United States Patent Application Publication US 2018/0305689 A1 - sequence listing, part 101

SEQ ID NO: 1467804 - RNA, 19 nt, Artificial Sequence
  Description of Artificial Sequence: Synthetic oligonucleotide
  Sense strand starting at position 3136 of SEQ ID NO: 1244139
accuguuagagagguggau

SEQ ID NO: 1467805 - RNA, 19 nt, Artificial Sequence
  Description of Artificial Sequence: Synthetic oligonucleotide
  Antisense strand to SEQ ID NO: 1467804
auccaccucucuaacaggu

SEQ ID NO: 1467806 - RNA, 19 nt, Artificial Sequence
  Description of Artificial Sequence: Synthetic oligonucleotide
  Sense strand starting at position 3260 of SEQ ID NO: 1244139
cccuguggcaaaugaaaga

SEQ ID NO: 1467807 - RNA, 19 nt, Artificial Sequence
  Description of Artificial Sequence: Synthetic oligonucleotide
  Antisense strand to SEQ ID NO: 1467806
ucuuucauuugccacaggg

SEQ ID NO: 1467808 - RNA, 19 nt, Artificial Sequence
  Description of Artificial Sequence: Synthetic oligonucleotide
  Sense strand starting at position 3335 of SEQ ID NO: 1244139
uguccacuuccuuggacau

SEQ ID NO: 1467809 - RNA, 19 nt, Artificial Sequence
  Description of Artificial Sequence: Synthetic oligonucleotide
  Antisense strand to SEQ ID NO: 1467808
auguccaaggaaguggaca

SEQ ID NO: 1467810 - RNA, 19 nt, Artificial Sequence
  Description of Artificial Sequence: Synthetic oligonucleotide
  Sense strand starting at position 3336 of SEQ ID NO: 1244139
guccacuuccuuggacauu

SEQ ID NO: 1467811 - RNA, 19 nt, Artificial Sequence
  Description of Artificial Sequence: Synthetic oligonucleotide
  Antisense strand to SEQ ID NO: 1467810
aauguccaaggaaguggac

SEQ ID NO: 1467812 - RNA, 19 nt, Artificial Sequence
  Description of Artificial Sequence: Synthetic oligonucleotide
  Sense strand starting at position 3347 of SEQ ID NO: 1244139
uggacauucuucccaggga

SEQ ID NO: 1467813 - RNA, 19 nt, Artificial Sequence
  Description of Artificial Sequence: Synthetic oligonucleotide
  Antisense strand to SEQ ID NO: 1467812
ucccugggaagaaugucca

SEQ ID NO: 1467814 - RNA, 19 nt, Artificial Sequence
  Description of Artificial Sequence: Synthetic oligonucleotide
  Sense strand starting at position 3402 of SEQ ID NO: 1244139
caaacugacguauguuaaa

SEQ ID NO: 1467815 - RNA, 19 nt, Artificial Sequence
  Description of Artificial Sequence: Synthetic oligonucleotide
  Antisense strand to SEQ ID NO: 1467814
uuuaacauacgucaguuug

SEQ ID NO: 1467816 - RNA, 19 nt, Artificial Sequence
  Description of Artificial Sequence: Synthetic oligonucleotide
  Sense strand starting at position 3461 of SEQ ID NO: 1244139
ggaacacagcgguaaacuu

SEQ ID NO: 1467817 - RNA, 19 nt, Artificial Sequence
  Description of Artificial Sequence: Synthetic oligonucleotide
  Antisense strand to SEQ ID NO: 1467816
aaguuuaccgcuguguucc

SEQ ID NO: 1467818 - RNA, 19 nt, Artificial Sequence
  Description of Artificial Sequence: Synthetic oligonucleotide
  Sense strand starting at position 3529 of SEQ ID NO: 1244139
uguaaacuccugcauguga

SEQ ID NO: 1467819 - RNA, 19 nt, Artificial Sequence
  Description of Artificial Sequence: Synthetic oligonucleotide
  Antisense strand to SEQ ID NO: 1467818
ucacaugcaggaguuuaca

SEQ ID NO: 1467820 - RNA, 19 nt, Artificial Sequence
  Description of Artificial Sequence: Synthetic oligonucleotide
  Sense strand starting at position 3537 of SEQ ID NO: 1244139
ccugcaugugaugagcauu

SEQ ID NO: 1467821 - RNA, 19 nt, Artificial Sequence
  Description of Artificial Sequence: Synthetic oligonucleotide
  Antisense strand to SEQ ID NO: 1467820
aaugcucaucacaugcagg

SEQ ID NO: 1467822 - RNA, 19 nt, Artificial Sequence
  Description of Artificial Sequence: Synthetic oligonucleotide
  Sense strand starting at position 3547 of SEQ ID NO: 1244139
augagcauucggugaaauc

SEQ ID NO: 1467823 - RNA, 19 nt, Artificial Sequence
  Description of Artificial Sequence: Synthetic oligonucleotide
  Antisense strand to SEQ ID NO: 1467822
gauuucaccgaaugcucau

SEQ ID NO: 1467824 - RNA, 19 nt, Artificial Sequence
  Description of Artificial Sequence: Synthetic oligonucleotide
  Sense strand starting at position 3548 of SEQ ID NO: 1244139
ugagcauucggugaaauca

SEQ ID NO: 1467825 - RNA, 19 nt, Artificial Sequence
  Description of Artificial Sequence: Synthetic oligonucleotide
  Antisense strand to SEQ ID NO: 1467824
ugauuucaccgaaugcuca

SEQ ID NO: 1467826 - RNA, 19 nt, Artificial Sequence
  Description of Artificial Sequence: Synthetic oligonucleotide
  Sense strand starting at position 3880 of SEQ ID NO: 1244139
agccauuaugaccguauuu

SEQ ID NO: 1467827 - RNA, 19 nt, Artificial Sequence
  Description of Artificial Sequence: Synthetic oligonucleotide
  Antisense strand to SEQ ID NO: 1467826
aaauacggucauaauggcu

SEQ ID NO: 1467828 - RNA, 19 nt, Artificial Sequence
  Description of Artificial Sequence: Synthetic oligonucleotide
  Sense strand starting at position 3922 of SEQ ID NO: 1244139
uuugucauuguugagauga

SEQ ID NO: 1467829 - RNA, 19 nt, Artificial Sequence
  Description of Artificial Sequence: Synthetic oligonucleotide
  Antisense strand to SEQ ID NO: 1467828
ucaucucaacaaugacaaa

SEQ ID NO: 1467830 - RNA, 19 nt, Artificial Sequence
  Description of Artificial Sequence: Synthetic oligonucleotide
  Sense strand starting at position 3962 of SEQ ID NO: 1244139
cugacuuucccaggcucaa

SEQ ID NO: 1467831 - RNA, 19 nt, Artificial Sequence
  Description of Artificial Sequence: Synthetic oligonucleotide
  Antisense strand to SEQ ID NO: 1467830
uugagccugggaaagucag

SEQ ID NO: 1467832 - RNA, 19 nt, Artificial Sequence
  Description of Artificial Sequence: Synthetic oligonucleotide
  Sense strand starting at position 75 of SEQ ID NO: 1244140
auuacaagaucuuggccaa

SEQ ID NO: 1467833 - RNA, 19 nt, Artificial Sequence
  Description of Artificial Sequence: Synthetic oligonucleotide
  Antisense strand to SEQ ID NO: 1467832
uuggccaagaucuuguaau

SEQ ID NO: 1467834 - RNA, 19 nt, Artificial Sequence
  Description of Artificial Sequence: Synthetic oligonucleotide
  Sense strand starting at position 76 of SEQ ID NO: 1244140
uuacaagaucuuggccaau

SEQ ID NO: 1467835 - RNA, 19 nt, Artificial Sequence
  Description of Artificial Sequence: Synthetic oligonucleotide
  Antisense strand to SEQ ID NO: 1467834
auuggccaagaucuuguaa

SEQ ID NO: 1467836 - RNA, 19 nt, Artificial Sequence
  Description of Artificial Sequence: Synthetic oligonucleotide
  Sense strand starting at position 78 of SEQ ID NO: 1244140
acaagaucuuggccaaucu

SEQ ID NO: 1467837 - RNA, 19 nt, Artificial Sequence
  Description of Artificial Sequence: Synthetic oligonucleotide
  Antisense strand to SEQ ID NO: 1467836
agauuggccaagaucuugu

SEQ ID NO: 1467838 - RNA, 19 nt, Artificial Sequence
  Description of Artificial Sequence: Synthetic oligonucleotide
  Sense strand starting at position 145 of SEQ ID NO: 1244140
auggguuucuuccacugga

SEQ ID NO: 1467839 - RNA, 19 nt, Artificial Sequence
  Description of Artificial Sequence: Synthetic oligonucleotide
  Antisense strand to SEQ ID NO: 1467838
uccaguggaagaaacccau

SEQ ID NO: 1467840 - RNA, 19 nt, Artificial Sequence
  Description of Artificial Sequence: Synthetic oligonucleotide
  Sense strand starting at position 148 of SEQ ID NO: 1244140
gguuucuuccacuggagac

SEQ ID NO: 1467841 - RNA, 19 nt, Artificial Sequence
  Description of Artificial Sequence: Synthetic oligonucleotide
  Antisense strand to SEQ ID NO: 1467840
gucuccaguggaagaaacc

SEQ ID NO: 1467842 - RNA, 19 nt, Artificial Sequence
  Description of Artificial Sequence: Synthetic oligonucleotide
  Sense strand starting at position 393 of SEQ ID NO: 1244140
aggaguuacugggauucga

SEQ ID NO: 1467843 - RNA, 19 nt, Artificial Sequence
  Description of Artificial Sequence: Synthetic oligonucleotide
  Antisense strand to SEQ ID NO: 1467842
ucgaaucccaguaacuccu

SEQ ID NO: 1467844 - RNA, 19 nt, Artificial Sequence
  Description of Artificial Sequence: Synthetic oligonucleotide
  Sense strand starting at position 408 of SEQ ID NO: 1244140
ucgagaucuuccuaggaau

SEQ ID NO: 1467845 - RNA, 19 nt, Artificial Sequence
  Description of Artificial Sequence: Synthetic oligonucleotide
  Antisense strand to SEQ ID NO: 1467844
auuccuaggaagaucucga

SEQ ID NO: 1467846 - RNA, 19 nt, Artificial Sequence
  Description of Artificial Sequence: Synthetic oligonucleotide
  Sense strand starting at position 411 of SEQ ID NO: 1244140
agaucuuccuaggaaucca

SEQ ID NO: 1467847 - RNA, 19 nt, Artificial Sequence
  Description of Artificial Sequence: Synthetic oligonucleotide
  Antisense strand to SEQ ID NO: 1467846
uggauuccuaggaagaucu

SEQ ID NO: 1467848 - RNA, 19 nt, Artificial Sequence
  Description of Artificial Sequence: Synthetic oligonucleotide
  Sense strand starting at position 440 of SEQ ID NO: 1244140
uccgcauccagaugggaaa

SEQ ID NO: 1467849 - RNA, 19 nt, Artificial Sequence
  Description of Artificial Sequence: Synthetic oligonucleotide
  Antisense strand to SEQ ID NO: 1467848
uuucccaucuggaugcgga

SEQ ID NO: 1467850 - RNA, 19 nt, Artificial Sequence
  Description of Artificial Sequence: Synthetic oligonucleotide
  Sense strand starting at position 473 of SEQ ID NO: 1244140
aaugguggagucuguaaau

SEQ ID NO: 1467851 - RNA, 19 nt, Artificial Sequence
  Description of Artificial Sequence: Synthetic oligonucleotide
  Antisense strand to SEQ ID NO: 1467850
auuuacagacuccaccauu

SEQ ID NO: 1467852 - RNA, 19 nt, Artificial Sequence
  Description of Artificial Sequence: Synthetic oligonucleotide
  Sense strand starting at position 482 of SEQ ID NO: 1244140
gucuguaaauucguuauua

SEQ ID NO: 1467853 - RNA, 19 nt, Artificial Sequence
  Description of Artificial Sequence: Synthetic oligonucleotide
  Antisense strand to SEQ ID NO: 1467852
uaauaacgaauuuacagac

SEQ ID NO: 1467854 - RNA, 19 nt, Artificial Sequence
  Description of Artificial Sequence: Synthetic oligonucleotide
  Sense strand starting at position 521 of SEQ ID NO: 1244140
uuauuaaaucacugaggcu

SEQ ID NO: 1467855 - RNA, 19 nt, Artificial Sequence
  Description of Artificial Sequence: Synthetic oligonucleotide
  Antisense strand to SEQ ID NO: 1467854
agccucagugauuuaauaa

SEQ ID NO: 1467856 - RNA, 19 nt, Artificial Sequence
  Description of Artificial Sequence: Synthetic oligonucleotide
  Sense strand starting at position 533 of SEQ ID NO: 1244140
ugaggcuuguugaguggau

SEQ ID NO: 1467857 - RNA, 19 nt, Artificial Sequence
  Description of Artificial Sequence: Synthetic oligonucleotide
  Antisense strand to SEQ ID NO: 1467856
auccacucaacaagccuca

SEQ ID NO: 1467858 - RNA, 19 nt, Artificial Sequence
  Description of Artificial Sequence: Synthetic oligonucleotide
  Sense strand starting at position 545 of SEQ ID NO: 1244140
aguggaucgcucuggaauc

SEQ ID NO: 1467859 - RNA, 19 nt, Artificial Sequence
  Description of Artificial Sequence: Synthetic oligonucleotide
  Antisense strand to SEQ ID NO: 1467858
gauuccagagcgauccacu

SEQ ID NO: 1467860 - RNA, 19 nt, Artificial Sequence
  Description of Artificial Sequence: Synthetic oligonucleotide
  Sense strand starting at position 1289 of SEQ ID NO: 1244140
ggaaaucccgaauguuucu

SEQ ID NO: 1467861 - RNA, 19 nt, Artificial Sequence
  Description of Artificial Sequence: Synthetic oligonucleotide
  Antisense strand to SEQ ID NO: 1467860
agaaacauucgggauuucc

SEQ ID NO: 1467862 - RNA, 19 nt, Artificial Sequence
  Description of Artificial Sequence: Synthetic oligonucleotide
  Sense strand starting at position 1472 of SEQ ID NO: 1244140
gggagguggcuguguucuu

SEQ ID NO: 1467863 - RNA, 19 nt, Artificial Sequence
  Description of Artificial Sequence: Synthetic oligonucleotide
  Antisense strand to SEQ ID NO: 1467862
aagaacacagccaccuccc

SEQ ID NO: 1467864 - RNA, 19 nt, Artificial Sequence
  Description of Artificial Sequence: Synthetic oligonucleotide
  Sense strand starting at position 1473 of SEQ ID NO: 1244140
ggagguggcuguguucuua

SEQ ID NO: 1467865 - RNA, 19 nt, Artificial Sequence
  Description of Artificial Sequence: Synthetic oligonucleotide
  Antisense strand to SEQ ID NO: 1467864
uaagaacacagccaccucc

SEQ ID NO: 1467866 - RNA, 19 nt, Artificial Sequence
  Description of Artificial Sequence: Synthetic oligonucleotide
  Sense strand starting at position 1481 of SEQ ID NO: 1244140
cuguguucuuaccggagaa

SEQ ID NO: 1467867 - RNA, 19 nt, Artificial Sequence
  Description of Artificial Sequence: Synthetic oligonucleotide
  Antisense strand to SEQ ID NO: 1467866
uucuccgguaagaacacag

SEQ ID NO: 1467868 - RNA, 19 nt, Artificial Sequence
  Description of Artificial Sequence: Synthetic oligonucleotide
  Sense strand starting at position 1482 of SEQ ID NO: 1244140
uguguucuuaccggagaaa

SEQ ID NO: 1467869 - RNA, 19 nt, Artificial Sequence
  Description of Artificial Sequence: Synthetic oligonucleotide
  Antisense strand to SEQ ID NO: 1467868
uuucuccgguaagaacaca

SEQ ID NO: 1467870 - RNA, 19 nt, Artificial Sequence
  Description of Artificial Sequence: Synthetic oligonucleotide
  Sense strand starting at position 1485 of SEQ ID NO: 1244140
guucuuaccggagaaaguu

SEQ ID NO: 1467871 - RNA, 19 nt, Artificial Sequence
  Description of Artificial Sequence: Synthetic oligonucleotide
  Antisense strand to SEQ ID NO: 1467870
aacuuucuccgguaagaac

SEQ ID NO: 1467872 - RNA, 19 nt, Artificial Sequence
  Description of Artificial Sequence: Synthetic oligonucleotide
  Sense strand starting at position 2136 of SEQ ID NO: 1244140
ccgauaaucucccgccuga

SEQ ID NO: 1467873 - RNA, 19 nt, Artificial Sequence
  Description of Artificial Sequence: Synthetic oligonucleotide
  Antisense strand to SEQ ID NO: 1467872
ucaggcgggagauuaucgg

SEQ ID NO: 1467874 - RNA, 19 nt, Artificial Sequence
  Description of Artificial Sequence: Synthetic oligonucleotide
  Sense strand starting at position 2519 of SEQ ID NO: 1244140
uucccuagauguuuaaaug

SEQ ID NO: 1467875 - RNA, 19 nt, Artificial Sequence
  Description of Artificial Sequence: Synthetic oligonucleotide
  Antisense strand to SEQ ID NO: 1467874
cauuuaaacaucuagggaa

SEQ ID NO: 1467876 - RNA, 19 nt, Artificial Sequence
  Description of Artificial Sequence: Synthetic oligonucleotide
  Sense strand starting at position 2722 of SEQ ID NO: 1244140
ggguccggcuguuaaauga

SEQ ID NO: 1467877 - RNA, 19 nt, Artificial Sequence
  Description of Artificial Sequence: Synthetic oligonucleotide
  Antisense strand to SEQ ID NO: 1467876
ucauuuaacagccggaccc

SEQ ID NO: 1467878 - RNA, 19 nt, Artificial Sequence
  Description of Artificial Sequence: Synthetic oligonucleotide
  Sense strand starting at position 2726 of SEQ ID NO: 1244140
ccggcuguuaaaugauaac

SEQ ID NO: 1467879 - RNA, 19 nt, Artificial Sequence
  Description of Artificial Sequence: Synthetic oligonucleotide
  Antisense strand to SEQ ID NO: 1467878
guuaucauuuaacagccgg

SEQ ID NO: 1467880 - RNA, 19 nt, Artificial Sequence
  Description of Artificial Sequence: Synthetic oligonucleotide
  Sense strand starting at position 2729 of SEQ ID NO: 1244140
gcuguuaaaugauaacguu

SEQ ID NO: 1467881 - RNA, 19 nt, Artificial Sequence
  Description of Artificial Sequence: Synthetic oligonucleotide
  Antisense strand to SEQ ID NO: 1467880
aacguuaucauuuaacagc

SEQ ID NO: 1467882 - RNA, 19 nt, Artificial Sequence
  Description of Artificial Sequence: Synthetic oligonucleotide
  Sense strand starting at position 2825 of SEQ ID NO: 1244140
gagugauagcuagggcuaa

SEQ ID NO: 1467883 - RNA, 19 nt, Artificial Sequence
  Description of Artificial Sequence: Synthetic oligonucleotide
  Antisense strand to SEQ ID NO: 1467882
uuagcccuagcuaucacuc

SEQ ID NO: 1467884 - RNA, 19 nt, Artificial Sequence
  Description of Artificial Sequence: Synthetic oligonucleotide
  Sense strand starting at position 3619 of SEQ ID NO: 1244140
ggguguuacuccggacucu

SEQ ID NO: 1467885 - RNA, 19 nt, Artificial Sequence
  Description of Artificial Sequence: Synthetic oligonucleotide
  Antisense strand to SEQ ID NO: 1467884
agaguccggaguaacaccc

SEQ ID NO: 1467886 - RNA, 19 nt, Artificial Sequence
  Description of Artificial Sequence: Synthetic oligonucleotide
  Sense strand starting at position 3770 of SEQ ID NO: 1244140
guugacuacaccgauauga

SEQ ID NO: 1467887 - RNA, 19 nt, Artificial Sequence
  Description of Artificial Sequence: Synthetic oligonucleotide
  Antisense strand to SEQ ID NO: 1467886
ucauaucgguguagucaac

SEQ ID NO: 1467888 - RNA, 19 nt, Artificial Sequence
  Description of Artificial Sequence: Synthetic oligonucleotide
  Sense strand starting at position 3781 of SEQ ID NO: 1244140
cgauaugaaugccuugaau

SEQ ID NO: 1467889 - RNA, 19 nt, Artificial Sequence
  Description of Artificial Sequence: Synthetic oligonucleotide
  Antisense strand to SEQ ID NO: 1467888
auucaaggcauucauaucg

SEQ ID NO: 1467890 - RNA, 19 nt, Artificial Sequence
  Description of Artificial Sequence: Synthetic oligonucleotide
  Sense strand starting at position 122 of SEQ ID NO: 1244141
cagagagauucccaaagua

SEQ ID NO: 1467891 - RNA, 19 nt, Artificial Sequence
  Description of Artificial Sequence: Synthetic oligonucleotide
  Antisense strand to SEQ ID NO: 1467890
uacuuugggaaucucucug

SEQ ID NO: 1467892 - RNA, 19 nt, Artificial Sequence
  Description of Artificial Sequence: Synthetic oligonucleotide
  Sense strand starting at position 288 of SEQ ID NO: 1244141
gagcaugacuagugaaacu

SEQ ID NO: 1467893 - RNA, 19 nt, Artificial Sequence
  Description of Artificial Sequence: Synthetic oligonucleotide
  Antisense strand to SEQ ID NO: 1467892
aguuucacuagucaugcuc

SEQ ID NO: 1467894 - RNA, 19 nt, Artificial Sequence
  Description of Artificial Sequence: Synthetic oligonucleotide
  Sense strand starting at position 315 of SEQ ID NO: 1244141
agagacaaaucaggaagaa

SEQ ID NO: 1467895 - RNA, 19 nt, Artificial Sequence
  Description of Artificial Sequence: Synthetic oligonucleotide
  Antisense strand to SEQ ID NO: 1467894
uucuuccugauuugucucu

SEQ ID NO: 1467896 - RNA, 19 nt, Artificial Sequence
  Description of Artificial Sequence: Synthetic oligonucleotide
  Sense strand starting at position 364 of SEQ ID NO: 1244141
cugagagucuaaggagaaa

SEQ ID NO: 1467897 - RNA, 19 nt, Artificial Sequence
  Description of Artificial Sequence: Synthetic oligonucleotide
  Antisense strand to SEQ ID NO: 1467896
uuucuccuuagacucucag

SEQ ID NO: 1467898 - RNA, 19 nt, Artificial Sequence
  Description of Artificial Sequence: Synthetic oligonucleotide
  Sense strand starting at position 826 of SEQ ID NO: 1244141
acgccaaagucccucuaau

SEQ ID NO: 1467899 - RNA, 19 nt, Artificial Sequence
  Description of Artificial Sequence: Synthetic oligonucleotide
  Antisense strand to SEQ ID NO: 1467898
auuagagggacuuuggcgu

SEQ ID NO: 1467900 - RNA, 19 nt, Artificial Sequence
  Description of Artificial Sequence: Synthetic oligonucleotide
  Sense strand starting at position 838 of SEQ ID NO: 1244141
cucuaauuuguauguccca

SEQ ID NO: 1467901 - RNA, 19 nt, Artificial Sequence
  Description of Artificial Sequence: Synthetic oligonucleotide
  Antisense strand to SEQ ID NO: 1467900
ugggacauacaaauuagag

SEQ ID NO: 1467902 - RNA, 19 nt, Artificial Sequence
  Description of Artificial Sequence: Synthetic oligonucleotide
  Sense strand starting at position 996 of SEQ ID NO: 1244141
ccaguucucuggcccuaga

SEQ ID NO: 1467903 - RNA, 19 nt, Artificial Sequence
  Description of Artificial Sequence: Synthetic oligonucleotide
  Antisense strand to SEQ ID NO: 1467902
ucuagggccagagaacugg

SEQ ID NO: 1467904 - RNA, 19 nt, Artificial Sequence
  Description of Artificial Sequence: Synthetic oligonucleotide
  Sense strand starting at position 1168 of SEQ ID NO: 1244141
guagcaguuuccuugauga

SEQ ID NO: 1467905 - RNA, 19 nt, Artificial Sequence
  Description of Artificial Sequence: Synthetic oligonucleotide
  Antisense strand to SEQ ID NO: 1467904
ucaucaaggaaacugcuac

SEQ ID NO: 1467906 - RNA, 19 nt, Artificial Sequence
  Description of Artificial Sequence: Synthetic oligonucleotide
  Sense strand starting at position 2315 of SEQ ID NO: 1244141
ucagucucccaccgagaaa

SEQ ID NO: 1467907 - RNA, 19 nt, Artificial Sequence
  Description of Artificial Sequence: Synthetic oligonucleotide
  Antisense strand to SEQ ID NO: 1467906
uuucucggugggagacuga

SEQ ID NO: 1467908 - RNA, 19 nt, Artificial Sequence
  Description of Artificial Sequence: Synthetic oligonucleotide
  Sense strand starting at position 2368 of SEQ ID NO: 1244141
uccggucuuccuggacaga

SEQ ID NO: 1467909 - RNA, 19 nt, Artificial Sequence
  Description of Artificial Sequence: Synthetic oligonucleotide
  Antisense strand to SEQ ID NO: 1467908
ucuguccaggaagaccgga

SEQ ID NO: 1467910 - RNA, 19 nt, Artificial Sequence
  Description of Artificial Sequence: Synthetic oligonucleotide
  Sense strand starting at position 2700 of SEQ ID NO: 1244141
gaggcaggccugggagauu

SEQ ID NO: 1467911 - RNA, 19 nt, Artificial Sequence
  Description of Artificial Sequence: Synthetic oligonucleotide
  Antisense strand to SEQ ID NO: 1467910
aaucucccaggccugccuc

SEQ ID NO: 1467912 - RNA, 19 nt, Artificial Sequence
  Description of Artificial Sequence: Synthetic oligonucleotide
  Sense strand starting at position 2761 of SEQ ID NO: 1244141
gggcaccauuccuuguaau

SEQ ID NO: 1467913 - RNA, 19 nt, Artificial Sequence
  Description of Artificial Sequence: Synthetic oligonucleotide
  Antisense strand to SEQ ID NO: 1467912
auuacaaggaauggugccc

SEQ ID NO: 1467914 - RNA, 19 nt, Artificial Sequence
  Description of Artificial Sequence: Synthetic oligonucleotide
  Sense strand starting at position 2762 of SEQ ID NO: 1244141
ggcaccauuccuuguaauc

SEQ ID NO: 1467915 - RNA, 19 nt, Artificial Sequence
  Description of Artificial Sequence: Synthetic oligonucleotide
  Antisense strand to SEQ ID NO: 1467914
gauuacaaggaauggugcc

SEQ ID NO: 1467916 - RNA, 19 nt, Artificial Sequence
  Description of Artificial Sequence: Synthetic oligonucleotide
  Sense strand starting at position 2771 of SEQ ID NO: 1244141
ccuuguaaucauuguguau

SEQ ID NO: 1467917 - RNA, 19 nt, Artificial Sequence
  Description of Artificial Sequence: Synthetic oligonucleotide
  Antisense strand to SEQ ID NO: 1467916
auacacaaugauuacaagg

SEQ ID NO: 1467918 - RNA, 19 nt, Artificial Sequence
  Description of Artificial Sequence: Synthetic oligonucleotide
  Sense strand starting at position 2783 of SEQ ID NO: 1244141
uguguauuuguagagcugu

SEQ ID NO: 1467919 - RNA, 19 nt, Artificial Sequence
  Description of Artificial Sequence: Synthetic oligonucleotide
  Antisense strand to SEQ ID NO: 1467918
acagcucuacaaauacaca

SEQ ID NO: 1467920 - RNA, 19 nt, Artificial Sequence
  Description of Artificial Sequence: Synthetic oligonucleotide
  Sense strand starting at position 3064 of SEQ ID NO: 1244141
gugagcuagaauuguacca

SEQ ID NO: 1467921 - RNA, 19 nt, Artificial Sequence
  Description of Artificial Sequence: Synthetic oligonucleotide
  Antisense strand to SEQ ID NO: 1467920
ugguacaauucuagcucac

SEQ ID NO: 1467922 - RNA, 19 nt, Artificial Sequence
  Description of Artificial Sequence: Synthetic oligonucleotide
  Sense strand starting at position 3066 of SEQ ID NO: 1244141
gagcuagaauuguaccacu

SEQ ID NO: 1467923 - RNA, 19 nt, Artificial Sequence
  Description of Artificial Sequence: Synthetic oligonucleotide
  Antisense strand to SEQ ID NO: 1467922
agugguacaauucuagcuc

SEQ ID NO: 1467924 - RNA, 19 nt, Artificial Sequence
  Description of Artificial Sequence: Synthetic oligonucleotide
  Sense strand starting at position 3069 of SEQ ID NO: 1244141
cuagaauuguaccacugca

SEQ ID NO: 1467925 - RNA, 19 nt, Artificial Sequence
  Description of Artificial Sequence: Synthetic oligonucleotide
  Antisense strand to SEQ ID NO: 1467924
ugcagugguacaauucuag

SEQ ID NO: 1467926 - RNA, 19 nt, Artificial Sequence
  Description of Artificial Sequence: Synthetic oligonucleotide
  Sense strand starting at position 3666 of SEQ ID NO: 1244141
ggaggagguuacagugauc

SEQ ID NO: 1467927 - RNA, 19 nt, Artificial Sequence
  Description of Artificial Sequence: Synthetic oligonucleotide
  Antisense strand to SEQ ID NO: 1467926
gaucacuguaaccuccucc

SEQ ID NO: 1467928 - RNA, 19 nt, Artificial Sequence
  Description of Artificial Sequence: Synthetic oligonucleotide
  Sense strand starting at position 81 of SEQ ID NO: 1244142
uuauaugcugaaggaauga

SEQ ID NO: 1467929 - RNA, 19 nt, Artificial Sequence
  Description of Artificial Sequence: Synthetic oligonucleotide
  Antisense strand to SEQ ID NO: 1467928
ucauuccuucagcauauaa

SEQ ID NO: 1467930 - RNA, 19 nt, Artificial Sequence
  Description of Artificial Sequence: Synthetic oligonucleotide
  Sense strand starting at position 166 of SEQ ID NO: 1244142
aaagguauuccaugaagua

SEQ ID NO: 1467931 - RNA, 19 nt, Artificial Sequence
  Description of Artificial Sequence: Synthetic oligonucleotide
  Antisense strand to SEQ ID NO: 1467930
uacuucauggaauaccuuu

SEQ ID NO: 1467932 - RNA, 19 nt, Artificial Sequence
  Description of Artificial Sequence: Synthetic oligonucleotide
  Sense strand starting at position 195 of SEQ ID NO: 1244142
uuacauugccaagagaggu

SEQ ID NO: 1467933 - RNA, 19 nt, Artificial Sequence
  Description of Artificial Sequence: Synthetic oligonucleotide
  Antisense strand to SEQ ID NO: 1467932
accucucuuggcaauguaa

SEQ ID NO: 1467934 - RNA, 19 nt, Artificial Sequence
  Description of Artificial Sequence: Synthetic oligonucleotide
  Sense strand starting at position 233 of SEQ ID NO: 1244142
ucuaaucuagacugagauc

SEQ ID NO: 1467935 - RNA, 19 nt, Artificial Sequence
  Description of Artificial Sequence: Synthetic oligonucleotide
  Antisense strand to SEQ ID NO: 1467934
gaucucagucuagauuaga

SEQ ID NO: 1467936 - RNA, 19 nt, Artificial Sequence
  Description of Artificial Sequence: Synthetic oligonucleotide
  Sense strand starting at position 362 of SEQ ID NO: 1244142
acgcaaggaccugacauua

SEQ ID NO: 1467937 - RNA, 19 nt, Artificial Sequence
  Description of Artificial Sequence: Synthetic oligonucleotide
  Antisense strand to SEQ ID NO: 1467936
uaaugucagguccuugcgu

SEQ ID NO: 1467938 - RNA, 19 nt, Artificial Sequence
  Description of Artificial Sequence: Synthetic oligonucleotide
  Sense strand starting at position 625 of SEQ ID NO: 1244142
guguuaguacaccaauaac

SEQ ID NO: 1467939 - RNA, 19 nt, Artificial Sequence
  Description of Artificial Sequence: Synthetic oligonucleotide
  Antisense strand to SEQ ID NO: 1467938
guuauugguguacuaacac

SEQ ID NO: 1467940 - RNA, 19 nt, Artificial Sequence
  Description of Artificial Sequence: Synthetic oligonucleotide
  Sense strand starting at position 737 of SEQ ID NO: 1244142
uuacaugauucuguacauu

SEQ ID NO: 1467941 - RNA, 19 nt, Artificial Sequence
  Description of Artificial Sequence: Synthetic oligonucleotide
  Antisense strand to SEQ ID NO: 1467940
aauguacagaaucauguaa

SEQ ID NO: 1467942 - RNA, 19 nt, Artificial Sequence
  Description of Artificial Sequence: Synthetic oligonucleotide
  Sense strand starting at position 746 of SEQ ID NO: 1244142
ucuguacauuauccuugau

SEQ ID NO: 1467943 - RNA, 19 nt, Artificial Sequence
  Description of Artificial Sequence: Synthetic oligonucleotide
  Antisense strand to SEQ ID NO: 1467942
aucaaggauaauguacaga

SEQ ID NO: 1467944 - RNA, 19 nt, Artificial Sequence
  Description of Artificial Sequence: Synthetic oligonucleotide
  Sense strand starting at position 748 of SEQ ID NO: 1244142
uguacauuauccuugauac

SEQ ID NO: 1467945 - RNA, 19 nt, Artificial Sequence
  Description of Artificial Sequence: Synthetic oligonucleotide
  Antisense strand to SEQ ID NO: 1467944
guaucaaggauaauguaca

SEQ ID NO: 1467946 - RNA, 19 nt, Artificial Sequence
  Description of Artificial Sequence: Synthetic oligonucleotide
  Sense strand starting at position 749 of SEQ ID NO: 1244142
guacauuauccuugauacg

SEQ ID NO: 1467947 - RNA, 19 nt, Artificial Sequence
  Description of Artificial Sequence: Synthetic oligonucleotide
  Antisense strand to SEQ ID NO: 1467946
cguaucaaggauaauguac

SEQ ID NO: 1467948 - RNA, 19 nt, Artificial Sequence
  Description of Artificial Sequence: Synthetic oligonucleotide
  Sense strand starting at position 771 of SEQ ID NO: 1244142
uaugguuacggcuaggaaa

SEQ ID NO: 1467949 - RNA, 19 nt, Artificial Sequence
  Description of Artificial Sequence: Synthetic oligonucleotide
  Antisense strand to SEQ ID NO: 1467948
uuuccuagccguaaccaua

SEQ ID NO: 1467950 - RNA, 19 nt, Artificial Sequence
  Description of Artificial Sequence: Synthetic oligonucleotide
  Sense strand starting at position 911 of SEQ ID NO: 1244142
ccuuguuauuggccaauaa

SEQ ID NO: 1467951 - RNA, 19 nt, Artificial Sequence
  Description of Artificial Sequence: Synthetic oligonucleotide
  Antisense strand to SEQ ID NO: 1467950
uuauuggccaauaacaagg

SEQ ID NO: 1467952 - RNA, 19 nt, Artificial Sequence
  Description of Artificial Sequence: Synthetic oligonucleotide
  Sense strand starting at position 912 of SEQ ID NO: 1244142
cuuguuauuggccaauaaa

SEQ ID NO: 1467953 - RNA, 19 nt, Artificial Sequence
  Description of Artificial Sequence: Synthetic oligonucleotide
  Antisense strand to SEQ ID NO: 1467952
uuuauuggccaauaacaag

SEQ ID NO: 1467954 - RNA, 19 nt, Artificial Sequence
  Description of Artificial Sequence: Synthetic oligonucleotide
  Sense strand starting at position 1294 of SEQ ID NO: 1244142
aagaguuuacaguagcagu

SEQ ID NO: 1467955 - RNA, 19 nt, Artificial Sequence
  Description of Artificial Sequence: Synthetic oligonucleotide
  Antisense strand to SEQ ID NO: 1467954
acugcuacuguaaacucuu

SEQ ID NO: 1467956 - RNA, 19 nt, Artificial Sequence
  Description of Artificial Sequence: Synthetic oligonucleotide
  Sense strand starting at position 1322 of SEQ ID NO: 1244142
uagguaucccaaggaagua

SEQ ID NO: 1467957 - RNA, 19 nt, Artificial Sequence
  Description of Artificial Sequence: Synthetic oligonucleotide
  Antisense strand to SEQ ID NO: 1467956
uacuuccuugggauaccua

SEQ ID NO: 1467958 - RNA, 19 nt, Artificial Sequence
  Description of Artificial Sequence: Synthetic oligonucleotide
  Sense strand starting at position 1499 of SEQ ID NO: 1244142
guaccuuucccauaugaca

SEQ ID NO: 1467959 - RNA, 19 nt, Artificial Sequence
  Description of Artificial Sequence: Synthetic oligonucleotide
  Antisense strand to SEQ ID NO: 1467958
ugucauaugggaaagguac

SEQ ID NO: 1467960 - RNA, 19 nt, Artificial Sequence
  Description of Artificial Sequence: Synthetic oligonucleotide
  Sense strand starting at position 1541 of SEQ ID NO: 1244142
aguuacucagauuagucua

SEQ ID NO: 1467961 - RNA, 19 nt, Artificial Sequence
  Description of Artificial Sequence: Synthetic oligonucleotide
  Antisense strand to SEQ ID NO: 1467960
uagacuaaucugaguaacu

SEQ ID NO: 1467962 - RNA, 19 nt, Artificial Sequence
  Description of Artificial Sequence: Synthetic oligonucleotide
  Sense strand starting at position 1716 of SEQ ID NO: 1244142
uugcgaagaaguuaucacu

SEQ ID NO: 1467963 - RNA, 19 nt, Artificial Sequence
  Description of Artificial Sequence: Synthetic oligonucleotide
  Antisense strand to SEQ ID NO: 1467962
agugauaacuucuucgcaa

SEQ ID NO: 1467964 - RNA, 19 nt, Artificial Sequence
  Description of Artificial Sequence: Synthetic oligonucleotide
  Sense strand starting at position 1783 of SEQ ID NO: 1244142
gcgcuuuguccucugaaau

SEQ ID NO: 1467965 - RNA, 19 nt, Artificial Sequence
  Description of Artificial Sequence: Synthetic oligonucleotide
  Antisense strand to SEQ ID NO: 1467964
auuucagaggacaaagcgc

SEQ ID NO: 1467966 - RNA, 19 nt, Artificial Sequence
  Description of Artificial Sequence: Synthetic oligonucleotide
  Sense strand starting at position 1880 of SEQ ID NO: 1244142
cagguuaaguuucucaaag

SEQ ID NO: 1467967 - RNA, 19 nt, Artificial Sequence
  Description of Artificial Sequence: Synthetic oligonucleotide
  Antisense strand to SEQ ID NO: 1467966
cuuugagaaacuuaaccug

SEQ ID NO: 1467968 - RNA, 19 nt, Artificial Sequence
  Description of Artificial Sequence: Synthetic oligonucleotide
  Sense strand starting at position 1881 of SEQ ID NO: 1244142
agguuaaguuucucaaaga

SEQ ID NO: 1467969 - RNA, 19 nt, Artificial Sequence
  Description of Artificial Sequence: Synthetic oligonucleotide
  Antisense strand to SEQ ID NO: 1467968
ucuuugagaaacuuaaccu

SEQ ID NO: 1467970 - RNA, 19 nt, Artificial Sequence
  Description of Artificial Sequence: Synthetic oligonucleotide
  Sense strand starting at position 2405 of SEQ ID NO: 1244142
agugauaacagccguggaa

SEQ ID NO: 1467971 - RNA, 19 nt, Artificial Sequence
  Description of Artificial Sequence: Synthetic oligonucleotide
  Antisense strand to SEQ ID NO: 1467970
uuccacggcuguuaucacu

SEQ ID NO: 1467972 - RNA, 19 nt, Artificial Sequence
  Description of Artificial Sequence: Synthetic oligonucleotide
  Sense strand starting at position 2414 of SEQ ID NO: 1244142
agccguggaaaguaucaau

SEQ ID NO: 1467973 - RNA, 19 nt, Artificial Sequence
  Description of Artificial Sequence: Synthetic oligonucleotide
  Antisense strand to SEQ ID NO: 1467972
auugauacuuuccacggcu

SEQ ID NO: 1467974 - RNA, 19 nt, Artificial Sequence
  Description of Artificial Sequence: Synthetic oligonucleotide
  Sense strand starting at position 2830 of SEQ ID NO: 1244142
agauauguaucagucaaca

SEQ ID NO: 1467975 - RNA, 19 nt, Artificial Sequence
  Description of Artificial Sequence: Synthetic oligonucleotide
  Antisense strand to SEQ ID NO: 1467974
uguugacugauacauaucu

SEQ ID NO: 1467976 - RNA, 19 nt, Artificial Sequence
  Description of Artificial Sequence: Synthetic oligonucleotide
  Sense strand starting at position 2866 of SEQ ID NO: 1244142
cccuacuguccagagguaa

SEQ ID NO: 1467977 - RNA, 19 nt, Artificial Sequence
  Description of Artificial Sequence: Synthetic oligonucleotide
  Antisense strand to SEQ ID NO: 1467976
uuaccucuggacaguaggg

SEQ ID NO: 1467978 - RNA, 19 nt, Artificial Sequence
  Description of Artificial Sequence: Synthetic oligonucleotide
  Sense strand starting at position 3008 of SEQ ID NO: 1244142
cagcgugugggacaauaua

SEQ ID NO: 1467979 - RNA, 19 nt, Artificial Sequence
  Description of Artificial Sequence: Synthetic oligonucleotide
  Antisense strand to SEQ ID NO: 1467978
uauauugucccacacgcug

SEQ ID NO: 1467980 - RNA, 19 nt, Artificial Sequence
  Description of Artificial Sequence: Synthetic oligonucleotide
  Sense strand starting at position 3019 of SEQ ID NO: 1244142
acaauauacgaaugagucu

SEQ ID NO: 1467981 - RNA, 19 nt, Artificial Sequence
  Description of Artificial Sequence: Synthetic oligonucleotide
  Antisense strand to SEQ ID NO: 1467980
agacucauucguauauugu

SEQ ID NO: 1467982 - RNA, 19 nt, Artificial Sequence
  Description of Artificial Sequence: Synthetic oligonucleotide
  Sense strand starting at position 3046 of SEQ ID NO: 1244142
cacugucaccgcuauuaga

SEQ ID NO: 1467983 - RNA, 19 nt, Artificial Sequence
  Description of Artificial Sequence: Synthetic oligonucleotide
  Antisense strand to SEQ ID NO: 1467982
ucuaauagcggugacagug

SEQ ID NO: 1467984 - RNA, 19 nt, Artificial Sequence
  Description of Artificial Sequence: Synthetic oligonucleotide
  Sense strand starting at position 3119 of SEQ ID NO: 1244142
aucagcuguccauaucaga

SEQ ID NO: 1467985 - RNA, 19 nt, Artificial Sequence
  Description of Artificial Sequence: Synthetic oligonucleotide
  Antisense strand to SEQ ID NO: 1467984
ucugauauggacagcugau

SEQ ID NO: 1467986 - RNA, 19 nt, Artificial Sequence
  Description of Artificial Sequence: Synthetic oligonucleotide
  Sense strand starting at position 3272 of SEQ ID NO: 1244142
ggcuuuaagcaccacagua

SEQ ID NO: 1467987 - RNA, 19 nt, Artificial Sequence
  Description of Artificial Sequence: Synthetic oligonucleotide
  Antisense strand to SEQ ID NO: 1467986
uacuguggugcuuaaagcc

SEQ ID NO: 1467988 - RNA, 19 nt, Artificial Sequence
  Description of Artificial Sequence: Synthetic oligonucleotide
  Sense strand starting at position 3288 of SEQ ID NO: 1244142
guagcaucucuauaacugu

SEQ ID NO: 1467989 - RNA, 19 nt, Artificial Sequence
  Description of Artificial Sequence: Synthetic oligonucleotide
  Antisense strand to SEQ ID NO: 1467988
acaguuauagagaugcuac

SEQ ID NO: 1467990 - RNA, 19 nt, Artificial Sequence
  Description of Artificial Sequence: Synthetic oligonucleotide
  Sense strand starting at position 3294 of SEQ ID NO: 1244142
ucucuauaacuguaugagu

SEQ ID NO: 1467991 - RNA, 19 nt, Artificial Sequence
  Description of Artificial Sequence: Synthetic oligonucleotide
  Antisense strand to SEQ ID NO: 1467990
acucauacaguuauagaga

SEQ ID NO: 1467992 - RNA, 19 nt, Artificial Sequence
  Description of Artificial Sequence: Synthetic oligonucleotide
  Sense strand starting at position 3296 of SEQ ID NO: 1244142
ucuauaacuguaugaguug

SEQ ID NO: 1467993 - RNA, 19 nt, Artificial Sequence
  Description of Artificial Sequence: Synthetic oligonucleotide
  Antisense strand to SEQ ID NO: 1467992
caacucauacaguuauaga

SEQ ID NO: 1467994 - RNA, 19 nt, Artificial Sequence
  Description of Artificial Sequence: Synthetic oligonucleotide
  Sense strand starting at position 3301 of SEQ ID NO: 1244142
aacuguaugaguugggagu

SEQ ID NO: 1467995 - RNA, 19 nt, Artificial Sequence
  Description of Artificial Sequence: Synthetic oligonucleotide
  Antisense strand to SEQ ID NO: 1467994
acucccaacucauacaguu

SEQ ID NO: 1467996 - RNA, 19 nt, Artificial Sequence
  Description of Artificial Sequence: Synthetic oligonucleotide
  Sense strand starting at position 3302 of SEQ ID NO: 1244142
acuguaugaguugggaguu

SEQ ID NO: 1467997 - RNA, 19 nt, Artificial Sequence
  Description of Artificial Sequence: Synthetic oligonucleotide
  Antisense strand to SEQ ID NO: 1467996
aacucccaacucauacagu

SEQ ID NO: 1467998 - RNA, 19 nt, Artificial Sequence
  Description of Artificial Sequence: Synthetic oligonucleotide
  Sense strand starting at position 3312 of SEQ ID NO: 1244142
uugggaguucugcaggaug

SEQ ID NO: 1467999 - RNA, 19 nt, Artificial Sequence
  Description of Artificial Sequence: Synthetic oligonucleotide
  Antisense strand to SEQ ID NO: 1467998
cauccugcagaacucccaa

SEQ ID NO: 1468000 - RNA, 19 nt, Artificial Sequence
  Description of Artificial Sequence: Synthetic oligonucleotide
  Sense strand starting at position 3315 of SEQ ID NO: 1244142
ggaguucugcaggauguca

SEQ ID NO: 1468001 - RNA, 19 nt, Artificial Sequence
  Description of Artificial Sequence: Synthetic oligonucleotide
  Antisense strand to SEQ ID NO: 1468000
ugacauccugcagaacucc

SEQ ID NO: 1468002 - RNA, 19 nt, Artificial Sequence
  Description of Artificial Sequence: Synthetic oligonucleotide
  Sense strand starting at position 3831 of SEQ ID NO: 1244142
auuacaauguucuucugua

SEQ ID NO: 1468003 - RNA, 19 nt, Artificial Sequence
  Description of Artificial Sequence: Synthetic oligonucleotide
  Antisense strand to SEQ ID NO: 1468002
uacagaagaacauuguaau

SEQ ID NO: 1468004 - RNA, 19 nt, Artificial Sequence
  Description of Artificial Sequence: Synthetic oligonucleotide
  Sense strand starting at position 3868 of SEQ ID NO: 1244142
guuaguacucuguaaauag

SEQ ID NO: 1468005 - RNA, 19 nt, Artificial Sequence
  Description of Artificial Sequence: Synthetic oligonucleotide
  Antisense strand to SEQ ID NO: 1468004
cuauuuacagaguacuaac

SEQ ID NO: 1468006 - RNA, 19 nt, Artificial Sequence
  Description of Artificial Sequence: Synthetic oligonucleotide
  Sense strand starting at position 3903 of SEQ ID NO: 1244142
ucggacucccgagagugau

SEQ ID NO: 1468007 - RNA, 19 nt, Artificial Sequence
  Description of Artificial Sequence: Synthetic oligonucleotide
  Antisense strand to SEQ ID NO: 1468006
aucacucucgggaguccga

SEQ ID NO: 1468008 - RNA, 19 nt, Artificial Sequence
  Description of Artificial Sequence: Synthetic oligonucleotide
  Sense strand starting at position 150 of SEQ ID NO: 1244143
uguagacaaugucuuaaac

SEQ ID NO: 1468009 - RNA, 19 nt, Artificial Sequence
  Description of Artificial Sequence: Synthetic oligonucleotide
  Antisense strand to SEQ ID NO: 1468008
guuuaagacauugucuaca

SEQ ID NO: 1468010 - RNA, 19 nt, Artificial Sequence
  Description of Artificial Sequence: Synthetic oligonucleotide
  Sense strand starting at position 174 of SEQ ID NO: 1244143
auuuguuuacugugccuaa

SEQ ID NO: 1468011 - RNA, 19 nt, Artificial Sequence
  Description of Artificial Sequence: Synthetic oligonucleotide
  Antisense strand to SEQ ID NO: 1468010
uuaggcacaguaaacaaau

SEQ ID NO: 1468012 - RNA, 19 nt, Artificial Sequence
  Description of Artificial Sequence: Synthetic oligonucleotide
  Sense strand starting at position 304 of SEQ ID NO: 1244143
acaauuuguucuuaaagug

SEQ ID NO: 1468013 - RNA, 19 nt, Artificial Sequence
  Description of Artificial Sequence: Synthetic oligonucleotide
  Antisense strand to SEQ ID NO: 1468012
cacuuuaagaacaaauugu

SEQ ID NO: 1468014 - RNA, 19 nt, Artificial Sequence
  Description of Artificial Sequence: Synthetic oligonucleotide
  Sense strand starting at position 396 of SEQ ID NO: 1244143
ugaaauauauggguucuuu

SEQ ID NO: 1468015 - RNA, 19 nt, Artificial Sequence
  Description of Artificial Sequence: Synthetic oligonucleotide
  Antisense strand to SEQ ID NO: 1468014
aaagaacccauauauuuca

SEQ ID NO: 1468016 - RNA, 19 nt, Artificial Sequence
  Description of Artificial Sequence: Synthetic oligonucleotide
  Sense strand starting at position 505 of SEQ ID NO: 1244143
ggcaacuuauuaucuguaa

SEQ ID NO: 1468017 - RNA, 19 nt, Artificial Sequence
  Description of Artificial Sequence: Synthetic oligonucleotide
  Antisense strand to SEQ ID NO: 1468016
uuacagauaauaaguugcc

SEQ ID NO: 1468018 - RNA, 19 nt, Artificial Sequence
  Description of Artificial Sequence: Synthetic oligonucleotide
  Sense strand starting at position 506 of SEQ ID NO: 1244143
gcaacuuauuaucuguaag

SEQ ID NO: 1468019 - RNA, 19 nt, Artificial Sequence
  Description of Artificial Sequence: Synthetic oligonucleotide
  Antisense strand to SEQ ID NO: 1468018
cuuacagauaauaaguugc

SEQ ID NO: 1468020 - RNA, 19 nt, Artificial Sequence
  Description of Artificial Sequence: Synthetic oligonucleotide
  Sense strand starting at position 509 of SEQ ID NO: 1244143
acuuauuaucuguaagagc

SEQ ID NO: 1468021 - RNA, 19 nt, Artificial Sequence
  Description of Artificial Sequence: Synthetic oligonucleotide
  Antisense strand to SEQ ID NO: 1468020
gcucuuacagauaauaagu

SEQ ID NO: 1468022 - RNA, 19 nt, Artificial Sequence
  Description of Artificial Sequence: Synthetic oligonucleotide
  Sense strand starting at position 516 of SEQ ID NO: 1244143
aucuguaagagcuauugag

SEQ ID NO: 1468023 - RNA, 19 nt, Artificial Sequence
  Description of Artificial Sequence: Synthetic oligonucleotide
  Antisense strand to SEQ ID NO: 1468022
cucaauagcucuuacagau

SEQ ID NO: 1468024 - RNA, 19 nt, Artificial Sequence
  Description of Artificial Sequence: Synthetic oligonucleotide
  Sense strand starting at position 625 of SEQ ID NO: 1244143
gauguugagggaggucuau

SEQ ID NO: 1468025 - RNA, 19 nt, Artificial Sequence
  Description of Artificial Sequence: Synthetic oligonucleotide
  Antisense strand to SEQ ID NO: 1468024
auagaccucccucaacauc

SEQ ID NO: 1468026 - RNA, 19 nt, Artificial Sequence
  Description of Artificial Sequence: Synthetic oligonucleotide
  Sense strand starting at position 750 of SEQ ID NO: 1244143
auaucauggucacauuuau

SEQ ID NO: 1468027 - RNA, 19 nt, Artificial Sequence
  Description of Artificial Sequence: Synthetic oligonucleotide
  Antisense strand to SEQ ID NO: 1468026
auaaaugugaccaugauau

SEQ ID NO: 1468028 - RNA, 19 nt, Artificial Sequence
  Description of Artificial Sequence: Synthetic oligonucleotide
  Sense strand starting at position 768 of SEQ ID NO: 1244143
uguaaacaucugggagagu

SEQ ID NO: 1468029 - RNA, 19 nt, Artificial Sequence
  Description of Artificial Sequence: Synthetic oligonucleotide
  Antisense strand to SEQ ID NO: 1468028
acucucccagauguuuaca

SEQ ID NO: 1468030 - RNA, 19 nt, Artificial Sequence
  Description of Artificial Sequence: Synthetic oligonucleotide
  Sense strand starting at position 1027 of SEQ ID NO: 1244143
aaaguuugagcaugcuaac

SEQ ID NO: 1468031 - RNA, 19 nt, Artificial Sequence
  Description of Artificial Sequence: Synthetic oligonucleotide
  Antisense strand to SEQ ID NO: 1468030
guuagcaugcucaaacuuu

SEQ ID NO: 1468032 - RNA, 19 nt, Artificial Sequence
  Description of Artificial Sequence: Synthetic oligonucleotide
  Sense strand starting at position 1093 of SEQ ID NO: 1244143
uugaacaucuuacugguau

SEQ ID NO: 1468033 - RNA, 19 nt, Artificial Sequence
  Description of Artificial Sequence: Synthetic oligonucleotide
  Antisense strand to SEQ ID NO: 1468032
auaccaguaagauguucaa

SEQ ID NO: 1468034 - RNA, 19 nt, Artificial Sequence
  Description of Artificial Sequence: Synthetic oligonucleotide
  Sense strand starting at position 1226 of SEQ ID NO: 1244143
ucaugaugaugcuuuaguu

SEQ ID NO: 1468035 - RNA, 19 nt, Artificial Sequence
  Description of Artificial Sequence: Synthetic oligonucleotide
  Antisense strand to SEQ ID NO: 1468034
aacuaaagcaucaucauga

SEQ ID NO: 1468036 - RNA, 19 nt, Artificial Sequence
  Description of Artificial Sequence: Synthetic oligonucleotide
  Sense strand starting at position 1230 of SEQ ID NO: 1244143
gaugaugcuuuaguuaaua

SEQ ID NO: 1468037 - RNA, 19 nt, Artificial Sequence
  Description of Artificial Sequence: Synthetic oligonucleotide
  Antisense strand to SEQ ID NO: 1468036
uauuaacuaaagcaucauc

SEQ ID NO: 1468038 - RNA, 19 nt, Artificial Sequence
  Description of Artificial Sequence: Synthetic oligonucleotide
  Sense strand starting at position 1339 of SEQ ID NO: 1244143
uaggaaaggccuuguguag

SEQ ID NO: 1468039 - RNA, 19 nt, Artificial Sequence
  Description of Artificial Sequence: Synthetic oligonucleotide
  Antisense strand to SEQ ID NO: 1468038
cuacacaaggccuuuccua

SEQ ID NO: 1468040 - RNA, 19 nt, Artificial Sequence
  Description of Artificial Sequence: Synthetic oligonucleotide
  Sense strand starting at position 1410 of SEQ ID NO: 1244143
agguuuguauucuuaccaa

SEQ ID NO: 1468041 - RNA, 19 nt, Artificial Sequence
  Description of Artificial Sequence: Synthetic oligonucleotide
  Antisense strand to SEQ ID NO: 1468040
uugguaagaauacaaaccu

SEQ ID NO: 1468042 - RNA, 19 nt, Artificial Sequence
  Description of Artificial Sequence: Synthetic oligonucleotide
  Sense strand starting at position 1428 of SEQ ID NO: 1244143
augaauuucugaggcauug

SEQ ID NO: 1468043 - RNA, 19 nt, Artificial Sequence
  Description of Artificial Sequence: Synthetic oligonucleotide
  Antisense strand to SEQ ID NO: 1468042
caaugccucagaaauucau

SEQ ID NO: 1468044 - RNA, 19 nt, Artificial Sequence
  Description of Artificial Sequence: Synthetic oligonucleotide
  Sense strand starting at position 1475 of SEQ ID NO: 1244143
uaaucuguccaguacgaga

SEQ ID NO: 1468045 - RNA, 19 nt, Artificial Sequence
  Description of Artificial Sequence: Synthetic oligonucleotide
  Antisense strand to SEQ ID NO: 1468044
ucucguacuggacagauua

SEQ ID NO: 1468046 - RNA, 19 nt, Artificial Sequence
  Description of Artificial Sequence: Synthetic oligonucleotide
  Sense strand starting at position 1617 of SEQ ID NO: 1244143
aggagaaguguccgaaguu

SEQ ID NO: 1468047 - RNA, 19 nt, Artificial Sequence
  Description of Artificial Sequence: Synthetic oligonucleotide
  Antisense strand to SEQ ID NO: 1468046
aacuucggacacuucuccu

SEQ ID NO: 1468048 - RNA, 19 nt, Artificial Sequence
  Description of Artificial Sequence: Synthetic oligonucleotide
  Sense strand starting at position 1636 of SEQ ID NO: 1244143
ggaugcacacucuauuguu

SEQ ID NO: 1468049 - RNA, 19 nt, Artificial Sequence
  Description of Artificial Sequence: Synthetic oligonucleotide
  Antisense strand to SEQ ID NO: 1468048
aacaauagagugugcaucc

SEQ ID NO: 1468050 - RNA, 19 nt, Artificial Sequence
  Description of Artificial Sequence: Synthetic oligonucleotide
  Sense strand starting at position 1661 of SEQ ID NO: 1244143
uguuauaacugcucagauu

SEQ ID NO: 1468051 - RNA, 19 nt, Artificial Sequence
  Description of Artificial Sequence: Synthetic oligonucleotide
  Antisense strand to SEQ ID NO: 1468050
aaucugagcaguuauaaca

SEQ ID NO: 1468052 - RNA, 19 nt, Artificial Sequence
  Description of Artificial Sequence: Synthetic oligonucleotide
  Sense strand starting at position 1662 of SEQ ID NO: 1244143
guuauaacugcucagauuc

SEQ ID NO: 1468053 - RNA, 19 nt, Artificial Sequence
  Description of Artificial Sequence: Synthetic oligonucleotide
  Antisense strand to SEQ ID NO: 1468052
gaaucugagcaguuauaac

SEQ ID NO: 1468054 - RNA, 19 nt, Artificial Sequence
  Description of Artificial Sequence: Synthetic oligonucleotide
  Sense strand starting at position 1692 of SEQ ID NO: 1244143
accugcuguggucagugaa

SEQ ID NO: 1468055 - RNA, 19 nt, Artificial Sequence
  Description of Artificial Sequence: Synthetic oligonucleotide
  Antisense strand to SEQ ID NO: 1468054
uucacugaccacagcaggu

SEQ ID NO: 1468056 - RNA, 19 nt, Artificial Sequence
  Description of Artificial Sequence: Synthetic oligonucleotide
  Sense strand starting at position 1741 of SEQ ID NO: 1244143
gucuuaugccgagauggga

SEQ ID NO: 1468057 - RNA, 19 nt, Artificial Sequence
  Description of Artificial Sequence: Synthetic oligonucleotide
  Antisense strand to SEQ ID NO: 1468056
ucccaucucggcauaagac

SEQ ID NO: 1468058 - RNA, 19 nt, Artificial Sequence
  Description of Artificial Sequence: Synthetic oligonucleotide
  Sense strand starting at position 1754 of SEQ ID NO: 1244143
augggaaagcucgacccau

SEQ ID NO: 1468059 - RNA, 19 nt, Artificial Sequence
  Description of Artificial Sequence: Synthetic oligonucleotide
  Antisense strand to SEQ ID NO: 1468058
augggucgagcuuucccau

SEQ ID NO: 1468060 - RNA, 19 nt, Artificial Sequence
  Description of Artificial Sequence: Synthetic oligonucleotide
  Sense strand starting at position 1868 of SEQ ID NO: 1244143
cgaucagccuucuuucuga

SEQ ID NO: 1468061 - RNA, 19 nt, Artificial Sequence
  Description of Artificial Sequence: Synthetic oligonucleotide
  Antisense strand to SEQ ID NO: 1468060
ucagaaagaaggcugaucg

SEQ ID NO: 1468062 - RNA, 19 nt, Artificial Sequence
  Description of Artificial Sequence: Synthetic oligonucleotide
  Sense strand starting at position 1881 of SEQ ID NO: 1244143
uucugauucugaguaacug

SEQ ID NO: 1468063 - RNA, 19 nt, Artificial Sequence
  Description of Artificial Sequence: Synthetic oligonucleotide
  Antisense strand to SEQ ID NO: 1468062
caguuacucagaaucagaa

SEQ ID NO: 1468064 - RNA, 19 nt, Artificial Sequence
  Description of Artificial Sequence: Synthetic oligonucleotide
  Sense strand starting at position 1906 of SEQ ID NO: 1244143
acaccugcagacugauaua

SEQ ID NO: 1468065 - RNA, 19 nt, Artificial Sequence
  Description of Artificial Sequence: Synthetic oligonucleotide
  Antisense strand to SEQ ID NO: 1468064
uauaucagucugcaggugu

SEQ ID NO: 1468066 - RNA, 19 nt, Artificial Sequence
  Description of Artificial Sequence: Synthetic oligonucleotide
  Sense strand starting at position 2049 of SEQ ID NO: 1244143
uugaaauucugagugguuu

SEQ ID NO: 1468067 - RNA, 19 nt, Artificial Sequence
  Description of Artificial Sequence: Synthetic oligonucleotide
  Antisense strand to SEQ ID NO: 1468066
aaaccacucagaauuucaa

SEQ ID NO: 1468068 - RNA, 19 nt, Artificial Sequence
  Description of Artificial Sequence: Synthetic oligonucleotide
  Sense strand starting at position 2050 of SEQ ID NO: 1244143
ugaaauucugagugguuuc

SEQ ID NO: 1468069 - RNA, 19 nt, Artificial Sequence
  Description of Artificial Sequence: Synthetic oligonucleotide
  Antisense strand to SEQ ID NO: 1468068
gaaaccacucagaauuuca

SEQ ID NO: 1468070 - RNA, 19 nt, Artificial Sequence
  Description of Artificial Sequence: Synthetic oligonucleotide
  Sense strand starting at position 2053 of SEQ ID NO: 1244143
aauucugagugguuucuuu

SEQ ID NO: 1468071 - RNA, 19 nt, Artificial Sequence
  Description of Artificial Sequence: Synthetic oligonucleotide
  Antisense strand to SEQ ID NO: 1468070
aaagaaaccacucagaauu

SEQ ID NO: 1468072 - RNA, 19 nt, Artificial Sequence
  Description of Artificial Sequence: Synthetic oligonucleotide
  Sense strand starting at position 2696 of SEQ ID NO: 1244143
accugaauagcagguaaga

SEQ ID NO: 1468073 - RNA, 19 nt, Artificial Sequence
  Description of Artificial Sequence: Synthetic oligonucleotide
  Antisense strand to SEQ ID NO: 1468072
ucuuaccugcuauucaggu

SEQ ID NO: 1468074 - RNA, 19 nt, Artificial Sequence
  Description of Artificial Sequence: Synthetic oligonucleotide
  Sense strand starting at position 2770 of SEQ ID NO: 1244143
gggccuaggcaagaauauu

SEQ ID NO: 1468075 - RNA, 19 nt, Artificial Sequence
  Description of Artificial Sequence: Synthetic oligonucleotide
  Antisense strand to SEQ ID NO: 1468074
aauauucuugccuaggccc

SEQ ID NO: 1468076 - RNA, 19 nt, Artificial Sequence
  Description of Artificial Sequence: Synthetic oligonucleotide
  Sense strand starting at position 2916 of SEQ ID NO: 1244143
gcaggcagugcccaaauuu

SEQ ID NO: 1468077 - RNA, 19 nt, Artificial Sequence
  Description of Artificial Sequence: Synthetic oligonucleotide
  Antisense strand to SEQ ID NO: 1468076
aaauuugggcacugccugc

SEQ ID NO: 1468078 - RNA, 19 nt, Artificial Sequence
  Description of Artificial Sequence: Synthetic oligonucleotide
  Sense strand starting at position 3390 of SEQ ID NO: 1244143
agacacauauagucucuau

SEQ ID NO: 1468079 - RNA, 19 nt, Artificial Sequence
  Description of Artificial Sequence: Synthetic oligonucleotide
  Antisense strand to SEQ ID NO: 1468078
auagagacuauaugugucu

SEQ ID NO: 1468080 - RNA, 19 nt, Artificial Sequence
  Description of Artificial Sequence: Synthetic oligonucleotide
  Sense strand starting at position 3394 of SEQ ID NO: 1244143
acauauagucucuauguua

SEQ ID NO: 1468081 - RNA, 19 nt, Artificial Sequence
  Description of Artificial Sequence: Synthetic oligonucleotide
  Antisense strand to SEQ ID NO: 1468080
uaacauagagacuauaugu

SEQ ID NO: 1468082 - RNA, 19 nt, Artificial Sequence
  Description of Artificial Sequence: Synthetic oligonucleotide
  Sense strand starting at position 3581 of SEQ ID NO: 1244143
ucauaaacacuucgggaga

SEQ ID NO: 1468083 - RNA, 19 nt, Artificial Sequence
  Description of Artificial Sequence: Synthetic oligonucleotide
  Antisense strand to SEQ ID NO: 1468082
ucucccgaaguguuuauga

SEQ ID NO: 1468084 - RNA, 19 nt, Artificial Sequence
  Description of Artificial Sequence: Synthetic oligonucleotide
  Sense strand starting at position 3627 of SEQ ID NO: 1244143
uuucuauuaugucuaagga

SEQ ID NO: 1468085 - RNA, 19 nt, Artificial Sequence
  Description of Artificial Sequence: Synthetic oligonucleotide
  Antisense strand to SEQ ID NO: 1468084
uccuuagacauaauagaaa

SEQ ID NO: 1468086 - RNA, 19 nt, Artificial Sequence
  Description of Artificial Sequence: Synthetic oligonucleotide
  Sense strand starting at position 3793 of SEQ ID NO: 1244143
gcaagauccuguuccuaca

SEQ ID NO: 1468087 - RNA, 19 nt, Artificial Sequence
  Description of Artificial Sequence: Synthetic oligonucleotide
  Antisense strand to SEQ ID NO: 1468086
uguaggaacaggaucuugc

SEQ ID NO: 1468088 - RNA, 19 nt, Artificial Sequence
  Description of Artificial Sequence: Synthetic oligonucleotide
  Sense strand starting at position 348 of SEQ ID NO: 1244144
aaaguuaaguguggacaua

SEQ ID NO: 1468089 - RNA, 19 nt, Artificial Sequence
  Description of Artificial Sequence: Synthetic oligonucleotide
  Antisense strand to SEQ ID NO: 1468088
uauguccacacuuaacuuu

SEQ ID NO: 1468090 - RNA, 19 nt, Artificial Sequence
  Description of Artificial Sequence: Synthetic oligonucleotide
  Sense strand starting at position 401 of SEQ ID NO: 1244144
ugggaaugccuguggauag

SEQ ID NO: 1468091 - RNA, 19 nt, Artificial Sequence
  Description of Artificial Sequence: Synthetic oligonucleotide
  Antisense strand to SEQ ID NO: 1468090
cuauccacaggcauuccca

SEQ ID NO: 1468092 - RNA, 19 nt, Artificial Sequence
  Description of Artificial Sequence: Synthetic oligonucleotide
  Sense strand starting at position 763 of SEQ ID NO: 1244144
cccuguuucuaagaagaaa

SEQ ID NO: 1468093 - RNA, 19 nt, Artificial Sequence
  Description of Artificial Sequence: Synthetic oligonucleotide
  Antisense strand to SEQ ID NO: 1468092
uuucuucuuagaaacaggg

SEQ ID NO: 1468094 - RNA, 19 nt, Artificial Sequence
  Description of Artificial Sequence: Synthetic oligonucleotide
  Sense strand starting at position 1087 of SEQ ID NO: 1244144
cuagauaaguuaggagaga

SEQ ID NO: 1468095 - RNA, 19 nt, Artificial Sequence
  Description of Artificial Sequence: Synthetic oligonucleotide
  Antisense strand to SEQ ID NO: 1468094
ucucuccuaacuuaucuag

SEQ ID NO: 1468096 - RNA, 19 nt, Artificial Sequence
  Description of Artificial Sequence: Synthetic oligonucleotide
  Sense strand starting at position 1221 of SEQ ID NO: 1244144
agaaguauaccgugcggaa

SEQ ID NO: 1468097 - RNA, 19 nt, Artificial Sequence
  Description of Artificial Sequence: Synthetic oligonucleotide
  Antisense strand to SEQ ID NO: 1468096
uuccgcacgguauacuucu

SEQ ID NO: 1468098 - RNA, 19 nt, Artificial Sequence
  Description of Artificial Sequence: Synthetic oligonucleotide
  Sense strand starting at position 1365 of SEQ ID NO: 1244144
cucagauaguuggguccaa

SEQ ID NO: 1468099 - RNA, 19 nt, Artificial Sequence
  Description of Artificial Sequence: Synthetic oligonucleotide
  Antisense strand to SEQ ID NO: 1468098
uuggacccaacuaucugag

SEQ ID NO: 1468100 - RNA, 19 nt, Artificial Sequence
  Description of Artificial Sequence: Synthetic oligonucleotide
  Sense strand starting at position 1384 of SEQ ID NO: 1244144
gcgggugaccuagauccaa

SEQ ID NO: 1468101 - RNA, 19 nt, Artificial Sequence
  Description of Artificial Sequence: Synthetic oligonucleotide
  Antisense strand to SEQ ID NO: 1468100
uuggaucuaggucacccgc

SEQ ID NO: 1468102 - RNA, 19 nt, Artificial Sequence
  Description of Artificial Sequence: Synthetic oligonucleotide
  Sense strand starting at position 2123 of SEQ ID NO: 1244144
guucuucaggcgucugcaa

SEQ ID NO: 1468103 - RNA, 19 nt, Artificial Sequence
  Description of Artificial Sequence: Synthetic oligonucleotide
  Antisense strand to SEQ ID NO: 1468102
uugcagacgccugaagaac

SEQ ID NO: 1468104 - RNA, 19 nt, Artificial Sequence
  Description of Artificial Sequence: Synthetic oligonucleotide
  Sense strand starting at position 2630 of SEQ ID NO: 1244144
gcgaucuaggcucaagagu

SEQ ID NO: 1468105 - RNA, 19 nt, Artificial Sequence
  Description of Artificial Sequence: Synthetic oligonucleotide
  Antisense strand to SEQ ID NO: 1468104
acucuugagccuagaucgc

SEQ ID NO: 1468106 - RNA, 19 nt, Artificial Sequence
  Description of Artificial Sequence: Synthetic oligonucleotide
  Sense strand starting at position 2639 of SEQ ID NO: 1244144
gcucaagagucgggaucau

SEQ ID NO: 1468107 - RNA, 19 nt, Artificial Sequence
  Description of Artificial Sequence: Synthetic oligonucleotide
  Antisense strand to SEQ ID NO: 1468106
augaucccgacucuugagc

SEQ ID NO: 1468108 - RNA, 19 nt, Artificial Sequence
  Description of Artificial Sequence: Synthetic oligonucleotide
  Sense strand starting at position 2648 of SEQ ID NO: 1244144
ucgggaucaugugcuguuu

SEQ ID NO: 1468109 - RNA, 19 nt, Artificial Sequence
  Description of Artificial Sequence: Synthetic oligonucleotide
  Antisense strand to SEQ ID NO: 1468108
aaacagcacaugaucccga

SEQ ID NO: 1468110 - RNA, 19 nt, Artificial Sequence
  Description of Artificial Sequence: Synthetic oligonucleotide
  Sense strand starting at position 2650 of SEQ ID NO: 1244144
gggaucaugugcuguuugu

SEQ ID NO: 1468111 - RNA, 19 nt, Artificial Sequence
  Description of Artificial Sequence: Synthetic oligonucleotide
  Antisense strand to SEQ ID NO: 1468110
acaaacagcacaugauccc

SEQ ID NO: 1468112 - RNA, 19 nt, Artificial Sequence
  Description of Artificial Sequence: Synthetic oligonucleotide
  Sense strand starting at position 3039 of SEQ ID NO: 1244144
ggcuguucuuccugagcca

SEQ ID NO: 1468113 - RNA, 19 nt, Artificial Sequence
  Description of Artificial Sequence: Synthetic oligonucleotide
  Antisense strand to SEQ ID NO: 1468112
uggcucaggaagaacagcc

SEQ ID NO: 1468114 - RNA, 19 nt, Artificial Sequence
  Description of Artificial Sequence: Synthetic oligonucleotide
  Sense strand starting at position 3051 of SEQ ID NO: 1244144
ugagccagcuucugugauu

SEQ ID NO: 1468115 - RNA, 19 nt, Artificial Sequence
  Description of Artificial Sequence: Synthetic oligonucleotide
  Antisense strand to SEQ ID NO: 1468114
aaucacagaagcuggcuca

SEQ ID NO: 1468116 - RNA, 19 nt, Artificial Sequence
  Description of Artificial Sequence: Synthetic oligonucleotide
  Sense strand starting at position 3054 of SEQ ID NO: 1244144
gccagcuucugugauucca

SEQ ID NO: 1468117 - RNA, 19 nt, Artificial Sequence
  Description of Artificial Sequence: Synthetic oligonucleotide
  Antisense strand to SEQ ID NO: 1468116
uggaaucacagaagcuggc

SEQ ID NO: 1468118 - RNA, 19 nt, Artificial Sequence
  Description of Artificial Sequence: Synthetic oligonucleotide
  Sense strand starting at position 3081 of SEQ ID NO: 1244144
cuuccuguccugggacaga

SEQ ID NO: 1468119 - RNA, 19 nt, Artificial Sequence
  Description of Artificial Sequence: Synthetic oligonucleotide
  Antisense strand to SEQ ID NO: 1468118
ucugucccaggacaggaag

SEQ ID NO: 1468120 - RNA, 19 nt, Artificial Sequence
  Description of Artificial Sequence: Synthetic oligonucleotide
  Sense strand starting at position 3464 of SEQ ID NO: 1244144
cccugaggguuggucugau

SEQ ID NO: 1468121 - RNA, 19 nt, Artificial Sequence
  Description of Artificial Sequence: Synthetic oligonucleotide
  Antisense strand to SEQ ID NO: 1468120
aucagaccaacccucaggg

SEQ ID NO: 1468122 - RNA, 19 nt, Artificial Sequence
  Description of Artificial Sequence: Synthetic oligonucleotide
  Sense strand starting at position 3607 of SEQ ID NO: 1244144
ccuacaguccuuggacuuu

SEQ ID NO: 1468123 - RNA, 19 nt, Artificial Sequence
  Description of Artificial Sequence: Synthetic oligonucleotide
  Antisense strand to SEQ ID NO: 1468122
aaaguccaaggacuguagg

SEQ ID NO: 1468124 - RNA, 19 nt, Artificial Sequence
  Description of Artificial Sequence: Synthetic oligonucleotide
  Sense strand starting at position 3803 of SEQ ID NO: 1244144
ucuuuaacaccguguguuu

SEQ ID NO: 1468125 - RNA, 19 nt, Artificial Sequence
  Description of Artificial Sequence: Synthetic oligonucleotide
  Antisense strand to SEQ ID NO: 1468124
aaacacacgguguuaaaga

SEQ ID NO: 1468126 - RNA, 19 nt, Artificial Sequence
  Description of Artificial Sequence: Synthetic oligonucleotide
  Sense strand starting at position 334 of SEQ ID NO: 1244145
guaacagguuucucgacau

SEQ ID NO: 1468127 - RNA, 19 nt, Artificial Sequence
  Description of Artificial Sequence: Synthetic oligonucleotide
  Antisense strand to SEQ ID NO: 1468126
augucgagaaaccuguuac

SEQ ID NO: 1468128 - RNA, 19 nt, Artificial Sequence
  Description of Artificial Sequence: Synthetic oligonucleotide
  Sense strand starting at position 338 of SEQ ID NO: 1244145
cagguuucucgacaucucu

SEQ ID NO: 1468129 - RNA, 19 nt, Artificial Sequence
  Description of Artificial Sequence: Synthetic oligonucleotide
  Antisense strand to SEQ ID NO: 1468128
agagaugucgagaaaccug

SEQ ID NO: 1468130 - RNA, 19 nt, Artificial Sequence
  Description of Artificial Sequence: Synthetic oligonucleotide
  Sense strand starting at position 345 of SEQ ID NO: 1244145
cucgacaucucucuuaaga

SEQ ID NO: 1468131 - RNA, 19 nt, Artificial Sequence
  Description of Artificial Sequence: Synthetic oligonucleotide
  Antisense strand to SEQ ID NO: 1468130
ucuuaagagagaugucgag

SEQ ID NO: 1468132 - RNA, 19 nt, Artificial Sequence
  Description of Artificial Sequence: Synthetic oligonucleotide
  Sense strand starting at position 358 of SEQ ID NO: 1244145
uuaagagucuaugcucuau

SEQ ID NO: 1468133 - RNA, 19 nt, Artificial Sequence
  Description of Artificial Sequence: Synthetic oligonucleotide
  Antisense strand to SEQ ID NO: 1468132
auagagcauagacucuuaa

SEQ ID NO: 1468134 - RNA, 19 nt, Artificial Sequence
  Description of Artificial Sequence: Synthetic oligonucleotide
  Sense strand starting at position 360 of SEQ ID NO: 1244145
aagagucuaugcucuaugu

SEQ ID NO: 1468135 - RNA, 19 nt, Artificial Sequence
  Description of Artificial Sequence: Synthetic oligonucleotide
  Antisense strand to SEQ ID NO: 1468134
acauagagcauagacucuu

SEQ ID NO: 1468136 - RNA, 19 nt, Artificial Sequence
  Description of Artificial Sequence: Synthetic oligonucleotide
  Sense strand starting at position 362 of SEQ ID NO: 1244145
gagucuaugcucuaugucu

SEQ ID NO: 1468137 - RNA, 19 nt, Artificial Sequence
  Description of Artificial Sequence: Synthetic oligonucleotide
  Antisense strand to SEQ ID NO: 1468136
agacauagagcauagacuc

SEQ ID NO: 1468138 - RNA, 19 nt, Artificial Sequence
  Description of Artificial Sequence: Synthetic oligonucleotide
  Sense strand starting at position 379 of SEQ ID NO: 1244145
cugcguaguauuccgugaa

SEQ ID NO: 1468139 - RNA, 19 nt, Artificial Sequence
  Description of Artificial Sequence: Synthetic oligonucleotide
  Antisense strand to SEQ ID NO: 1468138
uucacggaauacuacgcag

SEQ ID NO: 1468140 - RNA, 19 nt, Artificial Sequence
  Description of Artificial Sequence: Synthetic oligonucleotide
  Sense strand starting at position 422 of SEQ ID NO: 1244145
aagucaucaguuggauauu

SEQ ID NO: 1468141 - RNA, 19 nt, Artificial Sequence
  Description of Artificial Sequence: Synthetic oligonucleotide
  Antisense strand to SEQ ID NO: 1468140
aauauccaacugaugacuu

SEQ ID NO: 1468142 - RNA, 19 nt, Artificial Sequence
  Description of Artificial Sequence: Synthetic oligonucleotide
  Sense strand starting at position 423 of SEQ ID NO: 1244145
agucaucaguuggauauuu

SEQ ID NO: 1468143 - RNA, 19 nt, Artificial Sequence
  Description of Artificial Sequence: Synthetic oligonucleotide
  Antisense strand to SEQ ID NO: 1468142
aaauauccaacugaugacu

SEQ ID NO: 1468144 - RNA, 19 nt, Artificial Sequence
  Description of Artificial Sequence: Synthetic oligonucleotide
  Sense strand starting at position 536 of SEQ ID NO: 1244145
uacagaugucuuuagugga

SEQ ID NO: 1468145 - RNA, 19 nt, Artificial Sequence
  Description of Artificial Sequence: Synthetic oligonucleotide
  Antisense strand to SEQ ID NO: 1468144
uccacuaaagacaucugua

SEQ ID NO: 1468146 - RNA, 19 nt, Artificial Sequence
  Description of Artificial Sequence: Synthetic oligonucleotide
  Sense strand starting at position 541 of SEQ ID NO: 1244145
augucuuuaguggaacagu

SEQ ID NO: 1468147 - RNA, 19 nt, Artificial Sequence
  Description of Artificial Sequence: Synthetic oligonucleotide
  Antisense strand to SEQ ID NO: 1468146
acuguuccacuaaagacau

SEQ ID NO: 1468148 - RNA, 19 nt, Artificial Sequence
  Description of Artificial Sequence: Synthetic oligonucleotide
  Sense strand starting at position 806 of SEQ ID NO: 1244145
caagaaauucuuggccagu

SEQ ID NO: 1468149 - RNA, 19 nt, Artificial Sequence
  Description of Artificial Sequence: Synthetic oligonucleotide
  Antisense strand to SEQ ID NO: 1468148
acuggccaagaauuucuug

SEQ ID NO: 1468150 - RNA, 19 nt, Artificial Sequence
  Description of Artificial Sequence: Synthetic oligonucleotide
  Sense strand starting at position 807 of SEQ ID NO: 1244145
aagaaauucuuggccaguu

SEQ ID NO: 1468151 - RNA, 19 nt, Artificial Sequence
  Description of Artificial Sequence: Synthetic oligonucleotide
  Antisense strand to SEQ ID NO: 1468150
aacuggccaagaauuucuu

SEQ ID NO: 1468152 - RNA, 19 nt, Artificial Sequence
  Description of Artificial Sequence: Synthetic oligonucleotide
  Sense strand starting at position 808 of SEQ ID NO: 1244145
agaaauucuuggccaguuu

SEQ ID NO: 1468153 - RNA, 19 nt, Artificial Sequence
  Description of Artificial Sequence: Synthetic oligonucleotide
  Antisense strand to SEQ ID NO: 1468152
aaacuggccaagaauuucu

SEQ ID NO: 1468154 - RNA, 19 nt, Artificial Sequence
  Description of Artificial Sequence: Synthetic oligonucleotide
  Sense strand starting at position 809 of SEQ ID NO: 1244145
gaaauucuuggccaguuua

SEQ ID NO: 1468155 - RNA, 19 nt, Artificial Sequence
  Description of Artificial Sequence: Synthetic oligonucleotide
  Antisense strand to SEQ ID NO: 1468154
uaaacuggccaagaauuuc

SEQ ID NO: 1468156 - RNA, 19 nt, Artificial Sequence
  Description of Artificial Sequence: Synthetic oligonucleotide
  Sense strand starting at position 1025 of SEQ ID NO: 1244145
cggauuucuuguucccacu

SEQ ID NO: 1468157 - RNA, 19 nt, Artificial Sequence
  Description of Artificial Sequence: Synthetic oligonucleotide
  Antisense strand to SEQ ID NO: 1468156
agugggaacaagaaauccg

SEQ ID NO: 1468158 - RNA, 19 nt, Artificial Sequence
  Description of Artificial Sequence: Synthetic oligonucleotide
  Sense strand starting at position 1043 of SEQ ID NO: 1244145
ucucaaauccgacgauuag

SEQ ID NO: 1468159 - RNA, 19 nt, Artificial Sequence
  Description of Artificial Sequence: Synthetic oligonucleotide
  Antisense strand to SEQ ID NO: 1468158
cuaaucgucggauuugaga

SEQ ID NO: 1468160 - RNA, 19 nt, Artificial Sequence
  Description of Artificial Sequence: Synthetic oligonucleotide
  Sense strand starting at position 1071 of SEQ ID NO: 1244145
caagcaucgugacuuagac

SEQ ID NO: 1468161 - RNA, 19 nt, Artificial Sequence
  Description of Artificial Sequence: Synthetic oligonucleotide
  Antisense strand to SEQ ID NO: 1468160
gucuaagucacgaugcuug

SEQ ID NO: 1468162 - RNA, 19 nt, Artificial Sequence
  Description of Artificial Sequence: Synthetic oligonucleotide
  Sense strand starting at position 1073 of SEQ ID NO: 1244145
agcaucgugacuuagacua

SEQ ID NO: 1468163 - RNA, 19 nt, Artificial Sequence
  Description of Artificial Sequence: Synthetic oligonucleotide
  Antisense strand to SEQ ID NO: 1468162
uagucuaagucacgaugcu

SEQ ID NO: 1468164 - RNA, 19 nt, Artificial Sequence
  Description of Artificial Sequence: Synthetic oligonucleotide
  Sense strand starting at position 1085 of SEQ ID NO: 1244145
uagacuaagugggcgauua

SEQ ID NO: 1468165 - RNA, 19 nt, Artificial Sequence
  Description of Artificial Sequence: Synthetic oligonucleotide
  Antisense strand to SEQ ID NO: 1468164
uaaucgcccacuuagucua

SEQ ID NO: 1468166 - RNA, 19 nt, Artificial Sequence
  Description of Artificial Sequence: Synthetic oligonucleotide
  Sense strand starting at position 1209 of SEQ ID NO: 1244145
ggcagaccuccugauguau

SEQ ID NO: 1468167 - RNA, 19 nt, Artificial Sequence
  Description of Artificial Sequence: Synthetic oligonucleotide
  Antisense strand to SEQ ID NO: 1468166
auacaucaggaggucugcc

SEQ ID NO: 1468168 - RNA, 19 nt, Artificial Sequence
  Description of Artificial Sequence: Synthetic oligonucleotide
  Sense strand starting at position 1221 of SEQ ID NO: 1244145
gauguaugugcugaugaaa

SEQ ID NO: 1468169 - RNA, 19 nt, Artificial Sequence
  Description of Artificial Sequence: Synthetic oligonucleotide
  Antisense strand to SEQ ID NO: 1468168
uuucaucagcacauacauc

SEQ ID NO: 1468170 - RNA, 19 nt, Artificial Sequence
  Description of Artificial Sequence: Synthetic oligonucleotide
  Sense strand starting at position 1283 of SEQ ID NO: 1244145
ucguuaugucuuuaaccuc

SEQ ID NO: 1468171 - RNA, 19 nt, Artificial Sequence
  Description of Artificial Sequence: Synthetic oligonucleotide
  Antisense strand to SEQ ID NO: 1468170
gagguuaaagacauaacga

SEQ ID NO: 1468172 - RNA, 19 nt, Artificial Sequence
  Description of Artificial Sequence: Synthetic oligonucleotide
  Sense strand starting at position 1316 of SEQ ID NO: 1244145
ggcuguccucuccagaaag

SEQ ID NO: 1468173 - RNA, 19 nt, Artificial Sequence
  Description of Artificial Sequence: Synthetic oligonucleotide
  Antisense strand to SEQ ID NO: 1468172
cuuucuggagaggacagcc

SEQ ID NO: 1468174 - RNA, 19 nt, Artificial Sequence
  Description of Artificial Sequence: Synthetic oligonucleotide
  Sense strand starting at position 1318 of SEQ ID NO: 1244145
cuguccucuccagaaagca

SEQ ID NO: 1468175 - RNA, 19 nt, Artificial Sequence
  Description of Artificial Sequence: Synthetic oligonucleotide
  Antisense strand to SEQ ID NO: 1468174
ugcuuucuggagaggacag

SEQ ID NO: 1468176 - RNA, 19 nt, Artificial Sequence
  Description of Artificial Sequence: Synthetic oligonucleotide
  Sense strand starting at position 2287 of SEQ ID NO: 1244145
uuaccuauugcauauggga

SEQ ID NO: 1468177 - RNA, 19 nt, Artificial Sequence
  Description of Artificial Sequence: Synthetic oligonucleotide
  Antisense strand to SEQ ID NO: 1468176
ucccauaugcaauagguaa

SEQ ID NO: 1468178 - RNA, 19 nt, Artificial Sequence
  Description of Artificial Sequence: Synthetic oligonucleotide
  Sense strand starting at position 2331 of SEQ ID NO: 1244145
agaauuagccgucaauaaa

SEQ ID NO: 1468179 - RNA, 19 nt, Artificial Sequence
  Description of Artificial Sequence: Synthetic oligonucleotide
  Antisense strand to SEQ ID NO: 1468178
uuuauugacggcuaauucu

SEQ ID NO: 1468180 - RNA, 19 nt, Artificial Sequence
  Description of Artificial Sequence: Synthetic oligonucleotide
  Sense strand starting at position 2334 of SEQ ID NO: 1244145
auuagccgucaauaaauga

SEQ ID NO: 1468181 - RNA, 19 nt, Artificial Sequence
  Description of Artificial Sequence: Synthetic oligonucleotide
  Antisense strand to SEQ ID NO: 1468180
ucauuuauugacggcuaau

SEQ ID NO: 1468182 - RNA, 19 nt, Artificial Sequence
  Description of Artificial Sequence: Synthetic oligonucleotide
  Sense strand starting at position 3212 of SEQ ID NO: 1244145
uacaaaguguaguuuguaa

SEQ ID NO: 1468183 - RNA, 19 nt, Artificial Sequence
  Description of Artificial Sequence: Synthetic oligonucleotide
  Antisense strand to SEQ ID NO: 1468182
uuacaaacuacacuuugua

SEQ ID NO: 1468184 - RNA, 19 nt, Artificial Sequence
  Description of Artificial Sequence: Synthetic oligonucleotide
  Sense strand starting at position 3335 of SEQ ID NO: 1244145
cggaccucucugcaugaga

SEQ ID NO: 1468185 - RNA, 19 nt, Artificial Sequence
  Description of Artificial Sequence: Synthetic oligonucleotide
  Antisense strand to SEQ ID NO: 1468184
ucucaugcagagagguccg

SEQ ID NO: 1468186 - RNA, 19 nt, Artificial Sequence
  Description of Artificial Sequence: Synthetic oligonucleotide
  Sense strand starting at position 3337 of SEQ ID NO: 1244145
gaccucucugcaugagaag

SEQ ID NO: 1468187 - RNA, 19 nt, Artificial Sequence
  Description of Artificial Sequence: Synthetic oligonucleotide
  Antisense strand to SEQ ID NO: 1468186
cuucucaugcagagagguc

SEQ ID NO: 1468188 - RNA, 19 nt, Artificial Sequence
  Description of Artificial Sequence: Synthetic oligonucleotide
  Sense strand starting at position 3403 of SEQ ID NO: 1244145
ggcugugacccuggaauuc

SEQ ID NO: 1468189 - RNA, 19 nt, Artificial Sequence
  Description of Artificial Sequence: Synthetic oligonucleotide
  Antisense strand to SEQ ID NO: 1468188
gaauuccagggucacagcc

SEQ ID NO: 1468190 - RNA, 19 nt, Artificial Sequence
  Description of Artificial Sequence: Synthetic oligonucleotide
  Sense strand starting at position 3414 of SEQ ID NO: 1244145
uggaauucugauggaagca

SEQ ID NO: 1468191 - RNA, 19 nt, Artificial Sequence
  Description of Artificial Sequence: Synthetic oligonucleotide
  Antisense strand to SEQ ID NO: 1468190
ugcuuccaucagaauucca

SEQ ID NO: 1468192 - RNA, 19 nt, Artificial Sequence
  Description of Artificial Sequence: Synthetic oligonucleotide
  Sense strand starting at position 3478 of SEQ ID NO: 1244145
gcugaaccuuuaucauaag

SEQ ID NO: 1468193 - RNA, 19 nt, Artificial Sequence
  Description of Artificial Sequence: Synthetic oligonucleotide
  Antisense strand to SEQ ID NO: 1468192
cuuaugauaaagguucagc

SEQ ID NO: 1468194 - RNA, 19 nt, Artificial Sequence
  Description of Artificial Sequence: Synthetic oligonucleotide
  Sense strand starting at position 3608 of SEQ ID NO: 1244145
gggacauccuccuuuaugu

SEQ ID NO: 1468195 - RNA, 19 nt, Artificial Sequence
  Description of Artificial Sequence: Synthetic oligonucleotide
  Antisense strand to SEQ ID NO: 1468194
acauaaaggaggauguccc

SEQ ID NO: 1468196 - RNA, 19 nt, Artificial Sequence
  Description of Artificial Sequence: Synthetic oligonucleotide
  Sense strand starting at position 3727 of SEQ ID NO: 1244145
uaaagugauaugugugggu

SEQ ID NO: 1468197 - RNA, 19 nt, Artificial Sequence
  Description of Artificial Sequence: Synthetic oligonucleotide
  Antisense strand to SEQ ID NO: 1468196
acccacacauaucacuuua

SEQ ID NO: 1468198 - RNA, 19 nt, Artificial Sequence
  Description of Artificial Sequence: Synthetic oligonucleotide
  Sense strand starting at position 3732 of SEQ ID NO: 1244145
ugauaugugugggucucaa

SEQ ID NO: 1468199 - RNA, 19 nt, Artificial Sequence
  Description of Artificial Sequence: Synthetic oligonucleotide
  Antisense strand to SEQ ID NO: 1468198
uugagacccacacauauca

SEQ ID NO: 1468200 - RNA, 19 nt, Artificial Sequence
  Description of Artificial Sequence: Synthetic oligonucleotide
  Sense strand starting at position 3796 of SEQ ID NO: 1244145
agacaacugucugccuaga

SEQ ID NO: 1468201 - RNA, 19 nt, Artificial Sequence
  Description of Artificial Sequence: Synthetic oligonucleotide
  Antisense strand to SEQ ID NO: 1468200
ucuaggcagacaguugucu

SEQ ID NO: 1468202 - RNA, 19 nt, Artificial Sequence
  Description of Artificial Sequence: Synthetic oligonucleotide
  Sense strand starting at position 3798 of SEQ ID NO: 1244145
acaacugucugccuagaau

SEQ ID NO: 1468203 - RNA, 19 nt, Artificial Sequence
  Description of Artificial Sequence: Synthetic oligonucleotide
  Antisense strand to SEQ ID NO: 1468202
auucuaggcagacaguugu

SEQ ID NO: 1468204 - RNA, 19 nt, Artificial Sequence
  Description of Artificial Sequence: Synthetic oligonucleotide
  Sense strand starting at position 3950 of SEQ ID NO: 1244145
aggaaugccucuucuccaa

SEQ ID NO: 1468205 - RNA, 19 nt, Artificial Sequence
  Description of Artificial Sequence: Synthetic oligonucleotide
  Antisense strand to SEQ ID NO: 1468204
uuggagaagaggcauuccu

SEQ ID NO: 1468206 - RNA, 19 nt, Artificial Sequence
  Description of Artificial Sequence: Synthetic oligonucleotide
  Sense strand starting at position 92 of SEQ ID NO: 1244146
gaaaguaauuggccuaaug

SEQ ID NO: 1468207 - RNA, 19 nt, Artificial Sequence
  Description of Artificial Sequence: Synthetic oligonucleotide
  Antisense strand to SEQ ID NO: 1468206
cauuaggccaauuacuuuc

SEQ ID NO: 1468208 - RNA, 19 nt, Artificial Sequence
  Description of Artificial Sequence: Synthetic oligonucleotide
  Sense strand starting at position 108 of SEQ ID NO: 1244146
augaguuuagcccacauac

SEQ ID NO: 1468209 - RNA, 19 nt, Artificial Sequence
  Description of Artificial Sequence: Synthetic oligonucleotide
  Antisense strand to SEQ ID NO: 1468208
guaugugggcuaaacucau

SEQ ID NO: 1468210 - RNA, 19 nt, Artificial Sequence
  Description of Artificial Sequence: Synthetic oligonucleotide
  Sense strand starting at position 185 of SEQ ID NO: 1244146
cuggaacuguaacuauaua

SEQ ID NO: 1468211 - RNA, 19 nt, Artificial Sequence
  Description of Artificial Sequence: Synthetic oligonucleotide
  Antisense strand to SEQ ID NO: 1468210
uauauaguuacaguuccag

SEQ ID NO: 1468212 - RNA, 19 nt, Artificial Sequence
  Description of Artificial Sequence: Synthetic oligonucleotide
  Sense strand starting at position 363 of SEQ ID NO: 1244146
uguucuaaagcaugaaagu

SEQ ID NO: 1468213 - RNA, 19 nt, Artificial Sequence
  Description of Artificial Sequence: Synthetic oligonucleotide
  Antisense strand to SEQ ID NO: 1468212
acuuucaugcuuuagaaca

SEQ ID NO: 1468214 - RNA, 19 nt, Artificial Sequence
  Description of Artificial Sequence: Synthetic oligonucleotide
  Sense strand starting at position 364 of SEQ ID NO: 1244146
guucuaaagcaugaaaguc

SEQ ID NO: 1468215 - RNA, 19 nt, Artificial Sequence
  Description of Artificial Sequence: Synthetic oligonucleotide
  Antisense strand to SEQ ID NO: 1468214
gacuuucaugcuuuagaac

SEQ ID NO: 1468216 - RNA, 19 nt, Artificial Sequence
  Description of Artificial Sequence: Synthetic oligonucleotide
  Sense strand starting at position 433 of SEQ ID NO: 1244146
ggcgaaggaugaguuucuu

SEQ ID NO: 1468217 - RNA, 19 nt, Artificial Sequence
  Description of Artificial Sequence: Synthetic oligonucleotide
  Antisense strand to SEQ ID NO: 1468216
aagaaacucauccuucgcc

SEQ ID NO: 1468218 - RNA, 19 nt, Artificial Sequence
  Description of Artificial Sequence: Synthetic oligonucleotide
  Sense strand starting at position 441 of SEQ ID NO: 1244146
augaguuucuuauccugag

SEQ ID NO: 1468219 - RNA, 19 nt, Artificial Sequence
  Description of Artificial Sequence: Synthetic oligonucleotide
  Antisense strand to SEQ ID NO: 1468218
cucaggauaagaaacucau

SEQ ID NO: 1468220 - RNA, 19 nt, Artificial Sequence
  Description of Artificial Sequence: Synthetic oligonucleotide
  Sense strand starting at position 445 of SEQ ID NO: 1244146
guuucuuauccugagccca

SEQ ID NO: 1468221 - RNA, 19 nt, Artificial Sequence
  Description of Artificial Sequence: Synthetic oligonucleotide
  Antisense strand to SEQ ID NO: 1468220
ugggcucaggauaagaaac

SEQ ID NO: 1468222 - RNA, 19 nt, Artificial Sequence
  Description of Artificial Sequence: Synthetic oligonucleotide
  Sense strand starting at position 491 of SEQ ID NO: 1244146
aagugccauccguaccaaa

SEQ ID NO: 1468223 - RNA, 19 nt, Artificial Sequence
  Description of Artificial Sequence: Synthetic oligonucleotide
  Antisense strand to SEQ ID NO: 1468222
uuugguacggauggcacuu

SEQ ID NO: 1468224 - RNA, 19 nt, Artificial Sequence
  Description of Artificial Sequence: Synthetic oligonucleotide
  Sense strand starting at position 523 of SEQ ID NO: 1244146
gucuuaauucuggaucacu

SEQ ID NO: 1468225 - RNA, 19 nt, Artificial Sequence
  Description of Artificial Sequence: Synthetic oligonucleotide
  Antisense strand to SEQ ID NO: 1468224
agugauccagaauuaagac

SEQ ID NO: 1468226 - RNA, 19 nt, Artificial Sequence
  Description of Artificial Sequence: Synthetic oligonucleotide
  Sense strand starting at position 633 of SEQ ID NO: 1244146
acuguuuguugauccuaau

SEQ ID NO: 1468227 - RNA, 19 nt, Artificial Sequence
  Description of Artificial Sequence: Synthetic oligonucleotide
  Antisense strand to SEQ ID NO: 1468226
auuaggaucaacaaacagu

SEQ ID NO: 1468228 - RNA, 19 nt, Artificial Sequence
  Description of Artificial Sequence: Synthetic oligonucleotide
  Sense strand starting at position 738 of SEQ ID NO: 1244146
uuuaauaggucccuauguu

SEQ ID NO: 1468229 - RNA, 19 nt, Artificial Sequence
  Description of Artificial Sequence: Synthetic oligonucleotide
  Antisense strand to SEQ ID NO: 1468228
aacauagggaccuauuaaa

SEQ ID NO: 1468230 - RNA, 19 nt, Artificial Sequence
  Description of Artificial Sequence: Synthetic oligonucleotide
  Sense strand starting at position 739 of SEQ ID NO: 1244146
uuaauaggucccuauguug

SEQ ID NO: 1468231 - RNA, 19 nt, Artificial Sequence
  Description of Artificial Sequence: Synthetic oligonucleotide
  Antisense strand to SEQ ID NO: 1468230
caacauagggaccuauuaa

SEQ ID NO: 1468232 - RNA, 19 nt, Artificial Sequence
  Description of Artificial Sequence: Synthetic oligonucleotide
  Sense strand starting at position 809 of SEQ ID NO: 1244146
uacugucaccugggaaaug

SEQ ID NO: 1468233 - RNA, 19 nt, Artificial Sequence
  Description of Artificial Sequence: Synthetic oligonucleotide
  Antisense strand to SEQ ID NO: 1468232
cauuucccaggugacagua

SEQ ID NO: 1468234 - RNA, 19 nt, Artificial Sequence
  Description of Artificial Sequence: Synthetic oligonucleotide
  Sense strand starting at position 868 of SEQ ID NO: 1244146
ggaaucuucugcucuaaua

SEQ ID NO: 1468235 - RNA, 19 nt, Artificial Sequence
  Description of Artificial Sequence: Synthetic oligonucleotide
  Antisense strand to SEQ ID NO: 1468234
uauuagagcagaagauucc

SEQ ID NO: 1468236 - RNA, 19 nt, Artificial Sequence
  Description of Artificial Sequence: Synthetic oligonucleotide
  Sense strand starting at position 945 of SEQ ID NO: 1244146
uaguauuacuaguuagagg

SEQ ID NO: 1468237 - RNA, 19 nt, Artificial Sequence
  Description of Artificial Sequence: Synthetic oligonucleotide
  Antisense strand to SEQ ID NO: 1468236
ccucuaacuaguaauacua

SEQ ID NO: 1468238 - RNA, 19 nt, Artificial Sequence
  Description of Artificial Sequence: Synthetic oligonucleotide
  Sense strand starting at position 1155 of SEQ ID NO: 1244146
cuccaugagucgguggaaa

SEQ ID NO: 1468239 - RNA, 19 nt, Artificial Sequence
  Description of Artificial Sequence: Synthetic oligonucleotide
  Antisense strand to SEQ ID NO: 1468238
uuuccaccgacucauggag

SEQ ID NO: 1468240 - RNA, 19 nt, Artificial Sequence
  Description of Artificial Sequence: Synthetic oligonucleotide
  Sense strand starting at position 1178 of SEQ ID NO: 1244146
agcaaaucacugggcagaa

SEQ ID NO: 1468241 - RNA, 19 nt, Artificial Sequence
  Description of Artificial Sequence: Synthetic oligonucleotide
  Antisense strand to SEQ ID NO: 1468240
uucugcccagugauuugcu

SEQ ID NO: 1468242 - RNA, 19 nt, Artificial Sequence
  Description of Artificial Sequence: Synthetic oligonucleotide
  Sense strand starting at position 1310 of SEQ ID NO: 1244146
acuucucugucuccaggaa

SEQ ID NO: 1468243 - RNA, 19 nt, Artificial Sequence
  Description of Artificial Sequence: Synthetic oligonucleotide
  Antisense strand to SEQ ID NO: 1468242
uuccuggagacagagaagu

SEQ ID NO: 1468244 - RNA, 19 nt, Artificial Sequence
  Description of Artificial Sequence: Synthetic oligonucleotide
  Sense strand starting at position 1311 of SEQ ID NO: 1244146
cuucucugucuccaggaau

SEQ ID NO: 1468245 - RNA, 19 nt, Artificial Sequence
  Description of Artificial Sequence: Synthetic oligonucleotide
  Antisense strand to SEQ ID NO: 1468244
auuccuggagacagagaag

SEQ ID NO: 1468246 - RNA, 19 nt, Artificial Sequence
  Description of Artificial Sequence: Synthetic oligonucleotide
  Sense strand starting at position 1314 of SEQ ID NO: 1244146
cucugucuccaggaaucau

SEQ ID NO: 1468247 - RNA, 19 nt, Artificial Sequence
  Description of Artificial Sequence: Synthetic oligonucleotide
  Antisense strand to SEQ ID NO: 1468246
augauuccuggagacagag

SEQ ID NO: 1468248 - RNA, 19 nt, Artificial Sequence
  Description of Artificial Sequence: Synthetic oligonucleotide
  Sense strand starting at position 1325 of SEQ ID NO: 1244146
ggaaucauccaaggcacaa

SEQ ID NO: 1468249 - RNA, 19 nt, Artificial Sequence
  Description of Artificial Sequence: Synthetic oligonucleotide
  Antisense strand to SEQ ID NO: 1468248
uugugccuuggaugauucc

SEQ ID NO: 1468250 - RNA, 19 nt, Artificial Sequence
  Description of Artificial Sequence: Synthetic oligonucleotide
  Sense strand starting at position 1814 of SEQ ID NO: 1244146
ccggguugucgauacaaag

SEQ ID NO: 1468251 - RNA, 19 nt, Artificial Sequence
  Description of Artificial Sequence: Synthetic oligonucleotide
  Antisense strand to SEQ ID NO: 1468250
cuuuguaucgacaacccgg

SEQ ID NO: 1468252 - RNA, 19 nt, Artificial Sequence
  Description of Artificial Sequence: Synthetic oligonucleotide
  Sense strand starting at position 2087 of SEQ ID NO: 1244146
uuagaaaugugauucuggu

SEQ ID NO: 1468253 - RNA, 19 nt, Artificial Sequence
  Description of Artificial Sequence: Synthetic oligonucleotide
  Antisense strand to SEQ ID NO: 1468252
accagaaucacauuucuaa

SEQ ID NO: 1468254 - RNA, 19 nt, Artificial Sequence
  Description of Artificial Sequence: Synthetic oligonucleotide
  Sense strand starting at position 2189 of SEQ ID NO: 1244146
acaggauugccauggcauu

SEQ ID NO: 1468255 - RNA, 19 nt, Artificial Sequence
  Description of Artificial Sequence: Synthetic oligonucleotide
  Antisense strand to SEQ ID NO: 1468254
aaugccauggcaauccugu

SEQ ID NO: 1468256 - RNA, 19 nt, Artificial Sequence
  Description of Artificial Sequence: Synthetic oligonucleotide
  Sense strand starting at position 2290 of SEQ ID NO: 1244146
ugugccuucccagaaccaa

SEQ ID NO: 1468257 - RNA, 19 nt, Artificial Sequence
  Description of Artificial Sequence: Synthetic oligonucleotide
  Antisense strand to SEQ ID NO: 1468256
uugguucugggaaggcaca

SEQ ID NO: 1468258 - RNA, 19 nt, Artificial Sequence
  Description of Artificial Sequence: Synthetic oligonucleotide
  Sense strand starting at position 2322 of SEQ ID NO: 1244146
caggauuugugggagaauu

SEQ ID NO: 1468259 - RNA, 19 nt, Artificial Sequence
  Description of Artificial Sequence: Synthetic oligonucleotide
  Antisense strand to SEQ ID NO: 1468258
aauucucccacaaauccug

SEQ ID NO: 1468260 - RNA, 19 nt, Artificial Sequence
  Description of Artificial Sequence: Synthetic oligonucleotide
  Sense strand starting at position 2473 of SEQ ID NO: 1244146
ucaggaauucucuggaauc

SEQ ID NO: 1468261 - RNA, 19 nt, Artificial Sequence
  Description of Artificial Sequence: Synthetic oligonucleotide
  Antisense strand to SEQ ID NO: 1468260
gauuccagagaauuccuga

SEQ ID NO: 1468262 - RNA, 19 nt, Artificial Sequence
  Description of Artificial Sequence: Synthetic oligonucleotide
  Sense strand starting at position 2512 of SEQ ID NO: 1244146
gcacuucuucugggaagag

SEQ ID NO: 1468263 - RNA, 19 nt, Artificial Sequence
  Description of Artificial Sequence: Synthetic oligonucleotide
  Antisense strand to SEQ ID NO: 1468262
cucuucccagaagaagugc

SEQ ID NO: 1468264 - RNA, 19 nt, Artificial Sequence
  Description of Artificial Sequence: Synthetic oligonucleotide
  Sense strand starting at position 2560 of SEQ ID NO: 1244146
gaagucugaucacucagaa

SEQ ID NO: 1468265 - RNA, 19 nt, Artificial Sequence
  Description of Artificial Sequence: Synthetic oligonucleotide
  Antisense strand to SEQ ID NO: 1468264
uucugagugaucagacuuc

SEQ ID NO: 1468266 - RNA, 19 nt, Artificial Sequence
  Description of Artificial Sequence: Synthetic oligonucleotide
  Sense strand starting at position 2653 of SEQ ID NO: 1244146
aacguuuauuuggcaacuu

SEQ ID NO: 1468267 - RNA, 19 nt, Artificial Sequence
  Description of Artificial Sequence: Synthetic oligonucleotide
  Antisense strand to SEQ ID NO: 1468266
aaguugccaaauaaacguu

SEQ ID NO: 1468268 - RNA, 19 nt, Artificial Sequence
  Description of Artificial Sequence: Synthetic oligonucleotide
  Sense strand starting at position 2678 of SEQ ID NO: 1244146
accagauauugugcuagga

SEQ ID NO: 1468269 - RNA, 19 nt, Artificial Sequence
  Description of Artificial Sequence: Synthetic oligonucleotide
  Antisense strand to SEQ ID NO: 1468268
uccuagcacaauaucuggu

SEQ ID NO: 1468270 - RNA, 19 nt, Artificial Sequence
  Description of Artificial Sequence: Synthetic oligonucleotide
  Sense strand starting at position 2687 of SEQ ID NO: 1244146
ugugcuaggagcuggaaau

SEQ ID NO: 1468271 - RNA, 19 nt, Artificial Sequence
  Description of Artificial Sequence: Synthetic oligonucleotide
  Antisense strand to SEQ ID NO: 1468270
auuuccagcuccuagcaca

SEQ ID NO: 1468272 - RNA, 19 nt, Artificial Sequence
  Description of Artificial Sequence: Synthetic oligonucleotide
  Sense strand starting at position 2688 of SEQ ID NO: 1244146
gugcuaggagcuggaaaua

SEQ ID NO: 1468273 - RNA, 19 nt, Artificial Sequence
  Description of Artificial Sequence: Synthetic oligonucleotide
  Antisense strand to SEQ ID NO: 1468272
uauuuccagcuccuagcac

SEQ ID NO: 1468274 - RNA, 19 nt, Artificial Sequence
  Description of Artificial Sequence: Synthetic oligonucleotide
  Sense strand starting at position 3717 of SEQ ID NO: 1244146
agcuaauauuugggauuua

SEQ ID NO: 1468275 - RNA, 19 nt, Artificial Sequence
  Description of Artificial Sequence: Synthetic oligonucleotide
  Antisense strand to SEQ ID NO: 1468274
uaaaucccaaauauuagcu

SEQ ID NO: 1468276 - RNA, 19 nt, Artificial Sequence
  Description of Artificial Sequence: Synthetic oligonucleotide
  Sense strand starting at position 3792 of SEQ ID NO: 1244146
aaucuugugacguagguaa

SEQ ID NO: 1468277 - RNA, 19 nt, Artificial Sequence
  Description of Artificial Sequence: Synthetic oligonucleotide
  Antisense strand to SEQ ID NO: 1468276
uuaccuacgucacaagauu

SEQ ID NO: 1468278 - RNA, 19 nt, Artificial Sequence
  Description of Artificial Sequence: Synthetic oligonucleotide
  Sense strand starting at position 3796 of SEQ ID NO: 1244146
uugugacguagguaauauu

SEQ ID NO: 1468279 - RNA, 19 nt, Artificial Sequence
  Description of Artificial Sequence: Synthetic oligonucleotide
  Antisense strand to SEQ ID NO: 1468278
aauauuaccuacgucacaa

SEQ ID NO: 1468280 - RNA, 19 nt, Artificial Sequence
  Description of Artificial Sequence: Synthetic oligonucleotide
  Sense strand starting at position 3898 of SEQ ID NO: 1244146
agugcaaacauugguuuga

SEQ ID NO: 1468281 - RNA, 19 nt, Artificial Sequence
  Description of Artificial Sequence: Synthetic oligonucleotide
  Antisense strand to SEQ ID NO: 1468280
ucaaaccaauguuugcacu

SEQ ID NO: 1468282 - RNA, 19 nt, Artificial Sequence
  Description of Artificial Sequence: Synthetic oligonucleotide
  Sense strand starting at position 3909 of SEQ ID NO: 1244146
ugguuugagggacgaauga

SEQ ID NO: 1468283 - RNA, 19 nt, Artificial Sequence
  Description of Artificial Sequence: Synthetic oligonucleotide
  Antisense strand to SEQ ID NO: 1468282
ucauucgucccucaaacca

SEQ ID NO: 1468284 - RNA, 19 nt, Artificial Sequence
  Description of Artificial Sequence: Synthetic oligonucleotide
  Sense strand starting at position 3937 of SEQ ID NO: 1244146
guggguaugaacuaaguga

SEQ ID NO: 1468285 - RNA, 19 nt, Artificial Sequence
  Description of Artificial Sequence: Synthetic oligonucleotide
  Antisense strand to SEQ ID NO: 1468284
ucacuuaguucauacccac

SEQ ID NO: 1468286 - RNA, 19 nt, Artificial Sequence
  Description of Artificial Sequence: Synthetic oligonucleotide
  Sense strand starting at position 392 of SEQ ID NO: 1244147
gcuggacccuuaucaaaug

SEQ ID NO: 1468287 - RNA, 19 nt, Artificial Sequence
  Description of Artificial Sequence: Synthetic oligonucleotide
  Antisense strand to SEQ ID NO: 1468286
cauuugauaaggguccagc

SEQ ID NO: 1468288 - RNA, 19 nt, Artificial Sequence
  Description of Artificial Sequence: Synthetic oligonucleotide
  Sense strand starting at position 596 of SEQ ID NO: 1244147
ggcacagugucucucacaa

SEQ ID NO: 1468289 - RNA, 19 nt, Artificial Sequence
  Description of Artificial Sequence: Synthetic oligonucleotide
  Antisense strand to SEQ ID NO: 1468288
uugugagagacacugugcc

SEQ ID NO: 1468290 - RNA, 19 nt, Artificial Sequence
  Description of Artificial Sequence: Synthetic oligonucleotide
  Sense strand starting at position 665 of SEQ ID NO: 1244147
uggcacucuugauucugaa

SEQ ID NO: 1468291 - RNA, 19 nt, Artificial Sequence
  Description of Artificial Sequence: Synthetic oligonucleotide
  Antisense strand to SEQ ID NO: 1468290
uucagaaucaagagugcca

SEQ ID NO: 1468292 - RNA, 19 nt, Artificial Sequence
  Description of Artificial Sequence: Synthetic oligonucleotide
  Sense strand starting at position 678 of SEQ ID NO: 1244147
ucugaagccugaucaauac

SEQ ID NO: 1468293 - RNA, 19 nt, Artificial Sequence
  Description of Artificial Sequence: Synthetic oligonucleotide
  Antisense strand to SEQ ID NO: 1468292
guauugaucaggcuucaga

SEQ ID NO: 1468294 - RNA, 19 nt, Artificial Sequence
  Description of Artificial Sequence: Synthetic oligonucleotide
  Sense strand starting at position 1688 of SEQ ID NO: 1244147
ugcuaucgcaaaugggaaa

SEQ ID NO: 1468295 - RNA, 19 nt, Artificial Sequence
  Description of Artificial Sequence: Synthetic oligonucleotide
  Antisense strand to SEQ ID NO: 1468294
uuucccauuugcgauagca

SEQ ID NO: 1468296 - RNA, 19 nt, Artificial Sequence
  Description of Artificial Sequence: Synthetic oligonucleotide
  Sense strand starting at position 2067 of SEQ ID NO: 1244147
ccaaguaacuugcugagca

SEQ ID NO: 1468297 - RNA, 19 nt, Artificial Sequence
  Description of Artificial Sequence: Synthetic oligonucleotide
  Antisense strand to SEQ ID NO: 1468296
ugcucagcaaguuacuugg

SEQ ID NO: 1468298 - RNA, 19 nt, Artificial Sequence
  Description of Artificial Sequence: Synthetic oligonucleotide
  Sense strand starting at position 2115 of SEQ ID NO: 1244147
gacucaugguggcuagaau

SEQ ID NO: 1468299 - RNA, 19 nt, Artificial Sequence
  Description of Artificial Sequence: Synthetic oligonucleotide
  Antisense strand to SEQ ID NO: 1468298
auucuagccaccaugaguc

SEQ ID NO: 1468300 - RNA, 19 nt, Artificial Sequence
  Description of Artificial Sequence: Synthetic oligonucleotide
  Sense strand starting at position 2116 of SEQ ID NO: 1244147
acucaugguggcuagaauu

SEQ ID NO: 1468301 - RNA, 19 nt, Artificial Sequence
  Description of Artificial Sequence: Synthetic oligonucleotide
  Antisense strand to SEQ ID NO: 1468300
aauucuagccaccaugagu

SEQ ID NO: 1468302 - RNA, 19 nt, Artificial Sequence
  Description of Artificial Sequence: Synthetic oligonucleotide
  Sense strand starting at position 2127 of SEQ ID NO: 1244147
cuagaauugccaggaagug

SEQ ID NO: 1468303 - RNA, 19 nt, Artificial Sequence
  Description of Artificial Sequence: Synthetic oligonucleotide
  Antisense strand to SEQ ID NO: 1468302
cacuuccuggcaauucuag

SEQ ID NO: 1468304 - RNA, 19 nt, Artificial Sequence
  Description of Artificial Sequence: Synthetic oligonucleotide
  Sense strand starting at position 2199 of SEQ ID NO: 1244147
cuuuccugagaauaguuua

SEQ ID NO: 1468305 - RNA, 19 nt, Artificial Sequence
  Description of Artificial Sequence: Synthetic oligonucleotide
  Antisense strand to SEQ ID NO: 1468304
uaaacuauucucaggaaag

SEQ ID NO: 1468306 - RNA, 19 nt, Artificial Sequence
  Description of Artificial Sequence: Synthetic oligonucleotide
  Sense strand starting at position 2202 of SEQ ID NO: 1244147
uccugagaauaguuuauua

SEQ ID NO: 1468307 - RNA, 19 nt, Artificial Sequence
  Description of Artificial Sequence: Synthetic oligonucleotide
  Antisense strand to SEQ ID NO: 1468306
uaauaaacuauucucagga

SEQ ID NO: 1468308 - RNA, 19 nt, Artificial Sequence
  Description of Artificial Sequence: Synthetic oligonucleotide
  Sense strand starting at position 2212 of SEQ ID NO: 1244147
aguuuauuaccauguccua

SEQ ID NO: 1468309 - RNA, 19 nt, Artificial Sequence
  Description of Artificial Sequence: Synthetic oligonucleotide
  Antisense strand to SEQ ID NO: 1468308
uaggacaugguaauaaacu

SEQ ID NO: 1468310 - RNA, 19 nt, Artificial Sequence
  Description of Artificial Sequence: Synthetic oligonucleotide
  Sense strand starting at position 2230 of SEQ ID NO: 1244147
auugguucugccuaucaau

SEQ ID NO: 1468311 - RNA, 19 nt, Artificial Sequence
  Description of Artificial Sequence: Synthetic oligonucleotide
  Antisense strand to SEQ ID NO: 1468310
auugauaggcagaaccaau

SEQ ID NO: 1468312 - RNA, 19 nt, Artificial Sequence
  Description of Artificial Sequence: Synthetic oligonucleotide
  Sense strand starting at position 2305 of SEQ ID NO: 1244147
aucacuuucugcuugggau

SEQ ID NO: 1468313 - RNA, 19 nt, Artificial Sequence
  Description of Artificial Sequence: Synthetic oligonucleotide
  Antisense strand to SEQ ID NO: 1468312
aucccaagcagaaagugau

SEQ ID NO: 1468314 - RNA, 19 nt, Artificial Sequence
  Description of Artificial Sequence: Synthetic oligonucleotide
  Sense strand starting at position 2306 of SEQ ID NO: 1244147
ucacuuucugcuugggaua

SEQ ID NO: 1468315 - RNA, 19 nt, Artificial Sequence
  Description of Artificial Sequence: Synthetic oligonucleotide
  Antisense strand to SEQ ID NO: 1468314
uaucccaagcagaaaguga

SEQ ID NO: 1468316 - RNA, 19 nt, Artificial Sequence
  Description of Artificial Sequence: Synthetic oligonucleotide
  Sense strand starting at position 2319 of SEQ ID NO: 1244147
gggauagcgugauugugaa

SEQ ID NO: 1468317 - RNA, 19 nt, Artificial Sequence
  Description of Artificial Sequence: Synthetic oligonucleotide
  Antisense strand to SEQ ID NO: 1468316
uucacaaucacgcuauccc

SEQ ID NO: 1468318 - RNA, 19 nt, Artificial Sequence
  Description of Artificial Sequence: Synthetic oligonucleotide
  Sense strand starting at position 2325 of SEQ ID NO: 1244147
gcgugauugugaacugguc

SEQ ID NO: 1468319 - RNA, 19 nt, Artificial Sequence
  Description of Artificial Sequence: Synthetic oligonucleotide
  Antisense strand to SEQ ID NO: 1468318
gaccaguucacaaucacgc

SEQ ID NO: 1468320 - RNA, 19 nt, Artificial Sequence
  Description of Artificial Sequence: Synthetic oligonucleotide
  Sense strand starting at position 2327 of SEQ ID NO: 1244147
gugauugugaacuggucca

SEQ ID NO: 1468321 - RNA, 19 nt, Artificial Sequence
  Description of Artificial Sequence: Synthetic oligonucleotide
  Antisense strand to SEQ ID NO: 1468320
uggaccaguucacaaucac

SEQ ID NO: 1468322 - RNA, 19 nt, Artificial Sequence
  Description of Artificial Sequence: Synthetic oligonucleotide
  Sense strand starting at position 2332 of SEQ ID NO: 1244147
ugugaacugguccauacuu

SEQ ID NO: 1468323 - RNA, 19 nt, Artificial Sequence
  Description of Artificial Sequence: Synthetic oligonucleotide
  Antisense strand to SEQ ID NO: 1468322
aaguauggaccaguucaca

SEQ ID NO: 1468324 - RNA, 19 nt, Artificial Sequence
  Description of Artificial Sequence: Synthetic oligonucleotide
  Sense strand starting at position 2347 of SEQ ID NO: 1244147
acuugucuacucuagccua

SEQ ID NO: 1468325 - RNA, 19 nt, Artificial Sequence
  Description of Artificial Sequence: Synthetic oligonucleotide
  Antisense strand to SEQ ID NO: 1468324
uaggcuagaguagacaagu

SEQ ID NO: 1468326 - RNA, 19 nt, Artificial Sequence
  Description of Artificial Sequence: Synthetic oligonucleotide
  Sense strand starting at position 2639 of SEQ ID NO: 1244147
gugaauggaccuuggucua

SEQ ID NO: 1468327 - RNA, 19 nt, Artificial Sequence
  Description of Artificial Sequence: Synthetic oligonucleotide
  Antisense strand to SEQ ID NO: 1468326
uagaccaagguccauucac

SEQ ID NO: 1468328 - RNA, 19 nt, Artificial Sequence
  Description of Artificial Sequence: Synthetic oligonucleotide
  Sense strand starting at position 2684 of SEQ ID NO: 1244147
ggaguuauuccagggaauu

SEQ ID NO: 1468329 - RNA, 19 nt, Artificial Sequence
  Description of Artificial Sequence: Synthetic oligonucleotide
  Antisense strand to SEQ ID NO: 1468328
aauucccuggaauaacucc

SEQ ID NO: 1468330 - RNA, 19 nt, Artificial Sequence
  Description of Artificial Sequence: Synthetic oligonucleotide
  Sense strand starting at position 2705 of SEQ ID NO: 1244147
gacucacaguuucugagau

SEQ ID NO: 1468331 - RNA, 19 nt, Artificial Sequence
  Description of Artificial Sequence: Synthetic oligonucleotide
  Antisense strand to SEQ ID NO: 1468330
aucucagaaacugugaguc

SEQ ID NO: 1468332 - RNA, 19 nt, Artificial Sequence
  Description of Artificial Sequence: Synthetic oligonucleotide
  Sense strand starting at position 2712 of SEQ ID NO: 1244147
aguuucugagauuaugcau

SEQ ID NO: 1468333 - RNA, 19 nt, Artificial Sequence
  Description of Artificial Sequence: Synthetic oligonucleotide
  Antisense strand to SEQ ID NO: 1468332
augcauaaucucagaaacu

SEQ ID NO: 1468334 - RNA, 19 nt, Artificial Sequence
  Description of Artificial Sequence: Synthetic oligonucleotide
  Sense strand starting at position 2719 of SEQ ID NO: 1244147
gagauuaugcauuagcugu

SEQ ID NO: 1468335 - RNA, 19 nt, Artificial Sequence
  Description of Artificial Sequence: Synthetic oligonucleotide
  Antisense strand to SEQ ID NO: 1468334
acagcuaaugcauaaucuc

SEQ ID NO: 1468336 - RNA, 19 nt, Artificial Sequence
  Description of Artificial Sequence: Synthetic oligonucleotide
  Sense strand starting at position 2732 of SEQ ID NO: 1244147
agcuguucaguugaaggua

SEQ ID NO: 1468337 - RNA, 19 nt, Artificial Sequence
  Description of Artificial Sequence: Synthetic oligonucleotide
  Antisense strand to SEQ ID NO: 1468336
uaccuucaacugaacagcu

SEQ ID NO: 1468338 - RNA, 19 nt, Artificial Sequence
  Description of Artificial Sequence: Synthetic oligonucleotide
  Sense strand starting at position 2775 of SEQ ID NO: 1244147
ggagcucuuuaaccauuaa

SEQ ID NO: 1468339 - RNA, 19 nt, Artificial Sequence
  Description of Artificial Sequence: Synthetic oligonucleotide
  Antisense strand to SEQ ID NO: 1468338
uuaaugguuaaagagcucc

SEQ ID NO: 1468340 - RNA, 19 nt, Artificial Sequence
  Description of Artificial Sequence: Synthetic oligonucleotide
  Sense strand starting at position 2922 of SEQ ID NO: 1244147
guaaaugagucccuuggga

SEQ ID NO: 1468341 - RNA, 19 nt, Artificial Sequence
  Description of Artificial Sequence: Synthetic oligonucleotide
  Antisense strand to SEQ ID NO: 1468340
ucccaagggacucauuuac

SEQ ID NO: 1468342 - RNA, 19 nt, Artificial Sequence
  Description of Artificial Sequence: Synthetic oligonucleotide
  Sense strand starting at position 2973 of SEQ ID NO: 1244147
ccaagaguccaauguguag

SEQ ID NO: 1468343 - RNA, 19 nt, Artificial Sequence
  Description of Artificial Sequence: Synthetic oligonucleotide
  Antisense strand to SEQ ID NO: 1468342
cuacacauuggacucuugg

SEQ ID NO: 1468344 - RNA, 19 nt, Artificial Sequence
  Description of Artificial Sequence: Synthetic oligonucleotide
  Sense strand starting at position 2993 of SEQ ID NO: 1244147
acguguauugcugaaagac

SEQ ID NO: 1468345 - RNA, 19 nt, Artificial Sequence
  Description of Artificial Sequence: Synthetic oligonucleotide
  Antisense strand to SEQ ID NO: 1468344
gucuuucagcaauacacgu

SEQ ID NO: 1468346 - RNA, 19 nt, Artificial Sequence
  Description of Artificial Sequence: Synthetic oligonucleotide
  Sense strand starting at position 3043 of SEQ ID NO: 1244147
gcaaacauagggugacaaa

SEQ ID NO: 1468347 - RNA, 19 nt, Artificial Sequence
  Description of Artificial Sequence: Synthetic oligonucleotide
  Antisense strand to SEQ ID NO: 1468346
uuugucacccuauguuugc

SEQ ID NO: 1468348 - RNA, 19 nt, Artificial Sequence
  Description of Artificial Sequence: Synthetic oligonucleotide
  Sense strand starting at position 3164 of SEQ ID NO: 1244147
gcagguucucaggaagauu

SEQ ID NO: 1468349 - RNA, 19 nt, Artificial Sequence
  Description of Artificial Sequence: Synthetic oligonucleotide
  Antisense strand to SEQ ID NO: 1468348
aaucuuccugagaaccugc

SEQ ID NO: 1468350 - RNA, 19 nt, Artificial Sequence
  Description of Artificial Sequence: Synthetic oligonucleotide
  Sense strand starting at position 3392 of SEQ ID NO: 1244147
cugaguucccagugucaag

SEQ ID NO: 1468351 - RNA, 19 nt, Artificial Sequence
  Description of Artificial Sequence: Synthetic oligonucleotide
  Antisense strand to SEQ ID NO: 1468350
cuugacacugggaacucag

SEQ ID NO: 1468352 - RNA, 19 nt, Artificial Sequence
  Description of Artificial Sequence: Synthetic oligonucleotide
  Sense strand starting at position 3414 of SEQ ID NO: 1244147
augggaggcguguaauuaa

SEQ ID NO: 1468353 - RNA, 19 nt, Artificial Sequence
  Description of Artificial Sequence: Synthetic oligonucleotide
  Antisense strand to SEQ ID NO: 1468352
uuaauuacacgccucccau

SEQ ID NO: 1468354 - RNA, 19 nt, Artificial Sequence
  Description of Artificial Sequence: Synthetic oligonucleotide
  Sense strand starting at position 3501 of SEQ ID NO: 1244147
gagugauugcuguauuacu

SEQ ID NO: 1468355 - RNA, 19 nt, Artificial Sequence
  Description of Artificial Sequence: Synthetic oligonucleotide
  Antisense strand to SEQ ID NO: 1468354
aguaauacagcaaucacuc

SEQ ID NO: 1468356 - RNA, 19 nt, Artificial Sequence
  Description of Artificial Sequence: Synthetic oligonucleotide
  Sense strand starting at position 3596 of SEQ ID NO: 1244147
uguguugauaaaggauaca

SEQ ID NO: 1468357 - RNA, 19 nt, Artificial Sequence
  Description of Artificial Sequence: Synthetic oligonucleotide
  Antisense strand to SEQ ID NO: 1468356
uguauccuuuaucaacaca

SEQ ID NO: 1468358 - RNA, 19 nt, Artificial Sequence
  Description of Artificial Sequence: Synthetic oligonucleotide
  Sense strand starting at position 3619 of SEQ ID NO: 1244147
uaaccauuaggccagguau

SEQ ID NO: 1468359 - RNA, 19 nt, Artificial Sequence
  Description of Artificial Sequence: Synthetic oligonucleotide
  Antisense strand to SEQ ID NO: 1468358
auaccuggccuaaugguua

SEQ ID NO: 1468360 - RNA, 19 nt, Artificial Sequence
  Description of Artificial Sequence: Synthetic oligonucleotide
  Sense strand starting at position 3863 of SEQ ID NO: 1244147
agucaagcaugccuugaaa

SEQ ID NO: 1468361 - RNA, 19 nt, Artificial Sequence
  Description of Artificial Sequence: Synthetic oligonucleotide
  Antisense strand to SEQ ID NO: 1468360
uuucaaggcaugcuugacu

SEQ ID NO: 1468362 - RNA, 19 nt, Artificial Sequence
  Description of Artificial Sequence: Synthetic oligonucleotide
  Sense strand starting at position 3894 of SEQ ID NO: 1244147
aucaaagucguauaucauu

SEQ ID NO: 1468363 - RNA, 19 nt, Artificial Sequence
  Description of Artificial Sequence: Synthetic oligonucleotide
  Antisense strand to SEQ ID NO: 1468362
aaugauauacgacuuugau

SEQ ID NO: 1468364 - RNA, 19 nt, Artificial Sequence
  Description of Artificial Sequence: Synthetic oligonucleotide
  Sense strand starting at position 3902 of SEQ ID NO: 1244147
cguauaucauuguuacuca

SEQ ID NO: 1468365 - RNA, 19 nt, Artificial Sequence
  Description of Artificial Sequence: Synthetic oligonucleotide
  Antisense strand to SEQ ID NO: 1468364
ugaguaacaaugauauacg

SEQ ID NO: 1468366 - RNA, 19 nt, Artificial Sequence
  Description of Artificial Sequence: Synthetic oligonucleotide
  Sense strand starting at position 79 of SEQ ID NO: 1244148
gcaagauggaguugagguu

SEQ ID NO: 1468367 - RNA, 19 nt, Artificial Sequence
  Description of Artificial Sequence: Synthetic oligonucleotide
  Antisense strand to SEQ ID NO: 1468366
aaccucaacuccaucuugc

SEQ ID NO: 1468368 - RNA, 19 nt, Artificial Sequence
  Description of Artificial Sequence: Synthetic oligonucleotide
  Sense strand starting at position 93 of SEQ ID NO: 1244148
agguuaaguccagguaggu

SEQ ID NO: 1468369 - RNA, 19 nt, Artificial Sequence
  Description of Artificial Sequence: Synthetic oligonucleotide
  Antisense strand to SEQ ID NO: 1468368
accuaccuggacuuaaccu

SEQ ID NO: 1468370 - RNA, 19 nt, Artificial Sequence
  Description of Artificial Sequence: Synthetic oligonucleotide
  Sense strand starting at position 148 of SEQ ID NO: 1244148
gaguuuggacuuuggacau

SEQ ID NO: 1468371 - RNA, 19 nt, Artificial Sequence
  Description of Artificial Sequence: Synthetic oligonucleotide
  Antisense strand to SEQ ID NO: 1468370
auguccaaaguccaaacuc

SEQ ID NO: 1468372 - RNA, 19 nt, Artificial Sequence
  Description of Artificial Sequence: Synthetic oligonucleotide
  Sense strand starting at position 326 of SEQ ID NO: 1244148
guggaugguaccugcuuaa

SEQ ID NO: 1468373 - RNA, 19 nt, Artificial Sequence
  Description of Artificial Sequence: Synthetic oligonucleotide
  Antisense strand to SEQ ID NO: 1468372
uuaagcagguaccauccac

SEQ ID NO: 1468374 - RNA, 19 nt, Artificial Sequence
  Description of Artificial Sequence: Synthetic oligonucleotide
  Sense strand starting at position 618 of SEQ ID NO: 1244148
cacacucaggguugaagau

SEQ ID NO: 1468375 - RNA, 19 nt, Artificial Sequence
  Description of Artificial Sequence: Synthetic oligonucleotide
  Antisense strand to SEQ ID NO: 1468374
aucuucaacccugagugug

SEQ ID NO: 1468376 - RNA, 19 nt, Artificial Sequence
  Description of Artificial Sequence: Synthetic oligonucleotide
  Sense strand starting at position 638 of SEQ ID NO: 1244148
caacacgaaucuguggaau

SEQ ID NO: 1468377 - RNA, 19 nt, Artificial Sequence
  Description of Artificial Sequence: Synthetic oligonucleotide
  Antisense strand to SEQ ID NO: 1468376
auuccacagauucguguug

SEQ ID NO: 1468378 - RNA, 19 nt, Artificial Sequence
  Description of Artificial Sequence: Synthetic oligonucleotide
  Sense strand starting at position 649 of SEQ ID NO: 1244148
uguggaaugcagggaagau

SEQ ID NO: 1468379 - RNA, 19 nt, Artificial Sequence
  Description of Artificial Sequence: Synthetic oligonucleotide
  Antisense strand to SEQ ID NO: 1468378
aucuucccugcauuccaca

SEQ ID NO: 1468380 - RNA, 19 nt, Artificial Sequence
  Description of Artificial Sequence: Synthetic oligonucleotide
  Sense strand starting at position 904 of SEQ ID NO: 1244148
cagcgaggugcuuaaaugu

SEQ ID NO: 1468381 - RNA, 19 nt, Artificial Sequence
  Description of Artificial Sequence: Synthetic oligonucleotide
  Antisense strand to SEQ ID NO: 1468380
acauuuaagcaccucgcug

SEQ ID NO: 1468382 - RNA, 19 nt, Artificial Sequence
  Description of Artificial Sequence: Synthetic oligonucleotide
  Sense strand starting at position 1027 of SEQ ID NO: 1244148
ggguacucgguucacagaa

SEQ ID NO: 1468383 - RNA, 19 nt, Artificial Sequence
  Description of Artificial Sequence: Synthetic oligonucleotide
  Antisense strand to SEQ ID NO: 1468382
uucugugaaccgaguaccc

SEQ ID NO: 1468384 - RNA, 19 nt, Artificial Sequence
  Description of Artificial Sequence: Synthetic oligonucleotide
  Sense strand starting at position 1076 of SEQ ID NO: 1244148
uuccgcucucaugagagau

SEQ ID NO: 1468385 - RNA, 19 nt, Artificial Sequence
  Description of Artificial Sequence: Synthetic oligonucleotide
  Antisense strand to SEQ ID NO: 1468384
aucucucaugagagcggaa

SEQ ID NO: 1468386 - RNA, 19 nt, Artificial Sequence
  Description of Artificial Sequence: Synthetic oligonucleotide
  Sense strand starting at position 1136 of SEQ ID NO: 1244148
gucagcacuugccaaugau

SEQ ID NO: 1468387 - RNA, 19 nt, Artificial Sequence
  Description of Artificial Sequence: Synthetic oligonucleotide
  Antisense strand to SEQ ID NO: 1468386
aucauuggcaagugcugac

SEQ ID NO: 1468388 - RNA, 19 nt, Artificial Sequence
  Description of Artificial Sequence: Synthetic oligonucleotide
  Sense strand starting at position 1139 of SEQ ID NO: 1244148
agcacuugccaaugauuac

SEQ ID NO: 1468389 - RNA, 19 nt, Artificial Sequence
  Description of Artificial Sequence: Synthetic oligonucleotide
  Antisense strand to SEQ ID NO: 1468388
guaaucauuggcaagugcu

SEQ ID NO: 1468390 - RNA, 19 nt, Artificial Sequence
  Description of Artificial Sequence: Synthetic oligonucleotide
  Sense strand starting at position 2145 of SEQ ID NO: 1244148
cgcuucuccgagaaagcgu

SEQ ID NO: 1468391 - RNA, 19 nt, Artificial Sequence
  Description of Artificial Sequence: Synthetic oligonucleotide
  Antisense strand to SEQ ID NO: 1468390
acgcuuucucggagaagcg

SEQ ID NO: 1468392 - RNA, 19 nt, Artificial Sequence
  Description of Artificial Sequence: Synthetic oligonucleotide
  Sense strand starting at position 2207 of SEQ ID NO: 1244148
ggauuugucuggccgcuuu

SEQ ID NO: 1468393 - RNA, 19 nt, Artificial Sequence
  Description of Artificial Sequence: Synthetic oligonucleotide
  Antisense strand to SEQ ID NO: 1468392
aaagcggccagacaaaucc

SEQ ID NO: 1468394 - RNA, 19 nt, Artificial Sequence
  Description of Artificial Sequence: Synthetic oligonucleotide
  Sense strand starting at position 2265 of SEQ ID NO: 1244148
gcuggagagaccuggcauu

SEQ ID NO: 1468395 - RNA, 19 nt, Artificial Sequence
  Description of Artificial Sequence: Synthetic oligonucleotide
  Antisense strand to SEQ ID NO: 1468394
aaugccaggucucuccagc

SEQ ID NO: 1468396 - RNA, 19 nt, Artificial Sequence
  Description of Artificial Sequence: Synthetic oligonucleotide
  Sense strand starting at position 2371 of SEQ ID NO: 1244148
gcggucucugggaguucuu

SEQ ID NO: 1468397 - RNA, 19 nt, Artificial Sequence
  Description of Artificial Sequence: Synthetic oligonucleotide
  Antisense strand to SEQ ID NO: 1468396
aagaacucccagagaccgc

SEQ ID NO: 1468398 - RNA, 19 nt, Artificial Sequence
  Description of Artificial Sequence: Synthetic oligonucleotide
  Sense strand starting at position 2380 of SEQ ID NO: 1244148
gggaguucuuccucgcacu

SEQ ID NO: 1468399 - RNA, 19 nt, Artificial Sequence
  Description of Artificial Sequence: Synthetic oligonucleotide
  Antisense strand to SEQ ID NO: 1468398
agugcgaggaagaacuccc

SEQ ID NO: 1468400 - RNA, 19 nt, Artificial Sequence
  Description of Artificial Sequence: Synthetic oligonucleotide
  Sense strand starting at position 2381 of SEQ ID NO: 1244148
ggaguucuuccucgcacuc

SEQ ID NO: 1468401 - RNA, 19 nt, Artificial Sequence
  Description of Artificial Sequence: Synthetic oligonucleotide
  Antisense strand to SEQ ID NO: 1468400
gagugcgaggaagaacucc

SEQ ID NO: 1468402 - RNA, 19 nt, Artificial Sequence
  Description of Artificial Sequence: Synthetic oligonucleotide
  Sense strand starting at position 2409 of SEQ ID NO: 1244148
gcugucuuugccgagauuu

SEQ ID NO: 1468403 - RNA, 19 nt, Artificial Sequence
  Description of Artificial Sequence: Synthetic oligonucleotide
  Antisense strand to SEQ ID NO: 1468402
aaaucucggcaaagacagc

SEQ ID NO: 1468404 - RNA, 19 nt, Artificial Sequence
  Description of Artificial Sequence: Synthetic oligonucleotide
  Sense strand starting at position 2447 of SEQ ID NO: 1244148
ccugauccgagcugagauu

SEQ ID NO: 1468405 - RNA, 19 nt, Artificial Sequence
  Description of Artificial Sequence: Synthetic oligonucleotide
  Antisense strand to SEQ ID NO: 1468404
aaucucagcucggaucagg

SEQ ID NO: 1468406 - RNA, 19 nt, Artificial Sequence
  Description of Artificial Sequence: Synthetic oligonucleotide
  Sense strand starting at position 2460 of SEQ ID NO: 1244148
gagauuggcuccucagcaa

SEQ ID NO: 1468407 - RNA, 19 nt, Artificial Sequence
  Description of Artificial Sequence: Synthetic oligonucleotide
  Antisense strand to SEQ ID NO: 1468406
uugcugaggagccaaucuc

SEQ ID NO: 1468408 - RNA, 19 nt, Artificial Sequence
  Description of Artificial Sequence: Synthetic oligonucleotide
  Sense strand starting at position 2506 of SEQ ID NO: 1244148
accaaaugucgcuaauuau

SEQ ID NO: 1468409 - RNA, 19 nt, Artificial Sequence
  Description of Artificial Sequence: Synthetic oligonucleotide
  Antisense strand to SEQ ID NO: 1468408
auaauuagcgacauuuggu

SEQ ID NO: 1468410 - RNA, 19 nt, Artificial Sequence
  Description of Artificial Sequence: Synthetic oligonucleotide
  Sense strand starting at position 2552 of SEQ ID NO: 1244148
agugcugcgacuucuggua

SEQ ID NO: 1468411 - RNA, 19 nt, Artificial Sequence
  Description of Artificial Sequence: Synthetic oligonucleotide
  Antisense strand to SEQ ID NO: 1468410
uaccagaagucgcagcacu

SEQ ID NO: 1468412 - RNA, 19 nt, Artificial Sequence
  Description of Artificial Sequence: Synthetic oligonucleotide
  Sense strand starting at position 2557 of SEQ ID NO: 1244148
ugcgacuucugguaucaaa

SEQ ID NO: 1468413 - RNA, 19 nt, Artificial Sequence
  Description of Artificial Sequence: Synthetic oligonucleotide
  Antisense strand to SEQ ID NO: 1468412
uuugauaccagaagucgca

SEQ ID NO: 1468414 - RNA, 19 nt, Artificial Sequence
  Description of Artificial Sequence: Synthetic oligonucleotide
  Sense strand starting at position 2576 of SEQ ID NO: 1244148
ggcuaagacugucaaugua

SEQ ID NO: 1468415 - RNA, 19 nt, Artificial Sequence
  Description of Artificial Sequence: Synthetic oligonucleotide
  Antisense strand to SEQ ID NO: 1468414
uacauugacagucuuagcc

SEQ ID NO: 1468416 - RNA, 19 nt, Artificial Sequence
  Description of Artificial Sequence: Synthetic oligonucleotide
  Sense strand starting at position 2579 of SEQ ID NO: 1244148
uaagacugucaauguagaa

SEQ ID NO: 1468417 - RNA, 19 nt, Artificial Sequence
  Description of Artificial Sequence: Synthetic oligonucleotide
  Antisense strand to SEQ ID NO: 1468416
uucuacauugacagucuua

SEQ ID NO: 1468418 - RNA, 19 nt, Artificial Sequence
  Description of Artificial Sequence: Synthetic oligonucleotide
  Sense strand starting at position 2593 of SEQ ID NO: 1244148
uagaaaugaguccguccuu

SEQ ID NO: 1468419 - RNA, 19 nt, Artificial Sequence
  Description of Artificial Sequence: Synthetic oligonucleotide
  Antisense strand to SEQ ID NO: 1468418
aaggacggacucauuucua

SEQ ID NO: 1468420 - RNA, 19 nt, Artificial Sequence
  Description of Artificial Sequence: Synthetic oligonucleotide
  Sense strand starting at position 2641 of SEQ ID NO: 1244148
gagccuagaccguauccau

SEQ ID NO: 1468421 - RNA, 19 nt, Artificial Sequence
  Description of Artificial Sequence: Synthetic oligonucleotide
  Antisense strand to SEQ ID NO: 1468420
auggauacggucuaggcuc

SEQ ID NO: 1468422 - RNA, 19 nt, Artificial Sequence
  Description of Artificial Sequence: Synthetic oligonucleotide
  Sense strand starting at position 2730 of SEQ ID NO: 1244148
cgaacagaguguuuggaga

SEQ ID NO: 1468423 - RNA, 19 nt, Artificial Sequence
  Description of Artificial Sequence: Synthetic oligonucleotide
  Antisense strand to SEQ ID NO: 1468422
ucuccaaacacucuguucg

SEQ ID NO: 1468424 - RNA, 19 nt, Artificial Sequence
  Description of Artificial Sequence: Synthetic oligonucleotide
  Sense strand starting at position 2732 of SEQ ID NO: 1244148
aacagaguguuuggagacu

SEQ ID NO: 1468425 - RNA, 19 nt, Artificial Sequence
  Description of Artificial Sequence: Synthetic oligonucleotide
  Antisense strand to SEQ ID NO: 1468424
agucuccaaacacucuguu

SEQ ID NO: 1468426 - RNA, 19 nt, Artificial Sequence
  Description of Artificial Sequence: Synthetic oligonucleotide
  Sense strand starting at position 3168 of SEQ ID NO: 1244148
agagguuacuauguacuuu

SEQ ID NO: 1468427 - RNA, 19 nt, Artificial Sequence
  Description of Artificial Sequence: Synthetic oligonucleotide
  Antisense strand to SEQ ID NO: 1468426
aaaguacauaguaaccucu

SEQ ID NO: 1468428 - RNA, 19 nt, Artificial Sequence
  Description of Artificial Sequence: Synthetic oligonucleotide
  Sense strand starting at position 3178 of SEQ ID NO: 1244148
auguacuuucuuggaucua

SEQ ID NO: 1468429 - RNA, 19 nt, Artificial Sequence
  Description of Artificial Sequence: Synthetic oligonucleotide
  Antisense strand to SEQ ID NO: 1468428
uagauccaagaaaguacau

SEQ ID NO: 1468430 - RNA, 19 nt, Artificial Sequence
  Description of Artificial Sequence: Synthetic oligonucleotide
  Sense strand starting at position 3179 of SEQ ID NO: 1244148
uguacuuucuuggaucuaa

SEQ ID NO: 1468431 - RNA, 19 nt, Artificial Sequence
  Description of Artificial Sequence: Synthetic oligonucleotide
  Antisense strand to SEQ ID NO: 1468430
uuagauccaagaaaguaca

SEQ ID NO: 1468432 - RNA, 19 nt, Artificial Sequence
  Description of Artificial Sequence: Synthetic oligonucleotide
  Sense strand starting at position 3670 of SEQ ID NO: 1244148
acaacaaucuuugaagugu

SEQ ID NO: 1468433 - RNA, 19 nt, Artificial Sequence
  Description of Artificial Sequence: Synthetic oligonucleotide
  Antisense strand to SEQ ID NO: 1468432
acacuucaaagauuguugu

SEQ ID NO: 1468434 - RNA, 19 nt, Artificial Sequence
  Description of Artificial Sequence: Synthetic oligonucleotide
  Sense strand starting at position 3771 of SEQ ID NO: 1244148
uguguuaucugacccugga

SEQ ID NO: 1468435 - RNA, 19 nt, Artificial Sequence
  Description of Artificial Sequence: Synthetic oligonucleotide
  Antisense strand to SEQ ID NO: 1468434
uccagggucagauaacaca

SEQ ID NO: 1468436 - RNA, 19 nt, Artificial Sequence
  Description of Artificial Sequence: Synthetic oligonucleotide
  Sense strand starting at position 3828 of SEQ ID NO: 1244148
cuacuuugggcguguccaa

SEQ ID NO: 1468437 - RNA, 19 nt, Artificial Sequence
  Description of Artificial Sequence: Synthetic oligonucleotide
  Antisense strand to SEQ ID NO: 1468436
uuggacacgcccaaaguag

SEQ ID NO: 1468438 - RNA, 19 nt, Artificial Sequence
  Description of Artificial Sequence: Synthetic oligonucleotide
  Sense strand starting at position 3855 of SEQ ID NO: 1244148
gguccugaagcuugugcaa

SEQ ID NO: 1468439 - RNA, 19 nt, Artificial Sequence
  Description of Artificial Sequence: Synthetic oligonucleotide
  Antisense strand to SEQ ID NO: 1468438
uugcacaagcuucaggacc

SEQ ID NO: 1468440 - RNA, 19 nt, Artificial Sequence
  Description of Artificial Sequence: Synthetic oligonucleotide
  Sense strand starting at position 3879 of SEQ ID NO: 1244148
ggugcucuuuaagaauaaa

SEQ ID NO: 1468441 - RNA, 19 nt, Artificial Sequence
  Description of Artificial Sequence: Synthetic oligonucleotide
  Antisense strand to SEQ ID NO: 1468440
uuuauucuuaaagagcacc

SEQ ID NO: 1468442 - RNA, 19 nt, Artificial Sequence
  Description of Artificial Sequence: Synthetic oligonucleotide
  Sense strand starting at position 3910 of SEQ ID NO: 1244148
ucauaagaauuaugaguac

SEQ ID NO: 1468443 - RNA, 19 nt, Artificial Sequence
  Description of Artificial Sequence: Synthetic oligonucleotide
  Antisense strand to SEQ ID NO: 1468442
guacucauaauucuuauga

SEQ ID NO: 1468444 - RNA, 19 nt, Artificial Sequence
  Description of Artificial Sequence: Synthetic oligonucleotide
  Sense strand starting at position 3948 of SEQ ID NO: 1244148
gggaaaggguccuggccua

SEQ ID NO: 1468445 - RNA, 19 nt, Artificial Sequence
  Description of Artificial Sequence: Synthetic oligonucleotide
  Antisense strand to SEQ ID NO: 1468444
uaggccaggacccuuuccc

SEQ ID NO: 1468446 - RNA, 19 nt, Artificial Sequence
  Description of Artificial Sequence: Synthetic oligonucleotide
  Sense strand starting at position 176 of SEQ ID NO: 1244149
agagguuugaucgaugcca

SEQ ID NO: 1468447 - RNA, 19 nt, Artificial Sequence
  Description of Artificial Sequence: Synthetic oligonucleotide
  Antisense strand to SEQ ID NO: 1468446
uggcaucgaucaaaccucu

SEQ ID NO: 1468448 - RNA, 19 nt, Artificial Sequence
  Description of Artificial Sequence: Synthetic oligonucleotide
  Sense strand starting at position 225 of SEQ ID NO: 1244149
gguggucucagaggcuaaa

SEQ ID NO: 1468449 - RNA, 19 nt, Artificial Sequence
  Description of Artificial Sequence: Synthetic oligonucleotide
  Antisense strand to SEQ ID NO: 1468448
uuuagccucugagaccacc

SEQ ID NO: 1468450 - RNA, 19 nt, Artificial Sequence
  Description of Artificial Sequence: Synthetic oligonucleotide
  Sense strand starting at position 250 of SEQ ID NO: 1244149
agaugagccacaggaguau

SEQ ID NO: 1468451 - RNA, 19 nt, Artificial Sequence
  Description of Artificial Sequence: Synthetic oligonucleotide
  Antisense strand to SEQ ID NO: 1468450
auacuccuguggcucaucu

SEQ ID NO: 1468452 - RNA, 19 nt, Artificial Sequence
  Description of Artificial Sequence: Synthetic oligonucleotide
  Sense strand starting at position 398 of SEQ ID NO: 1244149
aagagucuagucuaagcau

SEQ ID NO: 1468453 - RNA, 19 nt, Artificial Sequence
  Description of Artificial Sequence: Synthetic oligonucleotide
  Antisense strand to SEQ ID NO: 1468452
augcuuagacuagacucuu

SEQ ID NO: 1468454 - RNA, 19 nt, Artificial Sequence
  Description of Artificial Sequence: Synthetic oligonucleotide
  Sense strand starting at position 413 of SEQ ID NO: 1244149
gcaucugcuccagauauuc

SEQ ID NO: 1468455 - RNA, 19 nt, Artificial Sequence
  Description of Artificial Sequence: Synthetic oligonucleotide
  Antisense strand to SEQ ID NO: 1468454
gaauaucuggagcagaugc

SEQ ID NO: 1468456 - RNA, 19 nt, Artificial Sequence
  Description of Artificial Sequence: Synthetic oligonucleotide
  Sense strand starting at position 422 of SEQ ID NO: 1244149
ccagauauucuugguaaug

SEQ ID NO: 1468457 - RNA, 19 nt, Artificial Sequence
  Description of Artificial Sequence: Synthetic oligonucleotide
  Antisense strand to SEQ ID NO: 1468456
cauuaccaagaauaucugg

SEQ ID NO: 1468458 - RNA, 19 nt, Artificial Sequence
  Description of Artificial Sequence: Synthetic oligonucleotide
  Sense strand starting at position 423 of SEQ ID NO: 1244149
cagauauucuugguaaugg

SEQ ID NO: 1468459 - RNA, 19 nt, Artificial Sequence
  Description of Artificial Sequence: Synthetic oligonucleotide
  Antisense strand to SEQ ID NO: 1468458
ccauuaccaagaauaucug

SEQ ID NO: 1468460 - RNA, 19 nt, Artificial Sequence
  Description of Artificial Sequence: Synthetic oligonucleotide
  Sense strand starting at position 428 of SEQ ID NO: 1244149
auucuugguaaugggagau

SEQ ID NO: 1468461 - RNA, 19 nt, Artificial Sequence
  Description of Artificial Sequence: Synthetic oligonucleotide
  Antisense strand to SEQ ID NO: 1468460
aucucccauuaccaagaau

SEQ ID NO: 1468462 - RNA, 19 nt, Artificial Sequence
  Description of Artificial Sequence: Synthetic oligonucleotide
  Sense strand starting at position 468 of SEQ ID NO: 1244149
gagugagacucucuccaca

SEQ ID NO: 1468463 - RNA, 19 nt, Artificial Sequence
  Description of Artificial Sequence: Synthetic oligonucleotide
  Antisense strand to SEQ ID NO: 1468462
uguggagagagucucacuc

SEQ ID NO: 1468464 - RNA, 19 nt, Artificial Sequence
  Description of Artificial Sequence: Synthetic oligonucleotide
  Sense strand starting at position 551 of SEQ ID NO: 1244149
ugaccuuuccauggugacu

SEQ ID NO: 1468465 - RNA, 19 nt, Artificial Sequence
  Description of Artificial Sequence: Synthetic oligonucleotide
  Antisense strand to SEQ ID NO: 1468464
agucaccauggaaagguca

SEQ ID NO: 1468466 - RNA, 19 nt, Artificial Sequence
  Description of Artificial Sequence: Synthetic oligonucleotide
  Sense strand starting at position 560 of SEQ ID NO: 1244149
cauggugacuauucugaug

SEQ ID NO: 1468467 - RNA, 19 nt, Artificial Sequence
  Description of Artificial Sequence: Synthetic oligonucleotide
  Antisense strand to SEQ ID NO: 1468466
caucagaauagucaccaug

SEQ ID NO: 1468468 - RNA, 19 nt, Artificial Sequence
  Description of Artificial Sequence: Synthetic oligonucleotide
  Sense strand starting at position 808 of SEQ ID NO: 1244149
agaaguuauggugagccaa

SEQ ID NO: 1468469 - RNA, 19 nt, Artificial Sequence
  Description of Artificial Sequence: Synthetic oligonucleotide
  Antisense strand to SEQ ID NO: 1468468
uuggcucaccauaacuucu

SEQ ID NO: 1468470 - RNA, 19 nt, Artificial Sequence
  Description of Artificial Sequence: Synthetic oligonucleotide
  Sense strand starting at position 1131 of SEQ ID NO: 1244149
ugggaagucugcucagauc

SEQ ID NO: 1468471 - RNA, 19 nt, Artificial Sequence
  Description of Artificial Sequence: Synthetic oligonucleotide
  Antisense strand to SEQ ID NO: 1468470
gaucugagcagacuuccca

SEQ ID NO: 1468472 - RNA, 19 nt, Artificial Sequence
  Description of Artificial Sequence: Synthetic oligonucleotide
  Sense strand starting at position 1268 of SEQ ID NO: 1244149
gcuuccaugggacaguuaa

SEQ ID NO: 1468473 - RNA, 19 nt, Artificial Sequence
  Description of Artificial Sequence: Synthetic oligonucleotide
  Antisense strand to SEQ ID NO: 1468472
uuaacugucccauggaagc

SEQ ID NO: 1468474 - RNA, 19 nt, Artificial Sequence
  Description of Artificial Sequence: Synthetic oligonucleotide
  Sense strand starting at position 1276 of SEQ ID NO: 1244149
gggacaguuaaaggcuaaa

SEQ ID NO: 1468475 - RNA, 19 nt, Artificial Sequence
  Description of Artificial Sequence: Synthetic oligonucleotide
  Antisense strand to SEQ ID NO: 1468474
uuuagccuuuaacuguccc

SEQ ID NO: 1468476 - RNA, 19 nt, Artificial Sequence
  Description of Artificial Sequence: Synthetic oligonucleotide
  Sense strand starting at position 2266 of SEQ ID NO: 1244149
ccguucguaucauccauuu

SEQ ID NO: 1468477 - RNA, 19 nt, Artificial Sequence
  Description of Artificial Sequence: Synthetic oligonucleotide
  Antisense strand to SEQ ID NO: 1468476
aaauggaugauacgaacgg

SEQ ID NO: 1468478 - RNA, 19 nt, Artificial Sequence
  Description of Artificial Sequence: Synthetic oligonucleotide
  Sense strand starting at position 2583 of SEQ ID NO: 1244149
ugaacaggacucugaguua

SEQ ID NO: 1468479 - RNA, 19 nt, Artificial Sequence
  Description of Artificial Sequence: Synthetic oligonucleotide
  Antisense strand to SEQ ID NO: 1468478
uaacucagaguccuguuca

SEQ ID NO: 1468480 - RNA, 19 nt, Artificial Sequence
  Description of Artificial Sequence: Synthetic oligonucleotide
  Sense strand starting at position 2590 of SEQ ID NO: 1244149
gacucugaguuaccagaau

SEQ ID NO: 1468481 - RNA, 19 nt, Artificial Sequence
  Description of Artificial Sequence: Synthetic oligonucleotide
  Antisense strand to SEQ ID NO: 1468480
auucugguaacucagaguc

SEQ ID NO: 1468482 - RNA, 19 nt, Artificial Sequence
  Description of Artificial Sequence: Synthetic oligonucleotide
  Sense strand starting at position 2686 of SEQ ID NO: 1244149
cuggcagucguguuuaagu

SEQ ID NO: 1468483 - RNA, 19 nt, Artificial Sequence
  Description of Artificial Sequence: Synthetic oligonucleotide
  Antisense strand to SEQ ID NO: 1468482
acuuaaacacgacugccag

SEQ ID NO: 1468484 - RNA, 19 nt, Artificial Sequence
  Description of Artificial Sequence: Synthetic oligonucleotide
  Sense strand starting at position 2693 of SEQ ID NO: 1244149
ucguguuuaagugcugauc

SEQ ID NO: 1468485 - RNA, 19 nt, Artificial Sequence
  Description of Artificial Sequence: Synthetic oligonucleotide
  Antisense strand to SEQ ID NO: 1468484
gaucagcacuuaaacacga

SEQ ID NO: 1468486 - RNA, 19 nt, Artificial Sequence
  Description of Artificial Sequence: Synthetic oligonucleotide
  Sense strand starting at position 2694 of SEQ ID NO: 1244149
cguguuuaagugcugaucu

SEQ ID NO: 1468487 - RNA, 19 nt, Artificial Sequence
  Description of Artificial Sequence: Synthetic oligonucleotide
  Antisense strand to SEQ ID NO: 1468486
agaucagcacuuaaacacg

SEQ ID NO: 1468488 - RNA, 19 nt, Artificial Sequence
  Description of Artificial Sequence: Synthetic oligonucleotide
  Sense strand starting at position 2696 of SEQ ID NO: 1244149
uguuuaagugcugaucuga

SEQ ID NO: 1468489 - RNA, 19 nt, Artificial Sequence
  Description of Artificial Sequence: Synthetic oligonucleotide
  Antisense strand to SEQ ID NO: 1468488
ucagaucagcacuuaaaca

SEQ ID NO: 1468490 - RNA, 19 nt, Artificial Sequence
  Description of Artificial Sequence: Synthetic oligonucleotide
  Sense strand starting at position 2707 of SEQ ID NO: 1244149
ugaucugagaucuguacug

SEQ ID NO: 1468491 - RNA, 19 nt, Artificial Sequence
  Description of Artificial Sequence: Synthetic oligonucleotide
  Antisense strand to SEQ ID NO: 1468490
caguacagaucucagauca

SEQ ID NO: 1468492 - RNA, 19 nt, Artificial Sequence
  Description of Artificial Sequence: Synthetic oligonucleotide
  Sense strand starting at position 2728 of SEQ ID NO: 1244149
ugaccaagucugugacaca

SEQ ID NO: 1468493 - RNA, 19 nt, Artificial Sequence
  Description of Artificial Sequence: Synthetic oligonucleotide
  Antisense strand to SEQ ID NO: 1468492
ugugucacagacuugguca

SEQ ID NO: 1468494 - RNA, 19 nt, Artificial Sequence
  Description of Artificial Sequence: Synthetic oligonucleotide
  Sense strand starting at position 3013 of SEQ ID NO: 1244149
uugagaugugaauguguua

SEQ ID NO: 1468495 - RNA, 19 nt, Artificial Sequence
  Description of Artificial Sequence: Synthetic oligonucleotide
  Antisense strand to SEQ ID NO: 1468494
uaacacauucacaucucaa

SEQ ID NO: 1468496 - RNA, 19 nt, Artificial Sequence
  Description of Artificial Sequence: Synthetic oligonucleotide
  Sense strand starting at position 3112 of SEQ ID NO: 1244149
ggcuaagguucugugaaga

SEQ ID NO: 1468497 - RNA, 19 nt, Artificial Sequence
  Description of Artificial Sequence: Synthetic oligonucleotide
  Antisense strand to SEQ ID NO: 1468496
ucuucacagaaccuuagcc

SEQ ID NO: 1468498 - RNA, 19 nt, Artificial Sequence
  Description of Artificial Sequence: Synthetic oligonucleotide
  Sense strand starting at position 3133 of SEQ ID NO: 1244149
cgaugacauuuccaacacu

SEQ ID NO: 1468499 - RNA, 19 nt, Artificial Sequence
  Description of Artificial Sequence: Synthetic oligonucleotide
  Antisense strand to SEQ ID NO: 1468498
aguguuggaaaugucaucg

SEQ ID NO: 1468500 - RNA, 19 nt, Artificial Sequence
  Description of Artificial Sequence: Synthetic oligonucleotide
  Sense strand starting at position 3172 of SEQ ID NO: 1244149
ugacaaagugcuuaugacu

SEQ ID NO: 1468501 - RNA, 19 nt, Artificial Sequence
  Description of Artificial Sequence: Synthetic oligonucleotide
  Antisense strand to SEQ ID NO: 1468500
agucauaagcacuuuguca

SEQ ID NO: 1468502 - RNA, 19 nt, Artificial Sequence
  Description of Artificial Sequence: Synthetic oligonucleotide
  Sense strand starting at position 3178 of SEQ ID NO: 1244149
agugcuuaugacuacuaga

SEQ ID NO: 1468503 - RNA, 19 nt, Artificial Sequence
  Description of Artificial Sequence: Synthetic oligonucleotide
  Antisense strand to SEQ ID NO: 1468502
ucuaguagucauaagcacu

SEQ ID NO: 1468504 - RNA, 19 nt, Artificial Sequence
  Description of Artificial Sequence: Synthetic oligonucleotide
  Sense strand starting at position 3230 of SEQ ID NO: 1244149
guuuccauccuguaugaaa

SEQ ID NO: 1468505 - RNA, 19 nt, Artificial Sequence
  Description of Artificial Sequence: Synthetic oligonucleotide
  Antisense strand to SEQ ID NO: 1468504
uuucauacaggauggaaac

SEQ ID NO: 1468506 - RNA, 19 nt, Artificial Sequence
  Description of Artificial Sequence: Synthetic oligonucleotide
  Sense strand starting at position 3297 of SEQ ID NO: 1244149
cugccaggucaugaugaaa

SEQ ID NO: 1468507 - RNA, 19 nt, Artificial Sequence
  Description of Artificial Sequence: Synthetic oligonucleotide
  Antisense strand to SEQ ID NO: 1468506
uuucaucaugaccuggcag

SEQ ID NO: 1468508 - RNA, 19 nt, Artificial Sequence
  Description of Artificial Sequence: Synthetic oligonucleotide
  Sense strand starting at position 3570 of SEQ ID NO: 1244149
gagagaagacuuuguguuu

SEQ ID NO: 1468509 - RNA, 19 nt, Artificial Sequence
  Description of Artificial Sequence: Synthetic oligonucleotide
  Antisense strand to SEQ ID NO: 1468508
aaacacaaagucuucucuc

SEQ ID NO: 1468510 - RNA, 19 nt, Artificial Sequence
  Description of Artificial Sequence: Synthetic oligonucleotide
  Sense strand starting at position 3571 of SEQ ID NO: 1244149
agagaagacuuuguguuug

SEQ ID NO: 1468511 - RNA, 19 nt, Artificial Sequence
  Description of Artificial Sequence: Synthetic oligonucleotide
  Antisense strand to SEQ ID NO: 1468510
caaacacaaagucuucucu

SEQ ID NO: 1468512 - RNA, 19 nt, Artificial Sequence
  Description of Artificial Sequence: Synthetic oligonucleotide
  Sense strand starting at position 3573 of SEQ ID NO: 1244149
agaagacuuuguguuugga

SEQ ID NO: 1468513 - RNA, 19 nt, Artificial Sequence
  Description of Artificial Sequence: Synthetic oligonucleotide
  Antisense strand to SEQ ID NO: 1468512
uccaaacacaaagucuucu

SEQ ID NO: 1468514 - RNA, 19 nt, Artificial Sequence
  Description of Artificial Sequence: Synthetic oligonucleotide
  Sense strand starting at position 3693 of SEQ ID NO: 1244149
ggacucauccugcauccau

SEQ ID NO: 1468515 - RNA, 19 nt, Artificial Sequence
  Description of Artificial Sequence: Synthetic oligonucleotide
  Antisense strand to SEQ ID NO: 1468514
auggaugcaggaugagucc

SEQ ID NO: 1468516 - RNA, 19 nt, Artificial Sequence
  Description of Artificial Sequence: Synthetic oligonucleotide
  Sense strand starting at position 3704 of SEQ ID NO: 1244149
gcauccauccaguauguau

SEQ ID NO: 1468517 - RNA, 19 nt, Artificial Sequence
  Description of Artificial Sequence: Synthetic oligonucleotide
  Antisense strand to SEQ ID NO: 1468516
auacauacuggauggaugc

SEQ ID NO: 1468518 - RNA, 19 nt, Artificial Sequence
  Description of Artificial Sequence: Synthetic oligonucleotide
  Sense strand starting at position 3731 of SEQ ID NO: 1244149
gcgucagugccucuaguca

SEQ ID NO: 1468519 - RNA, 19 nt, Artificial Sequence
  Description of Artificial Sequence: Synthetic oligonucleotide
  Antisense strand to SEQ ID NO: 1468518
ugacuagaggcacugacgc

SEQ ID NO: 1468520 - RNA, 19 nt, Artificial Sequence
  Description of Artificial Sequence: Synthetic oligonucleotide
  Sense strand starting at position 3736 of SEQ ID NO: 1244149
agugccucuagucaugaga

SEQ ID NO: 1468521 - RNA, 19 nt, Artificial Sequence
  Description of Artificial Sequence: Synthetic oligonucleotide
  Antisense strand to SEQ ID NO: 1468520
ucucaugacuagaggcacu

SEQ ID NO: 1468522 - RNA, 19 nt, Artificial Sequence
  Description of Artificial Sequence: Synthetic oligonucleotide
  Sense strand starting at position 3831 of SEQ ID NO: 1244149
ccaggcucuguugaguaau

SEQ ID NO: 1468523 - RNA, 19 nt, Artificial Sequence
  Description of Artificial Sequence: Synthetic oligonucleotide
  Antisense strand to SEQ ID NO: 1468522
auuacucaacagagccugg

SEQ ID NO: 1468524 - RNA, 19 nt, Artificial Sequence
  Description of Artificial Sequence: Synthetic oligonucleotide
  Sense strand starting at position 3909 of SEQ ID NO: 1244149
aagacaugugaaugugguu

SEQ ID NO: 1468525 - RNA, 19 nt, Artificial Sequence
  Description of Artificial Sequence: Synthetic oligonucleotide
  Antisense strand to SEQ ID NO: 1468524
aaccacauucacaugucuu

SEQ ID NO: 1468526 - RNA, 19 nt, Artificial Sequence
  Description of Artificial Sequence: Synthetic oligonucleotide
  Sense strand starting at position 435 of SEQ ID NO: 1244150
cccuguccagaaugaguua

SEQ ID NO: 1468527 - RNA, 19 nt, Artificial Sequence
  Description of Artificial Sequence: Synthetic oligonucleotide
  Antisense strand to SEQ ID NO: 1468526
uaacucauucuggacaggg

SEQ ID NO: 1468528 - RNA, 19 nt, Artificial Sequence
  Description of Artificial Sequence: Synthetic oligonucleotide
  Sense strand starting at position 440 of SEQ ID NO: 1244150
uccagaaugaguuauacgu

SEQ ID NO: 1468529 - RNA, 19 nt, Artificial Sequence
  Description of Artificial Sequence: Synthetic oligonucleotide
  Antisense strand to SEQ ID NO: 1468528
acguauaacucauucugga

SEQ ID NO: 1468530 - RNA, 19 nt, Artificial Sequence
  Description of Artificial Sequence: Synthetic oligonucleotide
  Sense strand starting at position 448 of SEQ ID NO: 1244150
gaguuauacgucuauacau

SEQ ID NO: 1468531 - RNA, 19 nt, Artificial Sequence
  Description of Artificial Sequence: Synthetic oligonucleotide
  Antisense strand to SEQ ID NO: 1468530
auguauagacguauaacuc

SEQ ID NO: 1468532 - RNA, 19 nt, Artificial Sequence
  Description of Artificial Sequence: Synthetic oligonucleotide
  Sense strand starting at position 450 of SEQ ID NO: 1244150
guuauacgucuauacauac

SEQ ID NO: 1468533 - RNA, 19 nt, Artificial Sequence
  Description of Artificial Sequence: Synthetic oligonucleotide
  Antisense strand to SEQ ID NO: 1468532
guauguauagacguauaac

SEQ ID NO: 1468534 - RNA, 19 nt, Artificial Sequence
  Description of Artificial Sequence: Synthetic oligonucleotide
  Sense strand starting at position 473 of SEQ ID NO: 1244150
aagagucuugacgggaauc

SEQ ID NO: 1468535 - RNA, 19 nt, Artificial Sequence
  Description of Artificial Sequence: Synthetic oligonucleotide
  Antisense strand to SEQ ID NO: 1468534
gauucccgucaagacucuu

SEQ ID NO: 1468536 - RNA, 19 nt, Artificial Sequence
  Description of Artificial Sequence: Synthetic oligonucleotide
  Sense strand starting at position 474 of SEQ ID NO: 1244150
agagucuugacgggaauca

SEQ ID NO: 1468537 - RNA, 19 nt, Artificial Sequence
  Description of Artificial Sequence: Synthetic oligonucleotide
  Antisense strand to SEQ ID NO: 1468536
ugauucccgucaagacucu

SEQ ID NO: 1468538 - RNA, 19 nt, Artificial Sequence
  Description of Artificial Sequence: Synthetic oligonucleotide
  Sense strand starting at position 475 of SEQ ID NO: 1244150
gagucuugacgggaaucac

SEQ ID NO: 1468539 - RNA, 19 nt, Artificial Sequence
  Description of Artificial Sequence: Synthetic oligonucleotide
  Antisense strand to SEQ ID NO: 1468538
gugauucccgucaagacuc

SEQ ID NO: 1468540 - RNA, 19 nt, Artificial Sequence
  Description of Artificial Sequence: Synthetic oligonucleotide
  Sense strand starting at position 504 of SEQ ID NO: 1244150
ucgaauaguuuaucuuuga

SEQ ID NO: 1468541 - RNA, 19 nt, Artificial Sequence
  Description of Artificial Sequence: Synthetic oligonucleotide
  Antisense strand to SEQ ID NO: 1468540
ucaaagauaaacuauucga

SEQ ID NO: 1468542 - RNA, 19 nt, Artificial Sequence
  Description of Artificial Sequence: Synthetic oligonucleotide
  Sense strand starting at position 505 of SEQ ID NO: 1244150
cgaauaguuuaucuuugaa

SEQ ID NO: 1468543 - RNA, 19 nt, Artificial Sequence
  Description of Artificial Sequence: Synthetic oligonucleotide
  Antisense strand to SEQ ID NO: 1468542
uucaaagauaaacuauucg

SEQ ID NO: 1468544 - RNA, 19 nt, Artificial Sequence
  Description of Artificial Sequence: Synthetic oligonucleotide
  Sense strand starting at position 508 of SEQ ID NO: 1244150
auaguuuaucuuugaagug

SEQ ID NO: 1468545 - RNA, 19 nt, Artificial Sequence
  Description of Artificial Sequence: Synthetic oligonucleotide
  Antisense strand to SEQ ID NO: 1468544
cacuucaaagauaaacuau

SEQ ID NO: 1468546 - RNA, 19 nt, Artificial Sequence
  Description of Artificial Sequence: Synthetic oligonucleotide
  Sense strand starting at position 961 of SEQ ID NO: 1244150
ugugucauccucugaggca

SEQ ID NO: 1468547 - RNA, 19 nt, Artificial Sequence
  Description of Artificial Sequence: Synthetic oligonucleotide
  Antisense strand to SEQ ID NO: 1468546
ugccucagaggaugacaca

SEQ ID NO: 1468548 - RNA, 19 nt, Artificial Sequence
  Description of Artificial Sequence: Synthetic oligonucleotide
  Sense strand starting at position 2285 of SEQ ID NO: 1244150
ggcacuuggugugcuuaga

SEQ ID NO: 1468549 - RNA, 19 nt, Artificial Sequence
  Description of Artificial Sequence: Synthetic oligonucleotide
  Antisense strand to SEQ ID NO: 1468548
ucuaagcacaccaagugcc

SEQ ID NO: 1468550 - RNA, 19 nt, Artificial Sequence
  Description of Artificial Sequence: Synthetic oligonucleotide
  Sense strand starting at position 2358 of SEQ ID NO: 1244150
gacccuguuucgcuggauu

SEQ ID NO: 1468551 - RNA, 19 nt, Artificial Sequence
  Description of Artificial Sequence: Synthetic oligonucleotide
  Antisense strand to SEQ ID NO: 1468550
aauccagcgaaacaggguc

SEQ ID NO: 1468552 - RNA, 19 nt, Artificial Sequence
  Description of Artificial Sequence: Synthetic oligonucleotide
  Sense strand starting at position 2361 of SEQ ID NO: 1244150
ccuguuucgcuggauucuu

SEQ ID NO: 1468553 - RNA, 19 nt, Artificial Sequence
  Description of Artificial Sequence: Synthetic oligonucleotide
  Antisense strand to SEQ ID NO: 1468552
aagaauccagcgaaacagg

SEQ ID NO: 1468554 - RNA, 19 nt, Artificial Sequence
  Description of Artificial Sequence: Synthetic oligonucleotide
  Sense strand starting at position 2370 of SEQ ID NO: 1244150
cuggauucuugggacacau

SEQ ID NO: 1468555 - RNA, 19 nt, Artificial Sequence
  Description of Artificial Sequence: Synthetic oligonucleotide
  Antisense strand to SEQ ID NO: 1468554
augugucccaagaauccag

SEQ ID NO: 1468556 - RNA, 19 nt, Artificial Sequence
  Description of Artificial Sequence: Synthetic oligonucleotide
  Sense strand starting at position 2437 of SEQ ID NO: 1244150
uggcaaacaucugcugaau

SEQ ID NO: 1468557 - RNA, 19 nt, Artificial Sequence
  Description of Artificial Sequence: Synthetic oligonucleotide
  Antisense strand to SEQ ID NO: 1468556
auucagcagauguuugcca

SEQ ID NO: 1468558 - RNA, 19 nt, Artificial Sequence
  Description of Artificial Sequence: Synthetic oligonucleotide
  Sense strand starting at position 2450 of SEQ ID NO: 1244150
cugaaugccuucucugaac

SEQ ID NO: 1468559 - RNA, 19 nt, Artificial Sequence
  Description of Artificial Sequence: Synthetic oligonucleotide
  Antisense strand to SEQ ID NO: 1468558
guucagagaaggcauucag

SEQ ID NO: 1468560 - RNA, 19 nt, Artificial Sequence
  Description of Artificial Sequence: Synthetic oligonucleotide
  Sense strand starting at position 2566 of SEQ ID NO: 1244150
ugcguaagcagugauaggu

SEQ ID NO: 1468561 - RNA, 19 nt, Artificial Sequence
  Description of Artificial Sequence: Synthetic oligonucleotide
  Antisense strand to SEQ ID NO: 1468560
accuaucacugcuuacgca

SEQ ID NO: 1468562 - RNA, 19 nt, Artificial Sequence
  Description of Artificial Sequence: Synthetic oligonucleotide
  Sense strand starting at position 2576 of SEQ ID NO: 1244150
gugauagguccaugaagag

SEQ ID NO: 1468563 - RNA, 19 nt, Artificial Sequence
  Description of Artificial Sequence: Synthetic oligonucleotide
  Antisense strand to SEQ ID NO: 1468562
cucuucauggaccuaucac

SEQ ID NO: 1468564 - RNA, 19 nt, Artificial Sequence
  Description of Artificial Sequence: Synthetic oligonucleotide
  Sense strand starting at position 2767 of SEQ ID NO: 1244150
cuuugagucccugggucuu

SEQ ID NO: 1468565 - RNA, 19 nt, Artificial Sequence
  Description of Artificial Sequence: Synthetic oligonucleotide
  Antisense strand to SEQ ID NO: 1468564
aagacccagggacucaaag

SEQ ID NO: 1468566 - RNA, 19 nt, Artificial Sequence
  Description of Artificial Sequence: Synthetic oligonucleotide
  Sense strand starting at position 2824 of SEQ ID NO: 1244150
auacuauggcuaugagcaa

SEQ ID NO: 1468567 - RNA, 19 nt, Artificial Sequence
  Description of Artificial Sequence: Synthetic oligonucleotide
  Antisense strand to SEQ ID NO: 1468566
uugcucauagccauaguau

SEQ ID NO: 1468568 - RNA, 19 nt, Artificial Sequence
  Description of Artificial Sequence: Synthetic oligonucleotide
  Sense strand starting at position 2885 of SEQ ID NO: 1244150
gguaguccugauggugaua

SEQ ID NO: 1468569 - RNA, 19 nt, Artificial Sequence
  Description of Artificial Sequence: Synthetic oligonucleotide
  Antisense strand to SEQ ID NO: 1468568
uaucaccaucaggacuacc

SEQ ID NO: 1468570 - RNA, 19 nt, Artificial Sequence
  Description of Artificial Sequence: Synthetic oligonucleotide
  Sense strand starting at position 3052 of SEQ ID NO: 1244150
ccaagaagauacuugucau

SEQ ID NO: 1468571 - RNA, 19 nt, Artificial Sequence
  Description of Artificial Sequence: Synthetic oligonucleotide
  Antisense strand to SEQ ID NO: 1468570
augacaaguaucuucuugg

SEQ ID NO: 1468572 - RNA, 19 nt, Artificial Sequence
  Description of Artificial Sequence: Synthetic oligonucleotide
  Sense strand starting at position 3227 of SEQ ID NO: 1244150
ggaccuuaauaguaacaca

SEQ ID NO: 1468573 - RNA, 19 nt, Artificial Sequence
  Description of Artificial Sequence: Synthetic oligonucleotide
  Antisense strand to SEQ ID NO: 1468572
uguguuacuauuaaggucc

SEQ ID NO: 1468574 - RNA, 19 nt, Artificial Sequence
  Description of Artificial Sequence: Synthetic oligonucleotide
  Sense strand starting at position 3366 of SEQ ID NO: 1244150
gccucuaggccagaagcau

SEQ ID NO: 1468575 - RNA, 19 nt, Artificial Sequence
  Description of Artificial Sequence: Synthetic oligonucleotide
  Antisense strand to SEQ ID NO: 1468574
augcuucuggccuagaggc

SEQ ID NO: 1468576 - RNA, 19 nt, Artificial Sequence
  Description of Artificial Sequence: Synthetic oligonucleotide
  Sense strand starting at position 3395 of SEQ ID NO: 1244150
gugucaaugcccuggagca

SEQ ID NO: 1468577 - RNA, 19 nt, Artificial Sequence
  Description of Artificial Sequence: Synthetic oligonucleotide
  Antisense strand to SEQ ID NO: 1468576
ugcuccagggcauugacac

SEQ ID NO: 1468578 - RNA, 19 nt, Artificial Sequence
  Description of Artificial Sequence: Synthetic oligonucleotide
  Sense strand starting at position 3396 of SEQ ID NO: 1244150
ugucaaugcccuggagcaa

SEQ ID NO: 1468579 - RNA, 19 nt, Artificial Sequence
  Description of Artificial Sequence: Synthetic oligonucleotide
  Antisense strand to SEQ ID NO: 1468578
uugcuccagggcauugaca

SEQ ID NO: 1468580 - RNA, 19 nt, Artificial Sequence
  Description of Artificial Sequence: Synthetic oligonucleotide
  Sense strand starting at position 3397 of SEQ ID NO: 1244150
gucaaugcccuggagcaaa

SEQ ID NO: 1468581 - RNA, 19 nt, Artificial Sequence
  Description of Artificial Sequence: Synthetic oligonucleotide
  Antisense strand to SEQ ID NO: 1468580
uuugcuccagggcauugac

SEQ ID NO: 1468582 - RNA, 19 nt, Artificial Sequence
  Description of Artificial Sequence: Synthetic oligonucleotide
  Sense strand starting at position 3422 of SEQ ID NO: 1244150
gucacauggccugguuaca

SEQ ID NO: 1468583 - RNA, 19 nt, Artificial Sequence
  Description of Artificial Sequence: Synthetic oligonucleotide
  Antisense strand to SEQ ID NO: 1468582
uguaaccaggccaugugac

SEQ ID NO: 1468584 - RNA, 19 nt, Artificial Sequence
  Description of Artificial Sequence: Synthetic oligonucleotide
  Sense strand starting at position 3432 of SEQ ID NO: 1244150
cugguuacaucucugccua

SEQ ID NO: 1468585 - RNA, 19 nt, Artificial Sequence
  Description of Artificial Sequence: Synthetic oligonucleotide
  Antisense strand to SEQ ID NO: 1468584
uaggcagagauguaaccag

SEQ ID NO: 1468586 - RNA, 19 nt, Artificial Sequence
  Description of Artificial Sequence: Synthetic oligonucleotide
  Sense strand starting at position 3433 of SEQ ID NO: 1244150
ugguuacaucucugccuaa

SEQ ID NO: 1468587 - RNA, 19 nt, Artificial Sequence
  Description of Artificial Sequence: Synthetic oligonucleotide
  Antisense strand to SEQ ID NO: 1468586
uuaggcagagauguaacca

SEQ ID NO: 1468588 - RNA, 19 nt, Artificial Sequence
  Description of Artificial Sequence: Synthetic oligonucleotide
  Sense strand starting at position 3444 of SEQ ID NO: 1244150
cugccuaaguauuuaguua

SEQ ID NO: 1468589 - RNA, 19 nt, Artificial Sequence
  Description of Artificial Sequence: Synthetic oligonucleotide
  Antisense strand to SEQ ID NO: 1468588
uaacuaaauacuuaggcag

SEQ ID NO: 1468590 - RNA, 19 nt, Artificial Sequence
  Description of Artificial Sequence: Synthetic oligonucleotide
  Sense strand starting at position 3456 of SEQ ID NO: 1244150
uuaguuaucugcuccauuc

SEQ ID NO: 1468591 - RNA, 19 nt, Artificial Sequence
  Description of Artificial Sequence: Synthetic oligonucleotide
  Antisense strand to SEQ ID NO: 1468590
gaauggagcagauaacuaa

SEQ ID NO: 1468592 - RNA, 19 nt, Artificial Sequence
  Description of Artificial Sequence: Synthetic oligonucleotide
  Sense strand starting at position 3500 of SEQ ID NO: 1244150
ccacuuaggugucuccuua

SEQ ID NO: 1468593 - RNA, 19 nt, Artificial Sequence
  Description of Artificial Sequence: Synthetic oligonucleotide
  Antisense strand to SEQ ID NO: 1468592
uaaggagacaccuaagugg

SEQ ID NO: 1468594 - RNA, 19 nt, Artificial Sequence
  Description of Artificial Sequence: Synthetic oligonucleotide
  Sense strand starting at position 3611 of SEQ ID NO: 1244150
gacauaauugugcaaguga

SEQ ID NO: 1468595 - RNA, 19 nt, Artificial Sequence
  Description of Artificial Sequence: Synthetic oligonucleotide
  Antisense strand to SEQ ID NO: 1468594
ucacuugcacaauuauguc

SEQ ID NO: 1468596 - RNA, 19 nt, Artificial Sequence
  Description of Artificial Sequence: Synthetic oligonucleotide
  Sense strand starting at position 3691 of SEQ ID NO: 1244150
aguaauugaugguuguguu

SEQ ID NO: 1468597 - RNA, 19 nt, Artificial Sequence
  Description of Artificial Sequence: Synthetic oligonucleotide
  Antisense strand to SEQ ID NO: 1468596
aacacaaccaucaauuacu

SEQ ID NO: 1468598 - RNA, 19 nt, Artificial Sequence
  Description of Artificial Sequence: Synthetic oligonucleotide
  Sense strand starting at position 3695 of SEQ ID NO: 1244150
auugaugguuguguuuaca

SEQ ID NO: 1468599 - RNA, 19 nt, Artificial Sequence
  Description of Artificial Sequence: Synthetic oligonucleotide
  Antisense strand to SEQ ID NO: 1468598
uguaaacacaaccaucaau

SEQ ID NO: 1468600 - RNA, 19 nt, Artificial Sequence
  Description of Artificial Sequence: Synthetic oligonucleotide
  Sense strand starting at position 3904 of SEQ ID NO: 1244150
uacaguagccuauguugaa

SEQ ID NO: 1468601 - RNA, 19 nt, Artificial Sequence
  Description of Artificial Sequence: Synthetic oligonucleotide
  Antisense strand to SEQ ID NO: 1468600
uucaacauaggcuacugua

SEQ ID NO: 1468602 - RNA, 19 nt, Artificial Sequence
  Description of Artificial Sequence: Synthetic oligonucleotide
  Sense strand starting at position 3905 of SEQ ID NO: 1244150
acaguagccuauguugaau

SEQ ID NO: 1468603 - RNA, 19 nt, Artificial Sequence
  Description of Artificial Sequence: Synthetic oligonucleotide
  Antisense strand to SEQ ID NO: 1468602
auucaacauaggcuacugu

SEQ ID NO: 1468604 - RNA, 19 nt, Artificial Sequence
  Description of Artificial Sequence: Synthetic oligonucleotide
  Sense strand starting at position 3908 of SEQ ID NO: 1244150
guagccuauguugaauuaa

SEQ ID NO: 1468605 - RNA, 19 nt, Artificial Sequence
  Description of Artificial Sequence: Synthetic oligonucleotide
  Antisense strand to SEQ ID NO: 1468604
uuaauucaacauaggcuac

SEQ ID NO: 1468606 - RNA, 19 nt, Artificial Sequence
  Description of Artificial Sequence: Synthetic oligonucleotide
  Sense strand starting at position 148 of SEQ ID NO: 1244151
gggcuucacggaggagauu

SEQ ID NO: 1468607 - RNA, 19 nt, Artificial Sequence
  Description of Artificial Sequence: Synthetic oligonucleotide
  Antisense strand to SEQ ID NO: 1468606
aaucuccuccgugaagccc

SEQ ID NO: 1468608 - RNA, 19 nt, Artificial Sequence
  Description of Artificial Sequence: Synthetic oligonucleotide
  Sense strand starting at position 161 of SEQ ID NO: 1244151
gagauugcucagcacagga

SEQ ID NO: 1468609 - RNA, 19 nt, Artificial Sequence
  Description of Artificial Sequence: Synthetic oligonucleotide
  Antisense strand to SEQ ID NO: 1468608
uccugugcugagcaaucuc

SEQ ID NO: 1468610 - RNA, 19 nt, Artificial Sequence
  Description of Artificial Sequence: Synthetic oligonucleotide
  Sense strand starting at position 205 of SEQ ID NO: 1244151
gcccguuucccagaugaga

SEQ ID NO: 1468611 - RNA, 19 nt, Artificial Sequence
  Description of Artificial Sequence: Synthetic oligonucleotide
  Antisense strand to SEQ ID NO: 1468610
ucucaucugggaaacgggc

SEQ ID NO: 1468612 - RNA, 19 nt, Artificial Sequence
  Description of Artificial Sequence: Synthetic oligonucleotide
  Sense strand starting at position 207 of SEQ ID NO: 1244151
ccguuucccagaugagaga

SEQ ID NO: 1468613 - RNA, 19 nt, Artificial Sequence
  Description of Artificial Sequence: Synthetic oligonucleotide
  Antisense strand to SEQ ID NO: 1468612
ucucucaucugggaaacgg

SEQ ID NO: 1468614 - RNA, 19 nt, Artificial Sequence
  Description of Artificial Sequence: Synthetic oligonucleotide
  Sense strand starting at position 374 of SEQ ID NO: 1244151
acccaagaguguuuggcuu

SEQ ID NO: 1468615 - RNA, 19 nt, Artificial Sequence
  Description of Artificial Sequence: Synthetic oligonucleotide
  Antisense strand to SEQ ID NO: 1468614
aagccaaacacucuugggu

SEQ ID NO: 1468616 - RNA, 19 nt, Artificial Sequence
  Description of Artificial Sequence: Synthetic oligonucleotide
  Sense strand starting at position 465 of SEQ ID NO: 1244151
uuguguuuaucauuagaug

SEQ ID NO: 1468617 - RNA, 19 nt, Artificial Sequence
  Description of Artificial Sequence: Synthetic oligonucleotide
  Antisense strand to SEQ ID NO: 1468616
caucuaaugauaaacacaa

SEQ ID NO: 1468618 - RNA, 19 nt, Artificial Sequence
  Description of Artificial Sequence: Synthetic oligonucleotide
  Sense strand starting at position 466 of SEQ ID NO: 1244151
uguguuuaucauuagaugu

SEQ ID NO: 1468619 - RNA, 19 nt, Artificial Sequence
  Description of Artificial Sequence: Synthetic oligonucleotide
  Antisense strand to SEQ ID NO: 1468618
acaucuaaugauaaacaca

SEQ ID NO: 1468620 - RNA, 19 nt, Artificial Sequence
  Description of Artificial Sequence: Synthetic oligonucleotide
  Sense strand starting at position 873 of SEQ ID NO: 1244151
uucugucucccugagaaau

SEQ ID NO: 1468621 - RNA, 19 nt, Artificial Sequence
  Description of Artificial Sequence: Synthetic oligonucleotide
  Antisense strand to SEQ ID NO: 1468620
auuucucagggagacagaa

SEQ ID NO: 1468622 - RNA, 19 nt, Artificial Sequence
  Description of Artificial Sequence: Synthetic oligonucleotide
  Sense strand starting at position 875 of SEQ ID NO: 1244151
cugucucccugagaaauca

SEQ ID NO: 1468623 - RNA, 19 nt, Artificial Sequence
  Description of Artificial Sequence: Synthetic oligonucleotide
  Antisense strand to SEQ ID NO: 1468622
ugauuucucagggagacag

SEQ ID NO: 1468624 - RNA, 19 nt, Artificial Sequence
  Description of Artificial Sequence: Synthetic oligonucleotide
  Sense strand starting at position 1137 of SEQ ID NO: 1244151
gaggcugagccaugggaaa

SEQ ID NO: 1468625 - RNA, 19 nt, Artificial Sequence
  Description of Artificial Sequence: Synthetic oligonucleotide
  Antisense strand to SEQ ID NO: 1468624
uuucccauggcucagccuc

SEQ ID NO: 1468626 - RNA, 19 nt, Artificial Sequence
  Description of Artificial Sequence: Synthetic oligonucleotide
  Sense strand starting at position 1139 of SEQ ID NO: 1244151
ggcugagccaugggaaaga

SEQ ID NO: 1468627 - RNA, 19 nt, Artificial Sequence
  Description of Artificial Sequence: Synthetic oligonucleotide
  Antisense strand to SEQ ID NO: 1468626
ucuuucccauggcucagcc

SEQ ID NO: 1468628 - RNA, 19 nt, Artificial Sequence
  Description of Artificial Sequence: Synthetic oligonucleotide
  Sense strand starting at position 1400 of SEQ ID NO: 1244151
gagccaauguuagaaagaa

SEQ ID NO: 1468629 - RNA, 19 nt, Artificial Sequence
  Description of Artificial Sequence: Synthetic oligonucleotide
  Antisense strand to SEQ ID NO: 1468628
uucuuucuaacauuggcuc

SEQ ID NO: 1468630 - RNA, 19 nt, Artificial Sequence
  Description of Artificial Sequence: Synthetic oligonucleotide
  Sense strand starting at position 1437 of SEQ ID NO: 1244151
ucaggaauguugguuuauc

SEQ ID NO: 1468631 - RNA, 19 nt, Artificial Sequence
  Description of Artificial Sequence: Synthetic oligonucleotide
  Antisense strand to SEQ ID NO: 1468630
gauaaaccaacauuccuga

SEQ ID NO: 1468632 - RNA, 19 nt, Artificial Sequence
  Description of Artificial Sequence: Synthetic oligonucleotide
  Sense strand starting at position 1438 of SEQ ID NO: 1244151
caggaauguugguuuauca

SEQ ID NO: 1468633 - RNA, 19 nt, Artificial Sequence
  Description of Artificial Sequence: Synthetic oligonucleotide
  Antisense strand to SEQ ID NO: 1468632
ugauaaaccaacauuccug

SEQ ID NO: 1468634 - RNA, 19 nt, Artificial Sequence
  Description of Artificial Sequence: Synthetic oligonucleotide
  Sense strand starting at position 1445 of SEQ ID NO: 1244151
guugguuuaucauuagaug

SEQ ID NO: 1468635 - RNA, 19 nt, Artificial Sequence
  Description of Artificial Sequence: Synthetic oligonucleotide
  Antisense strand to SEQ ID NO: 1468634
caucuaaugauaaaccaac

SEQ ID NO: 1468636 - RNA, 19 nt, Artificial Sequence
  Description of Artificial Sequence: Synthetic oligonucleotide
  Sense strand starting at position 2681 of SEQ ID NO: 1244151
cucgaugccuuguuacagu

SEQ ID NO: 1468637 - RNA, 19 nt, Artificial Sequence
  Description of Artificial Sequence: Synthetic oligonucleotide
  Antisense strand to SEQ ID NO: 1468636
acuguaacaaggcaucgag

SEQ ID NO: 1468638 - RNA, 19 nt, Artificial Sequence
  Description of Artificial Sequence: Synthetic oligonucleotide
  Sense strand starting at position 2690 of SEQ ID NO: 1244151
uuguuacaguuguucuuaa

SEQ ID NO: 1468639 - RNA, 19 nt, Artificial Sequence
  Description of Artificial Sequence: Synthetic oligonucleotide
  Antisense strand to SEQ ID NO: 1468638
uuaagaacaacuguaacaa

SEQ ID NO: 1468640 - RNA, 19 nt, Artificial Sequence
  Description of Artificial Sequence: Synthetic oligonucleotide
  Sense strand starting at position 2705 of SEQ ID NO: 1244151
uuaacaagcugguuacaga

SEQ ID NO: 1468641 - RNA, 19 nt, Artificial Sequence
  Description of Artificial Sequence: Synthetic oligonucleotide
  Antisense strand to SEQ ID NO: 1468640
ucuguaaccagcuuguuaa

SEQ ID NO: 1468642 - RNA, 19 nt, Artificial Sequence
  Description of Artificial Sequence: Synthetic oligonucleotide
  Sense strand starting at position 2737 of SEQ ID NO: 1244151
ucccgucaguccucugaga

SEQ ID NO: 1468643 - RNA, 19 nt, Artificial Sequence
  Description of Artificial Sequence: Synthetic oligonucleotide
  Antisense strand to SEQ ID NO: 1468642
ucucagaggacugacggga

SEQ ID NO: 1468644 - RNA, 19 nt, Artificial Sequence
  Description of Artificial Sequence: Synthetic oligonucleotide
  Sense strand starting at position 2785 of SEQ ID NO: 1244151
ggguguucaggucagagaa

SEQ ID NO: 1468645 - RNA, 19 nt, Artificial Sequence
  Description of Artificial Sequence: Synthetic oligonucleotide
  Antisense strand to SEQ ID NO: 1468644
uucucugaccugaacaccc

SEQ ID NO: 1468646 - RNA, 19 nt, Artificial Sequence
  Description of Artificial Sequence: Synthetic oligonucleotide
  Sense strand starting at position 3137 of SEQ ID NO: 1244151
aggcuuacuggccagcaau

SEQ ID NO: 1468647 - RNA, 19 nt, Artificial Sequence
  Description of Artificial Sequence: Synthetic oligonucleotide
  Antisense strand to SEQ ID NO: 1468646
auugcuggccaguaagccu

SEQ ID NO: 1468648 - RNA, 19 nt, Artificial Sequence
  Description of Artificial Sequence: Synthetic oligonucleotide
  Sense strand starting at position 3233 of SEQ ID NO: 1244151
ggucccuucccaugacauu

SEQ ID NO: 1468649 - RNA, 19 nt, Artificial Sequence
  Description of Artificial Sequence: Synthetic oligonucleotide
  Antisense strand to SEQ ID NO: 1468648
aaugucaugggaagggacc

SEQ ID NO: 1468650 - RNA, 19 nt, Artificial Sequence
  Description of Artificial Sequence: Synthetic oligonucleotide
  Sense strand starting at position 3245 of SEQ ID NO: 1244151
ugacauugagcccaguuua

SEQ ID NO: 1468651 - RNA, 19 nt, Artificial Sequence
  Description of Artificial Sequence: Synthetic oligonucleotide
  Antisense strand to SEQ ID NO: 1468650
uaaacugggcucaauguca

SEQ ID NO: 1468652 - RNA, 19 nt, Artificial Sequence
  Description of Artificial Sequence: Synthetic oligonucleotide
  Sense strand starting at position 3265 of SEQ ID NO: 1244151
ccuucuuguccuugaagac

SEQ ID NO: 1468653 - RNA, 19 nt, Artificial Sequence
  Description of Artificial Sequence: Synthetic oligonucleotide
  Antisense strand to SEQ ID NO: 1468652
gucuucaaggacaagaagg

SEQ ID NO: 1468654 - RNA, 19 nt, Artificial Sequence
  Description of Artificial Sequence: Synthetic oligonucleotide
  Sense strand starting at position 3385 of SEQ ID NO: 1244151
uugccacauugguuugaaa

SEQ ID NO: 1468655 - RNA, 19 nt, Artificial Sequence
  Description of Artificial Sequence: Synthetic oligonucleotide
  Antisense strand to SEQ ID NO: 1468654
uuucaaaccaauguggcaa

SEQ ID NO: 1468656 - RNA, 19 nt, Artificial Sequence
  Description of Artificial Sequence: Synthetic oligonucleotide
  Sense strand starting at position 3387 of SEQ ID NO: 1244151
gccacauugguuugaaaug

SEQ ID NO: 1468657 - RNA, 19 nt, Artificial Sequence
  Description of Artificial Sequence: Synthetic oligonucleotide
  Antisense strand to SEQ ID NO: 1468656
cauuucaaaccaauguggc

SEQ ID NO: 1468658 - RNA, 19 nt, Artificial Sequence
  Description of Artificial Sequence: Synthetic oligonucleotide
  Sense strand starting at position 3392 of SEQ ID NO: 1244151
auugguuugaaaugauguu

SEQ ID NO: 1468659 - RNA, 19 nt, Artificial Sequence
  Description of Artificial Sequence: Synthetic oligonucleotide
  Antisense strand to SEQ ID NO: 1468658
aacaucauuucaaaccaau

SEQ ID NO: 1468660 - RNA, 19 nt, Artificial Sequence
  Description of Artificial Sequence: Synthetic oligonucleotide
  Sense strand starting at position 3393 of SEQ ID NO: 1244151
uugguuugaaaugauguuu

SEQ ID NO: 1468661 - RNA, 19 nt, Artificial Sequence
  Description of Artificial Sequence: Synthetic oligonucleotide
  Antisense strand to SEQ ID NO: 1468660
aaacaucauuucaaaccaa

SEQ ID NO: 1468662 - RNA, 19 nt, Artificial Sequence
  Description of Artificial Sequence: Synthetic oligonucleotide
  Sense strand starting at position 3410 of SEQ ID NO: 1244151
uuaggaaucucgccacacu

SEQ ID NO: 1468663 - RNA, 19 nt, Artificial Sequence
  Description of Artificial Sequence: Synthetic oligonucleotide
  Antisense strand to SEQ ID NO: 1468662
aguguggcgagauuccuaa

SEQ ID NO: 1468664 - RNA, 19 nt, Artificial Sequence
  Description of Artificial Sequence: Synthetic oligonucleotide
  Sense strand starting at position 3515 of SEQ ID NO: 1244151
agugaaugggauggucaca

SEQ ID NO: 1468665 - RNA, 19 nt, Artificial Sequence
  Description of Artificial Sequence: Synthetic oligonucleotide
  Antisense strand to SEQ ID NO: 1468664
ugugaccaucccauucacu

SEQ ID NO: 1468666 - RNA, 19 nt, Artificial Sequence
  Description of Artificial Sequence: Synthetic oligonucleotide
  Sense strand starting at position 3553 of SEQ ID NO: 1244151
ugcugucaucuguaaacag

SEQ ID NO: 1468667 - RNA, 19 nt, Artificial Sequence
  Description of Artificial Sequence: Synthetic oligonucleotide
  Antisense strand to SEQ ID NO: 1468666
cuguuuacagaugacagca

SEQ ID NO: 1468668 - RNA, 19 nt, Artificial Sequence
  Description of Artificial Sequence: Synthetic oligonucleotide
  Sense strand starting at position 3610 of SEQ ID NO: 1244151
gcugguugcaaauguguga

SEQ ID NO: 1468669 - RNA, 19 nt, Artificial Sequence
  Description of Artificial Sequence: Synthetic oligonucleotide
  Antisense strand to SEQ ID NO: 1468668
ucacacauuugcaaccagc

SEQ ID NO: 1468670 - RNA, 19 nt, Artificial Sequence
  Description of Artificial Sequence: Synthetic oligonucleotide
  Sense strand starting at position 3637 of SEQ ID NO: 1244151
cuuuccuggucaucugaga

SEQ ID NO: 1468671 - RNA, 19 nt, Artificial Sequence
  Description of Artificial Sequence: Synthetic oligonucleotide
  Antisense strand to SEQ ID NO: 1468670
ucucagaugaccaggaaag

SEQ ID NO: 1468672 - RNA, 19 nt, Artificial Sequence
  Description of Artificial Sequence: Synthetic oligonucleotide
  Sense strand starting at position 3652 of SEQ ID NO: 1244151
gagagcuguucugcacaga

SEQ ID NO: 1468673 - RNA, 19 nt, Artificial Sequence
  Description of Artificial Sequence: Synthetic oligonucleotide
  Antisense strand to SEQ ID NO: 1468672
ucugugcagaacagcucuc

SEQ ID NO: 1468674 - RNA, 19 nt, Artificial Sequence
  Description of Artificial Sequence: Synthetic oligonucleotide
  Sense strand starting at position 3655 of SEQ ID NO: 1244151
agcuguucugcacagagaa

SEQ ID NO: 1468675 - RNA, 19 nt, Artificial Sequence
  Description of Artificial Sequence: Synthetic oligonucleotide
  Antisense strand to SEQ ID NO: 1468674
uucucugugcagaacagcu

SEQ ID NO: 1468676 - RNA, 19 nt, Artificial Sequence
  Description of Artificial Sequence: Synthetic oligonucleotide
  Sense strand starting at position 3704 of SEQ ID NO: 1244151
ggaacaauguggaaggagu

SEQ ID NO: 1468677 - RNA, 19 nt, Artificial Sequence
  Description of Artificial Sequence: Synthetic oligonucleotide
  Antisense strand to SEQ ID NO: 1468676
acuccuuccacauuguucc

SEQ ID NO: 1468678 - RNA, 19 nt, Artificial Sequence
  Description of Artificial Sequence: Synthetic oligonucleotide
  Sense strand starting at position 3731 of SEQ ID NO: 1244151
gguugaagcacucagaucu

SEQ ID NO: 1468679 - RNA, 19 nt, Artificial Sequence
  Description of Artificial Sequence: Synthetic oligonucleotide
  Antisense strand to SEQ ID NO: 1468678
agaucugagugcuucaacc

SEQ ID NO: 1468680 - RNA, 19 nt, Artificial Sequence
  Description of Artificial Sequence: Synthetic oligonucleotide
  Sense strand starting at position 3888 of SEQ ID NO: 1244151
agcagcacccauuagagaa

SEQ ID NO: 1468681 - RNA, 19 nt, Artificial Sequence
  Description of Artificial Sequence: Synthetic oligonucleotide
  Antisense strand to SEQ ID NO: 1468680
uucucuaaugggugcugcu

SEQ ID NO: 1468682 - RNA, 19 nt, Artificial Sequence
  Description of Artificial Sequence: Synthetic oligonucleotide
  Sense strand starting at position 3943 of SEQ ID NO: 1244151
ugaggcuucuuccuagaga

SEQ ID NO: 1468683 - RNA, 19 nt, Artificial Sequence
  Description of Artificial Sequence: Synthetic oligonucleotide
  Antisense strand to SEQ ID NO: 1468682
ucucuaggaagaagccuca

SEQ ID NO: 1468684 - RNA, 19 nt, Artificial Sequence
  Description of Artificial Sequence: Synthetic oligonucleotide
  Sense strand starting at position 3944 of SEQ ID NO: 1244151
gaggcuucuuccuagagaa

SEQ ID NO: 1468685 - RNA, 19 nt, Artificial Sequence
  Description of Artificial Sequence: Synthetic oligonucleotide
  Antisense strand to SEQ ID NO: 1468684
uucucuaggaagaagccuc

SEQ ID NO: 1468686 - RNA, 19 nt, Artificial Sequence
  Description of Artificial Sequence: Synthetic oligonucleotide
  Sense strand starting at position 433 of SEQ ID NO: 1244152
ucaggauggucucauauuc

SEQ ID NO: 1468687 - RNA, 19 nt, Artificial Sequence
  Description of Artificial Sequence: Synthetic oligonucleotide
  Antisense strand to SEQ ID NO: 1468686
gaauaugagaccauccuga

SEQ ID NO: 1468688 - RNA, 19 nt, Artificial Sequence
  Description of Artificial Sequence: Synthetic oligonucleotide
  Sense strand starting at position 441 of SEQ ID NO: 1244152
gucucauauuccuggguuc

SEQ ID NO: 1468689 - RNA, 19 nt, Artificial Sequence
  Description of Artificial Sequence: Synthetic oligonucleotide
  Antisense strand to SEQ ID NO: 1468688
gaacccaggaauaugagac

SEQ ID NO: 1468690 - RNA, 19 nt, Artificial Sequence
  Description of Artificial Sequence: Synthetic oligonucleotide
  Sense strand starting at position 864 of SEQ ID NO: 1244152
agggaauggugucuuguuu

SEQ ID NO: 1468691 - RNA, 19 nt, Artificial Sequence
  Description of Artificial Sequence: Synthetic oligonucleotide
  Antisense strand to SEQ ID NO: 1468690
aaacaagacaccauucccu

SEQ ID NO: 1468692 - RNA, 19 nt, Artificial Sequence
  Description of Artificial Sequence: Synthetic oligonucleotide
  Sense strand starting at position 868 of SEQ ID NO: 1244152
aauggugucuuguuuauca

SEQ ID NO: 1468693 - RNA, 19 nt, Artificial Sequence
  Description of Artificial Sequence: Synthetic oligonucleotide
  Antisense strand to SEQ ID NO: 1468692
ugauaaacaagacaccauu

SEQ ID NO: 1468694 - RNA, 19 nt, Artificial Sequence
  Description of Artificial Sequence: Synthetic oligonucleotide
  Sense strand starting at position 872 of SEQ ID NO: 1244152
gugucuuguuuaucacggu

SEQ ID NO: 1468695 - RNA, 19 nt, Artificial Sequence
  Description of Artificial Sequence: Synthetic oligonucleotide
  Antisense strand to SEQ ID NO: 1468694
accgugauaaacaagacac

SEQ ID NO: 1468696 - RNA, 19 nt, Artificial Sequence
  Description of Artificial Sequence: Synthetic oligonucleotide
  Sense strand starting at position 873 of SEQ ID NO: 1244152
ugucuuguuuaucacggua

SEQ ID NO: 1468697 - RNA, 19 nt, Artificial Sequence
  Description of Artificial Sequence: Synthetic oligonucleotide
  Antisense strand to SEQ ID NO: 1468696
uaccgugauaaacaagaca

SEQ ID NO: 1468698 - RNA, 19 nt, Artificial Sequence
  Description of Artificial Sequence: Synthetic oligonucleotide
  Sense strand starting at position 917 of SEQ ID NO: 1244152
cacaguggguccucaguaa

SEQ ID NO: 1468699 - RNA, 19 nt, Artificial Sequence
  Description of Artificial Sequence: Synthetic oligonucleotide
  Antisense strand to SEQ ID NO: 1468698
uuacugaggacccacugug

SEQ ID NO: 1468700 - RNA, 19 nt, Artificial Sequence
  Description of Artificial Sequence: Synthetic oligonucleotide
  Sense strand starting at position 921 of SEQ ID NO: 1244152
guggguccucaguaacgaa

SEQ ID NO: 1468701 - RNA, 19 nt, Artificial Sequence
  Description of Artificial Sequence: Synthetic oligonucleotide
  Antisense strand to SEQ ID NO: 1468700
uucguuacugaggacccac

SEQ ID NO: 1468702 - RNA, 19 nt, Artificial Sequence
  Description of Artificial Sequence: Synthetic oligonucleotide
  Sense strand starting at position 925 of SEQ ID NO: 1244152
guccucaguaacgaaugaa

SEQ ID NO: 1468703 - RNA, 19 nt, Artificial Sequence
  Description of Artificial Sequence: Synthetic oligonucleotide
  Antisense strand to SEQ ID NO: 1468702
uucauucguuacugaggac

SEQ ID NO: 1468704 - RNA, 19 nt, Artificial Sequence
  Description of Artificial Sequence: Synthetic oligonucleotide
  Sense strand starting at position 928 of SEQ ID NO: 1244152
cucaguaacgaaugaagua

SEQ ID NO: 1468705 - RNA, 19 nt, Artificial Sequence
  Description of Artificial Sequence: Synthetic oligonucleotide
  Antisense strand to SEQ ID NO: 1468704
uacuucauucguuacugag

SEQ ID NO: 1468706 - RNA, 19 nt, Artificial Sequence
  Description of Artificial Sequence: Synthetic oligonucleotide
  Sense strand starting at position 963 of SEQ ID NO: 1244152
uuuggcucugcucaguuaa

SEQ ID NO: 1468707 - RNA, 19 nt, Artificial Sequence
  Description of Artificial Sequence: Synthetic oligonucleotide
  Antisense strand to SEQ ID NO: 1468706
uuaacugagcagagccaaa

SEQ ID NO: 1468708 - RNA, 19 nt, Artificial Sequence
  Description of Artificial Sequence: Synthetic oligonucleotide
  Sense strand starting at position 1056 of SEQ ID NO: 1244152
gcuggucaguguuuaacaa

SEQ ID NO: 1468709 - RNA, 19 nt, Artificial Sequence
  Description of Artificial Sequence: Synthetic oligonucleotide
  Antisense strand to SEQ ID NO: 1468708
uuguuaaacacugaccagc

SEQ ID NO: 1468710 - RNA, 19 nt, Artificial Sequence
  Description of Artificial Sequence: Synthetic oligonucleotide
  Sense strand starting at position 1057 of SEQ ID NO: 1244152
cuggucaguguuuaacaau

SEQ ID NO: 1468711 - RNA, 19 nt, Artificial Sequence
  Description of Artificial Sequence: Synthetic oligonucleotide
  Antisense strand to SEQ ID NO: 1468710
auuguuaaacacugaccag

SEQ ID NO: 1468712 - RNA, 19 nt, Artificial Sequence
  Description of Artificial Sequence: Synthetic oligonucleotide
  Sense strand starting at position 1136 of SEQ ID NO: 1244152
uaggaagauugcuuaagcu

SEQ ID NO: 1468713 - RNA, 19 nt, Artificial Sequence
  Description of Artificial Sequence: Synthetic oligonucleotide
  Antisense strand to SEQ ID NO: 1468712
agcuuaagcaaucuuccua

SEQ ID NO: 1468714 - RNA, 19 nt, Artificial Sequence
  Description of Artificial Sequence: Synthetic oligonucleotide
  Sense strand starting at position 1351 of SEQ ID NO: 1244152
gugagagcauguuucuaca

SEQ ID NO: 1468715 - RNA, 19 nt, Artificial Sequence
  Description of Artificial Sequence: Synthetic oligonucleotide
  Antisense strand to SEQ ID NO: 1468714
uguagaaacaugcucucac

SEQ ID NO: 1468716 - RNA, 19 nt, Artificial Sequence
  Description of Artificial Sequence: Synthetic oligonucleotide
  Sense strand starting at position 1353 of SEQ ID NO: 1244152
gagagcauguuucuacaua

SEQ ID NO: 1468717 - RNA, 19 nt, Artificial Sequence
  Description of Artificial Sequence: Synthetic oligonucleotide
  Antisense strand to SEQ ID NO: 1468716
uauguagaaacaugcucuc

SEQ ID NO: 1468718 - RNA, 19 nt, Artificial Sequence
  Description of Artificial Sequence: Synthetic oligonucleotide
  Sense strand starting at position 1354 of SEQ ID NO: 1244152
agagcauguuucuacauau

SEQ ID NO: 1468719 - RNA, 19 nt, Artificial Sequence
  Description of Artificial Sequence: Synthetic oligonucleotide
  Antisense strand to SEQ ID NO: 1468718
auauguagaaacaugcucu

SEQ ID NO: 1468720 - RNA, 19 nt, Artificial Sequence
  Description of Artificial Sequence: Synthetic oligonucleotide
  Sense strand starting at position 1422 of SEQ ID NO: 1244152
acguguagcguuugccaau

SEQ ID NO: 1468721 - RNA, 19 nt, Artificial Sequence
  Description of Artificial Sequence: Synthetic oligonucleotide
  Antisense strand to SEQ ID NO: 1468720
auuggcaaacgcuacacgu

SEQ ID NO: 1468722 - RNA, 19 nt, Artificial Sequence
  Description of Artificial Sequence: Synthetic oligonucleotide
  Sense strand starting at position 1423 of SEQ ID NO: 1244152
cguguagcguuugccaauu

SEQ ID NO: 1468723 - RNA, 19 nt, Artificial Sequence
  Description of Artificial Sequence: Synthetic oligonucleotide
  Antisense strand to SEQ ID NO: 1468722
aauuggcaaacgcuacacg

SEQ ID NO: 1468724 - RNA, 19 nt, Artificial Sequence
  Description of Artificial Sequence: Synthetic oligonucleotide
  Sense strand starting at position 1454 of SEQ ID NO: 1244152
acauuucugucguggucua

SEQ ID NO: 1468725 - RNA, 19 nt, Artificial Sequence
  Description of Artificial Sequence: Synthetic oligonucleotide
  Antisense strand to SEQ ID NO: 1468724
uagaccacgacagaaaugu

SEQ ID NO: 1468726 - RNA, 19 nt, Artificial Sequence
  Description of Artificial Sequence: Synthetic oligonucleotide
  Sense strand starting at position 1455 of SEQ ID NO: 1244152
cauuucugucguggucuau

SEQ ID NO: 1468727 - RNA, 19 nt, Artificial Sequence
  Description of Artificial Sequence: Synthetic oligonucleotide
  Antisense strand to SEQ ID NO: 1468726
auagaccacgacagaaaug

SEQ ID NO: 1468728 - RNA, 19 nt, Artificial Sequence
  Description of Artificial Sequence: Synthetic oligonucleotide
  Sense strand starting at position 2093 of SEQ ID NO: 1244152
ggcucugagcaccaacaau

SEQ ID NO: 1468729 - RNA, 19 nt, Artificial Sequence
  Description of Artificial Sequence: Synthetic oligonucleotide
  Antisense strand to SEQ ID NO: 1468728
auuguuggugcucagagcc

SEQ ID NO: 1468730 - RNA, 19 nt, Artificial Sequence
  Description of Artificial Sequence: Synthetic oligonucleotide
  Sense strand starting at position 2243 of SEQ ID NO: 1244152
gacucugguuugcgaguuu

SEQ ID NO: 1468731 - RNA, 19 nt, Artificial Sequence
  Description of Artificial Sequence: Synthetic oligonucleotide
  Antisense strand to SEQ ID NO: 1468730
aaacucgcaaaccagaguc

SEQ ID NO: 1468732 - RNA, 19 nt, Artificial Sequence
  Description of Artificial Sequence: Synthetic oligonucleotide
  Sense strand starting at position 2298 of SEQ ID NO: 1244152
agggcagauguggguuuau

SEQ ID NO: 1468733 - RNA, 19 nt, Artificial Sequence
  Description of Artificial Sequence: Synthetic oligonucleotide
  Antisense strand to SEQ ID NO: 1468732
auaaacccacaucugcccu

SEQ ID NO: 1468734 - RNA, 19 nt, Artificial Sequence
  Description of Artificial Sequence: Synthetic oligonucleotide
  Sense strand starting at position 2310 of SEQ ID NO: 1244152
gguuuauucuucuuugccu

SEQ ID NO: 1468735 - RNA, 19 nt, Artificial Sequence
  Description of Artificial Sequence: Synthetic oligonucleotide
  Antisense strand to SEQ ID NO: 1468734
aggcaaagaagaauaaacc

SEQ ID NO: 1468736 - RNA, 19 nt, Artificial Sequence
  Description of Artificial Sequence: Synthetic oligonucleotide
  Sense strand starting at position 2723 of SEQ ID NO: 1244152
gcggcuguggguucaguau

SEQ ID NO: 1468737 - RNA, 19 nt, Artificial Sequence
  Description of Artificial Sequence: Synthetic oligonucleotide
  Antisense strand to SEQ ID NO: 1468736
auacugaacccacagccgc

SEQ ID NO: 1468738 - RNA, 19 nt, Artificial Sequence
  Description of Artificial Sequence: Synthetic oligonucleotide
  Sense strand starting at position 2802 of SEQ ID NO: 1244152
aagagaugcucagccugaa

SEQ ID NO: 1468739 - RNA, 19 nt, Artificial Sequence
  Description of Artificial Sequence: Synthetic oligonucleotide
  Antisense strand to SEQ ID NO: 1468738
uucaggcugagcaucucuu

SEQ ID NO: 1468740 - RNA, 19 nt, Artificial Sequence
  Description of Artificial Sequence: Synthetic oligonucleotide
  Sense strand starting at position 2814 of SEQ ID NO: 1244152
gccugaagccuggacaaga

SEQ ID NO: 1468741 - RNA, 19 nt, Artificial Sequence
  Description of Artificial Sequence: Synthetic oligonucleotide
  Antisense strand to SEQ ID NO: 1468740
ucuuguccaggcuucaggc

SEQ ID NO: 1468742 - RNA, 19 nt, Artificial Sequence
  Description of Artificial Sequence: Synthetic oligonucleotide
  Sense strand starting at position 3062 of SEQ ID NO: 1244152
aggcguagccugcuucuaa

SEQ ID NO: 1468743 - RNA, 19 nt, Artificial Sequence
  Description of Artificial Sequence: Synthetic oligonucleotide
  Antisense strand to SEQ ID NO: 1468742
uuagaagcaggcuacgccu

SEQ ID NO: 1468744 - RNA, 19 nt, Artificial Sequence
  Description of Artificial Sequence: Synthetic oligonucleotide
  Sense strand starting at position 3384 of SEQ ID NO: 1244152
cacugugacugccauauga

SEQ ID NO: 1468745 - RNA, 19 nt, Artificial Sequence
  Description of Artificial Sequence: Synthetic oligonucleotide
  Antisense strand to SEQ ID NO: 1468744
ucauauggcagucacagug

SEQ ID NO: 1468746 - RNA, 19 nt, Artificial Sequence
  Description of Artificial Sequence: Synthetic oligonucleotide
  Sense strand starting at position 3408 of SEQ ID NO: 1244152
gggcuucacggaggagauu

SEQ ID NO: 1468747 - RNA, 19 nt, Artificial Sequence
  Description of Artificial Sequence: Synthetic oligonucleotide
  Antisense strand to SEQ ID NO: 1468746
aaucuccuccgugaagccc

SEQ ID NO: 1468748 - RNA, 19 nt, Artificial Sequence
  Description of Artificial Sequence: Synthetic oligonucleotide
  Sense strand starting at position 3421 of SEQ ID NO: 1244152
gagauugcucagcacagga

SEQ ID NO: 1468749 - RNA, 19 nt, Artificial Sequence
  Description of Artificial Sequence: Synthetic oligonucleotide
  Antisense strand to SEQ ID NO: 1468748
uccugugcugagcaaucuc

SEQ ID NO: 1468750 - RNA, 19 nt, Artificial Sequence
  Description of Artificial Sequence: Synthetic oligonucleotide
  Sense strand starting at position 3465 of SEQ ID NO: 1244152
gcccguuucccagaugaga

SEQ ID NO: 1468751 - RNA, 19 nt, Artificial Sequence
  Description of Artificial Sequence: Synthetic oligonucleotide
  Antisense strand to SEQ ID NO: 1468750
ucucaucugggaaacgggc

SEQ ID NO: 1468752 - RNA, 19 nt, Artificial Sequence
  Description of Artificial Sequence: Synthetic oligonucleotide
  Sense strand starting at position 3467 of SEQ ID NO: 1244152
ccguuucccagaugagaga

SEQ ID NO: 1468753 - RNA, 19 nt, Artificial Sequence
  Description of Artificial Sequence: Synthetic oligonucleotide
  Antisense strand to SEQ ID NO: 1468752
ucucucaucugggaaacgg

SEQ ID NO: 1468754 - RNA, 19 nt, Artificial Sequence
  Description of Artificial Sequence: Synthetic oligonucleotide
  Sense strand starting at position 3634 of SEQ ID NO: 1244152
acccaagaguguuuggcuu

SEQ ID NO: 1468755 - RNA, 19 nt, Artificial Sequence
  Description of Artificial Sequence: Synthetic oligonucleotide
  Antisense strand to SEQ ID NO: 1468754
aagccaaacacucuugggu

SEQ ID NO: 1468756 - RNA, 19 nt, Artificial Sequence
  Description of Artificial Sequence: Synthetic oligonucleotide
  Sense strand starting at position 3725 of SEQ ID NO: 1244152
uuguguuuaucauuagaug

SEQ ID NO: 1468757 - RNA, 19 nt, Artificial Sequence
  Description of Artificial Sequence: Synthetic oligonucleotide
  Antisense strand to SEQ ID NO: 1468756
caucuaaugauaaacacaa

SEQ ID NO: 1468758 - RNA, 19 nt, Artificial Sequence
  Description of Artificial Sequence: Synthetic oligonucleotide
  Sense strand starting at position 3726 of SEQ ID NO: 1244152
uguguuuaucauuagaugu

SEQ ID NO: 1468759 - RNA, 19 nt, Artificial Sequence
  Description of Artificial Sequence: Synthetic oligonucleotide
  Antisense strand to SEQ ID NO: 1468758
acaucuaaugauaaacaca

SEQ ID NO: 1468760 - RNA, 19 nt, Artificial Sequence
  Description of Artificial Sequence: Synthetic oligonucleotide
  Sense strand starting at position 51 of SEQ ID NO: 1244153
ucacuaaugugguuuauug

SEQ ID NO: 1468761 - RNA, 19 nt, Artificial Sequence
  Description of Artificial Sequence: Synthetic oligonucleotide
  Antisense strand to SEQ ID NO: 1468760
caauaaaccacauuaguga

SEQ ID NO: 1468762 - RNA, 19 nt, Artificial Sequence
  Description of Artificial Sequence: Synthetic oligonucleotide
  Sense strand starting at position 60 of SEQ ID NO: 1244153
ugguuuauugcuggacuuu

SEQ ID NO: 1468763 - RNA, 19 nt, Artificial Sequence
  Description of Artificial Sequence: Synthetic oligonucleotide
  Antisense strand to SEQ ID NO: 1468762
aaaguccagcaauaaacca

SEQ ID NO: 1468764 - RNA, 19 nt, Artificial Sequence
  Description of Artificial Sequence: Synthetic oligonucleotide
  Sense strand starting at position 61 of SEQ ID NO: 1244153
gguuuauugcuggacuuua

SEQ ID NO: 1468765 - RNA, 19 nt, Artificial Sequence
  Description of Artificial Sequence: Synthetic oligonucleotide
  Antisense strand to SEQ ID NO: 1468764
uaaaguccagcaauaaacc

SEQ ID NO: 1468766 - RNA, 19 nt, Artificial Sequence
  Description of Artificial Sequence: Synthetic oligonucleotide
  Sense strand starting at position 66 of SEQ ID NO: 1244153
auugcuggacuuuauuaaa

SEQ ID NO: 1468767 - RNA, 19 nt, Artificial Sequence
  Description of Artificial Sequence: Synthetic oligonucleotide
  Antisense strand to SEQ ID NO: 1468766
uuuaauaaaguccagcaau

SEQ ID NO: 1468768 - RNA, 19 nt, Artificial Sequence
  Description of Artificial Sequence: Synthetic oligonucleotide
  Sense strand starting at position 161 of SEQ ID NO: 1244153
gcaggcaucacccgaauua

SEQ ID NO: 1468769 - RNA, 19 nt, Artificial Sequence
  Description of Artificial Sequence: Synthetic oligonucleotide
  Antisense strand to SEQ ID NO: 1468768
uaauucgggugaugccugc

SEQ ID NO: 1468770 - RNA, 19 nt, Artificial Sequence
  Description of Artificial Sequence: Synthetic oligonucleotide
  Sense strand starting at position 280 of SEQ ID NO: 1244153
aacugaacucagcgagcaa

SEQ ID NO: 1468771 - RNA, 19 nt, Artificial Sequence
  Description of Artificial Sequence: Synthetic oligonucleotide
  Antisense strand to SEQ ID NO: 1468770
uugcucgcugaguucaguu

SEQ ID NO: 1468772 - RNA, 19 nt, Artificial Sequence
  Description of Artificial Sequence: Synthetic oligonucleotide
  Sense strand starting at position 298 of SEQ ID NO: 1244153
aaugcuguuguagauaaga

SEQ ID NO: 1468773 - RNA, 19 nt, Artificial Sequence
  Description of Artificial Sequence: Synthetic oligonucleotide
  Antisense strand to SEQ ID NO: 1468772
ucuuaucuacaacagcauu

SEQ ID NO: 1468774 - RNA, 19 nt, Artificial Sequence
  Description of Artificial Sequence: Synthetic oligonucleotide
  Sense strand starting at position 300 of SEQ ID NO: 1244153
ugcuguuguagauaagauu

SEQ ID NO: 1468775 - RNA, 19 nt, Artificial Sequence
  Description of Artificial Sequence: Synthetic oligonucleotide
  Antisense strand to SEQ ID NO: 1468774
aaucuuaucuacaacagca

SEQ ID NO: 1468776 - RNA, 19 nt, Artificial Sequence
  Description of Artificial Sequence: Synthetic oligonucleotide
  Sense strand starting at position 520 of SEQ ID NO: 1244153
gcgcuugaacucgggagau

SEQ ID NO: 1468777 - RNA, 19 nt, Artificial Sequence
  Description of Artificial Sequence: Synthetic oligonucleotide
  Antisense strand to SEQ ID NO: 1468776
aucucccgaguucaagcgc

SEQ ID NO: 1468778 - RNA, 19 nt, Artificial Sequence
  Description of Artificial Sequence: Synthetic oligonucleotide
  Sense strand starting at position 643 of SEQ ID NO: 1244153
accacuuagcugcagaaua

SEQ ID NO: 1468779 - RNA, 19 nt, Artificial Sequence
  Description of Artificial Sequence: Synthetic oligonucleotide
  Antisense strand to SEQ ID NO: 1468778
uauucugcagcuaaguggu

SEQ ID NO: 1468780 - RNA, 19 nt, Artificial Sequence
  Description of Artificial Sequence: Synthetic oligonucleotide
  Sense strand starting at position 656 of SEQ ID NO: 1244153
agaauacuuuaccuguaag

SEQ ID NO: 1468781 - RNA, 19 nt, Artificial Sequence
  Description of Artificial Sequence: Synthetic oligonucleotide
  Antisense strand to SEQ ID NO: 1468780
cuuacagguaaaguauucu

SEQ ID NO: 1468782 - RNA, 19 nt, Artificial Sequence
  Description of Artificial Sequence: Synthetic oligonucleotide
  Sense strand starting at position 778 of SEQ ID NO: 1244153
gcugcugucaaagauguaa

SEQ ID NO: 1468783 - RNA, 19 nt, Artificial Sequence
  Description of Artificial Sequence: Synthetic oligonucleotide
  Antisense strand to SEQ ID NO: 1468782
uuacaucuuugacagcagc

SEQ ID NO: 1468784 - RNA, 19 nt, Artificial Sequence
  Description of Artificial Sequence: Synthetic oligonucleotide
  Sense strand starting at position 809 of SEQ ID NO: 1244153
ucucgagugcucuccaugu

SEQ ID NO: 1468785 - RNA, 19 nt, Artificial Sequence
  Description of Artificial Sequence: Synthetic oligonucleotide
  Antisense strand to SEQ ID NO: 1468784
acauggagagcacucgaga

SEQ ID NO: 1468786 - RNA, 19 nt, Artificial Sequence
  Description of Artificial Sequence: Synthetic oligonucleotide
  Sense strand starting at position 822 of SEQ ID NO: 1244153
ccauguacucgauguagua

SEQ ID NO: 1468787 - RNA, 19 nt, Artificial Sequence
  Description of Artificial Sequence: Synthetic oligonucleotide
  Antisense strand to SEQ ID NO: 1468786
uacuacaucgaguacaugg

SEQ ID NO: 1468788 - RNA, 19 nt, Artificial Sequence
  Description of Artificial Sequence: Synthetic oligonucleotide
  Sense strand starting at position 824 of SEQ ID NO: 1244153
auguacucgauguaguauu

SEQ ID NO: 1468789 - RNA, 19 nt, Artificial Sequence
  Description of Artificial Sequence: Synthetic oligonucleotide
  Antisense strand to SEQ ID NO: 1468788
aauacuacaucgaguacau

SEQ ID NO: 1468790 - RNA, 19 nt, Artificial Sequence
  Description of Artificial Sequence: Synthetic oligonucleotide
  Sense strand starting at position 858 of SEQ ID NO: 1244153
cugaguagccaucguuauc

SEQ ID NO: 1468791 - RNA, 19 nt, Artificial Sequence
  Description of Artificial Sequence: Synthetic oligonucleotide
  Antisense strand to SEQ ID NO: 1468790
gauaacgauggcuacucag

SEQ ID NO: 1468792 - RNA, 19 nt, Artificial Sequence
  Description of Artificial Sequence: Synthetic oligonucleotide
  Sense strand starting at position 869 of SEQ ID NO: 1244153
ucguuauccucaccacacu

SEQ ID NO: 1468793 - RNA, 19 nt, Artificial Sequence
  Description of Artificial Sequence: Synthetic oligonucleotide
  Antisense strand to SEQ ID NO: 1468792
aguguggugaggauaacga

SEQ ID NO: 1468794 - RNA, 19 nt, Artificial Sequence
  Description of Artificial Sequence: Synthetic oligonucleotide
  Sense strand starting at position 891 of SEQ ID NO: 1244153
acuucugguuccgauauuu

SEQ ID NO: 1468795 - RNA, 19 nt, Artificial Sequence
  Description of Artificial Sequence: Synthetic oligonucleotide
  Antisense strand to SEQ ID NO: 1468794
aaauaucggaaccagaagu

SEQ ID NO: 1468796 - RNA, 19 nt, Artificial Sequence
  Description of Artificial Sequence: Synthetic oligonucleotide
  Sense strand starting at position 1047 of SEQ ID NO: 1244153
ccacguuauccugagggaa

SEQ ID NO: 1468797 - RNA, 19 nt, Artificial Sequence
  Description of Artificial Sequence: Synthetic oligonucleotide
  Antisense strand to SEQ ID NO: 1468796
uucccucaggauaacgugg

SEQ ID NO: 1468798 - RNA, 19 nt, Artificial Sequence
  Description of Artificial Sequence: Synthetic oligonucleotide
  Sense strand starting at position 1050 of SEQ ID NO: 1244153
cguuauccugagggaauua

SEQ ID NO: 1468799 - RNA, 19 nt, Artificial Sequence
  Description of Artificial Sequence: Synthetic oligonucleotide
  Antisense strand to SEQ ID NO: 1468798
uaauucccucaggauaacg

SEQ ID NO: 1468800 - RNA, 19 nt, Artificial Sequence
  Description of Artificial Sequence: Synthetic oligonucleotide
  Sense strand starting at position 2545 of SEQ ID NO: 1244153
uuaaaugucucucaguaag

SEQ ID NO: 1468801 - RNA, 19 nt, Artificial Sequence
  Description of Artificial Sequence: Synthetic oligonucleotide
  Antisense strand to SEQ ID NO: 1468800
cuuacugagagacauuuaa

SEQ ID NO: 1468802 - RNA, 19 nt, Artificial Sequence
  Description of Artificial Sequence: Synthetic oligonucleotide
  Sense strand starting at position 2583 of SEQ ID NO: 1244153
agaagugacccuggucacu

SEQ ID NO: 1468803 - RNA, 19 nt, Artificial Sequence
  Description of Artificial Sequence: Synthetic oligonucleotide
  Antisense strand to SEQ ID NO: 1468802
agugaccagggucacuucu

SEQ ID NO: 1468804 - RNA, 19 nt, Artificial Sequence
  Description of Artificial Sequence: Synthetic oligonucleotide
  Sense strand starting at position 2585 of SEQ ID NO: 1244153
aagugacccuggucacuau

SEQ ID NO: 1468805 - RNA, 19 nt, Artificial Sequence
  Description of Artificial Sequence: Synthetic oligonucleotide
  Antisense strand to SEQ ID NO: 1468804
auagugaccagggucacuu

SEQ ID NO: 1468806 - RNA, 19 nt, Artificial Sequence
  Description of Artificial Sequence: Synthetic oligonucleotide
  Sense strand starting at position 2700 of SEQ ID NO: 1244153
cggcuuucuccacaucgaa

SEQ ID NO: 1468807 - RNA, 19 nt, Artificial Sequence
  Description of Artificial Sequence: Synthetic oligonucleotide
  Antisense strand to SEQ ID NO: 1468806
uucgauguggagaaagccg

SEQ ID NO: 1468808 - RNA, 19 nt, Artificial Sequence
  Description of Artificial Sequence: Synthetic oligonucleotide
  Sense strand starting at position 2728 of SEQ ID NO: 1244153
ccaggaaagugacauucuu

SEQ ID NO: 1468809 - RNA, 19 nt, Artificial Sequence
  Description of Artificial Sequence: Synthetic oligonucleotide
  Antisense strand to SEQ ID NO: 1468808
aagaaugucacuuuccugg

SEQ ID NO: 1468810 - RNA, 19 nt, Artificial Sequence
  Description of Artificial Sequence: Synthetic oligonucleotide
  Sense strand starting at position 2776 of SEQ ID NO: 1244153
guccaaggguuucuugauu

SEQ ID NO: 1468811 - RNA, 19 nt, Artificial Sequence
  Description of Artificial Sequence: Synthetic oligonucleotide
  Antisense strand to SEQ ID NO: 1468810
aaucaagaaacccuuggac

SEQ ID NO: 1468812 - RNA, 19 nt, Artificial Sequence
  Description of Artificial Sequence: Synthetic oligonucleotide
  Sense strand starting at position 2844 of SEQ ID NO: 1244153
uuuauuuggugcccaaagu

SEQ ID NO: 1468813 - RNA, 19 nt, Artificial Sequence
  Description of Artificial Sequence: Synthetic oligonucleotide
  Antisense strand to SEQ ID NO: 1468812
acuuugggcaccaaauaaa

SEQ ID NO: 1468814 - RNA, 19 nt, Artificial Sequence
  Description of Artificial Sequence: Synthetic oligonucleotide
  Sense strand starting at position 3156 of SEQ ID NO: 1244153
aggcaugucccaugcuaaa

SEQ ID NO: 1468815 - RNA, 19 nt, Artificial Sequence
  Description of Artificial Sequence: Synthetic oligonucleotide
  Antisense strand to SEQ ID NO: 1468814
uuuagcaugggacaugccu

SEQ ID NO: 1468816 - RNA, 19 nt, Artificial Sequence
  Description of Artificial Sequence: Synthetic oligonucleotide
  Sense strand starting at position 3175 of SEQ ID NO: 1244153
gaaacagcuuuagagaagu

SEQ ID NO: 1468817 - RNA, 19 nt, Artificial Sequence
  Description of Artificial Sequence: Synthetic oligonucleotide
  Antisense strand to SEQ ID NO: 1468816
acuucucuaaagcuguuuc

SEQ ID NO: 1468818 - RNA, 19 nt, Artificial Sequence
  Description of Artificial Sequence: Synthetic oligonucleotide
  Sense strand starting at position 3258 of SEQ ID NO: 1244153
uagugauacuacgucucua

SEQ ID NO: 1468819 - RNA, 19 nt, Artificial Sequence
  Description of Artificial Sequence: Synthetic oligonucleotide
  Antisense strand to SEQ ID NO: 1468818
uagagacguaguaucacua

SEQ ID NO: 1468820 - RNA, 19 nt, Artificial Sequence
  Description of Artificial Sequence: Synthetic oligonucleotide
  Sense strand starting at position 3422 of SEQ ID NO: 1244153
gcaagacauugucaagaag

SEQ ID NO: 1468821 - RNA, 19 nt, Artificial Sequence
  Description of Artificial Sequence: Synthetic oligonucleotide
  Antisense strand to SEQ ID NO: 1468820
cuucuugacaaugucuugc

SEQ ID NO: 1468822 - RNA, 19 nt, Artificial Sequence
  Description of Artificial Sequence: Synthetic oligonucleotide
  Sense strand starting at position 3465 of SEQ ID NO: 1244153
ggaggcuauuucugauugu

SEQ ID NO: 1468823 - RNA, 19 nt, Artificial Sequence
  Description of Artificial Sequence: Synthetic oligonucleotide
  Antisense strand to SEQ ID NO: 1468822
acaaucagaaauagccucc

SEQ ID NO: 1468824 - RNA, 19 nt, Artificial Sequence
  Description of Artificial Sequence: Synthetic oligonucleotide
  Sense strand starting at position 3466 of SEQ ID NO: 1244153
gaggcuauuucugauuguu

SEQ ID NO: 1468825 - RNA, 19 nt, Artificial Sequence
  Description of Artificial Sequence: Synthetic oligonucleotide
  Antisense strand to SEQ ID NO: 1468824
aacaaucagaaauagccuc

SEQ ID NO: 1468826 - RNA, 19 nt, Artificial Sequence
  Description of Artificial Sequence: Synthetic oligonucleotide
  Sense strand starting at position 3468 of SEQ ID NO: 1244153
ggcuauuucugauuguuuc

SEQ ID NO: 1468827 - RNA, 19 nt, Artificial Sequence
  Description of Artificial Sequence: Synthetic oligonucleotide
  Antisense strand to SEQ ID NO: 1468826
gaaacaaucagaaauagcc

SEQ ID NO: 1468828 - RNA, 19 nt, Artificial Sequence
  Description of Artificial Sequence: Synthetic oligonucleotide
  Sense strand starting at position 3475 of SEQ ID NO: 1244153
ucugauuguuuccaaacag

SEQ ID NO: 1468829 - RNA, 19 nt, Artificial Sequence
  Description of Artificial Sequence: Synthetic oligonucleotide
  Antisense strand to SEQ ID NO: 1468828
cuguuuggaaacaaucaga

SEQ ID NO: 1468830 - RNA, 19 nt, Artificial Sequence
  Description of Artificial Sequence: Synthetic oligonucleotide
  Sense strand starting at position 3958 of SEQ ID NO: 1244153
ugaugauauugccugugag

SEQ ID NO: 1468831 - RNA, 19 nt, Artificial Sequence
  Description of Artificial Sequence: Synthetic oligonucleotide
  Antisense strand to SEQ ID NO: 1468830
cucacaggcaauaucauca

SEQ ID NO: 1468832 - RNA, 19 nt, Artificial Sequence
  Description of Artificial Sequence: Synthetic oligonucleotide
  Sense strand starting at position 3959 of SEQ ID NO: 1244153
gaugauauugccugugaga

SEQ ID NO: 1468833 - RNA, 19 nt, Artificial Sequence
  Description of Artificial Sequence: Synthetic oligonucleotide
  Antisense strand to SEQ ID NO: 1468832
ucucacaggcaauaucauc

SEQ ID NO: 1468834 - RNA, 19 nt, Artificial Sequence
  Description of Artificial Sequence: Synthetic oligonucleotide
  Sense strand starting at position 3961 of SEQ ID NO: 1244153
ugauauugccugugagaau

SEQ ID NO: 1468835 - RNA, 19 nt, Artificial Sequence
  Description of Artificial Sequence: Synthetic oligonucleotide
  Antisense strand to SEQ ID NO: 1468834
auucucacaggcaauauca

SEQ ID NO: 1468836 - RNA, 19 nt, Artificial Sequence
  Description of Artificial Sequence: Synthetic oligonucleotide
  Sense strand starting at position 3962 of SEQ ID NO: 1244153
gauauugccugugagaaua

SEQ ID NO: 1468837 - RNA, 19 nt, Artificial Sequence
  Description of Artificial Sequence: Synthetic oligonucleotide
  Antisense strand to SEQ ID NO: 1468836
uauucucacaggcaauauc

SEQ ID NO: 1468838 - RNA, 19 nt, Artificial Sequence
  Description of Artificial Sequence: Synthetic oligonucleotide
  Sense strand starting at position 3964 of SEQ ID NO: 1244153
uauugccugugagaauaga

SEQ ID NO: 1468839 - RNA, 19 nt, Artificial Sequence
  Description of Artificial Sequence: Synthetic oligonucleotide
  Antisense strand to SEQ ID NO: 1468838
ucuauucucacaggcaaua

SEQ ID NO: 1468840 - RNA, 19 nt, Artificial Sequence
  Description of Artificial Sequence: Synthetic oligonucleotide
  Sense strand starting at position 225 of SEQ ID NO: 1244154
ggguacaaacccugaucaa

SEQ ID NO: 1468841 - RNA, 19 nt, Artificial Sequence
  Description of Artificial Sequence: Synthetic oligonucleotide
  Antisense strand to SEQ ID NO: 1468840
uugaucaggguuuguaccc

SEQ ID NO: 1468842 - RNA, 19 nt, Artificial Sequence
  Description of Artificial Sequence: Synthetic oligonucleotide
  Sense strand starting at position 324 of SEQ ID NO: 1244154
gagagagucuagcauugaa

SEQ ID NO: 1468843 - RNA, 19 nt, Artificial Sequence
  Description of Artificial Sequence: Synthetic oligonucleotide
  Antisense strand to SEQ ID NO: 1468842
uucaaugcuagacucucuc

SEQ ID NO: 1468844 - RNA, 19 nt, Artificial Sequence
  Description of Artificial Sequence: Synthetic oligonucleotide
  Sense strand starting at position 327 of SEQ ID NO: 1244154
agagucuagcauugaagaa

SEQ ID NO: 1468845 - RNA, 19 nt, Artificial Sequence
  Description of Artificial Sequence: Synthetic oligonucleotide
  Antisense strand to SEQ ID NO: 1468844
uucuucaaugcuagacucu

SEQ ID NO: 1468846 - RNA, 19 nt, Artificial Sequence
  Description of Artificial Sequence: Synthetic oligonucleotide
  Sense strand starting at position 372 of SEQ ID NO: 1244154
gucucacuuucccugucaa

SEQ ID NO: 1468847 - RNA, 19 nt, Artificial Sequence
  Description of Artificial Sequence: Synthetic oligonucleotide
  Antisense strand to SEQ ID NO: 1468846
uugacagggaaagugagac

SEQ ID NO: 1468848 - RNA, 19 nt, Artificial Sequence
  Description of Artificial Sequence: Synthetic oligonucleotide
  Sense strand starting at position 491 of SEQ ID NO: 1244154
augcgcuucugccucaaua

SEQ ID NO: 1468849 - RNA, 19 nt, Artificial Sequence
  Description of Artificial Sequence: Synthetic oligonucleotide
  Antisense strand to SEQ ID NO: 1468848
uauugaggcagaagcgcau

SEQ ID NO: 1468850 - RNA, 19 nt, Artificial Sequence
  Description of Artificial Sequence: Synthetic oligonucleotide
  Sense strand starting at position 492 of SEQ ID NO: 1244154
ugcgcuucugccucaauaa

SEQ ID NO: 1468851 - RNA, 19 nt, Artificial Sequence
  Description of Artificial Sequence: Synthetic oligonucleotide
  Antisense strand to SEQ ID NO: 1468850
uuauugaggcagaagcgca

SEQ ID NO: 1468852 - RNA, 19 nt, Artificial Sequence
  Description of Artificial Sequence: Synthetic oligonucleotide
  Sense strand starting at position 493 of SEQ ID NO: 1244154
gcgcuucugccucaauaac

SEQ ID NO: 1468853 - RNA, 19 nt, Artificial Sequence
  Description of Artificial Sequence: Synthetic oligonucleotide
  Antisense strand to SEQ ID NO: 1468852
guuauugaggcagaagcgc

SEQ ID NO: 1468854 - RNA, 19 nt, Artificial Sequence
  Description of Artificial Sequence: Synthetic oligonucleotide
  Sense strand starting at position 946 of SEQ ID NO: 1244154
gugaauacuuccuccugca

SEQ ID NO: 1468855 - RNA, 19 nt, Artificial Sequence
  Description of Artificial Sequence: Synthetic oligonucleotide
  Antisense strand to SEQ ID NO: 1468854
ugcaggaggaaguauucac

SEQ ID NO: 1468856 - RNA, 19 nt, Artificial Sequence
  Description of Artificial Sequence: Synthetic oligonucleotide
  Sense strand starting at position 1492 of SEQ ID NO: 1244154
cgguaaauuccugacugca

SEQ ID NO: 1468857 - RNA, 19 nt, Artificial Sequence
  Description of Artificial Sequence: Synthetic oligonucleotide
  Antisense strand to SEQ ID NO: 1468856
ugcagucaggaauuuaccg

SEQ ID NO: 1468858 - RNA, 19 nt, Artificial Sequence
  Description of Artificial Sequence: Synthetic oligonucleotide
  Sense strand starting at position 2092 of SEQ ID NO: 1244154
gugcgagcucacuggcuau

SEQ ID NO: 1468859 - RNA, 19 nt, Artificial Sequence
  Description of Artificial Sequence: Synthetic oligonucleotide
  Antisense strand to SEQ ID NO: 1468858
auagccagugagcucgcac

SEQ ID NO: 1468860 - RNA, 19 nt, Artificial Sequence
  Description of Artificial Sequence: Synthetic oligonucleotide
  Sense strand starting at position 2172 of SEQ ID NO: 1244154
cuguuuauccgcuugccau

SEQ ID NO: 1468861 - RNA, 19 nt, Artificial Sequence
  Description of Artificial Sequence: Synthetic oligonucleotide
  Antisense strand to SEQ ID NO: 1468860
auggcaagcggauaaacag

SEQ ID NO: 1468862 - RNA, 19 nt, Artificial Sequence
  Description of Artificial Sequence: Synthetic oligonucleotide
  Sense strand starting at position 2173 of SEQ ID NO: 1244154
uguuuauccgcuugccauu

SEQ ID NO: 1468863 - RNA, 19 nt, Artificial Sequence
  Description of Artificial Sequence: Synthetic oligonucleotide
  Antisense strand to SEQ ID NO: 1468862
aauggcaagcggauaaaca

SEQ ID NO: 1468864 - RNA, 19 nt, Artificial Sequence
  Description of Artificial Sequence: Synthetic oligonucleotide
  Sense strand starting at position 2251 of SEQ ID NO: 1244154
cauugcaucuauuggcaga

SEQ ID NO: 1468865 - RNA, 19 nt, Artificial Sequence
  Description of Artificial Sequence: Synthetic oligonucleotide
  Antisense strand to SEQ ID NO: 1468864
ucugccaauagaugcaaug

SEQ ID NO: 1468866 - RNA, 19 nt, Artificial Sequence
  Description of Artificial Sequence: Synthetic oligonucleotide
  Sense strand starting at position 2253 of SEQ ID NO: 1244154
uugcaucuauuggcagaua

SEQ ID NO: 1468867 - RNA, 19 nt, Artificial Sequence
  Description of Artificial Sequence: Synthetic oligonucleotide
  Antisense strand to SEQ ID NO: 1468866
uaucugccaauagaugcaa

SEQ ID NO: 1468868 - RNA, 19 nt, Artificial Sequence
  Description of Artificial Sequence: Synthetic oligonucleotide
  Sense strand starting at position 2277 of SEQ ID NO: 1244154
uuacuuccuccugauugga

SEQ ID NO: 1468869 - RNA, 19 nt, Artificial Sequence
  Description of Artificial Sequence: Synthetic oligonucleotide
  Antisense strand to SEQ ID NO: 1468868
uccaaucaggaggaaguaa

SEQ ID NO: 1468870 - RNA, 19 nt, Artificial Sequence
  Description of Artificial Sequence: Synthetic oligonucleotide
  Sense strand starting at position 2279 of SEQ ID NO: 1244154
acuuccuccugauuggaca

SEQ ID NO: 1468871 - RNA, 19 nt, Artificial Sequence
  Description of Artificial Sequence: Synthetic oligonucleotide
  Antisense strand to SEQ ID NO: 1468870
uguccaaucaggaggaagu

SEQ ID NO: 1468872 - RNA, 19 nt, Artificial Sequence
  Description of Artificial Sequence: Synthetic oligonucleotide
  Sense strand starting at position 2293 of SEQ ID NO: 1244154
ggacaaggcucugucagua

SEQ ID NO: 1468873 - RNA, 19 nt, Artificial Sequence
  Description of Artificial Sequence: Synthetic oligonucleotide
  Antisense strand to SEQ ID NO: 1468872
uacugacagagccuugucc

SEQ ID NO: 1468874 - RNA, 19 nt, Artificial Sequence
  Description of Artificial Sequence: Synthetic oligonucleotide
  Sense strand starting at position 2298 of SEQ ID NO: 1244154
aggcucugucaguaagacu

SEQ ID NO: 1468875 - RNA, 19 nt, Artificial Sequence
  Description of Artificial Sequence: Synthetic oligonucleotide
  Antisense strand to SEQ ID NO: 1468874
agucuuacugacagagccu

SEQ ID NO: 1468876 - RNA, 19 nt, Artificial Sequence
  Description of Artificial Sequence: Synthetic oligonucleotide
  Sense strand starting at position 2371 of SEQ ID NO: 1244154
gcaggugagacucauuacu

SEQ ID NO: 1468877 - RNA, 19 nt, Artificial Sequence
  Description of Artificial Sequence: Synthetic oligonucleotide
  Antisense strand to SEQ ID NO: 1468876
aguaaugagucucaccugc

SEQ ID NO: 1468878 - RNA, 19 nt, Artificial Sequence
  Description of Artificial Sequence: Synthetic oligonucleotide
  Sense strand starting at position 2373 of SEQ ID NO: 1244154
aggugagacucauuacucu

SEQ ID NO: 1468879 - RNA, 19 nt, Artificial Sequence
  Description of Artificial Sequence: Synthetic oligonucleotide
  Antisense strand to SEQ ID NO: 1468878
agaguaaugagucucaccu

SEQ ID NO: 1468880 - RNA, 19 nt, Artificial Sequence
  Description of Artificial Sequence: Synthetic oligonucleotide
  Sense strand starting at position 2402 of SEQ ID NO: 1244154
cuaccuguccaacagguaa

SEQ ID NO: 1468881 - RNA, 19 nt, Artificial Sequence
  Description of Artificial Sequence: Synthetic oligonucleotide
  Antisense strand to SEQ ID NO: 1468880
uuaccuguuggacagguag

SEQ ID NO: 1468882 - RNA, 19 nt, Artificial Sequence
  Description of Artificial Sequence: Synthetic oligonucleotide
  Sense strand starting at position 2413 of SEQ ID NO: 1244154
acagguaagucauagggau

SEQ ID NO: 1468883 - RNA, 19 nt, Artificial Sequence
  Description of Artificial Sequence: Synthetic oligonucleotide
  Antisense strand to SEQ ID NO: 1468882
aucccuaugacuuaccugu

SEQ ID NO: 1468884 - RNA, 19 nt, Artificial Sequence
  Description of Artificial Sequence: Synthetic oligonucleotide
  Sense strand starting at position 2415 of SEQ ID NO: 1244154
agguaagucauagggauac

SEQ ID NO: 1468885 - RNA, 19 nt, Artificial Sequence
  Description of Artificial Sequence: Synthetic oligonucleotide
  Antisense strand to SEQ ID NO: 1468884
guaucccuaugacuuaccu

SEQ ID NO: 1468886 - RNA, 19 nt, Artificial Sequence
  Description of Artificial Sequence: Synthetic oligonucleotide
  Sense strand starting at position 2484 of SEQ ID NO: 1244154
ugaugcuucuuugggcuua

SEQ ID NO: 1468887 - RNA, 19 nt, Artificial Sequence
  Description of Artificial Sequence: Synthetic oligonucleotide
  Antisense strand to SEQ ID NO: 1468886
uaagcccaaagaagcauca

SEQ ID NO: 1468888 - RNA, 19 nt, Artificial Sequence
  Description of Artificial Sequence: Synthetic oligonucleotide
  Sense strand starting at position 2486 of SEQ ID NO: 1244154
augcuucuuugggcuuauu

SEQ ID NO: 1468889 - RNA, 19 nt, Artificial Sequence
  Description of Artificial Sequence: Synthetic oligonucleotide
  Antisense strand to SEQ ID NO: 1468888
aauaagcccaaagaagcau

SEQ ID NO: 1468890 - RNA, 19 nt, Artificial Sequence
  Description of Artificial Sequence: Synthetic oligonucleotide
  Sense strand starting at position 2526 of SEQ ID NO: 1244154
aucacauauuuguauagca

SEQ ID NO: 1468891 - RNA, 19 nt, Artificial Sequence
  Description of Artificial Sequence: Synthetic oligonucleotide
  Antisense strand to SEQ ID NO: 1468890
ugcuauacaaauaugugau

SEQ ID NO: 1468892 - RNA, 19 nt, Artificial Sequence
  Description of Artificial Sequence: Synthetic oligonucleotide
  Sense strand starting at position 2590 of SEQ ID NO: 1244154
gaguacuccugggauuuag

SEQ ID NO: 1468893 - RNA, 19 nt, Artificial Sequence
  Description of Artificial Sequence: Synthetic oligonucleotide
  Antisense strand to SEQ ID NO: 1468892
cuaaaucccaggaguacuc

SEQ ID NO: 1468894 - RNA, 19 nt, Artificial Sequence
  Description of Artificial Sequence: Synthetic oligonucleotide
  Sense strand starting at position 2632 of SEQ ID NO: 1244154
ucucccacuugguaugauu

SEQ ID NO: 1468895 - RNA, 19 nt, Artificial Sequence
  Description of Artificial Sequence: Synthetic oligonucleotide
  Antisense strand to SEQ ID NO: 1468894
aaucauaccaagugggaga

SEQ ID NO: 1468896 - RNA, 19 nt, Artificial Sequence
  Description of Artificial Sequence: Synthetic oligonucleotide
  Sense strand starting at position 2671 of SEQ ID NO: 1244154
uguuucuccucuucuguaa

SEQ ID NO: 1468897 - RNA, 19 nt, Artificial Sequence
  Description of Artificial Sequence: Synthetic oligonucleotide
  Antisense strand to SEQ ID NO: 1468896
uuacagaagaggagaaaca

SEQ ID NO: 1468898 - RNA, 19 nt, Artificial Sequence
  Description of Artificial Sequence: Synthetic oligonucleotide
  Sense strand starting at position 2691 of SEQ ID NO: 1244154
cuggauacauuagccauau

SEQ ID NO: 1468899 - RNA, 19 nt, Artificial Sequence
  Description of Artificial Sequence: Synthetic oligonucleotide
  Antisense strand to SEQ ID NO: 1468898
auauggcuaauguauccag

SEQ ID NO: 1468900 - RNA, 19 nt, Artificial Sequence
  Description of Artificial Sequence: Synthetic oligonucleotide
  Sense strand starting at position 2739 of SEQ ID NO: 1244154
ugaggucagguuugugaaa

SEQ ID NO: 1468901 - RNA, 19 nt, Artificial Sequence
  Description of Artificial Sequence: Synthetic oligonucleotide
  Antisense strand to SEQ ID NO: 1468900
uuucacaaaccugaccuca

SEQ ID NO: 1468902 - RNA, 19 nt, Artificial Sequence
  Description of Artificial Sequence: Synthetic oligonucleotide
  Sense strand starting at position 2761 of SEQ ID NO: 1244154
cucagaaacugcuaaaggu

SEQ ID NO: 1468903 - RNA, 19 nt, Artificial Sequence
  Description of Artificial Sequence: Synthetic oligonucleotide
  Antisense strand to SEQ ID NO: 1468902
accuuuagcaguuucugag

SEQ ID NO: 1468904 - RNA, 19 nt, Artificial Sequence
  Description of Artificial Sequence: Synthetic oligonucleotide
  Sense strand starting at position 2770 of SEQ ID NO: 1244154
ugcuaaagguuagaaauuu

SEQ ID NO: 1468905 - RNA, 19 nt, Artificial Sequence
  Description of Artificial Sequence: Synthetic oligonucleotide
  Antisense strand to SEQ ID NO: 1468904
aaauuucuaaccuuuagca

SEQ ID NO: 1468906 - RNA, 19 nt, Artificial Sequence
  Description of Artificial Sequence: Synthetic oligonucleotide
  Sense strand starting at position 2853 of SEQ ID NO: 1244154
cgacccucauuguaaagau

SEQ ID NO: 1468907 - RNA, 19 nt, Artificial Sequence
  Description of Artificial Sequence: Synthetic oligonucleotide
  Antisense strand to SEQ ID NO: 1468906
aucuuuacaaugagggucg

SEQ ID NO: 1468908 - RNA, 19 nt, Artificial Sequence
  Description of Artificial Sequence: Synthetic oligonucleotide
  Sense strand starting at position 3883 of SEQ ID NO: 1244154
cuuccuuucugugguugau

SEQ ID NO: 1468909 - RNA, 19 nt, Artificial Sequence
  Description of Artificial Sequence: Synthetic oligonucleotide
  Antisense strand to SEQ ID NO: 1468908
aucaaccacagaaaggaag

SEQ ID NO: 1468910 - RNA, 19 nt, Artificial Sequence
  Description of Artificial Sequence: Synthetic oligonucleotide
  Sense strand starting at position 3885 of SEQ ID NO: 1244154
uccuuucugugguugauga

SEQ ID NO: 1468911 - RNA, 19 nt, Artificial Sequence
  Description of Artificial Sequence: Synthetic oligonucleotide
  Antisense strand to SEQ ID NO: 1468910
ucaucaaccacagaaagga

SEQ ID NO: 1468912 - RNA, 19 nt, Artificial Sequence
  Description of Artificial Sequence: Synthetic oligonucleotide
  Sense strand starting at position 3887 of SEQ ID NO: 1244154
cuuucugugguugaugaca

SEQ ID NO: 1468913 - RNA, 19 nt, Artificial Sequence
  Description of Artificial Sequence: Synthetic oligonucleotide
  Antisense strand to SEQ ID NO: 1468912
ugucaucaaccacagaaag

SEQ ID NO: 1468914 - RNA, 19 nt, Artificial Sequence
  Description of Artificial Sequence: Synthetic oligonucleotide
  Sense strand starting at position 3892 of SEQ ID NO: 1244154
ugugguugaugacaugaau

SEQ ID NO: 1468915 - RNA, 19 nt, Artificial Sequence
  Description of Artificial Sequence: Synthetic oligonucleotide
  Antisense strand to SEQ ID NO: 1468914
auucaugucaucaaccaca

SEQ ID NO: 1468916 - RNA, 19 nt, Artificial Sequence
  Description of Artificial Sequence: Synthetic oligonucleotide
  Sense strand starting at position 3895 of SEQ ID NO: 1244154
gguugaugacaugaaugcu

SEQ ID NO: 1468917 - RNA, 19 nt, Artificial Sequence
  Description of Artificial Sequence: Synthetic oligonucleotide
  Antisense strand to SEQ ID NO: 1468916
agcauucaugucaucaacc

SEQ ID NO: 1468918 - RNA, 19 nt, Artificial Sequence
  Description of Artificial Sequence: Synthetic oligonucleotide
  Sense strand starting at position 72 of SEQ ID NO: 1244155
ggaaguuaauuugagaacu

SEQ ID NO: 1468919 - RNA, 19 nt, Artificial Sequence
  Description of Artificial Sequence: Synthetic oligonucleotide
  Antisense strand to SEQ ID NO: 1468918
aguucucaaauuaacuucc

SEQ ID NO: 1468920 - RNA, 19 nt, Artificial Sequence
  Description of Artificial Sequence: Synthetic oligonucleotide
  Sense strand starting at position 261 of SEQ ID NO: 1244155
aaaugaggcugguaaugaa

SEQ ID NO: 1468921 - RNA, 19 nt, Artificial Sequence
  Description of Artificial Sequence: Synthetic oligonucleotide
  Antisense strand to SEQ ID NO: 1468920
uucauuaccagccucauuu

SEQ ID NO: 1468922 - RNA, 19 nt, Artificial Sequence
  Description of Artificial Sequence: Synthetic oligonucleotide
  Sense strand starting at position 367 of SEQ ID NO: 1244155
cuuaguaauucccucgguu

SEQ ID NO: 1468923 - RNA, 19 nt, Artificial Sequence
  Description of Artificial Sequence: Synthetic oligonucleotide
  Antisense strand to SEQ ID NO: 1468922
aaccgagggaauuacuaag

SEQ ID NO: 1468924 - RNA, 19 nt, Artificial Sequence
  Description of Artificial Sequence: Synthetic oligonucleotide
  Sense strand starting at position 369 of SEQ ID NO: 1244155
uaguaauucccucgguuac

SEQ ID NO: 1468925 - RNA, 19 nt, Artificial Sequence
  Description of Artificial Sequence: Synthetic oligonucleotide
  Antisense strand to SEQ ID NO: 1468924
guaaccgagggaauuacua

SEQ ID NO: 1468926 - RNA, 19 nt, Artificial Sequence
  Description of Artificial Sequence: Synthetic oligonucleotide
  Sense strand starting at position 371 of SEQ ID NO: 1244155
guaauucccucgguuacca

SEQ ID NO: 1468927 - RNA, 19 nt, Artificial Sequence
  Description of Artificial Sequence: Synthetic oligonucleotide
  Antisense strand to SEQ ID NO: 1468926
ugguaaccgagggaauuac

SEQ ID NO: 1468928 - RNA, 19 nt, Artificial Sequence
  Description of Artificial Sequence: Synthetic oligonucleotide
  Sense strand starting at position 419 of SEQ ID NO: 1244155
ucgagaagguaucugaaag

SEQ ID NO: 1468929 - RNA, 19 nt, Artificial Sequence
  Description of Artificial Sequence: Synthetic oligonucleotide
  Antisense strand to SEQ ID NO: 1468928
cuuucagauaccuucucga

SEQ ID NO: 1468930 - RNA, 19 nt, Artificial Sequence
  Description of Artificial Sequence: Synthetic oligonucleotide
  Sense strand starting at position 475 of SEQ ID NO: 1244155
augcaaauaguuuaagcua

SEQ ID NO: 1468931 - RNA, 19 nt, Artificial Sequence
  Description of Artificial Sequence: Synthetic oligonucleotide
  Antisense strand to SEQ ID NO: 1468930
uagcuuaaacuauuugcau

SEQ ID NO: 1468932 - RNA, 19 nt, Artificial Sequence
  Description of Artificial Sequence: Synthetic oligonucleotide
  Sense strand starting at position 572 of SEQ ID NO: 1244155
gcaaaugugugucuccaua

SEQ ID NO: 1468933 - RNA, 19 nt, Artificial Sequence
  Description of Artificial Sequence: Synthetic oligonucleotide
  Antisense strand to SEQ ID NO: 1468932
uauggagacacacauuugc

SEQ ID NO: 1468934 - RNA, 19 nt, Artificial Sequence
  Description of Artificial Sequence: Synthetic oligonucleotide
  Sense strand starting at position 828 of SEQ ID NO: 1244155
ccaagauuaugcuuaaguu

SEQ ID NO: 1468935 - RNA, 19 nt, Artificial Sequence
  Description of Artificial Sequence: Synthetic oligonucleotide
  Antisense strand to SEQ ID NO: 1468934
aacuuaagcauaaucuugg

SEQ ID NO: 1468936 - RNA, 19 nt, Artificial Sequence
  Description of Artificial Sequence: Synthetic oligonucleotide
  Sense strand starting at position 875 of SEQ ID NO: 1244155
accuauucuugacugaagu

SEQ ID NO: 1468937 - RNA, 19 nt, Artificial Sequence
  Description of Artificial Sequence: Synthetic oligonucleotide
  Antisense strand to SEQ ID NO: 1468936
acuucagucaagaauaggu

SEQ ID NO: 1468938 - RNA, 19 nt, Artificial Sequence
  Description of Artificial Sequence: Synthetic oligonucleotide
  Sense strand starting at position 876 of SEQ ID NO: 1244155
ccuauucuugacugaagua

SEQ ID NO: 1468939 - RNA, 19 nt, Artificial Sequence
  Description of Artificial Sequence: Synthetic oligonucleotide
  Antisense strand to SEQ ID NO: 1468938
uacuucagucaagaauagg

SEQ ID NO: 1468940 - RNA, 19 nt, Artificial Sequence
  Description of Artificial Sequence: Synthetic oligonucleotide
  Sense strand starting at position 1019 of SEQ ID NO: 1244155
guaggauccucguucaagu

SEQ ID NO: 1468941 - RNA, 19 nt, Artificial Sequence
  Description of Artificial Sequence: Synthetic oligonucleotide
  Antisense strand to SEQ ID NO: 1468940
acuugaacgaggauccuac

SEQ ID NO: 1468942 - RNA, 19 nt, Artificial Sequence
  Description of Artificial Sequence: Synthetic oligonucleotide
  Sense strand starting at position 1066 of SEQ ID NO: 1244155
ccaguuacugcuucgcuua

SEQ ID NO: 1468943 - RNA, 19 nt, Artificial Sequence
  Description of Artificial Sequence: Synthetic oligonucleotide
  Antisense strand to SEQ ID NO: 1468942
uaagcgaagcaguaacugg

SEQ ID NO: 1468944 - RNA, 19 nt, Artificial Sequence
  Description of Artificial Sequence: Synthetic oligonucleotide
  Sense strand starting at position 1068 of SEQ ID NO: 1244155
aguuacugcuucgcuuaaa

SEQ ID NO: 1468945 - RNA, 19 nt, Artificial Sequence
  Description of Artificial Sequence: Synthetic oligonucleotide
  Antisense strand to SEQ ID NO: 1468944
uuuaagcgaagcaguaacu

SEQ ID NO: 1468946 - RNA, 19 nt, Artificial Sequence
  Description of Artificial Sequence: Synthetic oligonucleotide
  Sense strand starting at position 1194 of SEQ ID NO: 1244155
guggauguguucuugcuau

SEQ ID NO: 1468947 - RNA, 19 nt, Artificial Sequence
  Description of Artificial Sequence: Synthetic oligonucleotide
  Antisense strand to SEQ ID NO: 1468946
auagcaagaacacauccac

SEQ ID NO: 1468948 - RNA, 19 nt, Artificial Sequence
  Description of Artificial Sequence: Synthetic oligonucleotide
  Sense strand starting at position 1204 of SEQ ID NO: 1244155
ucuugcuaugcguuuguca

SEQ ID NO: 1468949 - RNA, 19 nt, Artificial Sequence
  Description of Artificial Sequence: Synthetic oligonucleotide
  Antisense strand to SEQ ID NO: 1468948
ugacaaacgcauagcaaga

SEQ ID NO: 1468950 - RNA, 19 nt, Artificial Sequence
  Description of Artificial Sequence: Synthetic oligonucleotide
  Sense strand starting at position 1229 of SEQ ID NO: 1244155
cuucgaagacuuggcauca

SEQ ID NO: 1468951 - RNA, 19 nt, Artificial Sequence
  Description of Artificial Sequence: Synthetic oligonucleotide
  Antisense strand to SEQ ID NO: 1468950
ugaugccaagucuucgaag

SEQ ID NO: 1468952 - RNA, 19 nt, Artificial Sequence
  Description of Artificial Sequence: Synthetic oligonucleotide
  Sense strand starting at position 1289 of SEQ ID NO: 1244155
gcgacaguuugacucuuga

SEQ ID NO: 1468953 - RNA, 19 nt, Artificial Sequence
  Description of Artificial Sequence: Synthetic oligonucleotide
  Antisense strand to SEQ ID NO: 1468952
ucaagagucaaacugucgc

SEQ ID NO: 1468954 - RNA, 19 nt, Artificial Sequence
  Description of Artificial Sequence: Synthetic oligonucleotide
  Sense strand starting at position 2055 of SEQ ID NO: 1244155
gcgccauuggcugagcaau

SEQ ID NO: 1468955 - RNA, 19 nt, Artificial Sequence
  Description of Artificial Sequence: Synthetic oligonucleotide
  Antisense strand to SEQ ID NO: 1468954
auugcucagccaauggcgc

SEQ ID NO: 1468956 - RNA, 19 nt, Artificial Sequence
  Description of Artificial Sequence: Synthetic oligonucleotide
  Sense strand starting at position 2068 of SEQ ID NO: 1244155
agcaaugguguccgucaga

SEQ ID NO: 1468957 - RNA, 19 nt, Artificial Sequence
  Description of Artificial Sequence: Synthetic oligonucleotide
  Antisense strand to SEQ ID NO: 1468956
ucugacggacaccauugcu

SEQ ID NO: 1468958 - RNA, 19 nt, Artificial Sequence
  Description of Artificial Sequence: Synthetic oligonucleotide
  Sense strand starting at position 2529 of SEQ ID NO: 1244155
ugagauagagccgguagaa

SEQ ID NO: 1468959 - RNA, 19 nt, Artificial Sequence
  Description of Artificial Sequence: Synthetic oligonucleotide
  Antisense strand to SEQ ID NO: 1468958
uucuaccggcucuaucuca

SEQ ID NO: 1468960 - RNA, 19 nt, Artificial Sequence
  Description of Artificial Sequence: Synthetic oligonucleotide
  Sense strand starting at position 2637 of SEQ ID NO: 1244155
cuuacauaucucggcauau

SEQ ID NO: 1468961 - RNA, 19 nt, Artificial Sequence
  Description of Artificial Sequence: Synthetic oligonucleotide
  Antisense strand to SEQ ID NO: 1468960
auaugccgagauauguaag

SEQ ID NO: 1468962 - RNA, 19 nt, Artificial Sequence
  Description of Artificial Sequence: Synthetic oligonucleotide
  Sense strand starting at position 2638 of SEQ ID NO: 1244155
uuacauaucucggcauauc

SEQ ID NO: 1468963 - RNA, 19 nt, Artificial Sequence
  Description of Artificial Sequence: Synthetic oligonucleotide
  Antisense strand to SEQ ID NO: 1468962
gauaugccgagauauguaa

SEQ ID NO: 1468964 - RNA, 19 nt, Artificial Sequence
  Description of Artificial Sequence: Synthetic oligonucleotide
  Sense strand starting at position 2646 of SEQ ID NO: 1244155
cucggcauaucauuuguau

SEQ ID NO: 1468965 - RNA, 19 nt, Artificial Sequence
  Description of Artificial Sequence: Synthetic oligonucleotide
  Antisense strand to SEQ ID NO: 1468964
auacaaaugauaugccgag

SEQ ID NO: 1468966 - RNA, 19 nt, Artificial Sequence
  Description of Artificial Sequence: Synthetic oligonucleotide
  Sense strand starting at position 2650 of SEQ ID NO: 1244155
gcauaucauuuguauccau

SEQ ID NO: 1468967 - RNA, 19 nt, Artificial Sequence
  Description of Artificial Sequence: Synthetic oligonucleotide
  Antisense strand to SEQ ID NO: 1468966
auggauacaaaugauaugc

SEQ ID NO: 1468968 - RNA, 19 nt, Artificial Sequence
  Description of Artificial Sequence: Synthetic oligonucleotide
  Sense strand starting at position 2855 of SEQ ID NO: 1244155
gaaggugucccagaggcaa

SEQ ID NO: 1468969 - RNA, 19 nt, Artificial Sequence
  Description of Artificial Sequence: Synthetic oligonucleotide
  Antisense strand to SEQ ID NO: 1468968
uugccucugggacaccuuc

SEQ ID NO: 1468970 - RNA, 19 nt, Artificial Sequence
  Description of Artificial Sequence: Synthetic oligonucleotide
  Sense strand starting at position 2926 of SEQ ID NO: 1244155
aggguccucugccuaaaga

SEQ ID NO: 1468971 - RNA, 19 nt, Artificial Sequence
  Description of Artificial Sequence: Synthetic oligonucleotide
  Antisense strand to SEQ ID NO: 1468970
ucuuuaggcagaggacccu

SEQ ID NO: 1468972 - RNA, 19 nt, Artificial Sequence
  Description of Artificial Sequence: Synthetic oligonucleotide
  Sense strand starting at position 2927 of SEQ ID NO: 1244155
ggguccucugccuaaagau

SEQ ID NO: 1468973 - RNA, 19 nt, Artificial Sequence
  Description of Artificial Sequence: Synthetic oligonucleotide
  Antisense strand to SEQ ID NO: 1468972
aucuuuaggcagaggaccc

SEQ ID NO: 1468974 - RNA, 19 nt, Artificial Sequence
  Description of Artificial Sequence: Synthetic oligonucleotide
  Sense strand starting at position 2943 of SEQ ID NO: 1244155
gauagugaucuaugacaug

SEQ ID NO: 1468975 - RNA, 19 nt, Artificial Sequence
  Description of Artificial Sequence: Synthetic oligonucleotide
  Antisense strand to SEQ ID NO: 1468974
caugucauagaucacuauc

SEQ ID NO: 1468976 - RNA, 19 nt, Artificial Sequence
  Description of Artificial Sequence: Synthetic oligonucleotide
  Sense strand starting at position 2966 of SEQ ID NO: 1244155
aggauaaacucccaaagaa

SEQ ID NO: 1468977 - RNA, 19 nt, Artificial Sequence
  Description of Artificial Sequence: Synthetic oligonucleotide
  Antisense strand to SEQ ID NO: 1468976
uucuuugggaguuuauccu

SEQ ID NO: 1468978 - RNA, 19 nt, Artificial Sequence
  Description of Artificial Sequence: Synthetic oligonucleotide
  Sense strand starting at position 3024 of SEQ ID NO: 1244155
aaagaaggucagugaggua

SEQ ID NO: 1468979 - RNA, 19 nt, Artificial Sequence
  Description of Artificial Sequence: Synthetic oligonucleotide
  Antisense strand to SEQ ID NO: 1468978
uaccucacugaccuucuuu

SEQ ID NO: 1468980 - RNA, 19 nt, Artificial Sequence
  Description of Artificial Sequence: Synthetic oligonucleotide
  Sense strand starting at position 3077 of SEQ ID NO: 1244155
ggaggaagggucuguggaa

SEQ ID NO: 1468981 - RNA, 19 nt, Artificial Sequence
  Description of Artificial Sequence: Synthetic oligonucleotide
  Antisense strand to SEQ ID NO: 1468980
uuccacagacccuuccucc

SEQ ID NO: 1468982 - RNA, 19 nt, Artificial Sequence
  Description of Artificial Sequence: Synthetic oligonucleotide
  Sense strand starting at position 3228 of SEQ ID NO: 1244155
cccgaucucuaauagaaau

SEQ ID NO: 1468983 - RNA, 19 nt, Artificial Sequence
  Description of Artificial Sequence: Synthetic oligonucleotide
  Antisense strand to SEQ ID NO: 1468982
auuucuauuagagaucggg

SEQ ID NO: 1468984 - RNA, 19 nt, Artificial Sequence
  Description of Artificial Sequence: Synthetic oligonucleotide
  Sense strand starting at position 3443 of SEQ ID NO: 1244155
cugugagagccucauaggu

SEQ ID NO: 1468985 - RNA, 19 nt, Artificial Sequence
  Description of Artificial Sequence: Synthetic oligonucleotide
  Antisense strand to SEQ ID NO: 1468984
accuaugaggcucucacag

SEQ ID NO: 1468986 - RNA, 19 nt, Artificial Sequence
  Description of Artificial Sequence: Synthetic oligonucleotide
  Sense strand starting at position 3485 of SEQ ID NO: 1244155
ucugguaaccaugggacaa

SEQ ID NO: 1468987 - RNA, 19 nt, Artificial Sequence
  Description of Artificial Sequence: Synthetic oligonucleotide
  Antisense strand to SEQ ID NO: 1468986
uugucccaugguuaccaga

SEQ ID NO: 1468988 - RNA, 19 nt, Artificial Sequence
  Description of Artificial Sequence: Synthetic oligonucleotide
  Sense strand starting at position 3486 of SEQ ID NO: 1244155
cugguaaccaugggacaau

SEQ ID NO: 1468989 - RNA, 19 nt, Artificial Sequence
  Description of Artificial Sequence: Synthetic oligonucleotide
  Antisense strand to SEQ ID NO: 1468988
auugucccaugguuaccag

SEQ ID NO: 1468990 - RNA, 19 nt, Artificial Sequence
  Description of Artificial Sequence: Synthetic oligonucleotide
  Sense strand starting at position 3487 of SEQ ID NO: 1244155
ugguaaccaugggacaaua

SEQ ID NO: 1468991 - RNA, 19 nt, Artificial Sequence
  Description of Artificial Sequence: Synthetic oligonucleotide
  Antisense strand to SEQ ID NO: 1468990
uauugucccaugguuacca

SEQ ID NO: 1468992 - RNA, 19 nt, Artificial Sequence
  Description of Artificial Sequence: Synthetic oligonucleotide
  Sense strand starting at position 3922 of SEQ ID NO: 1244155
guuccuacccuuuagaguu

SEQ ID NO: 1468993 - RNA, 19 nt, Artificial Sequence
  Description of Artificial Sequence: Synthetic oligonucleotide
  Antisense strand to SEQ ID NO: 1468992
aacucuaaaggguaggaac

SEQ ID NO: 1468994 - RNA, 19 nt, Artificial Sequence
  Description of Artificial Sequence: Synthetic oligonucleotide
  Sense strand starting at position 3930 of SEQ ID NO: 1244155
ccuuuagaguuguugugaa

SEQ ID NO: 1468995 - RNA, 19 nt, Artificial Sequence
  Description of Artificial Sequence: Synthetic oligonucleotide
  Antisense strand to SEQ ID NO: 1468994
uucacaacaacucuaaagg

SEQ ID NO: 1468996 - RNA, 19 nt, Artificial Sequence
  Description of Artificial Sequence: Synthetic oligonucleotide
  Sense strand starting at position 3959 of SEQ ID NO: 1244155
gugaauacauaugauggau

SEQ ID NO: 1468997 - RNA, 19 nt, Artificial Sequence
  Description of Artificial Sequence: Synthetic oligonucleotide
  Antisense strand to SEQ ID NO: 1468996
auccaucauauguauucac

SEQ ID NO: 1468998 - RNA, 19 nt, Artificial Sequence
  Description of Artificial Sequence: Synthetic oligonucleotide
  Sense strand starting at position 26 of SEQ ID NO: 1244156
gaagguaguuauuccacau

SEQ ID NO: 1468999 - RNA, 19 nt, Artificial Sequence
  Description of Artificial Sequence: Synthetic oligonucleotide
  Antisense strand to SEQ ID NO: 1468998
auguggaauaacuaccuuc

SEQ ID NO: 1469000 - RNA, 19 nt, Artificial Sequence
  Description of Artificial Sequence: Synthetic oligonucleotide
  Sense strand starting at position 139 of SEQ ID NO: 1244156
auguaacuguuagcaaaga

SEQ ID NO: 1469001 - RNA, 19 nt, Artificial Sequence
  Description of Artificial Sequence: Synthetic oligonucleotide
  Antisense strand to SEQ ID NO: 1469000
ucuuugcuaacaguuacau

SEQ ID NO: 1469002 - RNA, 19 nt, Artificial Sequence
  Description of Artificial Sequence: Synthetic oligonucleotide
  Sense strand starting at position 162 of SEQ ID NO: 1244156
gguccaaaccauugacaau

SEQ ID NO: 1469003 - RNA, 19 nt, Artificial Sequence
  Description of Artificial Sequence: Synthetic oligonucleotide
  Antisense strand to SEQ ID NO: 1469002
auugucaaugguuuggacc

SEQ ID NO: 1469004 - RNA, 19 nt, Artificial Sequence
  Description of Artificial Sequence: Synthetic oligonucleotide
  Sense strand starting at position 175 of SEQ ID NO: 1244156
gacaauguacaugguaaau

SEQ ID NO: 1469005 - RNA, 19 nt, Artificial Sequence
  Description of Artificial Sequence: Synthetic oligonucleotide
  Antisense strand to SEQ ID NO: 1469004
auuuaccauguacauuguc

SEQ ID NO: 1469006 - RNA, 19 nt, Artificial Sequence
  Description of Artificial Sequence: Synthetic oligonucleotide
  Sense strand starting at position 283 of SEQ ID NO: 1244156
ugucuaguaaccuauguag

SEQ ID NO: 1469007 - RNA, 19 nt, Artificial Sequence
  Description of Artificial Sequence: Synthetic oligonucleotide
  Antisense strand to SEQ ID NO: 1469006
cuacauagguuacuagaca

SEQ ID NO: 1469008 - RNA, 19 nt, Artificial Sequence
  Description of Artificial Sequence: Synthetic oligonucleotide
  Sense strand starting at position 285 of SEQ ID NO: 1244156
ucuaguaaccuauguagaa

SEQ ID NO: 1469009 - RNA, 19 nt, Artificial Sequence
  Description of Artificial Sequence: Synthetic oligonucleotide
  Antisense strand to SEQ ID NO: 1469008
uucuacauagguuacuaga

SEQ ID NO: 1469010 - RNA, 19 nt, Artificial Sequence
  Description of Artificial Sequence: Synthetic oligonucleotide
  Sense strand starting at position 286 of SEQ ID NO: 1244156
cuaguaaccuauguagaaa

SEQ ID NO: 1469011 - RNA, 19 nt, Artificial Sequence
  Description of Artificial Sequence: Synthetic oligonucleotide
  Antisense strand to SEQ ID NO: 1469010
uuucuacauagguuacuag

SEQ ID NO: 1469012 - RNA, 19 nt, Artificial Sequence
  Description of Artificial Sequence: Synthetic oligonucleotide
  Sense strand starting at position 308 of SEQ ID NO: 1244156
ccagaaauguacuucguau

SEQ ID NO: 1469013 - RNA, 19 nt, Artificial Sequence
  Description of Artificial Sequence: Synthetic oligonucleotide
  Antisense strand to SEQ ID NO: 1469012
auacgaaguacauuucugg

SEQ ID NO: 1469014 - RNA, 19 nt, Artificial Sequence
  Description of Artificial Sequence: Synthetic oligonucleotide
  Sense strand starting at position 335 of SEQ ID NO: 1244156
auaggaguuuacccaauua

SEQ ID NO: 1469015 - RNA, 19 nt, Artificial Sequence
  Description of Artificial Sequence: Synthetic oligonucleotide
  Antisense strand to SEQ ID NO: 1469014
uaauuggguaaacuccuau

SEQ ID NO: 1469016 - RNA, 19 nt, Artificial Sequence
  Description of Artificial Sequence: Synthetic oligonucleotide
  Sense strand starting at position 559 of SEQ ID NO: 1244156
uuucuaaauuggucagaca

SEQ ID NO: 1469017 - RNA, 19 nt, Artificial Sequence
  Description of Artificial Sequence: Synthetic oligonucleotide
  Antisense strand to SEQ ID NO: 1469016
ugucugaccaauuuagaaa

SEQ ID NO: 1469018 - RNA, 19 nt, Artificial Sequence
  Description of Artificial Sequence: Synthetic oligonucleotide
  Sense strand starting at position 648 of SEQ ID NO: 1244156
uguaaauagugguccuuua

SEQ ID NO: 1469019 - RNA, 19 nt, Artificial Sequence
  Description of Artificial Sequence: Synthetic oligonucleotide
  Antisense strand to SEQ ID NO: 1469018
uaaaggaccacuauuuaca

SEQ ID NO: 1469020 - RNA, 19 nt, Artificial Sequence
  Description of Artificial Sequence: Synthetic oligonucleotide
  Sense strand starting at position 975 of SEQ ID NO: 1244156
uugcuagccacgugacaaa

SEQ ID NO: 1469021 - RNA, 19 nt, Artificial Sequence
  Description of Artificial Sequence: Synthetic oligonucleotide
  Antisense strand to SEQ ID NO: 1469020
uuugucacguggcuagcaa

SEQ ID NO: 1469022 - RNA, 19 nt, Artificial Sequence
  Description of Artificial Sequence: Synthetic oligonucleotide
  Sense strand starting at position 1002 of SEQ ID NO: 1244156
caacaccaggauugugaau

SEQ ID NO: 1469023 - RNA, 19 nt, Artificial Sequence
  Description of Artificial Sequence: Synthetic oligonucleotide
  Antisense strand to SEQ ID NO: 1469022
auucacaauccugguguug

SEQ ID NO: 1469024 - RNA, 19 nt, Artificial Sequence
  Description of Artificial Sequence: Synthetic oligonucleotide
  Sense strand starting at position 1050 of SEQ ID NO: 1244156
agagauuucucggaacuuu

SEQ ID NO: 1469025 - RNA, 19 nt, Artificial Sequence
  Description of Artificial Sequence: Synthetic oligonucleotide
  Antisense strand to SEQ ID NO: 1469024
aaaguuccgagaaaucucu

SEQ ID NO: 1469026 - RNA, 19 nt, Artificial Sequence
  Description of Artificial Sequence: Synthetic oligonucleotide
  Sense strand starting at position 1182 of SEQ ID NO: 1244156
cagugaccuccaggauaaa

SEQ ID NO: 1469027 - RNA, 19 nt, Artificial Sequence
  Description of Artificial Sequence: Synthetic oligonucleotide
  Antisense strand to SEQ ID NO: 1469026
uuuauccuggaggucacug

SEQ ID NO: 1469028 - RNA, 19 nt, Artificial Sequence
  Description of Artificial Sequence: Synthetic oligonucleotide
  Sense strand starting at position 1281 of SEQ ID NO: 1244156
aucaguaagcaauaguuaa

SEQ ID NO: 1469029 - RNA, 19 nt, Artificial Sequence
  Description of Artificial Sequence: Synthetic oligonucleotide
  Antisense strand to SEQ ID NO: 1469028
uuaacuauugcuuacugau

SEQ ID NO: 1469030 - RNA, 19 nt, Artificial Sequence
  Description of Artificial Sequence: Synthetic oligonucleotide
  Sense strand starting at position 1368 of SEQ ID NO: 1244156
acgggaguagcgcuguuua

SEQ ID NO: 1469031 - RNA, 19 nt, Artificial Sequence
  Description of Artificial Sequence: Synthetic oligonucleotide
  Antisense strand to SEQ ID NO: 1469030
uaaacagcgcuacucccgu

SEQ ID NO: 1469032 - RNA, 19 nt, Artificial Sequence
  Description of Artificial Sequence: Synthetic oligonucleotide
  Sense strand starting at position 1550 of SEQ ID NO: 1244156
aaacguaagugaccugaau

SEQ ID NO: 1469033 - RNA, 19 nt, Artificial Sequence
  Description of Artificial Sequence: Synthetic oligonucleotide
  Antisense strand to SEQ ID NO: 1469032
auucaggucacuuacguuu

SEQ ID NO: 1469034 - RNA, 19 nt, Artificial Sequence
  Description of Artificial Sequence: Synthetic oligonucleotide
  Sense strand starting at position 1637 of SEQ ID NO: 1244156
guguguuucgagcagagaa

SEQ ID NO: 1469035 - RNA, 19 nt, Artificial Sequence
  Description of Artificial Sequence: Synthetic oligonucleotide
  Antisense strand to SEQ ID NO: 1469034
uucucugcucgaaacacac

SEQ ID NO: 1469036 - RNA, 19 nt, Artificial Sequence
  Description of Artificial Sequence: Synthetic oligonucleotide
  Sense strand starting at position 1639 of SEQ ID NO: 1244156
guguuucgagcagagaaag

SEQ ID NO: 1469037 - RNA, 19 nt, Artificial Sequence
  Description of Artificial Sequence: Synthetic oligonucleotide
  Antisense strand to SEQ ID NO: 1469036
cuuucucugcucgaaacac

SEQ ID NO: 1469038 - RNA, 19 nt, Artificial Sequence
  Description of Artificial Sequence: Synthetic oligonucleotide
  Sense strand starting at position 1672 of SEQ ID NO: 1244156
agagaaguucaaggcgaga

SEQ ID NO: 1469039 - RNA, 19 nt, Artificial Sequence
  Description of Artificial Sequence: Synthetic oligonucleotide
  Antisense strand to SEQ ID NO: 1469038
ucucgccuugaacuucucu

SEQ ID NO: 1469040 - RNA, 19 nt, Artificial Sequence
  Description of Artificial Sequence: Synthetic oligonucleotide
  Sense strand starting at position 2494 of SEQ ID NO: 1244156
agacgagucggcuucgcua

SEQ ID NO: 1469041 - RNA, 19 nt, Artificial Sequence
  Description of Artificial Sequence: Synthetic oligonucleotide
  Antisense strand to SEQ ID NO: 1469040
uagcgaagccgacucgucu

SEQ ID NO: 1469042 - RNA, 19 nt, Artificial Sequence
  Description of Artificial Sequence: Synthetic oligonucleotide
  Sense strand starting at position 2939 of SEQ ID NO: 1244156
gugagucuaaccugaggca

SEQ ID NO: 1469043 - RNA, 19 nt, Artificial Sequence
  Description of Artificial Sequence: Synthetic oligonucleotide
  Antisense strand to SEQ ID NO: 1469042
ugccucagguuagacucac

SEQ ID NO: 1469044 - RNA, 19 nt, Artificial Sequence
  Description of Artificial Sequence: Synthetic oligonucleotide
  Sense strand starting at position 3063 of SEQ ID NO: 1244156
guuugcacuguguaguaaa

SEQ ID NO: 1469045 - RNA, 19 nt, Artificial Sequence
  Description of Artificial Sequence: Synthetic oligonucleotide
  Antisense strand to SEQ ID NO: 1469044
uuuacuacacagugcaaac

SEQ ID NO: 1469046 - RNA, 19 nt, Artificial Sequence
  Description of Artificial Sequence: Synthetic oligonucleotide
  Sense strand starting at position 3125 of SEQ ID NO: 1244156
gcagaaagcucccugacca

SEQ ID NO: 1469047 - RNA, 19 nt, Artificial Sequence
  Description of Artificial Sequence: Synthetic oligonucleotide
  Antisense strand to SEQ ID NO: 1469046
uggucagggagcuuucugc

SEQ ID NO: 1469048 - RNA, 19 nt, Artificial Sequence
  Description of Artificial Sequence: Synthetic oligonucleotide
  Sense strand starting at position 3450 of SEQ ID NO: 1244156
ggcaaauggcauuacacaa

SEQ ID NO: 1469049 - RNA, 19 nt, Artificial Sequence
  Description of Artificial Sequence: Synthetic oligonucleotide
  Antisense strand to SEQ ID NO: 1469048
uuguguaaugccauuugcc

SEQ ID NO: 1469050 - RNA, 19 nt, Artificial Sequence
  Description of Artificial Sequence: Synthetic oligonucleotide
  Sense strand starting at position 3457 of SEQ ID NO: 1244156
ggcauuacacaaugaguau

SEQ ID NO: 1469051 - RNA, 19 nt, Artificial Sequence
  Description of Artificial Sequence: Synthetic oligonucleotide
  Antisense strand to SEQ ID NO: 1469050
auacucauuguguaaugcc

SEQ ID NO: 1469052 - RNA, 19 nt, Artificial Sequence
  Description of Artificial Sequence: Synthetic oligonucleotide
  Sense strand starting at position 3584 of SEQ ID NO: 1244156
cguuaccagaguugguuua

SEQ ID NO: 1469053 - RNA, 19 nt, Artificial Sequence
  Description of Artificial Sequence: Synthetic oligonucleotide
  Antisense strand to SEQ ID NO: 1469052
uaaaccaacucugguaacg

SEQ ID NO: 1469054 - RNA, 19 nt, Artificial Sequence
  Description of Artificial Sequence: Synthetic oligonucleotide
  Sense strand starting at position 3585 of SEQ ID NO: 1244156
guuaccagaguugguuuaa

SEQ ID NO: 1469055 - RNA, 19 nt, Artificial Sequence
  Description of Artificial Sequence: Synthetic oligonucleotide
  Antisense strand to SEQ ID NO: 1469054
uuaaaccaacucugguaac

SEQ ID NO: 1469056 - RNA, 19 nt, Artificial Sequence
  Description of Artificial Sequence: Synthetic oligonucleotide
  Sense strand starting at position 3586 of SEQ ID NO: 1244156
uuaccagaguugguuuaaa

SEQ ID NO: 1469057 - RNA, 19 nt, Artificial Sequence
  Description of Artificial Sequence: Synthetic oligonucleotide
  Antisense strand to SEQ ID NO: 1469056
uuuaaaccaacucugguaa

SEQ ID NO: 1469058 - RNA, 19 nt, Artificial Sequence
  Description of Artificial Sequence: Synthetic oligonucleotide
  Sense strand starting at position 3626 of SEQ ID NO: 1244156
ucaugaccaguuuaucagu

SEQ ID NO: 1469059 - RNA, 19 nt, Artificial Sequence
  Description of Artificial Sequence: Synthetic oligonucleotide
  Antisense strand to SEQ ID NO: 1469058
acugauaaacuggucauga

SEQ ID NO: 1469060 - RNA, 19 nt, Artificial Sequence
  Description of Artificial Sequence: Synthetic oligonucleotide
  Sense strand starting at position 3631 of SEQ ID NO: 1244156
accaguuuaucaguacaga

SEQ ID NO: 1469061 - RNA, 19 nt, Artificial Sequence
  Description of Artificial Sequence: Synthetic oligonucleotide
  Antisense strand to SEQ ID NO: 1469060
ucuguacugauaaacuggu

SEQ ID NO: 1469062 - RNA, 19 nt, Artificial Sequence
  Description of Artificial Sequence: Synthetic oligonucleotide
  Sense strand starting at position 3632 of SEQ ID NO: 1244156
ccaguuuaucaguacagaa

SEQ ID NO: 1469063 - RNA, 19 nt, Artificial Sequence
  Description of Artificial Sequence: Synthetic oligonucleotide
  Antisense strand to SEQ ID NO: 1469062
uucuguacugauaaacugg

SEQ ID NO: 1469064 - RNA, 19 nt, Artificial Sequence
  Description of Artificial Sequence: Synthetic oligonucleotide
  Sense strand starting at position 3634 of SEQ ID NO: 1244156
aguuuaucaguacagaacu

SEQ ID NO: 1469065 - RNA, 19 nt, Artificial Sequence
  Description of Artificial Sequence: Synthetic oligonucleotide
  Antisense strand to SEQ ID NO: 1469064
aguucuguacugauaaacu

SEQ ID NO: 1469066 - RNA, 19 nt, Artificial Sequence
  Description of Artificial Sequence: Synthetic oligonucleotide
  Sense strand starting at position 3788 of SEQ ID NO: 1244156
ggaguaucuugagauuuaa

SEQ ID NO: 1469067 - RNA, 19 nt, Artificial Sequence
  Description of Artificial Sequence: Synthetic oligonucleotide
  Antisense strand to SEQ ID NO: 1469066
uuaaaucucaagauacucc

SEQ ID NO: 1469068 - RNA, 19 nt, Artificial Sequence
  Description of Artificial Sequence: Synthetic oligonucleotide
  Sense strand starting at position 3833 of SEQ ID NO: 1244156
uggcuuaaaugacugaaga

SEQ ID NO: 1469069 - RNA, 19 nt, Artificial Sequence
  Description of Artificial Sequence: Synthetic oligonucleotide
  Antisense strand to SEQ ID NO: 1469068
ucuucagucauuuaagcca

SEQ ID NO: 1469070 - RNA, 19 nt, Artificial Sequence
  Description of Artificial Sequence: Synthetic oligonucleotide
  Sense strand starting at position 3874 of SEQ ID NO: 1244156
ucaucaaauucggcagaua

SEQ ID NO: 1469071 - RNA, 19 nt, Artificial Sequence
  Description of Artificial Sequence: Synthetic oligonucleotide
  Antisense strand to SEQ ID NO: 1469070
uaucugccgaauuugauga

SEQ ID NO: 1469072 - RNA, 19 nt, Artificial Sequence
  Description of Artificial Sequence: Synthetic oligonucleotide
  Sense strand starting at position 3897 of SEQ ID NO: 1244156
ggguauguaugcucuacua

SEQ ID NO: 1469073 - RNA, 19 nt, Artificial Sequence
  Description of Artificial Sequence: Synthetic oligonucleotide
  Antisense strand to SEQ ID NO: 1469072
uaguagagcauacauaccc

SEQ ID NO: 1469074 - RNA, 19 nt, Artificial Sequence
  Description of Artificial Sequence: Synthetic oligonucleotide
  Sense strand starting at position 3965 of SEQ ID NO: 1244156
accaauauccggcauuaua

SEQ ID NO: 1469075 - RNA, 19 nt, Artificial Sequence
  Description of Artificial Sequence: Synthetic oligonucleotide
  Antisense strand to SEQ ID NO: 1469074
uauaaugccggauauuggu

SEQ ID NO: 1469076 - RNA, 19 nt, Artificial Sequence
  Description of Artificial Sequence: Synthetic oligonucleotide
  Sense strand starting at position 3975 of SEQ ID NO: 1244156
ggcauuauacgucacuucu

SEQ ID NO: 1469077 - RNA, 19 nt, Artificial Sequence
  Description of Artificial Sequence: Synthetic oligonucleotide
  Antisense strand to SEQ ID NO: 1469076
agaagugacguauaaugcc

SEQ ID NO: 1469078 - RNA, 19 nt, Artificial Sequence
  Description of Artificial Sequence: Synthetic oligonucleotide
  Sense strand starting at position 33 of SEQ ID NO: 1244157
auguaacuguuagcaaaga

SEQ ID NO: 1469079 - RNA, 19 nt, Artificial Sequence
  Description of Artificial Sequence: Synthetic oligonucleotide
  Antisense strand to SEQ ID NO: 1469078
ucuuugcuaacaguuacau

SEQ ID NO: 1469080 - RNA, 19 nt, Artificial Sequence
  Description of Artificial Sequence: Synthetic oligonucleotide
  Sense strand starting at position 56 of SEQ ID NO: 1244157
gguccaaaccauugacaau

SEQ ID NO: 1469081 - RNA, 19 nt, Artificial Sequence
  Description of Artificial Sequence: Synthetic oligonucleotide
  Antisense strand to SEQ ID NO: 1469080
auugucaaugguuuggacc

SEQ ID NO: 1469082 - RNA, 19 nt, Artificial Sequence
  Description of Artificial Sequence: Synthetic oligonucleotide
  Sense strand starting at position 69 of SEQ ID NO: 1244157
gacaauguacaugguaaau

SEQ ID NO: 1469083 - RNA, 19 nt, Artificial Sequence
  Description of Artificial Sequence: Synthetic oligonucleotide
  Antisense strand to SEQ ID NO: 1469082
auuuaccauguacauuguc

SEQ ID NO: 1469084 - RNA, 19 nt, Artificial Sequence
  Description of Artificial Sequence: Synthetic oligonucleotide
  Sense strand starting at position 177 of SEQ ID NO: 1244157
ugucuaguaaccuauguag

SEQ ID NO: 1469085 - RNA, 19 nt, Artificial Sequence
  Description of Artificial Sequence: Synthetic oligonucleotide
  Antisense strand to SEQ ID NO: 1469084
cuacauagguuacuagaca

SEQ ID NO: 1469086 - RNA, 19 nt, Artificial Sequence
  Description of Artificial Sequence: Synthetic oligonucleotide
  Sense strand starting at position 179 of SEQ ID NO: 1244157
ucuaguaaccuauguagaa

SEQ ID NO: 1469087 - RNA, 19 nt, Artificial Sequence
  Description of Artificial Sequence: Synthetic oligonucleotide
  Antisense strand to SEQ ID NO: 1469086
uucuacauagguuacuaga

SEQ ID NO: 1469088 - RNA, 19 nt, Artificial Sequence
  Description of Artificial Sequence: Synthetic oligonucleotide
  Sense strand starting at position 180 of SEQ ID NO: 1244157
cuaguaaccuauguagaaa

SEQ ID NO: 1469089 - RNA, 19 nt, Artificial Sequence
  Description of Artificial Sequence: Synthetic oligonucleotide
  Antisense strand to SEQ ID NO: 1469088
uuucuacauagguuacuag

SEQ ID NO: 1469090 - RNA, 19 nt, Artificial Sequence
  Description of Artificial Sequence: Synthetic oligonucleotide
  Sense strand starting at position 202 of SEQ ID NO: 1244157
ccagaaauguacuucguau

SEQ ID NO: 1469091 - RNA, 19 nt, Artificial Sequence
  Description of Artificial Sequence: Synthetic oligonucleotide
  Antisense strand to SEQ ID NO: 1469090
auacgaaguacauuucugg

SEQ ID NO: 1469092 - RNA, 19 nt, Artificial Sequence
  Description of Artificial Sequence: Synthetic oligonucleotide
  Sense strand starting at position 229 of SEQ ID NO: 1244157
auaggaguuuacccaauua

SEQ ID NO: 1469093 - RNA, 19 nt, Artificial Sequence
  Description of Artificial Sequence: Synthetic oligonucleotide
  Antisense strand to SEQ ID NO: 1469092
uaauuggguaaacuccuau

SEQ ID NO: 1469094 - RNA, 19 nt, Artificial Sequence
  Description of Artificial Sequence: Synthetic oligonucleotide
  Sense strand starting at position 453 of SEQ ID NO: 1244157
uuucuaaauuggucagaca

SEQ ID NO: 1469095 - RNA, 19 nt, Artificial Sequence
  Description of Artificial Sequence: Synthetic oligonucleotide
  Antisense strand to SEQ ID NO: 1469094
ugucugaccaauuuagaaa

SEQ ID NO: 1469096 - RNA, 19 nt, Artificial Sequence
  Description of Artificial Sequence: Synthetic oligonucleotide
  Sense strand starting at position 542 of SEQ ID NO: 1244157
uguaaauagugguccuuua

SEQ ID NO: 1469097 - RNA, 19 nt, Artificial Sequence
  Description of Artificial Sequence: Synthetic oligonucleotide
  Antisense strand to SEQ ID NO: 1469096
uaaaggaccacuauuuaca

SEQ ID NO: 1469098 - RNA, 19 nt, Artificial Sequence
  Description of Artificial Sequence: Synthetic oligonucleotide
  Sense strand starting at position 896 of SEQ ID NO: 1244157
caacaccaggauugugaau

SEQ ID NO: 1469099 - RNA, 19 nt, Artificial Sequence
  Description of Artificial Sequence: Synthetic oligonucleotide
  Antisense strand to SEQ ID NO: 1469098
auucacaauccugguguug

SEQ ID NO: 1469100 - RNA, 19 nt, Artificial Sequence
  Description of Artificial Sequence: Synthetic oligonucleotide
  Sense strand starting at position 944 of SEQ ID NO: 1244157
agagauuucucggaacuuu

SEQ ID NO: 1469101 - RNA, 19 nt, Artificial Sequence
  Description of Artificial Sequence: Synthetic oligonucleotide
  Antisense strand to SEQ ID NO: 1469100
aaaguuccgagaaaucucu

SEQ ID NO: 1469102 - RNA, 19 nt, Artificial Sequence
  Description of Artificial Sequence: Synthetic oligonucleotide
  Sense strand starting at position 1076 of SEQ ID NO: 1244157
cagugaccuccaggauaaa

SEQ ID NO: 1469103 - RNA, 19 nt, Artificial Sequence
  Description of Artificial Sequence: Synthetic oligonucleotide
  Antisense strand to SEQ ID NO: 1469102
uuuauccuggaggucacug

SEQ ID NO: 1469104 - RNA, 19 nt, Artificial Sequence
  Description of Artificial Sequence: Synthetic oligonucleotide
  Sense strand starting at position 1175 of SEQ ID NO: 1244157
aucaguaagcaauaguuaa

SEQ ID NO: 1469105 - RNA, 19 nt, Artificial Sequence
  Description of Artificial Sequence: Synthetic oligonucleotide
  Antisense strand to SEQ ID NO: 1469104
uuaacuauugcuuacugau

SEQ ID NO: 1469106 - RNA, 19 nt, Artificial Sequence
  Description of Artificial Sequence: Synthetic oligonucleotide
  Sense strand starting at position 1262 of SEQ ID NO: 1244157
acgggaguagcgcuguuua

SEQ ID NO: 1469107 - RNA, 19 nt, Artificial Sequence
  Description of Artificial Sequence: Synthetic oligonucleotide
  Antisense strand to SEQ ID NO: 1469106
uaaacagcgcuacucccgu

SEQ ID NO: 1469108 - RNA, 19 nt, Artificial Sequence
  Description of Artificial Sequence: Synthetic oligonucleotide
  Sense strand starting at position 1444 of SEQ ID NO: 1244157
aaacguaagugaccugaau

SEQ ID NO: 1469109 - RNA, 19 nt, Artificial Sequence
  Description of Artificial Sequence: Synthetic oligonucleotide
  Antisense strand to SEQ ID NO: 1469108
auucaggucacuuacguuu

SEQ ID NO: 1469110 - RNA, 19 nt, Artificial Sequence
  Description of Artificial Sequence: Synthetic oligonucleotide
  Sense strand starting at position 1531 of SEQ ID NO: 1244157
guguguuucgagcagagaa

SEQ ID NO: 1469111 - RNA, 19 nt, Artificial Sequence
  Description of Artificial Sequence: Synthetic oligonucleotide
  Antisense strand to SEQ ID NO: 1469110
uucucugcucgaaacacac

SEQ ID NO: 1469112 - RNA, 19 nt, Artificial Sequence
  Description of Artificial Sequence: Synthetic oligonucleotide
  Sense strand starting at position 1533 of SEQ ID NO: 1244157
guguuucgagcagagaaag

SEQ ID NO: 1469113 - RNA, 19 nt, Artificial Sequence
  Description of Artificial Sequence: Synthetic oligonucleotide
  Antisense strand to SEQ ID NO: 1469112
cuuucucugcucgaaacac

SEQ ID NO: 1469114 - RNA, 19 nt, Artificial Sequence
  Description of Artificial Sequence: Synthetic oligonucleotide
  Sense strand starting at position 1566 of SEQ ID NO: 1244157
agagaaguucaaggcgaga

SEQ ID NO: 1469115 - RNA, 19 nt, Artificial Sequence
  Description of Artificial Sequence: Synthetic oligonucleotide
  Antisense strand to SEQ ID NO: 1469114
ucucgccuugaacuucucu

SEQ ID NO: 1469116 - RNA, 19 nt, Artificial Sequence
  Description of Artificial Sequence: Synthetic oligonucleotide
  Sense strand starting at position 2388 of SEQ ID NO: 1244157
agacgagucggcuucgcua

SEQ ID NO: 1469117 - RNA, 19 nt, Artificial Sequence
  Description of Artificial Sequence: Synthetic oligonucleotide
  Antisense strand to SEQ ID NO: 1469116
uagcgaagccgacucgucu

SEQ ID NO: 1469118 - RNA, 19 nt, Artificial Sequence
  Description of Artificial Sequence: Synthetic oligonucleotide
  Sense strand starting at position 2833 of SEQ ID NO: 1244157
gugagucuaaccugaggca

SEQ ID NO: 1469119 - RNA, 19 nt, Artificial Sequence
  Description of Artificial Sequence: Synthetic oligonucleotide
  Antisense strand to SEQ ID NO: 1469118
ugccucagguuagacucac

SEQ ID NO: 1469120 - RNA, 19 nt, Artificial Sequence
  Description of Artificial Sequence: Synthetic oligonucleotide
  Sense strand starting at position 2957 of SEQ ID NO: 1244157
guuugcacuguguaguaaa

SEQ ID NO: 1469121 - RNA, 19 nt, Artificial Sequence
  Description of Artificial Sequence: Synthetic oligonucleotide
  Antisense strand to SEQ ID NO: 1469120
uuuacuacacagugcaaac

SEQ ID NO: 1469122 - RNA, 19 nt, Artificial Sequence
  Description of Artificial Sequence: Synthetic oligonucleotide
  Sense strand starting at position 3019 of SEQ ID NO: 1244157
gcagaaagcucccugacca

SEQ ID NO: 1469123 - RNA, 19 nt, Artificial Sequence
  Description of Artificial Sequence: Synthetic oligonucleotide
  Antisense strand to SEQ ID NO: 1469122
uggucagggagcuuucugc

SEQ ID NO: 1469124 - RNA, 19 nt, Artificial Sequence
  Description of Artificial Sequence: Synthetic oligonucleotide
  Sense strand starting at position 3344 of SEQ ID NO: 1244157
ggcaaauggcauuacacaa

SEQ ID NO: 1469125 - RNA, 19 nt, Artificial Sequence
  Description of Artificial Sequence: Synthetic oligonucleotide
  Antisense strand to SEQ ID NO: 1469124
uuguguaaugccauuugcc

SEQ ID NO: 1469126 - RNA, 19 nt, Artificial Sequence
  Description of Artificial Sequence: Synthetic oligonucleotide
  Sense strand starting at position 3351 of SEQ ID NO: 1244157
ggcauuacacaaugaguau

SEQ ID NO: 1469127 - RNA, 19 nt, Artificial Sequence
  Description of Artificial Sequence: Synthetic oligonucleotide
  Antisense strand to SEQ ID NO: 1469126
auacucauuguguaaugcc

SEQ ID NO: 1469128 - RNA, 19 nt, Artificial Sequence
  Description of Artificial Sequence: Synthetic oligonucleotide
  Sense strand starting at position 3479 of SEQ ID NO: 1244157
guuaccagaguugguuuaa

SEQ ID NO: 1469129 - RNA, 19 nt, Artificial Sequence
  Description of Artificial Sequence: Synthetic oligonucleotide
  Antisense strand to SEQ ID NO: 1469128
uuaaaccaacucugguaac

SEQ ID NO: 1469130 - RNA, 19 nt, Artificial Sequence
  Description of Artificial Sequence: Synthetic oligonucleotide
  Sense strand starting at position 3480 of SEQ ID NO: 1244157
uuaccagaguugguuuaaa

SEQ ID NO: 1469131 - RNA, 19 nt, Artificial Sequence
  Description of Artificial Sequence: Synthetic oligonucleotide
  Antisense strand to SEQ ID NO: 1469130
uuuaaaccaacucugguaa

SEQ ID NO: 1469132 - RNA, 19 nt, Artificial Sequence
  Description of Artificial Sequence: Synthetic oligonucleotide
  Sense strand starting at position 3520 of SEQ ID NO: 1244157
ucaugaccaguuuaucagu

SEQ ID NO: 1469133 - RNA, 19 nt, Artificial Sequence
  Description of Artificial Sequence: Synthetic oligonucleotide
  Antisense strand to SEQ ID NO: 1469132
acugauaaacuggucauga

SEQ ID NO: 1469134 - RNA, 19 nt, Artificial Sequence
  Description of Artificial Sequence: Synthetic oligonucleotide
  Sense strand starting at position 3525 of SEQ ID NO: 1244157
accaguuuaucaguacaga

SEQ ID NO: 1469135 - RNA, 19 nt, Artificial Sequence
  Description of Artificial Sequence: Synthetic oligonucleotide
  Antisense strand to SEQ ID NO: 1469134
ucuguacugauaaacuggu

SEQ ID NO: 1469136 - RNA, 19 nt, Artificial Sequence
  Description of Artificial Sequence: Synthetic oligonucleotide
  Sense strand starting at position 3526 of SEQ ID NO: 1244157
ccaguuuaucaguacagaa

SEQ ID NO: 1469137 - RNA, 19 nt, Artificial Sequence
  Description of Artificial Sequence: Synthetic oligonucleotide
  Antisense strand to SEQ ID NO: 1469136
uucuguacugauaaacugg

SEQ ID NO: 1469138 - RNA, 19 nt, Artificial Sequence
  Description of Artificial Sequence: Synthetic oligonucleotide
  Sense strand starting at position 3528 of SEQ ID NO: 1244157
aguuuaucaguacagaacu

SEQ ID NO: 1469139 - RNA, 19 nt, Artificial Sequence
  Description of Artificial Sequence: Synthetic oligonucleotide
  Antisense strand to SEQ ID NO: 1469138
aguucuguacugauaaacu

SEQ ID NO: 1469140 - RNA, 19 nt, Artificial Sequence
  Description of Artificial Sequence: Synthetic oligonucleotide
  Sense strand starting at position 3682 of SEQ ID NO: 1244157
ggaguaucuugagauuuaa

SEQ ID NO: 1469141 - RNA, 19 nt, Artificial Sequence
  Description of Artificial Sequence: Synthetic oligonucleotide
  Antisense strand to SEQ ID NO: 1469140
uuaaaucucaagauacucc

SEQ ID NO: 1469142 - RNA, 19 nt, Artificial Sequence
  Description of Artificial Sequence: Synthetic oligonucleotide
  Sense strand starting at position 3727 of SEQ ID NO: 1244157
uggcuuaaaugacugaaga

SEQ ID NO: 1469143 - RNA, 19 nt, Artificial Sequence
  Description of Artificial Sequence: Synthetic oligonucleotide
  Antisense strand to SEQ ID NO: 1469142
ucuucagucauuuaagcca

SEQ ID NO: 1469144 - RNA, 19 nt, Artificial Sequence
  Description of Artificial Sequence: Synthetic oligonucleotide
  Sense strand starting at position 3768 of SEQ ID NO: 1244157
ucaucaaauucggcagaua

SEQ ID NO: 1469145 - RNA, 19 nt, Artificial Sequence
  Description of Artificial Sequence: Synthetic oligonucleotide
  Antisense strand to SEQ ID NO: 1469144
uaucugccgaauuugauga

SEQ ID NO: 1469146 - RNA, 19 nt, Artificial Sequence
  Description of Artificial Sequence: Synthetic oligonucleotide
  Sense strand starting at position 3791 of SEQ ID NO: 1244157
ggguauguaugcucuacua

SEQ ID NO: 1469147 - RNA, 19 nt, Artificial Sequence
  Description of Artificial Sequence: Synthetic oligonucleotide
  Antisense strand to SEQ ID NO: 1469146
uaguagagcauacauaccc

SEQ ID NO: 1469148 - RNA, 19 nt, Artificial Sequence
  Description of Artificial Sequence: Synthetic oligonucleotide
  Sense strand starting at position 3859 of SEQ ID NO: 1244157
accaauauccggcauuaua

SEQ ID NO: 1469149 - RNA, 19 nt, Artificial Sequence
  Description of Artificial Sequence: Synthetic oligonucleotide
  Antisense strand to SEQ ID NO: 1469148
uauaaugccggauauuggu

SEQ ID NO: 1469150 - RNA, 19 nt, Artificial Sequence
  Description of Artificial Sequence: Synthetic oligonucleotide
  Sense strand starting at position 3869 of SEQ ID NO: 1244157
ggcauuauacgucacuucu

SEQ ID NO: 1469151 - RNA, 19 nt, Artificial Sequence
  Description of Artificial Sequence: Synthetic oligonucleotide
  Antisense strand to SEQ ID NO: 1469150
agaagugacguauaaugcc

SEQ ID NO: 1469152 - RNA, 19 nt, Artificial Sequence
  Description of Artificial Sequence: Synthetic oligonucleotide
  Sense strand starting at position 3903 of SEQ ID NO: 1244157
cccucacagucguuacaga

SEQ ID NO: 1469153 - RNA, 19 nt, Artificial Sequence
  Description of Artificial Sequence: Synthetic oligonucleotide
  Antisense strand to SEQ ID NO: 1469152
ucuguaacgacugugaggg

SEQ ID NO: 1469154 - RNA, 19 nt, Artificial Sequence
  Description of Artificial Sequence: Synthetic oligonucleotide
  Sense strand starting at position 3904 of SEQ ID NO: 1244157
ccucacagucguuacagaa

SEQ ID NO: 1469155 - RNA, 19 nt, Artificial Sequence
  Description of Artificial Sequence: Synthetic oligonucleotide
  Antisense strand to SEQ ID NO: 1469154
uucuguaacgacugugagg

SEQ ID NO: 1469156 - RNA, 19 nt, Artificial Sequence
  Description of Artificial Sequence: Synthetic oligonucleotide
  Sense strand starting at position 3928 of SEQ ID NO: 1244157
uuagucuucccacaaaguu

SEQ ID NO: 1469157 - RNA, 19 nt, Artificial Sequence
  Description of Artificial Sequence: Synthetic oligonucleotide
  Antisense strand to SEQ ID NO: 1469156
aacuuugugggaagacuaa

SEQ ID NO: 1469158 - RNA, 19 nt, Artificial Sequence
  Description of Artificial Sequence: Synthetic oligonucleotide
  Sense strand starting at position 5 of SEQ ID NO: 1244158
agacaugagugguuucgua

SEQ ID NO: 1469159 - RNA, 19 nt, Artificial Sequence
  Description of Artificial Sequence: Synthetic oligonucleotide
  Antisense strand to SEQ ID NO: 1469158
uacgaaaccacucaugucu

SEQ ID NO: 1469160 - RNA, 19 nt, Artificial Sequence
  Description of Artificial Sequence: Synthetic oligonucleotide
  Sense strand starting at position 167 of SEQ ID NO: 1244158
gccuaccugguguaauuga

SEQ ID NO: 1469161 - RNA, 19 nt, Artificial Sequence
  Description of Artificial Sequence: Synthetic oligonucleotide
  Antisense strand to SEQ ID NO: 1469160
ucaauuacaccagguaggc

SEQ ID NO: 1469162 - RNA, 19 nt, Artificial Sequence
  Description of Artificial Sequence: Synthetic oligonucleotide
  Sense strand starting at position 174 of SEQ ID NO: 1244158
ugguguaauugaccuugua

SEQ ID NO: 1469163 - RNA, 19 nt, Artificial Sequence
  Description of Artificial Sequence: Synthetic oligonucleotide
  Antisense strand to SEQ ID NO: 1469162
uacaaggucaauuacacca

SEQ ID NO: 1469164 - RNA, 19 nt, Artificial Sequence
  Description of Artificial Sequence: Synthetic oligonucleotide
  Sense strand starting at position 177 of SEQ ID NO: 1244158
uguaauugaccuuguaggu

SEQ ID NO: 1469165 - RNA, 19 nt, Artificial Sequence
  Description of Artificial Sequence: Synthetic oligonucleotide
  Antisense strand to SEQ ID NO: 1469164
accuacaaggucaauuaca

SEQ ID NO: 1469166 - RNA, 19 nt, Artificial Sequence
  Description of Artificial Sequence: Synthetic oligonucleotide
  Sense strand starting at position 209 of SEQ ID NO: 1244158
gccugagaccucugccgaa

SEQ ID NO: 1469167 - RNA, 19 nt, Artificial Sequence
  Description of Artificial Sequence: Synthetic oligonucleotide
  Antisense strand to SEQ ID NO: 1469166
uucggcagaggucucaggc

SEQ ID NO: 1469168 - RNA, 19 nt, Artificial Sequence
  Description of Artificial Sequence: Synthetic oligonucleotide
  Sense strand starting at position 239 of SEQ ID NO: 1244158
gucucaagcuuccaguagu

SEQ ID NO: 1469169 - RNA, 19 nt, Artificial Sequence
  Description of Artificial Sequence: Synthetic oligonucleotide
  Antisense strand to SEQ ID NO: 1469168
acuacuggaagcuugagac

SEQ ID NO: 1469170 - RNA, 19 nt, Artificial Sequence
  Description of Artificial Sequence: Synthetic oligonucleotide
  Sense strand starting at position 242 of SEQ ID NO: 1244158
ucaagcuuccaguaguuaa

SEQ ID NO: 1469171 - RNA, 19 nt, Artificial Sequence
  Description of Artificial Sequence: Synthetic oligonucleotide
  Antisense strand to SEQ ID NO: 1469170
uuaacuacuggaagcuuga

SEQ ID NO: 1469172 - RNA, 19 nt, Artificial Sequence
  Description of Artificial Sequence: Synthetic oligonucleotide
  Sense strand starting at position 267 of SEQ ID NO: 1244158
gcaagaacaucuuugagag

SEQ ID NO: 1469173 - RNA, 19 nt, Artificial Sequence
  Description of Artificial Sequence: Synthetic oligonucleotide
  Antisense strand to SEQ ID NO: 1469172
cucucaaagauguucuugc

SEQ ID NO: 1469174 - RNA, 19 nt, Artificial Sequence
  Description of Artificial Sequence: Synthetic oligonucleotide
  Sense strand starting at position 277 of SEQ ID NO: 1244158
cuuugagagcucgaacauc

SEQ ID NO: 1469175 - RNA, 19 nt, Artificial Sequence
  Description of Artificial Sequence: Synthetic oligonucleotide
  Antisense strand to SEQ ID NO: 1469174
gauguucgagcucucaaag

SEQ ID NO: 1469176 - RNA, 19 nt, Artificial Sequence
  Description of Artificial Sequence: Synthetic oligonucleotide
  Sense strand starting at position 312 of SEQ ID NO: 1244158
gagccaggugacuaaacuu

SEQ ID NO: 1469177 - RNA, 19 nt, Artificial Sequence
  Description of Artificial Sequence: Synthetic oligonucleotide
  Antisense strand to SEQ ID NO: 1469176
aaguuuagucaccuggcuc

SEQ ID NO: 1469178 - RNA, 19 nt, Artificial Sequence
  Description of Artificial Sequence: Synthetic oligonucleotide
  Sense strand starting at position 320 of SEQ ID NO: 1244158
ugacuaaacuuguacugca

SEQ ID NO: 1469179 - RNA, 19 nt, Artificial Sequence
  Description of Artificial Sequence: Synthetic oligonucleotide
  Antisense strand to SEQ ID NO: 1469178
ugcaguacaaguuuaguca

SEQ ID NO: 1469180 - RNA, 19 nt, Artificial Sequence
  Description of Artificial Sequence: Synthetic oligonucleotide
  Sense strand starting at position 327 of SEQ ID NO: 1244158
acuuguacugcacaaaguu

SEQ ID NO: 1469181 - RNA, 19 nt, Artificial Sequence
  Description of Artificial Sequence: Synthetic oligonucleotide
  Antisense strand to SEQ ID NO: 1469180
aacuuugugcaguacaagu

SEQ ID NO: 1469182 - RNA, 19 nt, Artificial Sequence
  Description of Artificial Sequence: Synthetic oligonucleotide
  Sense strand starting at position 474 of SEQ ID NO: 1244158
ucgggugcucucuauagaa

SEQ ID NO: 1469183 - RNA, 19 nt, Artificial Sequence
  Description of Artificial Sequence: Synthetic oligonucleotide
  Antisense strand to SEQ ID NO: 1469182
uucuauagagagcacccga

SEQ ID NO: 1469184 - RNA, 19 nt, Artificial Sequence
  Description of Artificial Sequence: Synthetic oligonucleotide
  Sense strand starting at position 570 of SEQ ID NO: 1244158
uguucucagcuugaggaga

SEQ ID NO: 1469185 - RNA, 19 nt, Artificial Sequence
  Description of Artificial Sequence: Synthetic oligonucleotide
  Antisense strand to SEQ ID NO: 1469184
ucuccucaagcugagaaca

SEQ ID NO: 1469186 - RNA, 19 nt, Artificial Sequence
  Description of Artificial Sequence: Synthetic oligonucleotide
  Sense strand starting at position 572 of SEQ ID NO: 1244158
uucucagcuugaggagaau

SEQ ID NO: 1469187 - RNA, 19 nt, Artificial Sequence
  Description of Artificial Sequence: Synthetic oligonucleotide
  Antisense strand to SEQ ID NO: 1469186
auucuccucaagcugagaa

SEQ ID NO: 1469188 - RNA, 19 nt, Artificial Sequence
  Description of Artificial Sequence: Synthetic oligonucleotide
  Sense strand starting at position 725 of SEQ ID NO: 1244158
gggucaucugcaggaugca

SEQ ID NO: 1469189 - RNA, 19 nt, Artificial Sequence
  Description of Artificial Sequence: Synthetic oligonucleotide
  Antisense strand to SEQ ID NO: 1469188
ugcauccugcagaugaccc

SEQ ID NO: 1469190 - RNA, 19 nt, Artificial Sequence
  Description of Artificial Sequence: Synthetic oligonucleotide
  Sense strand starting at position 726 of SEQ ID NO: 1244158
ggucaucugcaggaugcau

SEQ ID NO: 1469191 - RNA, 19 nt, Artificial Sequence
  Description of Artificial Sequence: Synthetic oligonucleotide
  Antisense strand to SEQ ID NO: 1469190
augcauccugcagaugacc

SEQ ID NO: 1469192 - RNA, 19 nt, Artificial Sequence
  Description of Artificial Sequence: Synthetic oligonucleotide
  Sense strand starting at position 848 of SEQ ID NO: 1244158
aguggaagcucaccuugaa

SEQ ID NO: 1469193 - RNA, 19 nt, Artificial Sequence
  Description of Artificial Sequence: Synthetic oligonucleotide
  Antisense strand to SEQ ID NO: 1469192
uucaaggugagcuuccacu

SEQ ID NO: 1469194 - RNA, 19 nt, Artificial Sequence
  Description of Artificial Sequence: Synthetic oligonucleotide
  Sense strand starting at position 895 of SEQ ID NO: 1244158
guguccucuuccuugugaa

SEQ ID NO: 1469195 - RNA, 19 nt, Artificial Sequence
  Description of Artificial Sequence: Synthetic oligonucleotide
  Antisense strand to SEQ ID NO: 1469194
uucacaaggaagaggacac

SEQ ID NO: 1469196 - RNA, 19 nt, Artificial Sequence
  Description of Artificial Sequence: Synthetic oligonucleotide
  Sense strand starting at position 896 of SEQ ID NO: 1244158
uguccucuuccuugugaac

SEQ ID NO: 1469197 - RNA, 19 nt, Artificial Sequence
  Description of Artificial Sequence: Synthetic oligonucleotide
  Antisense strand to SEQ ID NO: 1469196
guucacaaggaagaggaca

SEQ ID NO: 1469198 - RNA, 19 nt, Artificial Sequence
  Description of Artificial Sequence: Synthetic oligonucleotide
  Sense strand starting at position 899 of SEQ ID NO: 1244158
ccucuuccuugugaacaga

SEQ ID NO: 1469199 - RNA, 19 nt, Artificial Sequence
  Description of Artificial Sequence: Synthetic oligonucleotide
  Antisense strand to SEQ ID NO: 1469198
ucuguucacaaggaagagg

SEQ ID NO: 1469200 - RNA, 19 nt, Artificial Sequence
  Description of Artificial Sequence: Synthetic oligonucleotide
  Sense strand starting at position 902 of SEQ ID NO: 1244158
cuuccuugugaacagacau

SEQ ID NO: 1469201 - RNA, 19 nt, Artificial Sequence
  Description of Artificial Sequence: Synthetic oligonucleotide
  Antisense strand to SEQ ID NO: 1469200
augucuguucacaaggaag

SEQ ID NO: 1469202 - RNA, 19 nt, Artificial Sequence
  Description of Artificial Sequence: Synthetic oligonucleotide
  Sense strand starting at position 1126 of SEQ ID NO: 1244158
gagacugacugcuccgaua

SEQ ID NO: 1469203 - RNA, 19 nt, Artificial Sequence
  Description of Artificial Sequence: Synthetic oligonucleotide
  Antisense strand to SEQ ID NO: 1469202
uaucggagcagucagucuc

SEQ ID NO: 1469204 - RNA, 19 nt, Artificial Sequence
  Description of Artificial Sequence: Synthetic oligonucleotide
  Sense strand starting at position 1128 of SEQ ID NO: 1244158
gacugacugcuccgauauc

SEQ ID NO: 1469205 - RNA, 19 nt, Artificial Sequence
  Description of Artificial Sequence: Synthetic oligonucleotide
  Antisense strand to SEQ ID NO: 1469204
gauaucggagcagucaguc

SEQ ID NO: 1469206 - RNA, 19 nt, Artificial Sequence
  Description of Artificial Sequence: Synthetic oligonucleotide
  Sense strand starting at position 1129 of SEQ ID NO: 1244158
acugacugcuccgauauca

SEQ ID NO: 1469207 - RNA, 19 nt, Artificial Sequence
  Description of Artificial Sequence: Synthetic oligonucleotide
  Antisense strand to SEQ ID NO: 1469206
ugauaucggagcagucagu

SEQ ID NO: 1469208 - RNA, 19 nt, Artificial Sequence
  Description of Artificial Sequence: Synthetic oligonucleotide
  Sense strand starting at position 1166 of SEQ ID NO: 1244158
ccuguucugggcugagaga

SEQ ID NO: 1469209 - RNA, 19 nt, Artificial Sequence
  Description of Artificial Sequence: Synthetic oligonucleotide
  Antisense strand to SEQ ID NO: 1469208
ucucucagcccagaacagg

SEQ ID NO: 1469210 - RNA, 19 nt, Artificial Sequence
  Description of Artificial Sequence: Synthetic oligonucleotide
  Sense strand starting at position 1167 of SEQ ID NO: 1244158
cuguucugggcugagagau

SEQ ID NO: 1469211 - RNA, 19 nt, Artificial Sequence
  Description of Artificial Sequence: Synthetic oligonucleotide
  Antisense strand to SEQ ID NO: 1469210
aucucucagcccagaacag

SEQ ID NO: 1469212 - RNA, 19 nt, Artificial Sequence
  Description of Artificial Sequence: Synthetic oligonucleotide
  Sense strand starting at position 1455 of SEQ ID NO: 1244158
guuucauuggccuggaggu

SEQ ID NO: 1469213 - RNA, 19 nt, Artificial Sequence
  Description of Artificial Sequence: Synthetic oligonucleotide
  Antisense strand to SEQ ID NO: 1469212
accuccaggccaaugaaac

SEQ ID NO: 1469214 - RNA, 19 nt, Artificial Sequence
  Description of Artificial Sequence: Synthetic oligonucleotide
  Sense strand starting at position 1472 of SEQ ID NO: 1244158
guggaaggaucagucaaug

SEQ ID NO: 1469215 - RNA, 19 nt, Artificial Sequence
  Description of Artificial Sequence: Synthetic oligonucleotide
  Antisense strand to SEQ ID NO: 1469214
cauugacugauccuuccac

SEQ ID NO: 1469216 - RNA, 19 nt, Artificial Sequence
  Description of Artificial Sequence: Synthetic oligonucleotide
  Sense strand starting at position 1477 of SEQ ID NO: 1244158
aggaucagucaaugaccua

SEQ ID NO: 1469217 - RNA, 19 nt, Artificial Sequence
  Description of Artificial Sequence: Synthetic oligonucleotide
  Antisense strand to SEQ ID NO: 1469216
uaggucauugacugauccu

SEQ ID NO: 1469218 - RNA, 19 nt, Artificial Sequence
  Description of Artificial Sequence: Synthetic oligonucleotide
  Sense strand starting at position 2030 of SEQ ID NO: 1244158
gcgcaugacgggaguugua

SEQ ID NO: 1469219 - RNA, 19 nt, Artificial Sequence
  Description of Artificial Sequence: Synthetic oligonucleotide
  Antisense strand to SEQ ID NO: 1469218
uacaacucccgucaugcgc

SEQ ID NO: 1469220 - RNA, 19 nt, Artificial Sequence
  Description of Artificial Sequence: Synthetic oligonucleotide
  Sense strand starting at position 2120 of SEQ ID NO: 1244158
ccaagugaggccugaguga

SEQ ID NO: 1469221 - RNA, 19 nt, Artificial Sequence
  Description of Artificial Sequence: Synthetic oligonucleotide
  Antisense strand to SEQ ID NO: 1469220
ucacucaggccucacuugg

SEQ ID NO: 1469222 - RNA, 19 nt, Artificial Sequence
  Description of Artificial Sequence: Synthetic oligonucleotide
  Sense strand starting at position 2360 of SEQ ID NO: 1244158
gcaacaguucugcaguagu

SEQ ID NO: 1469223 - RNA, 19 nt, Artificial Sequence
  Description of Artificial Sequence: Synthetic oligonucleotide
  Antisense strand to SEQ ID NO: 1469222
acuacugcagaacuguugc

SEQ ID NO: 1469224 - RNA, 19 nt, Artificial Sequence
  Description of Artificial Sequence: Synthetic oligonucleotide
  Sense strand starting at position 2760 of SEQ ID NO: 1244158
gaggcauagcugugguuau

SEQ ID NO: 1469225 - RNA, 19 nt, Artificial Sequence
  Description of Artificial Sequence: Synthetic oligonucleotide
  Antisense strand to SEQ ID NO: 1469224
auaaccacagcuaugccuc

SEQ ID NO: 1469226 - RNA, 19 nt, Artificial Sequence
  Description of Artificial Sequence: Synthetic oligonucleotide
  Sense strand starting at position 2772 of SEQ ID NO: 1244158
ugguuaugauggucaccaa

SEQ ID NO: 1469227 - RNA, 19 nt, Artificial Sequence
  Description of Artificial Sequence: Synthetic oligonucleotide
  Antisense strand to SEQ ID NO: 1469226
uuggugaccaucauaacca

SEQ ID NO: 1469228 - RNA, 19 nt, Artificial Sequence
  Description of Artificial Sequence: Synthetic oligonucleotide
  Sense strand starting at position 2775 of SEQ ID NO: 1244158
uuaugauggucaccaagaa

SEQ ID NO: 1469229 - RNA, 19 nt, Artificial Sequence
  Description of Artificial Sequence: Synthetic oligonucleotide
  Antisense strand to SEQ ID NO: 1469228
uucuuggugaccaucauaa

SEQ ID NO: 1469230 - RNA, 19 nt, Artificial Sequence
  Description of Artificial Sequence: Synthetic oligonucleotide
  Sense strand starting at position 3049 of SEQ ID NO: 1244158
uggcucugucuaggaacaa

SEQ ID NO: 1469231 - RNA, 19 nt, Artificial Sequence
  Description of Artificial Sequence: Synthetic oligonucleotide
  Antisense strand to SEQ ID NO: 1469230
uuguuccuagacagagcca

SEQ ID NO: 1469232 - RNA, 19 nt, Artificial Sequence
  Description of Artificial Sequence: Synthetic oligonucleotide
  Sense strand starting at position 3050 of SEQ ID NO: 1244158
ggcucugucuaggaacaau

SEQ ID NO: 1469233 - RNA, 19 nt, Artificial Sequence
  Description of Artificial Sequence: Synthetic oligonucleotide
  Antisense strand to SEQ ID NO: 1469232
auuguuccuagacagagcc

SEQ ID NO: 1469234 - RNA, 19 nt, Artificial Sequence
  Description of Artificial Sequence: Synthetic oligonucleotide
  Sense strand starting at position 3298 of SEQ ID NO: 1244158
cuggcucuuggagguaaga

SEQ ID NO: 1469235 - RNA, 19 nt, Artificial Sequence
  Description of Artificial Sequence: Synthetic oligonucleotide
  Antisense strand to SEQ ID NO: 1469234
ucuuaccuccaagagccag

SEQ ID NO: 1469236 - RNA, 19 nt, Artificial Sequence
  Description of Artificial Sequence: Synthetic oligonucleotide
  Sense strand starting at position 3300 of SEQ ID NO: 1244158
ggcucuuggagguaagaug

SEQ ID NO: 1469237 - RNA, 19 nt, Artificial Sequence
  Description of Artificial Sequence: Synthetic oligonucleotide
  Antisense strand to SEQ ID NO: 1469236
caucuuaccuccaagagcc

SEQ ID NO: 1469238 - RNA, 19 nt, Artificial Sequence
  Description of Artificial Sequence: Synthetic oligonucleotide
  Sense strand starting at position 20 of SEQ ID NO: 1244159
caaguaacucccgguauuu

SEQ ID NO: 1469239 - RNA, 19 nt, Artificial Sequence
  Description of Artificial Sequence: Synthetic oligonucleotide
  Antisense strand to SEQ ID NO: 1469238
aaauaccgggaguuacuug

SEQ ID NO: 1469240 - RNA, 19 nt, Artificial Sequence
  Description of Artificial Sequence: Synthetic oligonucleotide
  Sense strand starting at position 29 of SEQ ID NO: 1244159
cccgguauuugggaaauua

SEQ ID NO: 1469241 - RNA, 19 nt, Artificial Sequence
  Description of Artificial Sequence: Synthetic oligonucleotide
  Antisense strand to SEQ ID NO: 1469240
uaauuucccaaauaccggg

SEQ ID NO: 1469242 - RNA, 19 nt, Artificial Sequence
  Description of Artificial Sequence: Synthetic oligonucleotide
  Sense strand starting at position 52 of SEQ ID NO: 1244159
agaggacuguggcccuauu

SEQ ID NO: 1469243 - RNA, 19 nt, Artificial Sequence
  Description of Artificial Sequence: Synthetic oligonucleotide
  Antisense strand to SEQ ID NO: 1469242
aauagggccacaguccucu

SEQ ID NO: 1469244 - RNA, 19 nt, Artificial Sequence
  Description of Artificial Sequence: Synthetic oligonucleotide
  Sense strand starting at position 92 of SEQ ID NO: 1244159
ugcauuuggugagccuuua

SEQ ID NO: 1469245 - RNA, 19 nt, Artificial Sequence
  Description of Artificial Sequence: Synthetic oligonucleotide
  Antisense strand to SEQ ID NO: 1469244
uaaaggcucaccaaaugca

SEQ ID NO: 1469246 - RNA, 19 nt, Artificial Sequence
  Description of Artificial Sequence: Synthetic oligonucleotide
  Sense strand starting at position 639 of SEQ ID NO: 1244159
auuauagucuaauuaccga

SEQ ID NO: 1469247 - RNA, 19 nt, Artificial Sequence
  Description of Artificial Sequence: Synthetic oligonucleotide
  Antisense strand to SEQ ID NO: 1469246
ucgguaauuagacuauaau

SEQ ID NO: 1469248 - RNA, 19 nt, Artificial Sequence
  Description of Artificial Sequence: Synthetic oligonucleotide
  Sense strand starting at position 642 of SEQ ID NO: 1244159
auagucuaauuaccgagau

SEQ ID NO: 1469249 - RNA, 19 nt, Artificial Sequence
  Description of Artificial Sequence: Synthetic oligonucleotide
  Antisense strand to SEQ ID NO: 1469248
aucucgguaauuagacuau

SEQ ID NO: 1469250 - RNA, 19 nt, Artificial Sequence
  Description of Artificial Sequence: Synthetic oligonucleotide
  Sense strand starting at position 666 of SEQ ID NO: 1244159
aagccuugacgugagacuu

SEQ ID NO: 1469251 - RNA, 19 nt, Artificial Sequence
  Description of Artificial Sequence: Synthetic oligonucleotide
  Antisense strand to SEQ ID NO: 1469250
aagucucacgucaaggcuu

SEQ ID NO: 1469252 - RNA, 19 nt, Artificial Sequence
  Description of Artificial Sequence: Synthetic oligonucleotide
  Sense strand starting at position 672 of SEQ ID NO: 1244159
ugacgugagacuuauuccu

SEQ ID NO: 1469253 - RNA, 19 nt, Artificial Sequence
  Description of Artificial Sequence: Synthetic oligonucleotide
  Antisense strand to SEQ ID NO: 1469252
aggaauaagucucacguca

SEQ ID NO: 1469254 - RNA, 19 nt, Artificial Sequence
  Description of Artificial Sequence: Synthetic oligonucleotide
  Sense strand starting at position 747 of SEQ ID NO: 1244159
cauuguacuccagggcaga

SEQ ID NO: 1469255 - RNA, 19 nt, Artificial Sequence
  Description of Artificial Sequence: Synthetic oligonucleotide
  Antisense strand to SEQ ID NO: 1469254
ucugcccuggaguacaaug

SEQ ID NO: 1469256 - RNA, 19 nt, Artificial Sequence
  Description of Artificial Sequence: Synthetic oligonucleotide
  Sense strand starting at position 879 of SEQ ID NO: 1244159
acccuuaagccagggauca

SEQ ID NO: 1469257 - RNA, 19 nt, Artificial Sequence
  Description of Artificial Sequence: Synthetic oligonucleotide
  Antisense strand to SEQ ID NO: 1469256
ugaucccuggcuuaagggu

SEQ ID NO: 1469258 - RNA, 19 nt, Artificial Sequence
  Description of Artificial Sequence: Synthetic oligonucleotide
  Sense strand starting at position 933 of SEQ ID NO: 1244159
cgcagaaaguagucaauag

SEQ ID NO: 1469259 - RNA, 19 nt, Artificial Sequence
  Description of Artificial Sequence: Synthetic oligonucleotide
  Antisense strand to SEQ ID NO: 1469258
cuauugacuacuuucugcg

SEQ ID NO: 1469260 - RNA, 19 nt, Artificial Sequence
  Description of Artificial Sequence: Synthetic oligonucleotide
  Sense strand starting at position 960 of SEQ ID NO: 1244159
ugaauugaguuagauuugu

SEQ ID NO: 1469261 - RNA, 19 nt, Artificial Sequence
  Description of Artificial Sequence: Synthetic oligonucleotide
  Antisense strand to SEQ ID NO: 1469260
acaaaucuaacucaauuca

SEQ ID NO: 1469262 - RNA, 19 nt, Artificial Sequence
  Description of Artificial Sequence: Synthetic oligonucleotide
  Sense strand starting at position 1062 of SEQ ID NO: 1244159
gggccauuccugggugauc

SEQ ID NO: 1469263 - RNA, 19 nt, Artificial Sequence
  Description of Artificial Sequence: Synthetic oligonucleotide
  Antisense strand to SEQ ID NO: 1469262
gaucacccaggaauggccc

SEQ ID NO: 1469264 - RNA, 19 nt, Artificial Sequence
  Description of Artificial Sequence: Synthetic oligonucleotide
  Sense strand starting at position 1063 of SEQ ID NO: 1244159
ggccauuccugggugaucu

SEQ ID NO: 1469265 - RNA, 19 nt, Artificial Sequence
  Description of Artificial Sequence: Synthetic oligonucleotide
  Antisense strand to SEQ ID NO: 1469264
agaucacccaggaauggcc

SEQ ID NO: 1469266 - RNA, 19 nt, Artificial Sequence
  Description of Artificial Sequence: Synthetic oligonucleotide
  Sense strand starting at position 1067 of SEQ ID NO: 1244159
auuccugggugaucuucua

SEQ ID NO: 1469267 - RNA, 19 nt, Artificial Sequence
  Description of Artificial Sequence: Synthetic oligonucleotide
  Antisense strand to SEQ ID NO: 1469266
uagaagaucacccaggaau

SEQ ID NO: 1469268 - RNA, 19 nt, Artificial Sequence
  Description of Artificial Sequence: Synthetic oligonucleotide
  Sense strand starting at position 1086 of SEQ ID NO: 1244159
agugccuucuaauucuaga

SEQ ID NO: 1469269 - RNA, 19 nt, Artificial Sequence
  Description of Artificial Sequence: Synthetic oligonucleotide
  Antisense strand to SEQ ID NO: 1469268
ucuagaauuagaaggcacu

SEQ ID NO: 1469270 - RNA, 19 nt, Artificial Sequence
  Description of Artificial Sequence: Synthetic oligonucleotide
  Sense strand starting at position 1393 of SEQ ID NO: 1244159
gagggaucguucucuccag

SEQ ID NO: 1469271 - RNA, 19 nt, Artificial Sequence
  Description of Artificial Sequence: Synthetic oligonucleotide
  Antisense strand to SEQ ID NO: 1469270
cuggagagaacgaucccuc

SEQ ID NO: 1469272 - RNA, 19 nt, Artificial Sequence
  Description of Artificial Sequence: Synthetic oligonucleotide
  Sense strand starting at position 1723 of SEQ ID NO: 1244159
aaucgacuguccuuagaaa

SEQ ID NO: 1469273 - RNA, 19 nt, Artificial Sequence
  Description of Artificial Sequence: Synthetic oligonucleotide
  Antisense strand to SEQ ID NO: 1469272
uuucuaaggacagucgauu

SEQ ID NO: 1469274 - RNA, 19 nt, Artificial Sequence
  Description of Artificial Sequence: Synthetic oligonucleotide
  Sense strand starting at position 1724 of SEQ ID NO: 1244159
aucgacuguccuuagaaac

SEQ ID NO: 1469275 - RNA, 19 nt, Artificial Sequence
  Description of Artificial Sequence: Synthetic oligonucleotide
  Antisense strand to SEQ ID NO: 1469274
guuucuaaggacagucgau

SEQ ID NO: 1469276 - RNA, 19 nt, Artificial Sequence
  Description of Artificial Sequence: Synthetic oligonucleotide
  Sense strand starting at position 2200 of SEQ ID NO: 1244159
ucaucuuuaccuugggcaa

SEQ ID NO: 1469277 - RNA, 19 nt, Artificial Sequence
  Description of Artificial Sequence: Synthetic oligonucleotide
  Antisense strand to SEQ ID NO: 1469276
uugcccaagguaaagauga

SEQ ID NO: 1469278 - RNA, 19 nt, Artificial Sequence
  Description of Artificial Sequence: Synthetic oligonucleotide
  Sense strand starting at position 2299 of SEQ ID NO: 1244159
guagccugauuguuuaaag

SEQ ID NO: 1469279 - RNA, 19 nt, Artificial Sequence
  Description of Artificial Sequence: Synthetic oligonucleotide
  Antisense strand to SEQ ID NO: 1469278
cuuuaaacaaucaggcuac

SEQ ID NO: 1469280 - RNA, 19 nt, Artificial Sequence
  Description of Artificial Sequence: Synthetic oligonucleotide
  Sense strand starting at position 2388 of SEQ ID NO: 1244159
gaaacaucguggucucgaa

SEQ ID NO: 1469281 - RNA, 19 nt, Artificial Sequence
  Description of Artificial Sequence: Synthetic oligonucleotide
  Antisense strand to SEQ ID NO: 1469280
uucgagaccacgauguuuc

SEQ ID NO: 1469282 - RNA, 19 nt, Artificial Sequence
  Description of Artificial Sequence: Synthetic oligonucleotide
  Sense strand starting at position 2444 of SEQ ID NO: 1244159
uagcguccgccaucaaguu

SEQ ID NO: 1469283 - RNA, 19 nt, Artificial Sequence
  Description of Artificial Sequence: Synthetic oligonucleotide
  Antisense strand to SEQ ID NO: 1469282
aacuugauggcggacgcua

SEQ ID NO: 1469284 - RNA, 19 nt, Artificial Sequence
  Description of Artificial Sequence: Synthetic oligonucleotide
  Sense strand starting at position 2577 of SEQ ID NO: 1244159
caauuuagcucuguggcga

SEQ ID NO: 1469285 - RNA, 19 nt, Artificial Sequence
  Description of Artificial Sequence: Synthetic oligonucleotide
  Antisense strand to SEQ ID NO: 1469284
ucgccacagagcuaaauug

SEQ ID NO: 1469286 - RNA, 19 nt, Artificial Sequence
  Description of Artificial Sequence: Synthetic oligonucleotide
  Sense strand starting at position 2730 of SEQ ID NO: 1244159
cuggcauccagaugcuuga

SEQ ID NO: 1469287 - RNA, 19 nt, Artificial Sequence
  Description of Artificial Sequence: Synthetic oligonucleotide
  Antisense strand to SEQ ID NO: 1469286
ucaagcaucuggaugccag

SEQ ID NO: 1469288 - RNA, 19 nt, Artificial Sequence
  Description of Artificial Sequence: Synthetic oligonucleotide
  Sense strand starting at position 2737 of SEQ ID NO: 1244159
ccagaugcuugagcagaga

SEQ ID NO: 1469289 - RNA, 19 nt, Artificial Sequence
  Description of Artificial Sequence: Synthetic oligonucleotide
  Antisense strand to SEQ ID NO: 1469288
ucucugcucaagcaucugg

SEQ ID NO: 1469290 - RNA, 19 nt, Artificial Sequence
  Description of Artificial Sequence: Synthetic oligonucleotide
  Sense strand starting at position 2740 of SEQ ID NO: 1244159
gaugcuugagcagagaguu

SEQ ID NO: 1469291 - RNA, 19 nt, Artificial Sequence
  Description of Artificial Sequence: Synthetic oligonucleotide
  Antisense strand to SEQ ID NO: 1469290
aacucucugcucaagcauc

SEQ ID NO: 1469292 - RNA, 19 nt, Artificial Sequence
  Description of Artificial Sequence: Synthetic oligonucleotide
  Sense strand starting at position 2846 of SEQ ID NO: 1244159
gaaggagaaguuggucaca

SEQ ID NO: 1469293 - RNA, 19 nt, Artificial Sequence
  Description of Artificial Sequence: Synthetic oligonucleotide
  Antisense strand to SEQ ID NO: 1469292
ugugaccaacuucuccuuc

SEQ ID NO: 1469294 - RNA, 19 nt, Artificial Sequence
  Description of Artificial Sequence: Synthetic oligonucleotide
  Sense strand starting at position 2998 of SEQ ID NO: 1244159
acgcucagucauuaaguua

SEQ ID NO: 1469295 - RNA, 19 nt, Artificial Sequence
  Description of Artificial Sequence: Synthetic oligonucleotide
  Antisense strand to SEQ ID NO: 1469294
uaacuuaaugacugagcgu

SEQ ID NO: 1469296 - RNA, 19 nt, Artificial Sequence
  Description of Artificial Sequence: Synthetic oligonucleotide
  Sense strand starting at position 3001 of SEQ ID NO: 1244159
cucagucauuaaguuagga

SEQ ID NO: 1469297 - RNA, 19 nt, Artificial Sequence
  Description of Artificial Sequence: Synthetic oligonucleotide
  Antisense strand to SEQ ID NO: 1469296
uccuaacuuaaugacugag

SEQ ID NO: 1469298 - RNA, 19 nt, Artificial Sequence
  Description of Artificial Sequence: Synthetic oligonucleotide
  Sense strand starting at position 3103 of SEQ ID NO: 1244159
guaaauaucugauugaugu

SEQ ID NO: 1469299 - RNA, 19 nt, Artificial Sequence
  Description of Artificial Sequence: Synthetic oligonucleotide
  Antisense strand to SEQ ID NO: 1469298
acaucaaucagauauuuac

SEQ ID NO: 1469300 - RNA, 19 nt, Artificial Sequence
  Description of Artificial Sequence: Synthetic oligonucleotide
  Sense strand starting at position 3104 of SEQ ID NO: 1244159
uaaauaucugauugaugug

SEQ ID NO: 1469301 - RNA, 19 nt, Artificial Sequence
  Description of Artificial Sequence: Synthetic oligonucleotide
  Antisense strand to SEQ ID NO: 1469300
cacaucaaucagauauuua

SEQ ID NO: 1469302 - RNA, 19 nt, Artificial Sequence
  Description of Artificial Sequence: Synthetic oligonucleotide
  Sense strand starting at position 3109 of SEQ ID NO: 1244159
aucugauugaugugcuaag

SEQ ID NO: 1469303 - RNA, 19 nt, Artificial Sequence
  Description of Artificial Sequence: Synthetic oligonucleotide
  Antisense strand to SEQ ID NO: 1469302
cuuagcacaucaaucagau

SEQ ID NO: 1469304 - RNA, 19 nt, Artificial Sequence
  Description of Artificial Sequence: Synthetic oligonucleotide
  Sense strand starting at position 3116 of SEQ ID NO: 1244159
ugaugugcuaaguaaagaa

SEQ ID NO: 1469305 - RNA, 19 nt, Artificial Sequence
  Description of Artificial Sequence: Synthetic oligonucleotide
  Antisense strand to SEQ ID NO: 1469304
uucuuuacuuagcacauca

SEQ ID NO: 1469306 - RNA, 19 nt, Artificial Sequence
  Description of Artificial Sequence: Synthetic oligonucleotide
  Sense strand starting at position 3258 of SEQ ID NO: 1244159
uugauaaccuacuuagguu

SEQ ID NO: 1469307 - RNA, 19 nt, Artificial Sequence
  Description of Artificial Sequence: Synthetic oligonucleotide
  Antisense strand to SEQ ID NO: 1469306
aaccuaaguagguuaucaa

SEQ ID NO: 1469308 - RNA, 19 nt, Artificial Sequence
  Description of Artificial Sequence: Synthetic oligonucleotide
  Sense strand starting at position 3403 of SEQ ID NO: 1244159
acggauauguuccugaggu

SEQ ID NO: 1469309 - RNA, 19 nt, Artificial Sequence
  Description of Artificial Sequence: Synthetic oligonucleotide
  Antisense strand to SEQ ID NO: 1469308
accucaggaacauauccgu

SEQ ID NO: 1469310 - RNA, 19 nt, Artificial Sequence
  Description of Artificial Sequence: Synthetic oligonucleotide
  Sense strand starting at position 3405 of SEQ ID NO: 1244159
ggauauguuccugagguua

SEQ ID NO: 1469311 - RNA, 19 nt, Artificial Sequence
  Description of Artificial Sequence: Synthetic oligonucleotide
  Antisense strand to SEQ ID NO: 1469310
uaaccucaggaacauaucc

SEQ ID NO: 1469312 - RNA, 19 nt, Artificial Sequence
  Description of Artificial Sequence: Synthetic oligonucleotide
  Sense strand starting at position 3417 of SEQ ID NO: 1244159
gagguuacauuugaauguu

SEQ ID NO: 1469313 - RNA, 19 nt, Artificial Sequence
  Description of Artificial Sequence: Synthetic oligonucleotide
  Antisense strand to SEQ ID NO: 1469312
aacauucaaauguaaccuc

SEQ ID NO: 1469314 - RNA, 19 nt, Artificial Sequence
  Description of Artificial Sequence: Synthetic oligonucleotide
  Sense strand starting at position 3452 of SEQ ID NO: 1244159
ugguaaggaucucuuacau

SEQ ID NO: 1469315 - RNA, 19 nt, Artificial Sequence
  Description of Artificial Sequence: Synthetic oligonucleotide
  Antisense strand to SEQ ID NO: 1469314
auguaagagauccuuacca

SEQ ID NO: 1469316 - RNA, 19 nt, Artificial Sequence
  Description of Artificial Sequence: Synthetic oligonucleotide
  Sense strand starting at position 3570 of SEQ ID NO: 1244159
gugcaauggcuggauguca

SEQ ID NO: 1469317 - RNA, 19 nt, Artificial Sequence
  Description of Artificial Sequence: Synthetic oligonucleotide
  Antisense strand to SEQ ID NO: 1469316
ugacauccagccauugcac

SEQ ID NO: 1469318 - RNA, 19 nt, Artificial Sequence
  Description of Artificial Sequence: Synthetic oligonucleotide
  Sense strand starting at position 194 of SEQ ID NO: 1244160
cccugauucuagguccgau

SEQ ID NO: 1469319 - RNA, 19 nt, Artificial Sequence
  Description of Artificial Sequence: Synthetic oligonucleotide
  Antisense strand to SEQ ID NO: 1469318
aucggaccuagaaucaggg

SEQ ID NO: 1469320 - RNA, 19 nt, Artificial Sequence
  Description of Artificial Sequence: Synthetic oligonucleotide
  Sense strand starting at position 197 of SEQ ID NO: 1244160
ugauucuagguccgauaac

SEQ ID NO: 1469321 - RNA, 19 nt, Artificial Sequence
  Description of Artificial Sequence: Synthetic oligonucleotide
  Antisense strand to SEQ ID NO: 1469320
guuaucggaccuagaauca

SEQ ID NO: 1469322 - RNA, 19 nt, Artificial Sequence
  Description of Artificial Sequence: Synthetic oligonucleotide
  Sense strand starting at position 475 of SEQ ID NO: 1244160
cugagaagcccucaggugu

SEQ ID NO: 1469323 - RNA, 19 nt, Artificial Sequence
  Description of Artificial Sequence: Synthetic oligonucleotide
  Antisense strand to SEQ ID NO: 1469322
acaccugagggcuucucag

SEQ ID NO: 1469324 - RNA, 19 nt, Artificial Sequence
  Description of Artificial Sequence: Synthetic oligonucleotide
  Sense strand starting at position 486 of SEQ ID NO: 1244160
ucaggugucucaguccaaa

SEQ ID NO: 1469325 - RNA, 19 nt, Artificial Sequence
  Description of Artificial Sequence: Synthetic oligonucleotide
  Antisense strand to SEQ ID NO: 1469324
uuuggacugagacaccuga

SEQ ID NO: 1469326 - RNA, 19 nt, Artificial Sequence
  Description of Artificial Sequence: Synthetic oligonucleotide
  Sense strand starting at position 489 of SEQ ID NO: 1244160
ggugucucaguccaaagaa

SEQ ID NO: 1469327 - RNA, 19 nt, Artificial Sequence
  Description of Artificial Sequence: Synthetic oligonucleotide
  Antisense strand to SEQ ID NO: 1469326
uucuuuggacugagacacc

SEQ ID NO: 1469328 - RNA, 19 nt, Artificial Sequence
  Description of Artificial Sequence: Synthetic oligonucleotide
  Sense strand starting at position 521 of SEQ ID NO: 1244160
ggccuauaagauugggcaa

SEQ ID NO: 1469329 - RNA, 19 nt, Artificial Sequence
  Description of Artificial Sequence: Synthetic oligonucleotide
  Antisense strand to SEQ ID NO: 1469328
uugcccaaucuuauaggcc

SEQ ID NO: 1469330 - RNA, 19 nt, Artificial Sequence
  Description of Artificial Sequence: Synthetic oligonucleotide
  Sense strand starting at position 538 of SEQ ID NO: 1244160
aagugcuaucuccagagca

SEQ ID NO: 1469331 - RNA, 19 nt, Artificial Sequence
  Description of Artificial Sequence: Synthetic oligonucleotide
  Antisense strand to SEQ ID NO: 1469330
ugcucuggagauagcacuu

SEQ ID NO: 1469332 - RNA, 19 nt, Artificial Sequence
  Description of Artificial Sequence: Synthetic oligonucleotide
  Sense strand starting at position 540 of SEQ ID NO: 1244160
gugcuaucuccagagcaga

SEQ ID NO: 1469333 - RNA, 19 nt, Artificial Sequence
  Description of Artificial Sequence: Synthetic oligonucleotide
  Antisense strand to SEQ ID NO: 1469332
ucugcucuggagauagcac

SEQ ID NO: 1469334 - RNA, 19 nt, Artificial Sequence
  Description of Artificial Sequence: Synthetic oligonucleotide
  Sense strand starting at position 693 of SEQ ID NO: 1244160
cuguguuugagucaucugu

SEQ ID NO: 1469335 - RNA, 19 nt, Artificial Sequence
  Description of Artificial Sequence: Synthetic oligonucleotide
  Antisense strand to SEQ ID NO: 1469334
acagaugacucaaacacag

SEQ ID NO: 1469336 - RNA, 19 nt, Artificial Sequence
  Description of Artificial Sequence: Synthetic oligonucleotide
  Sense strand starting at position 970 of SEQ ID NO: 1244160
uguuccuauugacuuguga

SEQ ID NO: 1469337 - RNA, 19 nt, Artificial Sequence
  Description of Artificial Sequence: Synthetic oligonucleotide
  Antisense strand to SEQ ID NO: 1469336
ucacaagucaauaggaaca

SEQ ID NO: 1469338 - RNA, 19 nt, Artificial Sequence
  Description of Artificial Sequence: Synthetic oligonucleotide
  Sense strand starting at position 984 of SEQ ID NO: 1244160
ugugaagacugucucugaa

SEQ ID NO: 1469339 - RNA, 19 nt, Artificial Sequence
  Description of Artificial Sequence: Synthetic oligonucleotide
  Antisense strand to SEQ ID NO: 1469338
uucagagacagucuucaca

SEQ ID NO: 1469340 - RNA, 19 nt, Artificial Sequence
  Description of Artificial Sequence: Synthetic oligonucleotide
  Sense strand starting at position 987 of SEQ ID NO: 1244160
gaagacugucucugaacca

SEQ ID NO: 1469341 - RNA, 19 nt, Artificial Sequence
  Description of Artificial Sequence: Synthetic oligonucleotide
  Antisense strand to SEQ ID NO: 1469340
ugguucagagacagucuuc

SEQ ID NO: 1469342 - RNA, 19 nt, Artificial Sequence
  Description of Artificial Sequence: Synthetic oligonucleotide
  Sense strand starting at position 1082 of SEQ ID NO: 1244160
ggaucagauuccucaggug

SEQ ID NO: 1469343 - RNA, 19 nt, Artificial Sequence
  Description of Artificial Sequence: Synthetic oligonucleotide
  Antisense strand to SEQ ID NO: 1469342
caccugaggaaucugaucc

SEQ ID NO: 1469344 - RNA, 19 nt, Artificial Sequence
  Description of Artificial Sequence: Synthetic oligonucleotide
  Sense strand starting at position 1187 of SEQ ID NO: 1244160
cuggcaguccucugagaua

SEQ ID NO: 1469345 - RNA, 19 nt, Artificial Sequence
  Description of Artificial Sequence: Synthetic oligonucleotide
  Antisense strand to SEQ ID NO: 1469344
uaucucagaggacugccag

SEQ ID NO: 1469346 - RNA, 19 nt, Artificial Sequence
  Description of Artificial Sequence: Synthetic oligonucleotide
  Sense strand starting at position 1200 of SEQ ID NO: 1244160
gagauaaagucaguuacau

SEQ ID NO: 1469347 - RNA, 19 nt, Artificial Sequence
  Description of Artificial Sequence: Synthetic oligonucleotide
  Antisense strand to SEQ ID NO: 1469346
auguaacugacuuuaucuc

SEQ ID NO: 1469348 - RNA, 19 nt, Artificial Sequence
  Description of Artificial Sequence: Synthetic oligonucleotide
  Sense strand starting at position 1440 of SEQ ID NO: 1244160
ggaggcauagccuggagau

SEQ ID NO: 1469349 - RNA, 19 nt, Artificial Sequence
  Description of Artificial Sequence: Synthetic oligonucleotide
  Antisense strand to SEQ ID NO: 1469348
aucuccaggcuaugccucc

SEQ ID NO: 1469350 - RNA, 19 nt, Artificial Sequence
  Description of Artificial Sequence: Synthetic oligonucleotide
  Sense strand starting at position 1441 of SEQ ID NO: 1244160
gaggcauagccuggagauc

SEQ ID NO: 1469351 - RNA, 19 nt, Artificial Sequence
  Description of Artificial Sequence: Synthetic oligonucleotide
  Antisense strand to SEQ ID NO: 1469350
gaucuccaggcuaugccuc

SEQ ID NO: 1469352 - RNA, 19 nt, Artificial Sequence
  Description of Artificial Sequence: Synthetic oligonucleotide
  Sense strand starting at position 1543 of SEQ ID NO: 1244160
cccagucaaccuugguaaa

SEQ ID NO: 1469353 - RNA, 19 nt, Artificial Sequence
  Description of Artificial Sequence: Synthetic oligonucleotide
  Antisense strand to SEQ ID NO: 1469352
uuuaccaagguugacuggg

SEQ ID NO: 1469354 - RNA, 19 nt, Artificial Sequence
  Description of Artificial Sequence: Synthetic oligonucleotide
  Sense strand starting at position 1558 of SEQ ID NO: 1244160
uaaacuugauucucguagu

SEQ ID NO: 1469355 - RNA, 19 nt, Artificial Sequence
  Description of Artificial Sequence: Synthetic oligonucleotide
  Antisense strand to SEQ ID NO: 1469354
acuacgagaaucaaguuua

SEQ ID NO: 1469356 - RNA, 19 nt, Artificial Sequence
  Description of Artificial Sequence: Synthetic oligonucleotide
  Sense strand starting at position 1653 of SEQ ID NO: 1244160
gagaccuacuuagugaagu

SEQ ID NO: 1469357 - RNA, 19 nt, Artificial Sequence
  Description of Artificial Sequence: Synthetic oligonucleotide
  Antisense strand to SEQ ID NO: 1469356
acuucacuaaguaggucuc

SEQ ID NO: 1469358 - RNA, 19 nt, Artificial Sequence
  Description of Artificial Sequence: Synthetic oligonucleotide
  Sense strand starting at position 1962 of SEQ ID NO: 1244160
gcgaagguucugcucggua

SEQ ID NO: 1469359 - RNA, 19 nt, Artificial Sequence
  Description of Artificial Sequence: Synthetic oligonucleotide
  Antisense strand to SEQ ID NO: 1469358
uaccgagcagaaccuucgc

SEQ ID NO: 1469360 - RNA, 19 nt, Artificial Sequence
  Description of Artificial Sequence: Synthetic oligonucleotide
  Sense strand starting at position 2271 of SEQ ID NO: 1244160
ggaaauggaugaggguaaa

SEQ ID NO: 1469361 - RNA, 19 nt, Artificial Sequence
  Description of Artificial Sequence: Synthetic oligonucleotide
  Antisense strand to SEQ ID NO: 1469360
uuuacccucauccauuucc

SEQ ID NO: 1469362 - RNA, 19 nt, Artificial Sequence
  Description of Artificial Sequence: Synthetic oligonucleotide
  Sense strand starting at position 2281 of SEQ ID NO: 1244160
gaggguaaaggucgaggau

SEQ ID NO: 1469363 - RNA, 19 nt, Artificial Sequence
  Description of Artificial Sequence: Synthetic oligonucleotide
  Antisense strand to SEQ ID NO: 1469362
auccucgaccuuuacccuc

SEQ ID NO: 1469364 - RNA, 19 nt, Artificial Sequence
  Description of Artificial Sequence: Synthetic oligonucleotide
  Sense strand starting at position 2283 of SEQ ID NO: 1244160
ggguaaaggucgaggauga

SEQ ID NO: 1469365 - RNA, 19 nt, Artificial Sequence
  Description of Artificial Sequence: Synthetic oligonucleotide
  Antisense strand to SEQ ID NO: 1469364
ucauccucgaccuuuaccc

SEQ ID NO: 1469366 - RNA, 19 nt, Artificial Sequence
  Description of Artificial Sequence: Synthetic oligonucleotide
  Sense strand starting at position 2302 of SEQ ID NO: 1244160
gguaaaggucucggaggau

SEQ ID NO: 1469367 - RNA, 19 nt, Artificial Sequence
  Description of Artificial Sequence: Synthetic oligonucleotide
  Antisense strand to SEQ ID NO: 1469366
auccuccgagaccuuuacc

SEQ ID NO: 1469368 - RNA, 19 nt, Artificial Sequence
  Description of Artificial Sequence: Synthetic oligonucleotide
  Sense strand starting at position 2305 of SEQ ID NO: 1244160
aaaggucucggaggauaag

SEQ ID NO: 1469369 - RNA, 19 nt, Artificial Sequence
  Description of Artificial Sequence: Synthetic oligonucleotide
  Antisense strand to SEQ ID NO: 1469368
cuuauccuccgagaccuuu

SEQ ID NO: 1469370 - RNA, 19 nt, Artificial Sequence
  Description of Artificial Sequence: Synthetic oligonucleotide
  Sense strand starting at position 2779 of SEQ ID NO: 1244160
ucaauauucccacgguuga

SEQ ID NO: 1469371 - RNA, 19 nt, Artificial Sequence
  Description of Artificial Sequence: Synthetic oligonucleotide
  Antisense strand to SEQ ID NO: 1469370
ucaaccgugggaauauuga

SEQ ID NO: 1469372 - RNA, 19 nt, Artificial Sequence
  Description of Artificial Sequence: Synthetic oligonucleotide
  Sense strand starting at position 2783 of SEQ ID NO: 1244160
uauucccacgguugagaaa

SEQ ID NO: 1469373 - RNA, 19 nt, Artificial Sequence
  Description of Artificial Sequence: Synthetic oligonucleotide
  Antisense strand to SEQ ID NO: 1469372
uuucucaaccgugggaaua

SEQ ID NO: 1469374 - RNA, 19 nt, Artificial Sequence
  Description of Artificial Sequence: Synthetic oligonucleotide
  Sense strand starting at position 3381 of SEQ ID NO: 1244160
gugaaugcacaaggaauaa

SEQ ID NO: 1469375 - RNA, 19 nt, Artificial Sequence
  Description of Artificial Sequence: Synthetic oligonucleotide
  Antisense strand to SEQ ID NO: 1469374
uuauuccuugugcauucac

SEQ ID NO: 1469376 - RNA, 19 nt, Artificial Sequence
  Description of Artificial Sequence: Synthetic oligonucleotide
  Sense strand starting at position 3470 of SEQ ID NO: 1244160
aacucuugaguugagcaaa

SEQ ID NO: 1469377 - RNA, 19 nt, Artificial Sequence
  Description of Artificial Sequence: Synthetic oligonucleotide
  Antisense strand to SEQ ID NO: 1469376
uuugcucaacucaagaguu

SEQ ID NO: 1469378 - RNA, 19 nt, Artificial Sequence
  Description of Artificial Sequence: Synthetic oligonucleotide
  Sense strand starting at position 3473 of SEQ ID NO: 1244160
ucuugaguugagcaaacau

SEQ ID NO: 1469379 - RNA, 19 nt, Artificial Sequence
  Description of Artificial Sequence: Synthetic oligonucleotide
  Antisense strand to SEQ ID NO: 1469378
auguuugcucaacucaaga

SEQ ID NO: 1469380 - RNA, 19 nt, Artificial Sequence
  Description of Artificial Sequence: Synthetic oligonucleotide
  Sense strand starting at position 3635 of SEQ ID NO: 1244160
ugacaacuuugaucccagu

SEQ ID NO: 1469381 - RNA, 19 nt, Artificial Sequence
  Description of Artificial Sequence: Synthetic oligonucleotide
  Antisense strand to SEQ ID NO: 1469380
acugggaucaaaguuguca

SEQ ID NO: 1469382 - RNA, 19 nt, Artificial Sequence
  Description of Artificial Sequence: Synthetic oligonucleotide
  Sense strand starting at position 3706 of SEQ ID NO: 1244160
ccauccuuccugcagagau

SEQ ID NO: 1469383 - RNA, 19 nt, Artificial Sequence
  Description of Artificial Sequence: Synthetic oligonucleotide
  Antisense strand to SEQ ID NO: 1469382
aucucugcaggaaggaugg

SEQ ID NO: 1469384 - RNA, 19 nt, Artificial Sequence
  Description of Artificial Sequence: Synthetic oligonucleotide
  Sense strand starting at position 3708 of SEQ ID NO: 1244160
auccuuccugcagagauga

SEQ ID NO: 1469385 - RNA, 19 nt, Artificial Sequence
  Description of Artificial Sequence: Synthetic oligonucleotide
  Antisense strand to SEQ ID NO: 1469384
ucaucucugcaggaaggau

SEQ ID NO: 1469386 - RNA, 19 nt, Artificial Sequence
  Description of Artificial Sequence: Synthetic oligonucleotide
  Sense strand starting at position 3745 of SEQ ID NO: 1244160
ggagcagaaucucucccaa

SEQ ID NO: 1469387 - RNA, 19 nt, Artificial Sequence
  Description of Artificial Sequence: Synthetic oligonucleotide
  Antisense strand to SEQ ID NO: 1469386
uugggagagauucugcucc

SEQ ID NO: 1469388 - RNA, 19 nt, Artificial Sequence
  Description of Artificial Sequence: Synthetic oligonucleotide
  Sense strand starting at position 3747 of SEQ ID NO: 1244160
agcagaaucucucccaaag

SEQ ID NO: 1469389 - RNA, 19 nt, Artificial Sequence
  Description of Artificial Sequence: Synthetic oligonucleotide
  Antisense strand to SEQ ID NO: 1469388
cuuugggagagauucugcu

SEQ ID NO: 1469390 - RNA, 19 nt, Artificial Sequence
  Description of Artificial Sequence: Synthetic oligonucleotide
  Sense strand starting at position 3821 of SEQ ID NO: 1244160
guagaagccugguugagua

SEQ ID NO: 1469391 - RNA, 19 nt, Artificial Sequence
  Description of Artificial Sequence: Synthetic oligonucleotide
  Antisense strand to SEQ ID NO: 1469390
uacucaaccaggcuucuac

SEQ ID NO: 1469392 - RNA, 19 nt, Artificial Sequence
  Description of Artificial Sequence: Synthetic oligonucleotide
  Sense strand starting at position 3823 of SEQ ID NO: 1244160
agaagccugguugaguaaa

SEQ ID NO: 1469393 - RNA, 19 nt, Artificial Sequence
  Description of Artificial Sequence: Synthetic oligonucleotide
  Antisense strand to SEQ ID NO: 1469392
uuuacucaaccaggcuucu

SEQ ID NO: 1469394 - RNA, 19 nt, Artificial Sequence
  Description of Artificial Sequence: Synthetic oligonucleotide
  Sense strand starting at position 3825 of SEQ ID NO: 1244160
aagccugguugaguaaaga

SEQ ID NO: 1469395 - RNA, 19 nt, Artificial Sequence
  Description of Artificial Sequence: Synthetic oligonucleotide
  Antisense strand to SEQ ID NO: 1469394
ucuuuacucaaccaggcuu

SEQ ID NO: 1469396 - RNA, 19 nt, Artificial Sequence
  Description of Artificial Sequence: Synthetic oligonucleotide
  Sense strand starting at position 3835 of SEQ ID NO: 1244160
gaguaaagacaucgcccau

SEQ ID NO: 1469397 - RNA, 19 nt, Artificial Sequence
  Description of Artificial Sequence: Synthetic oligonucleotide
  Antisense strand to SEQ ID NO: 1469396
augggcgaugucuuuacuc

SEQ ID NO: 1469398 - RNA, 19 nt, Artificial Sequence
  Description of Artificial Sequence: Synthetic oligonucleotide
  Sense strand starting at position 26 of SEQ ID NO: 1244161
gugagcugucacuguagaa

SEQ ID NO: 1469399 - RNA, 19 nt, Artificial Sequence
  Description of Artificial Sequence: Synthetic oligonucleotide
  Antisense strand to SEQ ID NO: 1469398
uucuacagugacagcucac

SEQ ID NO: 1469400 - RNA, 19 nt, Artificial Sequence
  Description of Artificial Sequence: Synthetic oligonucleotide
  Sense strand starting at position 129 of SEQ ID NO: 1244161
ugaccucuucugugccuaa

SEQ ID NO: 1469401 - RNA, 19 nt, Artificial Sequence
  Description of Artificial Sequence: Synthetic oligonucleotide
  Antisense strand to SEQ ID NO: 1469400
uuaggcacagaagagguca

SEQ ID NO: 1469402 - RNA, 19 nt, Artificial Sequence
  Description of Artificial Sequence: Synthetic oligonucleotide
  Sense strand starting at position 160 of SEQ ID NO: 1244161
ugcaaaguagggcauaaua

SEQ ID NO: 1469403 - RNA, 19 nt, Artificial Sequence
  Description of Artificial Sequence: Synthetic oligonucleotide
  Antisense strand to SEQ ID NO: 1469402
uauuaugcccuacuuugca

SEQ ID NO: 1469404 - RNA, 19 nt, Artificial Sequence
  Description of Artificial Sequence: Synthetic oligonucleotide
  Sense strand starting at position 187 of SEQ ID NO: 1244161
ucacauggucguugugaga

SEQ ID NO: 1469405 - RNA, 19 nt, Artificial Sequence
  Description of Artificial Sequence: Synthetic oligonucleotide
  Antisense strand to SEQ ID NO: 1469404
ucucacaacgaccauguga

SEQ ID NO: 1469406 - RNA, 19 nt, Artificial Sequence
  Description of Artificial Sequence: Synthetic oligonucleotide
  Sense strand starting at position 191 of SEQ ID NO: 1244161
auggucguugugagaguua

SEQ ID NO: 1469407 - RNA, 19 nt, Artificial Sequence
  Description of Artificial Sequence: Synthetic oligonucleotide
  Antisense strand to SEQ ID NO: 1469406
uaacucucacaacgaccau

SEQ ID NO: 1469408 - RNA, 19 nt, Artificial Sequence
  Description of Artificial Sequence: Synthetic oligonucleotide
  Sense strand starting at position 193 of SEQ ID NO: 1244161
ggucguugugagaguuaca

SEQ ID NO: 1469409 - RNA, 19 nt, Artificial Sequence
  Description of Artificial Sequence: Synthetic oligonucleotide
  Antisense strand to SEQ ID NO: 1469408
uguaacucucacaacgacc

SEQ ID NO: 1469410 - RNA, 19 nt, Artificial Sequence
  Description of Artificial Sequence: Synthetic oligonucleotide
  Sense strand starting at position 196 of SEQ ID NO: 1244161
cguugugagaguuacauga

SEQ ID NO: 1469411 - RNA, 19 nt, Artificial Sequence
  Description of Artificial Sequence: Synthetic oligonucleotide
  Antisense strand to SEQ ID NO: 1469410
ucauguaacucucacaacg

SEQ ID NO: 1469412 - RNA, 19 nt, Artificial Sequence
  Description of Artificial Sequence: Synthetic oligonucleotide
  Sense strand starting at position 200 of SEQ ID NO: 1244161
gugagaguuacaugaguua

SEQ ID NO: 1469413 - RNA, 19 nt, Artificial Sequence
  Description of Artificial Sequence: Synthetic oligonucleotide
  Antisense strand to SEQ ID NO: 1469412
uaacucauguaacucucac

SEQ ID NO: 1469414 - RNA, 19 nt, Artificial Sequence
  Description of Artificial Sequence: Synthetic oligonucleotide
  Sense strand starting at position 203 of SEQ ID NO: 1244161
agaguuacaugaguuaacu

SEQ ID NO: 1469415 - RNA, 19 nt, Artificial Sequence
  Description of Artificial Sequence: Synthetic oligonucleotide
  Antisense strand to SEQ ID NO: 1469414
aguuaacucauguaacucu

SEQ ID NO: 1469416 - RNA, 19 nt, Artificial Sequence
  Description of Artificial Sequence: Synthetic oligonucleotide
  Sense strand starting at position 345 of SEQ ID NO: 1244161
cccauuuauugauaggaaa

SEQ ID NO: 1469417 - RNA, 19 nt, Artificial Sequence
  Description of Artificial Sequence: Synthetic oligonucleotide
  Antisense strand to SEQ ID NO: 1469416
uuuccuaucaauaaauggg

SEQ ID NO: 1469418 - RNA, 19 nt, Artificial Sequence
  Description of Artificial Sequence: Synthetic oligonucleotide
  Sense strand starting at position 348 of SEQ ID NO: 1244161
auuuauugauaggaaacca

SEQ ID NO: 1469419 - RNA, 19 nt, Artificial Sequence
  Description of Artificial Sequence: Synthetic oligonucleotide
  Antisense strand to SEQ ID NO: 1469418
ugguuuccuaucaauaaau

SEQ ID NO: 1469420 - RNA, 19 nt, Artificial Sequence
  Description of Artificial Sequence: Synthetic oligonucleotide
  Sense strand starting at position 370 of SEQ ID NO: 1244161
ggcagagauuauccaaacu

SEQ ID NO: 1469421 - RNA, 19 nt, Artificial Sequence
  Description of Artificial Sequence: Synthetic oligonucleotide
  Antisense strand to SEQ ID NO: 1469420
aguuuggauaaucucugcc

SEQ ID NO: 1469422 - RNA, 19 nt, Artificial Sequence
  Description of Artificial Sequence: Synthetic oligonucleotide
  Sense strand starting at position 389 of SEQ ID NO: 1244161
cacagaucuccuuagugug

SEQ ID NO: 1469423 - RNA, 19 nt, Artificial Sequence
  Description of Artificial Sequence: Synthetic oligonucleotide
  Antisense strand to SEQ ID NO: 1469422
cacacuaaggagaucugug

SEQ ID NO: 1469424 - RNA, 19 nt, Artificial Sequence
  Description of Artificial Sequence: Synthetic oligonucleotide
  Sense strand starting at position 797 of SEQ ID NO: 1244161
ggugaugggcgcuauggaa

SEQ ID NO: 1469425 - RNA, 19 nt, Artificial Sequence
  Description of Artificial Sequence: Synthetic oligonucleotide
  Antisense strand to SEQ ID NO: 1469424
uuccauagcgcccaucacc

SEQ ID NO: 1469426 - RNA, 19 nt, Artificial Sequence
  Description of Artificial Sequence: Synthetic oligonucleotide
  Sense strand starting at position 898 of SEQ ID NO: 1244161
caggguucccgagggaaug

SEQ ID NO: 1469427 - RNA, 19 nt, Artificial Sequence
  Description of Artificial Sequence: Synthetic oligonucleotide
  Antisense strand to SEQ ID NO: 1469426
cauucccucgggaacccug

SEQ ID NO: 1469428 - RNA, 19 nt, Artificial Sequence
  Description of Artificial Sequence: Synthetic oligonucleotide
  Sense strand starting at position 994 of SEQ ID NO: 1244161
ggaggagugauguggcugu

SEQ ID NO: 1469429 - RNA, 19 nt, Artificial Sequence
  Description of Artificial Sequence: Synthetic oligonucleotide
  Antisense strand to SEQ ID NO: 1469428
acagccacaucacuccucc

SEQ ID NO: 1469430 - RNA, 19 nt, Artificial Sequence
  Description of Artificial Sequence: Synthetic oligonucleotide
  Sense strand starting at position 1507 of SEQ ID NO: 1244161
ucaccauguccaggagauc

SEQ ID NO: 1469431 - RNA, 19 nt, Artificial Sequence
  Description of Artificial Sequence: Synthetic oligonucleotide
  Antisense strand to SEQ ID NO: 1469430
gaucuccuggacaugguga

SEQ ID NO: 1469432 - RNA, 19 nt, Artificial Sequence
  Description of Artificial Sequence: Synthetic oligonucleotide
  Sense strand starting at position 1610 of SEQ ID NO: 1244161
uggcgaugguguccaggaa

SEQ ID NO: 1469433 - RNA, 19 nt, Artificial Sequence
  Description of Artificial Sequence: Synthetic oligonucleotide
  Antisense strand to SEQ ID NO: 1469432
uuccuggacaccaucgcca

SEQ ID NO: 1469434 - RNA, 19 nt, Artificial Sequence
  Description of Artificial Sequence: Synthetic oligonucleotide
  Sense strand starting at position 1613 of SEQ ID NO: 1244161
cgaugguguccaggaaggu

SEQ ID NO: 1469435 - RNA, 19 nt, Artificial Sequence
  Description of Artificial Sequence: Synthetic oligonucleotide
  Antisense strand to SEQ ID NO: 1469434
accuuccuggacaccaucg

SEQ ID NO: 1469436 - RNA, 19 nt, Artificial Sequence
  Description of Artificial Sequence: Synthetic oligonucleotide
  Sense strand starting at position 2203 of SEQ ID NO: 1244161
gccuacuggaguugacaua

SEQ ID NO: 1469437 - RNA, 19 nt, Artificial Sequence
  Description of Artificial Sequence: Synthetic oligonucleotide
  Antisense strand to SEQ ID NO: 1469436
uaugucaacuccaguaggc

SEQ ID NO: 1469438 - RNA, 19 nt, Artificial Sequence
  Description of Artificial Sequence: Synthetic oligonucleotide
  Sense strand starting at position 2454 of SEQ ID NO: 1244161
acaccaaucgugugauauc

SEQ ID NO: 1469439 - RNA, 19 nt, Artificial Sequence
  Description of Artificial Sequence: Synthetic oligonucleotide
  Antisense strand to SEQ ID NO: 1469438
gauaucacacgauuggugu

SEQ ID NO: 1469440 - RNA, 19 nt, Artificial Sequence
  Description of Artificial Sequence: Synthetic oligonucleotide
  Sense strand starting at position 2510 of SEQ ID NO: 1244161
ugauaauucuuaccugaug

SEQ ID NO: 1469441 - RNA, 19 nt, Artificial Sequence
  Description of Artificial Sequence: Synthetic oligonucleotide
  Antisense strand to SEQ ID NO: 1469440
caucagguaagaauuauca

SEQ ID NO: 1469442 - RNA, 19 nt, Artificial Sequence
  Description of Artificial Sequence: Synthetic oligonucleotide
  Sense strand starting at position 2527 of SEQ ID NO: 1244161
ugcaguuaccgugagaaug

SEQ ID NO: 1469443 - RNA, 19 nt, Artificial Sequence
  Description of Artificial Sequence: Synthetic oligonucleotide
  Antisense strand to SEQ ID NO: 1469442
cauucucacgguaacugca

SEQ ID NO: 1469444 - RNA, 19 nt, Artificial Sequence
  Description of Artificial Sequence: Synthetic oligonucleotide
  Sense strand starting at position 2555 of SEQ ID NO: 1244161
aaugcaugucuuugguaca

SEQ ID NO: 1469445 - RNA, 19 nt, Artificial Sequence
  Description of Artificial Sequence: Synthetic oligonucleotide
  Antisense strand to SEQ ID NO: 1469444
uguaccaaagacaugcauu

SEQ ID NO: 1469446 - RNA, 19 nt, Artificial Sequence
  Description of Artificial Sequence: Synthetic oligonucleotide
  Sense strand starting at position 2720 of SEQ ID NO: 1244161
agagucauggcuugcaaau

SEQ ID NO: 1469447 - RNA, 19 nt, Artificial Sequence
  Description of Artificial Sequence: Synthetic oligonucleotide
  Antisense strand to SEQ ID NO: 1469446
auuugcaagccaugacucu

SEQ ID NO: 1469448 - RNA, 19 nt, Artificial Sequence
  Description of Artificial Sequence: Synthetic oligonucleotide
  Sense strand starting at position 2730 of SEQ ID NO: 1244161
cuugcaaaucuccaaggau

SEQ ID NO: 1469449 - RNA, 19 nt, Artificial Sequence
  Description of Artificial Sequence: Synthetic oligonucleotide
  Antisense strand to SEQ ID NO: 1469448
auccuuggagauuugcaag

SEQ ID NO: 1469450 - RNA, 19 nt, Artificial Sequence
  Description of Artificial Sequence: Synthetic oligonucleotide
  Sense strand starting at position 2733 of SEQ ID NO: 1244161
gcaaaucuccaaggaugca

SEQ ID NO: 1469451 - RNA, 19 nt, Artificial Sequence
  Description of Artificial Sequence: Synthetic oligonucleotide
  Antisense strand to SEQ ID NO: 1469450
ugcauccuuggagauuugc

SEQ ID NO: 1469452 - RNA, 19 nt, Artificial Sequence
  Description of Artificial Sequence: Synthetic oligonucleotide
  Sense strand starting at position 2754 of SEQ ID NO: 1244161
ugugaacuuugaccucuaa

SEQ ID NO: 1469453 - RNA, 19 nt, Artificial Sequence
  Description of Artificial Sequence: Synthetic oligonucleotide
  Antisense strand to SEQ ID NO: 1469452
uuagaggucaaaguucaca

SEQ ID NO: 1469454 - RNA, 19 nt, Artificial Sequence
  Description of Artificial Sequence: Synthetic oligonucleotide
  Sense strand starting at position 2887 of SEQ ID NO: 1244161
ggcugcuucccacgacaaa

SEQ ID NO: 1469455 - RNA, 19 nt, Artificial Sequence
  Description of Artificial Sequence: Synthetic oligonucleotide
  Antisense strand to SEQ ID NO: 1469454
uuugucgugggaagcagcc

SEQ ID NO: 1469456 - RNA, 19 nt, Artificial Sequence
  Description of Artificial Sequence: Synthetic oligonucleotide
  Sense strand starting at position 2967 of SEQ ID NO: 1244161
cccucugagcuagguauua

SEQ ID NO: 1469457 - RNA, 19 nt, Artificial Sequence
  Description of Artificial Sequence: Synthetic oligonucleotide
  Antisense strand to SEQ ID NO: 1469456
uaauaccuagcucagaggg

SEQ ID NO: 1469458 - RNA, 19 nt, Artificial Sequence
  Description of Artificial Sequence: Synthetic oligonucleotide
  Sense strand starting at position 2976 of SEQ ID NO: 1244161
cuagguauuaucugggaug

SEQ ID NO: 1469459 - RNA, 19 nt, Artificial Sequence
  Description of Artificial Sequence: Synthetic oligonucleotide
  Antisense strand to SEQ ID NO: 1469458
caucccagauaauaccuag

SEQ ID NO: 1469460 - RNA, 19 nt, Artificial Sequence
  Description of Artificial Sequence: Synthetic oligonucleotide
  Sense strand starting at position 2978 of SEQ ID NO: 1244161
agguauuaucugggauguu

SEQ ID NO: 1469461 - RNA, 19 nt, Artificial Sequence
  Description of Artificial Sequence: Synthetic oligonucleotide
  Antisense strand to SEQ ID NO: 1469460
aacaucccagauaauaccu

SEQ ID NO: 1469462 - RNA, 19 nt, Artificial Sequence
  Description of Artificial Sequence: Synthetic oligonucleotide
  Sense strand starting at position 2981 of SEQ ID NO: 1244161
uauuaucugggauguuaga

SEQ ID NO: 1469463 - RNA, 19 nt, Artificial Sequence
  Description of Artificial Sequence: Synthetic oligonucleotide
  Antisense strand to SEQ ID NO: 1469462
ucuaacaucccagauaaua

SEQ ID NO: 1469464 - RNA, 19 nt, Artificial Sequence
  Description of Artificial Sequence: Synthetic oligonucleotide
  Sense strand starting at position 2991 of SEQ ID NO: 1244161
gauguuagauugcuaagaa

SEQ ID NO: 1469465 - RNA, 19 nt, Artificial Sequence
  Description of Artificial Sequence: Synthetic oligonucleotide
  Antisense strand to SEQ ID NO: 1469464
uucuuagcaaucuaacauc

SEQ ID NO: 1469466 - RNA, 19 nt, Artificial Sequence
  Description of Artificial Sequence: Synthetic oligonucleotide
  Sense strand starting at position 3212 of SEQ ID NO: 1244161
auuacaaugcccggcuaau

SEQ ID NO: 1469467 - RNA, 19 nt, Artificial Sequence
  Description of Artificial Sequence: Synthetic oligonucleotide
  Antisense strand to SEQ ID NO: 1469466
auuagccgggcauuguaau

SEQ ID NO: 1469468 - RNA, 19 nt, Artificial Sequence
  Description of Artificial Sequence: Synthetic oligonucleotide
  Sense strand starting at position 3525 of SEQ ID NO: 1244161
gagggagaaucuguugcau

SEQ ID NO: 1469469 - RNA, 19 nt, Artificial Sequence
  Description of Artificial Sequence: Synthetic oligonucleotide
  Antisense strand to SEQ ID NO: 1469468
augcaacagauucucccuc

SEQ ID NO: 1469470 - RNA, 19 nt, Artificial Sequence
  Description of Artificial Sequence: Synthetic oligonucleotide
  Sense strand starting at position 3827 of SEQ ID NO: 1244161
accaguaacaggugucuuu

SEQ ID NO: 1469471 - RNA, 19 nt, Artificial Sequence
  Description of Artificial Sequence: Synthetic oligonucleotide
  Antisense strand to SEQ ID NO: 1469470
aaagacaccuguuacuggu

SEQ ID NO: 1469472 - RNA, 19 nt, Artificial Sequence
  Description of Artificial Sequence: Synthetic oligonucleotide
  Sense strand starting at position 3880 of SEQ ID NO: 1244161
gcuuaagaaugucccauga

SEQ ID NO: 1469473 - RNA, 19 nt, Artificial Sequence
  Description of Artificial Sequence: Synthetic oligonucleotide
  Antisense strand to SEQ ID NO: 1469472
ucaugggacauucuuaagc

SEQ ID NO: 1469474 - RNA, 19 nt, Artificial Sequence
  Description of Artificial Sequence: Synthetic oligonucleotide
  Sense strand starting at position 3919 of SEQ ID NO: 1244161
agugcaaagcccgaugauu

SEQ ID NO: 1469475 - RNA, 19 nt, Artificial Sequence
  Description of Artificial Sequence: Synthetic oligonucleotide
  Antisense strand to SEQ ID NO: 1469474
aaucaucgggcuuugcacu

SEQ ID NO: 1469476 - RNA, 19 nt, Artificial Sequence
  Description of Artificial Sequence: Synthetic oligonucleotide
  Sense strand starting at position 3931 of SEQ ID NO: 1244161
gaugauuugugagagccuu

SEQ ID NO: 1469477 - RNA, 19 nt, Artificial Sequence
  Description of Artificial Sequence: Synthetic oligonucleotide
  Antisense strand to SEQ ID NO: 1469476
aaggcucucacaaaucauc

SEQ ID NO: 1469478 - RNA, 19 nt, Artificial Sequence
  Description of Artificial Sequence: Synthetic oligonucleotide
  Sense strand starting at position 39 of SEQ ID NO: 1244162
gugggaucuugggcaaauc

SEQ ID NO: 1469479 - RNA, 19 nt, Artificial Sequence
  Description of Artificial Sequence: Synthetic oligonucleotide
  Antisense strand to SEQ ID NO: 1469478
gauuugcccaagaucccac

SEQ ID NO: 1469480 - RNA, 19 nt, Artificial Sequence
  Description of Artificial Sequence: Synthetic oligonucleotide
  Sense strand starting at position 133 of SEQ ID NO: 1244162
gggagauauuuccaaauac

SEQ ID NO: 1469481 - RNA, 19 nt, Artificial Sequence
  Description of Artificial Sequence: Synthetic oligonucleotide
  Antisense strand to SEQ ID NO: 1469480
guauuuggaaauaucuccc

SEQ ID NO: 1469482 - RNA, 19 nt, Artificial Sequence
  Description of Artificial Sequence: Synthetic oligonucleotide
  Sense strand starting at position 180 of SEQ ID NO: 1244162
gagucagccucucuguaga

SEQ ID NO: 1469483 - RNA, 19 nt, Artificial Sequence
  Description of Artificial Sequence: Synthetic oligonucleotide
  Antisense strand to SEQ ID NO: 1469482
ucuacagagaggcugacuc

SEQ ID NO: 1469484 - RNA, 19 nt, Artificial Sequence
  Description of Artificial Sequence: Synthetic oligonucleotide
  Sense strand starting at position 183 of SEQ ID NO: 1244162
ucagccucucuguagagaa

SEQ ID NO: 1469485 - RNA, 19 nt, Artificial Sequence
  Description of Artificial Sequence: Synthetic oligonucleotide
  Antisense strand to SEQ ID NO: 1469484
uucucuacagagaggcuga

SEQ ID NO: 1469486 - RNA, 19 nt, Artificial Sequence
  Description of Artificial Sequence: Synthetic oligonucleotide
  Sense strand starting at position 217 of SEQ ID NO: 1244162
acaugcucuggguaauucu

SEQ ID NO: 1469487 - RNA, 19 nt, Artificial Sequence
  Description of Artificial Sequence: Synthetic oligonucleotide
  Antisense strand to SEQ ID NO: 1469486
agaauuacccagagcaugu

SEQ ID NO: 1469488 - RNA, 19 nt, Artificial Sequence
  Description of Artificial Sequence: Synthetic oligonucleotide
  Sense strand starting at position 407 of SEQ ID NO: 1244162
ucuguucugcuugcaguau

SEQ ID NO: 1469489 - RNA, 19 nt, Artificial Sequence
  Description of Artificial Sequence: Synthetic oligonucleotide
  Antisense strand to SEQ ID NO: 1469488
auacugcaagcagaacaga

SEQ ID NO: 1469490 - RNA, 19 nt, Artificial Sequence
  Description of Artificial Sequence: Synthetic oligonucleotide
  Sense strand starting at position 451 of SEQ ID NO: 1244162
acuccaucugaaugagcuu

SEQ ID NO: 1469491 - RNA, 19 nt, Artificial Sequence
  Description of Artificial Sequence: Synthetic oligonucleotide
  Antisense strand to SEQ ID NO: 1469490
aagcucauucagauggagu

SEQ ID NO: 1469492 - RNA, 19 nt, Artificial Sequence
  Description of Artificial Sequence: Synthetic oligonucleotide
  Sense strand starting at position 463 of SEQ ID NO: 1244162
ugagcuucuuggucaggga

SEQ ID NO: 1469493 - RNA, 19 nt, Artificial Sequence
  Description of Artificial Sequence: Synthetic oligonucleotide
  Antisense strand to SEQ ID NO: 1469492
ucccugaccaagaagcuca

SEQ ID NO: 1469494 - RNA, 19 nt, Artificial Sequence
  Description of Artificial Sequence: Synthetic oligonucleotide
  Sense strand starting at position 464 of SEQ ID NO: 1244162
gagcuucuuggucagggaa

SEQ ID NO: 1469495 - RNA, 19 nt, Artificial Sequence
  Description of Artificial Sequence: Synthetic oligonucleotide
  Antisense strand to SEQ ID NO: 1469494
uucccugaccaagaagcuc

SEQ ID NO: 1469496 - RNA, 19 nt, Artificial Sequence
  Description of Artificial Sequence: Synthetic oligonucleotide
  Sense strand starting at position 588 of SEQ ID NO: 1244162
ggaggugacuccuccucua

SEQ ID NO: 1469497 - RNA, 19 nt, Artificial Sequence
  Description of Artificial Sequence: Synthetic oligonucleotide
  Antisense strand to SEQ ID NO: 1469496
uagaggaggagucaccucc

SEQ ID NO: 1469498 - RNA, 19 nt, Artificial Sequence
  Description of Artificial Sequence: Synthetic oligonucleotide
  Sense strand starting at position 591 of SEQ ID NO: 1244162
ggugacuccuccucuaauc

SEQ ID NO: 1469499 - RNA, 19 nt, Artificial Sequence
  Description of Artificial Sequence: Synthetic oligonucleotide
  Antisense strand to SEQ ID NO: 1469498
gauuagaggaggagucacc

SEQ ID NO: 1469500 - RNA, 19 nt, Artificial Sequence
  Description of Artificial Sequence: Synthetic oligonucleotide
  Sense strand starting at position 600 of SEQ ID NO: 1244162
uccucuaauccuuggagca

SEQ ID NO: 1469501 - RNA, 19 nt, Artificial Sequence
  Description of Artificial Sequence: Synthetic oligonucleotide
  Antisense strand to SEQ ID NO: 1469500
ugcuccaaggauuagagga

SEQ ID NO: 1469502 - RNA, 19 nt, Artificial Sequence
  Description of Artificial Sequence: Synthetic oligonucleotide
  Sense strand starting at position 940 of SEQ ID NO: 1244162
aagccucuggccugaguau

SEQ ID NO: 1469503 - RNA, 19 nt, Artificial Sequence
  Description of Artificial Sequence: Synthetic oligonucleotide
  Antisense strand to SEQ ID NO: 1469502
auacucaggccagaggcuu

SEQ ID NO: 1469504 - RNA, 19 nt, Artificial Sequence
  Description of Artificial Sequence: Synthetic oligonucleotide
  Sense strand starting at position 951 of SEQ ID NO: 1244162
cugaguaugccucaccauc

SEQ ID NO: 1469505 - RNA, 19 nt, Artificial Sequence
  Description of Artificial Sequence: Synthetic oligonucleotide
  Antisense strand to SEQ ID NO: 1469504
gauggugaggcauacucag

SEQ ID NO: 1469506 - RNA, 19 nt, Artificial Sequence
  Description of Artificial Sequence: Synthetic oligonucleotide
  Sense strand starting at position 1635 of SEQ ID NO: 1244162
ugcuccuuguguuccagaa

SEQ ID NO: 1469507 - RNA, 19 nt, Artificial Sequence
  Description of Artificial Sequence: Synthetic oligonucleotide
  Antisense strand to SEQ ID NO: 1469506
uucuggaacacaaggagca

SEQ ID NO: 1469508 - RNA, 19 nt, Artificial Sequence
  Description of Artificial Sequence: Synthetic oligonucleotide
  Sense strand starting at position 1756 of SEQ ID NO: 1244162
ccgguuagaaguuaguaaa

SEQ ID NO: 1469509 - RNA, 19 nt, Artificial Sequence
  Description of Artificial Sequence: Synthetic oligonucleotide
  Antisense strand to SEQ ID NO: 1469508
uuuacuaacuucuaaccgg

SEQ ID NO: 1469510 - RNA, 19 nt, Artificial Sequence
  Description of Artificial Sequence: Synthetic oligonucleotide
  Sense strand starting at position 2196 of SEQ ID NO: 1244162
cgccuuggugcugaaagaa

SEQ ID NO: 1469511 - RNA, 19 nt, Artificial Sequence
  Description of Artificial Sequence: Synthetic oligonucleotide
  Antisense strand to SEQ ID NO: 1469510
uucuuucagcaccaaggcg

SEQ ID NO: 1469512 - RNA, 19 nt, Artificial Sequence
  Description of Artificial Sequence: Synthetic oligonucleotide
  Sense strand starting at position 2334 of SEQ ID NO: 1244162
ggguccuggcccuggaaua

SEQ ID NO: 1469513 - RNA, 19 nt, Artificial Sequence
  Description of Artificial Sequence: Synthetic oligonucleotide
  Antisense strand to SEQ ID NO: 1469512
uauuccagggccaggaccc

SEQ ID NO: 1469514 - RNA, 19 nt, Artificial Sequence
  Description of Artificial Sequence: Synthetic oligonucleotide
  Sense strand starting at position 2355 of SEQ ID NO: 1244162
gcagguguucucugaggag

SEQ ID NO: 1469515 - RNA, 19 nt, Artificial Sequence
  Description of Artificial Sequence: Synthetic oligonucleotide
  Antisense strand to SEQ ID NO: 1469514
cuccucagagaacaccugc

SEQ ID NO: 1469516 - RNA, 19 nt, Artificial Sequence
  Description of Artificial Sequence: Synthetic oligonucleotide
  Sense strand starting at position 2463 of SEQ ID NO: 1244162
gggaguuucccaggcagga

SEQ ID NO: 1469517 - RNA, 19 nt, Artificial Sequence
  Description of Artificial Sequence: Synthetic oligonucleotide
  Antisense strand to SEQ ID NO: 1469516
uccugccugggaaacuccc

SEQ ID NO: 1469518 - RNA, 19 nt, Artificial Sequence
  Description of Artificial Sequence: Synthetic oligonucleotide
  Sense strand starting at position 2515 of SEQ ID NO: 1244162
gguggucuuuggcugaaag

SEQ ID NO: 1469519 - RNA, 19 nt, Artificial Sequence
  Description of Artificial Sequence: Synthetic oligonucleotide
  Antisense strand to SEQ ID NO: 1469518
cuuucagccaaagaccacc

SEQ ID NO: 1469520 - RNA, 19 nt, Artificial Sequence
  Description of Artificial Sequence: Synthetic oligonucleotide
  Sense strand starting at position 2517 of SEQ ID NO: 1244162
uggucuuuggcugaaagcu

SEQ ID NO: 1469521 - RNA, 19 nt, Artificial Sequence
  Description of Artificial Sequence: Synthetic oligonucleotide
  Antisense strand to SEQ ID NO: 1469520
agcuuucagccaaagacca

SEQ ID NO: 1469522 - RNA, 19 nt, Artificial Sequence
  Description of Artificial Sequence: Synthetic oligonucleotide
  Sense strand starting at position 2532 of SEQ ID NO: 1244162
agcuuucuuccgggucuga

SEQ ID NO: 1469523 - RNA, 19 nt, Artificial Sequence
  Description of Artificial Sequence: Synthetic oligonucleotide
  Antisense strand to SEQ ID NO: 1469522
ucagacccggaagaaagcu

SEQ ID NO: 1469524 - RNA, 19 nt, Artificial Sequence
  Description of Artificial Sequence: Synthetic oligonucleotide
  Sense strand starting at position 2605 of SEQ ID NO: 1244162
gcaagugaucuccagcuca

SEQ ID NO: 1469525 - RNA, 19 nt, Artificial Sequence
  Description of Artificial Sequence: Synthetic oligonucleotide
  Antisense strand to SEQ ID NO: 1469524
ugagcuggagaucacuugc

SEQ ID NO: 1469526 - RNA, 19 nt, Artificial Sequence
  Description of Artificial Sequence: Synthetic oligonucleotide
  Sense strand starting at position 2671 of SEQ ID NO: 1244162
gggccugguccugagagga

SEQ ID NO: 1469527 - RNA, 19 nt, Artificial Sequence
  Description of Artificial Sequence: Synthetic oligonucleotide
  Antisense strand to SEQ ID NO: 1469526
uccucucaggaccaggccc

SEQ ID NO: 1469528 - RNA, 19 nt, Artificial Sequence
  Description of Artificial Sequence: Synthetic oligonucleotide
  Sense strand starting at position 3137 of SEQ ID NO: 1244162
gcaagugaccacugauaaa

SEQ ID NO: 1469529 - RNA, 19 nt, Artificial Sequence
  Description of Artificial Sequence: Synthetic oligonucleotide
  Antisense strand to SEQ ID NO: 1469528
uuuaucaguggucacuugc

SEQ ID NO: 1469530 - RNA, 19 nt, Artificial Sequence
  Description of Artificial Sequence: Synthetic oligonucleotide
  Sense strand starting at position 3222 of SEQ ID NO: 1244162
gguuuauugaaagaggcuu

SEQ ID NO: 1469531 - RNA, 19 nt, Artificial Sequence
  Description of Artificial Sequence: Synthetic oligonucleotide
  Antisense strand to SEQ ID NO: 1469530
aagccucuuucaauaaacc

SEQ ID NO: 1469532 - RNA, 19 nt, Artificial Sequence
  Description of Artificial Sequence: Synthetic oligonucleotide
  Sense strand starting at position 3386 of SEQ ID NO: 1244162
aggugaugucagugcagag

SEQ ID NO: 1469533 - RNA, 19 nt, Artificial Sequence
  Description of Artificial Sequence: Synthetic oligonucleotide
  Antisense strand to SEQ ID NO: 1469532
cucugcacugacaucaccu

SEQ ID NO: 1469534 - RNA, 19 nt, Artificial Sequence
  Description of Artificial Sequence: Synthetic oligonucleotide
  Sense strand starting at position 3440 of SEQ ID NO: 1244162
ggugaguuuggaggaagga

SEQ ID NO: 1469535 - RNA, 19 nt, Artificial Sequence
  Description of Artificial Sequence: Synthetic oligonucleotide
  Antisense strand to SEQ ID NO: 1469534
uccuuccuccaaacucacc

SEQ ID NO: 1469536 - RNA, 19 nt, Artificial Sequence
  Description of Artificial Sequence: Synthetic oligonucleotide
  Sense strand starting at position 3456 of SEQ ID NO: 1244162
ggagguaauuaauaaagac

SEQ ID NO: 1469537 - RNA, 19 nt, Artificial Sequence
  Description of Artificial Sequence: Synthetic oligonucleotide
  Antisense strand to SEQ ID NO: 1469536
gucuuuauuaauuaccucc

SEQ ID NO: 1469538 - RNA, 19 nt, Artificial Sequence
  Description of Artificial Sequence: Synthetic oligonucleotide
  Sense strand starting at position 3544 of SEQ ID NO: 1244162
aagaaauauucuggugaca

SEQ ID NO: 1469539 - RNA, 19 nt, Artificial Sequence
  Description of Artificial Sequence: Synthetic oligonucleotide
  Antisense strand to SEQ ID NO: 1469538
ugucaccagaauauuucuu

SEQ ID NO: 1469540 - RNA, 19 nt, Artificial Sequence
  Description of Artificial Sequence: Synthetic oligonucleotide
  Sense strand starting at position 3549 of SEQ ID NO: 1244162
auauucuggugacauaaac

SEQ ID NO: 1469541 - RNA, 19 nt, Artificial Sequence
  Description of Artificial Sequence: Synthetic oligonucleotide
  Antisense strand to SEQ ID NO: 1469540
guuuaugucaccagaauau

SEQ ID NO: 1469542 - RNA, 19 nt, Artificial Sequence
  Description of Artificial Sequence: Synthetic oligonucleotide
  Sense strand starting at position 3656 of SEQ ID NO: 1244162
gcuggauguguguuuguca

SEQ ID NO: 1469543 - RNA, 19 nt, Artificial Sequence
  Description of Artificial Sequence: Synthetic oligonucleotide
  Antisense strand to SEQ ID NO: 1469542
ugacaaacacacauccagc

SEQ ID NO: 1469544 - RNA, 19 nt, Artificial Sequence
  Description of Artificial Sequence: Synthetic oligonucleotide
  Sense strand starting at position 3657 of SEQ ID NO: 1244162
cuggauguguguuugucau

SEQ ID NO: 1469545 - RNA, 19 nt, Artificial Sequence
  Description of Artificial Sequence: Synthetic oligonucleotide
  Antisense strand to SEQ ID NO: 1469544
augacaaacacacauccag

SEQ ID NO: 1469546 - RNA, 19 nt, Artificial Sequence
  Description of Artificial Sequence: Synthetic oligonucleotide
  Sense strand starting at position 3800 of SEQ ID NO: 1244162
uucucaugagcucaguaca

SEQ ID NO: 1469547 - RNA, 19 nt, Artificial Sequence
  Description of Artificial Sequence: Synthetic oligonucleotide
  Antisense strand to SEQ ID NO: 1469546
uguacugagcucaugagaa

SEQ ID NO: 1469548 - RNA, 19 nt, Artificial Sequence
  Description of Artificial Sequence: Synthetic oligonucleotide
  Sense strand starting at position 3923 of SEQ ID NO: 1244162
gccugugcugacuagaguu

SEQ ID NO: 1469549 - RNA, 19 nt, Artificial Sequence
  Description of Artificial Sequence: Synthetic oligonucleotide
  Antisense strand to SEQ ID NO: 1469548
aacucuagucagcacaggc

SEQ ID NO: 1469550 - RNA, 19 nt, Artificial Sequence
  Description of Artificial Sequence: Synthetic oligonucleotide
  Sense strand starting at position 3929 of SEQ ID NO: 1244162
gcugacuagaguuguuaca

SEQ ID NO: 1469551 - RNA, 19 nt, Artificial Sequence
  Description of Artificial Sequence: Synthetic oligonucleotide
  Antisense strand to SEQ ID NO: 1469550
uguaacaacucuagucagc

SEQ ID NO: 1469552 - RNA, 19 nt, Artificial Sequence
  Description of Artificial Sequence: Synthetic oligonucleotide
  Sense strand starting at position 3931 of SEQ ID NO: 1244162
ugacuagaguuguuacaga

SEQ ID NO: 1469553 - RNA, 19 nt, Artificial Sequence
  Description of Artificial Sequence: Synthetic oligonucleotide
  Antisense strand to SEQ ID NO: 1469552
ucuguaacaacucuaguca

SEQ ID NO: 1469554 - RNA, 19 nt, Artificial Sequence
  Description of Artificial Sequence: Synthetic oligonucleotide
  Sense strand starting at position 3982 of SEQ ID NO: 1244162
uagagcugauagcuaguaa

SEQ ID NO: 1469555 - RNA, 19 nt, Artificial Sequence
  Description of Artificial Sequence: Synthetic oligonucleotide
  Antisense strand to SEQ ID NO: 1469554
uuacuagcuaucagcucua

SEQ ID NO: 1469556 - RNA, 19 nt, Artificial Sequence
  Description of Artificial Sequence: Synthetic oligonucleotide
  Sense strand starting at position 3983 of SEQ ID NO: 1244162
agagcugauagcuaguaau

SEQ ID NO: 1469557 - RNA, 19 nt, Artificial Sequence
  Description of Artificial Sequence: Synthetic oligonucleotide
  Antisense strand to SEQ ID NO: 1469556
auuacuagcuaucagcucu

SEQ ID NO: 1469558 - RNA, 19 nt, Artificial Sequence
  Description of Artificial Sequence: Synthetic oligonucleotide
  Sense strand starting at position 30 of SEQ ID NO: 1244163
gggcucuucucagaauaca

SEQ ID NO: 1469559 - RNA, 19 nt, Artificial Sequence
  Description of Artificial Sequence: Synthetic oligonucleotide
  Antisense strand to SEQ ID NO: 1469558
uguauucugagaagagccc

SEQ ID NO: 1469560 - RNA, 19 nt, Artificial Sequence
  Description of Artificial Sequence: Synthetic oligonucleotide
  Sense strand starting at position 411 of SEQ ID NO: 1244163
gcuuuauugcagggcucga

SEQ ID NO: 1469561 - RNA, 19 nt, Artificial Sequence
  Description of Artificial Sequence: Synthetic oligonucleotide
  Antisense strand to SEQ ID NO: 1469560
ucgagcccugcaauaaagc

SEQ ID NO: 1469562 - RNA, 19 nt, Artificial Sequence
  Description of Artificial Sequence: Synthetic oligonucleotide
  Sense strand starting at position 610 of SEQ ID NO: 1244163
ccauucugaucacagguuu

SEQ ID NO: 1469563 - RNA, 19 nt, Artificial Sequence
  Description of Artificial Sequence: Synthetic oligonucleotide
  Antisense strand to SEQ ID NO: 1469562
aaaccugugaucagaaugg

SEQ ID NO: 1469564 - RNA, 19 nt, Artificial Sequence
  Description of Artificial Sequence: Synthetic oligonucleotide
  Sense strand starting at position 907 of SEQ ID NO: 1244163
cugacuugcuggcauggaa

SEQ ID NO: 1469565 - RNA, 19 nt, Artificial Sequence
  Description of Artificial Sequence: Synthetic oligonucleotide
  Antisense strand to SEQ ID NO: 1469564
uuccaugccagcaagucag

SEQ ID NO: 1469566 - RNA, 19 nt, Artificial Sequence
  Description of Artificial Sequence: Synthetic oligonucleotide
  Sense strand starting at position 1211 of SEQ ID NO: 1244163
gaagguuagccaggagcaa

SEQ ID NO: 1469567 - RNA, 19 nt, Artificial Sequence
  Description of Artificial Sequence: Synthetic oligonucleotide
  Antisense strand to SEQ ID NO: 1469566
uugcuccuggcuaaccuuc

SEQ ID NO: 1469568 - RNA, 19 nt, Artificial Sequence
  Description of Artificial Sequence: Synthetic oligonucleotide
  Sense strand starting at position 1212 of SEQ ID NO: 1244163
aagguuagccaggagcaaa

SEQ ID NO: 1469569 - RNA, 19 nt, Artificial Sequence
  Description of Artificial Sequence: Synthetic oligonucleotide
  Antisense strand to SEQ ID NO: 1469568
uuugcuccuggcuaaccuu

SEQ ID NO: 1469570 - RNA, 19 nt, Artificial Sequence
  Description of Artificial Sequence: Synthetic oligonucleotide
  Sense strand starting at position 1224 of SEQ ID NO: 1244163
gagcaaaguuccuuguggu

SEQ ID NO: 1469571 - RNA, 19 nt, Artificial Sequence
  Description of Artificial Sequence: Synthetic oligonucleotide
  Antisense strand to SEQ ID NO: 1469570
accacaaggaacuuugcuc

SEQ ID NO: 1469572 - RNA, 19 nt, Artificial Sequence
  Description of Artificial Sequence: Synthetic oligonucleotide
  Sense strand starting at position 1239 of SEQ ID NO: 1244163
uggugguagccggagacau

SEQ ID NO: 1469573 - RNA, 19 nt, Artificial Sequence
  Description of Artificial Sequence: Synthetic oligonucleotide
  Antisense strand to SEQ ID NO: 1469572
augucuccggcuaccacca

SEQ ID NO: 1469574 - RNA, 19 nt, Artificial Sequence
  Description of Artificial Sequence: Synthetic oligonucleotide
  Sense strand starting at position 2408 of SEQ ID NO: 1244163
ugugcacacucgcucauau

SEQ ID NO: 1469575 - RNA, 19 nt, Artificial Sequence
  Description of Artificial Sequence: Synthetic oligonucleotide
  Antisense strand to SEQ ID NO: 1469574
auaugagcgagugugcaca

SEQ ID NO: 1469576 - RNA, 19 nt, Artificial Sequence
  Description of Artificial Sequence: Synthetic oligonucleotide
  Sense strand starting at position 2472 of SEQ ID NO: 1244163
ggucuaagcuugugcauuc

SEQ ID NO: 1469577 - RNA, 19 nt, Artificial Sequence
  Description of Artificial Sequence: Synthetic oligonucleotide
  Antisense strand to SEQ ID NO: 1469576
gaaugcacaagcuuagacc

SEQ ID NO: 1469578 - RNA, 19 nt, Artificial Sequence
  Description of Artificial Sequence: Synthetic oligonucleotide
  Sense strand starting at position 2479 of SEQ ID NO: 1244163
gcuugugcauucccacaga

SEQ ID NO: 1469579 - RNA, 19 nt, Artificial Sequence
  Description of Artificial Sequence: Synthetic oligonucleotide
  Antisense strand to SEQ ID NO: 1469578
ucugugggaaugcacaagc

SEQ ID NO: 1469580 - RNA, 19 nt, Artificial Sequence
  Description of Artificial Sequence: Synthetic oligonucleotide
  Sense strand starting at position 2733 of SEQ ID NO: 1244163
ccagcuuucugaggccuau

SEQ ID NO: 1469581 - RNA, 19 nt, Artificial Sequence
  Description of Artificial Sequence: Synthetic oligonucleotide
  Antisense strand to SEQ ID NO: 1469580
auaggccucagaaagcugg

SEQ ID NO: 1469582 - RNA, 19 nt, Artificial Sequence
  Description of Artificial Sequence: Synthetic oligonucleotide
  Sense strand starting at position 2877 of SEQ ID NO: 1244163
gcccuagggccucagaauu

SEQ ID NO: 1469583 - RNA, 19 nt, Artificial Sequence
  Description of Artificial Sequence: Synthetic oligonucleotide
  Antisense strand to SEQ ID NO: 1469582
aauucugaggcccuagggc

SEQ ID NO: 1469584 - RNA, 19 nt, Artificial Sequence
  Description of Artificial Sequence: Synthetic oligonucleotide
  Sense strand starting at position 2983 of SEQ ID NO: 1244163
auauaauuaugugucugca

SEQ ID NO: 1469585 - RNA, 19 nt, Artificial Sequence
  Description of Artificial Sequence: Synthetic oligonucleotide
  Antisense strand to SEQ ID NO: 1469584
ugcagacacauaauuauau

SEQ ID NO: 1469586 - RNA, 19 nt, Artificial Sequence
  Description of Artificial Sequence: Synthetic oligonucleotide
  Sense strand starting at position 2985 of SEQ ID NO: 1244163
auaauuaugugucugcaca

SEQ ID NO: 1469587 - RNA, 19 nt, Artificial Sequence
  Description of Artificial Sequence: Synthetic oligonucleotide
  Antisense strand to SEQ ID NO: 1469586
ugugcagacacauaauuau

SEQ ID NO: 1469588 - RNA, 19 nt, Artificial Sequence
  Description of Artificial Sequence: Synthetic oligonucleotide
  Sense strand starting at position 2986 of SEQ ID NO: 1244163
uaauuaugugucugcacag

SEQ ID NO: 1469589 - RNA, 19 nt, Artificial Sequence
  Description of Artificial Sequence: Synthetic oligonucleotide
  Antisense strand to SEQ ID NO: 1469588
cugugcagacacauaauua

SEQ ID NO: 1469590 - RNA, 19 nt, Artificial Sequence
  Description of Artificial Sequence: Synthetic oligonucleotide
  Sense strand starting at position 3019 of SEQ ID NO: 1244163
gcaggauucuaaccgagga

SEQ ID NO: 1469591 - RNA, 19 nt, Artificial Sequence
  Description of Artificial Sequence: Synthetic oligonucleotide
  Antisense strand to SEQ ID NO: 1469590
uccucgguuagaauccugc

SEQ ID NO: 1469592 - RNA, 19 nt, Artificial Sequence
  Description of Artificial Sequence: Synthetic oligonucleotide
  Sense strand starting at position 3244 of SEQ ID NO: 1244163
cccuguugucaguagaaau

SEQ ID NO: 1469593 - RNA, 19 nt, Artificial Sequence
  Description of Artificial Sequence: Synthetic oligonucleotide
  Antisense strand to SEQ ID NO: 1469592
auuucuacugacaacaggg

SEQ ID NO: 1469594 - RNA, 19 nt, Artificial Sequence
  Description of Artificial Sequence: Synthetic oligonucleotide
  Sense strand starting at position 3277 of SEQ ID NO: 1244163
ggcuguagcaaggauuaaa

SEQ ID NO: 1469595 - RNA, 19 nt, Artificial Sequence
  Description of Artificial Sequence: Synthetic oligonucleotide
  Antisense strand to SEQ ID NO: 1469594
uuuaauccuugcuacagcc

SEQ ID NO: 1469596 - RNA, 19 nt, Artificial Sequence
  Description of Artificial Sequence: Synthetic oligonucleotide
  Sense strand starting at position 3298 of SEQ ID NO: 1244163
agaugagucuaccuaaagu

SEQ ID NO: 1469597 - RNA, 19 nt, Artificial Sequence
  Description of Artificial Sequence: Synthetic oligonucleotide
  Antisense strand to SEQ ID NO: 1469596
acuuuagguagacucaucu

SEQ ID NO: 1469598 - RNA, 19 nt, Artificial Sequence
  Description of Artificial Sequence: Synthetic oligonucleotide
  Sense strand starting at position 3308 of SEQ ID NO: 1244163
accuaaagugcuuagcacu

SEQ ID NO: 1469599 - RNA, 19 nt, Artificial Sequence
  Description of Artificial Sequence: Synthetic oligonucleotide
  Antisense strand to SEQ ID NO: 1469598
agugcuaagcacuuuaggu

SEQ ID NO: 1469600 - RNA, 19 nt, Artificial Sequence
  Description of Artificial Sequence: Synthetic oligonucleotide
  Sense strand starting at position 3324 of SEQ ID NO: 1244163
acuugacuuggcugguaaa

SEQ ID NO: 1469601 - RNA, 19 nt, Artificial Sequence
  Description of Artificial Sequence: Synthetic oligonucleotide
  Antisense strand to SEQ ID NO: 1469600
uuuaccagccaagucaagu

SEQ ID NO: 1469602 - RNA, 19 nt, Artificial Sequence
  Description of Artificial Sequence: Synthetic oligonucleotide
  Sense strand starting at position 3360 of SEQ ID NO: 1244163
ucaauauguucugagcucu

SEQ ID NO: 1469603 - RNA, 19 nt, Artificial Sequence
  Description of Artificial Sequence: Synthetic oligonucleotide
  Antisense strand to SEQ ID NO: 1469602
agagcucagaacauauuga

SEQ ID NO: 1469604 - RNA, 19 nt, Artificial Sequence
  Description of Artificial Sequence: Synthetic oligonucleotide
  Sense strand starting at position 3366 of SEQ ID NO: 1244163
uguucugagcucugugcua

SEQ ID NO: 1469605 - RNA, 19 nt, Artificial Sequence
  Description of Artificial Sequence: Synthetic oligonucleotide
  Antisense strand to SEQ ID NO: 1469604
uagcacagagcucagaaca

SEQ ID NO: 1469606 - RNA, 19 nt, Artificial Sequence
  Description of Artificial Sequence: Synthetic oligonucleotide
  Sense strand starting at position 3368 of SEQ ID NO: 1244163
uucugagcucugugcuaug

SEQ ID NO: 1469607 - RNA, 19 nt, Artificial Sequence
  Description of Artificial Sequence: Synthetic oligonucleotide
  Antisense strand to SEQ ID NO: 1469606
cauagcacagagcucagaa

SEQ ID NO: 1469608 - RNA, 19 nt, Artificial Sequence
  Description of Artificial Sequence: Synthetic oligonucleotide
  Sense strand starting at position 3418 of SEQ ID NO: 1244163
ggccaucugugguggauaa

SEQ ID NO: 1469609 - RNA, 19 nt, Artificial Sequence
  Description of Artificial Sequence: Synthetic oligonucleotide
  Antisense strand to SEQ ID NO: 1469608
uuauccaccacagauggcc

SEQ ID NO: 1469610 - RNA, 19 nt, Artificial Sequence
  Description of Artificial Sequence: Synthetic oligonucleotide
  Sense strand starting at position 3482 of SEQ ID NO: 1244163
gguggucacuugcuuaauu

SEQ ID NO: 1469611 - RNA, 19 nt, Artificial Sequence
  Description of Artificial Sequence: Synthetic oligonucleotide
  Antisense strand to SEQ ID NO: 1469610
aauuaagcaagugaccacc

SEQ ID NO: 1469612 - RNA, 19 nt, Artificial Sequence
  Description of Artificial Sequence: Synthetic oligonucleotide
  Sense strand starting at position 3483 of SEQ ID NO: 1244163
guggucacuugcuuaauua

SEQ ID NO: 1469613 - RNA, 19 nt, Artificial Sequence
  Description of Artificial Sequence: Synthetic oligonucleotide
  Antisense strand to SEQ ID NO: 1469612
uaauuaagcaagugaccac

SEQ ID NO: 1469614 - RNA, 19 nt, Artificial Sequence
  Description of Artificial Sequence: Synthetic oligonucleotide
  Sense strand starting at position 3484 of SEQ ID NO: 1244163
uggucacuugcuuaauuac

SEQ ID NO: 1469615 - RNA, 19 nt, Artificial Sequence
  Description of Artificial Sequence: Synthetic oligonucleotide
  Antisense strand to SEQ ID NO: 1469614
guaauuaagcaagugacca

SEQ ID NO: 1469616 - RNA, 19 nt, Artificial Sequence
  Description of Artificial Sequence: Synthetic oligonucleotide
  Sense strand starting at position 3536 of SEQ ID NO: 1244163
ucagguguguccucaacuu

SEQ ID NO: 1469617 - RNA, 19 nt, Artificial Sequence
  Description of Artificial Sequence: Synthetic oligonucleotide
  Antisense strand to SEQ ID NO: 1469616
aaguugaggacacaccuga

SEQ ID NO: 1469618 - RNA, 19 nt, Artificial Sequence
  Description of Artificial Sequence: Synthetic oligonucleotide
  Sense strand starting at position 3928 of SEQ ID NO: 1244163
cuccucugggucuaagauu

SEQ ID NO: 1469619 - RNA, 19 nt, Artificial Sequence
  Description of Artificial Sequence: Synthetic oligonucleotide
  Antisense strand to SEQ ID NO: 1469618
aaucuuagacccagaggag

SEQ ID NO: 1469620 - RNA, 19 nt, Artificial Sequence
  Description of Artificial Sequence: Synthetic oligonucleotide
  Sense strand starting at position 3937 of SEQ ID NO: 1244163
gucuaagauucugacagcu

SEQ ID NO: 1469621 - RNA, 19 nt, Artificial Sequence
  Description of Artificial Sequence: Synthetic oligonucleotide
  Antisense strand to SEQ ID NO: 1469620
agcugucagaaucuuagac

SEQ ID NO: 1469622 - RNA, 19 nt, Artificial Sequence
  Description of Artificial Sequence: Synthetic oligonucleotide
  Sense strand starting at position 3947 of SEQ ID NO: 1244163
cugacagcuccugggacaa

SEQ ID NO: 1469623 - RNA, 19 nt, Artificial Sequence
  Description of Artificial Sequence: Synthetic oligonucleotide
  Antisense strand to SEQ ID NO: 1469622
uugucccaggagcugucag

SEQ ID NO: 1469624 - RNA, 19 nt, Artificial Sequence
  Description of Artificial Sequence: Synthetic oligonucleotide
  Sense strand starting at position 3949 of SEQ ID NO: 1244163
gacagcuccugggacaagu

SEQ ID NO: 1469625 - RNA, 19 nt, Artificial Sequence
  Description of Artificial Sequence: Synthetic oligonucleotide
  Antisense strand to SEQ ID NO: 1469624
acuugucccaggagcuguc

SEQ ID NO: 1469626 - RNA, 19 nt, Artificial Sequence
  Description of Artificial Sequence: Synthetic oligonucleotide
  Sense strand starting at position 24 of SEQ ID NO: 1244164
ucuacaggaccucauguau

SEQ ID NO: 1469627 - RNA, 19 nt, Artificial Sequence
  Description of Artificial Sequence: Synthetic oligonucleotide
  Antisense strand to SEQ ID NO: 1469626
auacaugagguccuguaga

SEQ ID NO: 1469628 - RNA, 19 nt, Artificial Sequence
  Description of Artificial Sequence: Synthetic oligonucleotide
  Sense strand starting at position 151 of SEQ ID NO: 1244164
acugcucuucuccaaggau

SEQ ID NO: 1469629 - RNA, 19 nt, Artificial Sequence
  Description of Artificial Sequence: Synthetic oligonucleotide
  Antisense strand to SEQ ID NO: 1469628
auccuuggagaagagcagu

SEQ ID NO: 1469630 - RNA, 19 nt, Artificial Sequence
  Description of Artificial Sequence: Synthetic oligonucleotide
  Sense strand starting at position 198 of SEQ ID NO: 1244164
caggucuuuggcuaaauau

SEQ ID NO: 1469631 - RNA, 19 nt, Artificial Sequence
  Description of Artificial Sequence: Synthetic oligonucleotide
  Antisense strand to SEQ ID NO: 1469630
auauuuagccaaagaccug

SEQ ID NO: 1469632 - RNA, 19 nt, Artificial Sequence
  Description of Artificial Sequence: Synthetic oligonucleotide
  Sense strand starting at position 226 of SEQ ID NO: 1244164
agugaagacuucuuugaca

SEQ ID NO: 1469633 - RNA, 19 nt, Artificial Sequence
  Description of Artificial Sequence: Synthetic oligonucleotide
  Antisense strand to SEQ ID NO: 1469632
ugucaaagaagucuucacu

SEQ ID NO: 1469634 - RNA, 19 nt, Artificial Sequence
  Description of Artificial Sequence: Synthetic oligonucleotide
  Sense strand starting at position 228 of SEQ ID NO: 1244164
ugaagacuucuuugacagu

SEQ ID NO: 1469635 - RNA, 19 nt, Artificial Sequence
  Description of Artificial Sequence: Synthetic oligonucleotide
  Antisense strand to SEQ ID NO: 1469634
acugucaaagaagucuuca

SEQ ID NO: 1469636 - RNA, 19 nt, Artificial Sequence
  Description of Artificial Sequence: Synthetic oligonucleotide
  Sense strand starting at position 302 of SEQ ID NO: 1244164
cuucuuaugcuggaacuca

SEQ ID NO: 1469637 - RNA, 19 nt, Artificial Sequence
  Description of Artificial Sequence: Synthetic oligonucleotide
  Antisense strand to SEQ ID NO: 1469636
ugaguuccagcauaagaag

SEQ ID NO: 1469638 - RNA, 19 nt, Artificial Sequence
  Description of Artificial Sequence: Synthetic oligonucleotide
  Sense strand starting at position 319 of SEQ ID NO: 1244164
caaguucuuguaugaggac

SEQ ID NO: 1469639 - RNA, 19 nt, Artificial Sequence
  Description of Artificial Sequence: Synthetic oligonucleotide
  Antisense strand to SEQ ID NO: 1469638
guccucauacaagaacuug

SEQ ID NO: 1469640 - RNA, 19 nt, Artificial Sequence
  Description of Artificial Sequence: Synthetic oligonucleotide
  Sense strand starting at position 375 of SEQ ID NO: 1244164
uguauuauuucggugccaa

SEQ ID NO: 1469641 - RNA, 19 nt, Artificial Sequence
  Description of Artificial Sequence: Synthetic oligonucleotide
  Antisense strand to SEQ ID NO: 1469640
uuggcaccgaaauaauaca

SEQ ID NO: 1469642 - RNA, 19 nt, Artificial Sequence
  Description of Artificial Sequence: Synthetic oligonucleotide
  Sense strand starting at position 376 of SEQ ID NO: 1244164
guauuauuucggugccaaa

SEQ ID NO: 1469643 - RNA, 19 nt, Artificial Sequence
  Description of Artificial Sequence: Synthetic oligonucleotide
  Antisense strand to SEQ ID NO: 1469642
uuuggcaccgaaauaauac

SEQ ID NO: 1469644 - RNA, 19 nt, Artificial Sequence
  Description of Artificial Sequence: Synthetic oligonucleotide
  Sense strand starting at position 564 of SEQ ID NO: 1244164
cugaaauucuuguugagaa

SEQ ID NO: 1469645 - RNA, 19 nt, Artificial Sequence
  Description of Artificial Sequence: Synthetic oligonucleotide
  Antisense strand to SEQ ID NO: 1469644
uucucaacaagaauuucag

SEQ ID NO: 1469646 - RNA, 19 nt, Artificial Sequence
  Description of Artificial Sequence: Synthetic oligonucleotide
  Sense strand starting at position 646 of SEQ ID NO: 1244164
guugucagucuuguuguau

SEQ ID NO: 1469647 - RNA, 19 nt, Artificial Sequence
  Description of Artificial Sequence: Synthetic oligonucleotide
  Antisense strand to SEQ ID NO: 1469646
auacaacaagacugacaac

SEQ ID NO: 1469648 - RNA, 19 nt, Artificial Sequence
  Description of Artificial Sequence: Synthetic oligonucleotide
  Sense strand starting at position 652 of SEQ ID NO: 1244164
agucuuguuguauaugaga

SEQ ID NO: 1469649 - RNA, 19 nt, Artificial Sequence
  Description of Artificial Sequence: Synthetic oligonucleotide
  Antisense strand to SEQ ID NO: 1469648
ucucauauacaacaagacu

SEQ ID NO: 1469650 - RNA, 19 nt, Artificial Sequence
  Description of Artificial Sequence: Synthetic oligonucleotide
  Sense strand starting at position 985 of SEQ ID NO: 1244164
ucuuacuagccauaagagu

SEQ ID NO: 1469651 - RNA, 19 nt, Artificial Sequence
  Description of Artificial Sequence: Synthetic oligonucleotide
  Antisense strand to SEQ ID NO: 1469650
acucuuauggcuaguaaga

SEQ ID NO: 1469652 - RNA, 19 nt, Artificial Sequence
  Description of Artificial Sequence: Synthetic oligonucleotide
  Sense strand starting at position 994 of SEQ ID NO: 1244164
ccauaagaguaauauuuag

SEQ ID NO: 1469653 - RNA, 19 nt, Artificial Sequence
  Description of Artificial Sequence: Synthetic oligonucleotide
  Antisense strand to SEQ ID NO: 1469652
cuaaauauuacucuuaugg

SEQ ID NO: 1469654 - RNA, 19 nt, Artificial Sequence
  Description of Artificial Sequence: Synthetic oligonucleotide
  Sense strand starting at position 1137 of SEQ ID NO: 1244164
ucaauuauauaugucagag

SEQ ID NO: 1469655 - RNA, 19 nt, Artificial Sequence
  Description of Artificial Sequence: Synthetic oligonucleotide
  Antisense strand to SEQ ID NO: 1469654
cucugacauauauaauuga

SEQ ID NO: 1469656 - RNA, 19 nt, Artificial Sequence
  Description of Artificial Sequence: Synthetic oligonucleotide
  Sense strand starting at position 1161 of SEQ ID NO: 1244164
guggcauccagagagcaaa

SEQ ID NO: 1469657 - RNA, 19 nt, Artificial Sequence
  Description of Artificial Sequence: Synthetic oligonucleotide
  Antisense strand to SEQ ID NO: 1469656
uuugcucucuggaugccac

SEQ ID NO: 1469658 - RNA, 19 nt, Artificial Sequence
  Description of Artificial Sequence: Synthetic oligonucleotide
  Sense strand starting at position 1492 of SEQ ID NO: 1244164
uuugaaagacauugcagaa

SEQ ID NO: 1469659 - RNA, 19 nt, Artificial Sequence
  Description of Artificial Sequence: Synthetic oligonucleotide
  Antisense strand to SEQ ID NO: 1469658
uucugcaaugucuuucaaa

SEQ ID NO: 1469660 - RNA, 19 nt, Artificial Sequence
  Description of Artificial Sequence: Synthetic oligonucleotide
  Sense strand starting at position 1506 of SEQ ID NO: 1244164
cagaauacuccauguggua

SEQ ID NO: 1469661 - RNA, 19 nt, Artificial Sequence
  Description of Artificial Sequence: Synthetic oligonucleotide
  Antisense strand to SEQ ID NO: 1469660
uaccacauggaguauucug

SEQ ID NO: 1469662 - RNA, 19 nt, Artificial Sequence
  Description of Artificial Sequence: Synthetic oligonucleotide
  Sense strand starting at position 1593 of SEQ ID NO: 1244164
uguaaacaccaaugugaga

SEQ ID NO: 1469663 - RNA, 19 nt, Artificial Sequence
  Description of Artificial Sequence: Synthetic oligonucleotide
  Antisense strand to SEQ ID NO: 1469662
ucucacauugguguuuaca

SEQ ID NO: 1469664 - RNA, 19 nt, Artificial Sequence
  Description of Artificial Sequence: Synthetic oligonucleotide
  Sense strand starting at position 1671 of SEQ ID NO: 1244164
cuuaaagcacuuggauaaa

SEQ ID NO: 1469665 - RNA, 19 nt, Artificial Sequence
  Description of Artificial Sequence: Synthetic oligonucleotide
  Antisense strand to SEQ ID NO: 1469664
uuuauccaagugcuuuaag

SEQ ID NO: 1469666 - RNA, 19 nt, Artificial Sequence
  Description of Artificial Sequence: Synthetic oligonucleotide
  Sense strand starting at position 1726 of SEQ ID NO: 1244164
aauauuuacguuugcugga

SEQ ID NO: 1469667 - RNA, 19 nt, Artificial Sequence
  Description of Artificial Sequence: Synthetic oligonucleotide
  Antisense strand to SEQ ID NO: 1469666
uccagcaaacguaaauauu

SEQ ID NO: 1469668 - RNA, 19 nt, Artificial Sequence
  Description of Artificial Sequence: Synthetic oligonucleotide
  Sense strand starting at position 1727 of SEQ ID NO: 1244164
auauuuacguuugcuggaa

SEQ ID NO: 1469669 - RNA, 19 nt, Artificial Sequence
  Description of Artificial Sequence: Synthetic oligonucleotide
  Antisense strand to SEQ ID NO: 1469668
uuccagcaaacguaaauau

SEQ ID NO: 1469670 - RNA, 19 nt, Artificial Sequence
  Description of Artificial Sequence: Synthetic oligonucleotide
  Sense strand starting at position 1728 of SEQ ID NO: 1244164
uauuuacguuugcuggaaa

SEQ ID NO: 1469671 - RNA, 19 nt, Artificial Sequence
  Description of Artificial Sequence: Synthetic oligonucleotide
  Antisense strand to SEQ ID NO: 1469670
uuuccagcaaacguaaaua

SEQ ID NO: 1469672 - RNA, 19 nt, Artificial Sequence
  Description of Artificial Sequence: Synthetic oligonucleotide
  Sense strand starting at position 1731 of SEQ ID NO: 1244164
uuacguuugcuggaaacag

SEQ ID NO: 1469673 - RNA, 19 nt, Artificial Sequence
  Description of Artificial Sequence: Synthetic oligonucleotide
  Antisense strand to SEQ ID NO: 1469672
cuguuuccagcaaacguaa

SEQ ID NO: 1469674 - RNA, 19 nt, Artificial Sequence
  Description of Artificial Sequence: Synthetic oligonucleotide
  Sense strand starting at position 2113 of SEQ ID NO: 1244164
aguauauccugacuaaguu

SEQ ID NO: 1469675 - RNA, 19 nt, Artificial Sequence
  Description of Artificial Sequence: Synthetic oligonucleotide
  Antisense strand to SEQ ID NO: 1469674
aacuuagucaggauauacu

SEQ ID NO: 1469676 - RNA, 19 nt, Artificial Sequence
  Description of Artificial Sequence: Synthetic oligonucleotide
  Sense strand starting at position 2114 of SEQ ID NO: 1244164
guauauccugacuaaguuu

SEQ ID NO: 1469677 - RNA, 19 nt, Artificial Sequence
  Description of Artificial Sequence: Synthetic oligonucleotide
  Antisense strand to SEQ ID NO: 1469676
aaacuuagucaggauauac

SEQ ID NO: 1469678 - RNA, 19 nt, Artificial Sequence
  Description of Artificial Sequence: Synthetic oligonucleotide
  Sense strand starting at position 2185 of SEQ ID NO: 1244164
caacaaugccuguaaguga

SEQ ID NO: 1469679 - RNA, 19 nt, Artificial Sequence
  Description of Artificial Sequence: Synthetic oligonucleotide
  Antisense strand to SEQ ID NO: 1469678
ucacuuacaggcauuguug

SEQ ID NO: 1469680 - RNA, 19 nt, Artificial Sequence
  Description of Artificial Sequence: Synthetic oligonucleotide
  Sense strand starting at position 2609 of SEQ ID NO: 1244164
uugaguccuaauggguuaa

SEQ ID NO: 1469681 - RNA, 19 nt, Artificial Sequence
  Description of Artificial Sequence: Synthetic oligonucleotide
  Antisense strand to SEQ ID NO: 1469680
uuaacccauuaggacucaa

SEQ ID NO: 1469682 - RNA, 19 nt, Artificial Sequence
  Description of Artificial Sequence: Synthetic oligonucleotide
  Sense strand starting at position 2610 of SEQ ID NO: 1244164
ugaguccuaauggguuaaa

SEQ ID NO: 1469683 - RNA, 19 nt, Artificial Sequence
  Description of Artificial Sequence: Synthetic oligonucleotide
  Antisense strand to SEQ ID NO: 1469682
uuuaacccauuaggacuca

SEQ ID NO: 1469684 - RNA, 19 nt, Artificial Sequence
  Description of Artificial Sequence: Synthetic oligonucleotide
  Sense strand starting at position 2611 of SEQ ID NO: 1244164
gaguccuaauggguuaaau

SEQ ID NO: 1469685 - RNA, 19 nt, Artificial Sequence
  Description of Artificial Sequence: Synthetic oligonucleotide
  Antisense strand to SEQ ID NO: 1469684
auuuaacccauuaggacuc

SEQ ID NO: 1469686 - RNA, 19 nt, Artificial Sequence
  Description of Artificial Sequence: Synthetic oligonucleotide
  Sense strand starting at position 2797 of SEQ ID NO: 1244164
gggaguuguguccaggaau

SEQ ID NO: 1469687 - RNA, 19 nt, Artificial Sequence
  Description of Artificial Sequence: Synthetic oligonucleotide
  Antisense strand to SEQ ID NO: 1469686
auuccuggacacaacuccc

SEQ ID NO: 1469688 - RNA, 19 nt, Artificial Sequence
  Description of Artificial Sequence: Synthetic oligonucleotide
  Sense strand starting at position 2958 of SEQ ID NO: 1244164
ugcuguuugacgguuguua

SEQ ID NO: 1469689 - RNA, 19 nt, Artificial Sequence
  Description of Artificial Sequence: Synthetic oligonucleotide
  Antisense strand to SEQ ID NO: 1469688
uaacaaccgucaaacagca

SEQ ID NO: 1469690 - RNA, 19 nt, Artificial Sequence
  Description of Artificial Sequence: Synthetic oligonucleotide
  Sense strand starting at position 3061 of SEQ ID NO: 1244164
cugagaaacugcuuaaccu

SEQ ID NO: 1469691 - RNA, 19 nt, Artificial Sequence
  Description of Artificial Sequence: Synthetic oligonucleotide
  Antisense strand to SEQ ID NO: 1469690
agguuaagcaguuucucag

SEQ ID NO: 1469692 - RNA, 19 nt, Artificial Sequence
  Description of Artificial Sequence: Synthetic oligonucleotide
  Sense strand starting at position 3062 of SEQ ID NO: 1244164
ugagaaacugcuuaaccuu

SEQ ID NO: 1469693 - RNA, 19 nt, Artificial Sequence
  Description of Artificial Sequence: Synthetic oligonucleotide
  Antisense strand to SEQ ID NO: 1469692
aagguuaagcaguuucuca

SEQ ID NO: 1469694 - RNA, 19 nt, Artificial Sequence
  Description of Artificial Sequence: Synthetic oligonucleotide
  Sense strand starting at position 3179 of SEQ ID NO: 1244164
gucacuaagguauacauau

SEQ ID NO: 1469695 - RNA, 19 nt, Artificial Sequence
  Description of Artificial Sequence: Synthetic oligonucleotide
  Antisense strand to SEQ ID NO: 1469694
auauguauaccuuagugac

SEQ ID NO: 1469696 - RNA, 19 nt, Artificial Sequence
  Description of Artificial Sequence: Synthetic oligonucleotide
  Sense strand starting at position 3186 of SEQ ID NO: 1244164
agguauacauauucugaua

SEQ ID NO: 1469697 - RNA, 19 nt, Artificial Sequence
  Description of Artificial Sequence: Synthetic oligonucleotide
  Antisense strand to SEQ ID NO: 1469696
uaucagaauauguauaccu

SEQ ID NO: 1469698 - RNA, 19 nt, Artificial Sequence
  Description of Artificial Sequence: Synthetic oligonucleotide
  Sense strand starting at position 3239 of SEQ ID NO: 1244164
ugcagaagaguuugaacuc

SEQ ID NO: 1469699 - RNA, 19 nt, Artificial Sequence
  Description of Artificial Sequence: Synthetic oligonucleotide
  Antisense strand to SEQ ID NO: 1469698
gaguucaaacucuucugca

SEQ ID NO: 1469700 - RNA, 19 nt, Artificial Sequence
  Description of Artificial Sequence: Synthetic oligonucleotide
  Sense strand starting at position 3396 of SEQ ID NO: 1244164
ugguuuauccaugauguug

SEQ ID NO: 1469701 - RNA, 19 nt, Artificial Sequence
  Description of Artificial Sequence: Synthetic oligonucleotide
  Antisense strand to SEQ ID NO: 1469700
caacaucauggauaaacca

SEQ ID NO: 1469702 - RNA, 19 nt, Artificial Sequence
  Description of Artificial Sequence: Synthetic oligonucleotide
  Sense strand starting at position 3769 of SEQ ID NO: 1244164
acucacauguaaguagaaa

SEQ ID NO: 1469703 - RNA, 19 nt, Artificial Sequence
  Description of Artificial Sequence: Synthetic oligonucleotide
  Antisense strand to SEQ ID NO: 1469702
uuucuacuuacaugugagu

SEQ ID NO: 1469704 - RNA, 19 nt, Artificial Sequence
  Description of Artificial Sequence: Synthetic oligonucleotide
  Sense strand starting at position 3980 of SEQ ID NO: 1244164
acaagaauuuguuacuuga

SEQ ID NO: 1469705 - RNA, 19 nt, Artificial Sequence
  Description of Artificial Sequence: Synthetic oligonucleotide
  Antisense strand to SEQ ID NO: 1469704
ucaaguaacaaauucuugu

SEQ ID NO: 1469706 - RNA, 19 nt, Artificial Sequence
  Description of Artificial Sequence: Synthetic oligonucleotide
  Sense strand starting at position 77 of SEQ ID NO: 1244165
auggcugaccugcagagau

SEQ ID NO: 1469707 - RNA, 19 nt, Artificial Sequence
  Description of Artificial Sequence: Synthetic oligonucleotide
  Antisense strand to SEQ ID NO: 1469706
aucucugcaggucagccau

SEQ ID NO: 1469708 - RNA, 19 nt, Artificial Sequence
  Description of Artificial Sequence: Synthetic oligonucleotide
  Sense strand starting at position 127 of SEQ ID NO: 1244165
gaauguggaugucugaaag

SEQ ID NO: 1469709 - RNA, 19 nt, Artificial Sequence
  Description of Artificial Sequence: Synthetic oligonucleotide
  Antisense strand to SEQ ID NO: 1469708
cuuucagacauccacauuc

SEQ ID NO: 1469710 - RNA, 19 nt, Artificial Sequence
  Description of Artificial Sequence: Synthetic oligonucleotide
  Sense strand starting at position 135 of SEQ ID NO: 1244165
augucugaaagcugaagau

SEQ ID NO: 1469711 - RNA, 19 nt, Artificial Sequence
  Description of Artificial Sequence: Synthetic oligonucleotide
  Antisense strand to SEQ ID NO: 1469710
aucuucagcuuucagacau

SEQ ID NO: 1469712 - RNA, 19 nt, Artificial Sequence
  Description of Artificial Sequence: Synthetic oligonucleotide
  Sense strand starting at position 153 of SEQ ID NO: 1244165
uuaaauauugcaggucaga

SEQ ID NO: 1469713 - RNA, 19 nt, Artificial Sequence
  Description of Artificial Sequence: Synthetic oligonucleotide
  Antisense strand to SEQ ID NO: 1469712
ucugaccugcaauauuuaa

SEQ ID NO: 1469714 - RNA, 19 nt, Artificial Sequence
  Description of Artificial Sequence: Synthetic oligonucleotide
  Sense strand starting at position 324 of SEQ ID NO: 1244165
ugguauauuacugagagcu

SEQ ID NO: 1469715 - RNA, 19 nt, Artificial Sequence
  Description of Artificial Sequence: Synthetic oligonucleotide
  Antisense strand to SEQ ID NO: 1469714
agcucucaguaauauacca

SEQ ID NO: 1469716 - RNA, 19 nt, Artificial Sequence
  Description of Artificial Sequence: Synthetic oligonucleotide
  Sense strand starting at position 334 of SEQ ID NO: 1244165
cugagagcuuagcuauuaa

SEQ ID NO: 1469717 - RNA, 19 nt, Artificial Sequence
  Description of Artificial Sequence: Synthetic oligonucleotide
  Antisense strand to SEQ ID NO: 1469716
uuaauagcuaagcucucag

SEQ ID NO: 1469718 - RNA, 19 nt, Artificial Sequence
  Description of Artificial Sequence: Synthetic oligonucleotide
  Sense strand starting at position 428 of SEQ ID NO: 1244165
gcuccuugugugucaggua

SEQ ID NO: 1469719 - RNA, 19 nt, Artificial Sequence
  Description of Artificial Sequence: Synthetic oligonucleotide
  Antisense strand to SEQ ID NO: 1469718
uaccugacacacaaggagc

SEQ ID NO: 1469720 - RNA, 19 nt, Artificial Sequence
  Description of Artificial Sequence: Synthetic oligonucleotide
  Sense strand starting at position 433 of SEQ ID NO: 1244165
uugugugucagguacacaa

SEQ ID NO: 1469721 - RNA, 19 nt, Artificial Sequence
  Description of Artificial Sequence: Synthetic oligonucleotide
  Antisense strand to SEQ ID NO: 1469720
uuguguaccugacacacaa

SEQ ID NO: 1469722 - RNA, 19 nt, Artificial Sequence
  Description of Artificial Sequence: Synthetic oligonucleotide
  Sense strand starting at position 437 of SEQ ID NO: 1244165
gugucagguacacaauuau

SEQ ID NO: 1469723 - RNA, 19 nt, Artificial Sequence
  Description of Artificial Sequence: Synthetic oligonucleotide
  Antisense strand to SEQ ID NO: 1469722
auaauuguguaccugacac

SEQ ID NO: 1469724 - RNA, 19 nt, Artificial Sequence
  Description of Artificial Sequence: Synthetic oligonucleotide
  Sense strand starting at position 518 of SEQ ID NO: 1244165
agagaagcuuaguaauuug

SEQ ID NO: 1469725 - RNA, 19 nt, Artificial Sequence
  Description of Artificial Sequence: Synthetic oligonucleotide
  Antisense strand to SEQ ID NO: 1469724
caaauuacuaagcuucucu

SEQ ID NO: 1469726 - RNA, 19 nt, Artificial Sequence
  Description of Artificial Sequence: Synthetic oligonucleotide
  Sense strand starting at position 759 of SEQ ID NO: 1244165
cugcauauggcucaaugau

SEQ ID NO: 1469727 - RNA, 19 nt, Artificial Sequence
  Description of Artificial Sequence: Synthetic oligonucleotide
  Antisense strand to SEQ ID NO: 1469726
aucauugagccauaugcag

SEQ ID NO: 1469728 - RNA, 19 nt, Artificial Sequence
  Description of Artificial Sequence: Synthetic oligonucleotide
  Sense strand starting at position 840 of SEQ ID NO: 1244165
ccaucugaauucucaggau

SEQ ID NO: 1469729 - RNA, 19 nt, Artificial Sequence
  Description of Artificial Sequence: Synthetic oligonucleotide
  Antisense strand to SEQ ID NO: 1469728
auccugagaauucagaugg

SEQ ID NO: 1469730 - RNA, 19 nt, Artificial Sequence
  Description of Artificial Sequence: Synthetic oligonucleotide
  Sense strand starting at position 1083 of SEQ ID NO: 1244165
auagcaacaguccagauua

SEQ ID NO: 1469731 - RNA, 19 nt, Artificial Sequence
  Description of Artificial Sequence: Synthetic oligonucleotide
  Antisense strand to SEQ ID NO: 1469730
uaaucuggacuguugcuau

SEQ ID NO: 1469732 - RNA, 19 nt, Artificial Sequence
  Description of Artificial Sequence: Synthetic oligonucleotide
  Sense strand starting at position 1085 of SEQ ID NO: 1244165
agcaacaguccagauuaca

SEQ ID NO: 1469733 - RNA, 19 nt, Artificial Sequence
  Description of Artificial Sequence: Synthetic oligonucleotide
  Antisense strand to SEQ ID NO: 1469732
uguaaucuggacuguugcu

SEQ ID NO: 1469734 - RNA, 19 nt, Artificial Sequence
  Description of Artificial Sequence: Synthetic oligonucleotide
  Sense strand starting at position 1184 of SEQ ID NO: 1244165
gcuugaagggcuuauuauu

SEQ ID NO: 1469735 - RNA, 19 nt, Artificial Sequence
  Description of Artificial Sequence: Synthetic oligonucleotide
  Antisense strand to SEQ ID NO: 1469734
aauaauaagcccuucaagc

SEQ ID NO: 1469736 - RNA, 19 nt, Artificial Sequence
  Description of Artificial Sequence: Synthetic oligonucleotide
  Sense strand starting at position 1245 of SEQ ID NO: 1244165
uacggcauuucugucuaua

SEQ ID NO: 1469737 - RNA, 19 nt, Artificial Sequence
  Description of Artificial Sequence: Synthetic oligonucleotide
  Antisense strand to SEQ ID NO: 1469736
uauagacagaaaugccgua

SEQ ID NO: 1469738 - RNA, 19 nt, Artificial Sequence
  Description of Artificial Sequence: Synthetic oligonucleotide
  Sense strand starting at position 1247 of SEQ ID NO: 1244165
cggcauuucugucuauauu

SEQ ID NO: 1469739 - RNA, 19 nt, Artificial Sequence
  Description of Artificial Sequence: Synthetic oligonucleotide
  Antisense strand to SEQ ID NO: 1469738
aauauagacagaaaugccg

SEQ ID NO: 1469740 - RNA, 19 nt, Artificial Sequence
  Description of Artificial Sequence: Synthetic oligonucleotide
  Sense strand starting at position 1321 of SEQ ID NO: 1244165
ucaaauuugcgaugcuacu

SEQ ID NO: 1469741 - RNA, 19 nt, Artificial Sequence
  Description of Artificial Sequence: Synthetic oligonucleotide
  Antisense strand to SEQ ID NO: 1469740
aguagcaucgcaaauuuga

SEQ ID NO: 1469742 - RNA, 19 nt, Artificial Sequence
  Description of Artificial Sequence: Synthetic oligonucleotide
  Sense strand starting at position 1442 of SEQ ID NO: 1244165
cguugcuccacgucaguaa

SEQ ID NO: 1469743 - RNA, 19 nt, Artificial Sequence
  Description of Artificial Sequence: Synthetic oligonucleotide
  Antisense strand to SEQ ID NO: 1469742
uuacugacguggagcaacg

SEQ ID NO: 1469744 - RNA, 19 nt, Artificial Sequence
  Description of Artificial Sequence: Synthetic oligonucleotide
  Sense strand starting at position 1472 of SEQ ID NO: 1244165
uggcuaagucaucauccuu

SEQ ID NO: 1469745 - RNA, 19 nt, Artificial Sequence
  Description of Artificial Sequence: Synthetic oligonucleotide
  Antisense strand to SEQ ID NO: 1469744
aaggaugaugacuuagcca

SEQ ID NO: 1469746 - RNA, 19 nt, Artificial Sequence
  Description of Artificial Sequence: Synthetic oligonucleotide
  Sense strand starting at position 1513 of SEQ ID NO: 1244165
uguuacuucccuuaaugga

SEQ ID NO: 1469747 - RNA, 19 nt, Artificial Sequence
  Description of Artificial Sequence: Synthetic oligonucleotide
  Antisense strand to SEQ ID NO: 1469746
uccauuaagggaaguaaca

SEQ ID NO: 1469748 - RNA, 19 nt, Artificial Sequence
  Description of Artificial Sequence: Synthetic oligonucleotide
  Sense strand starting at position 1523 of SEQ ID NO: 1244165
cuuaauggaucugcaaaug

SEQ ID NO: 1469749 - RNA, 19 nt, Artificial Sequence
  Description of Artificial Sequence: Synthetic oligonucleotide
  Antisense strand to SEQ ID NO: 1469748
cauuugcagauccauuaag

SEQ ID NO: 1469750 - RNA, 19 nt, Artificial Sequence
  Description of Artificial Sequence: Synthetic oligonucleotide
  Sense strand starting at position 1580 of SEQ ID NO: 1244165
agagauauaugagagaaag

SEQ ID NO: 1469751 - RNA, 19 nt, Artificial Sequence
  Description of Artificial Sequence: Synthetic oligonucleotide
  Antisense strand to SEQ ID NO: 1469750
cuuucucucauauaucucu

SEQ ID NO: 1469752 - RNA, 19 nt, Artificial Sequence
  Description of Artificial Sequence: Synthetic oligonucleotide
  Sense strand starting at position 1618 of SEQ ID NO: 1244165
agagcaugccuccauaaag

SEQ ID NO: 1469753 - RNA, 19 nt, Artificial Sequence
  Description of Artificial Sequence: Synthetic oligonucleotide
  Antisense strand to SEQ ID NO: 1469752
cuuuauggaggcaugcucu

SEQ ID NO: 1469754 - RNA, 19 nt, Artificial Sequence
  Description of Artificial Sequence: Synthetic oligonucleotide
  Sense strand starting at position 1761 of SEQ ID NO: 1244165
acgaucuuaccuuagugaa

SEQ ID NO: 1469755 - RNA, 19 nt, Artificial Sequence
  Description of Artificial Sequence: Synthetic oligonucleotide
  Antisense strand to SEQ ID NO: 1469754
uucacuaagguaagaucgu

SEQ ID NO: 1469756 - RNA, 19 nt, Artificial Sequence
  Description of Artificial Sequence: Synthetic oligonucleotide
  Sense strand starting at position 1763 of SEQ ID NO: 1244165
gaucuuaccuuagugaaag

SEQ ID NO: 1469757 - RNA, 19 nt, Artificial Sequence
  Description of Artificial Sequence: Synthetic oligonucleotide
  Antisense strand to SEQ ID NO: 1469756
cuuucacuaagguaagauc

SEQ ID NO: 1469758 - RNA, 19 nt, Artificial Sequence
  Description of Artificial Sequence: Synthetic oligonucleotide
  Sense strand starting at position 2091 of SEQ ID NO: 1244165
agaauagccuucuuccaug

SEQ ID NO: 1469759 - RNA, 19 nt, Artificial Sequence
  Description of Artificial Sequence: Synthetic oligonucleotide
  Antisense strand to SEQ ID NO: 1469758
cauggaagaaggcuauucu

SEQ ID NO: 1469760 - RNA, 19 nt, Artificial Sequence
  Description of Artificial Sequence: Synthetic oligonucleotide
  Sense strand starting at position 2974 of SEQ ID NO: 1244165
agauaauggagcugguaga

SEQ ID NO: 1469761 - RNA, 19 nt, Artificial Sequence
  Description of Artificial Sequence: Synthetic oligonucleotide
  Antisense strand to SEQ ID NO: 1469760
ucuaccagcuccauuaucu

SEQ ID NO: 1469762 - RNA, 19 nt, Artificial Sequence
  Description of Artificial Sequence: Synthetic oligonucleotide
  Sense strand starting at position 2975 of SEQ ID NO: 1244165
gauaauggagcugguagaa

SEQ ID NO: 1469763 - RNA, 19 nt, Artificial Sequence
  Description of Artificial Sequence: Synthetic oligonucleotide
  Antisense strand to SEQ ID NO: 1469762
uucuaccagcuccauuauc

SEQ ID NO: 1469764 - RNA, 19 nt, Artificial Sequence
  Description of Artificial Sequence: Synthetic oligonucleotide
  Sense strand starting at position 3045 of SEQ ID NO: 1244165
uugauaugcuuucugacag

SEQ ID NO: 1469765 - RNA, 19 nt, Artificial Sequence
  Description of Artificial Sequence: Synthetic oligonucleotide
  Antisense strand to SEQ ID NO: 1469764
cugucagaaagcauaucaa

SEQ ID NO: 1469766 - RNA, 19 nt, Artificial Sequence
  Description of Artificial Sequence: Synthetic oligonucleotide
  Sense strand starting at position 3085 of SEQ ID NO: 1244165
acaauauauuagucuggag

SEQ ID NO: 1469767 - RNA, 19 nt, Artificial Sequence
  Description of Artificial Sequence: Synthetic oligonucleotide
  Antisense strand to SEQ ID NO: 1469766
cuccagacuaauauauugu

SEQ ID NO: 1469768 - RNA, 19 nt, Artificial Sequence
  Description of Artificial Sequence: Synthetic oligonucleotide
  Sense strand starting at position 3087 of SEQ ID NO: 1244165
aauauauuagucuggagcu

SEQ ID NO: 1469769 - RNA, 19 nt, Artificial Sequence
  Description of Artificial Sequence: Synthetic oligonucleotide
  Antisense strand to SEQ ID NO: 1469768
agcuccagacuaauauauu

SEQ ID NO: 1469770 - RNA, 19 nt, Artificial Sequence
  Description of Artificial Sequence: Synthetic oligonucleotide
  Sense strand starting at position 3089 of SEQ ID NO: 1244165
uauauuagucuggagcuca

SEQ ID NO: 1469771 - RNA, 19 nt, Artificial Sequence
  Description of Artificial Sequence: Synthetic oligonucleotide
  Antisense strand to SEQ ID NO: 1469770
ugagcuccagacuaauaua

SEQ ID NO: 1469772 - RNA, 19 nt, Artificial Sequence
  Description of Artificial Sequence: Synthetic oligonucleotide
  Sense strand starting at position 3139 of SEQ ID NO: 1244165
ggaaguuaucaguguacau

SEQ ID NO: 1469773 - RNA, 19 nt, Artificial Sequence
  Description of Artificial Sequence: Synthetic oligonucleotide
  Antisense strand to SEQ ID NO: 1469772
auguacacugauaacuucc

SEQ ID NO: 1469774 - RNA, 19 nt, Artificial Sequence
  Description of Artificial Sequence: Synthetic oligonucleotide
  Sense strand starting at position 3141 of SEQ ID NO: 1244165
aaguuaucaguguacauag

SEQ ID NO: 1469775 - RNA, 19 nt, Artificial Sequence
  Description of Artificial Sequence: Synthetic oligonucleotide
  Antisense strand to SEQ ID NO: 1469774
cuauguacacugauaacuu

SEQ ID NO: 1469776 - RNA, 19 nt, Artificial Sequence
  Description of Artificial Sequence: Synthetic oligonucleotide
  Sense strand starting at position 3197 of SEQ ID NO: 1244165
gagucagaguaguuagaaa

SEQ ID NO: 1469777 - RNA, 19 nt, Artificial Sequence
  Description of Artificial Sequence: Synthetic oligonucleotide
  Antisense strand to SEQ ID NO: 1469776
uuucuaacuacucugacuc

SEQ ID NO: 1469778 - RNA, 19 nt, Artificial Sequence
  Description of Artificial Sequence: Synthetic oligonucleotide
  Sense strand starting at position 3332 of SEQ ID NO: 1244165
ugacaugugauacgaagua

SEQ ID NO: 1469779 - RNA, 19 nt, Artificial Sequence
  Description of Artificial Sequence: Synthetic oligonucleotide
  Antisense strand to SEQ ID NO: 1469778
uacuucguaucacauguca

SEQ ID NO: 1469780 - RNA, 19 nt, Artificial Sequence
  Description of Artificial Sequence: Synthetic oligonucleotide
  Sense strand starting at position 3374 of SEQ ID NO: 1244165
caguguggucgggcauagu

SEQ ID NO: 1469781 - RNA, 19 nt, Artificial Sequence
  Description of Artificial Sequence: Synthetic oligonucleotide
  Antisense strand to SEQ ID NO: 1469780
acuaugcccgaccacacug

SEQ ID NO: 1469782 - RNA, 19 nt, Artificial Sequence
  Description of Artificial Sequence: Synthetic oligonucleotide
  Sense strand starting at position 3930 of SEQ ID NO: 1244165
auguguguuagauauuaac

SEQ ID NO: 1469783 - RNA, 19 nt, Artificial Sequence
  Description of Artificial Sequence: Synthetic oligonucleotide
  Antisense strand to SEQ ID NO: 1469782
guuaauaucuaacacacau

SEQ ID NO: 1469784 - RNA, 19 nt, Artificial Sequence
  Description of Artificial Sequence: Synthetic oligonucleotide
  Sense strand starting at position 3983 of SEQ ID NO: 1244165
gauuuagcagugugauguc

SEQ ID NO: 1469785 - RNA, 19 nt, Artificial Sequence
  Description of Artificial Sequence: Synthetic oligonucleotide
  Antisense strand to SEQ ID NO: 1469784
gacaucacacugcuaaauc

SEQ ID NO: 1469786 - RNA, 19 nt, Artificial Sequence
  Description of Artificial Sequence: Synthetic oligonucleotide
  Sense strand starting at position 360 of SEQ ID NO: 1244166
ggcaacuguuggugaguca

SEQ ID NO: 1469787 - RNA, 19 nt, Artificial Sequence
  Description of Artificial Sequence: Synthetic oligonucleotide
  Antisense strand to SEQ ID NO: 1469786
ugacucaccaacaguugcc

SEQ ID NO: 1469788 - RNA, 19 nt, Artificial Sequence
  Description of Artificial Sequence: Synthetic oligonucleotide
  Sense strand starting at position 734 of SEQ ID NO: 1244166
guggaugagcugcagaguu

SEQ ID NO: 1469789 - RNA, 19 nt, Artificial Sequence
  Description of Artificial Sequence: Synthetic oligonucleotide
  Antisense strand to SEQ ID NO: 1469788
aacucugcagcucauccac

SEQ ID NO: 1469790 - RNA, 19 nt, Artificial Sequence
  Description of Artificial Sequence: Synthetic oligonucleotide
  Sense strand starting at position 744 of SEQ ID NO: 1244166
ugcagaguuucagagaggu

SEQ ID NO: 1469791 - RNA, 19 nt, Artificial Sequence
  Description of Artificial Sequence: Synthetic oligonucleotide
  Antisense strand to SEQ ID NO: 1469790
accucucugaaacucugca

SEQ ID NO: 1469792 - RNA, 19 nt, Artificial Sequence
  Description of Artificial Sequence: Synthetic oligonucleotide
  Sense strand starting at position 2151 of SEQ ID NO: 1244166
cucacauucuguggcguaa

SEQ ID NO: 1469793 - RNA, 19 nt, Artificial Sequence
  Description of Artificial Sequence: Synthetic oligonucleotide
  Antisense strand to SEQ ID NO: 1469792
uuacgccacagaaugugag

SEQ ID NO: 1469794 - RNA, 19 nt, Artificial Sequence
  Description of Artificial Sequence: Synthetic oligonucleotide
  Sense strand starting at position 2155 of SEQ ID NO: 1244166
cauucuguggcguaaagau

SEQ ID NO: 1469795 - RNA, 19 nt, Artificial Sequence
  Description of Artificial Sequence: Synthetic oligonucleotide
  Antisense strand to SEQ ID NO: 1469794
aucuuuacgccacagaaug

SEQ ID NO: 1469796 - RNA, 19 nt, Artificial Sequence
  Description of Artificial Sequence: Synthetic oligonucleotide
  Sense strand starting at position 2255 of SEQ ID NO: 1244166
gaggccaggucagaagauu

SEQ ID NO: 1469797 - RNA, 19 nt, Artificial Sequence
  Description of Artificial Sequence: Synthetic oligonucleotide
  Antisense strand to SEQ ID NO: 1469796
aaucuucugaccuggccuc

SEQ ID NO: 1469798 - RNA, 19 nt, Artificial Sequence
  Description of Artificial Sequence: Synthetic oligonucleotide
  Sense strand starting at position 3129 of SEQ ID NO: 1244166
ggccucagaugucauauua

SEQ ID NO: 1469799 - RNA, 19 nt, Artificial Sequence
  Description of Artificial Sequence: Synthetic oligonucleotide
  Antisense strand to SEQ ID NO: 1469798
uaauaugacaucugaggcc

SEQ ID NO: 1469800 - RNA, 19 nt, Artificial Sequence
  Description of Artificial Sequence: Synthetic oligonucleotide
  Sense strand starting at position 3338 of SEQ ID NO: 1244166
gcaccuaucucaugagguu

SEQ ID NO: 1469801 - RNA, 19 nt, Artificial Sequence
  Description of Artificial Sequence: Synthetic oligonucleotide
  Antisense strand to SEQ ID NO: 1469800
aaccucaugagauaggugc

SEQ ID NO: 1469802 - RNA, 19 nt, Artificial Sequence
  Description of Artificial Sequence: Synthetic oligonucleotide
  Sense strand starting at position 3350 of SEQ ID NO: 1244166
ugagguugcaauggaguuu

SEQ ID NO: 1469803 - RNA, 19 nt, Artificial Sequence
  Description of Artificial Sequence: Synthetic oligonucleotide
  Antisense strand to SEQ ID NO: 1469802
aaacuccauugcaaccuca

SEQ ID NO: 1469804 - RNA, 19 nt, Artificial Sequence
  Description of Artificial Sequence: Synthetic oligonucleotide
  Sense strand starting at position 3361 of SEQ ID NO: 1244166
uggaguuuccaugagugaa

SEQ ID NO: 1469805 - RNA, 19 nt, Artificial Sequence
  Description of Artificial Sequence: Synthetic oligonucleotide
  Antisense strand to SEQ ID NO: 1469804
uucacucauggaaacucca

SEQ ID NO: 1469806 - RNA, 19 nt, Artificial Sequence
  Description of Artificial Sequence: Synthetic oligonucleotide
  Sense strand starting at position 3363 of SEQ ID NO: 1244166
gaguuuccaugagugaaca

SEQ ID NO: 1469807 - RNA, 19 nt, Artificial Sequence
  Description of Artificial Sequence: Synthetic oligonucleotide
  Antisense strand to SEQ ID NO: 1469806
uguucacucauggaaacuc

SEQ ID NO: 1469808 - RNA, 19 nt, Artificial Sequence
  Description of Artificial Sequence: Synthetic oligonucleotide
  Sense strand starting at position 3908 of SEQ ID NO: 1244166
ucuggaaugucccacaacu

SEQ ID NO: 1469809 - RNA, 19 nt, Artificial Sequence
  Description of Artificial Sequence: Synthetic oligonucleotide
  Antisense strand to SEQ ID NO: 1469808
aguugugggacauuccaga

SEQ ID NO: 1469810 - RNA, 19 nt, Artificial Sequence
  Description of Artificial Sequence: Synthetic oligonucleotide
  Sense strand starting at position 19 of SEQ ID NO: 1244167
aaauguguccuguaauaug

SEQ ID NO: 1469811 - RNA, 19 nt, Artificial Sequence
  Description of Artificial Sequence: Synthetic oligonucleotide
  Antisense strand to SEQ ID NO: 1469810
cauauuacaggacacauuu

SEQ ID NO: 1469812 - RNA, 19 nt, Artificial Sequence
  Description of Artificial Sequence: Synthetic oligonucleotide
  Sense strand starting at position 37 of SEQ ID NO: 1244167
ggucauggugugcaauaaa

SEQ ID NO: 1469813 - RNA, 19 nt, Artificial Sequence
  Description of Artificial Sequence: Synthetic oligonucleotide
  Antisense strand to SEQ ID NO: 1469812
uuuauugcacaccaugacc

SEQ ID NO: 1469814 - RNA, 19 nt, Artificial Sequence
  Description of Artificial Sequence: Synthetic oligonucleotide
  Sense strand starting at position 40 of SEQ ID NO: 1244167
cauggugugcaauaaauaa

SEQ ID NO: 1469815 - RNA, 19 nt, Artificial Sequence
  Description of Artificial Sequence: Synthetic oligonucleotide
  Antisense strand to SEQ ID NO: 1469814
uuauuuauugcacaccaug

SEQ ID NO: 1469816 - RNA, 19 nt, Artificial Sequence
  Description of Artificial Sequence: Synthetic oligonucleotide
  Sense strand starting at position 198 of SEQ ID NO: 1244167
uugcuaugugagcacaacu

SEQ ID NO: 1469817 - RNA, 19 nt, Artificial Sequence
  Description of Artificial Sequence: Synthetic oligonucleotide
  Antisense strand to SEQ ID NO: 1469816
aguugugcucacauagcaa

SEQ ID NO: 1469818 - RNA, 19 nt, Artificial Sequence
  Description of Artificial Sequence: Synthetic oligonucleotide
  Sense strand starting at position 363 of SEQ ID NO: 1244167
gcauuugcauacgcugaaa

SEQ ID NO: 1469819 - RNA, 19 nt, Artificial Sequence
  Description of Artificial Sequence: Synthetic oligonucleotide
  Antisense strand to SEQ ID NO: 1469818
uuucagcguaugcaaaugc

SEQ ID NO: 1469820 - RNA, 19 nt, Artificial Sequence
  Description of Artificial Sequence: Synthetic oligonucleotide
  Sense strand starting at position 384 of SEQ ID NO: 1244167
cagacauguuugguaaaua

SEQ ID NO: 1469821 - RNA, 19 nt, Artificial Sequence
  Description of Artificial Sequence: Synthetic oligonucleotide
  Antisense strand to SEQ ID NO: 1469820
uauuuaccaaacaugucug

SEQ ID NO: 1469822 - RNA, 19 nt, Artificial Sequence
  Description of Artificial Sequence: Synthetic oligonucleotide
  Sense strand starting at position 537 of SEQ ID NO: 1244167
uagaaagacuguguucuuu

SEQ ID NO: 1469823 - RNA, 19 nt, Artificial Sequence
  Description of Artificial Sequence: Synthetic oligonucleotide
  Antisense strand to SEQ ID NO: 1469822
aaagaacacagucuuucua

SEQ ID NO: 1469824 - RNA, 19 nt, Artificial Sequence
  Description of Artificial Sequence: Synthetic oligonucleotide
  Sense strand starting at position 592 of SEQ ID NO: 1244167
ucaaauauuucuuauggag

SEQ ID NO: 1469825 - RNA, 19 nt, Artificial Sequence
  Description of Artificial Sequence: Synthetic oligonucleotide
  Antisense strand to SEQ ID NO: 1469824
cuccauaagaaauauuuga

SEQ ID NO: 1469826 - RNA, 19 nt, Artificial Sequence
  Description of Artificial Sequence: Synthetic oligonucleotide
  Sense strand starting at position 769 of SEQ ID NO: 1244167
augaaacauuuggaaguga

SEQ ID NO: 1469827 - RNA, 19 nt, Artificial Sequence
  Description of Artificial Sequence: Synthetic oligonucleotide
  Antisense strand to SEQ ID NO: 1469826
ucacuuccaaauguuucau

SEQ ID NO: 1469828 - RNA, 19 nt, Artificial Sequence
  Description of Artificial Sequence: Synthetic oligonucleotide
  Sense strand starting at position 797 of SEQ ID NO: 1244167
cgcuaacaaguguacagau

SEQ ID NO: 1469829 - RNA, 19 nt, Artificial Sequence
  Description of Artificial Sequence: Synthetic oligonucleotide
  Antisense strand to SEQ ID NO: 1469828
aucuguacacuuguuagcg

SEQ ID NO: 1469830 - RNA, 19 nt, Artificial Sequence
  Description of Artificial Sequence: Synthetic oligonucleotide
  Sense strand starting at position 832 of SEQ ID NO: 1244167
acaacauugguuggcgaga

SEQ ID NO: 1469831 - RNA, 19 nt, Artificial Sequence
  Description of Artificial Sequence: Synthetic oligonucleotide
  Antisense strand to SEQ ID NO: 1469830
ucucgccaaccaauguugu

SEQ ID NO: 1469832 - RNA, 19 nt, Artificial Sequence
  Description of Artificial Sequence: Synthetic oligonucleotide
  Sense strand starting at position 837 of SEQ ID NO: 1244167
auugguuggcgagaggaaa

SEQ ID NO: 1469833 - RNA, 19 nt, Artificial Sequence
  Description of Artificial Sequence: Synthetic oligonucleotide
  Antisense strand to SEQ ID NO: 1469832
uuuccucucgccaaccaau

SEQ ID NO: 1469834 - RNA, 19 nt, Artificial Sequence
  Description of Artificial Sequence: Synthetic oligonucleotide
  Sense strand starting at position 1012 of SEQ ID NO: 1244167
gugaucauccuaugauauc

SEQ ID NO: 1469835 - RNA, 19 nt, Artificial Sequence
  Description of Artificial Sequence: Synthetic oligonucleotide
  Antisense strand to SEQ ID NO: 1469834
gauaucauaggaugaucac

SEQ ID NO: 1469836 - RNA, 19 nt, Artificial Sequence
  Description of Artificial Sequence: Synthetic oligonucleotide
  Sense strand starting at position 1222 of SEQ ID NO: 1244167
gggagagugauauguaaug

SEQ ID NO: 1469837 - RNA, 19 nt, Artificial Sequence
  Description of Artificial Sequence: Synthetic oligonucleotide
  Antisense strand to SEQ ID NO: 1469836
cauuacauaucacucuccc

SEQ ID NO: 1469838 - RNA, 19 nt, Artificial Sequence
  Description of Artificial Sequence: Synthetic oligonucleotide
  Sense strand starting at position 1224 of SEQ ID NO: 1244167
gagagugauauguaaugug

SEQ ID NO: 1469839 - RNA, 19 nt, Artificial Sequence
  Description of Artificial Sequence: Synthetic oligonucleotide
  Antisense strand to SEQ ID NO: 1469838
cacauuacauaucacucuc

SEQ ID NO: 1469840 - RNA, 19 nt, Artificial Sequence
  Description of Artificial Sequence: Synthetic oligonucleotide
  Sense strand starting at position 1229 of SEQ ID NO: 1244167
ugauauguaaugugaaagu

SEQ ID NO: 1469841 - RNA, 19 nt, Artificial Sequence
  Description of Artificial Sequence: Synthetic oligonucleotide
  Antisense strand to SEQ ID NO: 1469840
acuuucacauuacauauca

SEQ ID NO: 1469842 - RNA, 19 nt, Artificial Sequence
  Description of Artificial Sequence: Synthetic oligonucleotide
  Sense strand starting at position 1335 of SEQ ID NO: 1244167
acagcuauacuugaagcaa

SEQ ID NO: 1469843 - RNA, 19 nt, Artificial Sequence
  Description of Artificial Sequence: Synthetic oligonucleotide
  Antisense strand to SEQ ID NO: 1469842
uugcuucaaguauagcugu

SEQ ID NO: 1469844 - RNA, 19 nt, Artificial Sequence
  Description of Artificial Sequence: Synthetic oligonucleotide
  Sense strand starting at position 1573 of SEQ ID NO: 1244167
agaugcugcagagaaaucu

SEQ ID NO: 1469845 - RNA, 19 nt, Artificial Sequence
  Description of Artificial Sequence: Synthetic oligonucleotide
  Antisense strand to SEQ ID NO: 1469844
agauuucucugcagcaucu

SEQ ID NO: 1469846 - RNA, 19 nt, Artificial Sequence
  Description of Artificial Sequence: Synthetic oligonucleotide
  Sense strand starting at position 1582 of SEQ ID NO: 1244167
agagaaaucuguuucuauu

SEQ ID NO: 1469847 - RNA, 19 nt, Artificial Sequence
  Description of Artificial Sequence: Synthetic oligonucleotide
  Antisense strand to SEQ ID NO: 1469846
aauagaaacagauuucucu

SEQ ID NO: 1469848 - RNA, 19 nt, Artificial Sequence
  Description of Artificial Sequence: Synthetic oligonucleotide
  Sense strand starting at position 2544 of SEQ ID NO: 1244167
cggagaagccacugaguca

SEQ ID NO: 1469849 - RNA, 19 nt, Artificial Sequence
  Description of Artificial Sequence: Synthetic oligonucleotide
  Antisense strand to SEQ ID NO: 1469848
ugacucaguggcuucuccg

SEQ ID NO: 1469850 - RNA, 19 nt, Artificial Sequence
  Description of Artificial Sequence: Synthetic oligonucleotide
  Sense strand starting at position 2983 of SEQ ID NO: 1244167
guguaaaccgaagaguaag

SEQ ID NO: 1469851 - RNA, 19 nt, Artificial Sequence
  Description of Artificial Sequence: Synthetic oligonucleotide
  Antisense strand to SEQ ID NO: 1469850
cuuacucuucgguuuacac

SEQ ID NO: 1469852 - RNA, 19 nt, Artificial Sequence
  Description of Artificial Sequence: Synthetic oligonucleotide
  Sense strand starting at position 2993 of SEQ ID NO: 1244167
aagaguaagugccuauuau

SEQ ID NO: 1469853 - RNA, 19 nt, Artificial Sequence
  Description of Artificial Sequence: Synthetic oligonucleotide
  Antisense strand to SEQ ID NO: 1469852
auaauaggcacuuacucuu

SEQ ID NO: 1469854 - RNA, 19 nt, Artificial Sequence
  Description of Artificial Sequence: Synthetic oligonucleotide
  Sense strand starting at position 2994 of SEQ ID NO: 1244167
agaguaagugccuauuauu

SEQ ID NO: 1469855 - RNA, 19 nt, Artificial Sequence
  Description of Artificial Sequence: Synthetic oligonucleotide
  Antisense strand to SEQ ID NO: 1469854
aauaauaggcacuuacucu

SEQ ID NO: 1469856 - RNA, 19 nt, Artificial Sequence
  Description of Artificial Sequence: Synthetic oligonucleotide
  Sense strand starting at position 3002 of SEQ ID NO: 1244167
ugccuauuauuucugagua

SEQ ID NO: 1469857 - RNA, 19 nt, Artificial Sequence
  Description of Artificial Sequence: Synthetic oligonucleotide
  Antisense strand to SEQ ID NO: 1469856
uacucagaaauaauaggca

SEQ ID NO: 1469858 - RNA, 19 nt, Artificial Sequence
  Description of Artificial Sequence: Synthetic oligonucleotide
  Sense strand starting at position 3067 of SEQ ID NO: 1244167
uuaggagucuuucuuucca

SEQ ID NO: 1469859 - RNA, 19 nt, Artificial Sequence
  Description of Artificial Sequence: Synthetic oligonucleotide
  Antisense strand to SEQ ID NO: 1469858
uggaaagaaagacuccuaa

SEQ ID NO: 1469860 - RNA, 19 nt, Artificial Sequence
  Description of Artificial Sequence: Synthetic oligonucleotide
  Sense strand starting at position 3069 of SEQ ID NO: 1244167
aggagucuuucuuuccacu

SEQ ID NO: 1469861 - RNA, 19 nt, Artificial Sequence
  Description of Artificial Sequence: Synthetic oligonucleotide
  Antisense strand to SEQ ID NO: 1469860
aguggaaagaaagacuccu

SEQ ID NO: 1469862 - RNA, 19 nt, Artificial Sequence
  Description of Artificial Sequence: Synthetic oligonucleotide
  Sense strand starting at position 3163 of SEQ ID NO: 1244167
ccuugagucgcugaacuaa

SEQ ID NO: 1469863 - RNA, 19 nt, Artificial Sequence
  Description of Artificial Sequence: Synthetic oligonucleotide
  Antisense strand to SEQ ID NO: 1469862
uuaguucagcgacucaagg

SEQ ID NO: 1469864 - RNA, 19 nt, Artificial Sequence
  Description of Artificial Sequence: Synthetic oligonucleotide
  Sense strand starting at position 3231 of SEQ ID NO: 1244167
guguguaggagaggugaaa

SEQ ID NO: 1469865 - RNA, 19 nt, Artificial Sequence
  Description of Artificial Sequence: Synthetic oligonucleotide
  Antisense strand to SEQ ID NO: 1469864
uuucaccucuccuacacac

SEQ ID NO: 1469866 - RNA, 19 nt, Artificial Sequence
  Description of Artificial Sequence: Synthetic oligonucleotide
  Sense strand starting at position 3315 of SEQ ID NO: 1244167
cuaggaggugcuggugaaa

SEQ ID NO: 1469867 - RNA, 19 nt, Artificial Sequence
  Description of Artificial Sequence: Synthetic oligonucleotide
  Antisense strand to SEQ ID NO: 1469866
uuucaccagcaccuccuag

SEQ ID NO: 1469868 - RNA, 19 nt, Artificial Sequence
  Description of Artificial Sequence: Synthetic oligonucleotide
  Sense strand starting at position 3318 of SEQ ID NO: 1244167
ggaggugcuggugaaauau

SEQ ID NO: 1469869 - RNA, 19 nt, Artificial Sequence
  Description of Artificial Sequence: Synthetic oligonucleotide
  Antisense strand to SEQ ID NO: 1469868
auauuucaccagcaccucc

SEQ ID NO: 1469870 - RNA, 19 nt, Artificial Sequence
  Description of Artificial Sequence: Synthetic oligonucleotide
  Sense strand starting at position 3474 of SEQ ID NO: 1244167
uggcgauguggucccaguu

SEQ ID NO: 1469871 - RNA, 19 nt, Artificial Sequence
  Description of Artificial Sequence: Synthetic oligonucleotide
  Antisense strand to SEQ ID NO: 1469870
aacugggaccacaucgcca

SEQ ID NO: 1469872 - RNA, 19 nt, Artificial Sequence
  Description of Artificial Sequence: Synthetic oligonucleotide
  Sense strand starting at position 3486 of SEQ ID NO: 1244167
cccaguuaauguguugaga

SEQ ID NO: 1469873 - RNA, 19 nt, Artificial Sequence
  Description of Artificial Sequence: Synthetic oligonucleotide
  Antisense strand to SEQ ID NO: 1469872
ucucaacacauuaacuggg

SEQ ID NO: 1469874 - RNA, 19 nt, Artificial Sequence
  Description of Artificial Sequence: Synthetic oligonucleotide
  Sense strand starting at position 3489 of SEQ ID NO: 1244167
aguuaauguguugagauua

SEQ ID NO: 1469875 - RNA, 19 nt, Artificial Sequence
  Description of Artificial Sequence: Synthetic oligonucleotide
  Antisense strand to SEQ ID NO: 1469874
uaaucucaacacauuaacu

SEQ ID NO: 1469876 - RNA, 19 nt, Artificial Sequence
  Description of Artificial Sequence: Synthetic oligonucleotide
  Sense strand starting at position 3573 of SEQ ID NO: 1244167
ggaggucuucuuuaacauc

SEQ ID NO: 1469877 - RNA, 19 nt, Artificial Sequence
  Description of Artificial Sequence: Synthetic oligonucleotide
  Antisense strand to SEQ ID NO: 1469876
gauguuaaagaagaccucc

SEQ ID NO: 1469878 - RNA, 19 nt, Artificial Sequence
  Description of Artificial Sequence: Synthetic oligonucleotide
  Sense strand starting at position 3639 of SEQ ID NO: 1244167
auagacggaugucuaagaa

SEQ ID NO: 1469879 - RNA, 19 nt, Artificial Sequence
  Description of Artificial Sequence: Synthetic oligonucleotide
  Antisense strand to SEQ ID NO: 1469878
uucuuagacauccgucuau

SEQ ID NO: 1469880 - RNA, 19 nt, Artificial Sequence
  Description of Artificial Sequence: Synthetic oligonucleotide
  Sense strand starting at position 3651 of SEQ ID NO: 1244167
cuaagaaucuaggcuguag

SEQ ID NO: 1469881 - RNA, 19 nt, Artificial Sequence
  Description of Artificial Sequence: Synthetic oligonucleotide
  Antisense strand to SEQ ID NO: 1469880
cuacagccuagauucuuag

SEQ ID NO: 1469882 - RNA, 19 nt, Artificial Sequence
  Description of Artificial Sequence: Synthetic oligonucleotide
  Sense strand starting at position 3676 of SEQ ID NO: 1244167
gcuaaaugaaccugagggu

SEQ ID NO: 1469883 - RNA, 19 nt, Artificial Sequence
  Description of Artificial Sequence: Synthetic oligonucleotide
  Antisense strand to SEQ ID NO: 1469882
acccucagguucauuuagc

SEQ ID NO: 1469884 - RNA, 19 nt, Artificial Sequence
  Description of Artificial Sequence: Synthetic oligonucleotide
  Sense strand starting at position 3824 of SEQ ID NO: 1244167
acauguuaagccuaaauag

SEQ ID NO: 1469885 - RNA, 19 nt, Artificial Sequence
  Description of Artificial Sequence: Synthetic oligonucleotide
  Antisense strand to SEQ ID NO: 1469884
cuauuuaggcuuaacaugu

SEQ ID NO: 1469886 - RNA, 19 nt, Artificial Sequence
  Description of Artificial Sequence: Synthetic oligonucleotide
  Sense strand starting at position 3900 of SEQ ID NO: 1244167
aucuguagauggcuaagaa

SEQ ID NO: 1469887 - RNA, 19 nt, Artificial Sequence
  Description of Artificial Sequence: Synthetic oligonucleotide
  Antisense strand to SEQ ID NO: 1469886
uucuuagccaucuacagau

SEQ ID NO: 1469888 - RNA, 19 nt, Artificial Sequence
  Description of Artificial Sequence: Synthetic oligonucleotide
  Sense strand starting at position 3901 of SEQ ID NO: 1244167
ucuguagauggcuaagaau

SEQ ID NO: 1469889 - RNA, 19 nt, Artificial Sequence
  Description of Artificial Sequence: Synthetic oligonucleotide
  Antisense strand to SEQ ID NO: 1469888
auucuuagccaucuacaga

SEQ ID NO: 1469890 - RNA, 19 nt, Artificial Sequence
  Description of Artificial Sequence: Synthetic oligonucleotide
  Sense strand starting at position 2779 of SEQ ID NO: 1244168
uuguuaaauaacggaauga

SEQ ID NO: 1469891 - RNA, 19 nt, Artificial Sequence
  Description of Artificial Sequence: Synthetic oligonucleotide
  Antisense strand to SEQ ID NO: 1469890
ucauuccguuauuuaacaa

SEQ ID NO: 1469892 - RNA, 19 nt, Artificial Sequence
  Description of Artificial Sequence: Synthetic oligonucleotide
  Sense strand starting at position 2874 of SEQ ID NO: 1244168
guggguguauucuuuaccu

SEQ ID NO: 1469893 - RNA, 19 nt, Artificial Sequence
  Description of Artificial Sequence: Synthetic oligonucleotide
  Antisense strand to SEQ ID NO: 1469892
agguaaagaauacacccac

SEQ ID NO: 1469894 - RNA, 19 nt, Artificial Sequence
  Description of Artificial Sequence: Synthetic oligonucleotide
  Sense strand starting at position 3354 of SEQ ID NO: 1244168
ggucacgucuagugcuaaa

SEQ ID NO: 1469895 - RNA, 19 nt, Artificial Sequence
  Description of Artificial Sequence: Synthetic oligonucleotide
  Antisense strand to SEQ ID NO: 1469894
uuuagcacuagacgugacc

SEQ ID NO: 1469896 - RNA, 19 nt, Artificial Sequence
  Description of Artificial Sequence: Synthetic oligonucleotide
  Sense strand starting at position 3378 of SEQ ID NO: 1244168
gccugacagcaauguugau

SEQ ID NO: 1469897 - RNA, 19 nt, Artificial Sequence
  Description of Artificial Sequence: Synthetic oligonucleotide
  Antisense strand to SEQ ID NO: 1469896
aucaacauugcugucaggc

SEQ ID NO: 1469898 - RNA, 19 nt, Artificial Sequence
  Description of Artificial Sequence: Synthetic oligonucleotide
  Sense strand starting at position 3387 of SEQ ID NO: 1244168
caauguugaugggcgaauu

SEQ ID NO: 1469899 - RNA, 19 nt, Artificial Sequence
  Description of Artificial Sequence: Synthetic oligonucleotide
  Antisense strand to SEQ ID NO: 1469898
aauucgcccaucaacauug

SEQ ID NO: 1469900 - RNA, 19 nt, Artificial Sequence
  Description of Artificial Sequence: Synthetic oligonucleotide
  Sense strand starting at position 3388 of SEQ ID NO: 1244168
aauguugaugggcgaauua

SEQ ID NO: 1469901 - RNA, 19 nt, Artificial Sequence
  Description of Artificial Sequence: Synthetic oligonucleotide
  Antisense strand to SEQ ID NO: 1469900
uaauucgcccaucaacauu

SEQ ID NO: 1469902 - RNA, 19 nt, Artificial Sequence
  Description of Artificial Sequence: Synthetic oligonucleotide
  Sense strand starting at position 89 of SEQ ID NO: 1244169
gacuuuagugauggcaaau

SEQ ID NO: 1469903 - RNA, 19 nt, Artificial Sequence
  Description of Artificial Sequence: Synthetic oligonucleotide
  Antisense strand to SEQ ID NO: 1469902
auuugccaucacuaaaguc

SEQ ID NO: 1469904 - RNA, 19 nt, Artificial Sequence
  Description of Artificial Sequence: Synthetic oligonucleotide
  Sense strand starting at position 134 of SEQ ID NO: 1244169
ugguaagaaagcuauagcu

SEQ ID NO: 1469905 - RNA, 19 nt, Artificial Sequence
  Description of Artificial Sequence: Synthetic oligonucleotide
  Antisense strand to SEQ ID NO: 1469904
agcuauagcuuucuuacca

SEQ ID NO: 1469906 - RNA, 19 nt, Artificial Sequence
  Description of Artificial Sequence: Synthetic oligonucleotide
  Sense strand starting at position 136 of SEQ ID NO: 1244169
guaagaaagcuauagcuuu

SEQ ID NO: 1469907 - RNA, 19 nt, Artificial Sequence
  Description of Artificial Sequence: Synthetic oligonucleotide
  Antisense strand to SEQ ID NO: 1469906
aaagcuauagcuuucuuac

SEQ ID NO: 1469908 - RNA, 19 nt, Artificial Sequence
  Description of Artificial Sequence: Synthetic oligonucleotide
  Sense strand starting at position 187 of SEQ ID NO: 1244169
ggguguuacagacagucau

SEQ ID NO: 1469909 - RNA, 19 nt, Artificial Sequence
  Description of Artificial Sequence: Synthetic oligonucleotide
  Antisense strand to SEQ ID NO: 1469908
augacugucuguaacaccc

SEQ ID NO: 1469910 - RNA, 19 nt, Artificial Sequence
  Description of Artificial Sequence: Synthetic oligonucleotide
  Sense strand starting at position 204 of SEQ ID NO: 1244169
auacucauuuaggcguuua

SEQ ID NO: 1469911 - RNA, 19 nt, Artificial Sequence
  Description of Artificial Sequence: Synthetic oligonucleotide
  Antisense strand to SEQ ID NO: 1469910
uaaacgccuaaaugaguau

SEQ ID NO: 1469912 - RNA, 19 nt, Artificial Sequence
  Description of Artificial Sequence: Synthetic oligonucleotide
  Sense strand starting at position 219 of SEQ ID NO: 1244169
uuuacuuacuggcuggaau

SEQ ID NO: 1469913 - RNA, 19 nt, Artificial Sequence
  Description of Artificial Sequence: Synthetic oligonucleotide
  Antisense strand to SEQ ID NO: 1469912
auuccagccaguaaguaaa

SEQ ID NO: 1469914 - RNA, 19 nt, Artificial Sequence
  Description of Artificial Sequence: Synthetic oligonucleotide
  Sense strand starting at position 220 of SEQ ID NO: 1244169
uuacuuacuggcuggaauu

SEQ ID NO: 1469915 - RNA, 19 nt, Artificial Sequence
  Description of Artificial Sequence: Synthetic oligonucleotide
  Antisense strand to SEQ ID NO: 1469914
aauuccagccaguaaguaa

SEQ ID NO: 1469916 - RNA, 19 nt, Artificial Sequence
  Description of Artificial Sequence: Synthetic oligonucleotide
  Sense strand starting at position 240 of SEQ ID NO: 1244169
gcaaucuuugccuggacaa

SEQ ID NO: 1469917 - RNA, 19 nt, Artificial Sequence
  Description of Artificial Sequence: Synthetic oligonucleotide
  Antisense strand to SEQ ID NO: 1469916
uuguccaggcaaagauugc

SEQ ID NO: 1469918 - RNA, 19 nt, Artificial Sequence
  Description of Artificial Sequence: Synthetic oligonucleotide
  Sense strand starting at position 280 of SEQ ID NO: 1244169
uucuguagcguguuuguua

SEQ ID NO: 1469919 - RNA, 19 nt, Artificial Sequence
  Description of Artificial Sequence: Synthetic oligonucleotide
  Antisense strand to SEQ ID NO: 1469918
uaacaaacacgcuacagaa

SEQ ID NO: 1469920 - RNA, 19 nt, Artificial Sequence
  Description of Artificial Sequence: Synthetic oligonucleotide
  Sense strand starting at position 331 of SEQ ID NO: 1244169
acugaaaucuuugcuugag

SEQ ID NO: 1469921 - RNA, 19 nt, Artificial Sequence
  Description of Artificial Sequence: Synthetic oligonucleotide
  Antisense strand to SEQ ID NO: 1469920
cucaagcaaagauuucagu

SEQ ID NO: 1469922 - RNA, 19 nt, Artificial Sequence
  Description of Artificial Sequence: Synthetic oligonucleotide
  Sense strand starting at position 332 of SEQ ID NO: 1244169
cugaaaucuuugcuugaga

SEQ ID NO: 1469923 - RNA, 19 nt, Artificial Sequence
  Description of Artificial Sequence: Synthetic oligonucleotide
  Antisense strand to SEQ ID NO: 1469922
ucucaagcaaagauuucag

SEQ ID NO: 1469924 - RNA, 19 nt, Artificial Sequence
  Description of Artificial Sequence: Synthetic oligonucleotide
  Sense strand starting at position 333 of SEQ ID NO: 1244169
ugaaaucuuugcuugagau

SEQ ID NO: 1469925 - RNA, 19 nt, Artificial Sequence
  Description of Artificial Sequence: Synthetic oligonucleotide
  Antisense strand to SEQ ID NO: 1469924
aucucaagcaaagauuuca

SEQ ID NO: 1469926 - RNA, 19 nt, Artificial Sequence
  Description of Artificial Sequence: Synthetic oligonucleotide
  Sense strand starting at position 334 of SEQ ID NO: 1244169
gaaaucuuugcuugagaug

SEQ ID NO: 1469927 - RNA, 19 nt, Artificial Sequence
  Description of Artificial Sequence: Synthetic oligonucleotide
  Antisense strand to SEQ ID NO: 1469926
caucucaagcaaagauuuc

SEQ ID NO: 1469928 - RNA, 19 nt, Artificial Sequence
  Description of Artificial Sequence: Synthetic oligonucleotide
  Sense strand starting at position 339 of SEQ ID NO: 1244169
cuuugcuugagauggacau

SEQ ID NO: 1469929 - RNA, 19 nt, Artificial Sequence
  Description of Artificial Sequence: Synthetic oligonucleotide
  Antisense strand to SEQ ID NO: 1469928
auguccaucucaagcaaag

SEQ ID NO: 1469930 - RNA, 19 nt, Artificial Sequence
  Description of Artificial Sequence: Synthetic oligonucleotide
  Sense strand starting at position 340 of SEQ ID NO: 1244169
uuugcuugagauggacauu

SEQ ID NO: 1469931 - RNA, 19 nt, Artificial Sequence
  Description of Artificial Sequence: Synthetic oligonucleotide
  Antisense strand to SEQ ID NO: 1469930
aauguccaucucaagcaaa

SEQ ID NO: 1469932 - RNA, 19 nt, Artificial Sequence
  Description of Artificial Sequence: Synthetic oligonucleotide
  Sense strand starting at position 439 of SEQ ID NO: 1244169
gccaacaucagugggaguu

SEQ ID NO: 1469933 - RNA, 19 nt, Artificial Sequence
  Description of Artificial Sequence: Synthetic oligonucleotide
  Antisense strand to SEQ ID NO: 1469932
aacucccacugauguuggc

SEQ ID NO: 1469934 - RNA, 19 nt, Artificial Sequence
  Description of Artificial Sequence: Synthetic oligonucleotide
  Sense strand starting at position 440 of SEQ ID NO: 1244169
ccaacaucagugggaguuu

SEQ ID NO: 1469935 - RNA, 19 nt, Artificial Sequence
  Description of Artificial Sequence: Synthetic oligonucleotide
  Antisense strand to SEQ ID NO: 1469934
aaacucccacugauguugg

SEQ ID NO: 1469936 - RNA, 19 nt, Artificial Sequence
  Description of Artificial Sequence: Synthetic oligonucleotide
  Sense strand starting at position 670 of SEQ ID NO: 1244169
caggauagguuuccaucaa

SEQ ID NO: 1469937 - RNA, 19 nt, Artificial Sequence
  Description of Artificial Sequence: Synthetic oligonucleotide
  Antisense strand to SEQ ID NO: 1469936
uugauggaaaccuauccug

SEQ ID NO: 1469938 - RNA, 19 nt, Artificial Sequence
  Description of Artificial Sequence: Synthetic oligonucleotide
  Sense strand starting at position 674 of SEQ ID NO: 1244169
auagguuuccaucaaucug

SEQ ID NO: 1469939 - RNA, 19 nt, Artificial Sequence
  Description of Artificial Sequence: Synthetic oligonucleotide
  Antisense strand to SEQ ID NO: 1469938
cagauugauggaaaccuau

SEQ ID NO: 1469940 - RNA, 19 nt, Artificial Sequence
  Description of Artificial Sequence: Synthetic oligonucleotide
  Sense strand starting at position 766 of SEQ ID NO: 1244169
agcugagugcuauauggga

SEQ ID NO: 1469941 - RNA, 19 nt, Artificial Sequence
  Description of Artificial Sequence: Synthetic oligonucleotide
  Antisense strand to SEQ ID NO: 1469940
ucccauauagcacucagcu

SEQ ID NO: 1469942 - RNA, 19 nt, Artificial Sequence
  Description of Artificial Sequence: Synthetic oligonucleotide
  Sense strand starting at position 768 of SEQ ID NO: 1244169
cugagugcuauaugggaua

SEQ ID NO: 1469943 - RNA, 19 nt, Artificial Sequence
  Description of Artificial Sequence: Synthetic oligonucleotide
  Antisense strand to SEQ ID NO: 1469942
uaucccauauagcacucag

SEQ ID NO: 1469944 - RNA, 19 nt, Artificial Sequence
  Description of Artificial Sequence: Synthetic oligonucleotide
  Sense strand starting at position 781 of SEQ ID NO: 1244169
gggauauaagaugguguga

SEQ ID NO: 1469945 - RNA, 19 nt, Artificial Sequence
  Description of Artificial Sequence: Synthetic oligonucleotide
  Antisense strand to SEQ ID NO: 1469944
ucacaccaucuuauauccc

SEQ ID NO: 1469946 - RNA, 19 nt, Artificial Sequence
  Description of Artificial Sequence: Synthetic oligonucleotide
  Sense strand starting at position 811 of SEQ ID NO: 1244169
ugccuuuaaguugagaacu

SEQ ID NO: 1469947 - RNA, 19 nt, Artificial Sequence
  Description of Artificial Sequence: Synthetic oligonucleotide
  Antisense strand to SEQ ID NO: 1469946
aguucucaacuuaaaggca

SEQ ID NO: 1469948 - RNA, 19 nt, Artificial Sequence
  Description of Artificial Sequence: Synthetic oligonucleotide
  Sense strand starting at position 828 of SEQ ID NO: 1244169
cuuaaaggugaauacguaa

SEQ ID NO: 1469949 - RNA, 19 nt, Artificial Sequence
  Description of Artificial Sequence: Synthetic oligonucleotide
  Antisense strand to SEQ ID NO: 1469948
uuacguauucaccuuuaag

SEQ ID NO: 1469950 - RNA, 19 nt, Artificial Sequence
  Description of Artificial Sequence: Synthetic oligonucleotide
  Sense strand starting at position 831 of SEQ ID NO: 1244169
aaaggugaauacguaaagu

SEQ ID NO: 1469951 - RNA, 19 nt, Artificial Sequence
  Description of Artificial Sequence: Synthetic oligonucleotide
  Antisense strand to SEQ ID NO: 1469950
acuuuacguauucaccuuu

SEQ ID NO: 1469952 - RNA, 19 nt, Artificial Sequence
  Description of Artificial Sequence: Synthetic oligonucleotide
  Sense strand starting at position 875 of SEQ ID NO: 1244169
cuggaaaugguuuaagugu

SEQ ID NO: 1469953 - RNA, 19 nt, Artificial Sequence
  Description of Artificial Sequence: Synthetic oligonucleotide
  Antisense strand to SEQ ID NO: 1469952
acacuuaaaccauuuccag

SEQ ID NO: 1469954 - RNA, 19 nt, Artificial Sequence
  Description of Artificial Sequence: Synthetic oligonucleotide
  Sense strand starting at position 981 of SEQ ID NO: 1244169
cuagauuugcagcggcaaa

SEQ ID NO: 1469955 - RNA, 19 nt, Artificial Sequence
  Description of Artificial Sequence: Synthetic oligonucleotide
  Antisense strand to SEQ ID NO: 1469954
uuugccgcugcaaaucuag

SEQ ID NO: 1469956 - RNA, 19 nt, Artificial Sequence
  Description of Artificial Sequence: Synthetic oligonucleotide
  Sense strand starting at position 1040 of SEQ ID NO: 1244169
gaccuaaaccagugacugu

SEQ ID NO: 1469957 - RNA, 19 nt, Artificial Sequence
  Description of Artificial Sequence: Synthetic oligonucleotide
  Antisense strand to SEQ ID NO: 1469956
acagucacugguuuagguc

SEQ ID NO: 1469958 - RNA, 19 nt, Artificial Sequence
  Description of Artificial Sequence: Synthetic oligonucleotide
  Sense strand starting at position 1203 of SEQ ID NO: 1244169
gacccaguucuggaugcau

SEQ ID NO: 1469959 - RNA, 19 nt, Artificial Sequence
  Description of Artificial Sequence: Synthetic oligonucleotide
  Antisense strand to SEQ ID NO: 1469958
augcauccagaacuggguc

SEQ ID NO: 1469960 - RNA, 19 nt, Artificial Sequence
  Description of Artificial Sequence: Synthetic oligonucleotide
  Sense strand starting at position 1268 of SEQ ID NO: 1244169
ugcagaucucagugggaug

SEQ ID NO: 1469961 - RNA, 19 nt, Artificial Sequence
  Description of Artificial Sequence: Synthetic oligonucleotide
  Antisense strand to SEQ ID NO: 1469960
caucccacugagaucugca

SEQ ID NO: 1469962 - RNA, 19 nt, Artificial Sequence
  Description of Artificial Sequence: Synthetic oligonucleotide
  Sense strand starting at position 1269 of SEQ ID NO: 1244169
gcagaucucagugggaugu

SEQ ID NO: 1469963 - RNA, 19 nt, Artificial Sequence
  Description of Artificial Sequence: Synthetic oligonucleotide
  Antisense strand to SEQ ID NO: 1469962
acaucccacugagaucugc

SEQ ID NO: 1469964 - RNA, 19 nt, Artificial Sequence
  Description of Artificial Sequence: Synthetic oligonucleotide
  Sense strand starting at position 1531 of SEQ ID NO: 1244169
gggaccgaucuacgagaaa

SEQ ID NO: 1469965 - RNA, 19 nt, Artificial Sequence
  Description of Artificial Sequence: Synthetic oligonucleotide
  Antisense strand to SEQ ID NO: 1469964
uuucucguagaucgguccc

SEQ ID NO: 1469966 - RNA, 19 nt, Artificial Sequence
  Description of Artificial Sequence: Synthetic oligonucleotide
  Sense strand starting at position 2194 of SEQ ID NO: 1244169
aagaucuucccgugaccca

SEQ ID NO: 1469967 - RNA, 19 nt, Artificial Sequence
  Description of Artificial Sequence: Synthetic oligonucleotide
  Antisense strand to SEQ ID NO: 1469966
ugggucacgggaagaucuu

SEQ ID NO: 1469968 - RNA, 19 nt, Artificial Sequence
  Description of Artificial Sequence: Synthetic oligonucleotide
  Sense strand starting at position 2571 of SEQ ID NO: 1244169
gggaaacauuacgcagaca

SEQ ID NO: 1469969 - RNA, 19 nt, Artificial Sequence
  Description of Artificial Sequence: Synthetic oligonucleotide
  Antisense strand to SEQ ID NO: 1469968
ugucugcguaauguuuccc

SEQ ID NO: 1469970 - RNA, 19 nt, Artificial Sequence
  Description of Artificial Sequence: Synthetic oligonucleotide
  Sense strand starting at position 2645 of SEQ ID NO: 1244169
ggcagcuuccaggauucga

SEQ ID NO: 1469971 - RNA, 19 nt, Artificial Sequence
  Description of Artificial Sequence: Synthetic oligonucleotide
  Antisense strand to SEQ ID NO: 1469970
ucgaauccuggaagcugcc

SEQ ID NO: 1469972 - RNA, 19 nt, Artificial Sequence
  Description of Artificial Sequence: Synthetic oligonucleotide
  Sense strand starting at position 2653 of SEQ ID NO: 1244169
ccaggauucgaacguauag

SEQ ID NO: 1469973 - RNA, 19 nt, Artificial Sequence
  Description of Artificial Sequence: Synthetic oligonucleotide
  Antisense strand to SEQ ID NO: 1469972
cuauacguucgaauccugg

SEQ ID NO: 1469974 - RNA, 19 nt, Artificial Sequence
  Description of Artificial Sequence: Synthetic oligonucleotide
  Sense strand starting at position 2655 of SEQ ID NO: 1244169
aggauucgaacguauagag

SEQ ID NO: 1469975 - RNA, 19 nt, Artificial Sequence
  Description of Artificial Sequence: Synthetic oligonucleotide
  Antisense strand to SEQ ID NO: 1469974
cucuauacguucgaauccu

SEQ ID NO: 1469976 - RNA, 19 nt, Artificial Sequence
  Description of Artificial Sequence: Synthetic oligonucleotide
  Sense strand starting at position 3127 of SEQ ID NO: 1244169
acugauguugcgggaaauc

SEQ ID NO: 1469977 - RNA, 19 nt, Artificial Sequence
  Description of Artificial Sequence: Synthetic oligonucleotide
  Antisense strand to SEQ ID NO: 1469976
gauuucccgcaacaucagu

SEQ ID NO: 1469978 - RNA, 19 nt, Artificial Sequence
  Description of Artificial Sequence: Synthetic oligonucleotide
  Sense strand starting at position 3373 of SEQ ID NO: 1244169
cugucaguugaggauguau

SEQ ID NO: 1469979 - RNA, 19 nt, Artificial Sequence
  Description of Artificial Sequence: Synthetic oligonucleotide
  Antisense strand to SEQ ID NO: 1469978
auacauccucaacugacag

SEQ ID NO: 1469980 - RNA, 19 nt, Artificial Sequence
  Description of Artificial Sequence: Synthetic oligonucleotide
  Sense strand starting at position 3375 of SEQ ID NO: 1244169
gucaguugaggauguauau

SEQ ID NO: 1469981 - RNA, 19 nt, Artificial Sequence
  Description of Artificial Sequence: Synthetic oligonucleotide
  Antisense strand to SEQ ID NO: 1469980
auauacauccucaacugac

SEQ ID NO: 1469982 - RNA, 19 nt, Artificial Sequence
  Description of Artificial Sequence: Synthetic oligonucleotide
  Sense strand starting at position 319 of SEQ ID NO: 1244170
ugacgcguuccugucauua

SEQ ID NO: 1469983 - RNA, 19 nt, Artificial Sequence
  Description of Artificial Sequence: Synthetic oligonucleotide
  Antisense strand to SEQ ID NO: 1469982
uaaugacaggaacgcguca

SEQ ID NO: 1469984 - RNA, 19 nt, Artificial Sequence
  Description of Artificial Sequence: Synthetic oligonucleotide
  Sense strand starting at position 329 of SEQ ID NO: 1244170
cugucauuaucccugucua

SEQ ID NO: 1469985 - RNA, 19 nt, Artificial Sequence
  Description of Artificial Sequence: Synthetic oligonucleotide
  Antisense strand to SEQ ID NO: 1469984
uagacagggauaaugacag

SEQ ID NO: 1469986 - RNA, 19 nt, Artificial Sequence
  Description of Artificial Sequence: Synthetic oligonucleotide
  Sense strand starting at position 330 of SEQ ID NO: 1244170
ugucauuaucccugucuac

SEQ ID NO: 1469987 - RNA, 19 nt, Artificial Sequence
  Description of Artificial Sequence: Synthetic oligonucleotide
  Antisense strand to SEQ ID NO: 1469986
guagacagggauaaugaca

SEQ ID NO: 1469988 - RNA, 19 nt, Artificial Sequence
  Description of Artificial Sequence: Synthetic oligonucleotide
  Sense strand starting at position 563 of SEQ ID NO: 1244170
cuggaucagugaucauucu

SEQ ID NO: 1469989 - RNA, 19 nt, Artificial Sequence
  Description of Artificial Sequence: Synthetic oligonucleotide
  Antisense strand to SEQ ID NO: 1469988
agaaugaucacugauccag

SEQ ID NO: 1469990 - RNA, 19 nt, Artificial Sequence
  Description of Artificial Sequence: Synthetic oligonucleotide
  Sense strand starting at position 572 of SEQ ID NO: 1244170
ugaucauucugucugaguc

SEQ ID NO: 1469991 - RNA, 19 nt, Artificial Sequence
  Description of Artificial Sequence: Synthetic oligonucleotide
  Antisense strand to SEQ ID NO: 1469990
gacucagacagaaugauca

SEQ ID NO: 1469992 - RNA, 19 nt, Artificial Sequence
  Description of Artificial Sequence: Synthetic oligonucleotide
  Sense strand starting at position 573 of SEQ ID NO: 1244170
gaucauucugucugaguca

SEQ ID NO: 1469993 - RNA, 19 nt, Artificial Sequence
  Description of Artificial Sequence: Synthetic oligonucleotide
  Antisense strand to SEQ ID NO: 1469992
ugacucagacagaaugauc

SEQ ID NO: 1469994 - RNA, 19 nt, Artificial Sequence
  Description of Artificial Sequence: Synthetic oligonucleotide
  Sense strand starting at position 576 of SEQ ID NO: 1244170
cauucugucugagucaaga

SEQ ID NO: 1469995 - RNA, 19 nt, Artificial Sequence
  Description of Artificial Sequence: Synthetic oligonucleotide
  Antisense strand to SEQ ID NO: 1469994
ucuugacucagacagaaug

SEQ ID NO: 1469996 - RNA, 19 nt, Artificial Sequence
  Description of Artificial Sequence: Synthetic oligonucleotide
  Sense strand starting at position 848 of SEQ ID NO: 1244170
uggccaaagucauucugca

SEQ ID NO: 1469997 - RNA, 19 nt, Artificial Sequence
  Description of Artificial Sequence: Synthetic oligonucleotide
  Antisense strand to SEQ ID NO: 1469996
ugcagaaugacuuuggcca

SEQ ID NO: 1469998 - RNA, 19 nt, Artificial Sequence
  Description of Artificial Sequence: Synthetic oligonucleotide
  Sense strand starting at position 853 of SEQ ID NO: 1244170
aaagucauucugcaaguga

SEQ ID NO: 1469999 - RNA, 19 nt, Artificial Sequence
  Description of Artificial Sequence: Synthetic oligonucleotide
  Antisense strand to SEQ ID NO: 1469998
ucacuugcagaaugacuuu

SEQ ID NO: 1470000 - RNA, 19 nt, Artificial Sequence
  Description of Artificial Sequence: Synthetic oligonucleotide
  Sense strand starting at position 967 of SEQ ID NO: 1244170
aggccaucuccugggucaa

SEQ ID NO: 1470001 - RNA, 19 nt, Artificial Sequence
  Description of Artificial Sequence: Synthetic oligonucleotide
  Antisense strand to SEQ ID NO: 1470000
uugacccaggagauggccu

SEQ ID NO: 1470002 - RNA, 19 nt, Artificial Sequence
  Description of Artificial Sequence: Synthetic oligonucleotide
  Sense strand starting at position 1026 of SEQ ID NO: 1244170
ucacguccucuagaggaua

SEQ ID NO: 1470003 - RNA, 19 nt, Artificial Sequence
  Description of Artificial Sequence: Synthetic oligonucleotide
  Antisense strand to SEQ ID NO: 1470002
uauccucuagaggacguga

SEQ ID NO: 1470004 - RNA, 19 nt, Artificial Sequence
  Description of Artificial Sequence: Synthetic oligonucleotide
  Sense strand starting at position 1028 of SEQ ID NO: 1244170
acguccucuagaggauaaa

SEQ ID NO: 1470005 - RNA, 19 nt, Artificial Sequence
  Description of Artificial Sequence: Synthetic oligonucleotide
  Antisense strand to SEQ ID NO: 1470004
uuuauccucuagaggacgu

SEQ ID NO: 1470006 - RNA, 19 nt, Artificial Sequence
  Description of Artificial Sequence: Synthetic oligonucleotide
  Sense strand starting at position 1368 of SEQ ID NO: 1244170
gggcaaaugcuauagugca

SEQ ID NO: 1470007 - RNA, 19 nt, Artificial Sequence
  Description of Artificial Sequence: Synthetic oligonucleotide
  Antisense strand to SEQ ID NO: 1470006
ugcacuauagcauuugccc

SEQ ID NO: 1470008 - RNA, 19 nt, Artificial Sequence
  Description of Artificial Sequence: Synthetic oligonucleotide
  Sense strand starting at position 1452 of SEQ ID NO: 1244170
ggcagugaucuccacuauc

SEQ ID NO: 1470009 - RNA, 19 nt, Artificial Sequence
  Description of Artificial Sequence: Synthetic oligonucleotide
  Antisense strand to SEQ ID NO: 1470008
gauaguggagaucacugcc

SEQ ID NO: 1470010 - RNA, 19 nt, Artificial Sequence
  Description of Artificial Sequence: Synthetic oligonucleotide
  Sense strand starting at position 1696 of SEQ ID NO: 1244170
cugaaccauuuauaggaga

SEQ ID NO: 1470011 - RNA, 19 nt, Artificial Sequence
  Description of Artificial Sequence: Synthetic oligonucleotide
  Antisense strand to SEQ ID NO: 1470010
ucuccuauaaaugguucag

SEQ ID NO: 1470012 - RNA, 19 nt, Artificial Sequence
  Description of Artificial Sequence: Synthetic oligonucleotide
  Sense strand starting at position 1795 of SEQ ID NO: 1244170
ucugaagagugggcaugau

SEQ ID NO: 1470013 - RNA, 19 nt, Artificial Sequence
  Description of Artificial Sequence: Synthetic oligonucleotide
  Antisense strand to SEQ ID NO: 1470012
aucaugcccacucuucaga

SEQ ID NO: 1470014 - RNA, 19 nt, Artificial Sequence
  Description of Artificial Sequence: Synthetic oligonucleotide
  Sense strand starting at position 1886 of SEQ ID NO: 1244170
ggacuuaccagauggaguu

SEQ ID NO: 1470015 - RNA, 19 nt, Artificial Sequence
  Description of Artificial Sequence: Synthetic oligonucleotide
  Antisense strand to SEQ ID NO: 1470014
aacuccaucugguaagucc

SEQ ID NO: 1470016 - RNA, 19 nt, Artificial Sequence
  Description of Artificial Sequence: Synthetic oligonucleotide
  Sense strand starting at position 1887 of SEQ ID NO: 1244170
gacuuaccagauggaguuu

SEQ ID NO: 1470017 - RNA, 19 nt, Artificial Sequence
  Description of Artificial Sequence: Synthetic oligonucleotide
  Antisense strand to SEQ ID NO: 1470016
aaacuccaucugguaaguc

SEQ ID NO: 1470018 - RNA, 19 nt, Artificial Sequence
  Description of Artificial Sequence: Synthetic oligonucleotide
  Sense strand starting at position 2042 of SEQ ID NO: 1244170
ggucuuccaggauggagaa

SEQ ID NO: 1470019 - RNA, 19 nt, Artificial Sequence
  Description of Artificial Sequence: Synthetic oligonucleotide
  Antisense strand to SEQ ID NO: 1470018
uucuccauccuggaagacc

SEQ ID NO: 1470020 - RNA, 19 nt, Artificial Sequence
  Description of Artificial Sequence: Synthetic oligonucleotide
  Sense strand starting at position 2100 of SEQ ID NO: 1244170
uggcucugguggucagaua

SEQ ID NO: 1470021 - RNA, 19 nt, Artificial Sequence
  Description of Artificial Sequence: Synthetic oligonucleotide
  Antisense strand to SEQ ID NO: 1470020
uaucugaccaccagagcca

SEQ ID NO: 1470022 - RNA, 19 nt, Artificial Sequence
  Description of Artificial Sequence: Synthetic oligonucleotide
  Sense strand starting at position 2101 of SEQ ID NO: 1244170
ggcucugguggucagauau

SEQ ID NO: 1470023 - RNA, 19 nt, Artificial Sequence
  Description of Artificial Sequence: Synthetic oligonucleotide
  Antisense strand to SEQ ID NO: 1470022
auaucugaccaccagagcc

SEQ ID NO: 1470024 - RNA, 19 nt, Artificial Sequence
  Description of Artificial Sequence: Synthetic oligonucleotide
  Sense strand starting at position 2113 of SEQ ID NO: 1244170
cagauaugaugggagaauc

SEQ ID NO: 1470025 - RNA, 19 nt, Artificial Sequence
  Description of Artificial Sequence: Synthetic oligonucleotide
  Antisense strand to SEQ ID NO: 1470024
gauucucccaucauaucug

SEQ ID NO: 1470026 - RNA, 19 nt, Artificial Sequence
  Description of Artificial Sequence: Synthetic oligonucleotide
  Sense strand starting at position 2123 of SEQ ID NO: 1244170
gggagaaucuuguuuccau

SEQ ID NO: 1470027 - RNA, 19 nt, Artificial Sequence
  Description of Artificial Sequence: Synthetic oligonucleotide
  Antisense strand to SEQ ID NO: 1470026
auggaaacaagauucuccc

SEQ ID NO: 1470028 - RNA, 19 nt, Artificial Sequence
  Description of Artificial Sequence: Synthetic oligonucleotide
  Sense strand starting at position 2124 of SEQ ID NO: 1244170
ggagaaucuuguuuccaug

SEQ ID NO: 1470029 - RNA, 19 nt, Artificial Sequence
  Description of Artificial Sequence: Synthetic oligonucleotide
  Antisense strand to SEQ ID NO: 1470028
cauggaaacaagauucucc

SEQ ID NO: 1470030 - RNA, 19 nt, Artificial Sequence
  Description of Artificial Sequence: Synthetic oligonucleotide
  Sense strand starting at position 2224 of SEQ ID NO: 1244170
ugauauggcaucugaguaa

SEQ ID NO: 1470031 - RNA, 19 nt, Artificial Sequence
  Description of Artificial Sequence: Synthetic oligonucleotide
  Antisense strand to SEQ ID NO: 1470030
uuacucagaugccauauca

SEQ ID NO: 1470032 - RNA, 19 nt, Artificial Sequence
  Description of Artificial Sequence: Synthetic oligonucleotide
  Sense strand starting at position 2228 of SEQ ID NO: 1244170
auggcaucugaguaagucu

SEQ ID NO: 1470033 - RNA, 19 nt, Artificial Sequence
  Description of Artificial Sequence: Synthetic oligonucleotide
  Antisense strand to SEQ ID NO: 1470032
agacuuacucagaugccau

SEQ ID NO: 1470034 - RNA, 19 nt, Artificial Sequence
  Description of Artificial Sequence: Synthetic oligonucleotide
  Sense strand starting at position 2231 of SEQ ID NO: 1244170
gcaucugaguaagucuaca

SEQ ID NO: 1470035 - RNA, 19 nt, Artificial Sequence
  Description of Artificial Sequence: Synthetic oligonucleotide
  Antisense strand to SEQ ID NO: 1470034
uguagacuuacucagaugc

SEQ ID NO: 1470036 - RNA, 19 nt, Artificial Sequence
  Description of Artificial Sequence: Synthetic oligonucleotide
  Sense strand starting at position 2236 of SEQ ID NO: 1244170
ugaguaagucuacaguaga

SEQ ID NO: 1470037 - RNA, 19 nt, Artificial Sequence
  Description of Artificial Sequence: Synthetic oligonucleotide
  Antisense strand to SEQ ID NO: 1470036
ucuacuguagacuuacuca

SEQ ID NO: 1470038 - RNA, 19 nt, Artificial Sequence
  Description of Artificial Sequence: Synthetic oligonucleotide
  Sense strand starting at position 2264 of SEQ ID NO: 1244170
cgugaucccucuucugaca

SEQ ID NO: 1470039 - RNA, 19 nt, Artificial Sequence
  Description of Artificial Sequence: Synthetic oligonucleotide
  Antisense strand to SEQ ID NO: 1470038
ugucagaagagggaucacg

SEQ ID NO: 1470040 - RNA, 19 nt, Artificial Sequence
  Description of Artificial Sequence: Synthetic oligonucleotide
  Sense strand starting at position 2552 of SEQ ID NO: 1244170
cugcaagaacucugacucu

SEQ ID NO: 1470041 - RNA, 19 nt, Artificial Sequence
  Description of Artificial Sequence: Synthetic oligonucleotide
  Antisense strand to SEQ ID NO: 1470040
agagucagaguucuugcag

SEQ ID NO: 1470042 - RNA, 19 nt, Artificial Sequence
  Description of Artificial Sequence: Synthetic oligonucleotide
  Sense strand starting at position 2571 of SEQ ID NO: 1244170
gggccuaagccuggaagua

SEQ ID NO: 1470043 - RNA, 19 nt, Artificial Sequence
  Description of Artificial Sequence: Synthetic oligonucleotide
  Antisense strand to SEQ ID NO: 1470042
uacuuccaggcuuaggccc

SEQ ID NO: 1470044 - RNA, 19 nt, Artificial Sequence
  Description of Artificial Sequence: Synthetic oligonucleotide
  Sense strand starting at position 2657 of SEQ ID NO: 1244170
ccucuuauguggccuaaga

SEQ ID NO: 1470045 - RNA, 19 nt, Artificial Sequence
  Description of Artificial Sequence: Synthetic oligonucleotide
  Antisense strand to SEQ ID NO: 1470044
ucuuaggccacauaagagg

SEQ ID NO: 1470046 - RNA, 19 nt, Artificial Sequence
  Description of Artificial Sequence: Synthetic oligonucleotide
  Sense strand starting at position 2659 of SEQ ID NO: 1244170
ucuuauguggccuaagaag

SEQ ID NO: 1470047 - RNA, 19 nt, Artificial Sequence
  Description of Artificial Sequence: Synthetic oligonucleotide
  Antisense strand to SEQ ID NO: 1470046
cuucuuaggccacauaaga

SEQ ID NO: 1470048 - RNA, 19 nt, Artificial Sequence
  Description of Artificial Sequence: Synthetic oligonucleotide
  Sense strand starting at position 2667 of SEQ ID NO: 1244170
ggccuaagaaggugauaca

SEQ ID NO: 1470049 - RNA, 19 nt, Artificial Sequence
  Description of Artificial Sequence: Synthetic oligonucleotide
  Antisense strand to SEQ ID NO: 1470048
uguaucaccuucuuaggcc

SEQ ID NO: 1470050 - RNA, 19 nt, Artificial Sequence
  Description of Artificial Sequence: Synthetic oligonucleotide
  Sense strand starting at position 2952 of SEQ ID NO: 1244170
cccagucuccaugaugcaa

SEQ ID NO: 1470051 - RNA, 19 nt, Artificial Sequence
  Description of Artificial Sequence: Synthetic oligonucleotide
  Antisense strand to SEQ ID NO: 1470050
uugcaucauggagacuggg

SEQ ID NO: 1470052 - RNA, 19 nt, Artificial Sequence
  Description of Artificial Sequence: Synthetic oligonucleotide
  Sense strand starting at position 3055 of SEQ ID NO: 1244170
aggguaguggucagcugua

SEQ ID NO: 1470053 - RNA, 19 nt, Artificial Sequence
  Description of Artificial Sequence: Synthetic oligonucleotide
  Antisense strand to SEQ ID NO: 1470052
uacagcugaccacuacccu

SEQ ID NO: 1470054 - RNA, 19 nt, Artificial Sequence
  Description of Artificial Sequence: Synthetic oligonucleotide
  Sense strand starting at position 3168 of SEQ ID NO: 1244170
gagaguguguaucuauagu

SEQ ID NO: 1470055 - RNA, 19 nt, Artificial Sequence
  Description of Artificial Sequence: Synthetic oligonucleotide
  Antisense strand to SEQ ID NO: 1470054
acuauagauacacacucuc

SEQ ID NO: 1470056 - RNA, 19 nt, Artificial Sequence
  Description of Artificial Sequence: Synthetic oligonucleotide
  Sense strand starting at position 3177 of SEQ ID NO: 1244170
uaucuauagucuguggcau

SEQ ID NO: 1470057 - RNA, 19 nt, Artificial Sequence
  Description of Artificial Sequence: Synthetic oligonucleotide
  Antisense strand to SEQ ID NO: 1470056
augccacagacuauagaua

SEQ ID NO: 1470058 - RNA, 19 nt, Artificial Sequence
  Description of Artificial Sequence: Synthetic oligonucleotide
  Sense strand starting at position 3519 of SEQ ID NO: 1244170
cccugagucccggagucaa

SEQ ID NO: 1470059 - RNA, 19 nt, Artificial Sequence
  Description of Artificial Sequence: Synthetic oligonucleotide
  Antisense strand to SEQ ID NO: 1470058
uugacuccgggacucaggg

SEQ ID NO: 1470060 - RNA, 19 nt, Artificial Sequence
  Description of Artificial Sequence: Synthetic oligonucleotide
  Sense strand starting at position 3649 of SEQ ID NO: 1244170
ccggucucuuccuuuaacu

SEQ ID NO: 1470061 - RNA, 19 nt, Artificial Sequence
  Description of Artificial Sequence: Synthetic oligonucleotide
  Antisense strand to SEQ ID NO: 1470060
aguuaaaggaagagaccgg

SEQ ID NO: 1470062 - RNA, 19 nt, Artificial Sequence
  Description of Artificial Sequence: Synthetic oligonucleotide
  Sense strand starting at position 59 of SEQ ID NO: 1244171
cccagcgcucugggagaau

SEQ ID NO: 1470063 - RNA, 19 nt, Artificial Sequence
  Description of Artificial Sequence: Synthetic oligonucleotide
  Antisense strand to SEQ ID NO: 1470062
auucucccagagcgcuggg

SEQ ID NO: 1470064 - RNA, 19 nt, Artificial Sequence
  Description of Artificial Sequence: Synthetic oligonucleotide
  Sense strand starting at position 148 of SEQ ID NO: 1244171
agugucugcccagaagaga

SEQ ID NO: 1470065 - RNA, 19 nt, Artificial Sequence
  Description of Artificial Sequence: Synthetic oligonucleotide
  Antisense strand to SEQ ID NO: 1470064
ucucuucugggcagacacu

SEQ ID NO: 1470066 - RNA, 19 nt, Artificial Sequence
  Description of Artificial Sequence: Synthetic oligonucleotide
  Sense strand starting at position 162 of SEQ ID NO: 1244171
agagaaaucucacugccac

SEQ ID NO: 1470067 - RNA, 19 nt, Artificial Sequence
  Description of Artificial Sequence: Synthetic oligonucleotide
  Antisense strand to SEQ ID NO: 1470066
guggcagugagauuucucu

SEQ ID NO: 1470068 - RNA, 19 nt, Artificial Sequence
  Description of Artificial Sequence: Synthetic oligonucleotide
  Sense strand starting at position 362 of SEQ ID NO: 1244171
uugugaugccucugcagaa

SEQ ID NO: 1470069 - RNA, 19 nt, Artificial Sequence
  Description of Artificial Sequence: Synthetic oligonucleotide
  Antisense strand to SEQ ID NO: 1470068
uucugcagaggcaucacaa

SEQ ID NO: 1470070 - RNA, 19 nt, Artificial Sequence
  Description of Artificial Sequence: Synthetic oligonucleotide
  Sense strand starting at position 363 of SEQ ID NO: 1244171
ugugaugccucugcagaag

SEQ ID NO: 1470071 - RNA, 19 nt, Artificial Sequence
  Description of Artificial Sequence: Synthetic oligonucleotide
  Antisense strand to SEQ ID NO: 1470070
cuucugcagaggcaucaca

SEQ ID NO: 1470072 - RNA, 19 nt, Artificial Sequence
  Description of Artificial Sequence: Synthetic oligonucleotide
  Sense strand starting at position 366 of SEQ ID NO: 1244171
gaugccucugcagaagagu

SEQ ID NO: 1470073 - RNA, 19 nt, Artificial Sequence
  Description of Artificial Sequence: Synthetic oligonucleotide
  Antisense strand to SEQ ID NO: 1470072
acucuucugcagaggcauc

SEQ ID NO: 1470074 - RNA, 19 nt, Artificial Sequence
  Description of Artificial Sequence: Synthetic oligonucleotide
  Sense strand starting at position 377 of SEQ ID NO: 1244171
agaagagugucacucugca

SEQ ID NO: 1470075 - RNA, 19 nt, Artificial Sequence
  Description of Artificial Sequence: Synthetic oligonucleotide
  Antisense strand to SEQ ID NO: 1470074
ugcagagugacacucuucu

SEQ ID NO: 1470076 - RNA, 19 nt, Artificial Sequence
  Description of Artificial Sequence: Synthetic oligonucleotide
  Sense strand starting at position 381 of SEQ ID NO: 1244171
gagugucacucugcaaaca

SEQ ID NO: 1470077 - RNA, 19 nt, Artificial Sequence
  Description of Artificial Sequence: Synthetic oligonucleotide
  Antisense strand to SEQ ID NO: 1470076
uguuugcagagugacacuc

SEQ ID NO: 1470078 - RNA, 19 nt, Artificial Sequence
  Description of Artificial Sequence: Synthetic oligonucleotide
  Sense strand starting at position 439 of SEQ ID NO: 1244171
uaggguacucacggaagau

SEQ ID NO: 1470079 - RNA, 19 nt, Artificial Sequence
  Description of Artificial Sequence: Synthetic oligonucleotide
  Antisense strand to SEQ ID NO: 1470078
aucuuccgugaguacccua

SEQ ID NO: 1470080 - RNA, 19 nt, Artificial Sequence
  Description of Artificial Sequence: Synthetic oligonucleotide
  Sense strand starting at position 474 of SEQ ID NO: 1244171
gcuggaaauccacagguua

SEQ ID NO: 1470081 - RNA, 19 nt, Artificial Sequence
  Description of Artificial Sequence: Synthetic oligonucleotide
  Antisense strand to SEQ ID NO: 1470080
uaaccuguggauuuccagc

SEQ ID NO: 1470082 - RNA, 19 nt, Artificial Sequence
  Description of Artificial Sequence: Synthetic oligonucleotide
  Sense strand starting at position 526 of SEQ ID NO: 1244171
gugugcuagcugcuaaaua

SEQ ID NO: 1470083 - RNA, 19 nt, Artificial Sequence
  Description of Artificial Sequence: Synthetic oligonucleotide
  Antisense strand to SEQ ID NO: 1470082
uauuuagcagcuagcacac

SEQ ID NO: 1470084 - RNA, 19 nt, Artificial Sequence
  Description of Artificial Sequence: Synthetic oligonucleotide
  Sense strand starting at position 577 of SEQ ID NO: 1244171
ucuggauuauuagaauuuc

SEQ ID NO: 1470085 - RNA, 19 nt, Artificial Sequence
  Description of Artificial Sequence: Synthetic oligonucleotide
  Antisense strand to SEQ ID NO: 1470084
gaaauucuaauaauccaga

SEQ ID NO: 1470086 - RNA, 19 nt, Artificial Sequence
  Description of Artificial Sequence: Synthetic oligonucleotide
  Sense strand starting at position 646 of SEQ ID NO: 1244171
aucuucgauuuccuguuau

SEQ ID NO: 1470087 - RNA, 19 nt, Artificial Sequence
  Description of Artificial Sequence: Synthetic oligonucleotide
  Antisense strand to SEQ ID NO: 1470086
auaacaggaaaucgaagau

SEQ ID NO: 1470088 - RNA, 19 nt, Artificial Sequence
  Description of Artificial Sequence: Synthetic oligonucleotide
  Sense strand starting at position 658 of SEQ ID NO: 1244171
cuguuaucuuucuucugua

SEQ ID NO: 1470089 - RNA, 19 nt, Artificial Sequence
  Description of Artificial Sequence: Synthetic oligonucleotide
  Antisense strand to SEQ ID NO: 1470088
uacagaagaaagauaacag

SEQ ID NO: 1470090 - RNA, 19 nt, Artificial Sequence
  Description of Artificial Sequence: Synthetic oligonucleotide
  Sense strand starting at position 699 of SEQ ID NO: 1244171
cucuguguccuacaaacau

SEQ ID NO: 1470091 - RNA, 19 nt, Artificial Sequence
  Description of Artificial Sequence: Synthetic oligonucleotide
  Antisense strand to SEQ ID NO: 1470090
auguuuguaggacacagag

SEQ ID NO: 1470092 - RNA, 19 nt, Artificial Sequence
  Description of Artificial Sequence: Synthetic oligonucleotide
  Sense strand starting at position 777 of SEQ ID NO: 1244171
auggcaaggcugggauuaa

SEQ ID NO: 1470093 - RNA, 19 nt, Artificial Sequence
  Description of Artificial Sequence: Synthetic oligonucleotide
  Antisense strand to SEQ ID NO: 1470092
uuaaucccagccuugccau

SEQ ID NO: 1470094 - RNA, 19 nt, Artificial Sequence
  Description of Artificial Sequence: Synthetic oligonucleotide
  Sense strand starting at position 2358 of SEQ ID NO: 1244171
caggguucugcggaaguua

SEQ ID NO: 1470095 - RNA, 19 nt, Artificial Sequence
  Description of Artificial Sequence: Synthetic oligonucleotide
  Antisense strand to SEQ ID NO: 1470094
uaacuuccgcagaacccug

SEQ ID NO: 1470096 - RNA, 19 nt, Artificial Sequence
  Description of Artificial Sequence: Synthetic oligonucleotide
  Sense strand starting at position 2635 of SEQ ID NO: 1244171
cacgguuccuggccaauga

SEQ ID NO: 1470097 - RNA, 19 nt, Artificial Sequence
  Description of Artificial Sequence: Synthetic oligonucleotide
  Antisense strand to SEQ ID NO: 1470096
ucauuggccaggaaccgug

SEQ ID NO: 1470098 - RNA, 19 nt, Artificial Sequence
  Description of Artificial Sequence: Synthetic oligonucleotide
  Sense strand starting at position 2639 of SEQ ID NO: 1244171
guuccuggccaaugaguuu

SEQ ID NO: 1470099 - RNA, 19 nt, Artificial Sequence
  Description of Artificial Sequence: Synthetic oligonucleotide
  Antisense strand to SEQ ID NO: 1470098
aaacucauuggccaggaac

SEQ ID NO: 1470100 - RNA, 19 nt, Artificial Sequence
  Description of Artificial Sequence: Synthetic oligonucleotide
  Sense strand starting at position 2742 of SEQ ID NO: 1244171
ugcagaaguagugaauauu

SEQ ID NO: 1470101 - RNA, 19 nt, Artificial Sequence
  Description of Artificial Sequence: Synthetic oligonucleotide
  Antisense strand to SEQ ID NO: 1470100
aauauucacuacuucugca

SEQ ID NO: 1470102 - RNA, 19 nt, Artificial Sequence
  Description of Artificial Sequence: Synthetic oligonucleotide
  Sense strand starting at position 2745 of SEQ ID NO: 1244171
agaaguagugaauauuguu

SEQ ID NO: 1470103 - RNA, 19 nt, Artificial Sequence
  Description of Artificial Sequence: Synthetic oligonucleotide
  Antisense strand to SEQ ID NO: 1470102
aacaauauucacuacuucu

SEQ ID NO: 1470104 - RNA, 19 nt, Artificial Sequence
  Description of Artificial Sequence: Synthetic oligonucleotide
  Sense strand starting at position 2761 of SEQ ID NO: 1244171
guucuugcccuuuagcaaa

SEQ ID NO: 1470105 - RNA, 19 nt, Artificial Sequence
  Description of Artificial Sequence: Synthetic oligonucleotide
  Antisense strand to SEQ ID NO: 1470104
uuugcuaaagggcaagaac

SEQ ID NO: 1470106 - RNA, 19 nt, Artificial Sequence
  Description of Artificial Sequence: Synthetic oligonucleotide
  Sense strand starting at position 2782 of SEQ ID NO: 1244171
auaguuuaucugggaagca

SEQ ID NO: 1470107 - RNA, 19 nt, Artificial Sequence
  Description of Artificial Sequence: Synthetic oligonucleotide
  Antisense strand to SEQ ID NO: 1470106
ugcuucccagauaaacuau

SEQ ID NO: 1470108 - RNA, 19 nt, Artificial Sequence
  Description of Artificial Sequence: Synthetic oligonucleotide
  Sense strand starting at position 2840 of SEQ ID NO: 1244171
gccugcuuccuucugugua

SEQ ID NO: 1470109 - RNA, 19 nt, Artificial Sequence
  Description of Artificial Sequence: Synthetic oligonucleotide
  Antisense strand to SEQ ID NO: 1470108
uacacagaaggaagcaggc

SEQ ID NO: 1470110 - RNA, 19 nt, Artificial Sequence
  Description of Artificial Sequence: Synthetic oligonucleotide
  Sense strand starting at position 2845 of SEQ ID NO: 1244171
cuuccuucuguguaguuua

SEQ ID NO: 1470111 - RNA, 19 nt, Artificial Sequence
  Description of Artificial Sequence: Synthetic oligonucleotide
  Antisense strand to SEQ ID NO: 1470110
uaaacuacacagaaggaag

SEQ ID NO: 1470112 - RNA, 19 nt, Artificial Sequence
  Description of Artificial Sequence: Synthetic oligonucleotide
  Sense strand starting at position 2852 of SEQ ID NO: 1244171
cuguguaguuuaucuggga

SEQ ID NO: 1470113 - RNA, 19 nt, Artificial Sequence
  Description of Artificial Sequence: Synthetic oligonucleotide
  Antisense strand to SEQ ID NO: 1470112
ucccagauaaacuacacag

SEQ ID NO: 1470114 - RNA, 19 nt, Artificial Sequence
  Description of Artificial Sequence: Synthetic oligonucleotide
  Sense strand starting at position 2853 of SEQ ID NO: 1244171
uguguaguuuaucugggaa

SEQ ID NO: 1470115 - RNA, 19 nt, Artificial Sequence
  Description of Artificial Sequence: Synthetic oligonucleotide
  Antisense strand to SEQ ID NO: 1470114
uucccagauaaacuacaca

SEQ ID NO: 1470116 - RNA, 19 nt, Artificial Sequence
  Description of Artificial Sequence: Synthetic oligonucleotide
  Sense strand starting at position 2856 of SEQ ID NO: 1244171
guaguuuaucugggaagca

SEQ ID NO: 1470117 - RNA, 19 nt, Artificial Sequence
  Description of Artificial Sequence: Synthetic oligonucleotide
  Antisense strand to SEQ ID NO: 1470116
ugcuucccagauaaacuac

SEQ ID NO: 1470118 - RNA, 19 nt, Artificial Sequence
  Description of Artificial Sequence: Synthetic oligonucleotide
  Sense strand starting at position 2976 of SEQ ID NO: 1244171
ucaguaucugaaugaugau

SEQ ID NO: 1470119 - RNA, 19 nt, Artificial Sequence
  Description of Artificial Sequence: Synthetic oligonucleotide
  Antisense strand to SEQ ID NO: 1470118
aucaucauucagauacuga

SEQ ID NO: 1470120 - RNA, 19 nt, Artificial Sequence
  Description of Artificial Sequence: Synthetic oligonucleotide
  Sense strand starting at position 3017 of SEQ ID NO: 1244171
ggaaauccugacgguuuca

SEQ ID NO: 1470121 - RNA, 19 nt, Artificial Sequence
  Description of Artificial Sequence: Synthetic oligonucleotide
  Antisense strand to SEQ ID NO: 1470120
ugaaaccgucaggauuucc

SEQ ID NO: 1470122 - RNA, 19 nt, Artificial Sequence
  Description of Artificial Sequence: Synthetic oligonucleotide
  Sense strand starting at position 3207 of SEQ ID NO: 1244171
cugauuguuuccucccuua

SEQ ID NO: 1470123 - RNA, 19 nt, Artificial Sequence
  Description of Artificial Sequence: Synthetic oligonucleotide
  Antisense strand to SEQ ID NO: 1470122
uaagggaggaaacaaucag

SEQ ID NO: 1470124 - RNA, 19 nt, Artificial Sequence
  Description of Artificial Sequence: Synthetic oligonucleotide
  Sense strand starting at position 3307 of SEQ ID NO: 1244171
cuguauuugcgucaucuuc

SEQ ID NO: 1470125 - RNA, 19 nt, Artificial Sequence
  Description of Artificial Sequence: Synthetic oligonucleotide
  Antisense strand to SEQ ID NO: 1470124
gaagaugacgcaaauacag

SEQ ID NO: 1470126 - RNA, 19 nt, Artificial Sequence
  Description of Artificial Sequence: Synthetic oligonucleotide
  Sense strand starting at position 3348 of SEQ ID NO: 1244171
caggguauguccuccgaau

SEQ ID NO: 1470127 - RNA, 19 nt, Artificial Sequence
  Description of Artificial Sequence: Synthetic oligonucleotide
  Antisense strand to SEQ ID NO: 1470126
auucggaggacauacccug

SEQ ID NO: 1470128 - RNA, 19 nt, Artificial Sequence
  Description of Artificial Sequence: Synthetic oligonucleotide
  Sense strand starting at position 3359 of SEQ ID NO: 1244171
cuccgaaugcucugggaag

SEQ ID NO: 1470129 - RNA, 19 nt, Artificial Sequence
  Description of Artificial Sequence: Synthetic oligonucleotide
  Antisense strand to SEQ ID NO: 1470128
cuucccagagcauucggag

SEQ ID NO: 1470130 - RNA, 19 nt, Artificial Sequence
  Description of Artificial Sequence: Synthetic oligonucleotide
  Sense strand starting at position 3566 of SEQ ID NO: 1244171
ucuauuucuuucuggagag

SEQ ID NO: 1470131 - RNA, 19 nt, Artificial Sequence
  Description of Artificial Sequence: Synthetic oligonucleotide
  Antisense strand to SEQ ID NO: 1470130
cucuccagaaagaaauaga

SEQ ID NO: 1470132 - RNA, 19 nt, Artificial Sequence
  Description of Artificial Sequence: Synthetic oligonucleotide
  Sense strand starting at position 3567 of SEQ ID NO: 1244171
cuauuucuuucuggagaga

SEQ ID NO: 1470133 - RNA, 19 nt, Artificial Sequence
  Description of Artificial Sequence: Synthetic oligonucleotide
  Antisense strand to SEQ ID NO: 1470132
ucucuccagaaagaaauag

SEQ ID NO: 1470134 - RNA, 19 nt, Artificial Sequence
  Description of Artificial Sequence: Synthetic oligonucleotide
  Sense strand starting at position 3736 of SEQ ID NO: 1244171
gggccauguuuggcacaga

SEQ ID NO: 1470135 - RNA, 19 nt, Artificial Sequence
  Description of Artificial Sequence: Synthetic oligonucleotide
  Antisense strand to SEQ ID NO: 1470134
ucugugccaaacauggccc

SEQ ID NO: 1470136 - RNA, 19 nt, Artificial Sequence
  Description of Artificial Sequence: Synthetic oligonucleotide
  Sense strand starting at position 3739 of SEQ ID NO: 1244171
ccauguuuggcacagaaau

SEQ ID NO: 1470137 - RNA, 19 nt, Artificial Sequence
  Description of Artificial Sequence: Synthetic oligonucleotide
  Antisense strand to SEQ ID NO: 1470136
auuucugugccaaacaugg

SEQ ID NO: 1470138 - RNA, 19 nt, Artificial Sequence
  Description of Artificial Sequence: Synthetic oligonucleotide
  Sense strand starting at position 3751 of SEQ ID NO: 1244171
cagaaauggugucucuaaa

SEQ ID NO: 1470139 - RNA, 19 nt, Artificial Sequence
  Description of Artificial Sequence: Synthetic oligonucleotide
  Antisense strand to SEQ ID NO: 1470138
uuuagagacaccauuucug

SEQ ID NO: 1470140 - RNA, 19 nt, Artificial Sequence
  Description of Artificial Sequence: Synthetic oligonucleotide
  Sense strand starting at position 3839 of SEQ ID NO: 1244171
ccugcuagucacugaaauu

SEQ ID NO: 1470141 - RNA, 19 nt, Artificial Sequence
  Description of Artificial Sequence: Synthetic oligonucleotide
  Antisense strand to SEQ ID NO: 1470140
aauuucagugacuagcagg

SEQ ID NO: 1470142 - RNA, 19 nt, Artificial Sequence
  Description of Artificial Sequence: Synthetic oligonucleotide
  Sense strand starting at position 173 of SEQ ID NO: 1244172
gugccauugcuuuaaauuu

SEQ ID NO: 1470143 - RNA, 19 nt, Artificial Sequence
  Description of Artificial Sequence: Synthetic oligonucleotide
  Antisense strand to SEQ ID NO: 1470142
aaauuuaaagcaauggcac

SEQ ID NO: 1470144 - RNA, 19 nt, Artificial Sequence
  Description of Artificial Sequence: Synthetic oligonucleotide
  Sense strand starting at position 212 of SEQ ID NO: 1244172
uuaguuaugccucaggauc

SEQ ID NO: 1470145 - RNA, 19 nt, Artificial Sequence
  Description of Artificial Sequence: Synthetic oligonucleotide
  Antisense strand to SEQ ID NO: 1470144
gauccugaggcauaacuaa

SEQ ID NO: 1470146 - RNA, 19 nt, Artificial Sequence
  Description of Artificial Sequence: Synthetic oligonucleotide
  Sense strand starting at position 300 of SEQ ID NO: 1244172
gagauaccacagugccauu

SEQ ID NO: 1470147 - RNA, 19 nt, Artificial Sequence
  Description of Artificial Sequence: Synthetic oligonucleotide
  Antisense strand to SEQ ID NO: 1470146
aauggcacugugguaucuc

SEQ ID NO: 1470148 - RNA, 19 nt, Artificial Sequence
  Description of Artificial Sequence: Synthetic oligonucleotide
  Sense strand starting at position 397 of SEQ ID NO: 1244172
cucuaaugacacuguaaug

SEQ ID NO: 1470149 - RNA, 19 nt, Artificial Sequence
  Description of Artificial Sequence: Synthetic oligonucleotide
  Antisense strand to SEQ ID NO: 1470148
cauuacagugucauuagag

SEQ ID NO: 1470150 - RNA, 19 nt, Artificial Sequence
  Description of Artificial Sequence: Synthetic oligonucleotide
  Sense strand starting at position 530 of SEQ ID NO: 1244172
auacaagaagucugccaga

SEQ ID NO: 1470151 - RNA, 19 nt, Artificial Sequence
  Description of Artificial Sequence: Synthetic oligonucleotide
  Antisense strand to SEQ ID NO: 1470150
ucuggcagacuucuuguau

SEQ ID NO: 1470152 - RNA, 19 nt, Artificial Sequence
  Description of Artificial Sequence: Synthetic oligonucleotide
  Sense strand starting at position 591 of SEQ ID NO: 1244172
guaugaagacccuagucau

SEQ ID NO: 1470153 - RNA, 19 nt, Artificial Sequence
  Description of Artificial Sequence: Synthetic oligonucleotide
  Antisense strand to SEQ ID NO: 1470152
augacuagggucuucauac

SEQ ID NO: 1470154 - RNA, 19 nt, Artificial Sequence
  Description of Artificial Sequence: Synthetic oligonucleotide
  Sense strand starting at position 603 of SEQ ID NO: 1244172
uagucauugccaggaagca

SEQ ID NO: 1470155 - RNA, 19 nt, Artificial Sequence
  Description of Artificial Sequence: Synthetic oligonucleotide
  Antisense strand to SEQ ID NO: 1470154
ugcuuccuggcaaugacua

SEQ ID NO: 1470156 - RNA, 19 nt, Artificial Sequence
  Description of Artificial Sequence: Synthetic oligonucleotide
  Sense strand starting at position 604 of SEQ ID NO: 1244172
agucauugccaggaagcau

SEQ ID NO: 1470157 - RNA, 19 nt, Artificial Sequence
  Description of Artificial Sequence: Synthetic oligonucleotide
  Antisense strand to SEQ ID NO: 1470156
augcuuccuggcaaugacu

SEQ ID NO: 1470158 - RNA, 19 nt, Artificial Sequence
  Description of Artificial Sequence: Synthetic oligonucleotide
  Sense strand starting at position 698 of SEQ ID NO: 1244172
acuugaucuccucagguca

SEQ ID NO: 1470159 - RNA, 19 nt, Artificial Sequence
  Description of Artificial Sequence: Synthetic oligonucleotide
  Antisense strand to SEQ ID NO: 1470158
ugaccugaggagaucaagu

SEQ ID NO: 1470160 - RNA, 19 nt, Artificial Sequence
  Description of Artificial Sequence: Synthetic oligonucleotide
  Sense strand starting at position 776 of SEQ ID NO: 1244172
cuaguuuggcucuagguga

SEQ ID NO: 1470161 - RNA, 19 nt, Artificial Sequence
  Description of Artificial Sequence: Synthetic oligonucleotide
  Antisense strand to SEQ ID NO: 1470160
ucaccuagagccaaacuag

SEQ ID NO: 1470162 - RNA, 19 nt, Artificial Sequence
  Description of Artificial Sequence: Synthetic oligonucleotide
  Sense strand starting at position 875 of SEQ ID NO: 1244172
caagauuaccugcggaaua

SEQ ID NO: 1470163 - RNA, 19 nt, Artificial Sequence
  Description of Artificial Sequence: Synthetic oligonucleotide
  Antisense strand to SEQ ID NO: 1470162
uauuccgcagguaaucuug

SEQ ID NO: 1470164 - RNA, 19 nt, Artificial Sequence
  Description of Artificial Sequence: Synthetic oligonucleotide
  Sense strand starting at position 877 of SEQ ID NO: 1244172
agauuaccugcggaauaac

SEQ ID NO: 1470165 - RNA, 19 nt, Artificial Sequence
  Description of Artificial Sequence: Synthetic oligonucleotide
  Antisense strand to SEQ ID NO: 1470164
guuauuccgcagguaaucu

SEQ ID NO: 1470166 - RNA, 19 nt, Artificial Sequence
  Description of Artificial Sequence: Synthetic oligonucleotide
  Sense strand starting at position 914 of SEQ ID NO: 1244172
gagcgucuuggauaaauca

SEQ ID NO: 1470167 - RNA, 19 nt, Artificial Sequence
  Description of Artificial Sequence: Synthetic oligonucleotide
  Antisense strand to SEQ ID NO: 1470166
ugauuuauccaagacgcuc

SEQ ID NO: 1470168 - RNA, 19 nt, Artificial Sequence
  Description of Artificial Sequence: Synthetic oligonucleotide
  Sense strand starting at position 1220 of SEQ ID NO: 1244172
gagggcauuccacaggagu

SEQ ID NO: 1470169 - RNA, 19 nt, Artificial Sequence
  Description of Artificial Sequence: Synthetic oligonucleotide
  Antisense strand to SEQ ID NO: 1470168
acuccuguggaaugcccuc

SEQ ID NO: 1470170 - RNA, 19 nt, Artificial Sequence
  Description of Artificial Sequence: Synthetic oligonucleotide
  Sense strand starting at position 1222 of SEQ ID NO: 1244172
gggcauuccacaggaguca

SEQ ID NO: 1470171 - RNA, 19 nt, Artificial Sequence
  Description of Artificial Sequence: Synthetic oligonucleotide
  Antisense strand to SEQ ID NO: 1470170
ugacuccuguggaaugccc

SEQ ID NO: 1470172 - RNA, 19 nt, Artificial Sequence
  Description of Artificial Sequence: Synthetic oligonucleotide
  Sense strand starting at position 1239 of SEQ ID NO: 1244172
cacuuuauccgauggcaug

SEQ ID NO: 1470173 - RNA, 19 nt, Artificial Sequence
  Description of Artificial Sequence: Synthetic oligonucleotide
  Antisense strand to SEQ ID NO: 1470172
caugccaucggauaaagug

SEQ ID NO: 1470174 - RNA, 19 nt, Artificial Sequence
  Description of Artificial Sequence: Synthetic oligonucleotide
  Sense strand starting at position 1548 of SEQ ID NO: 1244172
agggauucuuuguuggcga

SEQ ID NO: 1470175 - RNA, 19 nt, Artificial Sequence
  Description of Artificial Sequence: Synthetic oligonucleotide
  Antisense strand to SEQ ID NO: 1470174
ucgccaacaaagaaucccu

SEQ ID NO: 1470176 - RNA, 19 nt, Artificial Sequence
  Description of Artificial Sequence: Synthetic oligonucleotide
  Sense strand starting at position 1739 of SEQ ID NO: 1244172
cccuuuccuuggccaagaa

SEQ ID NO: 1470177 - RNA, 19 nt, Artificial Sequence
  Description of Artificial Sequence: Synthetic oligonucleotide
  Antisense strand to SEQ ID NO: 1470176
uucuuggccaaggaaaggg

SEQ ID NO: 1470178 - RNA, 19 nt, Artificial Sequence
  Description of Artificial Sequence: Synthetic oligonucleotide
  Sense strand starting at position 1740 of SEQ ID NO: 1244172
ccuuuccuuggccaagaau

SEQ ID NO: 1470179 - RNA, 19 nt, Artificial Sequence
  Description of Artificial Sequence: Synthetic oligonucleotide
  Antisense strand to SEQ ID NO: 1470178
auucuuggccaaggaaagg

SEQ ID NO: 1470180 - RNA, 19 nt, Artificial Sequence
  Description of Artificial Sequence: Synthetic oligonucleotide
  Sense strand starting at position 2011 of SEQ ID NO: 1244172
uggucaggauuugagaaua

SEQ ID NO: 1470181 - RNA, 19 nt, Artificial Sequence
  Description of Artificial Sequence: Synthetic oligonucleotide
  Antisense strand to SEQ ID NO: 1470180
uauucucaaauccugacca

SEQ ID NO: 1470182 - RNA, 19 nt, Artificial Sequence
  Description of Artificial Sequence: Synthetic oligonucleotide
  Sense strand starting at position 2105 of SEQ ID NO: 1244172
gaauuaggugccgagugau

SEQ ID NO: 1470183 - RNA, 19 nt, Artificial Sequence
  Description of Artificial Sequence: Synthetic oligonucleotide
  Antisense strand to SEQ ID NO: 1470182
aucacucggcaccuaauuc

SEQ ID NO: 1470184 - RNA, 19 nt, Artificial Sequence
  Description of Artificial Sequence: Synthetic oligonucleotide
  Sense strand starting at position 2173 of SEQ ID NO: 1244172
ggcaguuucuaguccagaa

SEQ ID NO: 1470185 - RNA, 19 nt, Artificial Sequence
  Description of Artificial Sequence: Synthetic oligonucleotide
  Antisense strand to SEQ ID NO: 1470184
uucuggacuagaaacugcc

SEQ ID NO: 1470186 - RNA, 19 nt, Artificial Sequence
  Description of Artificial Sequence: Synthetic oligonucleotide
  Sense strand starting at position 2345 of SEQ ID NO: 1244172
ccuuguugccuugaacaaa

SEQ ID NO: 1470187 - RNA, 19 nt, Artificial Sequence
  Description of Artificial Sequence: Synthetic oligonucleotide
  Antisense strand to SEQ ID NO: 1470186
uuuguucaaggcaacaagg

SEQ ID NO: 1470188 - RNA, 19 nt, Artificial Sequence
  Description of Artificial Sequence: Synthetic oligonucleotide
  Sense strand starting at position 2402 of SEQ ID NO: 1244172
cucccucaggacgaauauu

SEQ ID NO: 1470189 - RNA, 19 nt, Artificial Sequence
  Description of Artificial Sequence: Synthetic oligonucleotide
  Antisense strand to SEQ ID NO: 1470188
aauauucguccugagggag

SEQ ID NO: 1470190 - RNA, 19 nt, Artificial Sequence
  Description of Artificial Sequence: Synthetic oligonucleotide
  Sense strand starting at position 2411 of SEQ ID NO: 1244172
gacgaauauugcguccaaa

SEQ ID NO: 1470191 - RNA, 19 nt, Artificial Sequence
  Description of Artificial Sequence: Synthetic oligonucleotide
  Antisense strand to SEQ ID NO: 1470190
uuuggacgcaauauucguc

SEQ ID NO: 1470192 - RNA, 19 nt, Artificial Sequence
  Description of Artificial Sequence: Synthetic oligonucleotide
  Sense strand starting at position 2414 of SEQ ID NO: 1244172
gaauauugcguccaaacca

SEQ ID NO: 1470193 - RNA, 19 nt, Artificial Sequence
  Description of Artificial Sequence: Synthetic oligonucleotide
  Antisense strand to SEQ ID NO: 1470192
ugguuuggacgcaauauuc

SEQ ID NO: 1470194 - RNA, 19 nt, Artificial Sequence
  Description of Artificial Sequence: Synthetic oligonucleotide
  Sense strand starting at position 2532 of SEQ ID NO: 1244172
uuagauaaaucgccuggga

SEQ ID NO: 1470195 - RNA, 19 nt, Artificial Sequence
  Description of Artificial Sequence: Synthetic oligonucleotide
  Antisense strand to SEQ ID NO: 1470194
ucccaggcgauuuaucuaa

SEQ ID NO: 1470196 - RNA, 19 nt, Artificial Sequence
  Description of Artificial Sequence: Synthetic oligonucleotide
  Sense strand starting at position 2534 of SEQ ID NO: 1244172
agauaaaucgccugggaga

SEQ ID NO: 1470197 - RNA, 19 nt, Artificial Sequence
  Description of Artificial Sequence: Synthetic oligonucleotide
  Antisense strand to SEQ ID NO: 1470196
ucucccaggcgauuuaucu

SEQ ID NO: 1470198 - RNA, 19 nt, Artificial Sequence
  Description of Artificial Sequence: Synthetic oligonucleotide
  Sense strand starting at position 2535 of SEQ ID NO: 1244172
gauaaaucgccugggagac

SEQ ID NO: 1470199 - RNA, 19 nt, Artificial Sequence
  Description of Artificial Sequence: Synthetic oligonucleotide
  Antisense strand to SEQ ID NO: 1470198
gucucccaggcgauuuauc

SEQ ID NO: 1470200 - RNA, 19 nt, Artificial Sequence
  Description of Artificial Sequence: Synthetic oligonucleotide
  Sense strand starting at position 2574 of SEQ ID NO: 1244172
aagccugugucaguauuua

SEQ ID NO: 1470201 - RNA, 19 nt, Artificial Sequence
  Description of Artificial Sequence: Synthetic oligonucleotide
  Antisense strand to SEQ ID NO: 1470200
uaaauacugacacaggcuu

SEQ ID NO: 1470202 - RNA, 19 nt, Artificial Sequence
  Description of Artificial Sequence: Synthetic oligonucleotide
  Sense strand starting at position 2582 of SEQ ID NO: 1244172
gucaguauuuacuucucuu

SEQ ID NO: 1470203 - RNA, 19 nt, Artificial Sequence
  Description of Artificial Sequence: Synthetic oligonucleotide
  Antisense strand to SEQ ID NO: 1470202
aagagaaguaaauacugac

SEQ ID NO: 1470204 - RNA, 19 nt, Artificial Sequence
  Description of Artificial Sequence: Synthetic oligonucleotide
  Sense strand starting at position 2609 of SEQ ID NO: 1244172
gaucuaagucuggaaggcu

SEQ ID NO: 1470205 - RNA, 19 nt, Artificial Sequence
  Description of Artificial Sequence: Synthetic oligonucleotide
  Antisense strand to SEQ ID NO: 1470204
agccuuccagacuuagauc

SEQ ID NO: 1470206 - RNA, 19 nt, Artificial Sequence
  Description of Artificial Sequence: Synthetic oligonucleotide
  Sense strand starting at position 2670 of SEQ ID NO: 1244172
uuauauaauugggaaagag

SEQ ID NO: 1470207 - RNA, 19 nt, Artificial Sequence
  Description of Artificial Sequence: Synthetic oligonucleotide
  Antisense strand to SEQ ID NO: 1470206
cucuuucccaauuauauaa

SEQ ID NO: 1470208 - RNA, 19 nt, Artificial Sequence
  Description of Artificial Sequence: Synthetic oligonucleotide
  Sense strand starting at position 2690 of SEQ ID NO: 1244172
ugagguuggccuugugaag

SEQ ID NO: 1470209 - RNA, 19 nt, Artificial Sequence
  Description of Artificial Sequence: Synthetic oligonucleotide
  Antisense strand to SEQ ID NO: 1470208
cuucacaaggccaaccuca

SEQ ID NO: 1470210 - RNA, 19 nt, Artificial Sequence
  Description of Artificial Sequence: Synthetic oligonucleotide
  Sense strand starting at position 2728 of SEQ ID NO: 1244172
ucaugaguuuaauuacgua

SEQ ID NO: 1470211 - RNA, 19 nt, Artificial Sequence
  Description of Artificial Sequence: Synthetic oligonucleotide
  Antisense strand to SEQ ID NO: 1470210
uacguaauuaaacucauga

SEQ ID NO: 1470212 - RNA, 19 nt, Artificial Sequence
  Description of Artificial Sequence: Synthetic oligonucleotide
  Sense strand starting at position 2785 of SEQ ID NO: 1244172
uuuaguaccuaaucuugua

SEQ ID NO: 1470213 - RNA, 19 nt, Artificial Sequence
  Description of Artificial Sequence: Synthetic oligonucleotide
  Antisense strand to SEQ ID NO: 1470212
uacaagauuagguacuaaa

SEQ ID NO: 1470214 - RNA, 19 nt, Artificial Sequence
  Description of Artificial Sequence: Synthetic oligonucleotide
  Sense strand starting at position 2808 of SEQ ID NO: 1244172
ccaguuuagcuguugccua

SEQ ID NO: 1470215 - RNA, 19 nt, Artificial Sequence
  Description of Artificial Sequence: Synthetic oligonucleotide
  Antisense strand to SEQ ID NO: 1470214
uaggcaacagcuaaacugg

SEQ ID NO: 1470216 - RNA, 19 nt, Artificial Sequence
  Description of Artificial Sequence: Synthetic oligonucleotide
  Sense strand starting at position 2882 of SEQ ID NO: 1244172
ugcaaauagguccaaaucu

SEQ ID NO: 1470217 - RNA, 19 nt, Artificial Sequence
  Description of Artificial Sequence: Synthetic oligonucleotide
  Antisense strand to SEQ ID NO: 1470216
agauuuggaccuauuugca

SEQ ID NO: 1470218 - RNA, 19 nt, Artificial Sequence
  Description of Artificial Sequence: Synthetic oligonucleotide
  Sense strand starting at position 3393 of SEQ ID NO: 1244172
gguucuuucuuaucaguaa

SEQ ID NO: 1470219 - RNA, 19 nt, Artificial Sequence
  Description of Artificial Sequence: Synthetic oligonucleotide
  Antisense strand to SEQ ID NO: 1470218
uuacugauaagaaagaacc

SEQ ID NO: 1470220 - RNA, 19 nt, Artificial Sequence
  Description of Artificial Sequence: Synthetic oligonucleotide
  Sense strand starting at position 3486 of SEQ ID NO: 1244172
ucuuguauguauguacaua

SEQ ID NO: 1470221 - RNA, 19 nt, Artificial Sequence
  Description of Artificial Sequence: Synthetic oligonucleotide
  Antisense strand to SEQ ID NO: 1470220
uauguacauacauacaaga

SEQ ID NO: 1470222 - RNA, 19 nt, Artificial Sequence
  Description of Artificial Sequence: Synthetic oligonucleotide
  Sense strand starting at position 203 of SEQ ID NO: 1244173
gccugucuccuguaacaca

SEQ ID NO: 1470223 - RNA, 19 nt, Artificial Sequence
  Description of Artificial Sequence: Synthetic oligonucleotide
  Antisense strand to SEQ ID NO: 1470222
uguguuacaggagacaggc

SEQ ID NO: 1470224 - RNA, 19 nt, Artificial Sequence
  Description of Artificial Sequence: Synthetic oligonucleotide
  Sense strand starting at position 748 of SEQ ID NO: 1244173
gcuugucucuacccaggaa

SEQ ID NO: 1470225 - RNA, 19 nt, Artificial Sequence
  Description of Artificial Sequence: Synthetic oligonucleotide
  Antisense strand to SEQ ID NO: 1470224
uuccuggguagagacaagc

SEQ ID NO: 1470226 - RNA, 19 nt, Artificial Sequence
  Description of Artificial Sequence: Synthetic oligonucleotide
  Sense strand starting at position 885 of SEQ ID NO: 1244173
ggugcagaaugcucucaug

SEQ ID NO: 1470227 - RNA, 19 nt, Artificial Sequence
  Description of Artificial Sequence: Synthetic oligonucleotide
  Antisense strand to SEQ ID NO: 1470226
caugagagcauucugcacc

SEQ ID NO: 1470228 - RNA, 19 nt, Artificial Sequence
  Description of Artificial Sequence: Synthetic oligonucleotide
  Sense strand starting at position 895 of SEQ ID NO: 1244173
gcucucauggcccagagau

SEQ ID NO: 1470229 - RNA, 19 nt, Artificial Sequence
  Description of Artificial Sequence: Synthetic oligonucleotide
  Antisense strand to SEQ ID NO: 1470228
aucucugggccaugagagc

SEQ ID NO: 1470230 - RNA, 19 nt, Artificial Sequence
  Description of Artificial Sequence: Synthetic oligonucleotide
  Sense strand starting at position 1372 of SEQ ID NO: 1244173
gcgagucucccggcucaua

SEQ ID NO: 1470231 - RNA, 19 nt, Artificial Sequence
  Description of Artificial Sequence: Synthetic oligonucleotide
  Antisense strand to SEQ ID NO: 1470230
uaugagccgggagacucgc

SEQ ID NO: 1470232 - RNA, 19 nt, Artificial Sequence
  Description of Artificial Sequence: Synthetic oligonucleotide
  Sense strand starting at position 1624 of SEQ ID NO: 1244173
ggcuuuccgagucagaucu

SEQ ID NO: 1470233 - RNA, 19 nt, Artificial Sequence
  Description of Artificial Sequence: Synthetic oligonucleotide
  Antisense strand to SEQ ID NO: 1470232
agaucugacucggaaagcc

SEQ ID NO: 1470234 - RNA, 19 nt, Artificial Sequence
  Description of Artificial Sequence: Synthetic oligonucleotide
  Sense strand starting at position 1837 of SEQ ID NO: 1244173
ugaacuauuuaaggaucca

SEQ ID NO: 1470235 - RNA, 19 nt, Artificial Sequence
  Description of Artificial Sequence: Synthetic oligonucleotide
  Antisense strand to SEQ ID NO: 1470234
uggauccuuaaauaguuca

SEQ ID NO: 1470236 - RNA, 19 nt, Artificial Sequence
  Description of Artificial Sequence: Synthetic oligonucleotide
  Sense strand starting at position 1846 of SEQ ID NO: 1244173
uaaggauccagguguugca

SEQ ID NO: 1470237 - RNA, 19 nt, Artificial Sequence
  Description of Artificial Sequence: Synthetic oligonucleotide
  Antisense strand to SEQ ID NO: 1470236
ugcaacaccuggauccuua

SEQ ID NO: 1470238 - RNA, 19 nt, Artificial Sequence
  Description of Artificial Sequence: Synthetic oligonucleotide
  Sense strand starting at position 1954 of SEQ ID NO: 1244173
cgcagaaagaucugaggaa

SEQ ID NO: 1470239 - RNA, 19 nt, Artificial Sequence
  Description of Artificial Sequence: Synthetic oligonucleotide
  Antisense strand to SEQ ID NO: 1470238
uuccucagaucuuucugcg

SEQ ID NO: 1470240 - RNA, 19 nt, Artificial Sequence
  Description of Artificial Sequence: Synthetic oligonucleotide
  Sense strand starting at position 2320 of SEQ ID NO: 1244173
gcugcuguccaauggaaau

SEQ ID NO: 1470241 - RNA, 19 nt, Artificial Sequence
  Description of Artificial Sequence: Synthetic oligonucleotide
  Antisense strand to SEQ ID NO: 1470240
auuuccauuggacagcagc

SEQ ID NO: 1470242 - RNA, 19 nt, Artificial Sequence
  Description of Artificial Sequence: Synthetic oligonucleotide
  Sense strand starting at position 2382 of SEQ ID NO: 1244173
ggcagagucuugguuccag

SEQ ID NO: 1470243 - RNA, 19 nt, Artificial Sequence
  Description of Artificial Sequence: Synthetic oligonucleotide
  Antisense strand to SEQ ID NO: 1470242
cuggaaccaagacucugcc

SEQ ID NO: 1470244 - RNA, 19 nt, Artificial Sequence
  Description of Artificial Sequence: Synthetic oligonucleotide
  Sense strand starting at position 2398 of SEQ ID NO: 1244173
cagacauccgcggagcaau

SEQ ID NO: 1470245 - RNA, 19 nt, Artificial Sequence
  Description of Artificial Sequence: Synthetic oligonucleotide
  Antisense strand to SEQ ID NO: 1470244
auugcuccgcggaugucug

SEQ ID NO: 1470246 - RNA, 19 nt, Artificial Sequence
  Description of Artificial Sequence: Synthetic oligonucleotide
  Sense strand starting at position 2486 of SEQ ID NO: 1244173
accuuacccggaugaucuu

SEQ ID NO: 1470247 - RNA, 19 nt, Artificial Sequence
  Description of Artificial Sequence: Synthetic oligonucleotide
  Antisense strand to SEQ ID NO: 1470246
aagaucauccggguaaggu

SEQ ID NO: 1470248 - RNA, 19 nt, Artificial Sequence
  Description of Artificial Sequence: Synthetic oligonucleotide
  Sense strand starting at position 2493 of SEQ ID NO: 1244173
ccggaugaucuuggaaucu

SEQ ID NO: 1470249 - RNA, 19 nt, Artificial Sequence
  Description of Artificial Sequence: Synthetic oligonucleotide
  Antisense strand to SEQ ID NO: 1470248
agauuccaagaucauccgg

SEQ ID NO: 1470250 - RNA, 19 nt, Artificial Sequence
  Description of Artificial Sequence: Synthetic oligonucleotide
  Sense strand starting at position 2502 of SEQ ID NO: 1244173
cuuggaaucuaguuccuua

SEQ ID NO: 1470251 - RNA, 19 nt, Artificial Sequence
  Description of Artificial Sequence: Synthetic oligonucleotide
  Antisense strand to SEQ ID NO: 1470250
uaaggaacuagauuccaag

SEQ ID NO: 1470252 - RNA, 19 nt, Artificial Sequence
  Description of Artificial Sequence: Synthetic oligonucleotide
  Sense strand starting at position 2549 of SEQ ID NO: 1244173
ugucuuacaggauacguga

SEQ ID NO: 1470253 - RNA, 19 nt, Artificial Sequence
  Description of Artificial Sequence: Synthetic oligonucleotide
  Antisense strand to SEQ ID NO: 1470252
ucacguauccuguaagaca

SEQ ID NO: 1470254 - RNA, 19 nt, Artificial Sequence
  Description of Artificial Sequence: Synthetic oligonucleotide
  Sense strand starting at position 2562 of SEQ ID NO: 1244173
acgugaguuggucagcaaa

SEQ ID NO: 1470255 - RNA, 19 nt, Artificial Sequence
  Description of Artificial Sequence: Synthetic oligonucleotide
  Antisense strand to SEQ ID NO: 1470254
uuugcugaccaacucacgu

SEQ ID NO: 1470256 - RNA, 19 nt, Artificial Sequence
  Description of Artificial Sequence: Synthetic oligonucleotide
  Sense strand starting at position 2564 of SEQ ID NO: 1244173
gugaguuggucagcaaaua

SEQ ID NO: 1470257 - RNA, 19 nt, Artificial Sequence
  Description of Artificial Sequence: Synthetic oligonucleotide
  Antisense strand to SEQ ID NO: 1470256
uauuugcugaccaacucac

SEQ ID NO: 1470258 - RNA, 19 nt, Artificial Sequence
  Description of Artificial Sequence: Synthetic oligonucleotide
  Sense strand starting at position 2565 of SEQ ID NO: 1244173
ugaguuggucagcaaauac

SEQ ID NO: 1470259 - RNA, 19 nt, Artificial Sequence
  Description of Artificial Sequence: Synthetic oligonucleotide
  Antisense strand to SEQ ID NO: 1470258
guauuugcugaccaacuca

SEQ ID NO: 1470260 - RNA, 19 nt, Artificial Sequence
  Description of Artificial Sequence: Synthetic oligonucleotide
  Sense strand starting at position 2720 of SEQ ID NO: 1244173
aagucugagugcuuaccaa

SEQ ID NO: 1470261 - RNA, 19 nt, Artificial Sequence
  Description of Artificial Sequence: Synthetic oligonucleotide
  Antisense strand to SEQ ID NO: 1470260
uugguaagcacucagacuu

SEQ ID NO: 1470262 - RNA, 19 nt, Artificial Sequence
  Description of Artificial Sequence: Synthetic oligonucleotide
  Sense strand starting at position 2782 of SEQ ID NO: 1244173
uguagaguugacgugcgau

SEQ ID NO: 1470263 - RNA, 19 nt, Artificial Sequence
  Description of Artificial Sequence: Synthetic oligonucleotide
  Antisense strand to SEQ ID NO: 1470262
aucgcacgucaacucuaca

SEQ ID NO: 1470264 - RNA, 19 nt, Artificial Sequence
  Description of Artificial Sequence: Synthetic oligonucleotide
  Sense strand starting at position 2911 of SEQ ID NO: 1244173
aguggcaauguauaaucua

SEQ ID NO: 1470265 - RNA, 19 nt, Artificial Sequence
  Description of Artificial Sequence: Synthetic oligonucleotide
  Antisense strand to SEQ ID NO: 1470264
uagauuauacauugccacu

SEQ ID NO: 1470266 - RNA, 19 nt, Artificial Sequence
  Description of Artificial Sequence: Synthetic oligonucleotide
  Sense strand starting at position 2977 of SEQ ID NO: 1244173
ggacuuacuuacccaguuu

SEQ ID NO: 1470267 - RNA, 19 nt, Artificial Sequence
  Description of Artificial Sequence: Synthetic oligonucleotide
  Antisense strand to SEQ ID NO: 1470266
aaacuggguaaguaagucc

SEQ ID NO: 1470268 - RNA, 19 nt, Artificial Sequence
  Description of Artificial Sequence: Synthetic oligonucleotide
  Sense strand starting at position 3002 of SEQ ID NO: 1244173
caagguaaugucugacaag

SEQ ID NO: 1470269 - RNA, 19 nt, Artificial Sequence
  Description of Artificial Sequence: Synthetic oligonucleotide
  Antisense strand to SEQ ID NO: 1470268
cuugucagacauuaccuug

SEQ ID NO: 1470270 - RNA, 19 nt, Artificial Sequence
  Description of Artificial Sequence: Synthetic oligonucleotide
  Sense strand starting at position 3087 of SEQ ID NO: 1244173
acgaauuuggucuggugua

SEQ ID NO: 1470271 - RNA, 19 nt, Artificial Sequence
  Description of Artificial Sequence: Synthetic oligonucleotide
  Antisense strand to SEQ ID NO: 1470270
uacaccagaccaaauucgu

SEQ ID NO: 1470272 - RNA, 19 nt, Artificial Sequence
  Description of Artificial Sequence: Synthetic oligonucleotide
  Sense strand starting at position 3100 of SEQ ID NO: 1244173
gguguaagcccagaacuua

SEQ ID NO: 1470273 - RNA, 19 nt, Artificial Sequence
  Description of Artificial Sequence: Synthetic oligonucleotide
  Antisense strand to SEQ ID NO: 1470272
uaaguucugggcuuacacc

SEQ ID NO: 1470274 - RNA, 19 nt, Artificial Sequence
  Description of Artificial Sequence: Synthetic oligonucleotide
  Sense strand starting at position 3151 of SEQ ID NO: 1244173
ugaaacuuugcacagggua

SEQ ID NO: 1470275 - RNA, 19 nt, Artificial Sequence
  Description of Artificial Sequence: Synthetic oligonucleotide
  Antisense strand to SEQ ID NO: 1470274
uacccugugcaaaguuuca

SEQ ID NO: 1470276 - RNA, 19 nt, Artificial Sequence
  Description of Artificial Sequence: Synthetic oligonucleotide
  Sense strand starting at position 3154 of SEQ ID NO: 1244173
aacuuugcacaggguaauu

SEQ ID NO: 1470277 - RNA, 19 nt, Artificial Sequence
  Description of Artificial Sequence: Synthetic oligonucleotide
  Antisense strand to SEQ ID NO: 1470276
aauuacccugugcaaaguu

SEQ ID NO: 1470278 - RNA, 19 nt, Artificial Sequence
  Description of Artificial Sequence: Synthetic oligonucleotide
  Sense strand starting at position 3205 of SEQ ID NO: 1244173
aaguguuugcaagaacagu

SEQ ID NO: 1470279 - RNA, 19 nt, Artificial Sequence
  Description of Artificial Sequence: Synthetic oligonucleotide
  Antisense strand to SEQ ID NO: 1470278
acuguucuugcaaacacuu

SEQ ID NO: 1470280 - RNA, 19 nt, Artificial Sequence
  Description of Artificial Sequence: Synthetic oligonucleotide
  Sense strand starting at position 3211 of SEQ ID NO: 1244173
uugcaagaacagugauuac

SEQ ID NO: 1470281 - RNA, 19 nt, Artificial Sequence
  Description of Artificial Sequence: Synthetic oligonucleotide
  Antisense strand to SEQ ID NO: 1470280
guaaucacuguucuugcaa

SEQ ID NO: 1470282 - RNA, 19 nt, Artificial Sequence
  Description of Artificial Sequence: Synthetic oligonucleotide
  Sense strand starting at position 3240 of SEQ ID NO: 1244173
aauguaggacuaugucaaa

SEQ ID NO: 1470283 - RNA, 19 nt, Artificial Sequence
  Description of Artificial Sequence: Synthetic oligonucleotide
  Antisense strand to SEQ ID NO: 1470282
uuugacauaguccuacauu

SEQ ID NO: 1470284 - RNA, 19 nt, Artificial Sequence
  Description of Artificial Sequence: Synthetic oligonucleotide
  Sense strand starting at position 3312 of SEQ ID NO: 1244173
uuucgaauaguuggaaaga

SEQ ID NO: 1470285 - RNA, 19 nt, Artificial Sequence
  Description of Artificial Sequence: Synthetic oligonucleotide
  Antisense strand to SEQ ID NO: 1470284
ucuuuccaacuauucgaaa

SEQ ID NO: 1470286 - RNA, 19 nt, Artificial Sequence
  Description of Artificial Sequence: Synthetic oligonucleotide
  Sense strand starting at position 3525 of SEQ ID NO: 1244173
aguccauuccuauggccaa

SEQ ID NO: 1470287 - RNA, 19 nt, Artificial Sequence
  Description of Artificial Sequence: Synthetic oligonucleotide
  Antisense strand to SEQ ID NO: 1470286
uuggccauaggaauggacu

SEQ ID NO: 1470288 - RNA, 19 nt, Artificial Sequence
  Description of Artificial Sequence: Synthetic oligonucleotide
  Sense strand starting at position 3562 of SEQ ID NO: 1244173
guaaauaucuagcuauuag

SEQ ID NO: 1470289 - RNA, 19 nt, Artificial Sequence
  Description of Artificial Sequence: Synthetic oligonucleotide
  Antisense strand to SEQ ID NO: 1470288
cuaauagcuagauauuuac

SEQ ID NO: 1470290 - RNA, 19 nt, Artificial Sequence
  Description of Artificial Sequence: Synthetic oligonucleotide
  Sense strand starting at position 3616 of SEQ ID NO: 1244173
aaaguagguugacucauaa

SEQ ID NO: 1470291 - RNA, 19 nt, Artificial Sequence
  Description of Artificial Sequence: Synthetic oligonucleotide
  Antisense strand to SEQ ID NO: 1470290
uuaugagucaaccuacuuu

SEQ ID NO: 1470292 - RNA, 19 nt, Artificial Sequence
  Description of Artificial Sequence: Synthetic oligonucleotide
  Sense strand starting at position 3697 of SEQ ID NO: 1244173
aagggcaucucuucuaguu

SEQ ID NO: 1470293 - RNA, 19 nt, Artificial Sequence
  Description of Artificial Sequence: Synthetic oligonucleotide
  Antisense strand to SEQ ID NO: 1470292
aacuagaagagaugcccuu

SEQ ID NO: 1470294 - RNA, 19 nt, Artificial Sequence
  Description of Artificial Sequence: Synthetic oligonucleotide
  Sense strand starting at position 3834 of SEQ ID NO: 1244173
ccaaguauguuagugauuc

SEQ ID NO: 1470295 - RNA, 19 nt, Artificial Sequence
  Description of Artificial Sequence: Synthetic oligonucleotide
  Antisense strand to SEQ ID NO: 1470294
gaaucacuaacauacuugg

SEQ ID NO: 1470296 - RNA, 19 nt, Artificial Sequence
  Description of Artificial Sequence: Synthetic oligonucleotide
  Sense strand starting at position 3896 of SEQ ID NO: 1244173
acuagaugauaguuucuga

SEQ ID NO: 1470297 - RNA, 19 nt, Artificial Sequence
  Description of Artificial Sequence: Synthetic oligonucleotide
  Antisense strand to SEQ ID NO: 1470296
ucagaaacuaucaucuagu

SEQ ID NO: 1470298 - RNA, 19 nt, Artificial Sequence
  Description of Artificial Sequence: Synthetic oligonucleotide
  Sense strand starting at position 3899 of SEQ ID NO: 1244173
agaugauaguuucugaauu

SEQ ID NO: 1470299 - RNA, 19 nt, Artificial Sequence
  Description of Artificial Sequence: Synthetic oligonucleotide
  Antisense strand to SEQ ID NO: 1470298
aauucagaaacuaucaucu

SEQ ID NO: 1470300 - RNA, 19 nt, Artificial Sequence
  Description of Artificial Sequence: Synthetic oligonucleotide
  Sense strand starting at position 3937 of SEQ ID NO: 1244173
agaugagugucauucaagg

SEQ ID NO: 1470301 - RNA, 19 nt, Artificial Sequence
  Description of Artificial Sequence: Synthetic oligonucleotide
  Antisense strand to SEQ ID NO: 1470300
ccuugaaugacacucaucu

SEQ ID NO: 1470302 - RNA, 19 nt, Artificial Sequence
  Description of Artificial Sequence: Synthetic oligonucleotide
  Sense strand starting at position 2 of SEQ ID NO: 1244174
gagcuaaaugauggucaac

SEQ ID NO: 1470303 - RNA, 19 nt, Artificial Sequence
  Description of Artificial Sequence: Synthetic oligonucleotide
  Antisense strand to SEQ ID NO: 1470302
guugaccaucauuuagcuc

SEQ ID NO: 1470304 - RNA, 19 nt, Artificial Sequence
  Description of Artificial Sequence: Synthetic oligonucleotide
  Sense strand starting at position 4 of SEQ ID NO: 1244174
gcuaaaugauggucaacag

SEQ ID NO: 1470305 - RNA, 19 nt, Artificial Sequence
  Description of Artificial Sequence: Synthetic oligonucleotide
  Antisense strand to SEQ ID NO: 1470304
cuguugaccaucauuuagc

SEQ ID NO: 1470306 - RNA, 19 nt, Artificial Sequence
  Description of Artificial Sequence: Synthetic oligonucleotide
  Sense strand starting at position 57 of SEQ ID NO: 1244174
ugaucaugucacgggauaa

SEQ ID NO: 1470307 - RNA, 19 nt, Artificial Sequence
  Description of Artificial Sequence: Synthetic oligonucleotide
  Antisense strand to SEQ ID NO: 1470306
uuaucccgugacaugauca

SEQ ID NO: 1470308 - RNA, 19 nt, Artificial Sequence
  Description of Artificial Sequence: Synthetic oligonucleotide
  Sense strand starting at position 61 of SEQ ID NO: 1244174
caugucacgggauaaaguu

SEQ ID NO: 1470309 - RNA, 19 nt, Artificial Sequence
  Description of Artificial Sequence: Synthetic oligonucleotide
  Antisense strand to SEQ ID NO: 1470308
aacuuuaucccgugacaug

SEQ ID NO: 1470310 - RNA, 19 nt, Artificial Sequence
  Description of Artificial Sequence: Synthetic oligonucleotide
  Sense strand starting at position 359 of SEQ ID NO: 1244174
gguguuugcaaaggauaga

SEQ ID NO: 1470311 - RNA, 19 nt, Artificial Sequence
  Description of Artificial Sequence: Synthetic oligonucleotide
  Antisense strand to SEQ ID NO: 1470310
ucuauccuuugcaaacacc

SEQ ID NO: 1470312 - RNA, 19 nt, Artificial Sequence
  Description of Artificial Sequence: Synthetic oligonucleotide
  Sense strand starting at position 360 of SEQ ID NO: 1244174
guguuugcaaaggauagaa

SEQ ID NO: 1470313 - RNA, 19 nt, Artificial Sequence
  Description of Artificial Sequence: Synthetic oligonucleotide
  Antisense strand to SEQ ID NO: 1470312
uucuauccuuugcaaacac

SEQ ID NO: 1470314 - RNA, 19 nt, Artificial Sequence
  Description of Artificial Sequence: Synthetic oligonucleotide
  Sense strand starting at position 393 of SEQ ID NO: 1244174
agaguauggugcuuaagag

SEQ ID NO: 1470315 - RNA, 19 nt, Artificial Sequence
  Description of Artificial Sequence: Synthetic oligonucleotide
  Antisense strand to SEQ ID NO: 1470314
cucuuaagcaccauacucu

SEQ ID NO: 1470316 - RNA, 19 nt, Artificial Sequence
  Description of Artificial Sequence: Synthetic oligonucleotide
  Sense strand starting at position 394 of SEQ ID NO: 1244174
gaguauggugcuuaagagu

SEQ ID NO: 1470317 - RNA, 19 nt, Artificial Sequence
  Description of Artificial Sequence: Synthetic oligonucleotide
  Antisense strand to SEQ ID NO: 1470316
acucuuaagcaccauacuc

SEQ ID NO: 1470318 - RNA, 19 nt, Artificial Sequence
  Description of Artificial Sequence: Synthetic oligonucleotide
  Sense strand starting at position 400 of SEQ ID NO: 1244174
ggugcuuaagaguacuaug

SEQ ID NO: 1470319 - RNA, 19 nt, Artificial Sequence
  Description of Artificial Sequence: Synthetic oligonucleotide
  Antisense strand to SEQ ID NO: 1470318
cauaguacucuuaagcacc

SEQ ID NO: 1470320 - RNA, 19 nt, Artificial Sequence
  Description of Artificial Sequence: Synthetic oligonucleotide
  Sense strand starting at position 453 of SEQ ID NO: 1244174
caguuugcucuuuaggaug

SEQ ID NO: 1470321 - RNA, 19 nt, Artificial Sequence
  Description of Artificial Sequence: Synthetic oligonucleotide
  Antisense strand to SEQ ID NO: 1470320
cauccuaaagagcaaacug

SEQ ID NO: 1470322 - RNA, 19 nt, Artificial Sequence
  Description of Artificial Sequence: Synthetic oligonucleotide
  Sense strand starting at position 524 of SEQ ID NO: 1244174
acgagaagcaccugaaaug

SEQ ID NO: 1470323 - RNA, 19 nt, Artificial Sequence
  Description of Artificial Sequence: Synthetic oligonucleotide
  Antisense strand to SEQ ID NO: 1470322
cauuucaggugcuucucgu

SEQ ID NO: 1470324 - RNA, 19 nt, Artificial Sequence
  Description of Artificial Sequence: Synthetic oligonucleotide
  Sense strand starting at position 572 of SEQ ID NO: 1244174
ugugucuccagaugacuga

SEQ ID NO: 1470325 - RNA, 19 nt, Artificial Sequence
  Description of Artificial Sequence: Synthetic oligonucleotide
  Antisense strand to SEQ ID NO: 1470324
ucagucaucuggagacaca

SEQ ID NO: 1470326 - RNA, 19 nt, Artificial Sequence
  Description of Artificial Sequence: Synthetic oligonucleotide
  Sense strand starting at position 576 of SEQ ID NO: 1244174
ucuccagaugacugagcua

SEQ ID NO: 1470327 - RNA, 19 nt, Artificial Sequence
  Description of Artificial Sequence: Synthetic oligonucleotide
  Antisense strand to SEQ ID NO: 1470326
uagcucagucaucuggaga

SEQ ID NO: 1470328 - RNA, 19 nt, Artificial Sequence
  Description of Artificial Sequence: Synthetic oligonucleotide
  Sense strand starting at position 656 of SEQ ID NO: 1244174
cagggcugucuugaaauca

SEQ ID NO: 1470329 - RNA, 19 nt, Artificial Sequence
  Description of Artificial Sequence: Synthetic oligonucleotide
  Antisense strand to SEQ ID NO: 1470328
ugauuucaagacagcccug

SEQ ID NO: 1470330 - RNA, 19 nt, Artificial Sequence
  Description of Artificial Sequence: Synthetic oligonucleotide
  Sense strand starting at position 665 of SEQ ID NO: 1244174
cuugaaaucacugggcuga

SEQ ID NO: 1470331 - RNA, 19 nt, Artificial Sequence
  Description of Artificial Sequence: Synthetic oligonucleotide
  Antisense strand to SEQ ID NO: 1470330
ucagcccagugauuucaag

SEQ ID NO: 1470332 - RNA, 19 nt, Artificial Sequence
  Description of Artificial Sequence: Synthetic oligonucleotide
  Sense strand starting at position 693 of SEQ ID NO: 1244174
uagugagacgcccaucacu

SEQ ID NO: 1470333 - RNA, 19 nt, Artificial Sequence
  Description of Artificial Sequence: Synthetic oligonucleotide
  Antisense strand to SEQ ID NO: 1470332
agugaugggcgucucacua

SEQ ID NO: 1470334 - RNA, 19 nt, Artificial Sequence
  Description of Artificial Sequence: Synthetic oligonucleotide
  Sense strand starting at position 1093 of SEQ ID NO: 1244174
auuggucagacugguuaca

SEQ ID NO: 1470335 - RNA, 19 nt, Artificial Sequence
  Description of Artificial Sequence: Synthetic oligonucleotide
  Antisense strand to SEQ ID NO: 1470334
uguaaccagucugaccaau

SEQ ID NO: 1470336 - RNA, 19 nt, Artificial Sequence
  Description of Artificial Sequence: Synthetic oligonucleotide
  Sense strand starting at position 1095 of SEQ ID NO: 1244174
uggucagacugguuacaaa

SEQ ID NO: 1470337 - RNA, 19 nt, Artificial Sequence
  Description of Artificial Sequence: Synthetic oligonucleotide
  Antisense strand to SEQ ID NO: 1470336
uuuguaaccagucugacca

SEQ ID NO: 1470338 - RNA, 19 nt, Artificial Sequence
  Description of Artificial Sequence: Synthetic oligonucleotide
  Sense strand starting at position 1236 of SEQ ID NO: 1244174
ggugggucacguuagaaug

SEQ ID NO: 1470339 - RNA, 19 nt, Artificial Sequence
  Description of Artificial Sequence: Synthetic oligonucleotide
  Antisense strand to SEQ ID NO: 1470338
cauucuaacgugacccacc

SEQ ID NO: 1470340 - RNA, 19 nt, Artificial Sequence
  Description of Artificial Sequence: Synthetic oligonucleotide
  Sense strand starting at position 1311 of SEQ ID NO: 1244174
ugaaucuguguguauccau

SEQ ID NO: 1470341 - RNA, 19 nt, Artificial Sequence
  Description of Artificial Sequence: Synthetic oligonucleotide
  Antisense strand to SEQ ID NO: 1470340
auggauacacacagauuca

SEQ ID NO: 1470342 - RNA, 19 nt, Artificial Sequence
  Description of Artificial Sequence: Synthetic oligonucleotide
  Sense strand starting at position 1490 of SEQ ID NO: 1244174
gggcuuacagcugaugcaa

SEQ ID NO: 1470343 - RNA, 19 nt, Artificial Sequence
  Description of Artificial Sequence: Synthetic oligonucleotide
  Antisense strand to SEQ ID NO: 1470342
uugcaucagcuguaagccc

SEQ ID NO: 1470344 - RNA, 19 nt, Artificial Sequence
  Description of Artificial Sequence: Synthetic oligonucleotide
  Sense strand starting at position 2140 of SEQ ID NO: 1244174
accugaaggcacuguuuaa

SEQ ID NO: 1470345 - RNA, 19 nt, Artificial Sequence
  Description of Artificial Sequence: Synthetic oligonucleotide
  Antisense strand to SEQ ID NO: 1470344
uuaaacagugccuucaggu

SEQ ID NO: 1470346 - RNA, 19 nt, Artificial Sequence
  Description of Artificial Sequence: Synthetic oligonucleotide
  Sense strand starting at position 2158 of SEQ ID NO: 1244174
aggaggugugggugaacaa

SEQ ID NO: 1470347 - RNA, 19 nt, Artificial Sequence
  Description of Artificial Sequence: Synthetic oligonucleotide
  Antisense strand to SEQ ID NO: 1470346
uuguucacccacaccuccu

SEQ ID NO: 1470348 - RNA, 19 nt, Artificial Sequence
  Description of Artificial Sequence: Synthetic oligonucleotide
  Sense strand starting at position 2176 of SEQ ID NO: 1244174
aggacagugcaauguacaa

SEQ ID NO: 1470349 - RNA, 19 nt, Artificial Sequence
  Description of Artificial Sequence: Synthetic oligonucleotide
  Antisense strand to SEQ ID NO: 1470348
uuguacauugcacuguccu

SEQ ID NO: 1470350 - RNA, 19 nt, Artificial Sequence
  Description of Artificial Sequence: Synthetic oligonucleotide
  Sense strand starting at position 2309 of SEQ ID NO: 1244174
aggucaggguuccugacaa

SEQ ID NO: 1470351 - RNA, 19 nt, Artificial Sequence
  Description of Artificial Sequence: Synthetic oligonucleotide
  Antisense strand to SEQ ID NO: 1470350
uugucaggaacccugaccu

SEQ ID NO: 1470352 - RNA, 19 nt, Artificial Sequence
  Description of Artificial Sequence: Synthetic oligonucleotide
  Sense strand starting at position 2383 of SEQ ID NO: 1244174
ccagaaagccaucguuaaa

SEQ ID NO: 1470353 - RNA, 19 nt, Artificial Sequence
  Description of Artificial Sequence: Synthetic oligonucleotide
  Antisense strand to SEQ ID NO: 1470352
uuuaacgauggcuuucugg

SEQ ID NO: 1470354 - RNA, 19 nt, Artificial Sequence
  Description of Artificial Sequence: Synthetic oligonucleotide
  Sense strand starting at position 2679 of SEQ ID NO: 1244174
uaaagugaugacuggcauu

SEQ ID NO: 1470355 - RNA, 19 nt, Artificial Sequence
  Description of Artificial Sequence: Synthetic oligonucleotide
  Antisense strand to SEQ ID NO: 1470354
aaugccagucaucacuuua

SEQ ID NO: 1470356 - RNA, 19 nt, Artificial Sequence
  Description of Artificial Sequence: Synthetic oligonucleotide
  Sense strand starting at position 2691 of SEQ ID NO: 1244174
uggcauugucaagauaugu

SEQ ID NO: 1470357 - RNA, 19 nt, Artificial Sequence
  Description of Artificial Sequence: Synthetic oligonucleotide
  Antisense strand to SEQ ID NO: 1470356
acauaucuugacaaugcca

SEQ ID NO: 1470358 - RNA, 19 nt, Artificial Sequence
  Description of Artificial Sequence: Synthetic oligonucleotide
  Sense strand starting at position 3037 of SEQ ID NO: 1244174
ccaguuggaucaucuguaa

SEQ ID NO: 1470359 - RNA, 19 nt, Artificial Sequence
  Description of Artificial Sequence: Synthetic oligonucleotide
  Antisense strand to SEQ ID NO: 1470358
uuacagaugauccaacugg

SEQ ID NO: 1470360 - RNA, 19 nt, Artificial Sequence
  Description of Artificial Sequence: Synthetic oligonucleotide
  Sense strand starting at position 3041 of SEQ ID NO: 1244174
uuggaucaucuguaagcaa

SEQ ID NO: 1470361 - RNA, 19 nt, Artificial Sequence
  Description of Artificial Sequence: Synthetic oligonucleotide
  Antisense strand to SEQ ID NO: 1470360
uugcuuacagaugauccaa

SEQ ID NO: 1470362 - RNA, 19 nt, Artificial Sequence
  Description of Artificial Sequence: Synthetic oligonucleotide
  Sense strand starting at position 3100 of SEQ ID NO: 1244174
ugagaaauguggcugggaa

SEQ ID NO: 1470363 - RNA, 19 nt, Artificial Sequence
  Description of Artificial Sequence: Synthetic oligonucleotide
  Antisense strand to SEQ ID NO: 1470362
uucccagccacauuucuca

SEQ ID NO: 1470364 - RNA, 19 nt, Artificial Sequence
  Description of Artificial Sequence: Synthetic oligonucleotide
  Sense strand starting at position 3101 of SEQ ID NO: 1244174
gagaaauguggcugggaaa

SEQ ID NO: 1470365 - RNA, 19 nt, Artificial Sequence
  Description of Artificial Sequence: Synthetic oligonucleotide
  Antisense strand to SEQ ID NO: 1470364
uuucccagccacauuucuc

SEQ ID NO: 1470366 - RNA, 19 nt, Artificial Sequence
  Description of Artificial Sequence: Synthetic oligonucleotide
  Sense strand starting at position 3102 of SEQ ID NO: 1244174
agaaauguggcugggaaau

SEQ ID NO: 1470367 - RNA, 19 nt, Artificial Sequence
  Description of Artificial Sequence: Synthetic oligonucleotide
  Antisense strand to SEQ ID NO: 1470366
auuucccagccacauuucu

SEQ ID NO: 1470368 - RNA, 19 nt, Artificial Sequence
  Description of Artificial Sequence: Synthetic oligonucleotide
  Sense strand starting at position 3123 of SEQ ID NO: 1244174
ugauuuggguccgaagaag

SEQ ID NO: 1470369 - RNA, 19 nt, Artificial Sequence
  Description of Artificial Sequence: Synthetic oligonucleotide
  Antisense strand to SEQ ID NO: 1470368
cuucuucggacccaaauca

SEQ ID NO: 1470370 - RNA, 19 nt, Artificial Sequence
  Description of Artificial Sequence: Synthetic oligonucleotide
  Sense strand starting at position 3202 of SEQ ID NO: 1244174
ggcugagguguccaaaucu

SEQ ID NO: 1470371 - RNA, 19 nt, Artificial Sequence
  Description of Artificial Sequence: Synthetic oligonucleotide
  Antisense strand to SEQ ID NO: 1470370
agauuuggacaccucagcc

SEQ ID NO: 1470372 - RNA, 19 nt, Artificial Sequence
  Description of Artificial Sequence: Synthetic oligonucleotide
  Sense strand starting at position 3293 of SEQ ID NO: 1244174
aagguuaucuggucccuga

SEQ ID NO: 1470373 - RNA, 19 nt, Artificial Sequence
  Description of Artificial Sequence: Synthetic oligonucleotide
  Antisense strand to SEQ ID NO: 1470372
ucagggaccagauaaccuu

SEQ ID NO: 1470374 - RNA, 19 nt, Artificial Sequence
  Description of Artificial Sequence: Synthetic oligonucleotide
  Sense strand starting at position 3326 of SEQ ID NO: 1244174
gcauucucccugcaggaau

SEQ ID NO: 1470375 - RNA, 19 nt, Artificial Sequence
  Description of Artificial Sequence: Synthetic oligonucleotide
  Antisense strand to SEQ ID NO: 1470374
auuccugcagggagaaugc

SEQ ID NO: 1470376 - RNA, 19 nt, Artificial Sequence
  Description of Artificial Sequence: Synthetic oligonucleotide
  Sense strand starting at position 3339 of SEQ ID NO: 1244174
aggaauguucucgaucaca

SEQ ID NO: 1470377 - RNA, 19 nt, Artificial Sequence
  Description of Artificial Sequence: Synthetic oligonucleotide
  Antisense strand to SEQ ID NO: 1470376
ugugaucgagaacauuccu

SEQ ID NO: 1470378 - RNA, 19 nt, Artificial Sequence
  Description of Artificial Sequence: Synthetic oligonucleotide
  Sense strand starting at position 3470 of SEQ ID NO: 1244174
acgugauuucuggguggcu

SEQ ID NO: 1470379 - RNA, 19 nt, Artificial Sequence
  Description of Artificial Sequence: Synthetic oligonucleotide
  Antisense strand to SEQ ID NO: 1470378
agccacccagaaaucacgu

SEQ ID NO: 1470380 - RNA, 19 nt, Artificial Sequence
  Description of Artificial Sequence: Synthetic oligonucleotide
  Sense strand starting at position 3870 of SEQ ID NO: 1244174
ccgaaaucgcaccacugaa

SEQ ID NO: 1470381 - RNA, 19 nt, Artificial Sequence
  Description of Artificial Sequence: Synthetic oligonucleotide
  Antisense strand to SEQ ID NO: 1470380
uucaguggugcgauuucgg

SEQ ID NO: 1470382 - RNA, 19 nt, Artificial Sequence
  Description of Artificial Sequence: Synthetic oligonucleotide
  Sense strand starting at position 179 of SEQ ID NO: 1244175
gggaaauucugucucagaa

SEQ ID NO: 1470383 - RNA, 19 nt, Artificial Sequence
  Description of Artificial Sequence: Synthetic oligonucleotide
  Antisense strand to SEQ ID NO: 1470382
uucugagacagaauuuccc

SEQ ID NO: 1470384 - RNA, 19 nt, Artificial Sequence
  Description of Artificial Sequence: Synthetic oligonucleotide
  Sense strand starting at position 280 of SEQ ID NO: 1244175
aggagaauagcuugagguc

SEQ ID NO: 1470385 - RNA, 19 nt, Artificial Sequence
  Description of Artificial Sequence: Synthetic oligonucleotide
  Antisense strand to SEQ ID NO: 1470384
gaccucaagcuauucuccu

SEQ ID NO: 1470386 - RNA, 19 nt, Artificial Sequence
  Description of Artificial Sequence: Synthetic oligonucleotide
  Sense strand starting at position 384 of SEQ ID NO: 1244175
aacguaauugcuuauguaa

SEQ ID NO: 1470387 - RNA, 19 nt, Artificial Sequence
  Description of Artificial Sequence: Synthetic oligonucleotide
  Antisense strand to SEQ ID NO: 1470386
uuacauaagcaauuacguu

SEQ ID NO: 1470388 - RNA, 19 nt, Artificial Sequence
  Description of Artificial Sequence: Synthetic oligonucleotide
  Sense strand starting at position 425 of SEQ ID NO: 1244175
cucugauaauuguuuagau

SEQ ID NO: 1470389 - RNA, 19 nt, Artificial Sequence
  Description of Artificial Sequence: Synthetic oligonucleotide
  Antisense strand to SEQ ID NO: 1470388
aucuaaacaauuaucagag

SEQ ID NO: 1470390 - RNA, 19 nt, Artificial Sequence
  Description of Artificial Sequence: Synthetic oligonucleotide
  Sense strand starting at position 658 of SEQ ID NO: 1244175
acuggauaccuuuguacuu

SEQ ID NO: 1470391 - RNA, 19 nt, Artificial Sequence
  Description of Artificial Sequence: Synthetic oligonucleotide
  Antisense strand to SEQ ID NO: 1470390
aaguacaaagguauccagu

SEQ ID NO: 1470392 - RNA, 19 nt, Artificial Sequence
  Description of Artificial Sequence: Synthetic oligonucleotide
  Sense strand starting at position 665 of SEQ ID NO: 1244175
accuuuguacuugaagcau

SEQ ID NO: 1470393 - RNA, 19 nt, Artificial Sequence
  Description of Artificial Sequence: Synthetic oligonucleotide
  Antisense strand to SEQ ID NO: 1470392
augcuucaaguacaaaggu

SEQ ID NO: 1470394 - RNA, 19 nt, Artificial Sequence
  Description of Artificial Sequence: Synthetic oligonucleotide
  Sense strand starting at position 744 of SEQ ID NO: 1244175
uugagauguucuccucuaa

SEQ ID NO: 1470395 - RNA, 19 nt, Artificial Sequence
  Description of Artificial Sequence: Synthetic oligonucleotide
  Antisense strand to SEQ ID NO: 1470394
uuagaggagaacaucucaa

SEQ ID NO: 1470396 - RNA, 19 nt, Artificial Sequence
  Description of Artificial Sequence: Synthetic oligonucleotide
  Sense strand starting at position 867 of SEQ ID NO: 1244175
ccgguaagugcucaauaga

SEQ ID NO: 1470397 - RNA, 19 nt, Artificial Sequence
  Description of Artificial Sequence: Synthetic oligonucleotide
  Antisense strand to SEQ ID NO: 1470396
ucuauugagcacuuaccgg

SEQ ID NO: 1470398 - RNA, 19 nt, Artificial Sequence
  Description of Artificial Sequence: Synthetic oligonucleotide
  Sense strand starting at position 885 of SEQ ID NO: 1244175
auauuaguaucacuguuag

SEQ ID NO: 1470399 - RNA, 19 nt, Artificial Sequence
  Description of Artificial Sequence: Synthetic oligonucleotide
  Antisense strand to SEQ ID NO: 1470398
cuaacagugauacuaauau

SEQ ID NO: 1470400 - RNA, 19 nt, Artificial Sequence
  Description of Artificial Sequence: Synthetic oligonucleotide
  Sense strand starting at position 1182 of SEQ ID NO: 1244175
gcggaucgccugagucaga

SEQ ID NO: 1470401 - RNA, 19 nt, Artificial Sequence
  Description of Artificial Sequence: Synthetic oligonucleotide
  Antisense strand to SEQ ID NO: 1470400
ucugacucaggcgauccgc

SEQ ID NO: 1470402 - RNA, 19 nt, Artificial Sequence
  Description of Artificial Sequence: Synthetic oligonucleotide
  Sense strand starting at position 1540 of SEQ ID NO: 1244175
uuuaguuguagcgugcaga

SEQ ID NO: 1470403 - RNA, 19 nt, Artificial Sequence
  Description of Artificial Sequence: Synthetic oligonucleotide
  Antisense strand to SEQ ID NO: 1470402
ucugcacgcuacaacuaaa

SEQ ID NO: 1470404 - RNA, 19 nt, Artificial Sequence
  Description of Artificial Sequence: Synthetic oligonucleotide
  Sense strand starting at position 2043 of SEQ ID NO: 1244175
cggcgccuugcguucaaau

SEQ ID NO: 1470405 - RNA, 19 nt, Artificial Sequence
  Description of Artificial Sequence: Synthetic oligonucleotide
  Antisense strand to SEQ ID NO: 1470404
auuugaacgcaaggcgccg

SEQ ID NO: 1470406 - RNA, 19 nt, Artificial Sequence
  Description of Artificial Sequence: Synthetic oligonucleotide
  Sense strand starting at position 2044 of SEQ ID NO: 1244175
ggcgccuugcguucaaauu

SEQ ID NO: 1470407 - RNA, 19 nt, Artificial Sequence
  Description of Artificial Sequence: Synthetic oligonucleotide
  Antisense strand to SEQ ID NO: 1470406
aauuugaacgcaaggcgcc

SEQ ID NO: 1470408 - RNA, 19 nt, Artificial Sequence
  Description of Artificial Sequence: Synthetic oligonucleotide
  Sense strand starting at position 2079 of SEQ ID NO: 1244175
ccgugcuuccuauugguca

SEQ ID NO: 1470409 - RNA, 19 nt, Artificial Sequence
  Description of Artificial Sequence: Synthetic oligonucleotide
  Antisense strand to SEQ ID NO: 1470408
ugaccaauaggaagcacgg

SEQ ID NO: 1470410 - RNA, 19 nt, Artificial Sequence
  Description of Artificial Sequence: Synthetic oligonucleotide
  Sense strand starting at position 2117 of SEQ ID NO: 1244175
gcuguuuccuaaguaacaa

SEQ ID NO: 1470411 - RNA, 19 nt, Artificial Sequence
  Description of Artificial Sequence: Synthetic oligonucleotide
  Antisense strand to SEQ ID NO: 1470410
uuguuacuuaggaaacagc

SEQ ID NO: 1470412 - RNA, 19 nt, Artificial Sequence
  Description of Artificial Sequence: Synthetic oligonucleotide
  Sense strand starting at position 2371 of SEQ ID NO: 1244175
ucacauccguuugucaaga

SEQ ID NO: 1470413 - RNA, 19 nt, Artificial Sequence
  Description of Artificial Sequence: Synthetic oligonucleotide
  Antisense strand to SEQ ID NO: 1470412
ucuugacaaacggauguga

SEQ ID NO: 1470414 - RNA, 19 nt, Artificial Sequence
  Description of Artificial Sequence: Synthetic oligonucleotide
  Sense strand starting at position 2456 of SEQ ID NO: 1244175
acagccuugauguggcaaa

SEQ ID NO: 1470415 - RNA, 19 nt, Artificial Sequence
  Description of Artificial Sequence: Synthetic oligonucleotide
  Antisense strand to SEQ ID NO: 1470414
uuugccacaucaaggcugu

SEQ ID NO: 1470416 - RNA, 19 nt, Artificial Sequence
  Description of Artificial Sequence: Synthetic oligonucleotide
  Sense strand starting at position 2510 of SEQ ID NO: 1244175
uggcuuugacagugucaga

SEQ ID NO: 1470417 - RNA, 19 nt, Artificial Sequence
  Description of Artificial Sequence: Synthetic oligonucleotide
  Antisense strand to SEQ ID NO: 1470416
ucugacacugucaaagcca

SEQ ID NO: 1470418 - RNA, 19 nt, Artificial Sequence
  Description of Artificial Sequence: Synthetic oligonucleotide
  Sense strand starting at position 2528 of SEQ ID NO: 1244175
aagcaugaugccugacgau

SEQ ID NO: 1470419 - RNA, 19 nt, Artificial Sequence
  Description of Artificial Sequence: Synthetic oligonucleotide
  Antisense strand to SEQ ID NO: 1470418
aucgucaggcaucaugcuu

SEQ ID NO: 1470420 - RNA, 19 nt, Artificial Sequence
  Description of Artificial Sequence: Synthetic oligonucleotide
  Sense strand starting at position 2672 of SEQ ID NO: 1244175
guugaagaguuuccaguug

SEQ ID NO: 1470421 - RNA, 19 nt, Artificial Sequence
  Description of Artificial Sequence: Synthetic oligonucleotide
  Antisense strand to SEQ ID NO: 1470420
caacuggaaacucuucaac

SEQ ID NO: 1470422 - RNA, 19 nt, Artificial Sequence
  Description of Artificial Sequence: Synthetic oligonucleotide
  Sense strand starting at position 2690 of SEQ ID NO: 1244175
guggcucagucacuaacua

SEQ ID NO: 1470423 - RNA, 19 nt, Artificial Sequence
  Description of Artificial Sequence: Synthetic oligonucleotide
  Antisense strand to SEQ ID NO: 1470422
uaguuagugacugagccac

SEQ ID NO: 1470424 - RNA, 19 nt, Artificial Sequence
  Description of Artificial Sequence: Synthetic oligonucleotide
  Sense strand starting at position 2834 of SEQ ID NO: 1244175
agcauauguaagggauaac

SEQ ID NO: 1470425 - RNA, 19 nt, Artificial Sequence
  Description of Artificial Sequence: Synthetic oligonucleotide
  Antisense strand to SEQ ID NO: 1470424
guuaucccuuacauaugcu

SEQ ID NO: 1470426 - RNA, 19 nt, Artificial Sequence
  Description of Artificial Sequence: Synthetic oligonucleotide
  Sense strand starting at position 2895 of SEQ ID NO: 1244175
gagccaggugcucauuacu

SEQ ID NO: 1470427 - RNA, 19 nt, Artificial Sequence
  Description of Artificial Sequence: Synthetic oligonucleotide
  Antisense strand to SEQ ID NO: 1470426
aguaaugagcaccuggcuc

SEQ ID NO: 1470428 - RNA, 19 nt, Artificial Sequence
  Description of Artificial Sequence: Synthetic oligonucleotide
  Sense strand starting at position 3041 of SEQ ID NO: 1244175
cuaguugacuuggcccaaa

SEQ ID NO: 1470429 - RNA, 19 nt, Artificial Sequence
  Description of Artificial Sequence: Synthetic oligonucleotide
  Antisense strand to SEQ ID NO: 1470428
uuugggccaagucaacuag

SEQ ID NO: 1470430 - RNA, 19 nt, Artificial Sequence
  Description of Artificial Sequence: Synthetic oligonucleotide
  Sense strand starting at position 3111 of SEQ ID NO: 1244175
gcugguuuggugagguuaa

SEQ ID NO: 1470431 - RNA, 19 nt, Artificial Sequence
  Description of Artificial Sequence: Synthetic oligonucleotide
  Antisense strand to SEQ ID NO: 1470430
uuaaccucaccaaaccagc

SEQ ID NO: 1470432 - RNA, 19 nt, Artificial Sequence
  Description of Artificial Sequence: Synthetic oligonucleotide
  Sense strand starting at position 3146 of SEQ ID NO: 1244175
ggaggugcuggucauugua

SEQ ID NO: 1470433 - RNA, 19 nt, Artificial Sequence
  Description of Artificial Sequence: Synthetic oligonucleotide
  Antisense strand to SEQ ID NO: 1470432
uacaaugaccagcaccucc

SEQ ID NO: 1470434 - RNA, 19 nt, Artificial Sequence
  Description of Artificial Sequence: Synthetic oligonucleotide
  Sense strand starting at position 3170 of SEQ ID NO: 1244175
acaagaaauuuggaguacu

SEQ ID NO: 1470435 - RNA, 19 nt, Artificial Sequence
  Description of Artificial Sequence: Synthetic oligonucleotide
  Antisense strand to SEQ ID NO: 1470434
aguacuccaaauuucuugu

SEQ ID NO: 1470436 - RNA, 19 nt, Artificial Sequence
  Description of Artificial Sequence: Synthetic oligonucleotide
  Sense strand starting at position 3263 of SEQ ID NO: 1244175
cccuuacugggauguguau

SEQ ID NO: 1470437 - RNA, 19 nt, Artificial Sequence
  Description of Artificial Sequence: Synthetic oligonucleotide
  Antisense strand to SEQ ID NO: 1470436
auacacaucccaguaaggg

SEQ ID NO: 1470438 - RNA, 19 nt, Artificial Sequence
  Description of Artificial Sequence: Synthetic oligonucleotide
  Sense strand starting at position 3324 of SEQ ID NO: 1244175
ucuuguguccuauaagcca

SEQ ID NO: 1470439 - RNA, 19 nt, Artificial Sequence
  Description of Artificial Sequence: Synthetic oligonucleotide
  Antisense strand to SEQ ID NO: 1470438
uggcuuauaggacacaaga

SEQ ID NO: 1470440 - RNA, 19 nt, Artificial Sequence
  Description of Artificial Sequence: Synthetic oligonucleotide
  Sense strand starting at position 3448 of SEQ ID NO: 1244175
gacacuuacuugcuggaua

SEQ ID NO: 1470441 - RNA, 19 nt, Artificial Sequence
  Description of Artificial Sequence: Synthetic oligonucleotide
  Antisense strand to SEQ ID NO: 1470440
uauccagcaaguaaguguc

SEQ ID NO: 1470442 - RNA, 19 nt, Artificial Sequence
  Description of Artificial Sequence: Synthetic oligonucleotide
  Sense strand starting at position 3462 of SEQ ID NO: 1244175
ggauaaucuuggguaaguc

SEQ ID NO: 1470443 - RNA, 19 nt, Artificial Sequence
  Description of Artificial Sequence: Synthetic oligonucleotide
  Antisense strand to SEQ ID NO: 1470442
gacuuacccaagauuaucc

SEQ ID NO: 1470444 - RNA, 19 nt, Artificial Sequence
  Description of Artificial Sequence: Synthetic oligonucleotide
  Sense strand starting at position 3471 of SEQ ID NO: 1244175
uggguaagucaccaagucu

SEQ ID NO: 1470445 - RNA, 19 nt, Artificial Sequence
  Description of Artificial Sequence: Synthetic oligonucleotide
  Antisense strand to SEQ ID NO: 1470444
agacuuggugacuuaccca

SEQ ID NO: 1470446 - RNA, 19 nt, Artificial Sequence
  Description of Artificial Sequence: Synthetic oligonucleotide
  Sense strand starting at position 3526 of SEQ ID NO: 1244175
augaaagaauacuuagcuu

SEQ ID NO: 1470447 - RNA, 19 nt, Artificial Sequence
  Description of Artificial Sequence: Synthetic oligonucleotide
  Antisense strand to SEQ ID NO: 1470446
aagcuaaguauucuuucau

SEQ ID NO: 1470448 - RNA, 19 nt, Artificial Sequence
  Description of Artificial Sequence: Synthetic oligonucleotide
  Sense strand starting at position 3600 of SEQ ID NO: 1244175
gguaauggguguucucaua

SEQ ID NO: 1470449 - RNA, 19 nt, Artificial Sequence
  Description of Artificial Sequence: Synthetic oligonucleotide
  Antisense strand to SEQ ID NO: 1470448
uaugagaacacccauuacc

SEQ ID NO: 1470450 - RNA, 19 nt, Artificial Sequence
  Description of Artificial Sequence: Synthetic oligonucleotide
  Sense strand starting at position 3669 of SEQ ID NO: 1244175
auaggcugcucaguaauca

SEQ ID NO: 1470451 - RNA, 19 nt, Artificial Sequence
  Description of Artificial Sequence: Synthetic oligonucleotide
  Antisense strand to SEQ ID NO: 1470450
ugauuacugagcagccuau

SEQ ID NO: 1470452 - RNA, 19 nt, Artificial Sequence
  Description of Artificial Sequence: Synthetic oligonucleotide
  Sense strand starting at position 3670 of SEQ ID NO: 1244175
uaggcugcucaguaaucaa

SEQ ID NO: 1470453 - RNA, 19 nt, Artificial Sequence
  Description of Artificial Sequence: Synthetic oligonucleotide
  Antisense strand to SEQ ID NO: 1470452
uugauuacugagcagccua

SEQ ID NO: 1470454 - RNA, 19 nt, Artificial Sequence
  Description of Artificial Sequence: Synthetic oligonucleotide
  Sense strand starting at position 3737 of SEQ ID NO: 1244175
acaauuaaguaggaacaau

SEQ ID NO: 1470455 - RNA, 19 nt, Artificial Sequence
  Description of Artificial Sequence: Synthetic oligonucleotide
  Antisense strand to SEQ ID NO: 1470454
auuguuccuacuuaauugu

SEQ ID NO: 1470456 - RNA, 19 nt, Artificial Sequence
  Description of Artificial Sequence: Synthetic oligonucleotide
  Sense strand starting at position 3911 of SEQ ID NO: 1244175
gagggucaaccuuggcgaa

SEQ ID NO: 1470457 - RNA, 19 nt, Artificial Sequence
  Description of Artificial Sequence: Synthetic oligonucleotide
  Antisense strand to SEQ ID NO: 1470456
uucgccaagguugacccuc

SEQ ID NO: 1470458 - RNA, 19 nt, Artificial Sequence
  Description of Artificial Sequence: Synthetic oligonucleotide
  Sense strand starting at position 3913 of SEQ ID NO: 1244175
gggucaaccuuggcgaaua

SEQ ID NO: 1470459 - RNA, 19 nt, Artificial Sequence
  Description of Artificial Sequence: Synthetic oligonucleotide
  Antisense strand to SEQ ID NO: 1470458
uauucgccaagguugaccc

SEQ ID NO: 1470460 - RNA, 19 nt, Artificial Sequence
  Description of Artificial Sequence: Synthetic oligonucleotide
  Sense strand starting at position 3925 of SEQ ID NO: 1244175
gcgaauagugcugagaggu

SEQ ID NO: 1470461 - RNA, 19 nt, Artificial Sequence
  Description of Artificial Sequence: Synthetic oligonucleotide
  Antisense strand to SEQ ID NO: 1470460
accucucagcacuauucgc

SEQ ID NO: 1470462 - RNA, 19 nt, Artificial Sequence
  Description of Artificial Sequence: Synthetic oligonucleotide
  Sense strand starting at position 116 of SEQ ID NO: 1244176
cucucuguguuuccgcgaa

SEQ ID NO: 1470463 - RNA, 19 nt, Artificial Sequence
  Description of Artificial Sequence: Synthetic oligonucleotide
  Antisense strand to SEQ ID NO: 1470462
uucgcggaaacacagagag

SEQ ID NO: 1470464 - RNA, 19 nt, Artificial Sequence
  Description of Artificial Sequence: Synthetic oligonucleotide
  Sense strand starting at position 118 of SEQ ID NO: 1244176
cucuguguuuccgcgaaug

SEQ ID NO: 1470465 - RNA, 19 nt, Artificial Sequence
  Description of Artificial Sequence: Synthetic oligonucleotide
  Antisense strand to SEQ ID NO: 1470464
cauucgcggaaacacagag

SEQ ID NO: 1470466 - RNA, 19 nt, Artificial Sequence
  Description of Artificial Sequence: Synthetic oligonucleotide
  Sense strand starting at position 120 of SEQ ID NO: 1244176
cuguguuuccgcgaaugac

SEQ ID NO: 1470467 - RNA, 19 nt, Artificial Sequence
  Description of Artificial Sequence: Synthetic oligonucleotide
  Antisense strand to SEQ ID NO: 1470466
gucauucgcggaaacacag

SEQ ID NO: 1470468 - RNA, 19 nt, Artificial Sequence
  Description of Artificial Sequence: Synthetic oligonucleotide
  Sense strand starting at position 121 of SEQ ID NO: 1244176
uguguuuccgcgaaugacg

SEQ ID NO: 1470469 - RNA, 19 nt, Artificial Sequence
  Description of Artificial Sequence: Synthetic oligonucleotide
  Antisense strand to SEQ ID NO: 1470468
cgucauucgcggaaacaca

SEQ ID NO: 1470470 - RNA, 19 nt, Artificial Sequence
  Description of Artificial Sequence: Synthetic oligonucleotide
  Sense strand starting at position 130 of SEQ ID NO: 1244176
gcgaaugacgugcugcaga

SEQ ID NO: 1470471 - RNA, 19 nt, Artificial Sequence
  Description of Artificial Sequence: Synthetic oligonucleotide
  Antisense strand to SEQ ID NO: 1470470
ucugcagcacgucauucgc

SEQ ID NO: 1470472 - RNA, 19 nt, Artificial Sequence
  Description of Artificial Sequence: Synthetic oligonucleotide
  Sense strand starting at position 288 of SEQ ID NO: 1244176
uccuccagccagugugaaa

SEQ ID NO: 1470473 - RNA, 19 nt, Artificial Sequence
  Description of Artificial Sequence: Synthetic oligonucleotide
  Antisense strand to SEQ ID NO: 1470472
uuucacacuggcuggagga

SEQ ID NO: 1470474 - RNA, 19 nt, Artificial Sequence
  Description of Artificial Sequence: Synthetic oligonucleotide
  Sense strand starting at position 320 of SEQ ID NO: 1244176
gugcguggaucucccuaaa

SEQ ID NO: 1470475 - RNA, 19 nt, Artificial Sequence
  Description of Artificial Sequence: Synthetic oligonucleotide
  Antisense strand to SEQ ID NO: 1470474
uuuagggagauccacgcac

SEQ ID NO: 1470476 - RNA, 19 nt, Artificial Sequence
  Description of Artificial Sequence: Synthetic oligonucleotide
  Sense strand starting at position 323 of SEQ ID NO: 1244176
cguggaucucccuaaagaa

SEQ ID NO: 1470477 - RNA, 19 nt, Artificial Sequence
  Description of Artificial Sequence: Synthetic oligonucleotide
  Antisense strand to SEQ ID NO: 1470476
uucuuuagggagauccacg

SEQ ID NO: 1470478 - RNA, 19 nt, Artificial Sequence
  Description of Artificial Sequence: Synthetic oligonucleotide
  Sense strand starting at position 358 of SEQ ID NO: 1244176
gcacgucuugugcugauca

SEQ ID NO: 1470479 - RNA, 19 nt, Artificial Sequence
  Description of Artificial Sequence: Synthetic oligonucleotide
  Antisense strand to SEQ ID NO: 1470478
ugaucagcacaagacgugc

SEQ ID NO: 1470480 - RNA, 19 nt, Artificial Sequence
  Description of Artificial Sequence: Synthetic oligonucleotide
  Sense strand starting at position 360 of SEQ ID NO: 1244176
acgucuugugcugaucaaa

SEQ ID NO: 1470481 - RNA, 19 nt, Artificial Sequence
  Description of Artificial Sequence: Synthetic oligonucleotide
  Antisense strand to SEQ ID NO: 1470480
uuugaucagcacaagacgu

SEQ ID NO: 1470482 - RNA, 19 nt, Artificial Sequence
  Description of Artificial Sequence: Synthetic oligonucleotide
  Sense strand starting at position 414 of SEQ ID NO: 1244176
ggcccucuggccgagugaa

SEQ ID NO: 1470483 - RNA, 19 nt, Artificial Sequence
  Description of Artificial Sequence: Synthetic oligonucleotide
  Antisense strand to SEQ ID NO: 1470482
uucacucggccagagggcc

SEQ ID NO: 1470484 - RNA, 19 nt, Artificial Sequence
  Description of Artificial Sequence: Synthetic oligonucleotide
  Sense strand starting at position 1436 of SEQ ID NO: 1244176
uggagcagccucugauuaa

SEQ ID NO: 1470485 - RNA, 19 nt, Artificial Sequence
  Description of Artificial Sequence: Synthetic oligonucleotide
  Antisense strand to SEQ ID NO: 1470484
uuaaucagaggcugcucca

SEQ ID NO: 1470486 - RNA, 19 nt, Artificial Sequence
  Description of Artificial Sequence: Synthetic oligonucleotide
  Sense strand starting at position 1437 of SEQ ID NO: 1244176
ggagcagccucugauuaac

SEQ ID NO: 1470487 - RNA, 19 nt, Artificial Sequence
  Description of Artificial Sequence: Synthetic oligonucleotide
  Antisense strand to SEQ ID NO: 1470486
guuaaucagaggcugcucc

SEQ ID NO: 1470488 - RNA, 19 nt, Artificial Sequence
  Description of Artificial Sequence: Synthetic oligonucleotide
  Sense strand starting at position 1443 of SEQ ID NO: 1244176
gccucugauuaacugggaa

SEQ ID NO: 1470489 - RNA, 19 nt, Artificial Sequence
  Description of Artificial Sequence: Synthetic oligonucleotide
  Antisense strand to SEQ ID NO: 1470488
uucccaguuaaucagaggc

SEQ ID NO: 1470490 - RNA, 19 nt, Artificial Sequence
  Description of Artificial Sequence: Synthetic oligonucleotide
  Sense strand starting at position 1511 of SEQ ID NO: 1244176
ggcguuucuggaugagaga

SEQ ID NO: 1470491 - RNA, 19 nt, Artificial Sequence
  Description of Artificial Sequence: Synthetic oligonucleotide
  Antisense strand to SEQ ID NO: 1470490
ucucucauccagaaacgcc

SEQ ID NO: 1470492 - RNA, 19 nt, Artificial Sequence
  Description of Artificial Sequence: Synthetic oligonucleotide
  Sense strand starting at position 1520 of SEQ ID NO: 1244176
ggaugagagagccgagauu

SEQ ID NO: 1470493 - RNA, 19 nt, Artificial Sequence
  Description of Artificial Sequence: Synthetic oligonucleotide
  Antisense strand to SEQ ID NO: 1470492
aaucucggcucucucaucc

SEQ ID NO: 1470494 - RNA, 19 nt, Artificial Sequence
  Description of Artificial Sequence: Synthetic oligonucleotide
  Sense strand starting at position 1682 of SEQ ID NO: 1244176
gaaaguugcucugaagagu

SEQ ID NO: 1470495 - RNA, 19 nt, Artificial Sequence
  Description of Artificial Sequence: Synthetic oligonucleotide
  Antisense strand to SEQ ID NO: 1470494
acucuucagagcaacuuuc

SEQ ID NO: 1470496 - RNA, 19 nt, Artificial Sequence
  Description of Artificial Sequence: Synthetic oligonucleotide
  Sense strand starting at position 2211 of SEQ ID NO: 1244176
cuccgugucaguucgcuaa

SEQ ID NO: 1470497 - RNA, 19 nt, Artificial Sequence
  Description of Artificial Sequence: Synthetic oligonucleotide
  Antisense strand to SEQ ID NO: 1470496
uuagcgaacugacacggag

SEQ ID NO: 1470498 - RNA, 19 nt, Artificial Sequence
  Description of Artificial Sequence: Synthetic oligonucleotide
  Sense strand starting at position 2634 of SEQ ID NO: 1244176
gccacaauacugugcaaga

SEQ ID NO: 1470499 - RNA, 19 nt, Artificial Sequence
  Description of Artificial Sequence: Synthetic oligonucleotide
  Antisense strand to SEQ ID NO: 1470498
ucuugcacaguauuguggc

SEQ ID NO: 1470500 - RNA, 19 nt, Artificial Sequence
  Description of Artificial Sequence: Synthetic oligonucleotide
  Sense strand starting at position 2635 of SEQ ID NO: 1244176
ccacaauacugugcaagaa

SEQ ID NO: 1470501 - RNA, 19 nt, Artificial Sequence
  Description of Artificial Sequence: Synthetic oligonucleotide
  Antisense strand to SEQ ID NO: 1470500
uucuugcacaguauugugg

SEQ ID NO: 1470502 - RNA, 19 nt, Artificial Sequence
  Description of Artificial Sequence: Synthetic oligonucleotide
  Sense strand starting at position 2648 of SEQ ID NO: 1244176
caagaaagucuaggucuga

SEQ ID NO: 1470503 - RNA, 19 nt, Artificial Sequence
  Description of Artificial Sequence: Synthetic oligonucleotide
  Antisense strand to SEQ ID NO: 1470502
ucagaccuagacuuucuug

SEQ ID NO: 1470504 - RNA, 19 nt, Artificial Sequence
  Description of Artificial Sequence: Synthetic oligonucleotide
  Sense strand starting at position 2675 of SEQ ID NO: 1244176
ccuccauucuuggcgacaa

SEQ ID NO: 1470505 - RNA, 19 nt, Artificial Sequence
  Description of Artificial Sequence: Synthetic oligonucleotide
  Antisense strand to SEQ ID NO: 1470504
uugucgccaagaauggagg

SEQ ID NO: 1470506 - RNA, 19 nt, Artificial Sequence
  Description of Artificial Sequence: Synthetic oligonucleotide
  Sense strand starting at position 2677 of SEQ ID NO: 1244176
uccauucuuggcgacaaua

SEQ ID NO: 1470507 - RNA, 19 nt, Artificial Sequence
  Description of Artificial Sequence: Synthetic oligonucleotide
  Antisense strand to SEQ ID NO: 1470506
uauugucgccaagaaugga

SEQ ID NO: 1470508 - RNA, 19 nt, Artificial Sequence
  Description of Artificial Sequence: Synthetic oligonucleotide
  Sense strand starting at position 2760 of SEQ ID NO: 1244176
cuuggauucuggucccagu

SEQ ID NO: 1470509 - RNA, 19 nt, Artificial Sequence
  Description of Artificial Sequence: Synthetic oligonucleotide
  Antisense strand to SEQ ID NO: 1470508
acugggaccagaauccaag

SEQ ID NO: 1470510 - RNA, 19 nt, Artificial Sequence
  Description of Artificial Sequence: Synthetic oligonucleotide
  Sense strand starting at position 2852 of SEQ ID NO: 1244176
guuggagccucucccaauu

SEQ ID NO: 1470511 - RNA, 19 nt, Artificial Sequence
  Description of Artificial Sequence: Synthetic oligonucleotide
  Antisense strand to SEQ ID NO: 1470510
aauugggagaggcuccaac

SEQ ID NO: 1470512 - RNA, 19 nt, Artificial Sequence
  Description of Artificial Sequence: Synthetic oligonucleotide
  Sense strand starting at position 2950 of SEQ ID NO: 1244176
ggguuucacuuuccaggga

SEQ ID NO: 1470513 - RNA, 19 nt, Artificial Sequence
  Description of Artificial Sequence: Synthetic oligonucleotide
  Antisense strand to SEQ ID NO: 1470512
ucccuggaaagugaaaccc

SEQ ID NO: 1470514 - RNA, 19 nt, Artificial Sequence
  Description of Artificial Sequence: Synthetic oligonucleotide
  Sense strand starting at position 3091 of SEQ ID NO: 1244176
gccuguguugggaaucguu

SEQ ID NO: 1470515 - RNA, 19 nt, Artificial Sequence
  Description of Artificial Sequence: Synthetic oligonucleotide
  Antisense strand to SEQ ID NO: 1470514
aacgauucccaacacaggc

SEQ ID NO: 1470516 - RNA, 19 nt, Artificial Sequence
  Description of Artificial Sequence: Synthetic oligonucleotide
  Sense strand starting at position 3094 of SEQ ID NO: 1244176
uguguugggaaucguuauu

SEQ ID NO: 1470517 - RNA, 19 nt, Artificial Sequence
  Description of Artificial Sequence: Synthetic oligonucleotide
  Antisense strand to SEQ ID NO: 1470516
aauaacgauucccaacaca

SEQ ID NO: 1470518 - RNA, 19 nt, Artificial Sequence
  Description of Artificial Sequence: Synthetic oligonucleotide
  Sense strand starting at position 3099 of SEQ ID NO: 1244176
ugggaaucguuauuaauaa

SEQ ID NO: 1470519 - RNA, 19 nt, Artificial Sequence
  Description of Artificial Sequence: Synthetic oligonucleotide
  Antisense strand to SEQ ID NO: 1470518
uuauuaauaacgauuccca

SEQ ID NO: 1470520 - RNA, 19 nt, Artificial Sequence
  Description of Artificial Sequence: Synthetic oligonucleotide
  Sense strand starting at position 3100 of SEQ ID NO: 1244176
gggaaucguuauuaauaaa

SEQ ID NO: 1470521 - RNA, 19 nt, Artificial Sequence
  Description of Artificial Sequence: Synthetic oligonucleotide
  Antisense strand to SEQ ID NO: 1470520
uuuauuaauaacgauuccc

SEQ ID NO: 1470522 - RNA, 19 nt, Artificial Sequence
  Description of Artificial Sequence: Synthetic oligonucleotide
  Sense strand starting at position 3139 of SEQ ID NO: 1244176
cagccuuggguuuaauaaa

SEQ ID NO: 1470523 - RNA, 19 nt, Artificial Sequence
  Description of Artificial Sequence: Synthetic oligonucleotide
  Antisense strand to SEQ ID NO: 1470522
uuuauuaaacccaaggcug

SEQ ID NO: 1470524 - RNA, 19 nt, Artificial Sequence
  Description of Artificial Sequence: Synthetic oligonucleotide
  Sense strand starting at position 3261 of SEQ ID NO: 1244176
ugggcauacugugacaaga

SEQ ID NO: 1470525 - RNA, 19 nt, Artificial Sequence
  Description of Artificial Sequence: Synthetic oligonucleotide
  Antisense strand to SEQ ID NO: 1470524
ucuugucacaguaugccca

SEQ ID NO: 1470526 - RNA, 19 nt, Artificial Sequence
  Description of Artificial Sequence: Synthetic oligonucleotide
  Sense strand starting at position 3263 of SEQ ID NO: 1244176
ggcauacugugacaagaau

SEQ ID NO: 1470527 - RNA, 19 nt, Artificial Sequence
  Description of Artificial Sequence: Synthetic oligonucleotide
  Antisense strand to SEQ ID NO: 1470526
auucuugucacaguaugcc

SEQ ID NO: 1470528 - RNA, 19 nt, Artificial Sequence
  Description of Artificial Sequence: Synthetic oligonucleotide
  Sense strand starting at position 3275 of SEQ ID NO: 1244176
caagaaucgggucggguuu

SEQ ID NO: 1470529 - RNA, 19 nt, Artificial Sequence
  Description of Artificial Sequence: Synthetic oligonucleotide
  Antisense strand to SEQ ID NO: 1470528
aaacccgacccgauucuug

SEQ ID NO: 1470530 - RNA, 19 nt, Artificial Sequence
  Description of Artificial Sequence: Synthetic oligonucleotide
  Sense strand starting at position 3571 of SEQ ID NO: 1244176
gaaagagaaucggguaagu

SEQ ID NO: 1470531 - RNA, 19 nt, Artificial Sequence
  Description of Artificial Sequence: Synthetic oligonucleotide
  Antisense strand to SEQ ID NO: 1470530
acuuacccgauucucuuuc

SEQ ID NO: 1470532 - RNA, 19 nt, Artificial Sequence
  Description of Artificial Sequence: Synthetic oligonucleotide
  Sense strand starting at position 3573 of SEQ ID NO: 1244176
aagagaaucggguaaguuu

SEQ ID NO: 1470533 - RNA, 19 nt, Artificial Sequence
  Description of Artificial Sequence: Synthetic oligonucleotide
  Antisense strand to SEQ ID NO: 1470532
aaacuuacccgauucucuu

SEQ ID NO: 1470534 - RNA, 19 nt, Artificial Sequence
  Description of Artificial Sequence: Synthetic oligonucleotide
  Sense strand starting at position 3595 of SEQ ID NO: 1244176
ggguguguugugcuugcau

SEQ ID NO: 1470535 - RNA, 19 nt, Artificial Sequence
  Description of Artificial Sequence: Synthetic oligonucleotide
  Antisense strand to SEQ ID NO: 1470534
augcaagcacaacacaccc

SEQ ID NO: 1470536 - RNA, 19 nt, Artificial Sequence
  Description of Artificial Sequence: Synthetic oligonucleotide
  Sense strand starting at position 3597 of SEQ ID NO: 1244176
guguguugugcuugcauuu

SEQ ID NO: 1470537 - RNA, 19 nt, Artificial Sequence
  Description of Artificial Sequence: Synthetic oligonucleotide
  Antisense strand to SEQ ID NO: 1470536
aaaugcaagcacaacacac

SEQ ID NO: 1470538 - RNA, 19 nt, Artificial Sequence
  Description of Artificial Sequence: Synthetic oligonucleotide
  Sense strand starting at position 3629 of SEQ ID NO: 1244176
agaaccuauuuggaucaau

SEQ ID NO: 1470539 - RNA, 19 nt, Artificial Sequence
  Description of Artificial Sequence: Synthetic oligonucleotide
  Antisense strand to SEQ ID NO: 1470538
auugauccaaauagguucu

SEQ ID NO: 1470540 - RNA, 19 nt, Artificial Sequence
  Description of Artificial Sequence: Synthetic oligonucleotide
  Sense strand starting at position 3935 of SEQ ID NO: 1244176
uaacucagccuugggagua

SEQ ID NO: 1470541 - RNA, 19 nt, Artificial Sequence
  Description of Artificial Sequence: Synthetic oligonucleotide
  Antisense strand to SEQ ID NO: 1470540
uacucccaaggcugaguua

SEQ ID NO: 1470542 - RNA, 19 nt, Artificial Sequence
  Description of Artificial Sequence: Synthetic oligonucleotide
  Sense strand starting at position 228 of SEQ ID NO: 1244177
ggcugaaugcaaugugaau

SEQ ID NO: 1470543 - RNA, 19 nt, Artificial Sequence
  Description of Artificial Sequence: Synthetic oligonucleotide
  Antisense strand to SEQ ID NO: 1470542
auucacauugcauucagcc

SEQ ID NO: 1470544 - RNA, 19 nt, Artificial Sequence
  Description of Artificial Sequence: Synthetic oligonucleotide
  Sense strand starting at position 251 of SEQ ID NO: 1244177
gggcagggacggugauauu

SEQ ID NO: 1470545 - RNA, 19 nt, Artificial Sequence
  Description of Artificial Sequence: Synthetic oligonucleotide
  Antisense strand to SEQ ID NO: 1470544
aauaucaccgucccugccc

SEQ ID NO: 1470546 - RNA, 19 nt, Artificial Sequence
  Description of Artificial Sequence: Synthetic oligonucleotide
  Sense strand starting at position 276 of SEQ ID NO: 1244177
ccuugucacucgcaaaugu

SEQ ID NO: 1470547 - RNA, 19 nt, Artificial Sequence
  Description of Artificial Sequence: Synthetic oligonucleotide
  Antisense strand to SEQ ID NO: 1470546
acauuugcgagugacaagg

SEQ ID NO: 1470548 - RNA, 19 nt, Artificial Sequence
  Description of Artificial Sequence: Synthetic oligonucleotide
  Sense strand starting at position 286 of SEQ ID NO: 1244177
cgcaaauguacugaacguu

SEQ ID NO: 1470549 - RNA, 19 nt, Artificial Sequence
  Description of Artificial Sequence: Synthetic oligonucleotide
  Antisense strand to SEQ ID NO: 1470548
aacguucaguacauuugcg

SEQ ID NO: 1470550 - RNA, 19 nt, Artificial Sequence
  Description of Artificial Sequence: Synthetic oligonucleotide
  Sense strand starting at position 460 of SEQ ID NO: 1244177
gaggucaugcuaugaagga

SEQ ID NO: 1470551 - RNA, 19 nt, Artificial Sequence
  Description of Artificial Sequence: Synthetic oligonucleotide
  Antisense strand to SEQ ID NO: 1470550
uccuucauagcaugaccuc

SEQ ID NO: 1470552 - RNA, 19 nt, Artificial Sequence
  Description of Artificial Sequence: Synthetic oligonucleotide
  Sense strand starting at position 461 of SEQ ID NO: 1244177
aggucaugcuaugaaggaa

SEQ ID NO: 1470553 - RNA, 19 nt, Artificial Sequence
  Description of Artificial Sequence: Synthetic oligonucleotide
  Antisense strand to SEQ ID NO: 1470552
uuccuucauagcaugaccu

SEQ ID NO: 1470554 - RNA, 19 nt, Artificial Sequence
  Description of Artificial Sequence: Synthetic oligonucleotide
  Sense strand starting at position 516 of SEQ ID NO: 1244177
gcaaacacacgguguuaaa

SEQ ID NO: 1470555 - RNA, 19 nt, Artificial Sequence
  Description of Artificial Sequence: Synthetic oligonucleotide
  Antisense strand to SEQ ID NO: 1470554
uuuaacaccguguguuugc

SEQ ID NO: 1470556 - RNA, 19 nt, Artificial Sequence
  Description of Artificial Sequence: Synthetic oligonucleotide
  Sense strand starting at position 649 of SEQ ID NO: 1244177
gggagaaucuaguuuccac

SEQ ID NO: 1470557 - RNA, 19 nt, Artificial Sequence
  Description of Artificial Sequence: Synthetic oligonucleotide
  Antisense strand to SEQ ID NO: 1470556
guggaaacuagauucuccc

SEQ ID NO: 1470558 - RNA, 19 nt, Artificial Sequence
  Description of Artificial Sequence: Synthetic oligonucleotide
  Sense strand starting at position 895 of SEQ ID NO: 1244177
agaaauaccuguguuugag

SEQ ID NO: 1470559 - RNA, 19 nt, Artificial Sequence
  Description of Artificial Sequence: Synthetic oligonucleotide
  Antisense strand to SEQ ID NO: 1470558
cucaaacacagguauuucu

SEQ ID NO: 1470560 - RNA, 19 nt, Artificial Sequence
  Description of Artificial Sequence: Synthetic oligonucleotide
  Sense strand starting at position 899 of SEQ ID NO: 1244177
auaccuguguuugagggua

SEQ ID NO: 1470561 - RNA, 19 nt, Artificial Sequence
  Description of Artificial Sequence: Synthetic oligonucleotide
  Antisense strand to SEQ ID NO: 1470560
uacccucaaacacagguau

SEQ ID NO: 1470562 - RNA, 19 nt, Artificial Sequence
  Description of Artificial Sequence: Synthetic oligonucleotide
  Sense strand starting at position 901 of SEQ ID NO: 1244177
accuguguuugaggguaga

SEQ ID NO: 1470563 - RNA, 19 nt, Artificial Sequence
  Description of Artificial Sequence: Synthetic oligonucleotide
  Antisense strand to SEQ ID NO: 1470562
ucuacccucaaacacaggu

SEQ ID NO: 1470564 - RNA, 19 nt, Artificial Sequence
  Description of Artificial Sequence: Synthetic oligonucleotide
  Sense strand starting at position 1199 of SEQ ID NO: 1244177
accagucuuccugggcaga

SEQ ID NO: 1470565 - RNA, 19 nt, Artificial Sequence
  Description of Artificial Sequence: Synthetic oligonucleotide
  Antisense strand to SEQ ID NO: 1470564
ucugcccaggaagacuggu

SEQ ID NO: 1470566 - RNA, 19 nt, Artificial Sequence
  Description of Artificial Sequence: Synthetic oligonucleotide
  Sense strand starting at position 1235 of SEQ ID NO: 1244177
gcuggucugucccaggaca

SEQ ID NO: 1470567 - RNA, 19 nt, Artificial Sequence
  Description of Artificial Sequence: Synthetic oligonucleotide
  Antisense strand to SEQ ID NO: 1470566
uguccugggacagaccagc

SEQ ID NO: 1470568 - RNA, 19 nt, Artificial Sequence
  Description of Artificial Sequence: Synthetic oligonucleotide
  Sense strand starting at position 1277 of SEQ ID NO: 1244177
gaagcuggcucaggaagaa

SEQ ID NO: 1470569 - RNA, 19 nt, Artificial Sequence
  Description of Artificial Sequence: Synthetic oligonucleotide
  Antisense strand to SEQ ID NO: 1470568
uucuuccugagccagcuuc

SEQ ID NO: 1470570 - RNA, 19 nt, Artificial Sequence
  Description of Artificial Sequence: Synthetic oligonucleotide
  Sense strand starting at position 1678 of SEQ ID NO: 1244177
gcacaugaucccgacucuu

SEQ ID NO: 1470571 - RNA, 19 nt, Artificial Sequence
  Description of Artificial Sequence: Synthetic oligonucleotide
  Antisense strand to SEQ ID NO: 1470570
aagagucgggaucaugugc

SEQ ID NO: 1470572 - RNA, 19 nt, Artificial Sequence
  Description of Artificial Sequence: Synthetic oligonucleotide
  Sense strand starting at position 2083 of SEQ ID NO: 1244177
ccgggcuacucuuguuaaa

SEQ ID NO: 1470573 - RNA, 19 nt, Artificial Sequence
  Description of Artificial Sequence: Synthetic oligonucleotide
  Antisense strand to SEQ ID NO: 1470572
uuuaacaagaguagcccgg

SEQ ID NO: 1470574 - RNA, 19 nt, Artificial Sequence
  Description of Artificial Sequence: Synthetic oligonucleotide
  Sense strand starting at position 2085 of SEQ ID NO: 1244177
gggcuacucuuguuaaagg

SEQ ID NO: 1470575 - RNA, 19 nt, Artificial Sequence
  Description of Artificial Sequence: Synthetic oligonucleotide
  Antisense strand to SEQ ID NO: 1470574
ccuuuaacaagaguagccc

SEQ ID NO: 1470576 - RNA, 19 nt, Artificial Sequence
  Description of Artificial Sequence: Synthetic oligonucleotide
  Sense strand starting at position 2197 of SEQ ID NO: 1244177
guugcagacgccugaagaa

SEQ ID NO: 1470577 - RNA, 19 nt, Artificial Sequence
  Description of Artificial Sequence: Synthetic oligonucleotide
  Antisense strand to SEQ ID NO: 1470576
uucuucaggcgucugcaac

SEQ ID NO: 1470578 - RNA, 19 nt, Artificial Sequence
  Description of Artificial Sequence: Synthetic oligonucleotide
  Sense strand starting at position 2416 of SEQ ID NO: 1244177
cccgccgaguucuagaauu

SEQ ID NO: 1470579 - RNA, 19 nt, Artificial Sequence
  Description of Artificial Sequence: Synthetic oligonucleotide
  Antisense strand to SEQ ID NO: 1470578
aauucuagaacucggcggg

SEQ ID NO: 1470580 - RNA, 19 nt, Artificial Sequence
  Description of Artificial Sequence: Synthetic oligonucleotide
  Sense strand starting at position 2886 of SEQ ID NO: 1244177
gaagucaacuguggaggau

SEQ ID NO: 1470581 - RNA, 19 nt, Artificial Sequence
  Description of Artificial Sequence: Synthetic oligonucleotide
  Antisense strand to SEQ ID NO: 1470580
auccuccacaguugacuuc

SEQ ID NO: 1470582 - RNA, 19 nt, Artificial Sequence
  Description of Artificial Sequence: Synthetic oligonucleotide
  Sense strand starting at position 2898 of SEQ ID NO: 1244177
ggaggauccuuccuggcuu

SEQ ID NO: 1470583 - RNA, 19 nt, Artificial Sequence
  Description of Artificial Sequence: Synthetic oligonucleotide
  Antisense strand to SEQ ID NO: 1470582
aagccaggaaggauccucc

SEQ ID NO: 1470584 - RNA, 19 nt, Artificial Sequence
  Description of Artificial Sequence: Synthetic oligonucleotide
  Sense strand starting at position 3095 of SEQ ID NO: 1244177
gccgcuuccgcacgguaua

SEQ ID NO: 1470585 - RNA, 19 nt, Artificial Sequence
  Description of Artificial Sequence: Synthetic oligonucleotide
  Antisense strand to SEQ ID NO: 1470584
uauaccgugcggaagcggc

SEQ ID NO: 1470586 - RNA, 19 nt, Artificial Sequence
  Description of Artificial Sequence: Synthetic oligonucleotide
  Sense strand starting at position 3109 of SEQ ID NO: 1244177
guauacuucucuccgcuuu

SEQ ID NO: 1470587 - RNA, 19 nt, Artificial Sequence
  Description of Artificial Sequence: Synthetic oligonucleotide
  Antisense strand to SEQ ID NO: 1470586
aaagcggagagaaguauac

SEQ ID NO: 1470588 - RNA, 19 nt, Artificial Sequence
  Description of Artificial Sequence: Synthetic oligonucleotide
  Sense strand starting at position 3155 of SEQ ID NO: 1244177
ccuaguucccuuggauaaa

SEQ ID NO: 1470589 - RNA, 19 nt, Artificial Sequence
  Description of Artificial Sequence: Synthetic oligonucleotide
  Antisense strand to SEQ ID NO: 1470588
uuuauccaagggaacuagg

SEQ ID NO: 1470590 - RNA, 19 nt, Artificial Sequence
  Description of Artificial Sequence: Synthetic oligonucleotide
  Sense strand starting at position 3156 of SEQ ID NO: 1244177
cuaguucccuuggauaaau

SEQ ID NO: 1470591 - RNA, 19 nt, Artificial Sequence
  Description of Artificial Sequence: Synthetic oligonucleotide
  Antisense strand to SEQ ID NO: 1470590
auuuauccaagggaacuag

SEQ ID NO: 1470592 - RNA, 19 nt, Artificial Sequence
  Description of Artificial Sequence: Synthetic oligonucleotide
  Sense strand starting at position 3887 of SEQ ID NO: 1244177
aucuuuggcugucccuaua

SEQ ID NO: 1470593 - RNA, 19 nt, Artificial Sequence
  Description of Artificial Sequence: Synthetic oligonucleotide
  Antisense strand to SEQ ID NO: 1470592
uauagggacagccaaagau

SEQ ID NO: 1470594 - RNA, 19 nt, Artificial Sequence
  Description of Artificial Sequence: Synthetic oligonucleotide
  Sense strand starting at position 3966 of SEQ ID NO: 1244177
ugaccauuauguccacacu

SEQ ID NO: 1470595 - RNA, 19 nt, Artificial Sequence
  Description of Artificial Sequence: Synthetic oligonucleotide
  Antisense strand to SEQ ID NO: 1470594
aguguggacauaaugguca

SEQ ID NO: 1470596 - RNA, 19 nt, Artificial Sequence
  Description of Artificial Sequence: Synthetic oligonucleotide
  Sense strand starting at position 2074 of SEQ ID NO: 1244178
gagagauuguucucugcca

SEQ ID NO: 1470597 - RNA, 19 nt, Artificial Sequence
  Description of Artificial Sequence: Synthetic oligonucleotide
  Antisense strand to SEQ ID NO: 1470596
uggcagagaacaaucucuc

SEQ ID NO: 1470598 - RNA, 19 nt, Artificial Sequence
  Description of Artificial Sequence: Synthetic oligonucleotide
  Sense strand starting at position 2076 of SEQ ID NO: 1244178
gagauuguucucugccagu

SEQ ID NO: 1470599 - RNA, 19 nt, Artificial Sequence
  Description of Artificial Sequence: Synthetic oligonucleotide
  Antisense strand to SEQ ID NO: 1470598
acuggcagagaacaaucuc

SEQ ID NO: 1470600 - RNA, 19 nt, Artificial Sequence
  Description of Artificial Sequence: Synthetic oligonucleotide
  Sense strand starting at position 2174 of SEQ ID NO: 1244178
gaaccauggcguugaaauu

SEQ ID NO: 1470601 - RNA, 19 nt, Artificial Sequence
  Description of Artificial Sequence: Synthetic oligonucleotide
  Antisense strand to SEQ ID NO: 1470600
aauuucaacgccaugguuc

SEQ ID NO: 1470602 - RNA, 19 nt, Artificial Sequence
  Description of Artificial Sequence: Synthetic oligonucleotide
  Sense strand starting at position 2197 of SEQ ID NO: 1244178
uuauaugucccguguacau

SEQ ID NO: 1470603 - RNA, 19 nt, Artificial Sequence
  Description of Artificial Sequence: Synthetic oligonucleotide
  Antisense strand to SEQ ID NO: 1470602
auguacacgggacauauaa

SEQ ID NO: 1470604 - RNA, 19 nt, Artificial Sequence
  Description of Artificial Sequence: Synthetic oligonucleotide
  Sense strand starting at position 2199 of SEQ ID NO: 1244178
auaugucccguguacauuu

SEQ ID NO: 1470605 - RNA, 19 nt, Artificial Sequence
  Description of Artificial Sequence: Synthetic oligonucleotide
  Antisense strand to SEQ ID NO: 1470604
aaauguacacgggacauau

SEQ ID NO: 1470606 - RNA, 19 nt, Artificial Sequence
  Description of Artificial Sequence: Synthetic oligonucleotide
  Sense strand starting at position 2210 of SEQ ID NO: 1244178
guacauuuaugccuaagca

SEQ ID NO: 1470607 - RNA, 19 nt, Artificial Sequence
  Description of Artificial Sequence: Synthetic oligonucleotide
  Antisense strand to SEQ ID NO: 1470606
ugcuuaggcauaaauguac

SEQ ID NO: 1470608 - RNA, 19 nt, Artificial Sequence
  Description of Artificial Sequence: Synthetic oligonucleotide
  Sense strand starting at position 2252 of SEQ ID NO: 1244178
ucucaaagcucagugcuuu

SEQ ID NO: 1470609 - RNA, 19 nt, Artificial Sequence
  Description of Artificial Sequence: Synthetic oligonucleotide
  Antisense strand to SEQ ID NO: 1470608
aaagcacugagcuuugaga

SEQ ID NO: 1470610 - RNA, 19 nt, Artificial Sequence
  Description of Artificial Sequence: Synthetic oligonucleotide
  Sense strand starting at position 2253 of SEQ ID NO: 1244178
cucaaagcucagugcuuua

SEQ ID NO: 1470611 - RNA, 19 nt, Artificial Sequence
  Description of Artificial Sequence: Synthetic oligonucleotide
  Antisense strand to SEQ ID NO: 1470610
uaaagcacugagcuuugag

SEQ ID NO: 1470612 - RNA, 19 nt, Artificial Sequence
  Description of Artificial Sequence: Synthetic oligonucleotide
  Sense strand starting at position 2264 of SEQ ID NO: 1244178
gugcuuuaauuugagaauu

SEQ ID NO: 1470613 - RNA, 19 nt, Artificial Sequence
  Description of Artificial Sequence: Synthetic oligonucleotide
  Antisense strand to SEQ ID NO: 1470612
aauucucaaauuaaagcac

SEQ ID NO: 1470614 - RNA, 19 nt, Artificial Sequence
  Description of Artificial Sequence: Synthetic oligonucleotide
  Sense strand starting at position 2266 of SEQ ID NO: 1244178
gcuuuaauuugagaauugc

SEQ ID NO: 1470615 - RNA, 19 nt, Artificial Sequence
  Description of Artificial Sequence: Synthetic oligonucleotide
  Antisense strand to SEQ ID NO: 1470614
gcaauucucaaauuaaagc

SEQ ID NO: 1470616 - RNA, 19 nt, Artificial Sequence
  Description of Artificial Sequence: Synthetic oligonucleotide
  Sense strand starting at position 2275 of SEQ ID NO: 1244178
ugagaauugcuaugaaguu

SEQ ID NO: 1470617 - RNA, 19 nt, Artificial Sequence
  Description of Artificial Sequence: Synthetic oligonucleotide
  Antisense strand to SEQ ID NO: 1470616
aacuucauagcaauucuca

SEQ ID NO: 1470618 - RNA, 19 nt, Artificial Sequence
  Description of Artificial Sequence: Synthetic oligonucleotide
  Sense strand starting at position 2304 of SEQ ID NO: 1244178
uuaacucuccagugaucag

SEQ ID NO: 1470619 - RNA, 19 nt, Artificial Sequence
  Description of Artificial Sequence: Synthetic oligonucleotide
  Antisense strand to SEQ ID NO: 1470618
cugaucacuggagaguuaa

SEQ ID NO: 1470620 - RNA, 19 nt, Artificial Sequence
  Description of Artificial Sequence: Synthetic oligonucleotide
  Sense strand starting at position 2311 of SEQ ID NO: 1244178
uccagugaucagugggaau

SEQ ID NO: 1470621 - RNA, 19 nt, Artificial Sequence
  Description of Artificial Sequence: Synthetic oligonucleotide
  Antisense strand to SEQ ID NO: 1470620
auucccacugaucacugga

SEQ ID NO: 1470622 - RNA, 19 nt, Artificial Sequence
  Description of Artificial Sequence: Synthetic oligonucleotide
  Sense strand starting at position 2313 of SEQ ID NO: 1244178
cagugaucagugggaauag

SEQ ID NO: 1470623 - RNA, 19 nt, Artificial Sequence
  Description of Artificial Sequence: Synthetic oligonucleotide
  Antisense strand to SEQ ID NO: 1470622
cuauucccacugaucacug

SEQ ID NO: 1470624 - RNA, 19 nt, Artificial Sequence
  Description of Artificial Sequence: Synthetic oligonucleotide
  Sense strand starting at position 2314 of SEQ ID NO: 1244178
agugaucagugggaauaga

SEQ ID NO: 1470625 - RNA, 19 nt, Artificial Sequence
  Description of Artificial Sequence: Synthetic oligonucleotide
  Antisense strand to SEQ ID NO: 1470624
ucuauucccacugaucacu

SEQ ID NO: 1470626 - RNA, 19 nt, Artificial Sequence
  Description of Artificial Sequence: Synthetic oligonucleotide
  Sense strand starting at position 2432 of SEQ ID NO: 1244178
acguguaacuuguuuaaga

SEQ ID NO: 1470627 - RNA, 19 nt, Artificial Sequence
  Description of Artificial Sequence: Synthetic oligonucleotide
  Antisense strand to SEQ ID NO: 1470626
ucuuaaacaaguuacacgu

SEQ ID NO: 1470628 - RNA, 19 nt, Artificial Sequence
  Description of Artificial Sequence: Synthetic oligonucleotide
  Sense strand starting at position 2433 of SEQ ID NO: 1244178
cguguaacuuguuuaagag

SEQ ID NO: 1470629 - RNA, 19 nt, Artificial Sequence
  Description of Artificial Sequence: Synthetic oligonucleotide
  Antisense strand to SEQ ID NO: 1470628
cucuuaaacaaguuacacg

SEQ ID NO: 1470630 - RNA, 19 nt, Artificial Sequence
  Description of Artificial Sequence: Synthetic oligonucleotide
  Sense strand starting at position 2434 of SEQ ID NO: 1244178
guguaacuuguuuaagagu

SEQ ID NO: 1470631 - RNA, 19 nt, Artificial Sequence
  Description of Artificial Sequence: Synthetic oligonucleotide
  Antisense strand to SEQ ID NO: 1470630
acucuuaaacaaguuacac

SEQ ID NO: 1470632 - RNA, 19 nt, Artificial Sequence
  Description of Artificial Sequence: Synthetic oligonucleotide
  Sense strand starting at position 2475 of SEQ ID NO: 1244178
uuaaucggcuuucucauua

SEQ ID NO: 1470633 - RNA, 19 nt, Artificial Sequence
  Description of Artificial Sequence: Synthetic oligonucleotide
  Antisense strand to SEQ ID NO: 1470632
uaaugagaaagccgauuaa

SEQ ID NO: 1470634 - RNA, 19 nt, Artificial Sequence
  Description of Artificial Sequence: Synthetic oligonucleotide
  Sense strand starting at position 2479 of SEQ ID NO: 1244178
ucggcuuucucauuacaaa

SEQ ID NO: 1470635 - RNA, 19 nt, Artificial Sequence
  Description of Artificial Sequence: Synthetic oligonucleotide
  Antisense strand to SEQ ID NO: 1470634
uuuguaaugagaaagccga

SEQ ID NO: 1470636 - RNA, 19 nt, Artificial Sequence
  Description of Artificial Sequence: Synthetic oligonucleotide
  Sense strand starting at position 2528 of SEQ ID NO: 1244178
gugguaauuugcuaauaug

SEQ ID NO: 1470637 - RNA, 19 nt, Artificial Sequence
  Description of Artificial Sequence: Synthetic oligonucleotide
  Antisense strand to SEQ ID NO: 1470636
cauauuagcaaauuaccac

SEQ ID NO: 1470638 - RNA, 19 nt, Artificial Sequence
  Description of Artificial Sequence: Synthetic oligonucleotide
  Sense strand starting at position 2607 of SEQ ID NO: 1244178
ggcucugacagcuauaaag

SEQ ID NO: 1470639 - RNA, 19 nt, Artificial Sequence
  Description of Artificial Sequence: Synthetic oligonucleotide
  Antisense strand to SEQ ID NO: 1470638
cuuuauagcugucagagcc

SEQ ID NO: 1470640 - RNA, 19 nt, Artificial Sequence
  Description of Artificial Sequence: Synthetic oligonucleotide
  Sense strand starting at position 2719 of SEQ ID NO: 1244178
uauccauaauugggagaga

SEQ ID NO: 1470641 - RNA, 19 nt, Artificial Sequence
  Description of Artificial Sequence: Synthetic oligonucleotide
  Antisense strand to SEQ ID NO: 1470640
ucucucccaauuauggaua

SEQ ID NO: 1470642 - RNA, 19 nt, Artificial Sequence
  Description of Artificial Sequence: Synthetic oligonucleotide
  Sense strand starting at position 2720 of SEQ ID NO: 1244178
auccauaauugggagagaa

SEQ ID NO: 1470643 - RNA, 19 nt, Artificial Sequence
  Description of Artificial Sequence: Synthetic oligonucleotide
  Antisense strand to SEQ ID NO: 1470642
uucucucccaauuauggau

SEQ ID NO: 1470644 - RNA, 19 nt, Artificial Sequence
  Description of Artificial Sequence: Synthetic oligonucleotide
  Sense strand starting at position 2745 of SEQ ID NO: 1244178
ggcauuguguggaaagaga

SEQ ID NO: 1470645 - RNA, 19 nt, Artificial Sequence
  Description of Artificial Sequence: Synthetic oligonucleotide
  Antisense strand to SEQ ID NO: 1470644
ucucuuuccacacaaugcc

SEQ ID NO: 1470646 - RNA, 19 nt, Artificial Sequence
  Description of Artificial Sequence: Synthetic oligonucleotide
  Sense strand starting at position 2895 of SEQ ID NO: 1244178
gcauaagaauuagcuuaua

SEQ ID NO: 1470647 - RNA, 19 nt, Artificial Sequence
  Description of Artificial Sequence: Synthetic oligonucleotide
  Antisense strand to SEQ ID NO: 1470646
uauaagcuaauucuuaugc

SEQ ID NO: 1470648 - RNA, 19 nt, Artificial Sequence
  Description of Artificial Sequence: Synthetic oligonucleotide
  Sense strand starting at position 3168 of SEQ ID NO: 1244178
gaaggaggauacuggauaa

SEQ ID NO: 1470649 - RNA, 19 nt, Artificial Sequence
  Description of Artificial Sequence: Synthetic oligonucleotide
  Antisense strand to SEQ ID NO: 1470648
uuauccaguauccuccuuc

SEQ ID NO: 1470650 - RNA, 19 nt, Artificial Sequence
  Description of Artificial Sequence: Synthetic oligonucleotide
  Sense strand starting at position 3179 of SEQ ID NO: 1244178
cuggauaaauuagauaagu

SEQ ID NO: 1470651 - RNA, 19 nt, Artificial Sequence
  Description of Artificial Sequence: Synthetic oligonucleotide
  Antisense strand to SEQ ID NO: 1470650
acuuaucuaauuuauccag

SEQ ID NO: 1470652 - RNA, 19 nt, Artificial Sequence
  Description of Artificial Sequence: Synthetic oligonucleotide
  Sense strand starting at position 3192 of SEQ ID NO: 1244178
auaaguaagcagugcucau

SEQ ID NO: 1470653 - RNA, 19 nt, Artificial Sequence
  Description of Artificial Sequence: Synthetic oligonucleotide
  Antisense strand to SEQ ID NO: 1470652
augagcacugcuuacuuau

SEQ ID NO: 1470654 - RNA, 19 nt, Artificial Sequence
  Description of Artificial Sequence: Synthetic oligonucleotide
  Sense strand starting at position 3256 of SEQ ID NO: 1244178
uuaggcaauugucuucuaa

SEQ ID NO: 1470655 - RNA, 19 nt, Artificial Sequence
  Description of Artificial Sequence: Synthetic oligonucleotide
  Antisense strand to SEQ ID NO: 1470654
uuagaagacaauugccuaa

SEQ ID NO: 1470656 - RNA, 19 nt, Artificial Sequence
  Description of Artificial Sequence: Synthetic oligonucleotide
  Sense strand starting at position 3309 of SEQ ID NO: 1244178
acuuaaaguugugcuuuaa

SEQ ID NO: 1470657 - RNA, 19 nt, Artificial Sequence
  Description of Artificial Sequence: Synthetic oligonucleotide
  Antisense strand to SEQ ID NO: 1470656
uuaaagcacaacuuuaagu

SEQ ID NO: 1470658 - RNA, 19 nt, Artificial Sequence
  Description of Artificial Sequence: Synthetic oligonucleotide
  Sense strand starting at position 3380 of SEQ ID NO: 1244178
cuguauuugucauuagcac

SEQ ID NO: 1470659 - RNA, 19 nt, Artificial Sequence
  Description of Artificial Sequence: Synthetic oligonucleotide
  Antisense strand to SEQ ID NO: 1470658
gugcuaaugacaaauacag

SEQ ID NO: 1470660 - RNA, 19 nt, Artificial Sequence
  Description of Artificial Sequence: Synthetic oligonucleotide
  Sense strand starting at position 3389 of SEQ ID NO: 1244178
ucauuagcacucugucauu

SEQ ID NO: 1470661 - RNA, 19 nt, Artificial Sequence
  Description of Artificial Sequence: Synthetic oligonucleotide
  Antisense strand to SEQ ID NO: 1470660
aaugacagagugcuaauga

SEQ ID NO: 1470662 - RNA, 19 nt, Artificial Sequence
  Description of Artificial Sequence: Synthetic oligonucleotide
  Sense strand starting at position 3449 of SEQ ID NO: 1244178
ucauacuccuagguuaaag

SEQ ID NO: 1470663 - RNA, 19 nt, Artificial Sequence
  Description of Artificial Sequence: Synthetic oligonucleotide
  Antisense strand to SEQ ID NO: 1470662
cuuuaaccuaggaguauga

SEQ ID NO: 1470664 - RNA, 19 nt, Artificial Sequence
  Description of Artificial Sequence: Synthetic oligonucleotide
  Sense strand starting at position 3516 of SEQ ID NO: 1244178
ucaggaugcuuugcuauuu

SEQ ID NO: 1470665 - RNA, 19 nt, Artificial Sequence
  Description of Artificial Sequence: Synthetic oligonucleotide
  Antisense strand to SEQ ID NO: 1470664
aaauagcaaagcauccuga

SEQ ID NO: 1470666 - RNA, 19 nt, Artificial Sequence
  Description of Artificial Sequence: Synthetic oligonucleotide
  Sense strand starting at position 3608 of SEQ ID NO: 1244178
cacagagacuggucucaaa

SEQ ID NO: 1470667 - RNA, 19 nt, Artificial Sequence
  Description of Artificial Sequence: Synthetic oligonucleotide
  Antisense strand to SEQ ID NO: 1470666
uuugagaccagucucugug

SEQ ID NO: 1470668 - RNA, 19 nt, Artificial Sequence
  Description of Artificial Sequence: Synthetic oligonucleotide
  Sense strand starting at position 3659 of SEQ ID NO: 1244178
cucccaaagugauagaaau

SEQ ID NO: 1470669 - RNA, 19 nt, Artificial Sequence
  Description of Artificial Sequence: Synthetic oligonucleotide
  Antisense strand to SEQ ID NO: 1470668
auuucuaucacuuugggag

SEQ ID NO: 1470670 - RNA, 19 nt, Artificial Sequence
  Description of Artificial Sequence: Synthetic oligonucleotide
  Sense strand starting at position 3843 of SEQ ID NO: 1244178
ugagcagauccaugauaau

SEQ ID NO: 1470671 - RNA, 19 nt, Artificial Sequence
  Description of Artificial Sequence: Synthetic oligonucleotide
  Antisense strand to SEQ ID NO: 1470670
auuaucauggaucugcuca

SEQ ID NO: 1470672 - RNA, 19 nt, Artificial Sequence
  Description of Artificial Sequence: Synthetic oligonucleotide
  Sense strand starting at position 3969 of SEQ ID NO: 1244178
uuuauauaguuucccuagu

SEQ ID NO: 1470673 - RNA, 19 nt, Artificial Sequence
  Description of Artificial Sequence: Synthetic oligonucleotide
  Antisense strand to SEQ ID NO: 1470672
acuagggaaacuauauaaa

SEQ ID NO: 1470674 - RNA, 19 nt, Artificial Sequence
  Description of Artificial Sequence: Synthetic oligonucleotide
  Sense strand starting at position 3970 of SEQ ID NO: 1244178
uuauauaguuucccuagua

SEQ ID NO: 1470675 - RNA, 19 nt, Artificial Sequence
  Description of Artificial Sequence: Synthetic oligonucleotide
  Antisense strand to SEQ ID NO: 1470674
uacuagggaaacuauauaa

SEQ ID NO: 1470676 - RNA, 19 nt, Artificial Sequence
  Description of Artificial Sequence: Synthetic oligonucleotide
  Sense strand starting at position 101 of SEQ ID NO: 1244179
uguggucuaccugaaugag

SEQ ID NO: 1470677 - RNA, 19 nt, Artificial Sequence
  Description of Artificial Sequence: Synthetic oligonucleotide
  Antisense strand to SEQ ID NO: 1470676
cucauucagguagaccaca

SEQ ID NO: 1470678 - RNA, 19 nt, Artificial Sequence
  Description of Artificial Sequence: Synthetic oligonucleotide
  Sense strand starting at position 107 of SEQ ID NO: 1244179
cuaccugaaugagaaguuu

SEQ ID NO: 1470679 - RNA, 19 nt, Artificial Sequence
  Description of Artificial Sequence: Synthetic oligonucleotide
  Antisense strand to SEQ ID NO: 1470678
aaacuucucauucagguag

SEQ ID NO: 1470680 - RNA, 19 nt, Artificial Sequence
  Description of Artificial Sequence: Synthetic oligonucleotide
  Sense strand starting at position 254 of SEQ ID NO: 1244179
ucugauauuuccuggguau

SEQ ID NO: 1470681 - RNA, 19 nt, Artificial Sequence
  Description of Artificial Sequence: Synthetic oligonucleotide
  Antisense strand to SEQ ID NO: 1470680
auacccaggaaauaucaga

SEQ ID NO: 1470682 - RNA, 19 nt, Artificial Sequence
  Description of Artificial Sequence: Synthetic oligonucleotide
  Sense strand starting at position 331 of SEQ ID NO: 1244179
aauggucucuauugggaua

SEQ ID NO: 1470683 - RNA, 19 nt, Artificial Sequence
  Description of Artificial Sequence: Synthetic oligonucleotide
  Antisense strand to SEQ ID NO: 1470682
uaucccaauagagaccauu

SEQ ID NO: 1470684 - RNA, 19 nt, Artificial Sequence
  Description of Artificial Sequence: Synthetic oligonucleotide
  Sense strand starting at position 372 of SEQ ID NO: 1244179
guggcauugucaucugaaa

SEQ ID NO: 1470685 - RNA, 19 nt, Artificial Sequence
  Description of Artificial Sequence: Synthetic oligonucleotide
  Antisense strand to SEQ ID NO: 1470684
uuucagaugacaaugccac

SEQ ID NO: 1470686 - RNA, 19 nt, Artificial Sequence
  Description of Artificial Sequence: Synthetic oligonucleotide
  Sense strand starting at position 417 of SEQ ID NO: 1244179
aagguugguuugggugaga

SEQ ID NO: 1470687 - RNA, 19 nt, Artificial Sequence
  Description of Artificial Sequence: Synthetic oligonucleotide
  Antisense strand to SEQ ID NO: 1470686
ucucacccaaaccaaccuu

SEQ ID NO: 1470688 - RNA, 19 nt, Artificial Sequence
  Description of Artificial Sequence: Synthetic oligonucleotide
  Sense strand starting at position 418 of SEQ ID NO: 1244179
agguugguuugggugagaa

SEQ ID NO: 1470689 - RNA, 19 nt, Artificial Sequence
  Description of Artificial Sequence: Synthetic oligonucleotide
  Antisense strand to SEQ ID NO: 1470688
uucucacccaaaccaaccu

SEQ ID NO: 1470690 - RNA, 19 nt, Artificial Sequence
  Description of Artificial Sequence: Synthetic oligonucleotide
  Sense strand starting at position 419 of SEQ ID NO: 1244179
gguugguuugggugagaau

SEQ ID NO: 1470691 - RNA, 19 nt, Artificial Sequence
  Description of Artificial Sequence: Synthetic oligonucleotide
  Antisense strand to SEQ ID NO: 1470690
auucucacccaaaccaacc

SEQ ID NO: 1470692 - RNA, 19 nt, Artificial Sequence
  Description of Artificial Sequence: Synthetic oligonucleotide
  Sense strand starting at position 420 of SEQ ID NO: 1244179
guugguuugggugagaauc

SEQ ID NO: 1470693 - RNA, 19 nt, Artificial Sequence
  Description of Artificial Sequence: Synthetic oligonucleotide
  Antisense strand to SEQ ID NO: 1470692
gauucucacccaaaccaac

SEQ ID NO: 1470694 - RNA, 19 nt, Artificial Sequence
  Description of Artificial Sequence: Synthetic oligonucleotide
  Sense strand starting at position 422 of SEQ ID NO: 1244179
ugguuugggugagaaucaa

SEQ ID NO: 1470695 - RNA, 19 nt, Artificial Sequence
  Description of Artificial Sequence: Synthetic oligonucleotide
  Antisense strand to SEQ ID NO: 1470694
uugauucucacccaaacca

SEQ ID NO: 1470696 - RNA, 19 nt, Artificial Sequence
  Description of Artificial Sequence: Synthetic oligonucleotide
  Sense strand starting at position 458 of SEQ ID NO: 1244179
ccaccaauaguugguugaa

SEQ ID NO: 1470697 - RNA, 19 nt, Artificial Sequence
  Description of Artificial Sequence: Synthetic oligonucleotide
  Antisense strand to SEQ ID NO: 1470696
uucaaccaacuauuggugg

SEQ ID NO: 1470698 - RNA, 19 nt, Artificial Sequence
  Description of Artificial Sequence: Synthetic oligonucleotide
  Sense strand starting at position 459 of SEQ ID NO: 1244179
caccaauaguugguugaaa

SEQ ID NO: 1470699 - RNA, 19 nt, Artificial Sequence
  Description of Artificial Sequence: Synthetic oligonucleotide
  Antisense strand to SEQ ID NO: 1470698
uuucaaccaacuauuggug

SEQ ID NO: 1470700 - RNA, 19 nt, Artificial Sequence
  Description of Artificial Sequence: Synthetic oligonucleotide
  Sense strand starting at position 460 of SEQ ID NO: 1244179
accaauaguugguugaaau

SEQ ID NO: 1470701 - RNA, 19 nt, Artificial Sequence
  Description of Artificial Sequence: Synthetic oligonucleotide
  Antisense strand to SEQ ID NO: 1470700
auuucaaccaacuauuggu

SEQ ID NO: 1470702 - RNA, 19 nt, Artificial Sequence
  Description of Artificial Sequence: Synthetic oligonucleotide
  Sense strand starting at position 461 of SEQ ID NO: 1244179
ccaauaguugguugaaauc

SEQ ID NO: 1470703 - RNA, 19 nt, Artificial Sequence
  Description of Artificial Sequence: Synthetic oligonucleotide
  Antisense strand to SEQ ID NO: 1470702
gauuucaaccaacuauugg

SEQ ID NO: 1470704 - RNA, 19 nt, Artificial Sequence
  Description of Artificial Sequence: Synthetic oligonucleotide
  Sense strand starting at position 1291 of SEQ ID NO: 1244179
ucgcuuugggccaggaguu

SEQ ID NO: 1470705 - RNA, 19 nt, Artificial Sequence
  Description of Artificial Sequence: Synthetic oligonucleotide
  Antisense strand to SEQ ID NO: 1470704
aacuccuggcccaaagcga

SEQ ID NO: 1470706 - RNA, 19 nt, Artificial Sequence
  Description of Artificial Sequence: Synthetic oligonucleotide
  Sense strand starting at position 1490 of SEQ ID NO: 1244179
gugaaagaaugagagcuua

SEQ ID NO: 1470707 - RNA, 19 nt, Artificial Sequence
  Description of Artificial Sequence: Synthetic oligonucleotide
  Antisense strand to SEQ ID NO: 1470706
uaagcucucauucuuucac

SEQ ID NO: 1470708 - RNA, 19 nt, Artificial Sequence
  Description of Artificial Sequence: Synthetic oligonucleotide
  Sense strand starting at position 1544 of SEQ ID NO: 1244179
agcccagagcuuugacagu

SEQ ID NO: 1470709 - RNA, 19 nt, Artificial Sequence
  Description of Artificial Sequence: Synthetic oligonucleotide
  Antisense strand to SEQ ID NO: 1470708
acugucaaagcucugggcu

SEQ ID NO: 1470710 - RNA, 19 nt, Artificial Sequence
  Description of Artificial Sequence: Synthetic oligonucleotide
  Sense strand starting at position 1553 of SEQ ID NO: 1244179
cuuugacagugucccuaaa

SEQ ID NO: 1470711 - RNA, 19 nt, Artificial Sequence
  Description of Artificial Sequence: Synthetic oligonucleotide
  Antisense strand to SEQ ID NO: 1470710
uuuagggacacugucaaag

SEQ ID NO: 1470712 - RNA, 19 nt, Artificial Sequence
  Description of Artificial Sequence: Synthetic oligonucleotide
  Sense strand starting at position 1555 of SEQ ID NO: 1244179
uugacagugucccuaaagu

SEQ ID NO: 1470713 - RNA, 19 nt, Artificial Sequence
  Description of Artificial Sequence: Synthetic oligonucleotide
  Antisense strand to SEQ ID NO: 1470712
acuuuagggacacugucaa

SEQ ID NO: 1470714 - RNA, 19 nt, Artificial Sequence
  Description of Artificial Sequence: Synthetic oligonucleotide
  Sense strand starting at position 1640 of SEQ ID NO: 1244179
ggcugaauuuggcaacccu

SEQ ID NO: 1470715 - RNA, 19 nt, Artificial Sequence
  Description of Artificial Sequence: Synthetic oligonucleotide
  Antisense strand to SEQ ID NO: 1470714
aggguugccaaauucagcc

SEQ ID NO: 1470716 - RNA, 19 nt, Artificial Sequence
  Description of Artificial Sequence: Synthetic oligonucleotide
  Sense strand starting at position 2119 of SEQ ID NO: 1244179
cuccuucuguguccuugaa

SEQ ID NO: 1470717 - RNA, 19 nt, Artificial Sequence
  Description of Artificial Sequence: Synthetic oligonucleotide
  Antisense strand to SEQ ID NO: 1470716
uucaaggacacagaaggag

SEQ ID NO: 1470718 - RNA, 19 nt, Artificial Sequence
  Description of Artificial Sequence: Synthetic oligonucleotide
  Sense strand starting at position 2161 of SEQ ID NO: 1244179
agcaccaucugaguguuua

SEQ ID NO: 1470719 - RNA, 19 nt, Artificial Sequence
  Description of Artificial Sequence: Synthetic oligonucleotide
  Antisense strand to SEQ ID NO: 1470718
uaaacacucagauggugcu

SEQ ID NO: 1470720 - RNA, 19 nt, Artificial Sequence
  Description of Artificial Sequence: Synthetic oligonucleotide
  Sense strand starting at position 2162 of SEQ ID NO: 1244179
gcaccaucugaguguuuau

SEQ ID NO: 1470721 - RNA, 19 nt, Artificial Sequence
  Description of Artificial Sequence: Synthetic oligonucleotide
  Antisense strand to SEQ ID NO: 1470720
auaaacacucagauggugc

SEQ ID NO: 1470722 - RNA, 19 nt, Artificial Sequence
  Description of Artificial Sequence: Synthetic oligonucleotide
  Sense strand starting at position 2191 of SEQ ID NO: 1244179
uccuguuacucaccugaua

SEQ ID NO: 1470723 - RNA, 19 nt, Artificial Sequence
  Description of Artificial Sequence: Synthetic oligonucleotide
  Antisense strand to SEQ ID NO: 1470722
uaucaggugaguaacagga

SEQ ID NO: 1470724 - RNA, 19 nt, Artificial Sequence
  Description of Artificial Sequence: Synthetic oligonucleotide
  Sense strand starting at position 2212 of SEQ ID NO: 1244179
ggucucuaucccuggagca

SEQ ID NO: 1470725 - RNA, 19 nt, Artificial Sequence
  Description of Artificial Sequence: Synthetic oligonucleotide
  Antisense strand to SEQ ID NO: 1470724
ugcuccagggauagagacc

SEQ ID NO: 1470726 - RNA, 19 nt, Artificial Sequence
  Description of Artificial Sequence: Synthetic oligonucleotide
  Sense strand starting at position 2213 of SEQ ID NO: 1244179
gucucuaucccuggagcau

SEQ ID NO: 1470727 - RNA, 19 nt, Artificial Sequence
  Description of Artificial Sequence: Synthetic oligonucleotide
  Antisense strand to SEQ ID NO: 1470726
augcuccagggauagagac

SEQ ID NO: 1470728 - RNA, 19 nt, Artificial Sequence
  Description of Artificial Sequence: Synthetic oligonucleotide
  Sense strand starting at position 2214 of SEQ ID NO: 1244179
ucucuaucccuggagcauu

SEQ ID NO: 1470729 - RNA, 19 nt, Artificial Sequence
  Description of Artificial Sequence: Synthetic oligonucleotide
  Antisense strand to SEQ ID NO: 1470728
aaugcuccagggauagaga

SEQ ID NO: 1470730 - RNA, 19 nt, Artificial Sequence
  Description of Artificial Sequence: Synthetic oligonucleotide
  Sense strand starting at position 2253 of SEQ ID NO: 1244179
acacuuggcucccuagaca

SEQ ID NO: 1470731 - RNA, 19 nt, Artificial Sequence
  Description of Artificial Sequence: Synthetic oligonucleotide
  Antisense strand to SEQ ID NO: 1470730
ugucuagggagccaagugu

SEQ ID NO: 1470732 - RNA, 19 nt, Artificial Sequence
  Description of Artificial Sequence: Synthetic oligonucleotide
  Sense strand starting at position 2775 of SEQ ID NO: 1244179
agccaacgcugauuacauu

SEQ ID NO: 1470733 - RNA, 19 nt, Artificial Sequence
  Description of Artificial Sequence: Synthetic oligonucleotide
  Antisense strand to SEQ ID NO: 1470732
aauguaaucagcguuggcu

SEQ ID NO: 1470734 - RNA, 19 nt, Artificial Sequence
  Description of Artificial Sequence: Synthetic oligonucleotide
  Sense strand starting at position 2828 of SEQ ID NO: 1244179
auggguuagucacucaguu

SEQ ID NO: 1470735 - RNA, 19 nt, Artificial Sequence
  Description of Artificial Sequence: Synthetic oligonucleotide
  Antisense strand to SEQ ID NO: 1470734
aacugagugacuaacccau

SEQ ID NO: 1470736 - RNA, 19 nt, Artificial Sequence
  Description of Artificial Sequence: Synthetic oligonucleotide
  Sense strand starting at position 2830 of SEQ ID NO: 1244179
ggguuagucacucaguuuc

SEQ ID NO: 1470737 - RNA, 19 nt, Artificial Sequence
  Description of Artificial Sequence: Synthetic oligonucleotide
  Antisense strand to SEQ ID NO: 1470736
gaaacugagugacuaaccc

SEQ ID NO: 1470738 - RNA, 19 nt, Artificial Sequence
  Description of Artificial Sequence: Synthetic oligonucleotide
  Sense strand starting at position 2832 of SEQ ID NO: 1244179
guuagucacucaguuucuu

SEQ ID NO: 1470739 - RNA, 19 nt, Artificial Sequence
  Description of Artificial Sequence: Synthetic oligonucleotide
  Antisense strand to SEQ ID NO: 1470738
aagaaacugagugacuaac

SEQ ID NO: 1470740 - RNA, 19 nt, Artificial Sequence
  Description of Artificial Sequence: Synthetic oligonucleotide
  Sense strand starting at position 2840 of SEQ ID NO: 1244179
cucaguuucuucuggaaug

SEQ ID NO: 1470741 - RNA, 19 nt, Artificial Sequence
  Description of Artificial Sequence: Synthetic oligonucleotide
  Antisense strand to SEQ ID NO: 1470740
cauuccagaagaaacugag

SEQ ID NO: 1470742 - RNA, 19 nt, Artificial Sequence
  Description of Artificial Sequence: Synthetic oligonucleotide
  Sense strand starting at position 2841 of SEQ ID NO: 1244179
ucaguuucuucuggaauga

SEQ ID NO: 1470743 - RNA, 19 nt, Artificial Sequence
  Description of Artificial Sequence: Synthetic oligonucleotide
  Antisense strand to SEQ ID NO: 1470742
ucauuccagaagaaacuga

SEQ ID NO: 1470744 - RNA, 19 nt, Artificial Sequence
  Description of Artificial Sequence: Synthetic oligonucleotide
  Sense strand starting at position 2878 of SEQ ID NO: 1244179
gagcccuuucugggugauu

SEQ ID NO: 1470745 - RNA, 19 nt, Artificial Sequence
  Description of Artificial Sequence: Synthetic oligonucleotide
  Antisense strand to SEQ ID NO: 1470744
aaucacccagaaagggcuc

SEQ ID NO: 1470746 - RNA, 19 nt, Artificial Sequence
  Description of Artificial Sequence: Synthetic oligonucleotide
  Sense strand starting at position 2879 of SEQ ID NO: 1244179
agcccuuucugggugauua

SEQ ID NO: 1470747 - RNA, 19 nt, Artificial Sequence
  Description of Artificial Sequence: Synthetic oligonucleotide
  Antisense strand to SEQ ID NO: 1470746
uaaucacccagaaagggcu

SEQ ID NO: 1470748 - RNA, 19 nt, Artificial Sequence
  Description of Artificial Sequence: Synthetic oligonucleotide
  Sense strand starting at position 2880 of SEQ ID NO: 1244179
gcccuuucugggugauuaa

SEQ ID NO: 1470749 - RNA, 19 nt, Artificial Sequence
  Description of Artificial Sequence: Synthetic oligonucleotide
  Antisense strand to SEQ ID NO: 1470748
uuaaucacccagaaagggc

SEQ ID NO: 1470750 - RNA, 19 nt, Artificial Sequence
  Description of Artificial Sequence: Synthetic oligonucleotide
  Sense strand starting at position 2881 of SEQ ID NO: 1244179
cccuuucugggugauuaac

SEQ ID NO: 1470751 - RNA, 19 nt, Artificial Sequence
  Description of Artificial Sequence: Synthetic oligonucleotide
  Antisense strand to SEQ ID NO: 1470750
guuaaucacccagaaaggg

SEQ ID NO: 1470752 - RNA, 19 nt, Artificial Sequence
  Description of Artificial Sequence: Synthetic oligonucleotide
  Sense strand starting at position 2887 of SEQ ID NO: 1244179
cugggugauuaacagaauu

SEQ ID NO: 1470753 - RNA, 19 nt, Artificial Sequence
  Description of Artificial Sequence: Synthetic oligonucleotide
  Antisense strand to SEQ ID NO: 1470752
aauucuguuaaucacccag

SEQ ID NO: 1470754 - RNA, 19 nt, Artificial Sequence
  Description of Artificial Sequence: Synthetic oligonucleotide
  Sense strand starting at position 3833 of SEQ ID NO: 1244179
aggugagcacccugaugaa

SEQ ID NO: 1470755 - RNA, 19 nt, Artificial Sequence
  Description of Artificial Sequence: Synthetic oligonucleotide
  Antisense strand to SEQ ID NO: 1470754
uucaucagggugcucaccu

SEQ ID NO: 1470756 - RNA, 19 nt, Artificial Sequence
  Description of Artificial Sequence: Synthetic oligonucleotide
  Sense strand starting at position 609 of SEQ ID NO: 1244180
accuaagugcgauaaggaa

SEQ ID NO: 1470757 - RNA, 19 nt, Artificial Sequence
  Description of Artificial Sequence: Synthetic oligonucleotide
  Antisense strand to SEQ ID NO: 1470756
uuccuuaucgcacuuaggu

SEQ ID NO: 1470758 - RNA, 19 nt, Artificial Sequence
  Description of Artificial Sequence: Synthetic oligonucleotide
  Sense strand starting at position 670 of SEQ ID NO: 1244180
cuuagaaucccgcaucuga

SEQ ID NO: 1470759 - RNA, 19 nt, Artificial Sequence
  Description of Artificial Sequence: Synthetic oligonucleotide
  Antisense strand to SEQ ID NO: 1470758
ucagaugcgggauucuaag

SEQ ID NO: 1470760 - RNA, 19 nt, Artificial Sequence
  Description of Artificial Sequence: Synthetic oligonucleotide
  Sense strand starting at position 693 of SEQ ID NO: 1244180
augcguaauaggcgcucaa

SEQ ID NO: 1470761 - RNA, 19 nt, Artificial Sequence
  Description of Artificial Sequence: Synthetic oligonucleotide
  Antisense strand to SEQ ID NO: 1470760
uugagcgccuauuacgcau

SEQ ID NO: 1470762 - RNA, 19 nt, Artificial Sequence
  Description of Artificial Sequence: Synthetic oligonucleotide
  Sense strand starting at position 694 of SEQ ID NO: 1244180
ugcguaauaggcgcucaau

SEQ ID NO: 1470763 - RNA, 19 nt, Artificial Sequence
  Description of Artificial Sequence: Synthetic oligonucleotide
  Antisense strand to SEQ ID NO: 1470762
auugagcgccuauuacgca

SEQ ID NO: 1470764 - RNA, 19 nt, Artificial Sequence
  Description of Artificial Sequence: Synthetic oligonucleotide
  Sense strand starting at position 695 of SEQ ID NO: 1244180
gcguaauaggcgcucaaua

SEQ ID NO: 1470765 - RNA, 19 nt, Artificial Sequence
  Description of Artificial Sequence: Synthetic oligonucleotide
  Antisense strand to SEQ ID NO: 1470764
uauugagcgccuauuacgc

SEQ ID NO: 1470766 - RNA, 19 nt, Artificial Sequence
  Description of Artificial Sequence: Synthetic oligonucleotide
  Sense strand starting at position 721 of SEQ ID NO: 1244180
uuguuaauguaucuguaag

SEQ ID NO: 1470767 - RNA, 19 nt, Artificial Sequence
  Description of Artificial Sequence: Synthetic oligonucleotide
  Antisense strand to SEQ ID NO: 1470766
cuuacagauacauuaacaa

SEQ ID NO: 1470768 - RNA, 19 nt, Artificial Sequence
  Description of Artificial Sequence: Synthetic oligonucleotide
  Sense strand starting at position 723 of SEQ ID NO: 1244180
guuaauguaucuguaagau

SEQ ID NO: 1470769 - RNA, 19 nt, Artificial Sequence
  Description of Artificial Sequence: Synthetic oligonucleotide
  Antisense strand to SEQ ID NO: 1470768
aucuuacagauacauuaac

SEQ ID NO: 1470770 - RNA, 19 nt, Artificial Sequence
  Description of Artificial Sequence: Synthetic oligonucleotide
  Sense strand starting at position 727 of SEQ ID NO: 1244180
auguaucuguaagaugaua

SEQ ID NO: 1470771 - RNA, 19 nt, Artificial Sequence
  Description of Artificial Sequence: Synthetic oligonucleotide
  Antisense strand to SEQ ID NO: 1470770
uaucaucuuacagauacau

SEQ ID NO: 1470772 - RNA, 19 nt, Artificial Sequence
  Description of Artificial Sequence: Synthetic oligonucleotide
  Sense strand starting at position 735 of SEQ ID NO: 1244180
guaagaugauaauugccaa

SEQ ID NO: 1470773 - RNA, 19 nt, Artificial Sequence
  Description of Artificial Sequence: Synthetic oligonucleotide
  Antisense strand to SEQ ID NO: 1470772
uuggcaauuaucaucuuac

SEQ ID NO: 1470774 - RNA, 19 nt, Artificial Sequence
  Description of Artificial Sequence: Synthetic oligonucleotide
  Sense strand starting at position 781 of SEQ ID NO: 1244180
gguauuaccugccuucuaa

SEQ ID NO: 1470775 - RNA, 19 nt, Artificial Sequence
  Description of Artificial Sequence: Synthetic oligonucleotide
  Antisense strand to SEQ ID NO: 1470774
uuagaaggcagguaauacc

SEQ ID NO: 1470776 - RNA, 19 nt, Artificial Sequence
  Description of Artificial Sequence: Synthetic oligonucleotide
  Sense strand starting at position 844 of SEQ ID NO: 1244180
guggcagaauaauauuaaa

SEQ ID NO: 1470777 - RNA, 19 nt, Artificial Sequence
  Description of Artificial Sequence: Synthetic oligonucleotide
  Antisense strand to SEQ ID NO: 1470776
uuuaauauuauucugccac

SEQ ID NO: 1470778 - RNA, 19 nt, Artificial Sequence
  Description of Artificial Sequence: Synthetic oligonucleotide
  Sense strand starting at position 1032 of SEQ ID NO: 1244180
gcguuugcgcugucuggaa

SEQ ID NO: 1470779 - RNA, 19 nt, Artificial Sequence
  Description of Artificial Sequence: Synthetic oligonucleotide
  Antisense strand to SEQ ID NO: 1470778
uuccagacagcgcaaacgc

SEQ ID NO: 1470780 - RNA, 19 nt, Artificial Sequence
  Description of Artificial Sequence: Synthetic oligonucleotide
  Sense strand starting at position 1034 of SEQ ID NO: 1244180
guuugcgcugucuggaaua

SEQ ID NO: 1470781 - RNA, 19 nt, Artificial Sequence
  Description of Artificial Sequence: Synthetic oligonucleotide
  Antisense strand to SEQ ID NO: 1470780
uauuccagacagcgcaaac

SEQ ID NO: 1470782 - RNA, 19 nt, Artificial Sequence
  Description of Artificial Sequence: Synthetic oligonucleotide
  Sense strand starting at position 1036 of SEQ ID NO: 1244180
uugcgcugucuggaauauu

SEQ ID NO: 1470783 - RNA, 19 nt, Artificial Sequence
  Description of Artificial Sequence: Synthetic oligonucleotide
  Antisense strand to SEQ ID NO: 1470782
aauauuccagacagcgcaa

SEQ ID NO: 1470784 - RNA, 19 nt, Artificial Sequence
  Description of Artificial Sequence: Synthetic oligonucleotide
  Sense strand starting at position 1066 of SEQ ID NO: 1244180
uuugcacggucaguuauuu

SEQ ID NO: 1470785 - RNA, 19 nt, Artificial Sequence
  Description of Artificial Sequence: Synthetic oligonucleotide
  Antisense strand to SEQ ID NO: 1470784
aaauaacugaccgugcaaa

SEQ ID NO: 1470786 - RNA, 19 nt, Artificial Sequence
  Description of Artificial Sequence: Synthetic oligonucleotide
  Sense strand starting at position 1222 of SEQ ID NO: 1244180
ccuaguaucugagcuccuu

SEQ ID NO: 1470787 - RNA, 19 nt, Artificial Sequence
  Description of Artificial Sequence: Synthetic oligonucleotide
  Antisense strand to SEQ ID NO: 1470786
aaggagcucagauacuagg

SEQ ID NO: 1470788 - RNA, 19 nt, Artificial Sequence
  Description of Artificial Sequence: Synthetic oligonucleotide
  Sense strand starting at position 1312 of SEQ ID NO: 1244180
gcgcucagcgagugugaaa

SEQ ID NO: 1470789 - RNA, 19 nt, Artificial Sequence
  Description of Artificial Sequence: Synthetic oligonucleotide
  Antisense strand to SEQ ID NO: 1470788
uuucacacucgcugagcgc

SEQ ID NO: 1470790 - RNA, 19 nt, Artificial Sequence
  Description of Artificial Sequence: Synthetic oligonucleotide
  Sense strand starting at position 1323 of SEQ ID NO: 1244180
gugugaaaccaaugcauuc

SEQ ID NO: 1470791 - RNA, 19 nt, Artificial Sequence
  Description of Artificial Sequence: Synthetic oligonucleotide
  Antisense strand to SEQ ID NO: 1470790
gaaugcauugguuucacac

SEQ ID NO: 1470792 - RNA, 19 nt, Artificial Sequence
  Description of Artificial Sequence: Synthetic oligonucleotide
  Sense strand starting at position 1507 of SEQ ID NO: 1244180
guguacauguacucgauua

SEQ ID NO: 1470793 - RNA, 19 nt, Artificial Sequence
  Description of Artificial Sequence: Synthetic oligonucleotide
  Antisense strand to SEQ ID NO: 1470792
uaaucgaguacauguacac

SEQ ID NO: 1470794 - RNA, 19 nt, Artificial Sequence
  Description of Artificial Sequence: Synthetic oligonucleotide
  Sense strand starting at position 1702 of SEQ ID NO: 1244180
aggguaaugucgcagaaga

SEQ ID NO: 1470795 - RNA, 19 nt, Artificial Sequence
  Description of Artificial Sequence: Synthetic oligonucleotide
  Antisense strand to SEQ ID NO: 1470794
ucuucugcgacauuacccu

SEQ ID NO: 1470796 - RNA, 19 nt, Artificial Sequence
  Description of Artificial Sequence: Synthetic oligonucleotide
  Sense strand starting at position 1779 of SEQ ID NO: 1244180
cucgaaauccucggcuucu

SEQ ID NO: 1470797 - RNA, 19 nt, Artificial Sequence
  Description of Artificial Sequence: Synthetic oligonucleotide
  Antisense strand to SEQ ID NO: 1470796
agaagccgaggauuucgag

SEQ ID NO: 1470798 - RNA, 19 nt, Artificial Sequence
  Description of Artificial Sequence: Synthetic oligonucleotide
  Sense strand starting at position 2056 of SEQ ID NO: 1244180
gagggauucugggauuaaa

SEQ ID NO: 1470799 - RNA, 19 nt, Artificial Sequence
  Description of Artificial Sequence: Synthetic oligonucleotide
  Antisense strand to SEQ ID NO: 1470798
uuuaaucccagaaucccuc

SEQ ID NO: 1470800 - RNA, 19 nt, Artificial Sequence
  Description of Artificial Sequence: Synthetic oligonucleotide
  Sense strand starting at position 2215 of SEQ ID NO: 1244180
gagguccgucaguaacagu

SEQ ID NO: 1470801 - RNA, 19 nt, Artificial Sequence
  Description of Artificial Sequence: Synthetic oligonucleotide
  Antisense strand to SEQ ID NO: 1470800
acuguuacugacggaccuc

SEQ ID NO: 1470802 - RNA, 19 nt, Artificial Sequence
  Description of Artificial Sequence: Synthetic oligonucleotide
  Sense strand starting at position 2313 of SEQ ID NO: 1244180
guagcaugcucucugcagu

SEQ ID NO: 1470803 - RNA, 19 nt, Artificial Sequence
  Description of Artificial Sequence: Synthetic oligonucleotide
  Antisense strand to SEQ ID NO: 1470802
acugcagagagcaugcuac

SEQ ID NO: 1470804 - RNA, 19 nt, Artificial Sequence
  Description of Artificial Sequence: Synthetic oligonucleotide
  Sense strand starting at position 2316 of SEQ ID NO: 1244180
gcaugcucucugcagucau

SEQ ID NO: 1470805 - RNA, 19 nt, Artificial Sequence
  Description of Artificial Sequence: Synthetic oligonucleotide
  Antisense strand to SEQ ID NO: 1470804
augacugcagagagcaugc

SEQ ID NO: 1470806 - RNA, 19 nt, Artificial Sequence
  Description of Artificial Sequence: Synthetic oligonucleotide
  Sense strand starting at position 2376 of SEQ ID NO: 1244180
agccuugaguggcaauaca

SEQ ID NO: 1470807 - RNA, 19 nt, Artificial Sequence
  Description of Artificial Sequence: Synthetic oligonucleotide
  Antisense strand to SEQ ID NO: 1470806
uguauugccacucaaggcu

SEQ ID NO: 1470808 - RNA, 19 nt, Artificial Sequence
  Description of Artificial Sequence: Synthetic oligonucleotide
  Sense strand starting at position 2433 of SEQ ID NO: 1244180
ggaugaaugaguuacucgu

SEQ ID NO: 1470809 - RNA, 19 nt, Artificial Sequence
  Description of Artificial Sequence: Synthetic oligonucleotide
  Antisense strand to SEQ ID NO: 1470808
acgaguaacucauucaucc

SEQ ID NO: 1470810 - RNA, 19 nt, Artificial Sequence
  Description of Artificial Sequence: Synthetic oligonucleotide
  Sense strand starting at position 2435 of SEQ ID NO: 1244180
augaaugaguuacucguua

SEQ ID NO: 1470811 - RNA, 19 nt, Artificial Sequence
  Description of Artificial Sequence: Synthetic oligonucleotide
  Antisense strand to SEQ ID NO: 1470810
uaacgaguaacucauucau

SEQ ID NO: 1470812 - RNA, 19 nt, Artificial Sequence
  Description of Artificial Sequence: Synthetic oligonucleotide
  Sense strand starting at position 2440 of SEQ ID NO: 1244180
ugaguuacucguuauccgu

SEQ ID NO: 1470813 - RNA, 19 nt, Artificial Sequence
  Description of Artificial Sequence: Synthetic oligonucleotide
  Antisense strand to SEQ ID NO: 1470812
acggauaacgaguaacuca

SEQ ID NO: 1470814 - RNA, 19 nt, Artificial Sequence
  Description of Artificial Sequence: Synthetic oligonucleotide
  Sense strand starting at position 2562 of SEQ ID NO: 1244180
gcgcucuucgcuuauugca

SEQ ID NO: 1470815 - RNA, 19 nt, Artificial Sequence
  Description of Artificial Sequence: Synthetic oligonucleotide
  Antisense strand to SEQ ID NO: 1470814
ugcaauaagcgaagagcgc

SEQ ID NO: 1470816 - RNA, 19 nt, Artificial Sequence
  Description of Artificial Sequence: Synthetic oligonucleotide
  Sense strand starting at position 3247 of SEQ ID NO: 1244180
gaggauggauugcuugagu

SEQ ID NO: 1470817 - RNA, 19 nt, Artificial Sequence
  Description of Artificial Sequence: Synthetic oligonucleotide
  Antisense strand to SEQ ID NO: 1470816
acucaagcaauccauccuc

SEQ ID NO: 1470818 - RNA, 19 nt, Artificial Sequence
  Description of Artificial Sequence: Synthetic oligonucleotide
  Sense strand starting at position 3264 of SEQ ID NO: 1244180
guccaugaguuccagaaga

SEQ ID NO: 1470819 - RNA, 19 nt, Artificial Sequence
  Description of Artificial Sequence: Synthetic oligonucleotide
  Antisense strand to SEQ ID NO: 1470818
ucuucuggaacucauggac

SEQ ID NO: 1470820 - RNA, 19 nt, Artificial Sequence
  Description of Artificial Sequence: Synthetic oligonucleotide
  Sense strand starting at position 3266 of SEQ ID NO: 1244180
ccaugaguuccagaagagc

SEQ ID NO: 1470821 - RNA, 19 nt, Artificial Sequence
  Description of Artificial Sequence: Synthetic oligonucleotide
  Antisense strand to SEQ ID NO: 1470820
gcucuucuggaacucaugg

SEQ ID NO: 1470822 - RNA, 19 nt, Artificial Sequence
  Description of Artificial Sequence: Synthetic oligonucleotide
  Sense strand starting at position 3616 of SEQ ID NO: 1244180
cccagaaucuuuguggauu

SEQ ID NO: 1470823 - RNA, 19 nt, Artificial Sequence
  Description of Artificial Sequence: Synthetic oligonucleotide
  Antisense strand to SEQ ID NO: 1470822
aauccacaaagauucuggg

SEQ ID NO: 1470824 - RNA, 19 nt, Artificial Sequence
  Description of Artificial Sequence: Synthetic oligonucleotide
  Sense strand starting at position 3617 of SEQ ID NO: 1244180
ccagaaucuuuguggauua

SEQ ID NO: 1470825 - RNA, 19 nt, Artificial Sequence
  Description of Artificial Sequence: Synthetic oligonucleotide
  Antisense strand to SEQ ID NO: 1470824
uaauccacaaagauucugg

SEQ ID NO: 1470826 - RNA, 19 nt, Artificial Sequence
  Description of Artificial Sequence: Synthetic oligonucleotide
  Sense strand starting at position 3628 of SEQ ID NO: 1244180
guggauuacagaugcaaag

SEQ ID NO: 1470827 - RNA, 19 nt, Artificial Sequence
  Description of Artificial Sequence: Synthetic oligonucleotide
  Antisense strand to SEQ ID NO: 1470826
cuuugcaucuguaauccac

SEQ ID NO: 1470828 - RNA, 19 nt, Artificial Sequence
  Description of Artificial Sequence: Synthetic oligonucleotide
  Sense strand starting at position 3639 of SEQ ID NO: 1244180
augcaaaguaguuaggagu

SEQ ID NO: 1470829 - RNA, 19 nt, Artificial Sequence
  Description of Artificial Sequence: Synthetic oligonucleotide
  Antisense strand to SEQ ID NO: 1470828
acuccuaacuacuuugcau

SEQ ID NO: 1470830 - RNA, 19 nt, Artificial Sequence
  Description of Artificial Sequence: Synthetic oligonucleotide
  Sense strand starting at position 3759 of SEQ ID NO: 1244180
auguauguauguuacaacu

SEQ ID NO: 1470831 - RNA, 19 nt, Artificial Sequence
  Description of Artificial Sequence: Synthetic oligonucleotide
  Antisense strand to SEQ ID NO: 1470830
aguuguaacauacauacau

SEQ ID NO: 1470832 - RNA, 19 nt, Artificial Sequence
  Description of Artificial Sequence: Synthetic oligonucleotide
  Sense strand starting at position 3852 of SEQ ID NO: 1244180
aacagacucuggucugcaa

SEQ ID NO: 1470833 - RNA, 19 nt, Artificial Sequence
  Description of Artificial Sequence: Synthetic oligonucleotide
  Antisense strand to SEQ ID NO: 1470832
uugcagaccagagucuguu

SEQ ID NO: 1470834 - RNA, 19 nt, Artificial Sequence
  Description of Artificial Sequence: Synthetic oligonucleotide
  Sense strand starting at position 3856 of SEQ ID NO: 1244180
gacucuggucugcaacaca

SEQ ID NO: 1470835 - RNA, 19 nt, Artificial Sequence
  Description of Artificial Sequence: Synthetic oligonucleotide
  Antisense strand to SEQ ID NO: 1470834
uguguugcagaccagaguc

SEQ ID NO: 1470836 - RNA, 19 nt, Artificial Sequence
  Description of Artificial Sequence: Synthetic oligonucleotide
  Sense strand starting at position 20 of SEQ ID NO: 1244181
gaaggaaggucagagcuaa

SEQ ID NO: 1470837 - RNA, 19 nt, Artificial Sequence
  Description of Artificial Sequence: Synthetic oligonucleotide
  Antisense strand to SEQ ID NO: 1470836
uuagcucugaccuuccuuc

SEQ ID NO: 1470838 - RNA, 19 nt, Artificial Sequence
  Description of Artificial Sequence: Synthetic oligonucleotide
  Sense strand starting at position 137 of SEQ ID NO: 1244181
ccguuaagacuagaaaugu

SEQ ID NO: 1470839 - RNA, 19 nt, Artificial Sequence
  Description of Artificial Sequence: Synthetic oligonucleotide
  Antisense strand to SEQ ID NO: 1470838
acauuucuagucuuaacgg

SEQ ID NO: 1470840 - RNA, 19 nt, Artificial Sequence
  Description of Artificial Sequence: Synthetic oligonucleotide
  Sense strand starting at position 364 of SEQ ID NO: 1244181
acgccucauuuccuugaga

SEQ ID NO: 1470841 - RNA, 19 nt, Artificial Sequence
  Description of Artificial Sequence: Synthetic oligonucleotide
  Antisense strand to SEQ ID NO: 1470840
ucucaaggaaaugaggcgu

SEQ ID NO: 1470842 - RNA, 19 nt, Artificial Sequence
  Description of Artificial Sequence: Synthetic oligonucleotide
  Sense strand starting at position 365 of SEQ ID NO: 1244181
cgccucauuuccuugagaa

SEQ ID NO: 1470843 - RNA, 19 nt, Artificial Sequence
  Description of Artificial Sequence: Synthetic oligonucleotide
  Antisense strand to SEQ ID NO: 1470842
uucucaaggaaaugaggcg

SEQ ID NO: 1470844 - RNA, 19 nt, Artificial Sequence
  Description of Artificial Sequence: Synthetic oligonucleotide
  Sense strand starting at position 664 of SEQ ID NO: 1244181
uuccuuugucaauaauagu

SEQ ID NO: 1470845 - RNA, 19 nt, Artificial Sequence
  Description of Artificial Sequence: Synthetic oligonucleotide
  Antisense strand to SEQ ID NO: 1470844
acuauuauugacaaaggaa

SEQ ID NO: 1470846 - RNA, 19 nt, Artificial Sequence
  Description of Artificial Sequence: Synthetic oligonucleotide
  Sense strand starting at position 811 of SEQ ID NO: 1244181
ggcugagacuuccuggaga

SEQ ID NO: 1470847 - RNA, 19 nt, Artificial Sequence
  Description of Artificial Sequence: Synthetic oligonucleotide
  Antisense strand to SEQ ID NO: 1470846
ucuccaggaagucucagcc

SEQ ID NO: 1470848 - RNA, 19 nt, Artificial Sequence
  Description of Artificial Sequence: Synthetic oligonucleotide
  Sense strand starting at position 831 of SEQ ID NO: 1244181
ggcucuccaucagaaauag

SEQ ID NO: 1470849 - RNA, 19 nt, Artificial Sequence
  Description of Artificial Sequence: Synthetic oligonucleotide
  Antisense strand to SEQ ID NO: 1470848
cuauuucugauggagagcc

SEQ ID NO: 1470850 - RNA, 19 nt, Artificial Sequence
  Description of Artificial Sequence: Synthetic oligonucleotide
  Sense strand starting at position 1074 of SEQ ID NO: 1244181
uuggacuagccacauguau

SEQ ID NO: 1470851 - RNA, 19 nt, Artificial Sequence
  Description of Artificial Sequence: Synthetic oligonucleotide
  Antisense strand to SEQ ID NO: 1470850
auacauguggcuaguccaa

SEQ ID NO: 1470852 - RNA, 19 nt, Artificial Sequence
  Description of Artificial Sequence: Synthetic oligonucleotide
  Sense strand starting at position 1102 of SEQ ID NO: 1244181
cugacagccuaguucgaua

SEQ ID NO: 1470853 - RNA, 19 nt, Artificial Sequence
  Description of Artificial Sequence: Synthetic oligonucleotide
  Antisense strand to SEQ ID NO: 1470852
uaucgaacuaggcugucag

SEQ ID NO: 1470854 - RNA, 19 nt, Artificial Sequence
  Description of Artificial Sequence: Synthetic oligonucleotide
  Sense strand starting at position 1184 of SEQ ID NO: 1244181
aauuaugugccagggcaau

SEQ ID NO: 1470855 - RNA, 19 nt, Artificial Sequence
  Description of Artificial Sequence: Synthetic oligonucleotide
  Antisense strand to SEQ ID NO: 1470854
auugcccuggcacauaauu

SEQ ID NO: 1470856 - RNA, 19 nt, Artificial Sequence
  Description of Artificial Sequence: Synthetic oligonucleotide
  Sense strand starting at position 1215 of SEQ ID NO: 1244181
ucaggaggcucucccuauu

SEQ ID NO: 1470857 - RNA, 19 nt, Artificial Sequence
  Description of Artificial Sequence: Synthetic oligonucleotide
  Antisense strand to SEQ ID NO: 1470856
aauagggagagccuccuga

SEQ ID NO: 1470858 - RNA, 19 nt, Artificial Sequence
  Description of Artificial Sequence: Synthetic oligonucleotide
  Sense strand starting at position 1237 of SEQ ID NO: 1244181
cugucuuuacuuggccaaa

SEQ ID NO: 1470859 - RNA, 19 nt, Artificial Sequence
  Description of Artificial Sequence: Synthetic oligonucleotide
  Antisense strand to SEQ ID NO: 1470858
uuuggccaaguaaagacag

SEQ ID NO: 1470860 - RNA, 19 nt, Artificial Sequence
  Description of Artificial Sequence: Synthetic oligonucleotide
  Sense strand starting at position 1329 of SEQ ID NO: 1244181
ccgcaucucgcauauuuga

SEQ ID NO: 1470861 - RNA, 19 nt, Artificial Sequence
  Description of Artificial Sequence: Synthetic oligonucleotide
  Antisense strand to SEQ ID NO: 1470860
ucaaauaugcgagaugcgg

SEQ ID NO: 1470862 - RNA, 19 nt, Artificial Sequence
  Description of Artificial Sequence: Synthetic oligonucleotide
  Sense strand starting at position 1366 of SEQ ID NO: 1244181
aggagugaaugcgcuuaau

SEQ ID NO: 1470863 - RNA, 19 nt, Artificial Sequence
  Description of Artificial Sequence: Synthetic oligonucleotide
  Antisense strand to SEQ ID NO: 1470862
auuaagcgcauucacuccu

SEQ ID NO: 1470864 - RNA, 19 nt, Artificial Sequence
  Description of Artificial Sequence: Synthetic oligonucleotide
  Sense strand starting at position 1369 of SEQ ID NO: 1244181
agugaaugcgcuuaauuag

SEQ ID NO: 1470865 - RNA, 19 nt, Artificial Sequence
  Description of Artificial Sequence: Synthetic oligonucleotide
  Antisense strand to SEQ ID NO: 1470864
cuaauuaagcgcauucacu

SEQ ID NO: 1470866 - RNA, 19 nt, Artificial Sequence
  Description of Artificial Sequence: Synthetic oligonucleotide
  Sense strand starting at position 1372 of SEQ ID NO: 1244181
gaaugcgcuuaauuaggau

SEQ ID NO: 1470867 - RNA, 19 nt, Artificial Sequence
  Description of Artificial Sequence: Synthetic oligonucleotide
  Antisense strand to SEQ ID NO: 1470866
auccuaauuaagcgcauuc

SEQ ID NO: 1470868 - RNA, 19 nt, Artificial Sequence
  Description of Artificial Sequence: Synthetic oligonucleotide
  Sense strand starting at position 1378 of SEQ ID NO: 1244181
gcuuaauuaggaugacauc

SEQ ID NO: 1470869 - RNA, 19 nt, Artificial Sequence
  Description of Artificial Sequence: Synthetic oligonucleotide
  Antisense strand to SEQ ID NO: 1470868
gaugucauccuaauuaagc

SEQ ID NO: 1470870 - RNA, 19 nt, Artificial Sequence
  Description of Artificial Sequence: Synthetic oligonucleotide
  Sense strand starting at position 1397 of SEQ ID NO: 1244181
agcugugcgucauucagaa

SEQ ID NO: 1470871 - RNA, 19 nt, Artificial Sequence
  Description of Artificial Sequence: Synthetic oligonucleotide
  Antisense strand to SEQ ID NO: 1470870
uucugaaugacgcacagcu

SEQ ID NO: 1470872 - RNA, 19 nt, Artificial Sequence
  Description of Artificial Sequence: Synthetic oligonucleotide
  Sense strand starting at position 1605 of SEQ ID NO: 1244181
acaaguccucccgggacau

SEQ ID NO: 1470873 - RNA, 19 nt, Artificial Sequence
  Description of Artificial Sequence: Synthetic oligonucleotide
  Antisense strand to SEQ ID NO: 1470872
augucccgggaggacuugu

SEQ ID NO: 1470874 - RNA, 19 nt, Artificial Sequence
  Description of Artificial Sequence: Synthetic oligonucleotide
  Sense strand starting at position 1606 of SEQ ID NO: 1244181
caaguccucccgggacauu

SEQ ID NO: 1470875 - RNA, 19 nt, Artificial Sequence
  Description of Artificial Sequence: Synthetic oligonucleotide
  Antisense strand to SEQ ID NO: 1470874
aaugucccgggaggacuug

SEQ ID NO: 1470876 - RNA, 19 nt, Artificial Sequence
  Description of Artificial Sequence: Synthetic oligonucleotide
  Sense strand starting at position 2022 of SEQ ID NO: 1244181
auuuaaauuucccggugac

SEQ ID NO: 1470877 - RNA, 19 nt, Artificial Sequence
  Description of Artificial Sequence: Synthetic oligonucleotide
  Antisense strand to SEQ ID NO: 1470876
gucaccgggaaauuuaaau

SEQ ID NO: 1470878 - RNA, 19 nt, Artificial Sequence
  Description of Artificial Sequence: Synthetic oligonucleotide
  Sense strand starting at position 2171 of SEQ ID NO: 1244181
ggauggcaucgcgagauga

SEQ ID NO: 1470879 - RNA, 19 nt, Artificial Sequence
  Description of Artificial Sequence: Synthetic oligonucleotide
  Antisense strand to SEQ ID NO: 1470878
ucaucucgcgaugccaucc

SEQ ID NO: 1470880 - RNA, 19 nt, Artificial Sequence
  Description of Artificial Sequence: Synthetic oligonucleotide
  Sense strand starting at position 2359 of SEQ ID NO: 1244181
guucguguuuccauagggu

SEQ ID NO: 1470881 - RNA, 19 nt, Artificial Sequence
  Description of Artificial Sequence: Synthetic oligonucleotide
  Antisense strand to SEQ ID NO: 1470880
acccuauggaaacacgaac

SEQ ID NO: 1470882 - RNA, 19 nt, Artificial Sequence
  Description of Artificial Sequence: Synthetic oligonucleotide
  Sense strand starting at position 2362 of SEQ ID NO: 1244181
cguguuuccauaggguuga

SEQ ID NO: 1470883 - RNA, 19 nt, Artificial Sequence
  Description of Artificial Sequence: Synthetic oligonucleotide
  Antisense strand to SEQ ID NO: 1470882
ucaacccuauggaaacacg

SEQ ID NO: 1470884 - RNA, 19 nt, Artificial Sequence
  Description of Artificial Sequence: Synthetic oligonucleotide
  Sense strand starting at position 2409 of SEQ ID NO: 1244181
gggcgacagccuuaaacaa

SEQ ID NO: 1470885 - RNA, 19 nt, Artificial Sequence
  Description of Artificial Sequence: Synthetic oligonucleotide
  Antisense strand to SEQ ID NO: 1470884
uuguuuaaggcugucgccc

SEQ ID NO: 1470886 - RNA, 19 nt, Artificial Sequence
  Description of Artificial Sequence: Synthetic oligonucleotide
  Sense strand starting at position 2603 of SEQ ID NO: 1244181
agggaagauuuguguuaua

SEQ ID NO: 1470887 - RNA, 19 nt, Artificial Sequence
  Description of Artificial Sequence: Synthetic oligonucleotide
  Antisense strand to SEQ ID NO: 1470886
uauaacacaaaucuucccu

SEQ ID NO: 1470888 - RNA, 19 nt, Artificial Sequence
  Description of Artificial Sequence: Synthetic oligonucleotide
  Sense strand starting at position 2850 of SEQ ID NO: 1244181
gcguguacauaugugugau

SEQ ID NO: 1470889 - RNA, 19 nt, Artificial Sequence
  Description of Artificial Sequence: Synthetic oligonucleotide
  Antisense strand to SEQ ID NO: 1470888
aucacacauauguacacgc

SEQ ID NO: 1470890 - RNA, 19 nt, Artificial Sequence
  Description of Artificial Sequence: Synthetic oligonucleotide
  Sense strand starting at position 2851 of SEQ ID NO: 1244181
cguguacauaugugugauu

SEQ ID NO: 1470891 - RNA, 19 nt, Artificial Sequence
  Description of Artificial Sequence: Synthetic oligonucleotide
  Antisense strand to SEQ ID NO: 1470890
aaucacacauauguacacg

SEQ ID NO: 1470892 - RNA, 19 nt, Artificial Sequence
  Description of Artificial Sequence: Synthetic oligonucleotide
  Sense strand starting at position 2875 of SEQ ID NO: 1244181
auguuacuuuaagagaaag

SEQ ID NO: 1470893 - RNA, 19 nt, Artificial Sequence
  Description of Artificial Sequence: Synthetic oligonucleotide
  Antisense strand to SEQ ID NO: 1470892
cuuucucuuaaaguaacau

SEQ ID NO: 1470894 - RNA, 19 nt, Artificial Sequence
  Description of Artificial Sequence: Synthetic oligonucleotide
  Sense strand starting at position 2924 of SEQ ID NO: 1244181
cacggugucucuccuaaga

SEQ ID NO: 1470895 - RNA, 19 nt, Artificial Sequence
  Description of Artificial Sequence: Synthetic oligonucleotide
  Antisense strand to SEQ ID NO: 1470894
ucuuaggagagacaccgug

SEQ ID NO: 1470896 - RNA, 19 nt, Artificial Sequence
  Description of Artificial Sequence: Synthetic oligonucleotide
  Sense strand starting at position 3000 of SEQ ID NO: 1244181
ucaugcuguuguuuaguau

SEQ ID NO: 1470897 - RNA, 19 nt, Artificial Sequence
  Description of Artificial Sequence: Synthetic oligonucleotide
  Antisense strand to SEQ ID NO: 1470896
auacuaaacaacagcauga

SEQ ID NO: 1470898 - RNA, 19 nt, Artificial Sequence
  Description of Artificial Sequence: Synthetic oligonucleotide
  Sense strand starting at position 3003 of SEQ ID NO: 1244181
ugcuguuguuuaguaugua

SEQ ID NO: 1470899 - RNA, 19 nt, Artificial Sequence
  Description of Artificial Sequence: Synthetic oligonucleotide
  Antisense strand to SEQ ID NO: 1470898
uacauacuaaacaacagca

SEQ ID NO: 1470900 - RNA, 19 nt, Artificial Sequence
  Description of Artificial Sequence: Synthetic oligonucleotide
  Sense strand starting at position 3095 of SEQ ID NO: 1244181
uugccauaugcucaaacga

SEQ ID NO: 1470901 - RNA, 19 nt, Artificial Sequence
  Description of Artificial Sequence: Synthetic oligonucleotide
  Antisense strand to SEQ ID NO: 1470900
ucguuugagcauauggcaa

SEQ ID NO: 1470902 - RNA, 19 nt, Artificial Sequence
  Description of Artificial Sequence: Synthetic oligonucleotide
  Sense strand starting at position 3482 of SEQ ID NO: 1244181
uguuuacugguuggaggua

SEQ ID NO: 1470903 - RNA, 19 nt, Artificial Sequence
  Description of Artificial Sequence: Synthetic oligonucleotide
  Antisense strand to SEQ ID NO: 1470902
uaccuccaaccaguaaaca

SEQ ID NO: 1470904 - RNA, 19 nt, Artificial Sequence
  Description of Artificial Sequence: Synthetic oligonucleotide
  Sense strand starting at position 3522 of SEQ ID NO: 1244181
ugaacuaagggaugugagu

SEQ ID NO: 1470905 - RNA, 19 nt, Artificial Sequence
  Description of Artificial Sequence: Synthetic oligonucleotide
  Antisense strand to SEQ ID NO: 1470904
acucacaucccuuaguuca

SEQ ID NO: 1470906 - RNA, 19 nt, Artificial Sequence
  Description of Artificial Sequence: Synthetic oligonucleotide
  Sense strand starting at position 3533 of SEQ ID NO: 1244181
augugaguccuagaaaucu

SEQ ID NO: 1470907 - RNA, 19 nt, Artificial Sequence
  Description of Artificial Sequence: Synthetic oligonucleotide
  Antisense strand to SEQ ID NO: 1470906
agauuucuaggacucacau

SEQ ID NO: 1470908 - RNA, 19 nt, Artificial Sequence
  Description of Artificial Sequence: Synthetic oligonucleotide
  Sense strand starting at position 3579 of SEQ ID NO: 1244181
agaggucugaccugcucua

SEQ ID NO: 1470909 - RNA, 19 nt, Artificial Sequence
  Description of Artificial Sequence: Synthetic oligonucleotide
  Antisense strand to SEQ ID NO: 1470908
uagagcaggucagaccucu

SEQ ID NO: 1470910 - RNA, 19 nt, Artificial Sequence
  Description of Artificial Sequence: Synthetic oligonucleotide
  Sense strand starting at position 3590 of SEQ ID NO: 1244181
cugcucuaucucugaaggu

SEQ ID NO: 1470911 - RNA, 19 nt, Artificial Sequence
  Description of Artificial Sequence: Synthetic oligonucleotide
  Antisense strand to SEQ ID NO: 1470910
accuucagagauagagcag

SEQ ID NO: 1470912 - RNA, 19 nt, Artificial Sequence
  Description of Artificial Sequence: Synthetic oligonucleotide
  Sense strand starting at position 3604 of SEQ ID NO: 1244181
aagguuugcagguaggaga

SEQ ID NO: 1470913 - RNA, 19 nt, Artificial Sequence
  Description of Artificial Sequence: Synthetic oligonucleotide
  Antisense strand to SEQ ID NO: 1470912
ucuccuaccugcaaaccuu

SEQ ID NO: 1470914 - RNA, 19 nt, Artificial Sequence
  Description of Artificial Sequence: Synthetic oligonucleotide
  Sense strand starting at position 3651 of SEQ ID NO: 1244181
aguugaguuucuucucuuu

SEQ ID NO: 1470915 - RNA, 19 nt, Artificial Sequence
  Description of Artificial Sequence: Synthetic oligonucleotide
  Antisense strand to SEQ ID NO: 1470914
aaagagaagaaacucaacu

SEQ ID NO: 1470916 - RNA, 19 nt, Artificial Sequence
  Description of Artificial Sequence: Synthetic oligonucleotide
  Sense strand starting at position 61 of SEQ ID NO: 1244182
ccaauuauggcacguaauu

SEQ ID NO: 1470917 - RNA, 19 nt, Artificial Sequence
  Description of Artificial Sequence: Synthetic oligonucleotide
  Antisense strand to SEQ ID NO: 1470916
aauuacgugccauaauugg

SEQ ID NO: 1470918 - RNA, 19 nt, Artificial Sequence
  Description of Artificial Sequence: Synthetic oligonucleotide
  Sense strand starting at position 146 of SEQ ID NO: 1244182
uggacaagcuguguugaga

SEQ ID NO: 1470919 - RNA, 19 nt, Artificial Sequence
  Description of Artificial Sequence: Synthetic oligonucleotide
  Antisense strand to SEQ ID NO: 1470918
ucucaacacagcuugucca

SEQ ID NO: 1470920 - RNA, 19 nt, Artificial Sequence
  Description of Artificial Sequence: Synthetic oligonucleotide
  Sense strand starting at position 266 of SEQ ID NO: 1244182
gaaagcgauuucuuguucu

SEQ ID NO: 1470921 - RNA, 19 nt, Artificial Sequence
  Description of Artificial Sequence: Synthetic oligonucleotide
  Antisense strand to SEQ ID NO: 1470920
agaacaagaaaucgcuuuc

SEQ ID NO: 1470922 - RNA, 19 nt, Artificial Sequence
  Description of Artificial Sequence: Synthetic oligonucleotide
  Sense strand starting at position 274 of SEQ ID NO: 1244182
uuucuuguucucugggcaa

SEQ ID NO: 1470923 - RNA, 19 nt, Artificial Sequence
  Description of Artificial Sequence: Synthetic oligonucleotide
  Antisense strand to SEQ ID NO: 1470922
uugcccagagaacaagaaa

SEQ ID NO: 1470924 - RNA, 19 nt, Artificial Sequence
  Description of Artificial Sequence: Synthetic oligonucleotide
  Sense strand starting at position 276 of SEQ ID NO: 1244182
ucuuguucucugggcaaua

SEQ ID NO: 1470925 - RNA, 19 nt, Artificial Sequence
  Description of Artificial Sequence: Synthetic oligonucleotide
  Antisense strand to SEQ ID NO: 1470924
uauugcccagagaacaaga

SEQ ID NO: 1470926 - RNA, 19 nt, Artificial Sequence
  Description of Artificial Sequence: Synthetic oligonucleotide
  Sense strand starting at position 277 of SEQ ID NO: 1244182
cuuguucucugggcaauau

SEQ ID NO: 1470927 - RNA, 19 nt, Artificial Sequence
  Description of Artificial Sequence: Synthetic oligonucleotide
  Antisense strand to SEQ ID NO: 1470926
auauugcccagagaacaag

SEQ ID NO: 1470928 - RNA, 19 nt, Artificial Sequence
  Description of Artificial Sequence: Synthetic oligonucleotide
  Sense strand starting at position 278 of SEQ ID NO: 1244182
uuguucucugggcaauaua

SEQ ID NO: 1470929 - RNA, 19 nt, Artificial Sequence
  Description of Artificial Sequence: Synthetic oligonucleotide
  Antisense strand to SEQ ID NO: 1470928
uauauugcccagagaacaa

SEQ ID NO: 1470930 - RNA, 19 nt, Artificial Sequence
  Description of Artificial Sequence: Synthetic oligonucleotide
  Sense strand starting at position 304 of SEQ ID NO: 1244182
agauaagcguuacucacau

SEQ ID NO: 1470931 - RNA, 19 nt, Artificial Sequence
  Description of Artificial Sequence: Synthetic oligonucleotide
  Antisense strand to SEQ ID NO: 1470930
augugaguaacgcuuaucu

SEQ ID NO: 1470932 - RNA, 19 nt, Artificial Sequence
  Description of Artificial Sequence: Synthetic oligonucleotide
  Sense strand starting at position 316 of SEQ ID NO: 1244182
cucacauaguucuugacuu

SEQ ID NO: 1470933 - RNA, 19 nt, Artificial Sequence
  Description of Artificial Sequence: Synthetic oligonucleotide
  Antisense strand to SEQ ID NO: 1470932
aagucaagaacuaugugag

SEQ ID NO: 1470934 - RNA, 19 nt, Artificial Sequence
  Description of Artificial Sequence: Synthetic oligonucleotide
  Sense strand starting at position 493 of SEQ ID NO: 1244182
aggaaagugggcuguuaag

SEQ ID NO: 1470935 - RNA, 19 nt, Artificial Sequence
  Description of Artificial Sequence: Synthetic oligonucleotide
  Antisense strand to SEQ ID NO: 1470934
cuuaacagcccacuuuccu

SEQ ID NO: 1470936 - RNA, 19 nt, Artificial Sequence
  Description of Artificial Sequence: Synthetic oligonucleotide
  Sense strand starting at position 500 of SEQ ID NO: 1244182
ugggcuguuaagggaagau

SEQ ID NO: 1470937 - RNA, 19 nt, Artificial Sequence
  Description of Artificial Sequence: Synthetic oligonucleotide
  Antisense strand to SEQ ID NO: 1470936
aucuucccuuaacagccca

SEQ ID NO: 1470938 - RNA, 19 nt, Artificial Sequence
  Description of Artificial Sequence: Synthetic oligonucleotide
  Sense strand starting at position 548 of SEQ ID NO: 1244182
uuccacaacugaggauaau

SEQ ID NO: 1470939 - RNA, 19 nt, Artificial Sequence
  Description of Artificial Sequence: Synthetic oligonucleotide
  Antisense strand to SEQ ID NO: 1470938
auuauccucaguuguggaa

SEQ ID NO: 1470940 - RNA, 19 nt, Artificial Sequence
  Description of Artificial Sequence: Synthetic oligonucleotide
  Sense strand starting at position 558 of SEQ ID NO: 1244182
gaggauaauuuauagagca

SEQ ID NO: 1470941 - RNA, 19 nt, Artificial Sequence
  Description of Artificial Sequence: Synthetic oligonucleotide
  Antisense strand to SEQ ID NO: 1470940
ugcucuauaaauuauccuc

SEQ ID NO: 1470942 - RNA, 19 nt, Artificial Sequence
  Description of Artificial Sequence: Synthetic oligonucleotide
  Sense strand starting at position 730 of SEQ ID NO: 1244182
agcacuuaaugaggaauua

SEQ ID NO: 1470943 - RNA, 19 nt, Artificial Sequence
  Description of Artificial Sequence: Synthetic oligonucleotide
  Antisense strand to SEQ ID NO: 1470942
uaauuccucauuaagugcu

SEQ ID NO: 1470944 - RNA, 19 nt, Artificial Sequence
  Description of Artificial Sequence: Synthetic oligonucleotide
  Sense strand starting at position 776 of SEQ ID NO: 1244182
gugcccaaauugucauguu

SEQ ID NO: 1470945 - RNA, 19 nt, Artificial Sequence
  Description of Artificial Sequence: Synthetic oligonucleotide
  Antisense strand to SEQ ID NO: 1470944
aacaugacaauuugggcac

SEQ ID NO: 1470946 - RNA, 19 nt, Artificial Sequence
  Description of Artificial Sequence: Synthetic oligonucleotide
  Sense strand starting at position 812 of SEQ ID NO: 1244182
gguuucagaguaugguagu

SEQ ID NO: 1470947 - RNA, 19 nt, Artificial Sequence
  Description of Artificial Sequence: Synthetic oligonucleotide
  Antisense strand to SEQ ID NO: 1470946
acuaccauacucugaaacc

SEQ ID NO: 1470948 - RNA, 19 nt, Artificial Sequence
  Description of Artificial Sequence: Synthetic oligonucleotide
  Sense strand starting at position 825 of SEQ ID NO: 1244182
gguaguaguagucagucuu

SEQ ID NO: 1470949 - RNA, 19 nt, Artificial Sequence
  Description of Artificial Sequence: Synthetic oligonucleotide
  Antisense strand to SEQ ID NO: 1470948
aagacugacuacuacuacc

SEQ ID NO: 1470950 - RNA, 19 nt, Artificial Sequence
  Description of Artificial Sequence: Synthetic oligonucleotide
  Sense strand starting at position 831 of SEQ ID NO: 1244182
aguagucagucuucuaugu

SEQ ID NO: 1470951 - RNA, 19 nt, Artificial Sequence
  Description of Artificial Sequence: Synthetic oligonucleotide
  Antisense strand to SEQ ID NO: 1470950
acauagaagacugacuacu

SEQ ID NO: 1470952 - RNA, 19 nt, Artificial Sequence
  Description of Artificial Sequence: Synthetic oligonucleotide
  Sense strand starting at position 835 of SEQ ID NO: 1244182
gucagucuucuauguauac

SEQ ID NO: 1470953 - RNA, 19 nt, Artificial Sequence
  Description of Artificial Sequence: Synthetic oligonucleotide
  Antisense strand to SEQ ID NO: 1470952
guauacauagaagacugac

SEQ ID NO: 1470954 - RNA, 19 nt, Artificial Sequence
  Description of Artificial Sequence: Synthetic oligonucleotide
  Sense strand starting at position 836 of SEQ ID NO: 1244182
ucagucuucuauguauacu

SEQ ID NO: 1470955 - RNA, 19 nt, Artificial Sequence
  Description of Artificial Sequence: Synthetic oligonucleotide
  Antisense strand to SEQ ID NO: 1470954
aguauacauagaagacuga

SEQ ID NO: 1470956 - RNA, 19 nt, Artificial Sequence
  Description of Artificial Sequence: Synthetic oligonucleotide
  Sense strand starting at position 879 of SEQ ID NO: 1244182
augucugguacucaauguu

SEQ ID NO: 1470957 - RNA, 19 nt, Artificial Sequence
  Description of Artificial Sequence: Synthetic oligonucleotide
  Antisense strand to SEQ ID NO: 1470956
aacauugaguaccagacau

SEQ ID NO: 1470958 - RNA, 19 nt, Artificial Sequence
  Description of Artificial Sequence: Synthetic oligonucleotide
  Sense strand starting at position 882 of SEQ ID NO: 1244182
ucugguacucaauguuugu

SEQ ID NO: 1470959 - RNA, 19 nt, Artificial Sequence
  Description of Artificial Sequence: Synthetic oligonucleotide
  Antisense strand to SEQ ID NO: 1470958
acaaacauugaguaccaga

SEQ ID NO: 1470960 - RNA, 19 nt, Artificial Sequence
  Description of Artificial Sequence: Synthetic oligonucleotide
  Sense strand starting at position 1273 of SEQ ID NO: 1244182
uuggacuuuaguugaggaa

SEQ ID NO: 1470961 - RNA, 19 nt, Artificial Sequence
  Description of Artificial Sequence: Synthetic oligonucleotide
  Antisense strand to SEQ ID NO: 1470960
uuccucaacuaaaguccaa

SEQ ID NO: 1470962 - RNA, 19 nt, Artificial Sequence
  Description of Artificial Sequence: Synthetic oligonucleotide
  Sense strand starting at position 1473 of SEQ ID NO: 1244182
cugcaaucacagcagaaga

SEQ ID NO: 1470963 - RNA, 19 nt, Artificial Sequence
  Description of Artificial Sequence: Synthetic oligonucleotide
  Antisense strand to SEQ ID NO: 1470962
ucuucugcugugauugcag

SEQ ID NO: 1470964 - RNA, 19 nt, Artificial Sequence
  Description of Artificial Sequence: Synthetic oligonucleotide
  Sense strand starting at position 1532 of SEQ ID NO: 1244182
uguuaagaauguuaggaau

SEQ ID NO: 1470965 - RNA, 19 nt, Artificial Sequence
  Description of Artificial Sequence: Synthetic oligonucleotide
  Antisense strand to SEQ ID NO: 1470964
auuccuaacauucuuaaca

SEQ ID NO: 1470966 - RNA, 19 nt, Artificial Sequence
  Description of Artificial Sequence: Synthetic oligonucleotide
  Sense strand starting at position 1535 of SEQ ID NO: 1244182
uaagaauguuaggaauaag

SEQ ID NO: 1470967 - RNA, 19 nt, Artificial Sequence
  Description of Artificial Sequence: Synthetic oligonucleotide
  Antisense strand to SEQ ID NO: 1470966
cuuauuccuaacauucuua

SEQ ID NO: 1470968 - RNA, 19 nt, Artificial Sequence
  Description of Artificial Sequence: Synthetic oligonucleotide
  Sense strand starting at position 1607 of SEQ ID NO: 1244182
auggaauuaucagccuaua

SEQ ID NO: 1470969 - RNA, 19 nt, Artificial Sequence
  Description of Artificial Sequence: Synthetic oligonucleotide
  Antisense strand to SEQ ID NO: 1470968
uauaggcugauaauuccau

SEQ ID NO: 1470970 - RNA, 19 nt, Artificial Sequence
  Description of Artificial Sequence: Synthetic oligonucleotide
  Sense strand starting at position 1652 of SEQ ID NO: 1244182
ggauaaacagguuaguugu

SEQ ID NO: 1470971 - RNA, 19 nt, Artificial Sequence
  Description of Artificial Sequence: Synthetic oligonucleotide
  Antisense strand to SEQ ID NO: 1470970
acaacuaaccuguuuaucc

SEQ ID NO: 1470972 - RNA, 19 nt, Artificial Sequence
  Description of Artificial Sequence: Synthetic oligonucleotide
  Sense strand starting at position 1655 of SEQ ID NO: 1244182
uaaacagguuaguuguaaa

SEQ ID NO: 1470973 - RNA, 19 nt, Artificial Sequence
  Description of Artificial Sequence: Synthetic oligonucleotide
  Antisense strand to SEQ ID NO: 1470972
uuuacaacuaaccuguuua

SEQ ID NO: 1470974 - RNA, 19 nt, Artificial Sequence
  Description of Artificial Sequence: Synthetic oligonucleotide
  Sense strand starting at position 1788 of SEQ ID NO: 1244182
ugguuaguguuacucagac

SEQ ID NO: 1470975 - RNA, 19 nt, Artificial Sequence
  Description of Artificial Sequence: Synthetic oligonucleotide
  Antisense strand to SEQ ID NO: 1470974
gucugaguaacacuaacca

SEQ ID NO: 1470976 - RNA, 19 nt, Artificial Sequence
  Description of Artificial Sequence: Synthetic oligonucleotide
  Sense strand starting at position 1790 of SEQ ID NO: 1244182
guuaguguuacucagacuu

SEQ ID NO: 1470977 - RNA, 19 nt, Artificial Sequence
  Description of Artificial Sequence: Synthetic oligonucleotide
  Antisense strand to SEQ ID NO: 1470976
aagucugaguaacacuaac

SEQ ID NO: 1470978 - RNA, 19 nt, Artificial Sequence
  Description of Artificial Sequence: Synthetic oligonucleotide
  Sense strand starting at position 2066 of SEQ ID NO: 1244182
agaugagccucagucuguu

SEQ ID NO: 1470979 - RNA, 19 nt, Artificial Sequence
  Description of Artificial Sequence: Synthetic oligonucleotide
  Antisense strand to SEQ ID NO: 1470978
aacagacugaggcucaucu

SEQ ID NO: 1470980 - RNA, 19 nt, Artificial Sequence
  Description of Artificial Sequence: Synthetic oligonucleotide
  Sense strand starting at position 2089 of SEQ ID NO: 1244182
gggugcagaucccuaguga

SEQ ID NO: 1470981 - RNA, 19 nt, Artificial Sequence
  Description of Artificial Sequence: Synthetic oligonucleotide
  Antisense strand to SEQ ID NO: 1470980
ucacuagggaucugcaccc

SEQ ID NO: 1470982 - RNA, 19 nt, Artificial Sequence
  Description of Artificial Sequence: Synthetic oligonucleotide
  Sense strand starting at position 2090 of SEQ ID NO: 1244182
ggugcagaucccuagugau

SEQ ID NO: 1470983 - RNA, 19 nt, Artificial Sequence
  Description of Artificial Sequence: Synthetic oligonucleotide
  Antisense strand to SEQ ID NO: 1470982
aucacuagggaucugcacc

SEQ ID NO: 1470984 - RNA, 19 nt, Artificial Sequence
  Description of Artificial Sequence: Synthetic oligonucleotide
  Sense strand starting at position 2100 of SEQ ID NO: 1244182
ccuagugauuaggucucua

SEQ ID NO: 1470985 - RNA, 19 nt, Artificial Sequence
  Description of Artificial Sequence: Synthetic oligonucleotide
  Antisense strand to SEQ ID NO: 1470984
uagagaccuaaucacuagg

SEQ ID NO: 1470986 - RNA, 19 nt, Artificial Sequence
  Description of Artificial Sequence: Synthetic oligonucleotide
  Sense strand starting at position 2280 of SEQ ID NO: 1244182
ggcagagcucuaggaaaua

SEQ ID NO: 1470987 - RNA, 19 nt, Artificial Sequence
  Description of Artificial Sequence: Synthetic oligonucleotide
  Antisense strand to SEQ ID NO: 1470986
uauuuccuagagcucugcc

SEQ ID NO: 1470988 - RNA, 19 nt, Artificial Sequence
  Description of Artificial Sequence: Synthetic oligonucleotide
  Sense strand starting at position 3616 of SEQ ID NO: 1244182
ugcgcgauuggcugggaua

SEQ ID NO: 1470989 - RNA, 19 nt, Artificial Sequence
  Description of Artificial Sequence: Synthetic oligonucleotide
  Antisense strand to SEQ ID NO: 1470988
uaucccagccaaucgcgca

SEQ ID NO: 1470990 - RNA, 19 nt, Artificial Sequence
  Description of Artificial Sequence: Synthetic oligonucleotide
  Sense strand starting at position 3618 of SEQ ID NO: 1244182
cgcgauuggcugggauagu

SEQ ID NO: 1470991 - RNA, 19 nt, Artificial Sequence
  Description of Artificial Sequence: Synthetic oligonucleotide
  Antisense strand to SEQ ID NO: 1470990
acuaucccagccaaucgcg

SEQ ID NO: 1470992 - RNA, 19 nt, Artificial Sequence
  Description of Artificial Sequence: Synthetic oligonucleotide
  Sense strand starting at position 3628 of SEQ ID NO: 1244182
ugggauaguaggcguugau

SEQ ID NO: 1470993 - RNA, 19 nt, Artificial Sequence
  Description of Artificial Sequence: Synthetic oligonucleotide
  Antisense strand to SEQ ID NO: 1470992
aucaacgccuacuauccca

SEQ ID NO: 1470994 - RNA, 19 nt, Artificial Sequence
  Description of Artificial Sequence: Synthetic oligonucleotide
  Sense strand starting at position 3893 of SEQ ID NO: 1244182
acaggaagcugcuuuaaug

SEQ ID NO: 1470995 - RNA, 19 nt, Artificial Sequence
  Description of Artificial Sequence: Synthetic oligonucleotide
  Antisense strand to SEQ ID NO: 1470994
cauuaaagcagcuuccugu

SEQ ID NO: 1470996 - RNA, 19 nt, Artificial Sequence
  Description of Artificial Sequence: Synthetic oligonucleotide
  Sense strand starting at position 57 of SEQ ID NO: 1244183
cagcaaaguuagcaggaaa

SEQ ID NO: 1470997 - RNA, 19 nt, Artificial Sequence
  Description of Artificial Sequence: Synthetic oligonucleotide
  Antisense strand to SEQ ID NO: 1470996
uuuccugcuaacuuugcug

SEQ ID NO: 1470998 - RNA, 19 nt, Artificial Sequence
  Description of Artificial Sequence: Synthetic oligonucleotide
  Sense strand starting at position 115 of SEQ ID NO: 1244183
cugcaaucacagcagaaga

SEQ ID NO: 1470999 - RNA, 19 nt, Artificial Sequence
  Description of Artificial Sequence: Synthetic oligonucleotide
  Antisense strand to SEQ ID NO: 1470998
ucuucugcugugauugcag

SEQ ID NO: 1471000 - RNA, 19 nt, Artificial Sequence
  Description of Artificial Sequence: Synthetic oligonucleotide
  Sense strand starting at position 174 of SEQ ID NO: 1244183
uguuaagaauguuaggaau

SEQ ID NO: 1471001 - RNA, 19 nt, Artificial Sequence
  Description of Artificial Sequence: Synthetic oligonucleotide
  Antisense strand to SEQ ID NO: 1471000
auuccuaacauucuuaaca

SEQ ID NO: 1471002 - RNA, 19 nt, Artificial Sequence
  Description of Artificial Sequence: Synthetic oligonucleotide
  Sense strand starting at position 177 of SEQ ID NO: 1244183
uaagaauguuaggaauaag

SEQ ID NO: 1471003 - RNA, 19 nt, Artificial Sequence
  Description of Artificial Sequence: Synthetic oligonucleotide
  Antisense strand to SEQ ID NO: 1471002
cuuauuccuaacauucuua

SEQ ID NO: 1471004 - RNA, 19 nt, Artificial Sequence
  Description of Artificial Sequence: Synthetic oligonucleotide
  Sense strand starting at position 249 of SEQ ID NO: 1244183
auggaauuaucagccuaua

SEQ ID NO: 1471005 - RNA, 19 nt, Artificial Sequence
  Description of Artificial Sequence: Synthetic oligonucleotide
  Antisense strand to SEQ ID NO: 1471004
uauaggcugauaauuccau

SEQ ID NO: 1471006 - RNA, 19 nt, Artificial Sequence
  Description of Artificial Sequence: Synthetic oligonucleotide
  Sense strand starting at position 294 of SEQ ID NO: 1244183
ggauaaacagguuaguugu

SEQ ID NO: 1471007 - RNA, 19 nt, Artificial Sequence
  Description of Artificial Sequence: Synthetic oligonucleotide
  Antisense strand to SEQ ID NO: 1471006
acaacuaaccuguuuaucc

SEQ ID NO: 1471008 - RNA, 19 nt, Artificial Sequence
  Description of Artificial Sequence: Synthetic oligonucleotide
  Sense strand starting at position 297 of SEQ ID NO: 1244183
uaaacagguuaguuguaaa

SEQ ID NO: 1471009 - RNA, 19 nt, Artificial Sequence
  Description of Artificial Sequence: Synthetic oligonucleotide
  Antisense strand to SEQ ID NO: 1471008
uuuacaacuaaccuguuua

SEQ ID NO: 1471010 - RNA, 19 nt, Artificial Sequence
  Description of Artificial Sequence: Synthetic oligonucleotide
  Sense strand starting at position 383 of SEQ ID NO: 1244183
cuuuguugauguugacauu

SEQ ID NO: 1471011 - RNA, 19 nt, Artificial Sequence
  Description of Artificial Sequence: Synthetic oligonucleotide
  Antisense strand to SEQ ID NO: 1471010
aaugucaacaucaacaaag

SEQ ID NO: 1471012 - RNA, 19 nt, Artificial Sequence
  Description of Artificial Sequence: Synthetic oligonucleotide
  Sense strand starting at position 425 of SEQ ID NO: 1244183
acauaugguuaguguuacu

SEQ ID NO: 1471013 - RNA, 19 nt, Artificial Sequence
  Description of Artificial Sequence: Synthetic oligonucleotide
  Antisense strand to SEQ ID NO: 1471012
aguaacacuaaccauaugu

SEQ ID NO: 1471014 - RNA, 19 nt, Artificial Sequence
  Description of Artificial Sequence: Synthetic oligonucleotide
  Sense strand starting at position 430 of SEQ ID NO: 1244183
ugguuaguguuacucagac

SEQ ID NO: 1471015 - RNA, 19 nt, Artificial Sequence
  Description of Artificial Sequence: Synthetic oligonucleotide
  Antisense strand to SEQ ID NO: 1471014
gucugaguaacacuaacca

SEQ ID NO: 1471016 - RNA, 19 nt, Artificial Sequence
  Description of Artificial Sequence: Synthetic oligonucleotide
  Sense strand starting at position 432 of SEQ ID NO: 1244183
guuaguguuacucagacuu

SEQ ID NO: 1471017 - RNA, 19 nt, Artificial Sequence
  Description of Artificial Sequence: Synthetic oligonucleotide
  Antisense strand to SEQ ID NO: 1471016
aagucugaguaacacuaac

SEQ ID NO: 1471018 - RNA, 19 nt, Artificial Sequence
  Description of Artificial Sequence: Synthetic oligonucleotide
  Sense strand starting at position 708 of SEQ ID NO: 1244183
agaugagccucagucuguu

SEQ ID NO: 1471019 - RNA, 19 nt, Artificial Sequence
  Description of Artificial Sequence: Synthetic oligonucleotide
  Antisense strand to SEQ ID NO: 1471018
aacagacugaggcucaucu

SEQ ID NO: 1471020 - RNA, 19 nt, Artificial Sequence
  Description of Artificial Sequence: Synthetic oligonucleotide
  Sense strand starting at position 731 of SEQ ID NO: 1244183
gggugcagaucccuaguga

SEQ ID NO: 1471021 - RNA, 19 nt, Artificial Sequence
  Description of Artificial Sequence: Synthetic oligonucleotide
  Antisense strand to SEQ ID NO: 1471020
ucacuagggaucugcaccc

SEQ ID NO: 1471022 - RNA, 19 nt, Artificial Sequence
  Description of Artificial Sequence: Synthetic oligonucleotide
  Sense strand starting at position 732 of SEQ ID NO: 1244183
ggugcagaucccuagugau

SEQ ID NO: 1471023 - RNA, 19 nt, Artificial Sequence
  Description of Artificial Sequence: Synthetic oligonucleotide
  Antisense strand to SEQ ID NO: 1471022
aucacuagggaucugcacc

SEQ ID NO: 1471024 - RNA, 19 nt, Artificial Sequence
  Description of Artificial Sequence: Synthetic oligonucleotide
  Sense strand starting at position 735 of SEQ ID NO: 1244183
gcagaucccuagugauuag

SEQ ID NO: 1471025 - RNA, 19 nt, Artificial Sequence
  Description of Artificial Sequence: Synthetic oligonucleotide
  Antisense strand to SEQ ID NO: 1471024
cuaaucacuagggaucugc

SEQ ID NO: 1471026 - RNA, 19 nt, Artificial Sequence
  Description of Artificial Sequence: Synthetic oligonucleotide
  Sense strand starting at position 742 of SEQ ID NO: 1244183
ccuagugauuaggucucua

SEQ ID NO: 1471027 - RNA, 19 nt, Artificial Sequence
  Description of Artificial Sequence: Synthetic oligonucleotide
  Antisense strand to SEQ ID NO: 1471026
uagagaccuaaucacuagg

SEQ ID NO: 1471028 - RNA, 19 nt, Artificial Sequence
  Description of Artificial Sequence: Synthetic oligonucleotide
  Sense strand starting at position 922 of SEQ ID NO: 1244183
ggcagagcucuaggaaaua

SEQ ID NO: 1471029 - RNA, 19 nt, Artificial Sequence
  Description of Artificial Sequence: Synthetic oligonucleotide
  Antisense strand to SEQ ID NO: 1471028
uauuuccuagagcucugcc

SEQ ID NO: 1471030 - RNA, 19 nt, Artificial Sequence
  Description of Artificial Sequence: Synthetic oligonucleotide
  Sense strand starting at position 2258 of SEQ ID NO: 1244183
ugcgcgauuggcugggaua

SEQ ID NO: 1471031 - RNA, 19 nt, Artificial Sequence
  Description of Artificial Sequence: Synthetic oligonucleotide
  Antisense strand to SEQ ID NO: 1471030
uaucccagccaaucgcgca

SEQ ID NO: 1471032 - RNA, 19 nt, Artificial Sequence
  Description of Artificial Sequence: Synthetic oligonucleotide
  Sense strand starting at position 2260 of SEQ ID NO: 1244183
cgcgauuggcugggauagu

SEQ ID NO: 1471033 - RNA, 19 nt, Artificial Sequence
  Description of Artificial Sequence: Synthetic oligonucleotide
  Antisense strand to SEQ ID NO: 1471032
acuaucccagccaaucgcg

SEQ ID NO: 1471034 - RNA, 19 nt, Artificial Sequence
  Description of Artificial Sequence: Synthetic oligonucleotide
  Sense strand starting at position 2261 of SEQ ID NO: 1244183
gcgauuggcugggauagua

SEQ ID NO: 1471035 - RNA, 19 nt, Artificial Sequence
  Description of Artificial Sequence: Synthetic oligonucleotide
  Antisense strand to SEQ ID NO: 1471034
uacuaucccagccaaucgc

SEQ ID NO: 1471036 - RNA, 19 nt, Artificial Sequence
  Description of Artificial Sequence: Synthetic oligonucleotide
  Sense strand starting at position 2270 of SEQ ID NO: 1244183
ugggauaguaggcguugau

SEQ ID NO: 1471037 - RNA, 19 nt, Artificial Sequence
  Description of Artificial Sequence: Synthetic oligonucleotide
  Antisense strand to SEQ ID NO: 1471036
aucaacgccuacuauccca

SEQ ID NO: 1471038 - RNA, 19 nt, Artificial Sequence
  Description of Artificial Sequence: Synthetic oligonucleotide
  Sense strand starting at position 2535 of SEQ ID NO: 1244183
acaggaagcugcuuuaaug

SEQ ID NO: 1471039 - RNA, 19 nt, Artificial Sequence
  Description of Artificial Sequence: Synthetic oligonucleotide
  Antisense strand to SEQ ID NO: 1471038
cauuaaagcagcuuccugu

SEQ ID NO: 1471040 - RNA, 19 nt, Artificial Sequence
  Description of Artificial Sequence: Synthetic oligonucleotide
  Sense strand starting at position 2652 of SEQ ID NO: 1244183
ggguauggaacuuguccaa

SEQ ID NO: 1471041 - RNA, 19 nt, Artificial Sequence
  Description of Artificial Sequence: Synthetic oligonucleotide
  Antisense strand to SEQ ID NO: 1471040
uuggacaaguuccauaccc

SEQ ID NO: 1471042 - RNA, 19 nt, Artificial Sequence
  Description of Artificial Sequence: Synthetic oligonucleotide
  Sense strand starting at position 2680 of SEQ ID NO: 1244183
gcugguuaauggcuuggua

SEQ ID NO: 1471043 - RNA, 19 nt, Artificial Sequence
  Description of Artificial Sequence: Synthetic oligonucleotide
  Antisense strand to SEQ ID NO: 1471042
uaccaagccauuaaccagc

SEQ ID NO: 1471044 - RNA, 19 nt, Artificial Sequence
  Description of Artificial Sequence: Synthetic oligonucleotide
  Sense strand starting at position 2682 of SEQ ID NO: 1244183
ugguuaauggcuugguaag

SEQ ID NO: 1471045 - RNA, 19 nt, Artificial Sequence
  Description of Artificial Sequence: Synthetic oligonucleotide
  Antisense strand to SEQ ID NO: 1471044
cuuaccaagccauuaacca

SEQ ID NO: 1471046 - RNA, 19 nt, Artificial Sequence
  Description of Artificial Sequence: Synthetic oligonucleotide
  Sense strand starting at position 2684 of SEQ ID NO: 1244183
guuaauggcuugguaagga

SEQ ID NO: 1471047 - RNA, 19 nt, Artificial Sequence
  Description of Artificial Sequence: Synthetic oligonucleotide
  Antisense strand to SEQ ID NO: 1471046
uccuuaccaagccauuaac

SEQ ID NO: 1471048 - RNA, 19 nt, Artificial Sequence
  Description of Artificial Sequence: Synthetic oligonucleotide
  Sense strand starting at position 2724 of SEQ ID NO: 1244183
gggucuggaacuuguccaa

SEQ ID NO: 1471049 - RNA, 19 nt, Artificial Sequence
  Description of Artificial Sequence: Synthetic oligonucleotide
  Antisense strand to SEQ ID NO: 1471048
uuggacaaguuccagaccc

SEQ ID NO: 1471050 - RNA, 19 nt, Artificial Sequence
  Description of Artificial Sequence: Synthetic oligonucleotide
  Sense strand starting at position 2752 of SEQ ID NO: 1244183
gcugguuaguggcuugaua

SEQ ID NO: 1471051 - RNA, 19 nt, Artificial Sequence
  Description of Artificial Sequence: Synthetic oligonucleotide
  Antisense strand to SEQ ID NO: 1471050
uaucaagccacuaaccagc

SEQ ID NO: 1471052 - RNA, 19 nt, Artificial Sequence
  Description of Artificial Sequence: Synthetic oligonucleotide
  Sense strand starting at position 2754 of SEQ ID NO: 1244183
ugguuaguggcuugauaag

SEQ ID NO: 1471053 - RNA, 19 nt, Artificial Sequence
  Description of Artificial Sequence: Synthetic oligonucleotide
  Antisense strand to SEQ ID NO: 1471052
cuuaucaagccacuaacca

SEQ ID NO: 1471054 - RNA, 19 nt, Artificial Sequence
  Description of Artificial Sequence: Synthetic oligonucleotide
  Sense strand starting at position 2806 of SEQ ID NO: 1244183
gcagcuuccucuccaagga

SEQ ID NO: 1471055 - RNA, 19 nt, Artificial Sequence
  Description of Artificial Sequence: Synthetic oligonucleotide
  Antisense strand to SEQ ID NO: 1471054
uccuuggagaggaagcugc

SEQ ID NO: 1471056 - RNA, 19 nt, Artificial Sequence
  Description of Artificial Sequence: Synthetic oligonucleotide
  Sense strand starting at position 2828 of SEQ ID NO: 1244183
cccuaagccugcuuauaug

SEQ ID NO: 1471057 - RNA, 19 nt, Artificial Sequence
  Description of Artificial Sequence: Synthetic oligonucleotide
  Antisense strand to SEQ ID NO: 1471056
cauauaagcaggcuuaggg

SEQ ID NO: 1471058 - RNA, 19 nt, Artificial Sequence
  Description of Artificial Sequence: Synthetic oligonucleotide
  Sense strand starting at position 2852 of SEQ ID NO: 1244183
ugagaccugugcugugaua

SEQ ID NO: 1471059 - RNA, 19 nt, Artificial Sequence
  Description of Artificial Sequence: Synthetic oligonucleotide
  Antisense strand to SEQ ID NO: 1471058
uaucacagcacaggucuca

SEQ ID NO: 1471060 - RNA, 19 nt, Artificial Sequence
  Description of Artificial Sequence: Synthetic oligonucleotide
  Sense strand starting at position 2866 of SEQ ID NO: 1244183
ugauaaaucugacuugcuu

SEQ ID NO: 1471061 - RNA, 19 nt, Artificial Sequence
  Description of Artificial Sequence: Synthetic oligonucleotide
  Antisense strand to SEQ ID NO: 1471060
aagcaagucagauuuauca

SEQ ID NO: 1471062 - RNA, 19 nt, Artificial Sequence
  Description of Artificial Sequence: Synthetic oligonucleotide
  Sense strand starting at position 2897 of SEQ ID NO: 1244183
agggauuccuccucuuaga

SEQ ID NO: 1471063 - RNA, 19 nt, Artificial Sequence
  Description of Artificial Sequence: Synthetic oligonucleotide
  Antisense strand to SEQ ID NO: 1471062
ucuaagaggaggaaucccu

SEQ ID NO: 1471064 - RNA, 19 nt, Artificial Sequence
  Description of Artificial Sequence: Synthetic oligonucleotide
  Sense strand starting at position 3000 of SEQ ID NO: 1244183
cagaaagaauguguguaca

SEQ ID NO: 1471065 - RNA, 19 nt, Artificial Sequence
  Description of Artificial Sequence: Synthetic oligonucleotide
  Antisense strand to SEQ ID NO: 1471064
uguacacacauucuuucug

SEQ ID NO: 1471066 - RNA, 19 nt, Artificial Sequence
  Description of Artificial Sequence: Synthetic oligonucleotide
  Sense strand starting at position 3019 of SEQ ID NO: 1244183
ggaauaaaggauugugguu

SEQ ID NO: 1471067 - RNA, 19 nt, Artificial Sequence
  Description of Artificial Sequence: Synthetic oligonucleotide
  Antisense strand to SEQ ID NO: 1471066
aaccacaauccuuuauucc

SEQ ID NO: 1471068 - RNA, 19 nt, Artificial Sequence
  Description of Artificial Sequence: Synthetic oligonucleotide
  Sense strand starting at position 3024 of SEQ ID NO: 1244183
aaaggauugugguucuuaa

SEQ ID NO: 1471069 - RNA, 19 nt, Artificial Sequence
  Description of Artificial Sequence: Synthetic oligonucleotide
  Antisense strand to SEQ ID NO: 1471068
uuaagaaccacaauccuuu

SEQ ID NO: 1471070 - RNA, 19 nt, Artificial Sequence
  Description of Artificial Sequence: Synthetic oligonucleotide
  Sense strand starting at position 3064 of SEQ ID NO: 1244183
ggaagaaacucaugaaugc

SEQ ID NO: 1471071 - RNA, 19 nt, Artificial Sequence
  Description of Artificial Sequence: Synthetic oligonucleotide
  Antisense strand to SEQ ID NO: 1471070
gcauucaugaguuucuucc

SEQ ID NO: 1471072 - RNA, 19 nt, Artificial Sequence
  Description of Artificial Sequence: Synthetic oligonucleotide
  Sense strand starting at position 3967 of SEQ ID NO: 1244183
acuugagcuugugagguaa

SEQ ID NO: 1471073 - RNA, 19 nt, Artificial Sequence
  Description of Artificial Sequence: Synthetic oligonucleotide
  Antisense strand to SEQ ID NO: 1471072
uuaccucacaagcucaagu

SEQ ID NO: 1471074 - RNA, 19 nt, Artificial Sequence
  Description of Artificial Sequence: Synthetic oligonucleotide
  Sense strand starting at position 3980 of SEQ ID NO: 1244183
agguaauugcccugcagua

SEQ ID NO: 1471075 - RNA, 19 nt, Artificial Sequence
  Description of Artificial Sequence: Synthetic oligonucleotide
  Antisense strand to SEQ ID NO: 1471074
uacugcagggcaauuaccu

SEQ ID NO: 1471076 - RNA, 19 nt, Artificial Sequence
  Description of Artificial Sequence: Synthetic oligonucleotide
  Sense strand starting at position 52 of SEQ ID NO: 1244184
acucauugagcucaugaac

SEQ ID NO: 1471077 - RNA, 19 nt, Artificial Sequence
  Description of Artificial Sequence: Synthetic oligonucleotide
  Antisense strand to SEQ ID NO: 1471076
guucaugagcucaaugagu

SEQ ID NO: 1471078 - RNA, 19 nt, Artificial Sequence
  Description of Artificial Sequence: Synthetic oligonucleotide
  Sense strand starting at position 66 of SEQ ID NO: 1244184
ugaacaaccugguuuguga

SEQ ID NO: 1471079 - RNA, 19 nt, Artificial Sequence
  Description of Artificial Sequence: Synthetic oligonucleotide
  Antisense strand to SEQ ID NO: 1471078
ucacaaaccagguuguuca

SEQ ID NO: 1471080 - RNA, 19 nt, Artificial Sequence
  Description of Artificial Sequence: Synthetic oligonucleotide
  Sense strand starting at position 195 of SEQ ID NO: 1244184
auaauaaacuugguugagu

SEQ ID NO: 1471081 - RNA, 19 nt, Artificial Sequence
  Description of Artificial Sequence: Synthetic oligonucleotide
  Antisense strand to SEQ ID NO: 1471080
acucaaccaaguuuauuau

SEQ ID NO: 1471082 - RNA, 19 nt, Artificial Sequence
  Description of Artificial Sequence: Synthetic oligonucleotide
  Sense strand starting at position 197 of SEQ ID NO: 1244184
aauaaacuugguugaguga

SEQ ID NO: 1471083 - RNA, 19 nt, Artificial Sequence
  Description of Artificial Sequence: Synthetic oligonucleotide
  Antisense strand to SEQ ID NO: 1471082
ucacucaaccaaguuuauu

SEQ ID NO: 1471084 - RNA, 19 nt, Artificial Sequence
  Description of Artificial Sequence: Synthetic oligonucleotide
  Sense strand starting at position 289 of SEQ ID NO: 1244184
uggagucuauguccuuaaa

SEQ ID NO: 1471085 - RNA, 19 nt, Artificial Sequence
  Description of Artificial Sequence: Synthetic oligonucleotide
  Antisense strand to SEQ ID NO: 1471084
uuuaaggacauagacucca

SEQ ID NO: 1471086 - RNA, 19 nt, Artificial Sequence
  Description of Artificial Sequence: Synthetic oligonucleotide
  Sense strand starting at position 387 of SEQ ID NO: 1244184
acaauaacuucuuugguga

SEQ ID NO: 1471087 - RNA, 19 nt, Artificial Sequence
  Description of Artificial Sequence: Synthetic oligonucleotide
  Antisense strand to SEQ ID NO: 1471086
ucaccaaagaaguuauugu

SEQ ID NO: 1471088 - RNA, 19 nt, Artificial Sequence
  Description of Artificial Sequence: Synthetic oligonucleotide
  Sense strand starting at position 463 of SEQ ID NO: 1244184
uacugagauguguaucaug

SEQ ID NO: 1471089 - RNA, 19 nt, Artificial Sequence
  Description of Artificial Sequence: Synthetic oligonucleotide
  Antisense strand to SEQ ID NO: 1471088
caugauacacaucucagua

SEQ ID NO: 1471090 - RNA, 19 nt, Artificial Sequence
  Description of Artificial Sequence: Synthetic oligonucleotide
  Sense strand starting at position 509 of SEQ ID NO: 1244184
uacauaauaccguauucga

SEQ ID NO: 1471091 - RNA, 19 nt, Artificial Sequence
  Description of Artificial Sequence: Synthetic oligonucleotide
  Antisense strand to SEQ ID NO: 1471090
ucgaauacgguauuaugua

SEQ ID NO: 1471092 - RNA, 19 nt, Artificial Sequence
  Description of Artificial Sequence: Synthetic oligonucleotide
  Sense strand starting at position 516 of SEQ ID NO: 1244184
uaccguauucgaucacguu

SEQ ID NO: 1471093 - RNA, 19 nt, Artificial Sequence
  Description of Artificial Sequence: Synthetic oligonucleotide
  Antisense strand to SEQ ID NO: 1471092
aacgugaucgaauacggua

SEQ ID NO: 1471094 - RNA, 19 nt, Artificial Sequence
  Description of Artificial Sequence: Synthetic oligonucleotide
  Sense strand starting at position 526 of SEQ ID NO: 1244184
gaucacguucuccaugagu

SEQ ID NO: 1471095 - RNA, 19 nt, Artificial Sequence
  Description of Artificial Sequence: Synthetic oligonucleotide
  Antisense strand to SEQ ID NO: 1471094
acucauggagaacgugauc

SEQ ID NO: 1471096 - RNA, 19 nt, Artificial Sequence
  Description of Artificial Sequence: Synthetic oligonucleotide
  Sense strand starting at position 539 of SEQ ID NO: 1244184
augaguagccucuaucagu

SEQ ID NO: 1471097 - RNA, 19 nt, Artificial Sequence
  Description of Artificial Sequence: Synthetic oligonucleotide
  Antisense strand to SEQ ID NO: 1471096
acugauagaggcuacucau

SEQ ID NO: 1471098 - RNA, 19 nt, Artificial Sequence
  Description of Artificial Sequence: Synthetic oligonucleotide
  Sense strand starting at position 603 of SEQ ID NO: 1244184
cgauaaucacgugaugacu

SEQ ID NO: 1471099 - RNA, 19 nt, Artificial Sequence
  Description of Artificial Sequence: Synthetic oligonucleotide
  Antisense strand to SEQ ID NO: 1471098
agucaucacgugauuaucg

SEQ ID NO: 1471100 - RNA, 19 nt, Artificial Sequence
  Description of Artificial Sequence: Synthetic oligonucleotide
  Sense strand starting at position 650 of SEQ ID NO: 1244184
uuccuuuauuguuugaaag

SEQ ID NO: 1471101 - RNA, 19 nt, Artificial Sequence
  Description of Artificial Sequence: Synthetic oligonucleotide
  Antisense strand to SEQ ID NO: 1471100
cuuucaaacaauaaaggaa

SEQ ID NO: 1471102 - RNA, 19 nt, Artificial Sequence
  Description of Artificial Sequence: Synthetic oligonucleotide
  Sense strand starting at position 896 of SEQ ID NO: 1244184
cuggaagacuuucccucua

SEQ ID NO: 1471103 - RNA, 19 nt, Artificial Sequence
  Description of Artificial Sequence: Synthetic oligonucleotide
  Antisense strand to SEQ ID NO: 1471102
uagagggaaagucuuccag

SEQ ID NO: 1471104 - RNA, 19 nt, Artificial Sequence
  Description of Artificial Sequence: Synthetic oligonucleotide
  Sense strand starting at position 959 of SEQ ID NO: 1244184
auggaagaaugauaauaga

SEQ ID NO: 1471105 - RNA, 19 nt, Artificial Sequence
  Description of Artificial Sequence: Synthetic oligonucleotide
  Antisense strand to SEQ ID NO: 1471104
ucuauuaucauucuuccau

SEQ ID NO: 1471106 - RNA, 19 nt, Artificial Sequence
  Description of Artificial Sequence: Synthetic oligonucleotide
  Sense strand starting at position 1034 of SEQ ID NO: 1244184
gcaacagaauuugacauca

SEQ ID NO: 1471107 - RNA, 19 nt, Artificial Sequence
  Description of Artificial Sequence: Synthetic oligonucleotide
  Antisense strand to SEQ ID NO: 1471106
ugaugucaaauucuguugc

SEQ ID NO: 1471108 - RNA, 19 nt, Artificial Sequence
  Description of Artificial Sequence: Synthetic oligonucleotide
  Sense strand starting at position 1078 of SEQ ID NO: 1244184
uuuagacuuuaggcaaaca

SEQ ID NO: 1471109 - RNA, 19 nt, Artificial Sequence
  Description of Artificial Sequence: Synthetic oligonucleotide
  Antisense strand to SEQ ID NO: 1471108
uguuugccuaaagucuaaa

SEQ ID NO: 1471110 - RNA, 19 nt, Artificial Sequence
  Description of Artificial Sequence: Synthetic oligonucleotide
  Sense strand starting at position 1107 of SEQ ID NO: 1244184
ugaagucauuagcuuauag

SEQ ID NO: 1471111 - RNA, 19 nt, Artificial Sequence
  Description of Artificial Sequence: Synthetic oligonucleotide
  Antisense strand to SEQ ID NO: 1471110
cuauaagcuaaugacuuca

SEQ ID NO: 1471112 - RNA, 19 nt, Artificial Sequence
  Description of Artificial Sequence: Synthetic oligonucleotide
  Sense strand starting at position 1117 of SEQ ID NO: 1244184
agcuuauagcaagaaaccu

SEQ ID NO: 1471113 - RNA, 19 nt, Artificial Sequence
  Description of Artificial Sequence: Synthetic oligonucleotide
  Antisense strand to SEQ ID NO: 1471112
agguuucuugcuauaagcu

SEQ ID NO: 1471114 - RNA, 19 nt, Artificial Sequence
  Description of Artificial Sequence: Synthetic oligonucleotide
  Sense strand starting at position 1237 of SEQ ID NO: 1244184
augggagaacguugcuaaa

SEQ ID NO: 1471115 - RNA, 19 nt, Artificial Sequence
  Description of Artificial Sequence: Synthetic oligonucleotide
  Antisense strand to SEQ ID NO: 1471114
uuuagcaacguucucccau

SEQ ID NO: 1471116 - RNA, 19 nt, Artificial Sequence
  Description of Artificial Sequence: Synthetic oligonucleotide
  Sense strand starting at position 1288 of SEQ ID NO: 1244184
ugaaauuuguaccagggau

SEQ ID NO: 1471117 - RNA, 19 nt, Artificial Sequence
  Description of Artificial Sequence: Synthetic oligonucleotide
  Antisense strand to SEQ ID NO: 1471116
aucccugguacaaauuuca

SEQ ID NO: 1471118 - RNA, 19 nt, Artificial Sequence
  Description of Artificial Sequence: Synthetic oligonucleotide
  Sense strand starting at position 1313 of SEQ ID NO: 1244184
ugagccuucccaugaucaa

SEQ ID NO: 1471119 - RNA, 19 nt, Artificial Sequence
  Description of Artificial Sequence: Synthetic oligonucleotide
  Antisense strand to SEQ ID NO: 1471118
uugaucaugggaaggcuca

SEQ ID NO: 1471120 - RNA, 19 nt, Artificial Sequence
  Description of Artificial Sequence: Synthetic oligonucleotide
  Sense strand starting at position 1640 of SEQ ID NO: 1244184
uuucuuauggcugaggagu

SEQ ID NO: 1471121 - RNA, 19 nt, Artificial Sequence
  Description of Artificial Sequence: Synthetic oligonucleotide
  Antisense strand to SEQ ID NO: 1471120
acuccucagccauaagaaa

SEQ ID NO: 1471122 - RNA, 19 nt, Artificial Sequence
  Description of Artificial Sequence: Synthetic oligonucleotide
  Sense strand starting at position 1733 of SEQ ID NO: 1244184
ccacaagauuaauaaagga

SEQ ID NO: 1471123 - RNA, 19 nt, Artificial Sequence
  Description of Artificial Sequence: Synthetic oligonucleotide
  Antisense strand to SEQ ID NO: 1471122
uccuuuauuaaucuugugg

SEQ ID NO: 1471124 - RNA, 19 nt, Artificial Sequence
  Description of Artificial Sequence: Synthetic oligonucleotide
  Sense strand starting at position 1749 of SEQ ID NO: 1244184
ggaagauucugagcccuua

SEQ ID NO: 1471125 - RNA, 19 nt, Artificial Sequence
  Description of Artificial Sequence: Synthetic oligonucleotide
  Antisense strand to SEQ ID NO: 1471124
uaagggcucagaaucuucc

SEQ ID NO: 1471126 - RNA, 19 nt, Artificial Sequence
  Description of Artificial Sequence: Synthetic oligonucleotide
  Sense strand starting at position 2014 of SEQ ID NO: 1244184
aagcgagucaggugaauaa

SEQ ID NO: 1471127 - RNA, 19 nt, Artificial Sequence
  Description of Artificial Sequence: Synthetic oligonucleotide
  Antisense strand to SEQ ID NO: 1471126
uuauucaccugacucgcuu

SEQ ID NO: 1471128 - RNA, 19 nt, Artificial Sequence
  Description of Artificial Sequence: Synthetic oligonucleotide
  Sense strand starting at position 2335 of SEQ ID NO: 1244184
ugccacugugaucagauaa

SEQ ID NO: 1471129 - RNA, 19 nt, Artificial Sequence
  Description of Artificial Sequence: Synthetic oligonucleotide
  Antisense strand to SEQ ID NO: 1471128
uuaucugaucacaguggca

SEQ ID NO: 1471130 - RNA, 19 nt, Artificial Sequence
  Description of Artificial Sequence: Synthetic oligonucleotide
  Sense strand starting at position 2342 of SEQ ID NO: 1244184
gugaucagauaauuccuua

SEQ ID NO: 1471131 - RNA, 19 nt, Artificial Sequence
  Description of Artificial Sequence: Synthetic oligonucleotide
  Antisense strand to SEQ ID NO: 1471130
uaaggaauuaucugaucac

SEQ ID NO: 1471132 - RNA, 19 nt, Artificial Sequence
  Description of Artificial Sequence: Synthetic oligonucleotide
  Sense strand starting at position 2374 of SEQ ID NO: 1244184
auacucaguugucuaaacu

SEQ ID NO: 1471133 - RNA, 19 nt, Artificial Sequence
  Description of Artificial Sequence: Synthetic oligonucleotide
  Antisense strand to SEQ ID NO: 1471132
aguuuagacaacugaguau

SEQ ID NO: 1471134 - RNA, 19 nt, Artificial Sequence
  Description of Artificial Sequence: Synthetic oligonucleotide
  Sense strand starting at position 2380 of SEQ ID NO: 1244184
aguugucuaaacugggauu

SEQ ID NO: 1471135 - RNA, 19 nt, Artificial Sequence
  Description of Artificial Sequence: Synthetic oligonucleotide
  Antisense strand to SEQ ID NO: 1471134
aaucccaguuuagacaacu

SEQ ID NO: 1471136 - RNA, 19 nt, Artificial Sequence
  Description of Artificial Sequence: Synthetic oligonucleotide
  Sense strand starting at position 2392 of SEQ ID NO: 1244184
ugggauuccuuagucagaa

SEQ ID NO: 1471137 - RNA, 19 nt, Artificial Sequence
  Description of Artificial Sequence: Synthetic oligonucleotide
  Antisense strand to SEQ ID NO: 1471136
uucugacuaaggaauccca

SEQ ID NO: 1471138 - RNA, 19 nt, Artificial Sequence
  Description of Artificial Sequence: Synthetic oligonucleotide
  Sense strand starting at position 2393 of SEQ ID NO: 1244184
gggauuccuuagucagaac

SEQ ID NO: 1471139 - RNA, 19 nt, Artificial Sequence
  Description of Artificial Sequence: Synthetic oligonucleotide
  Antisense strand to SEQ ID NO: 1471138
guucugacuaaggaauccc

SEQ ID NO: 1471140 - RNA, 19 nt, Artificial Sequence
  Description of Artificial Sequence: Synthetic oligonucleotide
  Sense strand starting at position 2571 of SEQ ID NO: 1244184
aaaggcucugagcaagagu

SEQ ID NO: 1471141 - RNA, 19 nt, Artificial Sequence
  Description of Artificial Sequence: Synthetic oligonucleotide
  Antisense strand to SEQ ID NO: 1471140
acucuugcucagagccuuu

SEQ ID NO: 1471142 - RNA, 19 nt, Artificial Sequence
  Description of Artificial Sequence: Synthetic oligonucleotide
  Sense strand starting at position 2663 of SEQ ID NO: 1244184
auugcuaguuaaucaugaa

SEQ ID NO: 1471143 - RNA, 19 nt, Artificial Sequence
  Description of Artificial Sequence: Synthetic oligonucleotide
  Antisense strand to SEQ ID NO: 1471142
uucaugauuaacuagcaau

SEQ ID NO: 1471144 - RNA, 19 nt, Artificial Sequence
  Description of Artificial Sequence: Synthetic oligonucleotide
  Sense strand starting at position 3167 of SEQ ID NO: 1244184
guuguuauuugagucccuu

SEQ ID NO: 1471145 - RNA, 19 nt, Artificial Sequence
  Description of Artificial Sequence: Synthetic oligonucleotide
  Antisense strand to SEQ ID NO: 1471144
aagggacucaaauaacaac

SEQ ID NO: 1471146 - RNA, 19 nt, Artificial Sequence
  Description of Artificial Sequence: Synthetic oligonucleotide
  Sense strand starting at position 3423 of SEQ ID NO: 1244184
uguagaaucucagucuuua

SEQ ID NO: 1471147 - RNA, 19 nt, Artificial Sequence
  Description of Artificial Sequence: Synthetic oligonucleotide
  Antisense strand to SEQ ID NO: 1471146
uaaagacugagauucuaca

SEQ ID NO: 1471148 - RNA, 19 nt, Artificial Sequence
  Description of Artificial Sequence: Synthetic oligonucleotide
  Sense strand starting at position 3427 of SEQ ID NO: 1244184
gaaucucagucuuuaguag

SEQ ID NO: 1471149 - RNA, 19 nt, Artificial Sequence
  Description of Artificial Sequence: Synthetic oligonucleotide
  Antisense strand to SEQ ID NO: 1471148
cuacuaaagacugagauuc

SEQ ID NO: 1471150 - RNA, 19 nt, Artificial Sequence
  Description of Artificial Sequence: Synthetic oligonucleotide
  Sense strand starting at position 3445 of SEQ ID NO: 1244184
gagguacaguccuuacuau

SEQ ID NO: 1471151 - RNA, 19 nt, Artificial Sequence
  Description of Artificial Sequence: Synthetic oligonucleotide
  Antisense strand to SEQ ID NO: 1471150
auaguaaggacuguaccuc

SEQ ID NO: 1471152 - RNA, 19 nt, Artificial Sequence
  Description of Artificial Sequence: Synthetic oligonucleotide
  Sense strand starting at position 3446 of SEQ ID NO: 1244184
agguacaguccuuacuaua

SEQ ID NO: 1471153 - RNA, 19 nt, Artificial Sequence
  Description of Artificial Sequence: Synthetic oligonucleotide
  Antisense strand to SEQ ID NO: 1471152
uauaguaaggacuguaccu

SEQ ID NO: 1471154 - RNA, 19 nt, Artificial Sequence
  Description of Artificial Sequence: Synthetic oligonucleotide
  Sense strand starting at position 3483 of SEQ ID NO: 1244184
gaguccagggucuacaauu

SEQ ID NO: 1471155 - RNA, 19 nt, Artificial Sequence
  Description of Artificial Sequence: Synthetic oligonucleotide
  Antisense strand to SEQ ID NO: 1471154
aauuguagacccuggacuc

SEQ ID NO: 1471156 - RNA, 19 nt, Artificial Sequence
  Description of Artificial Sequence: Synthetic oligonucleotide
  Sense strand starting at position 57 of SEQ ID NO: 1244185
cugaaacaagcaugauauc

SEQ ID NO: 1471157 - RNA, 19 nt, Artificial Sequence
  Description of Artificial Sequence: Synthetic oligonucleotide
  Antisense strand to SEQ ID NO: 1471156
gauaucaugcuuguuucag

SEQ ID NO: 1471158 - RNA, 19 nt, Artificial Sequence
  Description of Artificial Sequence: Synthetic oligonucleotide
  Sense strand starting at position 66 of SEQ ID NO: 1244185
gcaugauaucaauacuggu

SEQ ID NO: 1471159 - RNA, 19 nt, Artificial Sequence
  Description of Artificial Sequence: Synthetic oligonucleotide
  Antisense strand to SEQ ID NO: 1471158
accaguauugauaucaugc

SEQ ID NO: 1471160 - RNA, 19 nt, Artificial Sequence
  Description of Artificial Sequence: Synthetic oligonucleotide
  Sense strand starting at position 99 of SEQ ID NO: 1244185
gggagauguaucugggcag

SEQ ID NO: 1471161 - RNA, 19 nt, Artificial Sequence
  Description of Artificial Sequence: Synthetic oligonucleotide
  Antisense strand to SEQ ID NO: 1471160
cugcccagauacaucuccc

SEQ ID NO: 1471162 - RNA, 19 nt, Artificial Sequence
  Description of Artificial Sequence: Synthetic oligonucleotide
  Sense strand starting at position 102 of SEQ ID NO: 1244185
agauguaucugggcagaga

SEQ ID NO: 1471163 - RNA, 19 nt, Artificial Sequence
  Description of Artificial Sequence: Synthetic oligonucleotide
  Antisense strand to SEQ ID NO: 1471162
ucucugcccagauacaucu

SEQ ID NO: 1471164 - RNA, 19 nt, Artificial Sequence
  Description of Artificial Sequence: Synthetic oligonucleotide
  Sense strand starting at position 103 of SEQ ID NO: 1244185
gauguaucugggcagagac

SEQ ID NO: 1471165 - RNA, 19 nt, Artificial Sequence
  Description of Artificial Sequence: Synthetic oligonucleotide
  Antisense strand to SEQ ID NO: 1471164
gucucugcccagauacauc

SEQ ID NO: 1471166 - RNA, 19 nt, Artificial Sequence
  Description of Artificial Sequence: Synthetic oligonucleotide
  Sense strand starting at position 158 of SEQ ID NO: 1244185
uggcaauauuugucaugua

SEQ ID NO: 1471167 - RNA, 19 nt, Artificial Sequence
  Description of Artificial Sequence: Synthetic oligonucleotide
  Antisense strand to SEQ ID NO: 1471166
uacaugacaaauauugcca

SEQ ID NO: 1471168 - RNA, 19 nt, Artificial Sequence
  Description of Artificial Sequence: Synthetic oligonucleotide
  Sense strand starting at position 187 of SEQ ID NO: 1244185
agaaguaauagugguuuaa

SEQ ID NO: 1471169 - RNA, 19 nt, Artificial Sequence
  Description of Artificial Sequence: Synthetic oligonucleotide
  Antisense strand to SEQ ID NO: 1471168
uuaaaccacuauuacuucu

SEQ ID NO: 1471170 - RNA, 19 nt, Artificial Sequence
  Description of Artificial Sequence: Synthetic oligonucleotide
  Sense strand starting at position 191 of SEQ ID NO: 1244185
guaauagugguuuaaugga

SEQ ID NO: 1471171 - RNA, 19 nt, Artificial Sequence
  Description of Artificial Sequence: Synthetic oligonucleotide
  Antisense strand to SEQ ID NO: 1471170
uccauuaaaccacuauuac

SEQ ID NO: 1471172 - RNA, 19 nt, Artificial Sequence
  Description of Artificial Sequence: Synthetic oligonucleotide
  Sense strand starting at position 335 of SEQ ID NO: 1244185
guaaauguuauugagggca

SEQ ID NO: 1471173 - RNA, 19 nt, Artificial Sequence
  Description of Artificial Sequence: Synthetic oligonucleotide
  Antisense strand to SEQ ID NO: 1471172
ugcccucaauaacauuuac

SEQ ID NO: 1471174 - RNA, 19 nt, Artificial Sequence
  Description of Artificial Sequence: Synthetic oligonucleotide
  Sense strand starting at position 489 of SEQ ID NO: 1244185
aguuguuagguugagaauc

SEQ ID NO: 1471175 - RNA, 19 nt, Artificial Sequence
  Description of Artificial Sequence: Synthetic oligonucleotide
  Antisense strand to SEQ ID NO: 1471174
gauucucaaccuaacaacu

SEQ ID NO: 1471176 - RNA, 19 nt, Artificial Sequence
  Description of Artificial Sequence: Synthetic oligonucleotide
  Sense strand starting at position 699 of SEQ ID NO: 1244185
agucuuguauuucuguaca

SEQ ID NO: 1471177 - RNA, 19 nt, Artificial Sequence
  Description of Artificial Sequence: Synthetic oligonucleotide
  Antisense strand to SEQ ID NO: 1471176
uguacagaaauacaagacu

SEQ ID NO: 1471178 - RNA, 19 nt, Artificial Sequence
  Description of Artificial Sequence: Synthetic oligonucleotide
  Sense strand starting at position 767 of SEQ ID NO: 1244185
guaagugugcccuccucuu

SEQ ID NO: 1471179 - RNA, 19 nt, Artificial Sequence
  Description of Artificial Sequence: Synthetic oligonucleotide
  Antisense strand to SEQ ID NO: 1471178
aagaggagggcacacuuac

SEQ ID NO: 1471180 - RNA, 19 nt, Artificial Sequence
  Description of Artificial Sequence: Synthetic oligonucleotide
  Sense strand starting at position 1156 of SEQ ID NO: 1244185
acacuugcuggaugaagau

SEQ ID NO: 1471181 - RNA, 19 nt, Artificial Sequence
  Description of Artificial Sequence: Synthetic oligonucleotide
  Antisense strand to SEQ ID NO: 1471180
aucuucauccagcaagugu

SEQ ID NO: 1471182 - RNA, 19 nt, Artificial Sequence
  Description of Artificial Sequence: Synthetic oligonucleotide
  Sense strand starting at position 1168 of SEQ ID NO: 1244185
ugaagauugccaugaccau

SEQ ID NO: 1471183 - RNA, 19 nt, Artificial Sequence
  Description of Artificial Sequence: Synthetic oligonucleotide
  Antisense strand to SEQ ID NO: 1471182
auggucauggcaaucuuca

SEQ ID NO: 1471184 - RNA, 19 nt, Artificial Sequence
  Description of Artificial Sequence: Synthetic oligonucleotide
  Sense strand starting at position 1193 of SEQ ID NO: 1244185
acagauguuuaucuuugau

SEQ ID NO: 1471185 - RNA, 19 nt, Artificial Sequence
  Description of Artificial Sequence: Synthetic oligonucleotide
  Antisense strand to SEQ ID NO: 1471184
aucaaagauaaacaucugu

SEQ ID NO: 1471186 - RNA, 19 nt, Artificial Sequence
  Description of Artificial Sequence: Synthetic oligonucleotide
  Sense strand starting at position 1195 of SEQ ID NO: 1244185
agauguuuaucuuugauga

SEQ ID NO: 1471187 - RNA, 19 nt, Artificial Sequence
  Description of Artificial Sequence: Synthetic oligonucleotide
  Antisense strand to SEQ ID NO: 1471186
ucaucaaagauaaacaucu

SEQ ID NO: 1471188 - RNA, 19 nt, Artificial Sequence
  Description of Artificial Sequence: Synthetic oligonucleotide
  Sense strand starting at position 1196 of SEQ ID NO: 1244185
gauguuuaucuuugaugag

SEQ ID NO: 1471189 - RNA, 19 nt, Artificial Sequence
  Description of Artificial Sequence: Synthetic oligonucleotide
  Antisense strand to SEQ ID NO: 1471188
cucaucaaagauaaacauc

SEQ ID NO: 1471190 - RNA, 19 nt, Artificial Sequence
  Description of Artificial Sequence: Synthetic oligonucleotide
  Sense strand starting at position 1205 of SEQ ID NO: 1244185
cuuugaugagacuggguua

SEQ ID NO: 1471191 - RNA, 19 nt, Artificial Sequence
  Description of Artificial Sequence: Synthetic oligonucleotide
  Antisense strand to SEQ ID NO: 1471190
uaacccagucucaucaaag

SEQ ID NO: 1471192 - RNA, 19 nt, Artificial Sequence
  Description of Artificial Sequence: Synthetic oligonucleotide
  Sense strand starting at position 1206 of SEQ ID NO: 1244185
uuugaugagacuggguuau

SEQ ID NO: 1471193 - RNA, 19 nt, Artificial Sequence
  Description of Artificial Sequence: Synthetic oligonucleotide
  Antisense strand to SEQ ID NO: 1471192
auaacccagucucaucaaa

SEQ ID NO: 1471194 - RNA, 19 nt, Artificial Sequence
  Description of Artificial Sequence: Synthetic oligonucleotide
  Sense strand starting at position 1238 of SEQ ID NO: 1244185
aaguaacauggguaagcau

SEQ ID NO: 1471195 - RNA, 19 nt, Artificial Sequence
  Description of Artificial Sequence: Synthetic oligonucleotide
  Antisense strand to SEQ ID NO: 1471194
augcuuacccauguuacuu

SEQ ID NO: 1471196 - RNA, 19 nt, Artificial Sequence
  Description of Artificial Sequence: Synthetic oligonucleotide
  Sense strand starting at position 1265 of SEQ ID NO: 1244185
gccacauugugcuuaauuu

SEQ ID NO: 1471197 - RNA, 19 nt, Artificial Sequence
  Description of Artificial Sequence: Synthetic oligonucleotide
  Antisense strand to SEQ ID NO: 1471196
aaauuaagcacaauguggc

SEQ ID NO: 1471198 - RNA, 19 nt, Artificial Sequence
  Description of Artificial Sequence: Synthetic oligonucleotide
  Sense strand starting at position 1459 of SEQ ID NO: 1244185
auaguuugauucuuccaga

SEQ ID NO: 1471199 - RNA, 19 nt, Artificial Sequence
  Description of Artificial Sequence: Synthetic oligonucleotide
  Antisense strand to SEQ ID NO: 1471198
ucuggaagaaucaaacuau

SEQ ID NO: 1471200 - RNA, 19 nt, Artificial Sequence
  Description of Artificial Sequence: Synthetic oligonucleotide
  Sense strand starting at position 1953 of SEQ ID NO: 1244185
uugagcuguaucgaacaga

SEQ ID NO: 1471201 - RNA, 19 nt, Artificial Sequence
  Description of Artificial Sequence: Synthetic oligonucleotide
  Antisense strand to SEQ ID NO: 1471200
ucuguucgauacagcucaa

SEQ ID NO: 1471202 - RNA, 19 nt, Artificial Sequence
  Description of Artificial Sequence: Synthetic oligonucleotide
  Sense strand starting at position 1956 of SEQ ID NO: 1244185
agcuguaucgaacagacau

SEQ ID NO: 1471203 - RNA, 19 nt, Artificial Sequence
  Description of Artificial Sequence: Synthetic oligonucleotide
  Antisense strand to SEQ ID NO: 1471202
augucuguucgauacagcu

SEQ ID NO: 1471204 - RNA, 19 nt, Artificial Sequence
  Description of Artificial Sequence: Synthetic oligonucleotide
  Sense strand starting at position 1962 of SEQ ID NO: 1244185
aucgaacagacauggugau

SEQ ID NO: 1471205 - RNA, 19 nt, Artificial Sequence
  Description of Artificial Sequence: Synthetic oligonucleotide
  Antisense strand to SEQ ID NO: 1471204
aucaccaugucuguucgau

SEQ ID NO: 1471206 - RNA, 19 nt, Artificial Sequence
  Description of Artificial Sequence: Synthetic oligonucleotide
  Sense strand starting at position 2017 of SEQ ID NO: 1244185
gugacaagccuuuauauac

SEQ ID NO: 1471207 - RNA, 19 nt, Artificial Sequence
  Description of Artificial Sequence: Synthetic oligonucleotide
  Antisense strand to SEQ ID NO: 1471206
guauauaaaggcuugucac

SEQ ID NO: 1471208 - RNA, 19 nt, Artificial Sequence
  Description of Artificial Sequence: Synthetic oligonucleotide
  Sense strand starting at position 2257 of SEQ ID NO: 1244185
guugaagaacauugagcaa

SEQ ID NO: 1471209 - RNA, 19 nt, Artificial Sequence
  Description of Artificial Sequence: Synthetic oligonucleotide
  Antisense strand to SEQ ID NO: 1471208
uugcucaauguucuucaac

SEQ ID NO: 1471210 - RNA, 19 nt, Artificial Sequence
  Description of Artificial Sequence: Synthetic oligonucleotide
  Sense strand starting at position 2448 of SEQ ID NO: 1244185
acaauaagguucuuguaga

SEQ ID NO: 1471211 - RNA, 19 nt, Artificial Sequence
  Description of Artificial Sequence: Synthetic oligonucleotide
  Antisense strand to SEQ ID NO: 1471210
ucuacaagaaccuuauugu

SEQ ID NO: 1471212 - RNA, 19 nt, Artificial Sequence
  Description of Artificial Sequence: Synthetic oligonucleotide
  Sense strand starting at position 2660 of SEQ ID NO: 1244185
cuaauuaaugauggcauua

SEQ ID NO: 1471213 - RNA, 19 nt, Artificial Sequence
  Description of Artificial Sequence: Synthetic oligonucleotide
  Antisense strand to SEQ ID NO: 1471212
uaaugccaucauuaauuag

SEQ ID NO: 1471214 - RNA, 19 nt, Artificial Sequence
  Description of Artificial Sequence: Synthetic oligonucleotide
  Sense strand starting at position 2702 of SEQ ID NO: 1244185
aucauaaaguuauccugga

SEQ ID NO: 1471215 - RNA, 19 nt, Artificial Sequence
  Description of Artificial Sequence: Synthetic oligonucleotide
  Antisense strand to SEQ ID NO: 1471214
uccaggauaacuuuaugau

SEQ ID NO: 1471216 - RNA, 19 nt, Artificial Sequence
  Description of Artificial Sequence: Synthetic oligonucleotide
  Sense strand starting at position 2753 of SEQ ID NO: 1244185
gguuucugugaagaccaua

SEQ ID NO: 1471217 - RNA, 19 nt, Artificial Sequence
  Description of Artificial Sequence: Synthetic oligonucleotide
  Antisense strand to SEQ ID NO: 1471216
uauggucuucacagaaacc

SEQ ID NO: 1471218 - RNA, 19 nt, Artificial Sequence
  Description of Artificial Sequence: Synthetic oligonucleotide
  Sense strand starting at position 3019 of SEQ ID NO: 1244185
uggauauacuguguacaga

SEQ ID NO: 1471219 - RNA, 19 nt, Artificial Sequence
  Description of Artificial Sequence: Synthetic oligonucleotide
  Antisense strand to SEQ ID NO: 1471218
ucuguacacaguauaucca

SEQ ID NO: 1471220 - RNA, 19 nt, Artificial Sequence
  Description of Artificial Sequence: Synthetic oligonucleotide
  Sense strand starting at position 3022 of SEQ ID NO: 1244185
auauacuguguacagaauu

SEQ ID NO: 1471221 - RNA, 19 nt, Artificial Sequence
  Description of Artificial Sequence: Synthetic oligonucleotide
  Antisense strand to SEQ ID NO: 1471220
aauucuguacacaguauau

SEQ ID NO: 1471222 - RNA, 19 nt, Artificial Sequence
  Description of Artificial Sequence: Synthetic oligonucleotide
  Sense strand starting at position 3054 of SEQ ID NO: 1244185
ugucuagugaaguaaauug

SEQ ID NO: 1471223 - RNA, 19 nt, Artificial Sequence
  Description of Artificial Sequence: Synthetic oligonucleotide
  Antisense strand to SEQ ID NO: 1471222
caauuuacuucacuagaca

SEQ ID NO: 1471224 - RNA, 19 nt, Artificial Sequence
  Description of Artificial Sequence: Synthetic oligonucleotide
  Sense strand starting at position 3059 of SEQ ID NO: 1244185
agugaaguaaauugggauu

SEQ ID NO: 1471225 - RNA, 19 nt, Artificial Sequence
  Description of Artificial Sequence: Synthetic oligonucleotide
  Antisense strand to SEQ ID NO: 1471224
aaucccaauuuacuucacu

SEQ ID NO: 1471226 - RNA, 19 nt, Artificial Sequence
  Description of Artificial Sequence: Synthetic oligonucleotide
  Sense strand starting at position 3104 of SEQ ID NO: 1244185
acccauaggcuaugacauu

SEQ ID NO: 1471227 - RNA, 19 nt, Artificial Sequence
  Description of Artificial Sequence: Synthetic oligonucleotide
  Antisense strand to SEQ ID NO: 1471226
aaugucauagccuaugggu

SEQ ID NO: 1471228 - RNA, 19 nt, Artificial Sequence
  Description of Artificial Sequence: Synthetic oligonucleotide
  Sense strand starting at position 3220 of SEQ ID NO: 1244185
uaggaauggugguuauuau

SEQ ID NO: 1471229 - RNA, 19 nt, Artificial Sequence
  Description of Artificial Sequence: Synthetic oligonucleotide
  Antisense strand to SEQ ID NO: 1471228
auaauaaccaccauuccua

SEQ ID NO: 1471230 - RNA, 19 nt, Artificial Sequence
  Description of Artificial Sequence: Synthetic oligonucleotide
  Sense strand starting at position 3221 of SEQ ID NO: 1244185
aggaauggugguuauuauu

SEQ ID NO: 1471231 - RNA, 19 nt, Artificial Sequence
  Description of Artificial Sequence: Synthetic oligonucleotide
  Antisense strand to SEQ ID NO: 1471230
aauaauaaccaccauuccu

SEQ ID NO: 1471232 - RNA, 19 nt, Artificial Sequence
  Description of Artificial Sequence: Synthetic oligonucleotide
  Sense strand starting at position 3868 of SEQ ID NO: 1244185
aguuuauugcugcacauuu

SEQ ID NO: 1471233 - RNA, 19 nt, Artificial Sequence
  Description of Artificial Sequence: Synthetic oligonucleotide
  Antisense strand to SEQ ID NO: 1471232
aaaugugcagcaauaaacu

SEQ ID NO: 1471234 - RNA, 19 nt, Artificial Sequence
  Description of Artificial Sequence: Synthetic oligonucleotide
  Sense strand starting at position 3905 of SEQ ID NO: 1244185
gaaauaguuucuguaggga

SEQ ID NO: 1471235 - RNA, 19 nt, Artificial Sequence
  Description of Artificial Sequence: Synthetic oligonucleotide
  Antisense strand to SEQ ID NO: 1471234
ucccuacagaaacuauuuc

SEQ ID NO: 1471236 - RNA, 19 nt, Artificial Sequence
  Description of Artificial Sequence: Synthetic oligonucleotide
  Sense strand starting at position 8 of SEQ ID NO: 1244186
acagcaucccagggaauaa

SEQ ID NO: 1471237 - RNA, 19 nt, Artificial Sequence
  Description of Artificial Sequence: Synthetic oligonucleotide
  Antisense strand to SEQ ID NO: 1471236
uuauucccugggaugcugu

SEQ ID NO: 1471238 - RNA, 19 nt, Artificial Sequence
  Description of Artificial Sequence: Synthetic oligonucleotide
  Sense strand starting at position 42 of SEQ ID NO: 1244186
gcugccguggcuguaaaua

SEQ ID NO: 1471239 - RNA, 19 nt, Artificial Sequence
  Description of Artificial Sequence: Synthetic oligonucleotide
  Antisense strand to SEQ ID NO: 1471238
uauuuacagccacggcagc

SEQ ID NO: 1471240 - RNA, 19 nt, Artificial Sequence
  Description of Artificial Sequence: Synthetic oligonucleotide
  Sense strand starting at position 165 of SEQ ID NO: 1244186
aguggcuuugacuaagauu

SEQ ID NO: 1471241 - RNA, 19 nt, Artificial Sequence
  Description of Artificial Sequence: Synthetic oligonucleotide
  Antisense strand to SEQ ID NO: 1471240
aaucuuagucaaagccacu

SEQ ID NO: 1471242 - RNA, 19 nt, Artificial Sequence
  Description of Artificial Sequence: Synthetic oligonucleotide
  Sense strand starting at position 260 of SEQ ID NO: 1244186
uaccuauaucugggagagu

SEQ ID NO: 1471243 - RNA, 19 nt, Artificial Sequence
  Description of Artificial Sequence: Synthetic oligonucleotide
  Antisense strand to SEQ ID NO: 1471242
acucucccagauauaggua

SEQ ID NO: 1471244 - RNA, 19 nt, Artificial Sequence
  Description of Artificial Sequence: Synthetic oligonucleotide
  Sense strand starting at position 683 of SEQ ID NO: 1244186
cagucacaucaugaguuga

SEQ ID NO: 1471245 - RNA, 19 nt, Artificial Sequence
  Description of Artificial Sequence: Synthetic oligonucleotide
  Antisense strand to SEQ ID NO: 1471244
ucaacucaugaugugacug

SEQ ID NO: 1471246 - RNA, 19 nt, Artificial Sequence
  Description of Artificial Sequence: Synthetic oligonucleotide
  Sense strand starting at position 717 of SEQ ID NO: 1244186
caaauaucgugauccauag

SEQ ID NO: 1471247 - RNA, 19 nt, Artificial Sequence
  Description of Artificial Sequence: Synthetic oligonucleotide
  Antisense strand to SEQ ID NO: 1471246
cuauggaucacgauauuug

SEQ ID NO: 1471248 - RNA, 19 nt, Artificial Sequence
  Description of Artificial Sequence: Synthetic oligonucleotide
  Sense strand starting at position 774 of SEQ ID NO: 1244186
ucugaauugcauuagauuc

SEQ ID NO: 1471249 - RNA, 19 nt, Artificial Sequence
  Description of Artificial Sequence: Synthetic oligonucleotide
  Antisense strand to SEQ ID NO: 1471248
gaaucuaaugcaauucaga

SEQ ID NO: 1471250 - RNA, 19 nt, Artificial Sequence
  Description of Artificial Sequence: Synthetic oligonucleotide
  Sense strand starting at position 805 of SEQ ID NO: 1244186
agaacacccuaugugaauu

SEQ ID NO: 1471251 - RNA, 19 nt, Artificial Sequence
  Description of Artificial Sequence: Synthetic oligonucleotide
  Antisense strand to SEQ ID NO: 1471250
aauucacauaggguguucu

SEQ ID NO: 1471252 - RNA, 19 nt, Artificial Sequence
  Description of Artificial Sequence: Synthetic oligonucleotide
  Sense strand starting at position 966 of SEQ ID NO: 1244186
gcuagucucgcauugucaa

SEQ ID NO: 1471253 - RNA, 19 nt, Artificial Sequence
  Description of Artificial Sequence: Synthetic oligonucleotide
  Antisense strand to SEQ ID NO: 1471252
uugacaaugcgagacuagc

SEQ ID NO: 1471254 - RNA, 19 nt, Artificial Sequence
  Description of Artificial Sequence: Synthetic oligonucleotide
  Sense strand starting at position 1331 of SEQ ID NO: 1244186
aggugauuaucacuguaaa

SEQ ID NO: 1471255 - RNA, 19 nt, Artificial Sequence
  Description of Artificial Sequence: Synthetic oligonucleotide
  Antisense strand to SEQ ID NO: 1471254
uuuacagugauaaucaccu

SEQ ID NO: 1471256 - RNA, 19 nt, Artificial Sequence
  Description of Artificial Sequence: Synthetic oligonucleotide
  Sense strand starting at position 1445 of SEQ ID NO: 1244186
ugcuguaaucgcucuguga

SEQ ID NO: 1471257 - RNA, 19 nt, Artificial Sequence
  Description of Artificial Sequence: Synthetic oligonucleotide
  Antisense strand to SEQ ID NO: 1471256
ucacagagcgauuacagca

SEQ ID NO: 1471258 - RNA, 19 nt, Artificial Sequence
  Description of Artificial Sequence: Synthetic oligonucleotide
  Sense strand starting at position 1446 of SEQ ID NO: 1244186
gcuguaaucgcucugugaa

SEQ ID NO: 1471259 - RNA, 19 nt, Artificial Sequence
  Description of Artificial Sequence: Synthetic oligonucleotide
  Antisense strand to SEQ ID NO: 1471258
uucacagagcgauuacagc

SEQ ID NO: 1471260 - RNA, 19 nt, Artificial Sequence
  Description of Artificial Sequence: Synthetic oligonucleotide
  Sense strand starting at position 1547 of SEQ ID NO: 1244186
gcaccuuauccagguagga

SEQ ID NO: 1471261 - RNA, 19 nt, Artificial Sequence
  Description of Artificial Sequence: Synthetic oligonucleotide
  Antisense strand to SEQ ID NO: 1471260
uccuaccuggauaaggugc

SEQ ID NO: 1471262 - RNA, 19 nt, Artificial Sequence
  Description of Artificial Sequence: Synthetic oligonucleotide
  Sense strand starting at position 1560 of SEQ ID NO: 1244186
guaggaagcuaaucuauca

SEQ ID NO: 1471263 - RNA, 19 nt, Artificial Sequence
  Description of Artificial Sequence: Synthetic oligonucleotide
  Antisense strand to SEQ ID NO: 1471262
ugauagauuagcuuccuac

SEQ ID NO: 1471264 - RNA, 19 nt, Artificial Sequence
  Description of Artificial Sequence: Synthetic oligonucleotide
  Sense strand starting at position 1624 of SEQ ID NO: 1244186
ccaucauugcccgagagaa

SEQ ID NO: 1471265 - RNA, 19 nt, Artificial Sequence
  Description of Artificial Sequence: Synthetic oligonucleotide
  Antisense strand to SEQ ID NO: 1471264
uucucucgggcaaugaugg

SEQ ID NO: 1471266 - RNA, 19 nt, Artificial Sequence
  Description of Artificial Sequence: Synthetic oligonucleotide
  Sense strand starting at position 1626 of SEQ ID NO: 1244186
aucauugcccgagagaaua

SEQ ID NO: 1471267 - RNA, 19 nt, Artificial Sequence
  Description of Artificial Sequence: Synthetic oligonucleotide
  Antisense strand to SEQ ID NO: 1471266
uauucucucgggcaaugau

SEQ ID NO: 1471268 - RNA, 19 nt, Artificial Sequence
  Description of Artificial Sequence: Synthetic oligonucleotide
  Sense strand starting at position 1958 of SEQ ID NO: 1244186
uguuguuggagagauccau

SEQ ID NO: 1471269 - RNA, 19 nt, Artificial Sequence
  Description of Artificial Sequence: Synthetic oligonucleotide
  Antisense strand to SEQ ID NO: 1471268
auggaucucuccaacaaca

SEQ ID NO: 1471270 - RNA, 19 nt, Artificial Sequence
  Description of Artificial Sequence: Synthetic oligonucleotide
  Sense strand starting at position 2036 of SEQ ID NO: 1244186
acuuauauaggcugcaaga

SEQ ID NO: 1471271 - RNA, 19 nt, Artificial Sequence
  Description of Artificial Sequence: Synthetic oligonucleotide
  Antisense strand to SEQ ID NO: 1471270
ucuugcagccuauauaagu

SEQ ID NO: 1471272 - RNA, 19 nt, Artificial Sequence
  Description of Artificial Sequence: Synthetic oligonucleotide
  Sense strand starting at position 2049 of SEQ ID NO: 1244186
gcaagaugggugucgcagu

SEQ ID NO: 1471273 - RNA, 19 nt, Artificial Sequence
  Description of Artificial Sequence: Synthetic oligonucleotide
  Antisense strand to SEQ ID NO: 1471272
acugcgacacccaucuugc

SEQ ID NO: 1471274 - RNA, 19 nt, Artificial Sequence
  Description of Artificial Sequence: Synthetic oligonucleotide
  Sense strand starting at position 2337 of SEQ ID NO: 1244186
gcugaauggauacguuaaa

SEQ ID NO: 1471275 - RNA, 19 nt, Artificial Sequence
  Description of Artificial Sequence: Synthetic oligonucleotide
  Antisense strand to SEQ ID NO: 1471274
uuuaacguauccauucagc

SEQ ID NO: 1471276 - RNA, 19 nt, Artificial Sequence
  Description of Artificial Sequence: Synthetic oligonucleotide
  Sense strand starting at position 2338 of SEQ ID NO: 1244186
cugaauggauacguuaaau

SEQ ID NO: 1471277 - RNA, 19 nt, Artificial Sequence
  Description of Artificial Sequence: Synthetic oligonucleotide
  Antisense strand to SEQ ID NO: 1471276
auuuaacguauccauucag

SEQ ID NO: 1471278 - RNA, 19 nt, Artificial Sequence
  Description of Artificial Sequence: Synthetic oligonucleotide
  Sense strand starting at position 2474 of SEQ ID NO: 1244186
uccagucaugaucaaguau

SEQ ID NO: 1471279 - RNA, 19 nt, Artificial Sequence
  Description of Artificial Sequence: Synthetic oligonucleotide
  Antisense strand to SEQ ID NO: 1471278
auacuugaucaugacugga

SEQ ID NO: 1471280 - RNA, 19 nt, Artificial Sequence
  Description of Artificial Sequence: Synthetic oligonucleotide
  Sense strand starting at position 2526 of SEQ ID NO: 1244186
gugaaaugcacuggugaaa

SEQ ID NO: 1471281 - RNA, 19 nt, Artificial Sequence
  Description of Artificial Sequence: Synthetic oligonucleotide
  Antisense strand to SEQ ID NO: 1471280
uuucaccagugcauuucac

SEQ ID NO: 1471282 - RNA, 19 nt, Artificial Sequence
  Description of Artificial Sequence: Synthetic oligonucleotide
  Sense strand starting at position 2538 of SEQ ID NO: 1244186
ggugaaagguggagaauaa

SEQ ID NO: 1471283 - RNA, 19 nt, Artificial Sequence
  Description of Artificial Sequence: Synthetic oligonucleotide
  Antisense strand to SEQ ID NO: 1471282
uuauucuccaccuuucacc

SEQ ID NO: 1471284 - RNA, 19 nt, Artificial Sequence
  Description of Artificial Sequence: Synthetic oligonucleotide
  Sense strand starting at position 2779 of SEQ ID NO: 1244186
acagauauugccuguaaug

SEQ ID NO: 1471285 - RNA, 19 nt, Artificial Sequence
  Description of Artificial Sequence: Synthetic oligonucleotide
  Antisense strand to SEQ ID NO: 1471284
cauuacaggcaauaucugu

SEQ ID NO: 1471286 - RNA, 19 nt, Artificial Sequence
  Description of Artificial Sequence: Synthetic oligonucleotide
  Sense strand starting at position 2781 of SEQ ID NO: 1244186
agauauugccuguaauggu

SEQ ID NO: 1471287 - RNA, 19 nt, Artificial Sequence
  Description of Artificial Sequence: Synthetic oligonucleotide
  Antisense strand to SEQ ID NO: 1471286
accauuacaggcaauaucu

SEQ ID NO: 1471288 - RNA, 19 nt, Artificial Sequence
  Description of Artificial Sequence: Synthetic oligonucleotide
  Sense strand starting at position 2805 of SEQ ID NO: 1244186
aauaaauguguugacuagu

SEQ ID NO: 1471289 - RNA, 19 nt, Artificial Sequence
  Description of Artificial Sequence: Synthetic oligonucleotide
  Antisense strand to SEQ ID NO: 1471288
acuagucaacacauuuauu

SEQ ID NO: 1471290 - RNA, 19 nt, Artificial Sequence
  Description of Artificial Sequence: Synthetic oligonucleotide
  Sense strand starting at position 2808 of SEQ ID NO: 1244186
aaauguguugacuaguuga

SEQ ID NO: 1471291 - RNA, 19 nt, Artificial Sequence
  Description of Artificial Sequence: Synthetic oligonucleotide
  Antisense strand to SEQ ID NO: 1471290
ucaacuagucaacacauuu

SEQ ID NO: 1471292 - RNA, 19 nt, Artificial Sequence
  Description of Artificial Sequence: Synthetic oligonucleotide
  Sense strand starting at position 2821 of SEQ ID NO: 1244186
aguugaauggauuguguaa

SEQ ID NO: 1471293 - RNA, 19 nt, Artificial Sequence
  Description of Artificial Sequence: Synthetic oligonucleotide
  Antisense strand to SEQ ID NO: 1471292
uuacacaauccauucaacu

SEQ ID NO: 1471294 - RNA, 19 nt, Artificial Sequence
  Description of Artificial Sequence: Synthetic oligonucleotide
  Sense strand starting at position 2918 of SEQ ID NO: 1244186
aguuuaagaggcuagugaa

SEQ ID NO: 1471295 - RNA, 19 nt, Artificial Sequence
  Description of Artificial Sequence: Synthetic oligonucleotide
  Antisense strand to SEQ ID NO: 1471294
uucacuagccucuuaaacu

SEQ ID NO: 1471296 - RNA, 19 nt, Artificial Sequence
  Description of Artificial Sequence: Synthetic oligonucleotide
  Sense strand starting at position 2944 of SEQ ID NO: 1244186
aguugacugcuaugaugaa

SEQ ID NO: 1471297 - RNA, 19 nt, Artificial Sequence
  Description of Artificial Sequence: Synthetic oligonucleotide
  Antisense strand to SEQ ID NO: 1471296
uucaucauagcagucaacu

SEQ ID NO: 1471298 - RNA, 19 nt, Artificial Sequence
  Description of Artificial Sequence: Synthetic oligonucleotide
  Sense strand starting at position 3208 of SEQ ID NO: 1244186
aguuguagauaccuggaaa

SEQ ID NO: 1471299 - RNA, 19 nt, Artificial Sequence
  Description of Artificial Sequence: Synthetic oligonucleotide
  Antisense strand to SEQ ID NO: 1471298
uuuccagguaucuacaacu

SEQ ID NO: 1471300 - RNA, 19 nt, Artificial Sequence
  Description of Artificial Sequence: Synthetic oligonucleotide
  Sense strand starting at position 3209 of SEQ ID NO: 1244186
guuguagauaccuggaaac

SEQ ID NO: 1471301 - RNA, 19 nt, Artificial Sequence
  Description of Artificial Sequence: Synthetic oligonucleotide
  Antisense strand to SEQ ID NO: 1471300
guuuccagguaucuacaac

SEQ ID NO: 1471302 - RNA, 19 nt, Artificial Sequence
  Description of Artificial Sequence: Synthetic oligonucleotide
  Sense strand starting at position 3220 of SEQ ID NO: 1244186
cuggaaaccgaguaguaca

SEQ ID NO: 1471303 - RNA, 19 nt, Artificial Sequence
  Description of Artificial Sequence: Synthetic oligonucleotide
  Antisense strand to SEQ ID NO: 1471302
uguacuacucgguuuccag

SEQ ID NO: 1471304 - RNA, 19 nt, Artificial Sequence
  Description of Artificial Sequence: Synthetic oligonucleotide
  Sense strand starting at position 3331 of SEQ ID NO: 1244186
uugagaugauggcccaauu

SEQ ID NO: 1471305 - RNA, 19 nt, Artificial Sequence
  Description of Artificial Sequence: Synthetic oligonucleotide
  Antisense strand to SEQ ID NO: 1471304
aauugggccaucaucucaa

SEQ ID NO: 1471306 - RNA, 19 nt, Artificial Sequence
  Description of Artificial Sequence: Synthetic oligonucleotide
  Sense strand starting at position 3341 of SEQ ID NO: 1244186
ggcccaauucucuacaugu

SEQ ID NO: 1471307 - RNA, 19 nt, Artificial Sequence
  Description of Artificial Sequence: Synthetic oligonucleotide
  Antisense strand to SEQ ID NO: 1471306
acauguagagaauugggcc

SEQ ID NO: 1471308 - RNA, 19 nt, Artificial Sequence
  Description of Artificial Sequence: Synthetic oligonucleotide
  Sense strand starting at position 3417 of SEQ ID NO: 1244186
guaggaaauuuagaagaug

SEQ ID NO: 1471309 - RNA, 19 nt, Artificial Sequence
  Description of Artificial Sequence: Synthetic oligonucleotide
  Antisense strand to SEQ ID NO: 1471308
caucuucuaaauuuccuac

SEQ ID NO: 1471310 - RNA, 19 nt, Artificial Sequence
  Description of Artificial Sequence: Synthetic oligonucleotide
  Sense strand starting at position 3563 of SEQ ID NO: 1244186
uuuaauaauuggguacaga

SEQ ID NO: 1471311 - RNA, 19 nt, Artificial Sequence
  Description of Artificial Sequence: Synthetic oligonucleotide
  Antisense strand to SEQ ID NO: 1471310
ucuguacccaauuauuaaa

SEQ ID NO: 1471312 - RNA, 19 nt, Artificial Sequence
  Description of Artificial Sequence: Synthetic oligonucleotide
  Sense strand starting at position 3587 of SEQ ID NO: 1244186
gauuguggauucuucgaaa

SEQ ID NO: 1471313 - RNA, 19 nt, Artificial Sequence
  Description of Artificial Sequence: Synthetic oligonucleotide
  Antisense strand to SEQ ID NO: 1471312
uuucgaagaauccacaauc

SEQ ID NO: 1471314 - RNA, 19 nt, Artificial Sequence
  Description of Artificial Sequence: Synthetic oligonucleotide
  Sense strand starting at position 3644 of SEQ ID NO: 1244186
uguauuugaugauaggaaa

SEQ ID NO: 1471315 - RNA, 19 nt, Artificial Sequence
  Description of Artificial Sequence: Synthetic oligonucleotide
  Antisense strand to SEQ ID NO: 1471314
uuuccuaucaucaaauaca

SEQ ID NO: 1471316 - RNA, 19 nt, Artificial Sequence
  Description of Artificial Sequence: Synthetic oligonucleotide
  Sense strand starting at position 64 of SEQ ID NO: 1244187
ugucaaucuccaggaugac

SEQ ID NO: 1471317 - RNA, 19 nt, Artificial Sequence
  Description of Artificial Sequence: Synthetic oligonucleotide
  Antisense strand to SEQ ID NO: 1471316
gucauccuggagauugaca

SEQ ID NO: 1471318 - RNA, 19 nt, Artificial Sequence
  Description of Artificial Sequence: Synthetic oligonucleotide
  Sense strand starting at position 309 of SEQ ID NO: 1244187
uguguuaggccucaaucaa

SEQ ID NO: 1471319 - RNA, 19 nt, Artificial Sequence
  Description of Artificial Sequence: Synthetic oligonucleotide
  Antisense strand to SEQ ID NO: 1471318
uugauugaggccuaacaca

SEQ ID NO: 1471320 - RNA, 19 nt, Artificial Sequence
  Description of Artificial Sequence: Synthetic oligonucleotide
  Sense strand starting at position 451 of SEQ ID NO: 1244187
ccucuaaacuguccuguga

SEQ ID NO: 1471321 - RNA, 19 nt, Artificial Sequence
  Description of Artificial Sequence: Synthetic oligonucleotide
  Antisense strand to SEQ ID NO: 1471320
ucacaggacaguuuagagg

SEQ ID NO: 1471322 - RNA, 19 nt, Artificial Sequence
  Description of Artificial Sequence: Synthetic oligonucleotide
  Sense strand starting at position 598 of SEQ ID NO: 1244187
gagugcauuucugaggaac

SEQ ID NO: 1471323 - RNA, 19 nt, Artificial Sequence
  Description of Artificial Sequence: Synthetic oligonucleotide
  Antisense strand to SEQ ID NO: 1471322
guuccucagaaaugcacuc

SEQ ID NO: 1471324 - RNA, 19 nt, Artificial Sequence
  Description of Artificial Sequence: Synthetic oligonucleotide
  Sense strand starting at position 627 of SEQ ID NO: 1244187
gaacaucuuugguucguca

SEQ ID NO: 1471325 - RNA, 19 nt, Artificial Sequence
  Description of Artificial Sequence: Synthetic oligonucleotide
  Antisense strand to SEQ ID NO: 1471324
ugacgaaccaaagauguuc

SEQ ID NO: 1471326 - RNA, 19 nt, Artificial Sequence
  Description of Artificial Sequence: Synthetic oligonucleotide
  Sense strand starting at position 746 of SEQ ID NO: 1244187
aucacuuugcuagagcuga

SEQ ID NO: 1471327 - RNA, 19 nt, Artificial Sequence
  Description of Artificial Sequence: Synthetic oligonucleotide
  Antisense strand to SEQ ID NO: 1471326
ucagcucuagcaaagugau

SEQ ID NO: 1471328 - RNA, 19 nt, Artificial Sequence
  Description of Artificial Sequence: Synthetic oligonucleotide
  Sense strand starting at position 821 of SEQ ID NO: 1244187
ugucuaaacguuuauauuc

SEQ ID NO: 1471329 - RNA, 19 nt, Artificial Sequence
  Description of Artificial Sequence: Synthetic oligonucleotide
  Antisense strand to SEQ ID NO: 1471328
gaauauaaacguuuagaca

SEQ ID NO: 1471330 - RNA, 19 nt, Artificial Sequence
  Description of Artificial Sequence: Synthetic oligonucleotide
  Sense strand starting at position 1122 of SEQ ID NO: 1244187
ccugucauguuuccagaua

SEQ ID NO: 1471331 - RNA, 19 nt, Artificial Sequence
  Description of Artificial Sequence: Synthetic oligonucleotide
  Antisense strand to SEQ ID NO: 1471330
uaucuggaaacaugacagg

SEQ ID NO: 1471332 - RNA, 19 nt, Artificial Sequence
  Description of Artificial Sequence: Synthetic oligonucleotide
  Sense strand starting at position 1134 of SEQ ID NO: 1244187
ccagauaacucaguagguu

SEQ ID NO: 1471333 - RNA, 19 nt, Artificial Sequence
  Description of Artificial Sequence: Synthetic oligonucleotide
  Antisense strand to SEQ ID NO: 1471332
aaccuacugaguuaucugg

SEQ ID NO: 1471334 - RNA, 19 nt, Artificial Sequence
  Description of Artificial Sequence: Synthetic oligonucleotide
  Sense strand starting at position 1155 of SEQ ID NO: 1244187
gauuauagagaucgaguca

SEQ ID NO: 1471335 - RNA, 19 nt, Artificial Sequence
  Description of Artificial Sequence: Synthetic oligonucleotide
  Antisense strand to SEQ ID NO: 1471334
ugacucgaucucuauaauc

SEQ ID NO: 1471336 - RNA, 19 nt, Artificial Sequence
  Description of Artificial Sequence: Synthetic oligonucleotide
  Sense strand starting at position 1181 of SEQ ID NO: 1244187
cauaacugucuggaaagca

SEQ ID NO: 1471337 - RNA, 19 nt, Artificial Sequence
  Description of Artificial Sequence: Synthetic oligonucleotide
  Antisense strand to SEQ ID NO: 1471336
ugcuuuccagacaguuaug

SEQ ID NO: 1471338 - RNA, 19 nt, Artificial Sequence
  Description of Artificial Sequence: Synthetic oligonucleotide
  Sense strand starting at position 1263 of SEQ ID NO: 1244187
ggaguuguggcaugagaaa

SEQ ID NO: 1471339 - RNA, 19 nt, Artificial Sequence
  Description of Artificial Sequence: Synthetic oligonucleotide
  Antisense strand to SEQ ID NO: 1471338
uuucucaugccacaacucc

SEQ ID NO: 1471340 - RNA, 19 nt, Artificial Sequence
  Description of Artificial Sequence: Synthetic oligonucleotide
  Sense strand starting at position 1294 of SEQ ID NO: 1244187
uagagacucuugguaguca

SEQ ID NO: 1471341 - RNA, 19 nt, Artificial Sequence
  Description of Artificial Sequence: Synthetic oligonucleotide
  Antisense strand to SEQ ID NO: 1471340
ugacuaccaagagucucua

SEQ ID NO: 1471342 - RNA, 19 nt, Artificial Sequence
  Description of Artificial Sequence: Synthetic oligonucleotide
  Sense strand starting at position 1298 of SEQ ID NO: 1244187
gacucuugguagucaaaca

SEQ ID NO: 1471343 - RNA, 19 nt, Artificial Sequence
  Description of Artificial Sequence: Synthetic oligonucleotide
  Antisense strand to SEQ ID NO: 1471342
uguuugacuaccaagaguc

SEQ ID NO: 1471344 - RNA, 19 nt, Artificial Sequence
  Description of Artificial Sequence: Synthetic oligonucleotide
  Sense strand starting at position 2113 of SEQ ID NO: 1244187
cuuaguuaucucugaucuc

SEQ ID NO: 1471345 - RNA, 19 nt, Artificial Sequence
  Description of Artificial Sequence: Synthetic oligonucleotide
  Antisense strand to SEQ ID NO: 1471344
gagaucagagauaacuaag

SEQ ID NO: 1471346 - RNA, 19 nt, Artificial Sequence
  Description of Artificial Sequence: Synthetic oligonucleotide
  Sense strand starting at position 2203 of SEQ ID NO: 1244187
acagcauucugccugagac

SEQ ID NO: 1471347 - RNA, 19 nt, Artificial Sequence
  Description of Artificial Sequence: Synthetic oligonucleotide
  Antisense strand to SEQ ID NO: 1471346
gucucaggcagaaugcugu

SEQ ID NO: 1471348 - RNA, 19 nt, Artificial Sequence
  Description of Artificial Sequence: Synthetic oligonucleotide
  Sense strand starting at position 2204 of SEQ ID NO: 1244187
cagcauucugccugagacu

SEQ ID NO: 1471349 - RNA, 19 nt, Artificial Sequence
  Description of Artificial Sequence: Synthetic oligonucleotide
  Antisense strand to SEQ ID NO: 1471348
agucucaggcagaaugcug

SEQ ID NO: 1471350 - RNA, 19 nt, Artificial Sequence
  Description of Artificial Sequence: Synthetic oligonucleotide
  Sense strand starting at position 2431 of SEQ ID NO: 1244187
cugggauguccuggauccu

SEQ ID NO: 1471351 - RNA, 19 nt, Artificial Sequence
  Description of Artificial Sequence: Synthetic oligonucleotide
  Antisense strand to SEQ ID NO: 1471350
aggauccaggacaucccag

SEQ ID NO: 1471352 - RNA, 19 nt, Artificial Sequence
  Description of Artificial Sequence: Synthetic oligonucleotide
  Sense strand starting at position 2432 of SEQ ID NO: 1244187
ugggauguccuggauccuu

SEQ ID NO: 1471353 - RNA, 19 nt, Artificial Sequence
  Description of Artificial Sequence: Synthetic oligonucleotide
  Antisense strand to SEQ ID NO: 1471352
aaggauccaggacauccca

SEQ ID NO: 1471354 - RNA, 19 nt, Artificial Sequence
  Description of Artificial Sequence: Synthetic oligonucleotide
  Sense strand starting at position 2491 of SEQ ID NO: 1244187
ugacaaacuuugcuugguu

SEQ ID NO: 1471355 - RNA, 19 nt, Artificial Sequence
  Description of Artificial Sequence: Synthetic oligonucleotide
  Antisense strand to SEQ ID NO: 1471354
aaccaagcaaaguuuguca

SEQ ID NO: 1471356 - RNA, 19 nt, Artificial Sequence
  Description of Artificial Sequence: Synthetic oligonucleotide
  Sense strand starting at position 2514 of SEQ ID NO: 1244187
agaaucaccugccuugaaa

SEQ ID NO: 1471357 - RNA, 19 nt, Artificial Sequence
  Description of Artificial Sequence: Synthetic oligonucleotide
  Antisense strand to SEQ ID NO: 1471356
uuucaaggcaggugauucu

SEQ ID NO: 1471358 - RNA, 19 nt, Artificial Sequence
  Description of Artificial Sequence: Synthetic oligonucleotide
  Sense strand starting at position 2517 of SEQ ID NO: 1244187
aucaccugccuugaaagua

SEQ ID NO: 1471359 - RNA, 19 nt, Artificial Sequence
  Description of Artificial Sequence: Synthetic oligonucleotide
  Antisense strand to SEQ ID NO: 1471358
uacuuucaaggcaggugau

SEQ ID NO: 1471360 - RNA, 19 nt, Artificial Sequence
  Description of Artificial Sequence: Synthetic oligonucleotide
  Sense strand starting at position 2656 of SEQ ID NO: 1244187
ggcccuguccauuaucaua

SEQ ID NO: 1471361 - RNA, 19 nt, Artificial Sequence
  Description of Artificial Sequence: Synthetic oligonucleotide
  Antisense strand to SEQ ID NO: 1471360
uaugauaauggacagggcc

SEQ ID NO: 1471362 - RNA, 19 nt, Artificial Sequence
  Description of Artificial Sequence: Synthetic oligonucleotide
  Sense strand starting at position 2703 of SEQ ID NO: 1244187
gcaggaacugggugaaguu

SEQ ID NO: 1471363 - RNA, 19 nt, Artificial Sequence
  Description of Artificial Sequence: Synthetic oligonucleotide
  Antisense strand to SEQ ID NO: 1471362
aacuucacccaguuccugc

SEQ ID NO: 1471364 - RNA, 19 nt, Artificial Sequence
  Description of Artificial Sequence: Synthetic oligonucleotide
  Sense strand starting at position 2712 of SEQ ID NO: 1244187
gggugaaguuacuuuacac

SEQ ID NO: 1471365 - RNA, 19 nt, Artificial Sequence
  Description of Artificial Sequence: Synthetic oligonucleotide
  Antisense strand to SEQ ID NO: 1471364
guguaaaguaacuucaccc

SEQ ID NO: 1471366 - RNA, 19 nt, Artificial Sequence
  Description of Artificial Sequence: Synthetic oligonucleotide
  Sense strand starting at position 2966 of SEQ ID NO: 1244187
ggacauucccagcauucca

SEQ ID NO: 1471367 - RNA, 19 nt, Artificial Sequence
  Description of Artificial Sequence: Synthetic oligonucleotide
  Antisense strand to SEQ ID NO: 1471366
uggaaugcugggaaugucc

SEQ ID NO: 1471368 - RNA, 19 nt, Artificial Sequence
  Description of Artificial Sequence: Synthetic oligonucleotide
  Sense strand starting at position 2973 of SEQ ID NO: 1244187
cccagcauuccauaaaggu

SEQ ID NO: 1471369 - RNA, 19 nt, Artificial Sequence
  Description of Artificial Sequence: Synthetic oligonucleotide
  Antisense strand to SEQ ID NO: 1471368
accuuuauggaaugcuggg

SEQ ID NO: 1471370 - RNA, 19 nt, Artificial Sequence
  Description of Artificial Sequence: Synthetic oligonucleotide
  Sense strand starting at position 3113 of SEQ ID NO: 1244187
gacguuugacaaugucuag

SEQ ID NO: 1471371 - RNA, 19 nt, Artificial Sequence
  Description of Artificial Sequence: Synthetic oligonucleotide
  Antisense strand to SEQ ID NO: 1471370
cuagacauugucaaacguc

SEQ ID NO: 1471372 - RNA, 19 nt, Artificial Sequence
  Description of Artificial Sequence: Synthetic oligonucleotide
  Sense strand starting at position 3116 of SEQ ID NO: 1244187
guuugacaaugucuaggaa

SEQ ID NO: 1471373 - RNA, 19 nt, Artificial Sequence
  Description of Artificial Sequence: Synthetic oligonucleotide
  Antisense strand to SEQ ID NO: 1471372
uuccuagacauugucaaac

SEQ ID NO: 1471374 - RNA, 19 nt, Artificial Sequence
  Description of Artificial Sequence: Synthetic oligonucleotide
  Sense strand starting at position 3119 of SEQ ID NO: 1244187
ugacaaugucuaggaacau

SEQ ID NO: 1471375 - RNA, 19 nt, Artificial Sequence
  Description of Artificial Sequence: Synthetic oligonucleotide
  Antisense strand to SEQ ID NO: 1471374
auguuccuagacauuguca

SEQ ID NO: 1471376 - RNA, 19 nt, Artificial Sequence
  Description of Artificial Sequence: Synthetic oligonucleotide
  Sense strand starting at position 3264 of SEQ ID NO: 1244187
gguugagaugccuggguca

SEQ ID NO: 1471377 - RNA, 19 nt, Artificial Sequence
  Description of Artificial Sequence: Synthetic oligonucleotide
  Antisense strand to SEQ ID NO: 1471376
ugacccaggcaucucaacc

SEQ ID NO: 1471378 - RNA, 19 nt, Artificial Sequence
  Description of Artificial Sequence: Synthetic oligonucleotide
  Sense strand starting at position 3266 of SEQ ID NO: 1244187
uugagaugccugggucagu

SEQ ID NO: 1471379 - RNA, 19 nt, Artificial Sequence
  Description of Artificial Sequence: Synthetic oligonucleotide
  Antisense strand to SEQ ID NO: 1471378
acugacccaggcaucucaa

SEQ ID NO: 1471380 - RNA, 19 nt, Artificial Sequence
  Description of Artificial Sequence: Synthetic oligonucleotide
  Sense strand starting at position 3293 of SEQ ID NO: 1244187
cggguugaaucacuccauu

SEQ ID NO: 1471381 - RNA, 19 nt, Artificial Sequence
  Description of Artificial Sequence: Synthetic oligonucleotide
  Antisense strand to SEQ ID NO: 1471380
aauggagugauucaacccg

SEQ ID NO: 1471382 - RNA, 19 nt, Artificial Sequence
  Description of Artificial Sequence: Synthetic oligonucleotide
  Sense strand starting at position 3344 of SEQ ID NO: 1244187
ggaagacggcccuguaaua

SEQ ID NO: 1471383 - RNA, 19 nt, Artificial Sequence
  Description of Artificial Sequence: Synthetic oligonucleotide
  Antisense strand to SEQ ID NO: 1471382
uauuacagggccgucuucc

SEQ ID NO: 1471384 - RNA, 19 nt, Artificial Sequence
  Description of Artificial Sequence: Synthetic oligonucleotide
  Sense strand starting at position 3354 of SEQ ID NO: 1244187
ccuguaauaaugugagcag

SEQ ID NO: 1471385 - RNA, 19 nt, Artificial Sequence
  Description of Artificial Sequence: Synthetic oligonucleotide
  Antisense strand to SEQ ID NO: 1471384
cugcucacauuauuacagg

SEQ ID NO: 1471386 - RNA, 19 nt, Artificial Sequence
  Description of Artificial Sequence: Synthetic oligonucleotide
  Sense strand starting at position 3357 of SEQ ID NO: 1244187
guaauaaugugagcagggu

SEQ ID NO: 1471387 - RNA, 19 nt, Artificial Sequence
  Description of Artificial Sequence: Synthetic oligonucleotide
  Antisense strand to SEQ ID NO: 1471386
acccugcucacauuauuac

SEQ ID NO: 1471388 - RNA, 19 nt, Artificial Sequence
  Description of Artificial Sequence: Synthetic oligonucleotide
  Sense strand starting at position 3580 of SEQ ID NO: 1244187
gauagaagguccuccauuc

SEQ ID NO: 1471389 - RNA, 19 nt, Artificial Sequence
  Description of Artificial Sequence: Synthetic oligonucleotide
  Antisense strand to SEQ ID NO: 1471388
gaauggaggaccuucuauc

SEQ ID NO: 1471390 - RNA, 19 nt, Artificial Sequence
  Description of Artificial Sequence: Synthetic oligonucleotide
  Sense strand starting at position 3593 of SEQ ID NO: 1244187
ccauuccagggcugacaau

SEQ ID NO: 1471391 - RNA, 19 nt, Artificial Sequence
  Description of Artificial Sequence: Synthetic oligonucleotide
  Antisense strand to SEQ ID NO: 1471390
auugucagcccuggaaugg

SEQ ID NO: 1471392 - RNA, 19 nt, Artificial Sequence
  Description of Artificial Sequence: Synthetic oligonucleotide
  Sense strand starting at position 3706 of SEQ ID NO: 1244187
gccacaaaggucuggauga

SEQ ID NO: 1471393 - RNA, 19 nt, Artificial Sequence
  Description of Artificial Sequence: Synthetic oligonucleotide
  Antisense strand to SEQ ID NO: 1471392
ucauccagaccuuuguggc

SEQ ID NO: 1471394 - RNA, 19 nt, Artificial Sequence
  Description of Artificial Sequence: Synthetic oligonucleotide
  Sense strand starting at position 3757 of SEQ ID NO: 1244187
gcaugagguucuccuggaa

SEQ ID NO: 1471395 - RNA, 19 nt, Artificial Sequence
  Description of Artificial Sequence: Synthetic oligonucleotide
  Antisense strand to SEQ ID NO: 1471394
uuccaggagaaccucaugc

SEQ ID NO: 1471396 - RNA, 19 nt, Artificial Sequence
  Description of Artificial Sequence: Synthetic oligonucleotide
  Sense strand starting at position 88 of SEQ ID NO: 1244188
gaagucauccgcggccaga

SEQ ID NO: 1471397 - RNA, 19 nt, Artificial Sequence
  Description of Artificial Sequence: Synthetic oligonucleotide
  Antisense strand to SEQ ID NO: 1471396
ucuggccgcggaugacuuc

SEQ ID NO: 1471398 - RNA, 19 nt, Artificial Sequence
  Description of Artificial Sequence: Synthetic oligonucleotide
  Sense strand starting at position 153 of SEQ ID NO: 1244188
cugugagaaucugcaggau

SEQ ID NO: 1471399 - RNA, 19 nt, Artificial Sequence
  Description of Artificial Sequence: Synthetic oligonucleotide
  Antisense strand to SEQ ID NO: 1471398
auccugcagauucucacag

SEQ ID NO: 1471400 - RNA, 19 nt, Artificial Sequence
  Description of Artificial Sequence: Synthetic oligonucleotide
  Sense strand starting at position 156 of SEQ ID NO: 1244188
ugagaaucugcaggaugga

SEQ ID NO: 1471401 - RNA, 19 nt, Artificial Sequence
  Description of Artificial Sequence: Synthetic oligonucleotide
  Antisense strand to SEQ ID NO: 1471400
uccauccugcagauucuca

SEQ ID NO: 1471402 - RNA, 19 nt, Artificial Sequence
  Description of Artificial Sequence: Synthetic oligonucleotide
  Sense strand starting at position 246 of SEQ ID NO: 1244188
ucauguucuugccugaauc

SEQ ID NO: 1471403 - RNA, 19 nt, Artificial Sequence
  Description of Artificial Sequence: Synthetic oligonucleotide
  Antisense strand to SEQ ID NO: 1471402
gauucaggcaagaacauga

SEQ ID NO: 1471404 - RNA, 19 nt, Artificial Sequence
  Description of Artificial Sequence: Synthetic oligonucleotide
  Sense strand starting at position 549 of SEQ ID NO: 1244188
cugccaguccucugcagau

SEQ ID NO: 1471405 - RNA, 19 nt, Artificial Sequence
  Description of Artificial Sequence: Synthetic oligonucleotide
  Antisense strand to SEQ ID NO: 1471404
aucugcagaggacuggcag

SEQ ID NO: 1471406 - RNA, 19 nt, Artificial Sequence
  Description of Artificial Sequence: Synthetic oligonucleotide
  Sense strand starting at position 551 of SEQ ID NO: 1244188
gccaguccucugcagauau

SEQ ID NO: 1471407 - RNA, 19 nt, Artificial Sequence
  Description of Artificial Sequence: Synthetic oligonucleotide
  Antisense strand to SEQ ID NO: 1471406
auaucugcagaggacuggc

SEQ ID NO: 1471408 - RNA, 19 nt, Artificial Sequence
  Description of Artificial Sequence: Synthetic oligonucleotide
  Sense strand starting at position 608 of SEQ ID NO: 1244188
aguggaacuuucucaagag

SEQ ID NO: 1471409 - RNA, 19 nt, Artificial Sequence
  Description of Artificial Sequence: Synthetic oligonucleotide
  Antisense strand to SEQ ID NO: 1471408
cucuugagaaaguuccacu

SEQ ID NO: 1471410 - RNA, 19 nt, Artificial Sequence
  Description of Artificial Sequence: Synthetic oligonucleotide
  Sense strand starting at position 609 of SEQ ID NO: 1244188
guggaacuuucucaagaga

SEQ ID NO: 1471411 - RNA, 19 nt, Artificial Sequence
  Description of Artificial Sequence: Synthetic oligonucleotide
  Antisense strand to SEQ ID NO: 1471410
ucucuugagaaaguuccac

SEQ ID NO: 1471412 - RNA, 19 nt, Artificial Sequence
  Description of Artificial Sequence: Synthetic oligonucleotide
  Sense strand starting at position 694 of SEQ ID NO: 1244188
cccugagucugguuggauu

SEQ ID NO: 1471413 - RNA, 19 nt, Artificial Sequence
  Description of Artificial Sequence: Synthetic oligonucleotide
  Antisense strand to SEQ ID NO: 1471412
aauccaaccagacucaggg

SEQ ID NO: 1471414 - RNA, 19 nt, Artificial Sequence
  Description of Artificial Sequence: Synthetic oligonucleotide
  Sense strand starting at position 750 of SEQ ID NO: 1244188
gucauuagagcccaacaga

SEQ ID NO: 1471415 - RNA, 19 nt, Artificial Sequence
  Description of Artificial Sequence: Synthetic oligonucleotide
  Antisense strand to SEQ ID NO: 1471414
ucuguugggcucuaaugac

SEQ ID NO: 1471416 - RNA, 19 nt, Artificial Sequence
  Description of Artificial Sequence: Synthetic oligonucleotide
  Sense strand starting at position 977 of SEQ ID NO: 1244188
gcuaaugagugguuuggau

SEQ ID NO: 1471417 - RNA, 19 nt, Artificial Sequence
  Description of Artificial Sequence: Synthetic oligonucleotide
  Antisense strand to SEQ ID NO: 1471416
auccaaaccacucauuagc

SEQ ID NO: 1471418 - RNA, 19 nt, Artificial Sequence
  Description of Artificial Sequence: Synthetic oligonucleotide
  Sense strand starting at position 979 of SEQ ID NO: 1244188
uaaugagugguuuggaugu

SEQ ID NO: 1471419 - RNA, 19 nt, Artificial Sequence
  Description of Artificial Sequence: Synthetic oligonucleotide
  Antisense strand to SEQ ID NO: 1471418
acauccaaaccacucauua

SEQ ID NO: 1471420 - RNA, 19 nt, Artificial Sequence
  Description of Artificial Sequence: Synthetic oligonucleotide
  Sense strand starting at position 1193 of SEQ ID NO: 1244188
ucucacauggucugaggau

SEQ ID NO: 1471421 - RNA, 19 nt, Artificial Sequence
  Description of Artificial Sequence: Synthetic oligonucleotide
  Antisense strand to SEQ ID NO: 1471420
auccucagaccaugugaga

SEQ ID NO: 1471422 - RNA, 19 nt, Artificial Sequence
  Description of Artificial Sequence: Synthetic oligonucleotide
  Sense strand starting at position 1202 of SEQ ID NO: 1244188
gucugaggauuugagauca

SEQ ID NO: 1471423 - RNA, 19 nt, Artificial Sequence
  Description of Artificial Sequence: Synthetic oligonucleotide
  Antisense strand to SEQ ID NO: 1471422
ugaucucaaauccucagac

SEQ ID NO: 1471424 - RNA, 19 nt, Artificial Sequence
  Description of Artificial Sequence: Synthetic oligonucleotide
  Sense strand starting at position 1245 of SEQ ID NO: 1244188
gggaaagcaucuucucacu

SEQ ID NO: 1471425 - RNA, 19 nt, Artificial Sequence
  Description of Artificial Sequence: Synthetic oligonucleotide
  Antisense strand to SEQ ID NO: 1471424
agugagaagaugcuuuccc

SEQ ID NO: 1471426 - RNA, 19 nt, Artificial Sequence
  Description of Artificial Sequence: Synthetic oligonucleotide
  Sense strand starting at position 1251 of SEQ ID NO: 1244188
gcaucuucucacugaucag

SEQ ID NO: 1471427 - RNA, 19 nt, Artificial Sequence
  Description of Artificial Sequence: Synthetic oligonucleotide
  Antisense strand to SEQ ID NO: 1471426
cugaucagugagaagaugc

SEQ ID NO: 1471428 - RNA, 19 nt, Artificial Sequence
  Description of Artificial Sequence: Synthetic oligonucleotide
  Sense strand starting at position 1307 of SEQ ID NO: 1244188
gguggacucuguccuauag

SEQ ID NO: 1471429 - RNA, 19 nt, Artificial Sequence
  Description of Artificial Sequence: Synthetic oligonucleotide
  Antisense strand to SEQ ID NO: 1471428
cuauaggacagaguccacc

SEQ ID NO: 1471430 - RNA, 19 nt, Artificial Sequence
  Description of Artificial Sequence: Synthetic oligonucleotide
  Sense strand starting at position 1355 of SEQ ID NO: 1244188
caugaauuguucccagaag

SEQ ID NO: 1471431 - RNA, 19 nt, Artificial Sequence
  Description of Artificial Sequence: Synthetic oligonucleotide
  Antisense strand to SEQ ID NO: 1471430
cuucugggaacaauucaug

SEQ ID NO: 1471432 - RNA, 19 nt, Artificial Sequence
  Description of Artificial Sequence: Synthetic oligonucleotide
  Sense strand starting at position 1356 of SEQ ID NO: 1244188
augaauuguucccagaagg

SEQ ID NO: 1471433 - RNA, 19 nt, Artificial Sequence
  Description of Artificial Sequence: Synthetic oligonucleotide
  Antisense strand to SEQ ID NO: 1471432
ccuucugggaacaauucau

SEQ ID NO: 1471434 - RNA, 19 nt, Artificial Sequence
  Description of Artificial Sequence: Synthetic oligonucleotide
  Sense strand starting at position 1984 of SEQ ID NO: 1244188
agagaaggugcucggguaa

SEQ ID NO: 1471435 - RNA, 19 nt, Artificial Sequence
  Description of Artificial Sequence: Synthetic oligonucleotide
  Antisense strand to SEQ ID NO: 1471434
uuacccgagcaccuucucu

SEQ ID NO: 1471436 - RNA, 19 nt, Artificial Sequence
  Description of Artificial Sequence: Synthetic oligonucleotide
  Sense strand starting at position 1996 of SEQ ID NO: 1244188
cggguaaauuggaaaggga

SEQ ID NO: 1471437 - RNA, 19 nt, Artificial Sequence
  Description of Artificial Sequence: Synthetic oligonucleotide
  Antisense strand to SEQ ID NO: 1471436
ucccuuuccaauuuacccg

SEQ ID NO: 1471438 - RNA, 19 nt, Artificial Sequence
  Description of Artificial Sequence: Synthetic oligonucleotide
  Sense strand starting at position 2286 of SEQ ID NO: 1244188
gggcuuagccagggugaca

SEQ ID NO: 1471439 - RNA, 19 nt, Artificial Sequence
  Description of Artificial Sequence: Synthetic oligonucleotide
  Antisense strand to SEQ ID NO: 1471438
ugucacccuggcuaagccc

SEQ ID NO: 1471440 - RNA, 19 nt, Artificial Sequence
  Description of Artificial Sequence: Synthetic oligonucleotide
  Sense strand starting at position 2527 of SEQ ID NO: 1244188
ccaugcugugcugagaagu

SEQ ID NO: 1471441 - RNA, 19 nt, Artificial Sequence
  Description of Artificial Sequence: Synthetic oligonucleotide
  Antisense strand to SEQ ID NO: 1471440
acuucucagcacagcaugg

SEQ ID NO: 1471442 - RNA, 19 nt, Artificial Sequence
  Description of Artificial Sequence: Synthetic oligonucleotide
  Sense strand starting at position 2535 of SEQ ID NO: 1244188
ugcugagaagucuguccca

SEQ ID NO: 1471443 - RNA, 19 nt, Artificial Sequence
  Description of Artificial Sequence: Synthetic oligonucleotide
  Antisense strand to SEQ ID NO: 1471442
ugggacagacuucucagca

SEQ ID NO: 1471444 - RNA, 19 nt, Artificial Sequence
  Description of Artificial Sequence: Synthetic oligonucleotide
  Sense strand starting at position 2853 of SEQ ID NO: 1244188
ugcagucagcucugagaau

SEQ ID NO: 1471445 - RNA, 19 nt, Artificial Sequence
  Description of Artificial Sequence: Synthetic oligonucleotide
  Antisense strand to SEQ ID NO: 1471444
auucucagagcugacugca

SEQ ID NO: 1471446 - RNA, 19 nt, Artificial Sequence
  Description of Artificial Sequence: Synthetic oligonucleotide
  Sense strand starting at position 2864 of SEQ ID NO: 1244188
cugagaauccaaugcgaca

SEQ ID NO: 1471447 - RNA, 19 nt, Artificial Sequence
  Description of Artificial Sequence: Synthetic oligonucleotide
  Antisense strand to SEQ ID NO: 1471446
ugucgcauuggauucucag

SEQ ID NO: 1471448 - RNA, 19 nt, Artificial Sequence
  Description of Artificial Sequence: Synthetic oligonucleotide
  Sense strand starting at position 2877 of SEQ ID NO: 1244188
gcgacaauguaugugaaag

SEQ ID NO: 1471449 - RNA, 19 nt, Artificial Sequence
  Description of Artificial Sequence: Synthetic oligonucleotide
  Antisense strand to SEQ ID NO: 1471448
cuuucacauacauugucgc

SEQ ID NO: 1471450 - RNA, 19 nt, Artificial Sequence
  Description of Artificial Sequence: Synthetic oligonucleotide
  Sense strand starting at position 2917 of SEQ ID NO: 1244188
caagaagccucguuggcau

SEQ ID NO: 1471451 - RNA, 19 nt, Artificial Sequence
  Description of Artificial Sequence: Synthetic oligonucleotide
  Antisense strand to SEQ ID NO: 1471450
augccaacgaggcuucuug

SEQ ID NO: 1471452 - RNA, 19 nt, Artificial Sequence
  Description of Artificial Sequence: Synthetic oligonucleotide
  Sense strand starting at position 2924 of SEQ ID NO: 1244188
ccucguuggcauuguuaua

SEQ ID NO: 1471453 - RNA, 19 nt, Artificial Sequence
  Description of Artificial Sequence: Synthetic oligonucleotide
  Antisense strand to SEQ ID NO: 1471452
uauaacaaugccaacgagg

SEQ ID NO: 1471454 - RNA, 19 nt, Artificial Sequence
  Description of Artificial Sequence: Synthetic oligonucleotide
  Sense strand starting at position 3349 of SEQ ID NO: 1244188
gcaggcauguugagaggaa

SEQ ID NO: 1471455 - RNA, 19 nt, Artificial Sequence
  Description of Artificial Sequence: Synthetic oligonucleotide
  Antisense strand to SEQ ID NO: 1471454
uuccucucaacaugccugc

SEQ ID NO: 1471456 - RNA, 19 nt, Artificial Sequence
  Description of Artificial Sequence: Synthetic oligonucleotide
  Sense strand starting at position 3350 of SEQ ID NO: 1244188
caggcauguugagaggaau

SEQ ID NO: 1471457 - RNA, 19 nt, Artificial Sequence
  Description of Artificial Sequence: Synthetic oligonucleotide
  Antisense strand to SEQ ID NO: 1471456
auuccucucaacaugccug

SEQ ID NO: 1471458 - RNA, 19 nt, Artificial Sequence
  Description of Artificial Sequence: Synthetic oligonucleotide
  Sense strand starting at position 3356 of SEQ ID NO: 1244188
uguugagaggaaugugauc

SEQ ID NO: 1471459 - RNA, 19 nt, Artificial Sequence
  Description of Artificial Sequence: Synthetic oligonucleotide
  Antisense strand to SEQ ID NO: 1471458
gaucacauuccucucaaca

SEQ ID NO: 1471460 - RNA, 19 nt, Artificial Sequence
  Description of Artificial Sequence: Synthetic oligonucleotide
  Sense strand starting at position 3361 of SEQ ID NO: 1244188
agaggaaugugaucguguc

SEQ ID NO: 1471461 - RNA, 19 nt, Artificial Sequence
  Description of Artificial Sequence: Synthetic oligonucleotide
  Antisense strand to SEQ ID NO: 1471460
gacacgaucacauuccucu

SEQ ID NO: 1471462 - RNA, 19 nt, Artificial Sequence
  Description of Artificial Sequence: Synthetic oligonucleotide
  Sense strand starting at position 3362 of SEQ ID NO: 1244188
gaggaaugugaucgugucu

SEQ ID NO: 1471463 - RNA, 19 nt, Artificial Sequence
  Description of Artificial Sequence: Synthetic oligonucleotide
  Antisense strand to SEQ ID NO: 1471462
agacacgaucacauuccuc

SEQ ID NO: 1471464 - RNA, 19 nt, Artificial Sequence
  Description of Artificial Sequence: Synthetic oligonucleotide
  Sense strand starting at position 3443 of SEQ ID NO: 1244188
augcucuuccugggaucaa

SEQ ID NO: 1471465 - RNA, 19 nt, Artificial Sequence
  Description of Artificial Sequence: Synthetic oligonucleotide
  Antisense strand to SEQ ID NO: 1471464
uugaucccaggaagagcau

SEQ ID NO: 1471466 - RNA, 19 nt, Artificial Sequence
  Description of Artificial Sequence: Synthetic oligonucleotide
  Sense strand starting at position 3454 of SEQ ID NO: 1244188
gggaucaacugcuccuaga

SEQ ID NO: 1471467 - RNA, 19 nt, Artificial Sequence
  Description of Artificial Sequence: Synthetic oligonucleotide
  Antisense strand to SEQ ID NO: 1471466
ucuaggagcaguugauccc

SEQ ID NO: 1471468 - RNA, 19 nt, Artificial Sequence
  Description of Artificial Sequence: Synthetic oligonucleotide
  Sense strand starting at position 3457 of SEQ ID NO: 1244188
aucaacugcuccuagaaga

SEQ ID NO: 1471469 - RNA, 19 nt, Artificial Sequence
  Description of Artificial Sequence: Synthetic oligonucleotide
  Antisense strand to SEQ ID NO: 1471468
ucuucuaggagcaguugau

SEQ ID NO: 1471470 - RNA, 19 nt, Artificial Sequence
  Description of Artificial Sequence: Synthetic oligonucleotide
  Sense strand starting at position 3571 of SEQ ID NO: 1244188
ggaagacaaugcugagaca

SEQ ID NO: 1471471 - RNA, 19 nt, Artificial Sequence
  Description of Artificial Sequence: Synthetic oligonucleotide
  Antisense strand to SEQ ID NO: 1471470
ugucucagcauugucuucc

SEQ ID NO: 1471472 - RNA, 19 nt, Artificial Sequence
  Description of Artificial Sequence: Synthetic oligonucleotide
  Sense strand starting at position 3635 of SEQ ID NO: 1244188
caaggaugugaguaagcca

SEQ ID NO: 1471473 - RNA, 19 nt, Artificial Sequence
  Description of Artificial Sequence: Synthetic oligonucleotide
  Antisense strand to SEQ ID NO: 1471472
uggcuuacucacauccuug

SEQ ID NO: 1471474 - RNA, 19 nt, Artificial Sequence
  Description of Artificial Sequence: Synthetic oligonucleotide
  Sense strand starting at position 3955 of SEQ ID NO: 1244188
ccuucuuaugcagggauca

SEQ ID NO: 1471475 - RNA, 19 nt, Artificial Sequence
  Description of Artificial Sequence: Synthetic oligonucleotide
  Antisense strand to SEQ ID NO: 1471474
ugaucccugcauaagaagg

SEQ ID NO: 1471476 - RNA, 19 nt, Artificial Sequence
  Description of Artificial Sequence: Synthetic oligonucleotide
  Sense strand starting at position 120 of SEQ ID NO: 1244189
gggaguugucgaugguggu

SEQ ID NO: 1471477 - RNA, 19 nt, Artificial Sequence
  Description of Artificial Sequence: Synthetic oligonucleotide
  Antisense strand to SEQ ID NO: 1471476
accaccaucgacaacuccc

SEQ ID NO: 1471478 - RNA, 19 nt, Artificial Sequence
  Description of Artificial Sequence: Synthetic oligonucleotide
  Sense strand starting at position 139 of SEQ ID NO: 1244189
ggccaugaucugcaggaga

SEQ ID NO: 1471479 - RNA, 19 nt, Artificial Sequence
  Description of Artificial Sequence: Synthetic oligonucleotide
  Antisense strand to SEQ ID NO: 1471478
ucuccugcagaucauggcc

SEQ ID NO: 1471480 - RNA, 19 nt, Artificial Sequence
  Description of Artificial Sequence: Synthetic oligonucleotide
  Sense strand starting at position 154 of SEQ ID NO: 1244189
gagacagagucggugucua

SEQ ID NO: 1471481 - RNA, 19 nt, Artificial Sequence
  Description of Artificial Sequence: Synthetic oligonucleotide
  Antisense strand to SEQ ID NO: 1471480
uagacaccgacucugucuc

SEQ ID NO: 1471482 - RNA, 19 nt, Artificial Sequence
  Description of Artificial Sequence: Synthetic oligonucleotide
  Sense strand starting at position 412 of SEQ ID NO: 1244189
ggcaguauugccuguggga

SEQ ID NO: 1471483 - RNA, 19 nt, Artificial Sequence
  Description of Artificial Sequence: Synthetic oligonucleotide
  Antisense strand to SEQ ID NO: 1471482
ucccacaggcaauacugcc

SEQ ID NO: 1471484 - RNA, 19 nt, Artificial Sequence
  Description of Artificial Sequence: Synthetic oligonucleotide
  Sense strand starting at position 414 of SEQ ID NO: 1244189
caguauugccugugggaau

SEQ ID NO: 1471485 - RNA, 19 nt, Artificial Sequence
  Description of Artificial Sequence: Synthetic oligonucleotide
  Antisense strand to SEQ ID NO: 1471484
auucccacaggcaauacug

SEQ ID NO: 1471486 - RNA, 19 nt, Artificial Sequence
  Description of Artificial Sequence: Synthetic oligonucleotide
  Sense strand starting at position 427 of SEQ ID NO: 1244189
gggaauugguugcccagga

SEQ ID NO: 1471487 - RNA, 19 nt, Artificial Sequence
  Description of Artificial Sequence: Synthetic oligonucleotide
  Antisense strand to SEQ ID NO: 1471486
uccugggcaaccaauuccc

SEQ ID NO: 1471488 - RNA, 19 nt, Artificial Sequence
  Description of Artificial Sequence: Synthetic oligonucleotide
  Sense strand starting at position 431 of SEQ ID NO: 1244189
auugguugcccaggagagu

SEQ ID NO: 1471489 - RNA, 19 nt, Artificial Sequence
  Description of Artificial Sequence: Synthetic oligonucleotide
  Antisense strand to SEQ ID NO: 1471488
acucuccugggcaaccaau

SEQ ID NO: 1471490 - RNA, 19 nt, Artificial Sequence
  Description of Artificial Sequence: Synthetic oligonucleotide
  Sense strand starting at position 514 of SEQ ID NO: 1244189
uggacaacucauggucacu

SEQ ID NO: 1471491 - RNA, 19 nt, Artificial Sequence
  Description of Artificial Sequence: Synthetic oligonucleotide
  Antisense strand to SEQ ID NO: 1471490
agugaccaugaguugucca

SEQ ID NO: 1471492 - RNA, 19 nt, Artificial Sequence
  Description of Artificial Sequence: Synthetic oligonucleotide
  Sense strand starting at position 664 of SEQ ID NO: 1244189
guggcagaauguguaauga

SEQ ID NO: 1471493 - RNA, 19 nt, Artificial Sequence
  Description of Artificial Sequence: Synthetic oligonucleotide
  Antisense strand to SEQ ID NO: 1471492
ucauuacacauucugccac

SEQ ID NO: 1471494 - RNA, 19 nt, Artificial Sequence
  Description of Artificial Sequence: Synthetic oligonucleotide
  Sense strand starting at position 683 of SEQ ID NO: 1244189
guucccaggucuccuaaga

SEQ ID NO: 1471495 - RNA, 19 nt, Artificial Sequence
  Description of Artificial Sequence: Synthetic oligonucleotide
  Antisense strand to SEQ ID NO: 1471494
ucuuaggagaccugggaac

SEQ ID NO: 1471496 - RNA, 19 nt, Artificial Sequence
  Description of Artificial Sequence: Synthetic oligonucleotide
  Sense strand starting at position 751 of SEQ ID NO: 1244189
gguucuagcaucuggaacu

SEQ ID NO: 1471497 - RNA, 19 nt, Artificial Sequence
  Description of Artificial Sequence: Synthetic oligonucleotide
  Antisense strand to SEQ ID NO: 1471496
aguuccagaugcuagaacc

SEQ ID NO: 1471498 - RNA, 19 nt, Artificial Sequence
  Description of Artificial Sequence: Synthetic oligonucleotide
  Sense strand starting at position 812 of SEQ ID NO: 1244189
ggaauacuuuaugcagaag

SEQ ID NO: 1471499 - RNA, 19 nt, Artificial Sequence
  Description of Artificial Sequence: Synthetic oligonucleotide
  Antisense strand to SEQ ID NO: 1471498
cuucugcauaaaguauucc

SEQ ID NO: 1471500 - RNA, 19 nt, Artificial Sequence
  Description of Artificial Sequence: Synthetic oligonucleotide
  Sense strand starting at position 1032 of SEQ ID NO: 1244189
gccucuggcucuuuauaau

SEQ ID NO: 1471501 - RNA, 19 nt, Artificial Sequence
  Description of Artificial Sequence: Synthetic oligonucleotide
  Antisense strand to SEQ ID NO: 1471500
auuauaaagagccagaggc

SEQ ID NO: 1471502 - RNA, 19 nt, Artificial Sequence
  Description of Artificial Sequence: Synthetic oligonucleotide
  Sense strand starting at position 1160 of SEQ ID NO: 1244189
gcaggugcauuccaaauuu

SEQ ID NO: 1471503 - RNA, 19 nt, Artificial Sequence
  Description of Artificial Sequence: Synthetic oligonucleotide
  Antisense strand to SEQ ID NO: 1471502
aaauuuggaaugcaccugc

SEQ ID NO: 1471504 - RNA, 19 nt, Artificial Sequence
  Description of Artificial Sequence: Synthetic oligonucleotide
  Sense strand starting at position 1169 of SEQ ID NO: 1244189
uuccaaauuugcugagauu

SEQ ID NO: 1471505 - RNA, 19 nt, Artificial Sequence
  Description of Artificial Sequence: Synthetic oligonucleotide
  Antisense strand to SEQ ID NO: 1471504
aaucucagcaaauuuggaa

SEQ ID NO: 1471506 - RNA, 19 nt, Artificial Sequence
  Description of Artificial Sequence: Synthetic oligonucleotide
  Sense strand starting at position 1224 of SEQ ID NO: 1244189
uuccuugagucagcaguaa

SEQ ID NO: 1471507 - RNA, 19 nt, Artificial Sequence
  Description of Artificial Sequence: Synthetic oligonucleotide
  Antisense strand to SEQ ID NO: 1471506
uuacugcugacucaaggaa

SEQ ID NO: 1471508 - RNA, 19 nt, Artificial Sequence
  Description of Artificial Sequence: Synthetic oligonucleotide
  Sense strand starting at position 1228 of SEQ ID NO: 1244189
uugagucagcaguaacacu

SEQ ID NO: 1471509 - RNA, 19 nt, Artificial Sequence
  Description of Artificial Sequence: Synthetic oligonucleotide
  Antisense strand to SEQ ID NO: 1471508
aguguuacugcugacucaa

SEQ ID NO: 1471510 - RNA, 19 nt, Artificial Sequence
  Description of Artificial Sequence: Synthetic oligonucleotide
  Sense strand starting at position 1246 of SEQ ID NO: 1244189
ugacauuagagcuguguac

SEQ ID NO: 1471511 - RNA, 19 nt, Artificial Sequence
  Description of Artificial Sequence: Synthetic oligonucleotide
  Antisense strand to SEQ ID NO: 1471510
guacacagcucuaauguca

SEQ ID NO: 1471512 - RNA, 19 nt, Artificial Sequence
  Description of Artificial Sequence: Synthetic oligonucleotide
  Sense strand starting at position 1248 of SEQ ID NO: 1244189
acauuagagcuguguacag

SEQ ID NO: 1471513 - RNA, 19 nt, Artificial Sequence
  Description of Artificial Sequence: Synthetic oligonucleotide
  Antisense strand to SEQ ID NO: 1471512
cuguacacagcucuaaugu

SEQ ID NO: 1471514 - RNA, 19 nt, Artificial Sequence
  Description of Artificial Sequence: Synthetic oligonucleotide
  Sense strand starting at position 1338 of SEQ ID NO: 1244189
ugaaguauuggcuguaguc

SEQ ID NO: 1471515 - RNA, 19 nt, Artificial Sequence
  Description of Artificial Sequence: Synthetic oligonucleotide
  Antisense strand to SEQ ID NO: 1471514
gacuacagccaauacuuca

SEQ ID NO: 1471516 - RNA, 19 nt, Artificial Sequence
  Description of Artificial Sequence: Synthetic oligonucleotide
  Sense strand starting at position 1383 of SEQ ID NO: 1244189
ucugguaccagucauggau

SEQ ID NO: 1471517 - RNA, 19 nt, Artificial Sequence
  Description of Artificial Sequence: Synthetic oligonucleotide
  Antisense strand to SEQ ID NO: 1471516
auccaugacugguaccaga

SEQ ID NO: 1471518 - RNA, 19 nt, Artificial Sequence
  Description of Artificial Sequence: Synthetic oligonucleotide
  Sense strand starting at position 1440 of SEQ ID NO: 1244189
guaccuuguccagguagga

SEQ ID NO: 1471519 - RNA, 19 nt, Artificial Sequence
  Description of Artificial Sequence: Synthetic oligonucleotide
  Antisense strand to SEQ ID NO: 1471518
uccuaccuggacaagguac

SEQ ID NO: 1471520 - RNA, 19 nt, Artificial Sequence
  Description of Artificial Sequence: Synthetic oligonucleotide
  Sense strand starting at position 1473 of SEQ ID NO: 1244189
ugagguucugcaugguaau

SEQ ID NO: 1471521 - RNA, 19 nt, Artificial Sequence
  Description of Artificial Sequence: Synthetic oligonucleotide
  Antisense strand to SEQ ID NO: 1471520
auuaccaugcagaaccuca

SEQ ID NO: 1471522 - RNA, 19 nt, Artificial Sequence
  Description of Artificial Sequence: Synthetic oligonucleotide
  Sense strand starting at position 1474 of SEQ ID NO: 1244189
gagguucugcaugguaauu

SEQ ID NO: 1471523 - RNA, 19 nt, Artificial Sequence
  Description of Artificial Sequence: Synthetic oligonucleotide
  Antisense strand to SEQ ID NO: 1471522
aauuaccaugcagaaccuc

SEQ ID NO: 1471524 - RNA, 19 nt, Artificial Sequence
  Description of Artificial Sequence: Synthetic oligonucleotide
  Sense strand starting at position 1666 of SEQ ID NO: 1244189
agaagaagcugagauacuu

SEQ ID NO: 1471525 - RNA, 19 nt, Artificial Sequence
  Description of Artificial Sequence: Synthetic oligonucleotide
  Antisense strand to SEQ ID NO: 1471524
aaguaucucagcuucuucu

SEQ ID NO: 1471526 - RNA, 19 nt, Artificial Sequence
  Description of Artificial Sequence: Synthetic oligonucleotide
  Sense strand starting at position 1675 of SEQ ID NO: 1244189
ugagauacuucggcuucca

SEQ ID NO: 1471527 - RNA, 19 nt, Artificial Sequence
  Description of Artificial Sequence: Synthetic oligonucleotide
  Antisense strand to SEQ ID NO: 1471526
uggaagccgaaguaucuca

SEQ ID NO: 1471528 - RNA, 19 nt, Artificial Sequence
  Description of Artificial Sequence: Synthetic oligonucleotide
  Sense strand starting at position 1780 of SEQ ID NO: 1244189
ggaagaaguuugcagaaau

SEQ ID NO: 1471529 - RNA, 19 nt, Artificial Sequence
  Description of Artificial Sequence: Synthetic oligonucleotide
  Antisense strand to SEQ ID NO: 1471528
auuucugcaaacuucuucc

SEQ ID NO: 1471530 - RNA, 19 nt, Artificial Sequence
  Description of Artificial Sequence: Synthetic oligonucleotide
  Sense strand starting at position 1792 of SEQ ID NO: 1244189
cagaaaugugguggucaug

SEQ ID NO: 1471531 - RNA, 19 nt, Artificial Sequence
  Description of Artificial Sequence: Synthetic oligonucleotide
  Antisense strand to SEQ ID NO: 1471530
caugaccaccacauuucug

SEQ ID NO: 1471532 - RNA, 19 nt, Artificial Sequence
  Description of Artificial Sequence: Synthetic oligonucleotide
  Sense strand starting at position 1992 of SEQ ID NO: 1244189
ccuugagugggucauguga

SEQ ID NO: 1471533 - RNA, 19 nt, Artificial Sequence
  Description of Artificial Sequence: Synthetic oligonucleotide
  Antisense strand to SEQ ID NO: 1471532
ucacaugacccacucaagg

SEQ ID NO: 1471534 - RNA, 19 nt, Artificial Sequence
  Description of Artificial Sequence: Synthetic oligonucleotide
  Sense strand starting at position 2266 of SEQ ID NO: 1244189
ccguguucuuaguuuggga

SEQ ID NO: 1471535 - RNA, 19 nt, Artificial Sequence
  Description of Artificial Sequence: Synthetic oligonucleotide
  Antisense strand to SEQ ID NO: 1471534
ucccaaacuaagaacacgg

SEQ ID NO: 1471536 - RNA, 19 nt, Artificial Sequence
  Description of Artificial Sequence: Synthetic oligonucleotide
  Sense strand starting at position 2268 of SEQ ID NO: 1244189
guguucuuaguuugggagu

SEQ ID NO: 1471537 - RNA, 19 nt, Artificial Sequence
  Description of Artificial Sequence: Synthetic oligonucleotide
  Antisense strand to SEQ ID NO: 1471536
acucccaaacuaagaacac

SEQ ID NO: 1471538 - RNA, 19 nt, Artificial Sequence
  Description of Artificial Sequence: Synthetic oligonucleotide
  Sense strand starting at position 2297 of SEQ ID NO: 1244189
aucauuaugcuguguuauc

SEQ ID NO: 1471539 - RNA, 19 nt, Artificial Sequence
  Description of Artificial Sequence: Synthetic oligonucleotide
  Antisense strand to SEQ ID NO: 1471538
gauaacacagcauaaugau

SEQ ID NO: 1471540 - RNA, 19 nt, Artificial Sequence
  Description of Artificial Sequence: Synthetic oligonucleotide
  Sense strand starting at position 2695 of SEQ ID NO: 1244189
gggcaaaccuccgcugaua

SEQ ID NO: 1471541 - RNA, 19 nt, Artificial Sequence
  Description of Artificial Sequence: Synthetic oligonucleotide
  Antisense strand to SEQ ID NO: 1471540
uaucagcggagguuugccc

SEQ ID NO: 1471542 - RNA, 19 nt, Artificial Sequence
  Description of Artificial Sequence: Synthetic oligonucleotide
  Sense strand starting at position 3188 of SEQ ID NO: 1244189
cugugaggccuggguucaa

SEQ ID NO: 1471543 - RNA, 19 nt, Artificial Sequence
  Description of Artificial Sequence: Synthetic oligonucleotide
  Antisense strand to SEQ ID NO: 1471542
uugaacccaggccucacag

SEQ ID NO: 1471544 - RNA, 19 nt, Artificial Sequence
  Description of Artificial Sequence: Synthetic oligonucleotide
  Sense strand starting at position 3228 of SEQ ID NO: 1244189
augguaagacuguggacau

SEQ ID NO: 1471545 - RNA, 19 nt, Artificial Sequence
  Description of Artificial Sequence: Synthetic oligonucleotide
  Antisense strand to SEQ ID NO: 1471544
auguccacagucuuaccau

SEQ ID NO: 1471546 - RNA, 19 nt, Artificial Sequence
  Description of Artificial Sequence: Synthetic oligonucleotide
  Sense strand starting at position 3467 of SEQ ID NO: 1244189
gcauguucuuaggcucaac

SEQ ID NO: 1471547 - RNA, 19 nt, Artificial Sequence
  Description of Artificial Sequence: Synthetic oligonucleotide
  Antisense strand to SEQ ID NO: 1471546
guugagccuaagaacaugc

SEQ ID NO: 1471548 - RNA, 19 nt, Artificial Sequence
  Description of Artificial Sequence: Synthetic oligonucleotide
  Sense strand starting at position 3526 of SEQ ID NO: 1244189
gguuguucuuagguucuua

SEQ ID NO: 1471549 - RNA, 19 nt, Artificial Sequence
  Description of Artificial Sequence: Synthetic oligonucleotide
  Antisense strand to SEQ ID NO: 1471548
uaagaaccuaagaacaacc

SEQ ID NO: 1471550 - RNA, 19 nt, Artificial Sequence
  Description of Artificial Sequence: Synthetic oligonucleotide
  Sense strand starting at position 3584 of SEQ ID NO: 1244189
cuuugugauuuacaaagca

SEQ ID NO: 1471551 - RNA, 19 nt, Artificial Sequence
  Description of Artificial Sequence: Synthetic oligonucleotide
  Antisense strand to SEQ ID NO: 1471550
ugcuuuguaaaucacaaag

SEQ ID NO: 1471552 - RNA, 19 nt, Artificial Sequence
  Description of Artificial Sequence: Synthetic oligonucleotide
  Sense strand starting at position 3674 of SEQ ID NO: 1244189
aauugaaacuuggagaggu

SEQ ID NO: 1471553 - RNA, 19 nt, Artificial Sequence
  Description of Artificial Sequence: Synthetic oligonucleotide
  Antisense strand to SEQ ID NO: 1471552
accucuccaaguuucaauu

SEQ ID NO: 1471554 - RNA, 19 nt, Artificial Sequence
  Description of Artificial Sequence: Synthetic oligonucleotide
  Sense strand starting at position 3863 of SEQ ID NO: 1244189
guggguuccuucucaucca

SEQ ID NO: 1471555 - RNA, 19 nt, Artificial Sequence
  Description of Artificial Sequence: Synthetic oligonucleotide
  Antisense strand to SEQ ID NO: 1471554
uggaugagaaggaacccac

SEQ ID NO: 1471556 - RNA, 19 nt, Artificial Sequence
  Description of Artificial Sequence: Synthetic oligonucleotide
  Sense strand starting at position 107 of SEQ ID NO: 1244190
guaccaguucgcuguugga

SEQ ID NO: 1471557 - RNA, 19 nt, Artificial Sequence
  Description of Artificial Sequence: Synthetic oligonucleotide
  Antisense strand to SEQ ID NO: 1471556
uccaacagcgaacugguac

SEQ ID NO: 1471558 - RNA, 19 nt, Artificial Sequence
  Description of Artificial Sequence: Synthetic oligonucleotide
  Sense strand starting at position 425 of SEQ ID NO: 1244190
cggucaguucagcagacuu

SEQ ID NO: 1471559 - RNA, 19 nt, Artificial Sequence
  Description of Artificial Sequence: Synthetic oligonucleotide
  Antisense strand to SEQ ID NO: 1471558
aagucugcugaacugaccg

SEQ ID NO: 1471560 - RNA, 19 nt, Artificial Sequence
  Description of Artificial Sequence: Synthetic oligonucleotide
  Sense strand starting at position 934 of SEQ ID NO: 1244190
ggaccuuacuacuugagca

SEQ ID NO: 1471561 - RNA, 19 nt, Artificial Sequence
  Description of Artificial Sequence: Synthetic oligonucleotide
  Antisense strand to SEQ ID NO: 1471560
ugcucaaguaguaaggucc

SEQ ID NO: 1471562 - RNA, 19 nt, Artificial Sequence
  Description of Artificial Sequence: Synthetic oligonucleotide
  Sense strand starting at position 938 of SEQ ID NO: 1244190
cuuacuacuugagcaugaa

SEQ ID NO: 1471563 - RNA, 19 nt, Artificial Sequence
  Description of Artificial Sequence: Synthetic oligonucleotide
  Antisense strand to SEQ ID NO: 1471562
uucaugcucaaguaguaag

SEQ ID NO: 1471564 - RNA, 19 nt, Artificial Sequence
  Description of Artificial Sequence: Synthetic oligonucleotide
  Sense strand starting at position 1127 of SEQ ID NO: 1244190
auaagagauuuaggguaac

SEQ ID NO: 1471565 - RNA, 19 nt, Artificial Sequence
  Description of Artificial Sequence: Synthetic oligonucleotide
  Antisense strand to SEQ ID NO: 1471564
guuacccuaaaucucuuau

SEQ ID NO: 1471566 - RNA, 19 nt, Artificial Sequence
  Description of Artificial Sequence: Synthetic oligonucleotide
  Sense strand starting at position 1887 of SEQ ID NO: 1244190
ugagcaguuggcugaaaga

SEQ ID NO: 1471567 - RNA, 19 nt, Artificial Sequence
  Description of Artificial Sequence: Synthetic oligonucleotide
  Antisense strand to SEQ ID NO: 1471566
ucuuucagccaacugcuca

SEQ ID NO: 1471568 - RNA, 19 nt, Artificial Sequence
  Description of Artificial Sequence: Synthetic oligonucleotide
  Sense strand starting at position 2086 of SEQ ID NO: 1244190
ugcugugugccggcucaga

SEQ ID NO: 1471569 - RNA, 19 nt, Artificial Sequence
  Description of Artificial Sequence: Synthetic oligonucleotide
  Antisense strand to SEQ ID NO: 1471568
ucugagccggcacacagca

SEQ ID NO: 1471570 - RNA, 19 nt, Artificial Sequence
  Description of Artificial Sequence: Synthetic oligonucleotide
  Sense strand starting at position 2505 of SEQ ID NO: 1244190
agagucccuucuguucuaa

SEQ ID NO: 1471571 - RNA, 19 nt, Artificial Sequence
  Description of Artificial Sequence: Synthetic oligonucleotide
  Antisense strand to SEQ ID NO: 1471570
uuagaacagaagggacucu

SEQ ID NO: 1471572 - RNA, 19 nt, Artificial Sequence
  Description of Artificial Sequence: Synthetic oligonucleotide
  Sense strand starting at position 3232 of SEQ ID NO: 1244190
cagugugugccauacaguu

SEQ ID NO: 1471573 - RNA, 19 nt, Artificial Sequence
  Description of Artificial Sequence: Synthetic oligonucleotide
  Antisense strand to SEQ ID NO: 1471572
aacuguauggcacacacug

SEQ ID NO: 1471574 - RNA, 19 nt, Artificial Sequence
  Description of Artificial Sequence: Synthetic oligonucleotide
  Sense strand starting at position 3242 of SEQ ID NO: 1244190
cauacaguucugugagcgu

SEQ ID NO: 1471575 - RNA, 19 nt, Artificial Sequence
  Description of Artificial Sequence: Synthetic oligonucleotide
  Antisense strand to SEQ ID NO: 1471574
acgcucacagaacuguaug

SEQ ID NO: 1471576 - RNA, 19 nt, Artificial Sequence
  Description of Artificial Sequence: Synthetic oligonucleotide
  Sense strand starting at position 3245 of SEQ ID NO: 1244190
acaguucugugagcguaga

SEQ ID NO: 1471577 - RNA, 19 nt, Artificial Sequence
  Description of Artificial Sequence: Synthetic oligonucleotide
  Antisense strand to SEQ ID NO: 1471576
ucuacgcucacagaacugu

SEQ ID NO: 1471578 - RNA, 19 nt, Artificial Sequence
  Description of Artificial Sequence: Synthetic oligonucleotide
  Sense strand starting at position 3888 of SEQ ID NO: 1244190
gucaccaaaggcuauuaau

SEQ ID NO: 1471579 - RNA, 19 nt, Artificial Sequence
  Description of Artificial Sequence: Synthetic oligonucleotide
  Antisense strand to SEQ ID NO: 1471578
auuaauagccuuuggugac

SEQ ID NO: 1471580 - RNA, 19 nt, Artificial Sequence
  Description of Artificial Sequence: Synthetic oligonucleotide
  Sense strand starting at position 3921 of SEQ ID NO: 1244190
gagcgaaagccuuauccag

SEQ ID NO: 1471581 - RNA, 19 nt, Artificial Sequence
  Description of Artificial Sequence: Synthetic oligonucleotide
  Antisense strand to SEQ ID NO: 1471580
cuggauaaggcuuucgcuc

SEQ ID NO: 1471582 - RNA, 19 nt, Artificial Sequence
  Description of Artificial Sequence: Synthetic oligonucleotide
  Sense strand starting at position 467 of SEQ ID NO: 1244191
agcagaucuuccugccuca

SEQ ID NO: 1471583 - RNA, 19 nt, Artificial Sequence
  Description of Artificial Sequence: Synthetic oligonucleotide
  Antisense strand to SEQ ID NO: 1471582
ugaggcaggaagaucugcu

SEQ ID NO: 1471584 - RNA, 19 nt, Artificial Sequence
  Description of Artificial Sequence: Synthetic oligonucleotide
  Sense strand starting at position 817 of SEQ ID NO: 1244191
auuaaagagugguuccaaa

SEQ ID NO: 1471585 - RNA, 19 nt, Artificial Sequence
  Description of Artificial Sequence: Synthetic oligonucleotide
  Antisense strand to SEQ ID NO: 1471584
uuuggaaccacucuuuaau

SEQ ID NO: 1471586 - RNA, 19 nt, Artificial Sequence
  Description of Artificial Sequence: Synthetic oligonucleotide
  Sense strand starting at position 1237 of SEQ ID NO: 1244191
ccucuuuguuccugacuca

SEQ ID NO: 1471587 - RNA, 19 nt, Artificial Sequence
  Description of Artificial Sequence: Synthetic oligonucleotide
  Antisense strand to SEQ ID NO: 1471586
ugagucaggaacaaagagg

SEQ ID NO: 1471588 - RNA, 19 nt, Artificial Sequence
  Description of Artificial Sequence: Synthetic oligonucleotide
  Sense strand starting at position 1462 of SEQ ID NO: 1244191
ccucaauuguccuguagua

SEQ ID NO: 1471589 - RNA, 19 nt, Artificial Sequence
  Description of Artificial Sequence: Synthetic oligonucleotide
  Antisense strand to SEQ ID NO: 1471588
uacuacaggacaauugagg

SEQ ID NO: 1471590 - RNA, 19 nt, Artificial Sequence
  Description of Artificial Sequence: Synthetic oligonucleotide
  Sense strand starting at position 1464 of SEQ ID NO: 1244191
ucaauuguccuguaguacu

SEQ ID NO: 1471591 - RNA, 19 nt, Artificial Sequence
  Description of Artificial Sequence: Synthetic oligonucleotide
  Antisense strand to SEQ ID NO: 1471590
aguacuacaggacaauuga

SEQ ID NO: 1471592 - RNA, 19 nt, Artificial Sequence
  Description of Artificial Sequence: Synthetic oligonucleotide
  Sense strand starting at position 2092 of SEQ ID NO: 1244191
cgcccaucaucaggaauuu

SEQ ID NO: 1471593 - RNA, 19 nt, Artificial Sequence
  Description of Artificial Sequence: Synthetic oligonucleotide
  Antisense strand to SEQ ID NO: 1471592
aaauuccugaugaugggcg

SEQ ID NO: 1471594 - RNA, 19 nt, Artificial Sequence
  Description of Artificial Sequence: Synthetic oligonucleotide
  Sense strand starting at position 2348 of SEQ ID NO: 1244191
cgccaaaguugcugucuuu

SEQ ID NO: 1471595 - RNA, 19 nt, Artificial Sequence
  Description of Artificial Sequence: Synthetic oligonucleotide
  Antisense strand to SEQ ID NO: 1471594
aaagacagcaacuuuggcg

SEQ ID NO: 1471596 - RNA, 19 nt, Artificial Sequence
  Description of Artificial Sequence: Synthetic oligonucleotide
  Sense strand starting at position 2670 of SEQ ID NO: 1244191
aacccagucucuucgugua

SEQ ID NO: 1471597 - RNA, 19 nt, Artificial Sequence
  Description of Artificial Sequence: Synthetic oligonucleotide
  Antisense strand to SEQ ID NO: 1471596
uacacgaagagacuggguu

SEQ ID NO: 1471598 - RNA, 19 nt, Artificial Sequence
  Description of Artificial Sequence: Synthetic oligonucleotide
  Sense strand starting at position 2672 of SEQ ID NO: 1244191
cccagucucuucguguaaa

SEQ ID NO: 1471599 - RNA, 19 nt, Artificial Sequence
  Description of Artificial Sequence: Synthetic oligonucleotide
  Antisense strand to SEQ ID NO: 1471598
uuuacacgaagagacuggg

SEQ ID NO: 1471600 - RNA, 19 nt, Artificial Sequence
  Description of Artificial Sequence: Synthetic oligonucleotide
  Sense strand starting at position 2673 of SEQ ID NO: 1244191
ccagucucuucguguaaac

SEQ ID NO: 1471601 - RNA, 19 nt, Artificial Sequence
  Description of Artificial Sequence: Synthetic oligonucleotide
  Antisense strand to SEQ ID NO: 1471600
guuuacacgaagagacugg

SEQ ID NO: 1471602 - RNA, 19 nt, Artificial Sequence
  Description of Artificial Sequence: Synthetic oligonucleotide
  Sense strand starting at position 2675 of SEQ ID NO: 1244191
agucucuucguguaaaccu

SEQ ID NO: 1471603 - RNA, 19 nt, Artificial Sequence
  Description of Artificial Sequence: Synthetic oligonucleotide
  Antisense strand to SEQ ID NO: 1471602
agguuuacacgaagagacu

SEQ ID NO: 1471604 - RNA, 19 nt, Artificial Sequence
  Description of Artificial Sequence: Synthetic oligonucleotide
  Sense strand starting at position 2843 of SEQ ID NO: 1244191
ggguauuuaucucaggucu

SEQ ID NO: 1471605 - RNA, 19 nt, Artificial Sequence
  Description of Artificial Sequence: Synthetic oligonucleotide
  Antisense strand to SEQ ID NO: 1471604
agaccugagauaaauaccc

SEQ ID NO: 1471606 - RNA, 19 nt, Artificial Sequence
  Description of Artificial Sequence: Synthetic oligonucleotide
  Sense strand starting at position 2845 of SEQ ID NO: 1244191
guauuuaucucaggucuca

SEQ ID NO: 1471607 - RNA, 19 nt, Artificial Sequence
  Description of Artificial Sequence: Synthetic oligonucleotide
  Antisense strand to SEQ ID NO: 1471606
ugagaccugagauaaauac

SEQ ID NO: 1471608 - RNA, 19 nt, Artificial Sequence
  Description of Artificial Sequence: Synthetic oligonucleotide
  Sense strand starting at position 3056 of SEQ ID NO: 1244191
gguggaauguggucauguu

SEQ ID NO: 1471609 - RNA, 19 nt, Artificial Sequence
  Description of Artificial Sequence: Synthetic oligonucleotide
  Antisense strand to SEQ ID NO: 1471608
aacaugaccacauuccacc

SEQ ID NO: 1471610 - RNA, 19 nt, Artificial Sequence
  Description of Artificial Sequence: Synthetic oligonucleotide
  Sense strand starting at position 3057 of SEQ ID NO: 1244191
guggaauguggucauguuu

SEQ ID NO: 1471611 - RNA, 19 nt, Artificial Sequence
  Description of Artificial Sequence: Synthetic oligonucleotide
  Antisense strand to SEQ ID NO: 1471610
aaacaugaccacauuccac

SEQ ID NO: 1471612 - RNA, 19 nt, Artificial Sequence
  Description of Artificial Sequence: Synthetic oligonucleotide
  Sense strand starting at position 3400 of SEQ ID NO: 1244191
ggcaccauccuuggaaagu

SEQ ID NO: 1471613 - RNA, 19 nt, Artificial Sequence
  Description of Artificial Sequence: Synthetic oligonucleotide
  Antisense strand to SEQ ID NO: 1471612
acuuuccaaggauggugcc

SEQ ID NO: 1471614 - RNA, 19 nt, Artificial Sequence
  Description of Artificial Sequence: Synthetic oligonucleotide
  Sense strand starting at position 3401 of SEQ ID NO: 1244191
gcaccauccuuggaaaguc

SEQ ID NO: 1471615 - RNA, 19 nt, Artificial Sequence
  Description of Artificial Sequence: Synthetic oligonucleotide
  Antisense strand to SEQ ID NO: 1471614
gacuuuccaaggauggugc

SEQ ID NO: 1471616 - RNA, 19 nt, Artificial Sequence
  Description of Artificial Sequence: Synthetic oligonucleotide
  Sense strand starting at position 3703 of SEQ ID NO: 1244191
ggagcaaagcuuuaauagu

SEQ ID NO: 1471617 - RNA, 19 nt, Artificial Sequence
  Description of Artificial Sequence: Synthetic oligonucleotide
  Antisense strand to SEQ ID NO: 1471616
acuauuaaagcuuugcucc

SEQ ID NO: 1471618 - RNA, 19 nt, Artificial Sequence
  Description of Artificial Sequence: Synthetic oligonucleotide
  Sense strand starting at position 3902 of SEQ ID NO: 1244191
ggucucaguggguggagaa

SEQ ID NO: 1471619 - RNA, 19 nt, Artificial Sequence
  Description of Artificial Sequence: Synthetic oligonucleotide
  Antisense strand to SEQ ID NO: 1471618
uucuccacccacugagacc

SEQ ID NO: 1471620 - RNA, 19 nt, Artificial Sequence
  Description of Artificial Sequence: Synthetic oligonucleotide
  Sense strand starting at position 24 of SEQ ID NO: 1244192
cguaagggugcguaguaaa

SEQ ID NO: 1471621 - RNA, 19 nt, Artificial Sequence
  Description of Artificial Sequence: Synthetic oligonucleotide
  Antisense strand to SEQ ID NO: 1471620
uuuacuacgcacccuuacg

SEQ ID NO: 1471622 - RNA, 19 nt, Artificial Sequence
  Description of Artificial Sequence: Synthetic oligonucleotide
  Sense strand starting at position 43 of SEQ ID NO: 1244192
auguacuuauugucgcaau

SEQ ID NO: 1471623 - RNA, 19 nt, Artificial Sequence
  Description of Artificial Sequence: Synthetic oligonucleotide
  Antisense strand to SEQ ID NO: 1471622
auugcgacaauaaguacau

SEQ ID NO: 1471624 - RNA, 19 nt, Artificial Sequence
  Description of Artificial Sequence: Synthetic oligonucleotide
  Sense strand starting at position 572 of SEQ ID NO: 1244192
ggucuaugccacgaguaca

SEQ ID NO: 1471625 - RNA, 19 nt, Artificial Sequence
  Description of Artificial Sequence: Synthetic oligonucleotide
  Antisense strand to SEQ ID NO: 1471624
uguacucguggcauagacc

SEQ ID NO: 1471626 - RNA, 19 nt, Artificial Sequence
  Description of Artificial Sequence: Synthetic oligonucleotide
  Sense strand starting at position 631 of SEQ ID NO: 1244192
cagcgugugcggcuguaaa

SEQ ID NO: 1471627 - RNA, 19 nt, Artificial Sequence
  Description of Artificial Sequence: Synthetic oligonucleotide
  Antisense strand to SEQ ID NO: 1471626
uuuacagccgcacacgcug

SEQ ID NO: 1471628 - RNA, 19 nt, Artificial Sequence
  Description of Artificial Sequence: Synthetic oligonucleotide
  Sense strand starting at position 950 of SEQ ID NO: 1244192
gacccuuccggccagagaa

SEQ ID NO: 1471629 - RNA, 19 nt, Artificial Sequence
  Description of Artificial Sequence: Synthetic oligonucleotide
  Antisense strand to SEQ ID NO: 1471628
uucucuggccggaaggguc

SEQ ID NO: 1471630 - RNA, 19 nt, Artificial Sequence
  Description of Artificial Sequence: Synthetic oligonucleotide
  Sense strand starting at position 1836 of SEQ ID NO: 1244192
uggcgauagcuguaggaag

SEQ ID NO: 1471631 - RNA, 19 nt, Artificial Sequence
  Description of Artificial Sequence: Synthetic oligonucleotide
  Antisense strand to SEQ ID NO: 1471630
cuuccuacagcuaucgcca

SEQ ID NO: 1471632 - RNA, 19 nt, Artificial Sequence
  Description of Artificial Sequence: Synthetic oligonucleotide
  Sense strand starting at position 1879 of SEQ ID NO: 1244192
gagcaacccuggucucaga

SEQ ID NO: 1471633 - RNA, 19 nt, Artificial Sequence
  Description of Artificial Sequence: Synthetic oligonucleotide
  Antisense strand to SEQ ID NO: 1471632
ucugagaccaggguugcuc

SEQ ID NO: 1471634 - RNA, 19 nt, Artificial Sequence
  Description of Artificial Sequence: Synthetic oligonucleotide
  Sense strand starting at position 1991 of SEQ ID NO: 1244192
gcggauaucugagcccuga

SEQ ID NO: 1471635 - RNA, 19 nt, Artificial Sequence
  Description of Artificial Sequence: Synthetic oligonucleotide
  Antisense strand to SEQ ID NO: 1471634
ucagggcucagauauccgc

SEQ ID NO: 1471636 - RNA, 19 nt, Artificial Sequence
  Description of Artificial Sequence: Synthetic oligonucleotide
  Sense strand starting at position 1995 of SEQ ID NO: 1244192
auaucugagcccugaggaa

SEQ ID NO: 1471637 - RNA, 19 nt, Artificial Sequence
  Description of Artificial Sequence: Synthetic oligonucleotide
  Antisense strand to SEQ ID NO: 1471636
uuccucagggcucagauau

SEQ ID NO: 1471638 - RNA, 19 nt, Artificial Sequence
  Description of Artificial Sequence: Synthetic oligonucleotide
  Sense strand starting at position 2020 of SEQ ID NO: 1244192
ggcuccugagagcaaauau

SEQ ID NO: 1471639 - RNA, 19 nt, Artificial Sequence
  Description of Artificial Sequence: Synthetic oligonucleotide
  Antisense strand to SEQ ID NO: 1471638
auauuugcucucaggagcc

SEQ ID NO: 1471640 - RNA, 19 nt, Artificial Sequence
  Description of Artificial Sequence: Synthetic oligonucleotide
  Sense strand starting at position 2257 of SEQ ID NO: 1244192
guuugacaccacugggaau

SEQ ID NO: 1471641 - RNA, 19 nt, Artificial Sequence
  Description of Artificial Sequence: Synthetic oligonucleotide
  Antisense strand to SEQ ID NO: 1471640
auucccaguggugucaaac

SEQ ID NO: 1471642 - RNA, 19 nt, Artificial Sequence
  Description of Artificial Sequence: Synthetic oligonucleotide
  Sense strand starting at position 2289 of SEQ ID NO: 1244192
gggucauauuccuacacac

SEQ ID NO: 1471643 - RNA, 19 nt, Artificial Sequence
  Description of Artificial Sequence: Synthetic oligonucleotide
  Antisense strand to SEQ ID NO: 1471642
guguguaggaauaugaccc

SEQ ID NO: 1471644 - RNA, 19 nt, Artificial Sequence
  Description of Artificial Sequence: Synthetic oligonucleotide
  Sense strand starting at position 2634 of SEQ ID NO: 1244192
cagagugcucccuguuaag

SEQ ID NO: 1471645 - RNA, 19 nt, Artificial Sequence
  Description of Artificial Sequence: Synthetic oligonucleotide
  Antisense strand to SEQ ID NO: 1471644
cuuaacagggagcacucug

SEQ ID NO: 1471646 - RNA, 19 nt, Artificial Sequence
  Description of Artificial Sequence: Synthetic oligonucleotide
  Sense strand starting at position 2902 of SEQ ID NO: 1244192
ugacaacagucuccugaga

SEQ ID NO: 1471647 - RNA, 19 nt, Artificial Sequence
  Description of Artificial Sequence: Synthetic oligonucleotide
  Antisense strand to SEQ ID NO: 1471646
ucucaggagacuguuguca

SEQ ID NO: 1471648 - RNA, 19 nt, Artificial Sequence
  Description of Artificial Sequence: Synthetic oligonucleotide
  Sense strand starting at position 3074 of SEQ ID NO: 1244192
ggaguauugggcugcuuua

SEQ ID NO: 1471649 - RNA, 19 nt, Artificial Sequence
  Description of Artificial Sequence: Synthetic oligonucleotide
  Antisense strand to SEQ ID NO: 1471648
uaaagcagcccaauacucc

SEQ ID NO: 1471650 - RNA, 19 nt, Artificial Sequence
  Description of Artificial Sequence: Synthetic oligonucleotide
  Sense strand starting at position 3128 of SEQ ID NO: 1244192
gccaguaacuugcccauga

SEQ ID NO: 1471651 - RNA, 19 nt, Artificial Sequence
  Description of Artificial Sequence: Synthetic oligonucleotide
  Antisense strand to SEQ ID NO: 1471650
ucaugggcaaguuacuggc

SEQ ID NO: 1471652 - RNA, 19 nt, Artificial Sequence
  Description of Artificial Sequence: Synthetic oligonucleotide
  Sense strand starting at position 3132 of SEQ ID NO: 1244192
guaacuugcccaugaggca

SEQ ID NO: 1471653 - RNA, 19 nt, Artificial Sequence
  Description of Artificial Sequence: Synthetic oligonucleotide
  Antisense strand to SEQ ID NO: 1471652
ugccucaugggcaaguuac

SEQ ID NO: 1471654 - RNA, 19 nt, Artificial Sequence
  Description of Artificial Sequence: Synthetic oligonucleotide
  Sense strand starting at position 3170 of SEQ ID NO: 1244192
aggcaaacauaggaugaau

SEQ ID NO: 1471655 - RNA, 19 nt, Artificial Sequence
  Description of Artificial Sequence: Synthetic oligonucleotide
  Antisense strand to SEQ ID NO: 1471654
auucauccuauguuugccu

SEQ ID NO: 1471656 - RNA, 19 nt, Artificial Sequence
  Description of Artificial Sequence: Synthetic oligonucleotide
  Sense strand starting at position 3222 of SEQ ID NO: 1244192
auguccucauccuuguaua

SEQ ID NO: 1471657 - RNA, 19 nt, Artificial Sequence
  Description of Artificial Sequence: Synthetic oligonucleotide
  Antisense strand to SEQ ID NO: 1471656
uauacaaggaugaggacau

SEQ ID NO: 1471658 - RNA, 19 nt, Artificial Sequence
  Description of Artificial Sequence: Synthetic oligonucleotide
  Sense strand starting at position 3223 of SEQ ID NO: 1244192
uguccucauccuuguauaa

SEQ ID NO: 1471659 - RNA, 19 nt, Artificial Sequence
  Description of Artificial Sequence: Synthetic oligonucleotide
  Antisense strand to SEQ ID NO: 1471658
uuauacaaggaugaggaca

SEQ ID NO: 1471660 - RNA, 19 nt, Artificial Sequence
  Description of Artificial Sequence: Synthetic oligonucleotide
  Sense strand starting at position 3237 of SEQ ID NO: 1244192
uauaaagaugagugcuuga

SEQ ID NO: 1471661 - RNA, 19 nt, Artificial Sequence
  Description of Artificial Sequence: Synthetic oligonucleotide
  Antisense strand to SEQ ID NO: 1471660
ucaagcacucaucuuuaua

SEQ ID NO: 1471662 - RNA, 19 nt, Artificial Sequence
  Description of Artificial Sequence: Synthetic oligonucleotide
  Sense strand starting at position 3240 of SEQ ID NO: 1244192
aaagaugagugcuugaaug

SEQ ID NO: 1471663 - RNA, 19 nt, Artificial Sequence
  Description of Artificial Sequence: Synthetic oligonucleotide
  Antisense strand to SEQ ID NO: 1471662
cauucaagcacucaucuuu

SEQ ID NO: 1471664 - RNA, 19 nt, Artificial Sequence
  Description of Artificial Sequence: Synthetic oligonucleotide
  Sense strand starting at position 3489 of SEQ ID NO: 1244192
ccuucuuguccuuauggca

SEQ ID NO: 1471665 - RNA, 19 nt, Artificial Sequence
  Description of Artificial Sequence: Synthetic oligonucleotide
  Antisense strand to SEQ ID NO: 1471664
ugccauaaggacaagaagg

SEQ ID NO: 1471666 - RNA, 19 nt, Artificial Sequence
  Description of Artificial Sequence: Synthetic oligonucleotide
  Sense strand starting at position 3541 of SEQ ID NO: 1244192
cugagaagguauuaaggga

SEQ ID NO: 1471667 - RNA, 19 nt, Artificial Sequence
  Description of Artificial Sequence: Synthetic oligonucleotide
  Antisense strand to SEQ ID NO: 1471666
ucccuuaauaccuucucag

SEQ ID NO: 1471668 - RNA, 19 nt, Artificial Sequence
  Description of Artificial Sequence: Synthetic oligonucleotide
  Sense strand starting at position 3627 of SEQ ID NO: 1244192
agcccucuucucuguguau

SEQ ID NO: 1471669 - RNA, 19 nt, Artificial Sequence
  Description of Artificial Sequence: Synthetic oligonucleotide
  Antisense strand to SEQ ID NO: 1471668
auacacagagaagagggcu

SEQ ID NO: 1471670 - RNA, 19 nt, Artificial Sequence
  Description of Artificial Sequence: Synthetic oligonucleotide
  Sense strand starting at position 3628 of SEQ ID NO: 1244192
gcccucuucucuguguauu

SEQ ID NO: 1471671 - RNA, 19 nt, Artificial Sequence
  Description of Artificial Sequence: Synthetic oligonucleotide
  Antisense strand to SEQ ID NO: 1471670
aauacacagagaagagggc

SEQ ID NO: 1471672 - RNA, 19 nt, Artificial Sequence
  Description of Artificial Sequence: Synthetic oligonucleotide
  Sense strand starting at position 3629 of SEQ ID NO: 1244192
cccucuucucuguguauua

SEQ ID NO: 1471673 - RNA, 19 nt, Artificial Sequence
  Description of Artificial Sequence: Synthetic oligonucleotide
  Antisense strand to SEQ ID NO: 1471672
uaauacacagagaagaggg

SEQ ID NO: 1471674 - RNA, 19 nt, Artificial Sequence
  Description of Artificial Sequence: Synthetic oligonucleotide
  Sense strand starting at position 3630 of SEQ ID NO: 1244192
ccucuucucuguguauuau

SEQ ID NO: 1471675 - RNA, 19 nt, Artificial Sequence
  Description of Artificial Sequence: Synthetic oligonucleotide
  Antisense strand to SEQ ID NO: 1471674
auaauacacagagaagagg

SEQ ID NO: 1471676 - RNA, 19 nt, Artificial Sequence
  Description of Artificial Sequence: Synthetic oligonucleotide
  Sense strand starting at position 3639 of SEQ ID NO: 1244192
uguguauuaucaccugggu

SEQ ID NO: 1471677 - RNA, 19 nt, Artificial Sequence
  Description of Artificial Sequence: Synthetic oligonucleotide
  Antisense strand to SEQ ID NO: 1471676
acccaggugauaauacaca

SEQ ID NO: 1471678 - RNA, 19 nt, Artificial Sequence
  Description of Artificial Sequence: Synthetic oligonucleotide
  Sense strand starting at position 3642 of SEQ ID NO: 1244192
guauuaucaccugggucac

SEQ ID NO: 1471679 - RNA, 19 nt, Artificial Sequence
  Description of Artificial Sequence: Synthetic oligonucleotide
  Antisense strand to SEQ ID NO: 1471678
gugacccaggugauaauac

SEQ ID NO: 1471680 - RNA, 19 nt, Artificial Sequence
  Description of Artificial Sequence: Synthetic oligonucleotide
  Sense strand starting at position 3669 of SEQ ID NO: 1244192
gguggagacuugucuccag

SEQ ID NO: 1471681 - RNA, 19 nt, Artificial Sequence
  Description of Artificial Sequence: Synthetic oligonucleotide
  Antisense strand to SEQ ID NO: 1471680
cuggagacaagucuccacc

SEQ ID NO: 1471682 - RNA, 19 nt, Artificial Sequence
  Description of Artificial Sequence: Synthetic oligonucleotide
  Sense strand starting at position 3672 of SEQ ID NO: 1244192
ggagacuugucuccagccu

SEQ ID NO: 1471683 - RNA, 19 nt, Artificial Sequence
  Description of Artificial Sequence: Synthetic oligonucleotide
  Antisense strand to SEQ ID NO: 1471682
aggcuggagacaagucucc

SEQ ID NO: 1471684 - RNA, 19 nt, Artificial Sequence
  Description of Artificial Sequence: Synthetic oligonucleotide
  Sense strand starting at position 3812 of SEQ ID NO: 1244192
ccagucugaggcuguuuaa

SEQ ID NO: 1471685 - RNA, 19 nt, Artificial Sequence
  Description of Artificial Sequence: Synthetic oligonucleotide
  Antisense strand to SEQ ID NO: 1471684
uuaaacagccucagacugg

SEQ ID NO: 1471686 - RNA, 19 nt, Artificial Sequence
  Description of Artificial Sequence: Synthetic oligonucleotide
  Sense strand starting at position 3815 of SEQ ID NO: 1244192
gucugaggcuguuuaacua

SEQ ID NO: 1471687 - RNA, 19 nt, Artificial Sequence
  Description of Artificial Sequence: Synthetic oligonucleotide
  Antisense strand to SEQ ID NO: 1471686
uaguuaaacagccucagac

SEQ ID NO: 1471688 - RNA, 19 nt, Artificial Sequence
  Description of Artificial Sequence: Synthetic oligonucleotide
  Sense strand starting at position 3819 of SEQ ID NO: 1244192
gaggcuguuuaacuaguga

SEQ ID NO: 1471689 - RNA, 19 nt, Artificial Sequence
  Description of Artificial Sequence: Synthetic oligonucleotide
  Antisense strand to SEQ ID NO: 1471688
ucacuaguuaaacagccuc

SEQ ID NO: 1471690 - RNA, 19 nt, Artificial Sequence
  Description of Artificial Sequence: Synthetic oligonucleotide
  Sense strand starting at position 3834 of SEQ ID NO: 1244192
gugaaucaguugcagaaag

SEQ ID NO: 1471691 - RNA, 19 nt, Artificial Sequence
  Description of Artificial Sequence: Synthetic oligonucleotide
  Antisense strand to SEQ ID NO: 1471690
cuuucugcaacugauucac

SEQ ID NO: 1471692 - RNA, 19 nt, Artificial Sequence
  Description of Artificial Sequence: Synthetic oligonucleotide
  Sense strand starting at position 3926 of SEQ ID NO: 1244192
acuggucagcucugaguca

SEQ ID NO: 1471693 - RNA, 19 nt, Artificial Sequence
  Description of Artificial Sequence: Synthetic oligonucleotide
  Antisense strand to SEQ ID NO: 1471692
ugacucagagcugaccagu

SEQ ID NO: 1471694 - RNA, 19 nt, Artificial Sequence
  Description of Artificial Sequence: Synthetic oligonucleotide
  Sense strand starting at position 3937 of SEQ ID NO: 1244192
cugagucauucccuuauca

SEQ ID NO: 1471695 - RNA, 19 nt, Artificial Sequence
  Description of Artificial Sequence: Synthetic oligonucleotide
  Antisense strand to SEQ ID NO: 1471694
ugauaagggaaugacucag

SEQ ID NO: 1471696 - RNA, 19 nt, Artificial Sequence
  Description of Artificial Sequence: Synthetic oligonucleotide
  Sense strand starting at position 3939 of SEQ ID NO: 1244192
gagucauucccuuaucagg

SEQ ID NO: 1471697 - RNA, 19 nt, Artificial Sequence
  Description of Artificial Sequence: Synthetic oligonucleotide
  Antisense strand to SEQ ID NO: 1471696
ccugauaagggaaugacuc

SEQ ID NO: 1471698 - RNA, 19 nt, Artificial Sequence
  Description of Artificial Sequence: Synthetic oligonucleotide
  Sense strand starting at position 3978 of SEQ ID NO: 1244192
ccuuguuagcgggaaggga

SEQ ID NO: 1471699 - RNA, 19 nt, Artificial Sequence
  Description of Artificial Sequence: Synthetic oligonucleotide
  Antisense strand to SEQ ID NO: 1471698
ucccuucccgcuaacaagg

SEQ ID NO: 1471700 - RNA, 19 nt, Artificial Sequence
  Description of Artificial Sequence: Synthetic oligonucleotide
  Sense strand starting at position 30 of SEQ ID NO: 1244193
ugauguuucuacuuaggac

SEQ ID NO: 1471701 - RNA, 19 nt, Artificial Sequence
  Description of Artificial Sequence: Synthetic oligonucleotide
  Antisense strand to SEQ ID NO: 1471700
guccuaaguagaaacauca

SEQ ID NO: 1471702 - RNA, 19 nt, Artificial Sequence
  Description of Artificial Sequence: Synthetic oligonucleotide
  Sense strand starting at position 227 of SEQ ID NO: 1244193
ucauauuguguccaccaua

SEQ ID NO: 1471703 - RNA, 19 nt, Artificial Sequence
  Description of Artificial Sequence: Synthetic oligonucleotide
  Antisense strand to SEQ ID NO: 1471702
uaugguggacacaauauga

SEQ ID NO: 1471704 - RNA, 19 nt, Artificial Sequence
  Description of Artificial Sequence: Synthetic oligonucleotide
  Sense strand starting at position 232 of SEQ ID NO: 1244193
uuguguccaccauaauauu

SEQ ID NO: 1471705 - RNA, 19 nt, Artificial Sequence
  Description of Artificial Sequence: Synthetic oligonucleotide
  Antisense strand to SEQ ID NO: 1471704
aauauuaugguggacacaa

SEQ ID NO: 1471706 - RNA, 19 nt, Artificial Sequence
  Description of Artificial Sequence: Synthetic oligonucleotide
  Sense strand starting at position 331 of SEQ ID NO: 1244193
gaacgaaaugcaugaugga

SEQ ID NO: 1471707 - RNA, 19 nt, Artificial Sequence
  Description of Artificial Sequence: Synthetic oligonucleotide
  Antisense strand to SEQ ID NO: 1471706
uccaucaugcauuucguuc

SEQ ID NO: 1471708 - RNA, 19 nt, Artificial Sequence
  Description of Artificial Sequence: Synthetic oligonucleotide
  Sense strand starting at position 338 of SEQ ID NO: 1244193
augcaugauggaggcauau

SEQ ID NO: 1471709 - RNA, 19 nt, Artificial Sequence
  Description of Artificial Sequence: Synthetic oligonucleotide
  Antisense strand to SEQ ID NO: 1471708
auaugccuccaucaugcau

SEQ ID NO: 1471710 - RNA, 19 nt, Artificial Sequence
  Description of Artificial Sequence: Synthetic oligonucleotide
  Sense strand starting at position 340 of SEQ ID NO: 1244193
gcaugauggaggcauauag

SEQ ID NO: 1471711 - RNA, 19 nt, Artificial Sequence
  Description of Artificial Sequence: Synthetic oligonucleotide
  Antisense strand to SEQ ID NO: 1471710
cuauaugccuccaucaugc

SEQ ID NO: 1471712 - RNA, 19 nt, Artificial Sequence
  Description of Artificial Sequence: Synthetic oligonucleotide
  Sense strand starting at position 368 of SEQ ID NO: 1244193
cuacuugcagaagauguua

SEQ ID NO: 1471713 - RNA, 19 nt, Artificial Sequence
  Description of Artificial Sequence: Synthetic oligonucleotide
  Antisense strand to SEQ ID NO: 1471712
uaacaucuucugcaaguag

SEQ ID NO: 1471714 - RNA, 19 nt, Artificial Sequence
  Description of Artificial Sequence: Synthetic oligonucleotide
  Sense strand starting at position 469 of SEQ ID NO: 1244193
uggccugugccuguguauu

SEQ ID NO: 1471715 - RNA, 19 nt, Artificial Sequence
  Description of Artificial Sequence: Synthetic oligonucleotide
  Antisense strand to SEQ ID NO: 1471714
aauacacaggcacaggcca

SEQ ID NO: 1471716 - RNA, 19 nt, Artificial Sequence
  Description of Artificial Sequence: Synthetic oligonucleotide
  Sense strand starting at position 548 of SEQ ID NO: 1244193
agagcuugcgaaggaugaa

SEQ ID NO: 1471717 - RNA, 19 nt, Artificial Sequence
  Description of Artificial Sequence: Synthetic oligonucleotide
  Antisense strand to SEQ ID NO: 1471716
uucauccuucgcaagcucu

SEQ ID NO: 1471718 - RNA, 19 nt, Artificial Sequence
  Description of Artificial Sequence: Synthetic oligonucleotide
  Sense strand starting at position 560 of SEQ ID NO: 1244193
ggaugaacuuuauuccgga

SEQ ID NO: 1471719 - RNA, 19 nt, Artificial Sequence
  Description of Artificial Sequence: Synthetic oligonucleotide
  Antisense strand to SEQ ID NO: 1471718
uccggaauaaaguucaucc

SEQ ID NO: 1471720 - RNA, 19 nt, Artificial Sequence
  Description of Artificial Sequence: Synthetic oligonucleotide
  Sense strand starting at position 561 of SEQ ID NO: 1244193
gaugaacuuuauuccggaa

SEQ ID NO: 1471721 - RNA, 19 nt, Artificial Sequence
  Description of Artificial Sequence: Synthetic oligonucleotide
  Antisense strand to SEQ ID NO: 1471720
uuccggaauaaaguucauc

SEQ ID NO: 1471722 - RNA, 19 nt, Artificial Sequence
  Description of Artificial Sequence: Synthetic oligonucleotide
  Sense strand starting at position 654 of SEQ ID NO: 1244193
ucaaauugcccugauguuu

SEQ ID NO: 1471723 - RNA, 19 nt, Artificial Sequence
  Description of Artificial Sequence: Synthetic oligonucleotide
  Antisense strand to SEQ ID NO: 1471722
aaacaucagggcaauuuga

SEQ ID NO: 1471724 - RNA, 19 nt, Artificial Sequence
  Description of Artificial Sequence: Synthetic oligonucleotide
  Sense strand starting at position 660 of SEQ ID NO: 1244193
ugcccugauguuuaguaca

SEQ ID NO: 1471725 - RNA, 19 nt, Artificial Sequence
  Description of Artificial Sequence: Synthetic oligonucleotide
  Antisense strand to SEQ ID NO: 1471724
uguacuaaacaucagggca

SEQ ID NO: 1471726 - RNA, 19 nt, Artificial Sequence
  Description of Artificial Sequence: Synthetic oligonucleotide
  Sense strand starting at position 662 of SEQ ID NO: 1244193
cccugauguuuaguacaac

SEQ ID NO: 1471727 - RNA, 19 nt, Artificial Sequence
  Description of Artificial Sequence: Synthetic oligonucleotide
  Antisense strand to SEQ ID NO: 1471726
guuguacuaaacaucaggg

SEQ ID NO: 1471728 - RNA, 19 nt, Artificial Sequence
  Description of Artificial Sequence: Synthetic oligonucleotide
  Sense strand starting at position 665 of SEQ ID NO: 1244193
ugauguuuaguacaacuca

SEQ ID NO: 1471729 - RNA, 19 nt, Artificial Sequence
  Description of Artificial Sequence: Synthetic oligonucleotide
  Antisense strand to SEQ ID NO: 1471728
ugaguuguacuaaacauca

SEQ ID NO: 1471730 - RNA, 19 nt, Artificial Sequence
  Description of Artificial Sequence: Synthetic oligonucleotide
  Sense strand starting at position 899 of SEQ ID NO: 1244193
auaggaggagguugugaua

SEQ ID NO: 1471731 - RNA, 19 nt, Artificial Sequence
  Description of Artificial Sequence: Synthetic oligonucleotide
  Antisense strand to SEQ ID NO: 1471730
uaucacaaccuccuccuau

SEQ ID NO: 1471732 - RNA, 19 nt, Artificial Sequence
  Description of Artificial Sequence: Synthetic oligonucleotide
  Sense strand starting at position 906 of SEQ ID NO: 1244193
gagguugugauaugauugu

SEQ ID NO: 1471733 - RNA, 19 nt, Artificial Sequence
  Description of Artificial Sequence: Synthetic oligonucleotide
  Antisense strand to SEQ ID NO: 1471732
acaaucauaucacaaccuc

SEQ ID NO: 1471734 - RNA, 19 nt, Artificial Sequence
  Description of Artificial Sequence: Synthetic oligonucleotide
  Sense strand starting at position 988 of SEQ ID NO: 1244193
gaugcugauggucauguua

SEQ ID NO: 1471735 - RNA, 19 nt, Artificial Sequence
  Description of Artificial Sequence: Synthetic oligonucleotide
  Antisense strand to SEQ ID NO: 1471734
uaacaugaccaucagcauc

SEQ ID NO: 1471736 - RNA, 19 nt, Artificial Sequence
  Description of Artificial Sequence: Synthetic oligonucleotide
  Sense strand starting at position 995 of SEQ ID NO: 1244193
auggucauguuauuaaaca

SEQ ID NO: 1471737 - RNA, 19 nt, Artificial Sequence
  Description of Artificial Sequence: Synthetic oligonucleotide
  Antisense strand to SEQ ID NO: 1471736
uguuuaauaacaugaccau

SEQ ID NO: 1471738 - RNA, 19 nt, Artificial Sequence
  Description of Artificial Sequence: Synthetic oligonucleotide
  Sense strand starting at position 1089 of SEQ ID NO: 1244193
uuaaaucugcaguacagua

SEQ ID NO: 1471739 - RNA, 19 nt, Artificial Sequence
  Description of Artificial Sequence: Synthetic oligonucleotide
  Antisense strand to SEQ ID NO: 1471738
uacuguacugcagauuuaa

SEQ ID NO: 1471740 - RNA, 19 nt, Artificial Sequence
  Description of Artificial Sequence: Synthetic oligonucleotide
  Sense strand starting at position 1276 of SEQ ID NO: 1244193
ugugauaagcugugacaaa

SEQ ID NO: 1471741 - RNA, 19 nt, Artificial Sequence
  Description of Artificial Sequence: Synthetic oligonucleotide
  Antisense strand to SEQ ID NO: 1471740
uuugucacagcuuaucaca

SEQ ID NO: 1471742 - RNA, 19 nt, Artificial Sequence
  Description of Artificial Sequence: Synthetic oligonucleotide
  Sense strand starting at position 1698 of SEQ ID NO: 1244193
gcuagacggucauuuaggu

SEQ ID NO: 1471743 - RNA, 19 nt, Artificial Sequence
  Description of Artificial Sequence: Synthetic oligonucleotide
  Antisense strand to SEQ ID NO: 1471742
accuaaaugaccgucuagc

SEQ ID NO: 1471744 - RNA, 19 nt, Artificial Sequence
  Description of Artificial Sequence: Synthetic oligonucleotide
  Sense strand starting at position 1928 of SEQ ID NO: 1244193
gcgacugaaauccauugga

SEQ ID NO: 1471745 - RNA, 19 nt, Artificial Sequence
  Description of Artificial Sequence: Synthetic oligonucleotide
  Antisense strand to SEQ ID NO: 1471744
uccaauggauuucagucgc

SEQ ID NO: 1471746 - RNA, 19 nt, Artificial Sequence
  Description of Artificial Sequence: Synthetic oligonucleotide
  Sense strand starting at position 2024 of SEQ ID NO: 1244193
uuaugaaguccacaggcaa

SEQ ID NO: 1471747 - RNA, 19 nt, Artificial Sequence
  Description of Artificial Sequence: Synthetic oligonucleotide
  Antisense strand to SEQ ID NO: 1471746
uugccuguggacuucauaa

SEQ ID NO: 1471748 - RNA, 19 nt, Artificial Sequence
  Description of Artificial Sequence: Synthetic oligonucleotide
  Sense strand starting at position 2057 of SEQ ID NO: 1244193
gcugacaugucacuaggau

SEQ ID NO: 1471749 - RNA, 19 nt, Artificial Sequence
  Description of Artificial Sequence: Synthetic oligonucleotide
  Antisense strand to SEQ ID NO: 1471748
auccuagugacaugucagc

SEQ ID NO: 1471750 - RNA, 19 nt, Artificial Sequence
  Description of Artificial Sequence: Synthetic oligonucleotide
  Sense strand starting at position 2352 of SEQ ID NO: 1244193
ggcagaugugccuacauaa

SEQ ID NO: 1471751 - RNA, 19 nt, Artificial Sequence
  Description of Artificial Sequence: Synthetic oligonucleotide
  Antisense strand to SEQ ID NO: 1471750
uuauguaggcacaucugcc

SEQ ID NO: 1471752 - RNA, 19 nt, Artificial Sequence
  Description of Artificial Sequence: Synthetic oligonucleotide
  Sense strand starting at position 2933 of SEQ ID NO: 1244193
ccauaaucacagcgagagu

SEQ ID NO: 1471753 - RNA, 19 nt, Artificial Sequence
  Description of Artificial Sequence: Synthetic oligonucleotide
  Antisense strand to SEQ ID NO: 1471752
acucucgcugugauuaugg

SEQ ID NO: 1471754 - RNA, 19 nt, Artificial Sequence
  Description of Artificial Sequence: Synthetic oligonucleotide
  Sense strand starting at position 3058 of SEQ ID NO: 1244193
augaucucaucggugggaa

SEQ ID NO: 1471755 - RNA, 19 nt, Artificial Sequence
  Description of Artificial Sequence: Synthetic oligonucleotide
  Antisense strand to SEQ ID NO: 1471754
uucccaccgaugagaucau

SEQ ID NO: 1471756 - RNA, 19 nt, Artificial Sequence
  Description of Artificial Sequence: Synthetic oligonucleotide
  Sense strand starting at position 3059 of SEQ ID NO: 1244193
ugaucucaucggugggaau

SEQ ID NO: 1471757 - RNA, 19 nt, Artificial Sequence
  Description of Artificial Sequence: Synthetic oligonucleotide
  Antisense strand to SEQ ID NO: 1471756
auucccaccgaugagauca

SEQ ID NO: 1471758 - RNA, 19 nt, Artificial Sequence
  Description of Artificial Sequence: Synthetic oligonucleotide
  Sense strand starting at position 3060 of SEQ ID NO: 1244193
gaucucaucggugggaauc

SEQ ID NO: 1471759 - RNA, 19 nt, Artificial Sequence
  Description of Artificial Sequence: Synthetic oligonucleotide
  Antisense strand to SEQ ID NO: 1471758
gauucccaccgaugagauc

SEQ ID NO: 1471760 - RNA, 19 nt, Artificial Sequence
  Description of Artificial Sequence: Synthetic oligonucleotide
  Sense strand starting at position 3070 of SEQ ID NO: 1244193
gugggaaucugauuguaag

SEQ ID NO: 1471761 - RNA, 19 nt, Artificial Sequence
  Description of Artificial Sequence: Synthetic oligonucleotide
  Antisense strand to SEQ ID NO: 1471760
cuuacaaucagauucccac

SEQ ID NO: 1471762 - RNA, 19 nt, Artificial Sequence
  Description of Artificial Sequence: Synthetic oligonucleotide
  Sense strand starting at position 3071 of SEQ ID NO: 1244193
ugggaaucugauuguaagc

SEQ ID NO: 1471763 - RNA, 19 nt, Artificial Sequence
  Description of Artificial Sequence: Synthetic oligonucleotide
  Antisense strand to SEQ ID NO: 1471762
gcuuacaaucagauuccca

SEQ ID NO: 1471764 - RNA, 19 nt, Artificial Sequence
  Description of Artificial Sequence: Synthetic oligonucleotide
  Sense strand starting at position 3092 of SEQ ID NO: 1244193
ccaauaaaugccugaguca

SEQ ID NO: 1471765 - RNA, 19 nt, Artificial Sequence
  Description of Artificial Sequence: Synthetic oligonucleotide
  Antisense strand to SEQ ID NO: 1471764
ugacucaggcauuuauugg

SEQ ID NO: 1471766 - RNA, 19 nt, Artificial Sequence
  Description of Artificial Sequence: Synthetic oligonucleotide
  Sense strand starting at position 3154 of SEQ ID NO: 1244193
ucccaugaagcauguaaau

SEQ ID NO: 1471767 - RNA, 19 nt, Artificial Sequence
  Description of Artificial Sequence: Synthetic oligonucleotide
  Antisense strand to SEQ ID NO: 1471766
auuuacaugcuucauggga

SEQ ID NO: 1471768 - RNA, 19 nt, Artificial Sequence
  Description of Artificial Sequence: Synthetic oligonucleotide
  Sense strand starting at position 3317 of SEQ ID NO: 1244193
guauauaauuaagcaagca

SEQ ID NO: 1471769 - RNA, 19 nt, Artificial Sequence
  Description of Artificial Sequence: Synthetic oligonucleotide
  Antisense strand to SEQ ID NO: 1471768
ugcuugcuuaauuauauac

SEQ ID NO: 1471770 - RNA, 19 nt, Artificial Sequence
  Description of Artificial Sequence: Synthetic oligonucleotide
  Sense strand starting at position 3441 of SEQ ID NO: 1244193
uuuagaaaccaguggcuuu

SEQ ID NO: 1471771 - RNA, 19 nt, Artificial Sequence
  Description of Artificial Sequence: Synthetic oligonucleotide
  Antisense strand to SEQ ID NO: 1471770
aaagccacugguuucuaaa

SEQ ID NO: 1471772 - RNA, 19 nt, Artificial Sequence
  Description of Artificial Sequence: Synthetic oligonucleotide
  Sense strand starting at position 3687 of SEQ ID NO: 1244193
agccaauacugaguacuca

SEQ ID NO: 1471773 - RNA, 19 nt, Artificial Sequence
  Description of Artificial Sequence: Synthetic oligonucleotide
  Antisense strand to SEQ ID NO: 1471772
ugaguacucaguauuggcu

SEQ ID NO: 1471774 - RNA, 19 nt, Artificial Sequence
  Description of Artificial Sequence: Synthetic oligonucleotide
  Sense strand starting at position 3727 of SEQ ID NO: 1244193
gcaagaagaccuugcuaac

SEQ ID NO: 1471775 - RNA, 19 nt, Artificial Sequence
  Description of Artificial Sequence: Synthetic oligonucleotide
  Antisense strand to SEQ ID NO: 1471774
guuagcaaggucuucuugc

SEQ ID NO: 1471776 - RNA, 19 nt, Artificial Sequence
  Description of Artificial Sequence: Synthetic oligonucleotide
  Sense strand starting at position 3784 of SEQ ID NO: 1244193
agcuaaacucuguagcaga

SEQ ID NO: 1471777 - RNA, 19 nt, Artificial Sequence
  Description of Artificial Sequence: Synthetic oligonucleotide
  Antisense strand to SEQ ID NO: 1471776
ucugcuacagaguuuagcu

SEQ ID NO: 1471778 - RNA, 19 nt, Artificial Sequence
  Description of Artificial Sequence: Synthetic oligonucleotide
  Sense strand starting at position 3983 of SEQ ID NO: 1244193
acaugaucaagguguguag

SEQ ID NO: 1471779 - RNA, 19 nt, Artificial Sequence
  Description of Artificial Sequence: Synthetic oligonucleotide
  Antisense strand to SEQ ID NO: 1471778
cuacacaccuugaucaugu

SEQ ID NO: 1471780 - RNA, 19 nt, Artificial Sequence
  Description of Artificial Sequence: Synthetic oligonucleotide
  Sense strand starting at position 78 of SEQ ID NO: 1244194
agaagucuaucucccaaga

SEQ ID NO: 1471781 - RNA, 19 nt, Artificial Sequence
  Description of Artificial Sequence: Synthetic oligonucleotide
  Antisense strand to SEQ ID NO: 1471780
ucuugggagauagacuucu

SEQ ID NO: 1471782 - RNA, 19 nt, Artificial Sequence
  Description of Artificial Sequence: Synthetic oligonucleotide
  Sense strand starting at position 83 of SEQ ID NO: 1244194
ucuaucucccaagaugagu

SEQ ID NO: 1471783 - RNA, 19 nt, Artificial Sequence
  Description of Artificial Sequence: Synthetic oligonucleotide
  Antisense strand to SEQ ID NO: 1471782
acucaucuugggagauaga

SEQ ID NO: 1471784 - RNA, 19 nt, Artificial Sequence
  Description of Artificial Sequence: Synthetic oligonucleotide
  Sense strand starting at position 94 of SEQ ID NO: 1244194
agaugaguccuagggugau

SEQ ID NO: 1471785 - RNA, 19 nt, Artificial Sequence
  Description of Artificial Sequence: Synthetic oligonucleotide
  Antisense strand to SEQ ID NO: 1471784
aucacccuaggacucaucu

SEQ ID NO: 1471786 - RNA, 19 nt, Artificial Sequence
  Description of Artificial Sequence: Synthetic oligonucleotide
  Sense strand starting at position 385 of SEQ ID NO: 1244194
gugccagacacauaaguga

SEQ ID NO: 1471787 - RNA, 19 nt, Artificial Sequence
  Description of Artificial Sequence: Synthetic oligonucleotide
  Antisense strand to SEQ ID NO: 1471786
ucacuuaugugucuggcac

SEQ ID NO: 1471788 - RNA, 19 nt, Artificial Sequence
  Description of Artificial Sequence: Synthetic oligonucleotide
  Sense strand starting at position 542 of SEQ ID NO: 1244194
cugaguuauuuggaagaaa

SEQ ID NO: 1471789 - RNA, 19 nt, Artificial Sequence
  Description of Artificial Sequence: Synthetic oligonucleotide
  Antisense strand to SEQ ID NO: 1471788
uuucuuccaaauaacucag

SEQ ID NO: 1471790 - RNA, 19 nt, Artificial Sequence
  Description of Artificial Sequence: Synthetic oligonucleotide
  Sense strand starting at position 746 of SEQ ID NO: 1244194
guuuguaaaggugaaugaa

SEQ ID NO: 1471791 - RNA, 19 nt, Artificial Sequence
  Description of Artificial Sequence: Synthetic oligonucleotide
  Antisense strand to SEQ ID NO: 1471790
uucauucaccuuuacaaac

SEQ ID NO: 1471792 - RNA, 19 nt, Artificial Sequence
  Description of Artificial Sequence: Synthetic oligonucleotide
  Sense strand starting at position 749 of SEQ ID NO: 1244194
uguaaaggugaaugaacua

SEQ ID NO: 1471793 - RNA, 19 nt, Artificial Sequence
  Description of Artificial Sequence: Synthetic oligonucleotide
  Antisense strand to SEQ ID NO: 1471792
uaguucauucaccuuuaca

SEQ ID NO: 1471794 - RNA, 19 nt, Artificial Sequence
  Description of Artificial Sequence: Synthetic oligonucleotide
  Sense strand starting at position 804 of SEQ ID NO: 1244194
cuaagauguugaucauucu

SEQ ID NO: 1471795 - RNA, 19 nt, Artificial Sequence
  Description of Artificial Sequence: Synthetic oligonucleotide
  Antisense strand to SEQ ID NO: 1471794
agaaugaucaacaucuuag

SEQ ID NO: 1471796 - RNA, 19 nt, Artificial Sequence
  Description of Artificial Sequence: Synthetic oligonucleotide
  Sense strand starting at position 807 of SEQ ID NO: 1244194
agauguugaucauucuuua

SEQ ID NO: 1471797 - RNA, 19 nt, Artificial Sequence
  Description of Artificial Sequence: Synthetic oligonucleotide
  Antisense strand to SEQ ID NO: 1471796
uaaagaaugaucaacaucu

SEQ ID NO: 1471798 - RNA, 19 nt, Artificial Sequence
  Description of Artificial Sequence: Synthetic oligonucleotide
  Sense strand starting at position 818 of SEQ ID NO: 1244194
auucuuuaugaaggcugaa

SEQ ID NO: 1471799 - RNA, 19 nt, Artificial Sequence
  Description of Artificial Sequence: Synthetic oligonucleotide
  Antisense strand to SEQ ID NO: 1471798
uucagccuucauaaagaau

SEQ ID NO: 1471800 - RNA, 19 nt, Artificial Sequence
  Description of Artificial Sequence: Synthetic oligonucleotide
  Sense strand starting at position 838 of SEQ ID NO: 1244194
auguuaucuagaggugaaa

SEQ ID NO: 1471801 - RNA, 19 nt, Artificial Sequence
  Description of Artificial Sequence: Synthetic oligonucleotide
  Antisense strand to SEQ ID NO: 1471800
uuucaccucuagauaacau

SEQ ID NO: 1471802 - RNA, 19 nt, Artificial Sequence
  Description of Artificial Sequence: Synthetic oligonucleotide
  Sense strand starting at position 849 of SEQ ID NO: 1244194
aggugaaauuuacaaugga

SEQ ID NO: 1471803 - RNA, 19 nt, Artificial Sequence
  Description of Artificial Sequence: Synthetic oligonucleotide
  Antisense strand to SEQ ID NO: 1471802
uccauuguaaauuucaccu

SEQ ID NO: 1471804 - RNA, 19 nt, Artificial Sequence
  Description of Artificial Sequence: Synthetic oligonucleotide
  Sense strand starting at position 888 of SEQ ID NO: 1244194
ggaauaaaggccugacauu

SEQ ID NO: 1471805 - RNA, 19 nt, Artificial Sequence
  Description of Artificial Sequence: Synthetic oligonucleotide
  Antisense strand to SEQ ID NO: 1471804
aaugucaggccuuuauucc

SEQ ID NO: 1471806 - RNA, 19 nt, Artificial Sequence
  Description of Artificial Sequence: Synthetic oligonucleotide
  Sense strand starting at position 1103 of SEQ ID NO: 1244194
aggugauuguuacuuuaaa

SEQ ID NO: 1471807 - RNA, 19 nt, Artificial Sequence
  Description of Artificial Sequence: Synthetic oligonucleotide
  Antisense strand to SEQ ID NO: 1471806
uuuaaaguaacaaucaccu

SEQ ID NO: 1471808 - RNA, 19 nt, Artificial Sequence
  Description of Artificial Sequence: Synthetic oligonucleotide
  Sense strand starting at position 1129 of SEQ ID NO: 1244194
cuaugaaauuaggauuuag

SEQ ID NO: 1471809 - RNA, 19 nt, Artificial Sequence
  Description of Artificial Sequence: Synthetic oligonucleotide
  Antisense strand to SEQ ID NO: 1471808
cuaaauccuaauuucauag

SEQ ID NO: 1471810 - RNA, 19 nt, Artificial Sequence
  Description of Artificial Sequence: Synthetic oligonucleotide
  Sense strand starting at position 1300 of SEQ ID NO: 1244194
auaucauuguuucugaaug

SEQ ID NO: 1471811 - RNA, 19 nt, Artificial Sequence
  Description of Artificial Sequence: Synthetic oligonucleotide
  Antisense strand to SEQ ID NO: 1471810
cauucagaaacaaugauau

SEQ ID NO: 1471812 - RNA, 19 nt, Artificial Sequence
  Description of Artificial Sequence: Synthetic oligonucleotide
  Sense strand starting at position 1412 of SEQ ID NO: 1244194
cuagaaaguguacaugcua

SEQ ID NO: 1471813 - RNA, 19 nt, Artificial Sequence
  Description of Artificial Sequence: Synthetic oligonucleotide
  Antisense strand to SEQ ID NO: 1471812
uagcauguacacuuucuag

SEQ ID NO: 1471814 - RNA, 19 nt, Artificial Sequence
  Description of Artificial Sequence: Synthetic oligonucleotide
  Sense strand starting at position 1499 of SEQ ID NO: 1244194
aauaucuuugaaggguauu

SEQ ID NO: 1471815 - RNA, 19 nt, Artificial Sequence
  Description of Artificial Sequence: Synthetic oligonucleotide
  Antisense strand to SEQ ID NO: 1471814
aauacccuucaaagauauu

SEQ ID NO: 1471816 - RNA, 19 nt, Artificial Sequence
  Description of Artificial Sequence: Synthetic oligonucleotide
  Sense strand starting at position 1521 of SEQ ID NO: 1244194
aaugguuccuuccugaaga

SEQ ID NO: 1471817 - RNA, 19 nt, Artificial Sequence
  Description of Artificial Sequence: Synthetic oligonucleotide
  Antisense strand to SEQ ID NO: 1471816
ucuucaggaaggaaccauu

SEQ ID NO: 1471818 - RNA, 19 nt, Artificial Sequence
  Description of Artificial Sequence: Synthetic oligonucleotide
  Sense strand starting at position 1523 of SEQ ID NO: 1244194
ugguuccuuccugaagauu

SEQ ID NO: 1471819 - RNA, 19 nt, Artificial Sequence
  Description of Artificial Sequence: Synthetic oligonucleotide
  Antisense strand to SEQ ID NO: 1471818
aaucuucaggaaggaacca

SEQ ID NO: 1471820 - RNA, 19 nt, Artificial Sequence
  Description of Artificial Sequence: Synthetic oligonucleotide
  Sense strand starting at position 1526 of SEQ ID NO: 1244194
uuccuuccugaagauugua

SEQ ID NO: 1471821 - RNA, 19 nt, Artificial Sequence
  Description of Artificial Sequence: Synthetic oligonucleotide
  Antisense strand to SEQ ID NO: 1471820
uacaaucuucaggaaggaa

SEQ ID NO: 1471822 - RNA, 19 nt, Artificial Sequence
  Description of Artificial Sequence: Synthetic oligonucleotide
  Sense strand starting at position 1529 of SEQ ID NO: 1244194
cuuccugaagauuguaaga

SEQ ID NO: 1471823 - RNA, 19 nt, Artificial Sequence
  Description of Artificial Sequence: Synthetic oligonucleotide
  Antisense strand to SEQ ID NO: 1471822
ucuuacaaucuucaggaag

SEQ ID NO: 1471824 - RNA, 19 nt, Artificial Sequence
  Description of Artificial Sequence: Synthetic oligonucleotide
  Sense strand starting at position 1546 of SEQ ID NO: 1244194
gagguuagagugcaccauu

SEQ ID NO: 1471825 - RNA, 19 nt, Artificial Sequence
  Description of Artificial Sequence: Synthetic oligonucleotide
  Antisense strand to SEQ ID NO: 1471824
aauggugcacucuaaccuc

SEQ ID NO: 1471826 - RNA, 19 nt, Artificial Sequence
  Description of Artificial Sequence: Synthetic oligonucleotide
  Sense strand starting at position 1839 of SEQ ID NO: 1244194
ccuggauccuuguugagag

SEQ ID NO: 1471827 - RNA, 19 nt, Artificial Sequence
  Description of Artificial Sequence: Synthetic oligonucleotide
  Antisense strand to SEQ ID NO: 1471826
cucucaacaaggauccagg

SEQ ID NO: 1471828 - RNA, 19 nt, Artificial Sequence
  Description of Artificial Sequence: Synthetic oligonucleotide
  Sense strand starting at position 2129 of SEQ ID NO: 1244194
uuguuauugguauaguaga

SEQ ID NO: 1471829 - RNA, 19 nt, Artificial Sequence
  Description of Artificial Sequence: Synthetic oligonucleotide
  Antisense strand to SEQ ID NO: 1471828
ucuacuauaccaauaacaa

SEQ ID NO: 1471830 - RNA, 19 nt, Artificial Sequence
  Description of Artificial Sequence: Synthetic oligonucleotide
  Sense strand starting at position 2134 of SEQ ID NO: 1244194
auugguauaguagaaaugu

SEQ ID NO: 1471831 - RNA, 19 nt, Artificial Sequence
  Description of Artificial Sequence: Synthetic oligonucleotide
  Antisense strand to SEQ ID NO: 1471830
acauuucuacuauaccaau

SEQ ID NO: 1471832 - RNA, 19 nt, Artificial Sequence
  Description of Artificial Sequence: Synthetic oligonucleotide
  Sense strand starting at position 2639 of SEQ ID NO: 1244194
agaguugugaguuaacauu

SEQ ID NO: 1471833 - RNA, 19 nt, Artificial Sequence
  Description of Artificial Sequence: Synthetic oligonucleotide
  Antisense strand to SEQ ID NO: 1471832
aauguuaacucacaacucu

SEQ ID NO: 1471834 - RNA, 19 nt, Artificial Sequence
  Description of Artificial Sequence: Synthetic oligonucleotide
  Sense strand starting at position 2907 of SEQ ID NO: 1244194
guaugacaucacugggacu

SEQ ID NO: 1471835 - RNA, 19 nt, Artificial Sequence
  Description of Artificial Sequence: Synthetic oligonucleotide
  Antisense strand to SEQ ID NO: 1471834
agucccagugaugucauac

SEQ ID NO: 1471836 - RNA, 19 nt, Artificial Sequence
  Description of Artificial Sequence: Synthetic oligonucleotide
  Sense strand starting at position 2920 of SEQ ID NO: 1244194
gggacuggcucuuugacaa

SEQ ID NO: 1471837 - RNA, 19 nt, Artificial Sequence
  Description of Artificial Sequence: Synthetic oligonucleotide
  Antisense strand to SEQ ID NO: 1471836
uugucaaagagccaguccc

SEQ ID NO: 1471838 - RNA, 19 nt, Artificial Sequence
  Description of Artificial Sequence: Synthetic oligonucleotide
  Sense strand starting at position 2939 of SEQ ID NO: 1244194
cuugcuuguguuccaugua

SEQ ID NO: 1471839 - RNA, 19 nt, Artificial Sequence
  Description of Artificial Sequence: Synthetic oligonucleotide
  Antisense strand to SEQ ID NO: 1471838
uacauggaacacaagcaag

SEQ ID NO: 1471840 - RNA, 19 nt, Artificial Sequence
  Description of Artificial Sequence: Synthetic oligonucleotide
  Sense strand starting at position 3044 of SEQ ID NO: 1244194
gaaauaugucgugagagug

SEQ ID NO: 1471841 - RNA, 19 nt, Artificial Sequence
  Description of Artificial Sequence: Synthetic oligonucleotide
  Antisense strand to SEQ ID NO: 1471840
cacucucacgacauauuuc

SEQ ID NO: 1471842 - RNA, 19 nt, Artificial Sequence
  Description of Artificial Sequence: Synthetic oligonucleotide
  Sense strand starting at position 3061 of SEQ ID NO: 1244194
uggaucuaucauuauuguu

SEQ ID NO: 1471843 - RNA, 19 nt, Artificial Sequence
  Description of Artificial Sequence: Synthetic oligonucleotide
  Antisense strand to SEQ ID NO: 1471842
aacaauaaugauagaucca

SEQ ID NO: 1471844 - RNA, 19 nt, Artificial Sequence
  Description of Artificial Sequence: Synthetic oligonucleotide
  Sense strand starting at position 3130 of SEQ ID NO: 1244194
uaaucagaccuggguucua

SEQ ID NO: 1471845 - RNA, 19 nt, Artificial Sequence
  Description of Artificial Sequence: Synthetic oligonucleotide
  Antisense strand to SEQ ID NO: 1471844
uagaacccaggucugauua

SEQ ID NO: 1471846 - RNA, 19 nt, Artificial Sequence
  Description of Artificial Sequence: Synthetic oligonucleotide
  Sense strand starting at position 3360 of SEQ ID NO: 1244194
ucuauagauuggucagaga

SEQ ID NO: 1471847 - RNA, 19 nt, Artificial Sequence
  Description of Artificial Sequence: Synthetic oligonucleotide
  Antisense strand to SEQ ID NO: 1471846
ucucugaccaaucuauaga

SEQ ID NO: 1471848 - RNA, 19 nt, Artificial Sequence
  Description of Artificial Sequence: Synthetic oligonucleotide
  Sense strand starting at position 3371 of SEQ ID NO: 1244194
gucagagaccuuuggagua

SEQ ID NO: 1471849 - RNA, 19 nt, Artificial Sequence
  Description of Artificial Sequence: Synthetic oligonucleotide
  Antisense strand to SEQ ID NO: 1471848
uacuccaaaggucucugac

SEQ ID NO: 1471850 - RNA, 19 nt, Artificial Sequence
  Description of Artificial Sequence: Synthetic oligonucleotide
  Sense strand starting at position 3427 of SEQ ID NO: 1244194
augauuaucuaggccaaac

SEQ ID NO: 1471851 - RNA, 19 nt, Artificial Sequence
  Description of Artificial Sequence: Synthetic oligonucleotide
  Antisense strand to SEQ ID NO: 1471850
guuuggccuagauaaucau

SEQ ID NO: 1471852 - RNA, 19 nt, Artificial Sequence
  Description of Artificial Sequence: Synthetic oligonucleotide
  Sense strand starting at position 3485 of SEQ ID NO: 1244194
gagaauuaggcuugggagu

SEQ ID NO: 1471853 - RNA, 19 nt, Artificial Sequence
  Description of Artificial Sequence: Synthetic oligonucleotide
  Antisense strand to SEQ ID NO: 1471852
acucccaagccuaauucuc

SEQ ID NO: 1471854 - RNA, 19 nt, Artificial Sequence
  Description of Artificial Sequence: Synthetic oligonucleotide
  Sense strand starting at position 3626 of SEQ ID NO: 1244194
acuagauucccuggagggu

SEQ ID NO: 1471855 - RNA, 19 nt, Artificial Sequence
  Description of Artificial Sequence: Synthetic oligonucleotide
  Antisense strand to SEQ ID NO: 1471854
acccuccagggaaucuagu

SEQ ID NO: 1471856 - RNA, 19 nt, Artificial Sequence
  Description of Artificial Sequence: Synthetic oligonucleotide
  Sense strand starting at position 3902 of SEQ ID NO: 1244194
uugauacugucuuugaaau

SEQ ID NO: 1471857 - RNA, 19 nt, Artificial Sequence
  Description of Artificial Sequence: Synthetic oligonucleotide
  Antisense strand to SEQ ID NO: 1471856
auuucaaagacaguaucaa

SEQ ID NO: 1471858 - RNA, 19 nt, Artificial Sequence
  Description of Artificial Sequence: Synthetic oligonucleotide
  Sense strand starting at position 3903 of SEQ ID NO: 1244194
ugauacugucuuugaaauc

SEQ ID NO: 1471859 - RNA, 19 nt, Artificial Sequence
  Description of Artificial Sequence: Synthetic oligonucleotide
  Antisense strand to SEQ ID NO: 1471858
gauuucaaagacaguauca

SEQ ID NO: 1471860 - RNA, 19 nt, Artificial Sequence
  Description of Artificial Sequence: Synthetic oligonucleotide
  Sense strand starting at position 4 of SEQ ID NO: 1244195
augucaugaugaccuauau

SEQ ID NO: 1471861 - RNA, 19 nt, Artificial Sequence
  Description of Artificial Sequence: Synthetic oligonucleotide
  Antisense strand to SEQ ID NO: 1471860
auauaggucaucaugacau

SEQ ID NO: 1471862 - RNA, 19 nt, Artificial Sequence
  Description of Artificial Sequence: Synthetic oligonucleotide
  Sense strand starting at position 214 of SEQ ID NO: 1244195
uugggucauaagugacauu

SEQ ID NO: 1471863 - RNA, 19 nt, Artificial Sequence
  Description of Artificial Sequence: Synthetic oligonucleotide
  Antisense strand to SEQ ID NO: 1471862
aaugucacuuaugacccaa

SEQ ID NO: 1471864 - RNA, 19 nt, Artificial Sequence
  Description of Artificial Sequence: Synthetic oligonucleotide
  Sense strand starting at position 277 of SEQ ID NO: 1244195
gugagaaaucaguagucuc

SEQ ID NO: 1471865 - RNA, 19 nt, Artificial Sequence
  Description of Artificial Sequence: Synthetic oligonucleotide
  Antisense strand to SEQ ID NO: 1471864
gagacuacugauuucucac

SEQ ID NO: 1471866 - RNA, 19 nt, Artificial Sequence
  Description of Artificial Sequence: Synthetic oligonucleotide
  Sense strand starting at position 280 of SEQ ID NO: 1244195
agaaaucaguagucucauu

SEQ ID NO: 1471867 - RNA, 19 nt, Artificial Sequence
  Description of Artificial Sequence: Synthetic oligonucleotide
  Antisense strand to SEQ ID NO: 1471866
aaugagacuacugauuucu

SEQ ID NO: 1471868 - RNA, 19 nt, Artificial Sequence
  Description of Artificial Sequence: Synthetic oligonucleotide
  Sense strand starting at position 346 of SEQ ID NO: 1244195
cuacauuauccauggacag

SEQ ID NO: 1471869 - RNA, 19 nt, Artificial Sequence
  Description of Artificial Sequence: Synthetic oligonucleotide
  Antisense strand to SEQ ID NO: 1471868
cuguccauggauaauguag

SEQ ID NO: 1471870 - RNA, 19 nt, Artificial Sequence
  Description of Artificial Sequence: Synthetic oligonucleotide
  Sense strand starting at position 475 of SEQ ID NO: 1244195
uggaaauugucuucuggac

SEQ ID NO: 1471871 - RNA, 19 nt, Artificial Sequence
  Description of Artificial Sequence: Synthetic oligonucleotide
  Antisense strand to SEQ ID NO: 1471870
guccagaagacaauuucca

SEQ ID NO: 1471872 - RNA, 19 nt, Artificial Sequence
  Description of Artificial Sequence: Synthetic oligonucleotide
  Sense strand starting at position 589 of SEQ ID NO: 1244195
uuccucauacugggaauaa

SEQ ID NO: 1471873 - RNA, 19 nt, Artificial Sequence
  Description of Artificial Sequence: Synthetic oligonucleotide
  Antisense strand to SEQ ID NO: 1471872
uuauucccaguaugaggaa

SEQ ID NO: 1471874 - RNA, 19 nt, Artificial Sequence
  Description of Artificial Sequence: Synthetic oligonucleotide
  Sense strand starting at position 599 of SEQ ID NO: 1244195
ugggaauaaucuuucuuac

SEQ ID NO: 1471875 - RNA, 19 nt, Artificial Sequence
  Description of Artificial Sequence: Synthetic oligonucleotide
  Antisense strand to SEQ ID NO: 1471874
guaagaaagauuauuccca

SEQ ID NO: 1471876 - RNA, 19 nt, Artificial Sequence
  Description of Artificial Sequence: Synthetic oligonucleotide
  Sense strand starting at position 601 of SEQ ID NO: 1244195
ggaauaaucuuucuuacug

SEQ ID NO: 1471877 - RNA, 19 nt, Artificial Sequence
  Description of Artificial Sequence: Synthetic oligonucleotide
  Antisense strand to SEQ ID NO: 1471876
caguaagaaagauuauucc

SEQ ID NO: 1471878 - RNA, 19 nt, Artificial Sequence
  Description of Artificial Sequence: Synthetic oligonucleotide
  Sense strand starting at position 690 of SEQ ID NO: 1244195
gaaccuucuccagguagga

SEQ ID NO: 1471879 - RNA, 19 nt, Artificial Sequence
  Description of Artificial Sequence: Synthetic oligonucleotide
  Antisense strand to SEQ ID NO: 1471878
uccuaccuggagaagguuc

SEQ ID NO: 1471880 - RNA, 19 nt, Artificial Sequence
  Description of Artificial Sequence: Synthetic oligonucleotide
  Sense strand starting at position 1066 of SEQ ID NO: 1244195
ggaguucccuucucugaca

SEQ ID NO: 1471881 - RNA, 19 nt, Artificial Sequence
  Description of Artificial Sequence: Synthetic oligonucleotide
  Antisense strand to SEQ ID NO: 1471880
ugucagagaagggaacucc

SEQ ID NO: 1471882 - RNA, 19 nt, Artificial Sequence
  Description of Artificial Sequence: Synthetic oligonucleotide
  Sense strand starting at position 1172 of SEQ ID NO: 1244195
uguuuagagccacaucaau

SEQ ID NO: 1471883 - RNA, 19 nt, Artificial Sequence
  Description of Artificial Sequence: Synthetic oligonucleotide
  Antisense strand to SEQ ID NO: 1471882
auugauguggcucuaaaca

SEQ ID NO: 1471884 - RNA, 19 nt, Artificial Sequence
  Description of Artificial Sequence: Synthetic oligonucleotide
  Sense strand starting at position 1251 of SEQ ID NO: 1244195
ggguauugggcucagguau

SEQ ID NO: 1471885 - RNA, 19 nt, Artificial Sequence
  Description of Artificial Sequence: Synthetic oligonucleotide
  Antisense strand to SEQ ID NO: 1471884
auaccugagcccaauaccc

SEQ ID NO: 1471886 - RNA, 19 nt, Artificial Sequence
  Description of Artificial Sequence: Synthetic oligonucleotide
  Sense strand starting at position 1310 of SEQ ID NO: 1244195
ccuggaauggguuagguua

SEQ ID NO: 1471887 - RNA, 19 nt, Artificial Sequence
  Description of Artificial Sequence: Synthetic oligonucleotide
  Antisense strand to SEQ ID NO: 1471886
uaaccuaacccauuccagg

SEQ ID NO: 1471888 - RNA, 19 nt, Artificial Sequence
  Description of Artificial Sequence: Synthetic oligonucleotide
  Sense strand starting at position 1347 of SEQ ID NO: 1244195
gcauauucgauguaguaua

SEQ ID NO: 1471889 - RNA, 19 nt, Artificial Sequence
  Description of Artificial Sequence: Synthetic oligonucleotide
  Antisense strand to SEQ ID NO: 1471888
uauacuacaucgaauaugc

SEQ ID NO: 1471890 - RNA, 19 nt, Artificial Sequence
  Description of Artificial Sequence: Synthetic oligonucleotide
  Sense strand starting at position 1905 of SEQ ID NO: 1244195
gucaaaugugguugaugaa

SEQ ID NO: 1471891 - RNA, 19 nt, Artificial Sequence
  Description of Artificial Sequence: Synthetic oligonucleotide
  Antisense strand to SEQ ID NO: 1471890
uucaucaaccacauuugac

SEQ ID NO: 1471892 - RNA, 19 nt, Artificial Sequence
  Description of Artificial Sequence: Synthetic oligonucleotide
  Sense strand starting at position 2142 of SEQ ID NO: 1244195
gggcuagauucuuucucca

SEQ ID NO: 1471893 - RNA, 19 nt, Artificial Sequence
  Description of Artificial Sequence: Synthetic oligonucleotide
  Antisense strand to SEQ ID NO: 1471892
uggagaaagaaucuagccc

SEQ ID NO: 1471894 - RNA, 19 nt, Artificial Sequence
  Description of Artificial Sequence: Synthetic oligonucleotide
  Sense strand starting at position 2330 of SEQ ID NO: 1244195
cagggucucauagggauga

SEQ ID NO: 1471895 - RNA, 19 nt, Artificial Sequence
  Description of Artificial Sequence: Synthetic oligonucleotide
  Antisense strand to SEQ ID NO: 1471894
ucaucccuaugagacccug

SEQ ID NO: 1471896 - RNA, 19 nt, Artificial Sequence
  Description of Artificial Sequence: Synthetic oligonucleotide
  Sense strand starting at position 2359 of SEQ ID NO: 1244195
gcugauucgcauguacagu

SEQ ID NO: 1471897 - RNA, 19 nt, Artificial Sequence
  Description of Artificial Sequence: Synthetic oligonucleotide
  Antisense strand to SEQ ID NO: 1471896
acuguacaugcgaaucagc

SEQ ID NO: 1471898 - RNA, 19 nt, Artificial Sequence
  Description of Artificial Sequence: Synthetic oligonucleotide
  Sense strand starting at position 2367 of SEQ ID NO: 1244195
gcauguacaguguaauuga

SEQ ID NO: 1471899 - RNA, 19 nt, Artificial Sequence
  Description of Artificial Sequence: Synthetic oligonucleotide
  Antisense strand to SEQ ID NO: 1471898
ucaauuacacuguacaugc

SEQ ID NO: 1471900 - RNA, 19 nt, Artificial Sequence
  Description of Artificial Sequence: Synthetic oligonucleotide
  Sense strand starting at position 2374 of SEQ ID NO: 1244195
caguguaauugagcacaug

SEQ ID NO: 1471901 - RNA, 19 nt, Artificial Sequence
  Description of Artificial Sequence: Synthetic oligonucleotide
  Antisense strand to SEQ ID NO: 1471900
caugugcucaauuacacug

SEQ ID NO: 1471902 - RNA, 19 nt, Artificial Sequence
  Description of Artificial Sequence: Synthetic oligonucleotide
  Sense strand starting at position 2375 of SEQ ID NO: 1244195
aguguaauugagcacauga

SEQ ID NO: 1471903 - RNA, 19 nt, Artificial Sequence
  Description of Artificial Sequence: Synthetic oligonucleotide
  Antisense strand to SEQ ID NO: 1471902
ucaugugcucaauuacacu

SEQ ID NO: 1471904 - RNA, 19 nt, Artificial Sequence
  Description of Artificial Sequence: Synthetic oligonucleotide
  Sense strand starting at position 2377 of SEQ ID NO: 1244195
uguaauugagcacaugaau

SEQ ID NO: 1471905 - RNA, 19 nt, Artificial Sequence
  Description of Artificial Sequence: Synthetic oligonucleotide
  Antisense strand to SEQ ID NO: 1471904
auucaugugcucaauuaca

SEQ ID NO: 1471906 - RNA, 19 nt, Artificial Sequence
  Description of Artificial Sequence: Synthetic oligonucleotide
  Sense strand starting at position 2501 of SEQ ID NO: 1244195
ugaauucuccugcaugagu

SEQ ID NO: 1471907 - RNA, 19 nt, Artificial Sequence
  Description of Artificial Sequence: Synthetic oligonucleotide
  Antisense strand to SEQ ID NO: 1471906
acucaugcaggagaauuca

SEQ ID NO: 1471908 - RNA, 19 nt, Artificial Sequence
  Description of Artificial Sequence: Synthetic oligonucleotide
  Sense strand starting at position 2716 of SEQ ID NO: 1244195
gcuucuugaaagcagaguu

SEQ ID NO: 1471909 - RNA, 19 nt, Artificial Sequence
  Description of Artificial Sequence: Synthetic oligonucleotide
  Antisense strand to SEQ ID NO: 1471908
aacucugcuuucaagaagc

SEQ ID NO: 1471910 - RNA, 19 nt, Artificial Sequence
  Description of Artificial Sequence: Synthetic oligonucleotide
  Sense strand starting at position 2723 of SEQ ID NO: 1244195
gaaagcagaguuuaugucu

SEQ ID NO: 1471911 - RNA, 19 nt, Artificial Sequence
  Description of Artificial Sequence: Synthetic oligonucleotide
  Antisense strand to SEQ ID NO: 1471910
agacauaaacucugcuuuc

SEQ ID NO: 1471912 - RNA, 19 nt, Artificial Sequence
  Description of Artificial Sequence: Synthetic oligonucleotide
  Sense strand starting at position 2764 of SEQ ID NO: 1244195
ugguuucuuggugguauuu

SEQ ID NO: 1471913 - RNA, 19 nt, Artificial Sequence
  Description of Artificial Sequence: Synthetic oligonucleotide
  Antisense strand to SEQ ID NO: 1471912
aaauaccaccaagaaacca

SEQ ID NO: 1471914 - RNA, 19 nt, Artificial Sequence
  Description of Artificial Sequence: Synthetic oligonucleotide
  Sense strand starting at position 2868 of SEQ ID NO: 1244195
uuaggacugugaguuauag

SEQ ID NO: 1471915 - RNA, 19 nt, Artificial Sequence
  Description of Artificial Sequence: Synthetic oligonucleotide
  Antisense strand to SEQ ID NO: 1471914
cuauaacucacaguccuaa

SEQ ID NO: 1471916 - RNA, 19 nt, Artificial Sequence
  Description of Artificial Sequence: Synthetic oligonucleotide
  Sense strand starting at position 2906 of SEQ ID NO: 1244195
gccucuccuggguauagau

SEQ ID NO: 1471917 - RNA, 19 nt, Artificial Sequence
  Description of Artificial Sequence: Synthetic oligonucleotide
  Antisense strand to SEQ ID NO: 1471916
aucuauacccaggagaggc

SEQ ID NO: 1471918 - RNA, 19 nt, Artificial Sequence
  Description of Artificial Sequence: Synthetic oligonucleotide
  Sense strand starting at position 2908 of SEQ ID NO: 1244195
cucuccuggguauagauua

SEQ ID NO: 1471919 - RNA, 19 nt, Artificial Sequence
  Description of Artificial Sequence: Synthetic oligonucleotide
  Antisense strand to SEQ ID NO: 1471918
uaaucuauacccaggagag

SEQ ID NO: 1471920 - RNA, 19 nt, Artificial Sequence
  Description of Artificial Sequence: Synthetic oligonucleotide
  Sense strand starting at position 2916 of SEQ ID NO: 1244195
gguauagauuaaccaucca

SEQ ID NO: 1471921 - RNA, 19 nt, Artificial Sequence
  Description of Artificial Sequence: Synthetic oligonucleotide
  Antisense strand to SEQ ID NO: 1471920
uggaugguuaaucuauacc

SEQ ID NO: 1471922 - RNA, 19 nt, Artificial Sequence
  Description of Artificial Sequence: Synthetic oligonucleotide
  Sense strand starting at position 3095 of SEQ ID NO: 1244195
cuuggagagugcuuagaaa

SEQ ID NO: 1471923 - RNA, 19 nt, Artificial Sequence
  Description of Artificial Sequence: Synthetic oligonucleotide
  Antisense strand to SEQ ID NO: 1471922
uuucuaagcacucuccaag

SEQ ID NO: 1471924 - RNA, 19 nt, Artificial Sequence
  Description of Artificial Sequence: Synthetic oligonucleotide
  Sense strand starting at position 3245 of SEQ ID NO: 1244195
acgguuccuggucaucaaa

SEQ ID NO: 1471925 - RNA, 19 nt, Artificial Sequence
  Description of Artificial Sequence: Synthetic oligonucleotide
  Antisense strand to SEQ ID NO: 1471924
uuugaugaccaggaaccgu

SEQ ID NO: 1471926 - RNA, 19 nt, Artificial Sequence
  Description of Artificial Sequence: Synthetic oligonucleotide
  Sense strand starting at position 3248 of SEQ ID NO: 1244195
guuccuggucaucaaaguu

SEQ ID NO: 1471927 - RNA, 19 nt, Artificial Sequence
  Description of Artificial Sequence: Synthetic oligonucleotide
  Antisense strand to SEQ ID NO: 1471926
aacuuugaugaccaggaac

SEQ ID NO: 1471928 - RNA, 19 nt, Artificial Sequence
  Description of Artificial Sequence: Synthetic oligonucleotide
  Sense strand starting at position 3426 of SEQ ID NO: 1244195
cugaguggcagugacuuau

SEQ ID NO: 1471929 - RNA, 19 nt, Artificial Sequence
  Description of Artificial Sequence: Synthetic oligonucleotide
  Antisense strand to SEQ ID NO: 1471928
auaagucacugccacucag

SEQ ID NO: 1471930 - RNA, 19 nt, Artificial Sequence
  Description of Artificial Sequence: Synthetic oligonucleotide
  Sense strand starting at position 3504 of SEQ ID NO: 1244195
uaggacuuauccuugagca

SEQ ID NO: 1471931 - RNA, 19 nt, Artificial Sequence
  Description of Artificial Sequence: Synthetic oligonucleotide
  Antisense strand to SEQ ID NO: 1471930
ugcucaaggauaaguccua

SEQ ID NO: 1471932 - RNA, 19 nt, Artificial Sequence
  Description of Artificial Sequence: Synthetic oligonucleotide
  Sense strand starting at position 3505 of SEQ ID NO: 1244195
aggacuuauccuugagcaa

SEQ ID NO: 1471933 - RNA, 19 nt, Artificial Sequence
  Description of Artificial Sequence: Synthetic oligonucleotide
  Antisense strand to SEQ ID NO: 1471932
uugcucaaggauaaguccu

SEQ ID NO: 1471934 - RNA, 19 nt, Artificial Sequence
  Description of Artificial Sequence: Synthetic oligonucleotide
  Sense strand starting at position 3591 of SEQ ID NO: 1244195
gagaaauagucucuucuag

SEQ ID NO: 1471935 - RNA, 19 nt, Artificial Sequence
  Description of Artificial Sequence: Synthetic oligonucleotide
  Antisense strand to SEQ ID NO: 1471934
cuagaagagacuauuucuc

SEQ ID NO: 1471936 - RNA, 19 nt, Artificial Sequence
  Description of Artificial Sequence: Synthetic oligonucleotide
  Sense strand starting at position 3614 of SEQ ID NO: 1244195
guuauaugaugguuuccca

SEQ ID NO: 1471937 - RNA, 19 nt, Artificial Sequence
  Description of Artificial Sequence: Synthetic oligonucleotide
  Antisense strand to SEQ ID NO: 1471936
ugggaaaccaucauauaac

SEQ ID NO: 1471938 - RNA, 19 nt, Artificial Sequence
  Description of Artificial Sequence: Synthetic oligonucleotide
  Sense strand starting at position 3617 of SEQ ID NO: 1244195
auaugaugguuucccauaa

SEQ ID NO: 1471939 - RNA, 19 nt, Artificial Sequence
  Description of Artificial Sequence: Synthetic oligonucleotide
  Antisense strand to SEQ ID NO: 1471938
uuaugggaaaccaucauau

SEQ ID NO: 1471940 - RNA, 19 nt, Artificial Sequence
  Description of Artificial Sequence: Synthetic oligonucleotide
  Sense strand starting at position 123 of SEQ ID NO: 1244196
ccaaucuggcauugucaau

SEQ ID NO: 1471941 - RNA, 19 nt, Artificial Sequence
  Description of Artificial Sequence: Synthetic oligonucleotide
  Antisense strand to SEQ ID NO: 1471940
auugacaaugccagauugg

SEQ ID NO: 1471942 - RNA, 19 nt, Artificial Sequence
  Description of Artificial Sequence: Synthetic oligonucleotide
  Sense strand starting at position 192 of SEQ ID NO: 1244196
gauguuaauagugagugaa

SEQ ID NO: 1471943 - RNA, 19 nt, Artificial Sequence
  Description of Artificial Sequence: Synthetic oligonucleotide
  Antisense strand to SEQ ID NO: 1471942
uucacucacuauuaacauc

SEQ ID NO: 1471944 - RNA, 19 nt, Artificial Sequence
  Description of Artificial Sequence: Synthetic oligonucleotide
  Sense strand starting at position 195 of SEQ ID NO: 1244196
guuaauagugagugaauca

SEQ ID NO: 1471945 - RNA, 19 nt, Artificial Sequence
  Description of Artificial Sequence: Synthetic oligonucleotide
  Antisense strand to SEQ ID NO: 1471944
ugauucacucacuauuaac

SEQ ID NO: 1471946 - RNA, 19 nt, Artificial Sequence
  Description of Artificial Sequence: Synthetic oligonucleotide
  Sense strand starting at position 632 of SEQ ID NO: 1244196
cuuaguaaugacuaaguau

SEQ ID NO: 1471947 - RNA, 19 nt, Artificial Sequence
  Description of Artificial Sequence: Synthetic oligonucleotide
  Antisense strand to SEQ ID NO: 1471946
auacuuagucauuacuaag

SEQ ID NO: 1471948 - RNA, 19 nt, Artificial Sequence
  Description of Artificial Sequence: Synthetic oligonucleotide
  Sense strand starting at position 635 of SEQ ID NO: 1244196
aguaaugacuaaguauaca

SEQ ID NO: 1471949 - RNA, 19 nt, Artificial Sequence
  Description of Artificial Sequence: Synthetic oligonucleotide
  Antisense strand to SEQ ID NO: 1471948
uguauacuuagucauuacu

SEQ ID NO: 1471950 - RNA, 19 nt, Artificial Sequence
  Description of Artificial Sequence: Synthetic oligonucleotide
  Sense strand starting at position 678 of SEQ ID NO: 1244196
ugguauauuuaggacuaca

SEQ ID NO: 1471951 - RNA, 19 nt, Artificial Sequence
  Description of Artificial Sequence: Synthetic oligonucleotide
  Antisense strand to SEQ ID NO: 1471950
uguaguccuaaauauacca

SEQ ID NO: 1471952 - RNA, 19 nt, Artificial Sequence
  Description of Artificial Sequence: Synthetic oligonucleotide
  Sense strand starting at position 759 of SEQ ID NO: 1244196
aggacauaguccucugcau

SEQ ID NO: 1471953 - RNA, 19 nt, Artificial Sequence
  Description of Artificial Sequence: Synthetic oligonucleotide
  Antisense strand to SEQ ID NO: 1471952
augcagaggacuauguccu

SEQ ID NO: 1471954 - RNA, 19 nt, Artificial Sequence
  Description of Artificial Sequence: Synthetic oligonucleotide
  Sense strand starting at position 789 of SEQ ID NO: 1244196
uuuguuagaucauuaucuc

SEQ ID NO: 1471955 - RNA, 19 nt, Artificial Sequence
  Description of Artificial Sequence: Synthetic oligonucleotide
  Antisense strand to SEQ ID NO: 1471954
gagauaaugaucuaacaaa

SEQ ID NO: 1471956 - RNA, 19 nt, Artificial Sequence
  Description of Artificial Sequence: Synthetic oligonucleotide
  Sense strand starting at position 790 of SEQ ID NO: 1244196
uuguuagaucauuaucuca

SEQ ID NO: 1471957 - RNA, 19 nt, Artificial Sequence
  Description of Artificial Sequence: Synthetic oligonucleotide
  Antisense strand to SEQ ID NO: 1471956
ugagauaaugaucuaacaa

SEQ ID NO: 1471958 - RNA, 19 nt, Artificial Sequence
  Description of Artificial Sequence: Synthetic oligonucleotide
  Sense strand starting at position 792 of SEQ ID NO: 1244196
guuagaucauuaucucaug

SEQ ID NO: 1471959 - RNA, 19 nt, Artificial Sequence
  Description of Artificial Sequence: Synthetic oligonucleotide
  Antisense strand to SEQ ID NO: 1471958
caugagauaaugaucuaac

SEQ ID NO: 1471960 - RNA, 19 nt, Artificial Sequence
  Description of Artificial Sequence: Synthetic oligonucleotide
  Sense strand starting at position 910 of SEQ ID NO: 1244196
cuacauucuuauguaaugu

SEQ ID NO: 1471961 - RNA, 19 nt, Artificial Sequence
  Description of Artificial Sequence: Synthetic oligonucleotide
  Antisense strand to SEQ ID NO: 1471960
acauuacauaagaauguag

SEQ ID NO: 1471962 - RNA, 19 nt, Artificial Sequence
  Description of Artificial Sequence: Synthetic oligonucleotide
  Sense strand starting at position 1082 of SEQ ID NO: 1244196
agcugccugguguuguaua

SEQ ID NO: 1471963 - RNA, 19 nt, Artificial Sequence
  Description of Artificial Sequence: Synthetic oligonucleotide
  Antisense strand to SEQ ID NO: 1471962
uauacaacaccaggcagcu

SEQ ID NO: 1471964 - RNA, 19 nt, Artificial Sequence
  Description of Artificial Sequence: Synthetic oligonucleotide
  Sense strand starting at position 1122 of SEQ ID NO: 1244196
uacugaaacugagauggaa

SEQ ID NO: 1471965 - RNA, 19 nt, Artificial Sequence
  Description of Artificial Sequence: Synthetic oligonucleotide
  Antisense strand to SEQ ID NO: 1471964
uuccaucucaguuucagua

SEQ ID NO: 1471966 - RNA, 19 nt, Artificial Sequence
  Description of Artificial Sequence: Synthetic oligonucleotide
  Sense strand starting at position 1147 of SEQ ID NO: 1244196
aauuaaugugauuggacau

SEQ ID NO: 1471967 - RNA, 19 nt, Artificial Sequence
  Description of Artificial Sequence: Synthetic oligonucleotide
  Antisense strand to SEQ ID NO: 1471966
auguccaaucacauuaauu

SEQ ID NO: 1471968 - RNA, 19 nt, Artificial Sequence
  Description of Artificial Sequence: Synthetic oligonucleotide
  Sense strand starting at position 1316 of SEQ ID NO: 1244196
cagauagucucaccugguu

SEQ ID NO: 1471969 - RNA, 19 nt, Artificial Sequence
  Description of Artificial Sequence: Synthetic oligonucleotide
  Antisense strand to SEQ ID NO: 1471968
aaccaggugagacuaucug

SEQ ID NO: 1471970 - RNA, 19 nt, Artificial Sequence
  Description of Artificial Sequence: Synthetic oligonucleotide
  Sense strand starting at position 1466 of SEQ ID NO: 1244196
cucugaccuugucuaggua

SEQ ID NO: 1471971 - RNA, 19 nt, Artificial Sequence
  Description of Artificial Sequence: Synthetic oligonucleotide
  Antisense strand to SEQ ID NO: 1471970
uaccuagacaaggucagag

SEQ ID NO: 1471972 - RNA, 19 nt, Artificial Sequence
  Description of Artificial Sequence: Synthetic oligonucleotide
  Sense strand starting at position 1469 of SEQ ID NO: 1244196
ugaccuugucuagguaauu

SEQ ID NO: 1471973 - RNA, 19 nt, Artificial Sequence
  Description of Artificial Sequence: Synthetic oligonucleotide
  Antisense strand to SEQ ID NO: 1471972
aauuaccuagacaagguca

SEQ ID NO: 1471974 - RNA, 19 nt, Artificial Sequence
  Description of Artificial Sequence: Synthetic oligonucleotide
  Sense strand starting at position 1985 of SEQ ID NO: 1244196
ggugaugacgaagagugua

SEQ ID NO: 1471975 - RNA, 19 nt, Artificial Sequence
  Description of Artificial Sequence: Synthetic oligonucleotide
  Antisense strand to SEQ ID NO: 1471974
uacacucuucgucaucacc

SEQ ID NO: 1471976 - RNA, 19 nt, Artificial Sequence
  Description of Artificial Sequence: Synthetic oligonucleotide
  Sense strand starting at position 1990 of SEQ ID NO: 1244196
ugacgaagaguguauucaa

SEQ ID NO: 1471977 - RNA, 19 nt, Artificial Sequence
  Description of Artificial Sequence: Synthetic oligonucleotide
  Antisense strand to SEQ ID NO: 1471976
uugaauacacucuucguca

SEQ ID NO: 1471978 - RNA, 19 nt, Artificial Sequence
  Description of Artificial Sequence: Synthetic oligonucleotide
  Sense strand starting at position 2088 of SEQ ID NO: 1244196
gguaauccguaauuggaua

SEQ ID NO: 1471979 - RNA, 19 nt, Artificial Sequence
  Description of Artificial Sequence: Synthetic oligonucleotide
  Antisense strand to SEQ ID NO: 1471978
uauccaauuacggauuacc

SEQ ID NO: 1471980 - RNA, 19 nt, Artificial Sequence
  Description of Artificial Sequence: Synthetic oligonucleotide
  Sense strand starting at position 2089 of SEQ ID NO: 1244196
guaauccguaauuggauaa

SEQ ID NO: 1471981 - RNA, 19 nt, Artificial Sequence
  Description of Artificial Sequence: Synthetic oligonucleotide
  Antisense strand to SEQ ID NO: 1471980
uuauccaauuacggauuac

SEQ ID NO: 1471982 - RNA, 19 nt, Artificial Sequence
  Description of Artificial Sequence: Synthetic oligonucleotide
  Sense strand starting at position 2117 of SEQ ID NO: 1244196
cuugaacacuucucugaag

SEQ ID NO: 1471983 - RNA, 19 nt, Artificial Sequence
  Description of Artificial Sequence: Synthetic oligonucleotide
  Antisense strand to SEQ ID NO: 1471982
cuucagagaaguguucaag

SEQ ID NO: 1471984 - RNA, 19 nt, Artificial Sequence
  Description of Artificial Sequence: Synthetic oligonucleotide
  Sense strand starting at position 2119 of SEQ ID NO: 1244196
ugaacacuucucugaagcu

SEQ ID NO: 1471985 - RNA, 19 nt, Artificial Sequence
  Description of Artificial Sequence: Synthetic oligonucleotide
  Antisense strand to SEQ ID NO: 1471984
agcuucagagaaguguuca

SEQ ID NO: 1471986 - RNA, 19 nt, Artificial Sequence
  Description of Artificial Sequence: Synthetic oligonucleotide
  Sense strand starting at position 2140 of SEQ ID NO: 1244196
gucagagcccugggacauu

SEQ ID NO: 1471987 - RNA, 19 nt, Artificial Sequence
  Description of Artificial Sequence: Synthetic oligonucleotide
  Antisense strand to SEQ ID NO: 1471986
aaugucccagggcucugac

SEQ ID NO: 1471988 - RNA, 19 nt, Artificial Sequence
  Description of Artificial Sequence: Synthetic oligonucleotide
  Sense strand starting at position 2150 of SEQ ID NO: 1244196
ugggacauuuacuauauca

SEQ ID NO: 1471989 - RNA, 19 nt, Artificial Sequence
  Description of Artificial Sequence: Synthetic oligonucleotide
  Antisense strand to SEQ ID NO: 1471988
ugauauaguaaauguccca

SEQ ID NO: 1471990 - RNA, 19 nt, Artificial Sequence
  Description of Artificial Sequence: Synthetic oligonucleotide
  Sense strand starting at position 2304 of SEQ ID NO: 1244196
cagagaauaucuccagguu

SEQ ID NO: 1471991 - RNA, 19 nt, Artificial Sequence
  Description of Artificial Sequence: Synthetic oligonucleotide
  Antisense strand to SEQ ID NO: 1471990
aaccuggagauauucucug

SEQ ID NO: 1471992 - RNA, 19 nt, Artificial Sequence
  Description of Artificial Sequence: Synthetic oligonucleotide
  Sense strand starting at position 2307 of SEQ ID NO: 1244196
agaauaucuccagguuaac

SEQ ID NO: 1471993 - RNA, 19 nt, Artificial Sequence
  Description of Artificial Sequence: Synthetic oligonucleotide
  Antisense strand to SEQ ID NO: 1471992
guuaaccuggagauauucu

SEQ ID NO: 1471994 - RNA, 19 nt, Artificial Sequence
  Description of Artificial Sequence: Synthetic oligonucleotide
  Sense strand starting at position 2624 of SEQ ID NO: 1244196
agguaaguauuauuacauc

SEQ ID NO: 1471995 - RNA, 19 nt, Artificial Sequence
  Description of Artificial Sequence: Synthetic oligonucleotide
  Antisense strand to SEQ ID NO: 1471994
gauguaauaauacuuaccu

SEQ ID NO: 1471996 - RNA, 19 nt, Artificial Sequence
  Description of Artificial Sequence: Synthetic oligonucleotide
  Sense strand starting at position 2662 of SEQ ID NO: 1244196
aguagcuaaugucuaagaa

SEQ ID NO: 1471997 - RNA, 19 nt, Artificial Sequence
  Description of Artificial Sequence: Synthetic oligonucleotide
  Antisense strand to SEQ ID NO: 1471996
uucuuagacauuagcuacu

SEQ ID NO: 1471998 - RNA, 19 nt, Artificial Sequence
  Description of Artificial Sequence: Synthetic oligonucleotide
  Sense strand starting at position 2663 of SEQ ID NO: 1244196
guagcuaaugucuaagaaa

SEQ ID NO: 1471999 - RNA, 19 nt, Artificial Sequence
  Description of Artificial Sequence: Synthetic oligonucleotide
  Antisense strand to SEQ ID NO: 1471998
uuucuuagacauuagcuac

SEQ ID NO: 1472000 - RNA, 19 nt, Artificial Sequence
  Description of Artificial Sequence: Synthetic oligonucleotide
  Sense strand starting at position 2729 of SEQ ID NO: 1244196
guugaauucuagucugaua

SEQ ID NO: 1472001 - RNA, 19 nt, Artificial Sequence
  Description of Artificial Sequence: Synthetic oligonucleotide
  Antisense strand to SEQ ID NO: 1472000
uaucagacuagaauucaac

SEQ ID NO: 1472002 - RNA, 19 nt, Artificial Sequence
  Description of Artificial Sequence: Synthetic oligonucleotide
  Sense strand starting at position 2731 of SEQ ID NO: 1244196
ugaauucuagucugauaua

SEQ ID NO: 1472003 - RNA, 19 nt, Artificial Sequence
  Description of Artificial Sequence: Synthetic oligonucleotide
  Antisense strand to SEQ ID NO: 1472002
uauaucagacuagaauuca

SEQ ID NO: 1472004 - RNA, 19 nt, Artificial Sequence
  Description of Artificial Sequence: Synthetic oligonucleotide
  Sense strand starting at position 2861 of SEQ ID NO: 1244196
aguguuacaauuggaguua

SEQ ID NO: 1472005 - RNA, 19 nt, Artificial Sequence
  Description of Artificial Sequence: Synthetic oligonucleotide
  Antisense strand to SEQ ID NO: 1472004
uaacuccaauuguaacacu

SEQ ID NO: 1472006 - RNA, 19 nt, Artificial Sequence
  Description of Artificial Sequence: Synthetic oligonucleotide
  Sense strand starting at position 3015 of SEQ ID NO: 1244196
guauaauuccaguacuaug

SEQ ID NO: 1472007 - RNA, 19 nt, Artificial Sequence
  Description of Artificial Sequence: Synthetic oligonucleotide
  Antisense strand to SEQ ID NO: 1472006
cauaguacuggaauuauac

SEQ ID NO: 1472008 - RNA, 19 nt, Artificial Sequence
  Description of Artificial Sequence: Synthetic oligonucleotide
  Sense strand starting at position 3117 of SEQ ID NO: 1244196
uugcuuacugggcauagaa

SEQ ID NO: 1472009 - RNA, 19 nt, Artificial Sequence
  Description of Artificial Sequence: Synthetic oligonucleotide
  Antisense strand to SEQ ID NO: 1472008
uucuaugcccaguaagcaa

SEQ ID NO: 1472010 - RNA, 19 nt, Artificial Sequence
  Description of Artificial Sequence: Synthetic oligonucleotide
  Sense strand starting at position 3119 of SEQ ID NO: 1244196
gcuuacugggcauagaauu

SEQ ID NO: 1472011 - RNA, 19 nt, Artificial Sequence
  Description of Artificial Sequence: Synthetic oligonucleotide
  Antisense strand to SEQ ID NO: 1472010
aauucuaugcccaguaagc

SEQ ID NO: 1472012 - RNA, 19 nt, Artificial Sequence
  Description of Artificial Sequence: Synthetic oligonucleotide
  Sense strand starting at position 3469 of SEQ ID NO: 1244196
uugggagauugguugcaca

SEQ ID NO: 1472013 - RNA, 19 nt, Artificial Sequence
  Description of Artificial Sequence: Synthetic oligonucleotide
  Antisense strand to SEQ ID NO: 1472012
ugugcaaccaaucucccaa

SEQ ID NO: 1472014 - RNA, 19 nt, Artificial Sequence
  Description of Artificial Sequence: Synthetic oligonucleotide
  Sense strand starting at position 3485 of SEQ ID NO: 1244196
acaacaaugucaguacacu

SEQ ID NO: 1472015 - RNA, 19 nt, Artificial Sequence
  Description of Artificial Sequence: Synthetic oligonucleotide
  Antisense strand to SEQ ID NO: 1472014
aguguacugacauuguugu

SEQ ID NO: 1472016 - RNA, 19 nt, Artificial Sequence
  Description of Artificial Sequence: Synthetic oligonucleotide
  Sense strand starting at position 3938 of SEQ ID NO: 1244196
aauuguuaagcugggagua

SEQ ID NO: 1472017 - RNA, 19 nt, Artificial Sequence
  Description of Artificial Sequence: Synthetic oligonucleotide
  Antisense strand to SEQ ID NO: 1472016
uacucccagcuuaacaauu

SEQ ID NO: 1472018 - RNA, 19 nt, Artificial Sequence
  Description of Artificial Sequence: Synthetic oligonucleotide
  Sense strand starting at position 3939 of SEQ ID NO: 1244196
auuguuaagcugggaguaa

SEQ ID NO: 1472019 - RNA, 19 nt, Artificial Sequence
  Description of Artificial Sequence: Synthetic oligonucleotide
  Antisense strand to SEQ ID NO: 1472018
uuacucccagcuuaacaau

SEQ ID NO: 1472020 - RNA, 19 nt, Artificial Sequence
  Description of Artificial Sequence: Synthetic oligonucleotide
  Sense strand starting at position 37 of SEQ ID NO: 1244197
aagggugaaucuguacaaa

SEQ ID NO: 1472021 - RNA, 19 nt, Artificial Sequence
  Description of Artificial Sequence: Synthetic oligonucleotide
  Antisense strand to SEQ ID NO: 1472020
uuuguacagauucacccuu

SEQ ID NO: 1472022 - RNA, 19 nt, Artificial Sequence
  Description of Artificial Sequence: Synthetic oligonucleotide
  Sense strand starting at position 447 of SEQ ID NO: 1244197
augagagguuauguacauu

SEQ ID NO: 1472023 - RNA, 19 nt, Artificial Sequence
  Description of Artificial Sequence: Synthetic oligonucleotide
  Antisense strand to SEQ ID NO: 1472022
aauguacauaaccucucau

SEQ ID NO: 1472024 - RNA, 19 nt, Artificial Sequence
  Description of Artificial Sequence: Synthetic oligonucleotide
  Sense strand starting at position 450 of SEQ ID NO: 1244197
agagguuauguacauuauc

SEQ ID NO: 1472025 - RNA, 19 nt, Artificial Sequence
  Description of Artificial Sequence: Synthetic oligonucleotide
  Antisense strand to SEQ ID NO: 1472024
gauaauguacauaaccucu

SEQ ID NO: 1472026 - RNA, 19 nt, Artificial Sequence
  Description of Artificial Sequence: Synthetic oligonucleotide
  Sense strand starting at position 578 of SEQ ID NO: 1244197
acugaaucuccagaucugu

SEQ ID NO: 1472027 - RNA, 19 nt, Artificial Sequence
  Description of Artificial Sequence: Synthetic oligonucleotide
  Antisense strand to SEQ ID NO: 1472026
acagaucuggagauucagu

SEQ ID NO: 1472028 - RNA, 19 nt, Artificial Sequence
  Description of Artificial Sequence: Synthetic oligonucleotide
  Sense strand starting at position 726 of SEQ ID NO: 1244197
gagacauagucacuaguca

SEQ ID NO: 1472029 - RNA, 19 nt, Artificial Sequence
  Description of Artificial Sequence: Synthetic oligonucleotide
  Antisense strand to SEQ ID NO: 1472028
ugacuagugacuaugucuc

SEQ ID NO: 1472030 - RNA, 19 nt, Artificial Sequence
  Description of Artificial Sequence: Synthetic oligonucleotide
  Sense strand starting at position 737 of SEQ ID NO: 1244197
acuagucacugaucaauga

SEQ ID NO: 1472031 - RNA, 19 nt, Artificial Sequence
  Description of Artificial Sequence: Synthetic oligonucleotide
  Antisense strand to SEQ ID NO: 1472030
ucauugaucagugacuagu

SEQ ID NO: 1472032 - RNA, 19 nt, Artificial Sequence
  Description of Artificial Sequence: Synthetic oligonucleotide
  Sense strand starting at position 867 of SEQ ID NO: 1244197
ggguauugggcgcuaguuu

SEQ ID NO: 1472033 - RNA, 19 nt, Artificial Sequence
  Description of Artificial Sequence: Synthetic oligonucleotide
  Antisense strand to SEQ ID NO: 1472032
aaacuagcgcccaauaccc

SEQ ID NO: 1472034 - RNA, 19 nt, Artificial Sequence
  Description of Artificial Sequence: Synthetic oligonucleotide
  Sense strand starting at position 975 of SEQ ID NO: 1244197
uggaauaagaguugcuaaa

SEQ ID NO: 1472035 - RNA, 19 nt, Artificial Sequence
  Description of Artificial Sequence: Synthetic oligonucleotide
  Antisense strand to SEQ ID NO: 1472034
uuuagcaacucuuauucca

SEQ ID NO: 1472036 - RNA, 19 nt, Artificial Sequence
  Description of Artificial Sequence: Synthetic oligonucleotide
  Sense strand starting at position 1046 of SEQ ID NO: 1244197
cuacuuacuugagucugaa

SEQ ID NO: 1472037 - RNA, 19 nt, Artificial Sequence
  Description of Artificial Sequence: Synthetic oligonucleotide
  Antisense strand to SEQ ID NO: 1472036
uucagacucaaguaaguag

SEQ ID NO: 1472038 - RNA, 19 nt, Artificial Sequence
  Description of Artificial Sequence: Synthetic oligonucleotide
  Sense strand starting at position 1049 of SEQ ID NO: 1244197
cuuacuugagucugaaauc

SEQ ID NO: 1472039 - RNA, 19 nt, Artificial Sequence
  Description of Artificial Sequence: Synthetic oligonucleotide
  Antisense strand to SEQ ID NO: 1472038
gauuucagacucaaguaag

SEQ ID NO: 1472040 - RNA, 19 nt, Artificial Sequence
  Description of Artificial Sequence: Synthetic oligonucleotide
  Sense strand starting at position 1060 of SEQ ID NO: 1244197
cugaaaucaucagcuguaa

SEQ ID NO: 1472041 - RNA, 19 nt, Artificial Sequence
  Description of Artificial Sequence: Synthetic oligonucleotide
  Antisense strand to SEQ ID NO: 1472040
uuacagcugaugauuucag

SEQ ID NO: 1472042 - RNA, 19 nt, Artificial Sequence
  Description of Artificial Sequence: Synthetic oligonucleotide
  Sense strand starting at position 1086 of SEQ ID NO: 1244197
auuaucgaucugcagaaca

SEQ ID NO: 1472043 - RNA, 19 nt, Artificial Sequence
  Description of Artificial Sequence: Synthetic oligonucleotide
  Antisense strand to SEQ ID NO: 1472042
uguucugcagaucgauaau

SEQ ID NO: 1472044 - RNA, 19 nt, Artificial Sequence
  Description of Artificial Sequence: Synthetic oligonucleotide
  Sense strand starting at position 1486 of SEQ ID NO: 1244197
augauugugcaguaugauu

SEQ ID NO: 1472045 - RNA, 19 nt, Artificial Sequence
  Description of Artificial Sequence: Synthetic oligonucleotide
  Antisense strand to SEQ ID NO: 1472044
aaucauacugcacaaucau

SEQ ID NO: 1472046 - RNA, 19 nt, Artificial Sequence
  Description of Artificial Sequence: Synthetic oligonucleotide
  Sense strand starting at position 1491 of SEQ ID NO: 1244197
ugugcaguaugauuucuua

SEQ ID NO: 1472047 - RNA, 19 nt, Artificial Sequence
  Description of Artificial Sequence: Synthetic oligonucleotide
  Antisense strand to SEQ ID NO: 1472046
uaagaaaucauacugcaca

SEQ ID NO: 1472048 - RNA, 19 nt, Artificial Sequence
  Description of Artificial Sequence: Synthetic oligonucleotide
  Sense strand starting at position 1494 of SEQ ID NO: 1244197
gcaguaugauuucuuaccu

SEQ ID NO: 1472049 - RNA, 19 nt, Artificial Sequence
  Description of Artificial Sequence: Synthetic oligonucleotide
  Antisense strand to SEQ ID NO: 1472048
agguaagaaaucauacugc

SEQ ID NO: 1472050 - RNA, 19 nt, Artificial Sequence
  Description of Artificial Sequence: Synthetic oligonucleotide
  Sense strand starting at position 1522 of SEQ ID NO: 1244197
ggucaucaauuauugggaa

SEQ ID NO: 1472051 - RNA, 19 nt, Artificial Sequence
  Description of Artificial Sequence: Synthetic oligonucleotide
  Antisense strand to SEQ ID NO: 1472050
uucccaauaauugaugacc

SEQ ID NO: 1472052 - RNA, 19 nt, Artificial Sequence
  Description of Artificial Sequence: Synthetic oligonucleotide
  Sense strand starting at position 1535 of SEQ ID NO: 1244197
ugggaaauaucugcuauag

SEQ ID NO: 1472053 - RNA, 19 nt, Artificial Sequence
  Description of Artificial Sequence: Synthetic oligonucleotide
  Antisense strand to SEQ ID NO: 1472052
cuauagcagauauuuccca

SEQ ID NO: 1472054 - RNA, 19 nt, Artificial Sequence
  Description of Artificial Sequence: Synthetic oligonucleotide
  Sense strand starting at position 1864 of SEQ ID NO: 1244197
caccauagagucugaguga

SEQ ID NO: 1472055 - RNA, 19 nt, Artificial Sequence
  Description of Artificial Sequence: Synthetic oligonucleotide
  Antisense strand to SEQ ID NO: 1472054
ucacucagacucuauggug

SEQ ID NO: 1472056 - RNA, 19 nt, Artificial Sequence
  Description of Artificial Sequence: Synthetic oligonucleotide
  Sense strand starting at position 1877 of SEQ ID NO: 1244197
gagugauccagugguggga

SEQ ID NO: 1472057 - RNA, 19 nt, Artificial Sequence
  Description of Artificial Sequence: Synthetic oligonucleotide
  Antisense strand to SEQ ID NO: 1472056
ucccaccacuggaucacuc

SEQ ID NO: 1472058 - RNA, 19 nt, Artificial Sequence
  Description of Artificial Sequence: Synthetic oligonucleotide
  Sense strand starting at position 1910 of SEQ ID NO: 1244197
ccuggaugcacuggaaagu

SEQ ID NO: 1472059 - RNA, 19 nt, Artificial Sequence
  Description of Artificial Sequence: Synthetic oligonucleotide
  Antisense strand to SEQ ID NO: 1472058
acuuuccagugcauccagg

SEQ ID NO: 1472060 - RNA, 19 nt, Artificial Sequence
  Description of Artificial Sequence: Synthetic oligonucleotide
  Sense strand starting at position 1927 of SEQ ID NO: 1244197
gucgaagagacaugguauc

SEQ ID NO: 1472061 - RNA, 19 nt, Artificial Sequence
  Description of Artificial Sequence: Synthetic oligonucleotide
  Antisense strand to SEQ ID NO: 1472060
gauaccaugucucuucgac

SEQ ID NO: 1472062 - RNA, 19 nt, Artificial Sequence
  Description of Artificial Sequence: Synthetic oligonucleotide
  Sense strand starting at position 1957 of SEQ ID NO: 1244197
guugcagagcuguauuugu

SEQ ID NO: 1472063 - RNA, 19 nt, Artificial Sequence
  Description of Artificial Sequence: Synthetic oligonucleotide
  Antisense strand to SEQ ID NO: 1472062
acaaauacagcucugcaac

SEQ ID NO: 1472064 - RNA, 19 nt, Artificial Sequence
  Description of Artificial Sequence: Synthetic oligonucleotide
  Sense strand starting at position 2054 of SEQ ID NO: 1244197
ugaaauucugccuacacag

SEQ ID NO: 1472065 - RNA, 19 nt, Artificial Sequence
  Description of Artificial Sequence: Synthetic oligonucleotide
  Antisense strand to SEQ ID NO: 1472064
cuguguaggcagaauuuca

SEQ ID NO: 1472066 - RNA, 19 nt, Artificial Sequence
  Description of Artificial Sequence: Synthetic oligonucleotide
  Sense strand starting at position 2149 of SEQ ID NO: 1244197
ggcucauuccuguaggagg

SEQ ID NO: 1472067 - RNA, 19 nt, Artificial Sequence
  Description of Artificial Sequence: Synthetic oligonucleotide
  Antisense strand to SEQ ID NO: 1472066
ccuccuacaggaaugagcc

SEQ ID NO: 1472068 - RNA, 19 nt, Artificial Sequence
  Description of Artificial Sequence: Synthetic oligonucleotide
  Sense strand starting at position 2267 of SEQ ID NO: 1244197
acuuccauccuuggaagua

SEQ ID NO: 1472069 - RNA, 19 nt, Artificial Sequence
  Description of Artificial Sequence: Synthetic oligonucleotide
  Antisense strand to SEQ ID NO: 1472068
uacuuccaaggauggaagu

SEQ ID NO: 1472070 - RNA, 19 nt, Artificial Sequence
  Description of Artificial Sequence: Synthetic oligonucleotide
  Sense strand starting at position 2308 of SEQ ID NO: 1244197
auagaaauuuagcaucaug

SEQ ID NO: 1472071 - RNA, 19 nt, Artificial Sequence
  Description of Artificial Sequence: Synthetic oligonucleotide
  Antisense strand to SEQ ID NO: 1472070
caugaugcuaaauuucuau

SEQ ID NO: 1472072 - RNA, 19 nt, Artificial Sequence
  Description of Artificial Sequence: Synthetic oligonucleotide
  Sense strand starting at position 2491 of SEQ ID NO: 1244197
acucuuucccaugggaagu

SEQ ID NO: 1472073 - RNA, 19 nt, Artificial Sequence
  Description of Artificial Sequence: Synthetic oligonucleotide
  Antisense strand to SEQ ID NO: 1472072
acuucccaugggaaagagu

SEQ ID NO: 1472074 - RNA, 19 nt, Artificial Sequence
  Description of Artificial Sequence: Synthetic oligonucleotide
  Sense strand starting at position 2501 of SEQ ID NO: 1244197
augggaaguuaacuuccau

SEQ ID NO: 1472075 - RNA, 19 nt, Artificial Sequence
  Description of Artificial Sequence: Synthetic oligonucleotide
  Antisense strand to SEQ ID NO: 1472074
auggaaguuaacuucccau

SEQ ID NO: 1472076 - RNA, 19 nt, Artificial Sequence
  Description of Artificial Sequence: Synthetic oligonucleotide
  Sense strand starting at position 2515 of SEQ ID NO: 1244197
uccauucuggcugacauga

SEQ ID NO: 1472077 - RNA, 19 nt, Artificial Sequence
  Description of Artificial Sequence: Synthetic oligonucleotide
  Antisense strand to SEQ ID NO: 1472076
ucaugucagccagaaugga

SEQ ID NO: 1472078 - RNA, 19 nt, Artificial Sequence
  Description of Artificial Sequence: Synthetic oligonucleotide
  Sense strand starting at position 2523 of SEQ ID NO: 1244197
ggcugacaugagcaucaua

SEQ ID NO: 1472079 - RNA, 19 nt, Artificial Sequence
  Description of Artificial Sequence: Synthetic oligonucleotide
  Antisense strand to SEQ ID NO: 1472078
uaugaugcucaugucagcc

SEQ ID NO: 1472080 - RNA, 19 nt, Artificial Sequence
  Description of Artificial Sequence: Synthetic oligonucleotide
  Sense strand starting at position 2526 of SEQ ID NO: 1244197
ugacaugagcaucauauuc

SEQ ID NO: 1472081 - RNA, 19 nt, Artificial Sequence
  Description of Artificial Sequence: Synthetic oligonucleotide
  Antisense strand to SEQ ID NO: 1472080
gaauaugaugcucauguca

SEQ ID NO: 1472082 - RNA, 19 nt, Artificial Sequence
  Description of Artificial Sequence: Synthetic oligonucleotide
  Sense strand starting at position 2537 of SEQ ID NO: 1244197
ucauauucuguugacacuu

SEQ ID NO: 1472083 - RNA, 19 nt, Artificial Sequence
  Description of Artificial Sequence: Synthetic oligonucleotide
  Antisense strand to SEQ ID NO: 1472082
aagugucaacagaauauga

SEQ ID NO: 1472084 - RNA, 19 nt, Artificial Sequence
  Description of Artificial Sequence: Synthetic oligonucleotide
  Sense strand starting at position 2629 of SEQ ID NO: 1244197
gugggaguuuggaaagaca

SEQ ID NO: 1472085 - RNA, 19 nt, Artificial Sequence
  Description of Artificial Sequence: Synthetic oligonucleotide
  Antisense strand to SEQ ID NO: 1472084
ugucuuuccaaacucccac

SEQ ID NO: 1472086 - RNA, 19 nt, Artificial Sequence
  Description of Artificial Sequence: Synthetic oligonucleotide
  Sense strand starting at position 2712 of SEQ ID NO: 1244197
aauuuauugugguuuagcu

SEQ ID NO: 1472087 - RNA, 19 nt, Artificial Sequence
  Description of Artificial Sequence: Synthetic oligonucleotide
  Antisense strand to SEQ ID NO: 1472086
agcuaaaccacaauaaauu

SEQ ID NO: 1472088 - RNA, 19 nt, Artificial Sequence
  Description of Artificial Sequence: Synthetic oligonucleotide
  Sense strand starting at position 2752 of SEQ ID NO: 1244197
guauuuagucggugggaau

SEQ ID NO: 1472089 - RNA, 19 nt, Artificial Sequence
  Description of Artificial Sequence: Synthetic oligonucleotide
  Antisense strand to SEQ ID NO: 1472088
auucccaccgacuaaauac

SEQ ID NO: 1472090 - RNA, 19 nt, Artificial Sequence
  Description of Artificial Sequence: Synthetic oligonucleotide
  Sense strand starting at position 3149 of SEQ ID NO: 1244197
uauggugcacgacaugauu

SEQ ID NO: 1472091 - RNA, 19 nt, Artificial Sequence
  Description of Artificial Sequence: Synthetic oligonucleotide
  Antisense strand to SEQ ID NO: 1472090
aaucaugucgugcaccaua

SEQ ID NO: 1472092 - RNA, 19 nt, Artificial Sequence
  Description of Artificial Sequence: Synthetic oligonucleotide
  Sense strand starting at position 3186 of SEQ ID NO: 1244197
uuguguaaugaccaaauca

SEQ ID NO: 1472093 - RNA, 19 nt, Artificial Sequence
  Description of Artificial Sequence: Synthetic oligonucleotide
  Antisense strand to SEQ ID NO: 1472092
ugauuuggucauuacacaa

SEQ ID NO: 1472094 - RNA, 19 nt, Artificial Sequence
  Description of Artificial Sequence: Synthetic oligonucleotide
  Sense strand starting at position 3300 of SEQ ID NO: 1244197
guacaauaguuauccugaa

SEQ ID NO: 1472095 - RNA, 19 nt, Artificial Sequence
  Description of Artificial Sequence: Synthetic oligonucleotide
  Antisense strand to SEQ ID NO: 1472094
uucaggauaacuauuguac

SEQ ID NO: 1472096 - RNA, 19 nt, Artificial Sequence
  Description of Artificial Sequence: Synthetic oligonucleotide
  Sense strand starting at position 3828 of SEQ ID NO: 1244197
cuugaucagauguaugguu

SEQ ID NO: 1472097 - RNA, 19 nt, Artificial Sequence
  Description of Artificial Sequence: Synthetic oligonucleotide
  Antisense strand to SEQ ID NO: 1472096
aaccauacaucugaucaag

SEQ ID NO: 1472098 - RNA, 19 nt, Artificial Sequence
  Description of Artificial Sequence: Synthetic oligonucleotide
  Sense strand starting at position 3969 of SEQ ID NO: 1244197
auggaugcuuagguugaau

SEQ ID NO: 1472099 - RNA, 19 nt, Artificial Sequence
  Description of Artificial Sequence: Synthetic oligonucleotide
  Antisense strand to SEQ ID NO: 1472098
auucaaccuaagcauccau

SEQ ID NO: 1472100 - RNA, 19 nt, Artificial Sequence
  Description of Artificial Sequence: Synthetic oligonucleotide
  Sense strand starting at position 26 of SEQ ID NO: 1244198
cgaaaugaacaguggacuu

SEQ ID NO: 1472101 - RNA, 19 nt, Artificial Sequence
  Description of Artificial Sequence: Synthetic oligonucleotide
  Antisense strand to SEQ ID NO: 1472100
aaguccacuguucauuucg

SEQ ID NO: 1472102 - RNA, 19 nt, Artificial Sequence
  Description of Artificial Sequence: Synthetic oligonucleotide
  Sense strand starting at position 260 of SEQ ID NO: 1244198
uaguaaggcaccugagagu

SEQ ID NO: 1472103 - RNA, 19 nt, Artificial Sequence
  Description of Artificial Sequence: Synthetic oligonucleotide
  Antisense strand to SEQ ID NO: 1472102
acucucaggugccuuacua

SEQ ID NO: 1472104 - RNA, 19 nt, Artificial Sequence
  Description of Artificial Sequence: Synthetic oligonucleotide
  Sense strand starting at position 326 of SEQ ID NO: 1244198
ugcugaaagauaugauguu

SEQ ID NO: 1472105 - RNA, 19 nt, Artificial Sequence
  Description of Artificial Sequence: Synthetic oligonucleotide
  Antisense strand to SEQ ID NO: 1472104
aacaucauaucuuucagca

SEQ ID NO: 1472106 - RNA, 19 nt, Artificial Sequence
  Description of Artificial Sequence: Synthetic oligonucleotide
  Sense strand starting at position 332 of SEQ ID NO: 1244198
aagauaugauguucuguac

SEQ ID NO: 1472107 - RNA, 19 nt, Artificial Sequence
  Description of Artificial Sequence: Synthetic oligonucleotide
  Antisense strand to SEQ ID NO: 1472106
guacagaacaucauaucuu

SEQ ID NO: 1472108 - RNA, 19 nt, Artificial Sequence
  Description of Artificial Sequence: Synthetic oligonucleotide
  Sense strand starting at position 335 of SEQ ID NO: 1244198
auaugauguucuguacaua

SEQ ID NO: 1472109 - RNA, 19 nt, Artificial Sequence
  Description of Artificial Sequence: Synthetic oligonucleotide
  Antisense strand to SEQ ID NO: 1472108
uauguacagaacaucauau

SEQ ID NO: 1472110 - RNA, 19 nt, Artificial Sequence
  Description of Artificial Sequence: Synthetic oligonucleotide
  Sense strand starting at position 879 of SEQ ID NO: 1244198
gaucuagucuggcuuuaga

SEQ ID NO: 1472111 - RNA, 19 nt, Artificial Sequence
  Description of Artificial Sequence: Synthetic oligonucleotide
  Antisense strand to SEQ ID NO: 1472110
ucuaaagccagacuagauc

SEQ ID NO: 1472112 - RNA, 19 nt, Artificial Sequence
  Description of Artificial Sequence: Synthetic oligonucleotide
  Sense strand starting at position 1239 of SEQ ID NO: 1244198
gcuuaagagccacauagau

SEQ ID NO: 1472113 - RNA, 19 nt, Artificial Sequence
  Description of Artificial Sequence: Synthetic oligonucleotide
  Antisense strand to SEQ ID NO: 1472112
aucuauguggcucuuaagc

SEQ ID NO: 1472114 - RNA, 19 nt, Artificial Sequence
  Description of Artificial Sequence: Synthetic oligonucleotide
  Sense strand starting at position 1471 of SEQ ID NO: 1244198
acacaaagucuguaguaaa

SEQ ID NO: 1472115 - RNA, 19 nt, Artificial Sequence
  Description of Artificial Sequence: Synthetic oligonucleotide
  Antisense strand to SEQ ID NO: 1472114
uuuacuacagacuuugugu

SEQ ID NO: 1472116 - RNA, 19 nt, Artificial Sequence
  Description of Artificial Sequence: Synthetic oligonucleotide
  Sense strand starting at position 1538 of SEQ ID NO: 1244198
ugagaaguaucugcuauag

SEQ ID NO: 1472117 - RNA, 19 nt, Artificial Sequence
  Description of Artificial Sequence: Synthetic oligonucleotide
  Antisense strand to SEQ ID NO: 1472116
cuauagcagauacuucuca

SEQ ID NO: 1472118 - RNA, 19 nt, Artificial Sequence
  Description of Artificial Sequence: Synthetic oligonucleotide
  Sense strand starting at position 2146 of SEQ ID NO: 1244198
uccagucuguagguggaaa

SEQ ID NO: 1472119 - RNA, 19 nt, Artificial Sequence
  Description of Artificial Sequence: Synthetic oligonucleotide
  Antisense strand to SEQ ID NO: 1472118
uuuccaccuacagacugga

SEQ ID NO: 1472120 - RNA, 19 nt, Artificial Sequence
  Description of Artificial Sequence: Synthetic oligonucleotide
  Sense strand starting at position 2250 of SEQ ID NO: 1244198
ugacuaaaugugcaucuuu

SEQ ID NO: 1472121 - RNA, 19 nt, Artificial Sequence
  Description of Artificial Sequence: Synthetic oligonucleotide
  Antisense strand to SEQ ID NO: 1472120
aaagaugcacauuuaguca

SEQ ID NO: 1472122 - RNA, 19 nt, Artificial Sequence
  Description of Artificial Sequence: Synthetic oligonucleotide
  Sense strand starting at position 2340 of SEQ ID NO: 1244198
ugagaaaugucuccuacuu

SEQ ID NO: 1472123 - RNA, 19 nt, Artificial Sequence
  Description of Artificial Sequence: Synthetic oligonucleotide
  Antisense strand to SEQ ID NO: 1472122
aaguaggagacauuucuca

SEQ ID NO: 1472124 - RNA, 19 nt, Artificial Sequence
  Description of Artificial Sequence: Synthetic oligonucleotide
  Sense strand starting at position 2363 of SEQ ID NO: 1244198
ccuguuaacgcucauagag

SEQ ID NO: 1472125 - RNA, 19 nt, Artificial Sequence
  Description of Artificial Sequence: Synthetic oligonucleotide
  Antisense strand to SEQ ID NO: 1472124
cucuaugagcguuaacagg

SEQ ID NO: 1472126 - RNA, 19 nt, Artificial Sequence
  Description of Artificial Sequence: Synthetic oligonucleotide
  Sense strand starting at position 2458 of SEQ ID NO: 1244198
auauguggucucgcuaugu

SEQ ID NO: 1472127 - RNA, 19 nt, Artificial Sequence
  Description of Artificial Sequence: Synthetic oligonucleotide
  Antisense strand to SEQ ID NO: 1472126
acauagcgagaccacauau

SEQ ID NO: 1472128 - RNA, 19 nt, Artificial Sequence
  Description of Artificial Sequence: Synthetic oligonucleotide
  Sense strand starting at position 2697 of SEQ ID NO: 1244198
auagaaauccugcaguccu

SEQ ID NO: 1472129 - RNA, 19 nt, Artificial Sequence
  Description of Artificial Sequence: Synthetic oligonucleotide
  Antisense strand to SEQ ID NO: 1472128
aggacugcaggauuucuau

SEQ ID NO: 1472130 - RNA, 19 nt, Artificial Sequence
  Description of Artificial Sequence: Synthetic oligonucleotide
  Sense strand starting at position 2749 of SEQ ID NO: 1244198
ugugaugaugguggagaau

SEQ ID NO: 1472131 - RNA, 19 nt, Artificial Sequence
  Description of Artificial Sequence: Synthetic oligonucleotide
  Antisense strand to SEQ ID NO: 1472130
auucuccaccaucaucaca

SEQ ID NO: 1472132 - RNA, 19 nt, Artificial Sequence
  Description of Artificial Sequence: Synthetic oligonucleotide
  Sense strand starting at position 2923 of SEQ ID NO: 1244198
gcaucauauugauuagcaa

SEQ ID NO: 1472133 - RNA, 19 nt, Artificial Sequence
  Description of Artificial Sequence: Synthetic oligonucleotide
  Antisense strand to SEQ ID NO: 1472132
uugcuaaucaauaugaugc

SEQ ID NO: 1472134 - RNA, 19 nt, Artificial Sequence
  Description of Artificial Sequence: Synthetic oligonucleotide
  Sense strand starting at position 2926 of SEQ ID NO: 1244198
ucauauugauuagcaagga

SEQ ID NO: 1472135 - RNA, 19 nt, Artificial Sequence
  Description of Artificial Sequence: Synthetic oligonucleotide
  Antisense strand to SEQ ID NO: 1472134
uccuugcuaaucaauauga

SEQ ID NO: 1472136 - RNA, 19 nt, Artificial Sequence
  Description of Artificial Sequence: Synthetic oligonucleotide
  Sense strand starting at position 2930 of SEQ ID NO: 1244198
auugauuagcaaggaguaa

SEQ ID NO: 1472137 - RNA, 19 nt, Artificial Sequence
  Description of Artificial Sequence: Synthetic oligonucleotide
  Antisense strand to SEQ ID NO: 1472136
uuacuccuugcuaaucaau

SEQ ID NO: 1472138 - RNA, 19 nt, Artificial Sequence
  Description of Artificial Sequence: Synthetic oligonucleotide
  Sense strand starting at position 3019 of SEQ ID NO: 1244198
uaaguugucacagggaagu

SEQ ID NO: 1472139 - RNA, 19 nt, Artificial Sequence
  Description of Artificial Sequence: Synthetic oligonucleotide
  Antisense strand to SEQ ID NO: 1472138
acuucccugugacaacuua

SEQ ID NO: 1472140 - RNA, 19 nt, Artificial Sequence
  Description of Artificial Sequence: Synthetic oligonucleotide
  Sense strand starting at position 3032 of SEQ ID NO: 1244198
ggaaguacucuuuauucuc

SEQ ID NO: 1472141 - RNA, 19 nt, Artificial Sequence
  Description of Artificial Sequence: Synthetic oligonucleotide
  Antisense strand to SEQ ID NO: 1472140
gagaauaaagaguacuucc

SEQ ID NO: 1472142 - RNA, 19 nt, Artificial Sequence
  Description of Artificial Sequence: Synthetic oligonucleotide
  Sense strand starting at position 3066 of SEQ ID NO: 1244198
ugggaaguuauccaggcuu

SEQ ID NO: 1472143 - RNA, 19 nt, Artificial Sequence
  Description of Artificial Sequence: Synthetic oligonucleotide
  Antisense strand to SEQ ID NO: 1472142
aagccuggauaacuuccca

SEQ ID NO: 1472144 - RNA, 19 nt, Artificial Sequence
  Description of Artificial Sequence: Synthetic oligonucleotide
  Sense strand starting at position 3252 of SEQ ID NO: 1244198
gggucucuaucaccuauaa

SEQ ID NO: 1472145 - RNA, 19 nt, Artificial Sequence
  Description of Artificial Sequence: Synthetic oligonucleotide
  Antisense strand to SEQ ID NO: 1472144
uuauaggugauagagaccc

SEQ ID NO: 1472146 - RNA, 19 nt, Artificial Sequence
  Description of Artificial Sequence: Synthetic oligonucleotide
  Sense strand starting at position 3272 of SEQ ID NO: 1244198
gauacaaauugauugguua

SEQ ID NO: 1472147 - RNA, 19 nt, Artificial Sequence
  Description of Artificial Sequence: Synthetic oligonucleotide
  Antisense strand to SEQ ID NO: 1472146
uaaccaaucaauuuguauc

SEQ ID NO: 1472148 - RNA, 19 nt, Artificial Sequence
  Description of Artificial Sequence: Synthetic oligonucleotide
  Sense strand starting at position 3275 of SEQ ID NO: 1244198
acaaauugauugguuaacu

SEQ ID NO: 1472149 - RNA, 19 nt, Artificial Sequence
  Description of Artificial Sequence: Synthetic oligonucleotide
  Antisense strand to SEQ ID NO: 1472148
aguuaaccaaucaauuugu

SEQ ID NO: 1472150 - RNA, 19 nt, Artificial Sequence
  Description of Artificial Sequence: Synthetic oligonucleotide
  Sense strand starting at position 3290 of SEQ ID NO: 1244198
aacuaauuauggguuuagu

SEQ ID NO: 1472151 - RNA, 19 nt, Artificial Sequence
  Description of Artificial Sequence: Synthetic oligonucleotide
  Antisense strand to SEQ ID NO: 1472150
acuaaacccauaauuaguu

SEQ ID NO: 1472152 - RNA, 19 nt, Artificial Sequence
  Description of Artificial Sequence: Synthetic oligonucleotide
  Sense strand starting at position 3344 of SEQ ID NO: 1244198
caauguuguggauagugaa

SEQ ID NO: 1472153 - RNA, 19 nt, Artificial Sequence
  Description of Artificial Sequence: Synthetic oligonucleotide
  Antisense strand to SEQ ID NO: 1472152
uucacuauccacaacauug

SEQ ID NO: 1472154 - RNA, 19 nt, Artificial Sequence
  Description of Artificial Sequence: Synthetic oligonucleotide
  Sense strand starting at position 3354 of SEQ ID NO: 1244198
gauagugaauccuuuggaa

SEQ ID NO: 1472155 - RNA, 19 nt, Artificial Sequence
  Description of Artificial Sequence: Synthetic oligonucleotide
  Antisense strand to SEQ ID NO: 1472154
uuccaaaggauucacuauc

SEQ ID NO: 1472156 - RNA, 19 nt, Artificial Sequence
  Description of Artificial Sequence: Synthetic oligonucleotide
  Sense strand starting at position 3391 of SEQ ID NO: 1244198
cacuaaaucguauggaaca

SEQ ID NO: 1472157 - RNA, 19 nt, Artificial Sequence
  Description of Artificial Sequence: Synthetic oligonucleotide
  Antisense strand to SEQ ID NO: 1472156
uguuccauacgauuuagug

SEQ ID NO: 1472158 - RNA, 19 nt, Artificial Sequence
  Description of Artificial Sequence: Synthetic oligonucleotide
  Sense strand starting at position 3480 of SEQ ID NO: 1244198
ggaccaucagcuuauguuu

SEQ ID NO: 1472159 - RNA, 19 nt, Artificial Sequence
  Description of Artificial Sequence: Synthetic oligonucleotide
  Antisense strand to SEQ ID NO: 1472158
aaacauaagcugauggucc

SEQ ID NO: 1472160 - RNA, 19 nt, Artificial Sequence
  Description of Artificial Sequence: Synthetic oligonucleotide
  Sense strand starting at position 3486 of SEQ ID NO: 1244198
ucagcuuauguuuagaaca

SEQ ID NO: 1472161 - RNA, 19 nt, Artificial Sequence
  Description of Artificial Sequence: Synthetic oligonucleotide
  Antisense strand to SEQ ID NO: 1472160
uguucuaaacauaagcuga

SEQ ID NO: 1472162 - RNA, 19 nt, Artificial Sequence
  Description of Artificial Sequence: Synthetic oligonucleotide
  Sense strand starting at position 3496 of SEQ ID NO: 1244198
uuuagaacagugcaugaua

SEQ ID NO: 1472163 - RNA, 19 nt, Artificial Sequence
  Description of Artificial Sequence: Synthetic oligonucleotide
  Antisense strand to SEQ ID NO: 1472162
uaucaugcacuguucuaaa

SEQ ID NO: 1472164 - RNA, 19 nt, Artificial Sequence
  Description of Artificial Sequence: Synthetic oligonucleotide
  Sense strand starting at position 3504 of SEQ ID NO: 1244198
agugcaugauaaccuagau

SEQ ID NO: 1472165 - RNA, 19 nt, Artificial Sequence
  Description of Artificial Sequence: Synthetic oligonucleotide
  Antisense strand to SEQ ID NO: 1472164
aucuagguuaucaugcacu

SEQ ID NO: 1472166 - RNA, 19 nt, Artificial Sequence
  Description of Artificial Sequence: Synthetic oligonucleotide
  Sense strand starting at position 3522 of SEQ ID NO: 1244198
uacaguuccuguuuagaga

SEQ ID NO: 1472167 - RNA, 19 nt, Artificial Sequence
  Description of Artificial Sequence: Synthetic oligonucleotide
  Antisense strand to SEQ ID NO: 1472166
ucucuaaacaggaacugua

SEQ ID NO: 1472168 - RNA, 19 nt, Artificial Sequence
  Description of Artificial Sequence: Synthetic oligonucleotide
  Sense strand starting at position 3621 of SEQ ID NO: 1244198
agaguauugucaguuuaau

SEQ ID NO: 1472169 - RNA, 19 nt, Artificial Sequence
  Description of Artificial Sequence: Synthetic oligonucleotide
  Antisense strand to SEQ ID NO: 1472168
auuaaacugacaauacucu

SEQ ID NO: 1472170 - RNA, 19 nt, Artificial Sequence
  Description of Artificial Sequence: Synthetic oligonucleotide
  Sense strand starting at position 3655 of SEQ ID NO: 1244198
aguuucuuaggugaguuau

SEQ ID NO: 1472171 - RNA, 19 nt, Artificial Sequence
  Description of Artificial Sequence: Synthetic oligonucleotide
  Antisense strand to SEQ ID NO: 1472170
auaacucaccuaagaaacu

SEQ ID NO: 1472172 - RNA, 19 nt, Artificial Sequence
  Description of Artificial Sequence: Synthetic oligonucleotide
  Sense strand starting at position 3657 of SEQ ID NO: 1244198
uuucuuaggugaguuauua

SEQ ID NO: 1472173 - RNA, 19 nt, Artificial Sequence
  Description of Artificial Sequence: Synthetic oligonucleotide
  Antisense strand to SEQ ID NO: 1472172
uaauaacucaccuaagaaa

SEQ ID NO: 1472174 - RNA, 19 nt, Artificial Sequence
  Description of Artificial Sequence: Synthetic oligonucleotide
  Sense strand starting at position 3782 of SEQ ID NO: 1244198
ggagaugaguugucucuga

SEQ ID NO: 1472175 - RNA, 19 nt, Artificial Sequence
  Description of Artificial Sequence: Synthetic oligonucleotide
  Antisense strand to SEQ ID NO: 1472174
ucagagacaacucaucucc

SEQ ID NO: 1472176 - RNA, 19 nt, Artificial Sequence
  Description of Artificial Sequence: Synthetic oligonucleotide
  Sense strand starting at position 3880 of SEQ ID NO: 1244198
aauguugucgccuauuuac

SEQ ID NO: 1472177 - RNA, 19 nt, Artificial Sequence
  Description of Artificial Sequence: Synthetic oligonucleotide
  Antisense strand to SEQ ID NO: 1472176
guaaauaggcgacaacauu

SEQ ID NO: 1472178 - RNA, 19 nt, Artificial Sequence
  Description of Artificial Sequence: Synthetic oligonucleotide
  Sense strand starting at position 3888 of SEQ ID NO: 1244198
cgccuauuuacucacguga

SEQ ID NO: 1472179 - RNA, 19 nt, Artificial Sequence
  Description of Artificial Sequence: Synthetic oligonucleotide
  Antisense strand to SEQ ID NO: 1472178
ucacgugaguaaauaggcg

SEQ ID NO: 1472180 - RNA, 19 nt, Artificial Sequence
  Description of Artificial Sequence: Synthetic oligonucleotide
  Sense strand starting at position 365 of SEQ ID NO: 1244199
ucaguuaggucaucuauca

SEQ ID NO: 1472181 - RNA, 19 nt, Artificial Sequence
  Description of Artificial Sequence: Synthetic oligonucleotide
  Antisense strand to SEQ ID NO: 1472180
ugauagaugaccuaacuga

SEQ ID NO: 1472182 - RNA, 19 nt, Artificial Sequence
  Description of Artificial Sequence: Synthetic oligonucleotide
  Sense strand starting at position 489 of SEQ ID NO: 1244199
auuuguugcucagcuaguu

SEQ ID NO: 1472183 - RNA, 19 nt, Artificial Sequence
  Description of Artificial Sequence: Synthetic oligonucleotide
  Antisense strand to SEQ ID NO: 1472182
aacuagcugagcaacaaau

SEQ ID NO: 1472184 - RNA, 19 nt, Artificial Sequence
  Description of Artificial Sequence: Synthetic oligonucleotide
  Sense strand starting at position 490 of SEQ ID NO: 1244199
uuuguugcucagcuaguua

SEQ ID NO: 1472185 - RNA, 19 nt, Artificial Sequence
  Description of Artificial Sequence: Synthetic oligonucleotide
  Antisense strand to SEQ ID NO: 1472184
uaacuagcugagcaacaaa

SEQ ID NO: 1472186 - RNA, 19 nt, Artificial Sequence
  Description of Artificial Sequence: Synthetic oligonucleotide
  Sense strand starting at position 672 of SEQ ID NO: 1244199
gcuguuagucuugcauuau

SEQ ID NO: 1472187 - RNA, 19 nt, Artificial Sequence
  Description of Artificial Sequence: Synthetic oligonucleotide
  Antisense strand to SEQ ID NO: 1472186
auaaugcaagacuaacagc

SEQ ID NO: 1472188 - RNA, 19 nt, Artificial Sequence
  Description of Artificial Sequence: Synthetic oligonucleotide
  Sense strand starting at position 676 of SEQ ID NO: 1244199
uuagucuugcauuaucauu

SEQ ID NO: 1472189 - RNA, 19 nt, Artificial Sequence
  Description of Artificial Sequence: Synthetic oligonucleotide
  Antisense strand to SEQ ID NO: 1472188
aaugauaaugcaagacuaa

SEQ ID NO: 1472190 - RNA, 19 nt, Artificial Sequence
  Description of Artificial Sequence: Synthetic oligonucleotide
  Sense strand starting at position 713 of SEQ ID NO: 1244199
auuacugguaguugcagaa

SEQ ID NO: 1472191 - RNA, 19 nt, Artificial Sequence
  Description of Artificial Sequence: Synthetic oligonucleotide
  Antisense strand to SEQ ID NO: 1472190
uucugcaacuaccaguaau

SEQ ID NO: 1472192 - RNA, 19 nt, Artificial Sequence
  Description of Artificial Sequence: Synthetic oligonucleotide
  Sense strand starting at position 717 of SEQ ID NO: 1244199
cugguaguugcagaaauua

SEQ ID NO: 1472193 - RNA, 19 nt, Artificial Sequence
  Description of Artificial Sequence: Synthetic oligonucleotide
  Antisense strand to SEQ ID NO: 1472192
uaauuucugcaacuaccag

SEQ ID NO: 1472194 - RNA, 19 nt, Artificial Sequence
  Description of Artificial Sequence: Synthetic oligonucleotide
  Sense strand starting at position 751 of SEQ ID NO: 1244199
guuaguuaagauugaggaa

SEQ ID NO: 1472195 - RNA, 19 nt, Artificial Sequence
  Description of Artificial Sequence: Synthetic oligonucleotide
  Antisense strand to SEQ ID NO: 1472194
uuccucaaucuuaacuaac

SEQ ID NO: 1472196 - RNA, 19 nt, Artificial Sequence
  Description of Artificial Sequence: Synthetic oligonucleotide
  Sense strand starting at position 834 of SEQ ID NO: 1244199
uggcaucugucucuaauaa

SEQ ID NO: 1472197 - RNA, 19 nt, Artificial Sequence
  Description of Artificial Sequence: Synthetic oligonucleotide
  Antisense strand to SEQ ID NO: 1472196
uuauuagagacagaugcca

SEQ ID NO: 1472198 - RNA, 19 nt, Artificial Sequence
  Description of Artificial Sequence: Synthetic oligonucleotide
  Sense strand starting at position 835 of SEQ ID NO: 1244199
ggcaucugucucuaauaau

SEQ ID NO: 1472199 - RNA, 19 nt, Artificial Sequence
  Description of Artificial Sequence: Synthetic oligonucleotide
  Antisense strand to SEQ ID NO: 1472198
auuauuagagacagaugcc

SEQ ID NO: 1472200 - RNA, 19 nt, Artificial Sequence
  Description of Artificial Sequence: Synthetic oligonucleotide
  Sense strand starting at position 1457 of SEQ ID NO: 1244199
aucugugaguggcuaaaca

SEQ ID NO: 1472201 - RNA, 19 nt, Artificial Sequence
  Description of Artificial Sequence: Synthetic oligonucleotide
  Antisense strand to SEQ ID NO: 1472200
uguuuagccacucacagau

SEQ ID NO: 1472202 - RNA, 19 nt, Artificial Sequence
  Description of Artificial Sequence: Synthetic oligonucleotide
  Sense strand starting at position 1521 of SEQ ID NO: 1244199
ucuuaaguucgucaauaau

SEQ ID NO: 1472203 - RNA, 19 nt, Artificial Sequence
  Description of Artificial Sequence: Synthetic oligonucleotide
  Antisense strand to SEQ ID NO: 1472202
auuauugacgaacuuaaga

SEQ ID NO: 1472204 - RNA, 19 nt, Artificial Sequence
  Description of Artificial Sequence: Synthetic oligonucleotide
  Sense strand starting at position 1527 of SEQ ID NO: 1244199
guucgucaauaauugggaa

SEQ ID NO: 1472205 - RNA, 19 nt, Artificial Sequence
  Description of Artificial Sequence: Synthetic oligonucleotide
  Antisense strand to SEQ ID NO: 1472204
uucccaauuauugacgaac

SEQ ID NO: 1472206 - RNA, 19 nt, Artificial Sequence
  Description of Artificial Sequence: Synthetic oligonucleotide
  Sense strand starting at position 1528 of SEQ ID NO: 1244199
uucgucaauaauugggaaa

SEQ ID NO: 1472207 - RNA, 19 nt, Artificial Sequence
  Description of Artificial Sequence: Synthetic oligonucleotide
  Antisense strand to SEQ ID NO: 1472206
uuucccaauuauugacgaa

SEQ ID NO: 1472208 - RNA, 19 nt, Artificial Sequence
  Description of Artificial Sequence: Synthetic oligonucleotide
  Sense strand starting at position 1529 of SEQ ID NO: 1244199
ucgucaauaauugggaaau

SEQ ID NO: 1472209 - RNA, 19 nt, Artificial Sequence
  Description of Artificial Sequence: Synthetic oligonucleotide
  Antisense strand to SEQ ID NO: 1472208
auuucccaauuauugacga

SEQ ID NO: 1472210 - RNA, 19 nt, Artificial Sequence
  Description of Artificial Sequence: Synthetic oligonucleotide
  Sense strand starting at position 1539 of SEQ ID NO: 1244199
uugggaaauaucugcugua

SEQ ID NO: 1472211 - RNA, 19 nt, Artificial Sequence
  Description of Artificial Sequence: Synthetic oligonucleotide
  Antisense strand to SEQ ID NO: 1472210
uacagcagauauuucccaa

SEQ ID NO: 1472212 - RNA, 19 nt, Artificial Sequence
  Description of Artificial Sequence: Synthetic oligonucleotide
  Sense strand starting at position 1540 of SEQ ID NO: 1244199
ugggaaauaucugcuguaa

SEQ ID NO: 1472213 - RNA, 19 nt, Artificial Sequence
  Description of Artificial Sequence: Synthetic oligonucleotide
  Antisense strand to SEQ ID NO: 1472212
uuacagcagauauuuccca

SEQ ID NO: 1472214 - RNA, 19 nt, Artificial Sequence
  Description of Artificial Sequence: Synthetic oligonucleotide
  Sense strand starting at position 1551 of SEQ ID NO: 1244199
ugcuguaaucaugaucaag

SEQ ID NO: 1472215 - RNA, 19 nt, Artificial Sequence
  Description of Artificial Sequence: Synthetic oligonucleotide
  Antisense strand to SEQ ID NO: 1472214
cuugaucaugauuacagca

SEQ ID NO: 1472216 - RNA, 19 nt, Artificial Sequence
  Description of Artificial Sequence: Synthetic oligonucleotide
  Sense strand starting at position 1641 of SEQ ID NO: 1244199
ccucuagggcucgaacauu

SEQ ID NO: 1472217 - RNA, 19 nt, Artificial Sequence
  Description of Artificial Sequence: Synthetic oligonucleotide
  Antisense strand to SEQ ID NO: 1472216
aauguucgagcccuagagg

SEQ ID NO: 1472218 - RNA, 19 nt, Artificial Sequence
  Description of Artificial Sequence: Synthetic oligonucleotide
  Sense strand starting at position 1650 of SEQ ID NO: 1244199
cucgaacauucuccaggua

SEQ ID NO: 1472219 - RNA, 19 nt, Artificial Sequence
  Description of Artificial Sequence: Synthetic oligonucleotide
  Antisense strand to SEQ ID NO: 1472218
uaccuggagaauguucgag

SEQ ID NO: 1472220 - RNA, 19 nt, Artificial Sequence
  Description of Artificial Sequence: Synthetic oligonucleotide
  Sense strand starting at position 1703 of SEQ ID NO: 1244199
accuucucauugccagaga

SEQ ID NO: 1472221 - RNA, 19 nt, Artificial Sequence
  Description of Artificial Sequence: Synthetic oligonucleotide
  Antisense strand to SEQ ID NO: 1472220
ucucuggcaaugagaaggu

SEQ ID NO: 1472222 - RNA, 19 nt, Artificial Sequence
  Description of Artificial Sequence: Synthetic oligonucleotide
  Sense strand starting at position 1924 of SEQ ID NO: 1244199
aagucuccuggagguagaa

SEQ ID NO: 1472223 - RNA, 19 nt, Artificial Sequence
  Description of Artificial Sequence: Synthetic oligonucleotide
  Antisense strand to SEQ ID NO: 1472222
uucuaccuccaggagacuu

SEQ ID NO: 1472224 - RNA, 19 nt, Artificial Sequence
  Description of Artificial Sequence: Synthetic oligonucleotide
  Sense strand starting at position 2004 of SEQ ID NO: 1244199
uggugaacggccuacucaa

SEQ ID NO: 1472225 - RNA, 19 nt, Artificial Sequence
  Description of Artificial Sequence: Synthetic oligonucleotide
  Antisense strand to SEQ ID NO: 1472224
uugaguaggccguucacca

SEQ ID NO: 1472226 - RNA, 19 nt, Artificial Sequence
  Description of Artificial Sequence: Synthetic oligonucleotide
  Sense strand starting at position 2028 of SEQ ID NO: 1244199
uugguuugccuuuauauac

SEQ ID NO: 1472227 - RNA, 19 nt, Artificial Sequence
  Description of Artificial Sequence: Synthetic oligonucleotide
  Antisense strand to SEQ ID NO: 1472226
guauauaaaggcaaaccaa

SEQ ID NO: 1472228 - RNA, 19 nt, Artificial Sequence
  Description of Artificial Sequence: Synthetic oligonucleotide
  Sense strand starting at position 2047 of SEQ ID NO: 1244199
acauuauuaggguguuucu

SEQ ID NO: 1472229 - RNA, 19 nt, Artificial Sequence
  Description of Artificial Sequence: Synthetic oligonucleotide
  Antisense strand to SEQ ID NO: 1472228
agaaacacccuaauaaugu

SEQ ID NO: 1472230 - RNA, 19 nt, Artificial Sequence
  Description of Artificial Sequence: Synthetic oligonucleotide
  Sense strand starting at position 2050 of SEQ ID NO: 1244199
uuauuaggguguuucuuga

SEQ ID NO: 1472231 - RNA, 19 nt, Artificial Sequence
  Description of Artificial Sequence: Synthetic oligonucleotide
  Antisense strand to SEQ ID NO: 1472230
ucaagaaacacccuaauaa

SEQ ID NO: 1472232 - RNA, 19 nt, Artificial Sequence
  Description of Artificial Sequence: Synthetic oligonucleotide
  Sense strand starting at position 2177 of SEQ ID NO: 1244199
ucuguagguggauaguuau

SEQ ID NO: 1472233 - RNA, 19 nt, Artificial Sequence
  Description of Artificial Sequence: Synthetic oligonucleotide
  Antisense strand to SEQ ID NO: 1472232
auaacuauccaccuacaga

SEQ ID NO: 1472234 - RNA, 19 nt, Artificial Sequence
  Description of Artificial Sequence: Synthetic oligonucleotide
  Sense strand starting at position 2230 of SEQ ID NO: 1244199
gguggaguauuaucaggau

SEQ ID NO: 1472235 - RNA, 19 nt, Artificial Sequence
  Description of Artificial Sequence: Synthetic oligonucleotide
  Antisense strand to SEQ ID NO: 1472234
auccugauaauacuccacc

SEQ ID NO: 1472236 - RNA, 19 nt, Artificial Sequence
  Description of Artificial Sequence: Synthetic oligonucleotide
  Sense strand starting at position 2473 of SEQ ID NO: 1244199
gacagaaaguguuccuuug

SEQ ID NO: 1472237 - RNA, 19 nt, Artificial Sequence
  Description of Artificial Sequence: Synthetic oligonucleotide
  Antisense strand to SEQ ID NO: 1472236
caaaggaacacuuucuguc

SEQ ID NO: 1472238 - RNA, 19 nt, Artificial Sequence
  Description of Artificial Sequence: Synthetic oligonucleotide
  Sense strand starting at position 2475 of SEQ ID NO: 1244199
cagaaaguguuccuuugau

SEQ ID NO: 1472239 - RNA, 19 nt, Artificial Sequence
  Description of Artificial Sequence: Synthetic oligonucleotide
  Antisense strand to SEQ ID NO: 1472238
aucaaaggaacacuuucug

SEQ ID NO: 1472240 - RNA, 19 nt, Artificial Sequence
  Description of Artificial Sequence: Synthetic oligonucleotide
  Sense strand starting at position 2625 of SEQ ID NO: 1244199
gacuguggucucuauauuc

SEQ ID NO: 1472241 - RNA, 19 nt, Artificial Sequence
  Description of Artificial Sequence: Synthetic oligonucleotide
  Antisense strand to SEQ ID NO: 1472240
gaauauagagaccacaguc

SEQ ID NO: 1472242 - RNA, 19 nt, Artificial Sequence
  Description of Artificial Sequence: Synthetic oligonucleotide
  Sense strand starting at position 2859 of SEQ ID NO: 1244199
cugacaaccucagucugau

SEQ ID NO: 1472243 - RNA, 19 nt, Artificial Sequence
  Description of Artificial Sequence: Synthetic oligonucleotide
  Antisense strand to SEQ ID NO: 1472242
aucagacugagguugucag

SEQ ID NO: 1472244 - RNA, 19 nt, Artificial Sequence
  Description of Artificial Sequence: Synthetic oligonucleotide
  Sense strand starting at position 2871 of SEQ ID NO: 1244199
gucugaugagucugaucga

SEQ ID NO: 1472245 - RNA, 19 nt, Artificial Sequence
  Description of Artificial Sequence: Synthetic oligonucleotide
  Antisense strand to SEQ ID NO: 1472244
ucgaucagacucaucagac

SEQ ID NO: 1472246 - RNA, 19 nt, Artificial Sequence
  Description of Artificial Sequence: Synthetic oligonucleotide
  Sense strand starting at position 2874 of SEQ ID NO: 1244199
ugaugagucugaucgaguu

SEQ ID NO: 1472247 - RNA, 19 nt, Artificial Sequence
  Description of Artificial Sequence: Synthetic oligonucleotide
  Antisense strand to SEQ ID NO: 1472246
aacucgaucagacucauca

SEQ ID NO: 1472248 - RNA, 19 nt, Artificial Sequence
  Description of Artificial Sequence: Synthetic oligonucleotide
  Sense strand starting at position 2893 of SEQ ID NO: 1244199
ucagacaguugcuuucuaa

SEQ ID NO: 1472249 - RNA, 19 nt, Artificial Sequence
  Description of Artificial Sequence: Synthetic oligonucleotide
  Antisense strand to SEQ ID NO: 1472248
uuagaaagcaacugucuga

SEQ ID NO: 1472250 - RNA, 19 nt, Artificial Sequence
  Description of Artificial Sequence: Synthetic oligonucleotide
  Sense strand starting at position 3336 of SEQ ID NO: 1244199
cugacuuguccguucuguu

SEQ ID NO: 1472251 - RNA, 19 nt, Artificial Sequence
  Description of Artificial Sequence: Synthetic oligonucleotide
  Antisense strand to SEQ ID NO: 1472250
aacagaacggacaagucag

SEQ ID NO: 1472252 - RNA, 19 nt, Artificial Sequence
  Description of Artificial Sequence: Synthetic oligonucleotide
  Sense strand starting at position 3337 of SEQ ID NO: 1244199
ugacuuguccguucuguuu

SEQ ID NO: 1472253 - RNA, 19 nt, Artificial Sequence
  Description of Artificial Sequence: Synthetic oligonucleotide
  Antisense strand to SEQ ID NO: 1472252
aaacagaacggacaaguca

SEQ ID NO: 1472254 - RNA, 19 nt, Artificial Sequence
  Description of Artificial Sequence: Synthetic oligonucleotide
  Sense strand starting at position 3463 of SEQ ID NO: 1244199
ugccaagaaugauugacau

SEQ ID NO: 1472255 - RNA, 19 nt, Artificial Sequence
  Description of Artificial Sequence: Synthetic oligonucleotide
  Antisense strand to SEQ ID NO: 1472254
augucaaucauucuuggca

SEQ ID NO: 1472256 - RNA, 19 nt, Artificial Sequence
  Description of Artificial Sequence: Synthetic oligonucleotide
  Sense strand starting at position 3540 of SEQ ID NO: 1244199
aauaaaugagcuugcggaa

SEQ ID NO: 1472257 - RNA, 19 nt, Artificial Sequence
  Description of Artificial Sequence: Synthetic oligonucleotide
  Antisense strand to SEQ ID NO: 1472256
uuccgcaagcucauuuauu

SEQ ID NO: 1472258 - RNA, 19 nt, Artificial Sequence
  Description of Artificial Sequence: Synthetic oligonucleotide
  Sense strand starting at position 3644 of SEQ ID NO: 1244199
acauuauuucuuugcuguu

SEQ ID NO: 1472259 - RNA, 19 nt, Artificial Sequence
  Description of Artificial Sequence: Synthetic oligonucleotide
  Antisense strand to SEQ ID NO: 1472258
aacagcaaagaaauaaugu

SEQ ID NO: 1472260 - RNA, 19 nt, Artificial Sequence
  Description of Artificial Sequence: Synthetic oligonucleotide
  Sense strand starting at position 127 of SEQ ID NO: 1244200
uagguaguauuauuagacu

SEQ ID NO: 1472261 - RNA, 19 nt, Artificial Sequence
  Description of Artificial Sequence: Synthetic oligonucleotide
  Antisense strand to SEQ ID NO: 1472260
agucuaauaauacuaccua

SEQ ID NO: 1472262 - RNA, 19 nt, Artificial Sequence
  Description of Artificial Sequence: Synthetic oligonucleotide
  Sense strand starting at position 238 of SEQ ID NO: 1244200
cagaguugugauuggacua

SEQ ID NO: 1472263 - RNA, 19 nt, Artificial Sequence
  Description of Artificial Sequence: Synthetic oligonucleotide
  Antisense strand to SEQ ID NO: 1472262
uaguccaaucacaacucug

SEQ ID NO: 1472264 - RNA, 19 nt, Artificial Sequence
  Description of Artificial Sequence: Synthetic oligonucleotide
  Sense strand starting at position 239 of SEQ ID NO: 1244200
agaguugugauuggacuac

SEQ ID NO: 1472265 - RNA, 19 nt, Artificial Sequence
  Description of Artificial Sequence: Synthetic oligonucleotide
  Antisense strand to SEQ ID NO: 1472264
guaguccaaucacaacucu

SEQ ID NO: 1472266 - RNA, 19 nt, Artificial Sequence
  Description of Artificial Sequence: Synthetic oligonucleotide
  Sense strand starting at position 243 of SEQ ID NO: 1244200
uugugauuggacuacaggu

SEQ ID NO: 1472267 - RNA, 19 nt, Artificial Sequence
  Description of Artificial Sequence: Synthetic oligonucleotide
  Antisense strand to SEQ ID NO: 1472266
accuguaguccaaucacaa

SEQ ID NO: 1472268 - RNA, 19 nt, Artificial Sequence
  Description of Artificial Sequence: Synthetic oligonucleotide
  Sense strand starting at position 293 of SEQ ID NO: 1244200
ugagauaugucaucuccuc

SEQ ID NO: 1472269 - RNA, 19 nt, Artificial Sequence
  Description of Artificial Sequence: Synthetic oligonucleotide
  Antisense strand to SEQ ID NO: 1472268
gaggagaugacauaucuca

SEQ ID NO: 1472270 - RNA, 19 nt, Artificial Sequence
  Description of Artificial Sequence: Synthetic oligonucleotide
  Sense strand starting at position 527 of SEQ ID NO: 1244200
uugaauuaggacuguaaau

SEQ ID NO: 1472271 - RNA, 19 nt, Artificial Sequence
  Description of Artificial Sequence: Synthetic oligonucleotide
  Antisense strand to SEQ ID NO: 1472270
auuuacaguccuaauucaa

SEQ ID NO: 1472272 - RNA, 19 nt, Artificial Sequence
  Description of Artificial Sequence: Synthetic oligonucleotide
  Sense strand starting at position 697 of SEQ ID NO: 1244200
uuccuuaguugacuaauga

SEQ ID NO: 1472273 - RNA, 19 nt, Artificial Sequence
  Description of Artificial Sequence: Synthetic oligonucleotide
  Antisense strand to SEQ ID NO: 1472272
ucauuagucaacuaaggaa

SEQ ID NO: 1472274 - RNA, 19 nt, Artificial Sequence
  Description of Artificial Sequence: Synthetic oligonucleotide
  Sense strand starting at position 698 of SEQ ID NO: 1244200
uccuuaguugacuaaugau

SEQ ID NO: 1472275 - RNA, 19 nt, Artificial Sequence
  Description of Artificial Sequence: Synthetic oligonucleotide
  Antisense strand to SEQ ID NO: 1472274
aucauuagucaacuaagga

SEQ ID NO: 1472276 - RNA, 19 nt, Artificial Sequence
  Description of Artificial Sequence: Synthetic oligonucleotide
  Sense strand starting at position 980 of SEQ ID NO: 1244200
ccagucuggcauuaucaau

SEQ ID NO: 1472277 - RNA, 19 nt, Artificial Sequence
  Description of Artificial Sequence: Synthetic oligonucleotide
  Antisense strand to SEQ ID NO: 1472276
auugauaaugccagacugg

SEQ ID NO: 1472278 - RNA, 19 nt, Artificial Sequence
  Description of Artificial Sequence: Synthetic oligonucleotide
  Sense strand starting at position 1001 of SEQ ID NO: 1244200
gcagaaugacauuagcauu

SEQ ID NO: 1472279 - RNA, 19 nt, Artificial Sequence
  Description of Artificial Sequence: Synthetic oligonucleotide
  Antisense strand to SEQ ID NO: 1472278
aaugcuaaugucauucugc

SEQ ID NO: 1472280 - RNA, 19 nt, Artificial Sequence
  Description of Artificial Sequence: Synthetic oligonucleotide
  Sense strand starting at position 1007 of SEQ ID NO: 1244200
ugacauuagcauuaguagu

SEQ ID NO: 1472281 - RNA, 19 nt, Artificial Sequence
  Description of Artificial Sequence: Synthetic oligonucleotide
  Antisense strand to SEQ ID NO: 1472280
acuacuaaugcuaauguca

SEQ ID NO: 1472282 - RNA, 19 nt, Artificial Sequence
  Description of Artificial Sequence: Synthetic oligonucleotide
  Sense strand starting at position 1020 of SEQ ID NO: 1244200
aguaguaguggaggagaua

SEQ ID NO: 1472283 - RNA, 19 nt, Artificial Sequence
  Description of Artificial Sequence: Synthetic oligonucleotide
  Antisense strand to SEQ ID NO: 1472282
uaucuccuccacuacuacu

SEQ ID NO: 1472284 - RNA, 19 nt, Artificial Sequence
  Description of Artificial Sequence: Synthetic oligonucleotide
  Sense strand starting at position 1353 of SEQ ID NO: 1244200
uaggaagaauuguuuaucu

SEQ ID NO: 1472285 - RNA, 19 nt, Artificial Sequence
  Description of Artificial Sequence: Synthetic oligonucleotide
  Antisense strand to SEQ ID NO: 1472284
agauaaacaauucuuccua

SEQ ID NO: 1472286 - RNA, 19 nt, Artificial Sequence
  Description of Artificial Sequence: Synthetic oligonucleotide
  Sense strand starting at position 1513 of SEQ ID NO: 1244200
ugauaucugcuauagucau

SEQ ID NO: 1472287 - RNA, 19 nt, Artificial Sequence
  Description of Artificial Sequence: Synthetic oligonucleotide
  Antisense strand to SEQ ID NO: 1472286
augacuauagcagauauca

SEQ ID NO: 1472288 - RNA, 19 nt, Artificial Sequence
  Description of Artificial Sequence: Synthetic oligonucleotide
  Sense strand starting at position 1622 of SEQ ID NO: 1244200
gcacauuauccagguagga

SEQ ID NO: 1472289 - RNA, 19 nt, Artificial Sequence
  Description of Artificial Sequence: Synthetic oligonucleotide
  Antisense strand to SEQ ID NO: 1472288
uccuaccuggauaaugugc

SEQ ID NO: 1472290 - RNA, 19 nt, Artificial Sequence
  Description of Artificial Sequence: Synthetic oligonucleotide
  Sense strand starting at position 1643 of SEQ ID NO: 1244200
ccaagcggucauuaagauu

SEQ ID NO: 1472291 - RNA, 19 nt, Artificial Sequence
  Description of Artificial Sequence: Synthetic oligonucleotide
  Antisense strand to SEQ ID NO: 1472290
aaucuuaaugaccgcuugg

SEQ ID NO: 1472292 - RNA, 19 nt, Artificial Sequence
  Description of Artificial Sequence: Synthetic oligonucleotide
  Sense strand starting at position 1922 of SEQ ID NO: 1244200
auuggagagacaugguguu

SEQ ID NO: 1472293 - RNA, 19 nt, Artificial Sequence
  Description of Artificial Sequence: Synthetic oligonucleotide
  Antisense strand to SEQ ID NO: 1472292
aacaccaugucucuccaau

SEQ ID NO: 1472294 - RNA, 19 nt, Artificial Sequence
  Description of Artificial Sequence: Synthetic oligonucleotide
  Sense strand starting at position 2040 of SEQ ID NO: 1244200
gggcguuccuauuugaguu

SEQ ID NO: 1472295 - RNA, 19 nt, Artificial Sequence
  Description of Artificial Sequence: Synthetic oligonucleotide
  Antisense strand to SEQ ID NO: 1472294
aacucaaauaggaacgccc

SEQ ID NO: 1472296 - RNA, 19 nt, Artificial Sequence
  Description of Artificial Sequence: Synthetic oligonucleotide
  Sense strand starting at position 2041 of SEQ ID NO: 1244200
ggcguuccuauuugaguua

SEQ ID NO: 1472297 - RNA, 19 nt, Artificial Sequence
  Description of Artificial Sequence: Synthetic oligonucleotide
  Antisense strand to SEQ ID NO: 1472296
uaacucaaauaggaacgcc

SEQ ID NO: 1472298 - RNA, 19 nt, Artificial Sequence
  Description of Artificial Sequence: Synthetic oligonucleotide
  Sense strand starting at position 2103 of SEQ ID NO: 1244200
uuauguauaauugggugau

SEQ ID NO: 1472299 - RNA, 19 nt, Artificial Sequence
  Description of Artificial Sequence: Synthetic oligonucleotide
  Antisense strand to SEQ ID NO: 1472298
aucacccaauuauacauaa

SEQ ID NO: 1472300 - RNA, 19 nt, Artificial Sequence
  Description of Artificial Sequence: Synthetic oligonucleotide
  Sense strand starting at position 2190 of SEQ ID NO: 1244200
ggguuuguucuauauuaag

SEQ ID NO: 1472301 - RNA, 19 nt, Artificial Sequence
  Description of Artificial Sequence: Synthetic oligonucleotide
  Antisense strand to SEQ ID NO: 1472300
cuuaauauagaacaaaccc

SEQ ID NO: 1472302 - RNA, 19 nt, Artificial Sequence
  Description of Artificial Sequence: Synthetic oligonucleotide
  Sense strand starting at position 2256 of SEQ ID NO: 1244200
ucuagacccuaggcauaua

SEQ ID NO: 1472303 - RNA, 19 nt, Artificial Sequence
  Description of Artificial Sequence: Synthetic oligonucleotide
  Antisense strand to SEQ ID NO: 1472302
uauaugccuagggucuaga

SEQ ID NO: 1472304 - RNA, 19 nt, Artificial Sequence
  Description of Artificial Sequence: Synthetic oligonucleotide
  Sense strand starting at position 2377 of SEQ ID NO: 1244200
gguauaaaggacugcuaau

SEQ ID NO: 1472305 - RNA, 19 nt, Artificial Sequence
  Description of Artificial Sequence: Synthetic oligonucleotide
  Antisense strand to SEQ ID NO: 1472304
auuagcaguccuuuauacc

SEQ ID NO: 1472306 - RNA, 19 nt, Artificial Sequence
  Description of Artificial Sequence: Synthetic oligonucleotide
  Sense strand starting at position 2466 of SEQ ID NO: 1244200
uguucuuaccaugauuaua

SEQ ID NO: 1472307 - RNA, 19 nt, Artificial Sequence
  Description of Artificial Sequence: Synthetic oligonucleotide
  Antisense strand to SEQ ID NO: 1472306
uauaaucaugguaagaaca

SEQ ID NO: 1472308 - RNA, 19 nt, Artificial Sequence
  Description of Artificial Sequence: Synthetic oligonucleotide
  Sense strand starting at position 2700 of SEQ ID NO: 1244200
ucuaaagaguuuguaauga

SEQ ID NO: 1472309 - RNA, 19 nt, Artificial Sequence
  Description of Artificial Sequence: Synthetic oligonucleotide
  Antisense strand to SEQ ID NO: 1472308
ucauuacaaacucuuuaga

SEQ ID NO: 1472310 - RNA, 19 nt, Artificial Sequence
  Description of Artificial Sequence: Synthetic oligonucleotide
  Sense strand starting at position 2761 of SEQ ID NO: 1244200
gaaacaagguggucaauua

SEQ ID NO: 1472311 - RNA, 19 nt, Artificial Sequence
  Description of Artificial Sequence: Synthetic oligonucleotide
  Antisense strand to SEQ ID NO: 1472310
uaauugaccaccuuguuuc

SEQ ID NO: 1472312 - RNA, 19 nt, Artificial Sequence
  Description of Artificial Sequence: Synthetic oligonucleotide
  Sense strand starting at position 2771 of SEQ ID NO: 1244200
ggucaauuacaagguugga

SEQ ID NO: 1472313 - RNA, 19 nt, Artificial Sequence
  Description of Artificial Sequence: Synthetic oligonucleotide
  Antisense strand to SEQ ID NO: 1472312
uccaaccuuguaauugacc

SEQ ID NO: 1472314 - RNA, 19 nt, Artificial Sequence
  Description of Artificial Sequence: Synthetic oligonucleotide
  Sense strand starting at position 2982 of SEQ ID NO: 1244200
ugaguuuagguuuggacca

SEQ ID NO: 1472315 - RNA, 19 nt, Artificial Sequence
  Description of Artificial Sequence: Synthetic oligonucleotide
  Antisense strand to SEQ ID NO: 1472314
ugguccaaaccuaaacuca

SEQ ID NO: 1472316 - RNA, 19 nt, Artificial Sequence
  Description of Artificial Sequence: Synthetic oligonucleotide
  Sense strand starting at position 3047 of SEQ ID NO: 1244200
uagcaagaaugacuguuua

SEQ ID NO: 1472317 - RNA, 19 nt, Artificial Sequence
  Description of Artificial Sequence: Synthetic oligonucleotide
  Antisense strand to SEQ ID NO: 1472316
uaaacagucauucuugcua

SEQ ID NO: 1472318 - RNA, 19 nt, Artificial Sequence
  Description of Artificial Sequence: Synthetic oligonucleotide
  Sense strand starting at position 3057 of SEQ ID NO: 1244200
gacuguuuagaauauguau

SEQ ID NO: 1472319 - RNA, 19 nt, Artificial Sequence
  Description of Artificial Sequence: Synthetic oligonucleotide
  Antisense strand to SEQ ID NO: 1472318
auacauauucuaaacaguc

SEQ ID NO: 1472320 - RNA, 19 nt, Artificial Sequence
  Description of Artificial Sequence: Synthetic oligonucleotide
  Sense strand starting at position 3093 of SEQ ID NO: 1244200
cuugacuagcaaugaguaa

SEQ ID NO: 1472321 - RNA, 19 nt, Artificial Sequence
  Description of Artificial Sequence: Synthetic oligonucleotide
  Antisense strand to SEQ ID NO: 1472320
uuacucauugcuagucaag

SEQ ID NO: 1472322 - RNA, 19 nt, Artificial Sequence
  Description of Artificial Sequence: Synthetic oligonucleotide
  Sense strand starting at position 3196 of SEQ ID NO: 1244200
ugaugaucagauugaugug

SEQ ID NO: 1472323 - RNA, 19 nt, Artificial Sequence
  Description of Artificial Sequence: Synthetic oligonucleotide
  Antisense strand to SEQ ID NO: 1472322
cacaucaaucugaucauca

SEQ ID NO: 1472324 - RNA, 19 nt, Artificial Sequence
  Description of Artificial Sequence: Synthetic oligonucleotide
  Sense strand starting at position 3201 of SEQ ID NO: 1244200
aucagauugauguggguuu

SEQ ID NO: 1472325 - RNA, 19 nt, Artificial Sequence
  Description of Artificial Sequence: Synthetic oligonucleotide
  Antisense strand to SEQ ID NO: 1472324
aaacccacaucaaucugau

SEQ ID NO: 1472326 - RNA, 19 nt, Artificial Sequence
  Description of Artificial Sequence: Synthetic oligonucleotide
  Sense strand starting at position 3294 of SEQ ID NO: 1244200
ggcgauugacuguaugauc

SEQ ID NO: 1472327 - RNA, 19 nt, Artificial Sequence
  Description of Artificial Sequence: Synthetic oligonucleotide
  Antisense strand to SEQ ID NO: 1472326
gaucauacagucaaucgcc

SEQ ID NO: 1472328 - RNA, 19 nt, Artificial Sequence
  Description of Artificial Sequence: Synthetic oligonucleotide
  Sense strand starting at position 3299 of SEQ ID NO: 1244200
uugacuguaugaucauaua

SEQ ID NO: 1472329 - RNA, 19 nt, Artificial Sequence
  Description of Artificial Sequence: Synthetic oligonucleotide
  Antisense strand to SEQ ID NO: 1472328
uauaugaucauacagucaa

SEQ ID NO: 1472330 - RNA, 19 nt, Artificial Sequence
  Description of Artificial Sequence: Synthetic oligonucleotide
  Sense strand starting at position 3367 of SEQ ID NO: 1244200
gagggugagucauugggua

SEQ ID NO: 1472331 - RNA, 19 nt, Artificial Sequence
  Description of Artificial Sequence: Synthetic oligonucleotide
  Antisense strand to SEQ ID NO: 1472330
uacccaaugacucacccuc

SEQ ID NO: 1472332 - RNA, 19 nt, Artificial Sequence
  Description of Artificial Sequence: Synthetic oligonucleotide
  Sense strand starting at position 3372 of SEQ ID NO: 1244200
ugagucauuggguauccuu

SEQ ID NO: 1472333 - RNA, 19 nt, Artificial Sequence
  Description of Artificial Sequence: Synthetic oligonucleotide
  Antisense strand to SEQ ID NO: 1472332
aaggauacccaaugacuca

SEQ ID NO: 1472334 - RNA, 19 nt, Artificial Sequence
  Description of Artificial Sequence: Synthetic oligonucleotide
  Sense strand starting at position 3655 of SEQ ID NO: 1244200
gaaguuucucaugauggca

SEQ ID NO: 1472335 - RNA, 19 nt, Artificial Sequence
  Description of Artificial Sequence: Synthetic oligonucleotide
  Antisense strand to SEQ ID NO: 1472334
ugccaucaugagaaacuuc

SEQ ID NO: 1472336 - RNA, 19 nt, Artificial Sequence
  Description of Artificial Sequence: Synthetic oligonucleotide
  Sense strand starting at position 3779 of SEQ ID NO: 1244200
agaggagucuuagcauaag

SEQ ID NO: 1472337 - RNA, 19 nt, Artificial Sequence
  Description of Artificial Sequence: Synthetic oligonucleotide
  Antisense strand to SEQ ID NO: 1472336
cuuaugcuaagacuccucu

SEQ ID NO: 1472338 - RNA, 19 nt, Artificial Sequence
  Description of Artificial Sequence: Synthetic oligonucleotide
  Sense strand starting at position 3854 of SEQ ID NO: 1244200
ccuugaaguccuuauguua

SEQ ID NO: 1472339 - RNA, 19 nt, Artificial Sequence
  Description of Artificial Sequence: Synthetic oligonucleotide
  Antisense strand to SEQ ID NO: 1472338
uaacauaaggacuucaagg

SEQ ID NO: 1472340 - RNA, 19 nt, Artificial Sequence
  Description of Artificial Sequence: Synthetic oligonucleotide
  Sense strand starting at position 54 of SEQ ID NO: 1244201
aguuacuaugcucagcaaa

SEQ ID NO: 1472341 - RNA, 19 nt, Artificial Sequence
  Description of Artificial Sequence: Synthetic oligonucleotide
  Antisense strand to SEQ ID NO: 1472340
uuugcugagcauaguaacu

SEQ ID NO: 1472342 - RNA, 19 nt, Artificial Sequence
  Description of Artificial Sequence: Synthetic oligonucleotide
  Sense strand starting at position 56 of SEQ ID NO: 1244201
uuacuaugcucagcaaaga

SEQ ID NO: 1472343 - RNA, 19 nt, Artificial Sequence
  Description of Artificial Sequence: Synthetic oligonucleotide
  Antisense strand to SEQ ID NO: 1472342
ucuuugcugagcauaguaa

SEQ ID NO: 1472344 - RNA, 19 nt, Artificial Sequence
  Description of Artificial Sequence: Synthetic oligonucleotide
  Sense strand starting at position 377 of SEQ ID NO: 1244201
ugucaaguaagagguaaga

SEQ ID NO: 1472345 - RNA, 19 nt, Artificial Sequence
  Description of Artificial Sequence: Synthetic oligonucleotide
  Antisense strand to SEQ ID NO: 1472344
ucuuaccucuuacuugaca

SEQ ID NO: 1472346 - RNA, 19 nt, Artificial Sequence
  Description of Artificial Sequence: Synthetic oligonucleotide
  Sense strand starting at position 387 of SEQ ID NO: 1244201
gagguaagagcaugucaug

SEQ ID NO: 1472347 - RNA, 19 nt, Artificial Sequence
  Description of Artificial Sequence: Synthetic oligonucleotide
  Antisense strand to SEQ ID NO: 1472346
caugacaugcucuuaccuc

SEQ ID NO: 1472348 - RNA, 19 nt, Artificial Sequence
  Description of Artificial Sequence: Synthetic oligonucleotide
  Sense strand starting at position 463 of SEQ ID NO: 1244201
aguagagacucacauuuau

SEQ ID NO: 1472349 - RNA, 19 nt, Artificial Sequence
  Description of Artificial Sequence: Synthetic oligonucleotide
  Antisense strand to SEQ ID NO: 1472348
auaaaugugagucucuacu

SEQ ID NO: 1472350 - RNA, 19 nt, Artificial Sequence
  Description of Artificial Sequence: Synthetic oligonucleotide
  Sense strand starting at position 628 of SEQ ID NO: 1244201
gcuaguuuaaagugaaaga

SEQ ID NO: 1472351 - RNA, 19 nt, Artificial Sequence
  Description of Artificial Sequence: Synthetic oligonucleotide
  Antisense strand to SEQ ID NO: 1472350
ucuuucacuuuaaacuagc

SEQ ID NO: 1472352 - RNA, 19 nt, Artificial Sequence
  Description of Artificial Sequence: Synthetic oligonucleotide
  Sense strand starting at position 638 of SEQ ID NO: 1244201
agugaaagauguuuccugu

SEQ ID NO: 1472353 - RNA, 19 nt, Artificial Sequence
  Description of Artificial Sequence: Synthetic oligonucleotide
  Antisense strand to SEQ ID NO: 1472352
acaggaaacaucuuucacu

SEQ ID NO: 1472354 - RNA, 19 nt, Artificial Sequence
  Description of Artificial Sequence: Synthetic oligonucleotide
  Sense strand starting at position 641 of SEQ ID NO: 1244201
gaaagauguuuccugucug

SEQ ID NO: 1472355 - RNA, 19 nt, Artificial Sequence
  Description of Artificial Sequence: Synthetic oligonucleotide
  Antisense strand to SEQ ID NO: 1472354
cagacaggaaacaucuuuc

SEQ ID NO: 1472356 - RNA, 19 nt, Artificial Sequence
  Description of Artificial Sequence: Synthetic oligonucleotide
  Sense strand starting at position 645 of SEQ ID NO: 1244201
gauguuuccugucugggaa

SEQ ID NO: 1472357 - RNA, 19 nt, Artificial Sequence
  Description of Artificial Sequence: Synthetic oligonucleotide
  Antisense strand to SEQ ID NO: 1472356
uucccagacaggaaacauc

SEQ ID NO: 1472358 - RNA, 19 nt, Artificial Sequence
  Description of Artificial Sequence: Synthetic oligonucleotide
  Sense strand starting at position 1003 of SEQ ID NO: 1244201
agaguacuaccugguagau

SEQ ID NO: 1472359 - RNA, 19 nt, Artificial Sequence
  Description of Artificial Sequence: Synthetic oligonucleotide
  Antisense strand to SEQ ID NO: 1472358
aucuaccagguaguacucu

SEQ ID NO: 1472360 - RNA, 19 nt, Artificial Sequence
  Description of Artificial Sequence: Synthetic oligonucleotide
  Sense strand starting at position 1157 of SEQ ID NO: 1244201
ugaugugaguccucaucca

SEQ ID NO: 1472361 - RNA, 19 nt, Artificial Sequence
  Description of Artificial Sequence: Synthetic oligonucleotide
  Antisense strand to SEQ ID NO: 1472360
uggaugaggacucacauca

SEQ ID NO: 1472362 - RNA, 19 nt, Artificial Sequence
  Description of Artificial Sequence: Synthetic oligonucleotide
  Sense strand starting at position 1301 of SEQ ID NO: 1244201
gcaaauuccgaacaacuca

SEQ ID NO: 1472363 - RNA, 19 nt, Artificial Sequence
  Description of Artificial Sequence: Synthetic oligonucleotide
  Antisense strand to SEQ ID NO: 1472362
ugaguuguucggaauuugc

SEQ ID NO: 1472364 - RNA, 19 nt, Artificial Sequence
  Description of Artificial Sequence: Synthetic oligonucleotide
  Sense strand starting at position 1381 of SEQ ID NO: 1244201
uucucagacuugguacaca

SEQ ID NO: 1472365 - RNA, 19 nt, Artificial Sequence
  Description of Artificial Sequence: Synthetic oligonucleotide
  Antisense strand to SEQ ID NO: 1472364
uguguaccaagucugagaa

SEQ ID NO: 1472366 - RNA, 19 nt, Artificial Sequence
  Description of Artificial Sequence: Synthetic oligonucleotide
  Sense strand starting at position 1407 of SEQ ID NO: 1244201
gggagugagagguggcuua

SEQ ID NO: 1472367 - RNA, 19 nt, Artificial Sequence
  Description of Artificial Sequence: Synthetic oligonucleotide
  Antisense strand to SEQ ID NO: 1472366
uaagccaccucucacuccc

SEQ ID NO: 1472368 - RNA, 19 nt, Artificial Sequence
  Description of Artificial Sequence: Synthetic oligonucleotide
  Sense strand starting at position 1419 of SEQ ID NO: 1244201
uggcuuagugaggacugaa

SEQ ID NO: 1472369 - RNA, 19 nt, Artificial Sequence
  Description of Artificial Sequence: Synthetic oligonucleotide
  Antisense strand to SEQ ID NO: 1472368
uucaguccucacuaagcca

SEQ ID NO: 1472370 - RNA, 19 nt, Artificial Sequence
  Description of Artificial Sequence: Synthetic oligonucleotide
  Sense strand starting at position 1611 of SEQ ID NO: 1244201
gcuccucaauggucuuaaa

SEQ ID NO: 1472371 - RNA, 19 nt, Artificial Sequence
  Description of Artificial Sequence: Synthetic oligonucleotide
  Antisense strand to SEQ ID NO: 1472370
uuuaagaccauugaggagc

SEQ ID NO: 1472372 - RNA, 19 nt, Artificial Sequence
  Description of Artificial Sequence: Synthetic oligonucleotide
  Sense strand starting at position 1966 of SEQ ID NO: 1244201
gggagugccuggcugaaga

SEQ ID NO: 1472373 - RNA, 19 nt, Artificial Sequence
  Description of Artificial Sequence: Synthetic oligonucleotide
  Antisense strand to SEQ ID NO: 1472372
ucuucagccaggcacuccc

SEQ ID NO: 1472374 - RNA, 19 nt, Artificial Sequence
  Description of Artificial Sequence: Synthetic oligonucleotide
  Sense strand starting at position 2243 of SEQ ID NO: 1244201
gugguaggccuucaaagag

SEQ ID NO: 1472375 - RNA, 19 nt, Artificial Sequence
  Description of Artificial Sequence: Synthetic oligonucleotide
  Antisense strand to SEQ ID NO: 1472374
cucuuugaaggccuaccac

SEQ ID NO: 1472376 - RNA, 19 nt, Artificial Sequence
  Description of Artificial Sequence: Synthetic oligonucleotide
  Sense strand starting at position 2296 of SEQ ID NO: 1244201
aauugagguguugauccau

SEQ ID NO: 1472377 - RNA, 19 nt, Artificial Sequence
  Description of Artificial Sequence: Synthetic oligonucleotide
  Antisense strand to SEQ ID NO: 1472376
auggaucaacaccucaauu

SEQ ID NO: 1472378 - RNA, 19 nt, Artificial Sequence
  Description of Artificial Sequence: Synthetic oligonucleotide
  Sense strand starting at position 2304 of SEQ ID NO: 1244201
uguugauccauccgaugac

SEQ ID NO: 1472379 - RNA, 19 nt, Artificial Sequence
  Description of Artificial Sequence: Synthetic oligonucleotide
  Antisense strand to SEQ ID NO: 1472378
gucaucggauggaucaaca

SEQ ID NO: 1472380 - RNA, 19 nt, Artificial Sequence
  Description of Artificial Sequence: Synthetic oligonucleotide
  Sense strand starting at position 2307 of SEQ ID NO: 1244201
ugauccauccgaugacauu

SEQ ID NO: 1472381 - RNA, 19 nt, Artificial Sequence
  Description of Artificial Sequence: Synthetic oligonucleotide
  Antisense strand to SEQ ID NO: 1472380
aaugucaucggauggauca

SEQ ID NO: 1472382 - RNA, 19 nt, Artificial Sequence
  Description of Artificial Sequence: Synthetic oligonucleotide
  Sense strand starting at position 2382 of SEQ ID NO: 1244201
gccguuucuagggagaaac

SEQ ID NO: 1472383 - RNA, 19 nt, Artificial Sequence
  Description of Artificial Sequence: Synthetic oligonucleotide
  Antisense strand to SEQ ID NO: 1472382
guuucucccuagaaacggc

SEQ ID NO: 1472384 - RNA, 19 nt, Artificial Sequence
  Description of Artificial Sequence: Synthetic oligonucleotide
  Sense strand starting at position 2412 of SEQ ID NO: 1244201
ugaggaagaaguugcauua

SEQ ID NO: 1472385 - RNA, 19 nt, Artificial Sequence
  Description of Artificial Sequence: Synthetic oligonucleotide
  Antisense strand to SEQ ID NO: 1472384
uaaugcaacuucuuccuca

SEQ ID NO: 1472386 - RNA, 19 nt, Artificial Sequence
  Description of Artificial Sequence: Synthetic oligonucleotide
  Sense strand starting at position 2448 of SEQ ID NO: 1244201
gucuuucccucugcauuua

SEQ ID NO: 1472387 - RNA, 19 nt, Artificial Sequence
  Description of Artificial Sequence: Synthetic oligonucleotide
  Antisense strand to SEQ ID NO: 1472386
uaaaugcagagggaaagac

SEQ ID NO: 1472388 - RNA, 19 nt, Artificial Sequence
  Description of Artificial Sequence: Synthetic oligonucleotide
  Sense strand starting at position 2507 of SEQ ID NO: 1244201
agccuuaagguggaugauu

SEQ ID NO: 1472389 - RNA, 19 nt, Artificial Sequence
  Description of Artificial Sequence: Synthetic oligonucleotide
  Antisense strand to SEQ ID NO: 1472388
aaucauccaccuuaaggcu

SEQ ID NO: 1472390 - RNA, 19 nt, Artificial Sequence
  Description of Artificial Sequence: Synthetic oligonucleotide
  Sense strand starting at position 2556 of SEQ ID NO: 1244201
uagacagcgauuuguguuu

SEQ ID NO: 1472391 - RNA, 19 nt, Artificial Sequence
  Description of Artificial Sequence: Synthetic oligonucleotide
  Antisense strand to SEQ ID NO: 1472390
aaacacaaaucgcugucua

SEQ ID NO: 1472392 - RNA, 19 nt, Artificial Sequence
  Description of Artificial Sequence: Synthetic oligonucleotide
  Sense strand starting at position 2657 of SEQ ID NO: 1244201
uuugauaacuaguuggaga

SEQ ID NO: 1472393 - RNA, 19 nt, Artificial Sequence
  Description of Artificial Sequence: Synthetic oligonucleotide
  Antisense strand to SEQ ID NO: 1472392
ucuccaacuaguuaucaaa

SEQ ID NO: 1472394 - RNA, 19 nt, Artificial Sequence
  Description of Artificial Sequence: Synthetic oligonucleotide
  Sense strand starting at position 3110 of SEQ ID NO: 1244201
uaaggaggucuuugucaaa

SEQ ID NO: 1472395 - RNA, 19 nt, Artificial Sequence
  Description of Artificial Sequence: Synthetic oligonucleotide
  Antisense strand to SEQ ID NO: 1472394
uuugacaaagaccuccuua

SEQ ID NO: 1472396 - RNA, 19 nt, Artificial Sequence
  Description of Artificial Sequence: Synthetic oligonucleotide
  Sense strand starting at position 3133 of SEQ ID NO: 1244201
uccuaagguuauccauagu

SEQ ID NO: 1472397 - RNA, 19 nt, Artificial Sequence
  Description of Artificial Sequence: Synthetic oligonucleotide
  Antisense strand to SEQ ID NO: 1472396
acuauggauaaccuuagga

SEQ ID NO: 1472398 - RNA, 19 nt, Artificial Sequence
  Description of Artificial Sequence: Synthetic oligonucleotide
  Sense strand starting at position 3147 of SEQ ID NO: 1244201
auaguauccgaacagagua

SEQ ID NO: 1472399 - RNA, 19 nt, Artificial Sequence
  Description of Artificial Sequence: Synthetic oligonucleotide
  Antisense strand to SEQ ID NO: 1472398
uacucuguucggauacuau

SEQ ID NO: 1472400 - RNA, 19 nt, Artificial Sequence
  Description of Artificial Sequence: Synthetic oligonucleotide
  Sense strand starting at position 3224 of SEQ ID NO: 1244201
acuuguaguugaucuuuaa

SEQ ID NO: 1472401 - RNA, 19 nt, Artificial Sequence
  Description of Artificial Sequence: Synthetic oligonucleotide
  Antisense strand to SEQ ID NO: 1472400
uuaaagaucaacuacaagu

SEQ ID NO: 1472402 - RNA, 19 nt, Artificial Sequence
  Description of Artificial Sequence: Synthetic oligonucleotide
  Sense strand starting at position 3227 of SEQ ID NO: 1244201
uguaguugaucuuuaaacu

SEQ ID NO: 1472403 - RNA, 19 nt, Artificial Sequence
  Description of Artificial Sequence: Synthetic oligonucleotide
  Antisense strand to SEQ ID NO: 1472402
aguuuaaagaucaacuaca

SEQ ID NO: 1472404 - RNA, 19 nt, Artificial Sequence
  Description of Artificial Sequence: Synthetic oligonucleotide
  Sense strand starting at position 3228 of SEQ ID NO: 1244201
guaguugaucuuuaaacuu

SEQ ID NO: 1472405 - RNA, 19 nt, Artificial Sequence
  Description of Artificial Sequence: Synthetic oligonucleotide
  Antisense strand to SEQ ID NO: 1472404
aaguuuaaagaucaacuac

SEQ ID NO: 1472406 - RNA, 19 nt, Artificial Sequence
  Description of Artificial Sequence: Synthetic oligonucleotide
  Sense strand starting at position 3275 of SEQ ID NO: 1244201
auauccauguuggcuuuaa

SEQ ID NO: 1472407 - RNA, 19 nt, Artificial Sequence
  Description of Artificial Sequence: Synthetic oligonucleotide
  Antisense strand to SEQ ID NO: 1472406
uuaaagccaacauggauau

SEQ ID NO: 1472408 - RNA, 19 nt, Artificial Sequence
  Description of Artificial Sequence: Synthetic oligonucleotide
  Sense strand starting at position 3279 of SEQ ID NO: 1244201
ccauguuggcuuuaaucuu

SEQ ID NO: 1472409 - RNA, 19 nt, Artificial Sequence
  Description of Artificial Sequence: Synthetic oligonucleotide
  Antisense strand to SEQ ID NO: 1472408
aagauuaaagccaacaugg

SEQ ID NO: 1472410 - RNA, 19 nt, Artificial Sequence
  Description of Artificial Sequence: Synthetic oligonucleotide
  Sense strand starting at position 3672 of SEQ ID NO: 1244201
uugcuuaauucucuaagag

SEQ ID NO: 1472411 - RNA, 19 nt, Artificial Sequence
  Description of Artificial Sequence: Synthetic oligonucleotide
  Antisense strand to SEQ ID NO: 1472410
cucuuagagaauuaagcaa

SEQ ID NO: 1472412 - RNA, 19 nt, Artificial Sequence
  Description of Artificial Sequence: Synthetic oligonucleotide
  Sense strand starting at position 3673 of SEQ ID NO: 1244201
ugcuuaauucucuaagaga

SEQ ID NO: 1472413 - RNA, 19 nt, Artificial Sequence
  Description of Artificial Sequence: Synthetic oligonucleotide
  Antisense strand to SEQ ID NO: 1472412
ucucuuagagaauuaagca

SEQ ID NO: 1472414 - RNA, 19 nt, Artificial Sequence
  Description of Artificial Sequence: Synthetic oligonucleotide
  Sense strand starting at position 3795 of SEQ ID NO: 1244201
aaaggaggucucugugguu

SEQ ID NO: 1472415 - RNA, 19 nt, Artificial Sequence
  Description of Artificial Sequence: Synthetic oligonucleotide
  Antisense strand to SEQ ID NO: 1472414
aaccacagagaccuccuuu

SEQ ID NO: 1472416 - RNA, 19 nt, Artificial Sequence
  Description of Artificial Sequence: Synthetic oligonucleotide
  Sense strand starting at position 3802 of SEQ ID NO: 1244201
gucucugugguuguguaau

SEQ ID NO: 1472417 - RNA, 19 nt, Artificial Sequence
  Description of Artificial Sequence: Synthetic oligonucleotide
  Antisense strand to SEQ ID NO: 1472416
auuacacaaccacagagac

SEQ ID NO: 1472418 - RNA, 19 nt, Artificial Sequence
  Description of Artificial Sequence: Synthetic oligonucleotide
  Sense strand starting at position 3948 of SEQ ID NO: 1244201
ggaagagguagccaaaguu

SEQ ID NO: 1472419 - RNA, 19 nt, Artificial Sequence
  Description of Artificial Sequence: Synthetic oligonucleotide
  Antisense strand to SEQ ID NO: 1472418
aacuuuggcuaccucuucc

SEQ ID NO: 1472420 - RNA, 19 nt, Artificial Sequence
  Description of Artificial Sequence: Synthetic oligonucleotide
  Sense strand starting at position 13 of SEQ ID NO: 1244202
ugcuguguggcucucgaga

SEQ ID NO: 1472421 - RNA, 19 nt, Artificial Sequence
  Description of Artificial Sequence: Synthetic oligonucleotide
  Antisense strand to SEQ ID NO: 1472420
ucucgagagccacacagca

SEQ ID NO: 1472422 - RNA, 19 nt, Artificial Sequence
  Description of Artificial Sequence: Synthetic oligonucleotide
  Sense strand starting at position 252 of SEQ ID NO: 1244202
uccauaaauugggcaaagu

SEQ ID NO: 1472423 - RNA, 19 nt, Artificial Sequence
  Description of Artificial Sequence: Synthetic oligonucleotide
  Antisense strand to SEQ ID NO: 1472422
acuuugcccaauuuaugga

SEQ ID NO: 1472424 - RNA, 19 nt, Artificial Sequence
  Description of Artificial Sequence: Synthetic oligonucleotide
  Sense strand starting at position 619 of SEQ ID NO: 1244202
uuuccaacccuccgugaaa

SEQ ID NO: 1472425 - RNA, 19 nt, Artificial Sequence
  Description of Artificial Sequence: Synthetic oligonucleotide
  Antisense strand to SEQ ID NO: 1472424
uuucacggaggguuggaaa

SEQ ID NO: 1472426 - RNA, 19 nt, Artificial Sequence
  Description of Artificial Sequence: Synthetic oligonucleotide
  Sense strand starting at position 622 of SEQ ID NO: 1244202
ccaacccuccgugaaacua

SEQ ID NO: 1472427 - RNA, 19 nt, Artificial Sequence
  Description of Artificial Sequence: Synthetic oligonucleotide
  Antisense strand to SEQ ID NO: 1472426
uaguuucacggaggguugg

SEQ ID NO: 1472428 - RNA, 19 nt, Artificial Sequence
  Description of Artificial Sequence: Synthetic oligonucleotide
  Sense strand starting at position 631 of SEQ ID NO: 1244202
cgugaaacuaauggaaagu

SEQ ID NO: 1472429 - RNA, 19 nt, Artificial Sequence
  Description of Artificial Sequence: Synthetic oligonucleotide
  Antisense strand to SEQ ID NO: 1472428
acuuuccauuaguuucacg

SEQ ID NO: 1472430 - RNA, 19 nt, Artificial Sequence
  Description of Artificial Sequence: Synthetic oligonucleotide
  Sense strand starting at position 730 of SEQ ID NO: 1244202
ccaguuuggcauuaucaau

SEQ ID NO: 1472431 - RNA, 19 nt, Artificial Sequence
  Description of Artificial Sequence: Synthetic oligonucleotide
  Antisense strand to SEQ ID NO: 1472430
auugauaaugccaaacugg

SEQ ID NO: 1472432 - RNA, 19 nt, Artificial Sequence
  Description of Artificial Sequence: Synthetic oligonucleotide
  Sense strand starting at position 947 of SEQ ID NO: 1244202
aauugcuaguccuuggaga

SEQ ID NO: 1472433 - RNA, 19 nt, Artificial Sequence
  Description of Artificial Sequence: Synthetic oligonucleotide
  Antisense strand to SEQ ID NO: 1472432
ucuccaaggacuagcaauu

SEQ ID NO: 1472434 - RNA, 19 nt, Artificial Sequence
  Description of Artificial Sequence: Synthetic oligonucleotide
  Sense strand starting at position 948 of SEQ ID NO: 1244202
auugcuaguccuuggagaa

SEQ ID NO: 1472435 - RNA, 19 nt, Artificial Sequence
  Description of Artificial Sequence: Synthetic oligonucleotide
  Antisense strand to SEQ ID NO: 1472434
uucuccaaggacuagcaau

SEQ ID NO: 1472436 - RNA, 19 nt, Artificial Sequence
  Description of Artificial Sequence: Synthetic oligonucleotide
  Sense strand starting at position 949 of SEQ ID NO: 1244202
uugcuaguccuuggagaac

SEQ ID NO: 1472437 - RNA, 19 nt, Artificial Sequence
  Description of Artificial Sequence: Synthetic oligonucleotide
  Antisense strand to SEQ ID NO: 1472436
guucuccaaggacuagcaa

SEQ ID NO: 1472438 - RNA, 19 nt, Artificial Sequence
  Description of Artificial Sequence: Synthetic oligonucleotide
  Sense strand starting at position 1048 of SEQ ID NO: 1244202
agaaucucaugucugaagu

SEQ ID NO: 1472439 - RNA, 19 nt, Artificial Sequence
  Description of Artificial Sequence: Synthetic oligonucleotide
  Antisense strand to SEQ ID NO: 1472438
acuucagacaugagauucu

SEQ ID NO: 1472440 - RNA, 19 nt, Artificial Sequence
  Description of Artificial Sequence: Synthetic oligonucleotide
  Sense strand starting at position 1076 of SEQ ID NO: 1244202
gacaguuagaagggucuuu

SEQ ID NO: 1472441 - RNA, 19 nt, Artificial Sequence
  Description of Artificial Sequence: Synthetic oligonucleotide
  Antisense strand to SEQ ID NO: 1472440
aaagacccuucuaacuguc

SEQ ID NO: 1472442 - RNA, 19 nt, Artificial Sequence
  Description of Artificial Sequence: Synthetic oligonucleotide
  Sense strand starting at position 1081 of SEQ ID NO: 1244202
uuagaagggucuuugacau

SEQ ID NO: 1472443 - RNA, 19 nt, Artificial Sequence
  Description of Artificial Sequence: Synthetic oligonucleotide
  Antisense strand to SEQ ID NO: 1472442
augucaaagacccuucuaa

SEQ ID NO: 1472444 - RNA, 19 nt, Artificial Sequence
  Description of Artificial Sequence: Synthetic oligonucleotide
  Sense strand starting at position 1126 of SEQ ID NO: 1244202
ggcuguuccaagcacuuga

SEQ ID NO: 1472445 - RNA, 19 nt, Artificial Sequence
  Description of Artificial Sequence: Synthetic oligonucleotide
  Antisense strand to SEQ ID NO: 1472444
ucaagugcuuggaacagcc

SEQ ID NO: 1472446 - RNA, 19 nt, Artificial Sequence
  Description of Artificial Sequence: Synthetic oligonucleotide
  Sense strand starting at position 1357 of SEQ ID NO: 1244202
agggaagucucuuuguccu

SEQ ID NO: 1472447 - RNA, 19 nt, Artificial Sequence
  Description of Artificial Sequence: Synthetic oligonucleotide
  Antisense strand to SEQ ID NO: 1472446
aggacaaagagacuucccu

SEQ ID NO: 1472448 - RNA, 19 nt, Artificial Sequence
  Description of Artificial Sequence: Synthetic oligonucleotide
  Sense strand starting at position 1359 of SEQ ID NO: 1244202
ggaagucucuuuguccuga

SEQ ID NO: 1472449 - RNA, 19 nt, Artificial Sequence
  Description of Artificial Sequence: Synthetic oligonucleotide
  Antisense strand to SEQ ID NO: 1472448
ucaggacaaagagacuucc

SEQ ID NO: 1472450 - RNA, 19 nt, Artificial Sequence
  Description of Artificial Sequence: Synthetic oligonucleotide
  Sense strand starting at position 1360 of SEQ ID NO: 1244202
gaagucucuuuguccugaa

SEQ ID NO: 1472451 - RNA, 19 nt, Artificial Sequence
  Description of Artificial Sequence: Synthetic oligonucleotide
  Antisense strand to SEQ ID NO: 1472450
uucaggacaaagagacuuc

SEQ ID NO: 1472452 - RNA, 19 nt, Artificial Sequence
  Description of Artificial Sequence: Synthetic oligonucleotide
  Sense strand starting at position 1497 of SEQ ID NO: 1244202
cugaaaugagacugguagu

SEQ ID NO: 1472453 - RNA, 19 nt, Artificial Sequence
  Description of Artificial Sequence: Synthetic oligonucleotide
  Antisense strand to SEQ ID NO: 1472452
acuaccagucucauuucag

SEQ ID NO: 1472454 - RNA, 19 nt, Artificial Sequence
  Description of Artificial Sequence: Synthetic oligonucleotide
  Sense strand starting at position 1507 of SEQ ID NO: 1244202
acugguagucaggagucau

SEQ ID NO: 1472455 - RNA, 19 nt, Artificial Sequence
  Description of Artificial Sequence: Synthetic oligonucleotide
  Antisense strand to SEQ ID NO: 1472454
augacuccugacuaccagu

SEQ ID NO: 1472456 - RNA, 19 nt, Artificial Sequence
  Description of Artificial Sequence: Synthetic oligonucleotide
  Sense strand starting at position 2162 of SEQ ID NO: 1244202
ggguuccugucauugauca

SEQ ID NO: 1472457 - RNA, 19 nt, Artificial Sequence
  Description of Artificial Sequence: Synthetic oligonucleotide
  Antisense strand to SEQ ID NO: 1472456
ugaucaaugacaggaaccc

SEQ ID NO: 1472458 - RNA, 19 nt, Artificial Sequence
  Description of Artificial Sequence: Synthetic oligonucleotide
  Sense strand starting at position 2166 of SEQ ID NO: 1244202
uccugucauugaucaccau

SEQ ID NO: 1472459 - RNA, 19 nt, Artificial Sequence
  Description of Artificial Sequence: Synthetic oligonucleotide
  Antisense strand to SEQ ID NO: 1472458
auggugaucaaugacagga

SEQ ID NO: 1472460 - RNA, 19 nt, Artificial Sequence
  Description of Artificial Sequence: Synthetic oligonucleotide
  Sense strand starting at position 2395 of SEQ ID NO: 1244202
cuggcuauuuaacaaggaa

SEQ ID NO: 1472461 - RNA, 19 nt, Artificial Sequence
  Description of Artificial Sequence: Synthetic oligonucleotide
  Antisense strand to SEQ ID NO: 1472460
uuccuuguuaaauagccag

SEQ ID NO: 1472462 - RNA, 19 nt, Artificial Sequence
  Description of Artificial Sequence: Synthetic oligonucleotide
  Sense strand starting at position 2409 of SEQ ID NO: 1244202
aggaaauguguggguggua

SEQ ID NO: 1472463 - RNA, 19 nt, Artificial Sequence
  Description of Artificial Sequence: Synthetic oligonucleotide
  Antisense strand to SEQ ID NO: 1472462
uaccacccacacauuuccu

SEQ ID NO: 1472464 - RNA, 19 nt, Artificial Sequence
  Description of Artificial Sequence: Synthetic oligonucleotide
  Sense strand starting at position 2412 of SEQ ID NO: 1244202
aaaugugugggugguagaa

SEQ ID NO: 1472465 - RNA, 19 nt, Artificial Sequence
  Description of Artificial Sequence: Synthetic oligonucleotide
  Antisense strand to SEQ ID NO: 1472464
uucuaccacccacacauuu

SEQ ID NO: 1472466 - RNA, 19 nt, Artificial Sequence
  Description of Artificial Sequence: Synthetic oligonucleotide
  Sense strand starting at position 2424 of SEQ ID NO: 1244202
gguagaaacugcuccgaug

SEQ ID NO: 1472467 - RNA, 19 nt, Artificial Sequence
  Description of Artificial Sequence: Synthetic oligonucleotide
  Antisense strand to SEQ ID NO: 1472466
caucggagcaguuucuacc

SEQ ID NO: 1472468 - RNA, 19 nt, Artificial Sequence
  Description of Artificial Sequence: Synthetic oligonucleotide
  Sense strand starting at position 2449 of SEQ ID NO: 1244202
gcggcauaaauccagcaga

SEQ ID NO: 1472469 - RNA, 19 nt, Artificial Sequence
  Description of Artificial Sequence: Synthetic oligonucleotide
  Antisense strand to SEQ ID NO: 1472468
ucugcuggauuuaugccgc

SEQ ID NO: 1472470 - RNA, 19 nt, Artificial Sequence
  Description of Artificial Sequence: Synthetic oligonucleotide
  Sense strand starting at position 2631 of SEQ ID NO: 1244202
ugauacguccuccaucuga

SEQ ID NO: 1472471 - RNA, 19 nt, Artificial Sequence
  Description of Artificial Sequence: Synthetic oligonucleotide
  Antisense strand to SEQ ID NO: 1472470
ucagauggaggacguauca

SEQ ID NO: 1472472 - RNA, 19 nt, Artificial Sequence
  Description of Artificial Sequence: Synthetic oligonucleotide
  Sense strand starting at position 2687 of SEQ ID NO: 1244202
ggaauaagagcuugcucug

SEQ ID NO: 1472473 - RNA, 19 nt, Artificial Sequence
  Description of Artificial Sequence: Synthetic oligonucleotide
  Antisense strand to SEQ ID NO: 1472472
cagagcaagcucuuauucc

SEQ ID NO: 1472474 - RNA, 19 nt, Artificial Sequence
  Description of Artificial Sequence: Synthetic oligonucleotide
  Sense strand starting at position 2940 of SEQ ID NO: 1244202
auugucaagugcucaauaa

SEQ ID NO: 1472475 - RNA, 19 nt, Artificial Sequence
  Description of Artificial Sequence: Synthetic oligonucleotide
  Antisense strand to SEQ ID NO: 1472474
uuauugagcacuugacaau

SEQ ID NO: 1472476 - RNA, 19 nt, Artificial Sequence
  Description of Artificial Sequence: Synthetic oligonucleotide
  Sense strand starting at position 2941 of SEQ ID NO: 1244202
uugucaagugcucaauaau

SEQ ID NO: 1472477 - RNA, 19 nt, Artificial Sequence
  Description of Artificial Sequence: Synthetic oligonucleotide
  Antisense strand to SEQ ID NO: 1472476
auuauugagcacuugacaa

SEQ ID NO: 1472478 - RNA, 19 nt, Artificial Sequence
  Description of Artificial Sequence: Synthetic oligonucleotide
  Sense strand starting at position 3090 of SEQ ID NO: 1244202
guucuauagcccuggaaug

SEQ ID NO: 1472479 - RNA, 19 nt, Artificial Sequence
  Description of Artificial Sequence: Synthetic oligonucleotide
  Antisense strand to SEQ ID NO: 1472478
cauuccagggcuauagaac

SEQ ID NO: 1472480 - RNA, 19 nt, Artificial Sequence
  Description of Artificial Sequence: Synthetic oligonucleotide
  Sense strand starting at position 3091 of SEQ ID NO: 1244202
uucuauagcccuggaauga

SEQ ID NO: 1472481 - RNA, 19 nt, Artificial Sequence
  Description of Artificial Sequence: Synthetic oligonucleotide
  Antisense strand to SEQ ID NO: 1472480
ucauuccagggcuauagaa

SEQ ID NO: 1472482 - RNA, 19 nt, Artificial Sequence
  Description of Artificial Sequence: Synthetic oligonucleotide
  Sense strand starting at position 3326 of SEQ ID NO: 1244202
ccagaaaugucaguacaag

SEQ ID NO: 1472483 - RNA, 19 nt, Artificial Sequence
  Description of Artificial Sequence: Synthetic oligonucleotide
  Antisense strand to SEQ ID NO: 1472482
cuuguacugacauuucugg

SEQ ID NO: 1472484 - RNA, 19 nt, Artificial Sequence
  Description of Artificial Sequence: Synthetic oligonucleotide
  Sense strand starting at position 3537 of SEQ ID NO: 1244202
caguaccuugucuggauua

SEQ ID NO: 1472485 - RNA, 19 nt, Artificial Sequence
  Description of Artificial Sequence: Synthetic oligonucleotide
  Antisense strand to SEQ ID NO: 1472484
uaauccagacaagguacug

SEQ ID NO: 1472486 - RNA, 19 nt, Artificial Sequence
  Description of Artificial Sequence: Synthetic oligonucleotide
  Sense strand starting at position 3552 of SEQ ID NO: 1244202
auuaccuauuuagagaaga

SEQ ID NO: 1472487 - RNA, 19 nt, Artificial Sequence
  Description of Artificial Sequence: Synthetic oligonucleotide
  Antisense strand to SEQ ID NO: 1472486
ucuucucuaaauagguaau

SEQ ID NO: 1472488 - RNA, 19 nt, Artificial Sequence
  Description of Artificial Sequence: Synthetic oligonucleotide
  Sense strand starting at position 3593 of SEQ ID NO: 1244202
gugugauggcaauaccaac

SEQ ID NO: 1472489 - RNA, 19 nt, Artificial Sequence
  Description of Artificial Sequence: Synthetic oligonucleotide
  Antisense strand to SEQ ID NO: 1472488
guugguauugccaucacac

SEQ ID NO: 1472490 - RNA, 19 nt, Artificial Sequence
  Description of Artificial Sequence: Synthetic oligonucleotide
  Sense strand starting at position 3654 of SEQ ID NO: 1244202
ccagcacuuguggaaugua

SEQ ID NO: 1472491 - RNA, 19 nt, Artificial Sequence
  Description of Artificial Sequence: Synthetic oligonucleotide
  Antisense strand to SEQ ID NO: 1472490
uacauuccacaagugcugg

SEQ ID NO: 1472492 - RNA, 19 nt, Artificial Sequence
  Description of Artificial Sequence: Synthetic oligonucleotide
  Sense strand starting at position 3758 of SEQ ID NO: 1244202
gguguuaucagucacucuc

SEQ ID NO: 1472493 - RNA, 19 nt, Artificial Sequence
  Description of Artificial Sequence: Synthetic oligonucleotide
  Antisense strand to SEQ ID NO: 1472492
gagagugacugauaacacc

SEQ ID NO: 1472494 - RNA, 19 nt, Artificial Sequence
  Description of Artificial Sequence: Synthetic oligonucleotide
  Sense strand starting at position 3797 of SEQ ID NO: 1244202
acauguuagaaaugugagu

SEQ ID NO: 1472495 - RNA, 19 nt, Artificial Sequence
  Description of Artificial Sequence: Synthetic oligonucleotide
  Antisense strand to SEQ ID NO: 1472494
acucacauuucuaacaugu

SEQ ID NO: 1472496 - RNA, 19 nt, Artificial Sequence
  Description of Artificial Sequence: Synthetic oligonucleotide
  Sense strand starting at position 3799 of SEQ ID NO: 1244202
auguuagaaaugugaguuu

SEQ ID NO: 1472497 - RNA, 19 nt, Artificial Sequence
  Description of Artificial Sequence: Synthetic oligonucleotide
  Antisense strand to SEQ ID NO: 1472496
aaacucacauuucuaacau

SEQ ID NO: 1472498 - RNA, 19 nt, Artificial Sequence
  Description of Artificial Sequence: Synthetic oligonucleotide
  Sense strand starting at position 3983 of SEQ ID NO: 1244202
gcaggcaaccuauagaauu

SEQ ID NO: 1472499 - RNA, 19 nt, Artificial Sequence
  Description of Artificial Sequence: Synthetic oligonucleotide
  Antisense strand to SEQ ID NO: 1472498
aauucuauagguugccugc

SEQ ID NO: 1472500 - RNA, 19 nt, Artificial Sequence
  Description of Artificial Sequence: Synthetic oligonucleotide
  Sense strand starting at position 194 of SEQ ID NO: 1244203
gcugacaaacuguaagacu

SEQ ID NO: 1472501 - RNA, 19 nt, Artificial Sequence
  Description of Artificial Sequence: Synthetic oligonucleotide
  Antisense strand to SEQ ID NO: 1472500
agucuuacaguuugucagc

SEQ ID NO: 1472502 - RNA, 19 nt, Artificial Sequence
  Description of Artificial Sequence: Synthetic oligonucleotide
  Sense strand starting at position 251 of SEQ ID NO: 1244203
auggguucugugcauagga

SEQ ID NO: 1472503 - RNA, 19 nt, Artificial Sequence
  Description of Artificial Sequence: Synthetic oligonucleotide
  Antisense strand to SEQ ID NO: 1472502
uccuaugcacagaacccau

SEQ ID NO: 1472504 - RNA, 19 nt, Artificial Sequence
  Description of Artificial Sequence: Synthetic oligonucleotide
  Sense strand starting at position 253 of SEQ ID NO: 1244203
ggguucugugcauaggaga

SEQ ID NO: 1472505 - RNA, 19 nt, Artificial Sequence
  Description of Artificial Sequence: Synthetic oligonucleotide
  Antisense strand to SEQ ID NO: 1472504
ucuccuaugcacagaaccc

SEQ ID NO: 1472506 - RNA, 19 nt, Artificial Sequence
  Description of Artificial Sequence: Synthetic oligonucleotide
  Sense strand starting at position 366 of SEQ ID NO: 1244203
gggaaaggaucucugagcu

SEQ ID NO: 1472507 - RNA, 19 nt, Artificial Sequence
  Description of Artificial Sequence: Synthetic oligonucleotide
  Antisense strand to SEQ ID NO: 1472506
agcucagagauccuuuccc

SEQ ID NO: 1472508 - RNA, 19 nt, Artificial Sequence
  Description of Artificial Sequence: Synthetic oligonucleotide
  Sense strand starting at position 388 of SEQ ID NO: 1244203
gugugugguggcucuguga

SEQ ID NO: 1472509 - RNA, 19 nt, Artificial Sequence
  Description of Artificial Sequence: Synthetic oligonucleotide
  Antisense strand to SEQ ID NO: 1472508
ucacagagccaccacacac

SEQ ID NO: 1472510 - RNA, 19 nt, Artificial Sequence
  Description of Artificial Sequence: Synthetic oligonucleotide
  Sense strand starting at position 450 of SEQ ID NO: 1244203
uuaacuuguguugacaaca

SEQ ID NO: 1472511 - RNA, 19 nt, Artificial Sequence
  Description of Artificial Sequence: Synthetic oligonucleotide
  Antisense strand to SEQ ID NO: 1472510
uguugucaacacaaguuaa

SEQ ID NO: 1472512 - RNA, 19 nt, Artificial Sequence
  Description of Artificial Sequence: Synthetic oligonucleotide
  Sense strand starting at position 642 of SEQ ID NO: 1244203
ugagcaaggacuugguaau

SEQ ID NO: 1472513 - RNA, 19 nt, Artificial Sequence
  Description of Artificial Sequence: Synthetic oligonucleotide
  Antisense strand to SEQ ID NO: 1472512
auuaccaaguccuugcuca

SEQ ID NO: 1472514 - RNA, 19 nt, Artificial Sequence
  Description of Artificial Sequence: Synthetic oligonucleotide
  Sense strand starting at position 643 of SEQ ID NO: 1244203
gagcaaggacuugguaauu

SEQ ID NO: 1472515 - RNA, 19 nt, Artificial Sequence
  Description of Artificial Sequence: Synthetic oligonucleotide
  Antisense strand to SEQ ID NO: 1472514
aauuaccaaguccuugcuc

SEQ ID NO: 1472516 - RNA, 19 nt, Artificial Sequence
  Description of Artificial Sequence: Synthetic oligonucleotide
  Sense strand starting at position 702 of SEQ ID NO: 1244203
ggaucaggaugucuaucuu

SEQ ID NO: 1472517 - RNA, 19 nt, Artificial Sequence
  Description of Artificial Sequence: Synthetic oligonucleotide
  Antisense strand to SEQ ID NO: 1472516
aagauagacauccugaucc

SEQ ID NO: 1472518 - RNA, 19 nt, Artificial Sequence
  Description of Artificial Sequence: Synthetic oligonucleotide
  Sense strand starting at position 742 of SEQ ID NO: 1244203
gcagguacucaaugaauau

SEQ ID NO: 1472519 - RNA, 19 nt, Artificial Sequence
  Description of Artificial Sequence: Synthetic oligonucleotide
  Antisense strand to SEQ ID NO: 1472518
auauucauugaguaccugc

SEQ ID NO: 1472520 - RNA, 19 nt, Artificial Sequence
  Description of Artificial Sequence: Synthetic oligonucleotide
  Sense strand starting at position 845 of SEQ ID NO: 1244203
cugagaagcugaucauaau

SEQ ID NO: 1472521 - RNA, 19 nt, Artificial Sequence
  Description of Artificial Sequence: Synthetic oligonucleotide
  Antisense strand to SEQ ID NO: 1472520
auuaugaucagcuucucag

SEQ ID NO: 1472522 - RNA, 19 nt, Artificial Sequence
  Description of Artificial Sequence: Synthetic oligonucleotide
  Sense strand starting at position 854 of SEQ ID NO: 1244203
ugaucauaauaguugacau

SEQ ID NO: 1472523 - RNA, 19 nt, Artificial Sequence
  Description of Artificial Sequence: Synthetic oligonucleotide
  Antisense strand to SEQ ID NO: 1472522
augucaacuauuaugauca

SEQ ID NO: 1472524 - RNA, 19 nt, Artificial Sequence
  Description of Artificial Sequence: Synthetic oligonucleotide
  Sense strand starting at position 942 of SEQ ID NO: 1244203
ugauccugcccucaagaaa

SEQ ID NO: 1472525 - RNA, 19 nt, Artificial Sequence
  Description of Artificial Sequence: Synthetic oligonucleotide
  Antisense strand to SEQ ID NO: 1472524
uuucuugagggcaggauca

SEQ ID NO: 1472526 - RNA, 19 nt, Artificial Sequence
  Description of Artificial Sequence: Synthetic oligonucleotide
  Sense strand starting at position 1055 of SEQ ID NO: 1244203
cugggacuacuuuguccua

SEQ ID NO: 1472527 - RNA, 19 nt, Artificial Sequence
  Description of Artificial Sequence: Synthetic oligonucleotide
  Antisense strand to SEQ ID NO: 1472526
uaggacaaaguagucccag

SEQ ID NO: 1472528 - RNA, 19 nt, Artificial Sequence
  Description of Artificial Sequence: Synthetic oligonucleotide
  Sense strand starting at position 1058 of SEQ ID NO: 1244203
ggacuacuuuguccuaggu

SEQ ID NO: 1472529 - RNA, 19 nt, Artificial Sequence
  Description of Artificial Sequence: Synthetic oligonucleotide
  Antisense strand to SEQ ID NO: 1472528
accuaggacaaaguagucc

SEQ ID NO: 1472530 - RNA, 19 nt, Artificial Sequence
  Description of Artificial Sequence: Synthetic oligonucleotide
  Sense strand starting at position 1253 of SEQ ID NO: 1244203
auggcccagucuuuacaaa

SEQ ID NO: 1472531 - RNA, 19 nt, Artificial Sequence
  Description of Artificial Sequence: Synthetic oligonucleotide
  Antisense strand to SEQ ID NO: 1472530
uuuguaaagacugggccau

SEQ ID NO: 1472532 - RNA, 19 nt, Artificial Sequence
  Description of Artificial Sequence: Synthetic oligonucleotide
  Sense strand starting at position 1312 of SEQ ID NO: 1244203
cucucaccucaggguaaua

SEQ ID NO: 1472533 - RNA, 19 nt, Artificial Sequence
  Description of Artificial Sequence: Synthetic oligonucleotide
  Antisense strand to SEQ ID NO: 1472532
uauuacccugaggugagag

SEQ ID NO: 1472534 - RNA, 19 nt, Artificial Sequence
  Description of Artificial Sequence: Synthetic oligonucleotide
  Sense strand starting at position 1325 of SEQ ID NO: 1244203
guaauaauucuggagcuug

SEQ ID NO: 1472535 - RNA, 19 nt, Artificial Sequence
  Description of Artificial Sequence: Synthetic oligonucleotide
  Antisense strand to SEQ ID NO: 1472534
caagcuccagaauuauuac

SEQ ID NO: 1472536 - RNA, 19 nt, Artificial Sequence
  Description of Artificial Sequence: Synthetic oligonucleotide
  Sense strand starting at position 1555 of SEQ ID NO: 1244203
ggauucucucccgacaacu

SEQ ID NO: 1472537 - RNA, 19 nt, Artificial Sequence
  Description of Artificial Sequence: Synthetic oligonucleotide
  Antisense strand to SEQ ID NO: 1472536
aguugucgggagagaaucc

SEQ ID NO: 1472538 - RNA, 19 nt, Artificial Sequence
  Description of Artificial Sequence: Synthetic oligonucleotide
  Sense strand starting at position 2037 of SEQ ID NO: 1244203
gcauuuauaccucguccau

SEQ ID NO: 1472539 - RNA, 19 nt, Artificial Sequence
  Description of Artificial Sequence: Synthetic oligonucleotide
  Antisense strand to SEQ ID NO: 1472538
auggacgagguauaaaugc

SEQ ID NO: 1472540 - RNA, 19 nt, Artificial Sequence
  Description of Artificial Sequence: Synthetic oligonucleotide
  Sense strand starting at position 2515 of SEQ ID NO: 1244203
uccugauaugaugggcuuu

SEQ ID NO: 1472541 - RNA, 19 nt, Artificial Sequence
  Description of Artificial Sequence: Synthetic oligonucleotide
  Antisense strand to SEQ ID NO: 1472540
aaagcccaucauaucagga

SEQ ID NO: 1472542 - RNA, 19 nt, Artificial Sequence
  Description of Artificial Sequence: Synthetic oligonucleotide
  Sense strand starting at position 2542 of SEQ ID NO: 1244203
ccaugaugacgucaaucaa

SEQ ID NO: 1472543 - RNA, 19 nt, Artificial Sequence
  Description of Artificial Sequence: Synthetic oligonucleotide
  Antisense strand to SEQ ID NO: 1472542
uugauugacgucaucaugg

SEQ ID NO: 1472544 - RNA, 19 nt, Artificial Sequence
  Description of Artificial Sequence: Synthetic oligonucleotide
  Sense strand starting at position 2591 of SEQ ID NO: 1244203
cauccagggcgauguaaua

SEQ ID NO: 1472545 - RNA, 19 nt, Artificial Sequence
  Description of Artificial Sequence: Synthetic oligonucleotide
  Antisense strand to SEQ ID NO: 1472544
uauuacaucgcccuggaug

SEQ ID NO: 1472546 - RNA, 19 nt, Artificial Sequence
  Description of Artificial Sequence: Synthetic oligonucleotide
  Sense strand starting at position 2657 of SEQ ID NO: 1244203
aguucuuacuuguuaagaa

SEQ ID NO: 1472547 - RNA, 19 nt, Artificial Sequence
  Description of Artificial Sequence: Synthetic oligonucleotide
  Antisense strand to SEQ ID NO: 1472546
uucuuaacaaguaagaacu

SEQ ID NO: 1472548 - RNA, 19 nt, Artificial Sequence
  Description of Artificial Sequence: Synthetic oligonucleotide
  Sense strand starting at position 2756 of SEQ ID NO: 1244203
uuagauguccauuauuccu

SEQ ID NO: 1472549 - RNA, 19 nt, Artificial Sequence
  Description of Artificial Sequence: Synthetic oligonucleotide
  Antisense strand to SEQ ID NO: 1472548
aggaauaauggacaucuaa

SEQ ID NO: 1472550 - RNA, 19 nt, Artificial Sequence
  Description of Artificial Sequence: Synthetic oligonucleotide
  Sense strand starting at position 2994 of SEQ ID NO: 1244203
ugacacugucaugacuuau

SEQ ID NO: 1472551 - RNA, 19 nt, Artificial Sequence
  Description of Artificial Sequence: Synthetic oligonucleotide
  Antisense strand to SEQ ID NO: 1472550
auaagucaugacaguguca

SEQ ID NO: 1472552 - RNA, 19 nt, Artificial Sequence
  Description of Artificial Sequence: Synthetic oligonucleotide
  Sense strand starting at position 3117 of SEQ ID NO: 1244203
guguggguagagugaugaa

SEQ ID NO: 1472553 - RNA, 19 nt, Artificial Sequence
  Description of Artificial Sequence: Synthetic oligonucleotide
  Antisense strand to SEQ ID NO: 1472552
uucaucacucuacccacac

SEQ ID NO: 1472554 - RNA, 19 nt, Artificial Sequence
  Description of Artificial Sequence: Synthetic oligonucleotide
  Sense strand starting at position 3176 of SEQ ID NO: 1244203
agugauaacugagugguuu

SEQ ID NO: 1472555 - RNA, 19 nt, Artificial Sequence
  Description of Artificial Sequence: Synthetic oligonucleotide
  Antisense strand to SEQ ID NO: 1472554
aaaccacucaguuaucacu

SEQ ID NO: 1472556 - RNA, 19 nt, Artificial Sequence
  Description of Artificial Sequence: Synthetic oligonucleotide
  Sense strand starting at position 3177 of SEQ ID NO: 1244203
gugauaacugagugguuua

SEQ ID NO: 1472557 - RNA, 19 nt, Artificial Sequence
  Description of Artificial Sequence: Synthetic oligonucleotide
  Antisense strand to SEQ ID NO: 1472556
uaaaccacucaguuaucac

SEQ ID NO: 1472558 - RNA, 19 nt, Artificial Sequence
  Description of Artificial Sequence: Synthetic oligonucleotide
  Sense strand starting at position 3178 of SEQ ID NO: 1244203
ugauaacugagugguuuac

SEQ ID NO: 1472559 - RNA, 19 nt, Artificial Sequence
  Description of Artificial Sequence: Synthetic oligonucleotide
  Antisense strand to SEQ ID NO: 1472558
guaaaccacucaguuauca

SEQ ID NO: 1472560 - RNA, 19 nt, Artificial Sequence
  Description of Artificial Sequence: Synthetic oligonucleotide
  Sense strand starting at position 3230 of SEQ ID NO: 1244203
ggcucuuaggaauggauga

SEQ ID NO: 1472561 - RNA, 19 nt, Artificial Sequence
  Description of Artificial Sequence: Synthetic oligonucleotide
  Antisense strand to SEQ ID NO: 1472560
ucauccauuccuaagagcc

SEQ ID NO: 1472562 - RNA, 19 nt, Artificial Sequence
  Description of Artificial Sequence: Synthetic oligonucleotide
  Sense strand starting at position 3231 of SEQ ID NO: 1244203
gcucuuaggaauggaugaa

SEQ ID NO: 1472563 - RNA, 19 nt, Artificial Sequence
  Description of Artificial Sequence: Synthetic oligonucleotide
  Antisense strand to SEQ ID NO: 1472562
uucauccauuccuaagagc

SEQ ID NO: 1472564 - RNA, 19 nt, Artificial Sequence
  Description of Artificial Sequence: Synthetic oligonucleotide
  Sense strand starting at position 3316 of SEQ ID NO: 1244203
ggagaauaaugugcacaca

SEQ ID NO: 1472565 - RNA, 19 nt, Artificial Sequence
  Description of Artificial Sequence: Synthetic oligonucleotide
  Antisense strand to SEQ ID NO: 1472564
ugugugcacauuauucucc

SEQ ID NO: 1472566 - RNA, 19 nt, Artificial Sequence
  Description of Artificial Sequence: Synthetic oligonucleotide
  Sense strand starting at position 3400 of SEQ ID NO: 1244203
gagaguugugaagggaagu

SEQ ID NO: 1472567 - RNA, 19 nt, Artificial Sequence
  Description of Artificial Sequence: Synthetic oligonucleotide
  Antisense strand to SEQ ID NO: 1472566
acuucccuucacaacucuc

SEQ ID NO: 1472568 - RNA, 19 nt, Artificial Sequence
  Description of Artificial Sequence: Synthetic oligonucleotide
  Sense strand starting at position 3538 of SEQ ID NO: 1244203
cuaaguguggugugacaaa

SEQ ID NO: 1472569 - RNA, 19 nt, Artificial Sequence
  Description of Artificial Sequence: Synthetic oligonucleotide
  Antisense strand to SEQ ID NO: 1472568
uuugucacaccacacuuag

SEQ ID NO: 1472570 - RNA, 19 nt, Artificial Sequence
  Description of Artificial Sequence: Synthetic oligonucleotide
  Sense strand starting at position 3667 of SEQ ID NO: 1244203
uagaauuuauggcagggau

SEQ ID NO: 1472571 - RNA, 19 nt, Artificial Sequence
  Description of Artificial Sequence: Synthetic oligonucleotide
  Antisense strand to SEQ ID NO: 1472570
aucccugccauaaauucua

SEQ ID NO: 1472572 - RNA, 19 nt, Artificial Sequence
  Description of Artificial Sequence: Synthetic oligonucleotide
  Sense strand starting at position 3679 of SEQ ID NO: 1244203
cagggaugaugauacagau

SEQ ID NO: 1472573 - RNA, 19 nt, Artificial Sequence
  Description of Artificial Sequence: Synthetic oligonucleotide
  Antisense strand to SEQ ID NO: 1472572
aucuguaucaucaucccug

SEQ ID NO: 1472574 - RNA, 19 nt, Artificial Sequence
  Description of Artificial Sequence: Synthetic oligonucleotide
  Sense strand starting at position 3697 of SEQ ID NO: 1244203
uaagguuuaguacaaguga

SEQ ID NO: 1472575 - RNA, 19 nt, Artificial Sequence
  Description of Artificial Sequence: Synthetic oligonucleotide
  Antisense strand to SEQ ID NO: 1472574
ucacuuguacuaaaccuua

SEQ ID NO: 1472576 - RNA, 19 nt, Artificial Sequence
  Description of Artificial Sequence: Synthetic oligonucleotide
  Sense strand starting at position 3784 of SEQ ID NO: 1244203
uggagaauuucccaaucag

SEQ ID NO: 1472577 - RNA, 19 nt, Artificial Sequence
  Description of Artificial Sequence: Synthetic oligonucleotide
  Antisense strand to SEQ ID NO: 1472576
cugauugggaaauucucca

SEQ ID NO: 1472578 - RNA, 19 nt, Artificial Sequence
  Description of Artificial Sequence: Synthetic oligonucleotide
  Sense strand starting at position 3983 of SEQ ID NO: 1244203
ggcugccuugaccagaaau

SEQ ID NO: 1472579 - RNA, 19 nt, Artificial Sequence
  Description of Artificial Sequence: Synthetic oligonucleotide
  Antisense strand to SEQ ID NO: 1472578
auuucuggucaaggcagcc

SEQ ID NO: 1472580 - RNA, 19 nt, Artificial Sequence
  Description of Artificial Sequence: Synthetic oligonucleotide
  Sense strand starting at position 73 of SEQ ID NO: 1244204
uuacuagacugcucugaug

SEQ ID NO: 1472581 - RNA, 19 nt, Artificial Sequence
  Description of Artificial Sequence: Synthetic oligonucleotide
  Antisense strand to SEQ ID NO: 1472580
caucagagcagucuaguaa

SEQ ID NO: 1472582 - RNA, 19 nt, Artificial Sequence
  Description of Artificial Sequence: Synthetic oligonucleotide
  Sense strand starting at position 81 of SEQ ID NO: 1244204
cugcucugaugguuaggaa

SEQ ID NO: 1472583 - RNA, 19 nt, Artificial Sequence
  Description of Artificial Sequence: Synthetic oligonucleotide
  Antisense strand to SEQ ID NO: 1472582
uuccuaaccaucagagcag

SEQ ID NO: 1472584 - RNA, 19 nt, Artificial Sequence
  Description of Artificial Sequence: Synthetic oligonucleotide
  Sense strand starting at position 82 of SEQ ID NO: 1244204
ugcucugaugguuaggaaa

SEQ ID NO: 1472585 - RNA, 19 nt, Artificial Sequence
  Description of Artificial Sequence: Synthetic oligonucleotide
  Antisense strand to SEQ ID NO: 1472584
uuuccuaaccaucagagca

SEQ ID NO: 1472586 - RNA, 19 nt, Artificial Sequence
  Description of Artificial Sequence: Synthetic oligonucleotide
  Sense strand starting at position 426 of SEQ ID NO: 1244204
uagguuacuggguauccaa

SEQ ID NO: 1472587 - RNA, 19 nt, Artificial Sequence
  Description of Artificial Sequence: Synthetic oligonucleotide
  Antisense strand to SEQ ID NO: 1472586
uuggauacccaguaaccua

SEQ ID NO: 1472588 - RNA, 19 nt, Artificial Sequence
  Description of Artificial Sequence: Synthetic oligonucleotide
  Sense strand starting at position 490 of SEQ ID NO: 1244204
ggguuucugggaugcuaaa

SEQ ID NO: 1472589 - RNA, 19 nt, Artificial Sequence
  Description of Artificial Sequence: Synthetic oligonucleotide
  Antisense strand to SEQ ID NO: 1472588
uuuagcaucccagaaaccc

SEQ ID NO: 1472590 - RNA, 19 nt, Artificial Sequence
  Description of Artificial Sequence: Synthetic oligonucleotide
  Sense strand starting at position 532 of SEQ ID NO: 1244204
agaacaacuugguuaucca

SEQ ID NO: 1472591 - RNA, 19 nt, Artificial Sequence
  Description of Artificial Sequence: Synthetic oligonucleotide
  Antisense strand to SEQ ID NO: 1472590
uggauaaccaaguuguucu

SEQ ID NO: 1472592 - RNA, 19 nt, Artificial Sequence
  Description of Artificial Sequence: Synthetic oligonucleotide
  Sense strand starting at position 664 of SEQ ID NO: 1244204
uuguguaacccacauacuu

SEQ ID NO: 1472593 - RNA, 19 nt, Artificial Sequence
  Description of Artificial Sequence: Synthetic oligonucleotide
  Antisense strand to SEQ ID NO: 1472592
aaguauguggguuacacaa

SEQ ID NO: 1472594 - RNA, 19 nt, Artificial Sequence
  Description of Artificial Sequence: Synthetic oligonucleotide
  Sense strand starting at position 749 of SEQ ID NO: 1244204
cugugagcuccugaaggaa

SEQ ID NO: 1472595 - RNA, 19 nt, Artificial Sequence
  Description of Artificial Sequence: Synthetic oligonucleotide
  Antisense strand to SEQ ID NO: 1472594
uuccuucaggagcucacag

SEQ ID NO: 1472596 - RNA, 19 nt, Artificial Sequence
  Description of Artificial Sequence: Synthetic oligonucleotide
  Sense strand starting at position 765 of SEQ ID NO: 1244204
gaaggagacugucuuacuc

SEQ ID NO: 1472597 - RNA, 19 nt, Artificial Sequence
  Description of Artificial Sequence: Synthetic oligonucleotide
  Antisense strand to SEQ ID NO: 1472596
gaguaagacagucuccuuc

SEQ ID NO: 1472598 - RNA, 19 nt, Artificial Sequence
  Description of Artificial Sequence: Synthetic oligonucleotide
  Sense strand starting at position 769 of SEQ ID NO: 1244204
gagacugucuuacucagua

SEQ ID NO: 1472599 - RNA, 19 nt, Artificial Sequence
  Description of Artificial Sequence: Synthetic oligonucleotide
  Antisense strand to SEQ ID NO: 1472598
uacugaguaagacagucuc

SEQ ID NO: 1472600 - RNA, 19 nt, Artificial Sequence
  Description of Artificial Sequence: Synthetic oligonucleotide
  Sense strand starting at position 774 of SEQ ID NO: 1244204
ugucuuacucaguacauua

SEQ ID NO: 1472601 - RNA, 19 nt, Artificial Sequence
  Description of Artificial Sequence: Synthetic oligonucleotide
  Antisense strand to SEQ ID NO: 1472600
uaauguacugaguaagaca

SEQ ID NO: 1472602 - RNA, 19 nt, Artificial Sequence
  Description of Artificial Sequence: Synthetic oligonucleotide
  Sense strand starting at position 821 of SEQ ID NO: 1244204
ucuccaacucuggguaaau

SEQ ID NO: 1472603 - RNA, 19 nt, Artificial Sequence
  Description of Artificial Sequence: Synthetic oligonucleotide
  Antisense strand to SEQ ID NO: 1472602
auuuacccagaguuggaga

SEQ ID NO: 1472604 - RNA, 19 nt, Artificial Sequence
  Description of Artificial Sequence: Synthetic oligonucleotide
  Sense strand starting at position 822 of SEQ ID NO: 1244204
cuccaacucuggguaaaua

SEQ ID NO: 1472605 - RNA, 19 nt, Artificial Sequence
  Description of Artificial Sequence: Synthetic oligonucleotide
  Antisense strand to SEQ ID NO: 1472604
uauuuacccagaguuggag

SEQ ID NO: 1472606 - RNA, 19 nt, Artificial Sequence
  Description of Artificial Sequence: Synthetic oligonucleotide
  Sense strand starting at position 926 of SEQ ID NO: 1244204
gaaucaagggcuuguacaa

SEQ ID NO: 1472607 - RNA, 19 nt, Artificial Sequence
  Description of Artificial Sequence: Synthetic oligonucleotide
  Antisense strand to SEQ ID NO: 1472606
uuguacaagcccuugauuc

SEQ ID NO: 1472608 - RNA, 19 nt, Artificial Sequence
  Description of Artificial Sequence: Synthetic oligonucleotide
  Sense strand starting at position 984 of SEQ ID NO: 1244204
gacauugccucuucuggga

SEQ ID NO: 1472609 - RNA, 19 nt, Artificial Sequence
  Description of Artificial Sequence: Synthetic oligonucleotide
  Antisense strand to SEQ ID NO: 1472608
ucccagaagaggcaauguc

SEQ ID NO: 1472610 - RNA, 19 nt, Artificial Sequence
  Description of Artificial Sequence: Synthetic oligonucleotide
  Sense strand starting at position 1044 of SEQ ID NO: 1244204
guggacucuuuacuuauau

SEQ ID NO: 1472611 - RNA, 19 nt, Artificial Sequence
  Description of Artificial Sequence: Synthetic oligonucleotide
  Antisense strand to SEQ ID NO: 1472610
auauaaguaaagaguccac

SEQ ID NO: 1472612 - RNA, 19 nt, Artificial Sequence
  Description of Artificial Sequence: Synthetic oligonucleotide
  Sense strand starting at position 1141 of SEQ ID NO: 1244204
uagauauugcuggagucaa

SEQ ID NO: 1472613 - RNA, 19 nt, Artificial Sequence
  Description of Artificial Sequence: Synthetic oligonucleotide
  Antisense strand to SEQ ID NO: 1472612
uugacuccagcaauaucua

SEQ ID NO: 1472614 - RNA, 19 nt, Artificial Sequence
  Description of Artificial Sequence: Synthetic oligonucleotide
  Sense strand starting at position 1335 of SEQ ID NO: 1244204
cagauauucugguuuggag

SEQ ID NO: 1472615 - RNA, 19 nt, Artificial Sequence
  Description of Artificial Sequence: Synthetic oligonucleotide
  Antisense strand to SEQ ID NO: 1472614
cuccaaaccagaauaucug

SEQ ID NO: 1472616 - RNA, 19 nt, Artificial Sequence
  Description of Artificial Sequence: Synthetic oligonucleotide
  Sense strand starting at position 1337 of SEQ ID NO: 1244204
gauauucugguuuggagua

SEQ ID NO: 1472617 - RNA, 19 nt, Artificial Sequence
  Description of Artificial Sequence: Synthetic oligonucleotide
  Antisense strand to SEQ ID NO: 1472616
uacuccaaaccagaauauc

SEQ ID NO: 1472618 - RNA, 19 nt, Artificial Sequence
  Description of Artificial Sequence: Synthetic oligonucleotide
  Sense strand starting at position 1350 of SEQ ID NO: 1244204
ggaguaagacgccauauaa

SEQ ID NO: 1472619 - RNA, 19 nt, Artificial Sequence
  Description of Artificial Sequence: Synthetic oligonucleotide
  Antisense strand to SEQ ID NO: 1472618
uuauauggcgucuuacucc

SEQ ID NO: 1472620 - RNA, 19 nt, Artificial Sequence
  Description of Artificial Sequence: Synthetic oligonucleotide
  Sense strand starting at position 1365 of SEQ ID NO: 1244204
auaagauugcuaugacuga

SEQ ID NO: 1472621 - RNA, 19 nt, Artificial Sequence
  Description of Artificial Sequence: Synthetic oligonucleotide
  Antisense strand to SEQ ID NO: 1472620
ucagucauagcaaucuuau

SEQ ID NO: 1472622 - RNA, 19 nt, Artificial Sequence
  Description of Artificial Sequence: Synthetic oligonucleotide
  Sense strand starting at position 1448 of SEQ ID NO: 1244204
uucuaagacuacuugaugu

SEQ ID NO: 1472623 - RNA, 19 nt, Artificial Sequence
  Description of Artificial Sequence: Synthetic oligonucleotide
  Antisense strand to SEQ ID NO: 1472622
acaucaaguagucuuagaa

SEQ ID NO: 1472624 - RNA, 19 nt, Artificial Sequence
  Description of Artificial Sequence: Synthetic oligonucleotide
  Sense strand starting at position 1503 of SEQ ID NO: 1244204
ucagcauuacugugaacag

SEQ ID NO: 1472625 - RNA, 19 nt, Artificial Sequence
  Description of Artificial Sequence: Synthetic oligonucleotide
  Antisense strand to SEQ ID NO: 1472624
cuguucacaguaaugcuga

SEQ ID NO: 1472626 - RNA, 19 nt, Artificial Sequence
  Description of Artificial Sequence: Synthetic oligonucleotide
  Sense strand starting at position 1536 of SEQ ID NO: 1244204
acaguuuaguaugucaaau

SEQ ID NO: 1472627 - RNA, 19 nt, Artificial Sequence
  Description of Artificial Sequence: Synthetic oligonucleotide
  Antisense strand to SEQ ID NO: 1472626
auuugacauacuaaacugu

SEQ ID NO: 1472628 - RNA, 19 nt, Artificial Sequence
  Description of Artificial Sequence: Synthetic oligonucleotide
  Sense strand starting at position 2131 of SEQ ID NO: 1244204
accugaguccuauaccuca

SEQ ID NO: 1472629 - RNA, 19 nt, Artificial Sequence
  Description of Artificial Sequence: Synthetic oligonucleotide
  Antisense strand to SEQ ID NO: 1472628
ugagguauaggacucaggu

SEQ ID NO: 1472630 - RNA, 19 nt, Artificial Sequence
  Description of Artificial Sequence: Synthetic oligonucleotide
  Sense strand starting at position 2134 of SEQ ID NO: 1244204
ugaguccuauaccucauua

SEQ ID NO: 1472631 - RNA, 19 nt, Artificial Sequence
  Description of Artificial Sequence: Synthetic oligonucleotide
  Antisense strand to SEQ ID NO: 1472630
uaaugagguauaggacuca

SEQ ID NO: 1472632 - RNA, 19 nt, Artificial Sequence
  Description of Artificial Sequence: Synthetic oligonucleotide
  Sense strand starting at position 2195 of SEQ ID NO: 1244204
aaacaugcugauugguuaa

SEQ ID NO: 1472633 - RNA, 19 nt, Artificial Sequence
  Description of Artificial Sequence: Synthetic oligonucleotide
  Antisense strand to SEQ ID NO: 1472632
uuaaccaaucagcauguuu

SEQ ID NO: 1472634 - RNA, 19 nt, Artificial Sequence
  Description of Artificial Sequence: Synthetic oligonucleotide
  Sense strand starting at position 2262 of SEQ ID NO: 1244204
agugcuuauccaugggaca

SEQ ID NO: 1472635 - RNA, 19 nt, Artificial Sequence
  Description of Artificial Sequence: Synthetic oligonucleotide
  Antisense strand to SEQ ID NO: 1472634
ugucccauggauaagcacu

SEQ ID NO: 1472636 - RNA, 19 nt, Artificial Sequence
  Description of Artificial Sequence: Synthetic oligonucleotide
  Sense strand starting at position 2383 of SEQ ID NO: 1244204
caauuaagacucugugaga

SEQ ID NO: 1472637 - RNA, 19 nt, Artificial Sequence
  Description of Artificial Sequence: Synthetic oligonucleotide
  Antisense strand to SEQ ID NO: 1472636
ucucacagagucuuaauug

SEQ ID NO: 1472638 - RNA, 19 nt, Artificial Sequence
  Description of Artificial Sequence: Synthetic oligonucleotide
  Sense strand starting at position 2984 of SEQ ID NO: 1244204
ucaaucagugcugacaaua

SEQ ID NO: 1472639 - RNA, 19 nt, Artificial Sequence
  Description of Artificial Sequence: Synthetic oligonucleotide
  Antisense strand to SEQ ID NO: 1472638
uauugucagcacugauuga

SEQ ID NO: 1472640 - RNA, 19 nt, Artificial Sequence
  Description of Artificial Sequence: Synthetic oligonucleotide
  Sense strand starting at position 3142 of SEQ ID NO: 1244204
aaggaaacccuugguugau

SEQ ID NO: 1472641 - RNA, 19 nt, Artificial Sequence
  Description of Artificial Sequence: Synthetic oligonucleotide
  Antisense strand to SEQ ID NO: 1472640
aucaaccaaggguuuccuu

SEQ ID NO: 1472642 - RNA, 19 nt, Artificial Sequence
  Description of Artificial Sequence: Synthetic oligonucleotide
  Sense strand starting at position 3289 of SEQ ID NO: 1244204
ugcauuccagauggaacua

SEQ ID NO: 1472643 - RNA, 19 nt, Artificial Sequence
  Description of Artificial Sequence: Synthetic oligonucleotide
  Antisense strand to SEQ ID NO: 1472642
uaguuccaucuggaaugca

SEQ ID NO: 1472644 - RNA, 19 nt, Artificial Sequence
  Description of Artificial Sequence: Synthetic oligonucleotide
  Sense strand starting at position 3495 of SEQ ID NO: 1244204
ugguuauccucauugaagg

SEQ ID NO: 1472645 - RNA, 19 nt, Artificial Sequence
  Description of Artificial Sequence: Synthetic oligonucleotide
  Antisense strand to SEQ ID NO: 1472644
ccuucaaugaggauaacca

SEQ ID NO: 1472646 - RNA, 19 nt, Artificial Sequence
  Description of Artificial Sequence: Synthetic oligonucleotide
  Sense strand starting at position 3580 of SEQ ID NO: 1244204
uagugcauagggugaauaa

SEQ ID NO: 1472647 - RNA, 19 nt, Artificial Sequence
  Description of Artificial Sequence: Synthetic oligonucleotide
  Antisense strand to SEQ ID NO: 1472646
uuauucacccuaugcacua

SEQ ID NO: 1472648 - RNA, 19 nt, Artificial Sequence
  Description of Artificial Sequence: Synthetic oligonucleotide
  Sense strand starting at position 3611 of SEQ ID NO: 1244204
gcaucuuuaaugggucaga

SEQ ID NO: 1472649 - RNA, 19 nt, Artificial Sequence
  Description of Artificial Sequence: Synthetic oligonucleotide
  Antisense strand to SEQ ID NO: 1472648
ucugacccauuaaagaugc

SEQ ID NO: 1472650 - RNA, 19 nt, Artificial Sequence
  Description of Artificial Sequence: Synthetic oligonucleotide
  Sense strand starting at position 3612 of SEQ ID NO: 1244204
caucuuuaaugggucagaa

SEQ ID NO: 1472651 - RNA, 19 nt, Artificial Sequence
  Description of Artificial Sequence: Synthetic oligonucleotide
  Antisense strand to SEQ ID NO: 1472650
uucugacccauuaaagaug

SEQ ID NO: 1472652 - RNA, 19 nt, Artificial Sequence
  Description of Artificial Sequence: Synthetic oligonucleotide
  Sense strand starting at position 3625 of SEQ ID NO: 1244204
ucagaaacagguugugacu

SEQ ID NO: 1472653 - RNA, 19 nt, Artificial Sequence
  Description of Artificial Sequence: Synthetic oligonucleotide
  Antisense strand to SEQ ID NO: 1472652
agucacaaccuguuucuga

SEQ ID NO: 1472654 - RNA, 19 nt, Artificial Sequence
  Description of Artificial Sequence: Synthetic oligonucleotide
  Sense strand starting at position 3679 of SEQ ID NO: 1244204
ggaagucauuuccaaggag

SEQ ID NO: 1472655 - RNA, 19 nt, Artificial Sequence
  Description of Artificial Sequence: Synthetic oligonucleotide
  Antisense strand to SEQ ID NO: 1472654
cuccuuggaaaugacuucc

SEQ ID NO: 1472656 - RNA, 19 nt, Artificial Sequence
  Description of Artificial Sequence: Synthetic oligonucleotide
  Sense strand starting at position 3757 of SEQ ID NO: 1244204
gggugaaugcauugaaggu

SEQ ID NO: 1472657 - RNA, 19 nt, Artificial Sequence
  Description of Artificial Sequence: Synthetic oligonucleotide
  Antisense strand to SEQ ID NO: 1472656
accuucaaugcauucaccc

SEQ ID NO: 1472658 - RNA, 19 nt, Artificial Sequence
  Description of Artificial Sequence: Synthetic oligonucleotide
  Sense strand starting at position 3758 of SEQ ID NO: 1244204
ggugaaugcauugaaggua

SEQ ID NO: 1472659 - RNA, 19 nt, Artificial Sequence
  Description of Artificial Sequence: Synthetic oligonucleotide
  Antisense strand to SEQ ID NO: 1472658
uaccuucaaugcauucacc

SEQ ID NO: 1472660 - RNA, 19 nt, Artificial Sequence
  Description of Artificial Sequence: Synthetic oligonucleotide
  Sense strand starting at position 198 of SEQ ID NO: 1244205
ugagaagaguucccuaucu

SEQ ID NO: 1472661 - RNA, 19 nt, Artificial Sequence
  Description of Artificial Sequence: Synthetic oligonucleotide
  Antisense strand to SEQ ID NO: 1472660
agauagggaacucuucuca

SEQ ID NO: 1472662 - RNA, 19 nt, Artificial Sequence
  Description of Artificial Sequence: Synthetic oligonucleotide
  Sense strand starting at position 200 of SEQ ID NO: 1244205
agaagaguucccuaucucc

SEQ ID NO: 1472663 - RNA, 19 nt, Artificial Sequence
  Description of Artificial Sequence: Synthetic oligonucleotide
  Antisense strand to SEQ ID NO: 1472662
ggagauagggaacucuucu

SEQ ID NO: 1472664 - RNA, 19 nt, Artificial Sequence
  Description of Artificial Sequence: Synthetic oligonucleotide
  Sense strand starting at position 221 of SEQ ID NO: 1244205
uugggcagccuggauuauu

SEQ ID NO: 1472665 - RNA, 19 nt, Artificial Sequence
  Description of Artificial Sequence: Synthetic oligonucleotide
  Antisense strand to SEQ ID NO: 1472664
aauaauccaggcugcccaa

SEQ ID NO: 1472666 - RNA, 19 nt, Artificial Sequence
  Description of Artificial Sequence: Synthetic oligonucleotide
  Sense strand starting at position 296 of SEQ ID NO: 1244205
auaucacuguguuuauaug

SEQ ID NO: 1472667 - RNA, 19 nt, Artificial Sequence
  Description of Artificial Sequence: Synthetic oligonucleotide
  Antisense strand to SEQ ID NO: 1472666
cauauaaacacagugauau

SEQ ID NO: 1472668 - RNA, 19 nt, Artificial Sequence
  Description of Artificial Sequence: Synthetic oligonucleotide
  Sense strand starting at position 310 of SEQ ID NO: 1244205
auaugacugucuuucuaua

SEQ ID NO: 1472669 - RNA, 19 nt, Artificial Sequence
  Description of Artificial Sequence: Synthetic oligonucleotide
  Antisense strand to SEQ ID NO: 1472668
uauagaaagacagucauau

SEQ ID NO: 1472670 - RNA, 19 nt, Artificial Sequence
  Description of Artificial Sequence: Synthetic oligonucleotide
  Sense strand starting at position 312 of SEQ ID NO: 1244205
augacugucuuucuauacu

SEQ ID NO: 1472671 - RNA, 19 nt, Artificial Sequence
  Description of Artificial Sequence: Synthetic oligonucleotide
  Antisense strand to SEQ ID NO: 1472670
aguauagaaagacagucau

SEQ ID NO: 1472672 - RNA, 19 nt, Artificial Sequence
  Description of Artificial Sequence: Synthetic oligonucleotide
  Sense strand starting at position 315 of SEQ ID NO: 1244205
acugucuuucuauacuaga

SEQ ID NO: 1472673 - RNA, 19 nt, Artificial Sequence
  Description of Artificial Sequence: Synthetic oligonucleotide
  Antisense strand to SEQ ID NO: 1472672
ucuaguauagaaagacagu

SEQ ID NO: 1472674 - RNA, 19 nt, Artificial Sequence
  Description of Artificial Sequence: Synthetic oligonucleotide
  Sense strand starting at position 520 of SEQ ID NO: 1244205
ccuugauauggauguagca

SEQ ID NO: 1472675 - RNA, 19 nt, Artificial Sequence
  Description of Artificial Sequence: Synthetic oligonucleotide
  Antisense strand to SEQ ID NO: 1472674
ugcuacauccauaucaagg

SEQ ID NO: 1472676 - RNA, 19 nt, Artificial Sequence
  Description of Artificial Sequence: Synthetic oligonucleotide
  Sense strand starting at position 894 of SEQ ID NO: 1244205
uggguagaauuggccugaa

SEQ ID NO: 1472677 - RNA, 19 nt, Artificial Sequence
  Description of Artificial Sequence: Synthetic oligonucleotide
  Antisense strand to SEQ ID NO: 1472676
uucaggccaauucuaccca

SEQ ID NO: 1472678 - RNA, 19 nt, Artificial Sequence
  Description of Artificial Sequence: Synthetic oligonucleotide
  Sense strand starting at position 897 of SEQ ID NO: 1244205
guagaauuggccugaaucu

SEQ ID NO: 1472679 - RNA, 19 nt, Artificial Sequence
  Description of Artificial Sequence: Synthetic oligonucleotide
  Antisense strand to SEQ ID NO: 1472678
agauucaggccaauucuac

SEQ ID NO: 1472680 - RNA, 19 nt, Artificial Sequence
  Description of Artificial Sequence: Synthetic oligonucleotide
  Sense strand starting at position 904 of SEQ ID NO: 1244205
uggccugaaucuucuugaa

SEQ ID NO: 1472681 - RNA, 19 nt, Artificial Sequence
  Description of Artificial Sequence: Synthetic oligonucleotide
  Antisense strand to SEQ ID NO: 1472680
uucaagaagauucaggcca

SEQ ID NO: 1472682 - RNA, 19 nt, Artificial Sequence
  Description of Artificial Sequence: Synthetic oligonucleotide
  Sense strand starting at position 906 of SEQ ID NO: 1244205
gccugaaucuucuugaacu

SEQ ID NO: 1472683 - RNA, 19 nt, Artificial Sequence
  Description of Artificial Sequence: Synthetic oligonucleotide
  Antisense strand to SEQ ID NO: 1472682
aguucaagaagauucaggc

SEQ ID NO: 1472684 - RNA, 19 nt, Artificial Sequence
  Description of Artificial Sequence: Synthetic oligonucleotide
  Sense strand starting at position 959 of SEQ ID NO: 1244205
agucaagcuguccauggau

SEQ ID NO: 1472685 - RNA, 19 nt, Artificial Sequence
  Description of Artificial Sequence: Synthetic oligonucleotide
  Antisense strand to SEQ ID NO: 1472684
auccauggacagcuugacu

SEQ ID NO: 1472686 - RNA, 19 nt, Artificial Sequence
  Description of Artificial Sequence: Synthetic oligonucleotide
  Sense strand starting at position 1181 of SEQ ID NO: 1244205
acaugagucuaguucccua

SEQ ID NO: 1472687 - RNA, 19 nt, Artificial Sequence
  Description of Artificial Sequence: Synthetic oligonucleotide
  Antisense strand to SEQ ID NO: 1472686
uagggaacuagacucaugu

SEQ ID NO: 1472688 - RNA, 19 nt, Artificial Sequence
  Description of Artificial Sequence: Synthetic oligonucleotide
  Sense strand starting at position 1184 of SEQ ID NO: 1244205
ugagucuaguucccuauuu

SEQ ID NO: 1472689 - RNA, 19 nt, Artificial Sequence
  Description of Artificial Sequence: Synthetic oligonucleotide
  Antisense strand to SEQ ID NO: 1472688
aaauagggaacuagacuca

SEQ ID NO: 1472690 - RNA, 19 nt, Artificial Sequence
  Description of Artificial Sequence: Synthetic oligonucleotide
  Sense strand starting at position 1282 of SEQ ID NO: 1244205
ucccuagggccaugaaaga

SEQ ID NO: 1472691 - RNA, 19 nt, Artificial Sequence
  Description of Artificial Sequence: Synthetic oligonucleotide
  Antisense strand to SEQ ID NO: 1472690
ucuuucauggcccuaggga

SEQ ID NO: 1472692 - RNA, 19 nt, Artificial Sequence
  Description of Artificial Sequence: Synthetic oligonucleotide
  Sense strand starting at position 1418 of SEQ ID NO: 1244205
agaaauuucucucaugagg

SEQ ID NO: 1472693 - RNA, 19 nt, Artificial Sequence
  Description of Artificial Sequence: Synthetic oligonucleotide
  Antisense strand to SEQ ID NO: 1472692
ccucaugagagaaauuucu

SEQ ID NO: 1472694 - RNA, 19 nt, Artificial Sequence
  Description of Artificial Sequence: Synthetic oligonucleotide
  Sense strand starting at position 1841 of SEQ ID NO: 1244205
gcaggcaacaacuguaaga

SEQ ID NO: 1472695 - RNA, 19 nt, Artificial Sequence
  Description of Artificial Sequence: Synthetic oligonucleotide
  Antisense strand to SEQ ID NO: 1472694
ucuuacaguuguugccugc

SEQ ID NO: 1472696 - RNA, 19 nt, Artificial Sequence
  Description of Artificial Sequence: Synthetic oligonucleotide
  Sense strand starting at position 2033 of SEQ ID NO: 1244205
cuaguuagaugcuucuaaa

SEQ ID NO: 1472697 - RNA, 19 nt, Artificial Sequence
  Description of Artificial Sequence: Synthetic oligonucleotide
  Antisense strand to SEQ ID NO: 1472696
uuuagaagcaucuaacuag

SEQ ID NO: 1472698 - RNA, 19 nt, Artificial Sequence
  Description of Artificial Sequence: Synthetic oligonucleotide
  Sense strand starting at position 2228 of SEQ ID NO: 1244205
ggguggaguuguuugggaa

SEQ ID NO: 1472699 - RNA, 19 nt, Artificial Sequence
  Description of Artificial Sequence: Synthetic oligonucleotide
  Antisense strand to SEQ ID NO: 1472698
uucccaaacaacuccaccc

SEQ ID NO: 1472700 - RNA, 19 nt, Artificial Sequence
  Description of Artificial Sequence: Synthetic oligonucleotide
  Sense strand starting at position 2253 of SEQ ID NO: 1244205
auuccucacccaggaguuu

SEQ ID NO: 1472701 - RNA, 19 nt, Artificial Sequence
  Description of Artificial Sequence: Synthetic oligonucleotide
  Antisense strand to SEQ ID NO: 1472700
aaacuccugggugaggaau

SEQ ID NO: 1472702 - RNA, 19 nt, Artificial Sequence
  Description of Artificial Sequence: Synthetic oligonucleotide
  Sense strand starting at position 2320 of SEQ ID NO: 1244205
gagaguuacucuuccaagu

SEQ ID NO: 1472703 - RNA, 19 nt, Artificial Sequence
  Description of Artificial Sequence: Synthetic oligonucleotide
  Antisense strand to SEQ ID NO: 1472702
acuuggaagaguaacucuc

SEQ ID NO: 1472704 - RNA, 19 nt, Artificial Sequence
  Description of Artificial Sequence: Synthetic oligonucleotide
  Sense strand starting at position 2414 of SEQ ID NO: 1244205
cgaaaugauccugagccuu

SEQ ID NO: 1472705 - RNA, 19 nt, Artificial Sequence
  Description of Artificial Sequence: Synthetic oligonucleotide
  Antisense strand to SEQ ID NO: 1472704
aaggcucaggaucauuucg

SEQ ID NO: 1472706 - RNA, 19 nt, Artificial Sequence
  Description of Artificial Sequence: Synthetic oligonucleotide
  Sense strand starting at position 2921 of SEQ ID NO: 1244205
augcguccggcaguaaaua

SEQ ID NO: 1472707 - RNA, 19 nt, Artificial Sequence
  Description of Artificial Sequence: Synthetic oligonucleotide
  Antisense strand to SEQ ID NO: 1472706
uauuuacugccggacgcau

SEQ ID NO: 1472708 - RNA, 19 nt, Artificial Sequence
  Description of Artificial Sequence: Synthetic oligonucleotide
  Sense strand starting at position 2961 of SEQ ID NO: 1244205
augcccauuuguuuagcua

SEQ ID NO: 1472709 - RNA, 19 nt, Artificial Sequence
  Description of Artificial Sequence: Synthetic oligonucleotide
  Antisense strand to SEQ ID NO: 1472708
uagcuaaacaaaugggcau

SEQ ID NO: 1472710 - RNA, 19 nt, Artificial Sequence
  Description of Artificial Sequence: Synthetic oligonucleotide
  Sense strand starting at position 2962 of SEQ ID NO: 1244205
ugcccauuuguuuagcuau

SEQ ID NO: 1472711 - RNA, 19 nt, Artificial Sequence
  Description of Artificial Sequence: Synthetic oligonucleotide
  Antisense strand to SEQ ID NO: 1472710
auagcuaaacaaaugggca

SEQ ID NO: 1472712 - RNA, 19 nt, Artificial Sequence
  Description of Artificial Sequence: Synthetic oligonucleotide
  Sense strand starting at position 3032 of SEQ ID NO: 1244205
agacuauaguguccacaaa

SEQ ID NO: 1472713 - RNA, 19 nt, Artificial Sequence
  Description of Artificial Sequence: Synthetic oligonucleotide
  Antisense strand to SEQ ID NO: 1472712
uuuguggacacuauagucu

SEQ ID NO: 1472714 - RNA, 19 nt, Artificial Sequence
  Description of Artificial Sequence: Synthetic oligonucleotide
  Sense strand starting at position 3087 of SEQ ID NO: 1244205
gcaacagccucucuaaaga

SEQ ID NO: 1472715 - RNA, 19 nt, Artificial Sequence
  Description of Artificial Sequence: Synthetic oligonucleotide
  Antisense strand to SEQ ID NO: 1472714
ucuuuagagaggcuguugc

SEQ ID NO: 1472716 - RNA, 19 nt, Artificial Sequence
  Description of Artificial Sequence: Synthetic oligonucleotide
  Sense strand starting at position 3178 of SEQ ID NO: 1244205
agcacugaagcaugaauau

SEQ ID NO: 1472717 - RNA, 19 nt, Artificial Sequence
  Description of Artificial Sequence: Synthetic oligonucleotide
  Antisense strand to SEQ ID NO: 1472716
auauucaugcuucagugcu

SEQ ID NO: 1472718 - RNA, 19 nt, Artificial Sequence
  Description of Artificial Sequence: Synthetic oligonucleotide
  Sense strand starting at position 3250 of SEQ ID NO: 1244205
agagguaucuuuguaucca

SEQ ID NO: 1472719 - RNA, 19 nt, Artificial Sequence
  Description of Artificial Sequence: Synthetic oligonucleotide
  Antisense strand to SEQ ID NO: 1472718
uggauacaaagauaccucu

SEQ ID NO: 1472720 - RNA, 19 nt, Artificial Sequence
  Description of Artificial Sequence: Synthetic oligonucleotide
  Sense strand starting at position 3324 of SEQ ID NO: 1244205
uuccucuuucuagaguauu

SEQ ID NO: 1472721 - RNA, 19 nt, Artificial Sequence
  Description of Artificial Sequence: Synthetic oligonucleotide
  Antisense strand to SEQ ID NO: 1472720
aauacucuagaaagaggaa

SEQ ID NO: 1472722 - RNA, 19 nt, Artificial Sequence
  Description of Artificial Sequence: Synthetic oligonucleotide
  Sense strand starting at position 3337 of SEQ ID NO: 1244205
aguauuaacucuccuagag

SEQ ID NO: 1472723 - RNA, 19 nt, Artificial Sequence
  Description of Artificial Sequence: Synthetic oligonucleotide
  Antisense strand to SEQ ID NO: 1472722
cucuaggagaguuaauacu

SEQ ID NO: 1472724 - RNA, 19 nt, Artificial Sequence
  Description of Artificial Sequence: Synthetic oligonucleotide
  Sense strand starting at position 3341 of SEQ ID NO: 1244205
uuaacucuccuagagguau

SEQ ID NO: 1472725 - RNA, 19 nt, Artificial Sequence
  Description of Artificial Sequence: Synthetic oligonucleotide
  Antisense strand to SEQ ID NO: 1472724
auaccucuaggagaguuaa

SEQ ID NO: 1472726 - RNA, 19 nt, Artificial Sequence
  Description of Artificial Sequence: Synthetic oligonucleotide
  Sense strand starting at position 3347 of SEQ ID NO: 1244205
cuccuagagguaugacuau

SEQ ID NO: 1472727 - RNA, 19 nt, Artificial Sequence
  Description of Artificial Sequence: Synthetic oligonucleotide
  Antisense strand to SEQ ID NO: 1472726
auagucauaccucuaggag

SEQ ID NO: 1472728 - RNA, 19 nt, Artificial Sequence
  Description of Artificial Sequence: Synthetic oligonucleotide
  Sense strand starting at position 3412 of SEQ ID NO: 1244205
gcagauuuacucuguuguc

SEQ ID NO: 1472729 - RNA, 19 nt, Artificial Sequence
  Description of Artificial Sequence: Synthetic oligonucleotide
  Antisense strand to SEQ ID NO: 1472728
gacaacagaguaaaucugc

SEQ ID NO: 1472730 - RNA, 19 nt, Artificial Sequence
  Description of Artificial Sequence: Synthetic oligonucleotide
  Sense strand starting at position 3437 of SEQ ID NO: 1244205
aguagacacugucucugau

SEQ ID NO: 1472731 - RNA, 19 nt, Artificial Sequence
  Description of Artificial Sequence: Synthetic oligonucleotide
  Antisense strand to SEQ ID NO: 1472730
aucagagacagugucuacu

SEQ ID NO: 1472732 - RNA, 19 nt, Artificial Sequence
  Description of Artificial Sequence: Synthetic oligonucleotide
  Sense strand starting at position 3440 of SEQ ID NO: 1244205
agacacugucucugauaag

SEQ ID NO: 1472733 - RNA, 19 nt, Artificial Sequence
  Description of Artificial Sequence: Synthetic oligonucleotide
  Antisense strand to SEQ ID NO: 1472732
cuuaucagagacagugucu

SEQ ID NO: 1472734 - RNA, 19 nt, Artificial Sequence
  Description of Artificial Sequence: Synthetic oligonucleotide
  Sense strand starting at position 3641 of SEQ ID NO: 1244205
aaagauuauuuguggaaca

SEQ ID NO: 1472735 - RNA, 19 nt, Artificial Sequence
  Description of Artificial Sequence: Synthetic oligonucleotide
  Antisense strand to SEQ ID NO: 1472734
uguuccacaaauaaucuuu

SEQ ID NO: 1472736 - RNA, 19 nt, Artificial Sequence
  Description of Artificial Sequence: Synthetic oligonucleotide
  Sense strand starting at position 3744 of SEQ ID NO: 1244205
auuugaguguuuccucuuu

SEQ ID NO: 1472737 - RNA, 19 nt, Artificial Sequence
  Description of Artificial Sequence: Synthetic oligonucleotide
  Antisense strand to SEQ ID NO: 1472736
aaagaggaaacacucaaau

SEQ ID NO: 1472738 - RNA, 19 nt, Artificial Sequence
  Description of Artificial Sequence: Synthetic oligonucleotide
  Sense strand starting at position 3774 of SEQ ID NO: 1244205
uaucuagagguuuguaaau

SEQ ID NO: 1472739 - RNA, 19 nt, Artificial Sequence
  Description of Artificial Sequence: Synthetic oligonucleotide
  Antisense strand to SEQ ID NO: 1472738
auuuacaaaccucuagaua

SEQ ID NO: 1472740 - RNA, 19 nt, Artificial Sequence
  Description of Artificial Sequence: Synthetic oligonucleotide
  Sense strand starting at position 355 of SEQ ID NO: 1244206
gucucauaccugcaggcau

SEQ ID NO: 1472741 - RNA, 19 nt, Artificial Sequence
  Description of Artificial Sequence: Synthetic oligonucleotide
  Antisense strand to SEQ ID NO: 1472740
augccugcagguaugagac

SEQ ID NO: 1472742 - RNA, 19 nt, Artificial Sequence
  Description of Artificial Sequence: Synthetic oligonucleotide
  Sense strand starting at position 631 of SEQ ID NO: 1244206
cugcauagagucuggagau

SEQ ID NO: 1472743 - RNA, 19 nt, Artificial Sequence
  Description of Artificial Sequence: Synthetic oligonucleotide
  Antisense strand to SEQ ID NO: 1472742
aucuccagacucuaugcag

SEQ ID NO: 1472744 - RNA, 19 nt, Artificial Sequence
  Description of Artificial Sequence: Synthetic oligonucleotide
  Sense strand starting at position 677 of SEQ ID NO: 1244206
ggacauuccacuuguugga

SEQ ID NO: 1472745 - RNA, 19 nt, Artificial Sequence
  Description of Artificial Sequence: Synthetic oligonucleotide
  Antisense strand to SEQ ID NO: 1472744
uccaacaaguggaaugucc

SEQ ID NO: 1472746 - RNA, 19 nt, Artificial Sequence
  Description of Artificial Sequence: Synthetic oligonucleotide
  Sense strand starting at position 690 of SEQ ID NO: 1244206
guuggagcucccuaaagcu

SEQ ID NO: 1472747 - RNA, 19 nt, Artificial Sequence
  Description of Artificial Sequence: Synthetic oligonucleotide
  Antisense strand to SEQ ID NO: 1472746
agcuuuagggagcuccaac

SEQ ID NO: 1472748 - RNA, 19 nt, Artificial Sequence
  Description of Artificial Sequence: Synthetic oligonucleotide
  Sense strand starting at position 856 of SEQ ID NO: 1244206
agguuagauagcugcauga

SEQ ID NO: 1472749 - RNA, 19 nt, Artificial Sequence
  Description of Artificial Sequence: Synthetic oligonucleotide
  Antisense strand to SEQ ID NO: 1472748
ucaugcagcuaucuaaccu

SEQ ID NO: 1472750 - RNA, 19 nt, Artificial Sequence
  Description of Artificial Sequence: Synthetic oligonucleotide
  Sense strand starting at position 858 of SEQ ID NO: 1244206
guuagauagcugcaugaaa

SEQ ID NO: 1472751 - RNA, 19 nt, Artificial Sequence
  Description of Artificial Sequence: Synthetic oligonucleotide
  Antisense strand to SEQ ID NO: 1472750
uuucaugcagcuaucuaac

SEQ ID NO: 1472752 - RNA, 19 nt, Artificial Sequence
  Description of Artificial Sequence: Synthetic oligonucleotide
  Sense strand starting at position 982 of SEQ ID NO: 1244206
gggauucucuggucauaaa

SEQ ID NO: 1472753 - RNA, 19 nt, Artificial Sequence
  Description of Artificial Sequence: Synthetic oligonucleotide
  Antisense strand to SEQ ID NO: 1472752
uuuaugaccagagaauccc

SEQ ID NO: 1472754 - RNA, 19 nt, Artificial Sequence
  Description of Artificial Sequence: Synthetic oligonucleotide
  Sense strand starting at position 992 of SEQ ID NO: 1244206
ggucauaaauggucccuca

SEQ ID NO: 1472755 - RNA, 19 nt, Artificial Sequence
  Description of Artificial Sequence: Synthetic oligonucleotide
  Antisense strand to SEQ ID NO: 1472754
ugagggaccauuuaugacc

SEQ ID NO: 1472756 - RNA, 19 nt, Artificial Sequence
  Description of Artificial Sequence: Synthetic oligonucleotide
  Sense strand starting at position 1090 of SEQ ID NO: 1244206
uuucuucccugaguuacuu

SEQ ID NO: 1472757 - RNA, 19 nt, Artificial Sequence
  Description of Artificial Sequence: Synthetic oligonucleotide
  Antisense strand to SEQ ID NO: 1472756
aaguaacucagggaagaaa

SEQ ID NO: 1472758 - RNA, 19 nt, Artificial Sequence
  Description of Artificial Sequence: Synthetic oligonucleotide
  Sense strand starting at position 1186 of SEQ ID NO: 1244206
ucagaagacucagaggauu

SEQ ID NO: 1472759 - RNA, 19 nt, Artificial Sequence
  Description of Artificial Sequence: Synthetic oligonucleotide
  Antisense strand to SEQ ID NO: 1472758
aauccucugagucuucuga

SEQ ID NO: 1472760 - RNA, 19 nt, Artificial Sequence
  Description of Artificial Sequence: Synthetic oligonucleotide
  Sense strand starting at position 1295 of SEQ ID NO: 1244206
ccugaaucucaguguucuc

SEQ ID NO: 1472761 - RNA, 19 nt, Artificial Sequence
  Description of Artificial Sequence: Synthetic oligonucleotide
  Antisense strand to SEQ ID NO: 1472760
gagaacacugagauucagg

SEQ ID NO: 1472762 - RNA, 19 nt, Artificial Sequence
  Description of Artificial Sequence: Synthetic oligonucleotide
  Sense strand starting at position 1307 of SEQ ID NO: 1244206
uguucucaacuguauaaug

SEQ ID NO: 1472763 - RNA, 19 nt, Artificial Sequence
  Description of Artificial Sequence: Synthetic oligonucleotide
  Antisense strand to SEQ ID NO: 1472762
cauuauacaguugagaaca

SEQ ID NO: 1472764 - RNA, 19 nt, Artificial Sequence
  Description of Artificial Sequence: Synthetic oligonucleotide
  Sense strand starting at position 1317 of SEQ ID NO: 1244206
uguauaaugggcuaaugau

SEQ ID NO: 1472765 - RNA, 19 nt, Artificial Sequence
  Description of Artificial Sequence: Synthetic oligonucleotide
  Antisense strand to SEQ ID NO: 1472764
aucauuagcccauuauaca

SEQ ID NO: 1472766 - RNA, 19 nt, Artificial Sequence
  Description of Artificial Sequence: Synthetic oligonucleotide
  Sense strand starting at position 1348 of SEQ ID NO: 1244206
agguuauugggaggagcaa

SEQ ID NO: 1472767 - RNA, 19 nt, Artificial Sequence
  Description of Artificial Sequence: Synthetic oligonucleotide
  Antisense strand to SEQ ID NO: 1472766
uugcuccucccaauaaccu

SEQ ID NO: 1472768 - RNA, 19 nt, Artificial Sequence
  Description of Artificial Sequence: Synthetic oligonucleotide
  Sense strand starting at position 1382 of SEQ ID NO: 1244206
ugaacaugcuuggugacuu

SEQ ID NO: 1472769 - RNA, 19 nt, Artificial Sequence
  Description of Artificial Sequence: Synthetic oligonucleotide
  Antisense strand to SEQ ID NO: 1472768
aagucaccaagcauguuca

SEQ ID NO: 1472770 - RNA, 19 nt, Artificial Sequence
  Description of Artificial Sequence: Synthetic oligonucleotide
  Sense strand starting at position 1445 of SEQ ID NO: 1244206
cacaaaguuccugggaauc

SEQ ID NO: 1472771 - RNA, 19 nt, Artificial Sequence
  Description of Artificial Sequence: Synthetic oligonucleotide
  Antisense strand to SEQ ID NO: 1472770
gauucccaggaacuuugug

SEQ ID NO: 1472772 - RNA, 19 nt, Artificial Sequence
  Description of Artificial Sequence: Synthetic oligonucleotide
  Sense strand starting at position 1666 of SEQ ID NO: 1244206
ucucauugccagugaggau

SEQ ID NO: 1472773 - RNA, 19 nt, Artificial Sequence
  Description of Artificial Sequence: Synthetic oligonucleotide
  Antisense strand to SEQ ID NO: 1472772
auccucacuggcaaugaga

SEQ ID NO: 1472774 - RNA, 19 nt, Artificial Sequence
  Description of Artificial Sequence: Synthetic oligonucleotide
  Sense strand starting at position 2135 of SEQ ID NO: 1244206
guuauuuaguuuccuguga

SEQ ID NO: 1472775 - RNA, 19 nt, Artificial Sequence
  Description of Artificial Sequence: Synthetic oligonucleotide
  Antisense strand to SEQ ID NO: 1472774
ucacaggaaacuaaauaac

SEQ ID NO: 1472776 - RNA, 19 nt, Artificial Sequence
  Description of Artificial Sequence: Synthetic oligonucleotide
  Sense strand starting at position 2229 of SEQ ID NO: 1244206
agaccaagucccugucagu

SEQ ID NO: 1472777 - RNA, 19 nt, Artificial Sequence
  Description of Artificial Sequence: Synthetic oligonucleotide
  Antisense strand to SEQ ID NO: 1472776
acugacagggacuuggucu

SEQ ID NO: 1472778 - RNA, 19 nt, Artificial Sequence
  Description of Artificial Sequence: Synthetic oligonucleotide
  Sense strand starting at position 2290 of SEQ ID NO: 1244206
gcauuaagcaagcauggga

SEQ ID NO: 1472779 - RNA, 19 nt, Artificial Sequence
  Description of Artificial Sequence: Synthetic oligonucleotide
  Antisense strand to SEQ ID NO: 1472778
ucccaugcuugcuuaaugc

SEQ ID NO: 1472780 - RNA, 19 nt, Artificial Sequence
  Description of Artificial Sequence: Synthetic oligonucleotide
  Sense strand starting at position 2536 of SEQ ID NO: 1244206
ccgaaaguuccauaugcca

SEQ ID NO: 1472781 - RNA, 19 nt, Artificial Sequence
  Description of Artificial Sequence: Synthetic oligonucleotide
  Antisense strand to SEQ ID NO: 1472780
uggcauauggaacuuucgg

SEQ ID NO: 1472782 - RNA, 19 nt, Artificial Sequence
  Description of Artificial Sequence: Synthetic oligonucleotide
  Sense strand starting at position 2558 of SEQ ID NO: 1244206
aaaccucaguccucgguaa

SEQ ID NO: 1472783 - RNA, 19 nt, Artificial Sequence
  Description of Artificial Sequence: Synthetic oligonucleotide
  Antisense strand to SEQ ID NO: 1472782
uuaccgaggacugagguuu

SEQ ID NO: 1472784 - RNA, 19 nt, Artificial Sequence
  Description of Artificial Sequence: Synthetic oligonucleotide
  Sense strand starting at position 2559 of SEQ ID NO: 1244206
aaccucaguccucgguaaa

SEQ ID NO: 1472785 - RNA, 19 nt, Artificial Sequence
  Description of Artificial Sequence: Synthetic oligonucleotide
  Antisense strand to SEQ ID NO: 1472784
uuuaccgaggacugagguu

SEQ ID NO: 1472786 - RNA, 19 nt, Artificial Sequence
  Description of Artificial Sequence: Synthetic oligonucleotide
  Sense strand starting at position 2679 of SEQ ID NO: 1244206
agccacaaugccuagagau

SEQ ID NO: 1472787 - RNA, 19 nt, Artificial Sequence
  Description of Artificial Sequence: Synthetic oligonucleotide
  Antisense strand to SEQ ID NO: 1472786
aucucuaggcauuguggcu

SEQ ID NO: 1472788 - RNA, 19 nt, Artificial Sequence
  Description of Artificial Sequence: Synthetic oligonucleotide
  Sense strand starting at position 2686 of SEQ ID NO: 1244206
augccuagagaucaguuaa

SEQ ID NO: 1472789 - RNA, 19 nt, Artificial Sequence
  Description of Artificial Sequence: Synthetic oligonucleotide
  Antisense strand to SEQ ID NO: 1472788
uuaacugaucucuaggcau

SEQ ID NO: 1472790 - RNA, 19 nt, Artificial Sequence
  Description of Artificial Sequence: Synthetic oligonucleotide
  Sense strand starting at position 2748 of SEQ ID NO: 1244206
ccagcccugguugagaaau

SEQ ID NO: 1472791 - RNA, 19 nt, Artificial Sequence
  Description of Artificial Sequence: Synthetic oligonucleotide
  Antisense strand to SEQ ID NO: 1472790
auuucucaaccagggcugg

SEQ ID NO: 1472792 - RNA, 19 nt, Artificial Sequence
  Description of Artificial Sequence: Synthetic oligonucleotide
  Sense strand starting at position 2886 of SEQ ID NO: 1244206
cugaucugucucuaugcau

SEQ ID NO: 1472793 - RNA, 19 nt, Artificial Sequence
  Description of Artificial Sequence: Synthetic oligonucleotide
  Antisense strand to SEQ ID NO: 1472792
augcauagagacagaucag

SEQ ID NO: 1472794 - RNA, 19 nt, Artificial Sequence
  Description of Artificial Sequence: Synthetic oligonucleotide
  Sense strand starting at position 2967 of SEQ ID NO: 1244206
ggaggcuuggacuguuuca

SEQ ID NO: 1472795 - RNA, 19 nt, Artificial Sequence
  Description of Artificial Sequence: Synthetic oligonucleotide
  Antisense strand to SEQ ID NO: 1472794
ugaaacaguccaagccucc

SEQ ID NO: 1472796 - RNA, 19 nt, Artificial Sequence
  Description of Artificial Sequence: Synthetic oligonucleotide
  Sense strand starting at position 2987 of SEQ ID NO: 1244206
gagccugucccagaucaca

SEQ ID NO: 1472797 - RNA, 19 nt, Artificial Sequence
  Description of Artificial Sequence: Synthetic oligonucleotide
  Antisense strand to SEQ ID NO: 1472796
ugugaucugggacaggcuc

SEQ ID NO: 1472798 - RNA, 19 nt, Artificial Sequence
  Description of Artificial Sequence: Synthetic oligonucleotide
  Sense strand starting at position 3072 of SEQ ID NO: 1244206
caacacagucguggauaga

SEQ ID NO: 1472799 - RNA, 19 nt, Artificial Sequence
  Description of Artificial Sequence: Synthetic oligonucleotide
  Antisense strand to SEQ ID NO: 1472798
ucuauccacgacuguguug

SEQ ID NO: 1472800 - RNA, 19 nt, Artificial Sequence
  Description of Artificial Sequence: Synthetic oligonucleotide
  Sense strand starting at position 3302 of SEQ ID NO: 1244206
gcccaaggcagugacuauu

SEQ ID NO: 1472801 - RNA, 19 nt, Artificial Sequence
  Description of Artificial Sequence: Synthetic oligonucleotide
  Antisense strand to SEQ ID NO: 1472800
aauagucacugccuugggc

SEQ ID NO: 1472802 - RNA, 19 nt, Artificial Sequence
  Description of Artificial Sequence: Synthetic oligonucleotide
  Sense strand starting at position 3310 of SEQ ID NO: 1244206
cagugacuauugguagauu

SEQ ID NO: 1472803 - RNA, 19 nt, Artificial Sequence
  Description of Artificial Sequence: Synthetic oligonucleotide
  Antisense strand to SEQ ID NO: 1472802
aaucuaccaauagucacug

SEQ ID NO: 1472804 - RNA, 19 nt, Artificial Sequence
  Description of Artificial Sequence: Synthetic oligonucleotide
  Sense strand starting at position 3311 of SEQ ID NO: 1244206
agugacuauugguagauuu

SEQ ID NO: 1472805 - RNA, 19 nt, Artificial Sequence
  Description of Artificial Sequence: Synthetic oligonucleotide
  Antisense strand to SEQ ID NO: 1472804
aaaucuaccaauagucacu

SEQ ID NO: 1472806 - RNA, 19 nt, Artificial Sequence
  Description of Artificial Sequence: Synthetic oligonucleotide
  Sense strand starting at position 3322 of SEQ ID NO: 1244206
guagauuucuuggccucca

SEQ ID NO: 1472807 - RNA, 19 nt, Artificial Sequence
  Description of Artificial Sequence: Synthetic oligonucleotide
  Antisense strand to SEQ ID NO: 1472806
uggaggccaagaaaucuac

SEQ ID NO: 1472808 - RNA, 19 nt, Artificial Sequence
  Description of Artificial Sequence: Synthetic oligonucleotide
  Sense strand starting at position 3411 of SEQ ID NO: 1244206
aaggauugaccuuguacuu

SEQ ID NO: 1472809 - RNA, 19 nt, Artificial Sequence
  Description of Artificial Sequence: Synthetic oligonucleotide
  Antisense strand to SEQ ID NO: 1472808
aaguacaaggucaauccuu

SEQ ID NO: 1472810 - RNA, 19 nt, Artificial Sequence
  Description of Artificial Sequence: Synthetic oligonucleotide
  Sense strand starting at position 3434 of SEQ ID NO: 1244206
uuuaaaucucuguaguguu

SEQ ID NO: 1472811 - RNA, 19 nt, Artificial Sequence
  Description of Artificial Sequence: Synthetic oligonucleotide
  Antisense strand to SEQ ID NO: 1472810
aacacuacagagauuuaaa

SEQ ID NO: 1472812 - RNA, 19 nt, Artificial Sequence
  Description of Artificial Sequence: Synthetic oligonucleotide
  Sense strand starting at position 3464 of SEQ ID NO: 1244206
agggcuucuagaugucuau

SEQ ID NO: 1472813 - RNA, 19 nt, Artificial Sequence
  Description of Artificial Sequence: Synthetic oligonucleotide
  Antisense strand to SEQ ID NO: 1472812
auagacaucuagaagcccu

SEQ ID NO: 1472814 - RNA, 19 nt, Artificial Sequence
  Description of Artificial Sequence: Synthetic oligonucleotide
  Sense strand starting at position 3467 of SEQ ID NO: 1244206
gcuucuagaugucuaugaa

SEQ ID NO: 1472815 - RNA, 19 nt, Artificial Sequence
  Description of Artificial Sequence: Synthetic oligonucleotide
  Antisense strand to SEQ ID NO: 1472814
uucauagacaucuagaagc

SEQ ID NO: 1472816 - RNA, 19 nt, Artificial Sequence
  Description of Artificial Sequence: Synthetic oligonucleotide
  Sense strand starting at position 3468 of SEQ ID NO: 1244206
cuucuagaugucuaugaau

SEQ ID NO: 1472817 - RNA, 19 nt, Artificial Sequence
  Description of Artificial Sequence: Synthetic oligonucleotide
  Antisense strand to SEQ ID NO: 1472816
auucauagacaucuagaag

SEQ ID NO: 1472818 - RNA, 19 nt, Artificial Sequence
  Description of Artificial Sequence: Synthetic oligonucleotide
  Sense strand starting at position 3470 of SEQ ID NO: 1244206
ucuagaugucuaugaauua

SEQ ID NO: 1472819 - RNA, 19 nt, Artificial Sequence
  Description of Artificial Sequence: Synthetic oligonucleotide
  Antisense strand to SEQ ID NO: 1472818
uaauucauagacaucuaga

SEQ ID NO: 1472820 - RNA, 19 nt, Artificial Sequence
  Description of Artificial Sequence: Synthetic oligonucleotide
  Sense strand starting at position 38 of SEQ ID NO: 1244207
cuccuucuaugggauauuu

SEQ ID NO: 1472821 - RNA, 19 nt, Artificial Sequence
  Description of Artificial Sequence: Synthetic oligonucleotide
  Antisense strand to SEQ ID NO: 1472820
aaauaucccauagaaggag

SEQ ID NO: 1472822 - RNA, 19 nt, Artificial Sequence
  Description of Artificial Sequence: Synthetic oligonucleotide
  Sense strand starting at position 46 of SEQ ID NO: 1244207
augggauauuugugagaug

SEQ ID NO: 1472823 - RNA, 19 nt, Artificial Sequence
  Description of Artificial Sequence: Synthetic oligonucleotide
  Antisense strand to SEQ ID NO: 1472822
caucucacaaauaucccau

SEQ ID NO: 1472824 - RNA, 19 nt, Artificial Sequence
  Description of Artificial Sequence: Synthetic oligonucleotide
  Sense strand starting at position 47 of SEQ ID NO: 1244207
ugggauauuugugagauga

SEQ ID NO: 1472825 - RNA, 19 nt, Artificial Sequence
  Description of Artificial Sequence: Synthetic oligonucleotide
  Antisense strand to SEQ ID NO: 1472824
ucaucucacaaauauccca

SEQ ID NO: 1472826 - RNA, 19 nt, Artificial Sequence
  Description of Artificial Sequence: Synthetic oligonucleotide
  Sense strand starting at position 49 of SEQ ID NO: 1244207
ggauauuugugagaugaua

SEQ ID NO: 1472827 - RNA, 19 nt, Artificial Sequence
  Description of Artificial Sequence: Synthetic oligonucleotide
  Antisense strand to SEQ ID NO: 1472826
uaucaucucacaaauaucc

SEQ ID NO: 1472828 - RNA, 19 nt, Artificial Sequence
  Description of Artificial Sequence: Synthetic oligonucleotide
  Sense strand starting at position 90 of SEQ ID NO: 1244207
gcuguuaucaggcacuaga

SEQ ID NO: 1472829 - RNA, 19 nt, Artificial Sequence
  Description of Artificial Sequence: Synthetic oligonucleotide
  Antisense strand to SEQ ID NO: 1472828
ucuagugccugauaacagc

SEQ ID NO: 1472830 - RNA, 19 nt, Artificial Sequence
  Description of Artificial Sequence: Synthetic oligonucleotide
  Sense strand starting at position 223 of SEQ ID NO: 1244207
aguuuauaauucuugggau

SEQ ID NO: 1472831 - RNA, 19 nt, Artificial Sequence
  Description of Artificial Sequence: Synthetic oligonucleotide
  Antisense strand to SEQ ID NO: 1472830
aucccaagaauuauaaacu

SEQ ID NO: 1472832 - RNA, 19 nt, Artificial Sequence
  Description of Artificial Sequence: Synthetic oligonucleotide
  Sense strand starting at position 515 of SEQ ID NO: 1244207
agagacagcucugucucau

SEQ ID NO: 1472833 - RNA, 19 nt, Artificial Sequence
  Description of Artificial Sequence: Synthetic oligonucleotide
  Antisense strand to SEQ ID NO: 1472832
augagacagagcugucucu

SEQ ID NO: 1472834 - RNA, 19 nt, Artificial Sequence
  Description of Artificial Sequence: Synthetic oligonucleotide
  Sense strand starting at position 748 of SEQ ID NO: 1244207
ggcaaaccuucccugauca

SEQ ID NO: 1472835 - RNA, 19 nt, Artificial Sequence
  Description of Artificial Sequence: Synthetic oligonucleotide
  Antisense strand to SEQ ID NO: 1472834
ugaucagggaagguuugcc

SEQ ID NO: 1472836 - RNA, 19 nt, Artificial Sequence
  Description of Artificial Sequence: Synthetic oligonucleotide
  Sense strand starting at position 800 of SEQ ID NO: 1244207
ccagcuuggcauuaucaau

SEQ ID NO: 1472837 - RNA, 19 nt, Artificial Sequence
  Description of Artificial Sequence: Synthetic oligonucleotide
  Antisense strand to SEQ ID NO: 1472836
auugauaaugccaagcugg

SEQ ID NO: 1472838 - RNA, 19 nt, Artificial Sequence
  Description of Artificial Sequence: Synthetic oligonucleotide
  Sense strand starting at position 842 of SEQ ID NO: 1244207
cagacuuagucagcaggau

SEQ ID NO: 1472839 - RNA, 19 nt, Artificial Sequence
  Description of Artificial Sequence: Synthetic oligonucleotide
  Antisense strand to SEQ ID NO: 1472838
auccugcugacuaagucug

SEQ ID NO: 1472840 - RNA, 19 nt, Artificial Sequence
  Description of Artificial Sequence: Synthetic oligonucleotide
  Sense strand starting at position 868 of SEQ ID NO: 1244207
acaagaggcuucccauaag

SEQ ID NO: 1472841 - RNA, 19 nt, Artificial Sequence
  Description of Artificial Sequence: Synthetic oligonucleotide
  Antisense strand to SEQ ID NO: 1472840
cuuaugggaagccucuugu

SEQ ID NO: 1472842 - RNA, 19 nt, Artificial Sequence
  Description of Artificial Sequence: Synthetic oligonucleotide
  Sense strand starting at position 871 of SEQ ID NO: 1244207
agaggcuucccauaagcua

SEQ ID NO: 1472843 - RNA, 19 nt, Artificial Sequence
  Description of Artificial Sequence: Synthetic oligonucleotide
  Antisense strand to SEQ ID NO: 1472842
uagcuuaugggaagccucu

SEQ ID NO: 1472844 - RNA, 19 nt, Artificial Sequence
  Description of Artificial Sequence: Synthetic oligonucleotide
  Sense strand starting at position 1035 of SEQ ID NO: 1244207
cgaggaugucagugaccau

SEQ ID NO: 1472845 - RNA, 19 nt, Artificial Sequence
  Description of Artificial Sequence: Synthetic oligonucleotide
  Antisense strand to SEQ ID NO: 1472844
auggucacugacauccucg

SEQ ID NO: 1472846 - RNA, 19 nt, Artificial Sequence
  Description of Artificial Sequence: Synthetic oligonucleotide
  Sense strand starting at position 1143 of SEQ ID NO: 1244207
gccugugugcucuugagca

SEQ ID NO: 1472847 - RNA, 19 nt, Artificial Sequence
  Description of Artificial Sequence: Synthetic oligonucleotide
  Antisense strand to SEQ ID NO: 1472846
ugcucaagagcacacaggc

SEQ ID NO: 1472848 - RNA, 19 nt, Artificial Sequence
  Description of Artificial Sequence: Synthetic oligonucleotide
  Sense strand starting at position 1198 of SEQ ID NO: 1244207
gucagauggguccaguaau

SEQ ID NO: 1472849 - RNA, 19 nt, Artificial Sequence
  Description of Artificial Sequence: Synthetic oligonucleotide
  Antisense strand to SEQ ID NO: 1472848
auuacuggacccaucugac

SEQ ID NO: 1472850 - RNA, 19 nt, Artificial Sequence
  Description of Artificial Sequence: Synthetic oligonucleotide
  Sense strand starting at position 1424 of SEQ ID NO: 1244207
uugcccuaccaggagaauu

SEQ ID NO: 1472851 - RNA, 19 nt, Artificial Sequence
  Description of Artificial Sequence: Synthetic oligonucleotide
  Antisense strand to SEQ ID NO: 1472850
aauucuccugguagggcaa

SEQ ID NO: 1472852 - RNA, 19 nt, Artificial Sequence
  Description of Artificial Sequence: Synthetic oligonucleotide
  Sense strand starting at position 1538 of SEQ ID NO: 1244207
ucaccuucugcuggaaauc

SEQ ID NO: 1472853 - RNA, 19 nt, Artificial Sequence
  Description of Artificial Sequence: Synthetic oligonucleotide
  Antisense strand to SEQ ID NO: 1472852
gauuuccagcagaagguga

SEQ ID NO: 1472854 - RNA, 19 nt, Artificial Sequence
  Description of Artificial Sequence: Synthetic oligonucleotide
  Sense strand starting at position 1550 of SEQ ID NO: 1244207
ggaaaucuucgauggucuu

SEQ ID NO: 1472855 - RNA, 19 nt, Artificial Sequence
  Description of Artificial Sequence: Synthetic oligonucleotide
  Antisense strand to SEQ ID NO: 1472854
aagaccaucgaagauuucc

SEQ ID NO: 1472856 - RNA, 19 nt, Artificial Sequence
  Description of Artificial Sequence: Synthetic oligonucleotide
  Sense strand starting at position 1553 of SEQ ID NO: 1244207
aaucuucgauggucuugaa

SEQ ID NO: 1472857 - RNA, 19 nt, Artificial Sequence
  Description of Artificial Sequence: Synthetic oligonucleotide
  Antisense strand to SEQ ID NO: 1472856
uucaagaccaucgaagauu

SEQ ID NO: 1472858 - RNA, 19 nt, Artificial Sequence
  Description of Artificial Sequence: Synthetic oligonucleotide
  Sense strand starting at position 1581 of SEQ ID NO: 1244207
guagucugggcagauguau

SEQ ID NO: 1472859 - RNA, 19 nt, Artificial Sequence
  Description of Artificial Sequence: Synthetic oligonucleotide
  Antisense strand to SEQ ID NO: 1472858
auacaucugcccagacuac

SEQ ID NO: 1472860 - RNA, 19 nt, Artificial Sequence
  Description of Artificial Sequence: Synthetic oligonucleotide
  Sense strand starting at position 1594 of SEQ ID NO: 1244207
auguaugggaucugaaacu

SEQ ID NO: 1472861 - RNA, 19 nt, Artificial Sequence
  Description of Artificial Sequence: Synthetic oligonucleotide
  Antisense strand to SEQ ID NO: 1472860
aguuucagaucccauacau

SEQ ID NO: 1472862 - RNA, 19 nt, Artificial Sequence
  Description of Artificial Sequence: Synthetic oligonucleotide
  Sense strand starting at position 1778 of SEQ ID NO: 1244207
agguguggcacucagaaga

SEQ ID NO: 1472863 - RNA, 19 nt, Artificial Sequence
  Description of Artificial Sequence: Synthetic oligonucleotide
  Antisense strand to SEQ ID NO: 1472862
ucuucugagugccacaccu

SEQ ID NO: 1472864 - RNA, 19 nt, Artificial Sequence
  Description of Artificial Sequence: Synthetic oligonucleotide
  Sense strand starting at position 1943 of SEQ ID NO: 1244207
cacagaggcccuugauaga

SEQ ID NO: 1472865 - RNA, 19 nt, Artificial Sequence
  Description of Artificial Sequence: Synthetic oligonucleotide
  Antisense strand to SEQ ID NO: 1472864
ucuaucaagggccucugug

SEQ ID NO: 1472866 - RNA, 19 nt, Artificial Sequence
  Description of Artificial Sequence: Synthetic oligonucleotide
  Sense strand starting at position 2454 of SEQ ID NO: 1244207
gggcuacugggaugguaaa

SEQ ID NO: 1472867 - RNA, 19 nt, Artificial Sequence
  Description of Artificial Sequence: Synthetic oligonucleotide
  Antisense strand to SEQ ID NO: 1472866
uuuaccaucccaguagccc

SEQ ID NO: 1472868 - RNA, 19 nt, Artificial Sequence
  Description of Artificial Sequence: Synthetic oligonucleotide
  Sense strand starting at position 2652 of SEQ ID NO: 1244207
agagcuugggucugaaacu

SEQ ID NO: 1472869 - RNA, 19 nt, Artificial Sequence
  Description of Artificial Sequence: Synthetic oligonucleotide
  Antisense strand to SEQ ID NO: 1472868
aguuucagacccaagcucu

SEQ ID NO: 1472870 - RNA, 19 nt, Artificial Sequence
  Description of Artificial Sequence: Synthetic oligonucleotide
  Sense strand starting at position 2787 of SEQ ID NO: 1244207
cuacuaauuugcccuguga

SEQ ID NO: 1472871 - RNA, 19 nt, Artificial Sequence
  Description of Artificial Sequence: Synthetic oligonucleotide
  Antisense strand to SEQ ID NO: 1472870
ucacagggcaaauuaguag

SEQ ID NO: 1472872 - RNA, 19 nt, Artificial Sequence
  Description of Artificial Sequence: Synthetic oligonucleotide
  Sense strand starting at position 2800 of SEQ ID NO: 1244207
cugugauacugagcacauc

SEQ ID NO: 1472873 - RNA, 19 nt, Artificial Sequence
  Description of Artificial Sequence: Synthetic oligonucleotide
  Antisense strand to SEQ ID NO: 1472872
gaugugcucaguaucacag

SEQ ID NO: 1472874 - RNA, 19 nt, Artificial Sequence
  Description of Artificial Sequence: Synthetic oligonucleotide
  Sense strand starting at position 2803 of SEQ ID NO: 1244207
ugauacugagcacaucauu

SEQ ID NO: 1472875 - RNA, 19 nt, Artificial Sequence
  Description of Artificial Sequence: Synthetic oligonucleotide
  Antisense strand to SEQ ID NO: 1472874
aaugaugugcucaguauca

SEQ ID NO: 1472876 - RNA, 19 nt, Artificial Sequence
  Description of Artificial Sequence: Synthetic oligonucleotide
  Sense strand starting at position 3012 of SEQ ID NO: 1244207
gguugacagucuuugauga

SEQ ID NO: 1472877 - RNA, 19 nt, Artificial Sequence
  Description of Artificial Sequence: Synthetic oligonucleotide
  Antisense strand to SEQ ID NO: 1472876
ucaucaaagacugucaacc

SEQ ID NO: 1472878 - RNA, 19 nt, Artificial Sequence
  Description of Artificial Sequence: Synthetic oligonucleotide
  Sense strand starting at position 3013 of SEQ ID NO: 1244207
guugacagucuuugaugau

SEQ ID NO: 1472879 - RNA, 19 nt, Artificial Sequence
  Description of Artificial Sequence: Synthetic oligonucleotide
  Antisense strand to SEQ ID NO: 1472878
aucaucaaagacugucaac

SEQ ID NO: 1472880 - RNA, 19 nt, Artificial Sequence
  Description of Artificial Sequence: Synthetic oligonucleotide
  Sense strand starting at position 3020 of SEQ ID NO: 1244207
gucuuugaugaugguuuau

SEQ ID NO: 1472881 - RNA, 19 nt, Artificial Sequence
  Description of Artificial Sequence: Synthetic oligonucleotide
  Antisense strand to SEQ ID NO: 1472880
auaaaccaucaucaaagac

SEQ ID NO: 1472882 - RNA, 19 nt, Artificial Sequence
  Description of Artificial Sequence: Synthetic oligonucleotide
  Sense strand starting at position 3039 of SEQ ID NO: 1244207
ggcugugaccagcaaaggu

SEQ ID NO: 1472883 - RNA, 19 nt, Artificial Sequence
  Description of Artificial Sequence: Synthetic oligonucleotide
  Antisense strand to SEQ ID NO: 1472882
accuuugcuggucacagcc

SEQ ID NO: 1472884 - RNA, 19 nt, Artificial Sequence
  Description of Artificial Sequence: Synthetic oligonucleotide
  Sense strand starting at position 3266 of SEQ ID NO: 1244207
ugaaccucauggguagaau

SEQ ID NO: 1472885 - RNA, 19 nt, Artificial Sequence
  Description of Artificial Sequence: Synthetic oligonucleotide
  Antisense strand to SEQ ID NO: 1472884
auucuacccaugagguuca

SEQ ID NO: 1472886 - RNA, 19 nt, Artificial Sequence
  Description of Artificial Sequence: Synthetic oligonucleotide
  Sense strand starting at position 3347 of SEQ ID NO: 1244207
auggcagacucuuuggaca

SEQ ID NO: 1472887 - RNA, 19 nt, Artificial Sequence
  Description of Artificial Sequence: Synthetic oligonucleotide
  Antisense strand to SEQ ID NO: 1472886
uguccaaagagucugccau

SEQ ID NO: 1472888 - RNA, 19 nt, Artificial Sequence
  Description of Artificial Sequence: Synthetic oligonucleotide
  Sense strand starting at position 3447 of SEQ ID NO: 1244207
aaagauaaaccugggucuu

SEQ ID NO: 1472889 - RNA, 19 nt, Artificial Sequence
  Description of Artificial Sequence: Synthetic oligonucleotide
  Antisense strand to SEQ ID NO: 1472888
aagacccagguuuaucuuu

SEQ ID NO: 1472890 - RNA, 19 nt, Artificial Sequence
  Description of Artificial Sequence: Synthetic oligonucleotide
  Sense strand starting at position 3467 of SEQ ID NO: 1244207
cgccuugaaacauggacuu

SEQ ID NO: 1472891 - RNA, 19 nt, Artificial Sequence
  Description of Artificial Sequence: Synthetic oligonucleotide
  Antisense strand to SEQ ID NO: 1472890
aaguccauguuucaaggcg

SEQ ID NO: 1472892 - RNA, 19 nt, Artificial Sequence
  Description of Artificial Sequence: Synthetic oligonucleotide
  Sense strand starting at position 3557 of SEQ ID NO: 1244207
gcauuuaugugcuucuaag

SEQ ID NO: 1472893 - RNA, 19 nt, Artificial Sequence
  Description of Artificial Sequence: Synthetic oligonucleotide
  Antisense strand to SEQ ID NO: 1472892
cuuagaagcacauaaaugc

SEQ ID NO: 1472894 - RNA, 19 nt, Artificial Sequence
  Description of Artificial Sequence: Synthetic oligonucleotide
  Sense strand starting at position 3634 of SEQ ID NO: 1244207
gaggauuggcuguggugaa

SEQ ID NO: 1472895 - RNA, 19 nt, Artificial Sequence
  Description of Artificial Sequence: Synthetic oligonucleotide
  Antisense strand to SEQ ID NO: 1472894
uucaccacagccaauccuc

SEQ ID NO: 1472896 - RNA, 19 nt, Artificial Sequence
  Description of Artificial Sequence: Synthetic oligonucleotide
  Sense strand starting at position 3826 of SEQ ID NO: 1244207
cuaggauuggauugucaug

SEQ ID NO: 1472897 - RNA, 19 nt, Artificial Sequence
  Description of Artificial Sequence: Synthetic oligonucleotide
  Antisense strand to SEQ ID NO: 1472896
caugacaauccaauccuag

SEQ ID NO: 1472898 - RNA, 19 nt, Artificial Sequence
  Description of Artificial Sequence: Synthetic oligonucleotide
  Sense strand starting at position 3894 of SEQ ID NO: 1244207
ggcucuccugugcuuugua

SEQ ID NO: 1472899 - RNA, 19 nt, Artificial Sequence
  Description of Artificial Sequence: Synthetic oligonucleotide
  Antisense strand to SEQ ID NO: 1472898
uacaaagcacaggagagcc

SEQ ID NO: 1472900 - RNA, 19 nt, Artificial Sequence
  Description of Artificial Sequence: Synthetic oligonucleotide
  Sense strand starting at position 505 of SEQ ID NO: 1244208
acgguuuguagucaggaca

SEQ ID NO: 1472901 - RNA, 19 nt, Artificial Sequence
  Description of Artificial Sequence: Synthetic oligonucleotide
  Antisense strand to SEQ ID NO: 1472900
uguccugacuacaaaccgu

SEQ ID NO: 1472902 - RNA, 19 nt, Artificial Sequence
  Description of Artificial Sequence: Synthetic oligonucleotide
  Sense strand starting at position 508 of SEQ ID NO: 1244208
guuuguagucaggacauua

SEQ ID NO: 1472903 - RNA, 19 nt, Artificial Sequence
  Description of Artificial Sequence: Synthetic oligonucleotide
  Antisense strand to SEQ ID NO: 1472902
uaauguccugacuacaaac

SEQ ID NO: 1472904 - RNA, 19 nt, Artificial Sequence
  Description of Artificial Sequence: Synthetic oligonucleotide
  Sense strand starting at position 518 of SEQ ID NO: 1244208
aggacauuaugcccauuga

SEQ ID NO: 1472905 - RNA, 19 nt, Artificial Sequence
  Description of Artificial Sequence: Synthetic oligonucleotide
  Antisense strand to SEQ ID NO: 1472904
ucaaugggcauaauguccu

SEQ ID NO: 1472906 - RNA, 19 nt, Artificial Sequence
  Description of Artificial Sequence: Synthetic oligonucleotide
  Sense strand starting at position 519 of SEQ ID NO: 1244208
ggacauuaugcccauugac

SEQ ID NO: 1472907 - RNA, 19 nt, Artificial Sequence
  Description of Artificial Sequence: Synthetic oligonucleotide
  Antisense strand to SEQ ID NO: 1472906
gucaaugggcauaaugucc

SEQ ID NO: 1472908 - RNA, 19 nt, Artificial Sequence
  Description of Artificial Sequence: Synthetic oligonucleotide
  Sense strand starting at position 580 of SEQ ID NO: 1244208
agaauuccaugcccaguua

SEQ ID NO: 1472909 - RNA, 19 nt, Artificial Sequence
  Description of Artificial Sequence: Synthetic oligonucleotide
  Antisense strand to SEQ ID NO: 1472908
uaacugggcauggaauucu

SEQ ID NO: 1472910 - RNA, 19 nt, Artificial Sequence
  Description of Artificial Sequence: Synthetic oligonucleotide
  Sense strand starting at position 812 of SEQ ID NO: 1244208
ugacaauuccuccagcuga

SEQ ID NO: 1472911 - RNA, 19 nt, Artificial Sequence
  Description of Artificial Sequence: Synthetic oligonucleotide
  Antisense strand to SEQ ID NO: 1472910
ucagcuggaggaauuguca

SEQ ID NO: 1472912 - RNA, 19 nt, Artificial Sequence
  Description of Artificial Sequence: Synthetic oligonucleotide
  Sense strand starting at position 1055 of SEQ ID NO: 1244208
aauuuaagguguggagaga

SEQ ID NO: 1472913 - RNA, 19 nt, Artificial Sequence
  Description of Artificial Sequence: Synthetic oligonucleotide
  Antisense strand to SEQ ID NO: 1472912
ucucuccacaccuuaaauu

SEQ ID NO: 1472914 - RNA, 19 nt, Artificial Sequence
  Description of Artificial Sequence: Synthetic oligonucleotide
  Sense strand starting at position 1069 of SEQ ID NO: 1244208
agagaaauauucuucuagu

SEQ ID NO: 1472915 - RNA, 19 nt, Artificial Sequence
  Description of Artificial Sequence: Synthetic oligonucleotide
  Antisense strand to SEQ ID NO: 1472914
acuagaagaauauuucucu

SEQ ID NO: 1472916 - RNA, 19 nt, Artificial Sequence
  Description of Artificial Sequence: Synthetic oligonucleotide
  Sense strand starting at position 1213 of SEQ ID NO: 1244208
gccagcuucgcguugucaa

SEQ ID NO: 1472917 - RNA, 19 nt, Artificial Sequence
  Description of Artificial Sequence: Synthetic oligonucleotide
  Antisense strand to SEQ ID NO: 1472916
uugacaacgcgaagcuggc

SEQ ID NO: 1472918 - RNA, 19 nt, Artificial Sequence
  Description of Artificial Sequence: Synthetic oligonucleotide
  Sense strand starting at position 1215 of SEQ ID NO: 1244208
cagcuucgcguugucaauu

SEQ ID NO: 1472919 - RNA, 19 nt, Artificial Sequence
  Description of Artificial Sequence: Synthetic oligonucleotide
  Antisense strand to SEQ ID NO: 1472918
aauugacaacgcgaagcug

SEQ ID NO: 1472920 - RNA, 19 nt, Artificial Sequence
  Description of Artificial Sequence: Synthetic oligonucleotide
  Sense strand starting at position 1223 of SEQ ID NO: 1244208
cguugucaauuuguacaau

SEQ ID NO: 1472921 - RNA, 19 nt, Artificial Sequence
  Description of Artificial Sequence: Synthetic oligonucleotide
  Antisense strand to SEQ ID NO: 1472920
auuguacaaauugacaacg

SEQ ID NO: 1472922 - RNA, 19 nt, Artificial Sequence
  Description of Artificial Sequence: Synthetic oligonucleotide
  Sense strand starting at position 1345 of SEQ ID NO: 1244208
uacgcucauguccaagaga

SEQ ID NO: 1472923 - RNA, 19 nt, Artificial Sequence
  Description of Artificial Sequence: Synthetic oligonucleotide
  Antisense strand to SEQ ID NO: 1472922
ucucuuggacaugagcgua

SEQ ID NO: 1472924 - RNA, 19 nt, Artificial Sequence
  Description of Artificial Sequence: Synthetic oligonucleotide
  Sense strand starting at position 1348 of SEQ ID NO: 1244208
gcucauguccaagagaaac

SEQ ID NO: 1472925 - RNA, 19 nt, Artificial Sequence
  Description of Artificial Sequence: Synthetic oligonucleotide
  Antisense strand to SEQ ID NO: 1472924
guuucucuuggacaugagc

SEQ ID NO: 1472926 - RNA, 19 nt, Artificial Sequence
  Description of Artificial Sequence: Synthetic oligonucleotide
  Sense strand starting at position 2136 of SEQ ID NO: 1244208
cugaguuuaccaugagaag

SEQ ID NO: 1472927 - RNA, 19 nt, Artificial Sequence
  Description of Artificial Sequence: Synthetic oligonucleotide
  Antisense strand to SEQ ID NO: 1472926
cuucucaugguaaacucag

SEQ ID NO: 1472928 - RNA, 19 nt, Artificial Sequence
  Description of Artificial Sequence: Synthetic oligonucleotide
  Sense strand starting at position 2147 of SEQ ID NO: 1244208
augagaaguuccucagcuc

SEQ ID NO: 1472929 - RNA, 19 nt, Artificial Sequence
  Description of Artificial Sequence: Synthetic oligonucleotide
  Antisense strand to SEQ ID NO: 1472928
gagcugaggaacuucucau

SEQ ID NO: 1472930 - RNA, 19 nt, Artificial Sequence
  Description of Artificial Sequence: Synthetic oligonucleotide
  Sense strand starting at position 2148 of SEQ ID NO: 1244208
ugagaaguuccucagcuca

SEQ ID NO: 1472931 - RNA, 19 nt, Artificial Sequence
  Description of Artificial Sequence: Synthetic oligonucleotide
  Antisense strand to SEQ ID NO: 1472930
ugagcugaggaacuucuca

SEQ ID NO: 1472932 - RNA, 19 nt, Artificial Sequence
  Description of Artificial Sequence: Synthetic oligonucleotide
  Sense strand starting at position 2150 of SEQ ID NO: 1244208
agaaguuccucagcucauu

SEQ ID NO: 1472933 - RNA, 19 nt, Artificial Sequence
  Description of Artificial Sequence: Synthetic oligonucleotide
  Antisense strand to SEQ ID NO: 1472932
aaugagcugaggaacuucu

SEQ ID NO: 1472934 - RNA, 19 nt, Artificial Sequence
  Description of Artificial Sequence: Synthetic oligonucleotide
  Sense strand starting at position 2176 of SEQ ID NO: 1244208
uguugacaaaucugagaug

SEQ ID NO: 1472935 - RNA, 19 nt, Artificial Sequence
  Description of Artificial Sequence: Synthetic oligonucleotide
  Antisense strand to SEQ ID NO: 1472934
caucucagauuugucaaca

SEQ ID NO: 1472936 - RNA, 19 nt, Artificial Sequence
  Description of Artificial Sequence: Synthetic oligonucleotide
  Sense strand starting at position 2301 of SEQ ID NO: 1244208
ggacuauggucucugugga

SEQ ID NO: 1472937 - RNA, 19 nt, Artificial Sequence
  Description of Artificial Sequence: Synthetic oligonucleotide
  Antisense strand to SEQ ID NO: 1472936
uccacagagaccauagucc

SEQ ID NO: 1472938 - RNA, 19 nt, Artificial Sequence
  Description of Artificial Sequence: Synthetic oligonucleotide
  Sense strand starting at position 2302 of SEQ ID NO: 1244208
gacuauggucucuguggau

SEQ ID NO: 1472939 - RNA, 19 nt, Artificial Sequence
  Description of Artificial Sequence: Synthetic oligonucleotide
  Antisense strand to SEQ ID NO: 1472938
auccacagagaccauaguc

SEQ ID NO: 1472940 - RNA, 19 nt, Artificial Sequence
  Description of Artificial Sequence: Synthetic oligonucleotide
  Sense strand starting at position 2314 of SEQ ID NO: 1244208
uguggauguggucacaaug

SEQ ID NO: 1472941 - RNA, 19 nt, Artificial Sequence
  Description of Artificial Sequence: Synthetic oligonucleotide
  Antisense strand to SEQ ID NO: 1472940
cauugugaccacauccaca

SEQ ID NO: 1472942 - RNA, 19 nt, Artificial Sequence
  Description of Artificial Sequence: Synthetic oligonucleotide
  Sense strand starting at position 2342 of SEQ ID NO: 1244208
aucuuuccgucaguaauuu

SEQ ID NO: 1472943 - RNA, 19 nt, Artificial Sequence
  Description of Artificial Sequence: Synthetic oligonucleotide
  Antisense strand to SEQ ID NO: 1472942
aaauuacugacggaaagau

SEQ ID NO: 1472944 - RNA, 19 nt, Artificial Sequence
  Description of Artificial Sequence: Synthetic oligonucleotide
  Sense strand starting at position 2467 of SEQ ID NO: 1244208
ugcaucuacugauauuuga

SEQ ID NO: 1472945 - RNA, 19 nt, Artificial Sequence
  Description of Artificial Sequence: Synthetic oligonucleotide
  Antisense strand to SEQ ID NO: 1472944
ucaaauaucaguagaugca

SEQ ID NO: 1472946 - RNA, 19 nt, Artificial Sequence
  Description of Artificial Sequence: Synthetic oligonucleotide
  Sense strand starting at position 2474 of SEQ ID NO: 1244208
acugauauuugacgauuga

SEQ ID NO: 1472947 - RNA, 19 nt, Artificial Sequence
  Description of Artificial Sequence: Synthetic oligonucleotide
  Antisense strand to SEQ ID NO: 1472946
ucaaucgucaaauaucagu

SEQ ID NO: 1472948 - RNA, 19 nt, Artificial Sequence
  Description of Artificial Sequence: Synthetic oligonucleotide
  Sense strand starting at position 2522 of SEQ ID NO: 1244208
auugcauacucccuugaga

SEQ ID NO: 1472949 - RNA, 19 nt, Artificial Sequence
  Description of Artificial Sequence: Synthetic oligonucleotide
  Antisense strand to SEQ ID NO: 1472948
ucucaagggaguaugcaau

SEQ ID NO: 1472950 - RNA, 19 nt, Artificial Sequence
  Description of Artificial Sequence: Synthetic oligonucleotide
  Sense strand starting at position 2524 of SEQ ID NO: 1244208
ugcauacucccuugagaag

SEQ ID NO: 1472951 - RNA, 19 nt, Artificial Sequence
  Description of Artificial Sequence: Synthetic oligonucleotide
  Antisense strand to SEQ ID NO: 1472950
cuucucaagggaguaugca

SEQ ID NO: 1472952 - RNA, 19 nt, Artificial Sequence
  Description of Artificial Sequence: Synthetic oligonucleotide
  Sense strand starting at position 2556 of SEQ ID NO: 1244208
aagcaauggcgcuaauuaa

SEQ ID NO: 1472953 - RNA, 19 nt, Artificial Sequence
  Description of Artificial Sequence: Synthetic oligonucleotide
  Antisense strand to SEQ ID NO: 1472952
uuaauuagcgccauugcuu

SEQ ID NO: 1472954 - RNA, 19 nt, Artificial Sequence
  Description of Artificial Sequence: Synthetic oligonucleotide
  Sense strand starting at position 2578 of SEQ ID NO: 1244208
uugguugacuagucagaau

SEQ ID NO: 1472955 - RNA, 19 nt, Artificial Sequence
  Description of Artificial Sequence: Synthetic oligonucleotide
  Antisense strand to SEQ ID NO: 1472954
auucugacuagucaaccaa

SEQ ID NO: 1472956 - RNA, 19 nt, Artificial Sequence
  Description of Artificial Sequence: Synthetic oligonucleotide
  Sense strand starting at position 2725 of SEQ ID NO: 1244208
cugaaaucucuggauguuc

SEQ ID NO: 1472957 - RNA, 19 nt, Artificial Sequence
  Description of Artificial Sequence: Synthetic oligonucleotide
  Antisense strand to SEQ ID NO: 1472956
gaacauccagagauuucag

SEQ ID NO: 1472958 - RNA, 19 nt, Artificial Sequence
  Description of Artificial Sequence: Synthetic oligonucleotide
  Sense strand starting at position 2727 of SEQ ID NO: 1244208
gaaaucucuggauguucua

SEQ ID NO: 1472959 - RNA, 19 nt, Artificial Sequence
  Description of Artificial Sequence: Synthetic oligonucleotide
  Antisense strand to SEQ ID NO: 1472958
uagaacauccagagauuuc

SEQ ID NO: 1472960 - RNA, 19 nt, Artificial Sequence
  Description of Artificial Sequence: Synthetic oligonucleotide
  Sense strand starting at position 2801 of SEQ ID NO: 1244208
uauaguucuggccaaggaa

SEQ ID NO: 1472961 - RNA, 19 nt, Artificial Sequence
  Description of Artificial Sequence: Synthetic oligonucleotide
  Antisense strand to SEQ ID NO: 1472960
uuccuuggccagaacuaua

SEQ ID NO: 1472962 - RNA, 19 nt, Artificial Sequence
  Description of Artificial Sequence: Synthetic oligonucleotide
  Sense strand starting at position 2989 of SEQ ID NO: 1244208
cuaugaggugguuacucau

SEQ ID NO: 1472963 - RNA, 19 nt, Artificial Sequence
  Description of Artificial Sequence: Synthetic oligonucleotide
  Antisense strand to SEQ ID NO: 1472962
augaguaaccaccucauag

SEQ ID NO: 1472964 - RNA, 19 nt, Artificial Sequence
  Description of Artificial Sequence: Synthetic oligonucleotide
  Sense strand starting at position 3061 of SEQ ID NO: 1244208
gauugacaguuagugaacu

SEQ ID NO: 1472965 - RNA, 19 nt, Artificial Sequence
  Description of Artificial Sequence: Synthetic oligonucleotide
  Antisense strand to SEQ ID NO: 1472964
aguucacuaacugucaauc

SEQ ID NO: 1472966 - RNA, 19 nt, Artificial Sequence
  Description of Artificial Sequence: Synthetic oligonucleotide
  Sense strand starting at position 3147 of SEQ ID NO: 1244208
ugagaacaacggugucauu

SEQ ID NO: 1472967 - RNA, 19 nt, Artificial Sequence
  Description of Artificial Sequence: Synthetic oligonucleotide
  Antisense strand to SEQ ID NO: 1472966
aaugacaccguuguucuca

SEQ ID NO: 1472968 - RNA, 19 nt, Artificial Sequence
  Description of Artificial Sequence: Synthetic oligonucleotide
  Sense strand starting at position 3204 of SEQ ID NO: 1244208
ggcuuaguuacuggaugag

SEQ ID NO: 1472969 - RNA, 19 nt, Artificial Sequence
  Description of Artificial Sequence: Synthetic oligonucleotide
  Antisense strand to SEQ ID NO: 1472968
cucauccaguaacuaagcc

SEQ ID NO: 1472970 - RNA, 19 nt, Artificial Sequence
  Description of Artificial Sequence: Synthetic oligonucleotide
  Sense strand starting at position 3276 of SEQ ID NO: 1244208
agauuuaaauacuauggca

SEQ ID NO: 1472971 - RNA, 19 nt, Artificial Sequence
  Description of Artificial Sequence: Synthetic oligonucleotide
  Antisense strand to SEQ ID NO: 1472970
ugccauaguauuuaaaucu

SEQ ID NO: 1472972 - RNA, 19 nt, Artificial Sequence
  Description of Artificial Sequence: Synthetic oligonucleotide
  Sense strand starting at position 3284 of SEQ ID NO: 1244208
auacuauggcagugacaac

SEQ ID NO: 1472973 - RNA, 19 nt, Artificial Sequence
  Description of Artificial Sequence: Synthetic oligonucleotide
  Antisense strand to SEQ ID NO: 1472972
guugucacugccauaguau

SEQ ID NO: 1472974 - RNA, 19 nt, Artificial Sequence
  Description of Artificial Sequence: Synthetic oligonucleotide
  Sense strand starting at position 3818 of SEQ ID NO: 1244208
ugcuguacugaguaucaua

SEQ ID NO: 1472975 - RNA, 19 nt, Artificial Sequence
  Description of Artificial Sequence: Synthetic oligonucleotide
  Antisense strand to SEQ ID NO: 1472974
uaugauacucaguacagca

SEQ ID NO: 1472976 - RNA, 19 nt, Artificial Sequence
  Description of Artificial Sequence: Synthetic oligonucleotide
  Sense strand starting at position 3826 of SEQ ID NO: 1244208
ugaguaucauaggcaacua

SEQ ID NO: 1472977 - RNA, 19 nt, Artificial Sequence
  Description of Artificial Sequence: Synthetic oligonucleotide
  Antisense strand to SEQ ID NO: 1472976
uaguugccuaugauacuca

SEQ ID NO: 1472978 - RNA, 19 nt, Artificial Sequence
  Description of Artificial Sequence: Synthetic oligonucleotide
  Sense strand starting at position 3893 of SEQ ID NO: 1244208
auugcacuacgacauuaua

SEQ ID NO: 1472979 - RNA, 19 nt, Artificial Sequence
  Description of Artificial Sequence: Synthetic oligonucleotide
  Antisense strand to SEQ ID NO: 1472978
uauaaugucguagugcaau

SEQ ID NO: 1472980 - RNA, 19 nt, Artificial Sequence
  Description of Artificial Sequence: Synthetic oligonucleotide
  Sense strand starting at position 268 of SEQ ID NO: 1244209
aacugacuugcguaagauc

SEQ ID NO: 1472981 - RNA, 19 nt, Artificial Sequence
  Description of Artificial Sequence: Synthetic oligonucleotide
  Antisense strand to SEQ ID NO: 1472980
gaucuuacgcaagucaguu

SEQ ID NO: 1472982 - RNA, 19 nt, Artificial Sequence
  Description of Artificial Sequence: Synthetic oligonucleotide
  Sense strand starting at position 328 of SEQ ID NO: 1244209
ggcugucaguuaccaaaga

SEQ ID NO: 1472983 - RNA, 19 nt, Artificial Sequence
  Description of Artificial Sequence: Synthetic oligonucleotide
  Antisense strand to SEQ ID NO: 1472982
ucuuugguaacugacagcc

SEQ ID NO: 1472984 - RNA, 19 nt, Artificial Sequence
  Description of Artificial Sequence: Synthetic oligonucleotide
  Sense strand starting at position 370 of SEQ ID NO: 1244209
cgugaucugcggcuccuua

SEQ ID NO: 1472985 - RNA, 19 nt, Artificial Sequence
  Description of Artificial Sequence: Synthetic oligonucleotide
  Antisense strand to SEQ ID NO: 1472984
uaaggagccgcagaucacg

SEQ ID NO: 1472986 - RNA, 19 nt, Artificial Sequence
  Description of Artificial Sequence: Synthetic oligonucleotide
  Sense strand starting at position 371 of SEQ ID NO: 1244209
gugaucugcggcuccuuau

SEQ ID NO: 1472987 - RNA, 19 nt, Artificial Sequence
  Description of Artificial Sequence: Synthetic oligonucleotide
  Antisense strand to SEQ ID NO: 1472986
auaaggagccgcagaucac

SEQ ID NO: 1472988 - RNA, 19 nt, Artificial Sequence
  Description of Artificial Sequence: Synthetic oligonucleotide
  Sense strand starting at position 453 of SEQ ID NO: 1244209
agggcucccuaauuaaauc

SEQ ID NO: 1472989 - RNA, 19 nt, Artificial Sequence
  Description of Artificial Sequence: Synthetic oligonucleotide
  Antisense strand to SEQ ID NO: 1472988
gauuuaauuagggagcccu

SEQ ID NO: 1472990 - RNA, 19 nt, Artificial Sequence
  Description of Artificial Sequence: Synthetic oligonucleotide
  Sense strand starting at position 489 of SEQ ID NO: 1244209
guaagugacuccucugacu

SEQ ID NO: 1472991 - RNA, 19 nt, Artificial Sequence
  Description of Artificial Sequence: Synthetic oligonucleotide
  Antisense strand to SEQ ID NO: 1472990
agucagaggagucacuuac

SEQ ID NO: 1472992 - RNA, 19 nt, Artificial Sequence
  Description of Artificial Sequence: Synthetic oligonucleotide
  Sense strand starting at position 562 of SEQ ID NO: 1244209
uuugcuccugguuaaugaa

SEQ ID NO: 1472993 - RNA, 19 nt, Artificial Sequence
  Description of Artificial Sequence: Synthetic oligonucleotide
  Antisense strand to SEQ ID NO: 1472992
uucauuaaccaggagcaaa

SEQ ID NO: 1472994 - RNA, 19 nt, Artificial Sequence
  Description of Artificial Sequence: Synthetic oligonucleotide
  Sense strand starting at position 630 of SEQ ID NO: 1244209
acauauaugcuuggauuaa

SEQ ID NO: 1472995 - RNA, 19 nt, Artificial Sequence
  Description of Artificial Sequence: Synthetic oligonucleotide
  Antisense strand to SEQ ID NO: 1472994
uuaauccaagcauauaugu

SEQ ID NO: 1472996 - RNA, 19 nt, Artificial Sequence
  Description of Artificial Sequence: Synthetic oligonucleotide
  Sense strand starting at position 969 of SEQ ID NO: 1244209
cuaugaucauguccaagag

SEQ ID NO: 1472997 - RNA, 19 nt, Artificial Sequence
  Description of Artificial Sequence: Synthetic oligonucleotide
  Antisense strand to SEQ ID NO: 1472996
cucuuggacaugaucauag

SEQ ID NO: 1472998 - RNA, 19 nt, Artificial Sequence
  Description of Artificial Sequence: Synthetic oligonucleotide
  Sense strand starting at position 1112 of SEQ ID NO: 1244209
ggaaguaagacugguaguc

SEQ ID NO: 1472999 - RNA, 19 nt, Artificial Sequence
  Description of Artificial Sequence: Synthetic oligonucleotide
  Antisense strand to SEQ ID NO: 1472998
gacuaccagucuuacuucc

SEQ ID NO: 1473000 - RNA, 19 nt, Artificial Sequence
  Description of Artificial Sequence: Synthetic oligonucleotide
  Sense strand starting at position 1306 of SEQ ID NO: 1244209
auuccaauguugccaggaa

SEQ ID NO: 1473001 - RNA, 19 nt, Artificial Sequence
  Description of Artificial Sequence: Synthetic oligonucleotide
  Antisense strand to SEQ ID NO: 1473000
uuccuggcaacauuggaau

SEQ ID NO: 1473002 - RNA, 19 nt, Artificial Sequence
  Description of Artificial Sequence: Synthetic oligonucleotide
  Sense strand starting at position 1484 of SEQ ID NO: 1244209
acccaaugucgaugggaga

SEQ ID NO: 1473003 - RNA, 19 nt, Artificial Sequence
  Description of Artificial Sequence: Synthetic oligonucleotide
  Antisense strand to SEQ ID NO: 1473002
ucucccaucgacauugggu

SEQ ID NO: 1473004 - RNA, 19 nt, Artificial Sequence
  Description of Artificial Sequence: Synthetic oligonucleotide
  Sense strand starting at position 1780 of SEQ ID NO: 1244209
uucucagcucguuaaagga

SEQ ID NO: 1473005 - RNA, 19 nt, Artificial Sequence
  Description of Artificial Sequence: Synthetic oligonucleotide
  Antisense strand to SEQ ID NO: 1473004
uccuuuaacgagcugagaa

SEQ ID NO: 1473006 - RNA, 19 nt, Artificial Sequence
  Description of Artificial Sequence: Synthetic oligonucleotide
  Sense strand starting at position 2011 of SEQ ID NO: 1244209
ugacaaugguucucacuug

SEQ ID NO: 1473007 - RNA, 19 nt, Artificial Sequence
  Description of Artificial Sequence: Synthetic oligonucleotide
  Antisense strand to SEQ ID NO: 1473006
caagugagaaccauuguca

SEQ ID NO: 1473008 - RNA, 19 nt, Artificial Sequence
  Description of Artificial Sequence: Synthetic oligonucleotide
  Sense strand starting at position 2019 of SEQ ID NO: 1244209
guucucacuuggguuaaga

SEQ ID NO: 1473009 - RNA, 19 nt, Artificial Sequence
  Description of Artificial Sequence: Synthetic oligonucleotide
  Antisense strand to SEQ ID NO: 1473008
ucuuaacccaagugagaac

SEQ ID NO: 1473010 - RNA, 19 nt, Artificial Sequence
  Description of Artificial Sequence: Synthetic oligonucleotide
  Sense strand starting at position 2021 of SEQ ID NO: 1244209
ucucacuuggguuaagacu

SEQ ID NO: 1473011 - RNA, 19 nt, Artificial Sequence
  Description of Artificial Sequence: Synthetic oligonucleotide
  Antisense strand to SEQ ID NO: 1473010
agucuuaacccaagugaga

SEQ ID NO: 1473012 - RNA, 19 nt, Artificial Sequence
  Description of Artificial Sequence: Synthetic oligonucleotide
  Sense strand starting at position 2048 of SEQ ID NO: 1244209
cuucccuauccagggaaga

SEQ ID NO: 1473013 - RNA, 19 nt, Artificial Sequence
  Description of Artificial Sequence: Synthetic oligonucleotide
  Antisense strand to SEQ ID NO: 1473012
ucuucccuggauagggaag

SEQ ID NO: 1473014 - RNA, 19 nt, Artificial Sequence
  Description of Artificial Sequence: Synthetic oligonucleotide
  Sense strand starting at position 2071 of SEQ ID NO: 1244209
gagucuuggaauuggugga

SEQ ID NO: 1473015 - RNA, 19 nt, Artificial Sequence
  Description of Artificial Sequence: Synthetic oligonucleotide
  Antisense strand to SEQ ID NO: 1473014
uccaccaauuccaagacuc

SEQ ID NO: 1473016 - RNA, 19 nt, Artificial Sequence
  Description of Artificial Sequence: Synthetic oligonucleotide
  Sense strand starting at position 2075 of SEQ ID NO: 1244209
cuuggaauugguggauguu

SEQ ID NO: 1473017 - RNA, 19 nt, Artificial Sequence
  Description of Artificial Sequence: Synthetic oligonucleotide
  Antisense strand to SEQ ID NO: 1473016
aacauccaccaauuccaag

SEQ ID NO: 1473018 - RNA, 19 nt, Artificial Sequence
  Description of Artificial Sequence: Synthetic oligonucleotide
  Sense strand starting at position 2076 of SEQ ID NO: 1244209
uuggaauugguggauguua

SEQ ID NO: 1473019 - RNA, 19 nt, Artificial Sequence
  Description of Artificial Sequence: Synthetic oligonucleotide
  Antisense strand to SEQ ID NO: 1473018
uaacauccaccaauuccaa

SEQ ID NO: 1473020 - RNA, 19 nt, Artificial Sequence
  Description of Artificial Sequence: Synthetic oligonucleotide
  Sense strand starting at position 2078 of SEQ ID NO: 1244209
ggaauugguggauguuaug

SEQ ID NO: 1473021 - RNA, 19 nt, Artificial Sequence
  Description of Artificial Sequence: Synthetic oligonucleotide
  Antisense strand to SEQ ID NO: 1473020
cauaacauccaccaauucc

SEQ ID NO: 1473022 - RNA, 19 nt, Artificial Sequence
  Description of Artificial Sequence: Synthetic oligonucleotide
  Sense strand starting at position 2096 of SEQ ID NO: 1244209
ggccuuggguuaucaagaa

SEQ ID NO: 1473023 - RNA, 19 nt, Artificial Sequence
  Description of Artificial Sequence: Synthetic oligonucleotide
  Antisense strand to SEQ ID NO: 1473022
uucuugauaacccaaggcc

SEQ ID NO: 1473024 - RNA, 19 nt, Artificial Sequence
  Description of Artificial Sequence: Synthetic oligonucleotide
  Sense strand starting at position 2246 of SEQ ID NO: 1244209
cuugauauauaguugguua

SEQ ID NO: 1473025 - RNA, 19 nt, Artificial Sequence
  Description of Artificial Sequence: Synthetic oligonucleotide
  Antisense strand to SEQ ID NO: 1473024
uaaccaacuauauaucaag

SEQ ID NO: 1473026 - RNA, 19 nt, Artificial Sequence
  Description of Artificial Sequence: Synthetic oligonucleotide
  Sense strand starting at position 2248 of SEQ ID NO: 1244209
ugauauauaguugguuaag

SEQ ID NO: 1473027 - RNA, 19 nt, Artificial Sequence
  Description of Artificial Sequence: Synthetic oligonucleotide
  Antisense strand to SEQ ID NO: 1473026
cuuaaccaacuauauauca

SEQ ID NO: 1473028 - RNA, 19 nt, Artificial Sequence
  Description of Artificial Sequence: Synthetic oligonucleotide
  Sense strand starting at position 2250 of SEQ ID NO: 1244209
auauauaguugguuaagca

SEQ ID NO: 1473029 - RNA, 19 nt, Artificial Sequence
  Description of Artificial Sequence: Synthetic oligonucleotide
  Antisense strand to SEQ ID NO: 1473028
ugcuuaaccaacuauauau

SEQ ID NO: 1473030 - RNA, 19 nt, Artificial Sequence
  Description of Artificial Sequence: Synthetic oligonucleotide
  Sense strand starting at position 2376 of SEQ ID NO: 1244209
gcuuaucucgaccaagaag

SEQ ID NO: 1473031 - RNA, 19 nt, Artificial Sequence
  Description of Artificial Sequence: Synthetic oligonucleotide
  Antisense strand to SEQ ID NO: 1473030
cuucuuggucgagauaagc

SEQ ID NO: 1473032 - RNA, 19 nt, Artificial Sequence
  Description of Artificial Sequence: Synthetic oligonucleotide
  Sense strand starting at position 2484 of SEQ ID NO: 1244209
gacauugagugaucagagc

SEQ ID NO: 1473033 - RNA, 19 nt, Artificial Sequence
  Description of Artificial Sequence: Synthetic oligonucleotide
  Antisense strand to SEQ ID NO: 1473032
gcucugaucacucaauguc

SEQ ID NO: 1473034 - RNA, 19 nt, Artificial Sequence
  Description of Artificial Sequence: Synthetic oligonucleotide
  Sense strand starting at position 2536 of SEQ ID NO: 1244209
auucuaaagucagucauga

SEQ ID NO: 1473035 - RNA, 19 nt, Artificial Sequence
  Description of Artificial Sequence: Synthetic oligonucleotide
  Antisense strand to SEQ ID NO: 1473034
ucaugacugacuuuagaau

SEQ ID NO: 1473036 - RNA, 19 nt, Artificial Sequence
  Description of Artificial Sequence: Synthetic oligonucleotide
  Sense strand starting at position 2617 of SEQ ID NO: 1244209
ggagguggguacucuuaau

SEQ ID NO: 1473037 - RNA, 19 nt, Artificial Sequence
  Description of Artificial Sequence: Synthetic oligonucleotide
  Antisense strand to SEQ ID NO: 1473036
auuaagaguacccaccucc

SEQ ID NO: 1473038 - RNA, 19 nt, Artificial Sequence
  Description of Artificial Sequence: Synthetic oligonucleotide
  Sense strand starting at position 2781 of SEQ ID NO: 1244209
ggauaacuacugugucauu

SEQ ID NO: 1473039 - RNA, 19 nt, Artificial Sequence
  Description of Artificial Sequence: Synthetic oligonucleotide
  Antisense strand to SEQ ID NO: 1473038
aaugacacaguaguuaucc

SEQ ID NO: 1473040 - RNA, 19 nt, Artificial Sequence
  Description of Artificial Sequence: Synthetic oligonucleotide
  Sense strand starting at position 2792 of SEQ ID NO: 1244209
gugucauugcuagaacuaa

SEQ ID NO: 1473041 - RNA, 19 nt, Artificial Sequence
  Description of Artificial Sequence: Synthetic oligonucleotide
  Antisense strand to SEQ ID NO: 1473040
uuaguucuagcaaugacac

SEQ ID NO: 1473042 - RNA, 19 nt, Artificial Sequence
  Description of Artificial Sequence: Synthetic oligonucleotide
  Sense strand starting at position 2834 of SEQ ID NO: 1244209
cgggcaagaaguugaaauu

SEQ ID NO: 1473043 - RNA, 19 nt, Artificial Sequence
  Description of Artificial Sequence: Synthetic oligonucleotide
  Antisense strand to SEQ ID NO: 1473042
aauuucaacuucuugcccg

SEQ ID NO: 1473044 - RNA, 19 nt, Artificial Sequence
  Description of Artificial Sequence: Synthetic oligonucleotide
  Sense strand starting at position 2940 of SEQ ID NO: 1244209
gaguuucuccaagggcuaa

SEQ ID NO: 1473045 - RNA, 19 nt, Artificial Sequence
  Description of Artificial Sequence: Synthetic oligonucleotide
  Antisense strand to SEQ ID NO: 1473044
uuagcccuuggagaaacuc

SEQ ID NO: 1473046 - RNA, 19 nt, Artificial Sequence
  Description of Artificial Sequence: Synthetic oligonucleotide
  Sense strand starting at position 3230 of SEQ ID NO: 1244209
agggaucagacgugcauau

SEQ ID NO: 1473047 - RNA, 19 nt, Artificial Sequence
  Description of Artificial Sequence: Synthetic oligonucleotide
  Antisense strand to SEQ ID NO: 1473046
auaugcacgucugaucccu

SEQ ID NO: 1473048 - RNA, 19 nt, Artificial Sequence
  Description of Artificial Sequence: Synthetic oligonucleotide
  Sense strand starting at position 3232 of SEQ ID NO: 1244209
ggaucagacgugcauaugu

SEQ ID NO: 1473049 - RNA, 19 nt, Artificial Sequence
  Description of Artificial Sequence: Synthetic oligonucleotide
  Antisense strand to SEQ ID NO: 1473048
acauaugcacgucugaucc

SEQ ID NO: 1473050 - RNA, 19 nt, Artificial Sequence
  Description of Artificial Sequence: Synthetic oligonucleotide
  Sense strand starting at position 3313 of SEQ ID NO: 1244209
ugggcuucucaggaaagua

SEQ ID NO: 1473051 - RNA, 19 nt, Artificial Sequence
  Description of Artificial Sequence: Synthetic oligonucleotide
  Antisense strand to SEQ ID NO: 1473050
uacuuuccugagaagccca

SEQ ID NO: 1473052 - RNA, 19 nt, Artificial Sequence
  Description of Artificial Sequence: Synthetic oligonucleotide
  Sense strand starting at position 3561 of SEQ ID NO: 1244209
uuccuuugauuugcuaagu

SEQ ID NO: 1473053 - RNA, 19 nt, Artificial Sequence
  Description of Artificial Sequence: Synthetic oligonucleotide
  Antisense strand to SEQ ID NO: 1473052
acuuagcaaaucaaaggaa

SEQ ID NO: 1473054 - RNA, 19 nt, Artificial Sequence
  Description of Artificial Sequence: Synthetic oligonucleotide
  Sense strand starting at position 3562 of SEQ ID NO: 1244209
uccuuugauuugcuaagua

SEQ ID NO: 1473055 - RNA, 19 nt, Artificial Sequence
  Description of Artificial Sequence: Synthetic oligonucleotide
  Antisense strand to SEQ ID NO: 1473054
uacuuagcaaaucaaagga

SEQ ID NO: 1473056 - RNA, 19 nt, Artificial Sequence
  Description of Artificial Sequence: Synthetic oligonucleotide
  Sense strand starting at position 3659 of SEQ ID NO: 1244209
augacucaucacugcugaa

SEQ ID NO: 1473057 - RNA, 19 nt, Artificial Sequence
  Description of Artificial Sequence: Synthetic oligonucleotide
  Antisense strand to SEQ ID NO: 1473056
uucagcagugaugagucau

SEQ ID NO: 1473058 - RNA, 19 nt, Artificial Sequence
  Description of Artificial Sequence: Synthetic oligonucleotide
  Sense strand starting at position 3770 of SEQ ID NO: 1244209
uguugcauggcucuuugua

SEQ ID NO: 1473059 - RNA, 19 nt, Artificial Sequence
  Description of Artificial Sequence: Synthetic oligonucleotide
  Antisense strand to SEQ ID NO: 1473058
uacaaagagccaugcaaca

SEQ ID NO: 1473060 - RNA, 19 nt, Artificial Sequence
  Description of Artificial Sequence: Synthetic oligonucleotide
  Sense strand starting at position 707 of SEQ ID NO: 1244210
uacgucugugcauaacaaa

SEQ ID NO: 1473061 - RNA, 19 nt, Artificial Sequence
  Description of Artificial Sequence: Synthetic oligonucleotide
  Antisense strand to SEQ ID NO: 1473060
uuuguuaugcacagacgua

SEQ ID NO: 1473062 - RNA, 19 nt, Artificial Sequence
  Description of Artificial Sequence: Synthetic oligonucleotide
  Sense strand starting at position 724 of SEQ ID NO: 1244210
aacuuagguuugguguaga

SEQ ID NO: 1473063 - RNA, 19 nt, Artificial Sequence
  Description of Artificial Sequence: Synthetic oligonucleotide
  Antisense strand to SEQ ID NO: 1473062
ucuacaccaaaccuaaguu

SEQ ID NO: 1473064 - RNA, 19 nt, Artificial Sequence
  Description of Artificial Sequence: Synthetic oligonucleotide
  Sense strand starting at position 727 of SEQ ID NO: 1244210
uuagguuugguguagaaac

SEQ ID NO: 1473065 - RNA, 19 nt, Artificial Sequence
  Description of Artificial Sequence: Synthetic oligonucleotide
  Antisense strand to SEQ ID NO: 1473064
guuucuacaccaaaccuaa

SEQ ID NO: 1473066 - RNA, 19 nt, Artificial Sequence
  Description of Artificial Sequence: Synthetic oligonucleotide
  Sense strand starting at position 729 of SEQ ID NO: 1244210
agguuugguguagaaacaa

SEQ ID NO: 1473067 - RNA, 19 nt, Artificial Sequence
  Description of Artificial Sequence: Synthetic oligonucleotide
  Antisense strand to SEQ ID NO: 1473066
uuguuucuacaccaaaccu

SEQ ID NO: 1473068 - RNA, 19 nt, Artificial Sequence
  Description of Artificial Sequence: Synthetic oligonucleotide
  Sense strand starting at position 929 of SEQ ID NO: 1244210
ugagucaucuaguuauaau

SEQ ID NO: 1473069 - RNA, 19 nt, Artificial Sequence
  Description of Artificial Sequence: Synthetic oligonucleotide
  Antisense strand to SEQ ID NO: 1473068
auuauaacuagaugacuca

SEQ ID NO: 1473070 - RNA, 19 nt, Artificial Sequence
  Description of Artificial Sequence: Synthetic oligonucleotide
  Sense strand starting at position 936 of SEQ ID NO: 1244210
ucuaguuauaaugguagag

SEQ ID NO: 1473071 - RNA, 19 nt, Artificial Sequence
  Description of Artificial Sequence: Synthetic oligonucleotide
  Antisense strand to SEQ ID NO: 1473070
cucuaccauuauaacuaga

SEQ ID NO: 1473072 - RNA, 19 nt, Artificial Sequence
  Description of Artificial Sequence: Synthetic oligonucleotide
  Sense strand starting at position 940 of SEQ ID NO: 1244210
guuauaaugguagagugua

SEQ ID NO: 1473073 - RNA, 19 nt, Artificial Sequence
  Description of Artificial Sequence: Synthetic oligonucleotide
  Antisense strand to SEQ ID NO: 1473072
uacacucuaccauuauaac

SEQ ID NO: 1473074 - RNA, 19 nt, Artificial Sequence
  Description of Artificial Sequence: Synthetic oligonucleotide
  Sense strand starting at position 1435 of SEQ ID NO: 1244210
auaacuguugcuuggaaac

SEQ ID NO: 1473075 - RNA, 19 nt, Artificial Sequence
  Description of Artificial Sequence: Synthetic oligonucleotide
  Antisense strand to SEQ ID NO: 1473074
guuuccaagcaacaguuau

SEQ ID NO: 1473076 - RNA, 19 nt, Artificial Sequence
  Description of Artificial Sequence: Synthetic oligonucleotide
  Sense strand starting at position 1472 of SEQ ID NO: 1244210
uuaaacagguucuuaggaa

SEQ ID NO: 1473077 - RNA, 19 nt, Artificial Sequence
  Description of Artificial Sequence: Synthetic oligonucleotide
  Antisense strand to SEQ ID NO: 1473076
uuccuaagaaccuguuuaa

SEQ ID NO: 1473078 - RNA, 19 nt, Artificial Sequence
  Description of Artificial Sequence: Synthetic oligonucleotide
  Sense strand starting at position 1521 of SEQ ID NO: 1244210
aguguaguaagacagguaa

SEQ ID NO: 1473079 - RNA, 19 nt, Artificial Sequence
  Description of Artificial Sequence: Synthetic oligonucleotide
  Antisense strand to SEQ ID NO: 1473078
uuaccugucuuacuacacu

SEQ ID NO: 1473080 - RNA, 19 nt, Artificial Sequence
  Description of Artificial Sequence: Synthetic oligonucleotide
  Sense strand starting at position 1523 of SEQ ID NO: 1244210
uguaguaagacagguaauc

SEQ ID NO: 1473081 - RNA, 19 nt, Artificial Sequence
  Description of Artificial Sequence: Synthetic oligonucleotide
  Antisense strand to SEQ ID NO: 1473080
gauuaccugucuuacuaca

SEQ ID NO: 1473082 - RNA, 19 nt, Artificial Sequence
  Description of Artificial Sequence: Synthetic oligonucleotide
  Sense strand starting at position 1600 of SEQ ID NO: 1244210
gcauucucucguucuagca

SEQ ID NO: 1473083 - RNA, 19 nt, Artificial Sequence
  Description of Artificial Sequence: Synthetic oligonucleotide
  Antisense strand to SEQ ID NO: 1473082
ugcuagaacgagagaaugc

SEQ ID NO: 1473084 - RNA, 19 nt, Artificial Sequence
  Description of Artificial Sequence: Synthetic oligonucleotide
  Sense strand starting at position 1707 of SEQ ID NO: 1244210
gcugcagucauccagagaa

SEQ ID NO: 1473085 - RNA, 19 nt, Artificial Sequence
  Description of Artificial Sequence: Synthetic oligonucleotide
  Antisense strand to SEQ ID NO: 1473084
uucucuggaugacugcagc

SEQ ID NO: 1473086 - RNA, 19 nt, Artificial Sequence
  Description of Artificial Sequence: Synthetic oligonucleotide
  Sense strand starting at position 1832 of SEQ ID NO: 1244210
gacaguuguugacuguaag

SEQ ID NO: 1473087 - RNA, 19 nt, Artificial Sequence
  Description of Artificial Sequence: Synthetic oligonucleotide
  Antisense strand to SEQ ID NO: 1473086
cuuacagucaacaacuguc

SEQ ID NO: 1473088 - RNA, 19 nt, Artificial Sequence
  Description of Artificial Sequence: Synthetic oligonucleotide
  Sense strand starting at position 1869 of SEQ ID NO: 1244210
guuguuagaagagauggua

SEQ ID NO: 1473089 - RNA, 19 nt, Artificial Sequence
  Description of Artificial Sequence: Synthetic oligonucleotide
  Antisense strand to SEQ ID NO: 1473088
uaccaucucuucuaacaac

SEQ ID NO: 1473090 - RNA, 19 nt, Artificial Sequence
  Description of Artificial Sequence: Synthetic oligonucleotide
  Sense strand starting at position 1872 of SEQ ID NO: 1244210
guuagaagagaugguacua

SEQ ID NO: 1473091 - RNA, 19 nt, Artificial Sequence
  Description of Artificial Sequence: Synthetic oligonucleotide
  Antisense strand to SEQ ID NO: 1473090
uaguaccaucucuucuaac

SEQ ID NO: 1473092 - RNA, 19 nt, Artificial Sequence
  Description of Artificial Sequence: Synthetic oligonucleotide
  Sense strand starting at position 1894 of SEQ ID NO: 1244210
uuuguaauccuagagcagu

SEQ ID NO: 1473093 - RNA, 19 nt, Artificial Sequence
  Description of Artificial Sequence: Synthetic oligonucleotide
  Antisense strand to SEQ ID NO: 1473092
acugcucuaggauuacaaa

SEQ ID NO: 1473094 - RNA, 19 nt, Artificial Sequence
  Description of Artificial Sequence: Synthetic oligonucleotide
  Sense strand starting at position 1929 of SEQ ID NO: 1244210
aggagaauugguuguugua

SEQ ID NO: 1473095 - RNA, 19 nt, Artificial Sequence
  Description of Artificial Sequence: Synthetic oligonucleotide
  Antisense strand to SEQ ID NO: 1473094
uacaacaaccaauucuccu

SEQ ID NO: 1473096 - RNA, 19 nt, Artificial Sequence
  Description of Artificial Sequence: Synthetic oligonucleotide
  Sense strand starting at position 1931 of SEQ ID NO: 1244210
gagaauugguuguuguaca

SEQ ID NO: 1473097 - RNA, 19 nt, Artificial Sequence
  Description of Artificial Sequence: Synthetic oligonucleotide
  Antisense strand to SEQ ID NO: 1473096
uguacaacaaccaauucuc

SEQ ID NO: 1473098 - RNA, 19 nt, Artificial Sequence
  Description of Artificial Sequence: Synthetic oligonucleotide
  Sense strand starting at position 2038 of SEQ ID NO: 1244210
ucugaauuccaaggcucuu

SEQ ID NO: 1473099 - RNA, 19 nt, Artificial Sequence
  Description of Artificial Sequence: Synthetic oligonucleotide
  Antisense strand to SEQ ID NO: 1473098
aagagccuuggaauucaga

SEQ ID NO: 1473100 - RNA, 19 nt, Artificial Sequence
  Description of Artificial Sequence: Synthetic oligonucleotide
  Sense strand starting at position 2068 of SEQ ID NO: 1244210
cuuugaagugcuuauauag

SEQ ID NO: 1473101 - RNA, 19 nt, Artificial Sequence
  Description of Artificial Sequence: Synthetic oligonucleotide
  Antisense strand to SEQ ID NO: 1473100
cuauauaagcacuucaaag

SEQ ID NO: 1473102 - RNA, 19 nt, Artificial Sequence
  Description of Artificial Sequence: Synthetic oligonucleotide
  Sense strand starting at position 2126 of SEQ ID NO: 1244210
cuuucucagguuuauauca

SEQ ID NO: 1473103 - RNA, 19 nt, Artificial Sequence
  Description of Artificial Sequence: Synthetic oligonucleotide
  Antisense strand to SEQ ID NO: 1473102
ugauauaaaccugagaaag

SEQ ID NO: 1473104 - RNA, 19 nt, Artificial Sequence
  Description of Artificial Sequence: Synthetic oligonucleotide
  Sense strand starting at position 2180 of SEQ ID NO: 1244210
cuugcuuaagaagaguuau

SEQ ID NO: 1473105 - RNA, 19 nt, Artificial Sequence
  Description of Artificial Sequence: Synthetic oligonucleotide
  Antisense strand to SEQ ID NO: 1473104
auaacucuucuuaagcaag

SEQ ID NO: 1473106 - RNA, 19 nt, Artificial Sequence
  Description of Artificial Sequence: Synthetic oligonucleotide
  Sense strand starting at position 2231 of SEQ ID NO: 1244210
guaaguuauuacccaucau

SEQ ID NO: 1473107 - RNA, 19 nt, Artificial Sequence
  Description of Artificial Sequence: Synthetic oligonucleotide
  Antisense strand to SEQ ID NO: 1473106
augauggguaauaacuuac

SEQ ID NO: 1473108 - RNA, 19 nt, Artificial Sequence
  Description of Artificial Sequence: Synthetic oligonucleotide
  Sense strand starting at position 2252 of SEQ ID NO: 1244210
cuacuacuugucuauugga

SEQ ID NO: 1473109 - RNA, 19 nt, Artificial Sequence
  Description of Artificial Sequence: Synthetic oligonucleotide
  Antisense strand to SEQ ID NO: 1473108
uccaauagacaaguaguag

SEQ ID NO: 1473110 - RNA, 19 nt, Artificial Sequence
  Description of Artificial Sequence: Synthetic oligonucleotide
  Sense strand starting at position 2383 of SEQ ID NO: 1244210
ugagcuuaaccaggaauga

SEQ ID NO: 1473111 - RNA, 19 nt, Artificial Sequence
  Description of Artificial Sequence: Synthetic oligonucleotide
  Antisense strand to SEQ ID NO: 1473110
ucauuccugguuaagcuca

SEQ ID NO: 1473112 - RNA, 19 nt, Artificial Sequence
  Description of Artificial Sequence: Synthetic oligonucleotide
  Sense strand starting at position 2688 of SEQ ID NO: 1244210
aggguuugauugcuaauaa

SEQ ID NO: 1473113 - RNA, 19 nt, Artificial Sequence
  Description of Artificial Sequence: Synthetic oligonucleotide
  Antisense strand to SEQ ID NO: 1473112
uuauuagcaaucaaacccu

SEQ ID NO: 1473114 - RNA, 19 nt, Artificial Sequence
  Description of Artificial Sequence: Synthetic oligonucleotide
  Sense strand starting at position 2779 of SEQ ID NO: 1244210
ugguguuugcuugugguau

SEQ ID NO: 1473115 - RNA, 19 nt, Artificial Sequence
  Description of Artificial Sequence: Synthetic oligonucleotide
  Antisense strand to SEQ ID NO: 1473114
auaccacaagcaaacacca

SEQ ID NO: 1473116 - RNA, 19 nt, Artificial Sequence
  Description of Artificial Sequence: Synthetic oligonucleotide
  Sense strand starting at position 2826 of SEQ ID NO: 1244210
ugguuuauacuggauguuu

SEQ ID NO: 1473117 - RNA, 19 nt, Artificial Sequence
  Description of Artificial Sequence: Synthetic oligonucleotide
  Antisense strand to SEQ ID NO: 1473116
aaacauccaguauaaacca

SEQ ID NO: 1473118 - RNA, 19 nt, Artificial Sequence
  Description of Artificial Sequence: Synthetic oligonucleotide
  Sense strand starting at position 2828 of SEQ ID NO: 1244210
guuuauacuggauguuuaa

SEQ ID NO: 1473119 - RNA, 19 nt, Artificial Sequence
  Description of Artificial Sequence: Synthetic oligonucleotide
  Antisense strand to SEQ ID NO: 1473118
uuaaacauccaguauaaac

SEQ ID NO: 1473120 - RNA, 19 nt, Artificial Sequence
  Description of Artificial Sequence: Synthetic oligonucleotide
  Sense strand starting at position 2882 of SEQ ID NO: 1244210
aggaauacuuacucagcau

SEQ ID NO: 1473121 - RNA, 19 nt, Artificial Sequence
  Description of Artificial Sequence: Synthetic oligonucleotide
  Antisense strand to SEQ ID NO: 1473120
augcugaguaaguauuccu

SEQ ID NO: 1473122 - RNA, 19 nt, Artificial Sequence
  Description of Artificial Sequence: Synthetic oligonucleotide
  Sense strand starting at position 2921 of SEQ ID NO: 1244210
cugcuaauccuuuauggag

SEQ ID NO: 1473123 - RNA, 19 nt, Artificial Sequence
  Description of Artificial Sequence: Synthetic oligonucleotide
  Antisense strand to SEQ ID NO: 1473122
cuccauaaaggauuagcag

SEQ ID NO: 1473124 - RNA, 19 nt, Artificial Sequence
  Description of Artificial Sequence: Synthetic oligonucleotide
  Sense strand starting at position 3095 of SEQ ID NO: 1244210
gcuacauagguauacaagu

SEQ ID NO: 1473125 - RNA, 19 nt, Artificial Sequence
  Description of Artificial Sequence: Synthetic oligonucleotide
  Antisense strand to SEQ ID NO: 1473124
acuuguauaccuauguagc

SEQ ID NO: 1473126 - RNA, 19 nt, Artificial Sequence
  Description of Artificial Sequence: Synthetic oligonucleotide
  Sense strand starting at position 3532 of SEQ ID NO: 1244210
uccuuuggguauguaucaa

SEQ ID NO: 1473127 - RNA, 19 nt, Artificial Sequence
  Description of Artificial Sequence: Synthetic oligonucleotide
  Antisense strand to SEQ ID NO: 1473126
uugauacauacccaaagga

SEQ ID NO: 1473128 - RNA, 19 nt, Artificial Sequence
  Description of Artificial Sequence: Synthetic oligonucleotide
  Sense strand starting at position 3540 of SEQ ID NO: 1244210
guauguaucaaguaauagg

SEQ ID NO: 1473129 - RNA, 19 nt, Artificial Sequence
  Description of Artificial Sequence: Synthetic oligonucleotide
  Antisense strand to SEQ ID NO: 1473128
ccuauuacuugauacauac

SEQ ID NO: 1473130 - RNA, 19 nt, Artificial Sequence
  Description of Artificial Sequence: Synthetic oligonucleotide
  Sense strand starting at position 3583 of SEQ ID NO: 1244210
gguucuugauccuuaagaa

SEQ ID NO: 1473131 - RNA, 19 nt, Artificial Sequence
  Description of Artificial Sequence: Synthetic oligonucleotide
  Antisense strand to SEQ ID NO: 1473130
uucuuaaggaucaagaacc

SEQ ID NO: 1473132 - RNA, 19 nt, Artificial Sequence
  Description of Artificial Sequence: Synthetic oligonucleotide
  Sense strand starting at position 3617 of SEQ ID NO: 1244210
ucugcauugguugaacuaa

SEQ ID NO: 1473133 - RNA, 19 nt, Artificial Sequence
  Description of Artificial Sequence: Synthetic oligonucleotide
  Antisense strand to SEQ ID NO: 1473132
uuaguucaaccaaugcaga

SEQ ID NO: 1473134 - RNA, 19 nt, Artificial Sequence
  Description of Artificial Sequence: Synthetic oligonucleotide
  Sense strand starting at position 3835 of SEQ ID NO: 1244210
ugagaagugucuuucuaua

SEQ ID NO: 1473135 - RNA, 19 nt, Artificial Sequence
  Description of Artificial Sequence: Synthetic oligonucleotide
  Antisense strand to SEQ ID NO: 1473134
uauagaaagacacuucuca

SEQ ID NO: 1473136 - RNA, 19 nt, Artificial Sequence
  Description of Artificial Sequence: Synthetic oligonucleotide
  Sense strand starting at position 3837 of SEQ ID NO: 1244210
agaagugucuuucuauauc

SEQ ID NO: 1473137 - RNA, 19 nt, Artificial Sequence
  Description of Artificial Sequence: Synthetic oligonucleotide
  Antisense strand to SEQ ID NO: 1473136
gauauagaaagacacuucu

SEQ ID NO: 1473138 - RNA, 19 nt, Artificial Sequence
  Description of Artificial Sequence: Synthetic oligonucleotide
  Sense strand starting at position 3840 of SEQ ID NO: 1244210
agugucuuucuauauccuu

SEQ ID NO: 1473139 - RNA, 19 nt, Artificial Sequence
  Description of Artificial Sequence: Synthetic oligonucleotide
  Antisense strand to SEQ ID NO: 1473138
aaggauauagaaagacacu

SEQ ID NO: 1473140 - RNA, 19 nt, Artificial Sequence
  Description of Artificial Sequence: Synthetic oligonucleotide
  Sense strand starting at position 33 of SEQ ID NO: 1244211
uuucuucugagauguagag

SEQ ID NO: 1473141 - RNA, 19 nt, Artificial Sequence
  Description of Artificial Sequence: Synthetic oligonucleotide
  Antisense strand to SEQ ID NO: 1473140
cucuacaucucagaagaaa

SEQ ID NO: 1473142 - RNA, 19 nt, Artificial Sequence
  Description of Artificial Sequence: Synthetic oligonucleotide
  Sense strand starting at position 149 of SEQ ID NO: 1244211
caguaauuccacuggauga

SEQ ID NO: 1473143 - RNA, 19 nt, Artificial Sequence
  Description of Artificial Sequence: Synthetic oligonucleotide
  Antisense strand to SEQ ID NO: 1473142
ucauccaguggaauuacug

SEQ ID NO: 1473144 - RNA, 19 nt, Artificial Sequence
  Description of Artificial Sequence: Synthetic oligonucleotide
  Sense strand starting at position 241 of SEQ ID NO: 1244211
cuccauugugaaggauaau

SEQ ID NO: 1473145 - RNA, 19 nt, Artificial Sequence
  Description of Artificial Sequence: Synthetic oligonucleotide
  Antisense strand to SEQ ID NO: 1473144
auuauccuucacaauggag

SEQ ID NO: 1473146 - RNA, 19 nt, Artificial Sequence
  Description of Artificial Sequence: Synthetic oligonucleotide
  Sense strand starting at position 481 of SEQ ID NO: 1244211
gaacauauguaagugaguu

SEQ ID NO: 1473147 - RNA, 19 nt, Artificial Sequence
  Description of Artificial Sequence: Synthetic oligonucleotide
  Antisense strand to SEQ ID NO: 1473146
aacucacuuacauauguuc

SEQ ID NO: 1473148 - RNA, 19 nt, Artificial Sequence
  Description of Artificial Sequence: Synthetic oligonucleotide
  Sense strand starting at position 518 of SEQ ID NO: 1244211
uuauuacucccugggcaga

SEQ ID NO: 1473149 - RNA, 19 nt, Artificial Sequence
  Description of Artificial Sequence: Synthetic oligonucleotide
  Antisense strand to SEQ ID NO: 1473148
ucugcccagggaguaauaa

SEQ ID NO: 1473150 - RNA, 19 nt, Artificial Sequence
  Description of Artificial Sequence: Synthetic oligonucleotide
  Sense strand starting at position 549 of SEQ ID NO: 1244211
uuuagugauucucuuuaca

SEQ ID NO: 1473151 - RNA, 19 nt, Artificial Sequence
  Description of Artificial Sequence: Synthetic oligonucleotide
  Antisense strand to SEQ ID NO: 1473150
uguaaagagaaucacuaaa

SEQ ID NO: 1473152 - RNA, 19 nt, Artificial Sequence
  Description of Artificial Sequence: Synthetic oligonucleotide
  Sense strand starting at position 552 of SEQ ID NO: 1244211
agugauucucuuuacacau

SEQ ID NO: 1473153 - RNA, 19 nt, Artificial Sequence
  Description of Artificial Sequence: Synthetic oligonucleotide
  Antisense strand to SEQ ID NO: 1473152
auguguaaagagaaucacu

SEQ ID NO: 1473154 - RNA, 19 nt, Artificial Sequence
  Description of Artificial Sequence: Synthetic oligonucleotide
  Sense strand starting at position 820 of SEQ ID NO: 1244211
uccuucugucuggaacuaa

SEQ ID NO: 1473155 - RNA, 19 nt, Artificial Sequence
  Description of Artificial Sequence: Synthetic oligonucleotide
  Antisense strand to SEQ ID NO: 1473154
uuaguuccagacagaagga

SEQ ID NO: 1473156 - RNA, 19 nt, Artificial Sequence
  Description of Artificial Sequence: Synthetic oligonucleotide
  Sense strand starting at position 831 of SEQ ID NO: 1244211
ggaacuaauuucuaauugu

SEQ ID NO: 1473157 - RNA, 19 nt, Artificial Sequence
  Description of Artificial Sequence: Synthetic oligonucleotide
  Antisense strand to SEQ ID NO: 1473156
acaauuagaaauuaguucc

SEQ ID NO: 1473158 - RNA, 19 nt, Artificial Sequence
  Description of Artificial Sequence: Synthetic oligonucleotide
  Sense strand starting at position 855 of SEQ ID NO: 1244211
auuuguuacugguuauugu

SEQ ID NO: 1473159 - RNA, 19 nt, Artificial Sequence
  Description of Artificial Sequence: Synthetic oligonucleotide
  Antisense strand to SEQ ID NO: 1473158
acaauaaccaguaacaaau

SEQ ID NO: 1473160 - RNA, 19 nt, Artificial Sequence
  Description of Artificial Sequence: Synthetic oligonucleotide
  Sense strand starting at position 895 of SEQ ID NO: 1244211
uuuggucuugauuaauuag

SEQ ID NO: 1473161 - RNA, 19 nt, Artificial Sequence
  Description of Artificial Sequence: Synthetic oligonucleotide
  Antisense strand to SEQ ID NO: 1473160
cuaauuaaucaagaccaaa

SEQ ID NO: 1473162 - RNA, 19 nt, Artificial Sequence
  Description of Artificial Sequence: Synthetic oligonucleotide
  Sense strand starting at position 898 of SEQ ID NO: 1244211
ggucuugauuaauuaggua

SEQ ID NO: 1473163 - RNA, 19 nt, Artificial Sequence
  Description of Artificial Sequence: Synthetic oligonucleotide
  Antisense strand to SEQ ID NO: 1473162
uaccuaauuaaucaagacc

SEQ ID NO: 1473164 - RNA, 19 nt, Artificial Sequence
  Description of Artificial Sequence: Synthetic oligonucleotide
  Sense strand starting at position 903 of SEQ ID NO: 1244211
ugauuaauuagguaguguu

SEQ ID NO: 1473165 - RNA, 19 nt, Artificial Sequence
  Description of Artificial Sequence: Synthetic oligonucleotide
  Antisense strand to SEQ ID NO: 1473164
aacacuaccuaauuaauca

SEQ ID NO: 1473166 - RNA, 19 nt, Artificial Sequence
  Description of Artificial Sequence: Synthetic oligonucleotide
  Sense strand starting at position 913 of SEQ ID NO: 1244211
gguaguguuguauaaugau

SEQ ID NO: 1473167 - RNA, 19 nt, Artificial Sequence
  Description of Artificial Sequence: Synthetic oligonucleotide
  Antisense strand to SEQ ID NO: 1473166
aucauuauacaacacuacc

SEQ ID NO: 1473168 - RNA, 19 nt, Artificial Sequence
  Description of Artificial Sequence: Synthetic oligonucleotide
  Sense strand starting at position 919 of SEQ ID NO: 1244211
guuguauaaugaucuauag

SEQ ID NO: 1473169 - RNA, 19 nt, Artificial Sequence
  Description of Artificial Sequence: Synthetic oligonucleotide
  Antisense strand to SEQ ID NO: 1473168
cuauagaucauuauacaac

SEQ ID NO: 1473170 - RNA, 19 nt, Artificial Sequence
  Description of Artificial Sequence: Synthetic oligonucleotide
  Sense strand starting at position 943 of SEQ ID NO: 1244211
gucuccaucguagaauaua

SEQ ID NO: 1473171 - RNA, 19 nt, Artificial Sequence
  Description of Artificial Sequence: Synthetic oligonucleotide
  Antisense strand to SEQ ID NO: 1473170
uauauucuacgauggagac

SEQ ID NO: 1473172 - RNA, 19 nt, Artificial Sequence
  Description of Artificial Sequence: Synthetic oligonucleotide
  Sense strand starting at position 1147 of SEQ ID NO: 1244211
gcagguaauguauaagacu

SEQ ID NO: 1473173 - RNA, 19 nt, Artificial Sequence
  Description of Artificial Sequence: Synthetic oligonucleotide
  Antisense strand to SEQ ID NO: 1473172
agucuuauacauuaccugc

SEQ ID NO: 1473174 - RNA, 19 nt, Artificial Sequence
  Description of Artificial Sequence: Synthetic oligonucleotide
  Sense strand starting at position 1275 of SEQ ID NO: 1244211
uaguguuaucaguaccaca

SEQ ID NO: 1473175 - RNA, 19 nt, Artificial Sequence
  Description of Artificial Sequence: Synthetic oligonucleotide
  Antisense strand to SEQ ID NO: 1473174
ugugguacugauaacacua

SEQ ID NO: 1473176 - RNA, 19 nt, Artificial Sequence
  Description of Artificial Sequence: Synthetic oligonucleotide
  Sense strand starting at position 1490 of SEQ ID NO: 1244211
cccagauaguugcuaauca

SEQ ID NO: 1473177 - RNA, 19 nt, Artificial Sequence
  Description of Artificial Sequence: Synthetic oligonucleotide
  Antisense strand to SEQ ID NO: 1473176
ugauuagcaacuaucuggg

SEQ ID NO: 1473178 - RNA, 19 nt, Artificial Sequence
  Description of Artificial Sequence: Synthetic oligonucleotide
  Sense strand starting at position 1502 of SEQ ID NO: 1244211
cuaaucacccgugacaauu

SEQ ID NO: 1473179 - RNA, 19 nt, Artificial Sequence
  Description of Artificial Sequence: Synthetic oligonucleotide
  Antisense strand to SEQ ID NO: 1473178
aauugucacgggugauuag

SEQ ID NO: 1473180 - RNA, 19 nt, Artificial Sequence
  Description of Artificial Sequence: Synthetic oligonucleotide
  Sense strand starting at position 1526 of SEQ ID NO: 1244211
agcauaucaucaccagaag

SEQ ID NO: 1473181 - RNA, 19 nt, Artificial Sequence
  Description of Artificial Sequence: Synthetic oligonucleotide
  Antisense strand to SEQ ID NO: 1473180
cuucuggugaugauaugcu

SEQ ID NO: 1473182 - RNA, 19 nt, Artificial Sequence
  Description of Artificial Sequence: Synthetic oligonucleotide
  Sense strand starting at position 1546 of SEQ ID NO: 1244211
aaggaacauugggaauaga

SEQ ID NO: 1473183 - RNA, 19 nt, Artificial Sequence
  Description of Artificial Sequence: Synthetic oligonucleotide
  Antisense strand to SEQ ID NO: 1473182
ucuauucccaauguuccuu

SEQ ID NO: 1473184 - RNA, 19 nt, Artificial Sequence
  Description of Artificial Sequence: Synthetic oligonucleotide
  Sense strand starting at position 1889 of SEQ ID NO: 1244211
auucguuuccuggaugaac

SEQ ID NO: 1473185 - RNA, 19 nt, Artificial Sequence
  Description of Artificial Sequence: Synthetic oligonucleotide
  Antisense strand to SEQ ID NO: 1473184
guucauccaggaaacgaau

SEQ ID NO: 1473186 - RNA, 19 nt, Artificial Sequence
  Description of Artificial Sequence: Synthetic oligonucleotide
  Sense strand starting at position 1913 of SEQ ID NO: 1244211
ugucaagacucagcugaaa

SEQ ID NO: 1473187 - RNA, 19 nt, Artificial Sequence
  Description of Artificial Sequence: Synthetic oligonucleotide
  Antisense strand to SEQ ID NO: 1473186
uuucagcugagucuugaca

SEQ ID NO: 1473188 - RNA, 19 nt, Artificial Sequence
  Description of Artificial Sequence: Synthetic oligonucleotide
  Sense strand starting at position 2022 of SEQ ID NO: 1244211
auuugugcgacagguuaua

SEQ ID NO: 1473189 - RNA, 19 nt, Artificial Sequence
  Description of Artificial Sequence: Synthetic oligonucleotide
  Antisense strand to SEQ ID NO: 1473188
uauaaccugucgcacaaau

SEQ ID NO: 1473190 - RNA, 19 nt, Artificial Sequence
  Description of Artificial Sequence: Synthetic oligonucleotide
  Sense strand starting at position 2097 of SEQ ID NO: 1244211
gcagcaacuugguugauuu

SEQ ID NO: 1473191 - RNA, 19 nt, Artificial Sequence
  Description of Artificial Sequence: Synthetic oligonucleotide
  Antisense strand to SEQ ID NO: 1473190
aaaucaaccaaguugcugc

SEQ ID NO: 1473192 - RNA, 19 nt, Artificial Sequence
  Description of Artificial Sequence: Synthetic oligonucleotide
  Sense strand starting at position 2269 of SEQ ID NO: 1244211
ggaugaucugggugacccu

SEQ ID NO: 1473193 - RNA, 19 nt, Artificial Sequence
  Description of Artificial Sequence: Synthetic oligonucleotide
  Antisense strand to SEQ ID NO: 1473192
agggucacccagaucaucc

SEQ ID NO: 1473194 - RNA, 19 nt, Artificial Sequence
  Description of Artificial Sequence: Synthetic oligonucleotide
  Sense strand starting at position 2305 of SEQ ID NO: 1244211
auugaauaacuuggucacu

SEQ ID NO: 1473195 - RNA, 19 nt, Artificial Sequence
  Description of Artificial Sequence: Synthetic oligonucleotide
  Antisense strand to SEQ ID NO: 1473194
agugaccaaguuauucaau

SEQ ID NO: 1473196 - RNA, 19 nt, Artificial Sequence
  Description of Artificial Sequence: Synthetic oligonucleotide
  Sense strand starting at position 2307 of SEQ ID NO: 1244211
ugaauaacuuggucacucu

SEQ ID NO: 1473197 - RNA, 19 nt, Artificial Sequence
  Description of Artificial Sequence: Synthetic oligonucleotide
  Antisense strand to SEQ ID NO: 1473196
agagugaccaaguuauuca

SEQ ID NO: 1473198 - RNA, 19 nt, Artificial Sequence
  Description of Artificial Sequence: Synthetic oligonucleotide
  Sense strand starting at position 2392 of SEQ ID NO: 1244211
ccaucuauguucuugagaa

SEQ ID NO: 1473199 - RNA, 19 nt, Artificial Sequence
  Description of Artificial Sequence: Synthetic oligonucleotide
  Antisense strand to SEQ ID NO: 1473198
uucucaagaacauagaugg

SEQ ID NO: 1473200 - RNA, 19 nt, Artificial Sequence
  Description of Artificial Sequence: Synthetic oligonucleotide
  Sense strand starting at position 2617 of SEQ ID NO: 1244211
guucguucucaggaaaucu

SEQ ID NO: 1473201 - RNA, 19 nt, Artificial Sequence
  Description of Artificial Sequence: Synthetic oligonucleotide
  Antisense strand to SEQ ID NO: 1473200
agauuuccugagaacgaac

SEQ ID NO: 1473202 - RNA, 19 nt, Artificial Sequence
  Description of Artificial Sequence: Synthetic oligonucleotide
  Sense strand starting at position 2863 of SEQ ID NO: 1244211
ugggaaauguuuccucuuu

SEQ ID NO: 1473203 - RNA, 19 nt, Artificial Sequence
  Description of Artificial Sequence: Synthetic oligonucleotide
  Antisense strand to SEQ ID NO: 1473202
aaagaggaaacauuuccca

SEQ ID NO: 1473204 - RNA, 19 nt, Artificial Sequence
  Description of Artificial Sequence: Synthetic oligonucleotide
  Sense strand starting at position 2864 of SEQ ID NO: 1244211
gggaaauguuuccucuuua

SEQ ID NO: 1473205 - RNA, 19 nt, Artificial Sequence
  Description of Artificial Sequence: Synthetic oligonucleotide
  Antisense strand to SEQ ID NO: 1473204
uaaagaggaaacauuuccc

SEQ ID NO: 1473206 - RNA, 19 nt, Artificial Sequence
  Description of Artificial Sequence: Synthetic oligonucleotide
  Sense strand starting at position 2865 of SEQ ID NO: 1244211
ggaaauguuuccucuuuau

SEQ ID NO: 1473207 - RNA, 19 nt, Artificial Sequence
  Description of Artificial Sequence: Synthetic oligonucleotide
  Antisense strand to SEQ ID NO: 1473206
auaaagaggaaacauuucc

SEQ ID NO: 1473208 - RNA, 19 nt, Artificial Sequence
  Description of Artificial Sequence: Synthetic oligonucleotide
  Sense strand starting at position 2885 of SEQ ID NO: 1244211
ucaugaaauucuguaagau

SEQ ID NO: 1473209 - RNA, 19 nt, Artificial Sequence
  Description of Artificial Sequence: Synthetic oligonucleotide
  Antisense strand to SEQ ID NO: 1473208
aucuuacagaauuucauga

SEQ ID NO: 1473210 - RNA, 19 nt, Artificial Sequence
  Description of Artificial Sequence: Synthetic oligonucleotide
  Sense strand starting at position 2958 of SEQ ID NO: 1244211
aggagucucccaugugaaa

SEQ ID NO: 1473211 - RNA, 19 nt, Artificial Sequence
  Description of Artificial Sequence: Synthetic oligonucleotide
  Antisense strand to SEQ ID NO: 1473210
uuucacaugggagacuccu

SEQ ID NO: 1473212 - RNA, 19 nt, Artificial Sequence
  Description of Artificial Sequence: Synthetic oligonucleotide
  Sense strand starting at position 3114 of SEQ ID NO: 1244211
gaaggcuugucucuacuaa

SEQ ID NO: 1473213 - RNA, 19 nt, Artificial Sequence
  Description of Artificial Sequence: Synthetic oligonucleotide
  Antisense strand to SEQ ID NO: 1473212
uuaguagagacaagccuuc

SEQ ID NO: 1473214 - RNA, 19 nt, Artificial Sequence
  Description of Artificial Sequence: Synthetic oligonucleotide
  Sense strand starting at position 3443 of SEQ ID NO: 1244211
uugugugaaaguugcauuu

SEQ ID NO: 1473215 - RNA, 19 nt, Artificial Sequence
  Description of Artificial Sequence: Synthetic oligonucleotide
  Antisense strand to SEQ ID NO: 1473214
aaaugcaacuuucacacaa

SEQ ID NO: 1473216 - RNA, 19 nt, Artificial Sequence
  Description of Artificial Sequence: Synthetic oligonucleotide
  Sense strand starting at position 3545 of SEQ ID NO: 1244211
aucugcagugucuauaaau

SEQ ID NO: 1473217 - RNA, 19 nt, Artificial Sequence
  Description of Artificial Sequence: Synthetic oligonucleotide
  Antisense strand to SEQ ID NO: 1473216
auuuauagacacugcagau

SEQ ID NO: 1473218 - RNA, 19 nt, Artificial Sequence
  Description of Artificial Sequence: Synthetic oligonucleotide
  Sense strand starting at position 3617 of SEQ ID NO: 1244211
ccaucaaucuggcuugaug

SEQ ID NO: 1473219 - RNA, 19 nt, Artificial Sequence
  Description of Artificial Sequence: Synthetic oligonucleotide
  Antisense strand to SEQ ID NO: 1473218
caucaagccagauugaugg

SEQ ID NO: 1473220 - RNA, 19 nt, Artificial Sequence
  Description of Artificial Sequence: Synthetic oligonucleotide
  Sense strand starting at position 72 of SEQ ID NO: 1244212
ggacucacuuuauccugaa

SEQ ID NO: 1473221 - RNA, 19 nt, Artificial Sequence
  Description of Artificial Sequence: Synthetic oligonucleotide
  Antisense strand to SEQ ID NO: 1473220
uucaggauaaagugagucc

SEQ ID NO: 1473222 - RNA, 19 nt, Artificial Sequence
  Description of Artificial Sequence: Synthetic oligonucleotide
  Sense strand starting at position 112 of SEQ ID NO: 1244212
guugucaauguccaggaga

SEQ ID NO: 1473223 - RNA, 19 nt, Artificial Sequence
  Description of Artificial Sequence: Synthetic oligonucleotide
  Antisense strand to SEQ ID NO: 1473222
ucuccuggacauugacaac

SEQ ID NO: 1473224 - RNA, 19 nt, Artificial Sequence
  Description of Artificial Sequence: Synthetic oligonucleotide
  Sense strand starting at position 174 of SEQ ID NO: 1244212
aggacacagccaugauauc

SEQ ID NO: 1473225 - RNA, 19 nt, Artificial Sequence
  Description of Artificial Sequence: Synthetic oligonucleotide
  Antisense strand to SEQ ID NO: 1473224
gauaucauggcuguguccu

SEQ ID NO: 1473226 - RNA, 19 nt, Artificial Sequence
  Description of Artificial Sequence: Synthetic oligonucleotide
  Sense strand starting at position 496 of SEQ ID NO: 1244212
ggcuuauggcaaugggaga

SEQ ID NO: 1473227 - RNA, 19 nt, Artificial Sequence
  Description of Artificial Sequence: Synthetic oligonucleotide
  Antisense strand to SEQ ID NO: 1473226
ucucccauugccauaagcc

SEQ ID NO: 1473228 - RNA, 19 nt, Artificial Sequence
  Description of Artificial Sequence: Synthetic oligonucleotide
  Sense strand starting at position 497 of SEQ ID NO: 1244212
gcuuauggcaaugggagau

SEQ ID NO: 1473229 - RNA, 19 nt, Artificial Sequence
  Description of Artificial Sequence: Synthetic oligonucleotide
  Antisense strand to SEQ ID NO: 1473228
aucucccauugccauaagc

SEQ ID NO: 1473230 - RNA, 19 nt, Artificial Sequence
  Description of Artificial Sequence: Synthetic oligonucleotide
  Sense strand starting at position 550 of SEQ ID NO: 1244212
ugaauugggcccugaagga

SEQ ID NO: 1473231 - RNA, 19 nt, Artificial Sequence
  Description of Artificial Sequence: Synthetic oligonucleotide
  Antisense strand to SEQ ID NO: 1473230
uccuucagggcccaauuca

SEQ ID NO: 1473232 - RNA, 19 nt, Artificial Sequence
  Description of Artificial Sequence: Synthetic oligonucleotide
  Sense strand starting at position 560 of SEQ ID NO: 1244212
ccugaaggauggcuaagau

SEQ ID NO: 1473233 - RNA, 19 nt, Artificial Sequence
  Description of Artificial Sequence: Synthetic oligonucleotide
  Antisense strand to SEQ ID NO: 1473232
aucuuagccauccuucagg

SEQ ID NO: 1473234 - RNA, 19 nt, Artificial Sequence
  Description of Artificial Sequence: Synthetic oligonucleotide
  Sense strand starting at position 631 of SEQ ID NO: 1244212
cagagacaugcaggaguua

SEQ ID NO: 1473235 - RNA, 19 nt, Artificial Sequence
  Description of Artificial Sequence: Synthetic oligonucleotide
  Antisense strand to SEQ ID NO: 1473234
uaacuccugcaugucucug

SEQ ID NO: 1473236 - RNA, 19 nt, Artificial Sequence
  Description of Artificial Sequence: Synthetic oligonucleotide
  Sense strand starting at position 761 of SEQ ID NO: 1244212
ugaacugaguggcugaaua

SEQ ID NO: 1473237 - RNA, 19 nt, Artificial Sequence
  Description of Artificial Sequence: Synthetic oligonucleotide
  Antisense strand to SEQ ID NO: 1473236
uauucagccacucaguuca

SEQ ID NO: 1473238 - RNA, 19 nt, Artificial Sequence
  Description of Artificial Sequence: Synthetic oligonucleotide
  Sense strand starting at position 788 of SEQ ID NO: 1244212
gauagauagacaugugggu

SEQ ID NO: 1473239 - RNA, 19 nt, Artificial Sequence
  Description of Artificial Sequence: Synthetic oligonucleotide
  Antisense strand to SEQ ID NO: 1473238
acccacaugucuaucuauc

SEQ ID NO: 1473240 - RNA, 19 nt, Artificial Sequence
  Description of Artificial Sequence: Synthetic oligonucleotide
  Sense strand starting at position 1146 of SEQ ID NO: 1244212
acaaguuuguuucugauga

SEQ ID NO: 1473241 - RNA, 19 nt, Artificial Sequence
  Description of Artificial Sequence: Synthetic oligonucleotide
  Antisense strand to SEQ ID NO: 1473240
ucaucagaaacaaacuugu

SEQ ID NO: 1473242 - RNA, 19 nt, Artificial Sequence
  Description of Artificial Sequence: Synthetic oligonucleotide
  Sense strand starting at position 1199 of SEQ ID NO: 1244212
auuaucugagcuuagaguu

SEQ ID NO: 1473243 - RNA, 19 nt, Artificial Sequence
  Description of Artificial Sequence: Synthetic oligonucleotide
  Antisense strand to SEQ ID NO: 1473242
aacucuaagcucagauaau

SEQ ID NO: 1473244 - RNA, 19 nt, Artificial Sequence
  Description of Artificial Sequence: Synthetic oligonucleotide
  Sense strand starting at position 1288 of SEQ ID NO: 1244212
ccuaccugguccuugagau

SEQ ID NO: 1473245 - RNA, 19 nt, Artificial Sequence
  Description of Artificial Sequence: Synthetic oligonucleotide
  Antisense strand to SEQ ID NO: 1473244
aucucaaggaccagguagg

SEQ ID NO: 1473246 - RNA, 19 nt, Artificial Sequence
  Description of Artificial Sequence: Synthetic oligonucleotide
  Sense strand starting at position 1289 of SEQ ID NO: 1244212
cuaccugguccuugagauc

SEQ ID NO: 1473247 - RNA, 19 nt, Artificial Sequence
  Description of Artificial Sequence: Synthetic oligonucleotide
  Antisense strand to SEQ ID NO: 1473246
gaucucaaggaccagguag

SEQ ID NO: 1473248 - RNA, 19 nt, Artificial Sequence
  Description of Artificial Sequence: Synthetic oligonucleotide
  Sense strand starting at position 1301 of SEQ ID NO: 1244212
ugagaucaucaauaguguu

SEQ ID NO: 1473249 - RNA, 19 nt, Artificial Sequence
  Description of Artificial Sequence: Synthetic oligonucleotide
  Antisense strand to SEQ ID NO: 1473248
aacacuauugaugaucuca

SEQ ID NO: 1473250 - RNA, 19 nt, Artificial Sequence
  Description of Artificial Sequence: Synthetic oligonucleotide
  Sense strand starting at position 1328 of SEQ ID NO: 1244212
gggaguaguucuucuggau

SEQ ID NO: 1473251 - RNA, 19 nt, Artificial Sequence
  Description of Artificial Sequence: Synthetic oligonucleotide
  Antisense strand to SEQ ID NO: 1473250
auccagaagaacuacuccc

SEQ ID NO: 1473252 - RNA, 19 nt, Artificial Sequence
  Description of Artificial Sequence: Synthetic oligonucleotide
  Sense strand starting at position 1368 of SEQ ID NO: 1244212
guaccaauccuggaucuua

SEQ ID NO: 1473253 - RNA, 19 nt, Artificial Sequence
  Description of Artificial Sequence: Synthetic oligonucleotide
  Antisense strand to SEQ ID NO: 1473252
uaagauccaggauugguac

SEQ ID NO: 1473254 - RNA, 19 nt, Artificial Sequence
  Description of Artificial Sequence: Synthetic oligonucleotide
  Sense strand starting at position 2190 of SEQ ID NO: 1244212
gugggauaauuugaugaca

SEQ ID NO: 1473255 - RNA, 19 nt, Artificial Sequence
  Description of Artificial Sequence: Synthetic oligonucleotide
  Antisense strand to SEQ ID NO: 1473254
ugucaucaaauuaucccac

SEQ ID NO: 1473256 - RNA, 19 nt, Artificial Sequence
  Description of Artificial Sequence: Synthetic oligonucleotide
  Sense strand starting at position 2192 of SEQ ID NO: 1244212
gggauaauuugaugacauu

SEQ ID NO: 1473257 - RNA, 19 nt, Artificial Sequence
  Description of Artificial Sequence: Synthetic oligonucleotide
  Antisense strand to SEQ ID NO: 1473256
aaugucaucaaauuauccc

SEQ ID NO: 1473258 - RNA, 19 nt, Artificial Sequence
  Description of Artificial Sequence: Synthetic oligonucleotide
  Sense strand starting at position 2255 of SEQ ID NO: 1244212
gaccuagauccuggagucu

SEQ ID NO: 1473259 - RNA, 19 nt, Artificial Sequence
  Description of Artificial Sequence: Synthetic oligonucleotide
  Antisense strand to SEQ ID NO: 1473258
agacuccaggaucuagguc

SEQ ID NO: 1473260 - RNA, 19 nt, Artificial Sequence
  Description of Artificial Sequence: Synthetic oligonucleotide
  Sense strand starting at position 2342 of SEQ ID NO: 1244212
agucaccuccucuauugau

SEQ ID NO: 1473261 - RNA, 19 nt, Artificial Sequence
  Description of Artificial Sequence: Synthetic oligonucleotide
  Antisense strand to SEQ ID NO: 1473260
aucaauagaggaggugacu

SEQ ID NO: 1473262 - RNA, 19 nt, Artificial Sequence
  Description of Artificial Sequence: Synthetic oligonucleotide
  Sense strand starting at position 2352 of SEQ ID NO: 1244212
ucuauugauggucauuacu

SEQ ID NO: 1473263 - RNA, 19 nt, Artificial Sequence
  Description of Artificial Sequence: Synthetic oligonucleotide
  Antisense strand to SEQ ID NO: 1473262
aguaaugaccaucaauaga

SEQ ID NO: 1473264 - RNA, 19 nt, Artificial Sequence
  Description of Artificial Sequence: Synthetic oligonucleotide
  Sense strand starting at position 2789 of SEQ ID NO: 1244212
uggaauugaccuugguuga

SEQ ID NO: 1473265 - RNA, 19 nt, Artificial Sequence
  Description of Artificial Sequence: Synthetic oligonucleotide
  Antisense strand to SEQ ID NO: 1473264
ucaaccaaggucaauucca

SEQ ID NO: 1473266 - RNA, 19 nt, Artificial Sequence
  Description of Artificial Sequence: Synthetic oligonucleotide
  Sense strand starting at position 2837 of SEQ ID NO: 1244212
gauacagagaugugugacu

SEQ ID NO: 1473267 - RNA, 19 nt, Artificial Sequence
  Description of Artificial Sequence: Synthetic oligonucleotide
  Antisense strand to SEQ ID NO: 1473266
agucacacaucucuguauc

SEQ ID NO: 1473268 - RNA, 19 nt, Artificial Sequence
  Description of Artificial Sequence: Synthetic oligonucleotide
  Sense strand starting at position 2839 of SEQ ID NO: 1244212
uacagagaugugugacuua

SEQ ID NO: 1473269 - RNA, 19 nt, Artificial Sequence
  Description of Artificial Sequence: Synthetic oligonucleotide
  Antisense strand to SEQ ID NO: 1473268
uaagucacacaucucugua

SEQ ID NO: 1473270 - RNA, 19 nt, Artificial Sequence
  Description of Artificial Sequence: Synthetic oligonucleotide
  Sense strand starting at position 2884 of SEQ ID NO: 1244212
guauauucuggucaccaag

SEQ ID NO: 1473271 - RNA, 19 nt, Artificial Sequence
  Description of Artificial Sequence: Synthetic oligonucleotide
  Antisense strand to SEQ ID NO: 1473270
cuuggugaccagaauauac

SEQ ID NO: 1473272 - RNA, 19 nt, Artificial Sequence
  Description of Artificial Sequence: Synthetic oligonucleotide
  Sense strand starting at position 2906 of SEQ ID NO: 1244212
agaagagaaugguaaagaa

SEQ ID NO: 1473273 - RNA, 19 nt, Artificial Sequence
  Description of Artificial Sequence: Synthetic oligonucleotide
  Antisense strand to SEQ ID NO: 1473272
uucuuuaccauucucuucu

SEQ ID NO: 1473274 - RNA, 19 nt, Artificial Sequence
  Description of Artificial Sequence: Synthetic oligonucleotide
  Sense strand starting at position 2984 of SEQ ID NO: 1244212
ugacuuugauaaguuacuu

SEQ ID NO: 1473275 - RNA, 19 nt, Artificial Sequence
  Description of Artificial Sequence: Synthetic oligonucleotide
  Antisense strand to SEQ ID NO: 1473274
aaguaacuuaucaaaguca

SEQ ID NO: 1473276 - RNA, 19 nt, Artificial Sequence
  Description of Artificial Sequence: Synthetic oligonucleotide
  Sense strand starting at position 3038 of SEQ ID NO: 1244212
gguugauaugaguaguuug

SEQ ID NO: 1473277 - RNA, 19 nt, Artificial Sequence
  Description of Artificial Sequence: Synthetic oligonucleotide
  Antisense strand to SEQ ID NO: 1473276
caaacuacucauaucaacc

SEQ ID NO: 1473278 - RNA, 19 nt, Artificial Sequence
  Description of Artificial Sequence: Synthetic oligonucleotide
  Sense strand starting at position 3066 of SEQ ID NO: 1244212
uaguaagagacuugugaga

SEQ ID NO: 1473279 - RNA, 19 nt, Artificial Sequence
  Description of Artificial Sequence: Synthetic oligonucleotide
  Antisense strand to SEQ ID NO: 1473278
ucucacaagucucuuacua

SEQ ID NO: 1473280 - RNA, 19 nt, Artificial Sequence
  Description of Artificial Sequence: Synthetic oligonucleotide
  Sense strand starting at position 3412 of SEQ ID NO: 1244212
uaagaauacucggcacuug

SEQ ID NO: 1473281 - RNA, 19 nt, Artificial Sequence
  Description of Artificial Sequence: Synthetic oligonucleotide
  Antisense strand to SEQ ID NO: 1473280
caagugccgaguauucuua

SEQ ID NO: 1473282 - RNA, 19 nt, Artificial Sequence
  Description of Artificial Sequence: Synthetic oligonucleotide
  Sense strand starting at position 3432 of SEQ ID NO: 1244212
agugaccucugauugaaau

SEQ ID NO: 1473283 - RNA, 19 nt, Artificial Sequence
  Description of Artificial Sequence: Synthetic oligonucleotide
  Antisense strand to SEQ ID NO: 1473282
auuucaaucagaggucacu

SEQ ID NO: 1473284 - RNA, 19 nt, Artificial Sequence
  Description of Artificial Sequence: Synthetic oligonucleotide
  Sense strand starting at position 3433 of SEQ ID NO: 1244212
gugaccucugauugaaaug

SEQ ID NO: 1473285 - RNA, 19 nt, Artificial Sequence
  Description of Artificial Sequence: Synthetic oligonucleotide
  Antisense strand to SEQ ID NO: 1473284
cauuucaaucagaggucac

SEQ ID NO: 1473286 - RNA, 19 nt, Artificial Sequence
  Description of Artificial Sequence: Synthetic oligonucleotide
  Sense strand starting at position 3547 of SEQ ID NO: 1244212
uuguacugugcucuguuau

SEQ ID NO: 1473287 - RNA, 19 nt, Artificial Sequence
  Description of Artificial Sequence: Synthetic oligonucleotide
  Antisense strand to SEQ ID NO: 1473286
auaacagagcacaguacaa

SEQ ID NO: 1473288 - RNA, 19 nt, Artificial Sequence
  Description of Artificial Sequence: Synthetic oligonucleotide
  Sense strand starting at position 3581 of SEQ ID NO: 1244212
ucuccauggcucuaugaag

SEQ ID NO: 1473289 - RNA, 19 nt, Artificial Sequence
  Description of Artificial Sequence: Synthetic oligonucleotide
  Antisense strand to SEQ ID NO: 1473288
cuucauagagccauggaga

SEQ ID NO: 1473290 - RNA, 19 nt, Artificial Sequence
  Description of Artificial Sequence: Synthetic oligonucleotide
  Sense strand starting at position 3723 of SEQ ID NO: 1244212
gucugauccaaguaggauc

SEQ ID NO: 1473291 - RNA, 19 nt, Artificial Sequence
  Description of Artificial Sequence: Synthetic oligonucleotide
  Antisense strand to SEQ ID NO: 1473290
gauccuacuuggaucagac

SEQ ID NO: 1473292 - RNA, 19 nt, Artificial Sequence
  Description of Artificial Sequence: Synthetic oligonucleotide
  Sense strand starting at position 3765 of SEQ ID NO: 1244212
agauaccagucauuccaga

SEQ ID NO: 1473293 - RNA, 19 nt, Artificial Sequence
  Description of Artificial Sequence: Synthetic oligonucleotide
  Antisense strand to SEQ ID NO: 1473292
ucuggaaugacugguaucu

SEQ ID NO: 1473294 - RNA, 19 nt, Artificial Sequence
  Description of Artificial Sequence: Synthetic oligonucleotide
  Sense strand starting at position 3782 of SEQ ID NO: 1244212
gaaagaugcucauugcuga

SEQ ID NO: 1473295 - RNA, 19 nt, Artificial Sequence
  Description of Artificial Sequence: Synthetic oligonucleotide
  Antisense strand to SEQ ID NO: 1473294
ucagcaaugagcaucuuuc

SEQ ID NO: 1473296 - RNA, 19 nt, Artificial Sequence
  Description of Artificial Sequence: Synthetic oligonucleotide
  Sense strand starting at position 3818 of SEQ ID NO: 1244212
ggaaaucucuuugccagga

SEQ ID NO: 1473297 - RNA, 19 nt, Artificial Sequence
  Description of Artificial Sequence: Synthetic oligonucleotide
  Antisense strand to SEQ ID NO: 1473296
uccuggcaaagagauuucc

SEQ ID NO: 1473298 - RNA, 19 nt, Artificial Sequence
  Description of Artificial Sequence: Synthetic oligonucleotide
  Sense strand starting at position 3881 of SEQ ID NO: 1244212
ggcauagaugacugguauu

SEQ ID NO: 1473299 - RNA, 19 nt, Artificial Sequence
  Description of Artificial Sequence: Synthetic oligonucleotide
  Antisense strand to SEQ ID NO: 1473298
aauaccagucaucuaugcc

SEQ ID NO: 1473300 - RNA, 19 nt, Artificial Sequence
  Description of Artificial Sequence: Synthetic oligonucleotide
  Sense strand starting at position 244 of SEQ ID NO: 1244213
uuagaaacgugauuggaca

SEQ ID NO: 1473301 - RNA, 19 nt, Artificial Sequence
  Description of Artificial Sequence: Synthetic oligonucleotide
  Antisense strand to SEQ ID NO: 1473300
uguccaaucacguuucuaa

SEQ ID NO: 1473302 - RNA, 19 nt, Artificial Sequence
  Description of Artificial Sequence: Synthetic oligonucleotide
  Sense strand starting at position 282 of SEQ ID NO: 1244213
uuaguagagugagugauga

SEQ ID NO: 1473303 - RNA, 19 nt, Artificial Sequence
  Description of Artificial Sequence: Synthetic oligonucleotide
  Antisense strand to SEQ ID NO: 1473302
ucaucacucacucuacuaa

SEQ ID NO: 1473304 - RNA, 19 nt, Artificial Sequence
  Description of Artificial Sequence: Synthetic oligonucleotide
  Sense strand starting at position 296 of SEQ ID NO: 1244213
gaugaaaccugucugucag

SEQ ID NO: 1473305 - RNA, 19 nt, Artificial Sequence
  Description of Artificial Sequence: Synthetic oligonucleotide
  Antisense strand to SEQ ID NO: 1473304
cugacagacagguuucauc

SEQ ID NO: 1473306 - RNA, 19 nt, Artificial Sequence
  Description of Artificial Sequence: Synthetic oligonucleotide
  Sense strand starting at position 297 of SEQ ID NO: 1244213
augaaaccugucugucaga

SEQ ID NO: 1473307 - RNA, 19 nt, Artificial Sequence
  Description of Artificial Sequence: Synthetic oligonucleotide
  Antisense strand to SEQ ID NO: 1473306
ucugacagacagguuucau

SEQ ID NO: 1473308 - RNA, 19 nt, Artificial Sequence
  Description of Artificial Sequence: Synthetic oligonucleotide
  Sense strand starting at position 361 of SEQ ID NO: 1244213
ggcagaaccucuucugaaa

SEQ ID NO: 1473309 - RNA, 19 nt, Artificial Sequence
  Description of Artificial Sequence: Synthetic oligonucleotide
  Antisense strand to SEQ ID NO: 1473308
uuucagaagagguucugcc

SEQ ID NO: 1473310 - RNA, 19 nt, Artificial Sequence
  Description of Artificial Sequence: Synthetic oligonucleotide
  Sense strand starting at position 454 of SEQ ID NO: 1244213
ggaagauucuugccuugag

SEQ ID NO: 1473311 - RNA, 19 nt, Artificial Sequence
  Description of Artificial Sequence: Synthetic oligonucleotide
  Antisense strand to SEQ ID NO: 1473310
cucaaggcaagaaucuucc

SEQ ID NO: 1473312 - RNA, 19 nt, Artificial Sequence
  Description of Artificial Sequence: Synthetic oligonucleotide
  Sense strand starting at position 457 of SEQ ID NO: 1244213
agauucuugccuugaggag

SEQ ID NO: 1473313 - RNA, 19 nt, Artificial Sequence
  Description of Artificial Sequence: Synthetic oligonucleotide
  Antisense strand to SEQ ID NO: 1473312
cuccucaaggcaagaaucu

SEQ ID NO: 1473314 - RNA, 19 nt, Artificial Sequence
  Description of Artificial Sequence: Synthetic oligonucleotide
  Sense strand starting at position 458 of SEQ ID NO: 1244213
gauucuugccuugaggagu

SEQ ID NO: 1473315 - RNA, 19 nt, Artificial Sequence
  Description of Artificial Sequence: Synthetic oligonucleotide
  Antisense strand to SEQ ID NO: 1473314
acuccucaaggcaagaauc

SEQ ID NO: 1473316 - RNA, 19 nt, Artificial Sequence
  Description of Artificial Sequence: Synthetic oligonucleotide
  Sense strand starting at position 461 of SEQ ID NO: 1244213
ucuugccuugaggaguaaa

SEQ ID NO: 1473317 - RNA, 19 nt, Artificial Sequence
  Description of Artificial Sequence: Synthetic oligonucleotide
  Antisense strand to SEQ ID NO: 1473316
uuuacuccucaaggcaaga

SEQ ID NO: 1473318 - RNA, 19 nt, Artificial Sequence
  Description of Artificial Sequence: Synthetic oligonucleotide
  Sense strand starting at position 630 of SEQ ID NO: 1244213
gaguuaugagccuagaccu

SEQ ID NO: 1473319 - RNA, 19 nt, Artificial Sequence
  Description of Artificial Sequence: Synthetic oligonucleotide
  Antisense strand to SEQ ID NO: 1473318
aggucuaggcucauaacuc

SEQ ID NO: 1473320 - RNA, 19 nt, Artificial Sequence
  Description of Artificial Sequence: Synthetic oligonucleotide
  Sense strand starting at position 637 of SEQ ID NO: 1244213
gagccuagaccuugaauga

SEQ ID NO: 1473321 - RNA, 19 nt, Artificial Sequence
  Description of Artificial Sequence: Synthetic oligonucleotide
  Antisense strand to SEQ ID NO: 1473320
ucauucaaggucuaggcuc

SEQ ID NO: 1473322 - RNA, 19 nt, Artificial Sequence
  Description of Artificial Sequence: Synthetic oligonucleotide
  Sense strand starting at position 728 of SEQ ID NO: 1244213
uuuguauaucuuggaggac

SEQ ID NO: 1473323 - RNA, 19 nt, Artificial Sequence
  Description of Artificial Sequence: Synthetic oligonucleotide
  Antisense strand to SEQ ID NO: 1473322
guccuccaagauauacaaa

SEQ ID NO: 1473324 - RNA, 19 nt, Artificial Sequence
  Description of Artificial Sequence: Synthetic oligonucleotide
  Sense strand starting at position 814 of SEQ ID NO: 1244213
cugaaucaaucuguuggaa

SEQ ID NO: 1473325 - RNA, 19 nt, Artificial Sequence
  Description of Artificial Sequence: Synthetic oligonucleotide
  Antisense strand to SEQ ID NO: 1473324
uuccaacagauugauucag

SEQ ID NO: 1473326 - RNA, 19 nt, Artificial Sequence
  Description of Artificial Sequence: Synthetic oligonucleotide
  Sense strand starting at position 1199 of SEQ ID NO: 1244213
guaggacuuuggcugacaa

SEQ ID NO: 1473327 - RNA, 19 nt, Artificial Sequence
  Description of Artificial Sequence: Synthetic oligonucleotide
  Antisense strand to SEQ ID NO: 1473326
uugucagccaaaguccuac

SEQ ID NO: 1473328 - RNA, 19 nt, Artificial Sequence
  Description of Artificial Sequence: Synthetic oligonucleotide
  Sense strand starting at position 1273 of SEQ ID NO: 1244213
aauuuauguggcuguguga

SEQ ID NO: 1473329 - RNA, 19 nt, Artificial Sequence
  Description of Artificial Sequence: Synthetic oligonucleotide
  Antisense strand to SEQ ID NO: 1473328
ucacacagccacauaaauu

SEQ ID NO: 1473330 - RNA, 19 nt, Artificial Sequence
  Description of Artificial Sequence: Synthetic oligonucleotide
  Sense strand starting at position 1306 of SEQ ID NO: 1244213
cccaguuauagguacugga

SEQ ID NO: 1473331 - RNA, 19 nt, Artificial Sequence
  Description of Artificial Sequence: Synthetic oligonucleotide
  Antisense strand to SEQ ID NO: 1473330
uccaguaccuauaacuggg

SEQ ID NO: 1473332 - RNA, 19 nt, Artificial Sequence
  Description of Artificial Sequence: Synthetic oligonucleotide
  Sense strand starting at position 1343 of SEQ ID NO: 1244213
auucuaauuuggcuaguuu

SEQ ID NO: 1473333 - RNA, 19 nt, Artificial Sequence
  Description of Artificial Sequence: Synthetic oligonucleotide
  Antisense strand to SEQ ID NO: 1473332
aaacuagccaaauuagaau

SEQ ID NO: 1473334 - RNA, 19 nt, Artificial Sequence
  Description of Artificial Sequence: Synthetic oligonucleotide
  Sense strand starting at position 1909 of SEQ ID NO: 1244213
cacagaagcuggucugaca

SEQ ID NO: 1473335 - RNA, 19 nt, Artificial Sequence
  Description of Artificial Sequence: Synthetic oligonucleotide
  Antisense strand to SEQ ID NO: 1473334
ugucagaccagcuucugug

SEQ ID NO: 1473336 - RNA, 19 nt, Artificial Sequence
  Description of Artificial Sequence: Synthetic oligonucleotide
  Sense strand starting at position 2210 of SEQ ID NO: 1244213
guuuacaaacaaugguaua

SEQ ID NO: 1473337 - RNA, 19 nt, Artificial Sequence
  Description of Artificial Sequence: Synthetic oligonucleotide
  Antisense strand to SEQ ID NO: 1473336
uauaccauuguuuguaaac

SEQ ID NO: 1473338 - RNA, 19 nt, Artificial Sequence
  Description of Artificial Sequence: Synthetic oligonucleotide
  Sense strand starting at position 2264 of SEQ ID NO: 1244213
guggguauaucaccugaca

SEQ ID NO: 1473339 - RNA, 19 nt, Artificial Sequence
  Description of Artificial Sequence: Synthetic oligonucleotide
  Antisense strand to SEQ ID NO: 1473338
ugucaggugauauacccac

SEQ ID NO: 1473340 - RNA, 19 nt, Artificial Sequence
  Description of Artificial Sequence: Synthetic oligonucleotide
  Sense strand starting at position 2379 of SEQ ID NO: 1244213
guaagacugcuuuguauuu

SEQ ID NO: 1473341 - RNA, 19 nt, Artificial Sequence
  Description of Artificial Sequence: Synthetic oligonucleotide
  Antisense strand to SEQ ID NO: 1473340
aaauacaaagcagucuuac

SEQ ID NO: 1473342 - RNA, 19 nt, Artificial Sequence
  Description of Artificial Sequence: Synthetic oligonucleotide
  Sense strand starting at position 2519 of SEQ ID NO: 1244213
gugauaucuccugaacuuc

SEQ ID NO: 1473343 - RNA, 19 nt, Artificial Sequence
  Description of Artificial Sequence: Synthetic oligonucleotide
  Antisense strand to SEQ ID NO: 1473342
gaaguucaggagauaucac

SEQ ID NO: 1473344 - RNA, 19 nt, Artificial Sequence
  Description of Artificial Sequence: Synthetic oligonucleotide
  Sense strand starting at position 2886 of SEQ ID NO: 1244213
cuuuauaaggcagguuaga

SEQ ID NO: 1473345 - RNA, 19 nt, Artificial Sequence
  Description of Artificial Sequence: Synthetic oligonucleotide
  Antisense strand to SEQ ID NO: 1473344
ucuaaccugccuuauaaag

SEQ ID NO: 1473346 - RNA, 19 nt, Artificial Sequence
  Description of Artificial Sequence: Synthetic oligonucleotide
  Sense strand starting at position 2924 of SEQ ID NO: 1244213
guucaagagguguaguaua

SEQ ID NO: 1473347 - RNA, 19 nt, Artificial Sequence
  Description of Artificial Sequence: Synthetic oligonucleotide
  Antisense strand to SEQ ID NO: 1473346
uauacuacaccucuugaac

SEQ ID NO: 1473348 - RNA, 19 nt, Artificial Sequence
  Description of Artificial Sequence: Synthetic oligonucleotide
  Sense strand starting at position 3043 of SEQ ID NO: 1244213
gguuacgugagauaaauga

SEQ ID NO: 1473349 - RNA, 19 nt, Artificial Sequence
  Description of Artificial Sequence: Synthetic oligonucleotide
  Antisense strand to SEQ ID NO: 1473348
ucauuuaucucacguaacc

SEQ ID NO: 1473350 - RNA, 19 nt, Artificial Sequence
  Description of Artificial Sequence: Synthetic oligonucleotide
  Sense strand starting at position 3159 of SEQ ID NO: 1244213
gguggcauuuguuuguaca

SEQ ID NO: 1473351 - RNA, 19 nt, Artificial Sequence
  Description of Artificial Sequence: Synthetic oligonucleotide
  Antisense strand to SEQ ID NO: 1473350
uguacaaacaaaugccacc

SEQ ID NO: 1473352 - RNA, 19 nt, Artificial Sequence
  Description of Artificial Sequence: Synthetic oligonucleotide
  Sense strand starting at position 3160 of SEQ ID NO: 1244213
guggcauuuguuuguacag

SEQ ID NO: 1473353 - RNA, 19 nt, Artificial Sequence
  Description of Artificial Sequence: Synthetic oligonucleotide
  Antisense strand to SEQ ID NO: 1473352
cuguacaaacaaaugccac

SEQ ID NO: 1473354 - RNA, 19 nt, Artificial Sequence
  Description of Artificial Sequence: Synthetic oligonucleotide
  Sense strand starting at position 3236 of SEQ ID NO: 1244213
uaugguaaccaugacugua

SEQ ID NO: 1473355 - RNA, 19 nt, Artificial Sequence
  Description of Artificial Sequence: Synthetic oligonucleotide
  Antisense strand to SEQ ID NO: 1473354
uacagucaugguuaccaua

SEQ ID NO: 1473356 - RNA, 19 nt, Artificial Sequence
  Description of Artificial Sequence: Synthetic oligonucleotide
  Sense strand starting at position 3241 of SEQ ID NO: 1244213
uaaccaugacuguagguau

SEQ ID NO: 1473357 - RNA, 19 nt, Artificial Sequence
  Description of Artificial Sequence: Synthetic oligonucleotide
  Antisense strand to SEQ ID NO: 1473356
auaccuacagucaugguua

SEQ ID NO: 1473358 - RNA, 19 nt, Artificial Sequence
  Description of Artificial Sequence: Synthetic oligonucleotide
  Sense strand starting at position 3244 of SEQ ID NO: 1244213
ccaugacuguagguaugaa

SEQ ID NO: 1473359 - RNA, 19 nt, Artificial Sequence
  Description of Artificial Sequence: Synthetic oligonucleotide
  Antisense strand to SEQ ID NO: 1473358
uucauaccuacagucaugg

SEQ ID NO: 1473360 - RNA, 19 nt, Artificial Sequence
  Description of Artificial Sequence: Synthetic oligonucleotide
  Sense strand starting at position 3272 of SEQ ID NO: 1244213
gguuauauguaaucaauga

SEQ ID NO: 1473361 - RNA, 19 nt, Artificial Sequence
  Description of Artificial Sequence: Synthetic oligonucleotide
  Antisense strand to SEQ ID NO: 1473360
ucauugauuacauauaacc

SEQ ID NO: 1473362 - RNA, 19 nt, Artificial Sequence
  Description of Artificial Sequence: Synthetic oligonucleotide
  Sense strand starting at position 3280 of SEQ ID NO: 1244213
guaaucaaugaauguugga

SEQ ID NO: 1473363 - RNA, 19 nt, Artificial Sequence
  Description of Artificial Sequence: Synthetic oligonucleotide
  Antisense strand to SEQ ID NO: 1473362
uccaacauucauugauuac

SEQ ID NO: 1473364 - RNA, 19 nt, Artificial Sequence
  Description of Artificial Sequence: Synthetic oligonucleotide
  Sense strand starting at position 3411 of SEQ ID NO: 1244213
gcacuaaaggcuuauacag

SEQ ID NO: 1473365 - RNA, 19 nt, Artificial Sequence
  Description of Artificial Sequence: Synthetic oligonucleotide
  Antisense strand to SEQ ID NO: 1473364
cuguauaagccuuuagugc

SEQ ID NO: 1473366 - RNA, 19 nt, Artificial Sequence
  Description of Artificial Sequence: Synthetic oligonucleotide
  Sense strand starting at position 3486 of SEQ ID NO: 1244213
guagcaauaggagggauua

SEQ ID NO: 1473367 - RNA, 19 nt, Artificial Sequence
  Description of Artificial Sequence: Synthetic oligonucleotide
  Antisense strand to SEQ ID NO: 1473366
uaaucccuccuauugcuac

SEQ ID NO: 1473368 - RNA, 19 nt, Artificial Sequence
  Description of Artificial Sequence: Synthetic oligonucleotide
  Sense strand starting at position 3616 of SEQ ID NO: 1244213
gaauacucuugagucuuga

SEQ ID NO: 1473369 - RNA, 19 nt, Artificial Sequence
  Description of Artificial Sequence: Synthetic oligonucleotide
  Antisense strand to SEQ ID NO: 1473368
ucaagacucaagaguauuc

SEQ ID NO: 1473370 - RNA, 19 nt, Artificial Sequence
  Description of Artificial Sequence: Synthetic oligonucleotide
  Sense strand starting at position 3624 of SEQ ID NO: 1244213
uugagucuugaagagguua

SEQ ID NO: 1473371 - RNA, 19 nt, Artificial Sequence
  Description of Artificial Sequence: Synthetic oligonucleotide
  Antisense strand to SEQ ID NO: 1473370
uaaccucuucaagacucaa

SEQ ID NO: 1473372 - RNA, 19 nt, Artificial Sequence
  Description of Artificial Sequence: Synthetic oligonucleotide
  Sense strand starting at position 3672 of SEQ ID NO: 1244213
accagaagagcuggguaua

SEQ ID NO: 1473373 - RNA, 19 nt, Artificial Sequence
  Description of Artificial Sequence: Synthetic oligonucleotide
  Antisense strand to SEQ ID NO: 1473372
uauacccagcucuucuggu

SEQ ID NO: 1473374 - RNA, 19 nt, Artificial Sequence
  Description of Artificial Sequence: Synthetic oligonucleotide
  Sense strand starting at position 3673 of SEQ ID NO: 1244213
ccagaagagcuggguauaa

SEQ ID NO: 1473375 - RNA, 19 nt, Artificial Sequence
  Description of Artificial Sequence: Synthetic oligonucleotide
  Antisense strand to SEQ ID NO: 1473374
uuauacccagcucuucugg

SEQ ID NO: 1473376 - RNA, 19 nt, Artificial Sequence
  Description of Artificial Sequence: Synthetic oligonucleotide
  Sense strand starting at position 3811 of SEQ ID NO: 1244213
uuuguaauagcacaagaau

SEQ ID NO: 1473377 - RNA, 19 nt, Artificial Sequence
  Description of Artificial Sequence: Synthetic oligonucleotide
  Antisense strand to SEQ ID NO: 1473376
auucuugugcuauuacaaa

SEQ ID NO: 1473378 - RNA, 19 nt, Artificial Sequence
  Description of Artificial Sequence: Synthetic oligonucleotide
  Sense strand starting at position 3854 of SEQ ID NO: 1244213
ggcacuauggaguagugau

SEQ ID NO: 1473379 - RNA, 19 nt, Artificial Sequence
  Description of Artificial Sequence: Synthetic oligonucleotide
  Antisense strand to SEQ ID NO: 1473378
aucacuacuccauagugcc

SEQ ID NO: 1473380 - RNA, 19 nt, Artificial Sequence
  Description of Artificial Sequence: Synthetic oligonucleotide
  Sense strand starting at position 70 of SEQ ID NO: 1244214
agauucucuggguaguauu

SEQ ID NO: 1473381 - RNA, 19 nt, Artificial Sequence
  Description of Artificial Sequence: Synthetic oligonucleotide
  Antisense strand to SEQ ID NO: 1473380
aauacuacccagagaaucu

SEQ ID NO: 1473382 - RNA, 19 nt, Artificial Sequence
  Description of Artificial Sequence: Synthetic oligonucleotide
  Sense strand starting at position 882 of SEQ ID NO: 1244214
gucauuaaccuccacugga

SEQ ID NO: 1473383 - RNA, 19 nt, Artificial Sequence
  Description of Artificial Sequence: Synthetic oligonucleotide
  Antisense strand to SEQ ID NO: 1473382
uccaguggagguuaaugac

SEQ ID NO: 1473384 - RNA, 19 nt, Artificial Sequence
  Description of Artificial Sequence: Synthetic oligonucleotide
  Sense strand starting at position 1051 of SEQ ID NO: 1244214
uuuauuagaccuugguaua

SEQ ID NO: 1473385 - RNA, 19 nt, Artificial Sequence
  Description of Artificial Sequence: Synthetic oligonucleotide
  Antisense strand to SEQ ID NO: 1473384
uauaccaaggucuaauaaa

SEQ ID NO: 1473386 - RNA, 19 nt, Artificial Sequence
  Description of Artificial Sequence: Synthetic oligonucleotide
  Sense strand starting at position 1052 of SEQ ID NO: 1244214
uuauuagaccuugguauau

SEQ ID NO: 1473387 - RNA, 19 nt, Artificial Sequence
  Description of Artificial Sequence: Synthetic oligonucleotide
  Antisense strand to SEQ ID NO: 1473386
auauaccaaggucuaauaa

SEQ ID NO: 1473388 - RNA, 19 nt, Artificial Sequence
  Description of Artificial Sequence: Synthetic oligonucleotide
  Sense strand starting at position 1275 of SEQ ID NO: 1244214
agaguaaggucuuucugga

SEQ ID NO: 1473389 - RNA, 19 nt, Artificial Sequence
  Description of Artificial Sequence: Synthetic oligonucleotide
  Antisense strand to SEQ ID NO: 1473388
uccagaaagaccuuacucu

SEQ ID NO: 1473390 - RNA, 19 nt, Artificial Sequence
  Description of Artificial Sequence: Synthetic oligonucleotide
  Sense strand starting at position 1360 of SEQ ID NO: 1244214
gguugaagaauuuguucgu

SEQ ID NO: 1473391 - RNA, 19 nt, Artificial Sequence
  Description of Artificial Sequence: Synthetic oligonucleotide
  Antisense strand to SEQ ID NO: 1473390
acgaacaaauucuucaacc

SEQ ID NO: 1473392 - RNA, 19 nt, Artificial Sequence
  Description of Artificial Sequence: Synthetic oligonucleotide
  Sense strand starting at position 1361 of SEQ ID NO: 1244214
guugaagaauuuguucguu

SEQ ID NO: 1473393 - RNA, 19 nt, Artificial Sequence
  Description of Artificial Sequence: Synthetic oligonucleotide
  Antisense strand to SEQ ID NO: 1473392
aacgaacaaauucuucaac

SEQ ID NO: 1473394 - RNA, 19 nt, Artificial Sequence
  Description of Artificial Sequence: Synthetic oligonucleotide
  Sense strand starting at position 1363 of SEQ ID NO: 1244214
ugaagaauuuguucguugu

SEQ ID NO: 1473395 - RNA, 19 nt, Artificial Sequence
  Description of Artificial Sequence: Synthetic oligonucleotide
  Antisense strand to SEQ ID NO: 1473394
acaacgaacaaauucuuca

SEQ ID NO: 1473396 - RNA, 19 nt, Artificial Sequence
  Description of Artificial Sequence: Synthetic oligonucleotide
  Sense strand starting at position 1364 of SEQ ID NO: 1244214
gaagaauuuguucguuguc

SEQ ID NO: 1473397 - RNA, 19 nt, Artificial Sequence
  Description of Artificial Sequence: Synthetic oligonucleotide
  Antisense strand to SEQ ID NO: 1473396
gacaacgaacaaauucuuc

SEQ ID NO: 1473398 - RNA, 19 nt, Artificial Sequence
  Description of Artificial Sequence: Synthetic oligonucleotide
  Sense strand starting at position 1366 of SEQ ID NO: 1244214
agaauuuguucguugucca

SEQ ID NO: 1473399 - RNA, 19 nt, Artificial Sequence
  Description of Artificial Sequence: Synthetic oligonucleotide
  Antisense strand to SEQ ID NO: 1473398
uggacaacgaacaaauucu

SEQ ID NO: 1473400 - RNA, 19 nt, Artificial Sequence
  Description of Artificial Sequence: Synthetic oligonucleotide
  Sense strand starting at position 1369 of SEQ ID NO: 1244214
auuuguucguuguccauaa

SEQ ID NO: 1473401 - RNA, 19 nt, Artificial Sequence
  Description of Artificial Sequence: Synthetic oligonucleotide
  Antisense strand to SEQ ID NO: 1473400
uuauggacaacgaacaaau

SEQ ID NO: 1473402 - RNA, 19 nt, Artificial Sequence
  Description of Artificial Sequence: Synthetic oligonucleotide
  Sense strand starting at position 1381 of SEQ ID NO: 1244214
uccauaagugcuugaagaa

SEQ ID NO: 1473403 - RNA, 19 nt, Artificial Sequence
  Description of Artificial Sequence: Synthetic oligonucleotide
  Antisense strand to SEQ ID NO: 1473402
uucuucaagcacuuaugga

SEQ ID NO: 1473404 - RNA, 19 nt, Artificial Sequence
  Description of Artificial Sequence: Synthetic oligonucleotide
  Sense strand starting at position 2081 of SEQ ID NO: 1244214
agaagucucuugcuuauuu

SEQ ID NO: 1473405 - RNA, 19 nt, Artificial Sequence
  Description of Artificial Sequence: Synthetic oligonucleotide
  Antisense strand to SEQ ID NO: 1473404
aaauaagcaagagacuucu

SEQ ID NO: 1473406 - RNA, 19 nt, Artificial Sequence
  Description of Artificial Sequence: Synthetic oligonucleotide
  Sense strand starting at position 2090 of SEQ ID NO: 1244214
uugcuuauuuguguuggau

SEQ ID NO: 1473407 - RNA, 19 nt, Artificial Sequence
  Description of Artificial Sequence: Synthetic oligonucleotide
  Antisense strand to SEQ ID NO: 1473406
auccaacacaaauaagcaa

SEQ ID NO: 1473408 - RNA, 19 nt, Artificial Sequence
  Description of Artificial Sequence: Synthetic oligonucleotide
  Sense strand starting at position 2111 of SEQ ID NO: 1244214
uuugucucugaaugauaau

SEQ ID NO: 1473409 - RNA, 19 nt, Artificial Sequence
  Description of Artificial Sequence: Synthetic oligonucleotide
  Antisense strand to SEQ ID NO: 1473408
auuaucauucagagacaaa

SEQ ID NO: 1473410 - RNA, 19 nt, Artificial Sequence
  Description of Artificial Sequence: Synthetic oligonucleotide
  Sense strand starting at position 2180 of SEQ ID NO: 1244214
gauuguauuuggucugcaa

SEQ ID NO: 1473411 - RNA, 19 nt, Artificial Sequence
  Description of Artificial Sequence: Synthetic oligonucleotide
  Antisense strand to SEQ ID NO: 1473410
uugcagaccaaauacaauc

SEQ ID NO: 1473412 - RNA, 19 nt, Artificial Sequence
  Description of Artificial Sequence: Synthetic oligonucleotide
  Sense strand starting at position 2182 of SEQ ID NO: 1244214
uuguauuuggucugcaauu

SEQ ID NO: 1473413 - RNA, 19 nt, Artificial Sequence
  Description of Artificial Sequence: Synthetic oligonucleotide
  Antisense strand to SEQ ID NO: 1473412
aauugcagaccaaauacaa

SEQ ID NO: 1473414 - RNA, 19 nt, Artificial Sequence
  Description of Artificial Sequence: Synthetic oligonucleotide
  Sense strand starting at position 2183 of SEQ ID NO: 1244214
uguauuuggucugcaauua

SEQ ID NO: 1473415 - RNA, 19 nt, Artificial Sequence
  Description of Artificial Sequence: Synthetic oligonucleotide
  Antisense strand to SEQ ID NO: 1473414
uaauugcagaccaaauaca

SEQ ID NO: 1473416 - RNA, 19 nt, Artificial Sequence
  Description of Artificial Sequence: Synthetic oligonucleotide
  Sense strand starting at position 2206 of SEQ ID NO: 1244214
ucuuuaccauggucaagaa

SEQ ID NO: 1473417 - RNA, 19 nt, Artificial Sequence
  Description of Artificial Sequence: Synthetic oligonucleotide
  Antisense strand to SEQ ID NO: 1473416
uucuugaccaugguaaaga

SEQ ID NO: 1473418 - RNA, 19 nt, Artificial Sequence
  Description of Artificial Sequence: Synthetic oligonucleotide
  Sense strand starting at position 2224 of SEQ ID NO: 1244214
agucauuggcauuaauuag

SEQ ID NO: 1473419 - RNA, 19 nt, Artificial Sequence
  Description of Artificial Sequence: Synthetic oligonucleotide
  Antisense strand to SEQ ID NO: 1473418
cuaauuaaugccaaugacu

SEQ ID NO: 1473420 - RNA, 19 nt, Artificial Sequence
  Description of Artificial Sequence: Synthetic oligonucleotide
  Sense strand starting at position 2280 of SEQ ID NO: 1244214
ccucauggucaaggaauaa

SEQ ID NO: 1473421 - RNA, 19 nt, Artificial Sequence
  Description of Artificial Sequence: Synthetic oligonucleotide
  Antisense strand to SEQ ID NO: 1473420
uuauuccuugaccaugagg

SEQ ID NO: 1473422 - RNA, 19 nt, Artificial Sequence
  Description of Artificial Sequence: Synthetic oligonucleotide
  Sense strand starting at position 2306 of SEQ ID NO: 1244214
augccucaccuuuaaggau

SEQ ID NO: 1473423 - RNA, 19 nt, Artificial Sequence
  Description of Artificial Sequence: Synthetic oligonucleotide
  Antisense strand to SEQ ID NO: 1473422
auccuuaaaggugaggcau

SEQ ID NO: 1473424 - RNA, 19 nt, Artificial Sequence
  Description of Artificial Sequence: Synthetic oligonucleotide
  Sense strand starting at position 2313 of SEQ ID NO: 1244214
accuuuaaggauugucaau

SEQ ID NO: 1473425 - RNA, 19 nt, Artificial Sequence
  Description of Artificial Sequence: Synthetic oligonucleotide
  Antisense strand to SEQ ID NO: 1473424
auugacaauccuuaaaggu

SEQ ID NO: 1473426 - RNA, 19 nt, Artificial Sequence
  Description of Artificial Sequence: Synthetic oligonucleotide
  Sense strand starting at position 2315 of SEQ ID NO: 1244214
cuuuaaggauugucaauau

SEQ ID NO: 1473427 - RNA, 19 nt, Artificial Sequence
  Description of Artificial Sequence: Synthetic oligonucleotide
  Antisense strand to SEQ ID NO: 1473426
auauugacaauccuuaaag

SEQ ID NO: 1473428 - RNA, 19 nt, Artificial Sequence
  Description of Artificial Sequence: Synthetic oligonucleotide
  Sense strand starting at position 2339 of SEQ ID NO: 1244214
aguguugacccuuacaacu

SEQ ID NO: 1473429 - RNA, 19 nt, Artificial Sequence
  Description of Artificial Sequence: Synthetic oligonucleotide
  Antisense strand to SEQ ID NO: 1473428
aguuguaagggucaacacu

SEQ ID NO: 1473430 - RNA, 19 nt, Artificial Sequence
  Description of Artificial Sequence: Synthetic oligonucleotide
  Sense strand starting at position 2537 of SEQ ID NO: 1244214
ugauuaugugccuaaauag

SEQ ID NO: 1473431 - RNA, 19 nt, Artificial Sequence
  Description of Artificial Sequence: Synthetic oligonucleotide
  Antisense strand to SEQ ID NO: 1473430
cuauuuaggcacauaauca

SEQ ID NO: 1473432 - RNA, 19 nt, Artificial Sequence
  Description of Artificial Sequence: Synthetic oligonucleotide
  Sense strand starting at position 2598 of SEQ ID NO: 1244214
caaucuaugggcuagguau

SEQ ID NO: 1473433 - RNA, 19 nt, Artificial Sequence
  Description of Artificial Sequence: Synthetic oligonucleotide
  Antisense strand to SEQ ID NO: 1473432
auaccuagcccauagauug

SEQ ID NO: 1473434 - RNA, 19 nt, Artificial Sequence
  Description of Artificial Sequence: Synthetic oligonucleotide
  Sense strand starting at position 2626 of SEQ ID NO: 1244214
ucccaucaaccaugugaga

SEQ ID NO: 1473435 - RNA, 19 nt, Artificial Sequence
  Description of Artificial Sequence: Synthetic oligonucleotide
  Antisense strand to SEQ ID NO: 1473434
ucucacaugguugauggga

SEQ ID NO: 1473436 - RNA, 19 nt, Artificial Sequence
  Description of Artificial Sequence: Synthetic oligonucleotide
  Sense strand starting at position 3127 of SEQ ID NO: 1244214
gagagcuuaggguaaguaa

SEQ ID NO: 1473437 - RNA, 19 nt, Artificial Sequence
  Description of Artificial Sequence: Synthetic oligonucleotide
  Antisense strand to SEQ ID NO: 1473436
uuacuuacccuaagcucuc

SEQ ID NO: 1473438 - RNA, 19 nt, Artificial Sequence
  Description of Artificial Sequence: Synthetic oligonucleotide
  Sense strand starting at position 3130 of SEQ ID NO: 1244214
agcuuaggguaaguaauaa

SEQ ID NO: 1473439 - RNA, 19 nt, Artificial Sequence
  Description of Artificial Sequence: Synthetic oligonucleotide
  Antisense strand to SEQ ID NO: 1473438
uuauuacuuacccuaagcu

SEQ ID NO: 1473440 - RNA, 19 nt, Artificial Sequence
  Description of Artificial Sequence: Synthetic oligonucleotide
  Sense strand starting at position 3333 of SEQ ID NO: 1244214
aauacuggaguaugugauu

SEQ ID NO: 1473441 - RNA, 19 nt, Artificial Sequence
  Description of Artificial Sequence: Synthetic oligonucleotide
  Antisense strand to SEQ ID NO: 1473440
aaucacauacuccaguauu

SEQ ID NO: 1473442 - RNA, 19 nt, Artificial Sequence
  Description of Artificial Sequence: Synthetic oligonucleotide
  Sense strand starting at position 3400 of SEQ ID NO: 1244214
agacuaauccagugaacug

SEQ ID NO: 1473443 - RNA, 19 nt, Artificial Sequence
  Description of Artificial Sequence: Synthetic oligonucleotide
  Antisense strand to SEQ ID NO: 1473442
caguucacuggauuagucu

SEQ ID NO: 1473444 - RNA, 19 nt, Artificial Sequence
  Description of Artificial Sequence: Synthetic oligonucleotide
  Sense strand starting at position 3446 of SEQ ID NO: 1244214
gcugaugacggugaauaua

SEQ ID NO: 1473445 - RNA, 19 nt, Artificial Sequence
  Description of Artificial Sequence: Synthetic oligonucleotide
  Antisense strand to SEQ ID NO: 1473444
uauauucaccgucaucagc

SEQ ID NO: 1473446 - RNA, 19 nt, Artificial Sequence
  Description of Artificial Sequence: Synthetic oligonucleotide
  Sense strand starting at position 3507 of SEQ ID NO: 1244214
ggaguauggguucauuacu

SEQ ID NO: 1473447 - RNA, 19 nt, Artificial Sequence
  Description of Artificial Sequence: Synthetic oligonucleotide
  Antisense strand to SEQ ID NO: 1473446
aguaaugaacccauacucc

SEQ ID NO: 1473448 - RNA, 19 nt, Artificial Sequence
  Description of Artificial Sequence: Synthetic oligonucleotide
  Sense strand starting at position 3584 of SEQ ID NO: 1244214
ucugcuucucuagaaauga

SEQ ID NO: 1473449 - RNA, 19 nt, Artificial Sequence
  Description of Artificial Sequence: Synthetic oligonucleotide
  Antisense strand to SEQ ID NO: 1473448
ucauuucuagagaagcaga

SEQ ID NO: 1473450 - RNA, 19 nt, Artificial Sequence
  Description of Artificial Sequence: Synthetic oligonucleotide
  Sense strand starting at position 3683 of SEQ ID NO: 1244214
agauaugauucuuugugaa

SEQ ID NO: 1473451 - RNA, 19 nt, Artificial Sequence
  Description of Artificial Sequence: Synthetic oligonucleotide
  Antisense strand to SEQ ID NO: 1473450
uucacaaagaaucauaucu

SEQ ID NO: 1473452 - RNA, 19 nt, Artificial Sequence
  Description of Artificial Sequence: Synthetic oligonucleotide
  Sense strand starting at position 3735 of SEQ ID NO: 1244214
agauucuuugauuagcuaa

SEQ ID NO: 1473453 - RNA, 19 nt, Artificial Sequence
  Description of Artificial Sequence: Synthetic oligonucleotide
  Antisense strand to SEQ ID NO: 1473452
uuagcuaaucaaagaaucu

SEQ ID NO: 1473454 - RNA, 19 nt, Artificial Sequence
  Description of Artificial Sequence: Synthetic oligonucleotide
  Sense strand starting at position 3797 of SEQ ID NO: 1244214
caacaaucucgggagcuau

SEQ ID NO: 1473455 - RNA, 19 nt, Artificial Sequence
  Description of Artificial Sequence: Synthetic oligonucleotide
  Antisense strand to SEQ ID NO: 1473454
auagcucccgagauuguug

SEQ ID NO: 1473456 - RNA, 19 nt, Artificial Sequence
  Description of Artificial Sequence: Synthetic oligonucleotide
  Sense strand starting at position 3833 of SEQ ID NO: 1244214
uuagcagaaucuuugauac

SEQ ID NO: 1473457 - RNA, 19 nt, Artificial Sequence
  Description of Artificial Sequence: Synthetic oligonucleotide
  Antisense strand to SEQ ID NO: 1473456
guaucaaagauucugcuaa

SEQ ID NO: 1473458 - RNA, 19 nt, Artificial Sequence
  Description of Artificial Sequence: Synthetic oligonucleotide
  Sense strand starting at position 3879 of SEQ ID NO: 1244214
ggcucagauaucugaggac

SEQ ID NO: 1473459 - RNA, 19 nt, Artificial Sequence
  Description of Artificial Sequence: Synthetic oligonucleotide
  Antisense strand to SEQ ID NO: 1473458
guccucagauaucugagcc

SEQ ID NO: 1473460 - RNA, 19 nt, Artificial Sequence
  Description of Artificial Sequence: Synthetic oligonucleotide
  Sense strand starting at position 502 of SEQ ID NO: 1244215
guguccagcguguuaacuu

SEQ ID NO: 1473461 - RNA, 19 nt, Artificial Sequence
  Description of Artificial Sequence: Synthetic oligonucleotide
  Antisense strand to SEQ ID NO: 1473460
aaguuaacacgcuggacac

SEQ ID NO: 1473462 - RNA, 19 nt, Artificial Sequence
  Description of Artificial Sequence: Synthetic oligonucleotide
  Sense strand starting at position 600 of SEQ ID NO: 1244215
gacaaauggcaaugguaga

SEQ ID NO: 1473463 - RNA, 19 nt, Artificial Sequence
  Description of Artificial Sequence: Synthetic oligonucleotide
  Antisense strand to SEQ ID NO: 1473462
ucuaccauugccauuuguc

SEQ ID NO: 1473464 - RNA, 19 nt, Artificial Sequence
  Description of Artificial Sequence: Synthetic oligonucleotide
  Sense strand starting at position 601 of SEQ ID NO: 1244215
acaaauggcaaugguagaa

SEQ ID NO: 1473465 - RNA, 19 nt, Artificial Sequence
  Description of Artificial Sequence: Synthetic oligonucleotide
  Antisense strand to SEQ ID NO: 1473464
uucuaccauugccauuugu

SEQ ID NO: 1473466 - RNA, 19 nt, Artificial Sequence
  Description of Artificial Sequence: Synthetic oligonucleotide
  Sense strand starting at position 763 of SEQ ID NO: 1244215
ggcuaagguguagaaauua

SEQ ID NO: 1473467 - RNA, 19 nt, Artificial Sequence
  Description of Artificial Sequence: Synthetic oligonucleotide
  Antisense strand to SEQ ID NO: 1473466
uaauuucuacaccuuagcc

SEQ ID NO: 1473468 - RNA, 19 nt, Artificial Sequence
  Description of Artificial Sequence: Synthetic oligonucleotide
  Sense strand starting at position 986 of SEQ ID NO: 1244215
ccuuuauuggucuagaccu

SEQ ID NO: 1473469 - RNA, 19 nt, Artificial Sequence
  Description of Artificial Sequence: Synthetic oligonucleotide
  Antisense strand to SEQ ID NO: 1473468
aggucuagaccaauaaagg

SEQ ID NO: 1473470 - RNA, 19 nt, Artificial Sequence
  Description of Artificial Sequence: Synthetic oligonucleotide
  Sense strand starting at position 988 of SEQ ID NO: 1244215
uuuauuggucuagaccuaa

SEQ ID NO: 1473471 - RNA, 19 nt, Artificial Sequence
  Description of Artificial Sequence: Synthetic oligonucleotide
  Antisense strand to SEQ ID NO: 1473470
uuaggucuagaccaauaaa

SEQ ID NO: 1473472 - RNA, 19 nt, Artificial Sequence
  Description of Artificial Sequence: Synthetic oligonucleotide
  Sense strand starting at position 1013 of SEQ ID NO: 1244215
uagauuagagcauguaaau

SEQ ID NO: 1473473 - RNA, 19 nt, Artificial Sequence
  Description of Artificial Sequence: Synthetic oligonucleotide
  Antisense strand to SEQ ID NO: 1473472
auuuacaugcucuaaucua

SEQ ID NO: 1473474 - RNA, 19 nt, Artificial Sequence
  Description of Artificial Sequence: Synthetic oligonucleotide
  Sense strand starting at position 1101 of SEQ ID NO: 1244215
uguauuuaaucuuucuggu

SEQ ID NO: 1473475 - RNA, 19 nt, Artificial Sequence
  Description of Artificial Sequence: Synthetic oligonucleotide
  Antisense strand to SEQ ID NO: 1473474
accagaaagauuaaauaca

SEQ ID NO: 1473476 - RNA, 19 nt, Artificial Sequence
  Description of Artificial Sequence: Synthetic oligonucleotide
  Sense strand starting at position 1109 of SEQ ID NO: 1244215
aucuuucugguuuagacuu

SEQ ID NO: 1473477 - RNA, 19 nt, Artificial Sequence
  Description of Artificial Sequence: Synthetic oligonucleotide
  Antisense strand to SEQ ID NO: 1473476
aagucuaaaccagaaagau

SEQ ID NO: 1473478 - RNA, 19 nt, Artificial Sequence
  Description of Artificial Sequence: Synthetic oligonucleotide
  Sense strand starting at position 1116 of SEQ ID NO: 1244215
ugguuuagacuuuaugguu

SEQ ID NO: 1473479 - RNA, 19 nt, Artificial Sequence
  Description of Artificial Sequence: Synthetic oligonucleotide
  Antisense strand to SEQ ID NO: 1473478
aaccauaaagucuaaacca

SEQ ID NO: 1473480 - RNA, 19 nt, Artificial Sequence
  Description of Artificial Sequence: Synthetic oligonucleotide
  Sense strand starting at position 1213 of SEQ ID NO: 1244215
ggacauaacucaguuugcu

SEQ ID NO: 1473481 - RNA, 19 nt, Artificial Sequence
  Description of Artificial Sequence: Synthetic oligonucleotide
  Antisense strand to SEQ ID NO: 1473480
agcaaacugaguuaugucc

SEQ ID NO: 1473482 - RNA, 19 nt, Artificial Sequence
  Description of Artificial Sequence: Synthetic oligonucleotide
  Sense strand starting at position 1225 of SEQ ID NO: 1244215
guuugcuuugcacauuaaa

SEQ ID NO: 1473483 - RNA, 19 nt, Artificial Sequence
  Description of Artificial Sequence: Synthetic oligonucleotide
  Antisense strand to SEQ ID NO: 1473482
uuuaaugugcaaagcaaac

SEQ ID NO: 1473484 - RNA, 19 nt, Artificial Sequence
  Description of Artificial Sequence: Synthetic oligonucleotide
  Sense strand starting at position 1288 of SEQ ID NO: 1244215
ucugaagaugcaugagcau

SEQ ID NO: 1473485 - RNA, 19 nt, Artificial Sequence
  Description of Artificial Sequence: Synthetic oligonucleotide
  Antisense strand to SEQ ID NO: 1473484
augcucaugcaucuucaga

SEQ ID NO: 1473486 - RNA, 19 nt, Artificial Sequence
  Description of Artificial Sequence: Synthetic oligonucleotide
  Sense strand starting at position 1381 of SEQ ID NO: 1244215
gcaagcuauccagaacacu

SEQ ID NO: 1473487 - RNA, 19 nt, Artificial Sequence
  Description of Artificial Sequence: Synthetic oligonucleotide
  Antisense strand to SEQ ID NO: 1473486
aguguucuggauagcuugc

SEQ ID NO: 1473488 - RNA, 19 nt, Artificial Sequence
  Description of Artificial Sequence: Synthetic oligonucleotide
  Sense strand starting at position 1957 of SEQ ID NO: 1244215
gucaggaguuggguugaga

SEQ ID NO: 1473489 - RNA, 19 nt, Artificial Sequence
  Description of Artificial Sequence: Synthetic oligonucleotide
  Antisense strand to SEQ ID NO: 1473488
ucucaacccaacuccugac

SEQ ID NO: 1473490 - RNA, 19 nt, Artificial Sequence
  Description of Artificial Sequence: Synthetic oligonucleotide
  Sense strand starting at position 2015 of SEQ ID NO: 1244215
cuauaucuguccuuugaua

SEQ ID NO: 1473491 - RNA, 19 nt, Artificial Sequence
  Description of Artificial Sequence: Synthetic oligonucleotide
  Antisense strand to SEQ ID NO: 1473490
uaucaaaggacagauauag

SEQ ID NO: 1473492 - RNA, 19 nt, Artificial Sequence
  Description of Artificial Sequence: Synthetic oligonucleotide
  Sense strand starting at position 2017 of SEQ ID NO: 1244215
auaucuguccuuugauaug

SEQ ID NO: 1473493 - RNA, 19 nt, Artificial Sequence
  Description of Artificial Sequence: Synthetic oligonucleotide
  Antisense strand to SEQ ID NO: 1473492
cauaucaaaggacagauau

SEQ ID NO: 1473494 - RNA, 19 nt, Artificial Sequence
  Description of Artificial Sequence: Synthetic oligonucleotide
  Sense strand starting at position 2027 of SEQ ID NO: 1244215
uuugauauguucccuagag

SEQ ID NO: 1473495 - RNA, 19 nt, Artificial Sequence
  Description of Artificial Sequence: Synthetic oligonucleotide
  Antisense strand to SEQ ID NO: 1473494
cucuagggaacauaucaaa

SEQ ID NO: 1473496 - RNA, 19 nt, Artificial Sequence
  Description of Artificial Sequence: Synthetic oligonucleotide
  Sense strand starting at position 2028 of SEQ ID NO: 1244215
uugauauguucccuagagc

SEQ ID NO: 1473497 - RNA, 19 nt, Artificial Sequence
  Description of Artificial Sequence: Synthetic oligonucleotide
  Antisense strand to SEQ ID NO: 1473496
gcucuagggaacauaucaa

SEQ ID NO: 1473498 - RNA, 19 nt, Artificial Sequence
  Description of Artificial Sequence: Synthetic oligonucleotide
  Sense strand starting at position 2029 of SEQ ID NO: 1244215
ugauauguucccuagagcu

SEQ ID NO: 1473499 - RNA, 19 nt, Artificial Sequence
  Description of Artificial Sequence: Synthetic oligonucleotide
  Antisense strand to SEQ ID NO: 1473498
agcucuagggaacauauca

SEQ ID NO: 1473500 - RNA, 19 nt, Artificial Sequence
  Description of Artificial Sequence: Synthetic oligonucleotide
  Sense strand starting at position 2075 of SEQ ID NO: 1244215
ugucaauuucagugugagu

SEQ ID NO: 1473501 - RNA, 19 nt, Artificial Sequence
  Description of Artificial Sequence: Synthetic oligonucleotide
  Antisense strand to SEQ ID NO: 1473500
acucacacugaaauugaca

SEQ ID NO: 1473502 - RNA, 19 nt, Artificial Sequence
  Description of Artificial Sequence: Synthetic oligonucleotide
  Sense strand starting at position 2097 of SEQ ID NO: 1244215
uggcuaauaccugaggugu

SEQ ID NO: 1473503 - RNA, 19 nt, Artificial Sequence
  Description of Artificial Sequence: Synthetic oligonucleotide
  Antisense strand to SEQ ID NO: 1473502
acaccucagguauuagcca

SEQ ID NO: 1473504 - RNA, 19 nt, Artificial Sequence
  Description of Artificial Sequence: Synthetic oligonucleotide
  Sense strand starting at position 2201 of SEQ ID NO: 1244215
agugaaggcucaucaugga

SEQ ID NO: 1473505 - RNA, 19 nt, Artificial Sequence
  Description of Artificial Sequence: Synthetic oligonucleotide
  Antisense strand to SEQ ID NO: 1473504
uccaugaugagccuucacu

SEQ ID NO: 1473506 - RNA, 19 nt, Artificial Sequence
  Description of Artificial Sequence: Synthetic oligonucleotide
  Sense strand starting at position 2301 of SEQ ID NO: 1244215
auaguuguccuuugauaac

SEQ ID NO: 1473507 - RNA, 19 nt, Artificial Sequence
  Description of Artificial Sequence: Synthetic oligonucleotide
  Antisense strand to SEQ ID NO: 1473506
guuaucaaaggacaacuau

SEQ ID NO: 1473508 - RNA, 19 nt, Artificial Sequence
  Description of Artificial Sequence: Synthetic oligonucleotide
  Sense strand starting at position 2413 of SEQ ID NO: 1244215
agacuaacauuagugucau

SEQ ID NO: 1473509 - RNA, 19 nt, Artificial Sequence
  Description of Artificial Sequence: Synthetic oligonucleotide
  Antisense strand to SEQ ID NO: 1473508
augacacuaauguuagucu

SEQ ID NO: 1473510 - RNA, 19 nt, Artificial Sequence
  Description of Artificial Sequence: Synthetic oligonucleotide
  Sense strand starting at position 2487 of SEQ ID NO: 1244215
ugaucaauuugugcaaguu

SEQ ID NO: 1473511 - RNA, 19 nt, Artificial Sequence
  Description of Artificial Sequence: Synthetic oligonucleotide
  Antisense strand to SEQ ID NO: 1473510
aacuugcacaaauugauca

SEQ ID NO: 1473512 - RNA, 19 nt, Artificial Sequence
  Description of Artificial Sequence: Synthetic oligonucleotide
  Sense strand starting at position 2544 of SEQ ID NO: 1244215
aguaauagugaauguacaa

SEQ ID NO: 1473513 - RNA, 19 nt, Artificial Sequence
  Description of Artificial Sequence: Synthetic oligonucleotide
  Antisense strand to SEQ ID NO: 1473512
uuguacauucacuauuacu

SEQ ID NO: 1473514 - RNA, 19 nt, Artificial Sequence
  Description of Artificial Sequence: Synthetic oligonucleotide
  Sense strand starting at position 2622 of SEQ ID NO: 1244215
uuaaacauaugugcuagua

SEQ ID NO: 1473515 - RNA, 19 nt, Artificial Sequence
  Description of Artificial Sequence: Synthetic oligonucleotide
  Antisense strand to SEQ ID NO: 1473514
uacuagcacauauguuuaa

SEQ ID NO: 1473516 - RNA, 19 nt, Artificial Sequence
  Description of Artificial Sequence: Synthetic oligonucleotide
  Sense strand starting at position 2634 of SEQ ID NO: 1244215
gcuaguaaugaguacacau

SEQ ID NO: 1473517 - RNA, 19 nt, Artificial Sequence
  Description of Artificial Sequence: Synthetic oligonucleotide
  Antisense strand to SEQ ID NO: 1473516
auguguacucauuacuagc

SEQ ID NO: 1473518 - RNA, 19 nt, Artificial Sequence
  Description of Artificial Sequence: Synthetic oligonucleotide
  Sense strand starting at position 2641 of SEQ ID NO: 1244215
augaguacacauuguaaca

SEQ ID NO: 1473519 - RNA, 19 nt, Artificial Sequence
  Description of Artificial Sequence: Synthetic oligonucleotide
  Antisense strand to SEQ ID NO: 1473518
uguuacaauguguacucau

SEQ ID NO: 1473520 - RNA, 19 nt, Artificial Sequence
  Description of Artificial Sequence: Synthetic oligonucleotide
  Sense strand starting at position 2735 of SEQ ID NO: 1244215
aaacuaaugcucuagaggu

SEQ ID NO: 1473521 - RNA, 19 nt, Artificial Sequence
  Description of Artificial Sequence: Synthetic oligonucleotide
  Antisense strand to SEQ ID NO: 1473520
accucuagagcauuaguuu

SEQ ID NO: 1473522 - RNA, 19 nt, Artificial Sequence
  Description of Artificial Sequence: Synthetic oligonucleotide
  Sense strand starting at position 2737 of SEQ ID NO: 1244215
acuaaugcucuagagguaa

SEQ ID NO: 1473523 - RNA, 19 nt, Artificial Sequence
  Description of Artificial Sequence: Synthetic oligonucleotide
  Antisense strand to SEQ ID NO: 1473522
uuaccucuagagcauuagu

SEQ ID NO: 1473524 - RNA, 19 nt, Artificial Sequence
  Description of Artificial Sequence: Synthetic oligonucleotide
  Sense strand starting at position 3315 of SEQ ID NO: 1244215
aaggguuaauauccaaagu

SEQ ID NO: 1473525 - RNA, 19 nt, Artificial Sequence
  Description of Artificial Sequence: Synthetic oligonucleotide
  Antisense strand to SEQ ID NO: 1473524
acuuuggauauuaacccuu

SEQ ID NO: 1473526 - RNA, 19 nt, Artificial Sequence
  Description of Artificial Sequence: Synthetic oligonucleotide
  Sense strand starting at position 3352 of SEQ ID NO: 1244215
acucaauaccuguaguaag

SEQ ID NO: 1473527 - RNA, 19 nt, Artificial Sequence
  Description of Artificial Sequence: Synthetic oligonucleotide
  Antisense strand to SEQ ID NO: 1473526
cuuacuacagguauugagu

SEQ ID NO: 1473528 - RNA, 19 nt, Artificial Sequence
  Description of Artificial Sequence: Synthetic oligonucleotide
  Sense strand starting at position 3470 of SEQ ID NO: 1244215
aucaccaaucaucggauaa

SEQ ID NO: 1473529 - RNA, 19 nt, Artificial Sequence
  Description of Artificial Sequence: Synthetic oligonucleotide
  Antisense strand to SEQ ID NO: 1473528
uuauccgaugauuggugau

SEQ ID NO: 1473530 - RNA, 19 nt, Artificial Sequence
  Description of Artificial Sequence: Synthetic oligonucleotide
  Sense strand starting at position 3474 of SEQ ID NO: 1244215
ccaaucaucggauaaugca

SEQ ID NO: 1473531 - RNA, 19 nt, Artificial Sequence
  Description of Artificial Sequence: Synthetic oligonucleotide
  Antisense strand to SEQ ID NO: 1473530
ugcauuauccgaugauugg

SEQ ID NO: 1473532 - RNA, 19 nt, Artificial Sequence
  Description of Artificial Sequence: Synthetic oligonucleotide
  Sense strand starting at position 3708 of SEQ ID NO: 1244215
guguauauacccgaaggaa

SEQ ID NO: 1473533 - RNA, 19 nt, Artificial Sequence
  Description of Artificial Sequence: Synthetic oligonucleotide
  Antisense strand to SEQ ID NO: 1473532
uuccuucggguauauacac

SEQ ID NO: 1473534 - RNA, 19 nt, Artificial Sequence
  Description of Artificial Sequence: Synthetic oligonucleotide
  Sense strand starting at position 3815 of SEQ ID NO: 1244215
guccauguccaucauuaaa

SEQ ID NO: 1473535 - RNA, 19 nt, Artificial Sequence
  Description of Artificial Sequence: Synthetic oligonucleotide
  Antisense strand to SEQ ID NO: 1473534
uuuaaugauggacauggac

SEQ ID NO: 1473536 - RNA, 19 nt, Artificial Sequence
  Description of Artificial Sequence: Synthetic oligonucleotide
  Sense strand starting at position 3889 of SEQ ID NO: 1244215
acuggaauauuauugguca

SEQ ID NO: 1473537 - RNA, 19 nt, Artificial Sequence
  Description of Artificial Sequence: Synthetic oligonucleotide
  Antisense strand to SEQ ID NO: 1473536
ugaccaauaauauuccagu

SEQ ID NO: 1473538 - RNA, 19 nt, Artificial Sequence
  Description of Artificial Sequence: Synthetic oligonucleotide
  Sense strand starting at position 3892 of SEQ ID NO: 1244215
ggaauauuauuggucauaa

SEQ ID NO: 1473539 - RNA, 19 nt, Artificial Sequence
  Description of Artificial Sequence: Synthetic oligonucleotide
  Antisense strand to SEQ ID NO: 1473538
uuaugaccaauaauauucc

SEQ ID NO: 1473540 - RNA, 19 nt, Artificial Sequence
  Description of Artificial Sequence: Synthetic oligonucleotide
  Sense strand starting at position 315 of SEQ ID NO: 1244216
cccuuacauggccaaugau

SEQ ID NO: 1473541 - RNA, 19 nt, Artificial Sequence
  Description of Artificial Sequence: Synthetic oligonucleotide
  Antisense strand to SEQ ID NO: 1473540
aucauuggccauguaaggg

SEQ ID NO: 1473542 - RNA, 19 nt, Artificial Sequence
  Description of Artificial Sequence: Synthetic oligonucleotide
  Sense strand starting at position 324 of SEQ ID NO: 1244216
ggccaaugauccucaauaa

SEQ ID NO: 1473543 - RNA, 19 nt, Artificial Sequence
  Description of Artificial Sequence: Synthetic oligonucleotide
  Antisense strand to SEQ ID NO: 1473542
uuauugaggaucauuggcc

SEQ ID NO: 1473544 - RNA, 19 nt, Artificial Sequence
  Description of Artificial Sequence: Synthetic oligonucleotide
  Sense strand starting at position 769 of SEQ ID NO: 1244216
cuugaauuauaagcaguua

SEQ ID NO: 1473545 - RNA, 19 nt, Artificial Sequence
  Description of Artificial Sequence: Synthetic oligonucleotide
  Antisense strand to SEQ ID NO: 1473544
uaacugcuuauaauucaag

SEQ ID NO: 1473546 - RNA, 19 nt, Artificial Sequence
  Description of Artificial Sequence: Synthetic oligonucleotide
  Sense strand starting at position 783 of SEQ ID NO: 1244216
aguuaaaccaggugaugua

SEQ ID NO: 1473547 - RNA, 19 nt, Artificial Sequence
  Description of Artificial Sequence: Synthetic oligonucleotide
  Antisense strand to SEQ ID NO: 1473546
uacaucaccugguuuaacu

SEQ ID NO: 1473548 - RNA, 19 nt, Artificial Sequence
  Description of Artificial Sequence: Synthetic oligonucleotide
  Sense strand starting at position 790 of SEQ ID NO: 1244216
ccaggugauguacaaguga

SEQ ID NO: 1473549 - RNA, 19 nt, Artificial Sequence
  Description of Artificial Sequence: Synthetic oligonucleotide
  Antisense strand to SEQ ID NO: 1473548
ucacuuguacaucaccugg

SEQ ID NO: 1473550 - RNA, 19 nt, Artificial Sequence
  Description of Artificial Sequence: Synthetic oligonucleotide
  Sense strand starting at position 888 of SEQ ID NO: 1244216
ugaaauauccagcaggcaa

SEQ ID NO: 1473551 - RNA, 19 nt, Artificial Sequence
  Description of Artificial Sequence: Synthetic oligonucleotide
  Antisense strand to SEQ ID NO: 1473550
uugccugcuggauauuuca

SEQ ID NO: 1473552 - RNA, 19 nt, Artificial Sequence
  Description of Artificial Sequence: Synthetic oligonucleotide
  Sense strand starting at position 961 of SEQ ID NO: 1244216
ccagccuacuucuuagaag

SEQ ID NO: 1473553 - RNA, 19 nt, Artificial Sequence
  Description of Artificial Sequence: Synthetic oligonucleotide
  Antisense strand to SEQ ID NO: 1473552
cuucuaagaaguaggcugg

SEQ ID NO: 1473554 - RNA, 19 nt, Artificial Sequence
  Description of Artificial Sequence: Synthetic oligonucleotide
  Sense strand starting at position 970 of SEQ ID NO: 1244216
uucuuagaagcugaauguu

SEQ ID NO: 1473555 - RNA, 19 nt, Artificial Sequence
  Description of Artificial Sequence: Synthetic oligonucleotide
  Antisense strand to SEQ ID NO: 1473554
aacauucagcuucuaagaa

SEQ ID NO: 1473556 - RNA, 19 nt, Artificial Sequence
  Description of Artificial Sequence: Synthetic oligonucleotide
  Sense strand starting at position 1015 of SEQ ID NO: 1244216
ugacuugaggaaugucacu

SEQ ID NO: 1473557 - RNA, 19 nt, Artificial Sequence
  Description of Artificial Sequence: Synthetic oligonucleotide
  Antisense strand to SEQ ID NO: 1473556
agugacauuccucaaguca

SEQ ID NO: 1473558 - RNA, 19 nt, Artificial Sequence
  Description of Artificial Sequence: Synthetic oligonucleotide
  Sense strand starting at position 1026 of SEQ ID NO: 1244216
augucacuuggcuauaauu

SEQ ID NO: 1473559 - RNA, 19 nt, Artificial Sequence
  Description of Artificial Sequence: Synthetic oligonucleotide
  Antisense strand to SEQ ID NO: 1473558
aauuauagccaagugacau

SEQ ID NO: 1473560 - RNA, 19 nt, Artificial Sequence
  Description of Artificial Sequence: Synthetic oligonucleotide
  Sense strand starting at position 1035 of SEQ ID NO: 1244216
ggcuauaauuuggugucuu

SEQ ID NO: 1473561 - RNA, 19 nt, Artificial Sequence
  Description of Artificial Sequence: Synthetic oligonucleotide
  Antisense strand to SEQ ID NO: 1473560
aagacaccaaauuauagcc

SEQ ID NO: 1473562 - RNA, 19 nt, Artificial Sequence
  Description of Artificial Sequence: Synthetic oligonucleotide
  Sense strand starting at position 1111 of SEQ ID NO: 1244216
auuagacuuguggauaguu

SEQ ID NO: 1473563 - RNA, 19 nt, Artificial Sequence
  Description of Artificial Sequence: Synthetic oligonucleotide
  Antisense strand to SEQ ID NO: 1473562
aacuauccacaagucuaau

SEQ ID NO: 1473564 - RNA, 19 nt, Artificial Sequence
  Description of Artificial Sequence: Synthetic oligonucleotide
  Sense strand starting at position 1119 of SEQ ID NO: 1244216
uguggauaguucucaugga

SEQ ID NO: 1473565 - RNA, 19 nt, Artificial Sequence
  Description of Artificial Sequence: Synthetic oligonucleotide
  Antisense strand to SEQ ID NO: 1473564
uccaugagaacuauccaca

SEQ ID NO: 1473566 - RNA, 19 nt, Artificial Sequence
  Description of Artificial Sequence: Synthetic oligonucleotide
  Sense strand starting at position 1123 of SEQ ID NO: 1244216
gauaguucucauggauaaa

SEQ ID NO: 1473567 - RNA, 19 nt, Artificial Sequence
  Description of Artificial Sequence: Synthetic oligonucleotide
  Antisense strand to SEQ ID NO: 1473566
uuuauccaugagaacuauc

SEQ ID NO: 1473568 - RNA, 19 nt, Artificial Sequence
  Description of Artificial Sequence: Synthetic oligonucleotide
  Sense strand starting at position 1285 of SEQ ID NO: 1244216
auagaauugugagcucaua

SEQ ID NO: 1473569 - RNA, 19 nt, Artificial Sequence
  Description of Artificial Sequence: Synthetic oligonucleotide
  Antisense strand to SEQ ID NO: 1473568
uaugagcucacaauucuau

SEQ ID NO: 1473570 - RNA, 19 nt, Artificial Sequence
  Description of Artificial Sequence: Synthetic oligonucleotide
  Sense strand starting at position 1306 of SEQ ID NO: 1244216
cuuaguagucuccaucaca

SEQ ID NO: 1473571 - RNA, 19 nt, Artificial Sequence
  Description of Artificial Sequence: Synthetic oligonucleotide
  Antisense strand to SEQ ID NO: 1473570
ugugauggagacuacuaag

SEQ ID NO: 1473572 - RNA, 19 nt, Artificial Sequence
  Description of Artificial Sequence: Synthetic oligonucleotide
  Sense strand starting at position 1798 of SEQ ID NO: 1244216
gguugagaagcugggaaau

SEQ ID NO: 1473573 - RNA, 19 nt, Artificial Sequence
  Description of Artificial Sequence: Synthetic oligonucleotide
  Antisense strand to SEQ ID NO: 1473572
auuucccagcuucucaacc

SEQ ID NO: 1473574 - RNA, 19 nt, Artificial Sequence
  Description of Artificial Sequence: Synthetic oligonucleotide
  Sense strand starting at position 1810 of SEQ ID NO: 1244216
gggaaauccgcagaagcua

SEQ ID NO: 1473575 - RNA, 19 nt, Artificial Sequence
  Description of Artificial Sequence: Synthetic oligonucleotide
  Antisense strand to SEQ ID NO: 1473574
uagcuucugcggauuuccc

SEQ ID NO: 1473576 - RNA, 19 nt, Artificial Sequence
  Description of Artificial Sequence: Synthetic oligonucleotide
  Sense strand starting at position 1957 of SEQ ID NO: 1244216
gucagaaguuggguuaaga

SEQ ID NO: 1473577 - RNA, 19 nt, Artificial Sequence
  Description of Artificial Sequence: Synthetic oligonucleotide
  Antisense strand to SEQ ID NO: 1473576
ucuuaacccaacuucugac

SEQ ID NO: 1473578 - RNA, 19 nt, Artificial Sequence
  Description of Artificial Sequence: Synthetic oligonucleotide
  Sense strand starting at position 2095 of SEQ ID NO: 1244216
auuuguuacuccguggauc

SEQ ID NO: 1473579 - RNA, 19 nt, Artificial Sequence
  Description of Artificial Sequence: Synthetic oligonucleotide
  Antisense strand to SEQ ID NO: 1473578
gauccacggaguaacaaau

SEQ ID NO: 1473580 - RNA, 19 nt, Artificial Sequence
  Description of Artificial Sequence: Synthetic oligonucleotide
  Sense strand starting at position 2119 of SEQ ID NO: 1244216
uuggcuuauguugaaauac

SEQ ID NO: 1473581 - RNA, 19 nt, Artificial Sequence
  Description of Artificial Sequence: Synthetic oligonucleotide
  Antisense strand to SEQ ID NO: 1473580
guauuucaacauaagccaa

SEQ ID NO: 1473582 - RNA, 19 nt, Artificial Sequence
  Description of Artificial Sequence: Synthetic oligonucleotide
  Sense strand starting at position 2143 of SEQ ID NO: 1244216
acacauuaugagcaauagu

SEQ ID NO: 1473583 - RNA, 19 nt, Artificial Sequence
  Description of Artificial Sequence: Synthetic oligonucleotide
  Antisense strand to SEQ ID NO: 1473582
acuauugcucauaaugugu

SEQ ID NO: 1473584 - RNA, 19 nt, Artificial Sequence
  Description of Artificial Sequence: Synthetic oligonucleotide
  Sense strand starting at position 2437 of SEQ ID NO: 1244216
aaggaauaccuuuggucau

SEQ ID NO: 1473585 - RNA, 19 nt, Artificial Sequence
  Description of Artificial Sequence: Synthetic oligonucleotide
  Antisense strand to SEQ ID NO: 1473584
augaccaaagguauuccuu

SEQ ID NO: 1473586 - RNA, 19 nt, Artificial Sequence
  Description of Artificial Sequence: Synthetic oligonucleotide
  Sense strand starting at position 2439 of SEQ ID NO: 1244216
ggaauaccuuuggucauac

SEQ ID NO: 1473587 - RNA, 19 nt, Artificial Sequence
  Description of Artificial Sequence: Synthetic oligonucleotide
  Antisense strand to SEQ ID NO: 1473586
guaugaccaaagguauucc

SEQ ID NO: 1473588 - RNA, 19 nt, Artificial Sequence
  Description of Artificial Sequence: Synthetic oligonucleotide
  Sense strand starting at position 2494 of SEQ ID NO: 1244216
cuuauugaauuaccgauua

SEQ ID NO: 1473589 - RNA, 19 nt, Artificial Sequence
  Description of Artificial Sequence: Synthetic oligonucleotide
  Antisense strand to SEQ ID NO: 1473588
uaaucgguaauucaauaag

SEQ ID NO: 1473590 - RNA, 19 nt, Artificial Sequence
  Description of Artificial Sequence: Synthetic oligonucleotide
  Sense strand starting at position 2499 of SEQ ID NO: 1244216
ugaauuaccgauuauaguu

SEQ ID NO: 1473591 - RNA, 19 nt, Artificial Sequence
  Description of Artificial Sequence: Synthetic oligonucleotide
  Antisense strand to SEQ ID NO: 1473590
aacuauaaucgguaauuca

SEQ ID NO: 1473592 - RNA, 19 nt, Artificial Sequence
  Description of Artificial Sequence: Synthetic oligonucleotide
  Sense strand starting at position 2537 of SEQ ID NO: 1244216
uggaaugugugacuauuau

SEQ ID NO: 1473593 - RNA, 19 nt, Artificial Sequence
  Description of Artificial Sequence: Synthetic oligonucleotide
  Antisense strand to SEQ ID NO: 1473592
auaauagucacacauucca

SEQ ID NO: 1473594 - RNA, 19 nt, Artificial Sequence
  Description of Artificial Sequence: Synthetic oligonucleotide
  Sense strand starting at position 2554 of SEQ ID NO: 1244216
auuccuguuccagaccaga

SEQ ID NO: 1473595 - RNA, 19 nt, Artificial Sequence
  Description of Artificial Sequence: Synthetic oligonucleotide
  Antisense strand to SEQ ID NO: 1473594
ucuggucuggaacaggaau

SEQ ID NO: 1473596 - RNA, 19 nt, Artificial Sequence
  Description of Artificial Sequence: Synthetic oligonucleotide
  Sense strand starting at position 2570 of SEQ ID NO: 1244216
agaaaucuguucuugggaa

SEQ ID NO: 1473597 - RNA, 19 nt, Artificial Sequence
  Description of Artificial Sequence: Synthetic oligonucleotide
  Antisense strand to SEQ ID NO: 1473596
uucccaagaacagauuucu

SEQ ID NO: 1473598 - RNA, 19 nt, Artificial Sequence
  Description of Artificial Sequence: Synthetic oligonucleotide
  Sense strand starting at position 2598 of SEQ ID NO: 1244216
cauaguauuuaggaaggua

SEQ ID NO: 1473599 - RNA, 19 nt, Artificial Sequence
  Description of Artificial Sequence: Synthetic oligonucleotide
  Antisense strand to SEQ ID NO: 1473598
uaccuuccuaaauacuaug

SEQ ID NO: 1473600 - RNA, 19 nt, Artificial Sequence
  Description of Artificial Sequence: Synthetic oligonucleotide
  Sense strand starting at position 2685 of SEQ ID NO: 1244216
uauugaauagguggaguaa

SEQ ID NO: 1473601 - RNA, 19 nt, Artificial Sequence
  Description of Artificial Sequence: Synthetic oligonucleotide
  Antisense strand to SEQ ID NO: 1473600
uuacuccaccuauucaaua

SEQ ID NO: 1473602 - RNA, 19 nt, Artificial Sequence
  Description of Artificial Sequence: Synthetic oligonucleotide
  Sense strand starting at position 2784 of SEQ ID NO: 1244216
ucuuguuauuugcuguaaa

SEQ ID NO: 1473603 - RNA, 19 nt, Artificial Sequence
  Description of Artificial Sequence: Synthetic oligonucleotide
  Antisense strand to SEQ ID NO: 1473602
uuuacagcaaauaacaaga

SEQ ID NO: 1473604 - RNA, 19 nt, Artificial Sequence
  Description of Artificial Sequence: Synthetic oligonucleotide
  Sense strand starting at position 2803 of SEQ ID NO: 1244216
gagacuaggaaauguguuu

SEQ ID NO: 1473605 - RNA, 19 nt, Artificial Sequence
  Description of Artificial Sequence: Synthetic oligonucleotide
  Antisense strand to SEQ ID NO: 1473604
aaacacauuuccuagucuc

SEQ ID NO: 1473606 - RNA, 19 nt, Artificial Sequence
  Description of Artificial Sequence: Synthetic oligonucleotide
  Sense strand starting at position 3425 of SEQ ID NO: 1244216
guguccagcguguuaacuu

SEQ ID NO: 1473607 - RNA, 19 nt, Artificial Sequence
  Description of Artificial Sequence: Synthetic oligonucleotide
  Antisense strand to SEQ ID NO: 1473606
aaguuaacacgcuggacac

SEQ ID NO: 1473608 - RNA, 19 nt, Artificial Sequence
  Description of Artificial Sequence: Synthetic oligonucleotide
  Sense strand starting at position 3523 of SEQ ID NO: 1244216
gacaaauggcaaugguaga

SEQ ID NO: 1473609 - RNA, 19 nt, Artificial Sequence
  Description of Artificial Sequence: Synthetic oligonucleotide
  Antisense strand to SEQ ID NO: 1473608
ucuaccauugccauuuguc

SEQ ID NO: 1473610 - RNA, 19 nt, Artificial Sequence
  Description of Artificial Sequence: Synthetic oligonucleotide
  Sense strand starting at position 3524 of SEQ ID NO: 1244216
acaaauggcaaugguagaa

SEQ ID NO: 1473611 - RNA, 19 nt, Artificial Sequence
  Description of Artificial Sequence: Synthetic oligonucleotide
  Antisense strand to SEQ ID NO: 1473610
uucuaccauugccauuugu

SEQ ID NO: 1473612 - RNA, 19 nt, Artificial Sequence
  Description of Artificial Sequence: Synthetic oligonucleotide
  Sense strand starting at position 3686 of SEQ ID NO: 1244216
ggcuaagguguagaaauua

SEQ ID NO: 1473613 - RNA, 19 nt, Artificial Sequence
  Description of Artificial Sequence: Synthetic oligonucleotide
  Antisense strand to SEQ ID NO: 1473612
uaauuucuacaccuuagcc

SEQ ID NO: 1473614 - RNA, 19 nt, Artificial Sequence
  Description of Artificial Sequence: Synthetic oligonucleotide
  Sense strand starting at position 3909 of SEQ ID NO: 1244216
ccuuuauuggucuagaccu

SEQ ID NO: 1473615 - RNA, 19 nt, Artificial Sequence
  Description of Artificial Sequence: Synthetic oligonucleotide
  Antisense strand to SEQ ID NO: 1473614
aggucuagaccaauaaagg

SEQ ID NO: 1473616 - RNA, 19 nt, Artificial Sequence
  Description of Artificial Sequence: Synthetic oligonucleotide
  Sense strand starting at position 3911 of SEQ ID NO: 1244216
uuuauuggucuagaccuaa

SEQ ID NO: 1473617 - RNA, 19 nt, Artificial Sequence
  Description of Artificial Sequence: Synthetic oligonucleotide
  Antisense strand to SEQ ID NO: 1473616
uuaggucuagaccaauaaa

SEQ ID NO: 1473618 - RNA, 19 nt, Artificial Sequence
  Description of Artificial Sequence: Synthetic oligonucleotide
  Sense strand starting at position 3936 of SEQ ID NO: 1244216
uagauuagagcauguaaau

SEQ ID NO: 1473619 - RNA, 19 nt, Artificial Sequence
  Description of Artificial Sequence: Synthetic oligonucleotide
  Antisense strand to SEQ ID NO: 1473618
auuuacaugcucuaaucua

SEQ ID NO: 1473620 - RNA, 19 nt, Artificial Sequence
  Description of Artificial Sequence: Synthetic oligonucleotide
  Sense strand starting at position 65 of SEQ ID NO: 1244217
auuggacaguuacauauuu

SEQ ID NO: 1473621 - RNA, 19 nt, Artificial Sequence
  Description of Artificial Sequence: Synthetic oligonucleotide
  Antisense strand to SEQ ID NO: 1473620
aaauauguaacuguccaau

SEQ ID NO: 1473622 - RNA, 19 nt, Artificial Sequence
  Description of Artificial Sequence: Synthetic oligonucleotide
  Sense strand starting at position 279 of SEQ ID NO: 1244217
ucaggauacugacauuucu

SEQ ID NO: 1473623 - RNA, 19 nt, Artificial Sequence
  Description of Artificial Sequence: Synthetic oligonucleotide
  Antisense strand to SEQ ID NO: 1473622
agaaaugucaguauccuga

SEQ ID NO: 1473624 - RNA, 19 nt, Artificial Sequence
  Description of Artificial Sequence: Synthetic oligonucleotide
  Sense strand starting at position 286 of SEQ ID NO: 1244217
acugacauuucugaugagu

SEQ ID NO: 1473625 - RNA, 19 nt, Artificial Sequence
  Description of Artificial Sequence: Synthetic oligonucleotide
  Antisense strand to SEQ ID NO: 1473624
acucaucagaaaugucagu

SEQ ID NO: 1473626 - RNA, 19 nt, Artificial Sequence
  Description of Artificial Sequence: Synthetic oligonucleotide
  Sense strand starting at position 318 of SEQ ID NO: 1244217
agccgauugugaguaacaa

SEQ ID NO: 1473627 - RNA, 19 nt, Artificial Sequence
  Description of Artificial Sequence: Synthetic oligonucleotide
  Antisense strand to SEQ ID NO: 1473626
uuguuacucacaaucggcu

SEQ ID NO: 1473628 - RNA, 19 nt, Artificial Sequence
  Description of Artificial Sequence: Synthetic oligonucleotide
  Sense strand starting at position 319 of SEQ ID NO: 1244217
gccgauugugaguaacaau

SEQ ID NO: 1473629 - RNA, 19 nt, Artificial Sequence
  Description of Artificial Sequence: Synthetic oligonucleotide
  Antisense strand to SEQ ID NO: 1473628
auuguuacucacaaucggc

SEQ ID NO: 1473630 - RNA, 19 nt, Artificial Sequence
  Description of Artificial Sequence: Synthetic oligonucleotide
  Sense strand starting at position 535 of SEQ ID NO: 1244217
cagggagccucuucugaga

SEQ ID NO: 1473631 - RNA, 19 nt, Artificial Sequence
  Description of Artificial Sequence: Synthetic oligonucleotide
  Antisense strand to SEQ ID NO: 1473630
ucucagaagaggcucccug

SEQ ID NO: 1473632 - RNA, 19 nt, Artificial Sequence
  Description of Artificial Sequence: Synthetic oligonucleotide
  Sense strand starting at position 738 of SEQ ID NO: 1244217
guaggagauggaugucaug

SEQ ID NO: 1473633 - RNA, 19 nt, Artificial Sequence
  Description of Artificial Sequence: Synthetic oligonucleotide
  Antisense strand to SEQ ID NO: 1473632
caugacauccaucuccuac

SEQ ID NO: 1473634 - RNA, 19 nt, Artificial Sequence
  Description of Artificial Sequence: Synthetic oligonucleotide
  Sense strand starting at position 880 of SEQ ID NO: 1244217
ggacaaguuggucggcaga

SEQ ID NO: 1473635 - RNA, 19 nt, Artificial Sequence
  Description of Artificial Sequence: Synthetic oligonucleotide
  Antisense strand to SEQ ID NO: 1473634
ucugccgaccaacuugucc

SEQ ID NO: 1473636 - RNA, 19 nt, Artificial Sequence
  Description of Artificial Sequence: Synthetic oligonucleotide
  Sense strand starting at position 1062 of SEQ ID NO: 1244217
gcagauggguuggcagaua

SEQ ID NO: 1473637 - RNA, 19 nt, Artificial Sequence
  Description of Artificial Sequence: Synthetic oligonucleotide
  Antisense strand to SEQ ID NO: 1473636
uaucugccaacccaucugc

SEQ ID NO: 1473638 - RNA, 19 nt, Artificial Sequence
  Description of Artificial Sequence: Synthetic oligonucleotide
  Sense strand starting at position 1212 of SEQ ID NO: 1244217
gaugcuagacucugagcaa

SEQ ID NO: 1473639 - RNA, 19 nt, Artificial Sequence
  Description of Artificial Sequence: Synthetic oligonucleotide
  Antisense strand to SEQ ID NO: 1473638
uugcucagagucuagcauc

SEQ ID NO: 1473640 - RNA, 19 nt, Artificial Sequence
  Description of Artificial Sequence: Synthetic oligonucleotide
  Sense strand starting at position 1215 of SEQ ID NO: 1244217
gcuagacucugagcaacuu

SEQ ID NO: 1473641 - RNA, 19 nt, Artificial Sequence
  Description of Artificial Sequence: Synthetic oligonucleotide
  Antisense strand to SEQ ID NO: 1473640
aaguugcucagagucuagc

SEQ ID NO: 1473642 - RNA, 19 nt, Artificial Sequence
  Description of Artificial Sequence: Synthetic oligonucleotide
  Sense strand starting at position 1268 of SEQ ID NO: 1244217
ggcagcuacuggucacaga

SEQ ID NO: 1473643 - RNA, 19 nt, Artificial Sequence
  Description of Artificial Sequence: Synthetic oligonucleotide
  Antisense strand to SEQ ID NO: 1473642
ucugugaccaguagcugcc

SEQ ID NO: 1473644 - RNA, 19 nt, Artificial Sequence
  Description of Artificial Sequence: Synthetic oligonucleotide
  Sense strand starting at position 1620 of SEQ ID NO: 1244217
guugcucacugagcaagaa

SEQ ID NO: 1473645 - RNA, 19 nt, Artificial Sequence
  Description of Artificial Sequence: Synthetic oligonucleotide
  Antisense strand to SEQ ID NO: 1473644
uucuugcucagugagcaac

SEQ ID NO: 1473646 - RNA, 19 nt, Artificial Sequence
  Description of Artificial Sequence: Synthetic oligonucleotide
  Sense strand starting at position 1853 of SEQ ID NO: 1244217
cacagcugucuugacaagu

SEQ ID NO: 1473647 - RNA, 19 nt, Artificial Sequence
  Description of Artificial Sequence: Synthetic oligonucleotide
  Antisense strand to SEQ ID NO: 1473646
acuugucaagacagcugug

SEQ ID NO: 1473648 - RNA, 19 nt, Artificial Sequence
  Description of Artificial Sequence: Synthetic oligonucleotide
  Sense strand starting at position 1967 of SEQ ID NO: 1244217
agaagcauuuccuagaaga

SEQ ID NO: 1473649 - RNA, 19 nt, Artificial Sequence
  Description of Artificial Sequence: Synthetic oligonucleotide
  Antisense strand to SEQ ID NO: 1473648
ucuucuaggaaaugcuucu

SEQ ID NO: 1473650 - RNA, 19 nt, Artificial Sequence
  Description of Artificial Sequence: Synthetic oligonucleotide
  Sense strand starting at position 2025 of SEQ ID NO: 1244217
ugcugagugcugagagguu

SEQ ID NO: 1473651 - RNA, 19 nt, Artificial Sequence
  Description of Artificial Sequence: Synthetic oligonucleotide
  Antisense strand to SEQ ID NO: 1473650
aaccucucagcacucagca

SEQ ID NO: 1473652 - RNA, 19 nt, Artificial Sequence
  Description of Artificial Sequence: Synthetic oligonucleotide
  Sense strand starting at position 2095 of SEQ ID NO: 1244217
uggcguguucuguuuggga

SEQ ID NO: 1473653 - RNA, 19 nt, Artificial Sequence
  Description of Artificial Sequence: Synthetic oligonucleotide
  Antisense strand to SEQ ID NO: 1473652
ucccaaacagaacacgcca

SEQ ID NO: 1473654 - RNA, 19 nt, Artificial Sequence
  Description of Artificial Sequence: Synthetic oligonucleotide
  Sense strand starting at position 2108 of SEQ ID NO: 1244217
uugggacuccugcaucuuu

SEQ ID NO: 1473655 - RNA, 19 nt, Artificial Sequence
  Description of Artificial Sequence: Synthetic oligonucleotide
  Antisense strand to SEQ ID NO: 1473654
aaagaugcaggagucccaa

SEQ ID NO: 1473656 - RNA, 19 nt, Artificial Sequence
  Description of Artificial Sequence: Synthetic oligonucleotide
  Sense strand starting at position 2145 of SEQ ID NO: 1244217
ccaguuugcagaggaacau

SEQ ID NO: 1473657 - RNA, 19 nt, Artificial Sequence
  Description of Artificial Sequence: Synthetic oligonucleotide
  Antisense strand to SEQ ID NO: 1473656
auguuccucugcaaacugg

SEQ ID NO: 1473658 - RNA, 19 nt, Artificial Sequence
  Description of Artificial Sequence: Synthetic oligonucleotide
  Sense strand starting at position 2175 of SEQ ID NO: 1244217
accguuuguugaucuggaa

SEQ ID NO: 1473659 - RNA, 19 nt, Artificial Sequence
  Description of Artificial Sequence: Synthetic oligonucleotide
  Antisense strand to SEQ ID NO: 1473658
uuccagaucaacaaacggu

SEQ ID NO: 1473660 - RNA, 19 nt, Artificial Sequence
  Description of Artificial Sequence: Synthetic oligonucleotide
  Sense strand starting at position 2184 of SEQ ID NO: 1244217
ugaucuggaagcuguuuau

SEQ ID NO: 1473661 - RNA, 19 nt, Artificial Sequence
  Description of Artificial Sequence: Synthetic oligonucleotide
  Antisense strand to SEQ ID NO: 1473660
auaaacagcuuccagauca

SEQ ID NO: 1473662 - RNA, 19 nt, Artificial Sequence
  Description of Artificial Sequence: Synthetic oligonucleotide
  Sense strand starting at position 2187 of SEQ ID NO: 1244217
ucuggaagcuguuuaucua

SEQ ID NO: 1473663 - RNA, 19 nt, Artificial Sequence
  Description of Artificial Sequence: Synthetic oligonucleotide
  Antisense strand to SEQ ID NO: 1473662
uagauaaacagcuuccaga

SEQ ID NO: 1473664 - RNA, 19 nt, Artificial Sequence
  Description of Artificial Sequence: Synthetic oligonucleotide
  Sense strand starting at position 2198 of SEQ ID NO: 1244217
uuuaucuacccguaaagaa

SEQ ID NO: 1473665 - RNA, 19 nt, Artificial Sequence
  Description of Artificial Sequence: Synthetic oligonucleotide
  Antisense strand to SEQ ID NO: 1473664
uucuuuacggguagauaaa

SEQ ID NO: 1473666 - RNA, 19 nt, Artificial Sequence
  Description of Artificial Sequence: Synthetic oligonucleotide
  Sense strand starting at position 2217 of SEQ ID NO: 1244217
gguguuuauuuauugaugu

SEQ ID NO: 1473667 - RNA, 19 nt, Artificial Sequence
  Description of Artificial Sequence: Synthetic oligonucleotide
  Antisense strand to SEQ ID NO: 1473666
acaucaauaaauaaacacc

SEQ ID NO: 1473668 - RNA, 19 nt, Artificial Sequence
  Description of Artificial Sequence: Synthetic oligonucleotide
  Sense strand starting at position 2260 of SEQ ID NO: 1244217
acagguagucuuggaagaa

SEQ ID NO: 1473669 - RNA, 19 nt, Artificial Sequence
  Description of Artificial Sequence: Synthetic oligonucleotide
  Antisense strand to SEQ ID NO: 1473668
uucuuccaagacuaccugu

SEQ ID NO: 1473670 - RNA, 19 nt, Artificial Sequence
  Description of Artificial Sequence: Synthetic oligonucleotide
  Sense strand starting at position 2447 of SEQ ID NO: 1244217
ccuucuagugggcagauaa

SEQ ID NO: 1473671 - RNA, 19 nt, Artificial Sequence
  Description of Artificial Sequence: Synthetic oligonucleotide
  Antisense strand to SEQ ID NO: 1473670
uuaucugcccacuagaagg

SEQ ID NO: 1473672 - RNA, 19 nt, Artificial Sequence
  Description of Artificial Sequence: Synthetic oligonucleotide
  Sense strand starting at position 2519 of SEQ ID NO: 1244217
gagauuaauugagaggaga

SEQ ID NO: 1473673 - RNA, 19 nt, Artificial Sequence
  Description of Artificial Sequence: Synthetic oligonucleotide
  Antisense strand to SEQ ID NO: 1473672
ucuccucucaauuaaucuc

SEQ ID NO: 1473674 - RNA, 19 nt, Artificial Sequence
  Description of Artificial Sequence: Synthetic oligonucleotide
  Sense strand starting at position 3275 of SEQ ID NO: 1244217
acagucugucccugaucua

SEQ ID NO: 1473675 - RNA, 19 nt, Artificial Sequence
  Description of Artificial Sequence: Synthetic oligonucleotide
  Antisense strand to SEQ ID NO: 1473674
uagaucagggacagacugu

SEQ ID NO: 1473676 - RNA, 19 nt, Artificial Sequence
  Description of Artificial Sequence: Synthetic oligonucleotide
  Sense strand starting at position 3422 of SEQ ID NO: 1244217
cuugaccuguuccuggaaa

SEQ ID NO: 1473677 - RNA, 19 nt, Artificial Sequence
  Description of Artificial Sequence: Synthetic oligonucleotide
  Antisense strand to SEQ ID NO: 1473676
uuuccaggaacaggucaag

SEQ ID NO: 1473678 - RNA, 19 nt, Artificial Sequence
  Description of Artificial Sequence: Synthetic oligonucleotide
  Sense strand starting at position 3424 of SEQ ID NO: 1244217
ugaccuguuccuggaaauc

SEQ ID NO: 1473679 - RNA, 19 nt, Artificial Sequence
  Description of Artificial Sequence: Synthetic oligonucleotide
  Antisense strand to SEQ ID NO: 1473678
gauuuccaggaacagguca

SEQ ID NO: 1473680 - RNA, 19 nt, Artificial Sequence
  Description of Artificial Sequence: Synthetic oligonucleotide
  Sense strand starting at position 3571 of SEQ ID NO: 1244217
acaagagacuucucaggug

SEQ ID NO: 1473681 - RNA, 19 nt, Artificial Sequence
  Description of Artificial Sequence: Synthetic oligonucleotide
  Antisense strand to SEQ ID NO: 1473680
caccugagaagucucuugu

SEQ ID NO: 1473682 - RNA, 19 nt, Artificial Sequence
  Description of Artificial Sequence: Synthetic oligonucleotide
  Sense strand starting at position 3583 of SEQ ID NO: 1244217
ucaggugugucucucaaag

SEQ ID NO: 1473683 - RNA, 19 nt, Artificial Sequence
  Description of Artificial Sequence: Synthetic oligonucleotide
  Antisense strand to SEQ ID NO: 1473682
cuuugagagacacaccuga

SEQ ID NO: 1473684 - RNA, 19 nt, Artificial Sequence
  Description of Artificial Sequence: Synthetic oligonucleotide
  Sense strand starting at position 3594 of SEQ ID NO: 1244217
ucucaaagacuuugugaac

SEQ ID NO: 1473685 - RNA, 19 nt, Artificial Sequence
  Description of Artificial Sequence: Synthetic oligonucleotide
  Antisense strand to SEQ ID NO: 1473684
guucacaaagucuuugaga

SEQ ID NO: 1473686 - RNA, 19 nt, Artificial Sequence
  Description of Artificial Sequence: Synthetic oligonucleotide
  Sense strand starting at position 3595 of SEQ ID NO: 1244217
cucaaagacuuugugaaca

SEQ ID NO: 1473687 - RNA, 19 nt, Artificial Sequence
  Description of Artificial Sequence: Synthetic oligonucleotide
  Antisense strand to SEQ ID NO: 1473686
uguucacaaagucuuugag

SEQ ID NO: 1473688 - RNA, 19 nt, Artificial Sequence
  Description of Artificial Sequence: Synthetic oligonucleotide
  Sense strand starting at position 3669 of SEQ ID NO: 1244217
uucugaauuccaggacuua

SEQ ID NO: 1473689 - RNA, 19 nt, Artificial Sequence
  Description of Artificial Sequence: Synthetic oligonucleotide
  Antisense strand to SEQ ID NO: 1473688
uaaguccuggaauucagaa

SEQ ID NO: 1473690 - RNA, 19 nt, Artificial Sequence
  Description of Artificial Sequence: Synthetic oligonucleotide
  Sense strand starting at position 3685 of SEQ ID NO: 1244217
uuaacaucuugcucaguga

SEQ ID NO: 1473691 - RNA, 19 nt, Artificial Sequence
  Description of Artificial Sequence: Synthetic oligonucleotide
  Antisense strand to SEQ ID NO: 1473690
ucacugagcaagauguuaa

SEQ ID NO: 1473692 - RNA, 19 nt, Artificial Sequence
  Description of Artificial Sequence: Synthetic oligonucleotide
  Sense strand starting at position 3829 of SEQ ID NO: 1244217
ugcaaucauugacucaguu

SEQ ID NO: 1473693 - RNA, 19 nt, Artificial Sequence
  Description of Artificial Sequence: Synthetic oligonucleotide
  Antisense strand to SEQ ID NO: 1473692
aacugagucaaugauugca

SEQ ID NO: 1473694 - RNA, 19 nt, Artificial Sequence
  Description of Artificial Sequence: Synthetic oligonucleotide
  Sense strand starting at position 3881 of SEQ ID NO: 1244217
cuggguucugugugauaga

SEQ ID NO: 1473695 - RNA, 19 nt, Artificial Sequence
  Description of Artificial Sequence: Synthetic oligonucleotide
  Antisense strand to SEQ ID NO: 1473694
ucuaucacacagaacccag

SEQ ID NO: 1473696 - RNA, 19 nt, Artificial Sequence
  Description of Artificial Sequence: Synthetic oligonucleotide
  Sense strand starting at position 3915 of SEQ ID NO: 1244217
uuguaauucuggccacaag

SEQ ID NO: 1473697 - RNA, 19 nt, Artificial Sequence
  Description of Artificial Sequence: Synthetic oligonucleotide
  Antisense strand to SEQ ID NO: 1473696
cuuguggccagaauuacaa

SEQ ID NO: 1473698 - RNA, 19 nt, Artificial Sequence
  Description of Artificial Sequence: Synthetic oligonucleotide
  Sense strand starting at position 3971 of SEQ ID NO: 1244217
gcaaguaugguacagaaug

SEQ ID NO: 1473699 - RNA, 19 nt, Artificial Sequence
  Description of Artificial Sequence: Synthetic oligonucleotide
  Antisense strand to SEQ ID NO: 1473698
cauucuguaccauacuugc

SEQ ID NO: 1473700 - RNA, 19 nt, Artificial Sequence
  Description of Artificial Sequence: Synthetic oligonucleotide
  Sense strand starting at position 160 of SEQ ID NO: 1244218
cuggaaagcuuaucaguaa

SEQ ID NO: 1473701 - RNA, 19 nt, Artificial Sequence
  Description of Artificial Sequence: Synthetic oligonucleotide
  Antisense strand to SEQ ID NO: 1473700
uuacugauaagcuuuccag

SEQ ID NO: 1473702 - RNA, 19 nt, Artificial Sequence
  Description of Artificial Sequence: Synthetic oligonucleotide
  Sense strand starting at position 163 of SEQ ID NO: 1244218
gaaagcuuaucaguaauag

SEQ ID NO: 1473703 - RNA, 19 nt, Artificial Sequence
  Description of Artificial Sequence: Synthetic oligonucleotide
  Antisense strand to SEQ ID NO: 1473702
cuauuacugauaagcuuuc

SEQ ID NO: 1473704 - RNA, 19 nt, Artificial Sequence
  Description of Artificial Sequence: Synthetic oligonucleotide
  Sense strand starting at position 177 of SEQ ID NO: 1244218
aauagacucugagugguga

SEQ ID NO: 1473705 - RNA, 19 nt, Artificial Sequence
  Description of Artificial Sequence: Synthetic oligonucleotide
  Antisense strand to SEQ ID NO: 1473704
ucaccacucagagucuauu

SEQ ID NO: 1473706 - RNA, 19 nt, Artificial Sequence
  Description of Artificial Sequence: Synthetic oligonucleotide
  Sense strand starting at position 198 of SEQ ID NO: 1244218
cuucgaaugcuauauucuu

SEQ ID NO: 1473707 - RNA, 19 nt, Artificial Sequence
  Description of Artificial Sequence: Synthetic oligonucleotide
  Antisense strand to SEQ ID NO: 1473706
aagaauauagcauucgaag

SEQ ID NO: 1473708 - RNA, 19 nt, Artificial Sequence
  Description of Artificial Sequence: Synthetic oligonucleotide
  Sense strand starting at position 515 of SEQ ID NO: 1244218
gcugguuccagguaagaca

SEQ ID NO: 1473709 - RNA, 19 nt, Artificial Sequence
  Description of Artificial Sequence: Synthetic oligonucleotide
  Antisense strand to SEQ ID NO: 1473708
ugucuuaccuggaaccagc

SEQ ID NO: 1473710 - RNA, 19 nt, Artificial Sequence
  Description of Artificial Sequence: Synthetic oligonucleotide
  Sense strand starting at position 686 of SEQ ID NO: 1244218
ccgacuuugccagaaaguu

SEQ ID NO: 1473711 - RNA, 19 nt, Artificial Sequence
  Description of Artificial Sequence: Synthetic oligonucleotide
  Antisense strand to SEQ ID NO: 1473710
aacuuucuggcaaagucgg

SEQ ID NO: 1473712 - RNA, 19 nt, Artificial Sequence
  Description of Artificial Sequence: Synthetic oligonucleotide
  Sense strand starting at position 698 of SEQ ID NO: 1244218
gaaaguucugaucaagccu

SEQ ID NO: 1473713 - RNA, 19 nt, Artificial Sequence
  Description of Artificial Sequence: Synthetic oligonucleotide
  Antisense strand to SEQ ID NO: 1473712
aggcuugaucagaacuuuc

SEQ ID NO: 1473714 - RNA, 19 nt, Artificial Sequence
  Description of Artificial Sequence: Synthetic oligonucleotide
  Sense strand starting at position 746 of SEQ ID NO: 1244218
agcuguagugcagaagaaa

SEQ ID NO: 1473715 - RNA, 19 nt, Artificial Sequence
  Description of Artificial Sequence: Synthetic oligonucleotide
  Antisense strand to SEQ ID NO: 1473714
uuucuucugcacuacagcu

SEQ ID NO: 1473716 - RNA, 19 nt, Artificial Sequence
  Description of Artificial Sequence: Synthetic oligonucleotide
  Sense strand starting at position 853 of SEQ ID NO: 1244218
ccuagagcuaacggguaaa

SEQ ID NO: 1473717 - RNA, 19 nt, Artificial Sequence
  Description of Artificial Sequence: Synthetic oligonucleotide
  Antisense strand to SEQ ID NO: 1473716
uuuacccguuagcucuagg

SEQ ID NO: 1473718 - RNA, 19 nt, Artificial Sequence
  Description of Artificial Sequence: Synthetic oligonucleotide
  Sense strand starting at position 941 of SEQ ID NO: 1244218
gaagcuuccgucuagaucu

SEQ ID NO: 1473719 - RNA, 19 nt, Artificial Sequence
  Description of Artificial Sequence: Synthetic oligonucleotide
  Antisense strand to SEQ ID NO: 1473718
agaucuagacggaagcuuc

SEQ ID NO: 1473720 - RNA, 19 nt, Artificial Sequence
  Description of Artificial Sequence: Synthetic oligonucleotide
  Sense strand starting at position 952 of SEQ ID NO: 1244218
cuagaucuaugguucucaa

SEQ ID NO: 1473721 - RNA, 19 nt, Artificial Sequence
  Description of Artificial Sequence: Synthetic oligonucleotide
  Antisense strand to SEQ ID NO: 1473720
uugagaaccauagaucuag

SEQ ID NO: 1473722 - RNA, 19 nt, Artificial Sequence
  Description of Artificial Sequence: Synthetic oligonucleotide
  Sense strand starting at position 1234 of SEQ ID NO: 1244218
gcucaaauuuauuaagagg

SEQ ID NO: 1473723 - RNA, 19 nt, Artificial Sequence
  Description of Artificial Sequence: Synthetic oligonucleotide
  Antisense strand to SEQ ID NO: 1473722
ccucuuaauaaauuugagc

SEQ ID NO: 1473724 - RNA, 19 nt, Artificial Sequence
  Description of Artificial Sequence: Synthetic oligonucleotide
  Sense strand starting at position 1342 of SEQ ID NO: 1244218
ugucuuauaguacaagaca

SEQ ID NO: 1473725 - RNA, 19 nt, Artificial Sequence
  Description of Artificial Sequence: Synthetic oligonucleotide
  Antisense strand to SEQ ID NO: 1473724
ugucuuguacuauaagaca

SEQ ID NO: 1473726 - RNA, 19 nt, Artificial Sequence
  Description of Artificial Sequence: Synthetic oligonucleotide
  Sense strand starting at position 1368 of SEQ ID NO: 1244218
ucaugugaauaaguaaagu

SEQ ID NO: 1473727 - RNA, 19 nt, Artificial Sequence
  Description of Artificial Sequence: Synthetic oligonucleotide
  Antisense strand to SEQ ID NO: 1473726
acuuuacuuauucacauga

SEQ ID NO: 1473728 - RNA, 19 nt, Artificial Sequence
  Description of Artificial Sequence: Synthetic oligonucleotide
  Sense strand starting at position 1409 of SEQ ID NO: 1244218
ugggaucacuuaguuguga

SEQ ID NO: 1473729 - RNA, 19 nt, Artificial Sequence
  Description of Artificial Sequence: Synthetic oligonucleotide
  Antisense strand to SEQ ID NO: 1473728
ucacaacuaagugauccca

SEQ ID NO: 1473730 - RNA, 19 nt, Artificial Sequence
  Description of Artificial Sequence: Synthetic oligonucleotide
  Sense strand starting at position 2186 of SEQ ID NO: 1244218
gcuguuuauccagagggua

SEQ ID NO: 1473731 - RNA, 19 nt, Artificial Sequence
  Description of Artificial Sequence: Synthetic oligonucleotide
  Antisense strand to SEQ ID NO: 1473730
uacccucuggauaaacagc

SEQ ID NO: 1473732 - RNA, 19 nt, Artificial Sequence
  Description of Artificial Sequence: Synthetic oligonucleotide
  Sense strand starting at position 2188 of SEQ ID NO: 1244218
uguuuauccagaggguaaa

SEQ ID NO: 1473733 - RNA, 19 nt, Artificial Sequence
  Description of Artificial Sequence: Synthetic oligonucleotide
  Antisense strand to SEQ ID NO: 1473732
uuuacccucuggauaaaca

SEQ ID NO: 1473734 - RNA, 19 nt, Artificial Sequence
  Description of Artificial Sequence: Synthetic oligonucleotide
  Sense strand starting at position 2460 of SEQ ID NO: 1244218
gcuccucccagguggaaau

SEQ ID NO: 1473735 - RNA, 19 nt, Artificial Sequence
  Description of Artificial Sequence: Synthetic oligonucleotide
  Antisense strand to SEQ ID NO: 1473734
auuuccaccugggaggagc

SEQ ID NO: 1473736 - RNA, 19 nt, Artificial Sequence
  Description of Artificial Sequence: Synthetic oligonucleotide
  Sense strand starting at position 2567 of SEQ ID NO: 1244218
gugagcaucagucaugagu

SEQ ID NO: 1473737 - RNA, 19 nt, Artificial Sequence
  Description of Artificial Sequence: Synthetic oligonucleotide
  Antisense strand to SEQ ID NO: 1473736
acucaugacugaugcucac

SEQ ID NO: 1473738 - RNA, 19 nt, Artificial Sequence
  Description of Artificial Sequence: Synthetic oligonucleotide
  Sense strand starting at position 2570 of SEQ ID NO: 1244218
agcaucagucaugaguaau

SEQ ID NO: 1473739 - RNA, 19 nt, Artificial Sequence
  Description of Artificial Sequence: Synthetic oligonucleotide
  Antisense strand to SEQ ID NO: 1473738
auuacucaugacugaugcu

SEQ ID NO: 1473740 - RNA, 19 nt, Artificial Sequence
  Description of Artificial Sequence: Synthetic oligonucleotide
  Sense strand starting at position 2681 of SEQ ID NO: 1244218
cgcacuucucucuaaauag

SEQ ID NO: 1473741 - RNA, 19 nt, Artificial Sequence
  Description of Artificial Sequence: Synthetic oligonucleotide
  Antisense strand to SEQ ID NO: 1473740
cuauuuagagagaagugcg

SEQ ID NO: 1473742 - RNA, 19 nt, Artificial Sequence
  Description of Artificial Sequence: Synthetic oligonucleotide
  Sense strand starting at position 2908 of SEQ ID NO: 1244218
gaguucgaaccuuauagac

SEQ ID NO: 1473743 - RNA, 19 nt, Artificial Sequence
  Description of Artificial Sequence: Synthetic oligonucleotide
  Antisense strand to SEQ ID NO: 1473742
gucuauaagguucgaacuc

SEQ ID NO: 1473744 - RNA, 19 nt, Artificial Sequence
  Description of Artificial Sequence: Synthetic oligonucleotide
  Sense strand starting at position 2961 of SEQ ID NO: 1244218
cccagagugucaucccaag

SEQ ID NO: 1473745 - RNA, 19 nt, Artificial Sequence
  Description of Artificial Sequence: Synthetic oligonucleotide
  Antisense strand to SEQ ID NO: 1473744
cuugggaugacacucuggg

SEQ ID NO: 1473746 - RNA, 19 nt, Artificial Sequence
  Description of Artificial Sequence: Synthetic oligonucleotide
  Sense strand starting at position 2967 of SEQ ID NO: 1244218
gugucaucccaaggaauaa

SEQ ID NO: 1473747 - RNA, 19 nt, Artificial Sequence
  Description of Artificial Sequence: Synthetic oligonucleotide
  Antisense strand to SEQ ID NO: 1473746
uuauuccuugggaugacac

SEQ ID NO: 1473748 - RNA, 19 nt, Artificial Sequence
  Description of Artificial Sequence: Synthetic oligonucleotide
  Sense strand starting at position 3212 of SEQ ID NO: 1244218
gggaucuaguccuucccuu

SEQ ID NO: 1473749 - RNA, 19 nt, Artificial Sequence
  Description of Artificial Sequence: Synthetic oligonucleotide
  Antisense strand to SEQ ID NO: 1473748
aagggaaggacuagauccc

SEQ ID NO: 1473750 - RNA, 19 nt, Artificial Sequence
  Description of Artificial Sequence: Synthetic oligonucleotide
  Sense strand starting at position 3242 of SEQ ID NO: 1244218
uucuuuguaagaugggcua

SEQ ID NO: 1473751 - RNA, 19 nt, Artificial Sequence
  Description of Artificial Sequence: Synthetic oligonucleotide
  Antisense strand to SEQ ID NO: 1473750
uagcccaucuuacaaagaa

SEQ ID NO: 1473752 - RNA, 19 nt, Artificial Sequence
  Description of Artificial Sequence: Synthetic oligonucleotide
  Sense strand starting at position 3244 of SEQ ID NO: 1244218
cuuuguaagaugggcuaga

SEQ ID NO: 1473753 - RNA, 19 nt, Artificial Sequence
  Description of Artificial Sequence: Synthetic oligonucleotide
  Antisense strand to SEQ ID NO: 1473752
ucuagcccaucuuacaaag

SEQ ID NO: 1473754 - RNA, 19 nt, Artificial Sequence
  Description of Artificial Sequence: Synthetic oligonucleotide
  Sense strand starting at position 3245 of SEQ ID NO: 1244218
uuuguaagaugggcuagaa

SEQ ID NO: 1473755 - RNA, 19 nt, Artificial Sequence
  Description of Artificial Sequence: Synthetic oligonucleotide
  Antisense strand to SEQ ID NO: 1473754
uucuagcccaucuuacaaa

SEQ ID NO: 1473756 - RNA, 19 nt, Artificial Sequence
  Description of Artificial Sequence: Synthetic oligonucleotide
  Sense strand starting at position 3321 of SEQ ID NO: 1244218
guaaaugaugaaugaguua

SEQ ID NO: 1473757 - RNA, 19 nt, Artificial Sequence
  Description of Artificial Sequence: Synthetic oligonucleotide
  Antisense strand to SEQ ID NO: 1473756
uaacucauucaucauuuac

SEQ ID NO: 1473758 - RNA, 19 nt, Artificial Sequence
  Description of Artificial Sequence: Synthetic oligonucleotide
  Sense strand starting at position 3324 of SEQ ID NO: 1244218
aaugaugaaugaguuacuu

SEQ ID NO: 1473759 - RNA, 19 nt, Artificial Sequence
  Description of Artificial Sequence: Synthetic oligonucleotide
  Antisense strand to SEQ ID NO: 1473758
aaguaacucauucaucauu

SEQ ID NO: 1473760 - RNA, 19 nt, Artificial Sequence
  Description of Artificial Sequence: Synthetic oligonucleotide
  Sense strand starting at position 3328 of SEQ ID NO: 1244218
augaaugaguuacuuggau

SEQ ID NO: 1473761 - RNA, 19 nt, Artificial Sequence
  Description of Artificial Sequence: Synthetic oligonucleotide
  Antisense strand to SEQ ID NO: 1473760
auccaaguaacucauucau

SEQ ID NO: 1473762 - RNA, 19 nt, Artificial Sequence
  Description of Artificial Sequence: Synthetic oligonucleotide
  Sense strand starting at position 3336 of SEQ ID NO: 1244218
guuacuuggaucugauaug

SEQ ID NO: 1473763 - RNA, 19 nt, Artificial Sequence
  Description of Artificial Sequence: Synthetic oligonucleotide
  Antisense strand to SEQ ID NO: 1473762
cauaucagauccaaguaac

SEQ ID NO: 1473764 - RNA, 19 nt, Artificial Sequence
  Description of Artificial Sequence: Synthetic oligonucleotide
  Sense strand starting at position 3501 of SEQ ID NO: 1244218
aaaucagaaugugugcuua

SEQ ID NO: 1473765 - RNA, 19 nt, Artificial Sequence
  Description of Artificial Sequence: Synthetic oligonucleotide
  Antisense strand to SEQ ID NO: 1473764
uaagcacacauucugauuu

SEQ ID NO: 1473766 - RNA, 19 nt, Artificial Sequence
  Description of Artificial Sequence: Synthetic oligonucleotide
  Sense strand starting at position 3505 of SEQ ID NO: 1244218
cagaaugugugcuuaugag

SEQ ID NO: 1473767 - RNA, 19 nt, Artificial Sequence
  Description of Artificial Sequence: Synthetic oligonucleotide
  Antisense strand to SEQ ID NO: 1473766
cucauaagcacacauucug

SEQ ID NO: 1473768 - RNA, 19 nt, Artificial Sequence
  Description of Artificial Sequence: Synthetic oligonucleotide
  Sense strand starting at position 3555 of SEQ ID NO: 1244218
cagguaacuuggguuacau

SEQ ID NO: 1473769 - RNA, 19 nt, Artificial Sequence
  Description of Artificial Sequence: Synthetic oligonucleotide
  Antisense strand to SEQ ID NO: 1473768
auguaacccaaguuaccug

SEQ ID NO: 1473770 - RNA, 19 nt, Artificial Sequence
  Description of Artificial Sequence: Synthetic oligonucleotide
  Sense strand starting at position 3557 of SEQ ID NO: 1244218
gguaacuuggguuacauua

SEQ ID NO: 1473771 - RNA, 19 nt, Artificial Sequence
  Description of Artificial Sequence: Synthetic oligonucleotide
  Antisense strand to SEQ ID NO: 1473770
uaauguaacccaaguuacc

SEQ ID NO: 1473772 - RNA, 19 nt, Artificial Sequence
  Description of Artificial Sequence: Synthetic oligonucleotide
  Sense strand starting at position 3658 of SEQ ID NO: 1244218
agaugacacauccguggua

SEQ ID NO: 1473773 - RNA, 19 nt, Artificial Sequence
  Description of Artificial Sequence: Synthetic oligonucleotide
  Antisense strand to SEQ ID NO: 1473772
uaccacggaugugucaucu

SEQ ID NO: 1473774 - RNA, 19 nt, Artificial Sequence
  Description of Artificial Sequence: Synthetic oligonucleotide
  Sense strand starting at position 3660 of SEQ ID NO: 1244218
augacacauccgugguaga

SEQ ID NO: 1473775 - RNA, 19 nt, Artificial Sequence
  Description of Artificial Sequence: Synthetic oligonucleotide
  Antisense strand to SEQ ID NO: 1473774
ucuaccacggaugugucau

SEQ ID NO: 1473776 - RNA, 19 nt, Artificial Sequence
  Description of Artificial Sequence: Synthetic oligonucleotide
  Sense strand starting at position 3749 of SEQ ID NO: 1244218
gcaccucugagugaguaua

SEQ ID NO: 1473777 - RNA, 19 nt, Artificial Sequence
  Description of Artificial Sequence: Synthetic oligonucleotide
  Antisense strand to SEQ ID NO: 1473776
uauacucacucagaggugc

SEQ ID NO: 1473778 - RNA, 19 nt, Artificial Sequence
  Description of Artificial Sequence: Synthetic oligonucleotide
  Sense strand starting at position 3751 of SEQ ID NO: 1244218
accucugagugaguauaau

SEQ ID NO: 1473779 - RNA, 19 nt, Artificial Sequence
  Description of Artificial Sequence: Synthetic oligonucleotide
  Antisense strand to SEQ ID NO: 1473778
auuauacucacucagaggu

SEQ ID NO: 1473780 - RNA, 19 nt, Artificial Sequence
  Description of Artificial Sequence: Synthetic oligonucleotide
  Sense strand starting at position 253 of SEQ ID NO: 1244219
ugaagaagugcucagcauc

SEQ ID NO: 1473781 - RNA, 19 nt, Artificial Sequence
  Description of Artificial Sequence: Synthetic oligonucleotide
  Antisense strand to SEQ ID NO: 1473780
gaugcugagcacuucuuca

SEQ ID NO: 1473782 - RNA, 19 nt, Artificial Sequence
  Description of Artificial Sequence: Synthetic oligonucleotide
  Sense strand starting at position 256 of SEQ ID NO: 1244219
agaagugcucagcaucacu

SEQ ID NO: 1473783 - RNA, 19 nt, Artificial Sequence
  Description of Artificial Sequence: Synthetic oligonucleotide
  Antisense strand to SEQ ID NO: 1473782
agugaugcugagcacuucu

SEQ ID NO: 1473784 - RNA, 19 nt, Artificial Sequence
  Description of Artificial Sequence: Synthetic oligonucleotide
  Sense strand starting at position 321 of SEQ ID NO: 1244219
ccacaauuagaauggcuau

SEQ ID NO: 1473785 - RNA, 19 nt, Artificial Sequence
  Description of Artificial Sequence: Synthetic oligonucleotide
  Antisense strand to SEQ ID NO: 1473784
auagccauucuaauugugg

SEQ ID NO: 1473786 - RNA, 19 nt, Artificial Sequence
  Description of Artificial Sequence: Synthetic oligonucleotide
  Sense strand starting at position 892 of SEQ ID NO: 1244219
ggcagagauuggucuacag

SEQ ID NO: 1473787 - RNA, 19 nt, Artificial Sequence
  Description of Artificial Sequence: Synthetic oligonucleotide
  Antisense strand to SEQ ID NO: 1473786
cuguagaccaaucucugcc

SEQ ID NO: 1473788 - RNA, 19 nt, Artificial Sequence
  Description of Artificial Sequence: Synthetic oligonucleotide
  Sense strand starting at position 894 of SEQ ID NO: 1244219
cagagauuggucuacaggu

SEQ ID NO: 1473789 - RNA, 19 nt, Artificial Sequence
  Description of Artificial Sequence: Synthetic oligonucleotide
  Antisense strand to SEQ ID NO: 1473788
accuguagaccaaucucug

SEQ ID NO: 1473790 - RNA, 19 nt, Artificial Sequence
  Description of Artificial Sequence: Synthetic oligonucleotide
  Sense strand starting at position 896 of SEQ ID NO: 1244219
gagauuggucuacagguac

SEQ ID NO: 1473791 - RNA, 19 nt, Artificial Sequence
  Description of Artificial Sequence: Synthetic oligonucleotide
  Antisense strand to SEQ ID NO: 1473790
guaccuguagaccaaucuc

SEQ ID NO: 1473792 - RNA, 19 nt, Artificial Sequence
  Description of Artificial Sequence: Synthetic oligonucleotide
  Sense strand starting at position 947 of SEQ ID NO: 1244219
gguauucuaauguacagua

SEQ ID NO: 1473793 - RNA, 19 nt, Artificial Sequence
  Description of Artificial Sequence: Synthetic oligonucleotide
  Antisense strand to SEQ ID NO: 1473792
uacuguacauuagaauacc

SEQ ID NO: 1473794 - RNA, 19 nt, Artificial Sequence
  Description of Artificial Sequence: Synthetic oligonucleotide
  Sense strand starting at position 967 of SEQ ID NO: 1244219
ggugacugugguuaguaau

SEQ ID NO: 1473795 - RNA, 19 nt, Artificial Sequence
  Description of Artificial Sequence: Synthetic oligonucleotide
  Antisense strand to SEQ ID NO: 1473794
auuacuaaccacagucacc

SEQ ID NO: 1473796 - RNA, 19 nt, Artificial Sequence
  Description of Artificial Sequence: Synthetic oligonucleotide
  Sense strand starting at position 1053 of SEQ ID NO: 1244219
aaauguaugaggugacgaa

SEQ ID NO: 1473797 - RNA, 19 nt, Artificial Sequence
  Description of Artificial Sequence: Synthetic oligonucleotide
  Antisense strand to SEQ ID NO: 1473796
uucgucaccucauacauuu

SEQ ID NO: 1473798 - RNA, 19 nt, Artificial Sequence
  Description of Artificial Sequence: Synthetic oligonucleotide
  Sense strand starting at position 1054 of SEQ ID NO: 1244219
aauguaugaggugacgaau

SEQ ID NO: 1473799 - RNA, 19 nt, Artificial Sequence
  Description of Artificial Sequence: Synthetic oligonucleotide
  Antisense strand to SEQ ID NO: 1473798
auucgucaccucauacauu

SEQ ID NO: 1473800 - RNA, 19 nt, Artificial Sequence
  Description of Artificial Sequence: Synthetic oligonucleotide
  Sense strand starting at position 1057 of SEQ ID NO: 1244219
guaugaggugacgaauaug

SEQ ID NO: 1473801 - RNA, 19 nt, Artificial Sequence
  Description of Artificial Sequence: Synthetic oligonucleotide
  Antisense strand to SEQ ID NO: 1473800
cauauucgucaccucauac

SEQ ID NO: 1473802 - RNA, 19 nt, Artificial Sequence
  Description of Artificial Sequence: Synthetic oligonucleotide
  Sense strand starting at position 1062 of SEQ ID NO: 1244219
aggugacgaauaugcuaaa

SEQ ID NO: 1473803 - RNA, 19 nt, Artificial Sequence
  Description of Artificial Sequence: Synthetic oligonucleotide
  Antisense strand to SEQ ID NO: 1473802
uuuagcauauucgucaccu

SEQ ID NO: 1473804 - RNA, 19 nt, Artificial Sequence
  Description of Artificial Sequence: Synthetic oligonucleotide
  Sense strand starting at position 1105 of SEQ ID NO: 1244219
cguauacauguauggaaac

SEQ ID NO: 1473805 - RNA, 19 nt, Artificial Sequence
  Description of Artificial Sequence: Synthetic oligonucleotide
  Antisense strand to SEQ ID NO: 1473804
guuuccauacauguauacg

SEQ ID NO: 1473806 - RNA, 19 nt, Artificial Sequence
  Description of Artificial Sequence: Synthetic oligonucleotide
  Sense strand starting at position 1314 of SEQ ID NO: 1244219
cagaauggcccaggucuua

SEQ ID NO: 1473807 - RNA, 19 nt, Artificial Sequence
  Description of Artificial Sequence: Synthetic oligonucleotide
  Antisense strand to SEQ ID NO: 1473806
uaagaccugggccauucug

SEQ ID NO: 1473808 - RNA, 19 nt, Artificial Sequence
  Description of Artificial Sequence: Synthetic oligonucleotide
  Sense strand starting at position 1412 of SEQ ID NO: 1244219
gagaaaugggagugugacu

SEQ ID NO: 1473809 - RNA, 19 nt, Artificial Sequence
  Description of Artificial Sequence: Synthetic oligonucleotide
  Antisense strand to SEQ ID NO: 1473808
agucacacucccauuucuc

SEQ ID NO: 1473810 - RNA, 19 nt, Artificial Sequence
  Description of Artificial Sequence: Synthetic oligonucleotide
  Sense strand starting at position 2200 of SEQ ID NO: 1244219
cuaagaacucaucgucauu

SEQ ID NO: 1473811 - RNA, 19 nt, Artificial Sequence
  Description of Artificial Sequence: Synthetic oligonucleotide
  Antisense strand to SEQ ID NO: 1473810
aaugacgaugaguucuuag

SEQ ID NO: 1473812 - RNA, 19 nt, Artificial Sequence
  Description of Artificial Sequence: Synthetic oligonucleotide
  Sense strand starting at position 2212 of SEQ ID NO: 1244219
cgucauuugaggugauagu

SEQ ID NO: 1473813 - RNA, 19 nt, Artificial Sequence
  Description of Artificial Sequence: Synthetic oligonucleotide
  Antisense strand to SEQ ID NO: 1473812
acuaucaccucaaaugacg

SEQ ID NO: 1473814 - RNA, 19 nt, Artificial Sequence
  Description of Artificial Sequence: Synthetic oligonucleotide
  Sense strand starting at position 2395 of SEQ ID NO: 1244219
cuacaugugaaacgugaau

SEQ ID NO: 1473815 - RNA, 19 nt, Artificial Sequence
  Description of Artificial Sequence: Synthetic oligonucleotide
  Antisense strand to SEQ ID NO: 1473814
auucacguuucacauguag

SEQ ID NO: 1473816 - RNA, 19 nt, Artificial Sequence
  Description of Artificial Sequence: Synthetic oligonucleotide
  Sense strand starting at position 2397 of SEQ ID NO: 1244219
acaugugaaacgugaauca

SEQ ID NO: 1473817 - RNA, 19 nt, Artificial Sequence
  Description of Artificial Sequence: Synthetic oligonucleotide
  Antisense strand to SEQ ID NO: 1473816
ugauucacguuucacaugu

SEQ ID NO: 1473818 - RNA, 19 nt, Artificial Sequence
  Description of Artificial Sequence: Synthetic oligonucleotide
  Sense strand starting at position 2410 of SEQ ID NO: 1244219
gaaucacacgaguguuaga

SEQ ID NO: 1473819 - RNA, 19 nt, Artificial Sequence
  Description of Artificial Sequence: Synthetic oligonucleotide
  Antisense strand to SEQ ID NO: 1473818
ucuaacacucgugugauuc

SEQ ID NO: 1473820 - RNA, 19 nt, Artificial Sequence
  Description of Artificial Sequence: Synthetic oligonucleotide
  Sense strand starting at position 2452 of SEQ ID NO: 1244219
ugggaauacguuugauuau

SEQ ID NO: 1473821 - RNA, 19 nt, Artificial Sequence
  Description of Artificial Sequence: Synthetic oligonucleotide
  Antisense strand to SEQ ID NO: 1473820
auaaucaaacguauuccca

SEQ ID NO: 1473822 - RNA, 19 nt, Artificial Sequence
  Description of Artificial Sequence: Synthetic oligonucleotide
  Sense strand starting at position 2461 of SEQ ID NO: 1244219
guuugauuaucacuugaua

SEQ ID NO: 1473823 - RNA, 19 nt, Artificial Sequence
  Description of Artificial Sequence: Synthetic oligonucleotide
  Antisense strand to SEQ ID NO: 1473822
uaucaagugauaaucaaac

SEQ ID NO: 1473824 - RNA, 19 nt, Artificial Sequence
  Description of Artificial Sequence: Synthetic oligonucleotide
  Sense strand starting at position 2472 of SEQ ID NO: 1244219
acuugauauagugggauac

SEQ ID NO: 1473825 - RNA, 19 nt, Artificial Sequence
  Description of Artificial Sequence: Synthetic oligonucleotide
  Antisense strand to SEQ ID NO: 1473824
guaucccacuauaucaagu

SEQ ID NO: 1473826 - RNA, 19 nt, Artificial Sequence
  Description of Artificial Sequence: Synthetic oligonucleotide
  Sense strand starting at position 2473 of SEQ ID NO: 1244219
cuugauauagugggauaca

SEQ ID NO: 1473827 - RNA, 19 nt, Artificial Sequence
  Description of Artificial Sequence: Synthetic oligonucleotide
  Antisense strand to SEQ ID NO: 1473826
uguaucccacuauaucaag

SEQ ID NO: 1473828 - RNA, 19 nt, Artificial Sequence
  Description of Artificial Sequence: Synthetic oligonucleotide
  Sense strand starting at position 2487 of SEQ ID NO: 1244219
auacauaggccuugaauag

SEQ ID NO: 1473829 - RNA, 19 nt, Artificial Sequence
  Description of Artificial Sequence: Synthetic oligonucleotide
  Antisense strand to SEQ ID NO: 1473828
cuauucaaggccuauguau

SEQ ID NO: 1473830 - RNA, 19 nt, Artificial Sequence
  Description of Artificial Sequence: Synthetic oligonucleotide
  Sense strand starting at position 2518 of SEQ ID NO: 1244219
uagaguuguacaggacaga

SEQ ID NO: 1473831 - RNA, 19 nt, Artificial Sequence
  Description of Artificial Sequence: Synthetic oligonucleotide
  Antisense strand to SEQ ID NO: 1473830
ucuguccuguacaacucua

SEQ ID NO: 1473832 - RNA, 19 nt, Artificial Sequence
  Description of Artificial Sequence: Synthetic oligonucleotide
  Sense strand starting at position 2553 of SEQ ID NO: 1244219
ccacuaaguguuggaauaa

SEQ ID NO: 1473833 - RNA, 19 nt, Artificial Sequence
  Description of Artificial Sequence: Synthetic oligonucleotide
  Antisense strand to SEQ ID NO: 1473832
uuauuccaacacuuagugg

SEQ ID NO: 1473834 - RNA, 19 nt, Artificial Sequence
  Description of Artificial Sequence: Synthetic oligonucleotide
  Sense strand starting at position 2696 of SEQ ID NO: 1244219
ugugcauguaaugaagaau

SEQ ID NO: 1473835 - RNA, 19 nt, Artificial Sequence
  Description of Artificial Sequence: Synthetic oligonucleotide
  Antisense strand to SEQ ID NO: 1473834
auucuucauuacaugcaca

SEQ ID NO: 1473836 - RNA, 19 nt, Artificial Sequence
  Description of Artificial Sequence: Synthetic oligonucleotide
  Sense strand starting at position 2699 of SEQ ID NO: 1244219
gcauguaaugaagaauucu

SEQ ID NO: 1473837 - RNA, 19 nt, Artificial Sequence
  Description of Artificial Sequence: Synthetic oligonucleotide
  Antisense strand to SEQ ID NO: 1473836
agaauucuucauuacaugc

SEQ ID NO: 1473838 - RNA, 19 nt, Artificial Sequence
  Description of Artificial Sequence: Synthetic oligonucleotide
  Sense strand starting at position 3056 of SEQ ID NO: 1244219
ugacauaggugcucugauu

SEQ ID NO: 1473839 - RNA, 19 nt, Artificial Sequence
  Description of Artificial Sequence: Synthetic oligonucleotide
  Antisense strand to SEQ ID NO: 1473838
aaucagagcaccuauguca

SEQ ID NO: 1473840 - RNA, 19 nt, Artificial Sequence
  Description of Artificial Sequence: Synthetic oligonucleotide
  Sense strand starting at position 3069 of SEQ ID NO: 1244219
cugauuagcaagugacaag

SEQ ID NO: 1473841 - RNA, 19 nt, Artificial Sequence
  Description of Artificial Sequence: Synthetic oligonucleotide
  Antisense strand to SEQ ID NO: 1473840
cuugucacuugcuaaucag

SEQ ID NO: 1473842 - RNA, 19 nt, Artificial Sequence
  Description of Artificial Sequence: Synthetic oligonucleotide
  Sense strand starting at position 3279 of SEQ ID NO: 1244219
uccuguuagucaccagaca

SEQ ID NO: 1473843 - RNA, 19 nt, Artificial Sequence
  Description of Artificial Sequence: Synthetic oligonucleotide
  Antisense strand to SEQ ID NO: 1473842
ugucuggugacuaacagga

SEQ ID NO: 1473844 - RNA, 19 nt, Artificial Sequence
  Description of Artificial Sequence: Synthetic oligonucleotide
  Sense strand starting at position 3302 of SEQ ID NO: 1244219
uuugaaucacuucgggauc

SEQ ID NO: 1473845 - RNA, 19 nt, Artificial Sequence
  Description of Artificial Sequence: Synthetic oligonucleotide
  Antisense strand to SEQ ID NO: 1473844
gaucccgaagugauucaaa

SEQ ID NO: 1473846 - RNA, 19 nt, Artificial Sequence
  Description of Artificial Sequence: Synthetic oligonucleotide
  Sense strand starting at position 3472 of SEQ ID NO: 1244219
acaaucucaucgcuagaga

SEQ ID NO: 1473847 - RNA, 19 nt, Artificial Sequence
  Description of Artificial Sequence: Synthetic oligonucleotide
  Antisense strand to SEQ ID NO: 1473846
ucucuagcgaugagauugu

SEQ ID NO: 1473848 - RNA, 19 nt, Artificial Sequence
  Description of Artificial Sequence: Synthetic oligonucleotide
  Sense strand starting at position 3483 of SEQ ID NO: 1244219
gcuagagaccuuugacucu

SEQ ID NO: 1473849 - RNA, 19 nt, Artificial Sequence
  Description of Artificial Sequence: Synthetic oligonucleotide
  Antisense strand to SEQ ID NO: 1473848
agagucaaaggucucuagc

SEQ ID NO: 1473850 - RNA, 19 nt, Artificial Sequence
  Description of Artificial Sequence: Synthetic oligonucleotide
  Sense strand starting at position 3555 of SEQ ID NO: 1244219
gugguaaccagagguaacu

SEQ ID NO: 1473851 - RNA, 19 nt, Artificial Sequence
  Description of Artificial Sequence: Synthetic oligonucleotide
  Antisense strand to SEQ ID NO: 1473850
aguuaccucugguuaccac

SEQ ID NO: 1473852 - RNA, 19 nt, Artificial Sequence
  Description of Artificial Sequence: Synthetic oligonucleotide
  Sense strand starting at position 3603 of SEQ ID NO: 1244219
cgagacauauuaucucaua

SEQ ID NO: 1473853 - RNA, 19 nt, Artificial Sequence
  Description of Artificial Sequence: Synthetic oligonucleotide
  Antisense strand to SEQ ID NO: 1473852
uaugagauaauaugucucg

SEQ ID NO: 1473854 - RNA, 19 nt, Artificial Sequence
  Description of Artificial Sequence: Synthetic oligonucleotide
  Sense strand starting at position 3678 of SEQ ID NO: 1244219
gccucuuuggaagacuuaa

SEQ ID NO: 1473855 - RNA, 19 nt, Artificial Sequence
  Description of Artificial Sequence: Synthetic oligonucleotide
  Antisense strand to SEQ ID NO: 1473854
uuaagucuuccaaagaggc

SEQ ID NO: 1473856 - RNA, 19 nt, Artificial Sequence
  Description of Artificial Sequence: Synthetic oligonucleotide
  Sense strand starting at position 3838 of SEQ ID NO: 1244219
agauaaucugugcaucacu

SEQ ID NO: 1473857 - RNA, 19 nt, Artificial Sequence
  Description of Artificial Sequence: Synthetic oligonucleotide
  Antisense strand to SEQ ID NO: 1473856
agugaugcacagauuaucu

SEQ ID NO: 1473858 - RNA, 19 nt, Artificial Sequence
  Description of Artificial Sequence: Synthetic oligonucleotide
  Sense strand starting at position 3960 of SEQ ID NO: 1244219
augccucagaguuguaaga

SEQ ID NO: 1473859 - RNA, 19 nt, Artificial Sequence
  Description of Artificial Sequence: Synthetic oligonucleotide
  Antisense strand to SEQ ID NO: 1473858
ucuuacaacucugaggcau

SEQ ID NO: 1473860 - RNA, 19 nt, Artificial Sequence
  Description of Artificial Sequence: Synthetic oligonucleotide
  Sense strand starting at position 63 of SEQ ID NO: 1244220
uuucuauauggugaaaguc

SEQ ID NO: 1473861 - RNA, 19 nt, Artificial Sequence
  Description of Artificial Sequence: Synthetic oligonucleotide
  Antisense strand to SEQ ID NO: 1473860
gacuuucaccauauagaaa

SEQ ID NO: 1473862 - RNA, 19 nt, Artificial Sequence
  Description of Artificial Sequence: Synthetic oligonucleotide
  Sense strand starting at position 185 of SEQ ID NO: 1244220
aagauuagauuguuguaug

SEQ ID NO: 1473863 - RNA, 19 nt, Artificial Sequence
  Description of Artificial Sequence: Synthetic oligonucleotide
  Antisense strand to SEQ ID NO: 1473862
cauacaacaaucuaaucuu

SEQ ID NO: 1473864 - RNA, 19 nt, Artificial Sequence
  Description of Artificial Sequence: Synthetic oligonucleotide
  Sense strand starting at position 579 of SEQ ID NO: 1244220
ucuuuaagucguguucugu

SEQ ID NO: 1473865 - RNA, 19 nt, Artificial Sequence
  Description of Artificial Sequence: Synthetic oligonucleotide
  Antisense strand to SEQ ID NO: 1473864
acagaacacgacuuaaaga

SEQ ID NO: 1473866 - RNA, 19 nt, Artificial Sequence
  Description of Artificial Sequence: Synthetic oligonucleotide
  Sense strand starting at position 580 of SEQ ID NO: 1244220
cuuuaagucguguucugua

SEQ ID NO: 1473867 - RNA, 19 nt, Artificial Sequence
  Description of Artificial Sequence: Synthetic oligonucleotide
  Antisense strand to SEQ ID NO: 1473866
uacagaacacgacuuaaag

SEQ ID NO: 1473868 - RNA, 19 nt, Artificial Sequence
  Description of Artificial Sequence: Synthetic oligonucleotide
  Sense strand starting at position 631 of SEQ ID NO: 1244220
cuagauguauuccuaggaa

SEQ ID NO: 1473869 - RNA, 19 nt, Artificial Sequence
  Description of Artificial Sequence: Synthetic oligonucleotide
  Antisense strand to SEQ ID NO: 1473868
uuccuaggaauacaucuag

SEQ ID NO: 1473870 - RNA, 19 nt, Artificial Sequence
  Description of Artificial Sequence: Synthetic oligonucleotide
  Sense strand starting at position 634 of SEQ ID NO: 1244220
gauguauuccuaggaagug

SEQ ID NO: 1473871 - RNA, 19 nt, Artificial Sequence
  Description of Artificial Sequence: Synthetic oligonucleotide
  Antisense strand to SEQ ID NO: 1473870
cacuuccuaggaauacauc

SEQ ID NO: 1473872 - RNA, 19 nt, Artificial Sequence
  Description of Artificial Sequence: Synthetic oligonucleotide
  Sense strand starting at position 689 of SEQ ID NO: 1244220
aaaguuguagaauguacaa

SEQ ID NO: 1473873 - RNA, 19 nt, Artificial Sequence
  Description of Artificial Sequence: Synthetic oligonucleotide
  Antisense strand to SEQ ID NO: 1473872
uuguacauucuacaacuuu

SEQ ID NO: 1473874 - RNA, 19 nt, Artificial Sequence
  Description of Artificial Sequence: Synthetic oligonucleotide
  Sense strand starting at position 739 of SEQ ID NO: 1244220
cuaagaaguguuugaccug

SEQ ID NO: 1473875 - RNA, 19 nt, Artificial Sequence
  Description of Artificial Sequence: Synthetic oligonucleotide
  Antisense strand to SEQ ID NO: 1473874
caggucaaacacuucuuag

SEQ ID NO: 1473876 - RNA, 19 nt, Artificial Sequence
  Description of Artificial Sequence: Synthetic oligonucleotide
  Sense strand starting at position 759 of SEQ ID NO: 1244220
ggucuaaaugcaggaaacu

SEQ ID NO: 1473877 - RNA, 19 nt, Artificial Sequence
  Description of Artificial Sequence: Synthetic oligonucleotide
  Antisense strand to SEQ ID NO: 1473876
aguuuccugcauuuagacc

SEQ ID NO: 1473878 - RNA, 19 nt, Artificial Sequence
  Description of Artificial Sequence: Synthetic oligonucleotide
  Sense strand starting at position 760 of SEQ ID NO: 1244220
gucuaaaugcaggaaacuu

SEQ ID NO: 1473879 - RNA, 19 nt, Artificial Sequence
  Description of Artificial Sequence: Synthetic oligonucleotide
  Antisense strand to SEQ ID NO: 1473878
aaguuuccugcauuuagac

SEQ ID NO: 1473880 - RNA, 19 nt, Artificial Sequence
  Description of Artificial Sequence: Synthetic oligonucleotide
  Sense strand starting at position 879 of SEQ ID NO: 1244220
gagguaauuggccagaggu

SEQ ID NO: 1473881 - RNA, 19 nt, Artificial Sequence
  Description of Artificial Sequence: Synthetic oligonucleotide
  Antisense strand to SEQ ID NO: 1473880
accucuggccaauuaccuc

SEQ ID NO: 1473882 - RNA, 19 nt, Artificial Sequence
  Description of Artificial Sequence: Synthetic oligonucleotide
  Sense strand starting at position 881 of SEQ ID NO: 1244220
gguaauuggccagagguug

SEQ ID NO: 1473883 - RNA, 19 nt, Artificial Sequence
  Description of Artificial Sequence: Synthetic oligonucleotide
  Antisense strand to SEQ ID NO: 1473882
caaccucuggccaauuacc

SEQ ID NO: 1473884 - RNA, 19 nt, Artificial Sequence
  Description of Artificial Sequence: Synthetic oligonucleotide
  Sense strand starting at position 970 of SEQ ID NO: 1244220
acaccauuaggcugggaau

SEQ ID NO: 1473885 - RNA, 19 nt, Artificial Sequence
  Description of Artificial Sequence: Synthetic oligonucleotide
  Antisense strand to SEQ ID NO: 1473884
auucccagccuaauggugu

SEQ ID NO: 1473886 - RNA, 19 nt, Artificial Sequence
  Description of Artificial Sequence: Synthetic oligonucleotide
  Sense strand starting at position 1077 of SEQ ID NO: 1244220
acaagugacucuguacaca

SEQ ID NO: 1473887 - RNA, 19 nt, Artificial Sequence
  Description of Artificial Sequence: Synthetic oligonucleotide
  Antisense strand to SEQ ID NO: 1473886
uguguacagagucacuugu

SEQ ID NO: 1473888 - RNA, 19 nt, Artificial Sequence
  Description of Artificial Sequence: Synthetic oligonucleotide
  Sense strand starting at position 1225 of SEQ ID NO: 1244220
cuuugaguaucucuagaaa

SEQ ID NO: 1473889 - RNA, 19 nt, Artificial Sequence
  Description of Artificial Sequence: Synthetic oligonucleotide
  Antisense strand to SEQ ID NO: 1473888
uuucuagagauacucaaag

SEQ ID NO: 1473890 - RNA, 19 nt, Artificial Sequence
  Description of Artificial Sequence: Synthetic oligonucleotide
  Sense strand starting at position 1438 of SEQ ID NO: 1244220
gggcuucucaaggaaacgu

SEQ ID NO: 1473891 - RNA, 19 nt, Artificial Sequence
  Description of Artificial Sequence: Synthetic oligonucleotide
  Antisense strand to SEQ ID NO: 1473890
acguuuccuugagaagccc

SEQ ID NO: 1473892 - RNA, 19 nt, Artificial Sequence
  Description of Artificial Sequence: Synthetic oligonucleotide
  Sense strand starting at position 2188 of SEQ ID NO: 1244220
uguagacauuguuuagaug

SEQ ID NO: 1473893 - RNA, 19 nt, Artificial Sequence
  Description of Artificial Sequence: Synthetic oligonucleotide
  Antisense strand to SEQ ID NO: 1473892
caucuaaacaaugucuaca

SEQ ID NO: 1473894 - RNA, 19 nt, Artificial Sequence
  Description of Artificial Sequence: Synthetic oligonucleotide
  Sense strand starting at position 2386 of SEQ ID NO: 1244220
ugcucugaggguuauuacu

SEQ ID NO: 1473895 - RNA, 19 nt, Artificial Sequence
  Description of Artificial Sequence: Synthetic oligonucleotide
  Antisense strand to SEQ ID NO: 1473894
aguaauaacccucagagca

SEQ ID NO: 1473896 - RNA, 19 nt, Artificial Sequence
  Description of Artificial Sequence: Synthetic oligonucleotide
  Sense strand starting at position 2580 of SEQ ID NO: 1244220
guagguuuccaucauccag

SEQ ID NO: 1473897 - RNA, 19 nt, Artificial Sequence
  Description of Artificial Sequence: Synthetic oligonucleotide
  Antisense strand to SEQ ID NO: 1473896
cuggaugauggaaaccuac

SEQ ID NO: 1473898 - RNA, 19 nt, Artificial Sequence
  Description of Artificial Sequence: Synthetic oligonucleotide
  Sense strand starting at position 2639 of SEQ ID NO: 1244220
uguaucuuuccagaccaag

SEQ ID NO: 1473899 - RNA, 19 nt, Artificial Sequence
  Description of Artificial Sequence: Synthetic oligonucleotide
  Antisense strand to SEQ ID NO: 1473898
cuuggucuggaaagauaca

SEQ ID NO: 1473900 - RNA, 19 nt, Artificial Sequence
  Description of Artificial Sequence: Synthetic oligonucleotide
  Sense strand starting at position 2645 of SEQ ID NO: 1244220
uuuccagaccaagguaaau

SEQ ID NO: 1473901 - RNA, 19 nt, Artificial Sequence
  Description of Artificial Sequence: Synthetic oligonucleotide
  Antisense strand to SEQ ID NO: 1473900
auuuaccuuggucuggaaa

SEQ ID NO: 1473902 - RNA, 19 nt, Artificial Sequence
  Description of Artificial Sequence: Synthetic oligonucleotide
  Sense strand starting at position 2758 of SEQ ID NO: 1244220
acauucuuaggauguggau

SEQ ID NO: 1473903 - RNA, 19 nt, Artificial Sequence
  Description of Artificial Sequence: Synthetic oligonucleotide
  Antisense strand to SEQ ID NO: 1473902
auccacauccuaagaaugu

SEQ ID NO: 1473904 - RNA, 19 nt, Artificial Sequence
  Description of Artificial Sequence: Synthetic oligonucleotide
  Sense strand starting at position 2760 of SEQ ID NO: 1244220
auucuuaggauguggauau

SEQ ID NO: 1473905 - RNA, 19 nt, Artificial Sequence
  Description of Artificial Sequence: Synthetic oligonucleotide
  Antisense strand to SEQ ID NO: 1473904
auauccacauccuaagaau

SEQ ID NO: 1473906 - RNA, 19 nt, Artificial Sequence
  Description of Artificial Sequence: Synthetic oligonucleotide
  Sense strand starting at position 2828 of SEQ ID NO: 1244220
aggucauguaccuaguaag

SEQ ID NO: 1473907 - RNA, 19 nt, Artificial Sequence
  Description of Artificial Sequence: Synthetic oligonucleotide
  Antisense strand to SEQ ID NO: 1473906
cuuacuagguacaugaccu

SEQ ID NO: 1473908 - RNA, 19 nt, Artificial Sequence
  Description of Artificial Sequence: Synthetic oligonucleotide
  Sense strand starting at position 2866 of SEQ ID NO: 1244220
uccagaaauaucuguggga

SEQ ID NO: 1473909 - RNA, 19 nt, Artificial Sequence
  Description of Artificial Sequence: Synthetic oligonucleotide
  Antisense strand to SEQ ID NO: 1473908
ucccacagauauuucugga

SEQ ID NO: 1473910 - RNA, 19 nt, Artificial Sequence
  Description of Artificial Sequence: Synthetic oligonucleotide
  Sense strand starting at position 2927 of SEQ ID NO: 1244220
uaaagaauggauuguaggu

SEQ ID NO: 1473911 - RNA, 19 nt, Artificial Sequence
  Description of Artificial Sequence: Synthetic oligonucleotide
  Antisense strand to SEQ ID NO: 1473910
accuacaauccauucuuua

SEQ ID NO: 1473912 - RNA, 19 nt, Artificial Sequence
  Description of Artificial Sequence: Synthetic oligonucleotide
  Sense strand starting at position 2946 of SEQ ID NO: 1244220
accacauucccagguauua

SEQ ID NO: 1473913 - RNA, 19 nt, Artificial Sequence
  Description of Artificial Sequence: Synthetic oligonucleotide
  Antisense strand to SEQ ID NO: 1473912
uaauaccugggaauguggu

SEQ ID NO: 1473914 - RNA, 19 nt, Artificial Sequence
  Description of Artificial Sequence: Synthetic oligonucleotide
  Sense strand starting at position 2958 of SEQ ID NO: 1244220
gguauuaaggaaugucuau

SEQ ID NO: 1473915 - RNA, 19 nt, Artificial Sequence
  Description of Artificial Sequence: Synthetic oligonucleotide
  Antisense strand to SEQ ID NO: 1473914
auagacauuccuuaauacc

SEQ ID NO: 1473916 - RNA, 19 nt, Artificial Sequence
  Description of Artificial Sequence: Synthetic oligonucleotide
  Sense strand starting at position 3152 of SEQ ID NO: 1244220
gucauaguugggcauaacu

SEQ ID NO: 1473917 - RNA, 19 nt, Artificial Sequence
  Description of Artificial Sequence: Synthetic oligonucleotide
  Antisense strand to SEQ ID NO: 1473916
aguuaugcccaacuaugac

SEQ ID NO: 1473918 - RNA, 19 nt, Artificial Sequence
  Description of Artificial Sequence: Synthetic oligonucleotide
  Sense strand starting at position 3154 of SEQ ID NO: 1244220
cauaguugggcauaacuga

SEQ ID NO: 1473919 - RNA, 19 nt, Artificial Sequence
  Description of Artificial Sequence: Synthetic oligonucleotide
  Antisense strand to SEQ ID NO: 1473918
ucaguuaugcccaacuaug

SEQ ID NO: 1473920 - RNA, 19 nt, Artificial Sequence
  Description of Artificial Sequence: Synthetic oligonucleotide
  Sense strand starting at position 3162 of SEQ ID NO: 1244220
ggcauaacugaaugauuau

SEQ ID NO: 1473921 - RNA, 19 nt, Artificial Sequence
  Description of Artificial Sequence: Synthetic oligonucleotide
  Antisense strand to SEQ ID NO: 1473920
auaaucauucaguuaugcc

SEQ ID NO: 1473922 - RNA, 19 nt, Artificial Sequence
  Description of Artificial Sequence: Synthetic oligonucleotide
  Sense strand starting at position 3220 of SEQ ID NO: 1244220
caaacaagucuauguagag

SEQ ID NO: 1473923 - RNA, 19 nt, Artificial Sequence
  Description of Artificial Sequence: Synthetic oligonucleotide
  Antisense strand to SEQ ID NO: 1473922
cucuacauagacuuguuug

SEQ ID NO: 1473924 - RNA, 19 nt, Artificial Sequence
  Description of Artificial Sequence: Synthetic oligonucleotide
  Sense strand starting at position 3227 of SEQ ID NO: 1244220
gucuauguagaggaagguu

SEQ ID NO: 1473925 - RNA, 19 nt, Artificial Sequence
  Description of Artificial Sequence: Synthetic oligonucleotide
  Antisense strand to SEQ ID NO: 1473924
aaccuuccucuacauagac

SEQ ID NO: 1473926 - RNA, 19 nt, Artificial Sequence
  Description of Artificial Sequence: Synthetic oligonucleotide
  Sense strand starting at position 3242 of SEQ ID NO: 1244220
gguugcagucuugcgguau

SEQ ID NO: 1473927 - RNA, 19 nt, Artificial Sequence
  Description of Artificial Sequence: Synthetic oligonucleotide
  Antisense strand to SEQ ID NO: 1473926
auaccgcaagacugcaacc

SEQ ID NO: 1473928 - RNA, 19 nt, Artificial Sequence
  Description of Artificial Sequence: Synthetic oligonucleotide
  Sense strand starting at position 3245 of SEQ ID NO: 1244220
ugcagucuugcgguauaac

SEQ ID NO: 1473929 - RNA, 19 nt, Artificial Sequence
  Description of Artificial Sequence: Synthetic oligonucleotide
  Antisense strand to SEQ ID NO: 1473928
guuauaccgcaagacugca

SEQ ID NO: 1473930 - RNA, 19 nt, Artificial Sequence
  Description of Artificial Sequence: Synthetic oligonucleotide
  Sense strand starting at position 3292 of SEQ ID NO: 1244220
acguguucucgggccucau

SEQ ID NO: 1473931 - RNA, 19 nt, Artificial Sequence
  Description of Artificial Sequence: Synthetic oligonucleotide
  Antisense strand to SEQ ID NO: 1473930
augaggcccgagaacacgu

SEQ ID NO: 1473932 - RNA, 19 nt, Artificial Sequence
  Description of Artificial Sequence: Synthetic oligonucleotide
  Sense strand starting at position 3360 of SEQ ID NO: 1244220
gcucauuucugcuuaugga

SEQ ID NO: 1473933 - RNA, 19 nt, Artificial Sequence
  Description of Artificial Sequence: Synthetic oligonucleotide
  Antisense strand to SEQ ID NO: 1473932
uccauaagcagaaaugagc

SEQ ID NO: 1473934 - RNA, 19 nt, Artificial Sequence
  Description of Artificial Sequence: Synthetic oligonucleotide
  Sense strand starting at position 3650 of SEQ ID NO: 1244220
cuuauaggcuuacccagau

SEQ ID NO: 1473935 - RNA, 19 nt, Artificial Sequence
  Description of Artificial Sequence: Synthetic oligonucleotide
  Antisense strand to SEQ ID NO: 1473934
aucuggguaagccuauaag

SEQ ID NO: 1473936 - RNA, 19 nt, Artificial Sequence
  Description of Artificial Sequence: Synthetic oligonucleotide
  Sense strand starting at position 3751 of SEQ ID NO: 1244220
gaaacaaggcauuguccau

SEQ ID NO: 1473937 - RNA, 19 nt, Artificial Sequence
  Description of Artificial Sequence: Synthetic oligonucleotide
  Antisense strand to SEQ ID NO: 1473936
auggacaaugccuuguuuc

SEQ ID NO: 1473938 - RNA, 19 nt, Artificial Sequence
  Description of Artificial Sequence: Synthetic oligonucleotide
  Sense strand starting at position 3886 of SEQ ID NO: 1244220
agaaauuagacuugugagc

SEQ ID NO: 1473939 - RNA, 19 nt, Artificial Sequence
  Description of Artificial Sequence: Synthetic oligonucleotide
  Antisense strand to SEQ ID NO: 1473938
gcucacaagucuaauuucu

SEQ ID NO: 1473940 - RNA, 19 nt, Artificial Sequence
  Description of Artificial Sequence: Synthetic oligonucleotide
  Sense strand starting at position 522 of SEQ ID NO: 1244221
auauaugcaguauggauua

SEQ ID NO: 1473941 - RNA, 19 nt, Artificial Sequence
  Description of Artificial Sequence: Synthetic oligonucleotide
  Antisense strand to SEQ ID NO: 1473940
uaauccauacugcauauau

SEQ ID NO: 1473942 - RNA, 19 nt, Artificial Sequence
  Description of Artificial Sequence: Synthetic oligonucleotide
  Sense strand starting at position 558 of SEQ ID NO: 1244221
accgcauugcaguuguuua

SEQ ID NO: 1473943 - RNA, 19 nt, Artificial Sequence
  Description of Artificial Sequence: Synthetic oligonucleotide
  Antisense strand to SEQ ID NO: 1473942
uaaacaacugcaaugcggu

SEQ ID NO: 1473944 - RNA, 19 nt, Artificial Sequence
  Description of Artificial Sequence: Synthetic oligonucleotide
  Sense strand starting at position 560 of SEQ ID NO: 1244221
cgcauugcaguuguuuaaa

SEQ ID NO: 1473945 - RNA, 19 nt, Artificial Sequence
  Description of Artificial Sequence: Synthetic oligonucleotide
  Antisense strand to SEQ ID NO: 1473944
uuuaaacaacugcaaugcg

SEQ ID NO: 1473946 - RNA, 19 nt, Artificial Sequence
  Description of Artificial Sequence: Synthetic oligonucleotide
  Sense strand starting at position 752 of SEQ ID NO: 1244221
uagggauucccaggucuug

SEQ ID NO: 1473947 - RNA, 19 nt, Artificial Sequence
  Description of Artificial Sequence: Synthetic oligonucleotide
  Antisense strand to SEQ ID NO: 1473946
caagaccugggaaucccua

SEQ ID NO: 1473948 - RNA, 19 nt, Artificial Sequence
  Description of Artificial Sequence: Synthetic oligonucleotide
  Sense strand starting at position 793 of SEQ ID NO: 1244221
uuuccuacauuggugaaca

SEQ ID NO: 1473949 - RNA, 19 nt, Artificial Sequence
  Description of Artificial Sequence: Synthetic oligonucleotide
  Antisense strand to SEQ ID NO: 1473948
uguucaccaauguaggaaa

SEQ ID NO: 1473950 - RNA, 19 nt, Artificial Sequence
  Description of Artificial Sequence: Synthetic oligonucleotide
  Sense strand starting at position 906 of SEQ ID NO: 1244221
cucaccauuucgucagcau

SEQ ID NO: 1473951 - RNA, 19 nt, Artificial Sequence
  Description of Artificial Sequence: Synthetic oligonucleotide
  Antisense strand to SEQ ID NO: 1473950
augcugacgaaauggugag

SEQ ID NO: 1473952 - RNA, 19 nt, Artificial Sequence
  Description of Artificial Sequence: Synthetic oligonucleotide
  Sense strand starting at position 943 of SEQ ID NO: 1244221
ucgaaauaugaaggugaau

SEQ ID NO: 1473953 - RNA, 19 nt, Artificial Sequence
  Description of Artificial Sequence: Synthetic oligonucleotide
  Antisense strand to SEQ ID NO: 1473952
auucaccuucauauuucga

SEQ ID NO: 1473954 - RNA, 19 nt, Artificial Sequence
  Description of Artificial Sequence: Synthetic oligonucleotide
  Sense strand starting at position 963 of SEQ ID NO: 1244221
augagaugaucagauuuau

SEQ ID NO: 1473955 - RNA, 19 nt, Artificial Sequence
  Description of Artificial Sequence: Synthetic oligonucleotide
  Antisense strand to SEQ ID NO: 1473954
auaaaucugaucaucucau

SEQ ID NO: 1473956 - RNA, 19 nt, Artificial Sequence
  Description of Artificial Sequence: Synthetic oligonucleotide
  Sense strand starting at position 1208 of SEQ ID NO: 1244221
uaguauuauccuggaagaa

SEQ ID NO: 1473957 - RNA, 19 nt, Artificial Sequence
  Description of Artificial Sequence: Synthetic oligonucleotide
  Antisense strand to SEQ ID NO: 1473956
uucuuccaggauaauacua

SEQ ID NO: 1473958 - RNA, 19 nt, Artificial Sequence
  Description of Artificial Sequence: Synthetic oligonucleotide
  Sense strand starting at position 1370 of SEQ ID NO: 1244221
uucucaagauugucagaga

SEQ ID NO: 1473959 - RNA, 19 nt, Artificial Sequence
  Description of Artificial Sequence: Synthetic oligonucleotide
  Antisense strand to SEQ ID NO: 1473958
ucucugacaaucuugagaa

SEQ ID NO: 1473960 - RNA, 19 nt, Artificial Sequence
  Description of Artificial Sequence: Synthetic oligonucleotide
  Sense strand starting at position 1395 of SEQ ID NO: 1244221
ggauuagcugcauaauuau

SEQ ID NO: 1473961 - RNA, 19 nt, Artificial Sequence
  Description of Artificial Sequence: Synthetic oligonucleotide
  Antisense strand to SEQ ID NO: 1473960
auaauuaugcagcuaaucc

SEQ ID NO: 1473962 - RNA, 19 nt, Artificial Sequence
  Description of Artificial Sequence: Synthetic oligonucleotide
  Sense strand starting at position 1504 of SEQ ID NO: 1244221
guagaagagucugcacaag

SEQ ID NO: 1473963 - RNA, 19 nt, Artificial Sequence
  Description of Artificial Sequence: Synthetic oligonucleotide
  Antisense strand to SEQ ID NO: 1473962
cuugugcagacucuucuac

SEQ ID NO: 1473964 - RNA, 19 nt, Artificial Sequence
  Description of Artificial Sequence: Synthetic oligonucleotide
  Sense strand starting at position 1537 of SEQ ID NO: 1244221
ggaauguuucgugcguuga

SEQ ID NO: 1473965 - RNA, 19 nt, Artificial Sequence
  Description of Artificial Sequence: Synthetic oligonucleotide
  Antisense strand to SEQ ID NO: 1473964
ucaacgcacgaaacauucc

SEQ ID NO: 1473966 - RNA, 19 nt, Artificial Sequence
  Description of Artificial Sequence: Synthetic oligonucleotide
  Sense strand starting at position 1540 of SEQ ID NO: 1244221
auguuucgugcguugagag

SEQ ID NO: 1473967 - RNA, 19 nt, Artificial Sequence
  Description of Artificial Sequence: Synthetic oligonucleotide
  Antisense strand to SEQ ID NO: 1473966
cucucaacgcacgaaacau

SEQ ID NO: 1473968 - RNA, 19 nt, Artificial Sequence
  Description of Artificial Sequence: Synthetic oligonucleotide
  Sense strand starting at position 2047 of SEQ ID NO: 1244221
uauauauccuagcuggaug

SEQ ID NO: 1473969 - RNA, 19 nt, Artificial Sequence
  Description of Artificial Sequence: Synthetic oligonucleotide
  Antisense strand to SEQ ID NO: 1473968
cauccagcuaggauauaua

SEQ ID NO: 1473970 - RNA, 19 nt, Artificial Sequence
  Description of Artificial Sequence: Synthetic oligonucleotide
  Sense strand starting at position 2103 of SEQ ID NO: 1244221
uguagcugcccguugaaau

SEQ ID NO: 1473971 - RNA, 19 nt, Artificial Sequence
  Description of Artificial Sequence: Synthetic oligonucleotide
  Antisense strand to SEQ ID NO: 1473970
auuucaacgggcagcuaca

SEQ ID NO: 1473972 - RNA, 19 nt, Artificial Sequence
  Description of Artificial Sequence: Synthetic oligonucleotide
  Sense strand starting at position 2110 of SEQ ID NO: 1244221
gcccguugaaaugagaacu

SEQ ID NO: 1473973 - RNA, 19 nt, Artificial Sequence
  Description of Artificial Sequence: Synthetic oligonucleotide
  Antisense strand to SEQ ID NO: 1473972
aguucucauuucaacgggc

SEQ ID NO: 1473974 - RNA, 19 nt, Artificial Sequence
  Description of Artificial Sequence: Synthetic oligonucleotide
  Sense strand starting at position 2210 of SEQ ID NO: 1244221
ggaauaccuggucauguau

SEQ ID NO: 1473975 - RNA, 19 nt, Artificial Sequence
  Description of Artificial Sequence: Synthetic oligonucleotide
  Antisense strand to SEQ ID NO: 1473974
auacaugaccagguauucc

SEQ ID NO: 1473976 - RNA, 19 nt, Artificial Sequence
  Description of Artificial Sequence: Synthetic oligonucleotide
  Sense strand starting at position 2355 of SEQ ID NO: 1244221
augggacuggaauguucau

SEQ ID NO: 1473977 - RNA, 19 nt, Artificial Sequence
  Description of Artificial Sequence: Synthetic oligonucleotide
  Antisense strand to SEQ ID NO: 1473976
augaacauuccagucccau

SEQ ID NO: 1473978 - RNA, 19 nt, Artificial Sequence
  Description of Artificial Sequence: Synthetic oligonucleotide
  Sense strand starting at position 2397 of SEQ ID NO: 1244221
uggcauugagaucaagcaa

SEQ ID NO: 1473979 - RNA, 19 nt, Artificial Sequence
  Description of Artificial Sequence: Synthetic oligonucleotide
  Antisense strand to SEQ ID NO: 1473978
uugcuugaucucaaugcca

SEQ ID NO: 1473980 - RNA, 19 nt, Artificial Sequence
  Description of Artificial Sequence: Synthetic oligonucleotide
  Sense strand starting at position 2445 of SEQ ID NO: 1244221
agagcagauguguauugau

SEQ ID NO: 1473981 - RNA, 19 nt, Artificial Sequence
  Description of Artificial Sequence: Synthetic oligonucleotide
  Antisense strand to SEQ ID NO: 1473980
aucaauacacaucugcucu

SEQ ID NO: 1473982 - RNA, 19 nt, Artificial Sequence
  Description of Artificial Sequence: Synthetic oligonucleotide
  Sense strand starting at position 2459 of SEQ ID NO: 1244221
uugauucugcuauggaaag

SEQ ID NO: 1473983 - RNA, 19 nt, Artificial Sequence
  Description of Artificial Sequence: Synthetic oligonucleotide
  Antisense strand to SEQ ID NO: 1473982
cuuuccauagcagaaucaa

SEQ ID NO: 1473984 - RNA, 19 nt, Artificial Sequence
  Description of Artificial Sequence: Synthetic oligonucleotide
  Sense strand starting at position 2473 of SEQ ID NO: 1244221
gaaagaauggcccaguguu

SEQ ID NO: 1473985 - RNA, 19 nt, Artificial Sequence
  Description of Artificial Sequence: Synthetic oligonucleotide
  Antisense strand to SEQ ID NO: 1473984
aacacugggccauucuuuc

SEQ ID NO: 1473986 - RNA, 19 nt, Artificial Sequence
  Description of Artificial Sequence: Synthetic oligonucleotide
  Sense strand starting at position 2595 of SEQ ID NO: 1244221
augagacacuuauuaugua

SEQ ID NO: 1473987 - RNA, 19 nt, Artificial Sequence
  Description of Artificial Sequence: Synthetic oligonucleotide
  Antisense strand to SEQ ID NO: 1473986
uacauaauaagugucucau

SEQ ID NO: 1473988 - RNA, 19 nt, Artificial Sequence
  Description of Artificial Sequence: Synthetic oligonucleotide
  Sense strand starting at position 2599 of SEQ ID NO: 1244221
gacacuuauuauguagaug

SEQ ID NO: 1473989 - RNA, 19 nt, Artificial Sequence
  Description of Artificial Sequence: Synthetic oligonucleotide
  Antisense strand to SEQ ID NO: 1473988
caucuacauaauaaguguc

SEQ ID NO: 1473990 - RNA, 19 nt, Artificial Sequence
  Description of Artificial Sequence: Synthetic oligonucleotide
  Sense strand starting at position 2602 of SEQ ID NO: 1244221
acuuauuauguagauggua

SEQ ID NO: 1473991 - RNA, 19 nt, Artificial Sequence
  Description of Artificial Sequence: Synthetic oligonucleotide
  Antisense strand to SEQ ID NO: 1473990
uaccaucuacauaauaagu

SEQ ID NO: 1473992 - RNA, 19 nt, Artificial Sequence
  Description of Artificial Sequence: Synthetic oligonucleotide
  Sense strand starting at position 2961 of SEQ ID NO: 1244221
guuuguuggcugaggguuu

SEQ ID NO: 1473993 - RNA, 19 nt, Artificial Sequence
  Description of Artificial Sequence: Synthetic oligonucleotide
  Antisense strand to SEQ ID NO: 1473992
aaacccucagccaacaaac

SEQ ID NO: 1473994 - RNA, 19 nt, Artificial Sequence
  Description of Artificial Sequence: Synthetic oligonucleotide
  Sense strand starting at position 2983 of SEQ ID NO: 1244221
uuguuuaugaggugggaag

SEQ ID NO: 1473995 - RNA, 19 nt, Artificial Sequence
  Description of Artificial Sequence: Synthetic oligonucleotide
  Antisense strand to SEQ ID NO: 1473994
cuucccaccucauaaacaa

SEQ ID NO: 1473996 - RNA, 19 nt, Artificial Sequence
  Description of Artificial Sequence: Synthetic oligonucleotide
  Sense strand starting at position 3034 of SEQ ID NO: 1244221
uuagcuggugaccaauaaa

SEQ ID NO: 1473997 - RNA, 19 nt, Artificial Sequence
  Description of Artificial Sequence: Synthetic oligonucleotide
  Antisense strand to SEQ ID NO: 1473996
uuuauuggucaccagcuaa

SEQ ID NO: 1473998 - RNA, 19 nt, Artificial Sequence
  Description of Artificial Sequence: Synthetic oligonucleotide
  Sense strand starting at position 3105 of SEQ ID NO: 1244221
aauuuagaguuggaaggua

SEQ ID NO: 1473999 - RNA, 19 nt, Artificial Sequence
  Description of Artificial Sequence: Synthetic oligonucleotide
  Antisense strand to SEQ ID NO: 1473998
uaccuuccaacucuaaauu

SEQ ID NO: 1474000 - RNA, 19 nt, Artificial Sequence
  Description of Artificial Sequence: Synthetic oligonucleotide
  Sense strand starting at position 3257 of SEQ ID NO: 1244221
uugagucuaugauccauca

SEQ ID NO: 1474001 - RNA, 19 nt, Artificial Sequence
  Description of Artificial Sequence: Synthetic oligonucleotide
  Antisense strand to SEQ ID NO: 1474000
ugauggaucauagacucaa

SEQ ID NO: 1474002 - RNA, 19 nt, Artificial Sequence
  Description of Artificial Sequence: Synthetic oligonucleotide
  Sense strand starting at position 3272 of SEQ ID NO: 1244221
aucauaguccaucacaguu

SEQ ID NO: 1474003 - RNA, 19 nt, Artificial Sequence
  Description of Artificial Sequence: Synthetic oligonucleotide
  Antisense strand to SEQ ID NO: 1474002
aacugugauggacuaugau

SEQ ID NO: 1474004 - RNA, 19 nt, Artificial Sequence
  Description of Artificial Sequence: Synthetic oligonucleotide
  Sense strand starting at position 3324 of SEQ ID NO: 1244221
caaagucguacggaucaaa

SEQ ID NO: 1474005 - RNA, 19 nt, Artificial Sequence
  Description of Artificial Sequence: Synthetic oligonucleotide
  Antisense strand to SEQ ID NO: 1474004
uuugauccguacgacuuug

SEQ ID NO: 1474006 - RNA, 19 nt, Artificial Sequence
  Description of Artificial Sequence: Synthetic oligonucleotide
  Sense strand starting at position 3335 of SEQ ID NO: 1244221
ggaucaaagaguggcaaau

SEQ ID NO: 1474007 - RNA, 19 nt, Artificial Sequence
  Description of Artificial Sequence: Synthetic oligonucleotide
  Antisense strand to SEQ ID NO: 1474006
auuugccacucuuugaucc

SEQ ID NO: 1474008 - RNA, 19 nt, Artificial Sequence
  Description of Artificial Sequence: Synthetic oligonucleotide
  Sense strand starting at position 3369 of SEQ ID NO: 1244221
aggucuucuguggaguaga

SEQ ID NO: 1474009 - RNA, 19 nt, Artificial Sequence
  Description of Artificial Sequence: Synthetic oligonucleotide
  Antisense strand to SEQ ID NO: 1474008
ucuacuccacagaagaccu

SEQ ID NO: 1474010 - RNA, 19 nt, Artificial Sequence
  Description of Artificial Sequence: Synthetic oligonucleotide
  Sense strand starting at position 3505 of SEQ ID NO: 1244221
ugauacaugguuuagcauu

SEQ ID NO: 1474011 - RNA, 19 nt, Artificial Sequence
  Description of Artificial Sequence: Synthetic oligonucleotide
  Antisense strand to SEQ ID NO: 1474010
aaugcuaaaccauguauca

SEQ ID NO: 1474012 - RNA, 19 nt, Artificial Sequence
  Description of Artificial Sequence: Synthetic oligonucleotide
  Sense strand starting at position 3568 of SEQ ID NO: 1244221
gagaaauaugucuguaaau

SEQ ID NO: 1474013 - RNA, 19 nt, Artificial Sequence
  Description of Artificial Sequence: Synthetic oligonucleotide
  Antisense strand to SEQ ID NO: 1474012
auuuacagacauauuucuc

SEQ ID NO: 1474014 - RNA, 19 nt, Artificial Sequence
  Description of Artificial Sequence: Synthetic oligonucleotide
  Sense strand starting at position 3569 of SEQ ID NO: 1244221
agaaauaugucuguaaauc

SEQ ID NO: 1474015 - RNA, 19 nt, Artificial Sequence
  Description of Artificial Sequence: Synthetic oligonucleotide
  Antisense strand to SEQ ID NO: 1474014
gauuuacagacauauuucu

SEQ ID NO: 1474016 - RNA, 19 nt, Artificial Sequence
  Description of Artificial Sequence: Synthetic oligonucleotide
  Sense strand starting at position 3714 of SEQ ID NO: 1244221
ggaucuaagucaucuggac

SEQ ID NO: 1474017 - RNA, 19 nt, Artificial Sequence
  Description of Artificial Sequence: Synthetic oligonucleotide
  Antisense strand to SEQ ID NO: 1474016
guccagaugacuuagaucc

SEQ ID NO: 1474018 - RNA, 19 nt, Artificial Sequence
  Description of Artificial Sequence: Synthetic oligonucleotide
  Sense strand starting at position 3818 of SEQ ID NO: 1244221
uacaguuuccagugaaaga

SEQ ID NO: 1474019 - RNA, 19 nt, Artificial Sequence
  Description of Artificial Sequence: Synthetic oligonucleotide
  Antisense strand to SEQ ID NO: 1474018
ucuuucacuggaaacugua

SEQ ID NO: 1474020 - RNA, 19 nt, Artificial Sequence
  Description of Artificial Sequence: Synthetic oligonucleotide
  Sense strand starting at position 87 of SEQ ID NO: 1244222
guuuaauaacuauaagguc

SEQ ID NO: 1474021 - RNA, 19 nt, Artificial Sequence
  Description of Artificial Sequence: Synthetic oligonucleotide
  Antisense strand to SEQ ID NO: 1474020
gaccuuauaguuauuaaac

SEQ ID NO: 1474022 - RNA, 19 nt, Artificial Sequence
  Description of Artificial Sequence: Synthetic oligonucleotide
  Sense strand starting at position 93 of SEQ ID NO: 1244222
uaacuauaaggucaguguu

SEQ ID NO: 1474023 - RNA, 19 nt, Artificial Sequence
  Description of Artificial Sequence: Synthetic oligonucleotide
  Antisense strand to SEQ ID NO: 1474022
aacacugaccuuauaguua

SEQ ID NO: 1474024 - RNA, 19 nt, Artificial Sequence
  Description of Artificial Sequence: Synthetic oligonucleotide
  Sense strand starting at position 599 of SEQ ID NO: 1244222
ccuugugacuauucuugga

SEQ ID NO: 1474025 - RNA, 19 nt, Artificial Sequence
  Description of Artificial Sequence: Synthetic oligonucleotide
  Antisense strand to SEQ ID NO: 1474024
uccaagaauagucacaagg

SEQ ID NO: 1474026 - RNA, 19 nt, Artificial Sequence
  Description of Artificial Sequence: Synthetic oligonucleotide
  Sense strand starting at position 601 of SEQ ID NO: 1244222
uugugacuauucuuggaag

SEQ ID NO: 1474027 - RNA, 19 nt, Artificial Sequence
  Description of Artificial Sequence: Synthetic oligonucleotide
  Antisense strand to SEQ ID NO: 1474026
cuuccaagaauagucacaa

SEQ ID NO: 1474028 - RNA, 19 nt, Artificial Sequence
  Description of Artificial Sequence: Synthetic oligonucleotide
  Sense strand starting at position 662 of SEQ ID NO: 1244222
cuggucuuccucugaaaua

SEQ ID NO: 1474029 - RNA, 19 nt, Artificial Sequence
  Description of Artificial Sequence: Synthetic oligonucleotide
  Antisense strand to SEQ ID NO: 1474028
uauuucagaggaagaccag

SEQ ID NO: 1474030 - RNA, 19 nt, Artificial Sequence
  Description of Artificial Sequence: Synthetic oligonucleotide
  Sense strand starting at position 673 of SEQ ID NO: 1244222
cugaaauaaugguccugaa

SEQ ID NO: 1474031 - RNA, 19 nt, Artificial Sequence
  Description of Artificial Sequence: Synthetic oligonucleotide
  Antisense strand to SEQ ID NO: 1474030
uucaggaccauuauuucag

SEQ ID NO: 1474032 - RNA, 19 nt, Artificial Sequence
  Description of Artificial Sequence: Synthetic oligonucleotide
  Sense strand starting at position 801 of SEQ ID NO: 1244222
aggcaauugcaagagauuc

SEQ ID NO: 1474033 - RNA, 19 nt, Artificial Sequence
  Description of Artificial Sequence: Synthetic oligonucleotide
  Antisense strand to SEQ ID NO: 1474032
gaaucucuugcaauugccu

SEQ ID NO: 1474034 - RNA, 19 nt, Artificial Sequence
  Description of Artificial Sequence: Synthetic oligonucleotide
  Sense strand starting at position 984 of SEQ ID NO: 1244222
ugucuauuccauuagacca

SEQ ID NO: 1474035 - RNA, 19 nt, Artificial Sequence
  Description of Artificial Sequence: Synthetic oligonucleotide
  Antisense strand to SEQ ID NO: 1474034
uggucuaauggaauagaca

SEQ ID NO: 1474036 - RNA, 19 nt, Artificial Sequence
  Description of Artificial Sequence: Synthetic oligonucleotide
  Sense strand starting at position 999 of SEQ ID NO: 1244222
accauaagcuucuuggaua

SEQ ID NO: 1474037 - RNA, 19 nt, Artificial Sequence
  Description of Artificial Sequence: Synthetic oligonucleotide
  Antisense strand to SEQ ID NO: 1474036
uauccaagaagcuuauggu

SEQ ID NO: 1474038 - RNA, 19 nt, Artificial Sequence
  Description of Artificial Sequence: Synthetic oligonucleotide
  Sense strand starting at position 1096 of SEQ ID NO: 1244222
cugaauagaugagauuucu

SEQ ID NO: 1474039 - RNA, 19 nt, Artificial Sequence
  Description of Artificial Sequence: Synthetic oligonucleotide
  Antisense strand to SEQ ID NO: 1474038
agaaaucucaucuauucag

SEQ ID NO: 1474040 - RNA, 19 nt, Artificial Sequence
  Description of Artificial Sequence: Synthetic oligonucleotide
  Sense strand starting at position 1102 of SEQ ID NO: 1244222
agaugagauuucuauggau

SEQ ID NO: 1474041 - RNA, 19 nt, Artificial Sequence
  Description of Artificial Sequence: Synthetic oligonucleotide
  Antisense strand to SEQ ID NO: 1474040
auccauagaaaucucaucu

SEQ ID NO: 1474042 - RNA, 19 nt, Artificial Sequence
  Description of Artificial Sequence: Synthetic oligonucleotide
  Sense strand starting at position 1105 of SEQ ID NO: 1244222
ugagauuucuauggauaag

SEQ ID NO: 1474043 - RNA, 19 nt, Artificial Sequence
  Description of Artificial Sequence: Synthetic oligonucleotide
  Antisense strand to SEQ ID NO: 1474042
cuuauccauagaaaucuca

SEQ ID NO: 1474044 - RNA, 19 nt, Artificial Sequence
  Description of Artificial Sequence: Synthetic oligonucleotide
  Sense strand starting at position 1312 of SEQ ID NO: 1244222
aaaccaucagguuguagaa

SEQ ID NO: 1474045 - RNA, 19 nt, Artificial Sequence
  Description of Artificial Sequence: Synthetic oligonucleotide
  Antisense strand to SEQ ID NO: 1474044
uucuacaaccugaugguuu

SEQ ID NO: 1474046 - RNA, 19 nt, Artificial Sequence
  Description of Artificial Sequence: Synthetic oligonucleotide
  Sense strand starting at position 1353 of SEQ ID NO: 1244222
ggaauucuuaaaggucgau

SEQ ID NO: 1474047 - RNA, 19 nt, Artificial Sequence
  Description of Artificial Sequence: Synthetic oligonucleotide
  Antisense strand to SEQ ID NO: 1474046
aucgaccuuuaagaauucc

SEQ ID NO: 1474048 - RNA, 19 nt, Artificial Sequence
  Description of Artificial Sequence: Synthetic oligonucleotide
  Sense strand starting at position 1530 of SEQ ID NO: 1244222
cagauagauguuuaggcuu

SEQ ID NO: 1474049 - RNA, 19 nt, Artificial Sequence
  Description of Artificial Sequence: Synthetic oligonucleotide
  Antisense strand to SEQ ID NO: 1474048
aagccuaaacaucuaucug

SEQ ID NO: 1474050 - RNA, 19 nt, Artificial Sequence
  Description of Artificial Sequence: Synthetic oligonucleotide
  Sense strand starting at position 2108 of SEQ ID NO: 1244222
gcaucuucuggccaauuaa

SEQ ID NO: 1474051 - RNA, 19 nt, Artificial Sequence
  Description of Artificial Sequence: Synthetic oligonucleotide
  Antisense strand to SEQ ID NO: 1474050
uuaauuggccagaagaugc

SEQ ID NO: 1474052 - RNA, 19 nt, Artificial Sequence
  Description of Artificial Sequence: Synthetic oligonucleotide
  Sense strand starting at position 2116 of SEQ ID NO: 1244222
uggccaauuaagugaagau

SEQ ID NO: 1474053 - RNA, 19 nt, Artificial Sequence
  Description of Artificial Sequence: Synthetic oligonucleotide
  Antisense strand to SEQ ID NO: 1474052
aucuucacuuaauuggcca

SEQ ID NO: 1474054 - RNA, 19 nt, Artificial Sequence
  Description of Artificial Sequence: Synthetic oligonucleotide
  Sense strand starting at position 2407 of SEQ ID NO: 1244222
agugacuugccuuauuaau

SEQ ID NO: 1474055 - RNA, 19 nt, Artificial Sequence
  Description of Artificial Sequence: Synthetic oligonucleotide
  Antisense strand to SEQ ID NO: 1474054
auuaauaaggcaagucacu

SEQ ID NO: 1474056 - RNA, 19 nt, Artificial Sequence
  Description of Artificial Sequence: Synthetic oligonucleotide
  Sense strand starting at position 2448 of SEQ ID NO: 1244222
gguuaauugcaucauccua

SEQ ID NO: 1474057 - RNA, 19 nt, Artificial Sequence
  Description of Artificial Sequence: Synthetic oligonucleotide
  Antisense strand to SEQ ID NO: 1474056
uaggaugaugcaauuaacc

SEQ ID NO: 1474058 - RNA, 19 nt, Artificial Sequence
  Description of Artificial Sequence: Synthetic oligonucleotide
  Sense strand starting at position 2492 of SEQ ID NO: 1244222
acagauagcuccuuccaug

SEQ ID NO: 1474059 - RNA, 19 nt, Artificial Sequence
  Description of Artificial Sequence: Synthetic oligonucleotide
  Antisense strand to SEQ ID NO: 1474058
cauggaaggagcuaucugu

SEQ ID NO: 1474060 - RNA, 19 nt, Artificial Sequence
  Description of Artificial Sequence: Synthetic oligonucleotide
  Sense strand starting at position 2793 of SEQ ID NO: 1244222
ggagaauauguaggccuau

SEQ ID NO: 1474061 - RNA, 19 nt, Artificial Sequence
  Description of Artificial Sequence: Synthetic oligonucleotide
  Antisense strand to SEQ ID NO: 1474060
auaggccuacauauucucc

SEQ ID NO: 1474062 - RNA, 19 nt, Artificial Sequence
  Description of Artificial Sequence: Synthetic oligonucleotide
  Sense strand starting at position 2868 of SEQ ID NO: 1244222
ccauaugaggucugagauc

SEQ ID NO: 1474063 - RNA, 19 nt, Artificial Sequence
  Description of Artificial Sequence: Synthetic oligonucleotide
  Antisense strand to SEQ ID NO: 1474062
gaucucagaccucauaugg

SEQ ID NO: 1474064 - RNA, 19 nt, Artificial Sequence
  Description of Artificial Sequence: Synthetic oligonucleotide
  Sense strand starting at position 3115 of SEQ ID NO: 1244222
caagguuagaagugguacu

SEQ ID NO: 1474065 - RNA, 19 nt, Artificial Sequence
  Description of Artificial Sequence: Synthetic oligonucleotide
  Antisense strand to SEQ ID NO: 1474064
aguaccacuucuaaccuug

SEQ ID NO: 1474066 - RNA, 19 nt, Artificial Sequence
  Description of Artificial Sequence: Synthetic oligonucleotide
  Sense strand starting at position 3166 of SEQ ID NO: 1244222
gacacauugucauccugga

SEQ ID NO: 1474067 - RNA, 19 nt, Artificial Sequence
  Description of Artificial Sequence: Synthetic oligonucleotide
  Antisense strand to SEQ ID NO: 1474066
uccaggaugacaauguguc

SEQ ID NO: 1474068 - RNA, 19 nt, Artificial Sequence
  Description of Artificial Sequence: Synthetic oligonucleotide
  Sense strand starting at position 3214 of SEQ ID NO: 1244222
gugucugagagcuagagaa

SEQ ID NO: 1474069 - RNA, 19 nt, Artificial Sequence
  Description of Artificial Sequence: Synthetic oligonucleotide
  Antisense strand to SEQ ID NO: 1474068
uucucuagcucucagacac

SEQ ID NO: 1474070 - RNA, 19 nt, Artificial Sequence
  Description of Artificial Sequence: Synthetic oligonucleotide
  Sense strand starting at position 3249 of SEQ ID NO: 1244222
uaacaugaugcaggguuua

SEQ ID NO: 1474071 - RNA, 19 nt, Artificial Sequence
  Description of Artificial Sequence: Synthetic oligonucleotide
  Antisense strand to SEQ ID NO: 1474070
uaaacccugcaucauguua

SEQ ID NO: 1474072 - RNA, 19 nt, Artificial Sequence
  Description of Artificial Sequence: Synthetic oligonucleotide
  Sense strand starting at position 3261 of SEQ ID NO: 1244222
ggguuuauuaguggaacuu

SEQ ID NO: 1474073 - RNA, 19 nt, Artificial Sequence
  Description of Artificial Sequence: Synthetic oligonucleotide
  Antisense strand to SEQ ID NO: 1474072
aaguuccacuaauaaaccc

SEQ ID NO: 1474074 - RNA, 19 nt, Artificial Sequence
  Description of Artificial Sequence: Synthetic oligonucleotide
  Sense strand starting at position 3262 of SEQ ID NO: 1244222
gguuuauuaguggaacuua

SEQ ID NO: 1474075 - RNA, 19 nt, Artificial Sequence
  Description of Artificial Sequence: Synthetic oligonucleotide
  Antisense strand to SEQ ID NO: 1474074
uaaguuccacuaauaaacc

SEQ ID NO: 1474076 - RNA, 19 nt, Artificial Sequence
  Description of Artificial Sequence: Synthetic oligonucleotide
  Sense strand starting at position 3477 of SEQ ID NO: 1244222
aggaguggaucuccaaguu

SEQ ID NO: 1474077 - RNA, 19 nt, Artificial Sequence
  Description of Artificial Sequence: Synthetic oligonucleotide
  Antisense strand to SEQ ID NO: 1474076
aacuuggagauccacuccu

SEQ ID NO: 1474078 - RNA, 19 nt, Artificial Sequence
  Description of Artificial Sequence: Synthetic oligonucleotide
  Sense strand starting at position 3503 of SEQ ID NO: 1244222
cccagauccuuagcucaga

SEQ ID NO: 1474079 - RNA, 19 nt, Artificial Sequence
  Description of Artificial Sequence: Synthetic oligonucleotide
  Antisense strand to SEQ ID NO: 1474078
ucugagcuaaggaucuggg

SEQ ID NO: 1474080 - RNA, 19 nt, Artificial Sequence
  Description of Artificial Sequence: Synthetic oligonucleotide
  Sense strand starting at position 3504 of SEQ ID NO: 1244222
ccagauccuuagcucagaa

SEQ ID NO: 1474081 - RNA, 19 nt, Artificial Sequence
  Description of Artificial Sequence: Synthetic oligonucleotide
  Antisense strand to SEQ ID NO: 1474080
uucugagcuaaggaucugg

SEQ ID NO: 1474082 - RNA, 19 nt, Artificial Sequence
  Description of Artificial Sequence: Synthetic oligonucleotide
  Sense strand starting at position 3506 of SEQ ID NO: 1244222
agauccuuagcucagaacu

SEQ ID NO: 1474083 - RNA, 19 nt, Artificial Sequence
  Description of Artificial Sequence: Synthetic oligonucleotide
  Antisense strand to SEQ ID NO: 1474082
aguucugagcuaaggaucu

SEQ ID NO: 1474084 - RNA, 19 nt, Artificial Sequence
  Description of Artificial Sequence: Synthetic oligonucleotide
  Sense strand starting at position 3549 of SEQ ID NO: 1244222
guaggaucauucucagggu

SEQ ID NO: 1474085 - RNA, 19 nt, Artificial Sequence
  Description of Artificial Sequence: Synthetic oligonucleotide
  Antisense strand to SEQ ID NO: 1474084
acccugagaaugauccuac

SEQ ID NO: 1474086 - RNA, 19 nt, Artificial Sequence
  Description of Artificial Sequence: Synthetic oligonucleotide
  Sense strand starting at position 3618 of SEQ ID NO: 1244222
ucagcauacccuugaauag

SEQ ID NO: 1474087 - RNA, 19 nt, Artificial Sequence
  Description of Artificial Sequence: Synthetic oligonucleotide
  Antisense strand to SEQ ID NO: 1474086
cuauucaaggguaugcuga

SEQ ID NO: 1474088 - RNA, 19 nt, Artificial Sequence
  Description of Artificial Sequence: Synthetic oligonucleotide
  Sense strand starting at position 3769 of SEQ ID NO: 1244222
uuguacuguauagaaaguu

SEQ ID NO: 1474089 - RNA, 19 nt, Artificial Sequence
  Description of Artificial Sequence: Synthetic oligonucleotide
  Antisense strand to SEQ ID NO: 1474088
aacuuucuauacaguacaa

SEQ ID NO: 1474090 - RNA, 19 nt, Artificial Sequence
  Description of Artificial Sequence: Synthetic oligonucleotide
  Sense strand starting at position 3795 of SEQ ID NO: 1244222
gcacucaggaguugauuaa

SEQ ID NO: 1474091 - RNA, 19 nt, Artificial Sequence
  Description of Artificial Sequence: Synthetic oligonucleotide
  Antisense strand to SEQ ID NO: 1474090
uuaaucaacuccugagugc

SEQ ID NO: 1474092 - RNA, 19 nt, Artificial Sequence
  Description of Artificial Sequence: Synthetic oligonucleotide
  Sense strand starting at position 3849 of SEQ ID NO: 1244222
auagcagaaaucuggguau

SEQ ID NO: 1474093 - RNA, 19 nt, Artificial Sequence
  Description of Artificial Sequence: Synthetic oligonucleotide
  Antisense strand to SEQ ID NO: 1474092
auacccagauuucugcuau

SEQ ID NO: 1474094 - RNA, 19 nt, Artificial Sequence
  Description of Artificial Sequence: Synthetic oligonucleotide
  Sense strand starting at position 3851 of SEQ ID NO: 1244222
agcagaaaucuggguaucu

SEQ ID NO: 1474095 - RNA, 19 nt, Artificial Sequence
  Description of Artificial Sequence: Synthetic oligonucleotide
  Antisense strand to SEQ ID NO: 1474094
agauacccagauuucugcu

SEQ ID NO: 1474096 - RNA, 19 nt, Artificial Sequence
  Description of Artificial Sequence: Synthetic oligonucleotide
  Sense strand starting at position 3852 of SEQ ID NO: 1244222
gcagaaaucuggguaucua

SEQ ID NO: 1474097 - RNA, 19 nt, Artificial Sequence
  Description of Artificial Sequence: Synthetic oligonucleotide
  Antisense strand to SEQ ID NO: 1474096
uagauacccagauuucugc

SEQ ID NO: 1474098 - RNA, 19 nt, Artificial Sequence
  Description of Artificial Sequence: Synthetic oligonucleotide
  Sense strand starting at position 3956 of SEQ ID NO: 1244222
cugauaagcgguuaagaug

SEQ ID NO: 1474099 - RNA, 19 nt, Artificial Sequence
  Description of Artificial Sequence: Synthetic oligonucleotide
  Antisense strand to SEQ ID NO: 1474098
caucuuaaccgcuuaucag

SEQ ID NO: 1474100 - RNA, 19 nt, Artificial Sequence
  Description of Artificial Sequence: Synthetic oligonucleotide
  Sense strand starting at position 9 of SEQ ID NO: 1244223
ugaagauuuguuugcuagu

SEQ ID NO: 1474101 - RNA, 19 nt, Artificial Sequence
  Description of Artificial Sequence: Synthetic oligonucleotide
  Antisense strand to SEQ ID NO: 1474100
acuagcaaacaaaucuuca

SEQ ID NO: 1474102 - RNA, 19 nt, Artificial Sequence
  Description of Artificial Sequence: Synthetic oligonucleotide
  Sense strand starting at position 292 of SEQ ID NO: 1244223
uggccaauaccucauguuu

SEQ ID NO: 1474103 - RNA, 19 nt, Artificial Sequence
  Description of Artificial Sequence: Synthetic oligonucleotide
  Antisense strand to SEQ ID NO: 1474102
aaacaugagguauuggcca

SEQ ID NO: 1474104 - RNA, 19 nt, Artificial Sequence
  Description of Artificial Sequence: Synthetic oligonucleotide
  Sense strand starting at position 320 of SEQ ID NO: 1244223
uguggcuuuccagaaccau

SEQ ID NO: 1474105 - RNA, 19 nt, Artificial Sequence
  Description of Artificial Sequence: Synthetic oligonucleotide
  Antisense strand to SEQ ID NO: 1474104
augguucuggaaagccaca

SEQ ID NO: 1474106 - RNA, 19 nt, Artificial Sequence
  Description of Artificial Sequence: Synthetic oligonucleotide
  Sense strand starting at position 705 of SEQ ID NO: 1244223
guuugcuaaagugaaauga

SEQ ID NO: 1474107 - RNA, 19 nt, Artificial Sequence
  Description of Artificial Sequence: Synthetic oligonucleotide
  Antisense strand to SEQ ID NO: 1474106
ucauuucacuuuagcaaac

SEQ ID NO: 1474108 - RNA, 19 nt, Artificial Sequence
  Description of Artificial Sequence: Synthetic oligonucleotide
  Sense strand starting at position 709 of SEQ ID NO: 1244223
gcuaaagugaaaugaauug

SEQ ID NO: 1474109 - RNA, 19 nt, Artificial Sequence
  Description of Artificial Sequence: Synthetic oligonucleotide
  Antisense strand to SEQ ID NO: 1474108
caauucauuucacuuuagc

SEQ ID NO: 1474110 - RNA, 19 nt, Artificial Sequence
  Description of Artificial Sequence: Synthetic oligonucleotide
  Sense strand starting at position 776 of SEQ ID NO: 1244223
aagguuauucucgguuaag

SEQ ID NO: 1474111 - RNA, 19 nt, Artificial Sequence
  Description of Artificial Sequence: Synthetic oligonucleotide
  Antisense strand to SEQ ID NO: 1474110
cuuaaccgagaauaaccuu

SEQ ID NO: 1474112 - RNA, 19 nt, Artificial Sequence
  Description of Artificial Sequence: Synthetic oligonucleotide
  Sense strand starting at position 777 of SEQ ID NO: 1244223
agguuauucucgguuaaga

SEQ ID NO: 1474113 - RNA, 19 nt, Artificial Sequence
  Description of Artificial Sequence: Synthetic oligonucleotide
  Antisense strand to SEQ ID NO: 1474112
ucuuaaccgagaauaaccu

SEQ ID NO: 1474114 - RNA, 19 nt, Artificial Sequence
  Description of Artificial Sequence: Synthetic oligonucleotide
  Sense strand starting at position 779 of SEQ ID NO: 1244223
guuauucucgguuaagaag

SEQ ID NO: 1474115 - RNA, 19 nt, Artificial Sequence
  Description of Artificial Sequence: Synthetic oligonucleotide
  Antisense strand to SEQ ID NO: 1474114
cuucuuaaccgagaauaac

SEQ ID NO: 1474116 - RNA, 19 nt, Artificial Sequence
  Description of Artificial Sequence: Synthetic oligonucleotide
  Sense strand starting at position 812 of SEQ ID NO: 1244223
uggacaaguucccugguca

SEQ ID NO: 1474117 - RNA, 19 nt, Artificial Sequence
  Description of Artificial Sequence: Synthetic oligonucleotide
  Antisense strand to SEQ ID NO: 1474116
ugaccagggaacuugucca

SEQ ID NO: 1474118 - RNA, 19 nt, Artificial Sequence
  Description of Artificial Sequence: Synthetic oligonucleotide
  Sense strand starting at position 813 of SEQ ID NO: 1244223
ggacaaguucccuggucag

SEQ ID NO: 1474119 - RNA, 19 nt, Artificial Sequence
  Description of Artificial Sequence: Synthetic oligonucleotide
  Antisense strand to SEQ ID NO: 1474118
cugaccagggaacuugucc

SEQ ID NO: 1474120 - RNA, 19 nt, Artificial Sequence
  Description of Artificial Sequence: Synthetic oligonucleotide
  Sense strand starting at position 852 of SEQ ID NO: 1244223
guggaaucaggguaaaguu

SEQ ID NO: 1474121 - RNA, 19 nt, Artificial Sequence
  Description of Artificial Sequence: Synthetic oligonucleotide
  Antisense strand to SEQ ID NO: 1474120
aacuuuacccugauuccac

SEQ ID NO: 1474122 - RNA, 19 nt, Artificial Sequence
  Description of Artificial Sequence: Synthetic oligonucleotide
  Sense strand starting at position 883 of SEQ ID NO: 1244223
gcauuuguacucgguggga

SEQ ID NO: 1474123 - RNA, 19 nt, Artificial Sequence
  Description of Artificial Sequence: Synthetic oligonucleotide
  Antisense strand to SEQ ID NO: 1474122
ucccaccgaguacaaaugc

SEQ ID NO: 1474124 - RNA, 19 nt, Artificial Sequence
  Description of Artificial Sequence: Synthetic oligonucleotide
  Sense strand starting at position 1053 of SEQ ID NO: 1244223
gggugaugugccuaaacca

SEQ ID NO: 1474125 - RNA, 19 nt, Artificial Sequence
  Description of Artificial Sequence: Synthetic oligonucleotide
  Antisense strand to SEQ ID NO: 1474124
ugguuuaggcacaucaccc

SEQ ID NO: 1474126 - RNA, 19 nt, Artificial Sequence
  Description of Artificial Sequence: Synthetic oligonucleotide
  Sense strand starting at position 1126 of SEQ ID NO: 1244223
caaguugguuggccagaaa

SEQ ID NO: 1474127 - RNA, 19 nt, Artificial Sequence
  Description of Artificial Sequence: Synthetic oligonucleotide
  Antisense strand to SEQ ID NO: 1474126
uuucuggccaaccaacuug

SEQ ID NO: 1474128 - RNA, 19 nt, Artificial Sequence
  Description of Artificial Sequence: Synthetic oligonucleotide
  Sense strand starting at position 1129 of SEQ ID NO: 1244223
guugguuggccagaaauca

SEQ ID NO: 1474129 - RNA, 19 nt, Artificial Sequence
  Description of Artificial Sequence: Synthetic oligonucleotide
  Antisense strand to SEQ ID NO: 1474128
ugauuucuggccaaccaac

SEQ ID NO: 1474130 - RNA, 19 nt, Artificial Sequence
  Description of Artificial Sequence: Synthetic oligonucleotide
  Sense strand starting at position 1155 of SEQ ID NO: 1244223
acaagaagcugguuugcaa

SEQ ID NO: 1474131 - RNA, 19 nt, Artificial Sequence
  Description of Artificial Sequence: Synthetic oligonucleotide
  Antisense strand to SEQ ID NO: 1474130
uugcaaaccagcuucuugu

SEQ ID NO: 1474132 - RNA, 19 nt, Artificial Sequence
  Description of Artificial Sequence: Synthetic oligonucleotide
  Sense strand starting at position 1218 of SEQ ID NO: 1244223
guagaugaagcauguggaa

SEQ ID NO: 1474133 - RNA, 19 nt, Artificial Sequence
  Description of Artificial Sequence: Synthetic oligonucleotide
  Antisense strand to SEQ ID NO: 1474132
uuccacaugcuucaucuac

SEQ ID NO: 1474134 - RNA, 19 nt, Artificial Sequence
  Description of Artificial Sequence: Synthetic oligonucleotide
  Sense strand starting at position 1285 of SEQ ID NO: 1244223
guaguauugcaagaacuga

SEQ ID NO: 1474135 - RNA, 19 nt, Artificial Sequence
  Description of Artificial Sequence: Synthetic oligonucleotide
  Antisense strand to SEQ ID NO: 1474134
ucaguucuugcaauacuac

SEQ ID NO: 1474136 - RNA, 19 nt, Artificial Sequence
  Description of Artificial Sequence: Synthetic oligonucleotide
  Sense strand starting at position 1367 of SEQ ID NO: 1244223
uauagcagauggguugaua

SEQ ID NO: 1474137 - RNA, 19 nt, Artificial Sequence
  Description of Artificial Sequence: Synthetic oligonucleotide
  Antisense strand to SEQ ID NO: 1474136
uaucaacccaucugcuaua

SEQ ID NO: 1474138 - RNA, 19 nt, Artificial Sequence
  Description of Artificial Sequence: Synthetic oligonucleotide
  Sense strand starting at position 1378 of SEQ ID NO: 1244223
gguugauaauaaguugauu

SEQ ID NO: 1474139 - RNA, 19 nt, Artificial Sequence
  Description of Artificial Sequence: Synthetic oligonucleotide
  Antisense strand to SEQ ID NO: 1474138
aaucaacuuauuaucaacc

SEQ ID NO: 1474140 - RNA, 19 nt, Artificial Sequence
  Description of Artificial Sequence: Synthetic oligonucleotide
  Sense strand starting at position 1460 of SEQ ID NO: 1244223
auggacuagcuguacagau

SEQ ID NO: 1474141 - RNA, 19 nt, Artificial Sequence
  Description of Artificial Sequence: Synthetic oligonucleotide
  Antisense strand to SEQ ID NO: 1474140
aucuguacagcuaguccau

SEQ ID NO: 1474142 - RNA, 19 nt, Artificial Sequence
  Description of Artificial Sequence: Synthetic oligonucleotide
  Sense strand starting at position 1476 of SEQ ID NO: 1244223
gaugguugguaggcaagaa

SEQ ID NO: 1474143 - RNA, 19 nt, Artificial Sequence
  Description of Artificial Sequence: Synthetic oligonucleotide
  Antisense strand to SEQ ID NO: 1474142
uucuugccuaccaaccauc

SEQ ID NO: 1474144 - RNA, 19 nt, Artificial Sequence
  Description of Artificial Sequence: Synthetic oligonucleotide
  Sense strand starting at position 1480 of SEQ ID NO: 1244223
guugguaggcaagaaguuu

SEQ ID NO: 1474145 - RNA, 19 nt, Artificial Sequence
  Description of Artificial Sequence: Synthetic oligonucleotide
  Antisense strand to SEQ ID NO: 1474144
aaacuucuugccuaccaac

SEQ ID NO: 1474146 - RNA, 19 nt, Artificial Sequence
  Description of Artificial Sequence: Synthetic oligonucleotide
  Sense strand starting at position 1660 of SEQ ID NO: 1244223
guagauuccgagcaggaug

SEQ ID NO: 1474147 - RNA, 19 nt, Artificial Sequence
  Description of Artificial Sequence: Synthetic oligonucleotide
  Antisense strand to SEQ ID NO: 1474146
cauccugcucggaaucuac

SEQ ID NO: 1474148 - RNA, 19 nt, Artificial Sequence
  Description of Artificial Sequence: Synthetic oligonucleotide
  Sense strand starting at position 1708 of SEQ ID NO: 1244223
ugaccagugccagacugau

SEQ ID NO: 1474149 - RNA, 19 nt, Artificial Sequence
  Description of Artificial Sequence: Synthetic oligonucleotide
  Antisense strand to SEQ ID NO: 1474148
aucagucuggcacugguca

SEQ ID NO: 1474150 - RNA, 19 nt, Artificial Sequence
  Description of Artificial Sequence: Synthetic oligonucleotide
  Sense strand starting at position 1970 of SEQ ID NO: 1244223
ugguguuuccaggacaaca

SEQ ID NO: 1474151 - RNA, 19 nt, Artificial Sequence
  Description of Artificial Sequence: Synthetic oligonucleotide
  Antisense strand to SEQ ID NO: 1474150
uguuguccuggaaacacca

SEQ ID NO: 1474152 - RNA, 19 nt, Artificial Sequence
  Description of Artificial Sequence: Synthetic oligonucleotide
  Sense strand starting at position 2036 of SEQ ID NO: 1244223
ucaguauaccugcauugga

SEQ ID NO: 1474153 - RNA, 19 nt, Artificial Sequence
  Description of Artificial Sequence: Synthetic oligonucleotide
  Antisense strand to SEQ ID NO: 1474152
uccaaugcagguauacuga

SEQ ID NO: 1474154 - RNA, 19 nt, Artificial Sequence
  Description of Artificial Sequence: Synthetic oligonucleotide
  Sense strand starting at position 2238 of SEQ ID NO: 1244223
gcauuuggauucguugaca

SEQ ID NO: 1474155 - RNA, 19 nt, Artificial Sequence
  Description of Artificial Sequence: Synthetic oligonucleotide
  Antisense strand to SEQ ID NO: 1474154
ugucaacgaauccaaaugc

SEQ ID NO: 1474156 - RNA, 19 nt, Artificial Sequence
  Description of Artificial Sequence: Synthetic oligonucleotide
  Sense strand starting at position 2444 of SEQ ID NO: 1244223
ggaugucaagacgggaaau

SEQ ID NO: 1474157 - RNA, 19 nt, Artificial Sequence
  Description of Artificial Sequence: Synthetic oligonucleotide
  Antisense strand to SEQ ID NO: 1474156
auuucccgucuugacaucc

SEQ ID NO: 1474158 - RNA, 19 nt, Artificial Sequence
  Description of Artificial Sequence: Synthetic oligonucleotide
  Sense strand starting at position 2536 of SEQ ID NO: 1244223
ccugaaacuuguuuacuag

SEQ ID NO: 1474159 - RNA, 19 nt, Artificial Sequence
  Description of Artificial Sequence: Synthetic oligonucleotide
  Antisense strand to SEQ ID NO: 1474158
cuaguaaacaaguuucagg

SEQ ID NO: 1474160 - RNA, 19 nt, Artificial Sequence
  Description of Artificial Sequence: Synthetic oligonucleotide
  Sense strand starting at position 2537 of SEQ ID NO: 1244223
cugaaacuuguuuacuagu

SEQ ID NO: 1474161 - RNA, 19 nt, Artificial Sequence
  Description of Artificial Sequence: Synthetic oligonucleotide
  Antisense strand to SEQ ID NO: 1474160
acuaguaaacaaguuucag

SEQ ID NO: 1474162 - RNA, 19 nt, Artificial Sequence
  Description of Artificial Sequence: Synthetic oligonucleotide
  Sense strand starting at position 2661 of SEQ ID NO: 1244223
guauaauugucaucacuau

SEQ ID NO: 1474163 - RNA, 19 nt, Artificial Sequence
  Description of Artificial Sequence: Synthetic oligonucleotide
  Antisense strand to SEQ ID NO: 1474162
auagugaugacaauuauac

SEQ ID NO: 1474164 - RNA, 19 nt, Artificial Sequence
  Description of Artificial Sequence: Synthetic oligonucleotide
  Sense strand starting at position 2667 of SEQ ID NO: 1244223
uugucaucacuauguuaga

SEQ ID NO: 1474165 - RNA, 19 nt, Artificial Sequence
  Description of Artificial Sequence: Synthetic oligonucleotide
  Antisense strand to SEQ ID NO: 1474164
ucuaacauagugaugacaa

SEQ ID NO: 1474166 - RNA, 19 nt, Artificial Sequence
  Description of Artificial Sequence: Synthetic oligonucleotide
  Sense strand starting at position 2668 of SEQ ID NO: 1244223
ugucaucacuauguuagaa

SEQ ID NO: 1474167 - RNA, 19 nt, Artificial Sequence
  Description of Artificial Sequence: Synthetic oligonucleotide
  Antisense strand to SEQ ID NO: 1474166
uucuaacauagugaugaca

SEQ ID NO: 1474168 - RNA, 19 nt, Artificial Sequence
  Description of Artificial Sequence: Synthetic oligonucleotide
  Sense strand starting at position 2676 of SEQ ID NO: 1244223
cuauguuagaaguggcaaa

SEQ ID NO: 1474169 - RNA, 19 nt, Artificial Sequence
  Description of Artificial Sequence: Synthetic oligonucleotide
  Antisense strand to SEQ ID NO: 1474168
uuugccacuucuaacauag

SEQ ID NO: 1474170 - RNA, 19 nt, Artificial Sequence
  Description of Artificial Sequence: Synthetic oligonucleotide
  Sense strand starting at position 2925 of SEQ ID NO: 1244223
agcuuugucugaccaccaa

SEQ ID NO: 1474171 - RNA, 19 nt, Artificial Sequence
  Description of Artificial Sequence: Synthetic oligonucleotide
  Antisense strand to SEQ ID NO: 1474170
uugguggucagacaaagcu

SEQ ID NO: 1474172 - RNA, 19 nt, Artificial Sequence
  Description of Artificial Sequence: Synthetic oligonucleotide
  Sense strand starting at position 3240 of SEQ ID NO: 1244223
gcaucaauagcauaugaau

SEQ ID NO: 1474173 - RNA, 19 nt, Artificial Sequence
  Description of Artificial Sequence: Synthetic oligonucleotide
  Antisense strand to SEQ ID NO: 1474172
auucauaugcuauugaugc

SEQ ID NO: 1474174 - RNA, 19 nt, Artificial Sequence
  Description of Artificial Sequence: Synthetic oligonucleotide
  Sense strand starting at position 3344 of SEQ ID NO: 1244223
ggaauucgugagggacuuu

SEQ ID NO: 1474175 - RNA, 19 nt, Artificial Sequence
  Description of Artificial Sequence: Synthetic oligonucleotide
  Antisense strand to SEQ ID NO: 1474174
aaagucccucacgaauucc

SEQ ID NO: 1474176 - RNA, 19 nt, Artificial Sequence
  Description of Artificial Sequence: Synthetic oligonucleotide
  Sense strand starting at position 3538 of SEQ ID NO: 1244223
acucauucuguugaauaug

SEQ ID NO: 1474177 - RNA, 19 nt, Artificial Sequence
  Description of Artificial Sequence: Synthetic oligonucleotide
  Antisense strand to SEQ ID NO: 1474176
cauauucaacagaaugagu

SEQ ID NO: 1474178 - RNA, 19 nt, Artificial Sequence
  Description of Artificial Sequence: Synthetic oligonucleotide
  Sense strand starting at position 3603 of SEQ ID NO: 1244223
cguugucaugucucagguu

SEQ ID NO: 1474179 - RNA, 19 nt, Artificial Sequence
  Description of Artificial Sequence: Synthetic oligonucleotide
  Antisense strand to SEQ ID NO: 1474178
aaccugagacaugacaacg

SEQ ID NO: 1474180 - RNA, 19 nt, Artificial Sequence
  Description of Artificial Sequence: Synthetic oligonucleotide
  Sense strand starting at position 19 of SEQ ID NO: 1244224
augcauauggagugauaua

SEQ ID NO: 1474181 - RNA, 19 nt, Artificial Sequence
  Description of Artificial Sequence: Synthetic oligonucleotide
  Antisense strand to SEQ ID NO: 1474180
uauaucacuccauaugcau

SEQ ID NO: 1474182 - RNA, 19 nt, Artificial Sequence
  Description of Artificial Sequence: Synthetic oligonucleotide
  Sense strand starting at position 108 of SEQ ID NO: 1244224
cauguauacuccuugggua

SEQ ID NO: 1474183 - RNA, 19 nt, Artificial Sequence
  Description of Artificial Sequence: Synthetic oligonucleotide
  Antisense strand to SEQ ID NO: 1474182
uacccaaggaguauacaug

SEQ ID NO: 1474184 - RNA, 19 nt, Artificial Sequence
  Description of Artificial Sequence: Synthetic oligonucleotide
  Sense strand starting at position 278 of SEQ ID NO: 1244224
uccauauggcaguaauggu

SEQ ID NO: 1474185 - RNA, 19 nt, Artificial Sequence
  Description of Artificial Sequence: Synthetic oligonucleotide
  Antisense strand to SEQ ID NO: 1474184
accauuacugccauaugga

SEQ ID NO: 1474186 - RNA, 19 nt, Artificial Sequence
  Description of Artificial Sequence: Synthetic oligonucleotide
  Sense strand starting at position 356 of SEQ ID NO: 1244224
gcaucugguccucacaaua

SEQ ID NO: 1474187 - RNA, 19 nt, Artificial Sequence
  Description of Artificial Sequence: Synthetic oligonucleotide
  Antisense strand to SEQ ID NO: 1474186
uauugugaggaccagaugc

SEQ ID NO: 1474188 - RNA, 19 nt, Artificial Sequence
  Description of Artificial Sequence: Synthetic oligonucleotide
  Sense strand starting at position 451 of SEQ ID NO: 1244224
ccacgcuauagguaggaaa

SEQ ID NO: 1474189 - RNA, 19 nt, Artificial Sequence
  Description of Artificial Sequence: Synthetic oligonucleotide
  Antisense strand to SEQ ID NO: 1474188
uuuccuaccuauagcgugg

SEQ ID NO: 1474190 - RNA, 19 nt, Artificial Sequence
  Description of Artificial Sequence: Synthetic oligonucleotide
  Sense strand starting at position 453 of SEQ ID NO: 1244224
acgcuauagguaggaaauc

SEQ ID NO: 1474191 - RNA, 19 nt, Artificial Sequence
  Description of Artificial Sequence: Synthetic oligonucleotide
  Antisense strand to SEQ ID NO: 1474190
gauuuccuaccuauagcgu

SEQ ID NO: 1474192 - RNA, 19 nt, Artificial Sequence
  Description of Artificial Sequence: Synthetic oligonucleotide
  Sense strand starting at position 638 of SEQ ID NO: 1244224
ggacaugaauuagugguua

SEQ ID NO: 1474193 - RNA, 19 nt, Artificial Sequence
  Description of Artificial Sequence: Synthetic oligonucleotide
  Antisense strand to SEQ ID NO: 1474192
uaaccacuaauucaugucc

SEQ ID NO: 1474194 - RNA, 19 nt, Artificial Sequence
  Description of Artificial Sequence: Synthetic oligonucleotide
  Sense strand starting at position 643 of SEQ ID NO: 1244224
ugaauuagugguuaucgua

SEQ ID NO: 1474195 - RNA, 19 nt, Artificial Sequence
  Description of Artificial Sequence: Synthetic oligonucleotide
  Antisense strand to SEQ ID NO: 1474194
uacgauaaccacuaauuca

SEQ ID NO: 1474196 - RNA, 19 nt, Artificial Sequence
  Description of Artificial Sequence: Synthetic oligonucleotide
  Sense strand starting at position 649 of SEQ ID NO: 1244224
agugguuaucguaguaguu

SEQ ID NO: 1474197 - RNA, 19 nt, Artificial Sequence
  Description of Artificial Sequence: Synthetic oligonucleotide
  Antisense strand to SEQ ID NO: 1474196
aacuacuacgauaaccacu

SEQ ID NO: 1474198 - RNA, 19 nt, Artificial Sequence
  Description of Artificial Sequence: Synthetic oligonucleotide
  Sense strand starting at position 650 of SEQ ID NO: 1244224
gugguuaucguaguaguuu

SEQ ID NO: 1474199 - RNA, 19 nt, Artificial Sequence
  Description of Artificial Sequence: Synthetic oligonucleotide
  Antisense strand to SEQ ID NO: 1474198
aaacuacuacgauaaccac

SEQ ID NO: 1474200 - RNA, 19 nt, Artificial Sequence
  Description of Artificial Sequence: Synthetic oligonucleotide
  Sense strand starting at position 698 of SEQ ID NO: 1244224
cucagaauugugugacuau

SEQ ID NO: 1474201 - RNA, 19 nt, Artificial Sequence
  Description of Artificial Sequence: Synthetic oligonucleotide
  Antisense strand to SEQ ID NO: 1474200
auagucacacaauucugag

SEQ ID NO: 1474202 - RNA, 19 nt, Artificial Sequence
  Description of Artificial Sequence: Synthetic oligonucleotide
  Sense strand starting at position 786 of SEQ ID NO: 1244224
ugucacuuagacuagcaaa

SEQ ID NO: 1474203 - RNA, 19 nt, Artificial Sequence
  Description of Artificial Sequence: Synthetic oligonucleotide
  Antisense strand to SEQ ID NO: 1474202
uuugcuagucuaagugaca

SEQ ID NO: 1474204 - RNA, 19 nt, Artificial Sequence
  Description of Artificial Sequence: Synthetic oligonucleotide
  Sense strand starting at position 861 of SEQ ID NO: 1244224
augaauacucgauaaaugc

SEQ ID NO: 1474205 - RNA, 19 nt, Artificial Sequence
  Description of Artificial Sequence: Synthetic oligonucleotide
  Antisense strand to SEQ ID NO: 1474204
gcauuuaucgaguauucau

SEQ ID NO: 1474206 - RNA, 19 nt, Artificial Sequence
  Description of Artificial Sequence: Synthetic oligonucleotide
  Sense strand starting at position 1407 of SEQ ID NO: 1244224
uuugcuaagccagaauaaa

SEQ ID NO: 1474207 - RNA, 19 nt, Artificial Sequence
  Description of Artificial Sequence: Synthetic oligonucleotide
  Antisense strand to SEQ ID NO: 1474206
uuuauucuggcuuagcaaa

SEQ ID NO: 1474208 - RNA, 19 nt, Artificial Sequence
  Description of Artificial Sequence: Synthetic oligonucleotide
  Sense strand starting at position 1447 of SEQ ID NO: 1244224
augguuauuucucaaagag

SEQ ID NO: 1474209 - RNA, 19 nt, Artificial Sequence
  Description of Artificial Sequence: Synthetic oligonucleotide
  Antisense strand to SEQ ID NO: 1474208
cucuuugagaaauaaccau

SEQ ID NO: 1474210 - RNA, 19 nt, Artificial Sequence
  Description of Artificial Sequence: Synthetic oligonucleotide
  Sense strand starting at position 1454 of SEQ ID NO: 1244224
uuucucaaagagugaugaa

SEQ ID NO: 1474211 - RNA, 19 nt, Artificial Sequence
  Description of Artificial Sequence: Synthetic oligonucleotide
  Antisense strand to SEQ ID NO: 1474210
uucaucacucuuugagaaa

SEQ ID NO: 1474212 - RNA, 19 nt, Artificial Sequence
  Description of Artificial Sequence: Synthetic oligonucleotide
  Sense strand starting at position 1506 of SEQ ID NO: 1244224
guacccaaaugugcaaaua

SEQ ID NO: 1474213 - RNA, 19 nt, Artificial Sequence
  Description of Artificial Sequence: Synthetic oligonucleotide
  Antisense strand to SEQ ID NO: 1474212
uauuugcacauuuggguac

SEQ ID NO: 1474214 - RNA, 19 nt, Artificial Sequence
  Description of Artificial Sequence: Synthetic oligonucleotide
  Sense strand starting at position 1702 of SEQ ID NO: 1244224
gaacauagguggucagguu

SEQ ID NO: 1474215 - RNA, 19 nt, Artificial Sequence
  Description of Artificial Sequence: Synthetic oligonucleotide
  Antisense strand to SEQ ID NO: 1474214
aaccugaccaccuauguuc

SEQ ID NO: 1474216 - RNA, 19 nt, Artificial Sequence
  Description of Artificial Sequence: Synthetic oligonucleotide
  Sense strand starting at position 2135 of SEQ ID NO: 1244224
aguguuuauuaccuaagau

SEQ ID NO: 1474217 - RNA, 19 nt, Artificial Sequence
  Description of Artificial Sequence: Synthetic oligonucleotide
  Antisense strand to SEQ ID NO: 1474216
aucuuagguaauaaacacu

SEQ ID NO: 1474218 - RNA, 19 nt, Artificial Sequence
  Description of Artificial Sequence: Synthetic oligonucleotide
  Sense strand starting at position 2266 of SEQ ID NO: 1244224
gggccauuaucuucuaauc

SEQ ID NO: 1474219 - RNA, 19 nt, Artificial Sequence
  Description of Artificial Sequence: Synthetic oligonucleotide
  Antisense strand to SEQ ID NO: 1474218
gauuagaagauaauggccc

SEQ ID NO: 1474220 - RNA, 19 nt, Artificial Sequence
  Description of Artificial Sequence: Synthetic oligonucleotide
  Sense strand starting at position 2577 of SEQ ID NO: 1244224
guuuguucugcauuccuuu

SEQ ID NO: 1474221 - RNA, 19 nt, Artificial Sequence
  Description of Artificial Sequence: Synthetic oligonucleotide
  Antisense strand to SEQ ID NO: 1474220
aaaggaaugcagaacaaac

SEQ ID NO: 1474222 - RNA, 19 nt, Artificial Sequence
  Description of Artificial Sequence: Synthetic oligonucleotide
  Sense strand starting at position 2659 of SEQ ID NO: 1244224
gacaaagauggguguccuu

SEQ ID NO: 1474223 - RNA, 19 nt, Artificial Sequence
  Description of Artificial Sequence: Synthetic oligonucleotide
  Antisense strand to SEQ ID NO: 1474222
aaggacacccaucuuuguc

SEQ ID NO: 1474224 - RNA, 19 nt, Artificial Sequence
  Description of Artificial Sequence: Synthetic oligonucleotide
  Sense strand starting at position 2684 of SEQ ID NO: 1244224
ccauccaacuguguuauaa

SEQ ID NO: 1474225 - RNA, 19 nt, Artificial Sequence
  Description of Artificial Sequence: Synthetic oligonucleotide
  Antisense strand to SEQ ID NO: 1474224
uuauaacacaguuggaugg

SEQ ID NO: 1474226 - RNA, 19 nt, Artificial Sequence
  Description of Artificial Sequence: Synthetic oligonucleotide
  Sense strand starting at position 2692 of SEQ ID NO: 1244224
cuguguuauaaauggagau

SEQ ID NO: 1474227 - RNA, 19 nt, Artificial Sequence
  Description of Artificial Sequence: Synthetic oligonucleotide
  Antisense strand to SEQ ID NO: 1474226
aucuccauuuauaacacag

SEQ ID NO: 1474228 - RNA, 19 nt, Artificial Sequence
  Description of Artificial Sequence: Synthetic oligonucleotide
  Sense strand starting at position 2693 of SEQ ID NO: 1244224
uguguuauaaauggagauu

SEQ ID NO: 1474229 - RNA, 19 nt, Artificial Sequence
  Description of Artificial Sequence: Synthetic oligonucleotide
  Antisense strand to SEQ ID NO: 1474228
aaucuccauuuauaacaca

SEQ ID NO: 1474230 - RNA, 19 nt, Artificial Sequence
  Description of Artificial Sequence: Synthetic oligonucleotide
  Sense strand starting at position 2705 of SEQ ID NO: 1244224
ggagauuauuuauaaccaa

SEQ ID NO: 1474231 - RNA, 19 nt, Artificial Sequence
  Description of Artificial Sequence: Synthetic oligonucleotide
  Antisense strand to SEQ ID NO: 1474230
uugguuauaaauaaucucc

SEQ ID NO: 1474232 - RNA, 19 nt, Artificial Sequence
  Description of Artificial Sequence: Synthetic oligonucleotide
  Sense strand starting at position 2775 of SEQ ID NO: 1244224
gacugaguuccaugaacac

SEQ ID NO: 1474233 - RNA, 19 nt, Artificial Sequence
  Description of Artificial Sequence: Synthetic oligonucleotide
  Antisense strand to SEQ ID NO: 1474232
guguucauggaacucaguc

SEQ ID NO: 1474234 - RNA, 19 nt, Artificial Sequence
  Description of Artificial Sequence: Synthetic oligonucleotide
  Sense strand starting at position 2797 of SEQ ID NO: 1244224
uuccaagggacuugaaagu

SEQ ID NO: 1474235 - RNA, 19 nt, Artificial Sequence
  Description of Artificial Sequence: Synthetic oligonucleotide
  Antisense strand to SEQ ID NO: 1474234
acuuucaagucccuuggaa

SEQ ID NO: 1474236 - RNA, 19 nt, Artificial Sequence
  Description of Artificial Sequence: Synthetic oligonucleotide
  Sense strand starting at position 2975 of SEQ ID NO: 1244224
agagauuagcucuauaggu

SEQ ID NO: 1474237 - RNA, 19 nt, Artificial Sequence
  Description of Artificial Sequence: Synthetic oligonucleotide
  Antisense strand to SEQ ID NO: 1474236
accuauagagcuaaucucu

SEQ ID NO: 1474238 - RNA, 19 nt, Artificial Sequence
  Description of Artificial Sequence: Synthetic oligonucleotide
  Sense strand starting at position 2977 of SEQ ID NO: 1244224
agauuagcucuauagguca

SEQ ID NO: 1474239 - RNA, 19 nt, Artificial Sequence
  Description of Artificial Sequence: Synthetic oligonucleotide
  Antisense strand to SEQ ID NO: 1474238
ugaccuauagagcuaaucu

SEQ ID NO: 1474240 - RNA, 19 nt, Artificial Sequence
  Description of Artificial Sequence: Synthetic oligonucleotide
  Sense strand starting at position 2990 of SEQ ID NO: 1244224
aggucagugcuuuaugaaa

SEQ ID NO: 1474241 - RNA, 19 nt, Artificial Sequence
  Description of Artificial Sequence: Synthetic oligonucleotide
  Antisense strand to SEQ ID NO: 1474240
uuucauaaagcacugaccu

SEQ ID NO: 1474242 - RNA, 19 nt, Artificial Sequence
  Description of Artificial Sequence: Synthetic oligonucleotide
  Sense strand starting at position 3260 of SEQ ID NO: 1244224
ggcucugugguccagaaua

SEQ ID NO: 1474243 - RNA, 19 nt, Artificial Sequence
  Description of Artificial Sequence: Synthetic oligonucleotide
  Antisense strand to SEQ ID NO: 1474242
uauucuggaccacagagcc

SEQ ID NO: 1474244 - RNA, 19 nt, Artificial Sequence
  Description of Artificial Sequence: Synthetic oligonucleotide
  Sense strand starting at position 3262 of SEQ ID NO: 1244224
cucugugguccagaauaga

SEQ ID NO: 1474245 - RNA, 19 nt, Artificial Sequence
  Description of Artificial Sequence: Synthetic oligonucleotide
  Antisense strand to SEQ ID NO: 1474244
ucuauucuggaccacagag

SEQ ID NO: 1474246 - RNA, 19 nt, Artificial Sequence
  Description of Artificial Sequence: Synthetic oligonucleotide
  Sense strand starting at position 3473 of SEQ ID NO: 1244224
cagauaagauggcucaagu

SEQ ID NO: 1474247 - RNA, 19 nt, Artificial Sequence
  Description of Artificial Sequence: Synthetic oligonucleotide
  Antisense strand to SEQ ID NO: 1474246
acuugagccaucuuaucug

SEQ ID NO: 1474248 - RNA, 19 nt, Artificial Sequence
  Description of Artificial Sequence: Synthetic oligonucleotide
  Sense strand starting at position 3630 of SEQ ID NO: 1244224
uuuggauuccuaugcuaga

SEQ ID NO: 1474249 - RNA, 19 nt, Artificial Sequence
  Description of Artificial Sequence: Synthetic oligonucleotide
  Antisense strand to SEQ ID NO: 1474248
ucuagcauaggaauccaaa

SEQ ID NO: 1474250 - RNA, 19 nt, Artificial Sequence
  Description of Artificial Sequence: Synthetic oligonucleotide
  Sense strand starting at position 3631 of SEQ ID NO: 1244224
uuggauuccuaugcuagaa

SEQ ID NO: 1474251 - RNA, 19 nt, Artificial Sequence
  Description of Artificial Sequence: Synthetic oligonucleotide
  Antisense strand to SEQ ID NO: 1474250
uucuagcauaggaauccaa

SEQ ID NO: 1474252 - RNA, 19 nt, Artificial Sequence
  Description of Artificial Sequence: Synthetic oligonucleotide
  Sense strand starting at position 3880 of SEQ ID NO: 1244224
gccacagacuucuccuaga

SEQ ID NO: 1474253 - RNA, 19 nt, Artificial Sequence
  Description of Artificial Sequence: Synthetic oligonucleotide
  Antisense strand to SEQ ID NO: 1474252
ucuaggagaagucuguggc

SEQ ID NO: 1474254 - RNA, 19 nt, Artificial Sequence
  Description of Artificial Sequence: Synthetic oligonucleotide
  Sense strand starting at position 3924 of SEQ ID NO: 1244224
gagaacaucuguuuggauc

SEQ ID NO: 1474255 - RNA, 19 nt, Artificial Sequence
  Description of Artificial Sequence: Synthetic oligonucleotide
  Antisense strand to SEQ ID NO: 1474254
gauccaaacagauguucuc

SEQ ID NO: 1474256 - RNA, 19 nt, Artificial Sequence
  Description of Artificial Sequence: Synthetic oligonucleotide
  Sense strand starting at position 3925 of SEQ ID NO: 1244224
agaacaucuguuuggaucu

SEQ ID NO: 1474257 - RNA, 19 nt, Artificial Sequence
  Description of Artificial Sequence: Synthetic oligonucleotide
  Antisense strand to SEQ ID NO: 1474256
agauccaaacagauguucu

SEQ ID NO: 1474258 - RNA, 19 nt, Artificial Sequence
  Description of Artificial Sequence: Synthetic oligonucleotide
  Sense strand starting at position 3936 of SEQ ID NO: 1244224
uuggaucuugaagggugaa

SEQ ID NO: 1474259 - RNA, 19 nt, Artificial Sequence
  Description of Artificial Sequence: Synthetic oligonucleotide
  Antisense strand to SEQ ID NO: 1474258
uucacccuucaagauccaa

SEQ ID NO: 1474260 - RNA, 19 nt, Artificial Sequence
  Description of Artificial Sequence: Synthetic oligonucleotide
  Sense strand starting at position 22 of SEQ ID NO: 1244225
ucaauaugaugccugacau

SEQ ID NO: 1474261 - RNA, 19 nt, Artificial Sequence
  Description of Artificial Sequence: Synthetic oligonucleotide
  Antisense strand to SEQ ID NO: 1474260
augucaggcaucauauuga

SEQ ID NO: 1474262 - RNA, 19 nt, Artificial Sequence
  Description of Artificial Sequence: Synthetic oligonucleotide
  Sense strand starting at position 86 of SEQ ID NO: 1244225
cuagaucucuuguugacaa

SEQ ID NO: 1474263 - RNA, 19 nt, Artificial Sequence
  Description of Artificial Sequence: Synthetic oligonucleotide
  Antisense strand to SEQ ID NO: 1474262
uugucaacaagagaucuag

SEQ ID NO: 1474264 - RNA, 19 nt, Artificial Sequence
  Description of Artificial Sequence: Synthetic oligonucleotide
  Sense strand starting at position 100 of SEQ ID NO: 1244225
gacaauauccucuguagug

SEQ ID NO: 1474265 - RNA, 19 nt, Artificial Sequence
  Description of Artificial Sequence: Synthetic oligonucleotide
  Antisense strand to SEQ ID NO: 1474264
cacuacagaggauauuguc

SEQ ID NO: 1474266 - RNA, 19 nt, Artificial Sequence
  Description of Artificial Sequence: Synthetic oligonucleotide
  Sense strand starting at position 112 of SEQ ID NO: 1244225
uguagugucccauagacuc

SEQ ID NO: 1474267 - RNA, 19 nt, Artificial Sequence
  Description of Artificial Sequence: Synthetic oligonucleotide
  Antisense strand to SEQ ID NO: 1474266
gagucuaugggacacuaca

SEQ ID NO: 1474268 - RNA, 19 nt, Artificial Sequence
  Description of Artificial Sequence: Synthetic oligonucleotide
  Sense strand starting at position 177 of SEQ ID NO: 1244225
uauggaaucccgugagaaa

SEQ ID NO: 1474269 - RNA, 19 nt, Artificial Sequence
  Description of Artificial Sequence: Synthetic oligonucleotide
  Antisense strand to SEQ ID NO: 1474268
uuucucacgggauuccaua

SEQ ID NO: 1474270 - RNA, 19 nt, Artificial Sequence
  Description of Artificial Sequence: Synthetic oligonucleotide
  Sense strand starting at position 180 of SEQ ID NO: 1244225
ggaaucccgugagaaauuu

SEQ ID NO: 1474271 - RNA, 19 nt, Artificial Sequence
  Description of Artificial Sequence: Synthetic oligonucleotide
  Antisense strand to SEQ ID NO: 1474270
aaauuucucacgggauucc

SEQ ID NO: 1474272 - RNA, 19 nt, Artificial Sequence
  Description of Artificial Sequence: Synthetic oligonucleotide
  Sense strand starting at position 295 of SEQ ID NO: 1244225
gcaugucuucuugugguuu

SEQ ID NO: 1474273 - RNA, 19 nt, Artificial Sequence
  Description of Artificial Sequence: Synthetic oligonucleotide
  Antisense strand to SEQ ID NO: 1474272
aaaccacaagaagacaugc

SEQ ID NO: 1474274 - RNA, 19 nt, Artificial Sequence
  Description of Artificial Sequence: Synthetic oligonucleotide
  Sense strand starting at position 396 of SEQ ID NO: 1244225
guguuacauaaauguauug

SEQ ID NO: 1474275 - RNA, 19 nt, Artificial Sequence
  Description of Artificial Sequence: Synthetic oligonucleotide
  Antisense strand to SEQ ID NO: 1474274
caauacauuuauguaacac

SEQ ID NO: 1474276 - RNA, 19 nt, Artificial Sequence
  Description of Artificial Sequence: Synthetic oligonucleotide
  Sense strand starting at position 511 of SEQ ID NO: 1244225
cgaauuaaagcauacguaa

SEQ ID NO: 1474277 - RNA, 19 nt, Artificial Sequence
  Description of Artificial Sequence: Synthetic oligonucleotide
  Antisense strand to SEQ ID NO: 1474276
uuacguaugcuuuaauucg

SEQ ID NO: 1474278 - RNA, 19 nt, Artificial Sequence
  Description of Artificial Sequence: Synthetic oligonucleotide
  Sense strand starting at position 518 of SEQ ID NO: 1244225
aagcauacguaaucagagu

SEQ ID NO: 1474279 - RNA, 19 nt, Artificial Sequence
  Description of Artificial Sequence: Synthetic oligonucleotide
  Antisense strand to SEQ ID NO: 1474278
acucugauuacguaugcuu

SEQ ID NO: 1474280 - RNA, 19 nt, Artificial Sequence
  Description of Artificial Sequence: Synthetic oligonucleotide
  Sense strand starting at position 519 of SEQ ID NO: 1244225
agcauacguaaucagaguu

SEQ ID NO: 1474281 - RNA, 19 nt, Artificial Sequence
  Description of Artificial Sequence: Synthetic oligonucleotide
  Antisense strand to SEQ ID NO: 1474280
aacucugauuacguaugcu

SEQ ID NO: 1474282 - RNA, 19 nt, Artificial Sequence
  Description of Artificial Sequence: Synthetic oligonucleotide
  Sense strand starting at position 578 of SEQ ID NO: 1244225
uauugauuacugugguaga

SEQ ID NO: 1474283 - RNA, 19 nt, Artificial Sequence
  Description of Artificial Sequence: Synthetic oligonucleotide
  Antisense strand to SEQ ID NO: 1474282
ucuaccacaguaaucaaua

SEQ ID NO: 1474284 - RNA, 19 nt, Artificial Sequence
  Description of Artificial Sequence: Synthetic oligonucleotide
  Sense strand starting at position 591 of SEQ ID NO: 1244225
gguagaacaucugugcuga

SEQ ID NO: 1474285 - RNA, 19 nt, Artificial Sequence
  Description of Artificial Sequence: Synthetic oligonucleotide
  Antisense strand to SEQ ID NO: 1474284
ucagcacagauguucuacc

SEQ ID NO: 1474286 - RNA, 19 nt, Artificial Sequence
  Description of Artificial Sequence: Synthetic oligonucleotide
  Sense strand starting at position 727 of SEQ ID NO: 1244225
agaauugaauacuugccaa

SEQ ID NO: 1474287 - RNA, 19 nt, Artificial Sequence
  Description of Artificial Sequence: Synthetic oligonucleotide
  Antisense strand to SEQ ID NO: 1474286
uuggcaaguauucaauucu

SEQ ID NO: 1474288 - RNA, 19 nt, Artificial Sequence
  Description of Artificial Sequence: Synthetic oligonucleotide
  Sense strand starting at position 778 of SEQ ID NO: 1244225
auuauaauccgauguggau

SEQ ID NO: 1474289 - RNA, 19 nt, Artificial Sequence
  Description of Artificial Sequence: Synthetic oligonucleotide
  Antisense strand to SEQ ID NO: 1474288
auccacaucggauuauaau

SEQ ID NO: 1474290 - RNA, 19 nt, Artificial Sequence
  Description of Artificial Sequence: Synthetic oligonucleotide
  Sense strand starting at position 918 of SEQ ID NO: 1244225
gggcuuuagagucagacau

SEQ ID NO: 1474291 - RNA, 19 nt, Artificial Sequence
  Description of Artificial Sequence: Synthetic oligonucleotide
  Antisense strand to SEQ ID NO: 1474290
augucugacucuaaagccc

SEQ ID NO: 1474292 - RNA, 19 nt, Artificial Sequence
  Description of Artificial Sequence: Synthetic oligonucleotide
  Sense strand starting at position 1053 of SEQ ID NO: 1244225
auaauuuacuggugaagag

SEQ ID NO: 1474293 - RNA, 19 nt, Artificial Sequence
  Description of Artificial Sequence: Synthetic oligonucleotide
  Antisense strand to SEQ ID NO: 1474292
cucuucaccaguaaauuau

SEQ ID NO: 1474294 - RNA, 19 nt, Artificial Sequence
  Description of Artificial Sequence: Synthetic oligonucleotide
  Sense strand starting at position 1101 of SEQ ID NO: 1244225
auugcacuugucugaggaa

SEQ ID NO: 1474295 - RNA, 19 nt, Artificial Sequence
  Description of Artificial Sequence: Synthetic oligonucleotide
  Antisense strand to SEQ ID NO: 1474294
uuccucagacaagugcaau

SEQ ID NO: 1474296 - RNA, 19 nt, Artificial Sequence
  Description of Artificial Sequence: Synthetic oligonucleotide
  Sense strand starting at position 1298 of SEQ ID NO: 1244225
ugacacaucuugccagaga

SEQ ID NO: 1474297 - RNA, 19 nt, Artificial Sequence
  Description of Artificial Sequence: Synthetic oligonucleotide
  Antisense strand to SEQ ID NO: 1474296
ucucuggcaagauguguca

SEQ ID NO: 1474298 - RNA, 19 nt, Artificial Sequence
  Description of Artificial Sequence: Synthetic oligonucleotide
  Sense strand starting at position 1564 of SEQ ID NO: 1244225
ggucaucuggucuaccuua

SEQ ID NO: 1474299 - RNA, 19 nt, Artificial Sequence
  Description of Artificial Sequence: Synthetic oligonucleotide
  Antisense strand to SEQ ID NO: 1474298
uaagguagaccagaugacc

SEQ ID NO: 1474300 - RNA, 19 nt, Artificial Sequence
  Description of Artificial Sequence: Synthetic oligonucleotide
  Sense strand starting at position 2144 of SEQ ID NO: 1244225
uuacauguccauuaagagu

SEQ ID NO: 1474301 - RNA, 19 nt, Artificial Sequence
  Description of Artificial Sequence: Synthetic oligonucleotide
  Antisense strand to SEQ ID NO: 1474300
acucuuaauggacauguaa

SEQ ID NO: 1474302 - RNA, 19 nt, Artificial Sequence
  Description of Artificial Sequence: Synthetic oligonucleotide
  Sense strand starting at position 2191 of SEQ ID NO: 1244225
uugacucauugacuuguca

SEQ ID NO: 1474303 - RNA, 19 nt, Artificial Sequence
  Description of Artificial Sequence: Synthetic oligonucleotide
  Antisense strand to SEQ ID NO: 1474302
ugacaagucaaugagucaa

SEQ ID NO: 1474304 - RNA, 19 nt, Artificial Sequence
  Description of Artificial Sequence: Synthetic oligonucleotide
  Sense strand starting at position 2360 of SEQ ID NO: 1244225
uauggauaaugugauuucu

SEQ ID NO: 1474305 - RNA, 19 nt, Artificial Sequence
  Description of Artificial Sequence: Synthetic oligonucleotide
  Antisense strand to SEQ ID NO: 1474304
agaaaucacauuauccaua

SEQ ID NO: 1474306 - RNA, 19 nt, Artificial Sequence
  Description of Artificial Sequence: Synthetic oligonucleotide
  Sense strand starting at position 2451 of SEQ ID NO: 1244225
uauggcuauuuacagauga

SEQ ID NO: 1474307 - RNA, 19 nt, Artificial Sequence
  Description of Artificial Sequence: Synthetic oligonucleotide
  Antisense strand to SEQ ID NO: 1474306
ucaucuguaaauagccaua

SEQ ID NO: 1474308 - RNA, 19 nt, Artificial Sequence
  Description of Artificial Sequence: Synthetic oligonucleotide
  Sense strand starting at position 2487 of SEQ ID NO: 1244225
aggcaucucggacauguuu

SEQ ID NO: 1474309 - RNA, 19 nt, Artificial Sequence
  Description of Artificial Sequence: Synthetic oligonucleotide
  Antisense strand to SEQ ID NO: 1474308
aaacauguccgagaugccu

SEQ ID NO: 1474310 - RNA, 19 nt, Artificial Sequence
  Description of Artificial Sequence: Synthetic oligonucleotide
  Sense strand starting at position 2532 of SEQ ID NO: 1244225
gguucuauugagcaagcaa

SEQ ID NO: 1474311 - RNA, 19 nt, Artificial Sequence
  Description of Artificial Sequence: Synthetic oligonucleotide
  Antisense strand to SEQ ID NO: 1474310
uugcuugcucaauagaacc

SEQ ID NO: 1474312 - RNA, 19 nt, Artificial Sequence
  Description of Artificial Sequence: Synthetic oligonucleotide
  Sense strand starting at position 2681 of SEQ ID NO: 1244225
caaucuuguggugaaucaa

SEQ ID NO: 1474313 - RNA, 19 nt, Artificial Sequence
  Description of Artificial Sequence: Synthetic oligonucleotide
  Antisense strand to SEQ ID NO: 1474312
uugauucaccacaagauug

SEQ ID NO: 1474314 - RNA, 19 nt, Artificial Sequence
  Description of Artificial Sequence: Synthetic oligonucleotide
  Sense strand starting at position 2860 of SEQ ID NO: 1244225
acagaacaaucauggauuu

SEQ ID NO: 1474315 - RNA, 19 nt, Artificial Sequence
  Description of Artificial Sequence: Synthetic oligonucleotide
  Antisense strand to SEQ ID NO: 1474314
aaauccaugauuguucugu

SEQ ID NO: 1474316 - RNA, 19 nt, Artificial Sequence
  Description of Artificial Sequence: Synthetic oligonucleotide
  Sense strand starting at position 2999 of SEQ ID NO: 1244225
uugaaauuccuuugaggua

SEQ ID NO: 1474317 - RNA, 19 nt, Artificial Sequence
  Description of Artificial Sequence: Synthetic oligonucleotide
  Antisense strand to SEQ ID NO: 1474316
uaccucaaaggaauuucaa

SEQ ID NO: 1474318 - RNA, 19 nt, Artificial Sequence
  Description of Artificial Sequence: Synthetic oligonucleotide
  Sense strand starting at position 3011 of SEQ ID NO: 1244225
ugagguaugccuuaaacaa

SEQ ID NO: 1474319 - RNA, 19 nt, Artificial Sequence
  Description of Artificial Sequence: Synthetic oligonucleotide
  Antisense strand to SEQ ID NO: 1474318
uuguuuaaggcauaccuca

SEQ ID NO: 1474320 - RNA, 19 nt, Artificial Sequence
  Description of Artificial Sequence: Synthetic oligonucleotide
  Sense strand starting at position 3040 of SEQ ID NO: 1244225
uuaagucagccagagauug

SEQ ID NO: 1474321 - RNA, 19 nt, Artificial Sequence
  Description of Artificial Sequence: Synthetic oligonucleotide
  Antisense strand to SEQ ID NO: 1474320
caaucucuggcugacuuaa

SEQ ID NO: 1474322 - RNA, 19 nt, Artificial Sequence
  Description of Artificial Sequence: Synthetic oligonucleotide
  Sense strand starting at position 3112 of SEQ ID NO: 1244225
uguccaugaucagcacaaa

SEQ ID NO: 1474323 - RNA, 19 nt, Artificial Sequence
  Description of Artificial Sequence: Synthetic oligonucleotide
  Antisense strand to SEQ ID NO: 1474322
uuugugcugaucauggaca

SEQ ID NO: 1474324 - RNA, 19 nt, Artificial Sequence
  Description of Artificial Sequence: Synthetic oligonucleotide
  Sense strand starting at position 3113 of SEQ ID NO: 1244225
guccaugaucagcacaaau

SEQ ID NO: 1474325 - RNA, 19 nt, Artificial Sequence
  Description of Artificial Sequence: Synthetic oligonucleotide
  Antisense strand to SEQ ID NO: 1474324
auuugugcugaucauggac

SEQ ID NO: 1474326 - RNA, 19 nt, Artificial Sequence
  Description of Artificial Sequence: Synthetic oligonucleotide
  Sense strand starting at position 3297 of SEQ ID NO: 1244225
uaucaaaugucauugguag

SEQ ID NO: 1474327 - RNA, 19 nt, Artificial Sequence
  Description of Artificial Sequence: Synthetic oligonucleotide
  Antisense strand to SEQ ID NO: 1474326
cuaccaaugacauuugaua

SEQ ID NO: 1474328 - RNA, 19 nt, Artificial Sequence
  Description of Artificial Sequence: Synthetic oligonucleotide
  Sense strand starting at position 3299 of SEQ ID NO: 1244225
ucaaaugucauugguaggu

SEQ ID NO: 1474329 - RNA, 19 nt, Artificial Sequence
  Description of Artificial Sequence: Synthetic oligonucleotide
  Antisense strand to SEQ ID NO: 1474328
accuaccaaugacauuuga

SEQ ID NO: 1474330 - RNA, 19 nt, Artificial Sequence
  Description of Artificial Sequence: Synthetic oligonucleotide
  Sense strand starting at position 3427 of SEQ ID NO: 1244225
gcuccuauccuuugaagaa

SEQ ID NO: 1474331 - RNA, 19 nt, Artificial Sequence
  Description of Artificial Sequence: Synthetic oligonucleotide
  Antisense strand to SEQ ID NO: 1474330
uucuucaaaggauaggagc

SEQ ID NO: 1474332 - RNA, 19 nt, Artificial Sequence
  Description of Artificial Sequence: Synthetic oligonucleotide
  Sense strand starting at position 3463 of SEQ ID NO: 1244225
ggcuauuaucuuuaguaac

SEQ ID NO: 1474333 - RNA, 19 nt, Artificial Sequence
  Description of Artificial Sequence: Synthetic oligonucleotide
  Antisense strand to SEQ ID NO: 1474332
guuacuaaagauaauagcc

SEQ ID NO: 1474334 - RNA, 19 nt, Artificial Sequence
  Description of Artificial Sequence: Synthetic oligonucleotide
  Sense strand starting at position 3812 of SEQ ID NO: 1244225
aagggugucgaacaucaua

SEQ ID NO: 1474335 - RNA, 19 nt, Artificial Sequence
  Description of Artificial Sequence: Synthetic oligonucleotide
  Antisense strand to SEQ ID NO: 1474334
uaugauguucgacacccuu

SEQ ID NO: 1474336 - RNA, 19 nt, Artificial Sequence
  Description of Artificial Sequence: Synthetic oligonucleotide
  Sense strand starting at position 3918 of SEQ ID NO: 1244225
guguauuaagcacaguauu

SEQ ID NO: 1474337 - RNA, 19 nt, Artificial Sequence
  Description of Artificial Sequence: Synthetic oligonucleotide
  Antisense strand to SEQ ID NO: 1474336
aauacugugcuuaauacac

SEQ ID NO: 1474338 - RNA, 19 nt, Artificial Sequence
  Description of Artificial Sequence: Synthetic oligonucleotide
  Sense strand starting at position 3958 of SEQ ID NO: 1244225
aaaccagccucugugagau

SEQ ID NO: 1474339 - RNA, 19 nt, Artificial Sequence
  Description of Artificial Sequence: Synthetic oligonucleotide
  Antisense strand to SEQ ID NO: 1474338
aucucacagaggcugguuu

SEQ ID NO: 1474340 - RNA, 19 nt, Artificial Sequence
  Description of Artificial Sequence: Synthetic oligonucleotide
  Sense strand starting at position 268 of SEQ ID NO: 1244226
accucaaagucuguuaaua

SEQ ID NO: 1474341 - RNA, 19 nt, Artificial Sequence
  Description of Artificial Sequence: Synthetic oligonucleotide
  Antisense strand to SEQ ID NO: 1474340
uauuaacagacuuugaggu

SEQ ID NO: 1474342 - RNA, 19 nt, Artificial Sequence
  Description of Artificial Sequence: Synthetic oligonucleotide
  Sense strand starting at position 386 of SEQ ID NO: 1244226
uucuguaaguacuugagaa

SEQ ID NO: 1474343 - RNA, 19 nt, Artificial Sequence
  Description of Artificial Sequence: Synthetic oligonucleotide
  Antisense strand to SEQ ID NO: 1474342
uucucaaguacuuacagaa

SEQ ID NO: 1474344 - RNA, 19 nt, Artificial Sequence
  Description of Artificial Sequence: Synthetic oligonucleotide
  Sense strand starting at position 388 of SEQ ID NO: 1244226
cuguaaguacuugagaacu

SEQ ID NO: 1474345 - RNA, 19 nt, Artificial Sequence
  Description of Artificial Sequence: Synthetic oligonucleotide
  Antisense strand to SEQ ID NO: 1474344
aguucucaaguacuuacag

SEQ ID NO: 1474346 - RNA, 19 nt, Artificial Sequence
  Description of Artificial Sequence: Synthetic oligonucleotide
  Sense strand starting at position 498 of SEQ ID NO: 1244226
aaacaugaccuguguagag

SEQ ID NO: 1474347 - RNA, 19 nt, Artificial Sequence
  Description of Artificial Sequence: Synthetic oligonucleotide
  Antisense strand to SEQ ID NO: 1474346
cucuacacaggucauguuu

SEQ ID NO: 1474348 - RNA, 19 nt, Artificial Sequence
  Description of Artificial Sequence: Synthetic oligonucleotide
  Sense strand starting at position 570 of SEQ ID NO: 1244226
ggcucaauuggugacauaa

SEQ ID NO: 1474349 - RNA, 19 nt, Artificial Sequence
  Description of Artificial Sequence: Synthetic oligonucleotide
  Antisense strand to SEQ ID NO: 1474348
uuaugucaccaauugagcc

SEQ ID NO: 1474350 - RNA, 19 nt, Artificial Sequence
  Description of Artificial Sequence: Synthetic oligonucleotide
  Sense strand starting at position 741 of SEQ ID NO: 1244226
acuaauacugcugguagaa

SEQ ID NO: 1474351 - RNA, 19 nt, Artificial Sequence
  Description of Artificial Sequence: Synthetic oligonucleotide
  Antisense strand to SEQ ID NO: 1474350
uucuaccagcaguauuagu

SEQ ID NO: 1474352 - RNA, 19 nt, Artificial Sequence
  Description of Artificial Sequence: Synthetic oligonucleotide
  Sense strand starting at position 787 of SEQ ID NO: 1244226
acuggcauucgauaauuau

SEQ ID NO: 1474353 - RNA, 19 nt, Artificial Sequence
  Description of Artificial Sequence: Synthetic oligonucleotide
  Antisense strand to SEQ ID NO: 1474352
auaauuaucgaaugccagu

SEQ ID NO: 1474354 - RNA, 19 nt, Artificial Sequence
  Description of Artificial Sequence: Synthetic oligonucleotide
  Sense strand starting at position 802 of SEQ ID NO: 1244226
uuauuaaccguaggaagaa

SEQ ID NO: 1474355 - RNA, 19 nt, Artificial Sequence
  Description of Artificial Sequence: Synthetic oligonucleotide
  Antisense strand to SEQ ID NO: 1474354
uucuuccuacgguuaauaa

SEQ ID NO: 1474356 - RNA, 19 nt, Artificial Sequence
  Description of Artificial Sequence: Synthetic oligonucleotide
  Sense strand starting at position 827 of SEQ ID NO: 1244226
ggauguuguguuuguauuu

SEQ ID NO: 1474357 - RNA, 19 nt, Artificial Sequence
  Description of Artificial Sequence: Synthetic oligonucleotide
  Antisense strand to SEQ ID NO: 1474356
aaauacaaacacaacaucc

SEQ ID NO: 1474358 - RNA, 19 nt, Artificial Sequence
  Description of Artificial Sequence: Synthetic oligonucleotide
  Sense strand starting at position 966 of SEQ ID NO: 1244226
uagaucaugucaccuggau

SEQ ID NO: 1474359 - RNA, 19 nt, Artificial Sequence
  Description of Artificial Sequence: Synthetic oligonucleotide
  Antisense strand to SEQ ID NO: 1474358
auccaggugacaugaucua

SEQ ID NO: 1474360 - RNA, 19 nt, Artificial Sequence
  Description of Artificial Sequence: Synthetic oligonucleotide
  Sense strand starting at position 970 of SEQ ID NO: 1244226
ucaugucaccuggauuagu

SEQ ID NO: 1474361 - RNA, 19 nt, Artificial Sequence
  Description of Artificial Sequence: Synthetic oligonucleotide
  Antisense strand to SEQ ID NO: 1474360
acuaauccaggugacauga

SEQ ID NO: 1474362 - RNA, 19 nt, Artificial Sequence
  Description of Artificial Sequence: Synthetic oligonucleotide
  Sense strand starting at position 975 of SEQ ID NO: 1244226
ucaccuggauuaguuuaua

SEQ ID NO: 1474363 - RNA, 19 nt, Artificial Sequence
  Description of Artificial Sequence: Synthetic oligonucleotide
  Antisense strand to SEQ ID NO: 1474362
uauaaacuaauccagguga

SEQ ID NO: 1474364 - RNA, 19 nt, Artificial Sequence
  Description of Artificial Sequence: Synthetic oligonucleotide
  Sense strand starting at position 978 of SEQ ID NO: 1244226
ccuggauuaguuuauauau

SEQ ID NO: 1474365 - RNA, 19 nt, Artificial Sequence
  Description of Artificial Sequence: Synthetic oligonucleotide
  Antisense strand to SEQ ID NO: 1474364
auauauaaacuaauccagg

SEQ ID NO: 1474366 - RNA, 19 nt, Artificial Sequence
  Description of Artificial Sequence: Synthetic oligonucleotide
  Sense strand starting at position 1002 of SEQ ID NO: 1244226
cauauuugguguuugggua

SEQ ID NO: 1474367 - RNA, 19 nt, Artificial Sequence
  Description of Artificial Sequence: Synthetic oligonucleotide
  Antisense strand to SEQ ID NO: 1474366
uacccaaacaccaaauaug

SEQ ID NO: 1474368 - RNA, 19 nt, Artificial Sequence
  Description of Artificial Sequence: Synthetic oligonucleotide
  Sense strand starting at position 1485 of SEQ ID NO: 1244226
auagcugaauggucauuga

SEQ ID NO: 1474369 - RNA, 19 nt, Artificial Sequence
  Description of Artificial Sequence: Synthetic oligonucleotide
  Antisense strand to SEQ ID NO: 1474368
ucaaugaccauucagcuau

SEQ ID NO: 1474370 - RNA, 19 nt, Artificial Sequence
  Description of Artificial Sequence: Synthetic oligonucleotide
  Sense strand starting at position 1488 of SEQ ID NO: 1244226
gcugaauggucauugaaag

SEQ ID NO: 1474371 - RNA, 19 nt, Artificial Sequence
  Description of Artificial Sequence: Synthetic oligonucleotide
  Antisense strand to SEQ ID NO: 1474370
cuuucaaugaccauucagc

SEQ ID NO: 1474372 - RNA, 19 nt, Artificial Sequence
  Description of Artificial Sequence: Synthetic oligonucleotide
  Sense strand starting at position 1489 of SEQ ID NO: 1244226
cugaauggucauugaaagu

SEQ ID NO: 1474373 - RNA, 19 nt, Artificial Sequence
  Description of Artificial Sequence: Synthetic oligonucleotide
  Antisense strand to SEQ ID NO: 1474372
acuuucaaugaccauucag

SEQ ID NO: 1474374 - RNA, 19 nt, Artificial Sequence
  Description of Artificial Sequence: Synthetic oligonucleotide
  Sense strand starting at position 1586 of SEQ ID NO: 1244226
guuguagguacugagauag

SEQ ID NO: 1474375 - RNA, 19 nt, Artificial Sequence
  Description of Artificial Sequence: Synthetic oligonucleotide
  Antisense strand to SEQ ID NO: 1474374
cuaucucaguaccuacaac

SEQ ID NO: 1474376 - RNA, 19 nt, Artificial Sequence
  Description of Artificial Sequence: Synthetic oligonucleotide
  Sense strand starting at position 1592 of SEQ ID NO: 1244226
gguacugagauaggugaau

SEQ ID NO: 1474377 - RNA, 19 nt, Artificial Sequence
  Description of Artificial Sequence: Synthetic oligonucleotide
  Antisense strand to SEQ ID NO: 1474376
auucaccuaucucaguacc

SEQ ID NO: 1474378 - RNA, 19 nt, Artificial Sequence
  Description of Artificial Sequence: Synthetic oligonucleotide
  Sense strand starting at position 1598 of SEQ ID NO: 1244226
gagauaggugaaugcuaaa

SEQ ID NO: 1474379 - RNA, 19 nt, Artificial Sequence
  Description of Artificial Sequence: Synthetic oligonucleotide
  Antisense strand to SEQ ID NO: 1474378
uuuagcauucaccuaucuc

SEQ ID NO: 1474380 - RNA, 19 nt, Artificial Sequence
  Description of Artificial Sequence: Synthetic oligonucleotide
  Sense strand starting at position 1883 of SEQ ID NO: 1244226
agcggcaggauuugucaga

SEQ ID NO: 1474381 - RNA, 19 nt, Artificial Sequence
  Description of Artificial Sequence: Synthetic oligonucleotide
  Antisense strand to SEQ ID NO: 1474380
ucugacaaauccugccgcu

SEQ ID NO: 1474382 - RNA, 19 nt, Artificial Sequence
  Description of Artificial Sequence: Synthetic oligonucleotide
  Sense strand starting at position 1956 of SEQ ID NO: 1244226
gcaauccauggcuauuaga

SEQ ID NO: 1474383 - RNA, 19 nt, Artificial Sequence
  Description of Artificial Sequence: Synthetic oligonucleotide
  Antisense strand to SEQ ID NO: 1474382
ucuaauagccauggauugc

SEQ ID NO: 1474384 - RNA, 19 nt, Artificial Sequence
  Description of Artificial Sequence: Synthetic oligonucleotide
  Sense strand starting at position 2194 of SEQ ID NO: 1244226
auuugaguucguugcuaaa

SEQ ID NO: 1474385 - RNA, 19 nt, Artificial Sequence
  Description of Artificial Sequence: Synthetic oligonucleotide
  Antisense strand to SEQ ID NO: 1474384
uuuagcaacgaacucaaau

SEQ ID NO: 1474386 - RNA, 19 nt, Artificial Sequence
  Description of Artificial Sequence: Synthetic oligonucleotide
  Sense strand starting at position 2311 of SEQ ID NO: 1244226
gggaauauugcaugacagu

SEQ ID NO: 1474387 - RNA, 19 nt, Artificial Sequence
  Description of Artificial Sequence: Synthetic oligonucleotide
  Antisense strand to SEQ ID NO: 1474386
acugucaugcaauauuccc

SEQ ID NO: 1474388 - RNA, 19 nt, Artificial Sequence
  Description of Artificial Sequence: Synthetic oligonucleotide
  Sense strand starting at position 2394 of SEQ ID NO: 1244226
accaauuugucugauaaag

SEQ ID NO: 1474389 - RNA, 19 nt, Artificial Sequence
  Description of Artificial Sequence: Synthetic oligonucleotide
  Antisense strand to SEQ ID NO: 1474388
cuuuaucagacaaauuggu

SEQ ID NO: 1474390 - RNA, 19 nt, Artificial Sequence
  Description of Artificial Sequence: Synthetic oligonucleotide
  Sense strand starting at position 2822 of SEQ ID NO: 1244226
agagcaccucuguauguaa

SEQ ID NO: 1474391 - RNA, 19 nt, Artificial Sequence
  Description of Artificial Sequence: Synthetic oligonucleotide
  Antisense strand to SEQ ID NO: 1474390
uuacauacagaggugcucu

SEQ ID NO: 1474392 - RNA, 19 nt, Artificial Sequence
  Description of Artificial Sequence: Synthetic oligonucleotide
  Sense strand starting at position 3007 of SEQ ID NO: 1244226
accagauguguuugauuaa

SEQ ID NO: 1474393 - RNA, 19 nt, Artificial Sequence
  Description of Artificial Sequence: Synthetic oligonucleotide
  Antisense strand to SEQ ID NO: 1474392
uuaaucaaacacaucuggu

SEQ ID NO: 1474394 - RNA, 19 nt, Artificial Sequence
  Description of Artificial Sequence: Synthetic oligonucleotide
  Sense strand starting at position 3010 of SEQ ID NO: 1244226
agauguguuugauuaagaa

SEQ ID NO: 1474395 - RNA, 19 nt, Artificial Sequence
  Description of Artificial Sequence: Synthetic oligonucleotide
  Antisense strand to SEQ ID NO: 1474394
uucuuaaucaaacacaucu

SEQ ID NO: 1474396 - RNA, 19 nt, Artificial Sequence
  Description of Artificial Sequence: Synthetic oligonucleotide
  Sense strand starting at position 3135 of SEQ ID NO: 1244226
accagcuagguugaaauau

SEQ ID NO: 1474397 - RNA, 19 nt, Artificial Sequence
  Description of Artificial Sequence: Synthetic oligonucleotide
  Antisense strand to SEQ ID NO: 1474396
auauuucaaccuagcuggu

SEQ ID NO: 1474398 - RNA, 19 nt, Artificial Sequence
  Description of Artificial Sequence: Synthetic oligonucleotide
  Sense strand starting at position 3329 of SEQ ID NO: 1244226
augagccugagcuagauua

SEQ ID NO: 1474399 - RNA, 19 nt, Artificial Sequence
  Description of Artificial Sequence: Synthetic oligonucleotide
  Antisense strand to SEQ ID NO: 1474398
uaaucuagcucaggcucau

SEQ ID NO: 1474400 - RNA, 19 nt, Artificial Sequence
  Description of Artificial Sequence: Synthetic oligonucleotide
  Sense strand starting at position 3331 of SEQ ID NO: 1244226
gagccugagcuagauuaau

SEQ ID NO: 1474401 - RNA, 19 nt, Artificial Sequence
  Description of Artificial Sequence: Synthetic oligonucleotide
  Antisense strand to SEQ ID NO: 1474400
auuaaucuagcucaggcuc

SEQ ID NO: 1474402 - RNA, 19 nt, Artificial Sequence
  Description of Artificial Sequence: Synthetic oligonucleotide
  Sense strand starting at position 3340 of SEQ ID NO: 1244226
cuagauuaaucuguugaca

SEQ ID NO: 1474403 - RNA, 19 nt, Artificial Sequence
  Description of Artificial Sequence: Synthetic oligonucleotide
  Antisense strand to SEQ ID NO: 1474402
ugucaacagauuaaucuag

SEQ ID NO: 1474404 - RNA, 19 nt, Artificial Sequence
  Description of Artificial Sequence: Synthetic oligonucleotide
  Sense strand starting at position 3443 of SEQ ID NO: 1244226
guaggaaagaccugguucu

SEQ ID NO: 1474405 - RNA, 19 nt, Artificial Sequence
  Description of Artificial Sequence: Synthetic oligonucleotide
  Antisense strand to SEQ ID NO: 1474404
agaaccaggucuuuccuac

SEQ ID NO: 1474406 - RNA, 19 nt, Artificial Sequence
  Description of Artificial Sequence: Synthetic oligonucleotide
  Sense strand starting at position 3444 of SEQ ID NO: 1244226
uaggaaagaccugguucua

SEQ ID NO: 1474407 - RNA, 19 nt, Artificial Sequence
  Description of Artificial Sequence: Synthetic oligonucleotide
  Antisense strand to SEQ ID NO: 1474406
uagaaccaggucuuuccua

SEQ ID NO: 1474408 - RNA, 19 nt, Artificial Sequence
  Description of Artificial Sequence: Synthetic oligonucleotide
  Sense strand starting at position 3466 of SEQ ID NO: 1244226
ccaguacgcuauuuagacu

SEQ ID NO: 1474409 - RNA, 19 nt, Artificial Sequence
  Description of Artificial Sequence: Synthetic oligonucleotide
  Antisense strand to SEQ ID NO: 1474408
agucuaaauagcguacugg

SEQ ID NO: 1474410 - RNA, 19 nt, Artificial Sequence
  Description of Artificial Sequence: Synthetic oligonucleotide
  Sense strand starting at position 3654 of SEQ ID NO: 1244226
uguggugugcauguuugua

SEQ ID NO: 1474411 - RNA, 19 nt, Artificial Sequence
  Description of Artificial Sequence: Synthetic oligonucleotide
  Antisense strand to SEQ ID NO: 1474410
uacaaacaugcacaccaca

SEQ ID NO: 1474412 - RNA, 19 nt, Artificial Sequence
  Description of Artificial Sequence: Synthetic oligonucleotide
  Sense strand starting at position 3715 of SEQ ID NO: 1244226
gagucagaauagcucuuga

SEQ ID NO: 1474413 - RNA, 19 nt, Artificial Sequence
  Description of Artificial Sequence: Synthetic oligonucleotide
  Antisense strand to SEQ ID NO: 1474412
ucaagagcuauucugacuc

SEQ ID NO: 1474414 - RNA, 19 nt, Artificial Sequence
  Description of Artificial Sequence: Synthetic oligonucleotide
  Sense strand starting at position 3720 of SEQ ID NO: 1244226
agaauagcucuugacuguu

SEQ ID NO: 1474415 - RNA, 19 nt, Artificial Sequence
  Description of Artificial Sequence: Synthetic oligonucleotide
  Antisense strand to SEQ ID NO: 1474414
aacagucaagagcuauucu

SEQ ID NO: 1474416 - RNA, 19 nt, Artificial Sequence
  Description of Artificial Sequence: Synthetic oligonucleotide
  Sense strand starting at position 3748 of SEQ ID NO: 1244226
gcugguuaucuuccucguu

SEQ ID NO: 1474417 - RNA, 19 nt, Artificial Sequence
  Description of Artificial Sequence: Synthetic oligonucleotide
  Antisense strand to SEQ ID NO: 1474416
aacgaggaagauaaccagc

SEQ ID NO: 1474418 - RNA, 19 nt, Artificial Sequence
  Description of Artificial Sequence: Synthetic oligonucleotide
  Sense strand starting at position 3882 of SEQ ID NO: 1244226
gugaaagcucauggacaac

SEQ ID NO: 1474419 - RNA, 19 nt, Artificial Sequence
  Description of Artificial Sequence: Synthetic oligonucleotide
  Antisense strand to SEQ ID NO: 1474418
guuguccaugagcuuucac

SEQ ID NO: 1474420 - RNA, 19 nt, Artificial Sequence
  Description of Artificial Sequence: Synthetic oligonucleotide
  Sense strand starting at position 180 of SEQ ID NO: 1244227
ugguccuuuccugaggaua

SEQ ID NO: 1474421 - RNA, 19 nt, Artificial Sequence
  Description of Artificial Sequence: Synthetic oligonucleotide
  Antisense strand to SEQ ID NO: 1474420
uauccucaggaaaggacca

SEQ ID NO: 1474422 - RNA, 19 nt, Artificial Sequence
  Description of Artificial Sequence: Synthetic oligonucleotide
  Sense strand starting at position 313 of SEQ ID NO: 1244227
gucugaauaugaccaaguu

SEQ ID NO: 1474423 - RNA, 19 nt, Artificial Sequence
  Description of Artificial Sequence: Synthetic oligonucleotide
  Antisense strand to SEQ ID NO: 1474422
aacuuggucauauucagac

SEQ ID NO: 1474424 - RNA, 19 nt, Artificial Sequence
  Description of Artificial Sequence: Synthetic oligonucleotide
  Sense strand starting at position 322 of SEQ ID NO: 1244227
ugaccaaguuuaccugaga

SEQ ID NO: 1474425 - RNA, 19 nt, Artificial Sequence
  Description of Artificial Sequence: Synthetic oligonucleotide
  Antisense strand to SEQ ID NO: 1474424
ucucagguaaacuugguca

SEQ ID NO: 1474426 - RNA, 19 nt, Artificial Sequence
  Description of Artificial Sequence: Synthetic oligonucleotide
  Sense strand starting at position 323 of SEQ ID NO: 1244227
gaccaaguuuaccugagau

SEQ ID NO: 1474427 - RNA, 19 nt, Artificial Sequence
  Description of Artificial Sequence: Synthetic oligonucleotide
  Antisense strand to SEQ ID NO: 1474426
aucucagguaaacuugguc

SEQ ID NO: 1474428 - RNA, 19 nt, Artificial Sequence
  Description of Artificial Sequence: Synthetic oligonucleotide
  Sense strand starting at position 361 of SEQ ID NO: 1244227
uaagcauaucccgagagug

SEQ ID NO: 1474429 - RNA, 19 nt, Artificial Sequence
  Description of Artificial Sequence: Synthetic oligonucleotide
  Antisense strand to SEQ ID NO: 1474428
cacucucgggauaugcuua

SEQ ID NO: 1474430 - RNA, 19 nt, Artificial Sequence
  Description of Artificial Sequence: Synthetic oligonucleotide
  Sense strand starting at position 809 of SEQ ID NO: 1244227
acagaaaguucuccucuga

SEQ ID NO: 1474431 - RNA, 19 nt, Artificial Sequence
  Description of Artificial Sequence: Synthetic oligonucleotide
  Antisense strand to SEQ ID NO: 1474430
ucagaggagaacuuucugu

SEQ ID NO: 1474432 - RNA, 19 nt, Artificial Sequence
  Description of Artificial Sequence: Synthetic oligonucleotide
  Sense strand starting at position 917 of SEQ ID NO: 1244227
cucacauaucuugauguga

SEQ ID NO: 1474433 - RNA, 19 nt, Artificial Sequence
  Description of Artificial Sequence: Synthetic oligonucleotide
  Antisense strand to SEQ ID NO: 1474432
ucacaucaagauaugugag

SEQ ID NO: 1474434 - RNA, 19 nt, Artificial Sequence
  Description of Artificial Sequence: Synthetic oligonucleotide
  Sense strand starting at position 930 of SEQ ID NO: 1244227
augugaucuccagagccca

SEQ ID NO: 1474435 - RNA, 19 nt, Artificial Sequence
  Description of Artificial Sequence: Synthetic oligonucleotide
  Antisense strand to SEQ ID NO: 1474434
ugggcucuggagaucacau

SEQ ID NO: 1474436 - RNA, 19 nt, Artificial Sequence
  Description of Artificial Sequence: Synthetic oligonucleotide
  Sense strand starting at position 946 of SEQ ID NO: 1244227
ccaacagugcaaugaacau

SEQ ID NO: 1474437 - RNA, 19 nt, Artificial Sequence
  Description of Artificial Sequence: Synthetic oligonucleotide
  Antisense strand to SEQ ID NO: 1474436
auguucauugcacuguugg

SEQ ID NO: 1474438 - RNA, 19 nt, Artificial Sequence
  Description of Artificial Sequence: Synthetic oligonucleotide
  Sense strand starting at position 952 of SEQ ID NO: 1244227
gugcaaugaacaugacaga

SEQ ID NO: 1474439 - RNA, 19 nt, Artificial Sequence
  Description of Artificial Sequence: Synthetic oligonucleotide
  Antisense strand to SEQ ID NO: 1474438
ucugucauguucauugcac

SEQ ID NO: 1474440 - RNA, 19 nt, Artificial Sequence
  Description of Artificial Sequence: Synthetic oligonucleotide
  Sense strand starting at position 1134 of SEQ ID NO: 1244227
ucuugagagaaguaaugcu

SEQ ID NO: 1474441 - RNA, 19 nt, Artificial Sequence
  Description of Artificial Sequence: Synthetic oligonucleotide
  Antisense strand to SEQ ID NO: 1474440
agcauuacuucucucaaga

SEQ ID NO: 1474442 - RNA, 19 nt, Artificial Sequence
  Description of Artificial Sequence: Synthetic oligonucleotide
  Sense strand starting at position 1283 of SEQ ID NO: 1244227
aacuuagaggcuuagucua

SEQ ID NO: 1474443 - RNA, 19 nt, Artificial Sequence
  Description of Artificial Sequence: Synthetic oligonucleotide
  Antisense strand to SEQ ID NO: 1474442
uagacuaagccucuaaguu

SEQ ID NO: 1474444 - RNA, 19 nt, Artificial Sequence
  Description of Artificial Sequence: Synthetic oligonucleotide
  Sense strand starting at position 1323 of SEQ ID NO: 1244227
cugaaugcugcugggaaga

SEQ ID NO: 1474445 - RNA, 19 nt, Artificial Sequence
  Description of Artificial Sequence: Synthetic oligonucleotide
  Antisense strand to SEQ ID NO: 1474444
ucuucccagcagcauucag

SEQ ID NO: 1474446 - RNA, 19 nt, Artificial Sequence
  Description of Artificial Sequence: Synthetic oligonucleotide
  Sense strand starting at position 1359 of SEQ ID NO: 1244227
agugguauuaaauguagau

SEQ ID NO: 1474447 - RNA, 19 nt, Artificial Sequence
  Description of Artificial Sequence: Synthetic oligonucleotide
  Antisense strand to SEQ ID NO: 1474446
aucuacauuuaauaccacu

SEQ ID NO: 1474448 - RNA, 19 nt, Artificial Sequence
  Description of Artificial Sequence: Synthetic oligonucleotide
  Sense strand starting at position 1390 of SEQ ID NO: 1244227
accaguuacuuaguggaau

SEQ ID NO: 1474449 - RNA, 19 nt, Artificial Sequence
  Description of Artificial Sequence: Synthetic oligonucleotide
  Antisense strand to SEQ ID NO: 1474448
auuccacuaaguaacuggu

SEQ ID NO: 1474450 - RNA, 19 nt, Artificial Sequence
  Description of Artificial Sequence: Synthetic oligonucleotide
  Sense strand starting at position 1494 of SEQ ID NO: 1244227
caugguugauaguccaaua

SEQ ID NO: 1474451 - RNA, 19 nt, Artificial Sequence
  Description of Artificial Sequence: Synthetic oligonucleotide
  Antisense strand to SEQ ID NO: 1474450
uauuggacuaucaaccaug

SEQ ID NO: 1474452 - RNA, 19 nt, Artificial Sequence
  Description of Artificial Sequence: Synthetic oligonucleotide
  Sense strand starting at position 1899 of SEQ ID NO: 1244227
ggcagaggccuugaucaca

SEQ ID NO: 1474453 - RNA, 19 nt, Artificial Sequence
  Description of Artificial Sequence: Synthetic oligonucleotide
  Antisense strand to SEQ ID NO: 1474452
ugugaucaaggccucugcc

SEQ ID NO: 1474454 - RNA, 19 nt, Artificial Sequence
  Description of Artificial Sequence: Synthetic oligonucleotide
  Sense strand starting at position 1973 of SEQ ID NO: 1244227
ggagguucuagguagguuu

SEQ ID NO: 1474455 - RNA, 19 nt, Artificial Sequence
  Description of Artificial Sequence: Synthetic oligonucleotide
  Antisense strand to SEQ ID NO: 1474454
aaaccuaccuagaaccucc

SEQ ID NO: 1474456 - RNA, 19 nt, Artificial Sequence
  Description of Artificial Sequence: Synthetic oligonucleotide
  Sense strand starting at position 1984 of SEQ ID NO: 1244227
guagguuuccaagacagug

SEQ ID NO: 1474457 - RNA, 19 nt, Artificial Sequence
  Description of Artificial Sequence: Synthetic oligonucleotide
  Antisense strand to SEQ ID NO: 1474456
cacugucuuggaaaccuac

SEQ ID NO: 1474458 - RNA, 19 nt, Artificial Sequence
  Description of Artificial Sequence: Synthetic oligonucleotide
  Sense strand starting at position 2060 of SEQ ID NO: 1244227
agcuguugucaccacauaa

SEQ ID NO: 1474459 - RNA, 19 nt, Artificial Sequence
  Description of Artificial Sequence: Synthetic oligonucleotide
  Antisense strand to SEQ ID NO: 1474458
uuauguggugacaacagcu

SEQ ID NO: 1474460 - RNA, 19 nt, Artificial Sequence
  Description of Artificial Sequence: Synthetic oligonucleotide
  Sense strand starting at position 2081 of SEQ ID NO: 1244227
gcuauuuccuuguuauugu

SEQ ID NO: 1474461 - RNA, 19 nt, Artificial Sequence
  Description of Artificial Sequence: Synthetic oligonucleotide
  Antisense strand to SEQ ID NO: 1474460
acaauaacaaggaaauagc

SEQ ID NO: 1474462 - RNA, 19 nt, Artificial Sequence
  Description of Artificial Sequence: Synthetic oligonucleotide
  Sense strand starting at position 2104 of SEQ ID NO: 1244227
cuuaauagauaggcaauua

SEQ ID NO: 1474463 - RNA, 19 nt, Artificial Sequence
  Description of Artificial Sequence: Synthetic oligonucleotide
  Antisense strand to SEQ ID NO: 1474462
uaauugccuaucuauuaag

SEQ ID NO: 1474464 - RNA, 19 nt, Artificial Sequence
  Description of Artificial Sequence: Synthetic oligonucleotide
  Sense strand starting at position 2234 of SEQ ID NO: 1244227
guuaauuuagugugucauu

SEQ ID NO: 1474465 - RNA, 19 nt, Artificial Sequence
  Description of Artificial Sequence: Synthetic oligonucleotide
  Antisense strand to SEQ ID NO: 1474464
aaugacacacuaaauuaac

SEQ ID NO: 1474466 - RNA, 19 nt, Artificial Sequence
  Description of Artificial Sequence: Synthetic oligonucleotide
  Sense strand starting at position 2319 of SEQ ID NO: 1244227
gcauucugugugucauccu

SEQ ID NO: 1474467 - RNA, 19 nt, Artificial Sequence
  Description of Artificial Sequence: Synthetic oligonucleotide
  Antisense strand to SEQ ID NO: 1474466
aggaugacacacagaaugc

SEQ ID NO: 1474468 - RNA, 19 nt, Artificial Sequence
  Description of Artificial Sequence: Synthetic oligonucleotide
  Sense strand starting at position 2362 of SEQ ID NO: 1244227
ccucaaaugggaugauguu

SEQ ID NO: 1474469 - RNA, 19 nt, Artificial Sequence
  Description of Artificial Sequence: Synthetic oligonucleotide
  Antisense strand to SEQ ID NO: 1474468
aacaucaucccauuugagg

SEQ ID NO: 1474470 - RNA, 19 nt, Artificial Sequence
  Description of Artificial Sequence: Synthetic oligonucleotide
  Sense strand starting at position 2389 of SEQ ID NO: 1244227
ucugaagauucuucugaga

SEQ ID NO: 1474471 - RNA, 19 nt, Artificial Sequence
  Description of Artificial Sequence: Synthetic oligonucleotide
  Antisense strand to SEQ ID NO: 1474470
ucucagaagaaucuucaga

SEQ ID NO: 1474472 - RNA, 19 nt, Artificial Sequence
  Description of Artificial Sequence: Synthetic oligonucleotide
  Sense strand starting at position 2572 of SEQ ID NO: 1244227
gcuaaagaguaagcugaaa

SEQ ID NO: 1474473 - RNA, 19 nt, Artificial Sequence
  Description of Artificial Sequence: Synthetic oligonucleotide
  Antisense strand to SEQ ID NO: 1474472
uuucagcuuacucuuuagc

SEQ ID NO: 1474474 - RNA, 19 nt, Artificial Sequence
  Description of Artificial Sequence: Synthetic oligonucleotide
  Sense strand starting at position 2765 of SEQ ID NO: 1244227
ucugaaagauguuuagucu

SEQ ID NO: 1474475 - RNA, 19 nt, Artificial Sequence
  Description of Artificial Sequence: Synthetic oligonucleotide
  Antisense strand to SEQ ID NO: 1474474
agacuaaacaucuuucaga

SEQ ID NO: 1474476 - RNA, 19 nt, Artificial Sequence
  Description of Artificial Sequence: Synthetic oligonucleotide
  Sense strand starting at position 2768 of SEQ ID NO: 1244227
gaaagauguuuagucucac

SEQ ID NO: 1474477 - RNA, 19 nt, Artificial Sequence
  Description of Artificial Sequence: Synthetic oligonucleotide
  Antisense strand to SEQ ID NO: 1474476
gugagacuaaacaucuuuc

SEQ ID NO: 1474478 - RNA, 19 nt, Artificial Sequence
  Description of Artificial Sequence: Synthetic oligonucleotide
  Sense strand starting at position 2880 of SEQ ID NO: 1244227
gggauauggcagugaauac

SEQ ID NO: 1474479 - RNA, 19 nt, Artificial Sequence
  Description of Artificial Sequence: Synthetic oligonucleotide
  Antisense strand to SEQ ID NO: 1474478
guauucacugccauauccc

SEQ ID NO: 1474480 - RNA, 19 nt, Artificial Sequence
  Description of Artificial Sequence: Synthetic oligonucleotide
  Sense strand starting at position 2986 of SEQ ID NO: 1244227
cacaguuggcagggaucua

SEQ ID NO: 1474481 - RNA, 19 nt, Artificial Sequence
  Description of Artificial Sequence: Synthetic oligonucleotide
  Antisense strand to SEQ ID NO: 1474480
uagaucccugccaacugug

SEQ ID NO: 1474482 - RNA, 19 nt, Artificial Sequence
  Description of Artificial Sequence: Synthetic oligonucleotide
  Sense strand starting at position 3008 of SEQ ID NO: 1244227
ugaggcaacuucuuuagau

SEQ ID NO: 1474483 - RNA, 19 nt, Artificial Sequence
  Description of Artificial Sequence: Synthetic oligonucleotide
  Antisense strand to SEQ ID NO: 1474482
aucuaaagaaguugccuca

SEQ ID NO: 1474484 - RNA, 19 nt, Artificial Sequence
  Description of Artificial Sequence: Synthetic oligonucleotide
  Sense strand starting at position 3009 of SEQ ID NO: 1244227
gaggcaacuucuuuagaug

SEQ ID NO: 1474485 - RNA, 19 nt, Artificial Sequence
  Description of Artificial Sequence: Synthetic oligonucleotide
  Antisense strand to SEQ ID NO: 1474484
caucuaaagaaguugccuc

SEQ ID NO: 1474486 - RNA, 19 nt, Artificial Sequence
  Description of Artificial Sequence: Synthetic oligonucleotide
  Sense strand starting at position 3015 of SEQ ID NO: 1244227
acuucuuuagaugguaauu

SEQ ID NO: 1474487 - RNA, 19 nt, Artificial Sequence
  Description of Artificial Sequence: Synthetic oligonucleotide
  Antisense strand to SEQ ID NO: 1474486
aauuaccaucuaaagaagu

SEQ ID NO: 1474488 - RNA, 19 nt, Artificial Sequence
  Description of Artificial Sequence: Synthetic oligonucleotide
  Sense strand starting at position 3239 of SEQ ID NO: 1244227
gggaaagcccuugauguag

SEQ ID NO: 1474489 - RNA, 19 nt, Artificial Sequence
  Description of Artificial Sequence: Synthetic oligonucleotide
  Antisense strand to SEQ ID NO: 1474488
cuacaucaagggcuuuccc

SEQ ID NO: 1474490 - RNA, 19 nt, Artificial Sequence
  Description of Artificial Sequence: Synthetic oligonucleotide
  Sense strand starting at position 3350 of SEQ ID NO: 1244227
agugcaagacgacauuaau

SEQ ID NO: 1474491 - RNA, 19 nt, Artificial Sequence
  Description of Artificial Sequence: Synthetic oligonucleotide
  Antisense strand to SEQ ID NO: 1474490
auuaaugucgucuugcacu

SEQ ID NO: 1474492 - RNA, 19 nt, Artificial Sequence
  Description of Artificial Sequence: Synthetic oligonucleotide
  Sense strand starting at position 3390 of SEQ ID NO: 1244227
auguuaucucuuuaggcca

SEQ ID NO: 1474493 - RNA, 19 nt, Artificial Sequence
  Description of Artificial Sequence: Synthetic oligonucleotide
  Antisense strand to SEQ ID NO: 1474492
uggccuaaagagauaacau

SEQ ID NO: 1474494 - RNA, 19 nt, Artificial Sequence
  Description of Artificial Sequence: Synthetic oligonucleotide
  Sense strand starting at position 3679 of SEQ ID NO: 1244227
gaaauaguauguuuaaagc

SEQ ID NO: 1474495 - RNA, 19 nt, Artificial Sequence
  Description of Artificial Sequence: Synthetic oligonucleotide
  Antisense strand to SEQ ID NO: 1474494
gcuuuaaacauacuauuuc

SEQ ID NO: 1474496 - RNA, 19 nt, Artificial Sequence
  Description of Artificial Sequence: Synthetic oligonucleotide
  Sense strand starting at position 3840 of SEQ ID NO: 1244227
agucacuaucaaggucaaa

SEQ ID NO: 1474497 - RNA, 19 nt, Artificial Sequence
  Description of Artificial Sequence: Synthetic oligonucleotide
  Antisense strand to SEQ ID NO: 1474496
uuugaccuugauagugacu

SEQ ID NO: 1474498 - RNA, 19 nt, Artificial Sequence
  Description of Artificial Sequence: Synthetic oligonucleotide
  Sense strand starting at position 3880 of SEQ ID NO: 1244227
uugggauucuggucuaacu

SEQ ID NO: 1474499 - RNA, 19 nt, Artificial Sequence
  Description of Artificial Sequence: Synthetic oligonucleotide
  Antisense strand to SEQ ID NO: 1474498
aguuagaccagaaucccaa

SEQ ID NO: 1474500 - RNA, 19 nt, Artificial Sequence
  Description of Artificial Sequence: Synthetic oligonucleotide
  Sense strand starting at position 125 of SEQ ID NO: 1244228
gcuaaugauacaugcgaug

SEQ ID NO: 1474501 - RNA, 19 nt, Artificial Sequence
  Description of Artificial Sequence: Synthetic oligonucleotide
  Antisense strand to SEQ ID NO: 1474500
caucgcauguaucauuagc

SEQ ID NO: 1474502 - RNA, 19 nt, Artificial Sequence
  Description of Artificial Sequence: Synthetic oligonucleotide
  Sense strand starting at position 134 of SEQ ID NO: 1244228
acaugcgauggguguuaga

SEQ ID NO: 1474503 - RNA, 19 nt, Artificial Sequence
  Description of Artificial Sequence: Synthetic oligonucleotide
  Antisense strand to SEQ ID NO: 1474502
ucuaacacccaucgcaugu

SEQ ID NO: 1474504 - RNA, 19 nt, Artificial Sequence
  Description of Artificial Sequence: Synthetic oligonucleotide
  Sense strand starting at position 144 of SEQ ID NO: 1244228
gguguuagaccacguggau

SEQ ID NO: 1474505 - RNA, 19 nt, Artificial Sequence
  Description of Artificial Sequence: Synthetic oligonucleotide
  Antisense strand to SEQ ID NO: 1474504
auccacguggucuaacacc

SEQ ID NO: 1474506 - RNA, 19 nt, Artificial Sequence
  Description of Artificial Sequence: Synthetic oligonucleotide
  Sense strand starting at position 329 of SEQ ID NO: 1244228
gcaacaaauuucuucgcuu

SEQ ID NO: 1474507 - RNA, 19 nt, Artificial Sequence
  Description of Artificial Sequence: Synthetic oligonucleotide
  Antisense strand to SEQ ID NO: 1474506
aagcgaagaaauuuguugc

SEQ ID NO: 1474508 - RNA, 19 nt, Artificial Sequence
  Description of Artificial Sequence: Synthetic oligonucleotide
  Sense strand starting at position 660 of SEQ ID NO: 1244228
uaguuuaugcgugacauug

SEQ ID NO: 1474509 - RNA, 19 nt, Artificial Sequence
  Description of Artificial Sequence: Synthetic oligonucleotide
  Antisense strand to SEQ ID NO: 1474508
caaugucacgcauaaacua

SEQ ID NO: 1474510 - RNA, 19 nt, Artificial Sequence
  Description of Artificial Sequence: Synthetic oligonucleotide
  Sense strand starting at position 681 of SEQ ID NO: 1244228
gcaguuuggcacuaugagu

SEQ ID NO: 1474511 - RNA, 19 nt, Artificial Sequence
  Description of Artificial Sequence: Synthetic oligonucleotide
  Antisense strand to SEQ ID NO: 1474510
acucauagugccaaacugc

SEQ ID NO: 1474512 - RNA, 19 nt, Artificial Sequence
  Description of Artificial Sequence: Synthetic oligonucleotide
  Sense strand starting at position 1041 of SEQ ID NO: 1244228
auguguaccucacugggaa

SEQ ID NO: 1474513 - RNA, 19 nt, Artificial Sequence
  Description of Artificial Sequence: Synthetic oligonucleotide
  Antisense strand to SEQ ID NO: 1474512
uucccagugagguacacau

SEQ ID NO: 1474514 - RNA, 19 nt, Artificial Sequence
  Description of Artificial Sequence: Synthetic oligonucleotide
  Sense strand starting at position 1220 of SEQ ID NO: 1244228
gagucagugggauggugau

SEQ ID NO: 1474515 - RNA, 19 nt, Artificial Sequence
  Description of Artificial Sequence: Synthetic oligonucleotide
  Antisense strand to SEQ ID NO: 1474514
aucaccaucccacugacuc

SEQ ID NO: 1474516 - RNA, 19 nt, Artificial Sequence
  Description of Artificial Sequence: Synthetic oligonucleotide
  Sense strand starting at position 1297 of SEQ ID NO: 1244228
uccuaauagucagcacaga

SEQ ID NO: 1474517 - RNA, 19 nt, Artificial Sequence
  Description of Artificial Sequence: Synthetic oligonucleotide
  Antisense strand to SEQ ID NO: 1474516
ucugugcugacuauuagga

SEQ ID NO: 1474518 - RNA, 19 nt, Artificial Sequence
  Description of Artificial Sequence: Synthetic oligonucleotide
  Sense strand starting at position 1298 of SEQ ID NO: 1244228
ccuaauagucagcacagaa

SEQ ID NO: 1474519 - RNA, 19 nt, Artificial Sequence
  Description of Artificial Sequence: Synthetic oligonucleotide
  Antisense strand to SEQ ID NO: 1474518
uucugugcugacuauuagg

SEQ ID NO: 1474520 - RNA, 19 nt, Artificial Sequence
  Description of Artificial Sequence: Synthetic oligonucleotide
  Sense strand starting at position 1950 of SEQ ID NO: 1244228
ggaguuuaccaugguguca

SEQ ID NO: 1474521 - RNA, 19 nt, Artificial Sequence
  Description of Artificial Sequence: Synthetic oligonucleotide
  Antisense strand to SEQ ID NO: 1474520
ugacaccaugguaaacucc

SEQ ID NO: 1474522 - RNA, 19 nt, Artificial Sequence
  Description of Artificial Sequence: Synthetic oligonucleotide
  Sense strand starting at position 1975 of SEQ ID NO: 1244228
gaaggaucuaguuggguuu

SEQ ID NO: 1474523 - RNA, 19 nt, Artificial Sequence
  Description of Artificial Sequence: Synthetic oligonucleotide
  Antisense strand to SEQ ID NO: 1474522
aaacccaacuagauccuuc

SEQ ID NO: 1474524 - RNA, 19 nt, Artificial Sequence
  Description of Artificial Sequence: Synthetic oligonucleotide
  Sense strand starting at position 1978 of SEQ ID NO: 1244228
ggaucuaguuggguuucua

SEQ ID NO: 1474525 - RNA, 19 nt, Artificial Sequence
  Description of Artificial Sequence: Synthetic oligonucleotide
  Antisense strand to SEQ ID NO: 1474524
uagaaacccaacuagaucc

SEQ ID NO: 1474526 - RNA, 19 nt, Artificial Sequence
  Description of Artificial Sequence: Synthetic oligonucleotide
  Sense strand starting at position 1991 of SEQ ID NO: 1244228
uuucuaggagagugaaguu

SEQ ID NO: 1474527 - RNA, 19 nt, Artificial Sequence
  Description of Artificial Sequence: Synthetic oligonucleotide
  Antisense strand to SEQ ID NO: 1474526
aacuucacucuccuagaaa

SEQ ID NO: 1474528 - RNA, 19 nt, Artificial Sequence
  Description of Artificial Sequence: Synthetic oligonucleotide
  Sense strand starting at position 2003 of SEQ ID NO: 1244228
ugaaguucuuguguuugga

SEQ ID NO: 1474529 - RNA, 19 nt, Artificial Sequence
  Description of Artificial Sequence: Synthetic oligonucleotide
  Antisense strand to SEQ ID NO: 1474528
uccaaacacaagaacuuca

SEQ ID NO: 1474530 - RNA, 19 nt, Artificial Sequence
  Description of Artificial Sequence: Synthetic oligonucleotide
  Sense strand starting at position 2005 of SEQ ID NO: 1244228
aaguucuuguguuuggaag

SEQ ID NO: 1474531 - RNA, 19 nt, Artificial Sequence
  Description of Artificial Sequence: Synthetic oligonucleotide
  Antisense strand to SEQ ID NO: 1474530
cuuccaaacacaagaacuu

SEQ ID NO: 1474532 - RNA, 19 nt, Artificial Sequence
  Description of Artificial Sequence: Synthetic oligonucleotide
  Sense strand starting at position 2122 of SEQ ID NO: 1244228
guaauuacaucauuguguu

SEQ ID NO: 1474533 - RNA, 19 nt, Artificial Sequence
  Description of Artificial Sequence: Synthetic oligonucleotide
  Antisense strand to SEQ ID NO: 1474532
aacacaaugauguaauuac

SEQ ID NO: 1474534 - RNA, 19 nt, Artificial Sequence
  Description of Artificial Sequence: Synthetic oligonucleotide
  Sense strand starting at position 2128 of SEQ ID NO: 1244228
acaucauuguguuuccagu

SEQ ID NO: 1474535 - RNA, 19 nt, Artificial Sequence
  Description of Artificial Sequence: Synthetic oligonucleotide
  Antisense strand to SEQ ID NO: 1474534
acuggaaacacaaugaugu

SEQ ID NO: 1474536 - RNA, 19 nt, Artificial Sequence
  Description of Artificial Sequence: Synthetic oligonucleotide
  Sense strand starting at position 2130 of SEQ ID NO: 1244228
aucauuguguuuccaguua

SEQ ID NO: 1474537 - RNA, 19 nt, Artificial Sequence
  Description of Artificial Sequence: Synthetic oligonucleotide
  Antisense strand to SEQ ID NO: 1474536
uaacuggaaacacaaugau

SEQ ID NO: 1474538 - RNA, 19 nt, Artificial Sequence
  Description of Artificial Sequence: Synthetic oligonucleotide
  Sense strand starting at position 2208 of SEQ ID NO: 1244228
auuggaaaugcaugucaua

SEQ ID NO: 1474539 - RNA, 19 nt, Artificial Sequence
  Description of Artificial Sequence: Synthetic oligonucleotide
  Antisense strand to SEQ ID NO: 1474538
uaugacaugcauuuccaau

SEQ ID NO: 1474540 - RNA, 19 nt, Artificial Sequence
  Description of Artificial Sequence: Synthetic oligonucleotide
  Sense strand starting at position 2343 of SEQ ID NO: 1244228
cagauugcugucugcaaau

SEQ ID NO: 1474541 - RNA, 19 nt, Artificial Sequence
  Description of Artificial Sequence: Synthetic oligonucleotide
  Antisense strand to SEQ ID NO: 1474540
auuugcagacagcaaucug

SEQ ID NO: 1474542 - RNA, 19 nt, Artificial Sequence
  Description of Artificial Sequence: Synthetic oligonucleotide
  Sense strand starting at position 2345 of SEQ ID NO: 1244228
gauugcugucugcaaauca

SEQ ID NO: 1474543 - RNA, 19 nt, Artificial Sequence
  Description of Artificial Sequence: Synthetic oligonucleotide
  Antisense strand to SEQ ID NO: 1474542
ugauuugcagacagcaauc

SEQ ID NO: 1474544 - RNA, 19 nt, Artificial Sequence
  Description of Artificial Sequence: Synthetic oligonucleotide
  Sense strand starting at position 2468 of SEQ ID NO: 1244228
ggaugucccaucuguaaug

SEQ ID NO: 1474545 - RNA, 19 nt, Artificial Sequence
  Description of Artificial Sequence: Synthetic oligonucleotide
  Antisense strand to SEQ ID NO: 1474544
cauuacagaugggacaucc

SEQ ID NO: 1474546 - RNA, 19 nt, Artificial Sequence
  Description of Artificial Sequence: Synthetic oligonucleotide
  Sense strand starting at position 2469 of SEQ ID NO: 1244228
gaugucccaucuguaauga

SEQ ID NO: 1474547 - RNA, 19 nt, Artificial Sequence
  Description of Artificial Sequence: Synthetic oligonucleotide
  Antisense strand to SEQ ID NO: 1474546
ucauuacagaugggacauc

SEQ ID NO: 1474548 - RNA, 19 nt, Artificial Sequence
  Description of Artificial Sequence: Synthetic oligonucleotide
  Sense strand starting at position 2486 of SEQ ID NO: 1244228
gaggaugacucugauccca

SEQ ID NO: 1474549 - RNA, 19 nt, Artificial Sequence
  Description of Artificial Sequence: Synthetic oligonucleotide
  Antisense strand to SEQ ID NO: 1474548
ugggaucagagucauccuc

SEQ ID NO: 1474550 - RNA, 19 nt, Artificial Sequence
  Description of Artificial Sequence: Synthetic oligonucleotide
  Sense strand starting at position 2488 of SEQ ID NO: 1244228
ggaugacucugaucccaug

SEQ ID NO: 1474551 - RNA, 19 nt, Artificial Sequence
  Description of Artificial Sequence: Synthetic oligonucleotide
  Antisense strand to SEQ ID NO: 1474550
caugggaucagagucaucc

SEQ ID NO: 1474552 - RNA, 19 nt, Artificial Sequence
  Description of Artificial Sequence: Synthetic oligonucleotide
  Sense strand starting at position 2534 of SEQ ID NO: 1244228
gucagaucccaagaaguuc

SEQ ID NO: 1474553 - RNA, 19 nt, Artificial Sequence
  Description of Artificial Sequence: Synthetic oligonucleotide
  Antisense strand to SEQ ID NO: 1474552
gaacuucuugggaucugac

SEQ ID NO: 1474554 - RNA, 19 nt, Artificial Sequence
  Description of Artificial Sequence: Synthetic oligonucleotide
  Sense strand starting at position 2548 of SEQ ID NO: 1244228
aguucuaaacucugucaga

SEQ ID NO: 1474555 - RNA, 19 nt, Artificial Sequence
  Description of Artificial Sequence: Synthetic oligonucleotide
  Antisense strand to SEQ ID NO: 1474554
ucugacagaguuuagaacu

SEQ ID NO: 1474556 - RNA, 19 nt, Artificial Sequence
  Description of Artificial Sequence: Synthetic oligonucleotide
  Sense strand starting at position 2549 of SEQ ID NO: 1244228
guucuaaacucugucagau

SEQ ID NO: 1474557 - RNA, 19 nt, Artificial Sequence
  Description of Artificial Sequence: Synthetic oligonucleotide
  Antisense strand to SEQ ID NO: 1474556
aucugacagaguuuagaac

SEQ ID NO: 1474558 - RNA, 19 nt, Artificial Sequence
  Description of Artificial Sequence: Synthetic oligonucleotide
  Sense strand starting at position 2644 of SEQ ID NO: 1244228
ugucuuacaguauaugcau

SEQ ID NO: 1474559 - RNA, 19 nt, Artificial Sequence
  Description of Artificial Sequence: Synthetic oligonucleotide
  Antisense strand to SEQ ID NO: 1474558
augcauauacuguaagaca

SEQ ID NO: 1474560 - RNA, 19 nt, Artificial Sequence
  Description of Artificial Sequence: Synthetic oligonucleotide
  Sense strand starting at position 2651 of SEQ ID NO: 1244228
caguauaugcauuaugagu

SEQ ID NO: 1474561 - RNA, 19 nt, Artificial Sequence
  Description of Artificial Sequence: Synthetic oligonucleotide
  Antisense strand to SEQ ID NO: 1474560
acucauaaugcauauacug

SEQ ID NO: 1474562 - RNA, 19 nt, Artificial Sequence
  Description of Artificial Sequence: Synthetic oligonucleotide
  Sense strand starting at position 2656 of SEQ ID NO: 1244228
uaugcauuaugaguaggaa

SEQ ID NO: 1474563 - RNA, 19 nt, Artificial Sequence
  Description of Artificial Sequence: Synthetic oligonucleotide
  Antisense strand to SEQ ID NO: 1474562
uuccuacucauaaugcaua

SEQ ID NO: 1474564 - RNA, 19 nt, Artificial Sequence
  Description of Artificial Sequence: Synthetic oligonucleotide
  Sense strand starting at position 2659 of SEQ ID NO: 1244228
gcauuaugaguaggaaguu

SEQ ID NO: 1474565 - RNA, 19 nt, Artificial Sequence
  Description of Artificial Sequence: Synthetic oligonucleotide
  Antisense strand to SEQ ID NO: 1474564
aacuuccuacucauaaugc

SEQ ID NO: 1474566 - RNA, 19 nt, Artificial Sequence
  Description of Artificial Sequence: Synthetic oligonucleotide
  Sense strand starting at position 3493 of SEQ ID NO: 1244228
agccguaaagaauacaauu

SEQ ID NO: 1474567 - RNA, 19 nt, Artificial Sequence
  Description of Artificial Sequence: Synthetic oligonucleotide
  Antisense strand to SEQ ID NO: 1474566
aauuguauucuuuacggcu

SEQ ID NO: 1474568 - RNA, 19 nt, Artificial Sequence
  Description of Artificial Sequence: Synthetic oligonucleotide
  Sense strand starting at position 3748 of SEQ ID NO: 1244228
cccugaaggcuugcgcuau

SEQ ID NO: 1474569 - RNA, 19 nt, Artificial Sequence
  Description of Artificial Sequence: Synthetic oligonucleotide
  Antisense strand to SEQ ID NO: 1474568
auagcgcaagccuucaggg

SEQ ID NO: 1474570 - RNA, 19 nt, Artificial Sequence
  Description of Artificial Sequence: Synthetic oligonucleotide
  Sense strand starting at position 3772 of SEQ ID NO: 1244228
uuauucucguuaccaugau

SEQ ID NO: 1474571 - RNA, 19 nt, Artificial Sequence
  Description of Artificial Sequence: Synthetic oligonucleotide
  Antisense strand to SEQ ID NO: 1474570
aucaugguaacgagaauaa

SEQ ID NO: 1474572 - RNA, 19 nt, Artificial Sequence
  Description of Artificial Sequence: Synthetic oligonucleotide
  Sense strand starting at position 3823 of SEQ ID NO: 1244228
uguugagugaaugaagguu

SEQ ID NO: 1474573 - RNA, 19 nt, Artificial Sequence
  Description of Artificial Sequence: Synthetic oligonucleotide
  Antisense strand to SEQ ID NO: 1474572
aaccuucauucacucaaca

SEQ ID NO: 1474574 - RNA, 19 nt, Artificial Sequence
  Description of Artificial Sequence: Synthetic oligonucleotide
  Sense strand starting at position 3965 of SEQ ID NO: 1244228
ucauuugugugauagguaa

SEQ ID NO: 1474575 - RNA, 19 nt, Artificial Sequence
  Description of Artificial Sequence: Synthetic oligonucleotide
  Antisense strand to SEQ ID NO: 1474574
uuaccuaucacacaaauga

SEQ ID NO: 1474576 - RNA, 19 nt, Artificial Sequence
  Description of Artificial Sequence: Synthetic oligonucleotide
  Sense strand starting at position 3969 of SEQ ID NO: 1244228
uugugugauagguaacaug

SEQ ID NO: 1474577 - RNA, 19 nt, Artificial Sequence
  Description of Artificial Sequence: Synthetic oligonucleotide
  Antisense strand to SEQ ID NO: 1474576
cauguuaccuaucacacaa

SEQ ID NO: 1474578 - RNA, 19 nt, Artificial Sequence
  Description of Artificial Sequence: Synthetic oligonucleotide
  Sense strand starting at position 3979 of SEQ ID NO: 1244228
gguaacaugucacccgaua

SEQ ID NO: 1474579 - RNA, 19 nt, Artificial Sequence
  Description of Artificial Sequence: Synthetic oligonucleotide
  Antisense strand to SEQ ID NO: 1474578
uaucgggugacauguuacc

SEQ ID NO: 1474580 - RNA, 19 nt, Artificial Sequence
  Description of Artificial Sequence: Synthetic oligonucleotide
  Sense strand starting at position 70 of SEQ ID NO: 1244229
guuuguguugaggauucau

SEQ ID NO: 1474581 - RNA, 19 nt, Artificial Sequence
  Description of Artificial Sequence: Synthetic oligonucleotide
  Antisense strand to SEQ ID NO: 1474580
augaauccucaacacaaac

SEQ ID NO: 1474582 - RNA, 19 nt, Artificial Sequence
  Description of Artificial Sequence: Synthetic oligonucleotide
  Sense strand starting at position 109 of SEQ ID NO: 1244229
auacauggacuuugcuaaa

SEQ ID NO: 1474583 - RNA, 19 nt, Artificial Sequence
  Description of Artificial Sequence: Synthetic oligonucleotide
  Antisense strand to SEQ ID NO: 1474582
uuuagcaaaguccauguau

SEQ ID NO: 1474584 - RNA, 19 nt, Artificial Sequence
  Description of Artificial Sequence: Synthetic oligonucleotide
  Sense strand starting at position 194 of SEQ ID NO: 1244229
cucugugcacaauaguaaa

SEQ ID NO: 1474585 - RNA, 19 nt, Artificial Sequence
  Description of Artificial Sequence: Synthetic oligonucleotide
  Antisense strand to SEQ ID NO: 1474584
uuuacuauugugcacagag

SEQ ID NO: 1474586 - RNA, 19 nt, Artificial Sequence
  Description of Artificial Sequence: Synthetic oligonucleotide
  Sense strand starting at position 238 of SEQ ID NO: 1244229
ucaacagugcauuggauaa

SEQ ID NO: 1474587 - RNA, 19 nt, Artificial Sequence
  Description of Artificial Sequence: Synthetic oligonucleotide
  Antisense strand to SEQ ID NO: 1474586
uuauccaaugcacuguuga

SEQ ID NO: 1474588 - RNA, 19 nt, Artificial Sequence
  Description of Artificial Sequence: Synthetic oligonucleotide
  Sense strand starting at position 582 of SEQ ID NO: 1244229
acgaauauguacucuuuga

SEQ ID NO: 1474589 - RNA, 19 nt, Artificial Sequence
  Description of Artificial Sequence: Synthetic oligonucleotide
  Antisense strand to SEQ ID NO: 1474588
ucaaagaguacauauucgu

SEQ ID NO: 1474590 - RNA, 19 nt, Artificial Sequence
  Description of Artificial Sequence: Synthetic oligonucleotide
  Sense strand starting at position 638 of SEQ ID NO: 1244229
augaguugugaucaaucuu

SEQ ID NO: 1474591 - RNA, 19 nt, Artificial Sequence
  Description of Artificial Sequence: Synthetic oligonucleotide
  Antisense strand to SEQ ID NO: 1474590
aagauugaucacaacucau

SEQ ID NO: 1474592 - RNA, 19 nt, Artificial Sequence
  Description of Artificial Sequence: Synthetic oligonucleotide
  Sense strand starting at position 811 of SEQ ID NO: 1244229
cuguuagaagguugacuaa

SEQ ID NO: 1474593 - RNA, 19 nt, Artificial Sequence
  Description of Artificial Sequence: Synthetic oligonucleotide
  Antisense strand to SEQ ID NO: 1474592
uuagucaaccuucuaacag

SEQ ID NO: 1474594 - RNA, 19 nt, Artificial Sequence
  Description of Artificial Sequence: Synthetic oligonucleotide
  Sense strand starting at position 855 of SEQ ID NO: 1244229
aguuaaauguaaucaccca

SEQ ID NO: 1474595 - RNA, 19 nt, Artificial Sequence
  Description of Artificial Sequence: Synthetic oligonucleotide
  Antisense strand to SEQ ID NO: 1474594
ugggugauuacauuuaacu

SEQ ID NO: 1474596 - RNA, 19 nt, Artificial Sequence
  Description of Artificial Sequence: Synthetic oligonucleotide
  Sense strand starting at position 862 of SEQ ID NO: 1244229
uguaaucacccaggaccua

SEQ ID NO: 1474597 - RNA, 19 nt, Artificial Sequence
  Description of Artificial Sequence: Synthetic oligonucleotide
  Antisense strand to SEQ ID NO: 1474596
uagguccugggugauuaca

SEQ ID NO: 1474598 - RNA, 19 nt, Artificial Sequence
  Description of Artificial Sequence: Synthetic oligonucleotide
  Sense strand starting at position 1079 of SEQ ID NO: 1244229
auuccuuaggcaugaugaa

SEQ ID NO: 1474599 - RNA, 19 nt, Artificial Sequence
  Description of Artificial Sequence: Synthetic oligonucleotide
  Antisense strand to SEQ ID NO: 1474598
uucaucaugccuaaggaau

SEQ ID NO: 1474600 - RNA, 19 nt, Artificial Sequence
  Description of Artificial Sequence: Synthetic oligonucleotide
  Sense strand starting at position 1080 of SEQ ID NO: 1244229
uuccuuaggcaugaugaau

SEQ ID NO: 1474601 - RNA, 19 nt, Artificial Sequence
  Description of Artificial Sequence: Synthetic oligonucleotide
  Antisense strand to SEQ ID NO: 1474600
auucaucaugccuaaggaa

SEQ ID NO: 1474602 - RNA, 19 nt, Artificial Sequence
  Description of Artificial Sequence: Synthetic oligonucleotide
  Sense strand starting at position 1143 of SEQ ID NO: 1244229
uugucaauuuauuaggaga

SEQ ID NO: 1474603 - RNA, 19 nt, Artificial Sequence
  Description of Artificial Sequence: Synthetic oligonucleotide
  Antisense strand to SEQ ID NO: 1474602
ucuccuaauaaauugacaa

SEQ ID NO: 1474604 - RNA, 19 nt, Artificial Sequence
  Description of Artificial Sequence: Synthetic oligonucleotide
  Sense strand starting at position 1146 of SEQ ID NO: 1244229
ucaauuuauuaggagauug

SEQ ID NO: 1474605 - RNA, 19 nt, Artificial Sequence
  Description of Artificial Sequence: Synthetic oligonucleotide
  Antisense strand to SEQ ID NO: 1474604
caaucuccuaauaaauuga

SEQ ID NO: 1474606 - RNA, 19 nt, Artificial Sequence
  Description of Artificial Sequence: Synthetic oligonucleotide
  Sense strand starting at position 1151 of SEQ ID NO: 1244229
uuauuaggagauugucaau

SEQ ID NO: 1474607 - RNA, 19 nt, Artificial Sequence
  Description of Artificial Sequence: Synthetic oligonucleotide
  Antisense strand to SEQ ID NO: 1474606
auugacaaucuccuaauaa

SEQ ID NO: 1474608 - RNA, 19 nt, Artificial Sequence
  Description of Artificial Sequence: Synthetic oligonucleotide
  Sense strand starting at position 1157 of SEQ ID NO: 1244229
ggagauugucaaugaauuc

SEQ ID NO: 1474609 - RNA, 19 nt, Artificial Sequence
  Description of Artificial Sequence: Synthetic oligonucleotide
  Antisense strand to SEQ ID NO: 1474608
gaauucauugacaaucucc

SEQ ID NO: 1474610 - RNA, 19 nt, Artificial Sequence
  Description of Artificial Sequence: Synthetic oligonucleotide
  Sense strand starting at position 1164 of SEQ ID NO: 1244229
gucaaugaauuccuuugga

SEQ ID NO: 1474611 - RNA, 19 nt, Artificial Sequence
  Description of Artificial Sequence: Synthetic oligonucleotide
  Antisense strand to SEQ ID NO: 1474610
uccaaaggaauucauugac

SEQ ID NO: 1474612 - RNA, 19 nt, Artificial Sequence
  Description of Artificial Sequence: Synthetic oligonucleotide
  Sense strand starting at position 1219 of SEQ ID NO: 1244229
cagaauuucuaaggaugag

SEQ ID NO: 1474613 - RNA, 19 nt, Artificial Sequence
  Description of Artificial Sequence: Synthetic oligonucleotide
  Antisense strand to SEQ ID NO: 1474612
cucauccuuagaaauucug

SEQ ID NO: 1474614 - RNA, 19 nt, Artificial Sequence
  Description of Artificial Sequence: Synthetic oligonucleotide
  Sense strand starting at position 1229 of SEQ ID NO: 1244229
aaggaugagguuugcuuau

SEQ ID NO: 1474615 - RNA, 19 nt, Artificial Sequence
  Description of Artificial Sequence: Synthetic oligonucleotide
  Antisense strand to SEQ ID NO: 1474614
auaagcaaaccucauccuu

SEQ ID NO: 1474616 - RNA, 19 nt, Artificial Sequence
  Description of Artificial Sequence: Synthetic oligonucleotide
  Sense strand starting at position 1980 of SEQ ID NO: 1244229
guggguuuccaggagagug

SEQ ID NO: 1474617 - RNA, 19 nt, Artificial Sequence
  Description of Artificial Sequence: Synthetic oligonucleotide
  Antisense strand to SEQ ID NO: 1474616
cacucuccuggaaacccac

SEQ ID NO: 1474618 - RNA, 19 nt, Artificial Sequence
  Description of Artificial Sequence: Synthetic oligonucleotide
  Sense strand starting at position 1996 of SEQ ID NO: 1244229
gugaguguucugaguuuga

SEQ ID NO: 1474619 - RNA, 19 nt, Artificial Sequence
  Description of Artificial Sequence: Synthetic oligonucleotide
  Antisense strand to SEQ ID NO: 1474618
ucaaacucagaacacucac

SEQ ID NO: 1474620 - RNA, 19 nt, Artificial Sequence
  Description of Artificial Sequence: Synthetic oligonucleotide
  Sense strand starting at position 2058 of SEQ ID NO: 1244229
ccacuaugacaaugugaau

SEQ ID NO: 1474621 - RNA, 19 nt, Artificial Sequence
  Description of Artificial Sequence: Synthetic oligonucleotide
  Antisense strand to SEQ ID NO: 1474620
auucacauugucauagugg

SEQ ID NO: 1474622 - RNA, 19 nt, Artificial Sequence
  Description of Artificial Sequence: Synthetic oligonucleotide
  Sense strand starting at position 2084 of SEQ ID NO: 1244229
ugguuugcacauuacuaau

SEQ ID NO: 1474623 - RNA, 19 nt, Artificial Sequence
  Description of Artificial Sequence: Synthetic oligonucleotide
  Antisense strand to SEQ ID NO: 1474622
auuaguaaugugcaaacca

SEQ ID NO: 1474624 - RNA, 19 nt, Artificial Sequence
  Description of Artificial Sequence: Synthetic oligonucleotide
  Sense strand starting at position 2100 of SEQ ID NO: 1244229
aauagagaaucaguuguuu

SEQ ID NO: 1474625 - RNA, 19 nt, Artificial Sequence
  Description of Artificial Sequence: Synthetic oligonucleotide
  Antisense strand to SEQ ID NO: 1474624
aaacaacugauucucuauu

SEQ ID NO: 1474626 - RNA, 19 nt, Artificial Sequence
  Description of Artificial Sequence: Synthetic oligonucleotide
  Sense strand starting at position 2284 of SEQ ID NO: 1244229
auuacaugacauuguuuga

SEQ ID NO: 1474627 - RNA, 19 nt, Artificial Sequence
  Description of Artificial Sequence: Synthetic oligonucleotide
  Antisense strand to SEQ ID NO: 1474626
ucaaacaaugucauguaau

SEQ ID NO: 1474628 - RNA, 19 nt, Artificial Sequence
  Description of Artificial Sequence: Synthetic oligonucleotide
  Sense strand starting at position 2291 of SEQ ID NO: 1244229
gacauuguuugauuggauu

SEQ ID NO: 1474629 - RNA, 19 nt, Artificial Sequence
  Description of Artificial Sequence: Synthetic oligonucleotide
  Antisense strand to SEQ ID NO: 1474628
aauccaaucaaacaauguc

SEQ ID NO: 1474630 - RNA, 19 nt, Artificial Sequence
  Description of Artificial Sequence: Synthetic oligonucleotide
  Sense strand starting at position 2469 of SEQ ID NO: 1244229
agguaacuuguguauaaua

SEQ ID NO: 1474631 - RNA, 19 nt, Artificial Sequence
  Description of Artificial Sequence: Synthetic oligonucleotide
  Antisense strand to SEQ ID NO: 1474630
uauuauacacaaguuaccu

SEQ ID NO: 1474632 - RNA, 19 nt, Artificial Sequence
  Description of Artificial Sequence: Synthetic oligonucleotide
  Sense strand starting at position 2471 of SEQ ID NO: 1244229
guaacuuguguauaauaag

SEQ ID NO: 1474633 - RNA, 19 nt, Artificial Sequence
  Description of Artificial Sequence: Synthetic oligonucleotide
  Antisense strand to SEQ ID NO: 1474632
cuuauuauacacaaguuac

SEQ ID NO: 1474634 - RNA, 19 nt, Artificial Sequence
  Description of Artificial Sequence: Synthetic oligonucleotide
  Sense strand starting at position 2489 of SEQ ID NO: 1244229
ggaacacugugauuccuuu

SEQ ID NO: 1474635 - RNA, 19 nt, Artificial Sequence
  Description of Artificial Sequence: Synthetic oligonucleotide
  Antisense strand to SEQ ID NO: 1474634
aaaggaaucacaguguucc

SEQ ID NO: 1474636 - RNA, 19 nt, Artificial Sequence
  Description of Artificial Sequence: Synthetic oligonucleotide
  Sense strand starting at position 2627 of SEQ ID NO: 1244229
auacauuggcaugauaggu

SEQ ID NO: 1474637 - RNA, 19 nt, Artificial Sequence
  Description of Artificial Sequence: Synthetic oligonucleotide
  Antisense strand to SEQ ID NO: 1474636
accuaucaugccaauguau

SEQ ID NO: 1474638 - RNA, 19 nt, Artificial Sequence
  Description of Artificial Sequence: Synthetic oligonucleotide
  Sense strand starting at position 2734 of SEQ ID NO: 1244229
cacugaauguguuuaacug

SEQ ID NO: 1474639 - RNA, 19 nt, Artificial Sequence
  Description of Artificial Sequence: Synthetic oligonucleotide
  Antisense strand to SEQ ID NO: 1474638
caguuaaacacauucagug

SEQ ID NO: 1474640 - RNA, 19 nt, Artificial Sequence
  Description of Artificial Sequence: Synthetic oligonucleotide
  Sense strand starting at position 2735 of SEQ ID NO: 1244229
acugaauguguuuaacuga

SEQ ID NO: 1474641 - RNA, 19 nt, Artificial Sequence
  Description of Artificial Sequence: Synthetic oligonucleotide
  Antisense strand to SEQ ID NO: 1474640
ucaguuaaacacauucagu

SEQ ID NO: 1474642 - RNA, 19 nt, Artificial Sequence
  Description of Artificial Sequence: Synthetic oligonucleotide
  Sense strand starting at position 2749 of SEQ ID NO: 1244229
acugaaguguuauugaaag

SEQ ID NO: 1474643 - RNA, 19 nt, Artificial Sequence
  Description of Artificial Sequence: Synthetic oligonucleotide
  Antisense strand to SEQ ID NO: 1474642
cuuucaauaacacuucagu

SEQ ID NO: 1474644 - RNA, 19 nt, Artificial Sequence
  Description of Artificial Sequence: Synthetic oligonucleotide
  Sense strand starting at position 2751 of SEQ ID NO: 1244229
ugaaguguuauugaaagua

SEQ ID NO: 1474645 - RNA, 19 nt, Artificial Sequence
  Description of Artificial Sequence: Synthetic oligonucleotide
  Antisense strand to SEQ ID NO: 1474644
uacuuucaauaacacuuca

SEQ ID NO: 1474646 - RNA, 19 nt, Artificial Sequence
  Description of Artificial Sequence: Synthetic oligonucleotide
  Sense strand starting at position 2823 of SEQ ID NO: 1244229
uugcuugauacauggagaa

SEQ ID NO: 1474647 - RNA, 19 nt, Artificial Sequence
  Description of Artificial Sequence: Synthetic oligonucleotide
  Antisense strand to SEQ ID NO: 1474646
uucuccauguaucaagcaa

SEQ ID NO: 1474648 - RNA, 19 nt, Artificial Sequence
  Description of Artificial Sequence: Synthetic oligonucleotide
  Sense strand starting at position 2933 of SEQ ID NO: 1244229
uagagaauggugugauuag

SEQ ID NO: 1474649 - RNA, 19 nt, Artificial Sequence
  Description of Artificial Sequence: Synthetic oligonucleotide
  Antisense strand to SEQ ID NO: 1474648
cuaaucacaccauucucua

SEQ ID NO: 1474650 - RNA, 19 nt, Artificial Sequence
  Description of Artificial Sequence: Synthetic oligonucleotide
  Sense strand starting at position 3057 of SEQ ID NO: 1244229
cugaguccucuauaauugu

SEQ ID NO: 1474651 - RNA, 19 nt, Artificial Sequence
  Description of Artificial Sequence: Synthetic oligonucleotide
  Antisense strand to SEQ ID NO: 1474650
acaauuauagaggacucag

SEQ ID NO: 1474652 - RNA, 19 nt, Artificial Sequence
  Description of Artificial Sequence: Synthetic oligonucleotide
  Sense strand starting at position 3097 of SEQ ID NO: 1244229
ggauucugcuauguagaca

SEQ ID NO: 1474653 - RNA, 19 nt, Artificial Sequence
  Description of Artificial Sequence: Synthetic oligonucleotide
  Antisense strand to SEQ ID NO: 1474652
ugucuacauagcagaaucc

SEQ ID NO: 1474654 - RNA, 19 nt, Artificial Sequence
  Description of Artificial Sequence: Synthetic oligonucleotide
  Sense strand starting at position 3642 of SEQ ID NO: 1244229
cggacaaaggguuaauagu

SEQ ID NO: 1474655 - RNA, 19 nt, Artificial Sequence
  Description of Artificial Sequence: Synthetic oligonucleotide
  Antisense strand to SEQ ID NO: 1474654
acuauuaacccuuuguccg

SEQ ID NO: 1474656 - RNA, 19 nt, Artificial Sequence
  Description of Artificial Sequence: Synthetic oligonucleotide
  Sense strand starting at position 3737 of SEQ ID NO: 1244229
auuguuugagguuaggaau

SEQ ID NO: 1474657 - RNA, 19 nt, Artificial Sequence
  Description of Artificial Sequence: Synthetic oligonucleotide
  Antisense strand to SEQ ID NO: 1474656
auuccuaaccucaaacaau

SEQ ID NO: 1474658 - RNA, 19 nt, Artificial Sequence
  Description of Artificial Sequence: Synthetic oligonucleotide
  Sense strand starting at position 3759 of SEQ ID NO: 1244229
agaccaacuugguuaacuu

SEQ ID NO: 1474659 - RNA, 19 nt, Artificial Sequence
  Description of Artificial Sequence: Synthetic oligonucleotide
  Antisense strand to SEQ ID NO: 1474658
aaguuaaccaaguuggucu

SEQ ID NO: 1474660 - RNA, 19 nt, Artificial Sequence
  Description of Artificial Sequence: Synthetic oligonucleotide
  Sense strand starting at position 76 of SEQ ID NO: 1244230
ugguaacugauguaggauu

SEQ ID NO: 1474661 - RNA, 19 nt, Artificial Sequence
  Description of Artificial Sequence: Synthetic oligonucleotide
  Antisense strand to SEQ ID NO: 1474660
aauccuacaucaguuacca

SEQ ID NO: 1474662 - RNA, 19 nt, Artificial Sequence
  Description of Artificial Sequence: Synthetic oligonucleotide
  Sense strand starting at position 119 of SEQ ID NO: 1244230
ucagaaagaugggucugua

SEQ ID NO: 1474663 - RNA, 19 nt, Artificial Sequence
  Description of Artificial Sequence: Synthetic oligonucleotide
  Antisense strand to SEQ ID NO: 1474662
uacagacccaucuuucuga

SEQ ID NO: 1474664 - RNA, 19 nt, Artificial Sequence
  Description of Artificial Sequence: Synthetic oligonucleotide
  Sense strand starting at position 122 of SEQ ID NO: 1244230
gaaagaugggucuguaaua

SEQ ID NO: 1474665 - RNA, 19 nt, Artificial Sequence
  Description of Artificial Sequence: Synthetic oligonucleotide
  Antisense strand to SEQ ID NO: 1474664
uauuacagacccaucuuuc

SEQ ID NO: 1474666 - RNA, 19 nt, Artificial Sequence
  Description of Artificial Sequence: Synthetic oligonucleotide
  Sense strand starting at position 123 of SEQ ID NO: 1244230
aaagaugggucuguaauac

SEQ ID NO: 1474667 - RNA, 19 nt, Artificial Sequence
  Description of Artificial Sequence: Synthetic oligonucleotide
  Antisense strand to SEQ ID NO: 1474666
guauuacagacccaucuuu

SEQ ID NO: 1474668 - RNA, 19 nt, Artificial Sequence
  Description of Artificial Sequence: Synthetic oligonucleotide
  Sense strand starting at position 849 of SEQ ID NO: 1244230
ucaugaucagaauguuccu

SEQ ID NO: 1474669 - RNA, 19 nt, Artificial Sequence
  Description of Artificial Sequence: Synthetic oligonucleotide
  Antisense strand to SEQ ID NO: 1474668
aggaacauucugaucauga

SEQ ID NO: 1474670 - RNA, 19 nt, Artificial Sequence
  Description of Artificial Sequence: Synthetic oligonucleotide
  Sense strand starting at position 1032 of SEQ ID NO: 1244230
cagagaaaguccucaggua

SEQ ID NO: 1474671 - RNA, 19 nt, Artificial Sequence
  Description of Artificial Sequence: Synthetic oligonucleotide
  Antisense strand to SEQ ID NO: 1474670
uaccugaggacuuucucug

SEQ ID NO: 1474672 - RNA, 19 nt, Artificial Sequence
  Description of Artificial Sequence: Synthetic oligonucleotide
  Sense strand starting at position 1060 of SEQ ID NO: 1244230
aggugccugcucuaaggaa

SEQ ID NO: 1474673 - RNA, 19 nt, Artificial Sequence
  Description of Artificial Sequence: Synthetic oligonucleotide
  Antisense strand to SEQ ID NO: 1474672
uuccuuagagcaggcaccu

SEQ ID NO: 1474674 - RNA, 19 nt, Artificial Sequence
  Description of Artificial Sequence: Synthetic oligonucleotide
  Sense strand starting at position 1087 of SEQ ID NO: 1244230
cuauguuugaauggagagu

SEQ ID NO: 1474675 - RNA, 19 nt, Artificial Sequence
  Description of Artificial Sequence: Synthetic oligonucleotide
  Antisense strand to SEQ ID NO: 1474674
acucuccauucaaacauag

SEQ ID NO: 1474676 - RNA, 19 nt, Artificial Sequence
  Description of Artificial Sequence: Synthetic oligonucleotide
  Sense strand starting at position 1222 of SEQ ID NO: 1244230
acacaaugcccguauauua

SEQ ID NO: 1474677 - RNA, 19 nt, Artificial Sequence
  Description of Artificial Sequence: Synthetic oligonucleotide
  Antisense strand to SEQ ID NO: 1474676
uaauauacgggcauugugu

SEQ ID NO: 1474678 - RNA, 19 nt, Artificial Sequence
  Description of Artificial Sequence: Synthetic oligonucleotide
  Sense strand starting at position 1229 of SEQ ID NO: 1244230
gcccguauauuauuuguau

SEQ ID NO: 1474679 - RNA, 19 nt, Artificial Sequence
  Description of Artificial Sequence: Synthetic oligonucleotide
  Antisense strand to SEQ ID NO: 1474678
auacaaauaauauacgggc

SEQ ID NO: 1474680 - RNA, 19 nt, Artificial Sequence
  Description of Artificial Sequence: Synthetic oligonucleotide
  Sense strand starting at position 1279 of SEQ ID NO: 1244230
ggaauagcuccaugugaua

SEQ ID NO: 1474681 - RNA, 19 nt, Artificial Sequence
  Description of Artificial Sequence: Synthetic oligonucleotide
  Antisense strand to SEQ ID NO: 1474680
uaucacauggagcuauucc

SEQ ID NO: 1474682 - RNA, 19 nt, Artificial Sequence
  Description of Artificial Sequence: Synthetic oligonucleotide
  Sense strand starting at position 1399 of SEQ ID NO: 1244230
guguuuggugagcauauuu

SEQ ID NO: 1474683 - RNA, 19 nt, Artificial Sequence
  Description of Artificial Sequence: Synthetic oligonucleotide
  Antisense strand to SEQ ID NO: 1474682
aaauaugcucaccaaacac

SEQ ID NO: 1474684 - RNA, 19 nt, Artificial Sequence
  Description of Artificial Sequence: Synthetic oligonucleotide
  Sense strand starting at position 1434 of SEQ ID NO: 1244230
ccaagaauugguuggaacu

SEQ ID NO: 1474685 - RNA, 19 nt, Artificial Sequence
  Description of Artificial Sequence: Synthetic oligonucleotide
  Antisense strand to SEQ ID NO: 1474684
aguuccaaccaauucuugg

SEQ ID NO: 1474686 - RNA, 19 nt, Artificial Sequence
  Description of Artificial Sequence: Synthetic oligonucleotide
  Sense strand starting at position 2087 of SEQ ID NO: 1244230
uuguuauuauuuguccuga

SEQ ID NO: 1474687 - RNA, 19 nt, Artificial Sequence
  Description of Artificial Sequence: Synthetic oligonucleotide
  Antisense strand to SEQ ID NO: 1474686
ucaggacaaauaauaacaa

SEQ ID NO: 1474688 - RNA, 19 nt, Artificial Sequence
  Description of Artificial Sequence: Synthetic oligonucleotide
  Sense strand starting at position 2098 of SEQ ID NO: 1244230
uguccugauauguaggcaa

SEQ ID NO: 1474689 - RNA, 19 nt, Artificial Sequence
  Description of Artificial Sequence: Synthetic oligonucleotide
  Antisense strand to SEQ ID NO: 1474688
uugccuacauaucaggaca

SEQ ID NO: 1474690 - RNA, 19 nt, Artificial Sequence
  Description of Artificial Sequence: Synthetic oligonucleotide
  Sense strand starting at position 2101 of SEQ ID NO: 1244230
ccugauauguaggcaauua

SEQ ID NO: 1474691 - RNA, 19 nt, Artificial Sequence
  Description of Artificial Sequence: Synthetic oligonucleotide
  Antisense strand to SEQ ID NO: 1474690
uaauugccuacauaucagg

SEQ ID NO: 1474692 - RNA, 19 nt, Artificial Sequence
  Description of Artificial Sequence: Synthetic oligonucleotide
  Sense strand starting at position 2328 of SEQ ID NO: 1244230
augacuacucuugggugau

SEQ ID NO: 1474693 - RNA, 19 nt, Artificial Sequence
  Description of Artificial Sequence: Synthetic oligonucleotide
  Antisense strand to SEQ ID NO: 1474692
aucacccaagaguagucau

SEQ ID NO: 1474694 - RNA, 19 nt, Artificial Sequence
  Description of Artificial Sequence: Synthetic oligonucleotide
  Sense strand starting at position 2330 of SEQ ID NO: 1244230
gacuacucuugggugauua

SEQ ID NO: 1474695 - RNA, 19 nt, Artificial Sequence
  Description of Artificial Sequence: Synthetic oligonucleotide
  Antisense strand to SEQ ID NO: 1474694
uaaucacccaagaguaguc

SEQ ID NO: 1474696 - RNA, 19 nt, Artificial Sequence
  Description of Artificial Sequence: Synthetic oligonucleotide
  Sense strand starting at position 2332 of SEQ ID NO: 1244230
cuacucuugggugauuacu

SEQ ID NO: 1474697 - RNA, 19 nt, Artificial Sequence
  Description of Artificial Sequence: Synthetic oligonucleotide
  Antisense strand to SEQ ID NO: 1474696
aguaaucacccaagaguag

SEQ ID NO: 1474698 - RNA, 19 nt, Artificial Sequence
  Description of Artificial Sequence: Synthetic oligonucleotide
  Sense strand starting at position 2334 of SEQ ID NO: 1244230
acucuugggugauuacuau

SEQ ID NO: 1474699 - RNA, 19 nt, Artificial Sequence
  Description of Artificial Sequence: Synthetic oligonucleotide
  Antisense strand to SEQ ID NO: 1474698
auaguaaucacccaagagu

SEQ ID NO: 1474700 - RNA, 19 nt, Artificial Sequence
  Description of Artificial Sequence: Synthetic oligonucleotide
  Sense strand starting at position 2341 of SEQ ID NO: 1244230
ggugauuacuauucuuaca

SEQ ID NO: 1474701 - RNA, 19 nt, Artificial Sequence
  Description of Artificial Sequence: Synthetic oligonucleotide
  Antisense strand to SEQ ID NO: 1474700
uguaagaauaguaaucacc

SEQ ID NO: 1474702 - RNA, 19 nt, Artificial Sequence
  Description of Artificial Sequence: Synthetic oligonucleotide
  Sense strand starting at position 2483 of SEQ ID NO: 1244230
ugaccacuggugugagaac

SEQ ID NO: 1474703 - RNA, 19 nt, Artificial Sequence
  Description of Artificial Sequence: Synthetic oligonucleotide
  Antisense strand to SEQ ID NO: 1474702
guucucacaccagugguca

SEQ ID NO: 1474704 - RNA, 19 nt, Artificial Sequence
  Description of Artificial Sequence: Synthetic oligonucleotide
  Sense strand starting at position 2914 of SEQ ID NO: 1244230
gggccuugaagauguccua

SEQ ID NO: 1474705 - RNA, 19 nt, Artificial Sequence
  Description of Artificial Sequence: Synthetic oligonucleotide
  Antisense strand to SEQ ID NO: 1474704
uaggacaucuucaaggccc

SEQ ID NO: 1474706 - RNA, 19 nt, Artificial Sequence
  Description of Artificial Sequence: Synthetic oligonucleotide
  Sense strand starting at position 2917 of SEQ ID NO: 1244230
ccuugaagauguccuauac

SEQ ID NO: 1474707 - RNA, 19 nt, Artificial Sequence
  Description of Artificial Sequence: Synthetic oligonucleotide
  Antisense strand to SEQ ID NO: 1474706
guauaggacaucuucaagg

SEQ ID NO: 1474708 - RNA, 19 nt, Artificial Sequence
  Description of Artificial Sequence: Synthetic oligonucleotide
  Sense strand starting at position 2952 of SEQ ID NO: 1244230
agaaguuguugauccaauu

SEQ ID NO: 1474709 - RNA, 19 nt, Artificial Sequence
  Description of Artificial Sequence: Synthetic oligonucleotide
  Antisense strand to SEQ ID NO: 1474708
aauuggaucaacaacuucu

SEQ ID NO: 1474710 - RNA, 19 nt, Artificial Sequence
  Description of Artificial Sequence: Synthetic oligonucleotide
  Sense strand starting at position 3200 of SEQ ID NO: 1244230
augucugacuuaccaugau

SEQ ID NO: 1474711 - RNA, 19 nt, Artificial Sequence
  Description of Artificial Sequence: Synthetic oligonucleotide
  Antisense strand to SEQ ID NO: 1474710
aucaugguaagucagacau

SEQ ID NO: 1474712 - RNA, 19 nt, Artificial Sequence
  Description of Artificial Sequence: Synthetic oligonucleotide
  Sense strand starting at position 3203 of SEQ ID NO: 1244230
ucugacuuaccaugauaga

SEQ ID NO: 1474713 - RNA, 19 nt, Artificial Sequence
  Description of Artificial Sequence: Synthetic oligonucleotide
  Antisense strand to SEQ ID NO: 1474712
ucuaucaugguaagucaga

SEQ ID NO: 1474714 - RNA, 19 nt, Artificial Sequence
  Description of Artificial Sequence: Synthetic oligonucleotide
  Sense strand starting at position 3261 of SEQ ID NO: 1244230
ggaggaguuucaguguaag

SEQ ID NO: 1474715 - RNA, 19 nt, Artificial Sequence
  Description of Artificial Sequence: Synthetic oligonucleotide
  Antisense strand to SEQ ID NO: 1474714
cuuacacugaaacuccucc

SEQ ID NO: 1474716 - RNA, 19 nt, Artificial Sequence
  Description of Artificial Sequence: Synthetic oligonucleotide
  Sense strand starting at position 3282 of SEQ ID NO: 1244230
gguguuucugagggagauc

SEQ ID NO: 1474717 - RNA, 19 nt, Artificial Sequence
  Description of Artificial Sequence: Synthetic oligonucleotide
  Antisense strand to SEQ ID NO: 1474716
gaucucccucagaaacacc

SEQ ID NO: 1474718 - RNA, 19 nt, Artificial Sequence
  Description of Artificial Sequence: Synthetic oligonucleotide
  Sense strand starting at position 3331 of SEQ ID NO: 1244230
gagggagauucccuuucuu

SEQ ID NO: 1474719 - RNA, 19 nt, Artificial Sequence
  Description of Artificial Sequence: Synthetic oligonucleotide
  Antisense strand to SEQ ID NO: 1474718
aagaaagggaaucucccuc

SEQ ID NO: 1474720 - RNA, 19 nt, Artificial Sequence
  Description of Artificial Sequence: Synthetic oligonucleotide
  Sense strand starting at position 3575 of SEQ ID NO: 1244230
ggaugaaaguggguuccau

SEQ ID NO: 1474721 - RNA, 19 nt, Artificial Sequence
  Description of Artificial Sequence: Synthetic oligonucleotide
  Antisense strand to SEQ ID NO: 1474720
auggaacccacuuucaucc

SEQ ID NO: 1474722 - RNA, 19 nt, Artificial Sequence
  Description of Artificial Sequence: Synthetic oligonucleotide
  Sense strand starting at position 3591 of SEQ ID NO: 1244230
caugaugcuguggaauuaa

SEQ ID NO: 1474723 - RNA, 19 nt, Artificial Sequence
  Description of Artificial Sequence: Synthetic oligonucleotide
  Antisense strand to SEQ ID NO: 1474722
uuaauuccacagcaucaug

SEQ ID NO: 1474724 - RNA, 19 nt, Artificial Sequence
  Description of Artificial Sequence: Synthetic oligonucleotide
  Sense strand starting at position 3603 of SEQ ID NO: 1244230
gaauuaagacccugugagc

SEQ ID NO: 1474725 - RNA, 19 nt, Artificial Sequence
  Description of Artificial Sequence: Synthetic oligonucleotide
  Antisense strand to SEQ ID NO: 1474724
gcucacagggucuuaauuc

SEQ ID NO: 1474726 - RNA, 19 nt, Artificial Sequence
  Description of Artificial Sequence: Synthetic oligonucleotide
  Sense strand starting at position 3645 of SEQ ID NO: 1244230
cucuaagauuuccaggaga

SEQ ID NO: 1474727 - RNA, 19 nt, Artificial Sequence
  Description of Artificial Sequence: Synthetic oligonucleotide
  Antisense strand to SEQ ID NO: 1474726
ucuccuggaaaucuuagag

SEQ ID NO: 1474728 - RNA, 19 nt, Artificial Sequence
  Description of Artificial Sequence: Synthetic oligonucleotide
  Sense strand starting at position 3660 of SEQ ID NO: 1244230
gagaccuuguauucuggaa

SEQ ID NO: 1474729 - RNA, 19 nt, Artificial Sequence
  Description of Artificial Sequence: Synthetic oligonucleotide
  Antisense strand to SEQ ID NO: 1474728
uuccagaauacaaggucuc

SEQ ID NO: 1474730 - RNA, 19 nt, Artificial Sequence
  Description of Artificial Sequence: Synthetic oligonucleotide
  Sense strand starting at position 3692 of SEQ ID NO: 1244230
uugagaagccgugacgauu

SEQ ID NO: 1474731 - RNA, 19 nt, Artificial Sequence
  Description of Artificial Sequence: Synthetic oligonucleotide
  Antisense strand to SEQ ID NO: 1474730
aaucgucacggcuucucaa

SEQ ID NO: 1474732 - RNA, 19 nt, Artificial Sequence
  Description of Artificial Sequence: Synthetic oligonucleotide
  Sense strand starting at position 3718 of SEQ ID NO: 1244230
gcugaugauucaguagaga

SEQ ID NO: 1474733 - RNA, 19 nt, Artificial Sequence
  Description of Artificial Sequence: Synthetic oligonucleotide
  Antisense strand to SEQ ID NO: 1474732
ucucuacugaaucaucagc

SEQ ID NO: 1474734 - RNA, 19 nt, Artificial Sequence
  Description of Artificial Sequence: Synthetic oligonucleotide
  Sense strand starting at position 3932 of SEQ ID NO: 1244230
acacccugaugcucugaua

SEQ ID NO: 1474735 - RNA, 19 nt, Artificial Sequence
  Description of Artificial Sequence: Synthetic oligonucleotide
  Antisense strand to SEQ ID NO: 1474734
uaucagagcaucagggugu

SEQ ID NO: 1474736 - RNA, 19 nt, Artificial Sequence
  Description of Artificial Sequence: Synthetic oligonucleotide
  Sense strand starting at position 3940 of SEQ ID NO: 1244230
augcucugauauguauaua

SEQ ID NO: 1474737 - RNA, 19 nt, Artificial Sequence
  Description of Artificial Sequence: Synthetic oligonucleotide
  Antisense strand to SEQ ID NO: 1474736
uauauacauaucagagcau

SEQ ID NO: 1474738 - RNA, 19 nt, Artificial Sequence
  Description of Artificial Sequence: Synthetic oligonucleotide
  Sense strand starting at position 3943 of SEQ ID NO: 1244230
cucugauauguauauauug

SEQ ID NO: 1474739 - RNA, 19 nt, Artificial Sequence
  Description of Artificial Sequence: Synthetic oligonucleotide
  Antisense strand to SEQ ID NO: 1474738
caauauauacauaucagag

SEQ ID NO: 1474740 - RNA, 19 nt, Artificial Sequence
  Description of Artificial Sequence: Synthetic oligonucleotide
  Sense strand starting at position 618 of SEQ ID NO: 1244231
aaaguaauccuagguugac

SEQ ID NO: 1474741 - RNA, 19 nt, Artificial Sequence
  Description of Artificial Sequence: Synthetic oligonucleotide
  Antisense strand to SEQ ID NO: 1474740
gucaaccuaggauuacuuu

SEQ ID NO: 1474742 - RNA, 19 nt, Artificial Sequence
  Description of Artificial Sequence: Synthetic oligonucleotide
  Sense strand starting at position 619 of SEQ ID NO: 1244231
aaguaauccuagguugaca

SEQ ID NO: 1474743 - RNA, 19 nt, Artificial Sequence
  Description of Artificial Sequence: Synthetic oligonucleotide
  Antisense strand to SEQ ID NO: 1474742
ugucaaccuaggauuacuu

SEQ ID NO: 1474744 - RNA, 19 nt, Artificial Sequence
  Description of Artificial Sequence: Synthetic oligonucleotide
  Sense strand starting at position 621 of SEQ ID NO: 1244231
guaauccuagguugacaga

SEQ ID NO: 1474745 - RNA, 19 nt, Artificial Sequence
  Description of Artificial Sequence: Synthetic oligonucleotide
  Antisense strand to SEQ ID NO: 1474744
ucugucaaccuaggauuac

SEQ ID NO: 1474746 - RNA, 19 nt, Artificial Sequence
  Description of Artificial Sequence: Synthetic oligonucleotide
  Sense strand starting at position 701 of SEQ ID NO: 1244231
ucuguauaauucucaaguc

SEQ ID NO: 1474747 - RNA, 19 nt, Artificial Sequence
  Description of Artificial Sequence: Synthetic oligonucleotide
  Antisense strand to SEQ ID NO: 1474746
gacuugagaauuauacaga

SEQ ID NO: 1474748 - RNA, 19 nt, Artificial Sequence
  Description of Artificial Sequence: Synthetic oligonucleotide
  Sense strand starting at position 776 of SEQ ID NO: 1244231
ugggaugcagcuuauugaa

SEQ ID NO: 1474749 - RNA, 19 nt, Artificial Sequence
  Description of Artificial Sequence: Synthetic oligonucleotide
  Antisense strand to SEQ ID NO: 1474748
uucaauaagcugcauccca

SEQ ID NO: 1474750 - RNA, 19 nt, Artificial Sequence
  Description of Artificial Sequence: Synthetic oligonucleotide
  Sense strand starting at position 778 of SEQ ID NO: 1244231
ggaugcagcuuauugaaga

SEQ ID NO: 1474751 - RNA, 19 nt, Artificial Sequence
  Description of Artificial Sequence: Synthetic oligonucleotide
  Antisense strand to SEQ ID NO: 1474750
ucuucaauaagcugcaucc

SEQ ID NO: 1474752 - RNA, 19 nt, Artificial Sequence
  Description of Artificial Sequence: Synthetic oligonucleotide
  Sense strand starting at position 783 of SEQ ID NO: 1244231
cagcuuauugaagacaguu

SEQ ID NO: 1474753 - RNA, 19 nt, Artificial Sequence
  Description of Artificial Sequence: Synthetic oligonucleotide
  Antisense strand to SEQ ID NO: 1474752
aacugucuucaauaagcug

SEQ ID NO: 1474754 - RNA, 19 nt, Artificial Sequence
  Description of Artificial Sequence: Synthetic oligonucleotide
  Sense strand starting at position 815 of SEQ ID NO: 1244231
aguuauauuccacagcuuu

SEQ ID NO: 1474755 - RNA, 19 nt, Artificial Sequence
  Description of Artificial Sequence: Synthetic oligonucleotide
  Antisense strand to SEQ ID NO: 1474754
aaagcuguggaauauaacu

SEQ ID NO: 1474756 - RNA, 19 nt, Artificial Sequence
  Description of Artificial Sequence: Synthetic oligonucleotide
  Sense strand starting at position 885 of SEQ ID NO: 1244231
cuacuaugagacugaauuc

SEQ ID NO: 1474757 - RNA, 19 nt, Artificial Sequence
  Description of Artificial Sequence: Synthetic oligonucleotide
  Antisense strand to SEQ ID NO: 1474756
gaauucagucucauaguag

SEQ ID NO: 1474758 - RNA, 19 nt, Artificial Sequence
  Description of Artificial Sequence: Synthetic oligonucleotide
  Sense strand starting at position 895 of SEQ ID NO: 1244231
acugaauucuggcuuggau

SEQ ID NO: 1474759 - RNA, 19 nt, Artificial Sequence
  Description of Artificial Sequence: Synthetic oligonucleotide
  Antisense strand to SEQ ID NO: 1474758
auccaagccagaauucagu

SEQ ID NO: 1474760 - RNA, 19 nt, Artificial Sequence
  Description of Artificial Sequence: Synthetic oligonucleotide
  Sense strand starting at position 897 of SEQ ID NO: 1244231
ugaauucuggcuuggauaa

SEQ ID NO: 1474761 - RNA, 19 nt, Artificial Sequence
  Description of Artificial Sequence: Synthetic oligonucleotide
  Antisense strand to SEQ ID NO: 1474760
uuauccaagccagaauuca

SEQ ID NO: 1474762 - RNA, 19 nt, Artificial Sequence
  Description of Artificial Sequence: Synthetic oligonucleotide
  Sense strand starting at position 898 of SEQ ID NO: 1244231
gaauucuggcuuggauaaa

SEQ ID NO: 1474763 - RNA, 19 nt, Artificial Sequence
  Description of Artificial Sequence: Synthetic oligonucleotide
  Antisense strand to SEQ ID NO: 1474762
uuuauccaagccagaauuc

SEQ ID NO: 1474764 - RNA, 19 nt, Artificial Sequence
  Description of Artificial Sequence: Synthetic oligonucleotide
  Sense strand starting at position 922 of SEQ ID NO: 1244231
auuggagaaugccaauuua

SEQ ID NO: 1474765 - RNA, 19 nt, Artificial Sequence
  Description of Artificial Sequence: Synthetic oligonucleotide
  Antisense strand to SEQ ID NO: 1474764
uaaauuggcauucuccaau

SEQ ID NO: 1474766 - RNA, 19 nt, Artificial Sequence
  Description of Artificial Sequence: Synthetic oligonucleotide
  Sense strand starting at position 947 of SEQ ID NO: 1244231
uaauuauuaggguguuuga

SEQ ID NO: 1474767 - RNA, 19 nt, Artificial Sequence
  Description of Artificial Sequence: Synthetic oligonucleotide
  Antisense strand to SEQ ID NO: 1474766
ucaaacacccuaauaauua

SEQ ID NO: 1474768 - RNA, 19 nt, Artificial Sequence
  Description of Artificial Sequence: Synthetic oligonucleotide
  Sense strand starting at position 950 of SEQ ID NO: 1244231
uuauuaggguguuugacaa

SEQ ID NO: 1474769 - RNA, 19 nt, Artificial Sequence
  Description of Artificial Sequence: Synthetic oligonucleotide
  Antisense strand to SEQ ID NO: 1474768
uugucaaacacccuaauaa

SEQ ID NO: 1474770 - RNA, 19 nt, Artificial Sequence
  Description of Artificial Sequence: Synthetic oligonucleotide
  Sense strand starting at position 1152 of SEQ ID NO: 1244231
aggauaccauuugaagauu

SEQ ID NO: 1474771 - RNA, 19 nt, Artificial Sequence
  Description of Artificial Sequence: Synthetic oligonucleotide
  Antisense strand to SEQ ID NO: 1474770
aaucuucaaaugguauccu

SEQ ID NO: 1474772 - RNA, 19 nt, Artificial Sequence
  Description of Artificial Sequence: Synthetic oligonucleotide
  Sense strand starting at position 1330 of SEQ ID NO: 1244231
guccacauguucucugaau

SEQ ID NO: 1474773 - RNA, 19 nt, Artificial Sequence
  Description of Artificial Sequence: Synthetic oligonucleotide
  Antisense strand to SEQ ID NO: 1474772
auucagagaacauguggac

SEQ ID NO: 1474774 - RNA, 19 nt, Artificial Sequence
  Description of Artificial Sequence: Synthetic oligonucleotide
  Sense strand starting at position 1332 of SEQ ID NO: 1244231
ccacauguucucugaauag

SEQ ID NO: 1474775 - RNA, 19 nt, Artificial Sequence
  Description of Artificial Sequence: Synthetic oligonucleotide
  Antisense strand to SEQ ID NO: 1474774
cuauucagagaacaugugg

SEQ ID NO: 1474776 - RNA, 19 nt, Artificial Sequence
  Description of Artificial Sequence: Synthetic oligonucleotide
  Sense strand starting at position 1347 of SEQ ID NO: 1244231
auagauacucugugccuga

SEQ ID NO: 1474777 - RNA, 19 nt, Artificial Sequence
  Description of Artificial Sequence: Synthetic oligonucleotide
  Antisense strand to SEQ ID NO: 1474776
ucaggcacagaguaucuau

SEQ ID NO: 1474778 - RNA, 19 nt, Artificial Sequence
  Description of Artificial Sequence: Synthetic oligonucleotide
  Sense strand starting at position 1348 of SEQ ID NO: 1244231
uagauacucugugccugaa

SEQ ID NO: 1474779 - RNA, 19 nt, Artificial Sequence
  Description of Artificial Sequence: Synthetic oligonucleotide
  Antisense strand to SEQ ID NO: 1474778
uucaggcacagaguaucua

SEQ ID NO: 1474780 - RNA, 19 nt, Artificial Sequence
  Description of Artificial Sequence: Synthetic oligonucleotide
  Sense strand starting at position 1637 of SEQ ID NO: 1244231
guuugcaacagcuagagau

SEQ ID NO: 1474781 - RNA, 19 nt, Artificial Sequence
  Description of Artificial Sequence: Synthetic oligonucleotide
  Antisense strand to SEQ ID NO: 1474780
aucucuagcuguugcaaac

SEQ ID NO: 1474782 - RNA, 19 nt, Artificial Sequence
  Description of Artificial Sequence: Synthetic oligonucleotide
  Sense strand starting at position 2158 of SEQ ID NO: 1244231
acaauaauguuuguccauu

SEQ ID NO: 1474783 - RNA, 19 nt, Artificial Sequence
  Description of Artificial Sequence: Synthetic oligonucleotide
  Antisense strand to SEQ ID NO: 1474782
aauggacaaacauuauugu

SEQ ID NO: 1474784 - RNA, 19 nt, Artificial Sequence
  Description of Artificial Sequence: Synthetic oligonucleotide
  Sense strand starting at position 2265 of SEQ ID NO: 1244231
uggcaucuucuagaccaaa

SEQ ID NO: 1474785 - RNA, 19 nt, Artificial Sequence
  Description of Artificial Sequence: Synthetic oligonucleotide
  Antisense strand to SEQ ID NO: 1474784
uuuggucuagaagaugcca

SEQ ID NO: 1474786 - RNA, 19 nt, Artificial Sequence
  Description of Artificial Sequence: Synthetic oligonucleotide
  Sense strand starting at position 2306 of SEQ ID NO: 1244231
agggcuaucaggugauacu

SEQ ID NO: 1474787 - RNA, 19 nt, Artificial Sequence
  Description of Artificial Sequence: Synthetic oligonucleotide
  Antisense strand to SEQ ID NO: 1474786
aguaucaccugauagcccu

SEQ ID NO: 1474788 - RNA, 19 nt, Artificial Sequence
  Description of Artificial Sequence: Synthetic oligonucleotide
  Sense strand starting at position 2365 of SEQ ID NO: 1244231
ccaguaccagaaugagauu

SEQ ID NO: 1474789 - RNA, 19 nt, Artificial Sequence
  Description of Artificial Sequence: Synthetic oligonucleotide
  Antisense strand to SEQ ID NO: 1474788
aaucucauucugguacugg

SEQ ID NO: 1474790 - RNA, 19 nt, Artificial Sequence
  Description of Artificial Sequence: Synthetic oligonucleotide
  Sense strand starting at position 2518 of SEQ ID NO: 1244231
aagguuuaauggccacaca

SEQ ID NO: 1474791 - RNA, 19 nt, Artificial Sequence
  Description of Artificial Sequence: Synthetic oligonucleotide
  Antisense strand to SEQ ID NO: 1474790
uguguggccauuaaaccuu

SEQ ID NO: 1474792 - RNA, 19 nt, Artificial Sequence
  Description of Artificial Sequence: Synthetic oligonucleotide
  Sense strand starting at position 2625 of SEQ ID NO: 1244231
aauggauaaucugagagac

SEQ ID NO: 1474793 - RNA, 19 nt, Artificial Sequence
  Description of Artificial Sequence: Synthetic oligonucleotide
  Antisense strand to SEQ ID NO: 1474792
gucucucagauuauccauu

SEQ ID NO: 1474794 - RNA, 19 nt, Artificial Sequence
  Description of Artificial Sequence: Synthetic oligonucleotide
  Sense strand starting at position 2701 of SEQ ID NO: 1244231
cacagcuugcuagaaggaa

SEQ ID NO: 1474795 - RNA, 19 nt, Artificial Sequence
  Description of Artificial Sequence: Synthetic oligonucleotide
  Antisense strand to SEQ ID NO: 1474794
uuccuucuagcaagcugug

SEQ ID NO: 1474796 - RNA, 19 nt, Artificial Sequence
  Description of Artificial Sequence: Synthetic oligonucleotide
  Sense strand starting at position 2776 of SEQ ID NO: 1244231
aaaggagcucauuauaguu

SEQ ID NO: 1474797 - RNA, 19 nt, Artificial Sequence
  Description of Artificial Sequence: Synthetic oligonucleotide
  Antisense strand to SEQ ID NO: 1474796
aacuauaaugagcuccuuu

SEQ ID NO: 1474798 - RNA, 19 nt, Artificial Sequence
  Description of Artificial Sequence: Synthetic oligonucleotide
  Sense strand starting at position 2830 of SEQ ID NO: 1244231
acaugacaauuugguggau

SEQ ID NO: 1474799 - RNA, 19 nt, Artificial Sequence
  Description of Artificial Sequence: Synthetic oligonucleotide
  Antisense strand to SEQ ID NO: 1474798
auccaccaaauugucaugu

SEQ ID NO: 1474800 - RNA, 19 nt, Artificial Sequence
  Description of Artificial Sequence: Synthetic oligonucleotide
  Sense strand starting at position 2832 of SEQ ID NO: 1244231
augacaauuugguggauua

SEQ ID NO: 1474801 - RNA, 19 nt, Artificial Sequence
  Description of Artificial Sequence: Synthetic oligonucleotide
  Antisense strand to SEQ ID NO: 1474800
uaauccaccaaauugucau

SEQ ID NO: 1474802 - RNA, 19 nt, Artificial Sequence
  Description of Artificial Sequence: Synthetic oligonucleotide
  Sense strand starting at position 3081 of SEQ ID NO: 1244231
cguggugucguggugucau

SEQ ID NO: 1474803 - RNA, 19 nt, Artificial Sequence
  Description of Artificial Sequence: Synthetic oligonucleotide
  Antisense strand to SEQ ID NO: 1474802
augacaccacgacaccacg

SEQ ID NO: 1474804 - RNA, 19 nt, Artificial Sequence
  Description of Artificial Sequence: Synthetic oligonucleotide
  Sense strand starting at position 3485 of SEQ ID NO: 1244231
gggaaauuauuagcaaugu

SEQ ID NO: 1474805 - RNA, 19 nt, Artificial Sequence
  Description of Artificial Sequence: Synthetic oligonucleotide
  Antisense strand to SEQ ID NO: 1474804
acauugcuaauaauuuccc

SEQ ID NO: 1474806 - RNA, 19 nt, Artificial Sequence
  Description of Artificial Sequence: Synthetic oligonucleotide
  Sense strand starting at position 3586 of SEQ ID NO: 1244231
ucaucuuugccuugauaug

SEQ ID NO: 1474807 - RNA, 19 nt, Artificial Sequence
  Description of Artificial Sequence: Synthetic oligonucleotide
  Antisense strand to SEQ ID NO: 1474806
cauaucaaggcaaagauga

SEQ ID NO: 1474808 - RNA, 19 nt, Artificial Sequence
  Description of Artificial Sequence: Synthetic oligonucleotide
  Sense strand starting at position 3597 of SEQ ID NO: 1244231
uugauauguggcugugaga

SEQ ID NO: 1474809 - RNA, 19 nt, Artificial Sequence
  Description of Artificial Sequence: Synthetic oligonucleotide
  Antisense strand to SEQ ID NO: 1474808
ucucacagccacauaucaa

SEQ ID NO: 1474810 - RNA, 19 nt, Artificial Sequence
  Description of Artificial Sequence: Synthetic oligonucleotide
  Sense strand starting at position 3742 of SEQ ID NO: 1244231
agggcauucccugaacuca

SEQ ID NO: 1474811 - RNA, 19 nt, Artificial Sequence
  Description of Artificial Sequence: Synthetic oligonucleotide
  Antisense strand to SEQ ID NO: 1474810
ugaguucagggaaugcccu

SEQ ID NO: 1474812 - RNA, 19 nt, Artificial Sequence
  Description of Artificial Sequence: Synthetic oligonucleotide
  Sense strand starting at position 3759 of SEQ ID NO: 1244231
cagggcucucauugcuaga

SEQ ID NO: 1474813 - RNA, 19 nt, Artificial Sequence
  Description of Artificial Sequence: Synthetic oligonucleotide
  Antisense strand to SEQ ID NO: 1474812
ucuagcaaugagagcccug

SEQ ID NO: 1474814 - RNA, 19 nt, Artificial Sequence
  Description of Artificial Sequence: Synthetic oligonucleotide
  Sense strand starting at position 3761 of SEQ ID NO: 1244231
gggcucucauugcuagaac

SEQ ID NO: 1474815 - RNA, 19 nt, Artificial Sequence
  Description of Artificial Sequence: Synthetic oligonucleotide
  Antisense strand to SEQ ID NO: 1474814
guucuagcaaugagagccc

SEQ ID NO: 1474816 - RNA, 19 nt, Artificial Sequence
  Description of Artificial Sequence: Synthetic oligonucleotide
  Sense strand starting at position 3764 of SEQ ID NO: 1244231
cucucauugcuagaacuag

SEQ ID NO: 1474817 - RNA, 19 nt, Artificial Sequence
  Description of Artificial Sequence: Synthetic oligonucleotide
  Antisense strand to SEQ ID NO: 1474816
cuaguucuagcaaugagag

SEQ ID NO: 1474818 - RNA, 19 nt, Artificial Sequence
  Description of Artificial Sequence: Synthetic oligonucleotide
  Sense strand starting at position 3819 of SEQ ID NO: 1244231
augauagcauccuuaaaug

SEQ ID NO: 1474819 - RNA, 19 nt, Artificial Sequence
  Description of Artificial Sequence: Synthetic oligonucleotide
  Antisense strand to SEQ ID NO: 1474818
cauuuaaggaugcuaucau

SEQ ID NO: 1474820 - RNA, 19 nt, Artificial Sequence
  Description of Artificial Sequence: Synthetic oligonucleotide
  Sense strand starting at position 69 of SEQ ID NO: 1244232
aagaauagauugcugguua

SEQ ID NO: 1474821 - RNA, 19 nt, Artificial Sequence
  Description of Artificial Sequence: Synthetic oligonucleotide
  Antisense strand to SEQ ID NO: 1474820
uaaccagcaaucuauucuu

SEQ ID NO: 1474822 - RNA, 19 nt, Artificial Sequence
  Description of Artificial Sequence: Synthetic oligonucleotide
  Sense strand starting at position 73 of SEQ ID NO: 1244232
auagauugcugguuaucag

SEQ ID NO: 1474823 - RNA, 19 nt, Artificial Sequence
  Description of Artificial Sequence: Synthetic oligonucleotide
  Antisense strand to SEQ ID NO: 1474822
cugauaaccagcaaucuau

SEQ ID NO: 1474824 - RNA, 19 nt, Artificial Sequence
  Description of Artificial Sequence: Synthetic oligonucleotide
  Sense strand starting at position 74 of SEQ ID NO: 1244232
uagauugcugguuaucaga

SEQ ID NO: 1474825 - RNA, 19 nt, Artificial Sequence
  Description of Artificial Sequence: Synthetic oligonucleotide
  Antisense strand to SEQ ID NO: 1474824
ucugauaaccagcaaucua

SEQ ID NO: 1474826 - RNA, 19 nt, Artificial Sequence
  Description of Artificial Sequence: Synthetic oligonucleotide
  Sense strand starting at position 99 of SEQ ID NO: 1244232
ggagggugccugugggaaa

SEQ ID NO: 1474827 - RNA, 19 nt, Artificial Sequence
  Description of Artificial Sequence: Synthetic oligonucleotide
  Antisense strand to SEQ ID NO: 1474826
uuucccacaggcacccucc

SEQ ID NO: 1474828 - RNA, 19 nt, Artificial Sequence
  Description of Artificial Sequence: Synthetic oligonucleotide
  Sense strand starting at position 126 of SEQ ID NO: 1244232
uggauugacguguacaaau

SEQ ID NO: 1474829 - RNA, 19 nt, Artificial Sequence
  Description of Artificial Sequence: Synthetic oligonucleotide
  Antisense strand to SEQ ID NO: 1474828
auuuguacacgucaaucca

SEQ ID NO: 1474830 - RNA, 19 nt, Artificial Sequence
  Description of Artificial Sequence: Synthetic oligonucleotide
  Sense strand starting at position 128 of SEQ ID NO: 1244232
gauugacguguacaaauau

SEQ ID NO: 1474831 - RNA, 19 nt, Artificial Sequence
  Description of Artificial Sequence: Synthetic oligonucleotide
  Antisense strand to SEQ ID NO: 1474830
auauuuguacacgucaauc

SEQ ID NO: 1474832 - RNA, 19 nt, Artificial Sequence
  Description of Artificial Sequence: Synthetic oligonucleotide
  Sense strand starting at position 181 of SEQ ID NO: 1244232
auaacuguaggaugacuau

SEQ ID NO: 1474833 - RNA, 19 nt, Artificial Sequence
  Description of Artificial Sequence: Synthetic oligonucleotide
  Antisense strand to SEQ ID NO: 1474832
auagucauccuacaguuau

SEQ ID NO: 1474834 - RNA, 19 nt, Artificial Sequence
  Description of Artificial Sequence: Synthetic oligonucleotide
  Sense strand starting at position 281 of SEQ ID NO: 1244232
ugugauggauaauccaauu

SEQ ID NO: 1474835 - RNA, 19 nt, Artificial Sequence
  Description of Artificial Sequence: Synthetic oligonucleotide
  Antisense strand to SEQ ID NO: 1474834
aauuggauuauccaucaca

SEQ ID NO: 1474836 - RNA, 19 nt, Artificial Sequence
  Description of Artificial Sequence: Synthetic oligonucleotide
  Sense strand starting at position 393 of SEQ ID NO: 1244232
ggcacuaauacugagguua

SEQ ID NO: 1474837 - RNA, 19 nt, Artificial Sequence
  Description of Artificial Sequence: Synthetic oligonucleotide
  Antisense strand to SEQ ID NO: 1474836
uaaccucaguauuagugcc

SEQ ID NO: 1474838 - RNA, 19 nt, Artificial Sequence
  Description of Artificial Sequence: Synthetic oligonucleotide
  Sense strand starting at position 413 of SEQ ID NO: 1244232
gaacacuggugucuuagau

SEQ ID NO: 1474839 - RNA, 19 nt, Artificial Sequence
  Description of Artificial Sequence: Synthetic oligonucleotide
  Antisense strand to SEQ ID NO: 1474838
aucuaagacaccaguguuc

SEQ ID NO: 1474840 - RNA, 19 nt, Artificial Sequence
  Description of Artificial Sequence: Synthetic oligonucleotide
  Sense strand starting at position 479 of SEQ ID NO: 1244232
caagaagugcuguauggaa

SEQ ID NO: 1474841 - RNA, 19 nt, Artificial Sequence
  Description of Artificial Sequence: Synthetic oligonucleotide
  Antisense strand to SEQ ID NO: 1474840
uuccauacagcacuucuug

SEQ ID NO: 1474842 - RNA, 19 nt, Artificial Sequence
  Description of Artificial Sequence: Synthetic oligonucleotide
  Sense strand starting at position 481 of SEQ ID NO: 1244232
agaagugcuguauggaaca

SEQ ID NO: 1474843 - RNA, 19 nt, Artificial Sequence
  Description of Artificial Sequence: Synthetic oligonucleotide
  Antisense strand to SEQ ID NO: 1474842
uguuccauacagcacuucu

SEQ ID NO: 1474844 - RNA, 19 nt, Artificial Sequence
  Description of Artificial Sequence: Synthetic oligonucleotide
  Sense strand starting at position 486 of SEQ ID NO: 1244232
ugcuguauggaacacgaaa

SEQ ID NO: 1474845 - RNA, 19 nt, Artificial Sequence
  Description of Artificial Sequence: Synthetic oligonucleotide
  Antisense strand to SEQ ID NO: 1474844
uuucguguuccauacagca

SEQ ID NO: 1474846 - RNA, 19 nt, Artificial Sequence
  Description of Artificial Sequence: Synthetic oligonucleotide
  Sense strand starting at position 528 of SEQ ID NO: 1244232
gugaauacaagaugaguua

SEQ ID NO: 1474847 - RNA, 19 nt, Artificial Sequence
  Description of Artificial Sequence: Synthetic oligonucleotide
  Antisense strand to SEQ ID NO: 1474846
uaacucaucuuguauucac

SEQ ID NO: 1474848 - RNA, 19 nt, Artificial Sequence
  Description of Artificial Sequence: Synthetic oligonucleotide
  Sense strand starting at position 596 of SEQ ID NO: 1244232
cacugacaugcugguacaa

SEQ ID NO: 1474849 - RNA, 19 nt, Artificial Sequence
  Description of Artificial Sequence: Synthetic oligonucleotide
  Antisense strand to SEQ ID NO: 1474848
uuguaccagcaugucagug

SEQ ID NO: 1474850 - RNA, 19 nt, Artificial Sequence
  Description of Artificial Sequence: Synthetic oligonucleotide
  Sense strand starting at position 674 of SEQ ID NO: 1244232
guugaauacuauuccaaga

SEQ ID NO: 1474851 - RNA, 19 nt, Artificial Sequence
  Description of Artificial Sequence: Synthetic oligonucleotide
  Antisense strand to SEQ ID NO: 1474850
ucuuggaauaguauucaac

SEQ ID NO: 1474852 - RNA, 19 nt, Artificial Sequence
  Description of Artificial Sequence: Synthetic oligonucleotide
  Sense strand starting at position 679 of SEQ ID NO: 1244232
auacuauuccaagaggcuu

SEQ ID NO: 1474853 - RNA, 19 nt, Artificial Sequence
  Description of Artificial Sequence: Synthetic oligonucleotide
  Antisense strand to SEQ ID NO: 1474852
aagccucuuggaauaguau

SEQ ID NO: 1474854 - RNA, 19 nt, Artificial Sequence
  Description of Artificial Sequence: Synthetic oligonucleotide
  Sense strand starting at position 717 of SEQ ID NO: 1244232
uugcuccuuggcuagagaa

SEQ ID NO: 1474855 - RNA, 19 nt, Artificial Sequence
  Description of Artificial Sequence: Synthetic oligonucleotide
  Antisense strand to SEQ ID NO: 1474854
uucucuagccaaggagcaa

SEQ ID NO: 1474856 - RNA, 19 nt, Artificial Sequence
  Description of Artificial Sequence: Synthetic oligonucleotide
  Sense strand starting at position 757 of SEQ ID NO: 1244232
aggugcuugcucuaagaaa

SEQ ID NO: 1474857 - RNA, 19 nt, Artificial Sequence
  Description of Artificial Sequence: Synthetic oligonucleotide
  Antisense strand to SEQ ID NO: 1474856
uuucuuagagcaagcaccu

SEQ ID NO: 1474858 - RNA, 19 nt, Artificial Sequence
  Description of Artificial Sequence: Synthetic oligonucleotide
  Sense strand starting at position 903 of SEQ ID NO: 1244232
gagacacaguaucuguaua

SEQ ID NO: 1474859 - RNA, 19 nt, Artificial Sequence
  Description of Artificial Sequence: Synthetic oligonucleotide
  Antisense strand to SEQ ID NO: 1474858
uauacagauacugugucuc

SEQ ID NO: 1474860 - RNA, 19 nt, Artificial Sequence
  Description of Artificial Sequence: Synthetic oligonucleotide
  Sense strand starting at position 916 of SEQ ID NO: 1244232
uguauauuucuaugccuga

SEQ ID NO: 1474861 - RNA, 19 nt, Artificial Sequence
  Description of Artificial Sequence: Synthetic oligonucleotide
  Antisense strand to SEQ ID NO: 1474860
ucaggcauagaaauauaca

SEQ ID NO: 1474862 - RNA, 19 nt, Artificial Sequence
  Description of Artificial Sequence: Synthetic oligonucleotide
  Sense strand starting at position 1024 of SEQ ID NO: 1244232
uaagauaguugacagauuu

SEQ ID NO: 1474863 - RNA, 19 nt, Artificial Sequence
  Description of Artificial Sequence: Synthetic oligonucleotide
  Antisense strand to SEQ ID NO: 1474862
aaaucugucaacuaucuua

SEQ ID NO: 1474864 - RNA, 19 nt, Artificial Sequence
  Description of Artificial Sequence: Synthetic oligonucleotide
  Sense strand starting at position 1122 of SEQ ID NO: 1244232
cuaagaauugguuggaacu

SEQ ID NO: 1474865 - RNA, 19 nt, Artificial Sequence
  Description of Artificial Sequence: Synthetic oligonucleotide
  Antisense strand to SEQ ID NO: 1474864
aguuccaaccaauucuuag

SEQ ID NO: 1474866 - RNA, 19 nt, Artificial Sequence
  Description of Artificial Sequence: Synthetic oligonucleotide
  Sense strand starting at position 1190 of SEQ ID NO: 1244232
caagaaugcugguugauga

SEQ ID NO: 1474867 - RNA, 19 nt, Artificial Sequence
  Description of Artificial Sequence: Synthetic oligonucleotide
  Antisense strand to SEQ ID NO: 1474866
ucaucaaccagcauucuug

SEQ ID NO: 1474868 - RNA, 19 nt, Artificial Sequence
  Description of Artificial Sequence: Synthetic oligonucleotide
  Sense strand starting at position 1984 of SEQ ID NO: 1244232
gguggguuuccaggaagga

SEQ ID NO: 1474869 - RNA, 19 nt, Artificial Sequence
  Description of Artificial Sequence: Synthetic oligonucleotide
  Antisense strand to SEQ ID NO: 1474868
uccuuccuggaaacccacc

SEQ ID NO: 1474870 - RNA, 19 nt, Artificial Sequence
  Description of Artificial Sequence: Synthetic oligonucleotide
  Sense strand starting at position 2323 of SEQ ID NO: 1244232
auacauuaugucugaccuu

SEQ ID NO: 1474871 - RNA, 19 nt, Artificial Sequence
  Description of Artificial Sequence: Synthetic oligonucleotide
  Antisense strand to SEQ ID NO: 1474870
aaggucagacauaauguau

SEQ ID NO: 1474872 - RNA, 19 nt, Artificial Sequence
  Description of Artificial Sequence: Synthetic oligonucleotide
  Sense strand starting at position 2423 of SEQ ID NO: 1244232
uuuguuauagaucaaguga

SEQ ID NO: 1474873 - RNA, 19 nt, Artificial Sequence
  Description of Artificial Sequence: Synthetic oligonucleotide
  Antisense strand to SEQ ID NO: 1474872
ucacuugaucuauaacaaa

SEQ ID NO: 1474874 - RNA, 19 nt, Artificial Sequence
  Description of Artificial Sequence: Synthetic oligonucleotide
  Sense strand starting at position 2434 of SEQ ID NO: 1244232
ucaagugagcaaugaaggu

SEQ ID NO: 1474875 - RNA, 19 nt, Artificial Sequence
  Description of Artificial Sequence: Synthetic oligonucleotide
  Antisense strand to SEQ ID NO: 1474874
accuucauugcucacuuga

SEQ ID NO: 1474876 - RNA, 19 nt, Artificial Sequence
  Description of Artificial Sequence: Synthetic oligonucleotide
  Sense strand starting at position 2438 of SEQ ID NO: 1244232
gugagcaaugaagguuuga

SEQ ID NO: 1474877 - RNA, 19 nt, Artificial Sequence
  Description of Artificial Sequence: Synthetic oligonucleotide
  Antisense strand to SEQ ID NO: 1474876
ucaaaccuucauugcucac

SEQ ID NO: 1474878 - RNA, 19 nt, Artificial Sequence
  Description of Artificial Sequence: Synthetic oligonucleotide
  Sense strand starting at position 2498 of SEQ ID NO: 1244232
aggauauauuccuugccac

SEQ ID NO: 1474879 - RNA, 19 nt, Artificial Sequence
  Description of Artificial Sequence: Synthetic oligonucleotide
  Antisense strand to SEQ ID NO: 1474878
guggcaaggaauauauccu

SEQ ID NO: 1474880 - RNA, 19 nt, Artificial Sequence
  Description of Artificial Sequence: Synthetic oligonucleotide
  Sense strand starting at position 2583 of SEQ ID NO: 1244232
guggacaucuaagucauga

SEQ ID NO: 1474881 - RNA, 19 nt, Artificial Sequence
  Description of Artificial Sequence: Synthetic oligonucleotide
  Antisense strand to SEQ ID NO: 1474880
ucaugacuuagauguccac

SEQ ID NO: 1474882 - RNA, 19 nt, Artificial Sequence
  Description of Artificial Sequence: Synthetic oligonucleotide
  Sense strand starting at position 3105 of SEQ ID NO: 1244232
acacauuaugucugaccuu

SEQ ID NO: 1474883 - RNA, 19 nt, Artificial Sequence
  Description of Artificial Sequence: Synthetic oligonucleotide
  Antisense strand to SEQ ID NO: 1474882
aaggucagacauaaugugu

SEQ ID NO: 1474884 - RNA, 19 nt, Artificial Sequence
  Description of Artificial Sequence: Synthetic oligonucleotide
  Sense strand starting at position 3461 of SEQ ID NO: 1244232
ggcccuuuaccuuaggaau

SEQ ID NO: 1474885 - RNA, 19 nt, Artificial Sequence
  Description of Artificial Sequence: Synthetic oligonucleotide
  Antisense strand to SEQ ID NO: 1474884
auuccuaagguaaagggcc

SEQ ID NO: 1474886 - RNA, 19 nt, Artificial Sequence
  Description of Artificial Sequence: Synthetic oligonucleotide
  Sense strand starting at position 3532 of SEQ ID NO: 1244232
cccaaaccuggauguuaaa

SEQ ID NO: 1474887 - RNA, 19 nt, Artificial Sequence
  Description of Artificial Sequence: Synthetic oligonucleotide
  Antisense strand to SEQ ID NO: 1474886
uuuaacauccagguuuggg

SEQ ID NO: 1474888 - RNA, 19 nt, Artificial Sequence
  Description of Artificial Sequence: Synthetic oligonucleotide
  Sense strand starting at position 3609 of SEQ ID NO: 1244232
gcucuuggguuagcaauuu

SEQ ID NO: 1474889 - RNA, 19 nt, Artificial Sequence
  Description of Artificial Sequence: Synthetic oligonucleotide
  Antisense strand to SEQ ID NO: 1474888
aaauugcuaacccaagagc

SEQ ID NO: 1474890 - RNA, 19 nt, Artificial Sequence
  Description of Artificial Sequence: Synthetic oligonucleotide
  Sense strand starting at position 3753 of SEQ ID NO: 1244232
gcagaaccauguuuccaaa

SEQ ID NO: 1474891 - RNA, 19 nt, Artificial Sequence
  Description of Artificial Sequence: Synthetic oligonucleotide
  Antisense strand to SEQ ID NO: 1474890
uuuggaaacaugguucugc

SEQ ID NO: 1474892 - RNA, 19 nt, Artificial Sequence
  Description of Artificial Sequence: Synthetic oligonucleotide
  Sense strand starting at position 3832 of SEQ ID NO: 1244232
uagaucaaaugagugguua

SEQ ID NO: 1474893 - RNA, 19 nt, Artificial Sequence
  Description of Artificial Sequence: Synthetic oligonucleotide
  Antisense strand to SEQ ID NO: 1474892
uaaccacucauuugaucua

SEQ ID NO: 1474894 - RNA, 19 nt, Artificial Sequence
  Description of Artificial Sequence: Synthetic oligonucleotide
  Sense strand starting at position 3833 of SEQ ID NO: 1244232
agaucaaaugagugguuau

SEQ ID NO: 1474895 - RNA, 19 nt, Artificial Sequence
  Description of Artificial Sequence: Synthetic oligonucleotide
  Antisense strand to SEQ ID NO: 1474894
auaaccacucauuugaucu

SEQ ID NO: 1474896 - RNA, 19 nt, Artificial Sequence
  Description of Artificial Sequence: Synthetic oligonucleotide
  Sense strand starting at position 3836 of SEQ ID NO: 1244232
ucaaaugagugguuauuaa

SEQ ID NO: 1474897 - RNA, 19 nt, Artificial Sequence
  Description of Artificial Sequence: Synthetic oligonucleotide
  Antisense strand to SEQ ID NO: 1474896
uuaauaaccacucauuuga

SEQ ID NO: 1474898 - RNA, 19 nt, Artificial Sequence
  Description of Artificial Sequence: Synthetic oligonucleotide
  Sense strand starting at position 3895 of SEQ ID NO: 1244232
uaaauuuacugggaguauu

SEQ ID NO: 1474899 - RNA, 19 nt, Artificial Sequence
  Description of Artificial Sequence: Synthetic oligonucleotide
  Antisense strand to SEQ ID NO: 1474898
aauacucccaguaaauuua

SEQ ID NO: 1474900 - RNA, 19 nt, Artificial Sequence
  Description of Artificial Sequence: Synthetic oligonucleotide
  Sense strand starting at position 811 of SEQ ID NO: 1244233
aggcccuguggugaguaua

SEQ ID NO: 1474901 - RNA, 19 nt, Artificial Sequence
  Description of Artificial Sequence: Synthetic oligonucleotide
  Antisense strand to SEQ ID NO: 1474900
uauacucaccacagggccu

SEQ ID NO: 1474902 - RNA, 19 nt, Artificial Sequence
  Description of Artificial Sequence: Synthetic oligonucleotide
  Sense strand starting at position 814 of SEQ ID NO: 1244233
cccuguggugaguauauua

SEQ ID NO: 1474903 - RNA, 19 nt, Artificial Sequence
  Description of Artificial Sequence: Synthetic oligonucleotide
  Antisense strand to SEQ ID NO: 1474902
uaauauacucaccacaggg

SEQ ID NO: 1474904 - RNA, 19 nt, Artificial Sequence
  Description of Artificial Sequence: Synthetic oligonucleotide
  Sense strand starting at position 824 of SEQ ID NO: 1244233
aguauauuacauggguuau

SEQ ID NO: 1474905 - RNA, 19 nt, Artificial Sequence
  Description of Artificial Sequence: Synthetic oligonucleotide
  Antisense strand to SEQ ID NO: 1474904
auaacccauguaauauacu

SEQ ID NO: 1474906 - RNA, 19 nt, Artificial Sequence
  Description of Artificial Sequence: Synthetic oligonucleotide
  Sense strand starting at position 825 of SEQ ID NO: 1244233
guauauuacauggguuaug

SEQ ID NO: 1474907 - RNA, 19 nt, Artificial Sequence
  Description of Artificial Sequence: Synthetic oligonucleotide
  Antisense strand to SEQ ID NO: 1474906
cauaacccauguaauauac

SEQ ID NO: 1474908 - RNA, 19 nt, Artificial Sequence
  Description of Artificial Sequence: Synthetic oligonucleotide
  Sense strand starting at position 835 of SEQ ID NO: 1244233
uggguuaugucucuuaaca

SEQ ID NO: 1474909 - RNA, 19 nt, Artificial Sequence
  Description of Artificial Sequence: Synthetic oligonucleotide
  Antisense strand to SEQ ID NO: 1474908
uguuaagagacauaaccca

SEQ ID NO: 1474910 - RNA, 19 nt, Artificial Sequence
  Description of Artificial Sequence: Synthetic oligonucleotide
  Sense strand starting at position 1123 of SEQ ID NO: 1244233
uagggaaguggcuguuuau

SEQ ID NO: 1474911 - RNA, 19 nt, Artificial Sequence
  Description of Artificial Sequence: Synthetic oligonucleotide
  Antisense strand to SEQ ID NO: 1474910
auaaacagccacuucccua

SEQ ID NO: 1474912 - RNA, 19 nt, Artificial Sequence
  Description of Artificial Sequence: Synthetic oligonucleotide
  Sense strand starting at position 1126 of SEQ ID NO: 1244233
ggaaguggcuguuuauuaa

SEQ ID NO: 1474913 - RNA, 19 nt, Artificial Sequence
  Description of Artificial Sequence: Synthetic oligonucleotide
  Antisense strand to SEQ ID NO: 1474912
uuaauaaacagccacuucc

SEQ ID NO: 1474914 - RNA, 19 nt, Artificial Sequence
  Description of Artificial Sequence: Synthetic oligonucleotide
  Sense strand starting at position 1196 of SEQ ID NO: 1244233
ugaagacacugcucaucua

SEQ ID NO: 1474915 - RNA, 19 nt, Artificial Sequence
  Description of Artificial Sequence: Synthetic oligonucleotide
  Antisense strand to SEQ ID NO: 1474914
uagaugagcagugucuuca

SEQ ID NO: 1474916 - RNA, 19 nt, Artificial Sequence
  Description of Artificial Sequence: Synthetic oligonucleotide
  Sense strand starting at position 1251 of SEQ ID NO: 1244233
aaugaaugugauugucugu

SEQ ID NO: 1474917 - RNA, 19 nt, Artificial Sequence
  Description of Artificial Sequence: Synthetic oligonucleotide
  Antisense strand to SEQ ID NO: 1474916
acagacaaucacauucauu

SEQ ID NO: 1474918 - RNA, 19 nt, Artificial Sequence
  Description of Artificial Sequence: Synthetic oligonucleotide
  Sense strand starting at position 1254 of SEQ ID NO: 1244233
gaaugugauugucugucau

SEQ ID NO: 1474919 - RNA, 19 nt, Artificial Sequence
  Description of Artificial Sequence: Synthetic oligonucleotide
  Antisense strand to SEQ ID NO: 1474918
augacagacaaucacauuc

SEQ ID NO: 1474920 - RNA, 19 nt, Artificial Sequence
  Description of Artificial Sequence: Synthetic oligonucleotide
  Sense strand starting at position 1256 of SEQ ID NO: 1244233
augugauugucugucauuu

SEQ ID NO: 1474921 - RNA, 19 nt, Artificial Sequence
  Description of Artificial Sequence: Synthetic oligonucleotide
  Antisense strand to SEQ ID NO: 1474920
aaaugacagacaaucacau

SEQ ID NO: 1474922 - RNA, 19 nt, Artificial Sequence
  Description of Artificial Sequence: Synthetic oligonucleotide
  Sense strand starting at position 1265 of SEQ ID NO: 1244233
ucugucauuuccuagaaga

SEQ ID NO: 1474923 - RNA, 19 nt, Artificial Sequence
  Description of Artificial Sequence: Synthetic oligonucleotide
  Antisense strand to SEQ ID NO: 1474922
ucuucuaggaaaugacaga

SEQ ID NO: 1474924 - RNA, 19 nt, Artificial Sequence
  Description of Artificial Sequence: Synthetic oligonucleotide
  Sense strand starting at position 1398 of SEQ ID NO: 1244233
ugacaaauaucacaaggag

SEQ ID NO: 1474925 - RNA, 19 nt, Artificial Sequence
  Description of Artificial Sequence: Synthetic oligonucleotide
  Antisense strand to SEQ ID NO: 1474924
cuccuugugauauuuguca

SEQ ID NO: 1474926 - RNA, 19 nt, Artificial Sequence
  Description of Artificial Sequence: Synthetic oligonucleotide
  Sense strand starting at position 1995 of SEQ ID NO: 1244233
uuucuagaagaaugagguu

SEQ ID NO: 1474927 - RNA, 19 nt, Artificial Sequence
  Description of Artificial Sequence: Synthetic oligonucleotide
  Antisense strand to SEQ ID NO: 1474926
aaccucauucuucuagaaa

SEQ ID NO: 1474928 - RNA, 19 nt, Artificial Sequence
  Description of Artificial Sequence: Synthetic oligonucleotide
  Sense strand starting at position 2010 of SEQ ID NO: 1244233
gguucucaaguuuggaagu

SEQ ID NO: 1474929 - RNA, 19 nt, Artificial Sequence
  Description of Artificial Sequence: Synthetic oligonucleotide
  Antisense strand to SEQ ID NO: 1474928
acuuccaaacuugagaacc

SEQ ID NO: 1474930 - RNA, 19 nt, Artificial Sequence
  Description of Artificial Sequence: Synthetic oligonucleotide
  Sense strand starting at position 2437 of SEQ ID NO: 1244233
uagucugugggucauuauu

SEQ ID NO: 1474931 - RNA, 19 nt, Artificial Sequence
  Description of Artificial Sequence: Synthetic oligonucleotide
  Antisense strand to SEQ ID NO: 1474930
aauaaugacccacagacua

SEQ ID NO: 1474932 - RNA, 19 nt, Artificial Sequence
  Description of Artificial Sequence: Synthetic oligonucleotide
  Sense strand starting at position 2439 of SEQ ID NO: 1244233
gucugugggucauuauuaa

SEQ ID NO: 1474933 - RNA, 19 nt, Artificial Sequence
  Description of Artificial Sequence: Synthetic oligonucleotide
  Antisense strand to SEQ ID NO: 1474932
uuaauaaugacccacagac

SEQ ID NO: 1474934 - RNA, 19 nt, Artificial Sequence
  Description of Artificial Sequence: Synthetic oligonucleotide
  Sense strand starting at position 2446 of SEQ ID NO: 1244233
ggucauuauuaagcaauaa

SEQ ID NO: 1474935 - RNA, 19 nt, Artificial Sequence
  Description of Artificial Sequence: Synthetic oligonucleotide
  Antisense strand to SEQ ID NO: 1474934
uuauugcuuaauaaugacc

SEQ ID NO: 1474936 - RNA, 19 nt, Artificial Sequence
  Description of Artificial Sequence: Synthetic oligonucleotide
  Sense strand starting at position 2494 of SEQ ID NO: 1244233
cuuggugaccucuacacua

SEQ ID NO: 1474937 - RNA, 19 nt, Artificial Sequence
  Description of Artificial Sequence: Synthetic oligonucleotide
  Antisense strand to SEQ ID NO: 1474936
uaguguagaggucaccaag

SEQ ID NO: 1474938 - RNA, 19 nt, Artificial Sequence
  Description of Artificial Sequence: Synthetic oligonucleotide
  Sense strand starting at position 2496 of SEQ ID NO: 1244233
uggugaccucuacacuauu

SEQ ID NO: 1474939 - RNA, 19 nt, Artificial Sequence
  Description of Artificial Sequence: Synthetic oligonucleotide
  Antisense strand to SEQ ID NO: 1474938
aauaguguagaggucacca

SEQ ID NO: 1474940 - RNA, 19 nt, Artificial Sequence
  Description of Artificial Sequence: Synthetic oligonucleotide
  Sense strand starting at position 2514 of SEQ ID NO: 1244233
ugaaauggguuucccugaa

SEQ ID NO: 1474941 - RNA, 19 nt, Artificial Sequence
  Description of Artificial Sequence: Synthetic oligonucleotide
  Antisense strand to SEQ ID NO: 1474940
uucagggaaacccauuuca

SEQ ID NO: 1474942 - RNA, 19 nt, Artificial Sequence
  Description of Artificial Sequence: Synthetic oligonucleotide
  Sense strand starting at position 2518 of SEQ ID NO: 1244233
auggguuucccugaauguu

SEQ ID NO: 1474943 - RNA, 19 nt, Artificial Sequence
  Description of Artificial Sequence: Synthetic oligonucleotide
  Antisense strand to SEQ ID NO: 1474942
aacauucagggaaacccau

SEQ ID NO: 1474944 - RNA, 19 nt, Artificial Sequence
  Description of Artificial Sequence: Synthetic oligonucleotide
  Sense strand starting at position 2547 of SEQ ID NO: 1244233
ggucauauuccauauccuu

SEQ ID NO: 1474945 - RNA, 19 nt, Artificial Sequence
  Description of Artificial Sequence: Synthetic oligonucleotide
  Antisense strand to SEQ ID NO: 1474944
aaggauauggaauaugacc

SEQ ID NO: 1474946 - RNA, 19 nt, Artificial Sequence
  Description of Artificial Sequence: Synthetic oligonucleotide
  Sense strand starting at position 2590 of SEQ ID NO: 1244233
augggucaguuucuuaaau

SEQ ID NO: 1474947 - RNA, 19 nt, Artificial Sequence
  Description of Artificial Sequence: Synthetic oligonucleotide
  Antisense strand to SEQ ID NO: 1474946
auuuaagaaacugacccau

SEQ ID NO: 1474948 - RNA, 19 nt, Artificial Sequence
  Description of Artificial Sequence: Synthetic oligonucleotide
  Sense strand starting at position 2591 of SEQ ID NO: 1244233
ugggucaguuucuuaaauu

SEQ ID NO: 1474949 - RNA, 19 nt, Artificial Sequence
  Description of Artificial Sequence: Synthetic oligonucleotide
  Antisense strand to SEQ ID NO: 1474948
aauuuaagaaacugaccca

SEQ ID NO: 1474950 - RNA, 19 nt, Artificial Sequence
  Description of Artificial Sequence: Synthetic oligonucleotide
  Sense strand starting at position 2717 of SEQ ID NO: 1244233
ccucuaacugucuguuaac

SEQ ID NO: 1474951 - RNA, 19 nt, Artificial Sequence
  Description of Artificial Sequence: Synthetic oligonucleotide
  Antisense strand to SEQ ID NO: 1474950
guuaacagacaguuagagg

SEQ ID NO: 1474952 - RNA, 19 nt, Artificial Sequence
  Description of Artificial Sequence: Synthetic oligonucleotide
  Sense strand starting at position 2718 of SEQ ID NO: 1244233
cucuaacugucuguuaaca

SEQ ID NO: 1474953 - RNA, 19 nt, Artificial Sequence
  Description of Artificial Sequence: Synthetic oligonucleotide
  Antisense strand to SEQ ID NO: 1474952
uguuaacagacaguuagag

SEQ ID NO: 1474954 - RNA, 19 nt, Artificial Sequence
  Description of Artificial Sequence: Synthetic oligonucleotide
  Sense strand starting at position 2848 of SEQ ID NO: 1244233
ucccuaacacuguguaaca

SEQ ID NO: 1474955 - RNA, 19 nt, Artificial Sequence
  Description of Artificial Sequence: Synthetic oligonucleotide
  Antisense strand to SEQ ID NO: 1474954
uguuacacaguguuaggga

SEQ ID NO: 1474956 - RNA, 19 nt, Artificial Sequence
  Description of Artificial Sequence: Synthetic oligonucleotide
  Sense strand starting at position 2859 of SEQ ID NO: 1244233
guguaacaccuguauaaua

SEQ ID NO: 1474957 - RNA, 19 nt, Artificial Sequence
  Description of Artificial Sequence: Synthetic oligonucleotide
  Antisense strand to SEQ ID NO: 1474956
uauuauacagguguuacac

SEQ ID NO: 1474958 - RNA, 19 nt, Artificial Sequence
  Description of Artificial Sequence: Synthetic oligonucleotide
  Sense strand starting at position 2861 of SEQ ID NO: 1244233
guaacaccuguauaauacu

SEQ ID NO: 1474959 - RNA, 19 nt, Artificial Sequence
  Description of Artificial Sequence: Synthetic oligonucleotide
  Antisense strand to SEQ ID NO: 1474958
aguauuauacagguguuac

SEQ ID NO: 1474960 - RNA, 19 nt, Artificial Sequence
  Description of Artificial Sequence: Synthetic oligonucleotide
  Sense strand starting at position 2914 of SEQ ID NO: 1244233
gcaugaugugcuuaauaua

SEQ ID NO: 1474961 - RNA, 19 nt, Artificial Sequence
  Description of Artificial Sequence: Synthetic oligonucleotide
  Antisense strand to SEQ ID NO: 1474960
uauauuaagcacaucaugc

SEQ ID NO: 1474962 - RNA, 19 nt, Artificial Sequence
  Description of Artificial Sequence: Synthetic oligonucleotide
  Sense strand starting at position 2939 of SEQ ID NO: 1244233
acucaagcucagugaaauu

SEQ ID NO: 1474963 - RNA, 19 nt, Artificial Sequence
  Description of Artificial Sequence: Synthetic oligonucleotide
  Antisense strand to SEQ ID NO: 1474962
aauuucacugagcuugagu

SEQ ID NO: 1474964 - RNA, 19 nt, Artificial Sequence
  Description of Artificial Sequence: Synthetic oligonucleotide
  Sense strand starting at position 2978 of SEQ ID NO: 1244233
cagauugacguauaauauu

SEQ ID NO: 1474965 - RNA, 19 nt, Artificial Sequence
  Description of Artificial Sequence: Synthetic oligonucleotide
  Antisense strand to SEQ ID NO: 1474964
aauauuauacgucaaucug

SEQ ID NO: 1474966 - RNA, 19 nt, Artificial Sequence
  Description of Artificial Sequence: Synthetic oligonucleotide
  Sense strand starting at position 3137 of SEQ ID NO: 1244233
agaauacaguauguacaau

SEQ ID NO: 1474967 - RNA, 19 nt, Artificial Sequence
  Description of Artificial Sequence: Synthetic oligonucleotide
  Antisense strand to SEQ ID NO: 1474966
auuguacauacuguauucu

SEQ ID NO: 1474968 - RNA, 19 nt, Artificial Sequence
  Description of Artificial Sequence: Synthetic oligonucleotide
  Sense strand starting at position 3174 of SEQ ID NO: 1244233
gucacuaugcuauacagua

SEQ ID NO: 1474969 - RNA, 19 nt, Artificial Sequence
  Description of Artificial Sequence: Synthetic oligonucleotide
  Antisense strand to SEQ ID NO: 1474968
uacuguauagcauagugac

SEQ ID NO: 1474970 - RNA, 19 nt, Artificial Sequence
  Description of Artificial Sequence: Synthetic oligonucleotide
  Sense strand starting at position 3338 of SEQ ID NO: 1244233
gcgaucaugugagugagau

SEQ ID NO: 1474971 - RNA, 19 nt, Artificial Sequence
  Description of Artificial Sequence: Synthetic oligonucleotide
  Antisense strand to SEQ ID NO: 1474970
aucucacucacaugaucgc

SEQ ID NO: 1474972 - RNA, 19 nt, Artificial Sequence
  Description of Artificial Sequence: Synthetic oligonucleotide
  Sense strand starting at position 3339 of SEQ ID NO: 1244233
cgaucaugugagugagauc

SEQ ID NO: 1474973 - RNA, 19 nt, Artificial Sequence
  Description of Artificial Sequence: Synthetic oligonucleotide
  Antisense strand to SEQ ID NO: 1474972
gaucucacucacaugaucg

SEQ ID NO: 1474974 - RNA, 19 nt, Artificial Sequence
  Description of Artificial Sequence: Synthetic oligonucleotide
  Sense strand starting at position 3366 of SEQ ID NO: 1244233
ucugucuuucuaugacuga

SEQ ID NO: 1474975 - RNA, 19 nt, Artificial Sequence
  Description of Artificial Sequence: Synthetic oligonucleotide
  Antisense strand to SEQ ID NO: 1474974
ucagucauagaaagacaga

SEQ ID NO: 1474976 - RNA, 19 nt, Artificial Sequence
  Description of Artificial Sequence: Synthetic oligonucleotide
  Sense strand starting at position 3464 of SEQ ID NO: 1244233
auaguauugcacugaguau

SEQ ID NO: 1474977 - RNA, 19 nt, Artificial Sequence
  Description of Artificial Sequence: Synthetic oligonucleotide
  Antisense strand to SEQ ID NO: 1474976
auacucagugcaauacuau

SEQ ID NO: 1474978 - RNA, 19 nt, Artificial Sequence
  Description of Artificial Sequence: Synthetic oligonucleotide
  Sense strand starting at position 3633 of SEQ ID NO: 1244233
agaaguggauugcuggaua

SEQ ID NO: 1474979 - RNA, 19 nt, Artificial Sequence
  Description of Artificial Sequence: Synthetic oligonucleotide
  Antisense strand to SEQ ID NO: 1474978
uauccagcaauccacuucu

SEQ ID NO: 1474980 - RNA, 19 nt, Artificial Sequence
  Description of Artificial Sequence: Synthetic oligonucleotide
  Sense strand starting at position 212 of SEQ ID NO: 1244234
uggaguuuauaggccauau

SEQ ID NO: 1474981 - RNA, 19 nt, Artificial Sequence
  Description of Artificial Sequence: Synthetic oligonucleotide
  Antisense strand to SEQ ID NO: 1474980
auauggccuauaaacucca

SEQ ID NO: 1474982 - RNA, 19 nt, Artificial Sequence
  Description of Artificial Sequence: Synthetic oligonucleotide
  Sense strand starting at position 475 of SEQ ID NO: 1244234
guuguuaauggauggagau

SEQ ID NO: 1474983 - RNA, 19 nt, Artificial Sequence
  Description of Artificial Sequence: Synthetic oligonucleotide
  Antisense strand to SEQ ID NO: 1474982
aucuccauccauuaacaac

SEQ ID NO: 1474984 - RNA, 19 nt, Artificial Sequence
  Description of Artificial Sequence: Synthetic oligonucleotide
  Sense strand starting at position 476 of SEQ ID NO: 1244234
uuguuaauggauggagaug

SEQ ID NO: 1474985 - RNA, 19 nt, Artificial Sequence
  Description of Artificial Sequence: Synthetic oligonucleotide
  Antisense strand to SEQ ID NO: 1474984
caucuccauccauuaacaa

SEQ ID NO: 1474986 - RNA, 19 nt, Artificial Sequence
  Description of Artificial Sequence: Synthetic oligonucleotide
  Sense strand starting at position 792 of SEQ ID NO: 1244234
uggaaacauccauguauug

SEQ ID NO: 1474987 - RNA, 19 nt, Artificial Sequence
  Description of Artificial Sequence: Synthetic oligonucleotide
  Antisense strand to SEQ ID NO: 1474986
caauacauggauguuucca

SEQ ID NO: 1474988 - RNA, 19 nt, Artificial Sequence
  Description of Artificial Sequence: Synthetic oligonucleotide
  Sense strand starting at position 860 of SEQ ID NO: 1244234
agaauaggauucguucagu

SEQ ID NO: 1474989 - RNA, 19 nt, Artificial Sequence
  Description of Artificial Sequence: Synthetic oligonucleotide
  Antisense strand to SEQ ID NO: 1474988
acugaacgaauccuauucu

SEQ ID NO: 1474990 - RNA, 19 nt, Artificial Sequence
  Description of Artificial Sequence: Synthetic oligonucleotide
  Sense strand starting at position 866 of SEQ ID NO: 1244234
ggauucguucaguuguguu

SEQ ID NO: 1474991 - RNA, 19 nt, Artificial Sequence
  Description of Artificial Sequence: Synthetic oligonucleotide
  Antisense strand to SEQ ID NO: 1474990
aacacaacugaacgaaucc

SEQ ID NO: 1474992 - RNA, 19 nt, Artificial Sequence
  Description of Artificial Sequence: Synthetic oligonucleotide
  Sense strand starting at position 890 of SEQ ID NO: 1244234
uggaauuucucaggaacua

SEQ ID NO: 1474993 - RNA, 19 nt, Artificial Sequence
  Description of Artificial Sequence: Synthetic oligonucleotide
  Antisense strand to SEQ ID NO: 1474992
uaguuccugagaaauucca

SEQ ID NO: 1474994 - RNA, 19 nt, Artificial Sequence
  Description of Artificial Sequence: Synthetic oligonucleotide
  Sense strand starting at position 942 of SEQ ID NO: 1244234
auuguauuucuaugcgaca

SEQ ID NO: 1474995 - RNA, 19 nt, Artificial Sequence
  Description of Artificial Sequence: Synthetic oligonucleotide
  Antisense strand to SEQ ID NO: 1474994
ugucgcauagaaauacaau

SEQ ID NO: 1474996 - RNA, 19 nt, Artificial Sequence
  Description of Artificial Sequence: Synthetic oligonucleotide
  Sense strand starting at position 943 of SEQ ID NO: 1244234
uuguauuucuaugcgacaa

SEQ ID NO: 1474997 - RNA, 19 nt, Artificial Sequence
  Description of Artificial Sequence: Synthetic oligonucleotide
  Antisense strand to SEQ ID NO: 1474996
uugucgcauagaaauacaa

SEQ ID NO: 1474998 - RNA, 19 nt, Artificial Sequence
  Description of Artificial Sequence: Synthetic oligonucleotide
  Sense strand starting at position 998 of SEQ ID NO: 1244234
acagaaacauugcuguaaa

SEQ ID NO: 1474999 - RNA, 19 nt, Artificial Sequence
  Description of Artificial Sequence: Synthetic oligonucleotide
  Antisense strand to SEQ ID NO: 1474998
uuuacagcaauguuucugu

SEQ ID NO: 1475000 - RNA, 19 nt, Artificial Sequence
  Description of Artificial Sequence: Synthetic oligonucleotide
  Sense strand starting at position 1075 of SEQ ID NO: 1244234
cgaguuacccugcaagaau

SEQ ID NO: 1475001 - RNA, 19 nt, Artificial Sequence
  Description of Artificial Sequence: Synthetic oligonucleotide
  Antisense strand to SEQ ID NO: 1475000
auucuugcaggguaacucg

SEQ ID NO: 1475002 - RNA, 19 nt, Artificial Sequence
  Description of Artificial Sequence: Synthetic oligonucleotide
  Sense strand starting at position 1230 of SEQ ID NO: 1244234
gauguauagccaggacaua

SEQ ID NO: 1475003 - RNA, 19 nt, Artificial Sequence
  Description of Artificial Sequence: Synthetic oligonucleotide
  Antisense strand to SEQ ID NO: 1475002
uauguccuggcuauacauc

SEQ ID NO: 1475004 - RNA, 19 nt, Artificial Sequence
  Description of Artificial Sequence: Synthetic oligonucleotide
  Sense strand starting at position 1231 of SEQ ID NO: 1244234
auguauagccaggacauau

SEQ ID NO: 1475005 - RNA, 19 nt, Artificial Sequence
  Description of Artificial Sequence: Synthetic oligonucleotide
  Antisense strand to SEQ ID NO: 1475004
auauguccuggcuauacau

SEQ ID NO: 1475006 - RNA, 19 nt, Artificial Sequence
  Description of Artificial Sequence: Synthetic oligonucleotide
  Sense strand starting at position 1253 of SEQ ID NO: 1244234
cuagauauauguccaggau

SEQ ID NO: 1475007 - RNA, 19 nt, Artificial Sequence
  Description of Artificial Sequence: Synthetic oligonucleotide
  Antisense strand to SEQ ID NO: 1475006
auccuggacauauaucuag

SEQ ID NO: 1475008 - RNA, 19 nt, Artificial Sequence
  Description of Artificial Sequence: Synthetic oligonucleotide
  Sense strand starting at position 1301 of SEQ ID NO: 1244234
uucugaguuguuuaugaga

SEQ ID NO: 1475009 - RNA, 19 nt, Artificial Sequence
  Description of Artificial Sequence: Synthetic oligonucleotide
  Antisense strand to SEQ ID NO: 1475008
ucucauaaacaacucagaa

SEQ ID NO: 1475010 - RNA, 19 nt, Artificial Sequence
  Description of Artificial Sequence: Synthetic oligonucleotide
  Sense strand starting at position 1998 of SEQ ID NO: 1244234
cauggugucagaggguaaa

SEQ ID NO: 1475011 - RNA, 19 nt, Artificial Sequence
  Description of Artificial Sequence: Synthetic oligonucleotide
  Antisense strand to SEQ ID NO: 1475010
uuuacccucugacaccaug

SEQ ID NO: 1475012 - RNA, 19 nt, Artificial Sequence
  Description of Artificial Sequence: Synthetic oligonucleotide
  Sense strand starting at position 2025 of SEQ ID NO: 1244234
guggguuuccaagagagug

SEQ ID NO: 1475013 - RNA, 19 nt, Artificial Sequence
  Description of Artificial Sequence: Synthetic oligonucleotide
  Antisense strand to SEQ ID NO: 1475012
cacucucuuggaaacccac

SEQ ID NO: 1475014 - RNA, 19 nt, Artificial Sequence
  Description of Artificial Sequence: Synthetic oligonucleotide
  Sense strand starting at position 2030 of SEQ ID NO: 1244234
uuuccaagagagugaguuu

SEQ ID NO: 1475015 - RNA, 19 nt, Artificial Sequence
  Description of Artificial Sequence: Synthetic oligonucleotide
  Antisense strand to SEQ ID NO: 1475014
aaacucacucucuuggaaa

SEQ ID NO: 1475016 - RNA, 19 nt, Artificial Sequence
  Description of Artificial Sequence: Synthetic oligonucleotide
  Sense strand starting at position 2096 of SEQ ID NO: 1244234
ugaggagccuuugugauua

SEQ ID NO: 1475017 - RNA, 19 nt, Artificial Sequence
  Description of Artificial Sequence: Synthetic oligonucleotide
  Antisense strand to SEQ ID NO: 1475016
uaaucacaaaggcuccuca

SEQ ID NO: 1475018 - RNA, 19 nt, Artificial Sequence
  Description of Artificial Sequence: Synthetic oligonucleotide
  Sense strand starting at position 2100 of SEQ ID NO: 1244234
gagccuuugugauuaugag

SEQ ID NO: 1475019 - RNA, 19 nt, Artificial Sequence
  Description of Artificial Sequence: Synthetic oligonucleotide
  Antisense strand to SEQ ID NO: 1475018
cucauaaucacaaaggcuc

SEQ ID NO: 1475020 - RNA, 19 nt, Artificial Sequence
  Description of Artificial Sequence: Synthetic oligonucleotide
  Sense strand starting at position 2101 of SEQ ID NO: 1244234
agccuuugugauuaugaga

SEQ ID NO: 1475021 - RNA, 19 nt, Artificial Sequence
  Description of Artificial Sequence: Synthetic oligonucleotide
  Antisense strand to SEQ ID NO: 1475020
ucucauaaucacaaaggcu

SEQ ID NO: 1475022 - RNA, 19 nt, Artificial Sequence
  Description of Artificial Sequence: Synthetic oligonucleotide
  Sense strand starting at position 2114 of SEQ ID NO: 1244234
augagaagauuguuuccuu

SEQ ID NO: 1475023 - RNA, 19 nt, Artificial Sequence
  Description of Artificial Sequence: Synthetic oligonucleotide
  Antisense strand to SEQ ID NO: 1475022
aaggaaacaaucuucucau

SEQ ID NO: 1475024 - RNA, 19 nt, Artificial Sequence
  Description of Artificial Sequence: Synthetic oligonucleotide
  Sense strand starting at position 2117 of SEQ ID NO: 1244234
agaagauuguuuccuuguu

SEQ ID NO: 1475025 - RNA, 19 nt, Artificial Sequence
  Description of Artificial Sequence: Synthetic oligonucleotide
  Antisense strand to SEQ ID NO: 1475024
aacaaggaaacaaucuucu

SEQ ID NO: 1475026 - RNA, 19 nt, Artificial Sequence
  Description of Artificial Sequence: Synthetic oligonucleotide
  Sense strand starting at position 2301 of SEQ ID NO: 1244234
cuggguaucaugugacaug

SEQ ID NO: 1475027 - RNA, 19 nt, Artificial Sequence
  Description of Artificial Sequence: Synthetic oligonucleotide
  Antisense strand to SEQ ID NO: 1475026
caugucacaugauacccag

SEQ ID NO: 1475028 - RNA, 19 nt, Artificial Sequence
  Description of Artificial Sequence: Synthetic oligonucleotide
  Sense strand starting at position 2339 of SEQ ID NO: 1244234
ucuguuucucaucaugaua

SEQ ID NO: 1475029 - RNA, 19 nt, Artificial Sequence
  Description of Artificial Sequence: Synthetic oligonucleotide
  Antisense strand to SEQ ID NO: 1475028
uaucaugaugagaaacaga

SEQ ID NO: 1475030 - RNA, 19 nt, Artificial Sequence
  Description of Artificial Sequence: Synthetic oligonucleotide
  Sense strand starting at position 2373 of SEQ ID NO: 1244234
uucugauugggcuaagauc

SEQ ID NO: 1475031 - RNA, 19 nt, Artificial Sequence
  Description of Artificial Sequence: Synthetic oligonucleotide
  Antisense strand to SEQ ID NO: 1475030
gaucuuagcccaaucagaa

SEQ ID NO: 1475032 - RNA, 19 nt, Artificial Sequence
  Description of Artificial Sequence: Synthetic oligonucleotide
  Sense strand starting at position 2382 of SEQ ID NO: 1244234
ggcuaagaucucuagugga

SEQ ID NO: 1475033 - RNA, 19 nt, Artificial Sequence
  Description of Artificial Sequence: Synthetic oligonucleotide
  Antisense strand to SEQ ID NO: 1475032
uccacuagagaucuuagcc

SEQ ID NO: 1475034 - RNA, 19 nt, Artificial Sequence
  Description of Artificial Sequence: Synthetic oligonucleotide
  Sense strand starting at position 2397 of SEQ ID NO: 1244234
uggagaaaugcauguguca

SEQ ID NO: 1475035 - RNA, 19 nt, Artificial Sequence
  Description of Artificial Sequence: Synthetic oligonucleotide
  Antisense strand to SEQ ID NO: 1475034
ugacacaugcauuucucca

SEQ ID NO: 1475036 - RNA, 19 nt, Artificial Sequence
  Description of Artificial Sequence: Synthetic oligonucleotide
  Sense strand starting at position 2400 of SEQ ID NO: 1244234
agaaaugcaugugucaauc

SEQ ID NO: 1475037 - RNA, 19 nt, Artificial Sequence
  Description of Artificial Sequence: Synthetic oligonucleotide
  Antisense strand to SEQ ID NO: 1475036
gauugacacaugcauuucu

SEQ ID NO: 1475038 - RNA, 19 nt, Artificial Sequence
  Description of Artificial Sequence: Synthetic oligonucleotide
  Sense strand starting at position 2577 of SEQ ID NO: 1244234
ccuugaaacaguuaguagu

SEQ ID NO: 1475039 - RNA, 19 nt, Artificial Sequence
  Description of Artificial Sequence: Synthetic oligonucleotide
  Antisense strand to SEQ ID NO: 1475038
acuacuaacuguuucaagg

SEQ ID NO: 1475040 - RNA, 19 nt, Artificial Sequence
  Description of Artificial Sequence: Synthetic oligonucleotide
  Sense strand starting at position 2588 of SEQ ID NO: 1244234
uuaguagugacucacuguu

SEQ ID NO: 1475041 - RNA, 19 nt, Artificial Sequence
  Description of Artificial Sequence: Synthetic oligonucleotide
  Antisense strand to SEQ ID NO: 1475040
aacagugagucacuacuaa

SEQ ID NO: 1475042 - RNA, 19 nt, Artificial Sequence
  Description of Artificial Sequence: Synthetic oligonucleotide
  Sense strand starting at position 2594 of SEQ ID NO: 1244234
gugacucacuguuucuaag

SEQ ID NO: 1475043 - RNA, 19 nt, Artificial Sequence
  Description of Artificial Sequence: Synthetic oligonucleotide
  Antisense strand to SEQ ID NO: 1475042
cuuagaaacagugagucac

SEQ ID NO: 1475044 - RNA, 19 nt, Artificial Sequence
  Description of Artificial Sequence: Synthetic oligonucleotide
  Sense strand starting at position 2596 of SEQ ID NO: 1244234
gacucacuguuucuaagga

SEQ ID NO: 1475045 - RNA, 19 nt, Artificial Sequence
  Description of Artificial Sequence: Synthetic oligonucleotide
  Antisense strand to SEQ ID NO: 1475044
uccuuagaaacagugaguc

SEQ ID NO: 1475046 - RNA, 19 nt, Artificial Sequence
  Description of Artificial Sequence: Synthetic oligonucleotide
  Sense strand starting at position 2672 of SEQ ID NO: 1244234
aguagaguaauguggauca

SEQ ID NO: 1475047 - RNA, 19 nt, Artificial Sequence
  Description of Artificial Sequence: Synthetic oligonucleotide
  Antisense strand to SEQ ID NO: 1475046
ugauccacauuacucuacu

SEQ ID NO: 1475048 - RNA, 19 nt, Artificial Sequence
  Description of Artificial Sequence: Synthetic oligonucleotide
  Sense strand starting at position 2677 of SEQ ID NO: 1244234
aguaauguggaucauaguu

SEQ ID NO: 1475049 - RNA, 19 nt, Artificial Sequence
  Description of Artificial Sequence: Synthetic oligonucleotide
  Antisense strand to SEQ ID NO: 1475048
aacuaugauccacauuacu

SEQ ID NO: 1475050 - RNA, 19 nt, Artificial Sequence
  Description of Artificial Sequence: Synthetic oligonucleotide
  Sense strand starting at position 2714 of SEQ ID NO: 1244234
auaucaaauguguaauggu

SEQ ID NO: 1475051 - RNA, 19 nt, Artificial Sequence
  Description of Artificial Sequence: Synthetic oligonucleotide
  Antisense strand to SEQ ID NO: 1475050
accauuacacauuugauau

SEQ ID NO: 1475052 - RNA, 19 nt, Artificial Sequence
  Description of Artificial Sequence: Synthetic oligonucleotide
  Sense strand starting at position 2728 of SEQ ID NO: 1244234
augguuaugcuuuauugac

SEQ ID NO: 1475053 - RNA, 19 nt, Artificial Sequence
  Description of Artificial Sequence: Synthetic oligonucleotide
  Antisense strand to SEQ ID NO: 1475052
gucaauaaagcauaaccau

SEQ ID NO: 1475054 - RNA, 19 nt, Artificial Sequence
  Description of Artificial Sequence: Synthetic oligonucleotide
  Sense strand starting at position 3916 of SEQ ID NO: 1244234
ucacaugaucaugguucua

SEQ ID NO: 1475055 - RNA, 19 nt, Artificial Sequence
  Description of Artificial Sequence: Synthetic oligonucleotide
  Antisense strand to SEQ ID NO: 1475054
uagaaccaugaucauguga

SEQ ID NO: 1475056 - RNA, 19 nt, Artificial Sequence
  Description of Artificial Sequence: Synthetic oligonucleotide
  Sense strand starting at position 3918 of SEQ ID NO: 1244234
acaugaucaugguucuaaa

SEQ ID NO: 1475057 - RNA, 19 nt, Artificial Sequence
  Description of Artificial Sequence: Synthetic oligonucleotide
  Antisense strand to SEQ ID NO: 1475056
uuuagaaccaugaucaugu

SEQ ID NO: 1475058 - RNA, 19 nt, Artificial Sequence
  Description of Artificial Sequence: Synthetic oligonucleotide
  Sense strand starting at position 3935 of SEQ ID NO: 1244234
aauaaagggucuucuuuag

SEQ ID NO: 1475059 - RNA, 19 nt, Artificial Sequence
  Description of Artificial Sequence: Synthetic oligonucleotide
  Antisense strand to SEQ ID NO: 1475058
cuaaagaagacccuuuauu

SEQ ID NO: 1475060 - RNA, 19 nt, Artificial Sequence
  Description of Artificial Sequence: Synthetic oligonucleotide
  Sense strand starting at position 476 of SEQ ID NO: 1244235
ucagccuuucuggguuuau

SEQ ID NO: 1475061 - RNA, 19 nt, Artificial Sequence
  Description of Artificial Sequence: Synthetic oligonucleotide
  Antisense strand to SEQ ID NO: 1475060
auaaacccagaaaggcuga

SEQ ID NO: 1475062 - RNA, 19 nt, Artificial Sequence
  Description of Artificial Sequence: Synthetic oligonucleotide
  Sense strand starting at position 477 of SEQ ID NO: 1244235
cagccuuucuggguuuaua

SEQ ID NO: 1475063 - RNA, 19 nt, Artificial Sequence
  Description of Artificial Sequence: Synthetic oligonucleotide
  Antisense strand to SEQ ID NO: 1475062
uauaaacccagaaaggcug

SEQ ID NO: 1475064 - RNA, 19 nt, Artificial Sequence
  Description of Artificial Sequence: Synthetic oligonucleotide
  Sense strand starting at position 543 of SEQ ID NO: 1244235
cauagagaccacugucaga

SEQ ID NO: 1475065 - RNA, 19 nt, Artificial Sequence
  Description of Artificial Sequence: Synthetic oligonucleotide
  Antisense strand to SEQ ID NO: 1475064
ucugacaguggucucuaug

SEQ ID NO: 1475066 - RNA, 19 nt, Artificial Sequence
  Description of Artificial Sequence: Synthetic oligonucleotide
  Sense strand starting at position 546 of SEQ ID NO: 1244235
agagaccacugucagaaau

SEQ ID NO: 1475067 - RNA, 19 nt, Artificial Sequence
  Description of Artificial Sequence: Synthetic oligonucleotide
  Antisense strand to SEQ ID NO: 1475066
auuucugacaguggucucu

SEQ ID NO: 1475068 - RNA, 19 nt, Artificial Sequence
  Description of Artificial Sequence: Synthetic oligonucleotide
  Sense strand starting at position 548 of SEQ ID NO: 1244235
agaccacugucagaaauau

SEQ ID NO: 1475069 - RNA, 19 nt, Artificial Sequence
  Description of Artificial Sequence: Synthetic oligonucleotide
  Antisense strand to SEQ ID NO: 1475068
auauuucugacaguggucu

SEQ ID NO: 1475070 - RNA, 19 nt, Artificial Sequence
  Description of Artificial Sequence: Synthetic oligonucleotide
  Sense strand starting at position 666 of SEQ ID NO: 1244235
guuguuuauugagugaaau

SEQ ID NO: 1475071 - RNA, 19 nt, Artificial Sequence
  Description of Artificial Sequence: Synthetic oligonucleotide
  Antisense strand to SEQ ID NO: 1475070
auuucacucaauaaacaac

SEQ ID NO: 1475072 - RNA, 19 nt, Artificial Sequence
  Description of Artificial Sequence: Synthetic oligonucleotide
  Sense strand starting at position 677 of SEQ ID NO: 1244235
agugaaaugacucgaguac

SEQ ID NO: 1475073 - RNA, 19 nt, Artificial Sequence
  Description of Artificial Sequence: Synthetic oligonucleotide
  Antisense strand to SEQ ID NO: 1475072
guacucgagucauuucacu

SEQ ID NO: 1475074 - RNA, 19 nt, Artificial Sequence
  Description of Artificial Sequence: Synthetic oligonucleotide
  Sense strand starting at position 678 of SEQ ID NO: 1244235
gugaaaugacucgaguaca

SEQ ID NO: 1475075 - RNA, 19 nt, Artificial Sequence
  Description of Artificial Sequence: Synthetic oligonucleotide
  Antisense strand to SEQ ID NO: 1475074
uguacucgagucauuucac

SEQ ID NO: 1475076 - RNA, 19 nt, Artificial Sequence
  Description of Artificial Sequence: Synthetic oligonucleotide
  Sense strand starting at position 686 of SEQ ID NO: 1244235
acucgaguacauuaaauuc

SEQ ID NO: 1475077 - RNA, 19 nt, Artificial Sequence
  Description of Artificial Sequence: Synthetic oligonucleotide
  Antisense strand to SEQ ID NO: 1475076
gaauuuaauguacucgagu

SEQ ID NO: 1475078 - RNA, 19 nt, Artificial Sequence
  Description of Artificial Sequence: Synthetic oligonucleotide
  Sense strand starting at position 828 of SEQ ID NO: 1244235
agagcuaaggcaugaauua

SEQ ID NO: 1475079 - RNA, 19 nt, Artificial Sequence
  Description of Artificial Sequence: Synthetic oligonucleotide
  Antisense strand to SEQ ID NO: 1475078
uaauucaugccuuagcucu

SEQ ID NO: 1475080 - RNA, 19 nt, Artificial Sequence
  Description of Artificial Sequence: Synthetic oligonucleotide
  Sense strand starting at position 984 of SEQ ID NO: 1244235
uccugugucuuuguguaaa

SEQ ID NO: 1475081 - RNA, 19 nt, Artificial Sequence
  Description of Artificial Sequence: Synthetic oligonucleotide
  Antisense strand to SEQ ID NO: 1475080
uuuacacaaagacacagga

SEQ ID NO: 1475082 - RNA, 19 nt, Artificial Sequence
  Description of Artificial Sequence: Synthetic oligonucleotide
  Sense strand starting at position 1003 of SEQ ID NO: 1244235
auauaauugccagggaauc

SEQ ID NO: 1475083 - RNA, 19 nt, Artificial Sequence
  Description of Artificial Sequence: Synthetic oligonucleotide
  Antisense strand to SEQ ID NO: 1475082
gauucccuggcaauuauau

SEQ ID NO: 1475084 - RNA, 19 nt, Artificial Sequence
  Description of Artificial Sequence: Synthetic oligonucleotide
  Sense strand starting at position 1059 of SEQ ID NO: 1244235
augaauucuuaagugcaga

SEQ ID NO: 1475085 - RNA, 19 nt, Artificial Sequence
  Description of Artificial Sequence: Synthetic oligonucleotide
  Antisense strand to SEQ ID NO: 1475084
ucugcacuuaagaauucau

SEQ ID NO: 1475086 - RNA, 19 nt, Artificial Sequence
  Description of Artificial Sequence: Synthetic oligonucleotide
  Sense strand starting at position 2031 of SEQ ID NO: 1244235
uuuccaagagagugaaguu

SEQ ID NO: 1475087 - RNA, 19 nt, Artificial Sequence
  Description of Artificial Sequence: Synthetic oligonucleotide
  Antisense strand to SEQ ID NO: 1475086
aacuucacucucuuggaaa

SEQ ID NO: 1475088 - RNA, 19 nt, Artificial Sequence
  Description of Artificial Sequence: Synthetic oligonucleotide
  Sense strand starting at position 2166 of SEQ ID NO: 1244235
acauaauuguguguuucua

SEQ ID NO: 1475089 - RNA, 19 nt, Artificial Sequence
  Description of Artificial Sequence: Synthetic oligonucleotide
  Antisense strand to SEQ ID NO: 1475088
uagaaacacacaauuaugu

SEQ ID NO: 1475090 - RNA, 19 nt, Artificial Sequence
  Description of Artificial Sequence: Synthetic oligonucleotide
  Sense strand starting at position 2168 of SEQ ID NO: 1244235
auaauuguguguuucuacu

SEQ ID NO: 1475091 - RNA, 19 nt, Artificial Sequence
  Description of Artificial Sequence: Synthetic oligonucleotide
  Antisense strand to SEQ ID NO: 1475090
aguagaaacacacaauuau

SEQ ID NO: 1475092 - RNA, 19 nt, Artificial Sequence
  Description of Artificial Sequence: Synthetic oligonucleotide
  Sense strand starting at position 2174 of SEQ ID NO: 1244235
guguguuucuacuuaaaua

SEQ ID NO: 1475093 - RNA, 19 nt, Artificial Sequence
  Description of Artificial Sequence: Synthetic oligonucleotide
  Antisense strand to SEQ ID NO: 1475092
uauuuaaguagaaacacac

SEQ ID NO: 1475094 - RNA, 19 nt, Artificial Sequence
  Description of Artificial Sequence: Synthetic oligonucleotide
  Sense strand starting at position 2358 of SEQ ID NO: 1244235
augugauucucccuccuac

SEQ ID NO: 1475095 - RNA, 19 nt, Artificial Sequence
  Description of Artificial Sequence: Synthetic oligonucleotide
  Antisense strand to SEQ ID NO: 1475094
guaggagggagaaucacau

SEQ ID NO: 1475096 - RNA, 19 nt, Artificial Sequence
  Description of Artificial Sequence: Synthetic oligonucleotide
  Sense strand starting at position 2541 of SEQ ID NO: 1244235
cguguaugcuucuugaaug

SEQ ID NO: 1475097 - RNA, 19 nt, Artificial Sequence
  Description of Artificial Sequence: Synthetic oligonucleotide
  Antisense strand to SEQ ID NO: 1475096
cauucaagaagcauacacg

SEQ ID NO: 1475098 - RNA, 19 nt, Artificial Sequence
  Description of Artificial Sequence: Synthetic oligonucleotide
  Sense strand starting at position 2564 of SEQ ID NO: 1244235
gggagauggucagaucuua

SEQ ID NO: 1475099 - RNA, 19 nt, Artificial Sequence
  Description of Artificial Sequence: Synthetic oligonucleotide
  Antisense strand to SEQ ID NO: 1475098
uaagaucugaccaucuccc

SEQ ID NO: 1475100 - RNA, 19 nt, Artificial Sequence
  Description of Artificial Sequence: Synthetic oligonucleotide
  Sense strand starting at position 2569 of SEQ ID NO: 1244235
auggucagaucuuaaggaa

SEQ ID NO: 1475101 - RNA, 19 nt, Artificial Sequence
  Description of Artificial Sequence: Synthetic oligonucleotide
  Antisense strand to SEQ ID NO: 1475100
uuccuuaagaucugaccau

SEQ ID NO: 1475102 - RNA, 19 nt, Artificial Sequence
  Description of Artificial Sequence: Synthetic oligonucleotide
  Sense strand starting at position 2980 of SEQ ID NO: 1244235
auaguauguggauaaguuc

SEQ ID NO: 1475103 - RNA, 19 nt, Artificial Sequence
  Description of Artificial Sequence: Synthetic oligonucleotide
  Antisense strand to SEQ ID NO: 1475102
gaacuuauccacauacuau

SEQ ID NO: 1475104 - RNA, 19 nt, Artificial Sequence
  Description of Artificial Sequence: Synthetic oligonucleotide
  Sense strand starting at position 2997 of SEQ ID NO: 1244235
uccauacauccucagggua

SEQ ID NO: 1475105 - RNA, 19 nt, Artificial Sequence
  Description of Artificial Sequence: Synthetic oligonucleotide
  Antisense strand to SEQ ID NO: 1475104
uacccugaggauguaugga

SEQ ID NO: 1475106 - RNA, 19 nt, Artificial Sequence
  Description of Artificial Sequence: Synthetic oligonucleotide
  Sense strand starting at position 3005 of SEQ ID NO: 1244235
uccucaggguauguauauu

SEQ ID NO: 1475107 - RNA, 19 nt, Artificial Sequence
  Description of Artificial Sequence: Synthetic oligonucleotide
  Antisense strand to SEQ ID NO: 1475106
aauauacauacccugagga

SEQ ID NO: 1475108 - RNA, 19 nt, Artificial Sequence
  Description of Artificial Sequence: Synthetic oligonucleotide
  Sense strand starting at position 3013 of SEQ ID NO: 1244235
guauguauauuacuuguga

SEQ ID NO: 1475109 - RNA, 19 nt, Artificial Sequence
  Description of Artificial Sequence: Synthetic oligonucleotide
  Antisense strand to SEQ ID NO: 1475108
ucacaaguaauauacauac

SEQ ID NO: 1475110 - RNA, 19 nt, Artificial Sequence
  Description of Artificial Sequence: Synthetic oligonucleotide
  Sense strand starting at position 3177 of SEQ ID NO: 1244235
augcuuguccaagauuaaa

SEQ ID NO: 1475111 - RNA, 19 nt, Artificial Sequence
  Description of Artificial Sequence: Synthetic oligonucleotide
  Antisense strand to SEQ ID NO: 1475110
uuuaaucuuggacaagcau

SEQ ID NO: 1475112 - RNA, 19 nt, Artificial Sequence
  Description of Artificial Sequence: Synthetic oligonucleotide
  Sense strand starting at position 3227 of SEQ ID NO: 1244235
ccaagaaagugguaaagaa

SEQ ID NO: 1475113 - RNA, 19 nt, Artificial Sequence
  Description of Artificial Sequence: Synthetic oligonucleotide
  Antisense strand to SEQ ID NO: 1475112
uucuuuaccacuuucuugg

SEQ ID NO: 1475114 - RNA, 19 nt, Artificial Sequence
  Description of Artificial Sequence: Synthetic oligonucleotide
  Sense strand starting at position 3252 of SEQ ID NO: 1244235
uugcuaagcuugcugaaac

SEQ ID NO: 1475115 - RNA, 19 nt, Artificial Sequence
  Description of Artificial Sequence: Synthetic oligonucleotide
  Antisense strand to SEQ ID NO: 1475114
guuucagcaagcuuagcaa

SEQ ID NO: 1475116 - RNA, 19 nt, Artificial Sequence
  Description of Artificial Sequence: Synthetic oligonucleotide
  Sense strand starting at position 3408 of SEQ ID NO: 1244235
cugccuugugcucauaaug

SEQ ID NO: 1475117 - RNA, 19 nt, Artificial Sequence
  Description of Artificial Sequence: Synthetic oligonucleotide
  Antisense strand to SEQ ID NO: 1475116
cauuaugagcacaaggcag

SEQ ID NO: 1475118 - RNA, 19 nt, Artificial Sequence
  Description of Artificial Sequence: Synthetic oligonucleotide
  Sense strand starting at position 3525 of SEQ ID NO: 1244235
ccaugauacucagcacaga

SEQ ID NO: 1475119 - RNA, 19 nt, Artificial Sequence
  Description of Artificial Sequence: Synthetic oligonucleotide
  Antisense strand to SEQ ID NO: 1475118
ucugugcugaguaucaugg

SEQ ID NO: 1475120 - RNA, 19 nt, Artificial Sequence
  Description of Artificial Sequence: Synthetic oligonucleotide
  Sense strand starting at position 3548 of SEQ ID NO: 1244235
accggaaauaaauguuugu

SEQ ID NO: 1475121 - RNA, 19 nt, Artificial Sequence
  Description of Artificial Sequence: Synthetic oligonucleotide
  Antisense strand to SEQ ID NO: 1475120
acaaacauuuauuuccggu

SEQ ID NO: 1475122 - RNA, 19 nt, Artificial Sequence
  Description of Artificial Sequence: Synthetic oligonucleotide
  Sense strand starting at position 3551 of SEQ ID NO: 1244235
ggaaauaaauguuuguuga

SEQ ID NO: 1475123 - RNA, 19 nt, Artificial Sequence
  Description of Artificial Sequence: Synthetic oligonucleotide
  Antisense strand to SEQ ID NO: 1475122
ucaacaaacauuuauuucc

SEQ ID NO: 1475124 - RNA, 19 nt, Artificial Sequence
  Description of Artificial Sequence: Synthetic oligonucleotide
  Sense strand starting at position 3619 of SEQ ID NO: 1244235
auguauauaucguuugacu

SEQ ID NO: 1475125 - RNA, 19 nt, Artificial Sequence
  Description of Artificial Sequence: Synthetic oligonucleotide
  Antisense strand to SEQ ID NO: 1475124
agucaaacgauauauacau

SEQ ID NO: 1475126 - RNA, 19 nt, Artificial Sequence
  Description of Artificial Sequence: Synthetic oligonucleotide
  Sense strand starting at position 3621 of SEQ ID NO: 1244235
guauauaucguuugacuuc

SEQ ID NO: 1475127 - RNA, 19 nt, Artificial Sequence
  Description of Artificial Sequence: Synthetic oligonucleotide
  Antisense strand to SEQ ID NO: 1475126
gaagucaaacgauauauac

SEQ ID NO: 1475128 - RNA, 19 nt, Artificial Sequence
  Description of Artificial Sequence: Synthetic oligonucleotide
  Sense strand starting at position 3704 of SEQ ID NO: 1244235
uuauuuaugugguaagcaa

SEQ ID NO: 1475129 - RNA, 19 nt, Artificial Sequence
  Description of Artificial Sequence: Synthetic oligonucleotide
  Antisense strand to SEQ ID NO: 1475128
uugcuuaccacauaaauaa

SEQ ID NO: 1475130 - RNA, 19 nt, Artificial Sequence
  Description of Artificial Sequence: Synthetic oligonucleotide
  Sense strand starting at position 3764 of SEQ ID NO: 1244235
uaggauuccguuuauagaa

SEQ ID NO: 1475131 - RNA, 19 nt, Artificial Sequence
  Description of Artificial Sequence: Synthetic oligonucleotide
  Antisense strand to SEQ ID NO: 1475130
uucuauaaacggaauccua

SEQ ID NO: 1475132 - RNA, 19 nt, Artificial Sequence
  Description of Artificial Sequence: Synthetic oligonucleotide
  Sense strand starting at position 3771 of SEQ ID NO: 1244235
ccguuuauagaaugagacu

SEQ ID NO: 1475133 - RNA, 19 nt, Artificial Sequence
  Description of Artificial Sequence: Synthetic oligonucleotide
  Antisense strand to SEQ ID NO: 1475132
agucucauucuauaaacgg

SEQ ID NO: 1475134 - RNA, 19 nt, Artificial Sequence
  Description of Artificial Sequence: Synthetic oligonucleotide
  Sense strand starting at position 3772 of SEQ ID NO: 1244235
cguuuauagaaugagacuu

SEQ ID NO: 1475135 - RNA, 19 nt, Artificial Sequence
  Description of Artificial Sequence: Synthetic oligonucleotide
  Antisense strand to SEQ ID NO: 1475134
aagucucauucuauaaacg

SEQ ID NO: 1475136 - RNA, 19 nt, Artificial Sequence
  Description of Artificial Sequence: Synthetic oligonucleotide
  Sense strand starting at position 3803 of SEQ ID NO: 1244235
ccaggaauaccauguuauc

SEQ ID NO: 1475137 - RNA, 19 nt, Artificial Sequence
  Description of Artificial Sequence: Synthetic oligonucleotide
  Antisense strand to SEQ ID NO: 1475136
gauaacaugguauuccugg

SEQ ID NO: 1475138 - RNA, 19 nt, Artificial Sequence
  Description of Artificial Sequence: Synthetic oligonucleotide
  Sense strand starting at position 3814 of SEQ ID NO: 1244235
auguuaucccauuguggaa

SEQ ID NO: 1475139 - RNA, 19 nt, Artificial Sequence
  Description of Artificial Sequence: Synthetic oligonucleotide
  Antisense strand to SEQ ID NO: 1475138
uuccacaaugggauaacau

SEQ ID NO: 1475140 - RNA, 19 nt, Artificial Sequence
  Description of Artificial Sequence: Synthetic oligonucleotide
  Sense strand starting at position 76 of SEQ ID NO: 1244236
acaugcaauggguguuaca

SEQ ID NO: 1475141 - RNA, 19 nt, Artificial Sequence
  Description of Artificial Sequence: Synthetic oligonucleotide
  Antisense strand to SEQ ID NO: 1475140
uguaacacccauugcaugu

SEQ ID NO: 1475142 - RNA, 19 nt, Artificial Sequence
  Description of Artificial Sequence: Synthetic oligonucleotide
  Sense strand starting at position 86 of SEQ ID NO: 1244236
gguguuacaccauguugau

SEQ ID NO: 1475143 - RNA, 19 nt, Artificial Sequence
  Description of Artificial Sequence: Synthetic oligonucleotide
  Antisense strand to SEQ ID NO: 1475142
aucaacaugguguaacacc

SEQ ID NO: 1475144 - RNA, 19 nt, Artificial Sequence
  Description of Artificial Sequence: Synthetic oligonucleotide
  Sense strand starting at position 96 of SEQ ID NO: 1244236
cauguugauccugagcaca

SEQ ID NO: 1475145 - RNA, 19 nt, Artificial Sequence
  Description of Artificial Sequence: Synthetic oligonucleotide
  Antisense strand to SEQ ID NO: 1475144
ugugcucaggaucaacaug

SEQ ID NO: 1475146 - RNA, 19 nt, Artificial Sequence
  Description of Artificial Sequence: Synthetic oligonucleotide
  Sense strand starting at position 98 of SEQ ID NO: 1244236
uguugauccugagcacaug

SEQ ID NO: 1475147 - RNA, 19 nt, Artificial Sequence
  Description of Artificial Sequence: Synthetic oligonucleotide
  Antisense strand to SEQ ID NO: 1475146
caugugcucaggaucaaca

SEQ ID NO: 1475148 - RNA, 19 nt, Artificial Sequence
  Description of Artificial Sequence: Synthetic oligonucleotide
  Sense strand starting at position 181 of SEQ ID NO: 1244236
gcucucaugagaggaauuc

SEQ ID NO: 1475149 - RNA, 19 nt, Artificial Sequence
  Description of Artificial Sequence: Synthetic oligonucleotide
  Antisense strand to SEQ ID NO: 1475148
gaauuccucucaugagagc

SEQ ID NO: 1475150 - RNA, 19 nt, Artificial Sequence
  Description of Artificial Sequence: Synthetic oligonucleotide
  Sense strand starting at position 313 of SEQ ID NO: 1244236
aaauucuuucgcgcagcaa

SEQ ID NO: 1475151 - RNA, 19 nt, Artificial Sequence
  Description of Artificial Sequence: Synthetic oligonucleotide
  Antisense strand to SEQ ID NO: 1475150
uugcugcgcgaaagaauuu

SEQ ID NO: 1475152 - RNA, 19 nt, Artificial Sequence
  Description of Artificial Sequence: Synthetic oligonucleotide
  Sense strand starting at position 316 of SEQ ID NO: 1244236
uucuuucgcgcagcaaauu

SEQ ID NO: 1475153 - RNA, 19 nt, Artificial Sequence
  Description of Artificial Sequence: Synthetic oligonucleotide
  Antisense strand to SEQ ID NO: 1475152
aauuugcugcgcgaaagaa

SEQ ID NO: 1475154 - RNA, 19 nt, Artificial Sequence
  Description of Artificial Sequence: Synthetic oligonucleotide
  Sense strand starting at position 601 of SEQ ID NO: 1244236
uuuaguuuaucugugacau

SEQ ID NO: 1475155 - RNA, 19 nt, Artificial Sequence
  Description of Artificial Sequence: Synthetic oligonucleotide
  Antisense strand to SEQ ID NO: 1475154
augucacagauaaacuaaa

SEQ ID NO: 1475156 - RNA, 19 nt, Artificial Sequence
  Description of Artificial Sequence: Synthetic oligonucleotide
  Sense strand starting at position 602 of SEQ ID NO: 1244236
uuaguuuaucugugacauu

SEQ ID NO: 1475157 - RNA, 19 nt, Artificial Sequence
  Description of Artificial Sequence: Synthetic oligonucleotide
  Antisense strand to SEQ ID NO: 1475156
aaugucacagauaaacuaa

SEQ ID NO: 1475158 - RNA, 19 nt, Artificial Sequence
  Description of Artificial Sequence: Synthetic oligonucleotide
  Sense strand starting at position 713 of SEQ ID NO: 1244236
gcaguuuggcacuaugauu

SEQ ID NO: 1475159 - RNA, 19 nt, Artificial Sequence
  Description of Artificial Sequence: Synthetic oligonucleotide
  Antisense strand to SEQ ID NO: 1475158
aaucauagugccaaacugc

SEQ ID NO: 1475160 - RNA, 19 nt, Artificial Sequence
  Description of Artificial Sequence: Synthetic oligonucleotide
  Sense strand starting at position 1041 of SEQ ID NO: 1244236
agacaaauaguauguuuga

SEQ ID NO: 1475161 - RNA, 19 nt, Artificial Sequence
  Description of Artificial Sequence: Synthetic oligonucleotide
  Antisense strand to SEQ ID NO: 1475160
ucaaacauacuauuugucu

SEQ ID NO: 1475162 - RNA, 19 nt, Artificial Sequence
  Description of Artificial Sequence: Synthetic oligonucleotide
  Sense strand starting at position 1042 of SEQ ID NO: 1244236
gacaaauaguauguuugaa

SEQ ID NO: 1475163 - RNA, 19 nt, Artificial Sequence
  Description of Artificial Sequence: Synthetic oligonucleotide
  Antisense strand to SEQ ID NO: 1475162
uucaaacauacuauuuguc

SEQ ID NO: 1475164 - RNA, 19 nt, Artificial Sequence
  Description of Artificial Sequence: Synthetic oligonucleotide
  Sense strand starting at position 1044 of SEQ ID NO: 1244236
caaauaguauguuugaaag

SEQ ID NO: 1475165 - RNA, 19 nt, Artificial Sequence
  Description of Artificial Sequence: Synthetic oligonucleotide
  Antisense strand to SEQ ID NO: 1475164
cuuucaaacauacuauuug

SEQ ID NO: 1475166 - RNA, 19 nt, Artificial Sequence
  Description of Artificial Sequence: Synthetic oligonucleotide
  Sense strand starting at position 1050 of SEQ ID NO: 1244236
guauguuugaaagggagau

SEQ ID NO: 1475167 - RNA, 19 nt, Artificial Sequence
  Description of Artificial Sequence: Synthetic oligonucleotide
  Antisense strand to SEQ ID NO: 1475166
aucucccuuucaaacauac

SEQ ID NO: 1475168 - RNA, 19 nt, Artificial Sequence
  Description of Artificial Sequence: Synthetic oligonucleotide
  Sense strand starting at position 1062 of SEQ ID NO: 1244236
gggagauaauguguaccua

SEQ ID NO: 1475169 - RNA, 19 nt, Artificial Sequence
  Description of Artificial Sequence: Synthetic oligonucleotide
  Antisense strand to SEQ ID NO: 1475168
uagguacacauuaucuccc

SEQ ID NO: 1475170 - RNA, 19 nt, Artificial Sequence
  Description of Artificial Sequence: Synthetic oligonucleotide
  Sense strand starting at position 1066 of SEQ ID NO: 1244236
gauaauguguaccuaauug

SEQ ID NO: 1475171 - RNA, 19 nt, Artificial Sequence
  Description of Artificial Sequence: Synthetic oligonucleotide
  Antisense strand to SEQ ID NO: 1475170
caauuagguacacauuauc

SEQ ID NO: 1475172 - RNA, 19 nt, Artificial Sequence
  Description of Artificial Sequence: Synthetic oligonucleotide
  Sense strand starting at position 1070 of SEQ ID NO: 1244236
auguguaccuaauugggaa

SEQ ID NO: 1475173 - RNA, 19 nt, Artificial Sequence
  Description of Artificial Sequence: Synthetic oligonucleotide
  Antisense strand to SEQ ID NO: 1475172
uucccaauuagguacacau

SEQ ID NO: 1475174 - RNA, 19 nt, Artificial Sequence
  Description of Artificial Sequence: Synthetic oligonucleotide
  Sense strand starting at position 1184 of SEQ ID NO: 1244236
ggugccaugacuggaagaa

SEQ ID NO: 1475175 - RNA, 19 nt, Artificial Sequence
  Description of Artificial Sequence: Synthetic oligonucleotide
  Antisense strand to SEQ ID NO: 1475174
uucuuccagucauggcacc

SEQ ID NO: 1475176 - RNA, 19 nt, Artificial Sequence
  Description of Artificial Sequence: Synthetic oligonucleotide
  Sense strand starting at position 1901 of SEQ ID NO: 1244236
ggcagaggucuuggccaca

SEQ ID NO: 1475177 - RNA, 19 nt, Artificial Sequence
  Description of Artificial Sequence: Synthetic oligonucleotide
  Antisense strand to SEQ ID NO: 1475176
uguggccaagaccucugcc

SEQ ID NO: 1475178 - RNA, 19 nt, Artificial Sequence
  Description of Artificial Sequence: Synthetic oligonucleotide
  Sense strand starting at position 1986 of SEQ ID NO: 1244236
uuggguuuccaagagagua

SEQ ID NO: 1475179 - RNA, 19 nt, Artificial Sequence
  Description of Artificial Sequence: Synthetic oligonucleotide
  Antisense strand to SEQ ID NO: 1475178
uacucucuuggaaacccaa

SEQ ID NO: 1475180 - RNA, 19 nt, Artificial Sequence
  Description of Artificial Sequence: Synthetic oligonucleotide
  Sense strand starting at position 1999 of SEQ ID NO: 1244236
agaguaaaguucuugaguu

SEQ ID NO: 1475181 - RNA, 19 nt, Artificial Sequence
  Description of Artificial Sequence: Synthetic oligonucleotide
  Antisense strand to SEQ ID NO: 1475180
aacucaagaacuuuacucu

SEQ ID NO: 1475182 - RNA, 19 nt, Artificial Sequence
  Description of Artificial Sequence: Synthetic oligonucleotide
  Sense strand starting at position 2001 of SEQ ID NO: 1244236
aguaaaguucuugaguuug

SEQ ID NO: 1475183 - RNA, 19 nt, Artificial Sequence
  Description of Artificial Sequence: Synthetic oligonucleotide
  Antisense strand to SEQ ID NO: 1475182
caaacucaagaacuuuacu

SEQ ID NO: 1475184 - RNA, 19 nt, Artificial Sequence
  Description of Artificial Sequence: Synthetic oligonucleotide
  Sense strand starting at position 2003 of SEQ ID NO: 1244236
uaaaguucuugaguuugga

SEQ ID NO: 1475185 - RNA, 19 nt, Artificial Sequence
  Description of Artificial Sequence: Synthetic oligonucleotide
  Antisense strand to SEQ ID NO: 1475184
uccaaacucaagaacuuua

SEQ ID NO: 1475186 - RNA, 19 nt, Artificial Sequence
  Description of Artificial Sequence: Synthetic oligonucleotide
  Sense strand starting at position 2006 of SEQ ID NO: 1244236
aguucuugaguuuggaagu

SEQ ID NO: 1475187 - RNA, 19 nt, Artificial Sequence
  Description of Artificial Sequence: Synthetic oligonucleotide
  Antisense strand to SEQ ID NO: 1475186
acuuccaaacucaagaacu

SEQ ID NO: 1475188 - RNA, 19 nt, Artificial Sequence
  Description of Artificial Sequence: Synthetic oligonucleotide
  Sense strand starting at position 2019 of SEQ ID NO: 1244236
ggaaguuuccuggguccau

SEQ ID NO: 1475189 - RNA, 19 nt, Artificial Sequence
  Description of Artificial Sequence: Synthetic oligonucleotide
  Antisense strand to SEQ ID NO: 1475188
auggacccaggaaacuucc

SEQ ID NO: 1475190 - RNA, 19 nt, Artificial Sequence
  Description of Artificial Sequence: Synthetic oligonucleotide
  Sense strand starting at position 2020 of SEQ ID NO: 1244236
gaaguuuccuggguccaua

SEQ ID NO: 1475191 - RNA, 19 nt, Artificial Sequence
  Description of Artificial Sequence: Synthetic oligonucleotide
  Antisense strand to SEQ ID NO: 1475190
uauggacccaggaaacuuc

SEQ ID NO: 1475192 - RNA, 19 nt, Artificial Sequence
  Description of Artificial Sequence: Synthetic oligonucleotide
  Sense strand starting at position 2064 of SEQ ID NO: 1244236
cguugucaccacgucauua

SEQ ID NO: 1475193 - RNA, 19 nt, Artificial Sequence
  Description of Artificial Sequence: Synthetic oligonucleotide
  Antisense strand to SEQ ID NO: 1475192
uaaugacguggugacaacg

SEQ ID NO: 1475194 - RNA, 19 nt, Artificial Sequence
  Description of Artificial Sequence: Synthetic oligonucleotide
  Sense strand starting at position 2066 of SEQ ID NO: 1244236
uugucaccacgucauuauu

SEQ ID NO: 1475195 - RNA, 19 nt, Artificial Sequence
  Description of Artificial Sequence: Synthetic oligonucleotide
  Antisense strand to SEQ ID NO: 1475194
aauaaugacguggugacaa

SEQ ID NO: 1475196 - RNA, 19 nt, Artificial Sequence
  Description of Artificial Sequence: Synthetic oligonucleotide
  Sense strand starting at position 2075 of SEQ ID NO: 1244236
cgucauuauuuccuuguua

SEQ ID NO: 1475197 - RNA, 19 nt, Artificial Sequence
  Description of Artificial Sequence: Synthetic oligonucleotide
  Antisense strand to SEQ ID NO: 1475196
uaacaaggaaauaaugacg

SEQ ID NO: 1475198 - RNA, 19 nt, Artificial Sequence
  Description of Artificial Sequence: Synthetic oligonucleotide
  Sense strand starting at position 2076 of SEQ ID NO: 1244236
gucauuauuuccuuguuau

SEQ ID NO: 1475199 - RNA, 19 nt, Artificial Sequence
  Description of Artificial Sequence: Synthetic oligonucleotide
  Antisense strand to SEQ ID NO: 1475198
auaacaaggaaauaaugac

SEQ ID NO: 1475200 - RNA, 19 nt, Artificial Sequence
  Description of Artificial Sequence: Synthetic oligonucleotide
  Sense strand starting at position 2210 of SEQ ID NO: 1244236
auuggaaaugcuugucaua

SEQ ID NO: 1475201 - RNA, 19 nt, Artificial Sequence
  Description of Artificial Sequence: Synthetic oligonucleotide
  Antisense strand to SEQ ID NO: 1475200
uaugacaagcauuuccaau

SEQ ID NO: 1475202 - RNA, 19 nt, Artificial Sequence
  Description of Artificial Sequence: Synthetic oligonucleotide
  Sense strand starting at position 2212 of SEQ ID NO: 1244236
uggaaaugcuugucauauu

SEQ ID NO: 1475203 - RNA, 19 nt, Artificial Sequence
  Description of Artificial Sequence: Synthetic oligonucleotide
  Antisense strand to SEQ ID NO: 1475202
aauaugacaagcauuucca

SEQ ID NO: 1475204 - RNA, 19 nt, Artificial Sequence
  Description of Artificial Sequence: Synthetic oligonucleotide
  Sense strand starting at position 2346 of SEQ ID NO: 1244236
gauugcugucugcaaauaa

SEQ ID NO: 1475205 - RNA, 19 nt, Artificial Sequence
  Description of Artificial Sequence: Synthetic oligonucleotide
  Antisense strand to SEQ ID NO: 1475204
uuauuugcagacagcaauc

SEQ ID NO: 1475206 - RNA, 19 nt, Artificial Sequence
  Description of Artificial Sequence: Synthetic oligonucleotide
  Sense strand starting at position 2453 of SEQ ID NO: 1244236
ggacucauuuguggaagga

SEQ ID NO: 1475207 - RNA, 19 nt, Artificial Sequence
  Description of Artificial Sequence: Synthetic oligonucleotide
  Antisense strand to SEQ ID NO: 1475206
uccuuccacaaaugagucc

SEQ ID NO: 1475208 - RNA, 19 nt, Artificial Sequence
  Description of Artificial Sequence: Synthetic oligonucleotide
  Sense strand starting at position 2535 of SEQ ID NO: 1244236
gucagaucccaacaaguuc

SEQ ID NO: 1475209 - RNA, 19 nt, Artificial Sequence
  Description of Artificial Sequence: Synthetic oligonucleotide
  Antisense strand to SEQ ID NO: 1475208
gaacuuguugggaucugac

SEQ ID NO: 1475210 - RNA, 19 nt, Artificial Sequence
  Description of Artificial Sequence: Synthetic oligonucleotide
  Sense strand starting at position 2654 of SEQ ID NO: 1244236
caguauaggcauuaagagu

SEQ ID NO: 1475211 - RNA, 19 nt, Artificial Sequence
  Description of Artificial Sequence: Synthetic oligonucleotide
  Antisense strand to SEQ ID NO: 1475210
acucuuaaugccuauacug

SEQ ID NO: 1475212 - RNA, 19 nt, Artificial Sequence
  Description of Artificial Sequence: Synthetic oligonucleotide
  Sense strand starting at position 2662 of SEQ ID NO: 1244236
gcauuaagaguaggaaguu

SEQ ID NO: 1475213 - RNA, 19 nt, Artificial Sequence
  Description of Artificial Sequence: Synthetic oligonucleotide
  Antisense strand to SEQ ID NO: 1475212
aacuuccuacucuuaaugc

SEQ ID NO: 1475214 - RNA, 19 nt, Artificial Sequence
  Description of Artificial Sequence: Synthetic oligonucleotide
  Sense strand starting at position 3686 of SEQ ID NO: 1244236
uugugcucauaauuuguua

SEQ ID NO: 1475215 - RNA, 19 nt, Artificial Sequence
  Description of Artificial Sequence: Synthetic oligonucleotide
  Antisense strand to SEQ ID NO: 1475214
uaacaaauuaugagcacaa

SEQ ID NO: 1475216 - RNA, 19 nt, Artificial Sequence
  Description of Artificial Sequence: Synthetic oligonucleotide
  Sense strand starting at position 3786 of SEQ ID NO: 1244236
uuauucuuguuaccaugau

SEQ ID NO: 1475217 - RNA, 19 nt, Artificial Sequence
  Description of Artificial Sequence: Synthetic oligonucleotide
  Antisense strand to SEQ ID NO: 1475216
aucaugguaacaagaauaa

SEQ ID NO: 1475218 - RNA, 19 nt, Artificial Sequence
  Description of Artificial Sequence: Synthetic oligonucleotide
  Sense strand starting at position 3832 of SEQ ID NO: 1244236
auguuuguugagugaagga

SEQ ID NO: 1475219 - RNA, 19 nt, Artificial Sequence
  Description of Artificial Sequence: Synthetic oligonucleotide
  Antisense strand to SEQ ID NO: 1475218
uccuucacucaacaaacau

SEQ ID NO: 1475220 - RNA, 19 nt, Artificial Sequence
  Description of Artificial Sequence: Synthetic oligonucleotide
  Sense strand starting at position 87 of SEQ ID NO: 1244237
agcugauaauagucaaaua

SEQ ID NO: 1475221 - RNA, 19 nt, Artificial Sequence
  Description of Artificial Sequence: Synthetic oligonucleotide
  Antisense strand to SEQ ID NO: 1475220
uauuugacuauuaucagcu

SEQ ID NO: 1475222 - RNA, 19 nt, Artificial Sequence
  Description of Artificial Sequence: Synthetic oligonucleotide
  Sense strand starting at position 185 of SEQ ID NO: 1244237
gaaggcaccucucuuggaa

SEQ ID NO: 1475223 - RNA, 19 nt, Artificial Sequence
  Description of Artificial Sequence: Synthetic oligonucleotide
  Antisense strand to SEQ ID NO: 1475222
uuccaagagaggugccuuc

SEQ ID NO: 1475224 - RNA, 19 nt, Artificial Sequence
  Description of Artificial Sequence: Synthetic oligonucleotide
  Sense strand starting at position 188 of SEQ ID NO: 1244237
ggcaccucucuuggaaauu

SEQ ID NO: 1475225 - RNA, 19 nt, Artificial Sequence
  Description of Artificial Sequence: Synthetic oligonucleotide
  Antisense strand to SEQ ID NO: 1475224
aauuuccaagagaggugcc

SEQ ID NO: 1475226 - RNA, 19 nt, Artificial Sequence
  Description of Artificial Sequence: Synthetic oligonucleotide
  Sense strand starting at position 300 of SEQ ID NO: 1244237
ucauccuuucuggguuuau

SEQ ID NO: 1475227 - RNA, 19 nt, Artificial Sequence
  Description of Artificial Sequence: Synthetic oligonucleotide
  Antisense strand to SEQ ID NO: 1475226
auaaacccagaaaggauga

SEQ ID NO: 1475228 - RNA, 19 nt, Artificial Sequence
  Description of Artificial Sequence: Synthetic oligonucleotide
  Sense strand starting at position 327 of SEQ ID NO: 1244237
aaauguuaaguguggaguu

SEQ ID NO: 1475229 - RNA, 19 nt, Artificial Sequence
  Description of Artificial Sequence: Synthetic oligonucleotide
  Antisense strand to SEQ ID NO: 1475228
aacuccacacuuaacauuu

SEQ ID NO: 1475230 - RNA, 19 nt, Artificial Sequence
  Description of Artificial Sequence: Synthetic oligonucleotide
  Sense strand starting at position 337 of SEQ ID NO: 1244237
uguggaguuguuuaaauua

SEQ ID NO: 1475231 - RNA, 19 nt, Artificial Sequence
  Description of Artificial Sequence: Synthetic oligonucleotide
  Antisense strand to SEQ ID NO: 1475230
uaauuuaaacaacuccaca

SEQ ID NO: 1475232 - RNA, 19 nt, Artificial Sequence
  Description of Artificial Sequence: Synthetic oligonucleotide
  Sense strand starting at position 372 of SEQ ID NO: 1244237
agaccacagucagcaauau

SEQ ID NO: 1475233 - RNA, 19 nt, Artificial Sequence
  Description of Artificial Sequence: Synthetic oligonucleotide
  Antisense strand to SEQ ID NO: 1475232
auauugcugacuguggucu

SEQ ID NO: 1475234 - RNA, 19 nt, Artificial Sequence
  Description of Artificial Sequence: Synthetic oligonucleotide
  Sense strand starting at position 392 of SEQ ID NO: 1244237
ccaugcuauccagaugaac

SEQ ID NO: 1475235 - RNA, 19 nt, Artificial Sequence
  Description of Artificial Sequence: Synthetic oligonucleotide
  Antisense strand to SEQ ID NO: 1475234
guucaucuggauagcaugg

SEQ ID NO: 1475236 - RNA, 19 nt, Artificial Sequence
  Description of Artificial Sequence: Synthetic oligonucleotide
  Sense strand starting at position 601 of SEQ ID NO: 1244237
ggacgauaguauuaugaga

SEQ ID NO: 1475237 - RNA, 19 nt, Artificial Sequence
  Description of Artificial Sequence: Synthetic oligonucleotide
  Antisense strand to SEQ ID NO: 1475236
ucucauaauacuaucgucc

SEQ ID NO: 1475238 - RNA, 19 nt, Artificial Sequence
  Description of Artificial Sequence: Synthetic oligonucleotide
  Sense strand starting at position 616 of SEQ ID NO: 1244237
gagauauaauguguuaaag

SEQ ID NO: 1475239 - RNA, 19 nt, Artificial Sequence
  Description of Artificial Sequence: Synthetic oligonucleotide
  Antisense strand to SEQ ID NO: 1475238
cuuuaacacauuauaucuc

SEQ ID NO: 1475240 - RNA, 19 nt, Artificial Sequence
  Description of Artificial Sequence: Synthetic oligonucleotide
  Sense strand starting at position 650 of SEQ ID NO: 1244237
agagcuaagguaugaauua

SEQ ID NO: 1475241 - RNA, 19 nt, Artificial Sequence
  Description of Artificial Sequence: Synthetic oligonucleotide
  Antisense strand to SEQ ID NO: 1475240
uaauucauaccuuagcucu

SEQ ID NO: 1475242 - RNA, 19 nt, Artificial Sequence
  Description of Artificial Sequence: Synthetic oligonucleotide
  Sense strand starting at position 682 of SEQ ID NO: 1244237
uuaggauauuaagacacau

SEQ ID NO: 1475243 - RNA, 19 nt, Artificial Sequence
  Description of Artificial Sequence: Synthetic oligonucleotide
  Antisense strand to SEQ ID NO: 1475242
augugucuuaauauccuaa

SEQ ID NO: 1475244 - RNA, 19 nt, Artificial Sequence
  Description of Artificial Sequence: Synthetic oligonucleotide
  Sense strand starting at position 768 of SEQ ID NO: 1244237
aucuauauucgauauagca

SEQ ID NO: 1475245 - RNA, 19 nt, Artificial Sequence
  Description of Artificial Sequence: Synthetic oligonucleotide
  Antisense strand to SEQ ID NO: 1475244
ugcuauaucgaauauagau

SEQ ID NO: 1475246 - RNA, 19 nt, Artificial Sequence
  Description of Artificial Sequence: Synthetic oligonucleotide
  Sense strand starting at position 775 of SEQ ID NO: 1244237
uucgauauagcauguauuu

SEQ ID NO: 1475247 - RNA, 19 nt, Artificial Sequence
  Description of Artificial Sequence: Synthetic oligonucleotide
  Antisense strand to SEQ ID NO: 1475246
aaauacaugcuauaucgaa

SEQ ID NO: 1475248 - RNA, 19 nt, Artificial Sequence
  Description of Artificial Sequence: Synthetic oligonucleotide
  Sense strand starting at position 842 of SEQ ID NO: 1244237
uauaauugucagggaauca

SEQ ID NO: 1475249 - RNA, 19 nt, Artificial Sequence
  Description of Artificial Sequence: Synthetic oligonucleotide
  Antisense strand to SEQ ID NO: 1475248
ugauucccugacaauuaua

SEQ ID NO: 1475250 - RNA, 19 nt, Artificial Sequence
  Description of Artificial Sequence: Synthetic oligonucleotide
  Sense strand starting at position 897 of SEQ ID NO: 1244237
augaauucuuauguacaga

SEQ ID NO: 1475251 - RNA, 19 nt, Artificial Sequence
  Description of Artificial Sequence: Synthetic oligonucleotide
  Antisense strand to SEQ ID NO: 1475250
ucuguacauaagaauucau

SEQ ID NO: 1475252 - RNA, 19 nt, Artificial Sequence
  Description of Artificial Sequence: Synthetic oligonucleotide
  Sense strand starting at position 2031 of SEQ ID NO: 1244237
cuuccaagagagugaaguu

SEQ ID NO: 1475253 - RNA, 19 nt, Artificial Sequence
  Description of Artificial Sequence: Synthetic oligonucleotide
  Antisense strand to SEQ ID NO: 1475252
aacuucacucucuuggaag

SEQ ID NO: 1475254 - RNA, 19 nt, Artificial Sequence
  Description of Artificial Sequence: Synthetic oligonucleotide
  Sense strand starting at position 2168 of SEQ ID NO: 1244237
auaauugugugcuucuacu

SEQ ID NO: 1475255 - RNA, 19 nt, Artificial Sequence
  Description of Artificial Sequence: Synthetic oligonucleotide
  Antisense strand to SEQ ID NO: 1475254
aguagaagcacacaauuau

SEQ ID NO: 1475256 - RNA, 19 nt, Artificial Sequence
  Description of Artificial Sequence: Synthetic oligonucleotide
  Sense strand starting at position 2174 of SEQ ID NO: 1244237
gugugcuucuacuuaaaua

SEQ ID NO: 1475257 - RNA, 19 nt, Artificial Sequence
  Description of Artificial Sequence: Synthetic oligonucleotide
  Antisense strand to SEQ ID NO: 1475256
uauuuaaguagaagcacac

SEQ ID NO: 1475258 - RNA, 19 nt, Artificial Sequence
  Description of Artificial Sequence: Synthetic oligonucleotide
  Sense strand starting at position 2414 of SEQ ID NO: 1244237
uuauaaugugaaugugucu

SEQ ID NO: 1475259 - RNA, 19 nt, Artificial Sequence
  Description of Artificial Sequence: Synthetic oligonucleotide
  Antisense strand to SEQ ID NO: 1475258
agacacauucacauuauaa

SEQ ID NO: 1475260 - RNA, 19 nt, Artificial Sequence
  Description of Artificial Sequence: Synthetic oligonucleotide
  Sense strand starting at position 2541 of SEQ ID NO: 1244237
cguguaugcuucuugaaua

SEQ ID NO: 1475261 - RNA, 19 nt, Artificial Sequence
  Description of Artificial Sequence: Synthetic oligonucleotide
  Antisense strand to SEQ ID NO: 1475260
uauucaagaagcauacacg

SEQ ID NO: 1475262 - RNA, 19 nt, Artificial Sequence
  Description of Artificial Sequence: Synthetic oligonucleotide
  Sense strand starting at position 2564 of SEQ ID NO: 1244237
gggagauggucagaucuca

SEQ ID NO: 1475263 - RNA, 19 nt, Artificial Sequence
  Description of Artificial Sequence: Synthetic oligonucleotide
  Antisense strand to SEQ ID NO: 1475262
ugagaucugaccaucuccc

SEQ ID NO: 1475264 - RNA, 19 nt, Artificial Sequence
  Description of Artificial Sequence: Synthetic oligonucleotide
  Sense strand starting at position 2569 of SEQ ID NO: 1244237
auggucagaucucaaggaa

SEQ ID NO: 1475265 - RNA, 19 nt, Artificial Sequence
  Description of Artificial Sequence: Synthetic oligonucleotide
  Antisense strand to SEQ ID NO: 1475264
uuccuugagaucugaccau

SEQ ID NO: 1475266 - RNA, 19 nt, Artificial Sequence
  Description of Artificial Sequence: Synthetic oligonucleotide
  Sense strand starting at position 2572 of SEQ ID NO: 1244237
gucagaucucaaggaaguu

SEQ ID NO: 1475267 - RNA, 19 nt, Artificial Sequence
  Description of Artificial Sequence: Synthetic oligonucleotide
  Antisense strand to SEQ ID NO: 1475266
aacuuccuugagaucugac

SEQ ID NO: 1475268 - RNA, 19 nt, Artificial Sequence
  Description of Artificial Sequence: Synthetic oligonucleotide
  Sense strand starting at position 3104 of SEQ ID NO: 1244237
guagguacauucuuauuac

SEQ ID NO: 1475269 - RNA, 19 nt, Artificial Sequence
  Description of Artificial Sequence: Synthetic oligonucleotide
  Antisense strand to SEQ ID NO: 1475268
guaauaagaauguaccuac

SEQ ID NO: 1475270 - RNA, 19 nt, Artificial Sequence
  Description of Artificial Sequence: Synthetic oligonucleotide
  Sense strand starting at position 3107 of SEQ ID NO: 1244237
gguacauucuuauuacucu

SEQ ID NO: 1475271 - RNA, 19 nt, Artificial Sequence
  Description of Artificial Sequence: Synthetic oligonucleotide
  Antisense strand to SEQ ID NO: 1475270
agaguaauaagaauguacc

SEQ ID NO: 1475272 - RNA, 19 nt, Artificial Sequence
  Description of Artificial Sequence: Synthetic oligonucleotide
  Sense strand starting at position 3408 of SEQ ID NO: 1244237
ccugucuugugcucauaau

SEQ ID NO: 1475273 - RNA, 19 nt, Artificial Sequence
  Description of Artificial Sequence: Synthetic oligonucleotide
  Antisense strand to SEQ ID NO: 1475272
auuaugagcacaagacagg

SEQ ID NO: 1475274 - RNA, 19 nt, Artificial Sequence
  Description of Artificial Sequence: Synthetic oligonucleotide
  Sense strand starting at position 3409 of SEQ ID NO: 1244237
cugucuugugcucauaauu

SEQ ID NO: 1475275 - RNA, 19 nt, Artificial Sequence
  Description of Artificial Sequence: Synthetic oligonucleotide
  Antisense strand to SEQ ID NO: 1475274
aauuaugagcacaagacag

SEQ ID NO: 1475276 - RNA, 19 nt, Artificial Sequence
  Description of Artificial Sequence: Synthetic oligonucleotide
  Sense strand starting at position 3490 of SEQ ID NO: 1244237
cccugaaugcaugggcuau

SEQ ID NO: 1475277 - RNA, 19 nt, Artificial Sequence
  Description of Artificial Sequence: Synthetic oligonucleotide
  Antisense strand to SEQ ID NO: 1475276
auagcccaugcauucaggg

SEQ ID NO: 1475278 - RNA, 19 nt, Artificial Sequence
  Description of Artificial Sequence: Synthetic oligonucleotide
  Sense strand starting at position 3526 of SEQ ID NO: 1244237
ccaugauacucaggacaga

SEQ ID NO: 1475279 - RNA, 19 nt, Artificial Sequence
  Description of Artificial Sequence: Synthetic oligonucleotide
  Antisense strand to SEQ ID NO: 1475278
ucuguccugaguaucaugg

SEQ ID NO: 1475280 - RNA, 19 nt, Artificial Sequence
  Description of Artificial Sequence: Synthetic oligonucleotide
  Sense strand starting at position 3542 of SEQ ID NO: 1244237
agagaacacuggugauaaa

SEQ ID NO: 1475281 - RNA, 19 nt, Artificial Sequence
  Description of Artificial Sequence: Synthetic oligonucleotide
  Antisense strand to SEQ ID NO: 1475280
uuuaucaccaguguucucu

SEQ ID NO: 1475282 - RNA, 19 nt, Artificial Sequence
  Description of Artificial Sequence: Synthetic oligonucleotide
  Sense strand starting at position 3552 of SEQ ID NO: 1244237
ggugauaaauguuucuuga

SEQ ID NO: 1475283 - RNA, 19 nt, Artificial Sequence
  Description of Artificial Sequence: Synthetic oligonucleotide
  Antisense strand to SEQ ID NO: 1475282
ucaagaaacauuuaucacc

SEQ ID NO: 1475284 - RNA, 19 nt, Artificial Sequence
  Description of Artificial Sequence: Synthetic oligonucleotide
  Sense strand starting at position 3554 of SEQ ID NO: 1244237
ugauaaauguuucuugagu

SEQ ID NO: 1475285 - RNA, 19 nt, Artificial Sequence
  Description of Artificial Sequence: Synthetic oligonucleotide
  Antisense strand to SEQ ID NO: 1475284
acucaagaaacauuuauca

SEQ ID NO: 1475286 - RNA, 19 nt, Artificial Sequence
  Description of Artificial Sequence: Synthetic oligonucleotide
  Sense strand starting at position 3559 of SEQ ID NO: 1244237
aauguuucuugagugaaug

SEQ ID NO: 1475287 - RNA, 19 nt, Artificial Sequence
  Description of Artificial Sequence: Synthetic oligonucleotide
  Antisense strand to SEQ ID NO: 1475286
cauucacucaagaaacauu

SEQ ID NO: 1475288 - RNA, 19 nt, Artificial Sequence
  Description of Artificial Sequence: Synthetic oligonucleotide
  Sense strand starting at position 3708 of SEQ ID NO: 1244237
uuucuaugguaaguaacau

SEQ ID NO: 1475289 - RNA, 19 nt, Artificial Sequence
  Description of Artificial Sequence: Synthetic oligonucleotide
  Antisense strand to SEQ ID NO: 1475288
auguuacuuaccauagaaa

SEQ ID NO: 1475290 - RNA, 19 nt, Artificial Sequence
  Description of Artificial Sequence: Synthetic oligonucleotide
  Sense strand starting at position 3749 of SEQ ID NO: 1244237
uggaaaguuguggaaguua

SEQ ID NO: 1475291 - RNA, 19 nt, Artificial Sequence
  Description of Artificial Sequence: Synthetic oligonucleotide
  Antisense strand to SEQ ID NO: 1475290
uaacuuccacaacuuucca

SEQ ID NO: 1475292 - RNA, 19 nt, Artificial Sequence
  Description of Artificial Sequence: Synthetic oligonucleotide
  Sense strand starting at position 3754 of SEQ ID NO: 1244237
aguuguggaaguuaggauu

SEQ ID NO: 1475293 - RNA, 19 nt, Artificial Sequence
  Description of Artificial Sequence: Synthetic oligonucleotide
  Antisense strand to SEQ ID NO: 1475292
aauccuaacuuccacaacu

SEQ ID NO: 1475294 - RNA, 19 nt, Artificial Sequence
  Description of Artificial Sequence: Synthetic oligonucleotide
  Sense strand starting at position 3765 of SEQ ID NO: 1244237
uuaggauucuguuuauaga

SEQ ID NO: 1475295 - RNA, 19 nt, Artificial Sequence
  Description of Artificial Sequence: Synthetic oligonucleotide
  Antisense strand to SEQ ID NO: 1475294
ucuauaaacagaauccuaa

SEQ ID NO: 1475296 - RNA, 19 nt, Artificial Sequence
  Description of Artificial Sequence: Synthetic oligonucleotide
  Sense strand starting at position 3773 of SEQ ID NO: 1244237
cuguuuauagaaugagacu

SEQ ID NO: 1475297 - RNA, 19 nt, Artificial Sequence
  Description of Artificial Sequence: Synthetic oligonucleotide
  Antisense strand to SEQ ID NO: 1475296
agucucauucuauaaacag

SEQ ID NO: 1475298 - RNA, 19 nt, Artificial Sequence
  Description of Artificial Sequence: Synthetic oligonucleotide
  Sense strand starting at position 3805 of SEQ ID NO: 1244237
ccaggaauaccgugucuuc

SEQ ID NO: 1475299 - RNA, 19 nt, Artificial Sequence
  Description of Artificial Sequence: Synthetic oligonucleotide
  Antisense strand to SEQ ID NO: 1475298
gaagacacgguauuccugg

SEQ ID NO: 1475300 - RNA, 19 nt, Artificial Sequence
  Description of Artificial Sequence: Synthetic oligonucleotide
  Sense strand starting at position 377 of SEQ ID NO: 1244238
ucuuaaagauggucucuag

SEQ ID NO: 1475301 - RNA, 19 nt, Artificial Sequence
  Description of Artificial Sequence: Synthetic oligonucleotide
  Antisense strand to SEQ ID NO: 1475300
cuagagaccaucuuuaaga

SEQ ID NO: 1475302 - RNA, 19 nt, Artificial Sequence
  Description of Artificial Sequence: Synthetic oligonucleotide
  Sense strand starting at position 387 of SEQ ID NO: 1244238
ggucucuaguggucauaga

SEQ ID NO: 1475303 - RNA, 19 nt, Artificial Sequence
  Description of Artificial Sequence: Synthetic oligonucleotide
  Antisense strand to SEQ ID NO: 1475302
ucuaugaccacuagagacc

SEQ ID NO: 1475304 - RNA, 19 nt, Artificial Sequence
  Description of Artificial Sequence: Synthetic oligonucleotide
  Sense strand starting at position 388 of SEQ ID NO: 1244238
gucucuaguggucauagag

SEQ ID NO: 1475305 - RNA, 19 nt, Artificial Sequence
  Description of Artificial Sequence: Synthetic oligonucleotide
  Antisense strand to SEQ ID NO: 1475304
cucuaugaccacuagagac

SEQ ID NO: 1475306 - RNA, 19 nt, Artificial Sequence
  Description of Artificial Sequence: Synthetic oligonucleotide
  Sense strand starting at position 410 of SEQ ID NO: 1244238
gggagaguauuugggaagu

SEQ ID NO: 1475307 - RNA, 19 nt, Artificial Sequence
  Description of Artificial Sequence: Synthetic oligonucleotide
  Antisense strand to SEQ ID NO: 1475306
acuucccaaauacucuccc

SEQ ID NO: 1475308 - RNA, 19 nt, Artificial Sequence
  Description of Artificial Sequence: Synthetic oligonucleotide
  Sense strand starting at position 421 of SEQ ID NO: 1244238
ugggaagugcuuuguagau

SEQ ID NO: 1475309 - RNA, 19 nt, Artificial Sequence
  Description of Artificial Sequence: Synthetic oligonucleotide
  Antisense strand to SEQ ID NO: 1475308
aucuacaaagcacuuccca

SEQ ID NO: 1475310 - RNA, 19 nt, Artificial Sequence
  Description of Artificial Sequence: Synthetic oligonucleotide
  Sense strand starting at position 425 of SEQ ID NO: 1244238
aagugcuuuguagauagaa

SEQ ID NO: 1475311 - RNA, 19 nt, Artificial Sequence
  Description of Artificial Sequence: Synthetic oligonucleotide
  Antisense strand to SEQ ID NO: 1475310
uucuaucuacaaagcacuu

SEQ ID NO: 1475312 - RNA, 19 nt, Artificial Sequence
  Description of Artificial Sequence: Synthetic oligonucleotide
  Sense strand starting at position 444 of SEQ ID NO: 1244238
aaguguuugcuugagaugu

SEQ ID NO: 1475313 - RNA, 19 nt, Artificial Sequence
  Description of Artificial Sequence: Synthetic oligonucleotide
  Antisense strand to SEQ ID NO: 1475312
acaucucaagcaaacacuu

SEQ ID NO: 1475314 - RNA, 19 nt, Artificial Sequence
  Description of Artificial Sequence: Synthetic oligonucleotide
  Sense strand starting at position 450 of SEQ ID NO: 1244238
uugcuugagaugugacuua

SEQ ID NO: 1475315 - RNA, 19 nt, Artificial Sequence
  Description of Artificial Sequence: Synthetic oligonucleotide
  Antisense strand to SEQ ID NO: 1475314
uaagucacaucucaagcaa

SEQ ID NO: 1475316 - RNA, 19 nt, Artificial Sequence
  Description of Artificial Sequence: Synthetic oligonucleotide
  Sense strand starting at position 502 of SEQ ID NO: 1244238
guugcaucuacccggagaa

SEQ ID NO: 1475317 - RNA, 19 nt, Artificial Sequence
  Description of Artificial Sequence: Synthetic oligonucleotide
  Antisense strand to SEQ ID NO: 1475316
uucuccggguagaugcaac

SEQ ID NO: 1475318 - RNA, 19 nt, Artificial Sequence
  Description of Artificial Sequence: Synthetic oligonucleotide
  Sense strand starting at position 503 of SEQ ID NO: 1244238
uugcaucuacccggagaaa

SEQ ID NO: 1475319 - RNA, 19 nt, Artificial Sequence
  Description of Artificial Sequence: Synthetic oligonucleotide
  Antisense strand to SEQ ID NO: 1475318
uuucuccggguagaugcaa

SEQ ID NO: 1475320 - RNA, 19 nt, Artificial Sequence
  Description of Artificial Sequence: Synthetic oligonucleotide
  Sense strand starting at position 555 of SEQ ID NO: 1244238
caaaguaccuggucauuga

SEQ ID NO: 1475321 - RNA, 19 nt, Artificial Sequence
  Description of Artificial Sequence: Synthetic oligonucleotide
  Antisense strand to SEQ ID NO: 1475320
ucaaugaccagguacuuug

SEQ ID NO: 1475322 - RNA, 19 nt, Artificial Sequence
  Description of Artificial Sequence: Synthetic oligonucleotide
  Sense strand starting at position 644 of SEQ ID NO: 1244238
cuuguaggucauugugaga

SEQ ID NO: 1475323 - RNA, 19 nt, Artificial Sequence
  Description of Artificial Sequence: Synthetic oligonucleotide
  Antisense strand to SEQ ID NO: 1475322
ucucacaaugaccuacaag

SEQ ID NO: 1475324 - RNA, 19 nt, Artificial Sequence
  Description of Artificial Sequence: Synthetic oligonucleotide
  Sense strand starting at position 829 of SEQ ID NO: 1244238
agaguuuaguaaucuggca

SEQ ID NO: 1475325 - RNA, 19 nt, Artificial Sequence
  Description of Artificial Sequence: Synthetic oligonucleotide
  Antisense strand to SEQ ID NO: 1475324
ugccagauuacuaaacucu

SEQ ID NO: 1475326 - RNA, 19 nt, Artificial Sequence
  Description of Artificial Sequence: Synthetic oligonucleotide
  Sense strand starting at position 831 of SEQ ID NO: 1244238
aguuuaguaaucuggcaga

SEQ ID NO: 1475327 - RNA, 19 nt, Artificial Sequence
  Description of Artificial Sequence: Synthetic oligonucleotide
  Antisense strand to SEQ ID NO: 1475326
ucugccagauuacuaaacu

SEQ ID NO: 1475328 - RNA, 19 nt, Artificial Sequence
  Description of Artificial Sequence: Synthetic oligonucleotide
  Sense strand starting at position 836 of SEQ ID NO: 1244238
aguaaucuggcagaggcua

SEQ ID NO: 1475329 - RNA, 19 nt, Artificial Sequence
  Description of Artificial Sequence: Synthetic oligonucleotide
  Antisense strand to SEQ ID NO: 1475328
uagccucugccagauuacu

SEQ ID NO: 1475330 - RNA, 19 nt, Artificial Sequence
  Description of Artificial Sequence: Synthetic oligonucleotide
  Sense strand starting at position 904 of SEQ ID NO: 1244238
gagaguuagauaugcaguc

SEQ ID NO: 1475331 - RNA, 19 nt, Artificial Sequence
  Description of Artificial Sequence: Synthetic oligonucleotide
  Antisense strand to SEQ ID NO: 1475330
gacugcauaucuaacucuc

SEQ ID NO: 1475332 - RNA, 19 nt, Artificial Sequence
  Description of Artificial Sequence: Synthetic oligonucleotide
  Sense strand starting at position 995 of SEQ ID NO: 1244238
augucaauuagguggaguu

SEQ ID NO: 1475333 - RNA, 19 nt, Artificial Sequence
  Description of Artificial Sequence: Synthetic oligonucleotide
  Antisense strand to SEQ ID NO: 1475332
aacuccaccuaauugacau

SEQ ID NO: 1475334 - RNA, 19 nt, Artificial Sequence
  Description of Artificial Sequence: Synthetic oligonucleotide
  Sense strand starting at position 997 of SEQ ID NO: 1244238
gucaauuagguggaguuga

SEQ ID NO: 1475335 - RNA, 19 nt, Artificial Sequence
  Description of Artificial Sequence: Synthetic oligonucleotide
  Antisense strand to SEQ ID NO: 1475334
ucaacuccaccuaauugac

SEQ ID NO: 1475336 - RNA, 19 nt, Artificial Sequence
  Description of Artificial Sequence: Synthetic oligonucleotide
  Sense strand starting at position 1008 of SEQ ID NO: 1244238
ggaguugacugaccaccau

SEQ ID NO: 1475337 - RNA, 19 nt, Artificial Sequence
  Description of Artificial Sequence: Synthetic oligonucleotide
  Antisense strand to SEQ ID NO: 1475336
augguggucagucaacucc

SEQ ID NO: 1475338 - RNA, 19 nt, Artificial Sequence
  Description of Artificial Sequence: Synthetic oligonucleotide
  Sense strand starting at position 1138 of SEQ ID NO: 1244238
gaauguuguuucucagaaa

SEQ ID NO: 1475339 - RNA, 19 nt, Artificial Sequence
  Description of Artificial Sequence: Synthetic oligonucleotide
  Antisense strand to SEQ ID NO: 1475338
uuucugagaaacaacauuc

SEQ ID NO: 1475340 - RNA, 19 nt, Artificial Sequence
  Description of Artificial Sequence: Synthetic oligonucleotide
  Sense strand starting at position 1165 of SEQ ID NO: 1244238
gaauguuucuugguggaau

SEQ ID NO: 1475341 - RNA, 19 nt, Artificial Sequence
  Description of Artificial Sequence: Synthetic oligonucleotide
  Antisense strand to SEQ ID NO: 1475340
auuccaccaagaaacauuc

SEQ ID NO: 1475342 - RNA, 19 nt, Artificial Sequence
  Description of Artificial Sequence: Synthetic oligonucleotide
  Sense strand starting at position 1167 of SEQ ID NO: 1244238
auguuucuugguggaauag

SEQ ID NO: 1475343 - RNA, 19 nt, Artificial Sequence
  Description of Artificial Sequence: Synthetic oligonucleotide
  Antisense strand to SEQ ID NO: 1475342
cuauuccaccaagaaacau

SEQ ID NO: 1475344 - RNA, 19 nt, Artificial Sequence
  Description of Artificial Sequence: Synthetic oligonucleotide
  Sense strand starting at position 1205 of SEQ ID NO: 1244238
caggaaauaugucucuggu

SEQ ID NO: 1475345 - RNA, 19 nt, Artificial Sequence
  Description of Artificial Sequence: Synthetic oligonucleotide
  Antisense strand to SEQ ID NO: 1475344
accagagacauauuuccug

SEQ ID NO: 1475346 - RNA, 19 nt, Artificial Sequence
  Description of Artificial Sequence: Synthetic oligonucleotide
  Sense strand starting at position 2033 of SEQ ID NO: 1244238
agaggugaguuuccaagaa

SEQ ID NO: 1475347 - RNA, 19 nt, Artificial Sequence
  Description of Artificial Sequence: Synthetic oligonucleotide
  Antisense strand to SEQ ID NO: 1475346
uucuuggaaacucaccucu

SEQ ID NO: 1475348 - RNA, 19 nt, Artificial Sequence
  Description of Artificial Sequence: Synthetic oligonucleotide
  Sense strand starting at position 2037 of SEQ ID NO: 1244238
gugaguuuccaagaaucug

SEQ ID NO: 1475349 - RNA, 19 nt, Artificial Sequence
  Description of Artificial Sequence: Synthetic oligonucleotide
  Antisense strand to SEQ ID NO: 1475348
cagauucuuggaaacucac

SEQ ID NO: 1475350 - RNA, 19 nt, Artificial Sequence
  Description of Artificial Sequence: Synthetic oligonucleotide
  Sense strand starting at position 2197 of SEQ ID NO: 1244238
uguuaugaaucuucugaaa

SEQ ID NO: 1475351 - RNA, 19 nt, Artificial Sequence
  Description of Artificial Sequence: Synthetic oligonucleotide
  Antisense strand to SEQ ID NO: 1475350
uuucagaagauucauaaca

SEQ ID NO: 1475352 - RNA, 19 nt, Artificial Sequence
  Description of Artificial Sequence: Synthetic oligonucleotide
  Sense strand starting at position 2605 of SEQ ID NO: 1244238
gcacuagaacauggugauu

SEQ ID NO: 1475353 - RNA, 19 nt, Artificial Sequence
  Description of Artificial Sequence: Synthetic oligonucleotide
  Antisense strand to SEQ ID NO: 1475352
aaucaccauguucuagugc

SEQ ID NO: 1475354 - RNA, 19 nt, Artificial Sequence
  Description of Artificial Sequence: Synthetic oligonucleotide
  Sense strand starting at position 2616 of SEQ ID NO: 1244238
uggugauuaacucaaggug

SEQ ID NO: 1475355 - RNA, 19 nt, Artificial Sequence
  Description of Artificial Sequence: Synthetic oligonucleotide
  Antisense strand to SEQ ID NO: 1475354
caccuugaguuaaucacca

SEQ ID NO: 1475356 - RNA, 19 nt, Artificial Sequence
  Description of Artificial Sequence: Synthetic oligonucleotide
  Sense strand starting at position 2619 of SEQ ID NO: 1244238
ugauuaacucaaggugaca

SEQ ID NO: 1475357 - RNA, 19 nt, Artificial Sequence
  Description of Artificial Sequence: Synthetic oligonucleotide
  Antisense strand to SEQ ID NO: 1475356
ugucaccuugaguuaauca

SEQ ID NO: 1475358 - RNA, 19 nt, Artificial Sequence
  Description of Artificial Sequence: Synthetic oligonucleotide
  Sense strand starting at position 2752 of SEQ ID NO: 1244238
ccacuuggguaucucaauu

SEQ ID NO: 1475359 - RNA, 19 nt, Artificial Sequence
  Description of Artificial Sequence: Synthetic oligonucleotide
  Antisense strand to SEQ ID NO: 1475358
aauugagauacccaagugg

SEQ ID NO: 1475360 - RNA, 19 nt, Artificial Sequence
  Description of Artificial Sequence: Synthetic oligonucleotide
  Sense strand starting at position 2835 of SEQ ID NO: 1244238
uguugauggcccuaaguac

SEQ ID NO: 1475361 - RNA, 19 nt, Artificial Sequence
  Description of Artificial Sequence: Synthetic oligonucleotide
  Antisense strand to SEQ ID NO: 1475360
guacuuagggccaucaaca

SEQ ID NO: 1475362 - RNA, 19 nt, Artificial Sequence
  Description of Artificial Sequence: Synthetic oligonucleotide
  Sense strand starting at position 2850 of SEQ ID NO: 1244238
guacaaacaucccugggua

SEQ ID NO: 1475363 - RNA, 19 nt, Artificial Sequence
  Description of Artificial Sequence: Synthetic oligonucleotide
  Antisense strand to SEQ ID NO: 1475362
uacccagggauguuuguac

SEQ ID NO: 1475364 - RNA, 19 nt, Artificial Sequence
  Description of Artificial Sequence: Synthetic oligonucleotide
  Sense strand starting at position 3308 of SEQ ID NO: 1244238
gaaugacuccaucaugugu

SEQ ID NO: 1475365 - RNA, 19 nt, Artificial Sequence
  Description of Artificial Sequence: Synthetic oligonucleotide
  Antisense strand to SEQ ID NO: 1475364
acacaugauggagucauuc

SEQ ID NO: 1475366 - RNA, 19 nt, Artificial Sequence
  Description of Artificial Sequence: Synthetic oligonucleotide
  Sense strand starting at position 3313 of SEQ ID NO: 1244238
acuccaucauguguauuaa

SEQ ID NO: 1475367 - RNA, 19 nt, Artificial Sequence
  Description of Artificial Sequence: Synthetic oligonucleotide
  Antisense strand to SEQ ID NO: 1475366
uuaauacacaugauggagu

SEQ ID NO: 1475368 - RNA, 19 nt, Artificial Sequence
  Description of Artificial Sequence: Synthetic oligonucleotide
  Sense strand starting at position 3314 of SEQ ID NO: 1244238
cuccaucauguguauuaau

SEQ ID NO: 1475369 - RNA, 19 nt, Artificial Sequence
  Description of Artificial Sequence: Synthetic oligonucleotide
  Antisense strand to SEQ ID NO: 1475368
auuaauacacaugauggag

SEQ ID NO: 1475370 - RNA, 19 nt, Artificial Sequence
  Description of Artificial Sequence: Synthetic oligonucleotide
  Sense strand starting at position 3363 of SEQ ID NO: 1244238
uuuggaugcuuagcaauuu

SEQ ID NO: 1475371 - RNA, 19 nt, Artificial Sequence
  Description of Artificial Sequence: Synthetic oligonucleotide
  Antisense strand to SEQ ID NO: 1475370
aaauugcuaagcauccaaa

SEQ ID NO: 1475372 - RNA, 19 nt, Artificial Sequence
  Description of Artificial Sequence: Synthetic oligonucleotide
  Sense strand starting at position 3454 of SEQ ID NO: 1244238
cuugacuugcucugacuua

SEQ ID NO: 1475373 - RNA, 19 nt, Artificial Sequence
  Description of Artificial Sequence: Synthetic oligonucleotide
  Antisense strand to SEQ ID NO: 1475372
uaagucagagcaagucaag

SEQ ID NO: 1475374 - RNA, 19 nt, Artificial Sequence
  Description of Artificial Sequence: Synthetic oligonucleotide
  Sense strand starting at position 3466 of SEQ ID NO: 1244238
ugacuuaaacuguggcuaa

SEQ ID NO: 1475375 - RNA, 19 nt, Artificial Sequence
  Description of Artificial Sequence: Synthetic oligonucleotide
  Antisense strand to SEQ ID NO: 1475374
uuagccacaguuuaaguca

SEQ ID NO: 1475376 - RNA, 19 nt, Artificial Sequence
  Description of Artificial Sequence: Synthetic oligonucleotide
  Sense strand starting at position 3673 of SEQ ID NO: 1244238
gugucuccacccugagaau

SEQ ID NO: 1475377 - RNA, 19 nt, Artificial Sequence
  Description of Artificial Sequence: Synthetic oligonucleotide
  Antisense strand to SEQ ID NO: 1475376
auucucaggguggagacac

SEQ ID NO: 1475378 - RNA, 19 nt, Artificial Sequence
  Description of Artificial Sequence: Synthetic oligonucleotide
  Sense strand starting at position 3685 of SEQ ID NO: 1244238
ugagaauggguuuggcaca

SEQ ID NO: 1475379 - RNA, 19 nt, Artificial Sequence
  Description of Artificial Sequence: Synthetic oligonucleotide
  Antisense strand to SEQ ID NO: 1475378
ugugccaaacccauucuca

SEQ ID NO: 1475380 - RNA, 19 nt, Artificial Sequence
  Description of Artificial Sequence: Synthetic oligonucleotide
  Sense strand starting at position 7 of SEQ ID NO: 1244239
cuaucuuucccugagugaa

SEQ ID NO: 1475381 - RNA, 19 nt, Artificial Sequence
  Description of Artificial Sequence: Synthetic oligonucleotide
  Antisense strand to SEQ ID NO: 1475380
uucacucagggaaagauag

SEQ ID NO: 1475382 - RNA, 19 nt, Artificial Sequence
  Description of Artificial Sequence: Synthetic oligonucleotide
  Sense strand starting at position 9 of SEQ ID NO: 1244239
aucuuucccugagugaaug

SEQ ID NO: 1475383 - RNA, 19 nt, Artificial Sequence
  Description of Artificial Sequence: Synthetic oligonucleotide
  Antisense strand to SEQ ID NO: 1475382
cauucacucagggaaagau

SEQ ID NO: 1475384 - RNA, 19 nt, Artificial Sequence
  Description of Artificial Sequence: Synthetic oligonucleotide
  Sense strand starting at position 17 of SEQ ID NO: 1244239
cugagugaaugcuuagcuu

SEQ ID NO: 1475385 - RNA, 19 nt, Artificial Sequence
  Description of Artificial Sequence: Synthetic oligonucleotide
  Antisense strand to SEQ ID NO: 1475384
aagcuaagcauucacucag

SEQ ID NO: 1475386 - RNA, 19 nt, Artificial Sequence
  Description of Artificial Sequence: Synthetic oligonucleotide
  Sense strand starting at position 67 of SEQ ID NO: 1244239
ugucuaucaugacuucuau

SEQ ID NO: 1475387 - RNA, 19 nt, Artificial Sequence
  Description of Artificial Sequence: Synthetic oligonucleotide
  Antisense strand to SEQ ID NO: 1475386
auagaagucaugauagaca

SEQ ID NO: 1475388 - RNA, 19 nt, Artificial Sequence
  Description of Artificial Sequence: Synthetic oligonucleotide
  Sense strand starting at position 164 of SEQ ID NO: 1244239
gccucauauuggucuuaca

SEQ ID NO: 1475389 - RNA, 19 nt, Artificial Sequence
  Description of Artificial Sequence: Synthetic oligonucleotide
  Antisense strand to SEQ ID NO: 1475388
uguaagaccaauaugaggc

SEQ ID NO: 1475390 - RNA, 19 nt, Artificial Sequence
  Description of Artificial Sequence: Synthetic oligonucleotide
  Sense strand starting at position 203 of SEQ ID NO: 1244239
uucccuuccuugguuuaga

SEQ ID NO: 1475391 - RNA, 19 nt, Artificial Sequence
  Description of Artificial Sequence: Synthetic oligonucleotide
  Antisense strand to SEQ ID NO: 1475390
ucuaaaccaaggaagggaa

SEQ ID NO: 1475392 - RNA, 19 nt, Artificial Sequence
  Description of Artificial Sequence: Synthetic oligonucleotide
  Sense strand starting at position 206 of SEQ ID NO: 1244239
ccuuccuugguuuagagau

SEQ ID NO: 1475393 - RNA, 19 nt, Artificial Sequence
  Description of Artificial Sequence: Synthetic oligonucleotide
  Antisense strand to SEQ ID NO: 1475392
aucucuaaaccaaggaagg

SEQ ID NO: 1475394 - RNA, 19 nt, Artificial Sequence
  Description of Artificial Sequence: Synthetic oligonucleotide
  Sense strand starting at position 342 of SEQ ID NO: 1244239
uaagguguggucuguauuu

SEQ ID NO: 1475395 - RNA, 19 nt, Artificial Sequence
  Description of Artificial Sequence: Synthetic oligonucleotide
  Antisense strand to SEQ ID NO: 1475394
aaauacagaccacaccuua

SEQ ID NO: 1475396 - RNA, 19 nt, Artificial Sequence
  Description of Artificial Sequence: Synthetic oligonucleotide
  Sense strand starting at position 384 of SEQ ID NO: 1244239
ugacuuugucaacagguau

SEQ ID NO: 1475397 - RNA, 19 nt, Artificial Sequence
  Description of Artificial Sequence: Synthetic oligonucleotide
  Antisense strand to SEQ ID NO: 1475396
auaccuguugacaaaguca

SEQ ID NO: 1475398 - RNA, 19 nt, Artificial Sequence
  Description of Artificial Sequence: Synthetic oligonucleotide
  Sense strand starting at position 526 of SEQ ID NO: 1244239
gaaugauuggcuggucaga

SEQ ID NO: 1475399 - RNA, 19 nt, Artificial Sequence
  Description of Artificial Sequence: Synthetic oligonucleotide
  Antisense strand to SEQ ID NO: 1475398
ucugaccagccaaucauuc

SEQ ID NO: 1475400 - RNA, 19 nt, Artificial Sequence
  Description of Artificial Sequence: Synthetic oligonucleotide
  Sense strand starting at position 2077 of SEQ ID NO: 1244239
acaucuggccuccaaaguu

SEQ ID NO: 1475401 - RNA, 19 nt, Artificial Sequence
  Description of Artificial Sequence: Synthetic oligonucleotide
  Antisense strand to SEQ ID NO: 1475400
aacuuuggaggccagaugu

SEQ ID NO: 1475402 - RNA, 19 nt, Artificial Sequence
  Description of Artificial Sequence: Synthetic oligonucleotide
  Sense strand starting at position 2319 of SEQ ID NO: 1244239
gugauaguuccuggugauc

SEQ ID NO: 1475403 - RNA, 19 nt, Artificial Sequence
  Description of Artificial Sequence: Synthetic oligonucleotide
  Antisense strand to SEQ ID NO: 1475402
gaucaccaggaacuaucac

SEQ ID NO: 1475404 - RNA, 19 nt, Artificial Sequence
  Description of Artificial Sequence: Synthetic oligonucleotide
  Sense strand starting at position 2328 of SEQ ID NO: 1244239
ccuggugauccgggaagca

SEQ ID NO: 1475405 - RNA, 19 nt, Artificial Sequence
  Description of Artificial Sequence: Synthetic oligonucleotide
  Antisense strand to SEQ ID NO: 1475404
ugcuucccggaucaccagg

SEQ ID NO: 1475406 - RNA, 19 nt, Artificial Sequence
  Description of Artificial Sequence: Synthetic oligonucleotide
  Sense strand starting at position 2343 of SEQ ID NO: 1244239
agcagauaguucucucugu

SEQ ID NO: 1475407 - RNA, 19 nt, Artificial Sequence
  Description of Artificial Sequence: Synthetic oligonucleotide
  Antisense strand to SEQ ID NO: 1475406
acagagagaacuaucugcu

SEQ ID NO: 1475408 - RNA, 19 nt, Artificial Sequence
  Description of Artificial Sequence: Synthetic oligonucleotide
  Sense strand starting at position 2347 of SEQ ID NO: 1244239
gauaguucucucuguccag

SEQ ID NO: 1475409 - RNA, 19 nt, Artificial Sequence
  Description of Artificial Sequence: Synthetic oligonucleotide
  Antisense strand to SEQ ID NO: 1475408
cuggacagagagaacuauc

SEQ ID NO: 1475410 - RNA, 19 nt, Artificial Sequence
  Description of Artificial Sequence: Synthetic oligonucleotide
  Sense strand starting at position 2378 of SEQ ID NO: 1244239
cuguauguagacugggaaa

SEQ ID NO: 1475411 - RNA, 19 nt, Artificial Sequence
  Description of Artificial Sequence: Synthetic oligonucleotide
  Antisense strand to SEQ ID NO: 1475410
uuucccagucuacauacag

SEQ ID NO: 1475412 - RNA, 19 nt, Artificial Sequence
  Description of Artificial Sequence: Synthetic oligonucleotide
  Sense strand starting at position 2380 of SEQ ID NO: 1244239
guauguagacugggaaaug

SEQ ID NO: 1475413 - RNA, 19 nt, Artificial Sequence
  Description of Artificial Sequence: Synthetic oligonucleotide
  Antisense strand to SEQ ID NO: 1475412
cauuucccagucuacauac

SEQ ID NO: 1475414 - RNA, 19 nt, Artificial Sequence
  Description of Artificial Sequence: Synthetic oligonucleotide
  Sense strand starting at position 2390 of SEQ ID NO: 1244239
ugggaaaugucugugggca

SEQ ID NO: 1475415 - RNA, 19 nt, Artificial Sequence
  Description of Artificial Sequence: Synthetic oligonucleotide
  Antisense strand to SEQ ID NO: 1475414
ugcccacagacauuuccca

SEQ ID NO: 1475416 - RNA, 19 nt, Artificial Sequence
  Description of Artificial Sequence: Synthetic oligonucleotide
  Sense strand starting at position 2391 of SEQ ID NO: 1244239
gggaaaugucugugggcag

SEQ ID NO: 1475417 - RNA, 19 nt, Artificial Sequence
  Description of Artificial Sequence: Synthetic oligonucleotide
  Antisense strand to SEQ ID NO: 1475416
cugcccacagacauuuccc

SEQ ID NO: 1475418 - RNA, 19 nt, Artificial Sequence
  Description of Artificial Sequence: Synthetic oligonucleotide
  Sense strand starting at position 2410 of SEQ ID NO: 1244239
ucgcgugaugcuguuaugu

SEQ ID NO: 1475419 - RNA, 19 nt, Artificial Sequence
  Description of Artificial Sequence: Synthetic oligonucleotide
  Antisense strand to SEQ ID NO: 1475418
acauaacagcaucacgcga

SEQ ID NO: 1475420 - RNA, 19 nt, Artificial Sequence
  Description of Artificial Sequence: Synthetic oligonucleotide
  Sense strand starting at position 2566 of SEQ ID NO: 1244239
ggguguuuggcacaaugua

SEQ ID NO: 1475421 - RNA, 19 nt, Artificial Sequence
  Description of Artificial Sequence: Synthetic oligonucleotide
  Antisense strand to SEQ ID NO: 1475420
uacauugugccaaacaccc

SEQ ID NO: 1475422 - RNA, 19 nt, Artificial Sequence
  Description of Artificial Sequence: Synthetic oligonucleotide
  Sense strand starting at position 2641 of SEQ ID NO: 1244239
uucagaaagcaucgagugu

SEQ ID NO: 1475423 - RNA, 19 nt, Artificial Sequence
  Description of Artificial Sequence: Synthetic oligonucleotide
  Antisense strand to SEQ ID NO: 1475422
acacucgaugcuuucugaa

SEQ ID NO: 1475424 - RNA, 19 nt, Artificial Sequence
  Description of Artificial Sequence: Synthetic oligonucleotide
  Sense strand starting at position 2686 of SEQ ID NO: 1244239
ugauuugccugggacugaa

SEQ ID NO: 1475425 - RNA, 19 nt, Artificial Sequence
  Description of Artificial Sequence: Synthetic oligonucleotide
  Antisense strand to SEQ ID NO: 1475424
uucagucccaggcaaauca

SEQ ID NO: 1475426 - RNA, 19 nt, Artificial Sequence
  Description of Artificial Sequence: Synthetic oligonucleotide
  Sense strand starting at position 2704 of SEQ ID NO: 1244239
aggguuuaccagcauggga

SEQ ID NO: 1475427 - RNA, 19 nt, Artificial Sequence
  Description of Artificial Sequence: Synthetic oligonucleotide
  Antisense strand to SEQ ID NO: 1475426
ucccaugcugguaaacccu

SEQ ID NO: 1475428 - RNA, 19 nt, Artificial Sequence
  Description of Artificial Sequence: Synthetic oligonucleotide
  Sense strand starting at position 2718 of SEQ ID NO: 1244239
ugggacucucugugacgua

SEQ ID NO: 1475429 - RNA, 19 nt, Artificial Sequence
  Description of Artificial Sequence: Synthetic oligonucleotide
  Antisense strand to SEQ ID NO: 1475428
uacgucacagagaguccca

SEQ ID NO: 1475430 - RNA, 19 nt, Artificial Sequence
  Description of Artificial Sequence: Synthetic oligonucleotide
  Sense strand starting at position 2730 of SEQ ID NO: 1244239
ugacguaagugcucuagau

SEQ ID NO: 1475431 - RNA, 19 nt, Artificial Sequence
  Description of Artificial Sequence: Synthetic oligonucleotide
  Antisense strand to SEQ ID NO: 1475430
aucuagagcacuuacguca

SEQ ID NO: 1475432 - RNA, 19 nt, Artificial Sequence
  Description of Artificial Sequence: Synthetic oligonucleotide
  Sense strand starting at position 2732 of SEQ ID NO: 1244239
acguaagugcucuagauuc

SEQ ID NO: 1475433 - RNA, 19 nt, Artificial Sequence
  Description of Artificial Sequence: Synthetic oligonucleotide
  Antisense strand to SEQ ID NO: 1475432
gaaucuagagcacuuacgu

SEQ ID NO: 1475434 - RNA, 19 nt, Artificial Sequence
  Description of Artificial Sequence: Synthetic oligonucleotide
  Sense strand starting at position 2742 of SEQ ID NO: 1244239
ucuagauucgggcaaauca

SEQ ID NO: 1475435 - RNA, 19 nt, Artificial Sequence
  Description of Artificial Sequence: Synthetic oligonucleotide
  Antisense strand to SEQ ID NO: 1475434
ugauuugcccgaaucuaga

SEQ ID NO: 1475436 - RNA, 19 nt, Artificial Sequence
  Description of Artificial Sequence: Synthetic oligonucleotide
  Sense strand starting at position 2752 of SEQ ID NO: 1244239
ggcaaaucaagcugaguuc

SEQ ID NO: 1475437 - RNA, 19 nt, Artificial Sequence
  Description of Artificial Sequence: Synthetic oligonucleotide
  Antisense strand to SEQ ID NO: 1475436
gaacucagcuugauuugcc

SEQ ID NO: 1475438 - RNA, 19 nt, Artificial Sequence
  Description of Artificial Sequence: Synthetic oligonucleotide
  Sense strand starting at position 2945 of SEQ ID NO: 1244239
ugucuaauagaauggugua

SEQ ID NO: 1475439 - RNA, 19 nt, Artificial Sequence
  Description of Artificial Sequence: Synthetic oligonucleotide
  Antisense strand to SEQ ID NO: 1475438
uacaccauucuauuagaca

SEQ ID NO: 1475440 - RNA, 19 nt, Artificial Sequence
  Description of Artificial Sequence: Synthetic oligonucleotide
  Sense strand starting at position 2946 of SEQ ID NO: 1244239
gucuaauagaaugguguag

SEQ ID NO: 1475441 - RNA, 19 nt, Artificial Sequence
  Description of Artificial Sequence: Synthetic oligonucleotide
  Antisense strand to SEQ ID NO: 1475440
cuacaccauucuauuagac

SEQ ID NO: 1475442 - RNA, 19 nt, Artificial Sequence
  Description of Artificial Sequence: Synthetic oligonucleotide
  Sense strand starting at position 2950 of SEQ ID NO: 1244239
aauagaaugguguagugua

SEQ ID NO: 1475443 - RNA, 19 nt, Artificial Sequence
  Description of Artificial Sequence: Synthetic oligonucleotide
  Antisense strand to SEQ ID NO: 1475442
uacacuacaccauucuauu

SEQ ID NO: 1475444 - RNA, 19 nt, Artificial Sequence
  Description of Artificial Sequence: Synthetic oligonucleotide
  Sense strand starting at position 2957 of SEQ ID NO: 1244239
ugguguaguguauaucuuu

SEQ ID NO: 1475445 - RNA, 19 nt, Artificial Sequence
  Description of Artificial Sequence: Synthetic oligonucleotide
  Antisense strand to SEQ ID NO: 1475444
aaagauauacacuacacca

SEQ ID NO: 1475446 - RNA, 19 nt, Artificial Sequence
  Description of Artificial Sequence: Synthetic oligonucleotide
  Sense strand starting at position 2975 of SEQ ID NO: 1244239
uuuauauucguuggauaga

SEQ ID NO: 1475447 - RNA, 19 nt, Artificial Sequence
  Description of Artificial Sequence: Synthetic oligonucleotide
  Antisense strand to SEQ ID NO: 1475446
ucuauccaacgaauauaaa

SEQ ID NO: 1475448 - RNA, 19 nt, Artificial Sequence
  Description of Artificial Sequence: Synthetic oligonucleotide
  Sense strand starting at position 3161 of SEQ ID NO: 1244239
uguuaugauuauucuaccu

SEQ ID NO: 1475449 - RNA, 19 nt, Artificial Sequence
  Description of Artificial Sequence: Synthetic oligonucleotide
  Antisense strand to SEQ ID NO: 1475448
agguagaauaaucauaaca

SEQ ID NO: 1475450 - RNA, 19 nt, Artificial Sequence
  Description of Artificial Sequence: Synthetic oligonucleotide
  Sense strand starting at position 3525 of SEQ ID NO: 1244239
ugugguuacgaucauaugu

SEQ ID NO: 1475451 - RNA, 19 nt, Artificial Sequence
  Description of Artificial Sequence: Synthetic oligonucleotide
  Antisense strand to SEQ ID NO: 1475450
acauaugaucguaaccaca

SEQ ID NO: 1475452 - RNA, 19 nt, Artificial Sequence
  Description of Artificial Sequence: Synthetic oligonucleotide
  Sense strand starting at position 3530 of SEQ ID NO: 1244239
uuacgaucauauguauaug

SEQ ID NO: 1475453 - RNA, 19 nt, Artificial Sequence
  Description of Artificial Sequence: Synthetic oligonucleotide
  Antisense strand to SEQ ID NO: 1475452
cauauacauaugaucguaa

SEQ ID NO: 1475454 - RNA, 19 nt, Artificial Sequence
  Description of Artificial Sequence: Synthetic oligonucleotide
  Sense strand starting at position 3533 of SEQ ID NO: 1244239
cgaucauauguauaugcca

SEQ ID NO: 1475455 - RNA, 19 nt, Artificial Sequence
  Description of Artificial Sequence: Synthetic oligonucleotide
  Antisense strand to SEQ ID NO: 1475454
uggcauauacauaugaucg

SEQ ID NO: 1475456 - RNA, 19 nt, Artificial Sequence
  Description of Artificial Sequence: Synthetic oligonucleotide
  Sense strand starting at position 3934 of SEQ ID NO: 1244239
ugaagucuagcccaauuau

SEQ ID NO: 1475457 - RNA, 19 nt, Artificial Sequence
  Description of Artificial Sequence: Synthetic oligonucleotide
  Antisense strand to SEQ ID NO: 1475456
auaauugggcuagacuuca

SEQ ID NO: 1475458 - RNA, 19 nt, Artificial Sequence
  Description of Artificial Sequence: Synthetic oligonucleotide
  Sense strand starting at position 3954 of SEQ ID NO: 1244239
ugaaaucuguacuuaguca

SEQ ID NO: 1475459 - RNA, 19 nt, Artificial Sequence
  Description of Artificial Sequence: Synthetic oligonucleotide
  Antisense strand to SEQ ID NO: 1475458
ugacuaaguacagauuuca

SEQ ID NO: 1475460 - RNA, 19 nt, Artificial Sequence
  Description of Artificial Sequence: Synthetic oligonucleotide
  Sense strand starting at position 38 of SEQ ID NO: 1244240
ucaugagugaaugguuauc

SEQ ID NO: 1475461 - RNA, 19 nt, Artificial Sequence
  Description of Artificial Sequence: Synthetic oligonucleotide
  Antisense strand to SEQ ID NO: 1475460
gauaaccauucacucauga

SEQ ID NO: 1475462 - RNA, 19 nt, Artificial Sequence
  Description of Artificial Sequence: Synthetic oligonucleotide
  Sense strand starting at position 40 of SEQ ID NO: 1244240
augagugaaugguuaucuu

SEQ ID NO: 1475463 - RNA, 19 nt, Artificial Sequence
  Description of Artificial Sequence: Synthetic oligonucleotide
  Antisense strand to SEQ ID NO: 1475462
aagauaaccauucacucau

SEQ ID NO: 1475464 - RNA, 19 nt, Artificial Sequence
  Description of Artificial Sequence: Synthetic oligonucleotide
  Sense strand starting at position 43 of SEQ ID NO: 1244240
agugaaugguuaucuuaca

SEQ ID NO: 1475465 - RNA, 19 nt, Artificial Sequence
  Description of Artificial Sequence: Synthetic oligonucleotide
  Antisense strand to SEQ ID NO: 1475464
uguaagauaaccauucacu

SEQ ID NO: 1475466 - RNA, 19 nt, Artificial Sequence
  Description of Artificial Sequence: Synthetic oligonucleotide
  Sense strand starting at position 44 of SEQ ID NO: 1244240
gugaaugguuaucuuacau

SEQ ID NO: 1475467 - RNA, 19 nt, Artificial Sequence
  Description of Artificial Sequence: Synthetic oligonucleotide
  Antisense strand to SEQ ID NO: 1475466
auguaagauaaccauucac

SEQ ID NO: 1475468 - RNA, 19 nt, Artificial Sequence
  Description of Artificial Sequence: Synthetic oligonucleotide
  Sense strand starting at position 92 of SEQ ID NO: 1244240
ucuauuaugucuucuauga

SEQ ID NO: 1475469 - RNA, 19 nt, Artificial Sequence
  Description of Artificial Sequence: Synthetic oligonucleotide
  Antisense strand to SEQ ID NO: 1475468
ucauagaagacauaauaga

SEQ ID NO: 1475470 - RNA, 19 nt, Artificial Sequence
  Description of Artificial Sequence: Synthetic oligonucleotide
  Sense strand starting at position 231 of SEQ ID NO: 1244240
ccuuccuuagcucagagau

SEQ ID NO: 1475471 - RNA, 19 nt, Artificial Sequence
  Description of Artificial Sequence: Synthetic oligonucleotide
  Antisense strand to SEQ ID NO: 1475470
aucucugagcuaaggaagg

SEQ ID NO: 1475472 - RNA, 19 nt, Artificial Sequence
  Description of Artificial Sequence: Synthetic oligonucleotide
  Sense strand starting at position 342 of SEQ ID NO: 1244240
gggacaaauugucuuaacg

SEQ ID NO: 1475473 - RNA, 19 nt, Artificial Sequence
  Description of Artificial Sequence: Synthetic oligonucleotide
  Antisense strand to SEQ ID NO: 1475472
cguuaagacaauuuguccc

SEQ ID NO: 1475474 - RNA, 19 nt, Artificial Sequence
  Description of Artificial Sequence: Synthetic oligonucleotide
  Sense strand starting at position 366 of SEQ ID NO: 1244240
uaacguauggucuguauuu

SEQ ID NO: 1475475 - RNA, 19 nt, Artificial Sequence
  Description of Artificial Sequence: Synthetic oligonucleotide
  Antisense strand to SEQ ID NO: 1475474
aaauacagaccauacguua

SEQ ID NO: 1475476 - RNA, 19 nt, Artificial Sequence
  Description of Artificial Sequence: Synthetic oligonucleotide
  Sense strand starting at position 421 of SEQ ID NO: 1244240
ugguauucaggagaccgau

SEQ ID NO: 1475477 - RNA, 19 nt, Artificial Sequence
  Description of Artificial Sequence: Synthetic oligonucleotide
  Antisense strand to SEQ ID NO: 1475476
aucggucuccugaauacca

SEQ ID NO: 1475478 - RNA, 19 nt, Artificial Sequence
  Description of Artificial Sequence: Synthetic oligonucleotide
  Sense strand starting at position 434 of SEQ ID NO: 1244240
accgaugcuguauaagaau

SEQ ID NO: 1475479 - RNA, 19 nt, Artificial Sequence
  Description of Artificial Sequence: Synthetic oligonucleotide
  Antisense strand to SEQ ID NO: 1475478
auucuuauacagcaucggu

SEQ ID NO: 1475480 - RNA, 19 nt, Artificial Sequence
  Description of Artificial Sequence: Synthetic oligonucleotide
  Sense strand starting at position 498 of SEQ ID NO: 1244240
gucuccugaguccacaaua

SEQ ID NO: 1475481 - RNA, 19 nt, Artificial Sequence
  Description of Artificial Sequence: Synthetic oligonucleotide
  Antisense strand to SEQ ID NO: 1475480
uauuguggacucaggagac

SEQ ID NO: 1475482 - RNA, 19 nt, Artificial Sequence
  Description of Artificial Sequence: Synthetic oligonucleotide
  Sense strand starting at position 549 of SEQ ID NO: 1244240
gaaugaauggcuggucaga

SEQ ID NO: 1475483 - RNA, 19 nt, Artificial Sequence
  Description of Artificial Sequence: Synthetic oligonucleotide
  Antisense strand to SEQ ID NO: 1475482
ucugaccagccauucauuc

SEQ ID NO: 1475484 - RNA, 19 nt, Artificial Sequence
  Description of Artificial Sequence: Synthetic oligonucleotide
  Sense strand starting at position 698 of SEQ ID NO: 1244240
gucagauuauuccucucau

SEQ ID NO: 1475485 - RNA, 19 nt, Artificial Sequence
  Description of Artificial Sequence: Synthetic oligonucleotide
  Antisense strand to SEQ ID NO: 1475484
augagaggaauaaucugac

SEQ ID NO: 1475486 - RNA, 19 nt, Artificial Sequence
  Description of Artificial Sequence: Synthetic oligonucleotide
  Sense strand starting at position 774 of SEQ ID NO: 1244240
uauauugggaguuaaacgu

SEQ ID NO: 1475487 - RNA, 19 nt, Artificial Sequence
  Description of Artificial Sequence: Synthetic oligonucleotide
  Antisense strand to SEQ ID NO: 1475486
acguuuaacucccaauaua

SEQ ID NO: 1475488 - RNA, 19 nt, Artificial Sequence
  Description of Artificial Sequence: Synthetic oligonucleotide
  Sense strand starting at position 780 of SEQ ID NO: 1244240
gggaguuaaacguaagugu

SEQ ID NO: 1475489 - RNA, 19 nt, Artificial Sequence
  Description of Artificial Sequence: Synthetic oligonucleotide
  Antisense strand to SEQ ID NO: 1475488
acacuuacguuuaacuccc

SEQ ID NO: 1475490 - RNA, 19 nt, Artificial Sequence
  Description of Artificial Sequence: Synthetic oligonucleotide
  Sense strand starting at position 2194 of SEQ ID NO: 1244240
aauugugaguuacucauag

SEQ ID NO: 1475491 - RNA, 19 nt, Artificial Sequence
  Description of Artificial Sequence: Synthetic oligonucleotide
  Antisense strand to SEQ ID NO: 1475490
cuaugaguaacucacaauu

SEQ ID NO: 1475492 - RNA, 19 nt, Artificial Sequence
  Description of Artificial Sequence: Synthetic oligonucleotide
  Sense strand starting at position 2348 of SEQ ID NO: 1244240
uguauauagacuuggaagu

SEQ ID NO: 1475493 - RNA, 19 nt, Artificial Sequence
  Description of Artificial Sequence: Synthetic oligonucleotide
  Antisense strand to SEQ ID NO: 1475492
acuuccaagucuauauaca

SEQ ID NO: 1475494 - RNA, 19 nt, Artificial Sequence
  Description of Artificial Sequence: Synthetic oligonucleotide
  Sense strand starting at position 2512 of SEQ ID NO: 1244240
cuuugaaugucacuuggga

SEQ ID NO: 1475495 - RNA, 19 nt, Artificial Sequence
  Description of Artificial Sequence: Synthetic oligonucleotide
  Antisense strand to SEQ ID NO: 1475494
ucccaagugacauucaaag

SEQ ID NO: 1475496 - RNA, 19 nt, Artificial Sequence
  Description of Artificial Sequence: Synthetic oligonucleotide
  Sense strand starting at position 2514 of SEQ ID NO: 1244240
uugaaugucacuugggaag

SEQ ID NO: 1475497 - RNA, 19 nt, Artificial Sequence
  Description of Artificial Sequence: Synthetic oligonucleotide
  Antisense strand to SEQ ID NO: 1475496
cuucccaagugacauucaa

SEQ ID NO: 1475498 - RNA, 19 nt, Artificial Sequence
  Description of Artificial Sequence: Synthetic oligonucleotide
  Sense strand starting at position 2592 of SEQ ID NO: 1244240
gaaaucugcugagauuuag

SEQ ID NO: 1475499 - RNA, 19 nt, Artificial Sequence
  Description of Artificial Sequence: Synthetic oligonucleotide
  Antisense strand to SEQ ID NO: 1475498
cuaaaucucagcagauuuc

SEQ ID NO: 1475500 - RNA, 19 nt, Artificial Sequence
  Description of Artificial Sequence: Synthetic oligonucleotide
  Sense strand starting at position 2647 of SEQ ID NO: 1244240
cauucugacuugucuggga

SEQ ID NO: 1475501 - RNA, 19 nt, Artificial Sequence
  Description of Artificial Sequence: Synthetic oligonucleotide
  Antisense strand to SEQ ID NO: 1475500
ucccagacaagucagaaug

SEQ ID NO: 1475502 - RNA, 19 nt, Artificial Sequence
  Description of Artificial Sequence: Synthetic oligonucleotide
  Sense strand starting at position 2706 of SEQ ID NO: 1244240
acguaacuucuugagauuc

SEQ ID NO: 1475503 - RNA, 19 nt, Artificial Sequence
  Description of Artificial Sequence: Synthetic oligonucleotide
  Antisense strand to SEQ ID NO: 1475502
gaaucucaagaaguuacgu

SEQ ID NO: 1475504 - RNA, 19 nt, Artificial Sequence
  Description of Artificial Sequence: Synthetic oligonucleotide
  Sense strand starting at position 2782 of SEQ ID NO: 1244240
gaaguaagcguugaaauuc

SEQ ID NO: 1475505 - RNA, 19 nt, Artificial Sequence
  Description of Artificial Sequence: Synthetic oligonucleotide
  Antisense strand to SEQ ID NO: 1475504
gaauuucaacgcuuacuuc

SEQ ID NO: 1475506 - RNA, 19 nt, Artificial Sequence
  Description of Artificial Sequence: Synthetic oligonucleotide
  Sense strand starting at position 2942 of SEQ ID NO: 1244240
ggaguucuaacauguugaa

SEQ ID NO: 1475507 - RNA, 19 nt, Artificial Sequence
  Description of Artificial Sequence: Synthetic oligonucleotide
  Antisense strand to SEQ ID NO: 1475506
uucaacauguuagaacucc

SEQ ID NO: 1475508 - RNA, 19 nt, Artificial Sequence
  Description of Artificial Sequence: Synthetic oligonucleotide
  Sense strand starting at position 2964 of SEQ ID NO: 1244240
auugucuagguauaucauu

SEQ ID NO: 1475509 - RNA, 19 nt, Artificial Sequence
  Description of Artificial Sequence: Synthetic oligonucleotide
  Antisense strand to SEQ ID NO: 1475508
aaugauauaccuagacaau

SEQ ID NO: 1475510 - RNA, 19 nt, Artificial Sequence
  Description of Artificial Sequence: Synthetic oligonucleotide
  Sense strand starting at position 3316 of SEQ ID NO: 1244240
gguaauuaucuuuaagcca

SEQ ID NO: 1475511 - RNA, 19 nt, Artificial Sequence
  Description of Artificial Sequence: Synthetic oligonucleotide
  Antisense strand to SEQ ID NO: 1475510
uggcuuaaagauaauuacc

SEQ ID NO: 1475512 - RNA, 19 nt, Artificial Sequence
  Description of Artificial Sequence: Synthetic oligonucleotide
  Sense strand starting at position 3323 of SEQ ID NO: 1244240
aucuuuaagccauauagug

SEQ ID NO: 1475513 - RNA, 19 nt, Artificial Sequence
  Description of Artificial Sequence: Synthetic oligonucleotide
  Antisense strand to SEQ ID NO: 1475512
cacuauauggcuuaaagau

SEQ ID NO: 1475514 - RNA, 19 nt, Artificial Sequence
  Description of Artificial Sequence: Synthetic oligonucleotide
  Sense strand starting at position 3354 of SEQ ID NO: 1244240
ucuauagcucaggauacuu

SEQ ID NO: 1475515 - RNA, 19 nt, Artificial Sequence
  Description of Artificial Sequence: Synthetic oligonucleotide
  Antisense strand to SEQ ID NO: 1475514
aaguauccugagcuauaga

SEQ ID NO: 1475516 - RNA, 19 nt, Artificial Sequence
  Description of Artificial Sequence: Synthetic oligonucleotide
  Sense strand starting at position 3359 of SEQ ID NO: 1244240
agcucaggauacuuaguaa

SEQ ID NO: 1475517 - RNA, 19 nt, Artificial Sequence
  Description of Artificial Sequence: Synthetic oligonucleotide
  Antisense strand to SEQ ID NO: 1475516
uuacuaaguauccugagcu

SEQ ID NO: 1475518 - RNA, 19 nt, Artificial Sequence
  Description of Artificial Sequence: Synthetic oligonucleotide
  Sense strand starting at position 3362 of SEQ ID NO: 1244240
ucaggauacuuaguaagug

SEQ ID NO: 1475519 - RNA, 19 nt, Artificial Sequence
  Description of Artificial Sequence: Synthetic oligonucleotide
  Antisense strand to SEQ ID NO: 1475518
cacuuacuaaguauccuga

SEQ ID NO: 1475520 - RNA, 19 nt, Artificial Sequence
  Description of Artificial Sequence: Synthetic oligonucleotide
  Sense strand starting at position 3482 of SEQ ID NO: 1244240
aucugaagccugugaggga

SEQ ID NO: 1475521 - RNA, 19 nt, Artificial Sequence
  Description of Artificial Sequence: Synthetic oligonucleotide
  Antisense strand to SEQ ID NO: 1475520
ucccucacaggcuucagau

SEQ ID NO: 1475522 - RNA, 19 nt, Artificial Sequence
  Description of Artificial Sequence: Synthetic oligonucleotide
  Sense strand starting at position 3495 of SEQ ID NO: 1244240
gagggaaguacauguucca

SEQ ID NO: 1475523 - RNA, 19 nt, Artificial Sequence
  Description of Artificial Sequence: Synthetic oligonucleotide
  Antisense strand to SEQ ID NO: 1475522
uggaacauguacuucccuc

SEQ ID NO: 1475524 - RNA, 19 nt, Artificial Sequence
  Description of Artificial Sequence: Synthetic oligonucleotide
  Sense strand starting at position 3529 of SEQ ID NO: 1244240
cuuguugaugucuaucauu

SEQ ID NO: 1475525 - RNA, 19 nt, Artificial Sequence
  Description of Artificial Sequence: Synthetic oligonucleotide
  Antisense strand to SEQ ID NO: 1475524
aaugauagacaucaacaag

SEQ ID NO: 1475526 - RNA, 19 nt, Artificial Sequence
  Description of Artificial Sequence: Synthetic oligonucleotide
  Sense strand starting at position 3545 of SEQ ID NO: 1244240
auuuccauguguguuugau

SEQ ID NO: 1475527 - RNA, 19 nt, Artificial Sequence
  Description of Artificial Sequence: Synthetic oligonucleotide
  Antisense strand to SEQ ID NO: 1475526
aucaaacacacauggaaau

SEQ ID NO: 1475528 - RNA, 19 nt, Artificial Sequence
  Description of Artificial Sequence: Synthetic oligonucleotide
  Sense strand starting at position 3582 of SEQ ID NO: 1244240
gcaugcugucucugaauuu

SEQ ID NO: 1475529 - RNA, 19 nt, Artificial Sequence
  Description of Artificial Sequence: Synthetic oligonucleotide
  Antisense strand to SEQ ID NO: 1475528
aaauucagagacagcaugc

SEQ ID NO: 1475530 - RNA, 19 nt, Artificial Sequence
  Description of Artificial Sequence: Synthetic oligonucleotide
  Sense strand starting at position 3797 of SEQ ID NO: 1244240
cacaguggacagugguaua

SEQ ID NO: 1475531 - RNA, 19 nt, Artificial Sequence
  Description of Artificial Sequence: Synthetic oligonucleotide
  Antisense strand to SEQ ID NO: 1475530
uauaccacuguccacugug

SEQ ID NO: 1475532 - RNA, 19 nt, Artificial Sequence
  Description of Artificial Sequence: Synthetic oligonucleotide
  Sense strand starting at position 3867 of SEQ ID NO: 1244240
ggcaguuauccagaccaag

SEQ ID NO: 1475533 - RNA, 19 nt, Artificial Sequence
  Description of Artificial Sequence: Synthetic oligonucleotide
  Antisense strand to SEQ ID NO: 1475532
cuuggucuggauaacugcc

SEQ ID NO: 1475534 - RNA, 19 nt, Artificial Sequence
  Description of Artificial Sequence: Synthetic oligonucleotide
  Sense strand starting at position 3910 of SEQ ID NO: 1244240
gagaauagaacugguggua

SEQ ID NO: 1475535 - RNA, 19 nt, Artificial Sequence
  Description of Artificial Sequence: Synthetic oligonucleotide
  Antisense strand to SEQ ID NO: 1475534
uaccaccaguucuauucuc

SEQ ID NO: 1475536 - RNA, 19 nt, Artificial Sequence
  Description of Artificial Sequence: Synthetic oligonucleotide
  Sense strand starting at position 3913 of SEQ ID NO: 1244240
aauagaacuggugguaaua

SEQ ID NO: 1475537 - RNA, 19 nt, Artificial Sequence
  Description of Artificial Sequence: Synthetic oligonucleotide
  Antisense strand to SEQ ID NO: 1475536
uauuaccaccaguucuauu

SEQ ID NO: 1475538 - RNA, 19 nt, Artificial Sequence
  Description of Artificial Sequence: Synthetic oligonucleotide
  Sense strand starting at position 3949 of SEQ ID NO: 1244240
ucaggugcacuguacuaua

SEQ ID NO: 1475539 - RNA, 19 nt, Artificial Sequence
  Description of Artificial Sequence: Synthetic oligonucleotide
  Antisense strand to SEQ ID NO: 1475538
uauaguacagugcaccuga

SEQ ID NO: 1475540 - RNA, 19 nt, Artificial Sequence
  Description of Artificial Sequence: Synthetic oligonucleotide
  Sense strand starting at position 44 of SEQ ID NO: 1244241
ucaaucuuuccauggguga

SEQ ID NO: 1475541 - RNA, 19 nt, Artificial Sequence
  Description of Artificial Sequence: Synthetic oligonucleotide
  Antisense strand to SEQ ID NO: 1475540
ucacccauggaaagauuga

SEQ ID NO: 1475542 - RNA, 19 nt, Artificial Sequence
  Description of Artificial Sequence: Synthetic oligonucleotide
  Sense strand starting at position 45 of SEQ ID NO: 1244241
caaucuuuccaugggugaa

SEQ ID NO: 1475543 - RNA, 19 nt, Artificial Sequence
  Description of Artificial Sequence: Synthetic oligonucleotide
  Antisense strand to SEQ ID NO: 1475542
uucacccauggaaagauug

SEQ ID NO: 1475544 - RNA, 19 nt, Artificial Sequence
  Description of Artificial Sequence: Synthetic oligonucleotide
  Sense strand starting at position 58 of SEQ ID NO: 1244241
ggugaaugcuuagcuuaca

SEQ ID NO: 1475545 - RNA, 19 nt, Artificial Sequence
  Description of Artificial Sequence: Synthetic oligonucleotide
  Antisense strand to SEQ ID NO: 1475544
uguaagcuaagcauucacc

SEQ ID NO: 1475546 - RNA, 19 nt, Artificial Sequence
  Description of Artificial Sequence: Synthetic oligonucleotide
  Sense strand starting at position 59 of SEQ ID NO: 1244241
gugaaugcuuagcuuacau

SEQ ID NO: 1475547 - RNA, 19 nt, Artificial Sequence
  Description of Artificial Sequence: Synthetic oligonucleotide
  Antisense strand to SEQ ID NO: 1475546
auguaagcuaagcauucac

SEQ ID NO: 1475548 - RNA, 19 nt, Artificial Sequence
  Description of Artificial Sequence: Synthetic oligonucleotide
  Sense strand starting at position 105 of SEQ ID NO: 1244241
ugucuauuaugacuucuau

SEQ ID NO: 1475549 - RNA, 19 nt, Artificial Sequence
  Description of Artificial Sequence: Synthetic oligonucleotide
  Antisense strand to SEQ ID NO: 1475548
auagaagucauaauagaca

SEQ ID NO: 1475550 - RNA, 19 nt, Artificial Sequence
  Description of Artificial Sequence: Synthetic oligonucleotide
  Sense strand starting at position 245 of SEQ ID NO: 1244241
ccuuacuuggcucagagau

SEQ ID NO: 1475551 - RNA, 19 nt, Artificial Sequence
  Description of Artificial Sequence: Synthetic oligonucleotide
  Antisense strand to SEQ ID NO: 1475550
aucucugagccaaguaagg

SEQ ID NO: 1475552 - RNA, 19 nt, Artificial Sequence
  Description of Artificial Sequence: Synthetic oligonucleotide
  Sense strand starting at position 293 of SEQ ID NO: 1244241
uuguguaguuucucaauuc

SEQ ID NO: 1475553 - RNA, 19 nt, Artificial Sequence
  Description of Artificial Sequence: Synthetic oligonucleotide
  Antisense strand to SEQ ID NO: 1475552
gaauugagaaacuacacaa

SEQ ID NO: 1475554 - RNA, 19 nt, Artificial Sequence
  Description of Artificial Sequence: Synthetic oligonucleotide
  Sense strand starting at position 312 of SEQ ID NO: 1244241
ucagcuuuguucuuacaua

SEQ ID NO: 1475555 - RNA, 19 nt, Artificial Sequence
  Description of Artificial Sequence: Synthetic oligonucleotide
  Antisense strand to SEQ ID NO: 1475554
uauguaagaacaaagcuga

SEQ ID NO: 1475556 - RNA, 19 nt, Artificial Sequence
  Description of Artificial Sequence: Synthetic oligonucleotide
  Sense strand starting at position 380 of SEQ ID NO: 1244241
aaauguauggucugcauuu

SEQ ID NO: 1475557 - RNA, 19 nt, Artificial Sequence
  Description of Artificial Sequence: Synthetic oligonucleotide
  Antisense strand to SEQ ID NO: 1475556
aaaugcagaccauacauuu

SEQ ID NO: 1475558 - RNA, 19 nt, Artificial Sequence
  Description of Artificial Sequence: Synthetic oligonucleotide
  Sense strand starting at position 444 of SEQ ID NO: 1244241
ggagaugaaggcuguauaa

SEQ ID NO: 1475559 - RNA, 19 nt, Artificial Sequence
  Description of Artificial Sequence: Synthetic oligonucleotide
  Antisense strand to SEQ ID NO: 1475558
uuauacagccuucaucucc

SEQ ID NO: 1475560 - RNA, 19 nt, Artificial Sequence
  Description of Artificial Sequence: Synthetic oligonucleotide
  Sense strand starting at position 446 of SEQ ID NO: 1244241
agaugaaggcuguauaagu

SEQ ID NO: 1475561 - RNA, 19 nt, Artificial Sequence
  Description of Artificial Sequence: Synthetic oligonucleotide
  Antisense strand to SEQ ID NO: 1475560
acuuauacagccuucaucu

SEQ ID NO: 1475562 - RNA, 19 nt, Artificial Sequence
  Description of Artificial Sequence: Synthetic oligonucleotide
  Sense strand starting at position 474 of SEQ ID NO: 1244241
acaugauauugacaacaag

SEQ ID NO: 1475563 - RNA, 19 nt, Artificial Sequence
  Description of Artificial Sequence: Synthetic oligonucleotide
  Antisense strand to SEQ ID NO: 1475562
cuuguugucaauaucaugu

SEQ ID NO: 1475564 - RNA, 19 nt, Artificial Sequence
  Description of Artificial Sequence: Synthetic oligonucleotide
  Sense strand starting at position 563 of SEQ ID NO: 1244241
gaaugaguggcuggucaga

SEQ ID NO: 1475565 - RNA, 19 nt, Artificial Sequence
  Description of Artificial Sequence: Synthetic oligonucleotide
  Antisense strand to SEQ ID NO: 1475564
ucugaccagccacucauuc

SEQ ID NO: 1475566 - RNA, 19 nt, Artificial Sequence
  Description of Artificial Sequence: Synthetic oligonucleotide
  Sense strand starting at position 661 of SEQ ID NO: 1244241
cacugaggugugggaaauu

SEQ ID NO: 1475567 - RNA, 19 nt, Artificial Sequence
  Description of Artificial Sequence: Synthetic oligonucleotide
  Antisense strand to SEQ ID NO: 1475566
aauuucccacaccucagug

SEQ ID NO: 1475568 - RNA, 19 nt, Artificial Sequence
  Description of Artificial Sequence: Synthetic oligonucleotide
  Sense strand starting at position 708 of SEQ ID NO: 1244241
cugcaaauauaagagauua

SEQ ID NO: 1475569 - RNA, 19 nt, Artificial Sequence
  Description of Artificial Sequence: Synthetic oligonucleotide
  Antisense strand to SEQ ID NO: 1475568
uaaucucuuauauuugcag

SEQ ID NO: 1475570 - RNA, 19 nt, Artificial Sequence
  Description of Artificial Sequence: Synthetic oligonucleotide
  Sense strand starting at position 749 of SEQ ID NO: 1244241
ucaaguauaugacuugcua

SEQ ID NO: 1475571 - RNA, 19 nt, Artificial Sequence
  Description of Artificial Sequence: Synthetic oligonucleotide
  Antisense strand to SEQ ID NO: 1475570
uagcaagucauauacuuga

SEQ ID NO: 1475572 - RNA, 19 nt, Artificial Sequence
  Description of Artificial Sequence: Synthetic oligonucleotide
  Sense strand starting at position 753 of SEQ ID NO: 1244241
guauaugacuugcuaauac

SEQ ID NO: 1475573 - RNA, 19 nt, Artificial Sequence
  Description of Artificial Sequence: Synthetic oligonucleotide
  Antisense strand to SEQ ID NO: 1475572
guauuagcaagucauauac

SEQ ID NO: 1475574 - RNA, 19 nt, Artificial Sequence
  Description of Artificial Sequence: Synthetic oligonucleotide
  Sense strand starting at position 782 of SEQ ID NO: 1244241
ugucauuucuacuauauug

SEQ ID NO: 1475575 - RNA, 19 nt, Artificial Sequence
  Description of Artificial Sequence: Synthetic oligonucleotide
  Antisense strand to SEQ ID NO: 1475574
caauauaguagaaaugaca

SEQ ID NO: 1475576 - RNA, 19 nt, Artificial Sequence
  Description of Artificial Sequence: Synthetic oligonucleotide
  Sense strand starting at position 848 of SEQ ID NO: 1244241
ggacaagagucugcccuuu

SEQ ID NO: 1475577 - RNA, 19 nt, Artificial Sequence
  Description of Artificial Sequence: Synthetic oligonucleotide
  Antisense strand to SEQ ID NO: 1475576
aaagggcagacucuugucc

SEQ ID NO: 1475578 - RNA, 19 nt, Artificial Sequence
  Description of Artificial Sequence: Synthetic oligonucleotide
  Sense strand starting at position 850 of SEQ ID NO: 1244241
acaagagucugcccuuuac

SEQ ID NO: 1475579 - RNA, 19 nt, Artificial Sequence
  Description of Artificial Sequence: Synthetic oligonucleotide
  Antisense strand to SEQ ID NO: 1475578
guaaagggcagacucuugu

SEQ ID NO: 1475580 - RNA, 19 nt, Artificial Sequence
  Description of Artificial Sequence: Synthetic oligonucleotide
  Sense strand starting at position 973 of SEQ ID NO: 1244241
gugauauguguguaaaucu

SEQ ID NO: 1475581 - RNA, 19 nt, Artificial Sequence
  Description of Artificial Sequence: Synthetic oligonucleotide
  Antisense strand to SEQ ID NO: 1475580
agauuuacacacauaucac

SEQ ID NO: 1475582 - RNA, 19 nt, Artificial Sequence
  Description of Artificial Sequence: Synthetic oligonucleotide
  Sense strand starting at position 988 of SEQ ID NO: 1244241
aucucauaucaggaaugcu

SEQ ID NO: 1475583 - RNA, 19 nt, Artificial Sequence
  Description of Artificial Sequence: Synthetic oligonucleotide
  Antisense strand to SEQ ID NO: 1475582
agcauuccugauaugagau

SEQ ID NO: 1475584 - RNA, 19 nt, Artificial Sequence
  Description of Artificial Sequence: Synthetic oligonucleotide
  Sense strand starting at position 2463 of SEQ ID NO: 1244241
caggcaucucucugugcaa

SEQ ID NO: 1475585 - RNA, 19 nt, Artificial Sequence
  Description of Artificial Sequence: Synthetic oligonucleotide
  Antisense strand to SEQ ID NO: 1475584
uugcacagagagaugccug

SEQ ID NO: 1475586 - RNA, 19 nt, Artificial Sequence
  Description of Artificial Sequence: Synthetic oligonucleotide
  Sense strand starting at position 2528 of SEQ ID NO: 1244241
gguguuugucacagugugu

SEQ ID NO: 1475587 - RNA, 19 nt, Artificial Sequence
  Description of Artificial Sequence: Synthetic oligonucleotide
  Antisense strand to SEQ ID NO: 1475586
acacacugugacaaacacc

SEQ ID NO: 1475588 - RNA, 19 nt, Artificial Sequence
  Description of Artificial Sequence: Synthetic oligonucleotide
  Sense strand starting at position 2529 of SEQ ID NO: 1244241
guguuugucacaguguguu

SEQ ID NO: 1475589 - RNA, 19 nt, Artificial Sequence
  Description of Artificial Sequence: Synthetic oligonucleotide
  Antisense strand to SEQ ID NO: 1475588
aacacacugugacaaacac

SEQ ID NO: 1475590 - RNA, 19 nt, Artificial Sequence
  Description of Artificial Sequence: Synthetic oligonucleotide
  Sense strand starting at position 2614 of SEQ ID NO: 1244241
aguaaucuaugcccugagu

SEQ ID NO: 1475591 - RNA, 19 nt, Artificial Sequence
  Description of Artificial Sequence: Synthetic oligonucleotide
  Antisense strand to SEQ ID NO: 1475590
acucagggcauagauuacu

SEQ ID NO: 1475592 - RNA, 19 nt, Artificial Sequence
  Description of Artificial Sequence: Synthetic oligonucleotide
  Sense strand starting at position 2616 of SEQ ID NO: 1244241
uaaucuaugcccugaguga

SEQ ID NO: 1475593 - RNA, 19 nt, Artificial Sequence
  Description of Artificial Sequence: Synthetic oligonucleotide
  Antisense strand to SEQ ID NO: 1475592
ucacucagggcauagauua

SEQ ID NO: 1475594 - RNA, 19 nt, Artificial Sequence
  Description of Artificial Sequence: Synthetic oligonucleotide
  Sense strand starting at position 2617 of SEQ ID NO: 1244241
aaucuaugcccugagugac

SEQ ID NO: 1475595 - RNA, 19 nt, Artificial Sequence
  Description of Artificial Sequence: Synthetic oligonucleotide
  Antisense strand to SEQ ID NO: 1475594
gucacucagggcauagauu

SEQ ID NO: 1475596 - RNA, 19 nt, Artificial Sequence
  Description of Artificial Sequence: Synthetic oligonucleotide
  Sense strand starting at position 2664 of SEQ ID NO: 1244241
gcgauuccagaaugagaau

SEQ ID NO: 1475597 - RNA, 19 nt, Artificial Sequence
  Description of Artificial Sequence: Synthetic oligonucleotide
  Antisense strand to SEQ ID NO: 1475596
auucucauucuggaaucgc

SEQ ID NO: 1475598 - RNA, 19 nt, Artificial Sequence
  Description of Artificial Sequence: Synthetic oligonucleotide
  Sense strand starting at position 2667 of SEQ ID NO: 1244241
auuccagaaugagaaugua

SEQ ID NO: 1475599 - RNA, 19 nt, Artificial Sequence
  Description of Artificial Sequence: Synthetic oligonucleotide
  Antisense strand to SEQ ID NO: 1475598
uacauucucauucuggaau

SEQ ID NO: 1475600 - RNA, 19 nt, Artificial Sequence
  Description of Artificial Sequence: Synthetic oligonucleotide
  Sense strand starting at position 2684 of SEQ ID NO: 1244241
uaggacucucuauggcaua

SEQ ID NO: 1475601 - RNA, 19 nt, Artificial Sequence
  Description of Artificial Sequence: Synthetic oligonucleotide
  Antisense strand to SEQ ID NO: 1475600
uaugccauagagaguccua

SEQ ID NO: 1475602 - RNA, 19 nt, Artificial Sequence
  Description of Artificial Sequence: Synthetic oligonucleotide
  Sense strand starting at position 2696 of SEQ ID NO: 1244241
uggcauaaaugcuugagau

SEQ ID NO: 1475603 - RNA, 19 nt, Artificial Sequence
  Description of Artificial Sequence: Synthetic oligonucleotide
  Antisense strand to SEQ ID NO: 1475602
aucucaagcauuuaugcca

SEQ ID NO: 1475604 - RNA, 19 nt, Artificial Sequence
  Description of Artificial Sequence: Synthetic oligonucleotide
  Sense strand starting at position 2697 of SEQ ID NO: 1244241
ggcauaaaugcuugagauu

SEQ ID NO: 1475605 - RNA, 19 nt, Artificial Sequence
  Description of Artificial Sequence: Synthetic oligonucleotide
  Antisense strand to SEQ ID NO: 1475604
aaucucaagcauuuaugcc

SEQ ID NO: 1475606 - RNA, 19 nt, Artificial Sequence
  Description of Artificial Sequence: Synthetic oligonucleotide
  Sense strand starting at position 2698 of SEQ ID NO: 1244241
gcauaaaugcuugagauuc

SEQ ID NO: 1475607 - RNA, 19 nt, Artificial Sequence
  Description of Artificial Sequence: Synthetic oligonucleotide
  Antisense strand to SEQ ID NO: 1475606
gaaucucaagcauuuaugc

SEQ ID NO: 1475608 - RNA, 19 nt, Artificial Sequence
  Description of Artificial Sequence: Synthetic oligonucleotide
  Sense strand starting at position 3057 of SEQ ID NO: 1244241
uguaauccuguagguaauu

SEQ ID NO: 1475609 - RNA, 19 nt, Artificial Sequence
  Description of Artificial Sequence: Synthetic oligonucleotide
  Antisense strand to SEQ ID NO: 1475608
aauuaccuacaggauuaca

SEQ ID NO: 1475610 - RNA, 19 nt, Artificial Sequence
  Description of Artificial Sequence: Synthetic oligonucleotide
  Sense strand starting at position 3423 of SEQ ID NO: 1244241
agggaaguaucuguuccac

SEQ ID NO: 1475611 - RNA, 19 nt, Artificial Sequence
  Description of Artificial Sequence: Synthetic oligonucleotide
  Antisense strand to SEQ ID NO: 1475610
guggaacagauacuucccu

SEQ ID NO: 1475612 - RNA, 19 nt, Artificial Sequence
  Description of Artificial Sequence: Synthetic oligonucleotide
  Sense strand starting at position 3425 of SEQ ID NO: 1244241
ggaaguaucuguuccacgu

SEQ ID NO: 1475613 - RNA, 19 nt, Artificial Sequence
  Description of Artificial Sequence: Synthetic oligonucleotide
  Antisense strand to SEQ ID NO: 1475612
acguggaacagauacuucc

SEQ ID NO: 1475614 - RNA, 19 nt, Artificial Sequence
  Description of Artificial Sequence: Synthetic oligonucleotide
  Sense strand starting at position 3678 of SEQ ID NO: 1244241
uguguccaugccuagugau

SEQ ID NO: 1475615 - RNA, 19 nt, Artificial Sequence
  Description of Artificial Sequence: Synthetic oligonucleotide
  Antisense strand to SEQ ID NO: 1475614
aucacuaggcauggacaca

SEQ ID NO: 1475616 - RNA, 19 nt, Artificial Sequence
  Description of Artificial Sequence: Synthetic oligonucleotide
  Sense strand starting at position 3716 of SEQ ID NO: 1244241
caacaaucacgguggacaa

SEQ ID NO: 1475617 - RNA, 19 nt, Artificial Sequence
  Description of Artificial Sequence: Synthetic oligonucleotide
  Antisense strand to SEQ ID NO: 1475616
uuguccaccgugauuguug

SEQ ID NO: 1475618 - RNA, 19 nt, Artificial Sequence
  Description of Artificial Sequence: Synthetic oligonucleotide
  Sense strand starting at position 3792 of SEQ ID NO: 1244241
agcaguuaucuagaccaac

SEQ ID NO: 1475619 - RNA, 19 nt, Artificial Sequence
  Description of Artificial Sequence: Synthetic oligonucleotide
  Antisense strand to SEQ ID NO: 1475618
guuggucuagauaacugcu

SEQ ID NO: 1475620 - RNA, 19 nt, Artificial Sequence
  Description of Artificial Sequence: Synthetic oligonucleotide
  Sense strand starting at position 74 of SEQ ID NO: 1244242
gacuuaauguggcuuaaug

SEQ ID NO: 1475621 - RNA, 19 nt, Artificial Sequence
  Description of Artificial Sequence: Synthetic oligonucleotide
  Antisense strand to SEQ ID NO: 1475620
cauuaagccacauuaaguc

SEQ ID NO: 1475622 - RNA, 19 nt, Artificial Sequence
  Description of Artificial Sequence: Synthetic oligonucleotide
  Sense strand starting at position 76 of SEQ ID NO: 1244242
cuuaauguggcuuaaugua

SEQ ID NO: 1475623 - RNA, 19 nt, Artificial Sequence
  Description of Artificial Sequence: Synthetic oligonucleotide
  Antisense strand to SEQ ID NO: 1475622
uacauuaagccacauuaag

SEQ ID NO: 1475624 - RNA, 19 nt, Artificial Sequence
  Description of Artificial Sequence: Synthetic oligonucleotide
  Sense strand starting at position 210 of SEQ ID NO: 1244242
augagauccucucucauga

SEQ ID NO: 1475625 - RNA, 19 nt, Artificial Sequence
  Description of Artificial Sequence: Synthetic oligonucleotide
  Antisense strand to SEQ ID NO: 1475624
ucaugagagaggaucucau

SEQ ID NO: 1475626 - RNA, 19 nt, Artificial Sequence
  Description of Artificial Sequence: Synthetic oligonucleotide
  Sense strand starting at position 272 of SEQ ID NO: 1244242
auaaauagcuggucaaaga

SEQ ID NO: 1475627 - RNA, 19 nt, Artificial Sequence
  Description of Artificial Sequence: Synthetic oligonucleotide
  Antisense strand to SEQ ID NO: 1475626
ucuuugaccagcuauuuau

SEQ ID NO: 1475628 - RNA, 19 nt, Artificial Sequence
  Description of Artificial Sequence: Synthetic oligonucleotide
  Sense strand starting at position 362 of SEQ ID NO: 1244242
uacucacugagguguggaa

SEQ ID NO: 1475629 - RNA, 19 nt, Artificial Sequence
  Description of Artificial Sequence: Synthetic oligonucleotide
  Antisense strand to SEQ ID NO: 1475628
uuccacaccucagugagua

SEQ ID NO: 1475630 - RNA, 19 nt, Artificial Sequence
  Description of Artificial Sequence: Synthetic oligonucleotide
  Sense strand starting at position 414 of SEQ ID NO: 1244242
gucgucugcaaauaugaga

SEQ ID NO: 1475631 - RNA, 19 nt, Artificial Sequence
  Description of Artificial Sequence: Synthetic oligonucleotide
  Antisense strand to SEQ ID NO: 1475630
ucucauauuugcagacgac

SEQ ID NO: 1475632 - RNA, 19 nt, Artificial Sequence
  Description of Artificial Sequence: Synthetic oligonucleotide
  Sense strand starting at position 500 of SEQ ID NO: 1244242
cuacuuuaccgagaguuaa

SEQ ID NO: 1475633 - RNA, 19 nt, Artificial Sequence
  Description of Artificial Sequence: Synthetic oligonucleotide
  Antisense strand to SEQ ID NO: 1475632
uuaacucucgguaaaguag

SEQ ID NO: 1475634 - RNA, 19 nt, Artificial Sequence
  Description of Artificial Sequence: Synthetic oligonucleotide
  Sense strand starting at position 523 of SEQ ID NO: 1244242
aaguguucuugggcagaaa

SEQ ID NO: 1475635 - RNA, 19 nt, Artificial Sequence
  Description of Artificial Sequence: Synthetic oligonucleotide
  Antisense strand to SEQ ID NO: 1475634
uuucugcccaagaacacuu

SEQ ID NO: 1475636 - RNA, 19 nt, Artificial Sequence
  Description of Artificial Sequence: Synthetic oligonucleotide
  Sense strand starting at position 524 of SEQ ID NO: 1244242
aguguucuugggcagaaag

SEQ ID NO: 1475637 - RNA, 19 nt, Artificial Sequence
  Description of Artificial Sequence: Synthetic oligonucleotide
  Antisense strand to SEQ ID NO: 1475636
cuuucugcccaagaacacu

SEQ ID NO: 1475638 - RNA, 19 nt, Artificial Sequence
  Description of Artificial Sequence: Synthetic oligonucleotide
  Sense strand starting at position 901 of SEQ ID NO: 1244242
gcagaaaccuaaguuucuu

SEQ ID NO: 1475639 - RNA, 19 nt, Artificial Sequence
  Description of Artificial Sequence: Synthetic oligonucleotide
  Antisense strand to SEQ ID NO: 1475638
aagaaacuuagguuucugc

SEQ ID NO: 1475640 - RNA, 19 nt, Artificial Sequence
  Description of Artificial Sequence: Synthetic oligonucleotide
  Sense strand starting at position 965 of SEQ ID NO: 1244242
augucuccacauugagaac

SEQ ID NO: 1475641 - RNA, 19 nt, Artificial Sequence
  Description of Artificial Sequence: Synthetic oligonucleotide
  Antisense strand to SEQ ID NO: 1475640
guucucaauguggagacau

SEQ ID NO: 1475642 - RNA, 19 nt, Artificial Sequence
  Description of Artificial Sequence: Synthetic oligonucleotide
  Sense strand starting at position 1119 of SEQ ID NO: 1244242
aucaguaaaguuugaaagu

SEQ ID NO: 1475643 - RNA, 19 nt, Artificial Sequence
  Description of Artificial Sequence: Synthetic oligonucleotide
  Antisense strand to SEQ ID NO: 1475642
acuuucaaacuuuacugau

SEQ ID NO: 1475644 - RNA, 19 nt, Artificial Sequence
  Description of Artificial Sequence: Synthetic oligonucleotide
  Sense strand starting at position 1148 of SEQ ID NO: 1244242
ucugaaagauaagugaguu

SEQ ID NO: 1475645 - RNA, 19 nt, Artificial Sequence
  Description of Artificial Sequence: Synthetic oligonucleotide
  Antisense strand to SEQ ID NO: 1475644
aacucacuuaucuuucaga

SEQ ID NO: 1475646 - RNA, 19 nt, Artificial Sequence
  Description of Artificial Sequence: Synthetic oligonucleotide
  Sense strand starting at position 1239 of SEQ ID NO: 1244242
gcaggaguuccagacaagu

SEQ ID NO: 1475647 - RNA, 19 nt, Artificial Sequence
  Description of Artificial Sequence: Synthetic oligonucleotide
  Antisense strand to SEQ ID NO: 1475646
acuugucuggaacuccugc

SEQ ID NO: 1475648 - RNA, 19 nt, Artificial Sequence
  Description of Artificial Sequence: Synthetic oligonucleotide
  Sense strand starting at position 1247 of SEQ ID NO: 1244242
uccagacaagucugaucaa

SEQ ID NO: 1475649 - RNA, 19 nt, Artificial Sequence
  Description of Artificial Sequence: Synthetic oligonucleotide
  Antisense strand to SEQ ID NO: 1475648
uugaucagacuugucugga

SEQ ID NO: 1475650 - RNA, 19 nt, Artificial Sequence
  Description of Artificial Sequence: Synthetic oligonucleotide
  Sense strand starting at position 1514 of SEQ ID NO: 1244242
gcugcucagcaacaagaau

SEQ ID NO: 1475651 - RNA, 19 nt, Artificial Sequence
  Description of Artificial Sequence: Synthetic oligonucleotide
  Antisense strand to SEQ ID NO: 1475650
auucuuguugcugagcagc

SEQ ID NO: 1475652 - RNA, 19 nt, Artificial Sequence
  Description of Artificial Sequence: Synthetic oligonucleotide
  Sense strand starting at position 2084 of SEQ ID NO: 1244242
acauguggccuccaaaguu

SEQ ID NO: 1475653 - RNA, 19 nt, Artificial Sequence
  Description of Artificial Sequence: Synthetic oligonucleotide
  Antisense strand to SEQ ID NO: 1475652
aacuuuggaggccacaugu

SEQ ID NO: 1475654 - RNA, 19 nt, Artificial Sequence
  Description of Artificial Sequence: Synthetic oligonucleotide
  Sense strand starting at position 2194 of SEQ ID NO: 1244242
uguuaugaaucuuuggaaa

SEQ ID NO: 1475655 - RNA, 19 nt, Artificial Sequence
  Description of Artificial Sequence: Synthetic oligonucleotide
  Antisense strand to SEQ ID NO: 1475654
uuuccaaagauucauaaca

SEQ ID NO: 1475656 - RNA, 19 nt, Artificial Sequence
  Description of Artificial Sequence: Synthetic oligonucleotide
  Sense strand starting at position 2206 of SEQ ID NO: 1244242
uuggaaaguaaggguuuaa

SEQ ID NO: 1475657 - RNA, 19 nt, Artificial Sequence
  Description of Artificial Sequence: Synthetic oligonucleotide
  Antisense strand to SEQ ID NO: 1475656
uuaaacccuuacuuuccaa

SEQ ID NO: 1475658 - RNA, 19 nt, Artificial Sequence
  Description of Artificial Sequence: Synthetic oligonucleotide
  Sense strand starting at position 2421 of SEQ ID NO: 1244242
aagcaugauguugauauau

SEQ ID NO: 1475659 - RNA, 19 nt, Artificial Sequence
  Description of Artificial Sequence: Synthetic oligonucleotide
  Antisense strand to SEQ ID NO: 1475658
auauaucaacaucaugcuu

SEQ ID NO: 1475660 - RNA, 19 nt, Artificial Sequence
  Description of Artificial Sequence: Synthetic oligonucleotide
  Sense strand starting at position 2702 of SEQ ID NO: 1244242
ugauuugucugggacugag

SEQ ID NO: 1475661 - RNA, 19 nt, Artificial Sequence
  Description of Artificial Sequence: Synthetic oligonucleotide
  Antisense strand to SEQ ID NO: 1475660
cucagucccagacaaauca

SEQ ID NO: 1475662 - RNA, 19 nt, Artificial Sequence
  Description of Artificial Sequence: Synthetic oligonucleotide
  Sense strand starting at position 2722 of SEQ ID NO: 1244242
ggcuuaccagcaugagaau

SEQ ID NO: 1475663 - RNA, 19 nt, Artificial Sequence
  Description of Artificial Sequence: Synthetic oligonucleotide
  Antisense strand to SEQ ID NO: 1475662
auucucaugcugguaagcc

SEQ ID NO: 1475664 - RNA, 19 nt, Artificial Sequence
  Description of Artificial Sequence: Synthetic oligonucleotide
  Sense strand starting at position 2748 of SEQ ID NO: 1244242
ugggaauuacugugacauu

SEQ ID NO: 1475665 - RNA, 19 nt, Artificial Sequence
  Description of Artificial Sequence: Synthetic oligonucleotide
  Antisense strand to SEQ ID NO: 1475664
aaugucacaguaauuccca

SEQ ID NO: 1475666 - RNA, 19 nt, Artificial Sequence
  Description of Artificial Sequence: Synthetic oligonucleotide
  Sense strand starting at position 2819 of SEQ ID NO: 1244242
agguuacuggcacaaucau

SEQ ID NO: 1475667 - RNA, 19 nt, Artificial Sequence
  Description of Artificial Sequence: Synthetic oligonucleotide
  Antisense strand to SEQ ID NO: 1475666
augauugugccaguaaccu

SEQ ID NO: 1475668 - RNA, 19 nt, Artificial Sequence
  Description of Artificial Sequence: Synthetic oligonucleotide
  Sense strand starting at position 2921 of SEQ ID NO: 1244242
gagggaauuaggugaguug

SEQ ID NO: 1475669 - RNA, 19 nt, Artificial Sequence
  Description of Artificial Sequence: Synthetic oligonucleotide
  Antisense strand to SEQ ID NO: 1475668
caacucaccuaauucccuc

SEQ ID NO: 1475670 - RNA, 19 nt, Artificial Sequence
  Description of Artificial Sequence: Synthetic oligonucleotide
  Sense strand starting at position 2924 of SEQ ID NO: 1244242
ggaauuaggugaguugaga

SEQ ID NO: 1475671 - RNA, 19 nt, Artificial Sequence
  Description of Artificial Sequence: Synthetic oligonucleotide
  Antisense strand to SEQ ID NO: 1475670
ucucaacucaccuaauucc

SEQ ID NO: 1475672 - RNA, 19 nt, Artificial Sequence
  Description of Artificial Sequence: Synthetic oligonucleotide
  Sense strand starting at position 2932 of SEQ ID NO: 1244242
gugaguugagaugauaucu

SEQ ID NO: 1475673 - RNA, 19 nt, Artificial Sequence
  Description of Artificial Sequence: Synthetic oligonucleotide
  Antisense strand to SEQ ID NO: 1475672
agauaucaucucaacucac

SEQ ID NO: 1475674 - RNA, 19 nt, Artificial Sequence
  Description of Artificial Sequence: Synthetic oligonucleotide
  Sense strand starting at position 2937 of SEQ ID NO: 1244242
uugagaugauaucugauuc

SEQ ID NO: 1475675 - RNA, 19 nt, Artificial Sequence
  Description of Artificial Sequence: Synthetic oligonucleotide
  Antisense strand to SEQ ID NO: 1475674
gaaucagauaucaucucaa

SEQ ID NO: 1475676 - RNA, 19 nt, Artificial Sequence
  Description of Artificial Sequence: Synthetic oligonucleotide
  Sense strand starting at position 2956 of SEQ ID NO: 1244242
cucuuugagguuuaccauu

SEQ ID NO: 1475677 - RNA, 19 nt, Artificial Sequence
  Description of Artificial Sequence: Synthetic oligonucleotide
  Antisense strand to SEQ ID NO: 1475676
aaugguaaaccucaaagag

SEQ ID NO: 1475678 - RNA, 19 nt, Artificial Sequence
  Description of Artificial Sequence: Synthetic oligonucleotide
  Sense strand starting at position 2962 of SEQ ID NO: 1244242
gagguuuaccauuguuuaa

SEQ ID NO: 1475679 - RNA, 19 nt, Artificial Sequence
  Description of Artificial Sequence: Synthetic oligonucleotide
  Antisense strand to SEQ ID NO: 1475678
uuaaacaaugguaaaccuc

SEQ ID NO: 1475680 - RNA, 19 nt, Artificial Sequence
  Description of Artificial Sequence: Synthetic oligonucleotide
  Sense strand starting at position 3323 of SEQ ID NO: 1244242
aggaguuaauauuccauga

SEQ ID NO: 1475681 - RNA, 19 nt, Artificial Sequence
  Description of Artificial Sequence: Synthetic oligonucleotide
  Antisense strand to SEQ ID NO: 1475680
ucauggaauauuaacuccu

SEQ ID NO: 1475682 - RNA, 19 nt, Artificial Sequence
  Description of Artificial Sequence: Synthetic oligonucleotide
  Sense strand starting at position 3327 of SEQ ID NO: 1244242
guuaauauuccaugaggga

SEQ ID NO: 1475683 - RNA, 19 nt, Artificial Sequence
  Description of Artificial Sequence: Synthetic oligonucleotide
  Antisense strand to SEQ ID NO: 1475682
ucccucauggaauauuaac

SEQ ID NO: 1475684 - RNA, 19 nt, Artificial Sequence
  Description of Artificial Sequence: Synthetic oligonucleotide
  Sense strand starting at position 3445 of SEQ ID NO: 1244242
aaaucaaguggcugaaguu

SEQ ID NO: 1475685 - RNA, 19 nt, Artificial Sequence
  Description of Artificial Sequence: Synthetic oligonucleotide
  Antisense strand to SEQ ID NO: 1475684
aacuucagccacuugauuu

SEQ ID NO: 1475686 - RNA, 19 nt, Artificial Sequence
  Description of Artificial Sequence: Synthetic oligonucleotide
  Sense strand starting at position 3446 of SEQ ID NO: 1244242
aaucaaguggcugaaguuu

SEQ ID NO: 1475687 - RNA, 19 nt, Artificial Sequence
  Description of Artificial Sequence: Synthetic oligonucleotide
  Antisense strand to SEQ ID NO: 1475686
aaacuucagccacuugauu

SEQ ID NO: 1475688 - RNA, 19 nt, Artificial Sequence
  Description of Artificial Sequence: Synthetic oligonucleotide
  Sense strand starting at position 3521 of SEQ ID NO: 1244242
gagggcugugagggaaaua

SEQ ID NO: 1475689 - RNA, 19 nt, Artificial Sequence
  Description of Artificial Sequence: Synthetic oligonucleotide
  Antisense strand to SEQ ID NO: 1475688
uauuucccucacagcccuc

SEQ ID NO: 1475690 - RNA, 19 nt, Artificial Sequence
  Description of Artificial Sequence: Synthetic oligonucleotide
  Sense strand starting at position 3556 of SEQ ID NO: 1244242
cuccuugaccuguagaugu

SEQ ID NO: 1475691 - RNA, 19 nt, Artificial Sequence
  Description of Artificial Sequence: Synthetic oligonucleotide
  Antisense strand to SEQ ID NO: 1475690
acaucuacaggucaaggag

SEQ ID NO: 1475692 - RNA, 19 nt, Artificial Sequence
  Description of Artificial Sequence: Synthetic oligonucleotide
  Sense strand starting at position 3569 of SEQ ID NO: 1244242
agaugucuaucuucuccau

SEQ ID NO: 1475693 - RNA, 19 nt, Artificial Sequence
  Description of Artificial Sequence: Synthetic oligonucleotide
  Antisense strand to SEQ ID NO: 1475692
auggagaagauagacaucu

SEQ ID NO: 1475694 - RNA, 19 nt, Artificial Sequence
  Description of Artificial Sequence: Synthetic oligonucleotide
  Sense strand starting at position 3615 of SEQ ID NO: 1244242
augcauccuguuugaauuu

SEQ ID NO: 1475695 - RNA, 19 nt, Artificial Sequence
  Description of Artificial Sequence: Synthetic oligonucleotide
  Antisense strand to SEQ ID NO: 1475694
aaauucaaacaggaugcau

SEQ ID NO: 1475696 - RNA, 19 nt, Artificial Sequence
  Description of Artificial Sequence: Synthetic oligonucleotide
  Sense strand starting at position 3933 of SEQ ID NO: 1244242
gccagugaugaagggagua

SEQ ID NO: 1475697 - RNA, 19 nt, Artificial Sequence
  Description of Artificial Sequence: Synthetic oligonucleotide
  Antisense strand to SEQ ID NO: 1475696
uacucccuucaucacuggc

SEQ ID NO: 1475698 - RNA, 19 nt, Artificial Sequence
  Description of Artificial Sequence: Synthetic oligonucleotide
  Sense strand starting at position 3960 of SEQ ID NO: 1244242
gcggaaacugauggagauu

SEQ ID NO: 1475699 - RNA, 19 nt, Artificial Sequence
  Description of Artificial Sequence: Synthetic oligonucleotide
  Antisense strand to SEQ ID NO: 1475698
aaucuccaucaguuuccgc

SEQ ID NO: 1475700 - RNA, 19 nt, Artificial Sequence
  Description of Artificial Sequence: Synthetic oligonucleotide
  Sense strand starting at position 28 of SEQ ID NO: 1244243
uaguuuagcuauuuggcua

SEQ ID NO: 1475701 - RNA, 19 nt, Artificial Sequence
  Description of Artificial Sequence: Synthetic oligonucleotide
  Antisense strand to SEQ ID NO: 1475700
uagccaaauagcuaaacua

SEQ ID NO: 1475702 - RNA, 19 nt, Artificial Sequence
  Description of Artificial Sequence: Synthetic oligonucleotide
  Sense strand starting at position 31 of SEQ ID NO: 1244243
uuuagcuauuuggcuauga

SEQ ID NO: 1475703 - RNA, 19 nt, Artificial Sequence
  Description of Artificial Sequence: Synthetic oligonucleotide
  Antisense strand to SEQ ID NO: 1475702
ucauagccaaauagcuaaa

SEQ ID NO: 1475704 - RNA, 19 nt, Artificial Sequence
  Description of Artificial Sequence: Synthetic oligonucleotide
  Sense strand starting at position 36 of SEQ ID NO: 1244243
cuauuuggcuaugacaaac

SEQ ID NO: 1475705 - RNA, 19 nt, Artificial Sequence
  Description of Artificial Sequence: Synthetic oligonucleotide
  Antisense strand to SEQ ID NO: 1475704
guuugucauagccaaauag

SEQ ID NO: 1475706 - RNA, 19 nt, Artificial Sequence
  Description of Artificial Sequence: Synthetic oligonucleotide
  Sense strand starting at position 62 of SEQ ID NO: 1244243
aguugcaccucacuugaaa

SEQ ID NO: 1475707 - RNA, 19 nt, Artificial Sequence
  Description of Artificial Sequence: Synthetic oligonucleotide
  Antisense strand to SEQ ID NO: 1475706
uuucaagugaggugcaacu

SEQ ID NO: 1475708 - RNA, 19 nt, Artificial Sequence
  Description of Artificial Sequence: Synthetic oligonucleotide
  Sense strand starting at position 1047 of SEQ ID NO: 1244243
aaaguaauccuagguugac

SEQ ID NO: 1475709 - RNA, 19 nt, Artificial Sequence
  Description of Artificial Sequence: Synthetic oligonucleotide
  Antisense strand to SEQ ID NO: 1475708
gucaaccuaggauuacuuu

SEQ ID NO: 1475710 - RNA, 19 nt, Artificial Sequence
  Description of Artificial Sequence: Synthetic oligonucleotide
  Sense strand starting at position 1048 of SEQ ID NO: 1244243
aaguaauccuagguugaca

SEQ ID NO: 1475711 - RNA, 19 nt, Artificial Sequence
  Description of Artificial Sequence: Synthetic oligonucleotide
  Antisense strand to SEQ ID NO: 1475710
ugucaaccuaggauuacuu

SEQ ID NO: 1475712 - RNA, 19 nt, Artificial Sequence
  Description of Artificial Sequence: Synthetic oligonucleotide
  Sense strand starting at position 1050 of SEQ ID NO: 1244243
guaauccuagguugacaga

SEQ ID NO: 1475713 - RNA, 19 nt, Artificial Sequence
  Description of Artificial Sequence: Synthetic oligonucleotide
  Antisense strand to SEQ ID NO: 1475712
ucugucaaccuaggauuac

SEQ ID NO: 1475714 - RNA, 19 nt, Artificial Sequence
  Description of Artificial Sequence: Synthetic oligonucleotide
  Sense strand starting at position 1069 of SEQ ID NO: 1244243
guuuaaaugccaugucuaa

SEQ ID NO: 1475715 - RNA, 19 nt, Artificial Sequence
  Description of Artificial Sequence: Synthetic oligonucleotide
  Antisense strand to SEQ ID NO: 1475714
uuagacauggcauuuaaac

SEQ ID NO: 1475716 - RNA, 19 nt, Artificial Sequence
  Description of Artificial Sequence: Synthetic oligonucleotide
  Sense strand starting at position 1130 of SEQ ID NO: 1244243
ucuguauaauucucaaguc

SEQ ID NO: 1475717 - RNA, 19 nt, Artificial Sequence
  Description of Artificial Sequence: Synthetic oligonucleotide
  Antisense strand to SEQ ID NO: 1475716
gacuugagaauuauacaga

SEQ ID NO: 1475718 - RNA, 19 nt, Artificial Sequence
  Description of Artificial Sequence: Synthetic oligonucleotide
  Sense strand starting at position 1168 of SEQ ID NO: 1244243
ugagcugcuucuguuuaaa

SEQ ID NO: 1475719 - RNA, 19 nt, Artificial Sequence
  Description of Artificial Sequence: Synthetic oligonucleotide
  Antisense strand to SEQ ID NO: 1475718
uuuaaacagaagcagcuca

SEQ ID NO: 1475720 - RNA, 19 nt, Artificial Sequence
  Description of Artificial Sequence: Synthetic oligonucleotide
  Sense strand starting at position 1205 of SEQ ID NO: 1244243
ugggaugcagcuuauugaa

SEQ ID NO: 1475721 - RNA, 19 nt, Artificial Sequence
  Description of Artificial Sequence: Synthetic oligonucleotide
  Antisense strand to SEQ ID NO: 1475720
uucaauaagcugcauccca

SEQ ID NO: 1475722 - RNA, 19 nt, Artificial Sequence
  Description of Artificial Sequence: Synthetic oligonucleotide
  Sense strand starting at position 1207 of SEQ ID NO: 1244243
ggaugcagcuuauugaaga

SEQ ID NO: 1475723 - RNA, 19 nt, Artificial Sequence
  Description of Artificial Sequence: Synthetic oligonucleotide
  Antisense strand to SEQ ID NO: 1475722
ucuucaauaagcugcaucc

SEQ ID NO: 1475724 - RNA, 19 nt, Artificial Sequence
  Description of Artificial Sequence: Synthetic oligonucleotide
  Sense strand starting at position 1212 of SEQ ID NO: 1244243
cagcuuauugaagacaguu

SEQ ID NO: 1475725 - RNA, 19 nt, Artificial Sequence
  Description of Artificial Sequence: Synthetic oligonucleotide
  Antisense strand to SEQ ID NO: 1475724
aacugucuucaauaagcug

SEQ ID NO: 1475726 - RNA, 19 nt, Artificial Sequence
  Description of Artificial Sequence: Synthetic oligonucleotide
  Sense strand starting at position 1244 of SEQ ID NO: 1244243
aguuauauuccacagcuuu

SEQ ID NO: 1475727 - RNA, 19 nt, Artificial Sequence
  Description of Artificial Sequence: Synthetic oligonucleotide
  Antisense strand to SEQ ID NO: 1475726
aaagcuguggaauauaacu

SEQ ID NO: 1475728 - RNA, 19 nt, Artificial Sequence
  Description of Artificial Sequence: Synthetic oligonucleotide
  Sense strand starting at position 1263 of SEQ ID NO: 1244243
cauguuauauguguuaggu

SEQ ID NO: 1475729 - RNA, 19 nt, Artificial Sequence
  Description of Artificial Sequence: Synthetic oligonucleotide
  Antisense strand to SEQ ID NO: 1475728
accuaacacauauaacaug

SEQ ID NO: 1475730 - RNA, 19 nt, Artificial Sequence
  Description of Artificial Sequence: Synthetic oligonucleotide
  Sense strand starting at position 1314 of SEQ ID NO: 1244243
cuacuaugagacugaauuc

SEQ ID NO: 1475731 - RNA, 19 nt, Artificial Sequence
  Description of Artificial Sequence: Synthetic oligonucleotide
  Antisense strand to SEQ ID NO: 1475730
gaauucagucucauaguag

SEQ ID NO: 1475732 - RNA, 19 nt, Artificial Sequence
  Description of Artificial Sequence: Synthetic oligonucleotide
  Sense strand starting at position 1324 of SEQ ID NO: 1244243
acugaauucuggcuuggau

SEQ ID NO: 1475733 - RNA, 19 nt, Artificial Sequence
  Description of Artificial Sequence: Synthetic oligonucleotide
  Antisense strand to SEQ ID NO: 1475732
auccaagccagaauucagu

SEQ ID NO: 1475734 - RNA, 19 nt, Artificial Sequence
  Description of Artificial Sequence: Synthetic oligonucleotide
  Sense strand starting at position 1326 of SEQ ID NO: 1244243
ugaauucuggcuuggauaa

SEQ ID NO: 1475735 - RNA, 19 nt, Artificial Sequence
  Description of Artificial Sequence: Synthetic oligonucleotide
  Antisense strand to SEQ ID NO: 1475734
uuauccaagccagaauuca

SEQ ID NO: 1475736 - RNA, 19 nt, Artificial Sequence
  Description of Artificial Sequence: Synthetic oligonucleotide
  Sense strand starting at position 1327 of SEQ ID NO: 1244243
gaauucuggcuuggauaaa

SEQ ID NO: 1475737 - RNA, 19 nt, Artificial Sequence
  Description of Artificial Sequence: Synthetic oligonucleotide
  Antisense strand to SEQ ID NO: 1475736
uuuauccaagccagaauuc

SEQ ID NO: 1475738 - RNA, 19 nt, Artificial Sequence
  Description of Artificial Sequence: Synthetic oligonucleotide
  Sense strand starting at position 1351 of SEQ ID NO: 1244243
auuggagaaugccaauuua

SEQ ID NO: 1475739 - RNA, 19 nt, Artificial Sequence
  Description of Artificial Sequence: Synthetic oligonucleotide
  Antisense strand to SEQ ID NO: 1475738
uaaauuggcauucuccaau

SEQ ID NO: 1475740 - RNA, 19 nt, Artificial Sequence
  Description of Artificial Sequence: Synthetic oligonucleotide
  Sense strand starting at position 1376 of SEQ ID NO: 1244243
uaauuauuaggguguuuga

SEQ ID NO: 1475741 - RNA, 19 nt, Artificial Sequence
  Description of Artificial Sequence: Synthetic oligonucleotide
  Antisense strand to SEQ ID NO: 1475740
ucaaacacccuaauaauua

SEQ ID NO: 1475742 - RNA, 19 nt, Artificial Sequence
  Description of Artificial Sequence: Synthetic oligonucleotide
  Sense strand starting at position 1379 of SEQ ID NO: 1244243
uuauuaggguguuugacaa

SEQ ID NO: 1475743 - RNA, 19 nt, Artificial Sequence
  Description of Artificial Sequence: Synthetic oligonucleotide
  Antisense strand to SEQ ID NO: 1475742
uugucaaacacccuaauaa

SEQ ID NO: 1475744 - RNA, 19 nt, Artificial Sequence
  Description of Artificial Sequence: Synthetic oligonucleotide
  Sense strand starting at position 1581 of SEQ ID NO: 1244243
aggauaccauuugaagauu

SEQ ID NO: 1475745 - RNA, 19 nt, Artificial Sequence
  Description of Artificial Sequence: Synthetic oligonucleotide
  Antisense strand to SEQ ID NO: 1475744
aaucuucaaaugguauccu

SEQ ID NO: 1475746 - RNA, 19 nt, Artificial Sequence
  Description of Artificial Sequence: Synthetic oligonucleotide
  Sense strand starting at position 1759 of SEQ ID NO: 1244243
guccacauguucucugaau

SEQ ID NO: 1475747 - RNA, 19 nt, Artificial Sequence
  Description of Artificial Sequence: Synthetic oligonucleotide
  Antisense strand to SEQ ID NO: 1475746
auucagagaacauguggac

SEQ ID NO: 1475748 - RNA, 19 nt, Artificial Sequence
  Description of Artificial Sequence: Synthetic oligonucleotide
  Sense strand starting at position 1761 of SEQ ID NO: 1244243
ccacauguucucugaauag

SEQ ID NO: 1475749 - RNA, 19 nt, Artificial Sequence
  Description of Artificial Sequence: Synthetic oligonucleotide
  Antisense strand to SEQ ID NO: 1475748
cuauucagagaacaugugg

SEQ ID NO: 1475750 - RNA, 19 nt, Artificial Sequence
  Description of Artificial Sequence: Synthetic oligonucleotide
  Sense strand starting at position 1776 of SEQ ID NO: 1244243
auagauacucugugccuga

SEQ ID NO: 1475751 - RNA, 19 nt, Artificial Sequence
  Description of Artificial Sequence: Synthetic oligonucleotide
  Antisense strand to SEQ ID NO: 1475750
ucaggcacagaguaucuau

SEQ ID NO: 1475752 - RNA, 19 nt, Artificial Sequence
  Description of Artificial Sequence: Synthetic oligonucleotide
  Sense strand starting at position 1777 of SEQ ID NO: 1244243
uagauacucugugccugaa

SEQ ID NO: 1475753 - RNA, 19 nt, Artificial Sequence
  Description of Artificial Sequence: Synthetic oligonucleotide
  Antisense strand to SEQ ID NO: 1475752
uucaggcacagaguaucua

SEQ ID NO: 1475754 - RNA, 19 nt, Artificial Sequence
  Description of Artificial Sequence: Synthetic oligonucleotide
  Sense strand starting at position 2066 of SEQ ID NO: 1244243
guuugcaacagcuagagau

SEQ ID NO: 1475755 - RNA, 19 nt, Artificial Sequence
  Description of Artificial Sequence: Synthetic oligonucleotide
  Antisense strand to SEQ ID NO: 1475754
aucucuagcuguugcaaac

SEQ ID NO: 1475756 - RNA, 19 nt, Artificial Sequence
  Description of Artificial Sequence: Synthetic oligonucleotide
  Sense strand starting at position 2587 of SEQ ID NO: 1244243
acaauaauguuuguccauu

SEQ ID NO: 1475757 - RNA, 19 nt, Artificial Sequence
  Description of Artificial Sequence: Synthetic oligonucleotide
  Antisense strand to SEQ ID NO: 1475756
aauggacaaacauuauugu

SEQ ID NO: 1475758 - RNA, 19 nt, Artificial Sequence
  Description of Artificial Sequence: Synthetic oligonucleotide
  Sense strand starting at position 2694 of SEQ ID NO: 1244243
uggcaucuucuagaccaaa

SEQ ID NO: 1475759 - RNA, 19 nt, Artificial Sequence
  Description of Artificial Sequence: Synthetic oligonucleotide
  Antisense strand to SEQ ID NO: 1475758
uuuggucuagaagaugcca

SEQ ID NO: 1475760 - RNA, 19 nt, Artificial Sequence
  Description of Artificial Sequence: Synthetic oligonucleotide
  Sense strand starting at position 2735 of SEQ ID NO: 1244243
agggcuaucaggugauacu

SEQ ID NO: 1475761 - RNA, 19 nt, Artificial Sequence
  Description of Artificial Sequence: Synthetic oligonucleotide
  Antisense strand to SEQ ID NO: 1475760
aguaucaccugauagcccu

SEQ ID NO: 1475762 - RNA, 19 nt, Artificial Sequence
  Description of Artificial Sequence: Synthetic oligonucleotide
  Sense strand starting at position 2794 of SEQ ID NO: 1244243
ccaguaccagaaugagauu

SEQ ID NO: 1475763 - RNA, 19 nt, Artificial Sequence
  Description of Artificial Sequence: Synthetic oligonucleotide
  Antisense strand to SEQ ID NO: 1475762
aaucucauucugguacugg

SEQ ID NO: 1475764 - RNA, 19 nt, Artificial Sequence
  Description of Artificial Sequence: Synthetic oligonucleotide
  Sense strand starting at position 2947 of SEQ ID NO: 1244243
aagguuuaauggccacaca

SEQ ID NO: 1475765 - RNA, 19 nt, Artificial Sequence
  Description of Artificial Sequence: Synthetic oligonucleotide
  Antisense strand to SEQ ID NO: 1475764
uguguggccauuaaaccuu

SEQ ID NO: 1475766 - RNA, 19 nt, Artificial Sequence
  Description of Artificial Sequence: Synthetic oligonucleotide
  Sense strand starting at position 3054 of SEQ ID NO: 1244243
aauggauaaucugagagac

SEQ ID NO: 1475767 - RNA, 19 nt, Artificial Sequence
  Description of Artificial Sequence: Synthetic oligonucleotide
  Antisense strand to SEQ ID NO: 1475766
gucucucagauuauccauu

SEQ ID NO: 1475768 - RNA, 19 nt, Artificial Sequence
  Description of Artificial Sequence: Synthetic oligonucleotide
  Sense strand starting at position 3130 of SEQ ID NO: 1244243
cacagcuugcuagaaggaa

SEQ ID NO: 1475769 - RNA, 19 nt, Artificial Sequence
  Description of Artificial Sequence: Synthetic oligonucleotide
  Antisense strand to SEQ ID NO: 1475768
uuccuucuagcaagcugug

SEQ ID NO: 1475770 - RNA, 19 nt, Artificial Sequence
  Description of Artificial Sequence: Synthetic oligonucleotide
  Sense strand starting at position 3205 of SEQ ID NO: 1244243
aaaggagcucauuauaguu

SEQ ID NO: 1475771 - RNA, 19 nt, Artificial Sequence
  Description of Artificial Sequence: Synthetic oligonucleotide
  Antisense strand to SEQ ID NO: 1475770
aacuauaaugagcuccuuu

SEQ ID NO: 1475772 - RNA, 19 nt, Artificial Sequence
  Description of Artificial Sequence: Synthetic oligonucleotide
  Sense strand starting at position 3259 of SEQ ID NO: 1244243
acaugacaauuugguggau

SEQ ID NO: 1475773 - RNA, 19 nt, Artificial Sequence
  Description of Artificial Sequence: Synthetic oligonucleotide
  Antisense strand to SEQ ID NO: 1475772
auccaccaaauugucaugu

SEQ ID NO: 1475774 - RNA, 19 nt, Artificial Sequence
  Description of Artificial Sequence: Synthetic oligonucleotide
  Sense strand starting at position 3261 of SEQ ID NO: 1244243
augacaauuugguggauua

SEQ ID NO: 1475775 - RNA, 19 nt, Artificial Sequence
  Description of Artificial Sequence: Synthetic oligonucleotide
  Antisense strand to SEQ ID NO: 1475774
uaauccaccaaauugucau

SEQ ID NO: 1475776 - RNA, 19 nt, Artificial Sequence
  Description of Artificial Sequence: Synthetic oligonucleotide
  Sense strand starting at position 3510 of SEQ ID NO: 1244243
cguggugucguggugucau

SEQ ID NO: 1475777 - RNA, 19 nt, Artificial Sequence
  Description of Artificial Sequence: Synthetic oligonucleotide
  Antisense strand to SEQ ID NO: 1475776
augacaccacgacaccacg

SEQ ID NO: 1475778 - RNA, 19 nt, Artificial Sequence
  Description of Artificial Sequence: Synthetic oligonucleotide
  Sense strand starting at position 3914 of SEQ ID NO: 1244243
gggaaauuauuagcaaugu

SEQ ID NO: 1475779 - RNA, 19 nt, Artificial Sequence
  Description of Artificial Sequence: Synthetic oligonucleotide
  Antisense strand to SEQ ID NO: 1475778
acauugcuaauaauuuccc

SEQ ID NO: 1475780 - RNA, 19 nt, Artificial Sequence
  Description of Artificial Sequence: Synthetic oligonucleotide
  Sense strand starting at position 44 of SEQ ID NO: 1244244
gcauguagucacuaucuau

SEQ ID NO: 1475781 - RNA, 19 nt, Artificial Sequence
  Description of Artificial Sequence: Synthetic oligonucleotide
  Antisense strand to SEQ ID NO: 1475780
auagauagugacuacaugc

SEQ ID NO: 1475782 - RNA, 19 nt, Artificial Sequence
  Description of Artificial Sequence: Synthetic oligonucleotide
  Sense strand starting at position 47 of SEQ ID NO: 1244244
uguagucacuaucuaucaa

SEQ ID NO: 1475783 - RNA, 19 nt, Artificial Sequence
  Description of Artificial Sequence: Synthetic oligonucleotide
  Antisense strand to SEQ ID NO: 1475782
uugauagauagugacuaca

SEQ ID NO: 1475784 - RNA, 19 nt, Artificial Sequence
  Description of Artificial Sequence: Synthetic oligonucleotide
  Sense strand starting at position 415 of SEQ ID NO: 1244244
gcaccagaucugcagaaca

SEQ ID NO: 1475785 - RNA, 19 nt, Artificial Sequence
  Description of Artificial Sequence: Synthetic oligonucleotide
  Antisense strand to SEQ ID NO: 1475784
uguucugcagaucuggugc

SEQ ID NO: 1475786 - RNA, 19 nt, Artificial Sequence
  Description of Artificial Sequence: Synthetic oligonucleotide
  Sense strand starting at position 428 of SEQ ID NO: 1244244
agaacauauucgucuuaua

SEQ ID NO: 1475787 - RNA, 19 nt, Artificial Sequence
  Description of Artificial Sequence: Synthetic oligonucleotide
  Antisense strand to SEQ ID NO: 1475786
uauaagacgaauauguucu

SEQ ID NO: 1475788 - RNA, 19 nt, Artificial Sequence
  Description of Artificial Sequence: Synthetic oligonucleotide
  Sense strand starting at position 448 of SEQ ID NO: 1244244
aacugauguuggucaugag

SEQ ID NO: 1475789 - RNA, 19 nt, Artificial Sequence
  Description of Artificial Sequence: Synthetic oligonucleotide
  Antisense strand to SEQ ID NO: 1475788
cucaugaccaacaucaguu

SEQ ID NO: 1475790 - RNA, 19 nt, Artificial Sequence
  Description of Artificial Sequence: Synthetic oligonucleotide
  Sense strand starting at position 449 of SEQ ID NO: 1244244
acugauguuggucaugaga

SEQ ID NO: 1475791 - RNA, 19 nt, Artificial Sequence
  Description of Artificial Sequence: Synthetic oligonucleotide
  Antisense strand to SEQ ID NO: 1475790
ucucaugaccaacaucagu

SEQ ID NO: 1475792 - RNA, 19 nt, Artificial Sequence
  Description of Artificial Sequence: Synthetic oligonucleotide
  Sense strand starting at position 694 of SEQ ID NO: 1244244
ggagauuacuccuccauug

SEQ ID NO: 1475793 - RNA, 19 nt, Artificial Sequence
  Description of Artificial Sequence: Synthetic oligonucleotide
  Antisense strand to SEQ ID NO: 1475792
caauggaggaguaaucucc

SEQ ID NO: 1475794 - RNA, 19 nt, Artificial Sequence
  Description of Artificial Sequence: Synthetic oligonucleotide
  Sense strand starting at position 696 of SEQ ID NO: 1244244
agauuacuccuccauuguu

SEQ ID NO: 1475795 - RNA, 19 nt, Artificial Sequence
  Description of Artificial Sequence: Synthetic oligonucleotide
  Antisense strand to SEQ ID NO: 1475794
aacaauggaggaguaaucu

SEQ ID NO: 1475796 - RNA, 19 nt, Artificial Sequence
  Description of Artificial Sequence: Synthetic oligonucleotide
  Sense strand starting at position 781 of SEQ ID NO: 1244244
aaauauaagugcucuugga

SEQ ID NO: 1475797 - RNA, 19 nt, Artificial Sequence
  Description of Artificial Sequence: Synthetic oligonucleotide
  Antisense strand to SEQ ID NO: 1475796
uccaagagcacuuauauuu

SEQ ID NO: 1475798 - RNA, 19 nt, Artificial Sequence
  Description of Artificial Sequence: Synthetic oligonucleotide
  Sense strand starting at position 785 of SEQ ID NO: 1244244
auaagugcucuuggacaga

SEQ ID NO: 1475799 - RNA, 19 nt, Artificial Sequence
  Description of Artificial Sequence: Synthetic oligonucleotide
  Antisense strand to SEQ ID NO: 1475798
ucuguccaagagcacuuau

SEQ ID NO: 1475800 - RNA, 19 nt, Artificial Sequence
  Description of Artificial Sequence: Synthetic oligonucleotide
  Sense strand starting at position 818 of SEQ ID NO: 1244244
ccuuaaaucugagucugca

SEQ ID NO: 1475801 - RNA, 19 nt, Artificial Sequence
  Description of Artificial Sequence: Synthetic oligonucleotide
  Antisense strand to SEQ ID NO: 1475800
ugcagacucagauuuaagg

SEQ ID NO: 1475802 - RNA, 19 nt, Artificial Sequence
  Description of Artificial Sequence: Synthetic oligonucleotide
  Sense strand starting at position 868 of SEQ ID NO: 1244244
uuuccucagcuggaaagua

SEQ ID NO: 1475803 - RNA, 19 nt, Artificial Sequence
  Description of Artificial Sequence: Synthetic oligonucleotide
  Antisense strand to SEQ ID NO: 1475802
uacuuuccagcugaggaaa

SEQ ID NO: 1475804 - RNA, 19 nt, Artificial Sequence
  Description of Artificial Sequence: Synthetic oligonucleotide
  Sense strand starting at position 925 of SEQ ID NO: 1244244
uuagguaacauguauggua

SEQ ID NO: 1475805 - RNA, 19 nt, Artificial Sequence
  Description of Artificial Sequence: Synthetic oligonucleotide
  Antisense strand to SEQ ID NO: 1475804
uaccauacauguuaccuaa

SEQ ID NO: 1475806 - RNA, 19 nt, Artificial Sequence
  Description of Artificial Sequence: Synthetic oligonucleotide
  Sense strand starting at position 932 of SEQ ID NO: 1244244
acauguaugguauggaaua

SEQ ID NO: 1475807 - RNA, 19 nt, Artificial Sequence
  Description of Artificial Sequence: Synthetic oligonucleotide
  Antisense strand to SEQ ID NO: 1475806
uauuccauaccauacaugu

SEQ ID NO: 1475808 - RNA, 19 nt, Artificial Sequence
  Description of Artificial Sequence: Synthetic oligonucleotide
  Sense strand starting at position 942 of SEQ ID NO: 1244244
uauggaauauguguguaaa

SEQ ID NO: 1475809 - RNA, 19 nt, Artificial Sequence
  Description of Artificial Sequence: Synthetic oligonucleotide
  Antisense strand to SEQ ID NO: 1475808
uuuacacacauauuccaua

SEQ ID NO: 1475810 - RNA, 19 nt, Artificial Sequence
  Description of Artificial Sequence: Synthetic oligonucleotide
  Sense strand starting at position 943 of SEQ ID NO: 1244244
auggaauauguguguaaau

SEQ ID NO: 1475811 - RNA, 19 nt, Artificial Sequence
  Description of Artificial Sequence: Synthetic oligonucleotide
  Antisense strand to SEQ ID NO: 1475810
auuuacacacauauuccau

SEQ ID NO: 1475812 - RNA, 19 nt, Artificial Sequence
  Description of Artificial Sequence: Synthetic oligonucleotide
  Sense strand starting at position 945 of SEQ ID NO: 1244244
ggaauauguguguaaaucc

SEQ ID NO: 1475813 - RNA, 19 nt, Artificial Sequence
  Description of Artificial Sequence: Synthetic oligonucleotide
  Antisense strand to SEQ ID NO: 1475812
ggauuuacacacauauucc

SEQ ID NO: 1475814 - RNA, 19 nt, Artificial Sequence
  Description of Artificial Sequence: Synthetic oligonucleotide
  Sense strand starting at position 1008 of SEQ ID NO: 1244244
gaaggacagcuuugaguuu

SEQ ID NO: 1475815 - RNA, 19 nt, Artificial Sequence
  Description of Artificial Sequence: Synthetic oligonucleotide
  Antisense strand to SEQ ID NO: 1475814
aaacucaaagcuguccuuc

SEQ ID NO: 1475816 - RNA, 19 nt, Artificial Sequence
  Description of Artificial Sequence: Synthetic oligonucleotide
  Sense strand starting at position 1014 of SEQ ID NO: 1244244
cagcuuugaguuuauuaag

SEQ ID NO: 1475817 - RNA, 19 nt, Artificial Sequence
  Description of Artificial Sequence: Synthetic oligonucleotide
  Antisense strand to SEQ ID NO: 1475816
cuuaauaaacucaaagcug

SEQ ID NO: 1475818 - RNA, 19 nt, Artificial Sequence
  Description of Artificial Sequence: Synthetic oligonucleotide
  Sense strand starting at position 1139 of SEQ ID NO: 1244244
uugugaagauuauugauca

SEQ ID NO: 1475819 - RNA, 19 nt, Artificial Sequence
  Description of Artificial Sequence: Synthetic oligonucleotide
  Antisense strand to SEQ ID NO: 1475818
ugaucaauaaucuucacaa

SEQ ID NO: 1475820 - RNA, 19 nt, Artificial Sequence
  Description of Artificial Sequence: Synthetic oligonucleotide
  Sense strand starting at position 2020 of SEQ ID NO: 1244244
uggacuucuguucagaggu

SEQ ID NO: 1475821 - RNA, 19 nt, Artificial Sequence
  Description of Artificial Sequence: Synthetic oligonucleotide
  Antisense strand to SEQ ID NO: 1475820
accucugaacagaagucca

SEQ ID NO: 1475822 - RNA, 19 nt, Artificial Sequence
  Description of Artificial Sequence: Synthetic oligonucleotide
  Sense strand starting at position 2035 of SEQ ID NO: 1244244
aggugaauuucccaggauc

SEQ ID NO: 1475823 - RNA, 19 nt, Artificial Sequence
  Description of Artificial Sequence: Synthetic oligonucleotide
  Antisense strand to SEQ ID NO: 1475822
gauccugggaaauucaccu

SEQ ID NO: 1475824 - RNA, 19 nt, Artificial Sequence
  Description of Artificial Sequence: Synthetic oligonucleotide
  Sense strand starting at position 2229 of SEQ ID NO: 1244244
ugcuuaauuguggauuacu

SEQ ID NO: 1475825 - RNA, 19 nt, Artificial Sequence
  Description of Artificial Sequence: Synthetic oligonucleotide
  Antisense strand to SEQ ID NO: 1475824
aguaauccacaauuaagca

SEQ ID NO: 1475826 - RNA, 19 nt, Artificial Sequence
  Description of Artificial Sequence: Synthetic oligonucleotide
  Sense strand starting at position 2232 of SEQ ID NO: 1244244
uuaauuguggauuacucau

SEQ ID NO: 1475827 - RNA, 19 nt, Artificial Sequence
  Description of Artificial Sequence: Synthetic oligonucleotide
  Antisense strand to SEQ ID NO: 1475826
augaguaauccacaauuaa

SEQ ID NO: 1475828 - RNA, 19 nt, Artificial Sequence
  Description of Artificial Sequence: Synthetic oligonucleotide
  Sense strand starting at position 2633 of SEQ ID NO: 1244244
ggagaaguccagugggauu

SEQ ID NO: 1475829 - RNA, 19 nt, Artificial Sequence
  Description of Artificial Sequence: Synthetic oligonucleotide
  Antisense strand to SEQ ID NO: 1475828
aaucccacuggacuucucc

SEQ ID NO: 1475830 - RNA, 19 nt, Artificial Sequence
  Description of Artificial Sequence: Synthetic oligonucleotide
  Sense strand starting at position 2650 of SEQ ID NO: 1244244
uuuagauagcaucaggcaa

SEQ ID NO: 1475831 - RNA, 19 nt, Artificial Sequence
  Description of Artificial Sequence: Synthetic oligonucleotide
  Antisense strand to SEQ ID NO: 1475830
uugccugaugcuaucuaaa

SEQ ID NO: 1475832 - RNA, 19 nt, Artificial Sequence
  Description of Artificial Sequence: Synthetic oligonucleotide
  Sense strand starting at position 2696 of SEQ ID NO: 1244244
ugauuugucugggagagag

SEQ ID NO: 1475833 - RNA, 19 nt, Artificial Sequence
  Description of Artificial Sequence: Synthetic oligonucleotide
  Antisense strand to SEQ ID NO: 1475832
cucucucccagacaaauca

SEQ ID NO: 1475834 - RNA, 19 nt, Artificial Sequence
  Description of Artificial Sequence: Synthetic oligonucleotide
  Sense strand starting at position 2736 of SEQ ID NO: 1244244
ugggacuuuguguaacaua

SEQ ID NO: 1475835 - RNA, 19 nt, Artificial Sequence
  Description of Artificial Sequence: Synthetic oligonucleotide
  Antisense strand to SEQ ID NO: 1475834
uauguuacacaaaguccca

SEQ ID NO: 1475836 - RNA, 19 nt, Artificial Sequence
  Description of Artificial Sequence: Synthetic oligonucleotide
  Sense strand starting at position 2750 of SEQ ID NO: 1244244
acauaagugcuuuagacuc

SEQ ID NO: 1475837 - RNA, 19 nt, Artificial Sequence
  Description of Artificial Sequence: Synthetic oligonucleotide
  Antisense strand to SEQ ID NO: 1475836
gagucuaaagcacuuaugu

SEQ ID NO: 1475838 - RNA, 19 nt, Artificial Sequence
  Description of Artificial Sequence: Synthetic oligonucleotide
  Sense strand starting at position 2756 of SEQ ID NO: 1244244
gugcuuuagacucaggcaa

SEQ ID NO: 1475839 - RNA, 19 nt, Artificial Sequence
  Description of Artificial Sequence: Synthetic oligonucleotide
  Antisense strand to SEQ ID NO: 1475838
uugccugagucuaaagcac

SEQ ID NO: 1475840 - RNA, 19 nt, Artificial Sequence
  Description of Artificial Sequence: Synthetic oligonucleotide
  Sense strand starting at position 3195 of SEQ ID NO: 1244244
agguaauaauuauugccua

SEQ ID NO: 1475841 - RNA, 19 nt, Artificial Sequence
  Description of Artificial Sequence: Synthetic oligonucleotide
  Antisense strand to SEQ ID NO: 1475840
uaggcaauaauuauuaccu

SEQ ID NO: 1475842 - RNA, 19 nt, Artificial Sequence
  Description of Artificial Sequence: Synthetic oligonucleotide
  Sense strand starting at position 3297 of SEQ ID NO: 1244244
uggcauguaggagaaugua

SEQ ID NO: 1475843 - RNA, 19 nt, Artificial Sequence
  Description of Artificial Sequence: Synthetic oligonucleotide
  Antisense strand to SEQ ID NO: 1475842
uacauucuccuacaugcca

SEQ ID NO: 1475844 - RNA, 19 nt, Artificial Sequence
  Description of Artificial Sequence: Synthetic oligonucleotide
  Sense strand starting at position 3417 of SEQ ID NO: 1244244
aggcuagcagucuggauuu

SEQ ID NO: 1475845 - RNA, 19 nt, Artificial Sequence
  Description of Artificial Sequence: Synthetic oligonucleotide
  Antisense strand to SEQ ID NO: 1475844
aaauccagacugcuagccu

SEQ ID NO: 1475846 - RNA, 19 nt, Artificial Sequence
  Description of Artificial Sequence: Synthetic oligonucleotide
  Sense strand starting at position 3585 of SEQ ID NO: 1244244
cuauacaggcaucaguaau

SEQ ID NO: 1475847 - RNA, 19 nt, Artificial Sequence
  Description of Artificial Sequence: Synthetic oligonucleotide
  Antisense strand to SEQ ID NO: 1475846
auuacugaugccuguauag

SEQ ID NO: 1475848 - RNA, 19 nt, Artificial Sequence
  Description of Artificial Sequence: Synthetic oligonucleotide
  Sense strand starting at position 3610 of SEQ ID NO: 1244244
ucagaagccugauuccaau

SEQ ID NO: 1475849 - RNA, 19 nt, Artificial Sequence
  Description of Artificial Sequence: Synthetic oligonucleotide
  Antisense strand to SEQ ID NO: 1475848
auuggaaucaggcuucuga

SEQ ID NO: 1475850 - RNA, 19 nt, Artificial Sequence
  Description of Artificial Sequence: Synthetic oligonucleotide
  Sense strand starting at position 3616 of SEQ ID NO: 1244244
gccugauuccaauaugacu

SEQ ID NO: 1475851 - RNA, 19 nt, Artificial Sequence
  Description of Artificial Sequence: Synthetic oligonucleotide
  Antisense strand to SEQ ID NO: 1475850
agucauauuggaaucaggc

SEQ ID NO: 1475852 - RNA, 19 nt, Artificial Sequence
  Description of Artificial Sequence: Synthetic oligonucleotide
  Sense strand starting at position 3632 of SEQ ID NO: 1244244
acuggaucuuaaguaauua

SEQ ID NO: 1475853 - RNA, 19 nt, Artificial Sequence
  Description of Artificial Sequence: Synthetic oligonucleotide
  Antisense strand to SEQ ID NO: 1475852
uaauuacuuaagauccagu

SEQ ID NO: 1475854 - RNA, 19 nt, Artificial Sequence
  Description of Artificial Sequence: Synthetic oligonucleotide
  Sense strand starting at position 3858 of SEQ ID NO: 1244244
cuggcuauccaucacaguu

SEQ ID NO: 1475855 - RNA, 19 nt, Artificial Sequence
  Description of Artificial Sequence: Synthetic oligonucleotide
  Antisense strand to SEQ ID NO: 1475854
aacugugauggauagccag

SEQ ID NO: 1475856 - RNA, 19 nt, Artificial Sequence
  Description of Artificial Sequence: Synthetic oligonucleotide
  Sense strand starting at position 3887 of SEQ ID NO: 1244244
gaauaaaucugaguagagc

SEQ ID NO: 1475857 - RNA, 19 nt, Artificial Sequence
  Description of Artificial Sequence: Synthetic oligonucleotide
  Antisense strand to SEQ ID NO: 1475856
gcucuacucagauuuauuc

SEQ ID NO: 1475858 - RNA, 19 nt, Artificial Sequence
  Description of Artificial Sequence: Synthetic oligonucleotide
  Sense strand starting at position 3911 of SEQ ID NO: 1244244
gcagaucauagauaacguu

SEQ ID NO: 1475859 - RNA, 19 nt, Artificial Sequence
  Description of Artificial Sequence: Synthetic oligonucleotide
  Antisense strand to SEQ ID NO: 1475858
aacguuaucuaugaucugc

SEQ ID NO: 1475860 - RNA, 19 nt, Artificial Sequence
  Description of Artificial Sequence: Synthetic oligonucleotide
  Sense strand starting at position 239 of SEQ ID NO: 1244245
gagauaauggauugugcca

SEQ ID NO: 1475861 - RNA, 19 nt, Artificial Sequence
  Description of Artificial Sequence: Synthetic oligonucleotide
  Antisense strand to SEQ ID NO: 1475860
uggcacaauccauuaucuc

SEQ ID NO: 1475862 - RNA, 19 nt, Artificial Sequence
  Description of Artificial Sequence: Synthetic oligonucleotide
  Sense strand starting at position 244 of SEQ ID NO: 1244245
aauggauugugccaagucu

SEQ ID NO: 1475863 - RNA, 19 nt, Artificial Sequence
  Description of Artificial Sequence: Synthetic oligonucleotide
  Antisense strand to SEQ ID NO: 1475862
agacuuggcacaauccauu

SEQ ID NO: 1475864 - RNA, 19 nt, Artificial Sequence
  Description of Artificial Sequence: Synthetic oligonucleotide
  Sense strand starting at position 292 of SEQ ID NO: 1244245
ccagcuuuguucuuacuua

SEQ ID NO: 1475865 - RNA, 19 nt, Artificial Sequence
  Description of Artificial Sequence: Synthetic oligonucleotide
  Antisense strand to SEQ ID NO: 1475864
uaaguaagaacaaagcugg

SEQ ID NO: 1475866 - RNA, 19 nt, Artificial Sequence
  Description of Artificial Sequence: Synthetic oligonucleotide
  Sense strand starting at position 323 of SEQ ID NO: 1244245
acgucucaauuaugggaca

SEQ ID NO: 1475867 - RNA, 19 nt, Artificial Sequence
  Description of Artificial Sequence: Synthetic oligonucleotide
  Antisense strand to SEQ ID NO: 1475866
ugucccauaauugagacgu

SEQ ID NO: 1475868 - RNA, 19 nt, Artificial Sequence
  Description of Artificial Sequence: Synthetic oligonucleotide
  Sense strand starting at position 324 of SEQ ID NO: 1244245
cgucucaauuaugggacaa

SEQ ID NO: 1475869 - RNA, 19 nt, Artificial Sequence
  Description of Artificial Sequence: Synthetic oligonucleotide
  Antisense strand to SEQ ID NO: 1475868
uugucccauaauugagacg

SEQ ID NO: 1475870 - RNA, 19 nt, Artificial Sequence
  Description of Artificial Sequence: Synthetic oligonucleotide
  Sense strand starting at position 326 of SEQ ID NO: 1244245
ucucaauuaugggacaaau

SEQ ID NO: 1475871 - RNA, 19 nt, Artificial Sequence
  Description of Artificial Sequence: Synthetic oligonucleotide
  Antisense strand to SEQ ID NO: 1475870
auuugucccauaauugaga

SEQ ID NO: 1475872 - RNA, 19 nt, Artificial Sequence
  Description of Artificial Sequence: Synthetic oligonucleotide
  Sense strand starting at position 348 of SEQ ID NO: 1244245
cuuaauguggcauaaggua

SEQ ID NO: 1475873 - RNA, 19 nt, Artificial Sequence
  Description of Artificial Sequence: Synthetic oligonucleotide
  Antisense strand to SEQ ID NO: 1475872
uaccuuaugccacauuaag

SEQ ID NO: 1475874 - RNA, 19 nt, Artificial Sequence
  Description of Artificial Sequence: Synthetic oligonucleotide
  Sense strand starting at position 451 of SEQ ID NO: 1244245
uuuacaugauaucgagaau

SEQ ID NO: 1475875 - RNA, 19 nt, Artificial Sequence
  Description of Artificial Sequence: Synthetic oligonucleotide
  Antisense strand to SEQ ID NO: 1475874
auucucgauaucauguaaa

SEQ ID NO: 1475876 - RNA, 19 nt, Artificial Sequence
  Description of Artificial Sequence: Synthetic oligonucleotide
  Sense strand starting at position 482 of SEQ ID NO: 1244245
augagacucucucaugagu

SEQ ID NO: 1475877 - RNA, 19 nt, Artificial Sequence
  Description of Artificial Sequence: Synthetic oligonucleotide
  Antisense strand to SEQ ID NO: 1475876
acucaugagagagucucau

SEQ ID NO: 1475878 - RNA, 19 nt, Artificial Sequence
  Description of Artificial Sequence: Synthetic oligonucleotide
  Sense strand starting at position 495 of SEQ ID NO: 1244245
augaguccacaaugaauuc

SEQ ID NO: 1475879 - RNA, 19 nt, Artificial Sequence
  Description of Artificial Sequence: Synthetic oligonucleotide
  Antisense strand to SEQ ID NO: 1475878
gaauucauuguggacucau

SEQ ID NO: 1475880 - RNA, 19 nt, Artificial Sequence
  Description of Artificial Sequence: Synthetic oligonucleotide
  Sense strand starting at position 1986 of SEQ ID NO: 1244245
uggaguucuguucagaggu

SEQ ID NO: 1475881 - RNA, 19 nt, Artificial Sequence
  Description of Artificial Sequence: Synthetic oligonucleotide
  Antisense strand to SEQ ID NO: 1475880
accucugaacagaacucca

SEQ ID NO: 1475882 - RNA, 19 nt, Artificial Sequence
  Description of Artificial Sequence: Synthetic oligonucleotide
  Sense strand starting at position 1988 of SEQ ID NO: 1244245
gaguucuguucagagguga

SEQ ID NO: 1475883 - RNA, 19 nt, Artificial Sequence
  Description of Artificial Sequence: Synthetic oligonucleotide
  Antisense strand to SEQ ID NO: 1475882
ucaccucugaacagaacuc

SEQ ID NO: 1475884 - RNA, 19 nt, Artificial Sequence
  Description of Artificial Sequence: Synthetic oligonucleotide
  Sense strand starting at position 2205 of SEQ ID NO: 1244245
auagacacuuuguuugaga

SEQ ID NO: 1475885 - RNA, 19 nt, Artificial Sequence
  Description of Artificial Sequence: Synthetic oligonucleotide
  Antisense strand to SEQ ID NO: 1475884
ucucaaacaaagugucuau

SEQ ID NO: 1475886 - RNA, 19 nt, Artificial Sequence
  Description of Artificial Sequence: Synthetic oligonucleotide
  Sense strand starting at position 2206 of SEQ ID NO: 1244245
uagacacuuuguuugagau

SEQ ID NO: 1475887 - RNA, 19 nt, Artificial Sequence
  Description of Artificial Sequence: Synthetic oligonucleotide
  Antisense strand to SEQ ID NO: 1475886
aucucaaacaaagugucua

SEQ ID NO: 1475888 - RNA, 19 nt, Artificial Sequence
  Description of Artificial Sequence: Synthetic oligonucleotide
  Sense strand starting at position 2207 of SEQ ID NO: 1244245
agacacuuuguuugagaua

SEQ ID NO: 1475889 - RNA, 19 nt, Artificial Sequence
  Description of Artificial Sequence: Synthetic oligonucleotide
  Antisense strand to SEQ ID NO: 1475888
uaucucaaacaaagugucu

SEQ ID NO: 1475890 - RNA, 19 nt, Artificial Sequence
  Description of Artificial Sequence: Synthetic oligonucleotide
  Sense strand starting at position 2208 of SEQ ID NO: 1244245
gacacuuuguuugagauaa

SEQ ID NO: 1475891 - RNA, 19 nt, Artificial Sequence
  Description of Artificial Sequence: Synthetic oligonucleotide
  Antisense strand to SEQ ID NO: 1475890
uuaucucaaacaaaguguc

SEQ ID NO: 1475892 - RNA, 19 nt, Artificial Sequence
  Description of Artificial Sequence: Synthetic oligonucleotide
  Sense strand starting at position 2342 of SEQ ID NO: 1244245
uguauauagacugggaagu

SEQ ID NO: 1475893 - RNA, 19 nt, Artificial Sequence
  Description of Artificial Sequence: Synthetic oligonucleotide
  Antisense strand to SEQ ID NO: 1475892
acuucccagucuauauaca

SEQ ID NO: 1475894 - RNA, 19 nt, Artificial Sequence
  Description of Artificial Sequence: Synthetic oligonucleotide
  Sense strand starting at position 2491 of SEQ ID NO: 1244245
cugugccuuuccguuauuu

SEQ ID NO: 1475895 - RNA, 19 nt, Artificial Sequence
  Description of Artificial Sequence: Synthetic oligonucleotide
  Antisense strand to SEQ ID NO: 1475894
aaauaacggaaaggcacag

SEQ ID NO: 1475896 - RNA, 19 nt, Artificial Sequence
  Description of Artificial Sequence: Synthetic oligonucleotide
  Sense strand starting at position 2493 of SEQ ID NO: 1244245
gugccuuuccguuauuuga

SEQ ID NO: 1475897 - RNA, 19 nt, Artificial Sequence
  Description of Artificial Sequence: Synthetic oligonucleotide
  Antisense strand to SEQ ID NO: 1475896
ucaaauaacggaaaggcac

SEQ ID NO: 1475898 - RNA, 19 nt, Artificial Sequence
  Description of Artificial Sequence: Synthetic oligonucleotide
  Sense strand starting at position 2495 of SEQ ID NO: 1244245
gccuuuccguuauuugaac

SEQ ID NO: 1475899 - RNA, 19 nt, Artificial Sequence
  Description of Artificial Sequence: Synthetic oligonucleotide
  Antisense strand to SEQ ID NO: 1475898
guucaaauaacggaaaggc

SEQ ID NO: 1475900 - RNA, 19 nt, Artificial Sequence
  Description of Artificial Sequence: Synthetic oligonucleotide
  Sense strand starting at position 2501 of SEQ ID NO: 1244245
ccguuauuugaacgucacu

SEQ ID NO: 1475901 - RNA, 19 nt, Artificial Sequence
  Description of Artificial Sequence: Synthetic oligonucleotide
  Antisense strand to SEQ ID NO: 1475900
agugacguucaaauaacgg

SEQ ID NO: 1475902 - RNA, 19 nt, Artificial Sequence
  Description of Artificial Sequence: Synthetic oligonucleotide
  Sense strand starting at position 2617 of SEQ ID NO: 1244245
caaacuaugcccugaguga

SEQ ID NO: 1475903 - RNA, 19 nt, Artificial Sequence
  Description of Artificial Sequence: Synthetic oligonucleotide
  Antisense strand to SEQ ID NO: 1475902
ucacucagggcauaguuug

SEQ ID NO: 1475904 - RNA, 19 nt, Artificial Sequence
  Description of Artificial Sequence: Synthetic oligonucleotide
  Sense strand starting at position 2618 of SEQ ID NO: 1244245
aaacuaugcccugagugac

SEQ ID NO: 1475905 - RNA, 19 nt, Artificial Sequence
  Description of Artificial Sequence: Synthetic oligonucleotide
  Antisense strand to SEQ ID NO: 1475904
gucacucagggcauaguuu

SEQ ID NO: 1475906 - RNA, 19 nt, Artificial Sequence
  Description of Artificial Sequence: Synthetic oligonucleotide
  Sense strand starting at position 2643 of SEQ ID NO: 1244245
uucugacuugucugugagu

SEQ ID NO: 1475907 - RNA, 19 nt, Artificial Sequence
  Description of Artificial Sequence: Synthetic oligonucleotide
  Antisense strand to SEQ ID NO: 1475906
acucacagacaagucagaa

SEQ ID NO: 1475908 - RNA, 19 nt, Artificial Sequence
  Description of Artificial Sequence: Synthetic oligonucleotide
  Sense strand starting at position 2645 of SEQ ID NO: 1244245
cugacuugucugugagugu

SEQ ID NO: 1475909 - RNA, 19 nt, Artificial Sequence
  Description of Artificial Sequence: Synthetic oligonucleotide
  Antisense strand to SEQ ID NO: 1475908
acacucacagacaagucag

SEQ ID NO: 1475910 - RNA, 19 nt, Artificial Sequence
  Description of Artificial Sequence: Synthetic oligonucleotide
  Sense strand starting at position 2663 of SEQ ID NO: 1244245
uggcgauuccaggacgaga

SEQ ID NO: 1475911 - RNA, 19 nt, Artificial Sequence
  Description of Artificial Sequence: Synthetic oligonucleotide
  Antisense strand to SEQ ID NO: 1475910
ucucguccuggaaucgcca

SEQ ID NO: 1475912 - RNA, 19 nt, Artificial Sequence
  Description of Artificial Sequence: Synthetic oligonucleotide
  Sense strand starting at position 2665 of SEQ ID NO: 1244245
gcgauuccaggacgagaau

SEQ ID NO: 1475913 - RNA, 19 nt, Artificial Sequence
  Description of Artificial Sequence: Synthetic oligonucleotide
  Antisense strand to SEQ ID NO: 1475912
auucucguccuggaaucgc

SEQ ID NO: 1475914 - RNA, 19 nt, Artificial Sequence
  Description of Artificial Sequence: Synthetic oligonucleotide
  Sense strand starting at position 2686 of SEQ ID NO: 1244245
aggacucucuaugacauaa

SEQ ID NO: 1475915 - RNA, 19 nt, Artificial Sequence
  Description of Artificial Sequence: Synthetic oligonucleotide
  Antisense strand to SEQ ID NO: 1475914
uuaugucauagagaguccu

SEQ ID NO: 1475916 - RNA, 19 nt, Artificial Sequence
  Description of Artificial Sequence: Synthetic oligonucleotide
  Sense strand starting at position 3050 of SEQ ID NO: 1244245
uguaauccuguagguaacu

SEQ ID NO: 1475917 - RNA, 19 nt, Artificial Sequence
  Description of Artificial Sequence: Synthetic oligonucleotide
  Antisense strand to SEQ ID NO: 1475916
aguuaccuacaggauuaca

SEQ ID NO: 1475918 - RNA, 19 nt, Artificial Sequence
  Description of Artificial Sequence: Synthetic oligonucleotide
  Sense strand starting at position 3051 of SEQ ID NO: 1244245
guaauccuguagguaacuu

SEQ ID NO: 1475919 - RNA, 19 nt, Artificial Sequence
  Description of Artificial Sequence: Synthetic oligonucleotide
  Antisense strand to SEQ ID NO: 1475918
aaguuaccuacaggauuac

SEQ ID NO: 1475920 - RNA, 19 nt, Artificial Sequence
  Description of Artificial Sequence: Synthetic oligonucleotide
  Sense strand starting at position 3454 of SEQ ID NO: 1244245
cgaagucuaucaucuccaa

SEQ ID NO: 1475921 - RNA, 19 nt, Artificial Sequence
  Description of Artificial Sequence: Synthetic oligonucleotide
  Antisense strand to SEQ ID NO: 1475920
uuggagaugauagacuucg

SEQ ID NO: 1475922 - RNA, 19 nt, Artificial Sequence
  Description of Artificial Sequence: Synthetic oligonucleotide
  Sense strand starting at position 3600 of SEQ ID NO: 1244245
uuuagaugguucuauuugu

SEQ ID NO: 1475923 - RNA, 19 nt, Artificial Sequence
  Description of Artificial Sequence: Synthetic oligonucleotide
  Antisense strand to SEQ ID NO: 1475922
acaaauagaaccaucuaaa

SEQ ID NO: 1475924 - RNA, 19 nt, Artificial Sequence
  Description of Artificial Sequence: Synthetic oligonucleotide
  Sense strand starting at position 3709 of SEQ ID NO: 1244245
cagcaaucacgguggacaa

SEQ ID NO: 1475925 - RNA, 19 nt, Artificial Sequence
  Description of Artificial Sequence: Synthetic oligonucleotide
  Antisense strand to SEQ ID NO: 1475924
uuguccaccgugauugcug

SEQ ID NO: 1475926 - RNA, 19 nt, Artificial Sequence
  Description of Artificial Sequence: Synthetic oligonucleotide
  Sense strand starting at position 3710 of SEQ ID NO: 1244245
agcaaucacgguggacaau

SEQ ID NO: 1475927 - RNA, 19 nt, Artificial Sequence
  Description of Artificial Sequence: Synthetic oligonucleotide
  Antisense strand to SEQ ID NO: 1475926
auuguccaccgugauugcu

SEQ ID NO: 1475928 - RNA, 19 nt, Artificial Sequence
  Description of Artificial Sequence: Synthetic oligonucleotide
  Sense strand starting at position 3785 of SEQ ID NO: 1244245
agcaguuaucuagaccaaa

SEQ ID NO: 1475929 - RNA, 19 nt, Artificial Sequence
  Description of Artificial Sequence: Synthetic oligonucleotide
  Antisense strand to SEQ ID NO: 1475928
uuuggucuagauaacugcu

SEQ ID NO: 1475930 - RNA, 19 nt, Artificial Sequence
  Description of Artificial Sequence: Synthetic oligonucleotide
  Sense strand starting at position 235 of SEQ ID NO: 1244246
ccauuaucccaagggaacu

SEQ ID NO: 1475931 - RNA, 19 nt, Artificial Sequence
  Description of Artificial Sequence: Synthetic oligonucleotide
  Antisense strand to SEQ ID NO: 1475930
aguucccuugggauaaugg

SEQ ID NO: 1475932 - RNA, 19 nt, Artificial Sequence
  Description of Artificial Sequence: Synthetic oligonucleotide
  Sense strand starting at position 377 of SEQ ID NO: 1244246
ggaggagaaugagaaucaa

SEQ ID NO: 1475933 - RNA, 19 nt, Artificial Sequence
  Description of Artificial Sequence: Synthetic oligonucleotide
  Antisense strand to SEQ ID NO: 1475932
uugauucucauucuccucc

SEQ ID NO: 1475934 - RNA, 19 nt, Artificial Sequence
  Description of Artificial Sequence: Synthetic oligonucleotide
  Sense strand starting at position 547 of SEQ ID NO: 1244246
auugaaugauuggcuggua

SEQ ID NO: 1475935 - RNA, 19 nt, Artificial Sequence
  Description of Artificial Sequence: Synthetic oligonucleotide
  Antisense strand to SEQ ID NO: 1475934
uaccagccaaucauucaau

SEQ ID NO: 1475936 - RNA, 19 nt, Artificial Sequence
  Description of Artificial Sequence: Synthetic oligonucleotide
  Sense strand starting at position 548 of SEQ ID NO: 1244246
uugaaugauuggcugguau

SEQ ID NO: 1475937 - RNA, 19 nt, Artificial Sequence
  Description of Artificial Sequence: Synthetic oligonucleotide
  Antisense strand to SEQ ID NO: 1475936
auaccagccaaucauucaa

SEQ ID NO: 1475938 - RNA, 19 nt, Artificial Sequence
  Description of Artificial Sequence: Synthetic oligonucleotide
  Sense strand starting at position 550 of SEQ ID NO: 1244246
gaaugauuggcugguauag

SEQ ID NO: 1475939 - RNA, 19 nt, Artificial Sequence
  Description of Artificial Sequence: Synthetic oligonucleotide
  Antisense strand to SEQ ID NO: 1475938
cuauaccagccaaucauuc

SEQ ID NO: 1475940 - RNA, 19 nt, Artificial Sequence
  Description of Artificial Sequence: Synthetic oligonucleotide
  Sense strand starting at position 570 of SEQ ID NO: 1244246
ccaauaggaucccugcauu

SEQ ID NO: 1475941 - RNA, 19 nt, Artificial Sequence
  Description of Artificial Sequence: Synthetic oligonucleotide
  Antisense strand to SEQ ID NO: 1475940
aaugcagggauccuauugg

SEQ ID NO: 1475942 - RNA, 19 nt, Artificial Sequence
  Description of Artificial Sequence: Synthetic oligonucleotide
  Sense strand starting at position 652 of SEQ ID NO: 1244246
ggcaauuaauuugggaaga

SEQ ID NO: 1475943 - RNA, 19 nt, Artificial Sequence
  Description of Artificial Sequence: Synthetic oligonucleotide
  Antisense strand to SEQ ID NO: 1475942
ucuucccaaauuaauugcc

SEQ ID NO: 1475944 - RNA, 19 nt, Artificial Sequence
  Description of Artificial Sequence: Synthetic oligonucleotide
  Sense strand starting at position 653 of SEQ ID NO: 1244246
gcaauuaauuugggaagac

SEQ ID NO: 1475945 - RNA, 19 nt, Artificial Sequence
  Description of Artificial Sequence: Synthetic oligonucleotide
  Antisense strand to SEQ ID NO: 1475944
gucuucccaaauuaauugc

SEQ ID NO: 1475946 - RNA, 19 nt, Artificial Sequence
  Description of Artificial Sequence: Synthetic oligonucleotide
  Sense strand starting at position 680 of SEQ ID NO: 1244246
acugaaauguuaucucuug

SEQ ID NO: 1475947 - RNA, 19 nt, Artificial Sequence
  Description of Artificial Sequence: Synthetic oligonucleotide
  Antisense strand to SEQ ID NO: 1475946
caagagauaacauuucagu

SEQ ID NO: 1475948 - RNA, 19 nt, Artificial Sequence
  Description of Artificial Sequence: Synthetic oligonucleotide
  Sense strand starting at position 796 of SEQ ID NO: 1244246
aaauguaagugucuuugga

SEQ ID NO: 1475949 - RNA, 19 nt, Artificial Sequence
  Description of Artificial Sequence: Synthetic oligonucleotide
  Antisense strand to SEQ ID NO: 1475948
uccaaagacacuuacauuu

SEQ ID NO: 1475950 - RNA, 19 nt, Artificial Sequence
  Description of Artificial Sequence: Synthetic oligonucleotide
  Sense strand starting at position 798 of SEQ ID NO: 1244246
auguaagugucuuuggaca

SEQ ID NO: 1475951 - RNA, 19 nt, Artificial Sequence
  Description of Artificial Sequence: Synthetic oligonucleotide
  Antisense strand to SEQ ID NO: 1475950
uguccaaagacacuuacau

SEQ ID NO: 1475952 - RNA, 19 nt, Artificial Sequence
  Description of Artificial Sequence: Synthetic oligonucleotide
  Sense strand starting at position 839 of SEQ ID NO: 1244246
aucagagucuguccacuau

SEQ ID NO: 1475953 - RNA, 19 nt, Artificial Sequence
  Description of Artificial Sequence: Synthetic oligonucleotide
  Antisense strand to SEQ ID NO: 1475952
auaguggacagacucugau

SEQ ID NO: 1475954 - RNA, 19 nt, Artificial Sequence
  Description of Artificial Sequence: Synthetic oligonucleotide
  Sense strand starting at position 849 of SEQ ID NO: 1244246
guccacuauuagcuacaua

SEQ ID NO: 1475955 - RNA, 19 nt, Artificial Sequence
  Description of Artificial Sequence: Synthetic oligonucleotide
  Antisense strand to SEQ ID NO: 1475954
uauguagcuaauaguggac

SEQ ID NO: 1475956 - RNA, 19 nt, Artificial Sequence
  Description of Artificial Sequence: Synthetic oligonucleotide
  Sense strand starting at position 943 of SEQ ID NO: 1244246
ggguaauacauaugguaug

SEQ ID NO: 1475957 - RNA, 19 nt, Artificial Sequence
  Description of Artificial Sequence: Synthetic oligonucleotide
  Antisense strand to SEQ ID NO: 1475956
cauaccauauguauuaccc

SEQ ID NO: 1475958 - RNA, 19 nt, Artificial Sequence
  Description of Artificial Sequence: Synthetic oligonucleotide
  Sense strand starting at position 948 of SEQ ID NO: 1244246
auacauaugguaugugaua

SEQ ID NO: 1475959 - RNA, 19 nt, Artificial Sequence
  Description of Artificial Sequence: Synthetic oligonucleotide
  Antisense strand to SEQ ID NO: 1475958
uaucacauaccauauguau

SEQ ID NO: 1475960 - RNA, 19 nt, Artificial Sequence
  Description of Artificial Sequence: Synthetic oligonucleotide
  Sense strand starting at position 949 of SEQ ID NO: 1244246
uacauaugguaugugauau

SEQ ID NO: 1475961 - RNA, 19 nt, Artificial Sequence
  Description of Artificial Sequence: Synthetic oligonucleotide
  Antisense strand to SEQ ID NO: 1475960
auaucacauaccauaugua

SEQ ID NO: 1475962 - RNA, 19 nt, Artificial Sequence
  Description of Artificial Sequence: Synthetic oligonucleotide
  Sense strand starting at position 960 of SEQ ID NO: 1244246
ugugauauauguguaaauc

SEQ ID NO: 1475963 - RNA, 19 nt, Artificial Sequence
  Description of Artificial Sequence: Synthetic oligonucleotide
  Antisense strand to SEQ ID NO: 1475962
gauuuacacauauaucaca

SEQ ID NO: 1475964 - RNA, 19 nt, Artificial Sequence
  Description of Artificial Sequence: Synthetic oligonucleotide
  Sense strand starting at position 961 of SEQ ID NO: 1244246
gugauauauguguaaaucc

SEQ ID NO: 1475965 - RNA, 19 nt, Artificial Sequence
  Description of Artificial Sequence: Synthetic oligonucleotide
  Antisense strand to SEQ ID NO: 1475964
ggauuuacacauauaucac

SEQ ID NO: 1475966 - RNA, 19 nt, Artificial Sequence
  Description of Artificial Sequence: Synthetic oligonucleotide
  Sense strand starting at position 2153 of SEQ ID NO: 1244246
ucccuuugggauugucaaa

SEQ ID NO: 1475967 - RNA, 19 nt, Artificial Sequence
  Description of Artificial Sequence: Synthetic oligonucleotide
  Antisense strand to SEQ ID NO: 1475966
uuugacaaucccaaaggga

SEQ ID NO: 1475968 - RNA, 19 nt, Artificial Sequence
  Description of Artificial Sequence: Synthetic oligonucleotide
  Sense strand starting at position 2322 of SEQ ID NO: 1244246
augugauaguucuugguga

SEQ ID NO: 1475969 - RNA, 19 nt, Artificial Sequence
  Description of Artificial Sequence: Synthetic oligonucleotide
  Antisense strand to SEQ ID NO: 1475968
ucaccaagaacuaucacau

SEQ ID NO: 1475970 - RNA, 19 nt, Artificial Sequence
  Description of Artificial Sequence: Synthetic oligonucleotide
  Sense strand starting at position 2329 of SEQ ID NO: 1244246
aguucuuggugaucuggga

SEQ ID NO: 1475971 - RNA, 19 nt, Artificial Sequence
  Description of Artificial Sequence: Synthetic oligonucleotide
  Antisense strand to SEQ ID NO: 1475970
ucccagaucaccaagaacu

SEQ ID NO: 1475972 - RNA, 19 nt, Artificial Sequence
  Description of Artificial Sequence: Synthetic oligonucleotide
  Sense strand starting at position 2333 of SEQ ID NO: 1244246
cuuggugaucugggaagcu

SEQ ID NO: 1475973 - RNA, 19 nt, Artificial Sequence
  Description of Artificial Sequence: Synthetic oligonucleotide
  Antisense strand to SEQ ID NO: 1475972
agcuucccagaucaccaag

SEQ ID NO: 1475974 - RNA, 19 nt, Artificial Sequence
  Description of Artificial Sequence: Synthetic oligonucleotide
  Sense strand starting at position 2353 of SEQ ID NO: 1244246
aggaaauucucucugccca

SEQ ID NO: 1475975 - RNA, 19 nt, Artificial Sequence
  Description of Artificial Sequence: Synthetic oligonucleotide
  Antisense strand to SEQ ID NO: 1475974
ugggcagagagaauuuccu

SEQ ID NO: 1475976 - RNA, 19 nt, Artificial Sequence
  Description of Artificial Sequence: Synthetic oligonucleotide
  Sense strand starting at position 2543 of SEQ ID NO: 1244246
caguuauuugaacgucacu

SEQ ID NO: 1475977 - RNA, 19 nt, Artificial Sequence
  Description of Artificial Sequence: Synthetic oligonucleotide
  Antisense strand to SEQ ID NO: 1475976
agugacguucaaauaacug

SEQ ID NO: 1475978 - RNA, 19 nt, Artificial Sequence
  Description of Artificial Sequence: Synthetic oligonucleotide
  Sense strand starting at position 2715 of SEQ ID NO: 1244246
ccgggaugagaauguagaa

SEQ ID NO: 1475979 - RNA, 19 nt, Artificial Sequence
  Description of Artificial Sequence: Synthetic oligonucleotide
  Antisense strand to SEQ ID NO: 1475978
uucuacauucucaucccgg

SEQ ID NO: 1475980 - RNA, 19 nt, Artificial Sequence
  Description of Artificial Sequence: Synthetic oligonucleotide
  Sense strand starting at position 2836 of SEQ ID NO: 1244246
cuuucuuagacggagucuu

SEQ ID NO: 1475981 - RNA, 19 nt, Artificial Sequence
  Description of Artificial Sequence: Synthetic oligonucleotide
  Antisense strand to SEQ ID NO: 1475980
aagacuccgucuaagaaag

SEQ ID NO: 1475982 - RNA, 19 nt, Artificial Sequence
  Description of Artificial Sequence: Synthetic oligonucleotide
  Sense strand starting at position 3290 of SEQ ID NO: 1244246
ccauuacaucuauguuaga

SEQ ID NO: 1475983 - RNA, 19 nt, Artificial Sequence
  Description of Artificial Sequence: Synthetic oligonucleotide
  Antisense strand to SEQ ID NO: 1475982
ucuaacauagauguaaugg

SEQ ID NO: 1475984 - RNA, 19 nt, Artificial Sequence
  Description of Artificial Sequence: Synthetic oligonucleotide
  Sense strand starting at position 3366 of SEQ ID NO: 1244246
agcuaaucacucugucaag

SEQ ID NO: 1475985 - RNA, 19 nt, Artificial Sequence
  Description of Artificial Sequence: Synthetic oligonucleotide
  Antisense strand to SEQ ID NO: 1475984
cuugacagagugauuagcu

SEQ ID NO: 1475986 - RNA, 19 nt, Artificial Sequence
  Description of Artificial Sequence: Synthetic oligonucleotide
  Sense strand starting at position 3384 of SEQ ID NO: 1244246
guuguaauccuauagcuaa

SEQ ID NO: 1475987 - RNA, 19 nt, Artificial Sequence
  Description of Artificial Sequence: Synthetic oligonucleotide
  Antisense strand to SEQ ID NO: 1475986
uuagcuauaggauuacaac

SEQ ID NO: 1475988 - RNA, 19 nt, Artificial Sequence
  Description of Artificial Sequence: Synthetic oligonucleotide
  Sense strand starting at position 3487 of SEQ ID NO: 1244246
auugcauagucacuuugga

SEQ ID NO: 1475989 - RNA, 19 nt, Artificial Sequence
  Description of Artificial Sequence: Synthetic oligonucleotide
  Antisense strand to SEQ ID NO: 1475988
uccaaagugacuaugcaau

SEQ ID NO: 1475990 - RNA, 19 nt, Artificial Sequence
  Description of Artificial Sequence: Synthetic oligonucleotide
  Sense strand starting at position 3575 of SEQ ID NO: 1244246
ccacauaguguaggagaau

SEQ ID NO: 1475991 - RNA, 19 nt, Artificial Sequence
  Description of Artificial Sequence: Synthetic oligonucleotide
  Antisense strand to SEQ ID NO: 1475990
auucuccuacacuaugugg

SEQ ID NO: 1475992 - RNA, 19 nt, Artificial Sequence
  Description of Artificial Sequence: Synthetic oligonucleotide
  Sense strand starting at position 3587 of SEQ ID NO: 1244246
ggagaauguaucuauagcu

SEQ ID NO: 1475993 - RNA, 19 nt, Artificial Sequence
  Description of Artificial Sequence: Synthetic oligonucleotide
  Antisense strand to SEQ ID NO: 1475992
agcuauagauacauucucc

SEQ ID NO: 1475994 - RNA, 19 nt, Artificial Sequence
  Description of Artificial Sequence: Synthetic oligonucleotide
  Sense strand starting at position 3594 of SEQ ID NO: 1244246
guaucuauagcucagguga

SEQ ID NO: 1475995 - RNA, 19 nt, Artificial Sequence
  Description of Artificial Sequence: Synthetic oligonucleotide
  Antisense strand to SEQ ID NO: 1475994
ucaccugagcuauagauac

SEQ ID NO: 1475996 - RNA, 19 nt, Artificial Sequence
  Description of Artificial Sequence: Synthetic oligonucleotide
  Sense strand starting at position 3647 of SEQ ID NO: 1244246
gguaaauuacugcaaacca

SEQ ID NO: 1475997 - RNA, 19 nt, Artificial Sequence
  Description of Artificial Sequence: Synthetic oligonucleotide
  Antisense strand to SEQ ID NO: 1475996
ugguuugcaguaauuuacc

SEQ ID NO: 1475998 - RNA, 19 nt, Artificial Sequence
  Description of Artificial Sequence: Synthetic oligonucleotide
  Sense strand starting at position 3698 of SEQ ID NO: 1244246
aggccucuagucuggaauu

SEQ ID NO: 1475999 - RNA, 19 nt, Artificial Sequence
  Description of Artificial Sequence: Synthetic oligonucleotide
  Antisense strand to SEQ ID NO: 1475998
aauuccagacuagaggccu

SEQ ID NO: 1476000 - RNA, 19 nt, Artificial Sequence
  Description of Artificial Sequence: Synthetic oligonucleotide
  Sense strand starting at position 3700 of SEQ ID NO: 1244246
gccucuagucuggaauuaa

SEQ ID NO: 1476001 - RNA, 19 nt, Artificial Sequence
  Description of Artificial Sequence: Synthetic oligonucleotide
  Antisense strand to SEQ ID NO: 1476000
uuaauuccagacuagaggc

SEQ ID NO: 1476002 - RNA, 19 nt, Artificial Sequence
  Description of Artificial Sequence: Synthetic oligonucleotide
  Sense strand starting at position 3786 of SEQ ID NO: 1244246
acuuguagaugucuaucau

SEQ ID NO: 1476003 - RNA, 19 nt, Artificial Sequence
  Description of Artificial Sequence: Synthetic oligonucleotide
  Antisense strand to SEQ ID NO: 1476002
augauagacaucuacaagu

SEQ ID NO: 1476004 - RNA, 19 nt, Artificial Sequence
  Description of Artificial Sequence: Synthetic oligonucleotide
  Sense strand starting at position 3787 of SEQ ID NO: 1244246
cuuguagaugucuaucauu

SEQ ID NO: 1476005 - RNA, 19 nt, Artificial Sequence
  Description of Artificial Sequence: Synthetic oligonucleotide
  Antisense strand to SEQ ID NO: 1476004
aaugauagacaucuacaag

SEQ ID NO: 1476006 - RNA, 19 nt, Artificial Sequence
  Description of Artificial Sequence: Synthetic oligonucleotide
  Sense strand starting at position 3811 of SEQ ID NO: 1244246
guguguuugacauaaguuu

SEQ ID NO: 1476007 - RNA, 19 nt, Artificial Sequence
  Description of Artificial Sequence: Synthetic oligonucleotide
  Antisense strand to SEQ ID NO: 1476006
aaacuuaugucaaacacac

SEQ ID NO: 1476008 - RNA, 19 nt, Artificial Sequence
  Description of Artificial Sequence: Synthetic oligonucleotide
  Sense strand starting at position 3840 of SEQ ID NO: 1244246
gcauacugucucugaauuu

SEQ ID NO: 1476009 - RNA, 19 nt, Artificial Sequence
  Description of Artificial Sequence: Synthetic oligonucleotide
  Antisense strand to SEQ ID NO: 1476008
aaauucagagacaguaugc

SEQ ID NO: 1476010 - RNA, 19 nt, Artificial Sequence
  Description of Artificial Sequence: Synthetic oligonucleotide
  Sense strand starting at position 10 of SEQ ID NO: 1244247
cagguauugugaguaaacg

SEQ ID NO: 1476011 - RNA, 19 nt, Artificial Sequence
  Description of Artificial Sequence: Synthetic oligonucleotide
  Antisense strand to SEQ ID NO: 1476010
cguuuacucacaauaccug

SEQ ID NO: 1476012 - RNA, 19 nt, Artificial Sequence
  Description of Artificial Sequence: Synthetic oligonucleotide
  Sense strand starting at position 11 of SEQ ID NO: 1244247
agguauugugaguaaacga

SEQ ID NO: 1476013 - RNA, 19 nt, Artificial Sequence
  Description of Artificial Sequence: Synthetic oligonucleotide
  Antisense strand to SEQ ID NO: 1476012
ucguuuacucacaauaccu

SEQ ID NO: 1476014 - RNA, 19 nt, Artificial Sequence
  Description of Artificial Sequence: Synthetic oligonucleotide
  Sense strand starting at position 18 of SEQ ID NO: 1244247
gugaguaaacgaggucuuu

SEQ ID NO: 1476015 - RNA, 19 nt, Artificial Sequence
  Description of Artificial Sequence: Synthetic oligonucleotide
  Antisense strand to SEQ ID NO: 1476014
aaagaccucguuuacucac

SEQ ID NO: 1476016 - RNA, 19 nt, Artificial Sequence
  Description of Artificial Sequence: Synthetic oligonucleotide
  Sense strand starting at position 24 of SEQ ID NO: 1244247
aaacgaggucuuuggcuuu

SEQ ID NO: 1476017 - RNA, 19 nt, Artificial Sequence
  Description of Artificial Sequence: Synthetic oligonucleotide
  Antisense strand to SEQ ID NO: 1476016
aaagccaaagaccucguuu

SEQ ID NO: 1476018 - RNA, 19 nt, Artificial Sequence
  Description of Artificial Sequence: Synthetic oligonucleotide
  Sense strand starting at position 204 of SEQ ID NO: 1244247
guuuccauucguugaugga

SEQ ID NO: 1476019 - RNA, 19 nt, Artificial Sequence
  Description of Artificial Sequence: Synthetic oligonucleotide
  Antisense strand to SEQ ID NO: 1476018
uccaucaacgaauggaaac

SEQ ID NO: 1476020 - RNA, 19 nt, Artificial Sequence
  Description of Artificial Sequence: Synthetic oligonucleotide
  Sense strand starting at position 205 of SEQ ID NO: 1244247
uuuccauucguugauggau

SEQ ID NO: 1476021 - RNA, 19 nt, Artificial Sequence
  Description of Artificial Sequence: Synthetic oligonucleotide
  Antisense strand to SEQ ID NO: 1476020
auccaucaacgaauggaaa

SEQ ID NO: 1476022 - RNA, 19 nt, Artificial Sequence
  Description of Artificial Sequence: Synthetic oligonucleotide
  Sense strand starting at position 217 of SEQ ID NO: 1244247
gauggauucuuccuuguuc

SEQ ID NO: 1476023 - RNA, 19 nt, Artificial Sequence
  Description of Artificial Sequence: Synthetic oligonucleotide
  Antisense strand to SEQ ID NO: 1476022
gaacaaggaagaauccauc

SEQ ID NO: 1476024 - RNA, 19 nt, Artificial Sequence
  Description of Artificial Sequence: Synthetic oligonucleotide
  Sense strand starting at position 257 of SEQ ID NO: 1244247
gugagucauggccaccaca

SEQ ID NO: 1476025 - RNA, 19 nt, Artificial Sequence
  Description of Artificial Sequence: Synthetic oligonucleotide
  Antisense strand to SEQ ID NO: 1476024
ugugguggccaugacucac

SEQ ID NO: 1476026 - RNA, 19 nt, Artificial Sequence
  Description of Artificial Sequence: Synthetic oligonucleotide
  Sense strand starting at position 570 of SEQ ID NO: 1244247
gccaccuguuaauccagau

SEQ ID NO: 1476027 - RNA, 19 nt, Artificial Sequence
  Description of Artificial Sequence: Synthetic oligonucleotide
  Antisense strand to SEQ ID NO: 1476026
aucuggauuaacagguggc

SEQ ID NO: 1476028 - RNA, 19 nt, Artificial Sequence
  Description of Artificial Sequence: Synthetic oligonucleotide
  Sense strand starting at position 821 of SEQ ID NO: 1244247
accaguuacugugugacuu

SEQ ID NO: 1476029 - RNA, 19 nt, Artificial Sequence
  Description of Artificial Sequence: Synthetic oligonucleotide
  Antisense strand to SEQ ID NO: 1476028
aagucacacaguaacuggu

SEQ ID NO: 1476030 - RNA, 19 nt, Artificial Sequence
  Description of Artificial Sequence: Synthetic oligonucleotide
  Sense strand starting at position 822 of SEQ ID NO: 1244247
ccaguuacugugugacuuu

SEQ ID NO: 1476031 - RNA, 19 nt, Artificial Sequence
  Description of Artificial Sequence: Synthetic oligonucleotide
  Antisense strand to SEQ ID NO: 1476030
aaagucacacaguaacugg

SEQ ID NO: 1476032 - RNA, 19 nt, Artificial Sequence
  Description of Artificial Sequence: Synthetic oligonucleotide
  Sense strand starting at position 925 of SEQ ID NO: 1244247
gccuuaaaccuggguacua

SEQ ID NO: 1476033 - RNA, 19 nt, Artificial Sequence
  Description of Artificial Sequence: Synthetic oligonucleotide
  Antisense strand to SEQ ID NO: 1476032
uaguacccagguuuaaggc

SEQ ID NO: 1476034 - RNA, 19 nt, Artificial Sequence
  Description of Artificial Sequence: Synthetic oligonucleotide
  Sense strand starting at position 1112 of SEQ ID NO: 1244247
gccauaacugugggaggaa

SEQ ID NO: 1476035 - RNA, 19 nt, Artificial Sequence
  Description of Artificial Sequence: Synthetic oligonucleotide
  Antisense strand to SEQ ID NO: 1476034
uuccucccacaguuauggc

SEQ ID NO: 1476036 - RNA, 19 nt, Artificial Sequence
  Description of Artificial Sequence: Synthetic oligonucleotide
  Sense strand starting at position 1131 of SEQ ID NO: 1244247
gggauagggcccugaguua

SEQ ID NO: 1476037 - RNA, 19 nt, Artificial Sequence
  Description of Artificial Sequence: Synthetic oligonucleotide
  Antisense strand to SEQ ID NO: 1476036
uaacucagggcccuauccc

SEQ ID NO: 1476038 - RNA, 19 nt, Artificial Sequence
  Description of Artificial Sequence: Synthetic oligonucleotide
  Sense strand starting at position 1138 of SEQ ID NO: 1244247
ggcccugaguuauuacuga

SEQ ID NO: 1476039 - RNA, 19 nt, Artificial Sequence
  Description of Artificial Sequence: Synthetic oligonucleotide
  Antisense strand to SEQ ID NO: 1476038
ucaguaauaacucagggcc

SEQ ID NO: 1476040 - RNA, 19 nt, Artificial Sequence
  Description of Artificial Sequence: Synthetic oligonucleotide
  Sense strand starting at position 1164 of SEQ ID NO: 1244247
ccaggauucuggccuucca

SEQ ID NO: 1476041 - RNA, 19 nt, Artificial Sequence
  Description of Artificial Sequence: Synthetic oligonucleotide
  Antisense strand to SEQ ID NO: 1476040
uggaaggccagaauccugg

SEQ ID NO: 1476042 - RNA, 19 nt, Artificial Sequence
  Description of Artificial Sequence: Synthetic oligonucleotide
  Sense strand starting at position 1536 of SEQ ID NO: 1244247
gcugguuaacccuggucaa

SEQ ID NO: 1476043 - RNA, 19 nt, Artificial Sequence
  Description of Artificial Sequence: Synthetic oligonucleotide
  Antisense strand to SEQ ID NO: 1476042
uugaccaggguuaaccagc

SEQ ID NO: 1476044 - RNA, 19 nt, Artificial Sequence
  Description of Artificial Sequence: Synthetic oligonucleotide
  Sense strand starting at position 1537 of SEQ ID NO: 1244247
cugguuaacccuggucaaa

SEQ ID NO: 1476045 - RNA, 19 nt, Artificial Sequence
  Description of Artificial Sequence: Synthetic oligonucleotide
  Antisense strand to SEQ ID NO: 1476044
uuugaccaggguuaaccag

SEQ ID NO: 1476046 - RNA, 19 nt, Artificial Sequence
  Description of Artificial Sequence: Synthetic oligonucleotide
  Sense strand starting at position 1698 of SEQ ID NO: 1244247
ucuagacucccagaagcau

SEQ ID NO: 1476047 - RNA, 19 nt, Artificial Sequence
  Description of Artificial Sequence: Synthetic oligonucleotide
  Antisense strand to SEQ ID NO: 1476046
augcuucugggagucuaga

SEQ ID NO: 1476048 - RNA, 19 nt, Artificial Sequence
  Description of Artificial Sequence: Synthetic oligonucleotide
  Sense strand starting at position 1707 of SEQ ID NO: 1244247
ccagaagcaucugcucaau

SEQ ID NO: 1476049 - RNA, 19 nt, Artificial Sequence
  Description of Artificial Sequence: Synthetic oligonucleotide
  Antisense strand to SEQ ID NO: 1476048
auugagcagaugcuucugg

SEQ ID NO: 1476050 - RNA, 19 nt, Artificial Sequence
  Description of Artificial Sequence: Synthetic oligonucleotide
  Sense strand starting at position 1709 of SEQ ID NO: 1244247
agaagcaucugcucaaucu

SEQ ID NO: 1476051 - RNA, 19 nt, Artificial Sequence
  Description of Artificial Sequence: Synthetic oligonucleotide
  Antisense strand to SEQ ID NO: 1476050
agauugagcagaugcuucu

SEQ ID NO: 1476052 - RNA, 19 nt, Artificial Sequence
  Description of Artificial Sequence: Synthetic oligonucleotide
  Sense strand starting at position 1849 of SEQ ID NO: 1244247
gcaggcagcucaguaagaa

SEQ ID NO: 1476053 - RNA, 19 nt, Artificial Sequence
  Description of Artificial Sequence: Synthetic oligonucleotide
  Antisense strand to SEQ ID NO: 1476052
uucuuacugagcugccugc

SEQ ID NO: 1476054 - RNA, 19 nt, Artificial Sequence
  Description of Artificial Sequence: Synthetic oligonucleotide
  Sense strand starting at position 1890 of SEQ ID NO: 1244247
uuggucuuguuucccauaa

SEQ ID NO: 1476055 - RNA, 19 nt, Artificial Sequence
  Description of Artificial Sequence: Synthetic oligonucleotide
  Antisense strand to SEQ ID NO: 1476054
uuaugggaaacaagaccaa

SEQ ID NO: 1476056 - RNA, 19 nt, Artificial Sequence
  Description of Artificial Sequence: Synthetic oligonucleotide
  Sense strand starting at position 1891 of SEQ ID NO: 1244247
uggucuuguuucccauaac

SEQ ID NO: 1476057 - RNA, 19 nt, Artificial Sequence
  Description of Artificial Sequence: Synthetic oligonucleotide
  Antisense strand to SEQ ID NO: 1476056
guuaugggaaacaagacca

SEQ ID NO: 1476058 - RNA, 19 nt, Artificial Sequence
  Description of Artificial Sequence: Synthetic oligonucleotide
  Sense strand starting at position 1919 of SEQ ID NO: 1244247
agacacucauaccuaguau

SEQ ID NO: 1476059 - RNA, 19 nt, Artificial Sequence
  Description of Artificial Sequence: Synthetic oligonucleotide
  Antisense strand to SEQ ID NO: 1476058
auacuagguaugagugucu

SEQ ID NO: 1476060 - RNA, 19 nt, Artificial Sequence
  Description of Artificial Sequence: Synthetic oligonucleotide
  Sense strand starting at position 2086 of SEQ ID NO: 1244247
cacaguuccgugcaaauca

SEQ ID NO: 1476061 - RNA, 19 nt, Artificial Sequence
  Description of Artificial Sequence: Synthetic oligonucleotide
  Antisense strand to SEQ ID NO: 1476060
ugauuugcacggaacugug

SEQ ID NO: 1476062 - RNA, 19 nt, Artificial Sequence
  Description of Artificial Sequence: Synthetic oligonucleotide
  Sense strand starting at position 2094 of SEQ ID NO: 1244247
cgugcaaaucaagacacau

SEQ ID NO: 1476063 - RNA, 19 nt, Artificial Sequence
  Description of Artificial Sequence: Synthetic oligonucleotide
  Antisense strand to SEQ ID NO: 1476062
augugucuugauuugcacg

SEQ ID NO: 1476064 - RNA, 19 nt, Artificial Sequence
  Description of Artificial Sequence: Synthetic oligonucleotide
  Sense strand starting at position 2194 of SEQ ID NO: 1244247
cuucuaugaguuuacucau

SEQ ID NO: 1476065 - RNA, 19 nt, Artificial Sequence
  Description of Artificial Sequence: Synthetic oligonucleotide
  Antisense strand to SEQ ID NO: 1476064
augaguaaacucauagaag

SEQ ID NO: 1476066 - RNA, 19 nt, Artificial Sequence
  Description of Artificial Sequence: Synthetic oligonucleotide
  Sense strand starting at position 2197 of SEQ ID NO: 1244247
cuaugaguuuacucaucca

SEQ ID NO: 1476067 - RNA, 19 nt, Artificial Sequence
  Description of Artificial Sequence: Synthetic oligonucleotide
  Antisense strand to SEQ ID NO: 1476066
uggaugaguaaacucauag

SEQ ID NO: 1476068 - RNA, 19 nt, Artificial Sequence
  Description of Artificial Sequence: Synthetic oligonucleotide
  Sense strand starting at position 2232 of SEQ ID NO: 1244247
gcuggcuuucuggagcaca

SEQ ID NO: 1476069 - RNA, 19 nt, Artificial Sequence
  Description of Artificial Sequence: Synthetic oligonucleotide
  Antisense strand to SEQ ID NO: 1476068
ugugcuccagaaagccagc

SEQ ID NO: 1476070 - RNA, 19 nt, Artificial Sequence
  Description of Artificial Sequence: Synthetic oligonucleotide
  Sense strand starting at position 2717 of SEQ ID NO: 1244247
uguguauuaucuuucucuu

SEQ ID NO: 1476071 - RNA, 19 nt, Artificial Sequence
  Description of Artificial Sequence: Synthetic oligonucleotide
  Antisense strand to SEQ ID NO: 1476070
aagagaaagauaauacaca

SEQ ID NO: 1476072 - RNA, 19 nt, Artificial Sequence
  Description of Artificial Sequence: Synthetic oligonucleotide
  Sense strand starting at position 2805 of SEQ ID NO: 1244247
accugauauugagcagaug

SEQ ID NO: 1476073 - RNA, 19 nt, Artificial Sequence
  Description of Artificial Sequence: Synthetic oligonucleotide
  Antisense strand to SEQ ID NO: 1476072
caucugcucaauaucaggu

SEQ ID NO: 1476074 - RNA, 19 nt, Artificial Sequence
  Description of Artificial Sequence: Synthetic oligonucleotide
  Sense strand starting at position 2813 of SEQ ID NO: 1244247
uugagcagaugcucaauaa

SEQ ID NO: 1476075 - RNA, 19 nt, Artificial Sequence
  Description of Artificial Sequence: Synthetic oligonucleotide
  Antisense strand to SEQ ID NO: 1476074
uuauugagcaucugcucaa

SEQ ID NO: 1476076 - RNA, 19 nt, Artificial Sequence
  Description of Artificial Sequence: Synthetic oligonucleotide
  Sense strand starting at position 2825 of SEQ ID NO: 1244247
ucaauaaaucgucacugga

SEQ ID NO: 1476077 - RNA, 19 nt, Artificial Sequence
  Description of Artificial Sequence: Synthetic oligonucleotide
  Antisense strand to SEQ ID NO: 1476076
uccagugacgauuuauuga

SEQ ID NO: 1476078 - RNA, 19 nt, Artificial Sequence
  Description of Artificial Sequence: Synthetic oligonucleotide
  Sense strand starting at position 3106 of SEQ ID NO: 1244247
gggugagucucugucugaa

SEQ ID NO: 1476079 - RNA, 19 nt, Artificial Sequence
  Description of Artificial Sequence: Synthetic oligonucleotide
  Antisense strand to SEQ ID NO: 1476078
uucagacagagacucaccc

SEQ ID NO: 1476080 - RNA, 19 nt, Artificial Sequence
  Description of Artificial Sequence: Synthetic oligonucleotide
  Sense strand starting at position 3108 of SEQ ID NO: 1244247
gugagucucugucugaaau

SEQ ID NO: 1476081 - RNA, 19 nt, Artificial Sequence
  Description of Artificial Sequence: Synthetic oligonucleotide
  Antisense strand to SEQ ID NO: 1476080
auuucagacagagacucac

SEQ ID NO: 1476082 - RNA, 19 nt, Artificial Sequence
  Description of Artificial Sequence: Synthetic oligonucleotide
  Sense strand starting at position 3109 of SEQ ID NO: 1244247
ugagucucugucugaaauu

SEQ ID NO: 1476083 - RNA, 19 nt, Artificial Sequence
  Description of Artificial Sequence: Synthetic oligonucleotide
  Antisense strand to SEQ ID NO: 1476082
aauuucagacagagacuca

SEQ ID NO: 1476084 - RNA, 19 nt, Artificial Sequence
  Description of Artificial Sequence: Synthetic oligonucleotide
  Sense strand starting at position 3110 of SEQ ID NO: 1244247
gagucucugucugaaauuu

SEQ ID NO: 1476085 - RNA, 19 nt, Artificial Sequence
  Description of Artificial Sequence: Synthetic oligonucleotide
  Antisense strand to SEQ ID NO: 1476084
aaauuucagacagagacuc

SEQ ID NO: 1476086 - RNA, 19 nt, Artificial Sequence
  Description of Artificial Sequence: Synthetic oligonucleotide
  Sense strand starting at position 3241 of SEQ ID NO: 1244247
guacaaaggucagaaagaa

SEQ ID NO: 1476087 - RNA, 19 nt, Artificial Sequence
  Description of Artificial Sequence: Synthetic oligonucleotide
  Antisense strand to SEQ ID NO: 1476086
uucuuucugaccuuuguac

SEQ ID NO: 1476088 - RNA, 19 nt, Artificial Sequence
  Description of Artificial Sequence: Synthetic oligonucleotide
  Sense strand starting at position 3275 of SEQ ID NO: 1244247
gauacuuacccaggaguac

SEQ ID NO: 1476089 - RNA, 19 nt, Artificial Sequence
  Description of Artificial Sequence: Synthetic oligonucleotide
  Antisense strand to SEQ ID NO: 1476088
guacuccuggguaaguauc

SEQ ID NO: 1476090 - RNA, 19 nt, Artificial Sequence
  Description of Artificial Sequence: Synthetic oligonucleotide
  Sense strand starting at position 38 of SEQ ID NO: 1244248
uuuccucgugcccacaaua

SEQ ID NO: 1476091 - RNA, 19 nt, Artificial Sequence
  Description of Artificial Sequence: Synthetic oligonucleotide
  Antisense strand to SEQ ID NO: 1476090
uauugugggcacgaggaaa

SEQ ID NO: 1476092 - RNA, 19 nt, Artificial Sequence
  Description of Artificial Sequence: Synthetic oligonucleotide
  Sense strand starting at position 245 of SEQ ID NO: 1244248
gagauaagguguccaauaa

SEQ ID NO: 1476093 - RNA, 19 nt, Artificial Sequence
  Description of Artificial Sequence: Synthetic oligonucleotide
  Antisense strand to SEQ ID NO: 1476092
uuauuggacaccuuaucuc

SEQ ID NO: 1476094 - RNA, 19 nt, Artificial Sequence
  Description of Artificial Sequence: Synthetic oligonucleotide
  Sense strand starting at position 288 of SEQ ID NO: 1244248
ggcuccaggucaguaauga

SEQ ID NO: 1476095 - RNA, 19 nt, Artificial Sequence
  Description of Artificial Sequence: Synthetic oligonucleotide
  Antisense strand to SEQ ID NO: 1476094
ucauuacugaccuggagcc

SEQ ID NO: 1476096 - RNA, 19 nt, Artificial Sequence
  Description of Artificial Sequence: Synthetic oligonucleotide
  Sense strand starting at position 289 of SEQ ID NO: 1244248
gcuccaggucaguaaugaa

SEQ ID NO: 1476097 - RNA, 19 nt, Artificial Sequence
  Description of Artificial Sequence: Synthetic oligonucleotide
  Antisense strand to SEQ ID NO: 1476096
uucauuacugaccuggagc

SEQ ID NO: 1476098 - RNA, 19 nt, Artificial Sequence
  Description of Artificial Sequence: Synthetic oligonucleotide
  Sense strand starting at position 435 of SEQ ID NO: 1244248
uugggugguggaugaaaga

SEQ ID NO: 1476099 - RNA, 19 nt, Artificial Sequence
  Description of Artificial Sequence: Synthetic oligonucleotide
  Antisense strand to SEQ ID NO: 1476098
ucuuucauccaccacccaa

SEQ ID NO: 1476100 - RNA, 19 nt, Artificial Sequence
  Description of Artificial Sequence: Synthetic oligonucleotide
  Sense strand starting at position 569 of SEQ ID NO: 1244248
cccuaaacuguacgggaaa

SEQ ID NO: 1476101 - RNA, 19 nt, Artificial Sequence
  Description of Artificial Sequence: Synthetic oligonucleotide
  Antisense strand to SEQ ID NO: 1476100
uuucccguacaguuuaggg

SEQ ID NO: 1476102 - RNA, 19 nt, Artificial Sequence
  Description of Artificial Sequence: Synthetic oligonucleotide
  Sense strand starting at position 571 of SEQ ID NO: 1244248
cuaaacuguacgggaaaca

SEQ ID NO: 1476103 - RNA, 19 nt, Artificial Sequence
  Description of Artificial Sequence: Synthetic oligonucleotide
  Antisense strand to SEQ ID NO: 1476102
uguuucccguacaguuuag

SEQ ID NO: 1476104 - RNA, 19 nt, Artificial Sequence
  Description of Artificial Sequence: Synthetic oligonucleotide
  Sense strand starting at position 792 of SEQ ID NO: 1244248
agcucuuuguucuuccaca

SEQ ID NO: 1476105 - RNA, 19 nt, Artificial Sequence
  Description of Artificial Sequence: Synthetic oligonucleotide
  Antisense strand to SEQ ID NO: 1476104
uguggaagaacaaagagcu

SEQ ID NO: 1476106 - RNA, 19 nt, Artificial Sequence
  Description of Artificial Sequence: Synthetic oligonucleotide
  Sense strand starting at position 839 of SEQ ID NO: 1244248
ggagaucucagcuaagcac

SEQ ID NO: 1476107 - RNA, 19 nt, Artificial Sequence
  Description of Artificial Sequence: Synthetic oligonucleotide
  Antisense strand to SEQ ID NO: 1476106
gugcuuagcugagaucucc

SEQ ID NO: 1476108 - RNA, 19 nt, Artificial Sequence
  Description of Artificial Sequence: Synthetic oligonucleotide
  Sense strand starting at position 969 of SEQ ID NO: 1244248
cugcgaguccuuuaacgac

SEQ ID NO: 1476109 - RNA, 19 nt, Artificial Sequence
  Description of Artificial Sequence: Synthetic oligonucleotide
  Antisense strand to SEQ ID NO: 1476108
gucguuaaaggacucgcag

SEQ ID NO: 1476110 - RNA, 19 nt, Artificial Sequence
  Description of Artificial Sequence: Synthetic oligonucleotide
  Sense strand starting at position 1598 of SEQ ID NO: 1244248
ucaccuuauccagacaguu

SEQ ID NO: 1476111 - RNA, 19 nt, Artificial Sequence
  Description of Artificial Sequence: Synthetic oligonucleotide
  Antisense strand to SEQ ID NO: 1476110
aacugucuggauaagguga

SEQ ID NO: 1476112 - RNA, 19 nt, Artificial Sequence
  Description of Artificial Sequence: Synthetic oligonucleotide
  Sense strand starting at position 2163 of SEQ ID NO: 1244248
cuuucuacccggcaugaau

SEQ ID NO: 1476113 - RNA, 19 nt, Artificial Sequence
  Description of Artificial Sequence: Synthetic oligonucleotide
  Antisense strand to SEQ ID NO: 1476112
auucaugccggguagaaag

SEQ ID NO: 1476114 - RNA, 19 nt, Artificial Sequence
  Description of Artificial Sequence: Synthetic oligonucleotide
  Sense strand starting at position 2175 of SEQ ID NO: 1244248
caugaaucugcggaccgaa

SEQ ID NO: 1476115 - RNA, 19 nt, Artificial Sequence
  Description of Artificial Sequence: Synthetic oligonucleotide
  Antisense strand to SEQ ID NO: 1476114
uucgguccgcagauucaug

SEQ ID NO: 1476116 - RNA, 19 nt, Artificial Sequence
  Description of Artificial Sequence: Synthetic oligonucleotide
  Sense strand starting at position 2819 of SEQ ID NO: 1244248
ucagaugggucagacaguu

SEQ ID NO: 1476117 - RNA, 19 nt, Artificial Sequence
  Description of Artificial Sequence: Synthetic oligonucleotide
  Antisense strand to SEQ ID NO: 1476116
aacugucugacccaucuga

SEQ ID NO: 1476118 - RNA, 19 nt, Artificial Sequence
  Description of Artificial Sequence: Synthetic oligonucleotide
  Sense strand starting at position 2855 of SEQ ID NO: 1244248
gggacaggauguuuccaau

SEQ ID NO: 1476119 - RNA, 19 nt, Artificial Sequence
  Description of Artificial Sequence: Synthetic oligonucleotide
  Antisense strand to SEQ ID NO: 1476118
auuggaaacauccuguccc

SEQ ID NO: 1476120 - RNA, 19 nt, Artificial Sequence
  Description of Artificial Sequence: Synthetic oligonucleotide
  Sense strand starting at position 3044 of SEQ ID NO: 1244248
guuauaacccagugcaaac

SEQ ID NO: 1476121 - RNA, 19 nt, Artificial Sequence
  Description of Artificial Sequence: Synthetic oligonucleotide
  Antisense strand to SEQ ID NO: 1476120
guuugcacuggguuauaac

SEQ ID NO: 1476122 - RNA, 19 nt, Artificial Sequence
  Description of Artificial Sequence: Synthetic oligonucleotide
  Sense strand starting at position 3072 of SEQ ID NO: 1244248
cgaacacaguguuucucaa

SEQ ID NO: 1476123 - RNA, 19 nt, Artificial Sequence
  Description of Artificial Sequence: Synthetic oligonucleotide
  Antisense strand to SEQ ID NO: 1476122
uugagaaacacuguguucg

SEQ ID NO: 1476124 - RNA, 19 nt, Artificial Sequence
  Description of Artificial Sequence: Synthetic oligonucleotide
  Sense strand starting at position 3086 of SEQ ID NO: 1244248
cucaaauuugaacgugcau

SEQ ID NO: 1476125 - RNA, 19 nt, Artificial Sequence
  Description of Artificial Sequence: Synthetic oligonucleotide
  Antisense strand to SEQ ID NO: 1476124
augcacguucaaauuugag

SEQ ID NO: 1476126 - RNA, 19 nt, Artificial Sequence
  Description of Artificial Sequence: Synthetic oligonucleotide
  Sense strand starting at position 3093 of SEQ ID NO: 1244248
uugaacgugcaucagaauu

SEQ ID NO: 1476127 - RNA, 19 nt, Artificial Sequence
  Description of Artificial Sequence: Synthetic oligonucleotide
  Antisense strand to SEQ ID NO: 1476126
aauucugaugcacguucaa

SEQ ID NO: 1476128 - RNA, 19 nt, Artificial Sequence
  Description of Artificial Sequence: Synthetic oligonucleotide
  Sense strand starting at position 3320 of SEQ ID NO: 1244248
acuguugggccggaggaaa

SEQ ID NO: 1476129 - RNA, 19 nt, Artificial Sequence
  Description of Artificial Sequence: Synthetic oligonucleotide
  Antisense strand to SEQ ID NO: 1476128
uuuccuccggcccaacagu

SEQ ID NO: 1476130 - RNA, 19 nt, Artificial Sequence
  Description of Artificial Sequence: Synthetic oligonucleotide
  Sense strand starting at position 3342 of SEQ ID NO: 1244248
guaagugugacgggagaca

SEQ ID NO: 1476131 - RNA, 19 nt, Artificial Sequence
  Description of Artificial Sequence: Synthetic oligonucleotide
  Antisense strand to SEQ ID NO: 1476130
ugucucccgucacacuuac

SEQ ID NO: 1476132 - RNA, 19 nt, Artificial Sequence
  Description of Artificial Sequence: Synthetic oligonucleotide
  Sense strand starting at position 3463 of SEQ ID NO: 1244248
ccggaaugugguuguguca

SEQ ID NO: 1476133 - RNA, 19 nt, Artificial Sequence
  Description of Artificial Sequence: Synthetic oligonucleotide
  Antisense strand to SEQ ID NO: 1476132
ugacacaaccacauuccgg

SEQ ID NO: 1476134 - RNA, 19 nt, Artificial Sequence
  Description of Artificial Sequence: Synthetic oligonucleotide
  Sense strand starting at position 3522 of SEQ ID NO: 1244248
cuccuauuacugugagcug

SEQ ID NO: 1476135 - RNA, 19 nt, Artificial Sequence
  Description of Artificial Sequence: Synthetic oligonucleotide
  Antisense strand to SEQ ID NO: 1476134
cagcucacaguaauaggag

SEQ ID NO: 1476136 - RNA, 19 nt, Artificial Sequence
  Description of Artificial Sequence: Synthetic oligonucleotide
  Sense strand starting at position 3525 of SEQ ID NO: 1244248
cuauuacugugagcuguau

SEQ ID NO: 1476137 - RNA, 19 nt, Artificial Sequence
  Description of Artificial Sequence: Synthetic oligonucleotide
  Antisense strand to SEQ ID NO: 1476136
auacagcucacaguaauag

SEQ ID NO: 1476138 - RNA, 19 nt, Artificial Sequence
  Description of Artificial Sequence: Synthetic oligonucleotide
  Sense strand starting at position 3537 of SEQ ID NO: 1244248
gcuguaucucuaggcugaa

SEQ ID NO: 1476139 - RNA, 19 nt, Artificial Sequence
  Description of Artificial Sequence: Synthetic oligonucleotide
  Antisense strand to SEQ ID NO: 1476138
uucagccuagagauacagc

SEQ ID NO: 1476140 - RNA, 19 nt, Artificial Sequence
  Description of Artificial Sequence: Synthetic oligonucleotide
  Sense strand starting at position 3622 of SEQ ID NO: 1244248
uccuuuaggccuugaacuu

SEQ ID NO: 1476141 - RNA, 19 nt, Artificial Sequence
  Description of Artificial Sequence: Synthetic oligonucleotide
  Antisense strand to SEQ ID NO: 1476140
aaguucaaggccuaaagga

SEQ ID NO: 1476142 - RNA, 19 nt, Artificial Sequence
  Description of Artificial Sequence: Synthetic oligonucleotide
  Sense strand starting at position 3623 of SEQ ID NO: 1244248
ccuuuaggccuugaacuuu

SEQ ID NO: 1476143 - RNA, 19 nt, Artificial Sequence
  Description of Artificial Sequence: Synthetic oligonucleotide
  Antisense strand to SEQ ID NO: 1476142
aaaguucaaggccuaaagg

SEQ ID NO: 1476144 - RNA, 19 nt, Artificial Sequence
  Description of Artificial Sequence: Synthetic oligonucleotide
  Sense strand starting at position 3633 of SEQ ID NO: 1244248
uugaacuuuccauguauag

SEQ ID NO: 1476145 - RNA, 19 nt, Artificial Sequence
  Description of Artificial Sequence: Synthetic oligonucleotide
  Antisense strand to SEQ ID NO: 1476144
cuauacauggaaaguucaa

SEQ ID NO: 1476146 - RNA, 19 nt, Artificial Sequence
  Description of Artificial Sequence: Synthetic oligonucleotide
  Sense strand starting at position 3642 of SEQ ID NO: 1244248
ccauguauagcuuaucaag

SEQ ID NO: 1476147 - RNA, 19 nt, Artificial Sequence
  Description of Artificial Sequence: Synthetic oligonucleotide
  Antisense strand to SEQ ID NO: 1476146
cuugauaagcuauacaugg

SEQ ID NO: 1476148 - RNA, 19 nt, Artificial Sequence
  Description of Artificial Sequence: Synthetic oligonucleotide
  Sense strand starting at position 3669 of SEQ ID NO: 1244248
cugccuaugagcugaguca

SEQ ID NO: 1476149 - RNA, 19 nt, Artificial Sequence
  Description of Artificial Sequence: Synthetic oligonucleotide
  Antisense strand to SEQ ID NO: 1476148
ugacucagcucauaggcag

SEQ ID NO: 1476150 - RNA, 19 nt, Artificial Sequence
  Description of Artificial Sequence: Synthetic oligonucleotide
  Sense strand starting at position 3670 of SEQ ID NO: 1244248
ugccuaugagcugagucaa

SEQ ID NO: 1476151 - RNA, 19 nt, Artificial Sequence
  Description of Artificial Sequence: Synthetic oligonucleotide
  Antisense strand to SEQ ID NO: 1476150
uugacucagcucauaggca

SEQ ID NO: 1476152 - RNA, 19 nt, Artificial Sequence
  Description of Artificial Sequence: Synthetic oligonucleotide
  Sense strand starting at position 3744 of SEQ ID NO: 1244248
guucgaguucgcgaguaua

SEQ ID NO: 1476153 - RNA, 19 nt, Artificial Sequence
  Description of Artificial Sequence: Synthetic oligonucleotide
  Antisense strand to SEQ ID NO: 1476152
uauacucgcgaacucgaac

SEQ ID NO: 1476154 - RNA, 19 nt, Artificial Sequence
  Description of Artificial Sequence: Synthetic oligonucleotide
  Sense strand starting at position 3746 of SEQ ID NO: 1244248
ucgaguucgcgaguauaug

SEQ ID NO: 1476155 - RNA, 19 nt, Artificial Sequence
  Description of Artificial Sequence: Synthetic oligonucleotide
  Antisense strand to SEQ ID NO: 1476154
cauauacucgcgaacucga

SEQ ID NO: 1476156 - RNA, 19 nt, Artificial Sequence
  Description of Artificial Sequence: Synthetic oligonucleotide
  Sense strand starting at position 3747 of SEQ ID NO: 1244248
cgaguucgcgaguauauga

SEQ ID NO: 1476157 - RNA, 19 nt, Artificial Sequence
  Description of Artificial Sequence: Synthetic oligonucleotide
  Antisense strand to SEQ ID NO: 1476156
ucauauacucgcgaacucg

SEQ ID NO: 1476158 - RNA, 19 nt, Artificial Sequence
  Description of Artificial Sequence: Synthetic oligonucleotide
  Sense strand starting at position 3778 of SEQ ID NO: 1244248
uuggauuacuucuccuagu

SEQ ID NO: 1476159 - RNA, 19 nt, Artificial Sequence
  Description of Artificial Sequence: Synthetic oligonucleotide
  Antisense strand to SEQ ID NO: 1476158
acuaggagaaguaauccaa

SEQ ID NO: 1476160 - RNA, 19 nt, Artificial Sequence
  Description of Artificial Sequence: Synthetic oligonucleotide
  Sense strand starting at position 3779 of SEQ ID NO: 1244248
uggauuacuucuccuaguu

SEQ ID NO: 1476161 - RNA, 19 nt, Artificial Sequence
  Description of Artificial Sequence: Synthetic oligonucleotide
  Antisense strand to SEQ ID NO: 1476160
aacuaggagaaguaaucca

SEQ ID NO: 1476162 - RNA, 19 nt, Artificial Sequence
  Description of Artificial Sequence: Synthetic oligonucleotide
  Sense strand starting at position 3866 of SEQ ID NO: 1244248
acguuaaaccaaugggcau

SEQ ID NO: 1476163 - RNA, 19 nt, Artificial Sequence
  Description of Artificial Sequence: Synthetic oligonucleotide
  Antisense strand to SEQ ID NO: 1476162
augcccauugguuuaacgu

SEQ ID NO: 1476164 - RNA, 19 nt, Artificial Sequence
  Description of Artificial Sequence: Synthetic oligonucleotide
  Sense strand starting at position 3879 of SEQ ID NO: 1244248
gggcaucggagauggaaau

SEQ ID NO: 1476165 - RNA, 19 nt, Artificial Sequence
  Description of Artificial Sequence: Synthetic oligonucleotide
  Antisense strand to SEQ ID NO: 1476164
auuuccaucuccgaugccc

SEQ ID NO: 1476166 - RNA, 19 nt, Artificial Sequence
  Description of Artificial Sequence: Synthetic oligonucleotide
  Sense strand starting at position 3906 of SEQ ID NO: 1244248
gccuuuguucuccaacuga

SEQ ID NO: 1476167 - RNA, 19 nt, Artificial Sequence
  Description of Artificial Sequence: Synthetic oligonucleotide
  Antisense strand to SEQ ID NO: 1476166
ucaguuggagaacaaaggc

SEQ ID NO: 1476168 - RNA, 19 nt, Artificial Sequence
  Description of Artificial Sequence: Synthetic oligonucleotide
  Sense strand starting at position 3924 of SEQ ID NO: 1244248
agaguacuggugcgcuuau

SEQ ID NO: 1476169 - RNA, 19 nt, Artificial Sequence
  Description of Artificial Sequence: Synthetic oligonucleotide
  Antisense strand to SEQ ID NO: 1476168
auaagcgcaccaguacucu

SEQ ID NO: 1476170 - RNA, 19 nt, Artificial Sequence
  Description of Artificial Sequence: Synthetic oligonucleotide
  Sense strand starting at position 319 of SEQ ID NO: 1244249
aucccaagacuagguguaa

SEQ ID NO: 1476171 - RNA, 19 nt, Artificial Sequence
  Description of Artificial Sequence: Synthetic oligonucleotide
  Antisense strand to SEQ ID NO: 1476170
uuacaccuagucuugggau

SEQ ID NO: 1476172 - RNA, 19 nt, Artificial Sequence
  Description of Artificial Sequence: Synthetic oligonucleotide
  Sense strand starting at position 320 of SEQ ID NO: 1244249
ucccaagacuagguguaau

SEQ ID NO: 1476173 - RNA, 19 nt, Artificial Sequence
  Description of Artificial Sequence: Synthetic oligonucleotide
  Antisense strand to SEQ ID NO: 1476172
auuacaccuagucuuggga

SEQ ID NO: 1476174 - RNA, 19 nt, Artificial Sequence
  Description of Artificial Sequence: Synthetic oligonucleotide
  Sense strand starting at position 330 of SEQ ID NO: 1244249
agguguaauuucugguuau

SEQ ID NO: 1476175 - RNA, 19 nt, Artificial Sequence
  Description of Artificial Sequence: Synthetic oligonucleotide
  Antisense strand to SEQ ID NO: 1476174
auaaccagaaauuacaccu

SEQ ID NO: 1476176 - RNA, 19 nt, Artificial Sequence
  Description of Artificial Sequence: Synthetic oligonucleotide
  Sense strand starting at position 331 of SEQ ID NO: 1244249
gguguaauuucugguuauc

SEQ ID NO: 1476177 - RNA, 19 nt, Artificial Sequence
  Description of Artificial Sequence: Synthetic oligonucleotide
  Antisense strand to SEQ ID NO: 1476176
gauaaccagaaauuacacc

SEQ ID NO: 1476178 - RNA, 19 nt, Artificial Sequence
  Description of Artificial Sequence: Synthetic oligonucleotide
  Sense strand starting at position 450 of SEQ ID NO: 1244249
acccuuuagggaugucacu

SEQ ID NO: 1476179 - RNA, 19 nt, Artificial Sequence
  Description of Artificial Sequence: Synthetic oligonucleotide
  Antisense strand to SEQ ID NO: 1476178
agugacaucccuaaagggu

SEQ ID NO: 1476180 - RNA, 19 nt, Artificial Sequence
  Description of Artificial Sequence: Synthetic oligonucleotide
  Sense strand starting at position 526 of SEQ ID NO: 1244249
cgucuuucucaacagacaa

SEQ ID NO: 1476181 - RNA, 19 nt, Artificial Sequence
  Description of Artificial Sequence: Synthetic oligonucleotide
  Antisense strand to SEQ ID NO: 1476180
uugucuguugagaaagacg

SEQ ID NO: 1476182 - RNA, 19 nt, Artificial Sequence
  Description of Artificial Sequence: Synthetic oligonucleotide
  Sense strand starting at position 664 of SEQ ID NO: 1244249
cugcuauggccggguagaa

SEQ ID NO: 1476183 - RNA, 19 nt, Artificial Sequence
  Description of Artificial Sequence: Synthetic oligonucleotide
  Antisense strand to SEQ ID NO: 1476182
uucuacccggccauagcag

SEQ ID NO: 1476184 - RNA, 19 nt, Artificial Sequence
  Description of Artificial Sequence: Synthetic oligonucleotide
  Sense strand starting at position 676 of SEQ ID NO: 1244249
gguagaaguccuugaaguc

SEQ ID NO: 1476185 - RNA, 19 nt, Artificial Sequence
  Description of Artificial Sequence: Synthetic oligonucleotide
  Antisense strand to SEQ ID NO: 1476184
gacuucaaggacuucuacc

SEQ ID NO: 1476186 - RNA, 19 nt, Artificial Sequence
  Description of Artificial Sequence: Synthetic oligonucleotide
  Sense strand starting at position 988 of SEQ ID NO: 1244249
cccugauaguaguugagau

SEQ ID NO: 1476187 - RNA, 19 nt, Artificial Sequence
  Description of Artificial Sequence: Synthetic oligonucleotide
  Antisense strand to SEQ ID NO: 1476186
aucucaacuacuaucaggg

SEQ ID NO: 1476188 - RNA, 19 nt, Artificial Sequence
  Description of Artificial Sequence: Synthetic oligonucleotide
  Sense strand starting at position 989 of SEQ ID NO: 1244249
ccugauaguaguugagaua

SEQ ID NO: 1476189 - RNA, 19 nt, Artificial Sequence
  Description of Artificial Sequence: Synthetic oligonucleotide
  Antisense strand to SEQ ID NO: 1476188
uaucucaacuacuaucagg

SEQ ID NO: 1476190 - RNA, 19 nt, Artificial Sequence
  Description of Artificial Sequence: Synthetic oligonucleotide
  Sense strand starting at position 992 of SEQ ID NO: 1244249
gauaguaguugagauacuu

SEQ ID NO: 1476191 - RNA, 19 nt, Artificial Sequence
  Description of Artificial Sequence: Synthetic oligonucleotide
  Antisense strand to SEQ ID NO: 1476190
aaguaucucaacuacuauc

SEQ ID NO: 1476192 - RNA, 19 nt, Artificial Sequence
  Description of Artificial Sequence: Synthetic oligonucleotide
  Sense strand starting at position 1000 of SEQ ID NO: 1244249
uugagauacuuggcgguca

SEQ ID NO: 1476193 - RNA, 19 nt, Artificial Sequence
  Description of Artificial Sequence: Synthetic oligonucleotide
  Antisense strand to SEQ ID NO: 1476192
ugaccgccaaguaucucaa

SEQ ID NO: 1476194 - RNA, 19 nt, Artificial Sequence
  Description of Artificial Sequence: Synthetic oligonucleotide
  Sense strand starting at position 1159 of SEQ ID NO: 1244249
ucgugccuugggugaagau

SEQ ID NO: 1476195 - RNA, 19 nt, Artificial Sequence
  Description of Artificial Sequence: Synthetic oligonucleotide
  Antisense strand to SEQ ID NO: 1476194
aucuucacccaaggcacga

SEQ ID NO: 1476196 - RNA, 19 nt, Artificial Sequence
  Description of Artificial Sequence: Synthetic oligonucleotide
  Sense strand starting at position 1160 of SEQ ID NO: 1244249
cgugccuugggugaagaua

SEQ ID NO: 1476197 - RNA, 19 nt, Artificial Sequence
  Description of Artificial Sequence: Synthetic oligonucleotide
  Antisense strand to SEQ ID NO: 1476196
uaucuucacccaaggcacg

SEQ ID NO: 1476198 - RNA, 19 nt, Artificial Sequence
  Description of Artificial Sequence: Synthetic oligonucleotide
  Sense strand starting at position 1886 of SEQ ID NO: 1244249
uccgauagugucguuaagu

SEQ ID NO: 1476199 - RNA, 19 nt, Artificial Sequence
  Description of Artificial Sequence: Synthetic oligonucleotide
  Antisense strand to SEQ ID NO: 1476198
acuuaacgacacuaucgga

SEQ ID NO: 1476200 - RNA, 19 nt, Artificial Sequence
  Description of Artificial Sequence: Synthetic oligonucleotide
  Sense strand starting at position 1887 of SEQ ID NO: 1244249
ccgauagugucguuaaguc

SEQ ID NO: 1476201 - RNA, 19 nt, Artificial Sequence
  Description of Artificial Sequence: Synthetic oligonucleotide
  Antisense strand to SEQ ID NO: 1476200
gacuuaacgacacuaucgg

SEQ ID NO: 1476202 - RNA, 19 nt, Artificial Sequence
  Description of Artificial Sequence: Synthetic oligonucleotide
  Sense strand starting at position 1965 of SEQ ID NO: 1244249
gagcgcuucccgccagaga

SEQ ID NO: 1476203 - RNA, 19 nt, Artificial Sequence
  Description of Artificial Sequence: Synthetic oligonucleotide
  Antisense strand to SEQ ID NO: 1476202
ucucuggcgggaagcgcuc

SEQ ID NO: 1476204 - RNA, 19 nt, Artificial Sequence
  Description of Artificial Sequence: Synthetic oligonucleotide
  Sense strand starting at position 1966 of SEQ ID NO: 1244249
agcgcuucccgccagagau

SEQ ID NO: 1476205 - RNA, 19 nt, Artificial Sequence
  Description of Artificial Sequence: Synthetic oligonucleotide
  Antisense strand to SEQ ID NO: 1476204
aucucuggcgggaagcgcu

SEQ ID NO: 1476206 - RNA, 19 nt, Artificial Sequence
  Description of Artificial Sequence: Synthetic oligonucleotide
  Sense strand starting at position 2274 of SEQ ID NO: 1244249
gcugcucuucccuggagau

SEQ ID NO: 1476207 - RNA, 19 nt, Artificial Sequence
  Description of Artificial Sequence: Synthetic oligonucleotide
  Antisense strand to SEQ ID NO: 1476206
aucuccagggaagagcagc

SEQ ID NO: 1476208 - RNA, 19 nt, Artificial Sequence
  Description of Artificial Sequence: Synthetic oligonucleotide
  Sense strand starting at position 2290 of SEQ ID NO: 1244249
gaugccuucccuuggagua

SEQ ID NO: 1476209 - RNA, 19 nt, Artificial Sequence
  Description of Artificial Sequence: Synthetic oligonucleotide
  Antisense strand to SEQ ID NO: 1476208
uacuccaagggaaggcauc

SEQ ID NO: 1476210 - RNA, 19 nt, Artificial Sequence
  Description of Artificial Sequence: Synthetic oligonucleotide
  Sense strand starting at position 2384 of SEQ ID NO: 1244249
auucgaagugcccgcgaaa

SEQ ID NO: 1476211 - RNA, 19 nt, Artificial Sequence
  Description of Artificial Sequence: Synthetic oligonucleotide
  Antisense strand to SEQ ID NO: 1476210
uuucgcgggcacuucgaau

SEQ ID NO: 1476212 - RNA, 19 nt, Artificial Sequence
  Description of Artificial Sequence: Synthetic oligonucleotide
  Sense strand starting at position 2387 of SEQ ID NO: 1244249
cgaagugcccgcgaaagaa

SEQ ID NO: 1476213 - RNA, 19 nt, Artificial Sequence
  Description of Artificial Sequence: Synthetic oligonucleotide
  Antisense strand to SEQ ID NO: 1476212
uucuuucgcgggcacuucg

SEQ ID NO: 1476214 - RNA, 19 nt, Artificial Sequence
  Description of Artificial Sequence: Synthetic oligonucleotide
  Sense strand starting at position 2497 of SEQ ID NO: 1244249
gaguucucaucuuucccga

SEQ ID NO: 1476215 - RNA, 19 nt, Artificial Sequence
  Description of Artificial Sequence: Synthetic oligonucleotide
  Antisense strand to SEQ ID NO: 1476214
ucgggaaagaugagaacuc

SEQ ID NO: 1476216 - RNA, 19 nt, Artificial Sequence
  Description of Artificial Sequence: Synthetic oligonucleotide
  Sense strand starting at position 3303 of SEQ ID NO: 1244249
ccggaaaggacucgauaau

SEQ ID NO: 1476217 - RNA, 19 nt, Artificial Sequence
  Description of Artificial Sequence: Synthetic oligonucleotide
  Antisense strand to SEQ ID NO: 1476216
auuaucgaguccuuuccgg

SEQ ID NO: 1476218 - RNA, 19 nt, Artificial Sequence
  Description of Artificial Sequence: Synthetic oligonucleotide
  Sense strand starting at position 3313 of SEQ ID NO: 1244249
cucgauaaucaaggugaac

SEQ ID NO: 1476219 - RNA, 19 nt, Artificial Sequence
  Description of Artificial Sequence: Synthetic oligonucleotide
  Antisense strand to SEQ ID NO: 1476218
guucaccuugauuaucgag

SEQ ID NO: 1476220 - RNA, 19 nt, Artificial Sequence
  Description of Artificial Sequence: Synthetic oligonucleotide
  Sense strand starting at position 3315 of SEQ ID NO: 1244249
cgauaaucaaggugaacug

SEQ ID NO: 1476221 - RNA, 19 nt, Artificial Sequence
  Description of Artificial Sequence: Synthetic oligonucleotide
  Antisense strand to SEQ ID NO: 1476220
caguucaccuugauuaucg

SEQ ID NO: 1476222 - RNA, 19 nt, Artificial Sequence
  Description of Artificial Sequence: Synthetic oligonucleotide
  Sense strand starting at position 3325 of SEQ ID NO: 1244249
ggugaacugccuuguguag

SEQ ID NO: 1476223 - RNA, 19 nt, Artificial Sequence
  Description of Artificial Sequence: Synthetic oligonucleotide
  Antisense strand to SEQ ID NO: 1476222
cuacacaaggcaguucacc

SEQ ID NO: 1476224 - RNA, 19 nt, Artificial Sequence
  Description of Artificial Sequence: Synthetic oligonucleotide
  Sense strand starting at position 3339 of SEQ ID NO: 1244249
uguaguuaccagggcugua

SEQ ID NO: 1476225 - RNA, 19 nt, Artificial Sequence
  Description of Artificial Sequence: Synthetic oligonucleotide
  Antisense strand to SEQ ID NO: 1476224
uacagcccugguaacuaca

SEQ ID NO: 1476226 - RNA, 19 nt, Artificial Sequence
  Description of Artificial Sequence: Synthetic oligonucleotide
  Sense strand starting at position 3344 of SEQ ID NO: 1244249
uuaccagggcuguauguaa

SEQ ID NO: 1476227 - RNA, 19 nt, Artificial Sequence
  Description of Artificial Sequence: Synthetic oligonucleotide
  Antisense strand to SEQ ID NO: 1476226
uuacauacagcccugguaa

SEQ ID NO: 1476228 - RNA, 19 nt, Artificial Sequence
  Description of Artificial Sequence: Synthetic oligonucleotide
  Sense strand starting at position 3381 of SEQ ID NO: 1244249
uguucugaucuacaguguu

SEQ ID NO: 1476229 - RNA, 19 nt, Artificial Sequence
  Description of Artificial Sequence: Synthetic oligonucleotide
  Antisense strand to SEQ ID NO: 1476228
aacacuguagaucagaaca

SEQ ID NO: 1476230 - RNA, 19 nt, Artificial Sequence
  Description of Artificial Sequence: Synthetic oligonucleotide
  Sense strand starting at position 3414 of SEQ ID NO: 1244249
ggucccugcugcuuaagaa

SEQ ID NO: 1476231 - RNA, 19 nt, Artificial Sequence
  Description of Artificial Sequence: Synthetic oligonucleotide
  Antisense strand to SEQ ID NO: 1476230
uucuuaagcagcagggacc

SEQ ID NO: 1476232 - RNA, 19 nt, Artificial Sequence
  Description of Artificial Sequence: Synthetic oligonucleotide
  Sense strand starting at position 3424 of SEQ ID NO: 1244249
gcuuaagaacccugggaug

SEQ ID NO: 1476233 - RNA, 19 nt, Artificial Sequence
  Description of Artificial Sequence: Synthetic oligonucleotide
  Antisense strand to SEQ ID NO: 1476232
caucccaggguucuuaagc

SEQ ID NO: 1476234 - RNA, 19 nt, Artificial Sequence
  Description of Artificial Sequence: Synthetic oligonucleotide
  Sense strand starting at position 3509 of SEQ ID NO: 1244249
gugccuuuguggucagaga

SEQ ID NO: 1476235 - RNA, 19 nt, Artificial Sequence
  Description of Artificial Sequence: Synthetic oligonucleotide
  Antisense strand to SEQ ID NO: 1476234
ucucugaccacaaaggcac

SEQ ID NO: 1476236 - RNA, 19 nt, Artificial Sequence
  Description of Artificial Sequence: Synthetic oligonucleotide
  Sense strand starting at position 3510 of SEQ ID NO: 1244249
ugccuuuguggucagagaa

SEQ ID NO: 1476237 - RNA, 19 nt, Artificial Sequence
  Description of Artificial Sequence: Synthetic oligonucleotide
  Antisense strand to SEQ ID NO: 1476236
uucucugaccacaaaggca

SEQ ID NO: 1476238 - RNA, 19 nt, Artificial Sequence
  Description of Artificial Sequence: Synthetic oligonucleotide
  Sense strand starting at position 3590 of SEQ ID NO: 1244249
aaggcugguggguauuaua

SEQ ID NO: 1476239 - RNA, 19 nt, Artificial Sequence
  Description of Artificial Sequence: Synthetic oligonucleotide
  Antisense strand to SEQ ID NO: 1476238
uauaauacccaccagccuu

SEQ ID NO: 1476240 - RNA, 19 nt, Artificial Sequence
  Description of Artificial Sequence: Synthetic oligonucleotide
  Sense strand starting at position 3593 of SEQ ID NO: 1244249
gcugguggguauuauaaga

SEQ ID NO: 1476241 - RNA, 19 nt, Artificial Sequence
  Description of Artificial Sequence: Synthetic oligonucleotide
  Antisense strand to SEQ ID NO: 1476240
ucuuauaauacccaccagc

SEQ ID NO: 1476242 - RNA, 19 nt, Artificial Sequence
  Description of Artificial Sequence: Synthetic oligonucleotide
  Sense strand starting at position 3693 of SEQ ID NO: 1244249
cugggcuccuuggaggaau

SEQ ID NO: 1476243 - RNA, 19 nt, Artificial Sequence
  Description of Artificial Sequence: Synthetic oligonucleotide
  Antisense strand to SEQ ID NO: 1476242
auuccuccaaggagcccag

SEQ ID NO: 1476244 - RNA, 19 nt, Artificial Sequence
  Description of Artificial Sequence: Synthetic oligonucleotide
  Sense strand starting at position 3953 of SEQ ID NO: 1244249
acugaaagaagucaguguu

SEQ ID NO: 1476245 - RNA, 19 nt, Artificial Sequence
  Description of Artificial Sequence: Synthetic oligonucleotide
  Antisense strand to SEQ ID NO: 1476244
aacacugacuucuuucagu

SEQ ID NO: 1476246 - RNA, 19 nt, Artificial Sequence
  Description of Artificial Sequence: Synthetic oligonucleotide
  Sense strand starting at position 3956 of SEQ ID NO: 1244249
gaaagaagucaguguuucu

SEQ ID NO: 1476247 - RNA, 19 nt, Artificial Sequence
  Description of Artificial Sequence: Synthetic oligonucleotide
  Antisense strand to SEQ ID NO: 1476246
agaaacacugacuucuuuc

SEQ ID NO: 1476248 - RNA, 19 nt, Artificial Sequence
  Description of Artificial Sequence: Synthetic oligonucleotide
  Sense strand starting at position 3961 of SEQ ID NO: 1244249
aagucaguguuucuuagac

SEQ ID NO: 1476249 - RNA, 19 nt, Artificial Sequence
  Description of Artificial Sequence: Synthetic oligonucleotide
  Antisense strand to SEQ ID NO: 1476248
gucuaagaaacacugacuu

SEQ ID NO: 1476250 - RNA, 19 nt, Artificial Sequence
  Description of Artificial Sequence: Synthetic oligonucleotide
  Sense strand starting at position 69 of SEQ ID NO: 1244250
uuucucuggcucgguaaga

SEQ ID NO: 1476251 - RNA, 19 nt, Artificial Sequence
  Description of Artificial Sequence: Synthetic oligonucleotide
  Antisense strand to SEQ ID NO: 1476250
ucuuaccgagccagagaaa

SEQ ID NO: 1476252 - RNA, 19 nt, Artificial Sequence
  Description of Artificial Sequence: Synthetic oligonucleotide
  Sense strand starting at position 70 of SEQ ID NO: 1244250
uucucuggcucgguaagaa

SEQ ID NO: 1476253 - RNA, 19 nt, Artificial Sequence
  Description of Artificial Sequence: Synthetic oligonucleotide
  Antisense strand to SEQ ID NO: 1476252
uucuuaccgagccagagaa

SEQ ID NO: 1476254 - RNA, 19 nt, Artificial Sequence
  Description of Artificial Sequence: Synthetic oligonucleotide
  Sense strand starting at position 80 of SEQ ID NO: 1244250
cgguaagaauccugugaua

SEQ ID NO: 1476255 - RNA, 19 nt, Artificial Sequence
  Description of Artificial Sequence: Synthetic oligonucleotide
  Antisense strand to SEQ ID NO: 1476254
uaucacaggauucuuaccg

SEQ ID NO: 1476256 - RNA, 19 nt, Artificial Sequence
  Description of Artificial Sequence: Synthetic oligonucleotide
  Sense strand starting at position 82 of SEQ ID NO: 1244250
guaagaauccugugauacc

SEQ ID NO: 1476257 - RNA, 19 nt, Artificial Sequence
  Description of Artificial Sequence: Synthetic oligonucleotide
  Antisense strand to SEQ ID NO: 1476256
gguaucacaggauucuuac

SEQ ID NO: 1476258 - RNA, 19 nt, Artificial Sequence
  Description of Artificial Sequence: Synthetic oligonucleotide
  Sense strand starting at position 340 of SEQ ID NO: 1244250
gcagcuuugcucugggacu

SEQ ID NO: 1476259 - RNA, 19 nt, Artificial Sequence
  Description of Artificial Sequence: Synthetic oligonucleotide
  Antisense strand to SEQ ID NO: 1476258
agucccagagcaaagcugc

SEQ ID NO: 1476260 - RNA, 19 nt, Artificial Sequence
  Description of Artificial Sequence: Synthetic oligonucleotide
  Sense strand starting at position 553 of SEQ ID NO: 1244250
cucuccucccugugucaau

SEQ ID NO: 1476261 - RNA, 19 nt, Artificial Sequence
  Description of Artificial Sequence: Synthetic oligonucleotide
  Antisense strand to SEQ ID NO: 1476260
auugacacagggaggagag

SEQ ID NO: 1476262 - RNA, 19 nt, Artificial Sequence
  Description of Artificial Sequence: Synthetic oligonucleotide
  Sense strand starting at position 562 of SEQ ID NO: 1244250
cugugucaaugucaguaga

SEQ ID NO: 1476263 - RNA, 19 nt, Artificial Sequence
  Description of Artificial Sequence: Synthetic oligonucleotide
  Antisense strand to SEQ ID NO: 1476262
ucuacugacauugacacag

SEQ ID NO: 1476264 - RNA, 19 nt, Artificial Sequence
  Description of Artificial Sequence: Synthetic oligonucleotide
  Sense strand starting at position 564 of SEQ ID NO: 1244250
gugucaaugucaguagaug

SEQ ID NO: 1476265 - RNA, 19 nt, Artificial Sequence
  Description of Artificial Sequence: Synthetic oligonucleotide
  Antisense strand to SEQ ID NO: 1476264
caucuacugacauugacac

SEQ ID NO: 1476266 - RNA, 19 nt, Artificial Sequence
  Description of Artificial Sequence: Synthetic oligonucleotide
  Sense strand starting at position 1318 of SEQ ID NO: 1244250
gcugguauccuugugcagu

SEQ ID NO: 1476267 - RNA, 19 nt, Artificial Sequence
  Description of Artificial Sequence: Synthetic oligonucleotide
  Antisense strand to SEQ ID NO: 1476266
acugcacaaggauaccagc

SEQ ID NO: 1476268 - RNA, 19 nt, Artificial Sequence
  Description of Artificial Sequence: Synthetic oligonucleotide
  Sense strand starting at position 1324 of SEQ ID NO: 1244250
auccuugugcagugaguaa

SEQ ID NO: 1476269 - RNA, 19 nt, Artificial Sequence
  Description of Artificial Sequence: Synthetic oligonucleotide
  Antisense strand to SEQ ID NO: 1476268
uuacucacugcacaaggau

SEQ ID NO: 1476270 - RNA, 19 nt, Artificial Sequence
  Description of Artificial Sequence: Synthetic oligonucleotide
  Sense strand starting at position 1336 of SEQ ID NO: 1244250
ugaguaaucugcccaacug

SEQ ID NO: 1476271 - RNA, 19 nt, Artificial Sequence
  Description of Artificial Sequence: Synthetic oligonucleotide
  Antisense strand to SEQ ID NO: 1476270
caguugggcagauuacuca

SEQ ID NO: 1476272 - RNA, 19 nt, Artificial Sequence
  Description of Artificial Sequence: Synthetic oligonucleotide
  Sense strand starting at position 1337 of SEQ ID NO: 1244250
gaguaaucugcccaacugu

SEQ ID NO: 1476273 - RNA, 19 nt, Artificial Sequence
  Description of Artificial Sequence: Synthetic oligonucleotide
  Antisense strand to SEQ ID NO: 1476272
acaguugggcagauuacuc

SEQ ID NO: 1476274 - RNA, 19 nt, Artificial Sequence
  Description of Artificial Sequence: Synthetic oligonucleotide
  Sense strand starting at position 1385 of SEQ ID NO: 1244250
caaugauuguugcuggacu

SEQ ID NO: 1476275 - RNA, 19 nt, Artificial Sequence
  Description of Artificial Sequence: Synthetic oligonucleotide
  Antisense strand to SEQ ID NO: 1476274
aguccagcaacaaucauug

SEQ ID NO: 1476276 - RNA, 19 nt, Artificial Sequence
  Description of Artificial Sequence: Synthetic oligonucleotide
  Sense strand starting at position 1387 of SEQ ID NO: 1244250
augauuguugcuggacuca

SEQ ID NO: 1476277 - RNA, 19 nt, Artificial Sequence
  Description of Artificial Sequence: Synthetic oligonucleotide
  Antisense strand to SEQ ID NO: 1476276
ugaguccagcaacaaucau

SEQ ID NO: 1476278 - RNA, 19 nt, Artificial Sequence
  Description of Artificial Sequence: Synthetic oligonucleotide
  Sense strand starting at position 1459 of SEQ ID NO: 1244250
ccacuugccuguguagaga

SEQ ID NO: 1476279 - RNA, 19 nt, Artificial Sequence
  Description of Artificial Sequence: Synthetic oligonucleotide
  Antisense strand to SEQ ID NO: 1476278
ucucuacacaggcaagugg

SEQ ID NO: 1476280 - RNA, 19 nt, Artificial Sequence
  Description of Artificial Sequence: Synthetic oligonucleotide
  Sense strand starting at position 1719 of SEQ ID NO: 1244250
cggacauugcaucacugua

SEQ ID NO: 1476281 - RNA, 19 nt, Artificial Sequence
  Description of Artificial Sequence: Synthetic oligonucleotide
  Antisense strand to SEQ ID NO: 1476280
uacagugaugcaauguccg

SEQ ID NO: 1476282 - RNA, 19 nt, Artificial Sequence
  Description of Artificial Sequence: Synthetic oligonucleotide
  Sense strand starting at position 1954 of SEQ ID NO: 1244250
ucaggcugaucccaggaaa

SEQ ID NO: 1476283 - RNA, 19 nt, Artificial Sequence
  Description of Artificial Sequence: Synthetic oligonucleotide
  Antisense strand to SEQ ID NO: 1476282
uuuccugggaucagccuga

SEQ ID NO: 1476284 - RNA, 19 nt, Artificial Sequence
  Description of Artificial Sequence: Synthetic oligonucleotide
  Sense strand starting at position 1991 of SEQ ID NO: 1244250
acuuucgauuuccagaaac

SEQ ID NO: 1476285 - RNA, 19 nt, Artificial Sequence
  Description of Artificial Sequence: Synthetic oligonucleotide
  Antisense strand to SEQ ID NO: 1476284
guuucuggaaaucgaaagu

SEQ ID NO: 1476286 - RNA, 19 nt, Artificial Sequence
  Description of Artificial Sequence: Synthetic oligonucleotide
  Sense strand starting at position 2018 of SEQ ID NO: 1244250
auagaugucuuccgggauu

SEQ ID NO: 1476287 - RNA, 19 nt, Artificial Sequence
  Description of Artificial Sequence: Synthetic oligonucleotide
  Antisense strand to SEQ ID NO: 1476286
aaucccggaagacaucuau

SEQ ID NO: 1476288 - RNA, 19 nt, Artificial Sequence
  Description of Artificial Sequence: Synthetic oligonucleotide
  Sense strand starting at position 2271 of SEQ ID NO: 1244250
ggcuguggacucugacaga

SEQ ID NO: 1476289 - RNA, 19 nt, Artificial Sequence
  Description of Artificial Sequence: Synthetic oligonucleotide
  Antisense strand to SEQ ID NO: 1476288
ucugucagaguccacagcc

SEQ ID NO: 1476290 - RNA, 19 nt, Artificial Sequence
  Description of Artificial Sequence: Synthetic oligonucleotide
  Sense strand starting at position 2597 of SEQ ID NO: 1244250
gagccucucugggugacau

SEQ ID NO: 1476291 - RNA, 19 nt, Artificial Sequence
  Description of Artificial Sequence: Synthetic oligonucleotide
  Antisense strand to SEQ ID NO: 1476290
augucacccagagaggcuc

SEQ ID NO: 1476292 - RNA, 19 nt, Artificial Sequence
  Description of Artificial Sequence: Synthetic oligonucleotide
  Sense strand starting at position 2598 of SEQ ID NO: 1244250
agccucucugggugacaua

SEQ ID NO: 1476293 - RNA, 19 nt, Artificial Sequence
  Description of Artificial Sequence: Synthetic oligonucleotide
  Antisense strand to SEQ ID NO: 1476292
uaugucacccagagaggcu

SEQ ID NO: 1476294 - RNA, 19 nt, Artificial Sequence
  Description of Artificial Sequence: Synthetic oligonucleotide
  Sense strand starting at position 2599 of SEQ ID NO: 1244250
gccucucugggugacauaa

SEQ ID NO: 1476295 - RNA, 19 nt, Artificial Sequence
  Description of Artificial Sequence: Synthetic oligonucleotide
  Antisense strand to SEQ ID NO: 1476294
uuaugucacccagagaggc

SEQ ID NO: 1476296 - RNA, 19 nt, Artificial Sequence
  Description of Artificial Sequence: Synthetic oligonucleotide
  Sense strand starting at position 2941 of SEQ ID NO: 1244250
uggccuaauccauggucaa

SEQ ID NO: 1476297 - RNA, 19 nt, Artificial Sequence
  Description of Artificial Sequence: Synthetic oligonucleotide
  Antisense strand to SEQ ID NO: 1476296
uugaccauggauuaggcca

SEQ ID NO: 1476298 - RNA, 19 nt, Artificial Sequence
  Description of Artificial Sequence: Synthetic oligonucleotide
  Sense strand starting at position 2942 of SEQ ID NO: 1244250
ggccuaauccauggucaag

SEQ ID NO: 1476299 - RNA, 19 nt, Artificial Sequence
  Description of Artificial Sequence: Synthetic oligonucleotide
  Antisense strand to SEQ ID NO: 1476298
cuugaccauggauuaggcc

SEQ ID NO: 1476300 - RNA, 19 nt, Artificial Sequence
  Description of Artificial Sequence: Synthetic oligonucleotide
  Sense strand starting at position 2997 of SEQ ID NO: 1244250
gcucuuguuucugucacuu

SEQ ID NO: 1476301 - RNA, 19 nt, Artificial Sequence
  Description of Artificial Sequence: Synthetic oligonucleotide
  Antisense strand to SEQ ID NO: 1476300
aagugacagaaacaagagc

SEQ ID NO: 1476302 - RNA, 19 nt, Artificial Sequence
  Description of Artificial Sequence: Synthetic oligonucleotide
  Sense strand starting at position 3090 of SEQ ID NO: 1244250
gaagaaucaucagggaguu

SEQ ID NO: 1476303 - RNA, 19 nt, Artificial Sequence
  Description of Artificial Sequence: Synthetic oligonucleotide
  Antisense strand to SEQ ID NO: 1476302
aacucccugaugauucuuc

SEQ ID NO: 1476304 - RNA, 19 nt, Artificial Sequence
  Description of Artificial Sequence: Synthetic oligonucleotide
  Sense strand starting at position 3139 of SEQ ID NO: 1244250
gucaccaucucugggagua

SEQ ID NO: 1476305 - RNA, 19 nt, Artificial Sequence
  Description of Artificial Sequence: Synthetic oligonucleotide
  Antisense strand to SEQ ID NO: 1476304
uacucccagagauggugac

SEQ ID NO: 1476306 - RNA, 19 nt, Artificial Sequence
  Description of Artificial Sequence: Synthetic oligonucleotide
  Sense strand starting at position 3225 of SEQ ID NO: 1244250
cagcuuagaguccgagaca

SEQ ID NO: 1476307 - RNA, 19 nt, Artificial Sequence
  Description of Artificial Sequence: Synthetic oligonucleotide
  Antisense strand to SEQ ID NO: 1476306
ugucucggacucuaagcug

SEQ ID NO: 1476308 - RNA, 19 nt, Artificial Sequence
  Description of Artificial Sequence: Synthetic oligonucleotide
  Sense strand starting at position 3352 of SEQ ID NO: 1244250
gcaggugcagcuggaaaua

SEQ ID NO: 1476309 - RNA, 19 nt, Artificial Sequence
  Description of Artificial Sequence: Synthetic oligonucleotide
  Antisense strand to SEQ ID NO: 1476308
uauuuccagcugcaccugc

SEQ ID NO: 1476310 - RNA, 19 nt, Artificial Sequence
  Description of Artificial Sequence: Synthetic oligonucleotide
  Sense strand starting at position 3445 of SEQ ID NO: 1244250
ccuucucagcagugcuaau

SEQ ID NO: 1476311 - RNA, 19 nt, Artificial Sequence
  Description of Artificial Sequence: Synthetic oligonucleotide
  Antisense strand to SEQ ID NO: 1476310
auuagcacugcugagaagg

SEQ ID NO: 1476312 - RNA, 19 nt, Artificial Sequence
  Description of Artificial Sequence: Synthetic oligonucleotide
  Sense strand starting at position 3510 of SEQ ID NO: 1244250
gagggcaucucugggaagu

SEQ ID NO: 1476313 - RNA, 19 nt, Artificial Sequence
  Description of Artificial Sequence: Synthetic oligonucleotide
  Antisense strand to SEQ ID NO: 1476312
acuucccagagaugcccuc

SEQ ID NO: 1476314 - RNA, 19 nt, Artificial Sequence
  Description of Artificial Sequence: Synthetic oligonucleotide
  Sense strand starting at position 3577 of SEQ ID NO: 1244250
ccgggaaaguccuaagcca

SEQ ID NO: 1476315 - RNA, 19 nt, Artificial Sequence
  Description of Artificial Sequence: Synthetic oligonucleotide
  Antisense strand to SEQ ID NO: 1476314
uggcuuaggacuuucccgg

SEQ ID NO: 1476316 - RNA, 19 nt, Artificial Sequence
  Description of Artificial Sequence: Synthetic oligonucleotide
  Sense strand starting at position 3770 of SEQ ID NO: 1244250
gggugaaagccucagauuc

SEQ ID NO: 1476317 - RNA, 19 nt, Artificial Sequence
  Description of Artificial Sequence: Synthetic oligonucleotide
  Antisense strand to SEQ ID NO: 1476316
gaaucugaggcuuucaccc

SEQ ID NO: 1476318 - RNA, 19 nt, Artificial Sequence
  Description of Artificial Sequence: Synthetic oligonucleotide
  Sense strand starting at position 3780 of SEQ ID NO: 1244250
cucagauucguguggacag

SEQ ID NO: 1476319 - RNA, 19 nt, Artificial Sequence
  Description of Artificial Sequence: Synthetic oligonucleotide
  Antisense strand to SEQ ID NO: 1476318
cuguccacacgaaucugag

SEQ ID NO: 1476320 - RNA, 19 nt, Artificial Sequence
  Description of Artificial Sequence: Synthetic oligonucleotide
  Sense strand starting at position 3782 of SEQ ID NO: 1244250
cagauucguguggacagaa

SEQ ID NO: 1476321 - RNA, 19 nt, Artificial Sequence
  Description of Artificial Sequence: Synthetic oligonucleotide
  Antisense strand to SEQ ID NO: 1476320
uucuguccacacgaaucug

SEQ ID NO: 1476322 - RNA, 19 nt, Artificial Sequence
  Description of Artificial Sequence: Synthetic oligonucleotide
  Sense strand starting at position 3867 of SEQ ID NO: 1244250
augguuaacuggccuguaa

SEQ ID NO: 1476323 - RNA, 19 nt, Artificial Sequence
  Description of Artificial Sequence: Synthetic oligonucleotide
  Antisense strand to SEQ ID NO: 1476322
uuacaggccaguuaaccau

SEQ ID NO: 1476324 - RNA, 19 nt, Artificial Sequence
  Description of Artificial Sequence: Synthetic oligonucleotide
  Sense strand starting at position 3927 of SEQ ID NO: 1244250
gaggaacgcucccuauaau

SEQ ID NO: 1476325 - RNA, 19 nt, Artificial Sequence
  Description of Artificial Sequence: Synthetic oligonucleotide
  Antisense strand to SEQ ID NO: 1476324
auuauagggagcguuccuc

SEQ ID NO: 1476326 - RNA, 19 nt, Artificial Sequence
  Description of Artificial Sequence: Synthetic oligonucleotide
  Sense strand starting at position 3928 of SEQ ID NO: 1244250
aggaacgcucccuauaaua

SEQ ID NO: 1476327 - RNA, 19 nt, Artificial Sequence
  Description of Artificial Sequence: Synthetic oligonucleotide
  Antisense strand to SEQ ID NO: 1476326
uauuauagggagcguuccu

SEQ ID NO: 1476328 - RNA, 19 nt, Artificial Sequence
  Description of Artificial Sequence: Synthetic oligonucleotide
  Sense strand starting at position 3954 of SEQ ID NO: 1244250
uggauuucgccaggcauua

SEQ ID NO: 1476329 - RNA, 19 nt, Artificial Sequence
  Description of Artificial Sequence: Synthetic oligonucleotide
  Antisense strand to SEQ ID NO: 1476328
uaaugccuggcgaaaucca

SEQ ID NO: 1476330 - RNA, 19 nt, Artificial Sequence
  Description of Artificial Sequence: Synthetic oligonucleotide
  Sense strand starting at position 27 of SEQ ID NO: 1244251
caggcuuccucucaugagu

SEQ ID NO: 1476331 - RNA, 19 nt, Artificial Sequence
  Description of Artificial Sequence: Synthetic oligonucleotide
  Antisense strand to SEQ ID NO: 1476330
acucaugagaggaagccug

SEQ ID NO: 1476332 - RNA, 19 nt, Artificial Sequence
  Description of Artificial Sequence: Synthetic oligonucleotide
  Sense strand starting at position 29 of SEQ ID NO: 1244251
ggcuuccucucaugaguaa

SEQ ID NO: 1476333 - RNA, 19 nt, Artificial Sequence
  Description of Artificial Sequence: Synthetic oligonucleotide
  Antisense strand to SEQ ID NO: 1476332
uuacucaugagaggaagcc

SEQ ID NO: 1476334 - RNA, 19 nt, Artificial Sequence
  Description of Artificial Sequence: Synthetic oligonucleotide
  Sense strand starting at position 30 of SEQ ID NO: 1244251
gcuuccucucaugaguaag

SEQ ID NO: 1476335 - RNA, 19 nt, Artificial Sequence
  Description of Artificial Sequence: Synthetic oligonucleotide
  Antisense strand to SEQ ID NO: 1476334
cuuacucaugagaggaagc

SEQ ID NO: 1476336 - RNA, 19 nt, Artificial Sequence
  Description of Artificial Sequence: Synthetic oligonucleotide
  Sense strand starting at position 36 of SEQ ID NO: 1244251
ucucaugaguaagcugaga

SEQ ID NO: 1476337 - RNA, 19 nt, Artificial Sequence
  Description of Artificial Sequence: Synthetic oligonucleotide
  Antisense strand to SEQ ID NO: 1476336
ucucagcuuacucaugaga

SEQ ID NO: 1476338 - RNA, 19 nt, Artificial Sequence
  Description of Artificial Sequence: Synthetic oligonucleotide
  Sense strand starting at position 41 of SEQ ID NO: 1244251
ugaguaagcugagaacauc

SEQ ID NO: 1476339 - RNA, 19 nt, Artificial Sequence
  Description of Artificial Sequence: Synthetic oligonucleotide
  Antisense strand to SEQ ID NO: 1476338
gauguucucagcuuacuca

SEQ ID NO: 1476340 - RNA, 19 nt, Artificial Sequence
  Description of Artificial Sequence: Synthetic oligonucleotide
  Sense strand starting at position 77 of SEQ ID NO: 1244251
cagugcuuccuggaccaca

SEQ ID NO: 1476341 - RNA, 19 nt, Artificial Sequence
  Description of Artificial Sequence: Synthetic oligonucleotide
  Antisense strand to SEQ ID NO: 1476340
ugugguccaggaagcacug

SEQ ID NO: 1476342 - RNA, 19 nt, Artificial Sequence
  Description of Artificial Sequence: Synthetic oligonucleotide
  Sense strand starting at position 289 of SEQ ID NO: 1244251
ccaagugaggcuuaauugu

SEQ ID NO: 1476343 - RNA, 19 nt, Artificial Sequence
  Description of Artificial Sequence: Synthetic oligonucleotide
  Antisense strand to SEQ ID NO: 1476342
acaauuaagccucacuugg

SEQ ID NO: 1476344 - RNA, 19 nt, Artificial Sequence
  Description of Artificial Sequence: Synthetic oligonucleotide
  Sense strand starting at position 411 of SEQ ID NO: 1244251
cucugauguccguaggaua

SEQ ID NO: 1476345 - RNA, 19 nt, Artificial Sequence
  Description of Artificial Sequence: Synthetic oligonucleotide
  Antisense strand to SEQ ID NO: 1476344
uauccuacggacaucagag

SEQ ID NO: 1476346 - RNA, 19 nt, Artificial Sequence
  Description of Artificial Sequence: Synthetic oligonucleotide
  Sense strand starting at position 414 of SEQ ID NO: 1244251
ugauguccguaggauaauu

SEQ ID NO: 1476347 - RNA, 19 nt, Artificial Sequence
  Description of Artificial Sequence: Synthetic oligonucleotide
  Antisense strand to SEQ ID NO: 1476346
aauuauccuacggacauca

SEQ ID NO: 1476348 - RNA, 19 nt, Artificial Sequence
  Description of Artificial Sequence: Synthetic oligonucleotide
  Sense strand starting at position 443 of SEQ ID NO: 1244251
auccaaggauuagaaagua

SEQ ID NO: 1476349 - RNA, 19 nt, Artificial Sequence
  Description of Artificial Sequence: Synthetic oligonucleotide
  Antisense strand to SEQ ID NO: 1476348
uacuuucuaauccuuggau

SEQ ID NO: 1476350 - RNA, 19 nt, Artificial Sequence
  Description of Artificial Sequence: Synthetic oligonucleotide
  Sense strand starting at position 657 of SEQ ID NO: 1244251
ugaggugucauuggugaca

SEQ ID NO: 1476351 - RNA, 19 nt, Artificial Sequence
  Description of Artificial Sequence: Synthetic oligonucleotide
  Antisense strand to SEQ ID NO: 1476350
ugucaccaaugacaccuca

SEQ ID NO: 1476352 - RNA, 19 nt, Artificial Sequence
  Description of Artificial Sequence: Synthetic oligonucleotide
  Sense strand starting at position 704 of SEQ ID NO: 1244251
auucuuucucucuggaguu

SEQ ID NO: 1476353 - RNA, 19 nt, Artificial Sequence
  Description of Artificial Sequence: Synthetic oligonucleotide
  Antisense strand to SEQ ID NO: 1476352
aacuccagagagaaagaau

SEQ ID NO: 1476354 - RNA, 19 nt, Artificial Sequence
  Description of Artificial Sequence: Synthetic oligonucleotide
  Sense strand starting at position 706 of SEQ ID NO: 1244251
ucuuucucucuggaguuua

SEQ ID NO: 1476355 - RNA, 19 nt, Artificial Sequence
  Description of Artificial Sequence: Synthetic oligonucleotide
  Antisense strand to SEQ ID NO: 1476354
uaaacuccagagagaaaga

SEQ ID NO: 1476356 - RNA, 19 nt, Artificial Sequence
  Description of Artificial Sequence: Synthetic oligonucleotide
  Sense strand starting at position 953 of SEQ ID NO: 1244251
gugagauccuaugacagga

SEQ ID NO: 1476357 - RNA, 19 nt, Artificial Sequence
  Description of Artificial Sequence: Synthetic oligonucleotide
  Antisense strand to SEQ ID NO: 1476356
uccugucauaggaucucac

SEQ ID NO: 1476358 - RNA, 19 nt, Artificial Sequence
  Description of Artificial Sequence: Synthetic oligonucleotide
  Sense strand starting at position 1508 of SEQ ID NO: 1244251
cguccuuacugucccagaa

SEQ ID NO: 1476359 - RNA, 19 nt, Artificial Sequence
  Description of Artificial Sequence: Synthetic oligonucleotide
  Antisense strand to SEQ ID NO: 1476358
uucugggacaguaaggacg

SEQ ID NO: 1476360 - RNA, 19 nt, Artificial Sequence
  Description of Artificial Sequence: Synthetic oligonucleotide
  Sense strand starting at position 1609 of SEQ ID NO: 1244251
cucagucaacacugucaaa

SEQ ID NO: 1476361 - RNA, 19 nt, Artificial Sequence
  Description of Artificial Sequence: Synthetic oligonucleotide
  Antisense strand to SEQ ID NO: 1476360
uuugacaguguugacugag

SEQ ID NO: 1476362 - RNA, 19 nt, Artificial Sequence
  Description of Artificial Sequence: Synthetic oligonucleotide
  Sense strand starting at position 1627 of SEQ ID NO: 1244251
agccaugacucgugggaag

SEQ ID NO: 1476363 - RNA, 19 nt, Artificial Sequence
  Description of Artificial Sequence: Synthetic oligonucleotide
  Antisense strand to SEQ ID NO: 1476362
cuucccacgagucauggcu

SEQ ID NO: 1476364 - RNA, 19 nt, Artificial Sequence
  Description of Artificial Sequence: Synthetic oligonucleotide
  Sense strand starting at position 1629 of SEQ ID NO: 1244251
ccaugacucgugggaagga

SEQ ID NO: 1476365 - RNA, 19 nt, Artificial Sequence
  Description of Artificial Sequence: Synthetic oligonucleotide
  Antisense strand to SEQ ID NO: 1476364
uccuucccacgagucaugg

SEQ ID NO: 1476366 - RNA, 19 nt, Artificial Sequence
  Description of Artificial Sequence: Synthetic oligonucleotide
  Sense strand starting at position 1707 of SEQ ID NO: 1244251
ugauauuucugcccugcuu

SEQ ID NO: 1476367 - RNA, 19 nt, Artificial Sequence
  Description of Artificial Sequence: Synthetic oligonucleotide
  Antisense strand to SEQ ID NO: 1476366
aagcagggcagaaauauca

SEQ ID NO: 1476368 - RNA, 19 nt, Artificial Sequence
  Description of Artificial Sequence: Synthetic oligonucleotide
  Sense strand starting at position 2033 of SEQ ID NO: 1244251
gagagaaagguaugguacu

SEQ ID NO: 1476369 - RNA, 19 nt, Artificial Sequence
  Description of Artificial Sequence: Synthetic oligonucleotide
  Antisense strand to SEQ ID NO: 1476368
aguaccauaccuuucucuc

SEQ ID NO: 1476370 - RNA, 19 nt, Artificial Sequence
  Description of Artificial Sequence: Synthetic oligonucleotide
  Sense strand starting at position 2402 of SEQ ID NO: 1244251
ccgccugaacuuuaugaag

SEQ ID NO: 1476371 - RNA, 19 nt, Artificial Sequence
  Description of Artificial Sequence: Synthetic oligonucleotide
  Antisense strand to SEQ ID NO: 1476370
cuucauaaaguucaggcgg

SEQ ID NO: 1476372 - RNA, 19 nt, Artificial Sequence
  Description of Artificial Sequence: Synthetic oligonucleotide
  Sense strand starting at position 2404 of SEQ ID NO: 1244251
gccugaacuuuaugaagau

SEQ ID NO: 1476373 - RNA, 19 nt, Artificial Sequence
  Description of Artificial Sequence: Synthetic oligonucleotide
  Antisense strand to SEQ ID NO: 1476372
aucuucauaaaguucaggc

SEQ ID NO: 1476374 - RNA, 19 nt, Artificial Sequence
  Description of Artificial Sequence: Synthetic oligonucleotide
  Sense strand starting at position 2405 of SEQ ID NO: 1244251
ccugaacuuuaugaagauu

SEQ ID NO: 1476375 - RNA, 19 nt, Artificial Sequence
  Description of Artificial Sequence: Synthetic oligonucleotide
  Antisense strand to SEQ ID NO: 1476374
aaucuucauaaaguucagg

SEQ ID NO: 1476376 - RNA, 19 nt, Artificial Sequence
  Description of Artificial Sequence: Synthetic oligonucleotide
  Sense strand starting at position 2416 of SEQ ID NO: 1244251
ugaagauucucagacucuu

SEQ ID NO: 1476377 - RNA, 19 nt, Artificial Sequence
  Description of Artificial Sequence: Synthetic oligonucleotide
  Antisense strand to SEQ ID NO: 1476376
aagagucugagaaucuuca

SEQ ID NO: 1476378 - RNA, 19 nt, Artificial Sequence
  Description of Artificial Sequence: Synthetic oligonucleotide
  Sense strand starting at position 2646 of SEQ ID NO: 1244251
agagaagucuuggacauga

SEQ ID NO: 1476379 - RNA, 19 nt, Artificial Sequence
  Description of Artificial Sequence: Synthetic oligonucleotide
  Antisense strand to SEQ ID NO: 1476378
ucauguccaagacuucucu

SEQ ID NO: 1476380 - RNA, 19 nt, Artificial Sequence
  Description of Artificial Sequence: Synthetic oligonucleotide
  Sense strand starting at position 2767 of SEQ ID NO: 1244251
cagcgaugugcuggugaga

SEQ ID NO: 1476381 - RNA, 19 nt, Artificial Sequence
  Description of Artificial Sequence: Synthetic oligonucleotide
  Antisense strand to SEQ ID NO: 1476380
ucucaccagcacaucgcug

SEQ ID NO: 1476382 - RNA, 19 nt, Artificial Sequence
  Description of Artificial Sequence: Synthetic oligonucleotide
  Sense strand starting at position 2993 of SEQ ID NO: 1244251
ccauuauguuccuggauca

SEQ ID NO: 1476383 - RNA, 19 nt, Artificial Sequence
  Description of Artificial Sequence: Synthetic oligonucleotide
  Antisense strand to SEQ ID NO: 1476382
ugauccaggaacauaaugg

SEQ ID NO: 1476384 - RNA, 19 nt, Artificial Sequence
  Description of Artificial Sequence: Synthetic oligonucleotide
  Sense strand starting at position 3064 of SEQ ID NO: 1244251
aagggaaauucuuugcgau

SEQ ID NO: 1476385 - RNA, 19 nt, Artificial Sequence
  Description of Artificial Sequence: Synthetic oligonucleotide
  Antisense strand to SEQ ID NO: 1476384
aucgcaaagaauuucccuu

SEQ ID NO: 1476386 - RNA, 19 nt, Artificial Sequence
  Description of Artificial Sequence: Synthetic oligonucleotide
  Sense strand starting at position 3065 of SEQ ID NO: 1244251
agggaaauucuuugcgauc

SEQ ID NO: 1476387 - RNA, 19 nt, Artificial Sequence
  Description of Artificial Sequence: Synthetic oligonucleotide
  Antisense strand to SEQ ID NO: 1476386
gaucgcaaagaauuucccu

SEQ ID NO: 1476388 - RNA, 19 nt, Artificial Sequence
  Description of Artificial Sequence: Synthetic oligonucleotide
  Sense strand starting at position 3114 of SEQ ID NO: 1244251
gcacaucauuuguaggcaa

SEQ ID NO: 1476389 - RNA, 19 nt, Artificial Sequence
  Description of Artificial Sequence: Synthetic oligonucleotide
  Antisense strand to SEQ ID NO: 1476388
uugccuacaaaugaugugc

SEQ ID NO: 1476390 - RNA, 19 nt, Artificial Sequence
  Description of Artificial Sequence: Synthetic oligonucleotide
  Sense strand starting at position 3132 of SEQ ID NO: 1244251
aucacaaauugauugcgau

SEQ ID NO: 1476391 - RNA, 19 nt, Artificial Sequence
  Description of Artificial Sequence: Synthetic oligonucleotide
  Antisense strand to SEQ ID NO: 1476390
aucgcaaucaauuugugau

SEQ ID NO: 1476392 - RNA, 19 nt, Artificial Sequence
  Description of Artificial Sequence: Synthetic oligonucleotide
  Sense strand starting at position 3133 of SEQ ID NO: 1244251
ucacaaauugauugcgaua

SEQ ID NO: 1476393 - RNA, 19 nt, Artificial Sequence
  Description of Artificial Sequence: Synthetic oligonucleotide
  Antisense strand to SEQ ID NO: 1476392
uaucgcaaucaauuuguga

SEQ ID NO: 1476394 - RNA, 19 nt, Artificial Sequence
  Description of Artificial Sequence: Synthetic oligonucleotide
  Sense strand starting at position 3138 of SEQ ID NO: 1244251
aauugauugcgauacgcaa

SEQ ID NO: 1476395 - RNA, 19 nt, Artificial Sequence
  Description of Artificial Sequence: Synthetic oligonucleotide
  Antisense strand to SEQ ID NO: 1476394
uugcguaucgcaaucaauu

SEQ ID NO: 1476396 - RNA, 19 nt, Artificial Sequence
  Description of Artificial Sequence: Synthetic oligonucleotide
  Sense strand starting at position 3320 of SEQ ID NO: 1244251
agacccugucccuacauau

SEQ ID NO: 1476397 - RNA, 19 nt, Artificial Sequence
  Description of Artificial Sequence: Synthetic oligonucleotide
  Antisense strand to SEQ ID NO: 1476396
auauguagggacagggucu

SEQ ID NO: 1476398 - RNA, 19 nt, Artificial Sequence
  Description of Artificial Sequence: Synthetic oligonucleotide
  Sense strand starting at position 3539 of SEQ ID NO: 1244251
cuuggugaguuguaauaca

SEQ ID NO: 1476399 - RNA, 19 nt, Artificial Sequence
  Description of Artificial Sequence: Synthetic oligonucleotide
  Antisense strand to SEQ ID NO: 1476398
uguauuacaacucaccaag

SEQ ID NO: 1476400 - RNA, 19 nt, Artificial Sequence
  Description of Artificial Sequence: Synthetic oligonucleotide
  Sense strand starting at position 3729 of SEQ ID NO: 1244251
cagaguagcccucggcaau

SEQ ID NO: 1476401 - RNA, 19 nt, Artificial Sequence
  Description of Artificial Sequence: Synthetic oligonucleotide
  Antisense strand to SEQ ID NO: 1476400
auugccgagggcuacucug

SEQ ID NO: 1476402 - RNA, 19 nt, Artificial Sequence
  Description of Artificial Sequence: Synthetic oligonucleotide
  Sense strand starting at position 3730 of SEQ ID NO: 1244251
agaguagcccucggcaaua

SEQ ID NO: 1476403 - RNA, 19 nt, Artificial Sequence
  Description of Artificial Sequence: Synthetic oligonucleotide
  Antisense strand to SEQ ID NO: 1476402
uauugccgagggcuacucu

SEQ ID NO: 1476404 - RNA, 19 nt, Artificial Sequence
  Description of Artificial Sequence: Synthetic oligonucleotide
  Sense strand starting at position 3820 of SEQ ID NO: 1244251
cuugaaguguuguucaagu

SEQ ID NO: 1476405 - RNA, 19 nt, Artificial Sequence
  Description of Artificial Sequence: Synthetic oligonucleotide
  Antisense strand to SEQ ID NO: 1476404
acuugaacaacacuucaag

SEQ ID NO: 1476406 - RNA, 19 nt, Artificial Sequence
  Description of Artificial Sequence: Synthetic oligonucleotide
  Sense strand starting at position 3822 of SEQ ID NO: 1244251
ugaaguguuguucaaguca

SEQ ID NO: 1476407 - RNA, 19 nt, Artificial Sequence
  Description of Artificial Sequence: Synthetic oligonucleotide
  Antisense strand to SEQ ID NO: 1476406
ugacuugaacaacacuuca

SEQ ID NO: 1476408 - RNA, 19 nt, Artificial Sequence
  Description of Artificial Sequence: Synthetic oligonucleotide
  Sense strand starting at position 3903 of SEQ ID NO: 1244251
gagucuuugagaggcugga

SEQ ID NO: 1476409 - RNA, 19 nt, Artificial Sequence
  Description of Artificial Sequence: Synthetic oligonucleotide
  Antisense strand to SEQ ID NO: 1476408
uccagccucucaaagacuc

SEQ ID NO: 1476410 - RNA, 19 nt, Artificial Sequence
  Description of Artificial Sequence: Synthetic oligonucleotide
  Sense strand starting at position 60 of SEQ ID NO: 1244252
ggcuuccucucaugaggaa

SEQ ID NO: 1476411 - RNA, 19 nt, Artificial Sequence
  Description of Artificial Sequence: Synthetic oligonucleotide
  Antisense strand to SEQ ID NO: 1476410
uuccucaugagaggaagcc

SEQ ID NO: 1476412 - RNA, 19 nt, Artificial Sequence
  Description of Artificial Sequence: Synthetic oligonucleotide
  Sense strand starting at position 197 of SEQ ID NO: 1244252
gagugagguuuccaagcca

SEQ ID NO: 1476413 - RNA, 19 nt, Artificial Sequence
  Description of Artificial Sequence: Synthetic oligonucleotide
  Antisense strand to SEQ ID NO: 1476412
uggcuuggaaaccucacuc

SEQ ID NO: 1476414 - RNA, 19 nt, Artificial Sequence
  Description of Artificial Sequence: Synthetic oligonucleotide
  Sense strand starting at position 249 of SEQ ID NO: 1244252
cagugaaccgcgugaccuu

SEQ ID NO: 1476415 - RNA, 19 nt, Artificial Sequence
  Description of Artificial Sequence: Synthetic oligonucleotide
  Antisense strand to SEQ ID NO: 1476414
aaggucacgcgguucacug

SEQ ID NO: 1476416 - RNA, 19 nt, Artificial Sequence
  Description of Artificial Sequence: Synthetic oligonucleotide
  Sense strand starting at position 397 of SEQ ID NO: 1244252
cacugaucgucuuucuugu

SEQ ID NO: 1476417 - RNA, 19 nt, Artificial Sequence
  Description of Artificial Sequence: Synthetic oligonucleotide
  Antisense strand to SEQ ID NO: 1476416
acaagaaagacgaucagug

SEQ ID NO: 1476418 - RNA, 19 nt, Artificial Sequence
  Description of Artificial Sequence: Synthetic oligonucleotide
  Sense strand starting at position 401 of SEQ ID NO: 1244252
gaucgucuuucuugucuga

SEQ ID NO: 1476419 - RNA, 19 nt, Artificial Sequence
  Description of Artificial Sequence: Synthetic oligonucleotide
  Antisense strand to SEQ ID NO: 1476418
ucagacaagaaagacgauc

SEQ ID NO: 1476420 - RNA, 19 nt, Artificial Sequence
  Description of Artificial Sequence: Synthetic oligonucleotide
  Sense strand starting at position 408 of SEQ ID NO: 1244252
uuucuugucugagcuccaa

SEQ ID NO: 1476421 - RNA, 19 nt, Artificial Sequence
  Description of Artificial Sequence: Synthetic oligonucleotide
  Antisense strand to SEQ ID NO: 1476420
uuggagcucagacaagaaa

SEQ ID NO: 1476422 - RNA, 19 nt, Artificial Sequence
  Description of Artificial Sequence: Synthetic oligonucleotide
  Sense strand starting at position 484 of SEQ ID NO: 1244252
auccaaagauuagaaagua

SEQ ID NO: 1476423 - RNA, 19 nt, Artificial Sequence
  Description of Artificial Sequence: Synthetic oligonucleotide
  Antisense strand to SEQ ID NO: 1476422
uacuuucuaaucuuuggau

SEQ ID NO: 1476424 - RNA, 19 nt, Artificial Sequence
  Description of Artificial Sequence: Synthetic oligonucleotide
  Sense strand starting at position 974 of SEQ ID NO: 1244252
ucgggaagcucuuugccaa

SEQ ID NO: 1476425 - RNA, 19 nt, Artificial Sequence
  Description of Artificial Sequence: Synthetic oligonucleotide
  Antisense strand to SEQ ID NO: 1476424
uuggcaaagagcuucccga

SEQ ID NO: 1476426 - RNA, 19 nt, Artificial Sequence
  Description of Artificial Sequence: Synthetic oligonucleotide
  Sense strand starting at position 999 of SEQ ID NO: 1244252
gugagauccugugacagga

SEQ ID NO: 1476427 - RNA, 19 nt, Artificial Sequence
  Description of Artificial Sequence: Synthetic oligonucleotide
  Antisense strand to SEQ ID NO: 1476426
uccugucacaggaucucac

SEQ ID NO: 1476428 - RNA, 19 nt, Artificial Sequence
  Description of Artificial Sequence: Synthetic oligonucleotide
  Sense strand starting at position 1223 of SEQ ID NO: 1244252
cucugagacuguccgucua

SEQ ID NO: 1476429 - RNA, 19 nt, Artificial Sequence
  Description of Artificial Sequence: Synthetic oligonucleotide
  Antisense strand to SEQ ID NO: 1476428
uagacggacagucucagag

SEQ ID NO: 1476430 - RNA, 19 nt, Artificial Sequence
  Description of Artificial Sequence: Synthetic oligonucleotide
  Sense strand starting at position 1225 of SEQ ID NO: 1244252
cugagacuguccgucuaca

SEQ ID NO: 1476431 - RNA, 19 nt, Artificial Sequence
  Description of Artificial Sequence: Synthetic oligonucleotide
  Antisense strand to SEQ ID NO: 1476430
uguagacggacagucucag

SEQ ID NO: 1476432 - RNA, 19 nt, Artificial Sequence
  Description of Artificial Sequence: Synthetic oligonucleotide
  Sense strand starting at position 1254 of SEQ ID NO: 1244252
caugccuaugccugguuaa

SEQ ID NO: 1476433 - RNA, 19 nt, Artificial Sequence
  Description of Artificial Sequence: Synthetic oligonucleotide
  Antisense strand to SEQ ID NO: 1476432
uuaaccaggcauaggcaug

SEQ ID NO: 1476434 - RNA, 19 nt, Artificial Sequence
  Description of Artificial Sequence: Synthetic oligonucleotide
  Sense strand starting at position 1685 of SEQ ID NO: 1244252
ugauucaugggaggagcau

SEQ ID NO: 1476435 - RNA, 19 nt, Artificial Sequence
  Description of Artificial Sequence: Synthetic oligonucleotide
  Antisense strand to SEQ ID NO: 1476434
augcuccucccaugaauca

SEQ ID NO: 1476436 - RNA, 19 nt, Artificial Sequence
  Description of Artificial Sequence: Synthetic oligonucleotide
  Sense strand starting at position 1759 of SEQ ID NO: 1244252
ugacauuucugcccugcuu

SEQ ID NO: 1476437 - RNA, 19 nt, Artificial Sequence
  Description of Artificial Sequence: Synthetic oligonucleotide
  Antisense strand to SEQ ID NO: 1476436
aagcagggcagaaauguca

SEQ ID NO: 1476438 - RNA, 19 nt, Artificial Sequence
  Description of Artificial Sequence: Synthetic oligonucleotide
  Sense strand starting at position 1776 of SEQ ID NO: 1244252
uuguguucucuuugggaug

SEQ ID NO: 1476439 - RNA, 19 nt, Artificial Sequence
  Description of Artificial Sequence: Synthetic oligonucleotide
  Antisense strand to SEQ ID NO: 1476438
caucccaaagagaacacaa

SEQ ID NO: 1476440 - RNA, 19 nt, Artificial Sequence
  Description of Artificial Sequence: Synthetic oligonucleotide
  Sense strand starting at position 2406 of SEQ ID NO: 1244252
cucagagucugagggacau

SEQ ID NO: 1476441 - RNA, 19 nt, Artificial Sequence
  Description of Artificial Sequence: Synthetic oligonucleotide
  Antisense strand to SEQ ID NO: 1476440
augucccucagacucugag

SEQ ID NO: 1476442 - RNA, 19 nt, Artificial Sequence
  Description of Artificial Sequence: Synthetic oligonucleotide
  Sense strand starting at position 2466 of SEQ ID NO: 1244252
ugaagauucucagaaucuu

SEQ ID NO: 1476443 - RNA, 19 nt, Artificial Sequence
  Description of Artificial Sequence: Synthetic oligonucleotide
  Antisense strand to SEQ ID NO: 1476442
aagauucugagaaucuuca

SEQ ID NO: 1476444 - RNA, 19 nt, Artificial Sequence
  Description of Artificial Sequence: Synthetic oligonucleotide
  Sense strand starting at position 3028 of SEQ ID NO: 1244252
gacgaacuccuuugagaug

SEQ ID NO: 1476445 - RNA, 19 nt, Artificial Sequence
  Description of Artificial Sequence: Synthetic oligonucleotide
  Antisense strand to SEQ ID NO: 1476444
caucucaaaggaguucguc

SEQ ID NO: 1476446 - RNA, 19 nt, Artificial Sequence
  Description of Artificial Sequence: Synthetic oligonucleotide
  Sense strand starting at position 3029 of SEQ ID NO: 1244252
acgaacuccuuugagaugu

SEQ ID NO: 1476447 - RNA, 19 nt, Artificial Sequence
  Description of Artificial Sequence: Synthetic oligonucleotide
  Antisense strand to SEQ ID NO: 1476446
acaucucaaaggaguucgu

SEQ ID NO: 1476448 - RNA, 19 nt, Artificial Sequence
  Description of Artificial Sequence: Synthetic oligonucleotide
  Sense strand starting at position 3039 of SEQ ID NO: 1244252
uugagauguucccauagac

SEQ ID NO: 1476449 - RNA, 19 nt, Artificial Sequence
  Description of Artificial Sequence: Synthetic oligonucleotide
  Antisense strand to SEQ ID NO: 1476448
gucuaugggaacaucucaa

SEQ ID NO: 1476450 - RNA, 19 nt, Artificial Sequence
  Description of Artificial Sequence: Synthetic oligonucleotide
  Sense strand starting at position 3221 of SEQ ID NO: 1244252
cgucauuuguagcaaucac

SEQ ID NO: 1476451 - RNA, 19 nt, Artificial Sequence
  Description of Artificial Sequence: Synthetic oligonucleotide
  Antisense strand to SEQ ID NO: 1476450
gugauugcuacaaaugacg

SEQ ID NO: 1476452 - RNA, 19 nt, Artificial Sequence
  Description of Artificial Sequence: Synthetic oligonucleotide
  Sense strand starting at position 3228 of SEQ ID NO: 1244252
uguagcaaucaccaauuga

SEQ ID NO: 1476453 - RNA, 19 nt, Artificial Sequence
  Description of Artificial Sequence: Synthetic oligonucleotide
  Antisense strand to SEQ ID NO: 1476452
ucaauuggugauugcuaca

SEQ ID NO: 1476454 - RNA, 19 nt, Artificial Sequence
  Description of Artificial Sequence: Synthetic oligonucleotide
  Sense strand starting at position 3640 of SEQ ID NO: 1244252
cuuggugaguuguaauaua

SEQ ID NO: 1476455 - RNA, 19 nt, Artificial Sequence
  Description of Artificial Sequence: Synthetic oligonucleotide
  Antisense strand to SEQ ID NO: 1476454
uauauuacaacucaccaag

SEQ ID NO: 1476456 - RNA, 19 nt, Artificial Sequence
  Description of Artificial Sequence: Synthetic oligonucleotide
  Sense strand starting at position 3744 of SEQ ID NO: 1244252
aagcuuuacucgucauagc

SEQ ID NO: 1476457 - RNA, 19 nt, Artificial Sequence
  Description of Artificial Sequence: Synthetic oligonucleotide
  Antisense strand to SEQ ID NO: 1476456
gcuaugacgaguaaagcuu

SEQ ID NO: 1476458 - RNA, 19 nt, Artificial Sequence
  Description of Artificial Sequence: Synthetic oligonucleotide
  Sense strand starting at position 57 of SEQ ID NO: 1244253
ggcuuccucucaugaggaa

SEQ ID NO: 1476459 - RNA, 19 nt, Artificial Sequence
  Description of Artificial Sequence: Synthetic oligonucleotide
  Antisense strand to SEQ ID NO: 1476458
uuccucaugagaggaagcc

SEQ ID NO: 1476460 - RNA, 19 nt, Artificial Sequence
  Description of Artificial Sequence: Synthetic oligonucleotide
  Sense strand starting at position 393 of SEQ ID NO: 1244253
cacugaucgucuuucuugu

SEQ ID NO: 1476461 - RNA, 19 nt, Artificial Sequence
  Description of Artificial Sequence: Synthetic oligonucleotide
  Antisense strand to SEQ ID NO: 1476460
acaagaaagacgaucagug

SEQ ID NO: 1476462 - RNA, 19 nt, Artificial Sequence
  Description of Artificial Sequence: Synthetic oligonucleotide
  Sense strand starting at position 480 of SEQ ID NO: 1244253
auccaaagauuagaaagua

SEQ ID NO: 1476463 - RNA, 19 nt, Artificial Sequence
  Description of Artificial Sequence: Synthetic oligonucleotide
  Antisense strand to SEQ ID NO: 1476462
uacuuucuaaucuuuggau

SEQ ID NO: 1476464 - RNA, 19 nt, Artificial Sequence
  Description of Artificial Sequence: Synthetic oligonucleotide
  Sense strand starting at position 995 of SEQ ID NO: 1244253
gugagauccugugacagga

SEQ ID NO: 1476465 - RNA, 19 nt, Artificial Sequence
  Description of Artificial Sequence: Synthetic oligonucleotide
  Antisense strand to SEQ ID NO: 1476464
uccugucacaggaucucac

SEQ ID NO: 1476466 - RNA, 19 nt, Artificial Sequence
  Description of Artificial Sequence: Synthetic oligonucleotide
  Sense strand starting at position 1219 of SEQ ID NO: 1244253
cucugagacuguccgucua

SEQ ID NO: 1476467 - RNA, 19 nt, Artificial Sequence
  Description of Artificial Sequence: Synthetic oligonucleotide
  Antisense strand to SEQ ID NO: 1476466
uagacggacagucucagag

SEQ ID NO: 1476468 - RNA, 19 nt, Artificial Sequence
  Description of Artificial Sequence: Synthetic oligonucleotide
  Sense strand starting at position 1221 of SEQ ID NO: 1244253
cugagacuguccgucuaca

SEQ ID NO: 1476469 - RNA, 19 nt, Artificial Sequence
  Description of Artificial Sequence: Synthetic oligonucleotide
  Antisense strand to SEQ ID NO: 1476468
uguagacggacagucucag

SEQ ID NO: 1476470 - RNA, 19 nt, Artificial Sequence
  Description of Artificial Sequence: Synthetic oligonucleotide
  Sense strand starting at position 1250 of SEQ ID NO: 1244253
caugccuaugccugguuaa

SEQ ID NO: 1476471 - RNA, 19 nt, Artificial Sequence
  Description of Artificial Sequence: Synthetic oligonucleotide
  Antisense strand to SEQ ID NO: 1476470
uuaaccaggcauaggcaug

SEQ ID NO: 1476472 - RNA, 19 nt, Artificial Sequence
  Description of Artificial Sequence: Synthetic oligonucleotide
  Sense strand starting at position 1693 of SEQ ID NO: 1244253
ggagcaucucuccaggcau

SEQ ID NO: 1476473 - RNA, 19 nt, Artificial Sequence
  Description of Artificial Sequence: Synthetic oligonucleotide
  Antisense strand to SEQ ID NO: 1476472
augccuggagagaugcucc

SEQ ID NO: 1476474 - RNA, 19 nt, Artificial Sequence
  Description of Artificial Sequence: Synthetic oligonucleotide
  Sense strand starting at position 1755 of SEQ ID NO: 1244253
ugacauuucugcccugcuu

SEQ ID NO: 1476475 - RNA, 19 nt, Artificial Sequence
  Description of Artificial Sequence: Synthetic oligonucleotide
  Antisense strand to SEQ ID NO: 1476474
aagcagggcagaaauguca

SEQ ID NO: 1476476 - RNA, 19 nt, Artificial Sequence
  Description of Artificial Sequence: Synthetic oligonucleotide
  Sense strand starting at position 2246 of SEQ ID NO: 1244253
ugaguugccagaugacacu

SEQ ID NO: 1476477 - RNA, 19 nt, Artificial Sequence
  Description of Artificial Sequence: Synthetic oligonucleotide
  Antisense strand to SEQ ID NO: 1476476
agugucaucuggcaacuca

SEQ ID NO: 1476478 - RNA, 19 nt, Artificial Sequence
  Description of Artificial Sequence: Synthetic oligonucleotide
  Sense strand starting at position 2404 of SEQ ID NO: 1244253
cucagagucugagggacau

SEQ ID NO: 1476479 - RNA, 19 nt, Artificial Sequence
  Description of Artificial Sequence: Synthetic oligonucleotide
  Antisense strand to SEQ ID NO: 1476478
augucccucagacucugag

SEQ ID NO: 1476480 - RNA, 19 nt, Artificial Sequence
  Description of Artificial Sequence: Synthetic oligonucleotide
  Sense strand starting at position 2446 of SEQ ID NO: 1244253
guggcagccugagcuauau

SEQ ID NO: 1476481 - RNA, 19 nt, Artificial Sequence
  Description of Artificial Sequence: Synthetic oligonucleotide
  Antisense strand to SEQ ID NO: 1476480
auauagcucaggcugccac

SEQ ID NO: 1476482 - RNA, 19 nt, Artificial Sequence
  Description of Artificial Sequence: Synthetic oligonucleotide
  Sense strand starting at position 2448 of SEQ ID NO: 1244253
ggcagccugagcuauauga

SEQ ID NO: 1476483 - RNA, 19 nt, Artificial Sequence
  Description of Artificial Sequence: Synthetic oligonucleotide
  Antisense strand to SEQ ID NO: 1476482
ucauauagcucaggcugcc

SEQ ID NO: 1476484 - RNA, 19 nt, Artificial Sequence
  Description of Artificial Sequence: Synthetic oligonucleotide
  Sense strand starting at position 2450 of SEQ ID NO: 1244253
cagccugagcuauaugaag

SEQ ID NO: 1476485 - RNA, 19 nt, Artificial Sequence
  Description of Artificial Sequence: Synthetic oligonucleotide
  Antisense strand to SEQ ID NO: 1476484
cuucauauagcucaggcug

SEQ ID NO: 1476486 - RNA, 19 nt, Artificial Sequence
  Description of Artificial Sequence: Synthetic oligonucleotide
  Sense strand starting at position 2452 of SEQ ID NO: 1244253
gccugagcuauaugaagau

SEQ ID NO: 1476487 - RNA, 19 nt, Artificial Sequence
  Description of Artificial Sequence: Synthetic oligonucleotide
  Antisense strand to SEQ ID NO: 1476486
aucuucauauagcucaggc

SEQ ID NO: 1476488 - RNA, 19 nt, Artificial Sequence
  Description of Artificial Sequence: Synthetic oligonucleotide
  Sense strand starting at position 2464 of SEQ ID NO: 1244253
ugaagauucucagaaucuu

SEQ ID NO: 1476489 - RNA, 19 nt, Artificial Sequence
  Description of Artificial Sequence: Synthetic oligonucleotide
  Antisense strand to SEQ ID NO: 1476488
aagauucugagaaucuuca

SEQ ID NO: 1476490 - RNA, 19 nt, Artificial Sequence
  Description of Artificial Sequence: Synthetic oligonucleotide
  Sense strand starting at position 2683 of SEQ ID NO: 1244253
agagaaguauuggacauaa

SEQ ID NO: 1476491 - RNA, 19 nt, Artificial Sequence
  Description of Artificial Sequence: Synthetic oligonucleotide
  Antisense strand to SEQ ID NO: 1476490
uuauguccaauacuucucu

SEQ ID NO: 1476492 - RNA, 19 nt, Artificial Sequence
  Description of Artificial Sequence: Synthetic oligonucleotide
  Sense strand starting at position 2873 of SEQ ID NO: 1244253
caacgaugugcuggcgaga

SEQ ID NO: 1476493 - RNA, 19 nt, Artificial Sequence
  Description of Artificial Sequence: Synthetic oligonucleotide
  Antisense strand to SEQ ID NO: 1476492
ucucgccagcacaucguug

SEQ ID NO: 1476494 - RNA, 19 nt, Artificial Sequence
  Description of Artificial Sequence: Synthetic oligonucleotide
  Sense strand starting at position 3027 of SEQ ID NO: 1244253
gacgaacuccuuugagaug

SEQ ID NO: 1476495 - RNA, 19 nt, Artificial Sequence
  Description of Artificial Sequence: Synthetic oligonucleotide
  Antisense strand to SEQ ID NO: 1476494
caucucaaaggaguucguc

SEQ ID NO: 1476496 - RNA, 19 nt, Artificial Sequence
  Description of Artificial Sequence: Synthetic oligonucleotide
  Sense strand starting at position 3028 of SEQ ID NO: 1244253
acgaacuccuuugagaugu

SEQ ID NO: 1476497 - RNA, 19 nt, Artificial Sequence
  Description of Artificial Sequence: Synthetic oligonucleotide
  Antisense strand to SEQ ID NO: 1476496
acaucucaaaggaguucgu

SEQ ID NO: 1476498 - RNA, 19 nt, Artificial Sequence
  Description of Artificial Sequence: Synthetic oligonucleotide
  Sense strand starting at position 3038 of SEQ ID NO: 1244253
uugagauguucccauagac

SEQ ID NO: 1476499 - RNA, 19 nt, Artificial Sequence
  Description of Artificial Sequence: Synthetic oligonucleotide
  Antisense strand to SEQ ID NO: 1476498
gucuaugggaacaucucaa

SEQ ID NO: 1476500 - RNA, 19 nt, Artificial Sequence
  Description of Artificial Sequence: Synthetic oligonucleotide
  Sense strand starting at position 3086 of SEQ ID NO: 1244253
aucccauuauguucuggau

SEQ ID NO: 1476501 - RNA, 19 nt, Artificial Sequence
  Description of Artificial Sequence: Synthetic oligonucleotide
  Antisense strand to SEQ ID NO: 1476500
auccagaacauaaugggau

SEQ ID NO: 1476502 - RNA, 19 nt, Artificial Sequence
  Description of Artificial Sequence: Synthetic oligonucleotide
  Sense strand starting at position 3088 of SEQ ID NO: 1244253
cccauuauguucuggauca

SEQ ID NO: 1476503 - RNA, 19 nt, Artificial Sequence
  Description of Artificial Sequence: Synthetic oligonucleotide
  Antisense strand to SEQ ID NO: 1476502
ugauccagaacauaauggg

SEQ ID NO: 1476504 - RNA, 19 nt, Artificial Sequence
  Description of Artificial Sequence: Synthetic oligonucleotide
  Sense strand starting at position 3089 of SEQ ID NO: 1244253
ccauuauguucuggaucaa

SEQ ID NO: 1476505 - RNA, 19 nt, Artificial Sequence
  Description of Artificial Sequence: Synthetic oligonucleotide
  Antisense strand to SEQ ID NO: 1476504
uugauccagaacauaaugg

SEQ ID NO: 1476506 - RNA, 19 nt, Artificial Sequence
  Description of Artificial Sequence: Synthetic oligonucleotide
  Sense strand starting at position 3168 of SEQ ID NO: 1244253
agggaaauucuuugcaauc

SEQ ID NO: 1476507 - RNA, 19 nt, Artificial Sequence
  Description of Artificial Sequence: Synthetic oligonucleotide
  Antisense strand to SEQ ID NO: 1476506
gauugcaaagaauuucccu

SEQ ID NO: 1476508 - RNA, 19 nt, Artificial Sequence
  Description of Artificial Sequence: Synthetic oligonucleotide
  Sense strand starting at position 3169 of SEQ ID NO: 1244253
gggaaauucuuugcaaucc

SEQ ID NO: 1476509 - RNA, 19 nt, Artificial Sequence
  Description of Artificial Sequence: Synthetic oligonucleotide
  Antisense strand to SEQ ID NO: 1476508
ggauugcaaagaauuuccc

SEQ ID NO: 1476510 - RNA, 19 nt, Artificial Sequence
  Description of Artificial Sequence: Synthetic oligonucleotide
  Sense strand starting at position 3170 of SEQ ID NO: 1244253
ggaaauucuuugcaauccu

SEQ ID NO: 1476511 - RNA, 19 nt, Artificial Sequence
  Description of Artificial Sequence: Synthetic oligonucleotide
  Antisense strand to SEQ ID NO: 1476510
aggauugcaaagaauuucc

SEQ ID NO: 1476512 - RNA, 19 nt, Artificial Sequence
  Description of Artificial Sequence: Synthetic oligonucleotide
  Sense strand starting at position 3188 of SEQ ID NO: 1244253
ucucgaauaccaggaauau

SEQ ID NO: 1476513 - RNA, 19 nt, Artificial Sequence
  Description of Artificial Sequence: Synthetic oligonucleotide
  Antisense strand to SEQ ID NO: 1476512
auauuccugguauucgaga

SEQ ID NO: 1476514 - RNA, 19 nt, Artificial Sequence
  Description of Artificial Sequence: Synthetic oligonucleotide
  Sense strand starting at position 3220 of SEQ ID NO: 1244253
cgucauuuguagcaaucac

SEQ ID NO: 1476515 - RNA, 19 nt, Artificial Sequence
  Description of Artificial Sequence: Synthetic oligonucleotide
  Antisense strand to SEQ ID NO: 1476514
gugauugcuacaaaugacg

SEQ ID NO: 1476516 - RNA, 19 nt, Artificial Sequence
  Description of Artificial Sequence: Synthetic oligonucleotide
  Sense strand starting at position 3227 of SEQ ID NO: 1244253
uguagcaaucaccaauuga

SEQ ID NO: 1476517 - RNA, 19 nt, Artificial Sequence
  Description of Artificial Sequence: Synthetic oligonucleotide
  Antisense strand to SEQ ID NO: 1476516
ucaauuggugauugcuaca

SEQ ID NO: 1476518 - RNA, 19 nt, Artificial Sequence
  Description of Artificial Sequence: Synthetic oligonucleotide
  Sense strand starting at position 3237 of SEQ ID NO: 1244253
accaauugauugggauaug

SEQ ID NO: 1476519 - RNA, 19 nt, Artificial Sequence
  Description of Artificial Sequence: Synthetic oligonucleotide
  Antisense strand to SEQ ID NO: 1476518
cauaucccaaucaauuggu

SEQ ID NO: 1476520 - RNA, 19 nt, Artificial Sequence
  Description of Artificial Sequence: Synthetic oligonucleotide
  Sense strand starting at position 3639 of SEQ ID NO: 1244253
cuuggugaguuguaauaua

SEQ ID NO: 1476521 - RNA, 19 nt, Artificial Sequence
  Description of Artificial Sequence: Synthetic oligonucleotide
  Antisense strand to SEQ ID NO: 1476520
uauauuacaacucaccaag

SEQ ID NO: 1476522 - RNA, 19 nt, Artificial Sequence
  Description of Artificial Sequence: Synthetic oligonucleotide
  Sense strand starting at position 3743 of SEQ ID NO: 1244253
aagcuuuacucgucauagc

SEQ ID NO: 1476523 - RNA, 19 nt, Artificial Sequence
  Description of Artificial Sequence: Synthetic oligonucleotide
  Antisense strand to SEQ ID NO: 1476522
gcuaugacgaguaaagcuu

SEQ ID NO: 1476524 - RNA, 19 nt, Artificial Sequence
  Description of Artificial Sequence: Synthetic oligonucleotide
  Sense strand starting at position 3831 of SEQ ID NO: 1244253
cagaguggcccucagcaau

SEQ ID NO: 1476525 - RNA, 19 nt, Artificial Sequence
  Description of Artificial Sequence: Synthetic oligonucleotide
  Antisense strand to SEQ ID NO: 1476524
auugcugagggccacucug

SEQ ID NO: 1476526 - RNA, 19 nt, Artificial Sequence
  Description of Artificial Sequence: Synthetic oligonucleotide
  Sense strand starting at position 3875 of SEQ ID NO: 1244253
gucaaugagccuugcaacu

SEQ ID NO: 1476527 - RNA, 19 nt, Artificial Sequence
  Description of Artificial Sequence: Synthetic oligonucleotide
  Antisense strand to SEQ ID NO: 1476526
aguugcaaggcucauugac

SEQ ID NO: 1476528 - RNA, 19 nt, Artificial Sequence
  Description of Artificial Sequence: Synthetic oligonucleotide
  Sense strand starting at position 3918 of SEQ ID NO: 1244253
agacacaugcugugagaau

SEQ ID NO: 1476529 - RNA, 19 nt, Artificial Sequence
  Description of Artificial Sequence: Synthetic oligonucleotide
  Antisense strand to SEQ ID NO: 1476528
auucucacagcaugugucu

SEQ ID NO: 1476530 - RNA, 19 nt, Artificial Sequence
  Description of Artificial Sequence: Synthetic oligonucleotide
  Sense strand starting at position 3919 of SEQ ID NO: 1244253
gacacaugcugugagaauu

SEQ ID NO: 1476531 - RNA, 19 nt, Artificial Sequence
  Description of Artificial Sequence: Synthetic oligonucleotide
  Antisense strand to SEQ ID NO: 1476530
aauucucacagcauguguc

SEQ ID NO: 1476532 - RNA, 19 nt, Artificial Sequence
  Description of Artificial Sequence: Synthetic oligonucleotide
  Sense strand starting at position 3927 of SEQ ID NO: 1244253
cugugagaauuccauucga

SEQ ID NO: 1476533 - RNA, 19 nt, Artificial Sequence
  Description of Artificial Sequence: Synthetic oligonucleotide
  Antisense strand to SEQ ID NO: 1476532
ucgaauggaauucucacag

SEQ ID NO: 1476534 - RNA, 19 nt, Artificial Sequence
  Description of Artificial Sequence: Synthetic oligonucleotide
  Sense strand starting at position 3932 of SEQ ID NO: 1244253
agaauuccauucgagucaa

SEQ ID NO: 1476535 - RNA, 19 nt, Artificial Sequence
  Description of Artificial Sequence: Synthetic oligonucleotide
  Antisense strand to SEQ ID NO: 1476534
uugacucgaauggaauucu

SEQ ID NO: 1476536 - RNA, 19 nt, Artificial Sequence
  Description of Artificial Sequence: Synthetic oligonucleotide
  Sense strand starting at position 3970 of SEQ ID NO: 1244253
uggcguuacccuugggagu

SEQ ID NO: 1476537 - RNA, 19 nt, Artificial Sequence
  Description of Artificial Sequence: Synthetic oligonucleotide
  Antisense strand to SEQ ID NO: 1476536
acucccaaggguaacgcca

SEQ ID NO: 1476538 - RNA, 19 nt, Artificial Sequence
  Description of Artificial Sequence: Synthetic oligonucleotide
  Sense strand starting at position 56 of SEQ ID NO: 1244254
gcgucuuggcccucugagu

SEQ ID NO: 1476539 - RNA, 19 nt, Artificial Sequence
  Description of Artificial Sequence: Synthetic oligonucleotide
  Antisense strand to SEQ ID NO: 1476538
acucagagggccaagacgc

SEQ ID NO: 1476540 - RNA, 19 nt, Artificial Sequence
  Description of Artificial Sequence: Synthetic oligonucleotide
  Sense strand starting at position 65 of SEQ ID NO: 1244254
cccucugaguggcuuugaa

SEQ ID NO: 1476541 - RNA, 19 nt, Artificial Sequence
  Description of Artificial Sequence: Synthetic oligonucleotide
  Antisense strand to SEQ ID NO: 1476540
uucaaagccacucagaggg

SEQ ID NO: 1476542 - RNA, 19 nt, Artificial Sequence
  Description of Artificial Sequence: Synthetic oligonucleotide
  Sense strand starting at position 149 of SEQ ID NO: 1244254
agccgaguaaauugcgaua

SEQ ID NO: 1476543 - RNA, 19 nt, Artificial Sequence
  Description of Artificial Sequence: Synthetic oligonucleotide
  Antisense strand to SEQ ID NO: 1476542
uaucgcaauuuacucggcu

SEQ ID NO: 1476544 - RNA, 19 nt, Artificial Sequence
  Description of Artificial Sequence: Synthetic oligonucleotide
  Sense strand starting at position 152 of SEQ ID NO: 1244254
cgaguaaauugcgauauuu

SEQ ID NO: 1476545 - RNA, 19 nt, Artificial Sequence
  Description of Artificial Sequence: Synthetic oligonucleotide
  Antisense strand to SEQ ID NO: 1476544
aaauaucgcaauuuacucg

SEQ ID NO: 1476546 - RNA, 19 nt, Artificial Sequence
  Description of Artificial Sequence: Synthetic oligonucleotide
  Sense strand starting at position 206 of SEQ ID NO: 1244254
gcccguucuucucuguuga

SEQ ID NO: 1476547 - RNA, 19 nt, Artificial Sequence
  Description of Artificial Sequence: Synthetic oligonucleotide
  Antisense strand to SEQ ID NO: 1476546
ucaacagagaagaacgggc

SEQ ID NO: 1476548 - RNA, 19 nt, Artificial Sequence
  Description of Artificial Sequence: Synthetic oligonucleotide
  Sense strand starting at position 224 of SEQ ID NO: 1244254
acuuguguguuugugugaa

SEQ ID NO: 1476549 - RNA, 19 nt, Artificial Sequence
  Description of Artificial Sequence: Synthetic oligonucleotide
  Antisense strand to SEQ ID NO: 1476548
uucacacaaacacacaagu

SEQ ID NO: 1476550 - RNA, 19 nt, Artificial Sequence
  Description of Artificial Sequence: Synthetic oligonucleotide
  Sense strand starting at position 226 of SEQ ID NO: 1244254
uuguguguuugugugaaug

SEQ ID NO: 1476551 - RNA, 19 nt, Artificial Sequence
  Description of Artificial Sequence: Synthetic oligonucleotide
  Antisense strand to SEQ ID NO: 1476550
cauucacacaaacacacaa

SEQ ID NO: 1476552 - RNA, 19 nt, Artificial Sequence
  Description of Artificial Sequence: Synthetic oligonucleotide
  Sense strand starting at position 256 of SEQ ID NO: 1244254
uugugaguguacgauaaua

SEQ ID NO: 1476553 - RNA, 19 nt, Artificial Sequence
  Description of Artificial Sequence: Synthetic oligonucleotide
  Antisense strand to SEQ ID NO: 1476552
uauuaucguacacucacaa

SEQ ID NO: 1476554 - RNA, 19 nt, Artificial Sequence
  Description of Artificial Sequence: Synthetic oligonucleotide
  Sense strand starting at position 258 of SEQ ID NO: 1244254
gugaguguacgauaauaua

SEQ ID NO: 1476555 - RNA, 19 nt, Artificial Sequence
  Description of Artificial Sequence: Synthetic oligonucleotide
  Antisense strand to SEQ ID NO: 1476554
uauauuaucguacacucac

SEQ ID NO: 1476556 - RNA, 19 nt, Artificial Sequence
  Description of Artificial Sequence: Synthetic oligonucleotide
  Sense strand starting at position 352 of SEQ ID NO: 1244254
agguuucaucaaggagguu

SEQ ID NO: 1476557 - RNA, 19 nt, Artificial Sequence
  Description of Artificial Sequence: Synthetic oligonucleotide
  Antisense strand to SEQ ID NO: 1476556
aaccuccuugaugaaaccu

SEQ ID NO: 1476558 - RNA, 19 nt, Artificial Sequence
  Description of Artificial Sequence: Synthetic oligonucleotide
  Sense strand starting at position 384 of SEQ ID NO: 1244254
ggcaguuuccuaggaggac

SEQ ID NO: 1476559 - RNA, 19 nt, Artificial Sequence
  Description of Artificial Sequence: Synthetic oligonucleotide
  Antisense strand to SEQ ID NO: 1476558
guccuccuaggaaacugcc

SEQ ID NO: 1476560 - RNA, 19 nt, Artificial Sequence
  Description of Artificial Sequence: Synthetic oligonucleotide
  Sense strand starting at position 385 of SEQ ID NO: 1244254
gcaguuuccuaggaggacu

SEQ ID NO: 1476561 - RNA, 19 nt, Artificial Sequence
  Description of Artificial Sequence: Synthetic oligonucleotide
  Antisense strand to SEQ ID NO: 1476560
aguccuccuaggaaacugc

SEQ ID NO: 1476562 - RNA, 19 nt, Artificial Sequence
  Description of Artificial Sequence: Synthetic oligonucleotide
  Sense strand starting at position 587 of SEQ ID NO: 1244254
ggcuuuaaggccgaguucu

SEQ ID NO: 1476563 - RNA, 19 nt, Artificial Sequence
  Description of Artificial Sequence: Synthetic oligonucleotide
  Antisense strand to SEQ ID NO: 1476562
agaacucggccuuaaagcc

SEQ ID NO: 1476564 - RNA, 19 nt, Artificial Sequence
  Description of Artificial Sequence: Synthetic oligonucleotide
  Sense strand starting at position 767 of SEQ ID NO: 1244254
agagcuuggcuccgggaaa

SEQ ID NO: 1476565 - RNA, 19 nt, Artificial Sequence
  Description of Artificial Sequence: Synthetic oligonucleotide
  Antisense strand to SEQ ID NO: 1476564
uuucccggagccaagcucu

SEQ ID NO: 1476566 - RNA, 19 nt, Artificial Sequence
  Description of Artificial Sequence: Synthetic oligonucleotide
  Sense strand starting at position 901 of SEQ ID NO: 1244254
gacccauaguuuccaggau

SEQ ID NO: 1476567 - RNA, 19 nt, Artificial Sequence
  Description of Artificial Sequence: Synthetic oligonucleotide
  Antisense strand to SEQ ID NO: 1476566
auccuggaaacuauggguc

SEQ ID NO: 1476568 - RNA, 19 nt, Artificial Sequence
  Description of Artificial Sequence: Synthetic oligonucleotide
  Sense strand starting at position 905 of SEQ ID NO: 1244254
cauaguuuccaggaugcaa

SEQ ID NO: 1476569 - RNA, 19 nt, Artificial Sequence
  Description of Artificial Sequence: Synthetic oligonucleotide
  Antisense strand to SEQ ID NO: 1476568
uugcauccuggaaacuaug

SEQ ID NO: 1476570 - RNA, 19 nt, Artificial Sequence
  Description of Artificial Sequence: Synthetic oligonucleotide
  Sense strand starting at position 1097 of SEQ ID NO: 1244254
gaaaguacucaccggaaga

SEQ ID NO: 1476571 - RNA, 19 nt, Artificial Sequence
  Description of Artificial Sequence: Synthetic oligonucleotide
  Antisense strand to SEQ ID NO: 1476570
ucuuccggugaguacuuuc

SEQ ID NO: 1476572 - RNA, 19 nt, Artificial Sequence
  Description of Artificial Sequence: Synthetic oligonucleotide
  Sense strand starting at position 1987 of SEQ ID NO: 1244254
ggaggaagaucuugguguu

SEQ ID NO: 1476573 - RNA, 19 nt, Artificial Sequence
  Description of Artificial Sequence: Synthetic oligonucleotide
  Antisense strand to SEQ ID NO: 1476572
aacaccaagaucuuccucc

SEQ ID NO: 1476574 - RNA, 19 nt, Artificial Sequence
  Description of Artificial Sequence: Synthetic oligonucleotide
  Sense strand starting at position 1988 of SEQ ID NO: 1244254
gaggaagaucuugguguug

SEQ ID NO: 1476575 - RNA, 19 nt, Artificial Sequence
  Description of Artificial Sequence: Synthetic oligonucleotide
  Antisense strand to SEQ ID NO: 1476574
caacaccaagaucuuccuc

SEQ ID NO: 1476576 - RNA, 19 nt, Artificial Sequence
  Description of Artificial Sequence: Synthetic oligonucleotide
  Sense strand starting at position 1990 of SEQ ID NO: 1244254
ggaagaucuugguguugau

SEQ ID NO: 1476577 - RNA, 19 nt, Artificial Sequence
  Description of Artificial Sequence: Synthetic oligonucleotide
  Antisense strand to SEQ ID NO: 1476576
aucaacaccaagaucuucc

SEQ ID NO: 1476578 - RNA, 19 nt, Artificial Sequence
  Description of Artificial Sequence: Synthetic oligonucleotide
  Sense strand starting at position 2038 of SEQ ID NO: 1244254
uggagaaguguuuguguca

SEQ ID NO: 1476579 - RNA, 19 nt, Artificial Sequence
  Description of Artificial Sequence: Synthetic oligonucleotide
  Antisense strand to SEQ ID NO: 1476578
ugacacaaacacuucucca

SEQ ID NO: 1476580 - RNA, 19 nt, Artificial Sequence
  Description of Artificial Sequence: Synthetic oligonucleotide
  Sense strand starting at position 2039 of SEQ ID NO: 1244254
ggagaaguguuugugucaa

SEQ ID NO: 1476581 - RNA, 19 nt, Artificial Sequence
  Description of Artificial Sequence: Synthetic oligonucleotide
  Antisense strand to SEQ ID NO: 1476580
uugacacaaacacuucucc

SEQ ID NO: 1476582 - RNA, 19 nt, Artificial Sequence
  Description of Artificial Sequence: Synthetic oligonucleotide
  Sense strand starting at position 2041 of SEQ ID NO: 1244254
agaaguguuugugucaauc

SEQ ID NO: 1476583 - RNA, 19 nt, Artificial Sequence
  Description of Artificial Sequence: Synthetic oligonucleotide
  Antisense strand to SEQ ID NO: 1476582
gauugacacaaacacuucu

SEQ ID NO: 1476584 - RNA, 19 nt, Artificial Sequence
  Description of Artificial Sequence: Synthetic oligonucleotide
  Sense strand starting at position 2376 of SEQ ID NO: 1244254
uuucguugugguggcaaau

SEQ ID NO: 1476585 - RNA, 19 nt, Artificial Sequence
  Description of Artificial Sequence: Synthetic oligonucleotide
  Antisense strand to SEQ ID NO: 1476584
auuugccaccacaacgaaa

SEQ ID NO: 1476586 - RNA, 19 nt, Artificial Sequence
  Description of Artificial Sequence: Synthetic oligonucleotide
  Sense strand starting at position 2387 of SEQ ID NO: 1244254
uggcaaaucuggguuuccu

SEQ ID NO: 1476587 - RNA, 19 nt, Artificial Sequence
  Description of Artificial Sequence: Synthetic oligonucleotide
  Antisense strand to SEQ ID NO: 1476586
aggaaacccagauuugcca

SEQ ID NO: 1476588 - RNA, 19 nt, Artificial Sequence
  Description of Artificial Sequence: Synthetic oligonucleotide
  Sense strand starting at position 2823 of SEQ ID NO: 1244254
ccgcguuuagaggaucagu

SEQ ID NO: 1476589 - RNA, 19 nt, Artificial Sequence
  Description of Artificial Sequence: Synthetic oligonucleotide
  Antisense strand to SEQ ID NO: 1476588
acugauccucuaaacgcgg

SEQ ID NO: 1476590 - RNA, 19 nt, Artificial Sequence
  Description of Artificial Sequence: Synthetic oligonucleotide
  Sense strand starting at position 2975 of SEQ ID NO: 1244254
agaguucugcuguagagug

SEQ ID NO: 1476591 - RNA, 19 nt, Artificial Sequence
  Description of Artificial Sequence: Synthetic oligonucleotide
  Antisense strand to SEQ ID NO: 1476590
cacucuacagcagaacucu

SEQ ID NO: 1476592 - RNA, 19 nt, Artificial Sequence
  Description of Artificial Sequence: Synthetic oligonucleotide
  Sense strand starting at position 3111 of SEQ ID NO: 1244254
guacuuucuugagcuggaa

SEQ ID NO: 1476593 - RNA, 19 nt, Artificial Sequence
  Description of Artificial Sequence: Synthetic oligonucleotide
  Antisense strand to SEQ ID NO: 1476592
uuccagcucaagaaaguac

SEQ ID NO: 1476594 - RNA, 19 nt, Artificial Sequence
  Description of Artificial Sequence: Synthetic oligonucleotide
  Sense strand starting at position 3113 of SEQ ID NO: 1244254
acuuucuugagcuggaagu

SEQ ID NO: 1476595 - RNA, 19 nt, Artificial Sequence
  Description of Artificial Sequence: Synthetic oligonucleotide
  Antisense strand to SEQ ID NO: 1476594
acuuccagcucaagaaagu

SEQ ID NO: 1476596 - RNA, 19 nt, Artificial Sequence
  Description of Artificial Sequence: Synthetic oligonucleotide
  Sense strand starting at position 3115 of SEQ ID NO: 1244254
uuucuugagcuggaaguuu

SEQ ID NO: 1476597 - RNA, 19 nt, Artificial Sequence
  Description of Artificial Sequence: Synthetic oligonucleotide
  Antisense strand to SEQ ID NO: 1476596
aaacuuccagcucaagaaa

SEQ ID NO: 1476598 - RNA, 19 nt, Artificial Sequence
  Description of Artificial Sequence: Synthetic oligonucleotide
  Sense strand starting at position 3123 of SEQ ID NO: 1244254
gcuggaaguuugucccaag

SEQ ID NO: 1476599 - RNA, 19 nt, Artificial Sequence
  Description of Artificial Sequence: Synthetic oligonucleotide
  Antisense strand to SEQ ID NO: 1476598
cuugggacaaacuuccagc

SEQ ID NO: 1476600 - RNA, 19 nt, Artificial Sequence
  Description of Artificial Sequence: Synthetic oligonucleotide
  Sense strand starting at position 3405 of SEQ ID NO: 1244254
uggcgagaaaguugugaga

SEQ ID NO: 1476601 - RNA, 19 nt, Artificial Sequence
  Description of Artificial Sequence: Synthetic oligonucleotide
  Antisense strand to SEQ ID NO: 1476600
ucucacaacuuucucgcca

SEQ ID NO: 1476602 - RNA, 19 nt, Artificial Sequence
  Description of Artificial Sequence: Synthetic oligonucleotide
  Sense strand starting at position 3407 of SEQ ID NO: 1244254
gcgagaaaguugugagaaa

SEQ ID NO: 1476603 - RNA, 19 nt, Artificial Sequence
  Description of Artificial Sequence: Synthetic oligonucleotide
  Antisense strand to SEQ ID NO: 1476602
uuucucacaacuuucucgc

SEQ ID NO: 1476604 - RNA, 19 nt, Artificial Sequence
  Description of Artificial Sequence: Synthetic oligonucleotide
  Sense strand starting at position 3777 of SEQ ID NO: 1244254
gggacagauccuggucuag

SEQ ID NO: 1476605 - RNA, 19 nt, Artificial Sequence
  Description of Artificial Sequence: Synthetic oligonucleotide
  Antisense strand to SEQ ID NO: 1476604
cuagaccaggaucuguccc

SEQ ID NO: 1476606 - RNA, 19 nt, Artificial Sequence
  Description of Artificial Sequence: Synthetic oligonucleotide
  Sense strand starting at position 3779 of SEQ ID NO: 1244254
gacagauccuggucuagag

SEQ ID NO: 1476607 - RNA, 19 nt, Artificial Sequence
  Description of Artificial Sequence: Synthetic oligonucleotide
  Antisense strand to SEQ ID NO: 1476606
cucuagaccaggaucuguc

SEQ ID NO: 1476608 - RNA, 19 nt, Artificial Sequence
  Description of Artificial Sequence: Synthetic oligonucleotide
  Sense strand starting at position 3796 of SEQ ID NO: 1244254
agugccuucgccuggaaga

SEQ ID NO: 1476609 - RNA, 19 nt, Artificial Sequence
  Description of Artificial Sequence: Synthetic oligonucleotide
  Antisense strand to SEQ ID NO: 1476608
ucuuccaggcgaaggcacu

SEQ ID NO: 1476610 - RNA, 19 nt, Artificial Sequence
  Description of Artificial Sequence: Synthetic oligonucleotide
  Sense strand starting at position 3798 of SEQ ID NO: 1244254
ugccuucgccuggaagagu

SEQ ID NO: 1476611 - RNA, 19 nt, Artificial Sequence
  Description of Artificial Sequence: Synthetic oligonucleotide
  Antisense strand to SEQ ID NO: 1476610
acucuuccaggcgaaggca

SEQ ID NO: 1476612 - RNA, 19 nt, Artificial Sequence
  Description of Artificial Sequence: Synthetic oligonucleotide
  Sense strand starting at position 3807 of SEQ ID NO: 1244254
cuggaagaguuacuguagu

SEQ ID NO: 1476613 - RNA, 19 nt, Artificial Sequence
  Description of Artificial Sequence: Synthetic oligonucleotide
  Antisense strand to SEQ ID NO: 1476612
acuacaguaacucuuccag

SEQ ID NO: 1476614 - RNA, 19 nt, Artificial Sequence
  Description of Artificial Sequence: Synthetic oligonucleotide
  Sense strand starting at position 3847 of SEQ ID NO: 1244254
acccuaaauuccguuucga

SEQ ID NO: 1476615 - RNA, 19 nt, Artificial Sequence
  Description of Artificial Sequence: Synthetic oligonucleotide
  Antisense strand to SEQ ID NO: 1476614
ucgaaacggaauuuagggu

SEQ ID NO: 1476616 - RNA, 19 nt, Artificial Sequence
  Description of Artificial Sequence: Synthetic oligonucleotide
  Sense strand starting at position 3892 of SEQ ID NO: 1244254
caggauuucuccugaagug

SEQ ID NO: 1476617 - RNA, 19 nt, Artificial Sequence
  Description of Artificial Sequence: Synthetic oligonucleotide
  Antisense strand to SEQ ID NO: 1476616
cacuucaggagaaauccug

SEQ ID NO: 1476618 - RNA, 19 nt, Artificial Sequence
  Description of Artificial Sequence: Synthetic oligonucleotide
  Sense strand starting at position 339 of SEQ ID NO: 1244255
cuguauaaccuugaugggu

SEQ ID NO: 1476619 - RNA, 19 nt, Artificial Sequence
  Description of Artificial Sequence: Synthetic oligonucleotide
  Antisense strand to SEQ ID NO: 1476618
acccaucaagguuauacag

SEQ ID NO: 1476620 - RNA, 19 nt, Artificial Sequence
  Description of Artificial Sequence: Synthetic oligonucleotide
  Sense strand starting at position 489 of SEQ ID NO: 1244255
cuccuauuaugaucgguga

SEQ ID NO: 1476621 - RNA, 19 nt, Artificial Sequence
  Description of Artificial Sequence: Synthetic oligonucleotide
  Antisense strand to SEQ ID NO: 1476620
ucaccgaucauaauaggag

SEQ ID NO: 1476622 - RNA, 19 nt, Artificial Sequence
  Description of Artificial Sequence: Synthetic oligonucleotide
  Sense strand starting at position 811 of SEQ ID NO: 1244255
gcugguggaccuggaauaa

SEQ ID NO: 1476623 - RNA, 19 nt, Artificial Sequence
  Description of Artificial Sequence: Synthetic oligonucleotide
  Antisense strand to SEQ ID NO: 1476622
uuauuccagguccaccagc

SEQ ID NO: 1476624 - RNA, 19 nt, Artificial Sequence
  Description of Artificial Sequence: Synthetic oligonucleotide
  Sense strand starting at position 865 of SEQ ID NO: 1244255
gacuguuaccucggagaaa

SEQ ID NO: 1476625 - RNA, 19 nt, Artificial Sequence
  Description of Artificial Sequence: Synthetic oligonucleotide
  Antisense strand to SEQ ID NO: 1476624
uuucuccgagguaacaguc

SEQ ID NO: 1476626 - RNA, 19 nt, Artificial Sequence
  Description of Artificial Sequence: Synthetic oligonucleotide
  Sense strand starting at position 914 of SEQ ID NO: 1244255
uuucuaaagcaggguaaau

SEQ ID NO: 1476627 - RNA, 19 nt, Artificial Sequence
  Description of Artificial Sequence: Synthetic oligonucleotide
  Antisense strand to SEQ ID NO: 1476626
auuuacccugcuuuagaaa

SEQ ID NO: 1476628 - RNA, 19 nt, Artificial Sequence
  Description of Artificial Sequence: Synthetic oligonucleotide
  Sense strand starting at position 1524 of SEQ ID NO: 1244255
gcgggaagugaucaaggcu

SEQ ID NO: 1476629 - RNA, 19 nt, Artificial Sequence
  Description of Artificial Sequence: Synthetic oligonucleotide
  Antisense strand to SEQ ID NO: 1476628
agccuugaucacuucccgc

SEQ ID NO: 1476630 - RNA, 19 nt, Artificial Sequence
  Description of Artificial Sequence: Synthetic oligonucleotide
  Sense strand starting at position 1616 of SEQ ID NO: 1244255
guggguuccacagggaaca

SEQ ID NO: 1476631 - RNA, 19 nt, Artificial Sequence
  Description of Artificial Sequence: Synthetic oligonucleotide
  Antisense strand to SEQ ID NO: 1476630
uguucccuguggaacccac

SEQ ID NO: 1476632 - RNA, 19 nt, Artificial Sequence
  Description of Artificial Sequence: Synthetic oligonucleotide
  Sense strand starting at position 2276 of SEQ ID NO: 1244255
caaagaucgcgucaaucua

SEQ ID NO: 1476633 - RNA, 19 nt, Artificial Sequence
  Description of Artificial Sequence: Synthetic oligonucleotide
  Antisense strand to SEQ ID NO: 1476632
uagauugacgcgaucuuug

SEQ ID NO: 1476634 - RNA, 19 nt, Artificial Sequence
  Description of Artificial Sequence: Synthetic oligonucleotide
  Sense strand starting at position 2313 of SEQ ID NO: 1244255
ucuguuugugucccgcaga

SEQ ID NO: 1476635 - RNA, 19 nt, Artificial Sequence
  Description of Artificial Sequence: Synthetic oligonucleotide
  Antisense strand to SEQ ID NO: 1476634
ucugcgggacacaaacaga

SEQ ID NO: 1476636 - RNA, 19 nt, Artificial Sequence
  Description of Artificial Sequence: Synthetic oligonucleotide
  Sense strand starting at position 2335 of SEQ ID NO: 1244255
ccuaguaaauaguuuguau

SEQ ID NO: 1476637 - RNA, 19 nt, Artificial Sequence
  Description of Artificial Sequence: Synthetic oligonucleotide
  Antisense strand to SEQ ID NO: 1476636
auacaaacuauuuacuagg

SEQ ID NO: 1476638 - RNA, 19 nt, Artificial Sequence
  Description of Artificial Sequence: Synthetic oligonucleotide
  Sense strand starting at position 2425 of SEQ ID NO: 1244255
ggagaaacuccuugauugu

SEQ ID NO: 1476639 - RNA, 19 nt, Artificial Sequence
  Description of Artificial Sequence: Synthetic oligonucleotide
  Antisense strand to SEQ ID NO: 1476638
acaaucaaggaguuucucc

SEQ ID NO: 1476640 - RNA, 19 nt, Artificial Sequence
  Description of Artificial Sequence: Synthetic oligonucleotide
  Sense strand starting at position 2487 of SEQ ID NO: 1244255
ugagaguugggauggcgau

SEQ ID NO: 1476641 - RNA, 19 nt, Artificial Sequence
  Description of Artificial Sequence: Synthetic oligonucleotide
  Antisense strand to SEQ ID NO: 1476640
aucgccaucccaacucuca

SEQ ID NO: 1476642 - RNA, 19 nt, Artificial Sequence
  Description of Artificial Sequence: Synthetic oligonucleotide
  Sense strand starting at position 2488 of SEQ ID NO: 1244255
gagaguugggauggcgauu

SEQ ID NO: 1476643 - RNA, 19 nt, Artificial Sequence
  Description of Artificial Sequence: Synthetic oligonucleotide
  Antisense strand to SEQ ID NO: 1476642
aaucgccaucccaacucuc

SEQ ID NO: 1476644 - RNA, 19 nt, Artificial Sequence
  Description of Artificial Sequence: Synthetic oligonucleotide
  Sense strand starting at position 2570 of SEQ ID NO: 1244255
ggccuuguuagguaagcaa

SEQ ID NO: 1476645 - RNA, 19 nt, Artificial Sequence
  Description of Artificial Sequence: Synthetic oligonucleotide
  Antisense strand to SEQ ID NO: 1476644
uugcuuaccuaacaaggcc

SEQ ID NO: 1476646 - RNA, 19 nt, Artificial Sequence
  Description of Artificial Sequence: Synthetic oligonucleotide
  Sense strand starting at position 2573 of SEQ ID NO: 1244255
cuuguuagguaagcaaaga

SEQ ID NO: 1476647 - RNA, 19 nt, Artificial Sequence
  Description of Artificial Sequence: Synthetic oligonucleotide
  Antisense strand to SEQ ID NO: 1476646
ucuuugcuuaccuaacaag

SEQ ID NO: 1476648 - RNA, 19 nt, Artificial Sequence
  Description of Artificial Sequence: Synthetic oligonucleotide
  Sense strand starting at position 2574 of SEQ ID NO: 1244255
uuguuagguaagcaaagaa

SEQ ID NO: 1476649 - RNA, 19 nt, Artificial Sequence
  Description of Artificial Sequence: Synthetic oligonucleotide
  Antisense strand to SEQ ID NO: 1476648
uucuuugcuuaccuaacaa

SEQ ID NO: 1476650 - RNA, 19 nt, Artificial Sequence
  Description of Artificial Sequence: Synthetic oligonucleotide
  Sense strand starting at position 2602 of SEQ ID NO: 1244255
gagagaauucugugcugug

SEQ ID NO: 1476651 - RNA, 19 nt, Artificial Sequence
  Description of Artificial Sequence: Synthetic oligonucleotide
  Antisense strand to SEQ ID NO: 1476650
cacagcacagaauucucuc

SEQ ID NO: 1476652 - RNA, 19 nt, Artificial Sequence
  Description of Artificial Sequence: Synthetic oligonucleotide
  Sense strand starting at position 2635 of SEQ ID NO: 1244255
gucuuuacucuguagagga

SEQ ID NO: 1476653 - RNA, 19 nt, Artificial Sequence
  Description of Artificial Sequence: Synthetic oligonucleotide
  Antisense strand to SEQ ID NO: 1476652
uccucuacagaguaaagac

SEQ ID NO: 1476654 - RNA, 19 nt, Artificial Sequence
  Description of Artificial Sequence: Synthetic oligonucleotide
  Sense strand starting at position 2737 of SEQ ID NO: 1244255
cauagugacccauguggga

SEQ ID NO: 1476655 - RNA, 19 nt, Artificial Sequence
  Description of Artificial Sequence: Synthetic oligonucleotide
  Antisense strand to SEQ ID NO: 1476654
ucccacaugggucacuaug

SEQ ID NO: 1476656 - RNA, 19 nt, Artificial Sequence
  Description of Artificial Sequence: Synthetic oligonucleotide
  Sense strand starting at position 2753 of SEQ ID NO: 1244255
ggagaugauucagcuaguu

SEQ ID NO: 1476657 - RNA, 19 nt, Artificial Sequence
  Description of Artificial Sequence: Synthetic oligonucleotide
  Antisense strand to SEQ ID NO: 1476656
aacuagcugaaucaucucc

SEQ ID NO: 1476658 - RNA, 19 nt, Artificial Sequence
  Description of Artificial Sequence: Synthetic oligonucleotide
  Sense strand starting at position 2766 of SEQ ID NO: 1244255
cuaguuaggguggagagua

SEQ ID NO: 1476659 - RNA, 19 nt, Artificial Sequence
  Description of Artificial Sequence: Synthetic oligonucleotide
  Antisense strand to SEQ ID NO: 1476658
uacucuccacccuaacuag

SEQ ID NO: 1476660 - RNA, 19 nt, Artificial Sequence
  Description of Artificial Sequence: Synthetic oligonucleotide
  Sense strand starting at position 2931 of SEQ ID NO: 1244255
ggguuagaaagaugaguuu

SEQ ID NO: 1476661 - RNA, 19 nt, Artificial Sequence
  Description of Artificial Sequence: Synthetic oligonucleotide
  Antisense strand to SEQ ID NO: 1476660
aaacucaucuuucuaaccc

SEQ ID NO: 1476662 - RNA, 19 nt, Artificial Sequence
  Description of Artificial Sequence: Synthetic oligonucleotide
  Sense strand starting at position 2960 of SEQ ID NO: 1244255
acauuaaguuuguuugacu

SEQ ID NO: 1476663 - RNA, 19 nt, Artificial Sequence
  Description of Artificial Sequence: Synthetic oligonucleotide
  Antisense strand to SEQ ID NO: 1476662
agucaaacaaacuuaaugu

SEQ ID NO: 1476664 - RNA, 19 nt, Artificial Sequence
  Description of Artificial Sequence: Synthetic oligonucleotide
  Sense strand starting at position 2965 of SEQ ID NO: 1244255
aaguuuguuugacuaaguu

SEQ ID NO: 1476665 - RNA, 19 nt, Artificial Sequence
  Description of Artificial Sequence: Synthetic oligonucleotide
  Antisense strand to SEQ ID NO: 1476664
aacuuagucaaacaaacuu

SEQ ID NO: 1476666 - RNA, 19 nt, Artificial Sequence
  Description of Artificial Sequence: Synthetic oligonucleotide
  Sense strand starting at position 2969 of SEQ ID NO: 1244255
uuguuugacuaaguuuaac

SEQ ID NO: 1476667 - RNA, 19 nt, Artificial Sequence
  Description of Artificial Sequence: Synthetic oligonucleotide
  Antisense strand to SEQ ID NO: 1476666
guuaaacuuagucaaacaa

SEQ ID NO: 1476668 - RNA, 19 nt, Artificial Sequence
  Description of Artificial Sequence: Synthetic oligonucleotide
  Sense strand starting at position 2975 of SEQ ID NO: 1244255
gacuaaguuuaacugcgau

SEQ ID NO: 1476669 - RNA, 19 nt, Artificial Sequence
  Description of Artificial Sequence: Synthetic oligonucleotide
  Antisense strand to SEQ ID NO: 1476668
aucgcaguuaaacuuaguc

SEQ ID NO: 1476670 - RNA, 19 nt, Artificial Sequence
  Description of Artificial Sequence: Synthetic oligonucleotide
  Sense strand starting at position 3098 of SEQ ID NO: 1244255
agcuaugauaauugaguga

SEQ ID NO: 1476671 - RNA, 19 nt, Artificial Sequence
  Description of Artificial Sequence: Synthetic oligonucleotide
  Antisense strand to SEQ ID NO: 1476670
ucacucaauuaucauagcu

SEQ ID NO: 1476672 - RNA, 19 nt, Artificial Sequence
  Description of Artificial Sequence: Synthetic oligonucleotide
  Sense strand starting at position 3101 of SEQ ID NO: 1244255
uaugauaauugagugaucu

SEQ ID NO: 1476673 - RNA, 19 nt, Artificial Sequence
  Description of Artificial Sequence: Synthetic oligonucleotide
  Antisense strand to SEQ ID NO: 1476672
agaucacucaauuaucaua

SEQ ID NO: 1476674 - RNA, 19 nt, Artificial Sequence
  Description of Artificial Sequence: Synthetic oligonucleotide
  Sense strand starting at position 3102 of SEQ ID NO: 1244255
augauaauugagugaucuu

SEQ ID NO: 1476675 - RNA, 19 nt, Artificial Sequence
  Description of Artificial Sequence: Synthetic oligonucleotide
  Antisense strand to SEQ ID NO: 1476674
aagaucacucaauuaucau

SEQ ID NO: 1476676 - RNA, 19 nt, Artificial Sequence
  Description of Artificial Sequence: Synthetic oligonucleotide
  Sense strand starting at position 3105 of SEQ ID NO: 1244255
auaauugagugaucuugag

SEQ ID NO: 1476677 - RNA, 19 nt, Artificial Sequence
  Description of Artificial Sequence: Synthetic oligonucleotide
  Antisense strand to SEQ ID NO: 1476676
cucaagaucacucaauuau

SEQ ID NO: 1476678 - RNA, 19 nt, Artificial Sequence
  Description of Artificial Sequence: Synthetic oligonucleotide
  Sense strand starting at position 3216 of SEQ ID NO: 1244255
uauugagcacuugaauguu

SEQ ID NO: 1476679 - RNA, 19 nt, Artificial Sequence
  Description of Artificial Sequence: Synthetic oligonucleotide
  Antisense strand to SEQ ID NO: 1476678
aacauucaagugcucaaua

SEQ ID NO: 1476680 - RNA, 19 nt, Artificial Sequence
  Description of Artificial Sequence: Synthetic oligonucleotide
  Sense strand starting at position 3226 of SEQ ID NO: 1244255
uugaauguugcauggaauu

SEQ ID NO: 1476681 - RNA, 19 nt, Artificial Sequence
  Description of Artificial Sequence: Synthetic oligonucleotide
  Antisense strand to SEQ ID NO: 1476680
aauuccaugcaacauucaa

SEQ ID NO: 1476682 - RNA, 19 nt, Artificial Sequence
  Description of Artificial Sequence: Synthetic oligonucleotide
  Sense strand starting at position 3232 of SEQ ID NO: 1244255
guugcauggaauugagaug

SEQ ID NO: 1476683 - RNA, 19 nt, Artificial Sequence
  Description of Artificial Sequence: Synthetic oligonucleotide
  Antisense strand to SEQ ID NO: 1476682
caucucaauuccaugcaac

SEQ ID NO: 1476684 - RNA, 19 nt, Artificial Sequence
  Description of Artificial Sequence: Synthetic oligonucleotide
  Sense strand starting at position 3237 of SEQ ID NO: 1244255
auggaauugagaugugcua

SEQ ID NO: 1476685 - RNA, 19 nt, Artificial Sequence
  Description of Artificial Sequence: Synthetic oligonucleotide
  Antisense strand to SEQ ID NO: 1476684
uagcacaucucaauuccau

SEQ ID NO: 1476686 - RNA, 19 nt, Artificial Sequence
  Description of Artificial Sequence: Synthetic oligonucleotide
  Sense strand starting at position 3244 of SEQ ID NO: 1244255
ugagaugugcuauaaguga

SEQ ID NO: 1476687 - RNA, 19 nt, Artificial Sequence
  Description of Artificial Sequence: Synthetic oligonucleotide
  Antisense strand to SEQ ID NO: 1476686
ucacuuauagcacaucuca

SEQ ID NO: 1476688 - RNA, 19 nt, Artificial Sequence
  Description of Artificial Sequence: Synthetic oligonucleotide
  Sense strand starting at position 3248 of SEQ ID NO: 1244255
augugcuauaagugaagaa

SEQ ID NO: 1476689 - RNA, 19 nt, Artificial Sequence
  Description of Artificial Sequence: Synthetic oligonucleotide
  Antisense strand to SEQ ID NO: 1476688
uucuucacuuauagcacau

SEQ ID NO: 1476690 - RNA, 19 nt, Artificial Sequence
  Description of Artificial Sequence: Synthetic oligonucleotide
  Sense strand starting at position 3249 of SEQ ID NO: 1244255
ugugcuauaagugaagaaa

SEQ ID NO: 1476691 - RNA, 19 nt, Artificial Sequence
  Description of Artificial Sequence: Synthetic oligonucleotide
  Antisense strand to SEQ ID NO: 1476690
uuucuucacuuauagcaca

SEQ ID NO: 1476692 - RNA, 19 nt, Artificial Sequence
  Description of Artificial Sequence: Synthetic oligonucleotide
  Sense strand starting at position 3360 of SEQ ID NO: 1244255
auaugaggguggucccaua

SEQ ID NO: 1476693 - RNA, 19 nt, Artificial Sequence
  Description of Artificial Sequence: Synthetic oligonucleotide
  Antisense strand to SEQ ID NO: 1476692
uaugggaccacccucauau

SEQ ID NO: 1476694 - RNA, 19 nt, Artificial Sequence
  Description of Artificial Sequence: Synthetic oligonucleotide
  Sense strand starting at position 3414 of SEQ ID NO: 1244255
gugacagcacauuacucau

SEQ ID NO: 1476695 - RNA, 19 nt, Artificial Sequence
  Description of Artificial Sequence: Synthetic oligonucleotide
  Antisense strand to SEQ ID NO: 1476694
augaguaaugugcugucac

SEQ ID NO: 1476696 - RNA, 19 nt, Artificial Sequence
  Description of Artificial Sequence: Synthetic oligonucleotide
  Sense strand starting at position 3427 of SEQ ID NO: 1244255
acucauguguuuguggaga

SEQ ID NO: 1476697 - RNA, 19 nt, Artificial Sequence
  Description of Artificial Sequence: Synthetic oligonucleotide
  Antisense strand to SEQ ID NO: 1476696
ucuccacaaacacaugagu

SEQ ID NO: 1476698 - RNA, 19 nt, Artificial Sequence
  Description of Artificial Sequence: Synthetic oligonucleotide
  Sense strand starting at position 61 of SEQ ID NO: 1244256
gcugacuccuugcuggaga

SEQ ID NO: 1476699 - RNA, 19 nt, Artificial Sequence
  Description of Artificial Sequence: Synthetic oligonucleotide
  Antisense strand to SEQ ID NO: 1476698
ucuccagcaaggagucagc

SEQ ID NO: 1476700 - RNA, 19 nt, Artificial Sequence
  Description of Artificial Sequence: Synthetic oligonucleotide
  Sense strand starting at position 62 of SEQ ID NO: 1244256
cugacuccuugcuggagaa

SEQ ID NO: 1476701 - RNA, 19 nt, Artificial Sequence
  Description of Artificial Sequence: Synthetic oligonucleotide
  Antisense strand to SEQ ID NO: 1476700
uucuccagcaaggagucag

SEQ ID NO: 1476702 - RNA, 19 nt, Artificial Sequence
  Description of Artificial Sequence: Synthetic oligonucleotide
  Sense strand starting at position 63 of SEQ ID NO: 1244256
ugacuccuugcuggagaaa

SEQ ID NO: 1476703 - RNA, 19 nt, Artificial Sequence
  Description of Artificial Sequence: Synthetic oligonucleotide
  Antisense strand to SEQ ID NO: 1476702
uuucuccagcaaggaguca

SEQ ID NO: 1476704 - RNA, 19 nt, Artificial Sequence
  Description of Artificial Sequence: Synthetic oligonucleotide
  Sense strand starting at position 473 of SEQ ID NO: 1244256
aguugccuuugcucuuaaa

SEQ ID NO: 1476705 - RNA, 19 nt, Artificial Sequence
  Description of Artificial Sequence: Synthetic oligonucleotide
  Antisense strand to SEQ ID NO: 1476704
uuuaagagcaaaggcaacu

SEQ ID NO: 1476706 - RNA, 19 nt, Artificial Sequence
  Description of Artificial Sequence: Synthetic oligonucleotide
  Sense strand starting at position 476 of SEQ ID NO: 1244256
ugccuuugcucuuaaacag

SEQ ID NO: 1476707 - RNA, 19 nt, Artificial Sequence
  Description of Artificial Sequence: Synthetic oligonucleotide
  Antisense strand to SEQ ID NO: 1476706
cuguuuaagagcaaaggca

SEQ ID NO: 1476708 - RNA, 19 nt, Artificial Sequence
  Description of Artificial Sequence: Synthetic oligonucleotide
  Sense strand starting at position 668 of SEQ ID NO: 1244256
agaagcaagaguuguggaa

SEQ ID NO: 1476709 - RNA, 19 nt, Artificial Sequence
  Description of Artificial Sequence: Synthetic oligonucleotide
  Antisense strand to SEQ ID NO: 1476708
uuccacaacucuugcuucu

SEQ ID NO: 1476710 - RNA, 19 nt, Artificial Sequence
  Description of Artificial Sequence: Synthetic oligonucleotide
  Sense strand starting at position 1284 of SEQ ID NO: 1244256
ugggacuuucccuaaguca

SEQ ID NO: 1476711 - RNA, 19 nt, Artificial Sequence
  Description of Artificial Sequence: Synthetic oligonucleotide
  Antisense strand to SEQ ID NO: 1476710
ugacuuagggaaaguccca

SEQ ID NO: 1476712 - RNA, 19 nt, Artificial Sequence
  Description of Artificial Sequence: Synthetic oligonucleotide
  Sense strand starting at position 408 of SEQ ID NO: 1244257
ggcagcucucaucggcaau

SEQ ID NO: 1476713 - RNA, 19 nt, Artificial Sequence
  Description of Artificial Sequence: Synthetic oligonucleotide
  Antisense strand to SEQ ID NO: 1476712
auugccgaugagagcugcc

SEQ ID NO: 1476714 - RNA, 19 nt, Artificial Sequence
  Description of Artificial Sequence: Synthetic oligonucleotide
  Sense strand starting at position 509 of SEQ ID NO: 1244257
agacaagugucuccucaag

SEQ ID NO: 1476715 - RNA, 19 nt, Artificial Sequence
  Description of Artificial Sequence: Synthetic oligonucleotide
  Antisense strand to SEQ ID NO: 1476714
cuugaggagacacuugucu

SEQ ID NO: 1476716 - RNA, 19 nt, Artificial Sequence
  Description of Artificial Sequence: Synthetic oligonucleotide
  Sense strand starting at position 635 of SEQ ID NO: 1244257
gaaagauauuggugcagcu

SEQ ID NO: 1476717 - RNA, 19 nt, Artificial Sequence
  Description of Artificial Sequence: Synthetic oligonucleotide
  Antisense strand to SEQ ID NO: 1476716
agcugcaccaauaucuuuc

SEQ ID NO: 1476718 - RNA, 19 nt, Artificial Sequence
  Description of Artificial Sequence: Synthetic oligonucleotide
  Sense strand starting at position 637 of SEQ ID NO: 1244257
aagauauuggugcagcuca

SEQ ID NO: 1476719 - RNA, 19 nt, Artificial Sequence
  Description of Artificial Sequence: Synthetic oligonucleotide
  Antisense strand to SEQ ID NO: 1476718
ugagcugcaccaauaucuu

SEQ ID NO: 1476720 - RNA, 19 nt, Artificial Sequence
  Description of Artificial Sequence: Synthetic oligonucleotide
  Sense strand starting at position 833 of SEQ ID NO: 1244257
gcucuaacaucagugcaga

SEQ ID NO: 1476721 - RNA, 19 nt, Artificial Sequence
  Description of Artificial Sequence: Synthetic oligonucleotide
  Antisense strand to SEQ ID NO: 1476720
ucugcacugauguuagagc

SEQ ID NO: 1476722 - RNA, 19 nt, Artificial Sequence
  Description of Artificial Sequence: Synthetic oligonucleotide
  Sense strand starting at position 1047 of SEQ ID NO: 1244257
ugcgaagugcaguguagua

SEQ ID NO: 1476723 - RNA, 19 nt, Artificial Sequence
  Description of Artificial Sequence: Synthetic oligonucleotide
  Antisense strand to SEQ ID NO: 1476722
uacuacacugcacuucgca

SEQ ID NO: 1476724 - RNA, 19 nt, Artificial Sequence
  Description of Artificial Sequence: Synthetic oligonucleotide
  Sense strand starting at position 1561 of SEQ ID NO: 1244257
ggcaaagagucucagagac

SEQ ID NO: 1476725 - RNA, 19 nt, Artificial Sequence
  Description of Artificial Sequence: Synthetic oligonucleotide
  Antisense strand to SEQ ID NO: 1476724
gucucugagacucuuugcc

SEQ ID NO: 1476726 - RNA, 19 nt, Artificial Sequence
  Description of Artificial Sequence: Synthetic oligonucleotide
  Sense strand starting at position 2355 of SEQ ID NO: 1244257
cgacgugcccacucaugua

SEQ ID NO: 1476727 - RNA, 19 nt, Artificial Sequence
  Description of Artificial Sequence: Synthetic oligonucleotide
  Antisense strand to SEQ ID NO: 1476726
uacaugagugggcacgucg

SEQ ID NO: 1476728 - RNA, 19 nt, Artificial Sequence
  Description of Artificial Sequence: Synthetic oligonucleotide
  Sense strand starting at position 2401 of SEQ ID NO: 1244257
gacagcucugacuggaaca

SEQ ID NO: 1476729 - RNA, 19 nt, Artificial Sequence
  Description of Artificial Sequence: Synthetic oligonucleotide
  Antisense strand to SEQ ID NO: 1476728
uguuccagucagagcuguc

SEQ ID NO: 1476730 - RNA, 19 nt, Artificial Sequence
  Description of Artificial Sequence: Synthetic oligonucleotide
  Sense strand starting at position 2462 of SEQ ID NO: 1244257
uuggucaagugauugccaa

SEQ ID NO: 1476731 - RNA, 19 nt, Artificial Sequence
  Description of Artificial Sequence: Synthetic oligonucleotide
  Antisense strand to SEQ ID NO: 1476730
uuggcaaucacuugaccaa

SEQ ID NO: 1476732 - RNA, 19 nt, Artificial Sequence
  Description of Artificial Sequence: Synthetic oligonucleotide
  Sense strand starting at position 2466 of SEQ ID NO: 1244257
ucaagugauugccaaguuu

SEQ ID NO: 1476733 - RNA, 19 nt, Artificial Sequence
  Description of Artificial Sequence: Synthetic oligonucleotide
  Antisense strand to SEQ ID NO: 1476732
aaacuuggcaaucacuuga

SEQ ID NO: 1476734 - RNA, 19 nt, Artificial Sequence
  Description of Artificial Sequence: Synthetic oligonucleotide
  Sense strand starting at position 2564 of SEQ ID NO: 1244257
uuggcuuuguagucaggaa

SEQ ID NO: 1476735 - RNA, 19 nt, Artificial Sequence
  Description of Artificial Sequence: Synthetic oligonucleotide
  Antisense strand to SEQ ID NO: 1476734
uuccugacuacaaagccaa

SEQ ID NO: 1476736 - RNA, 19 nt, Artificial Sequence
  Description of Artificial Sequence: Synthetic oligonucleotide
  Sense strand starting at position 2565 of SEQ ID NO: 1244257
uggcuuuguagucaggaau

SEQ ID NO: 1476737 - RNA, 19 nt, Artificial Sequence
  Description of Artificial Sequence: Synthetic oligonucleotide
  Antisense strand to SEQ ID NO: 1476736
auuccugacuacaaagcca

SEQ ID NO: 1476738 - RNA, 19 nt, Artificial Sequence
  Description of Artificial Sequence: Synthetic oligonucleotide
  Sense strand starting at position 2568 of SEQ ID NO: 1244257
cuuuguagucaggaauucu

SEQ ID NO: 1476739 - RNA, 19 nt, Artificial Sequence
  Description of Artificial Sequence: Synthetic oligonucleotide
  Antisense strand to SEQ ID NO: 1476738
agaauuccugacuacaaag

SEQ ID NO: 1476740 - RNA, 19 nt, Artificial Sequence
  Description of Artificial Sequence: Synthetic oligonucleotide
  Sense strand starting at position 2664 of SEQ ID NO: 1244257
gggauucuuucuuagccaa

SEQ ID NO: 1476741 - RNA, 19 nt, Artificial Sequence
  Description of Artificial Sequence: Synthetic oligonucleotide
  Antisense strand to SEQ ID NO: 1476740
uuggcuaagaaagaauccc

SEQ ID NO: 1476742 - RNA, 19 nt, Artificial Sequence
  Description of Artificial Sequence: Synthetic oligonucleotide
  Sense strand starting at position 2735 of SEQ ID NO: 1244257
auuggagcuuuacggagau

SEQ ID NO: 1476743 - RNA, 19 nt, Artificial Sequence
  Description of Artificial Sequence: Synthetic oligonucleotide
  Antisense strand to SEQ ID NO: 1476742
aucuccguaaagcuccaau

SEQ ID NO: 1476744 - RNA, 19 nt, Artificial Sequence
  Description of Artificial Sequence: Synthetic oligonucleotide
  Sense strand starting at position 2776 of SEQ ID NO: 1244257
gagaacagcgucugaacaa

SEQ ID NO: 1476745 - RNA, 19 nt, Artificial Sequence
  Description of Artificial Sequence: Synthetic oligonucleotide
  Antisense strand to SEQ ID NO: 1476744
uuguucagacgcuguucuc

SEQ ID NO: 1476746 - RNA, 19 nt, Artificial Sequence
  Description of Artificial Sequence: Synthetic oligonucleotide
  Sense strand starting at position 3233 of SEQ ID NO: 1244257
cugacuuagugcugucagu

SEQ ID NO: 1476747 - RNA, 19 nt, Artificial Sequence
  Description of Artificial Sequence: Synthetic oligonucleotide
  Antisense strand to SEQ ID NO: 1476746
acugacagcacuaagucag

SEQ ID NO: 1476748 - RNA, 19 nt, Artificial Sequence
  Description of Artificial Sequence: Synthetic oligonucleotide
  Sense strand starting at position 3317 of SEQ ID NO: 1244257
gcuguuaguuguuggcaga

SEQ ID NO: 1476749 - RNA, 19 nt, Artificial Sequence
  Description of Artificial Sequence: Synthetic oligonucleotide
  Antisense strand to SEQ ID NO: 1476748
ucugccaacaacuaacagc

SEQ ID NO: 1476750 - RNA, 19 nt, Artificial Sequence
  Description of Artificial Sequence: Synthetic oligonucleotide
  Sense strand starting at position 3837 of SEQ ID NO: 1244257
aggucaggaguuugggaaa

SEQ ID NO: 1476751 - RNA, 19 nt, Artificial Sequence
  Description of Artificial Sequence: Synthetic oligonucleotide
  Antisense strand to SEQ ID NO: 1476750
uuucccaaacuccugaccu

SEQ ID NO: 1476752 - RNA, 19 nt, Artificial Sequence
  Description of Artificial Sequence: Synthetic oligonucleotide
  Sense strand starting at position 93 of SEQ ID NO: 1244258
uuggucaacuuaguuuaaa

SEQ ID NO: 1476753 - RNA, 19 nt, Artificial Sequence
  Description of Artificial Sequence: Synthetic oligonucleotide
  Antisense strand to SEQ ID NO: 1476752
uuuaaacuaaguugaccaa

SEQ ID NO: 1476754 - RNA, 19 nt, Artificial Sequence
  Description of Artificial Sequence: Synthetic oligonucleotide
  Sense strand starting at position 163 of SEQ ID NO: 1244258
uuaugaauguagugucauu

SEQ ID NO: 1476755 - RNA, 19 nt, Artificial Sequence
  Description of Artificial Sequence: Synthetic oligonucleotide
  Antisense strand to SEQ ID NO: 1476754
aaugacacuacauucauaa

SEQ ID NO: 1476756 - RNA, 19 nt, Artificial Sequence
  Description of Artificial Sequence: Synthetic oligonucleotide
  Sense strand starting at position 297 of SEQ ID NO: 1244258
caaagaugggcccagucua

SEQ ID NO: 1476757 - RNA, 19 nt, Artificial Sequence
  Description of Artificial Sequence: Synthetic oligonucleotide
  Antisense strand to SEQ ID NO: 1476756
uagacugggcccaucuuug

SEQ ID NO: 1476758 - RNA, 19 nt, Artificial Sequence
  Description of Artificial Sequence: Synthetic oligonucleotide
  Sense strand starting at position 356 of SEQ ID NO: 1244258
agcugaguuugaguucugu

SEQ ID NO: 1476759 - RNA, 19 nt, Artificial Sequence
  Description of Artificial Sequence: Synthetic oligonucleotide
  Antisense strand to SEQ ID NO: 1476758
acagaacucaaacucagcu

SEQ ID NO: 1476760 - RNA, 19 nt, Artificial Sequence
  Description of Artificial Sequence: Synthetic oligonucleotide
  Sense strand starting at position 364 of SEQ ID NO: 1244258
uugaguucugucugccaca

SEQ ID NO: 1476761 - RNA, 19 nt, Artificial Sequence
  Description of Artificial Sequence: Synthetic oligonucleotide
  Antisense strand to SEQ ID NO: 1476760
uguggcagacagaacucaa

SEQ ID NO: 1476762 - RNA, 19 nt, Artificial Sequence
  Description of Artificial Sequence: Synthetic oligonucleotide
  Sense strand starting at position 392 of SEQ ID NO: 1244258
gugggaagaucgccuaaga

SEQ ID NO: 1476763 - RNA, 19 nt, Artificial Sequence
  Description of Artificial Sequence: Synthetic oligonucleotide
  Antisense strand to SEQ ID NO: 1476762
ucuuaggcgaucuucccac

SEQ ID NO: 1476764 - RNA, 19 nt, Artificial Sequence
  Description of Artificial Sequence: Synthetic oligonucleotide
  Sense strand starting at position 449 of SEQ ID NO: 1244258
agacaucucucgcacaguu

SEQ ID NO: 1476765 - RNA, 19 nt, Artificial Sequence
  Description of Artificial Sequence: Synthetic oligonucleotide
  Antisense strand to SEQ ID NO: 1476764
aacugugcgagagaugucu

SEQ ID NO: 1476766 - RNA, 19 nt, Artificial Sequence
  Description of Artificial Sequence: Synthetic oligonucleotide
  Sense strand starting at position 893 of SEQ ID NO: 1244258
agcguuuccuugucaccuu

SEQ ID NO: 1476767 - RNA, 19 nt, Artificial Sequence
  Description of Artificial Sequence: Synthetic oligonucleotide
  Antisense strand to SEQ ID NO: 1476766
aaggugacaaggaaacgcu

SEQ ID NO: 1476768 - RNA, 19 nt, Artificial Sequence
  Description of Artificial Sequence: Synthetic oligonucleotide
  Sense strand starting at position 976 of SEQ ID NO: 1244258
acucaagguucucuugaac

SEQ ID NO: 1476769 - RNA, 19 nt, Artificial Sequence
  Description of Artificial Sequence: Synthetic oligonucleotide
  Antisense strand to SEQ ID NO: 1476768
guucaagagaaccuugagu

SEQ ID NO: 1476770 - RNA, 19 nt, Artificial Sequence
  Description of Artificial Sequence: Synthetic oligonucleotide
  Sense strand starting at position 1298 of SEQ ID NO: 1244258
uccgcacugucaugugaag

SEQ ID NO: 1476771 - RNA, 19 nt, Artificial Sequence
  Description of Artificial Sequence: Synthetic oligonucleotide
  Antisense strand to SEQ ID NO: 1476770
cuucacaugacagugcgga

SEQ ID NO: 1476772 - RNA, 19 nt, Artificial Sequence
  Description of Artificial Sequence: Synthetic oligonucleotide
  Sense strand starting at position 1300 of SEQ ID NO: 1244258
cgcacugucaugugaaggu

SEQ ID NO: 1476773 - RNA, 19 nt, Artificial Sequence
  Description of Artificial Sequence: Synthetic oligonucleotide
  Antisense strand to SEQ ID NO: 1476772
accuucacaugacagugcg

SEQ ID NO: 1476774 - RNA, 19 nt, Artificial Sequence
  Description of Artificial Sequence: Synthetic oligonucleotide
  Sense strand starting at position 1616 of SEQ ID NO: 1244258
agccaacauuauugugcaa

SEQ ID NO: 1476775 - RNA, 19 nt, Artificial Sequence
  Description of Artificial Sequence: Synthetic oligonucleotide
  Antisense strand to SEQ ID NO: 1476774
uugcacaauaauguuggcu

SEQ ID NO: 1476776 - RNA, 19 nt, Artificial Sequence
  Description of Artificial Sequence: Synthetic oligonucleotide
  Sense strand starting at position 1650 of SEQ ID NO: 1244258
ucagucaucgcgcagauca

SEQ ID NO: 1476777 - RNA, 19 nt, Artificial Sequence
  Description of Artificial Sequence: Synthetic oligonucleotide
  Antisense strand to SEQ ID NO: 1476776
ugaucugcgcgaugacuga

SEQ ID NO: 1476778 - RNA, 19 nt, Artificial Sequence
  Description of Artificial Sequence: Synthetic oligonucleotide
  Sense strand starting at position 1661 of SEQ ID NO: 1244258
gcagaucaggcagagaagu

SEQ ID NO: 1476779 - RNA, 19 nt, Artificial Sequence
  Description of Artificial Sequence: Synthetic oligonucleotide
  Antisense strand to SEQ ID NO: 1476778
acuucucugccugaucugc

SEQ ID NO: 1476780 - RNA, 19 nt, Artificial Sequence
  Description of Artificial Sequence: Synthetic oligonucleotide
  Sense strand starting at position 1671 of SEQ ID NO: 1244258
cagagaaguuucccgcaga

SEQ ID NO: 1476781 - RNA, 19 nt, Artificial Sequence
  Description of Artificial Sequence: Synthetic oligonucleotide
  Antisense strand to SEQ ID NO: 1476780
ucugcgggaaacuucucug

SEQ ID NO: 1476782 - RNA, 19 nt, Artificial Sequence
  Description of Artificial Sequence: Synthetic oligonucleotide
  Sense strand starting at position 1672 of SEQ ID NO: 1244258
agagaaguuucccgcagaa

SEQ ID NO: 1476783 - RNA, 19 nt, Artificial Sequence
  Description of Artificial Sequence: Synthetic oligonucleotide
  Antisense strand to SEQ ID NO: 1476782
uucugcgggaaacuucucu

SEQ ID NO: 1476784 - RNA, 19 nt, Artificial Sequence
  Description of Artificial Sequence: Synthetic oligonucleotide
  Sense strand starting at position 1674 of SEQ ID NO: 1244258
agaaguuucccgcagaacu

SEQ ID NO: 1476785 - RNA, 19 nt, Artificial Sequence
  Description of Artificial Sequence: Synthetic oligonucleotide
  Antisense strand to SEQ ID NO: 1476784
aguucugcgggaaacuucu

SEQ ID NO: 1476786 - RNA, 19 nt, Artificial Sequence
  Description of Artificial Sequence: Synthetic oligonucleotide
  Sense strand starting at position 1676 of SEQ ID NO: 1244258
aaguuucccgcagaacuuu

SEQ ID NO: 1476787 - RNA, 19 nt, Artificial Sequence
  Description of Artificial Sequence: Synthetic oligonucleotide
  Antisense strand to SEQ ID NO: 1476786
aaaguucugcgggaaacuu

SEQ ID NO: 1476788 - RNA, 19 nt, Artificial Sequence
  Description of Artificial Sequence: Synthetic oligonucleotide
  Sense strand starting at position 1684 of SEQ ID NO: 1244258
cgcagaacuuucuacaggu

SEQ ID NO: 1476789 - RNA, 19 nt, Artificial Sequence
  Description of Artificial Sequence: Synthetic oligonucleotide
  Antisense strand to SEQ ID NO: 1476788
accuguagaaaguucugcg

SEQ ID NO: 1476790 - RNA, 19 nt, Artificial Sequence
  Description of Artificial Sequence: Synthetic oligonucleotide
  Sense strand starting at position 2280 of SEQ ID NO: 1244258
cggaaauaguucccggaac

SEQ ID NO: 1476791 - RNA, 19 nt, Artificial Sequence
  Description of Artificial Sequence: Synthetic oligonucleotide
  Antisense strand to SEQ ID NO: 1476790
guuccgggaacuauuuccg

SEQ ID NO: 1476792 - RNA, 19 nt, Artificial Sequence
  Description of Artificial Sequence: Synthetic oligonucleotide
  Sense strand starting at position 2939 of SEQ ID NO: 1244258
ggguuuacccaguacauac

SEQ ID NO: 1476793 - RNA, 19 nt, Artificial Sequence
  Description of Artificial Sequence: Synthetic oligonucleotide
  Antisense strand to SEQ ID NO: 1476792
guauguacuggguaaaccc

SEQ ID NO: 1476794 - RNA, 19 nt, Artificial Sequence
  Description of Artificial Sequence: Synthetic oligonucleotide
  Sense strand starting at position 3435 of SEQ ID NO: 1244258
aucaaaucugcagggacaa

SEQ ID NO: 1476795 - RNA, 19 nt, Artificial Sequence
  Description of Artificial Sequence: Synthetic oligonucleotide
  Antisense strand to SEQ ID NO: 1476794
uugucccugcagauuugau

SEQ ID NO: 1476796 - RNA, 19 nt, Artificial Sequence
  Description of Artificial Sequence: Synthetic oligonucleotide
  Sense strand starting at position 3436 of SEQ ID NO: 1244258
ucaaaucugcagggacaaa

SEQ ID NO: 1476797 - RNA, 19 nt, Artificial Sequence
  Description of Artificial Sequence: Synthetic oligonucleotide
  Antisense strand to SEQ ID NO: 1476796
uuugucccugcagauuuga

SEQ ID NO: 1476798 - RNA, 19 nt, Artificial Sequence
  Description of Artificial Sequence: Synthetic oligonucleotide
  Sense strand starting at position 3509 of SEQ ID NO: 1244258
aagagauucuacggaagga

SEQ ID NO: 1476799 - RNA, 19 nt, Artificial Sequence
  Description of Artificial Sequence: Synthetic oligonucleotide
  Antisense strand to SEQ ID NO: 1476798
uccuuccguagaaucucuu

SEQ ID NO: 1476800 - RNA, 19 nt, Artificial Sequence
  Description of Artificial Sequence: Synthetic oligonucleotide
  Sense strand starting at position 3534 of SEQ ID NO: 1244258
gugcaagaauucugaccca

SEQ ID NO: 1476801 - RNA, 19 nt, Artificial Sequence
  Description of Artificial Sequence: Synthetic oligonucleotide
  Antisense strand to SEQ ID NO: 1476800
ugggucagaauucuugcac

SEQ ID NO: 1476802 - RNA, 19 nt, Artificial Sequence
  Description of Artificial Sequence: Synthetic oligonucleotide
  Sense strand starting at position 3569 of SEQ ID NO: 1244258
aacacagggcucugaugaa

SEQ ID NO: 1476803 - RNA, 19 nt, Artificial Sequence
  Description of Artificial Sequence: Synthetic oligonucleotide
  Antisense strand to SEQ ID NO: 1476802
uucaucagagcccuguguu

SEQ ID NO: 1476804 - RNA, 19 nt, Artificial Sequence
  Description of Artificial Sequence: Synthetic oligonucleotide
  Sense strand starting at position 3681 of SEQ ID NO: 1244258
cugggugaguccuagacua

SEQ ID NO: 1476805 - RNA, 19 nt, Artificial Sequence
  Description of Artificial Sequence: Synthetic oligonucleotide
  Antisense strand to SEQ ID NO: 1476804
uagucuaggacucacccag

SEQ ID NO: 1476806 - RNA, 19 nt, Artificial Sequence
  Description of Artificial Sequence: Synthetic oligonucleotide
  Sense strand starting at position 3810 of SEQ ID NO: 1244258
uccuguuccucucagagau

SEQ ID NO: 1476807 - RNA, 19 nt, Artificial Sequence
  Description of Artificial Sequence: Synthetic oligonucleotide
  Antisense strand to SEQ ID NO: 1476806
aucucugagaggaacagga

SEQ ID NO: 1476808 - RNA, 19 nt, Artificial Sequence
  Description of Artificial Sequence: Synthetic oligonucleotide
  Sense strand starting at position 3812 of SEQ ID NO: 1244258
cuguuccucucagagauug

SEQ ID NO: 1476809 - RNA, 19 nt, Artificial Sequence
  Description of Artificial Sequence: Synthetic oligonucleotide
  Antisense strand to SEQ ID NO: 1476808
caaucucugagaggaacag

SEQ ID NO: 1476810 - RNA, 19 nt, Artificial Sequence
  Description of Artificial Sequence: Synthetic oligonucleotide
  Sense strand starting at position 21 of SEQ ID NO: 1244259
agggcuuccuggugacuga

SEQ ID NO: 1476811 - RNA, 19 nt, Artificial Sequence
  Description of Artificial Sequence: Synthetic oligonucleotide
  Antisense strand to SEQ ID NO: 1476810
ucagucaccaggaagcccu

SEQ ID NO: 1476812 - RNA, 19 nt, Artificial Sequence
  Description of Artificial Sequence: Synthetic oligonucleotide
  Sense strand starting at position 72 of SEQ ID NO: 1244259
gaaguccuuucuggaggaa

SEQ ID NO: 1476813 - RNA, 19 nt, Artificial Sequence
  Description of Artificial Sequence: Synthetic oligonucleotide
  Antisense strand to SEQ ID NO: 1476812
uuccuccagaaaggacuuc

SEQ ID NO: 1476814 - RNA, 19 nt, Artificial Sequence
  Description of Artificial Sequence: Synthetic oligonucleotide
  Sense strand starting at position 183 of SEQ ID NO: 1244259
ccgggcuccuccucugauu

SEQ ID NO: 1476815 - RNA, 19 nt, Artificial Sequence
  Description of Artificial Sequence: Synthetic oligonucleotide
  Antisense strand to SEQ ID NO: 1476814
aaucagaggaggagcccgg

SEQ ID NO: 1476816 - RNA, 19 nt, Artificial Sequence
  Description of Artificial Sequence: Synthetic oligonucleotide
  Sense strand starting at position 306 of SEQ ID NO: 1244259
ccuggagccucuugucaca

SEQ ID NO: 1476817 - RNA, 19 nt, Artificial Sequence
  Description of Artificial Sequence: Synthetic oligonucleotide
  Antisense strand to SEQ ID NO: 1476816
ugugacaagaggcuccagg

SEQ ID NO: 1476818 - RNA, 19 nt, Artificial Sequence
  Description of Artificial Sequence: Synthetic oligonucleotide
  Sense strand starting at position 308 of SEQ ID NO: 1244259
uggagccucuugucacaga

SEQ ID NO: 1476819 - RNA, 19 nt, Artificial Sequence
  Description of Artificial Sequence: Synthetic oligonucleotide
  Antisense strand to SEQ ID NO: 1476818
ucugugacaagaggcucca

SEQ ID NO: 1476820 - RNA, 19 nt, Artificial Sequence
  Description of Artificial Sequence: Synthetic oligonucleotide
  Sense strand starting at position 1130 of SEQ ID NO: 1244259
ggacauuuguuuggaguag

SEQ ID NO: 1476821 - RNA, 19 nt, Artificial Sequence
  Description of Artificial Sequence: Synthetic oligonucleotide
  Antisense strand to SEQ ID NO: 1476820
cuacuccaaacaaaugucc

SEQ ID NO: 1476822 - RNA, 19 nt, Artificial Sequence
  Description of Artificial Sequence: Synthetic oligonucleotide
  Sense strand starting at position 1131 of SEQ ID NO: 1244259
gacauuuguuuggaguagu

SEQ ID NO: 1476823 - RNA, 19 nt, Artificial Sequence
  Description of Artificial Sequence: Synthetic oligonucleotide
  Antisense strand to SEQ ID NO: 1476822
acuacuccaaacaaauguc

SEQ ID NO: 1476824 - RNA, 19 nt, Artificial Sequence
  Description of Artificial Sequence: Synthetic oligonucleotide
  Sense strand starting at position 1147 of SEQ ID NO: 1244259
aguguucacugguuuguuu

SEQ ID NO: 1476825 - RNA, 19 nt, Artificial Sequence
  Description of Artificial Sequence: Synthetic oligonucleotide
  Antisense strand to SEQ ID NO: 1476824
aaacaaaccagugaacacu

SEQ ID NO: 1476826 - RNA, 19 nt, Artificial Sequence
  Description of Artificial Sequence: Synthetic oligonucleotide
  Sense strand starting at position 1612 of SEQ ID NO: 1244259
agccaagggucuccacaua

SEQ ID NO: 1476827 - RNA, 19 nt, Artificial Sequence
  Description of Artificial Sequence: Synthetic oligonucleotide
  Antisense strand to SEQ ID NO: 1476826
uauguggagacccuuggcu

SEQ ID NO: 1476828 - RNA, 19 nt, Artificial Sequence
  Description of Artificial Sequence: Synthetic oligonucleotide
  Sense strand starting at position 1759 of SEQ ID NO: 1244259
gugaacucaccaugagcuu

SEQ ID NO: 1476829 - RNA, 19 nt, Artificial Sequence
  Description of Artificial Sequence: Synthetic oligonucleotide
  Antisense strand to SEQ ID NO: 1476828
aagcucauggugaguucac

SEQ ID NO: 1476830 - RNA, 19 nt, Artificial Sequence
  Description of Artificial Sequence: Synthetic oligonucleotide
  Sense strand starting at position 1833 of SEQ ID NO: 1244259
guuucagagucaucgggau

SEQ ID NO: 1476831 - RNA, 19 nt, Artificial Sequence
  Description of Artificial Sequence: Synthetic oligonucleotide
  Antisense strand to SEQ ID NO: 1476830
aucccgaugacucugaaac

SEQ ID NO: 1476832 - RNA, 19 nt, Artificial Sequence
  Description of Artificial Sequence: Synthetic oligonucleotide
  Sense strand starting at position 2115 of SEQ ID NO: 1244259
ggguaugggugcagacaaa

SEQ ID NO: 1476833 - RNA, 19 nt, Artificial Sequence
  Description of Artificial Sequence: Synthetic oligonucleotide
  Antisense strand to SEQ ID NO: 1476832
uuugucugcacccauaccc

SEQ ID NO: 1476834 - RNA, 19 nt, Artificial Sequence
  Description of Artificial Sequence: Synthetic oligonucleotide
  Sense strand starting at position 2388 of SEQ ID NO: 1244259
gcaagucuucagugggaag

SEQ ID NO: 1476835 - RNA, 19 nt, Artificial Sequence
  Description of Artificial Sequence: Synthetic oligonucleotide
  Antisense strand to SEQ ID NO: 1476834
cuucccacugaagacuugc

SEQ ID NO: 1476836 - RNA, 19 nt, Artificial Sequence
  Description of Artificial Sequence: Synthetic oligonucleotide
  Sense strand starting at position 2399 of SEQ ID NO: 1244259
gugggaagcugccugcauu

SEQ ID NO: 1476837 - RNA, 19 nt, Artificial Sequence
  Description of Artificial Sequence: Synthetic oligonucleotide
  Antisense strand to SEQ ID NO: 1476836
aaugcaggcagcuucccac

SEQ ID NO: 1476838 - RNA, 19 nt, Artificial Sequence
  Description of Artificial Sequence: Synthetic oligonucleotide
  Sense strand starting at position 2400 of SEQ ID NO: 1244259
ugggaagcugccugcauuu

SEQ ID NO: 1476839 - RNA, 19 nt, Artificial Sequence
  Description of Artificial Sequence: Synthetic oligonucleotide
  Antisense strand to SEQ ID NO: 1476838
aaaugcaggcagcuuccca

SEQ ID NO: 1476840 - RNA, 19 nt, Artificial Sequence
  Description of Artificial Sequence: Synthetic oligonucleotide
  Sense strand starting at position 2469 of SEQ ID NO: 1244259
aacguaaucuuguugguuc

SEQ ID NO: 1476841 - RNA, 19 nt, Artificial Sequence
  Description of Artificial Sequence: Synthetic oligonucleotide
  Antisense strand to SEQ ID NO: 1476840
gaaccaacaagauuacguu

SEQ ID NO: 1476842 - RNA, 19 nt, Artificial Sequence
  Description of Artificial Sequence: Synthetic oligonucleotide
  Sense strand starting at position 2507 of SEQ ID NO: 1244259
ggaaucugguuuccagacu

SEQ ID NO: 1476843 - RNA, 19 nt, Artificial Sequence
  Description of Artificial Sequence: Synthetic oligonucleotide
  Antisense strand to SEQ ID NO: 1476842
agucuggaaaccagauucc

SEQ ID NO: 1476844 - RNA, 19 nt, Artificial Sequence
  Description of Artificial Sequence: Synthetic oligonucleotide
  Sense strand starting at position 2730 of SEQ ID NO: 1244259
ggcagaagucgggacgcau

SEQ ID NO: 1476845 - RNA, 19 nt, Artificial Sequence
  Description of Artificial Sequence: Synthetic oligonucleotide
  Antisense strand to SEQ ID NO: 1476844
augcgucccgacuucugcc

SEQ ID NO: 1476846 - RNA, 19 nt, Artificial Sequence
  Description of Artificial Sequence: Synthetic oligonucleotide
  Sense strand starting at position 2763 of SEQ ID NO: 1244259
ccaggagucuuaggguugu

SEQ ID NO: 1476847 - RNA, 19 nt, Artificial Sequence
  Description of Artificial Sequence: Synthetic oligonucleotide
  Antisense strand to SEQ ID NO: 1476846
acaacccuaagacuccugg

SEQ ID NO: 1476848 - RNA, 19 nt, Artificial Sequence
  Description of Artificial Sequence: Synthetic oligonucleotide
  Sense strand starting at position 2767 of SEQ ID NO: 1244259
gagucuuaggguuguccca

SEQ ID NO: 1476849 - RNA, 19 nt, Artificial Sequence
  Description of Artificial Sequence: Synthetic oligonucleotide
  Antisense strand to SEQ ID NO: 1476848
ugggacaacccuaagacuc

SEQ ID NO: 1476850 - RNA, 19 nt, Artificial Sequence
  Description of Artificial Sequence: Synthetic oligonucleotide
  Sense strand starting at position 2859 of SEQ ID NO: 1244259
ugaacaagggcacguuauu

SEQ ID NO: 1476851 - RNA, 19 nt, Artificial Sequence
  Description of Artificial Sequence: Synthetic oligonucleotide
  Antisense strand to SEQ ID NO: 1476850
aauaacgugcccuuguuca

SEQ ID NO: 1476852 - RNA, 19 nt, Artificial Sequence
  Description of Artificial Sequence: Synthetic oligonucleotide
  Sense strand starting at position 2872 of SEQ ID NO: 1244259
guuauuugcucucacaguc

SEQ ID NO: 1476853 - RNA, 19 nt, Artificial Sequence
  Description of Artificial Sequence: Synthetic oligonucleotide
  Antisense strand to SEQ ID NO: 1476852
gacugugagagcaaauaac

SEQ ID NO: 1476854 - RNA, 19 nt, Artificial Sequence
  Description of Artificial Sequence: Synthetic oligonucleotide
  Sense strand starting at position 3021 of SEQ ID NO: 1244259
gagaaauggaguuggcuga

SEQ ID NO: 1476855 - RNA, 19 nt, Artificial Sequence
  Description of Artificial Sequence: Synthetic oligonucleotide
  Antisense strand to SEQ ID NO: 1476854
ucagccaacuccauuucuc

SEQ ID NO: 1476856 - RNA, 19 nt, Artificial Sequence
  Description of Artificial Sequence: Synthetic oligonucleotide
  Sense strand starting at position 3198 of SEQ ID NO: 1244259
cuggauuccucucugacaa

SEQ ID NO: 1476857 - RNA, 19 nt, Artificial Sequence
  Description of Artificial Sequence: Synthetic oligonucleotide
  Antisense strand to SEQ ID NO: 1476856
uugucagagaggaauccag

SEQ ID NO: 1476858 - RNA, 19 nt, Artificial Sequence
  Description of Artificial Sequence: Synthetic oligonucleotide
  Sense strand starting at position 3199 of SEQ ID NO: 1244259
uggauuccucucugacaag

SEQ ID NO: 1476859 - RNA, 19 nt, Artificial Sequence
  Description of Artificial Sequence: Synthetic oligonucleotide
  Antisense strand to SEQ ID NO: 1476858
cuugucagagaggaaucca

SEQ ID NO: 1476860 - RNA, 19 nt, Artificial Sequence
  Description of Artificial Sequence: Synthetic oligonucleotide
  Sense strand starting at position 3800 of SEQ ID NO: 1244259
cgagguuccgcccgaaaug

SEQ ID NO: 1476861 - RNA, 19 nt, Artificial Sequence
  Description of Artificial Sequence: Synthetic oligonucleotide
  Antisense strand to SEQ ID NO: 1476860
cauuucgggcggaaccucg

SEQ ID NO: 1476862 - RNA, 19 nt, Artificial Sequence
  Description of Artificial Sequence: Synthetic oligonucleotide
  Sense strand starting at position 95 of SEQ ID NO: 1244260
ugagguuugaagcaagguu

SEQ ID NO: 1476863 - RNA, 19 nt, Artificial Sequence
  Description of Artificial Sequence: Synthetic oligonucleotide
  Antisense strand to SEQ ID NO: 1476862
aaccuugcuucaaaccuca

SEQ ID NO: 1476864 - RNA, 19 nt, Artificial Sequence
  Description of Artificial Sequence: Synthetic oligonucleotide
  Sense strand starting at position 212 of SEQ ID NO: 1244260
uuccuauggacacgucaga

SEQ ID NO: 1476865 - RNA, 19 nt, Artificial Sequence
  Description of Artificial Sequence: Synthetic oligonucleotide
  Antisense strand to SEQ ID NO: 1476864
ucugacguguccauaggaa

SEQ ID NO: 1476866 - RNA, 19 nt, Artificial Sequence
  Description of Artificial Sequence: Synthetic oligonucleotide
  Sense strand starting at position 349 of SEQ ID NO: 1244260
aagacaguuggaugucaga

SEQ ID NO: 1476867 - RNA, 19 nt, Artificial Sequence
  Description of Artificial Sequence: Synthetic oligonucleotide
  Antisense strand to SEQ ID NO: 1476866
ucugacauccaacugucuu

SEQ ID NO: 1476868 - RNA, 19 nt, Artificial Sequence
  Description of Artificial Sequence: Synthetic oligonucleotide
  Sense strand starting at position 356 of SEQ ID NO: 1244260
uuggaugucagagacaguu

SEQ ID NO: 1476869 - RNA, 19 nt, Artificial Sequence
  Description of Artificial Sequence: Synthetic oligonucleotide
  Antisense strand to SEQ ID NO: 1476868
aacugucucugacauccaa

SEQ ID NO: 1476870 - RNA, 19 nt, Artificial Sequence
  Description of Artificial Sequence: Synthetic oligonucleotide
  Sense strand starting at position 392 of SEQ ID NO: 1244260
uggaauucccagugcgaga

SEQ ID NO: 1476871 - RNA, 19 nt, Artificial Sequence
  Description of Artificial Sequence: Synthetic oligonucleotide
  Antisense strand to SEQ ID NO: 1476870
ucucgcacugggaauucca

SEQ ID NO: 1476872 - RNA, 19 nt, Artificial Sequence
  Description of Artificial Sequence: Synthetic oligonucleotide
  Sense strand starting at position 538 of SEQ ID NO: 1244260
ggauuccuauaacuggauu

SEQ ID NO: 1476873 - RNA, 19 nt, Artificial Sequence
  Description of Artificial Sequence: Synthetic oligonucleotide
  Antisense strand to SEQ ID NO: 1476872
aauccaguuauaggaaucc

SEQ ID NO: 1476874 - RNA, 19 nt, Artificial Sequence
  Description of Artificial Sequence: Synthetic oligonucleotide
  Sense strand starting at position 544 of SEQ ID NO: 1244260
cuauaacuggauugcuuau

SEQ ID NO: 1476875 - RNA, 19 nt, Artificial Sequence
  Description of Artificial Sequence: Synthetic oligonucleotide
  Antisense strand to SEQ ID NO: 1476874
auaagcaauccaguuauag

SEQ ID NO: 1476876 - RNA, 19 nt, Artificial Sequence
  Description of Artificial Sequence: Synthetic oligonucleotide
  Sense strand starting at position 876 of SEQ ID NO: 1244260
ucaagaagccucuaaaugu

SEQ ID NO: 1476877 - RNA, 19 nt, Artificial Sequence
  Description of Artificial Sequence: Synthetic oligonucleotide
  Antisense strand to SEQ ID NO: 1476876
acauuuagaggcuucuuga

SEQ ID NO: 1476878 - RNA, 19 nt, Artificial Sequence
  Description of Artificial Sequence: Synthetic oligonucleotide
  Sense strand starting at position 943 of SEQ ID NO: 1244260
agcagaaauucuuugcaag

SEQ ID NO: 1476879 - RNA, 19 nt, Artificial Sequence
  Description of Artificial Sequence: Synthetic oligonucleotide
  Antisense strand to SEQ ID NO: 1476878
cuugcaaagaauuucugcu

SEQ ID NO: 1476880 - RNA, 19 nt, Artificial Sequence
  Description of Artificial Sequence: Synthetic oligonucleotide
  Sense strand starting at position 944 of SEQ ID NO: 1244260
gcagaaauucuuugcaagu

SEQ ID NO: 1476881 - RNA, 19 nt, Artificial Sequence
  Description of Artificial Sequence: Synthetic oligonucleotide
  Antisense strand to SEQ ID NO: 1476880
acuugcaaagaauuucugc

SEQ ID NO: 1476882 - RNA, 19 nt, Artificial Sequence
  Description of Artificial Sequence: Synthetic oligonucleotide
  Sense strand starting at position 950 of SEQ ID NO: 1244260
auucuuugcaaguagagag

SEQ ID NO: 1476883 - RNA, 19 nt, Artificial Sequence
  Description of Artificial Sequence: Synthetic oligonucleotide
  Antisense strand to SEQ ID NO: 1476882
cucucuacuugcaaagaau

SEQ ID NO: 1476884 - RNA, 19 nt, Artificial Sequence
  Description of Artificial Sequence: Synthetic oligonucleotide
  Sense strand starting at position 1052 of SEQ ID NO: 1244260
aguugagcugaaugagacu

SEQ ID NO: 1476885 - RNA, 19 nt, Artificial Sequence
  Description of Artificial Sequence: Synthetic oligonucleotide
  Antisense strand to SEQ ID NO: 1476884
agucucauucagcucaacu

SEQ ID NO: 1476886 - RNA, 19 nt, Artificial Sequence
  Description of Artificial Sequence: Synthetic oligonucleotide
  Sense strand starting at position 1061 of SEQ ID NO: 1244260
gaaugagacucagagaagu

SEQ ID NO: 1476887 - RNA, 19 nt, Artificial Sequence
  Description of Artificial Sequence: Synthetic oligonucleotide
  Antisense strand to SEQ ID NO: 1476886
acuucucugagucucauuc

SEQ ID NO: 1476888 - RNA, 19 nt, Artificial Sequence
  Description of Artificial Sequence: Synthetic oligonucleotide
  Sense strand starting at position 1072 of SEQ ID NO: 1244260
agagaaguuaagugaguuc

SEQ ID NO: 1476889 - RNA, 19 nt, Artificial Sequence
  Description of Artificial Sequence: Synthetic oligonucleotide
  Antisense strand to SEQ ID NO: 1476888
gaacucacuuaacuucucu

SEQ ID NO: 1476890 - RNA, 19 nt, Artificial Sequence
  Description of Artificial Sequence: Synthetic oligonucleotide
  Sense strand starting at position 1084 of SEQ ID NO: 1244260
ugaguucuccaaggucaca

SEQ ID NO: 1476891 - RNA, 19 nt, Artificial Sequence
  Description of Artificial Sequence: Synthetic oligonucleotide
  Antisense strand to SEQ ID NO: 1476890
ugugaccuuggagaacuca

SEQ ID NO: 1476892 - RNA, 19 nt, Artificial Sequence
  Description of Artificial Sequence: Synthetic oligonucleotide
  Sense strand starting at position 1248 of SEQ ID NO: 1244260
auaccuagucccgagcaua

SEQ ID NO: 1476893 - RNA, 19 nt, Artificial Sequence
  Description of Artificial Sequence: Synthetic oligonucleotide
  Antisense strand to SEQ ID NO: 1476892
uaugcucgggacuagguau

SEQ ID NO: 1476894 - RNA, 19 nt, Artificial Sequence
  Description of Artificial Sequence: Synthetic oligonucleotide
  Sense strand starting at position 1592 of SEQ ID NO: 1244260
gcccuugauugucuccaga

SEQ ID NO: 1476895 - RNA, 19 nt, Artificial Sequence
  Description of Artificial Sequence: Synthetic oligonucleotide
  Antisense strand to SEQ ID NO: 1476894
ucuggagacaaucaagggc

SEQ ID NO: 1476896 - RNA, 19 nt, Artificial Sequence
  Description of Artificial Sequence: Synthetic oligonucleotide
  Sense strand starting at position 1594 of SEQ ID NO: 1244260
ccuugauugucuccagaga

SEQ ID NO: 1476897 - RNA, 19 nt, Artificial Sequence
  Description of Artificial Sequence: Synthetic oligonucleotide
  Antisense strand to SEQ ID NO: 1476896
ucucuggagacaaucaagg

SEQ ID NO: 1476898 - RNA, 19 nt, Artificial Sequence
  Description of Artificial Sequence: Synthetic oligonucleotide
  Sense strand starting at position 1697 of SEQ ID NO: 1244260
gguugcuuagagugaucua

SEQ ID NO: 1476899 - RNA, 19 nt, Artificial Sequence
  Description of Artificial Sequence: Synthetic oligonucleotide
  Antisense strand to SEQ ID NO: 1476898
uagaucacucuaagcaacc

SEQ ID NO: 1476900 - RNA, 19 nt, Artificial Sequence
  Description of Artificial Sequence: Synthetic oligonucleotide
  Sense strand starting at position 1698 of SEQ ID NO: 1244260
guugcuuagagugaucuag

SEQ ID NO: 1476901 - RNA, 19 nt, Artificial Sequence
  Description of Artificial Sequence: Synthetic oligonucleotide
  Antisense strand to SEQ ID NO: 1476900
cuagaucacucuaagcaac

SEQ ID NO: 1476902 - RNA, 19 nt, Artificial Sequence
  Description of Artificial Sequence: Synthetic oligonucleotide
  Sense strand starting at position 1718 of SEQ ID NO: 1244260
ucuccucuuugauuggaua

SEQ ID NO: 1476903 - RNA, 19 nt, Artificial Sequence
  Description of Artificial Sequence: Synthetic oligonucleotide
  Antisense strand to SEQ ID NO: 1476902
uauccaaucaaagaggaga

SEQ ID NO: 1476904 - RNA, 19 nt, Artificial Sequence
  Description of Artificial Sequence: Synthetic oligonucleotide
  Sense strand starting at position 1762 of SEQ ID NO: 1244260
acaguucucucccuaguga

SEQ ID NO: 1476905 - RNA, 19 nt, Artificial Sequence
  Description of Artificial Sequence: Synthetic oligonucleotide
  Antisense strand to SEQ ID NO: 1476904
ucacuagggagagaacugu

SEQ ID NO: 1476906 - RNA, 19 nt, Artificial Sequence
  Description of Artificial Sequence: Synthetic oligonucleotide
  Sense strand starting at position 1770 of SEQ ID NO: 1244260
cucccuagugaaugugaca

SEQ ID NO: 1476907 - RNA, 19 nt, Artificial Sequence
  Description of Artificial Sequence: Synthetic oligonucleotide
  Antisense strand to SEQ ID NO: 1476906
ugucacauucacuagggag

SEQ ID NO: 1476908 - RNA, 19 nt, Artificial Sequence
  Description of Artificial Sequence: Synthetic oligonucleotide
  Sense strand starting at position 2070 of SEQ ID NO: 1244260
acccauuaucagugagcac

SEQ ID NO: 1476909 - RNA, 19 nt, Artificial Sequence
  Description of Artificial Sequence: Synthetic oligonucleotide
  Antisense strand to SEQ ID NO: 1476908
gugcucacugauaaugggu

SEQ ID NO: 1476910 - RNA, 19 nt, Artificial Sequence
  Description of Artificial Sequence: Synthetic oligonucleotide
  Sense strand starting at position 2134 of SEQ ID NO: 1244260
cuggaucugugauugacag

SEQ ID NO: 1476911 - RNA, 19 nt, Artificial Sequence
  Description of Artificial Sequence: Synthetic oligonucleotide
  Antisense strand to SEQ ID NO: 1476910
cugucaaucacagauccag

SEQ ID NO: 1476912 - RNA, 19 nt, Artificial Sequence
  Description of Artificial Sequence: Synthetic oligonucleotide
  Sense strand starting at position 2146 of SEQ ID NO: 1244260
uugacaggcgcucauguaa

SEQ ID NO: 1476913 - RNA, 19 nt, Artificial Sequence
  Description of Artificial Sequence: Synthetic oligonucleotide
  Antisense strand to SEQ ID NO: 1476912
uuacaugagcgccugucaa

SEQ ID NO: 1476914 - RNA, 19 nt, Artificial Sequence
  Description of Artificial Sequence: Synthetic oligonucleotide
  Sense strand starting at position 2235 of SEQ ID NO: 1244260
agaacaugugaauguuaac

SEQ ID NO: 1476915 - RNA, 19 nt, Artificial Sequence
  Description of Artificial Sequence: Synthetic oligonucleotide
  Antisense strand to SEQ ID NO: 1476914
guuaacauucacauguucu

SEQ ID NO: 1476916 - RNA, 19 nt, Artificial Sequence
  Description of Artificial Sequence: Synthetic oligonucleotide
  Sense strand starting at position 2241 of SEQ ID NO: 1244260
ugugaauguuaaccuuaua

SEQ ID NO: 1476917 - RNA, 19 nt, Artificial Sequence
  Description of Artificial Sequence: Synthetic oligonucleotide
  Antisense strand to SEQ ID NO: 1476916
uauaagguuaacauucaca

SEQ ID NO: 1476918 - RNA, 19 nt, Artificial Sequence
  Description of Artificial Sequence: Synthetic oligonucleotide
  Sense strand starting at position 2308 of SEQ ID NO: 1244260
uggagagguuaucccggau

SEQ ID NO: 1476919 - RNA, 19 nt, Artificial Sequence
  Description of Artificial Sequence: Synthetic oligonucleotide
  Antisense strand to SEQ ID NO: 1476918
auccgggauaaccucucca

SEQ ID NO: 1476920 - RNA, 19 nt, Artificial Sequence
  Description of Artificial Sequence: Synthetic oligonucleotide
  Sense strand starting at position 2570 of SEQ ID NO: 1244260
accuuuggccucuagaacu

SEQ ID NO: 1476921 - RNA, 19 nt, Artificial Sequence
  Description of Artificial Sequence: Synthetic oligonucleotide
  Antisense strand to SEQ ID NO: 1476920
aguucuagaggccaaaggu

SEQ ID NO: 1476922 - RNA, 19 nt, Artificial Sequence
  Description of Artificial Sequence: Synthetic oligonucleotide
  Sense strand starting at position 2614 of SEQ ID NO: 1244260
acacacuuuguguguaaga

SEQ ID NO: 1476923 - RNA, 19 nt, Artificial Sequence
  Description of Artificial Sequence: Synthetic oligonucleotide
  Antisense strand to SEQ ID NO: 1476922
ucuuacacacaaagugugu

SEQ ID NO: 1476924 - RNA, 19 nt, Artificial Sequence
  Description of Artificial Sequence: Synthetic oligonucleotide
  Sense strand starting at position 2616 of SEQ ID NO: 1244260
acacuuuguguguaagacu

SEQ ID NO: 1476925 - RNA, 19 nt, Artificial Sequence
  Description of Artificial Sequence: Synthetic oligonucleotide
  Antisense strand to SEQ ID NO: 1476924
agucuuacacacaaagugu

SEQ ID NO: 1476926 - RNA, 19 nt, Artificial Sequence
  Description of Artificial Sequence: Synthetic oligonucleotide
  Sense strand starting at position 2781 of SEQ ID NO: 1244260
gggagguggugauuaggua

SEQ ID NO: 1476927 - RNA, 19 nt, Artificial Sequence
  Description of Artificial Sequence: Synthetic oligonucleotide
  Antisense strand to SEQ ID NO: 1476926
uaccuaaucaccaccuccc

SEQ ID NO: 1476928 - RNA, 19 nt, Artificial Sequence
  Description of Artificial Sequence: Synthetic oligonucleotide
  Sense strand starting at position 2782 of SEQ ID NO: 1244260
ggagguggugauuagguaa

SEQ ID NO: 1476929 - RNA, 19 nt, Artificial Sequence
  Description of Artificial Sequence: Synthetic oligonucleotide
  Antisense strand to SEQ ID NO: 1476928
uuaccuaaucaccaccucc

SEQ ID NO: 1476930 - RNA, 19 nt, Artificial Sequence
  Description of Artificial Sequence: Synthetic oligonucleotide
  Sense strand starting at position 2785 of SEQ ID NO: 1244260
gguggugauuagguaauga

SEQ ID NO: 1476931 - RNA, 19 nt, Artificial Sequence
  Description of Artificial Sequence: Synthetic oligonucleotide
  Antisense strand to SEQ ID NO: 1476930
ucauuaccuaaucaccacc

SEQ ID NO: 1476932 - RNA, 19 nt, Artificial Sequence
  Description of Artificial Sequence: Synthetic oligonucleotide
  Sense strand starting at position 3395 of SEQ ID NO: 1244260
gugucaauauaggcuaagu

SEQ ID NO: 1476933 - RNA, 19 nt, Artificial Sequence
  Description of Artificial Sequence: Synthetic oligonucleotide
  Antisense strand to SEQ ID NO: 1476932
acuuagccuauauugacac

SEQ ID NO: 1476934 - RNA, 19 nt, Artificial Sequence
  Description of Artificial Sequence: Synthetic oligonucleotide
  Sense strand starting at position 3462 of SEQ ID NO: 1244260
cauugugaagucugacaug

SEQ ID NO: 1476935 - RNA, 19 nt, Artificial Sequence
  Description of Artificial Sequence: Synthetic oligonucleotide
  Antisense strand to SEQ ID NO: 1476934
caugucagacuucacaaug

SEQ ID NO: 1476936 - RNA, 19 nt, Artificial Sequence
  Description of Artificial Sequence: Synthetic oligonucleotide
  Sense strand starting at position 3732 of SEQ ID NO: 1244260
ggaguauugcuccaucaca

SEQ ID NO: 1476937 - RNA, 19 nt, Artificial Sequence
  Description of Artificial Sequence: Synthetic oligonucleotide
  Antisense strand to SEQ ID NO: 1476936
ugugauggagcaauacucc

SEQ ID NO: 1476938 - RNA, 19 nt, Artificial Sequence
  Description of Artificial Sequence: Synthetic oligonucleotide
  Sense strand starting at position 3849 of SEQ ID NO: 1244260
acagguaagcuccaucaca

SEQ ID NO: 1476939 - RNA, 19 nt, Artificial Sequence
  Description of Artificial Sequence: Synthetic oligonucleotide
  Antisense strand to SEQ ID NO: 1476938
ugugauggagcuuaccugu

SEQ ID NO: 1476940 - RNA, 19 nt, Artificial Sequence
  Description of Artificial Sequence: Synthetic oligonucleotide
  Sense strand starting at position 3860 of SEQ ID NO: 1244260
ccaucacagccagguaauu

SEQ ID NO: 1476941 - RNA, 19 nt, Artificial Sequence
  Description of Artificial Sequence: Synthetic oligonucleotide
  Antisense strand to SEQ ID NO: 1476940
aauuaccuggcugugaugg

SEQ ID NO: 1476942 - RNA, 19 nt, Artificial Sequence
  Description of Artificial Sequence: Synthetic oligonucleotide
  Sense strand starting at position 141 of SEQ ID NO: 1244261
uugcauccuccuggaagaa

SEQ ID NO: 1476943 - RNA, 19 nt, Artificial Sequence
  Description of Artificial Sequence: Synthetic oligonucleotide
  Antisense strand to SEQ ID NO: 1476942
uucuuccaggaggaugcaa

SEQ ID NO: 1476944 - RNA, 19 nt, Artificial Sequence
  Description of Artificial Sequence: Synthetic oligonucleotide
  Sense strand starting at position 232 of SEQ ID NO: 1244261
gggaaauuaucaccggcaa

SEQ ID NO: 1476945 - RNA, 19 nt, Artificial Sequence
  Description of Artificial Sequence: Synthetic oligonucleotide
  Antisense strand to SEQ ID NO: 1476944
uugccggugauaauuuccc

SEQ ID NO: 1476946 - RNA, 19 nt, Artificial Sequence
  Description of Artificial Sequence: Synthetic oligonucleotide
  Sense strand starting at position 233 of SEQ ID NO: 1244261
ggaaauuaucaccggcaac

SEQ ID NO: 1476947 - RNA, 19 nt, Artificial Sequence
  Description of Artificial Sequence: Synthetic oligonucleotide
  Antisense strand to SEQ ID NO: 1476946
guugccggugauaauuucc

SEQ ID NO: 1476948 - RNA, 19 nt, Artificial Sequence
  Description of Artificial Sequence: Synthetic oligonucleotide
  Sense strand starting at position 603 of SEQ ID NO: 1244261
uucuuccuugucugggaaa

SEQ ID NO: 1476949 - RNA, 19 nt, Artificial Sequence
  Description of Artificial Sequence: Synthetic oligonucleotide
  Antisense strand to SEQ ID NO: 1476948
uuucccagacaaggaagaa

SEQ ID NO: 1476950 - RNA, 19 nt, Artificial Sequence
  Description of Artificial Sequence: Synthetic oligonucleotide
  Sense strand starting at position 622 of SEQ ID NO: 1244261
gccacaucucucugaugaa

SEQ ID NO: 1476951 - RNA, 19 nt, Artificial Sequence
  Description of Artificial Sequence: Synthetic oligonucleotide
  Antisense strand to SEQ ID NO: 1476950
uucaucagagagauguggc

SEQ ID NO: 1476952 - RNA, 19 nt, Artificial Sequence
  Description of Artificial Sequence: Synthetic oligonucleotide
  Sense strand starting at position 656 of SEQ ID NO: 1244261
auggauauucccugagcac

SEQ ID NO: 1476953 - RNA, 19 nt, Artificial Sequence
  Description of Artificial Sequence: Synthetic oligonucleotide
  Antisense strand to SEQ ID NO: 1476952
gugcucagggaauauccau

SEQ ID NO: 1476954 - RNA, 19 nt, Artificial Sequence
  Description of Artificial Sequence: Synthetic oligonucleotide
  Sense strand starting at position 872 of SEQ ID NO: 1244261
ugaccuaugugcucauuga

SEQ ID NO: 1476955 - RNA, 19 nt, Artificial Sequence
  Description of Artificial Sequence: Synthetic oligonucleotide
  Antisense strand to SEQ ID NO: 1476954
ucaaugagcacauagguca

SEQ ID NO: 1476956 - RNA, 19 nt, Artificial Sequence
  Description of Artificial Sequence: Synthetic oligonucleotide
  Sense strand starting at position 873 of SEQ ID NO: 1244261
gaccuaugugcucauugaa

SEQ ID NO: 1476957 - RNA, 19 nt, Artificial Sequence
  Description of Artificial Sequence: Synthetic oligonucleotide
  Antisense strand to SEQ ID NO: 1476956
uucaaugagcacauagguc

SEQ ID NO: 1476958 - RNA, 19 nt, Artificial Sequence
  Description of Artificial Sequence: Synthetic oligonucleotide
  Sense strand starting at position 876 of SEQ ID NO: 1244261
cuaugugcucauugaauau

SEQ ID NO: 1476959 - RNA, 19 nt, Artificial Sequence
  Description of Artificial Sequence: Synthetic oligonucleotide
  Antisense strand to SEQ ID NO: 1476958
auauucaaugagcacauag

SEQ ID NO: 1476960 - RNA, 19 nt, Artificial Sequence
  Description of Artificial Sequence: Synthetic oligonucleotide
  Sense strand starting at position 993 of SEQ ID NO: 1244261
ggaucacgucucuaguuua

SEQ ID NO: 1476961 - RNA, 19 nt, Artificial Sequence
  Description of Artificial Sequence: Synthetic oligonucleotide
  Antisense strand to SEQ ID NO: 1476960
uaaacuagagacgugaucc

SEQ ID NO: 1476962 - RNA, 19 nt, Artificial Sequence
  Description of Artificial Sequence: Synthetic oligonucleotide
  Sense strand starting at position 1296 of SEQ ID NO: 1244261
guucccucaucaguuuaau

SEQ ID NO: 1476963 - RNA, 19 nt, Artificial Sequence
  Description of Artificial Sequence: Synthetic oligonucleotide
  Antisense strand to SEQ ID NO: 1476962
auuaaacugaugagggaac

SEQ ID NO: 1476964 - RNA, 19 nt, Artificial Sequence
  Description of Artificial Sequence: Synthetic oligonucleotide
  Sense strand starting at position 1330 of SEQ ID NO: 1244261
auggucauaccugaguaca

SEQ ID NO: 1476965 - RNA, 19 nt, Artificial Sequence
  Description of Artificial Sequence: Synthetic oligonucleotide
  Antisense strand to SEQ ID NO: 1476964
uguacucagguaugaccau

SEQ ID NO: 1476966 - RNA, 19 nt, Artificial Sequence
  Description of Artificial Sequence: Synthetic oligonucleotide
  Sense strand starting at position 1332 of SEQ ID NO: 1244261
ggucauaccugaguacaag

SEQ ID NO: 1476967 - RNA, 19 nt, Artificial Sequence
  Description of Artificial Sequence: Synthetic oligonucleotide
  Antisense strand to SEQ ID NO: 1476966
cuuguacucagguaugacc

SEQ ID NO: 1476968 - RNA, 19 nt, Artificial Sequence
  Description of Artificial Sequence: Synthetic oligonucleotide
  Sense strand starting at position 1477 of SEQ ID NO: 1244261
uaguuuacccacuggugaa

SEQ ID NO: 1476969 - RNA, 19 nt, Artificial Sequence
  Description of Artificial Sequence: Synthetic oligonucleotide
  Antisense strand to SEQ ID NO: 1476968
uucaccaguggguaaacua

SEQ ID NO: 1476970 - RNA, 19 nt, Artificial Sequence
  Description of Artificial Sequence: Synthetic oligonucleotide
  Sense strand starting at position 2260 of SEQ ID NO: 1244261
guugacuuguuccuggacu

SEQ ID NO: 1476971 - RNA, 19 nt, Artificial Sequence
  Description of Artificial Sequence: Synthetic oligonucleotide
  Antisense strand to SEQ ID NO: 1476970
aguccaggaacaagucaac

SEQ ID NO: 1476972 - RNA, 19 nt, Artificial Sequence
  Description of Artificial Sequence: Synthetic oligonucleotide
  Sense strand starting at position 2262 of SEQ ID NO: 1244261
ugacuuguuccuggacuuc

SEQ ID NO: 1476973 - RNA, 19 nt, Artificial Sequence
  Description of Artificial Sequence: Synthetic oligonucleotide
  Antisense strand to SEQ ID NO: 1476972
gaaguccaggaacaaguca

SEQ ID NO: 1476974 - RNA, 19 nt, Artificial Sequence
  Description of Artificial Sequence: Synthetic oligonucleotide
  Sense strand starting at position 2642 of SEQ ID NO: 1244261
agaauaaugcuuuguacac

SEQ ID NO: 1476975 - RNA, 19 nt, Artificial Sequence
  Description of Artificial Sequence: Synthetic oligonucleotide
  Antisense strand to SEQ ID NO: 1476974
guguacaaagcauuauucu

SEQ ID NO: 1476976 - RNA, 19 nt, Artificial Sequence
  Description of Artificial Sequence: Synthetic oligonucleotide
  Sense strand starting at position 2675 of SEQ ID NO: 1244261
gugacugcacaagauaacu

SEQ ID NO: 1476977 - RNA, 19 nt, Artificial Sequence
  Description of Artificial Sequence: Synthetic oligonucleotide
  Antisense strand to SEQ ID NO: 1476976
aguuaucuugugcagucac

SEQ ID NO: 1476978 - RNA, 19 nt, Artificial Sequence
  Description of Artificial Sequence: Synthetic oligonucleotide
  Sense strand starting at position 2752 of SEQ ID NO: 1244261
uuuaaaguuguuugaggac

SEQ ID NO: 1476979 - RNA, 19 nt, Artificial Sequence
  Description of Artificial Sequence: Synthetic oligonucleotide
  Antisense strand to SEQ ID NO: 1476978
guccucaaacaacuuuaaa

SEQ ID NO: 1476980 - RNA, 19 nt, Artificial Sequence
  Description of Artificial Sequence: Synthetic oligonucleotide
  Sense strand starting at position 2761 of SEQ ID NO: 1244261
guuugaggacgguaucauu

SEQ ID NO: 1476981 - RNA, 19 nt, Artificial Sequence
  Description of Artificial Sequence: Synthetic oligonucleotide
  Antisense strand to SEQ ID NO: 1476980
aaugauaccguccucaaac

SEQ ID NO: 1476982 - RNA, 19 nt, Artificial Sequence
  Description of Artificial Sequence: Synthetic oligonucleotide
  Sense strand starting at position 2841 of SEQ ID NO: 1244261
ugaggagguccugggugau

SEQ ID NO: 1476983 - RNA, 19 nt, Artificial Sequence
  Description of Artificial Sequence: Synthetic oligonucleotide
  Antisense strand to SEQ ID NO: 1476982
aucacccaggaccuccuca

SEQ ID NO: 1476984 - RNA, 19 nt, Artificial Sequence
  Description of Artificial Sequence: Synthetic oligonucleotide
  Sense strand starting at position 3062 of SEQ ID NO: 1244261
accucugcuggucaucaua

SEQ ID NO: 1476985 - RNA, 19 nt, Artificial Sequence
  Description of Artificial Sequence: Synthetic oligonucleotide
  Antisense strand to SEQ ID NO: 1476984
uaugaugaccagcagaggu

SEQ ID NO: 1476986 - RNA, 19 nt, Artificial Sequence
  Description of Artificial Sequence: Synthetic oligonucleotide
  Sense strand starting at position 3064 of SEQ ID NO: 1244261
cucugcuggucaucauaga

SEQ ID NO: 1476987 - RNA, 19 nt, Artificial Sequence
  Description of Artificial Sequence: Synthetic oligonucleotide
  Antisense strand to SEQ ID NO: 1476986
ucuaugaugaccagcagag

SEQ ID NO: 1476988 - RNA, 19 nt, Artificial Sequence
  Description of Artificial Sequence: Synthetic oligonucleotide
  Sense strand starting at position 3065 of SEQ ID NO: 1244261
ucugcuggucaucauagaa

SEQ ID NO: 1476989 - RNA, 19 nt, Artificial Sequence
  Description of Artificial Sequence: Synthetic oligonucleotide
  Antisense strand to SEQ ID NO: 1476988
uucuaugaugaccagcaga

SEQ ID NO: 1476990 - RNA, 19 nt, Artificial Sequence
  Description of Artificial Sequence: Synthetic oligonucleotide
  Sense strand starting at position 3158 of SEQ ID NO: 1244261
cggagauccacaggucaaa

SEQ ID NO: 1476991 - RNA, 19 nt, Artificial Sequence
  Description of Artificial Sequence: Synthetic oligonucleotide
  Antisense strand to SEQ ID NO: 1476990
uuugaccuguggaucuccg

SEQ ID NO: 1476992 - RNA, 19 nt, Artificial Sequence
  Description of Artificial Sequence: Synthetic oligonucleotide
  Sense strand starting at position 3195 of SEQ ID NO: 1244261
gucauaggacucuggguuu

SEQ ID NO: 1476993 - RNA, 19 nt, Artificial Sequence
  Description of Artificial Sequence: Synthetic oligonucleotide
  Antisense strand to SEQ ID NO: 1476992
aaacccagaguccuaugac

SEQ ID NO: 1476994 - RNA, 19 nt, Artificial Sequence
  Description of Artificial Sequence: Synthetic oligonucleotide
  Sense strand starting at position 3238 of SEQ ID NO: 1244261
aggagaaguucauugaugu

SEQ ID NO: 1476995 - RNA, 19 nt, Artificial Sequence
  Description of Artificial Sequence: Synthetic oligonucleotide
  Antisense strand to SEQ ID NO: 1476994
acaucaaugaacuucuccu

SEQ ID NO: 1476996 - RNA, 19 nt, Artificial Sequence
  Description of Artificial Sequence: Synthetic oligonucleotide
  Sense strand starting at position 3239 of SEQ ID NO: 1244261
ggagaaguucauugaugug

SEQ ID NO: 1476997 - RNA, 19 nt, Artificial Sequence
  Description of Artificial Sequence: Synthetic oligonucleotide
  Antisense strand to SEQ ID NO: 1476996
cacaucaaugaacuucucc

SEQ ID NO: 1476998 - RNA, 19 nt, Artificial Sequence
  Description of Artificial Sequence: Synthetic oligonucleotide
  Sense strand starting at position 3305 of SEQ ID NO: 1244261
ugaguuugggugcaauauc

SEQ ID NO: 1476999 - RNA, 19 nt, Artificial Sequence
  Description of Artificial Sequence: Synthetic oligonucleotide
  Antisense strand to SEQ ID NO: 1476998
gauauugcacccaaacuca

SEQ ID NO: 1477000 - RNA, 19 nt, Artificial Sequence
  Description of Artificial Sequence: Synthetic oligonucleotide
  Sense strand starting at position 3396 of SEQ ID NO: 1244261
gggucuggauguccuucaa

SEQ ID NO: 1477001 - RNA, 19 nt, Artificial Sequence
  Description of Artificial Sequence: Synthetic oligonucleotide
  Antisense strand to SEQ ID NO: 1477000
uugaaggacauccagaccc

SEQ ID NO: 1477002 - RNA, 19 nt, Artificial Sequence
  Description of Artificial Sequence: Synthetic oligonucleotide
  Sense strand starting at position 3436 of SEQ ID NO: 1244261
ccacaaaugcgugaaugaa

SEQ ID NO: 1477003 - RNA, 19 nt, Artificial Sequence
  Description of Artificial Sequence: Synthetic oligonucleotide
  Antisense strand to SEQ ID NO: 1477002
uucauucacgcauuugugg

SEQ ID NO: 1477004 - RNA, 19 nt, Artificial Sequence
  Description of Artificial Sequence: Synthetic oligonucleotide
  Sense strand starting at position 3525 of SEQ ID NO: 1244261
agugucauuugucuaauug

SEQ ID NO: 1477005 - RNA, 19 nt, Artificial Sequence
  Description of Artificial Sequence: Synthetic oligonucleotide
  Antisense strand to SEQ ID NO: 1477004
caauuagacaaaugacacu

SEQ ID NO: 1477006 - RNA, 19 nt, Artificial Sequence
  Description of Artificial Sequence: Synthetic oligonucleotide
  Sense strand starting at position 3542 of SEQ ID NO: 1244261
ugcuuuguaaguguaguuu

SEQ ID NO: 1477007 - RNA, 19 nt, Artificial Sequence
  Description of Artificial Sequence: Synthetic oligonucleotide
  Antisense strand to SEQ ID NO: 1477006
aaacuacacuuacaaagca

SEQ ID NO: 1477008 - RNA, 19 nt, Artificial Sequence
  Description of Artificial Sequence: Synthetic oligonucleotide
  Sense strand starting at position 3571 of SEQ ID NO: 1244261
auguaaauuaugugaacgu

SEQ ID NO: 1477009 - RNA, 19 nt, Artificial Sequence
  Description of Artificial Sequence: Synthetic oligonucleotide
  Antisense strand to SEQ ID NO: 1477008
acguucacauaauuuacau

SEQ ID NO: 1477010 - RNA, 19 nt, Artificial Sequence
  Description of Artificial Sequence: Synthetic oligonucleotide
  Sense strand starting at position 3575 of SEQ ID NO: 1244261
aaauuaugugaacgucuaa

SEQ ID NO: 1477011 - RNA, 19 nt, Artificial Sequence
  Description of Artificial Sequence: Synthetic oligonucleotide
  Antisense strand to SEQ ID NO: 1477010
uuagacguucacauaauuu

SEQ ID NO: 1477012 - RNA, 19 nt, Artificial Sequence
  Description of Artificial Sequence: Synthetic oligonucleotide
  Sense strand starting at position 3588 of SEQ ID NO: 1244261
gucuaauggguuuauuauu

SEQ ID NO: 1477013 - RNA, 19 nt, Artificial Sequence
  Description of Artificial Sequence: Synthetic oligonucleotide
  Antisense strand to SEQ ID NO: 1477012
aauaauaaacccauuagac

SEQ ID NO: 1477014 - RNA, 19 nt, Artificial Sequence
  Description of Artificial Sequence: Synthetic oligonucleotide
  Sense strand starting at position 3659 of SEQ ID NO: 1244261
gguaacuagcaauggucau

SEQ ID NO: 1477015 - RNA, 19 nt, Artificial Sequence
  Description of Artificial Sequence: Synthetic oligonucleotide
  Antisense strand to SEQ ID NO: 1477014
augaccauugcuaguuacc

SEQ ID NO: 1477016 - RNA, 19 nt, Artificial Sequence
  Description of Artificial Sequence: Synthetic oligonucleotide
  Sense strand starting at position 3670 of SEQ ID NO: 1244261
auggucauagcccauguau

SEQ ID NO: 1477017 - RNA, 19 nt, Artificial Sequence
  Description of Artificial Sequence: Synthetic oligonucleotide
  Antisense strand to SEQ ID NO: 1477016
auacaugggcuaugaccau

SEQ ID NO: 1477018 - RNA, 19 nt, Artificial Sequence
  Description of Artificial Sequence: Synthetic oligonucleotide
  Sense strand starting at position 3672 of SEQ ID NO: 1244261
ggucauagcccauguauuu

SEQ ID NO: 1477019 - RNA, 19 nt, Artificial Sequence
  Description of Artificial Sequence: Synthetic oligonucleotide
  Antisense strand to SEQ ID NO: 1477018
aaauacaugggcuaugacc

SEQ ID NO: 1477020 - RNA, 19 nt, Artificial Sequence
  Description of Artificial Sequence: Synthetic oligonucleotide
  Sense strand starting at position 3694 of SEQ ID NO: 1244261
aguucucaagaauauaugu

SEQ ID NO: 1477021 - RNA, 19 nt, Artificial Sequence
  Description of Artificial Sequence: Synthetic oligonucleotide
  Antisense strand to SEQ ID NO: 1477020
acauauauucuugagaacu

SEQ ID NO: 1477022 - RNA, 19 nt, Artificial Sequence
  Description of Artificial Sequence: Synthetic oligonucleotide
  Sense strand starting at position 3905 of SEQ ID NO: 1244262
agguuccucccuugacaaa

SEQ ID NO: 1477023 - RNA, 19 nt, Artificial Sequence
  Description of Artificial Sequence: Synthetic oligonucleotide
  Antisense strand to SEQ ID NO: 1477022
uuugucaagggaggaaccu

SEQ ID NO: 1477024 - RNA, 19 nt, Artificial Sequence
  Description of Artificial Sequence: Synthetic oligonucleotide
  Sense strand starting at position 3973 of SEQ ID NO: 1244262
cugugagggucucaaucua

SEQ ID NO: 1477025 - RNA, 19 nt, Artificial Sequence
  Description of Artificial Sequence: Synthetic oligonucleotide
  Antisense strand to SEQ ID NO: 1477024
uagauugagacccucacag

SEQ ID NO: 1477026 - RNA, 19 nt, Artificial Sequence
  Description of Artificial Sequence: Synthetic oligonucleotide
  Sense strand starting at position 490 of SEQ ID NO: 1244264
gucuaaaggucacacugua

SEQ ID NO: 1477027 - RNA, 19 nt, Artificial Sequence
  Description of Artificial Sequence: Synthetic oligonucleotide
  Antisense strand to SEQ ID NO: 1477026
uacagugugaccuuuagac

SEQ ID NO: 1477028 - RNA, 19 nt, Artificial Sequence
  Description of Artificial Sequence: Synthetic oligonucleotide
  Sense strand starting at position 2391 of SEQ ID NO: 1244263
gcuauuggaucucagaaua

SEQ ID NO: 1477029 - RNA, 19 nt, Artificial Sequence
  Description of Artificial Sequence: Synthetic oligonucleotide
  Antisense strand to SEQ ID NO: 1477028
uauucugagauccaauagc

SEQ ID NO: 1477030 - RNA, 19 nt, Artificial Sequence
  Description of Artificial Sequence: Synthetic oligonucleotide
  Sense strand starting at position 3020 of SEQ ID NO: 1244263
uaaauaaucuaguaacggu

SEQ ID NO: 1477031 - RNA, 19 nt, Artificial Sequence
  Description of Artificial Sequence: Synthetic oligonucleotide
  Antisense strand to SEQ ID NO: 1477030
accguuacuagauuauuua

SEQ ID NO: 1477032 - RNA, 19 nt, Artificial Sequence
  Description of Artificial Sequence: Synthetic oligonucleotide
  Sense strand starting at position 3076 of SEQ ID NO: 1244263
aauacuaggccacguuaua

SEQ ID NO: 1477033 - RNA, 19 nt, Artificial Sequence
  Description of Artificial Sequence: Synthetic oligonucleotide
  Antisense strand to SEQ ID NO: 1477032
uauaacguggccuaguauu

SEQ ID NO: 1477034 - RNA, 19 nt, Artificial Sequence
  Description of Artificial Sequence: Synthetic oligonucleotide
  Sense strand starting at position 3086 of SEQ ID NO: 1244263
cacguuauaucagagacuu

SEQ ID NO: 1477035 - RNA, 19 nt, Artificial Sequence
  Description of Artificial Sequence: Synthetic oligonucleotide
  Antisense strand to SEQ ID NO: 1477034
aagucucugauauaacgug

SEQ ID NO: 1477036 - RNA, 19 nt, Artificial Sequence
  Description of Artificial Sequence: Synthetic oligonucleotide
  Sense strand starting at position 3088 of SEQ ID NO: 1244263
cguuauaucagagacuuga

SEQ ID NO: 1477037 - RNA, 19 nt, Artificial Sequence
  Description of Artificial Sequence: Synthetic oligonucleotide
  Antisense strand to SEQ ID NO: 1477036
ucaagucucugauauaacg

SEQ ID NO: 1477038 - RNA, 19 nt, Artificial Sequence
  Description of Artificial Sequence: Synthetic oligonucleotide
  Sense strand starting at position 321 of SEQ ID NO: 1244265
uggcuucuacuccagggaa

SEQ ID NO: 1477039 - RNA, 19 nt, Artificial Sequence
  Description of Artificial Sequence: Synthetic oligonucleotide
  Antisense strand to SEQ ID NO: 1477038
uucccuggaguagaagcca

SEQ ID NO: 1477040 - RNA, 19 nt, Artificial Sequence
  Description of Artificial Sequence: Synthetic oligonucleotide
  Sense strand starting at position 464 of SEQ ID NO: 1244265
ugugguggauguguucaga

SEQ ID NO: 1477041 - RNA, 19 nt, Artificial Sequence
  Description of Artificial Sequence: Synthetic oligonucleotide
  Antisense strand to SEQ ID NO: 1477040
ucugaacacauccaccaca

SEQ ID NO: 1477042 - RNA, 19 nt, Artificial Sequence
  Description of Artificial Sequence: Synthetic oligonucleotide
  Sense strand starting at position 467 of SEQ ID NO: 1244265
gguggauguguucagauga

SEQ ID NO: 1477043 - RNA, 19 nt, Artificial Sequence
  Description of Artificial Sequence: Synthetic oligonucleotide
  Antisense strand to SEQ ID NO: 1477042
ucaucugaacacauccacc

SEQ ID NO: 1477044 - RNA, 19 nt, Artificial Sequence
  Description of Artificial Sequence: Synthetic oligonucleotide
  Sense strand starting at position 618 of SEQ ID NO: 1244265
gaagguuucuuugugcaga

SEQ ID NO: 1477045 - RNA, 19 nt, Artificial Sequence
  Description of Artificial Sequence: Synthetic oligonucleotide
  Antisense strand to SEQ ID NO: 1477044
ucugcacaaagaaaccuuc

SEQ ID NO: 1477046 - RNA, 19 nt, Artificial Sequence
  Description of Artificial Sequence: Synthetic oligonucleotide
  Sense strand starting at position 620 of SEQ ID NO: 1244265
agguuucuuugugcagaaa

SEQ ID NO: 1477047 - RNA, 19 nt, Artificial Sequence
  Description of Artificial Sequence: Synthetic oligonucleotide
  Antisense strand to SEQ ID NO: 1477046
uuucugcacaaagaaaccu

SEQ ID NO: 1477048 - RNA, 19 nt, Artificial Sequence
  Description of Artificial Sequence: Synthetic oligonucleotide
  Sense strand starting at position 621 of SEQ ID NO: 1244265
gguuucuuugugcagaaag

SEQ ID NO: 1477049 - RNA, 19 nt, Artificial Sequence
  Description of Artificial Sequence: Synthetic oligonucleotide
  Antisense strand to SEQ ID NO: 1477048
cuuucugcacaaagaaacc

SEQ ID NO: 1477050 - RNA, 19 nt, Artificial Sequence
  Description of Artificial Sequence: Synthetic oligonucleotide
  Sense strand starting at position 623 of SEQ ID NO: 1244265
uuucuuugugcagaaagcu

SEQ ID NO: 1477051 - RNA, 19 nt, Artificial Sequence
  Description of Artificial Sequence: Synthetic oligonucleotide
  Antisense strand to SEQ ID NO: 1477050
agcuuucugcacaaagaaa

SEQ ID NO: 1477052 - RNA, 19 nt, Artificial Sequence
  Description of Artificial Sequence: Synthetic oligonucleotide
  Sense strand starting at position 683 of SEQ ID NO: 1244265
cccaguuugucugugguga

SEQ ID NO: 1477053 - RNA, 19 nt, Artificial Sequence
  Description of Artificial Sequence: Synthetic oligonucleotide
  Antisense strand to SEQ ID NO: 1477052
ucaccacagacaaacuggg

SEQ ID NO: 1477054 - RNA, 19 nt, Artificial Sequence
  Description of Artificial Sequence: Synthetic oligonucleotide
  Sense strand starting at position 804 of SEQ ID NO: 1244265
cggccuguccuguuuguua

SEQ ID NO: 1477055 - RNA, 19 nt, Artificial Sequence
  Description of Artificial Sequence: Synthetic oligonucleotide
  Antisense strand to SEQ ID NO: 1477054
uaacaaacaggacaggccg

SEQ ID NO: 1477056 - RNA, 19 nt, Artificial Sequence
  Description of Artificial Sequence: Synthetic oligonucleotide
  Sense strand starting at position 831 of SEQ ID NO: 1244265
cugagcguaccuuguauuu

SEQ ID NO: 1477057 - RNA, 19 nt, Artificial Sequence
  Description of Artificial Sequence: Synthetic oligonucleotide
  Antisense strand to SEQ ID NO: 1477056
aaauacaagguacgcucag

SEQ ID NO: 1477058 - RNA, 19 nt, Artificial Sequence
  Description of Artificial Sequence: Synthetic oligonucleotide
  Sense strand starting at position 918 of SEQ ID NO: 1244265
ugggaaugcccuuguacac

SEQ ID NO: 1477059 - RNA, 19 nt, Artificial Sequence
  Description of Artificial Sequence: Synthetic oligonucleotide
  Antisense strand to SEQ ID NO: 1477058
guguacaagggcauuccca

SEQ ID NO: 1477060 - RNA, 19 nt, Artificial Sequence
  Description of Artificial Sequence: Synthetic oligonucleotide
  Sense strand starting at position 927 of SEQ ID NO: 1244265
ccuuguacacuagaucuau

SEQ ID NO: 1477061 - RNA, 19 nt, Artificial Sequence
  Description of Artificial Sequence: Synthetic oligonucleotide
  Antisense strand to SEQ ID NO: 1477060
auagaucuaguguacaagg

SEQ ID NO: 1477062 - RNA, 19 nt, Artificial Sequence
  Description of Artificial Sequence: Synthetic oligonucleotide
  Sense strand starting at position 941 of SEQ ID NO: 1244265
ucuaucagcugugugcaaa

SEQ ID NO: 1477063 - RNA, 19 nt, Artificial Sequence
  Description of Artificial Sequence: Synthetic oligonucleotide
  Antisense strand to SEQ ID NO: 1477062
uuugcacacagcugauaga

SEQ ID NO: 1477064 - RNA, 19 nt, Artificial Sequence
  Description of Artificial Sequence: Synthetic oligonucleotide
  Sense strand starting at position 1041 of SEQ ID NO: 1244265
ccaugauuccucgguagag

SEQ ID NO: 1477065 - RNA, 19 nt, Artificial Sequence
  Description of Artificial Sequence: Synthetic oligonucleotide
  Antisense strand to SEQ ID NO: 1477064
cucuaccgaggaaucaugg

SEQ ID NO: 1477066 - RNA, 19 nt, Artificial Sequence
  Description of Artificial Sequence: Synthetic oligonucleotide
  Sense strand starting at position 1042 of SEQ ID NO: 1244265
caugauuccucgguagagg

SEQ ID NO: 1477067 - RNA, 19 nt, Artificial Sequence
  Description of Artificial Sequence: Synthetic oligonucleotide
  Antisense strand to SEQ ID NO: 1477066
ccucuaccgaggaaucaug

SEQ ID NO: 1477068 - RNA, 19 nt, Artificial Sequence
  Description of Artificial Sequence: Synthetic oligonucleotide
  Sense strand starting at position 1043 of SEQ ID NO: 1244265
augauuccucgguagaggu

SEQ ID NO: 1477069 - RNA, 19 nt, Artificial Sequence
  Description of Artificial Sequence: Synthetic oligonucleotide
  Antisense strand to SEQ ID NO: 1477068
accucuaccgaggaaucau

SEQ ID NO: 1477070 - RNA, 19 nt, Artificial Sequence
  Description of Artificial Sequence: Synthetic oligonucleotide
  Sense strand starting at position 1106 of SEQ ID NO: 1244265
gauggacacucagagucaa

SEQ ID NO: 1477071 - RNA, 19 nt, Artificial Sequence
  Description of Artificial Sequence: Synthetic oligonucleotide
  Antisense strand to SEQ ID NO: 1477070
uugacucugaguguccauc

SEQ ID NO: 1477072 - RNA, 19 nt, Artificial Sequence
  Description of Artificial Sequence: Synthetic oligonucleotide
  Sense strand starting at position 1400 of SEQ ID NO: 1244265
uugguacuguucuuauaug

SEQ ID NO: 1477073 - RNA, 19 nt, Artificial Sequence
  Description of Artificial Sequence: Synthetic oligonucleotide
  Antisense strand to SEQ ID NO: 1477072
cauauaagaacaguaccaa

SEQ ID NO: 1477074 - RNA, 19 nt, Artificial Sequence
  Description of Artificial Sequence: Synthetic oligonucleotide
  Sense strand starting at position 1408 of SEQ ID NO: 1244265
guucuuauaugucucccau

SEQ ID NO: 1477075 - RNA, 19 nt, Artificial Sequence
  Description of Artificial Sequence: Synthetic oligonucleotide
  Antisense strand to SEQ ID NO: 1477074
augggagacauauaagaac

SEQ ID NO: 1477076 - RNA, 19 nt, Artificial Sequence
  Description of Artificial Sequence: Synthetic oligonucleotide
  Sense strand starting at position 1476 of SEQ ID NO: 1244265
uuugcugucaaaugaggua

SEQ ID NO: 1477077 - RNA, 19 nt, Artificial Sequence
  Description of Artificial Sequence: Synthetic oligonucleotide
  Antisense strand to SEQ ID NO: 1477076
uaccucauuugacagcaaa

SEQ ID NO: 1477078 - RNA, 19 nt, Artificial Sequence
  Description of Artificial Sequence: Synthetic oligonucleotide
  Sense strand starting at position 1481 of SEQ ID NO: 1244265
ugucaaaugagguauguug

SEQ ID NO: 1477079 - RNA, 19 nt, Artificial Sequence
  Description of Artificial Sequence: Synthetic oligonucleotide
  Antisense strand to SEQ ID NO: 1477078
caacauaccucauuugaca

SEQ ID NO: 1477080 - RNA, 19 nt, Artificial Sequence
  Description of Artificial Sequence: Synthetic oligonucleotide
  Sense strand starting at position 1483 of SEQ ID NO: 1244265
ucaaaugagguauguugga

SEQ ID NO: 1477081 - RNA, 19 nt, Artificial Sequence
  Description of Artificial Sequence: Synthetic oligonucleotide
  Antisense strand to SEQ ID NO: 1477080
uccaacauaccucauuuga

SEQ ID NO: 1477082 - RNA, 19 nt, Artificial Sequence
  Description of Artificial Sequence: Synthetic oligonucleotide
  Sense strand starting at position 1492 of SEQ ID NO: 1244265
guauguuggaguuagugga

SEQ ID NO: 1477083 - RNA, 19 nt, Artificial Sequence
  Description of Artificial Sequence: Synthetic oligonucleotide
  Antisense strand to SEQ ID NO: 1477082
uccacuaacuccaacauac

SEQ ID NO: 1477084 - RNA, 19 nt, Artificial Sequence
  Description of Artificial Sequence: Synthetic oligonucleotide
  Sense strand starting at position 1992 of SEQ ID NO: 1244265
uccgucucacuguaagaca

SEQ ID NO: 1477085 - RNA, 19 nt, Artificial Sequence
  Description of Artificial Sequence: Synthetic oligonucleotide
  Antisense strand to SEQ ID NO: 1477084
ugucuuacagugagacgga

SEQ ID NO: 1477086 - RNA, 19 nt, Artificial Sequence
  Description of Artificial Sequence: Synthetic oligonucleotide
  Sense strand starting at position 2641 of SEQ ID NO: 1244265
cgauccggucucuacuaaa

SEQ ID NO: 1477087 - RNA, 19 nt, Artificial Sequence
  Description of Artificial Sequence: Synthetic oligonucleotide
  Antisense strand to SEQ ID NO: 1477086
uuuaguagagaccggaucg

SEQ ID NO: 1477088 - RNA, 19 nt, Artificial Sequence
  Description of Artificial Sequence: Synthetic oligonucleotide
  Sense strand starting at position 3326 of SEQ ID NO: 1244265
ugguguguggucucugcua

SEQ ID NO: 1477089 - RNA, 19 nt, Artificial Sequence
  Description of Artificial Sequence: Synthetic oligonucleotide
  Antisense strand to SEQ ID NO: 1477088
uagcagagaccacacacca

SEQ ID NO: 1477090 - RNA, 19 nt, Artificial Sequence
  Description of Artificial Sequence: Synthetic oligonucleotide
  Sense strand starting at position 3363 of SEQ ID NO: 1244265
aucuuuacuuaguugaagu

SEQ ID NO: 1477091 - RNA, 19 nt, Artificial Sequence
  Description of Artificial Sequence: Synthetic oligonucleotide
  Antisense strand to SEQ ID NO: 1477090
acuucaacuaaguaaagau

SEQ ID NO: 1477092 - RNA, 19 nt, Artificial Sequence
  Description of Artificial Sequence: Synthetic oligonucleotide
  Sense strand starting at position 3503 of SEQ ID NO: 1244265
agggauucguuccuguguu

SEQ ID NO: 1477093 - RNA, 19 nt, Artificial Sequence
  Description of Artificial Sequence: Synthetic oligonucleotide
  Antisense strand to SEQ ID NO: 1477092
aacacaggaacgaaucccu

SEQ ID NO: 1477094 - RNA, 19 nt, Artificial Sequence
  Description of Artificial Sequence: Synthetic oligonucleotide
  Sense strand starting at position 3505 of SEQ ID NO: 1244265
ggauucguuccuguguugu

SEQ ID NO: 1477095 - RNA, 19 nt, Artificial Sequence
  Description of Artificial Sequence: Synthetic oligonucleotide
  Antisense strand to SEQ ID NO: 1477094
acaacacaggaacgaaucc

SEQ ID NO: 1477096 - RNA, 19 nt, Artificial Sequence
  Description of Artificial Sequence: Synthetic oligonucleotide
  Sense strand starting at position 3515 of SEQ ID NO: 1244265
cuguguuguacuugacaug

SEQ ID NO: 1477097 - RNA, 19 nt, Artificial Sequence
  Description of Artificial Sequence: Synthetic oligonucleotide
  Antisense strand to SEQ ID NO: 1477096
caugucaaguacaacacag

SEQ ID NO: 1477098 - RNA, 19 nt, Artificial Sequence
  Description of Artificial Sequence: Synthetic oligonucleotide
  Sense strand starting at position 3516 of SEQ ID NO: 1244265
uguguuguacuugacaugu

SEQ ID NO: 1477099 - RNA, 19 nt, Artificial Sequence
  Description of Artificial Sequence: Synthetic oligonucleotide
  Antisense strand to SEQ ID NO: 1477098
acaugucaaguacaacaca

SEQ ID NO: 1477100 - RNA, 19 nt, Artificial Sequence
  Description of Artificial Sequence: Synthetic oligonucleotide
  Sense strand starting at position 3545 of SEQ ID NO: 1244265
caguguugguuucuccaaa

SEQ ID NO: 1477101 - RNA, 19 nt, Artificial Sequence
  Description of Artificial Sequence: Synthetic oligonucleotide
  Antisense strand to SEQ ID NO: 1477100
uuuggagaaaccaacacug

SEQ ID NO: 1477102 - RNA, 19 nt, Artificial Sequence
  Description of Artificial Sequence: Synthetic oligonucleotide
  Sense strand starting at position 3546 of SEQ ID NO: 1244265
aguguugguuucuccaaag

SEQ ID NO: 1477103 - RNA, 19 nt, Artificial Sequence
  Description of Artificial Sequence: Synthetic oligonucleotide
  Antisense strand to SEQ ID NO: 1477102
cuuuggagaaaccaacacu

SEQ ID NO: 1477104 - RNA, 19 nt, Artificial Sequence
  Description of Artificial Sequence: Synthetic oligonucleotide
  Sense strand starting at position 3609 of SEQ ID NO: 1244265
ggccuuaagccauggugga

SEQ ID NO: 1477105 - RNA, 19 nt, Artificial Sequence
  Description of Artificial Sequence: Synthetic oligonucleotide
  Antisense strand to SEQ ID NO: 1477104
uccaccauggcuuaaggcc

SEQ ID NO: 1477106 - RNA, 19 nt, Artificial Sequence
  Description of Artificial Sequence: Synthetic oligonucleotide
  Sense strand starting at position 3610 of SEQ ID NO: 1244265
gccuuaagccaugguggau

SEQ ID NO: 1477107 - RNA, 19 nt, Artificial Sequence
  Description of Artificial Sequence: Synthetic oligonucleotide
  Antisense strand to SEQ ID NO: 1477106
auccaccauggcuuaaggc

SEQ ID NO: 1477108 - RNA, 19 nt, Artificial Sequence
  Description of Artificial Sequence: Synthetic oligonucleotide
  Sense strand starting at position 3655 of SEQ ID NO: 1244265
uuccuugagcuacagacau

SEQ ID NO: 1477109 - RNA, 19 nt, Artificial Sequence
  Description of Artificial Sequence: Synthetic oligonucleotide
  Antisense strand to SEQ ID NO: 1477108
augucuguagcucaaggaa

SEQ ID NO: 1477110 - RNA, 19 nt, Artificial Sequence
  Description of Artificial Sequence: Synthetic oligonucleotide
  Sense strand starting at position 3695 of SEQ ID NO: 1244265
ccuuguuucugcuccacau

SEQ ID NO: 1477111 - RNA, 19 nt, Artificial Sequence
  Description of Artificial Sequence: Synthetic oligonucleotide
  Antisense strand to SEQ ID NO: 1477110
auguggagcagaaacaagg

SEQ ID NO: 1477112 - RNA, 19 nt, Artificial Sequence
  Description of Artificial Sequence: Synthetic oligonucleotide
  Sense strand starting at position 3748 of SEQ ID NO: 1244265
ggcauuaucuggucuacaa

SEQ ID NO: 1477113 - RNA, 19 nt, Artificial Sequence
  Description of Artificial Sequence: Synthetic oligonucleotide
  Antisense strand to SEQ ID NO: 1477112
uuguagaccagauaaugcc

SEQ ID NO: 1477114 - RNA, 19 nt, Artificial Sequence
  Description of Artificial Sequence: Synthetic oligonucleotide
  Sense strand starting at position 3831 of SEQ ID NO: 1244265
cugggaaucccaugugacu

SEQ ID NO: 1477115 - RNA, 19 nt, Artificial Sequence
  Description of Artificial Sequence: Synthetic oligonucleotide
  Antisense strand to SEQ ID NO: 1477114
agucacaugggauucccag

SEQ ID NO: 1477116 - RNA, 19 nt, Artificial Sequence
  Description of Artificial Sequence: Synthetic oligonucleotide
  Sense strand starting at position 3926 of SEQ ID NO: 1244265
agguuucugacuugagguu

SEQ ID NO: 1477117 - RNA, 19 nt, Artificial Sequence
  Description of Artificial Sequence: Synthetic oligonucleotide
  Antisense strand to SEQ ID NO: 1477116
aaccucaagucagaaaccu

SEQ ID NO: 1477118 - RNA, 19 nt, Artificial Sequence
  Description of Artificial Sequence: Synthetic oligonucleotide
  Sense strand starting at position 1630 of SEQ ID NO: 1244266
ucaggaucauguccggauu

SEQ ID NO: 1477119 - RNA, 19 nt, Artificial Sequence
  Description of Artificial Sequence: Synthetic oligonucleotide
  Antisense strand to SEQ ID NO: 1477118
aauccggacaugauccuga

SEQ ID NO: 1477120 - RNA, 19 nt, Artificial Sequence
  Description of Artificial Sequence: Synthetic oligonucleotide
  Sense strand starting at position 2978 of SEQ ID NO: 1244266
guaucacgaucauuuaugu

SEQ ID NO: 1477121 - RNA, 19 nt, Artificial Sequence
  Description of Artificial Sequence: Synthetic oligonucleotide
  Antisense strand to SEQ ID NO: 1477120
acauaaaugaucgugauac

SEQ ID NO: 1477122 - RNA, 19 nt, Artificial Sequence
  Description of Artificial Sequence: Synthetic oligonucleotide
  Sense strand starting at position 2982 of SEQ ID NO: 1244266
cacgaucauuuauguagca

SEQ ID NO: 1477123 - RNA, 19 nt, Artificial Sequence
  Description of Artificial Sequence: Synthetic oligonucleotide
  Antisense strand to SEQ ID NO: 1477122
ugcuacauaaaugaucgug

SEQ ID NO: 1477124 - RNA, 19 nt, Artificial Sequence
  Description of Artificial Sequence: Synthetic oligonucleotide
  Sense strand starting at position 3905 of SEQ ID NO: 1244267
agguuccucccuugacaaa

SEQ ID NO: 1477125 - RNA, 19 nt, Artificial Sequence
  Description of Artificial Sequence: Synthetic oligonucleotide
  Antisense strand to SEQ ID NO: 1477124
uuugucaagggaggaaccu

SEQ ID NO: 1477126 - RNA, 19 nt, Artificial Sequence
  Description of Artificial Sequence: Synthetic oligonucleotide
  Sense strand starting at position 3973 of SEQ ID NO: 1244267
cugugagggucucaaucua

SEQ ID NO: 1477127 - RNA, 19 nt, Artificial Sequence
  Description of Artificial Sequence: Synthetic oligonucleotide
  Antisense strand to SEQ ID NO: 1477126
uagauugagacccucacag

SEQ ID NO: 1477128 - RNA, 19 nt, Artificial Sequence
  Description of Artificial Sequence: Synthetic oligonucleotide
  Sense strand starting at position 1023 of SEQ ID NO: 1244269
ggguguuggguuuggagga

SEQ ID NO: 1477129 - RNA, 19 nt, Artificial Sequence
  Description of Artificial Sequence: Synthetic oligonucleotide
  Antisense strand to SEQ ID NO: 1477128
uccuccaaacccaacaccc

SEQ ID NO: 1477130 - RNA, 19 nt, Artificial Sequence
  Description of Artificial Sequence: Synthetic oligonucleotide
  Sense strand starting at position 2180 of SEQ ID NO: 1244269
auguguauguggguauaca

SEQ ID NO: 1477131 - RNA, 19 nt, Artificial Sequence
  Description of Artificial Sequence: Synthetic oligonucleotide
  Antisense strand to SEQ ID NO: 1477130
uguauacccacauacacau

SEQ ID NO: 1477132 - RNA, 19 nt, Artificial Sequence
  Description of Artificial Sequence: Synthetic oligonucleotide
  Sense strand starting at position 2595 of SEQ ID NO: 1244269
gcucaucuguccuuccaca

SEQ ID NO: 1477133 - RNA, 19 nt, Artificial Sequence
  Description of Artificial Sequence: Synthetic oligonucleotide
  Antisense strand to SEQ ID NO: 1477132
uguggaaggacagaugagc

SEQ ID NO: 1477134 - RNA, 19 nt, Artificial Sequence
  Description of Artificial Sequence: Synthetic oligonucleotide
  Sense strand starting at position 2391 of SEQ ID NO: 1244270
gcuauuggaucucagaaua

SEQ ID NO: 1477135 - RNA, 19 nt, Artificial Sequence
  Description of Artificial Sequence: Synthetic oligonucleotide
  Antisense strand to SEQ ID NO: 1477134
uauucugagauccaauagc

SEQ ID NO: 1477136 - RNA, 19 nt, Artificial Sequence
  Description of Artificial Sequence: Synthetic oligonucleotide
  Sense strand starting at position 3020 of SEQ ID NO: 1244270
uaaauaaucuaguaacggu

SEQ ID NO: 1477137 - RNA, 19 nt, Artificial Sequence
  Description of Artificial Sequence: Synthetic oligonucleotide
  Antisense strand to SEQ ID NO: 1477136
accguuacuagauuauuua

SEQ ID NO: 1477138 - RNA, 19 nt, Artificial Sequence
  Description of Artificial Sequence: Synthetic oligonucleotide
  Sense strand starting at position 3076 of SEQ ID NO: 1244270
aauacuaggccacguuaua

SEQ ID NO: 1477139 - RNA, 19 nt, Artificial Sequence
  Description of Artificial Sequence: Synthetic oligonucleotide
  Antisense strand to SEQ ID NO: 1477138
uauaacguggccuaguauu

SEQ ID NO: 1477140 - RNA, 19 nt, Artificial Sequence
  Description of Artificial Sequence: Synthetic oligonucleotide
  Sense strand starting at position 3086 of SEQ ID NO: 1244270
cacguuauaucagagacuu

SEQ ID NO: 1477141 - RNA, 19 nt, Artificial Sequence
  Description of Artificial Sequence: Synthetic oligonucleotide
  Antisense strand to SEQ ID NO: 1477140
aagucucugauauaacgug

SEQ ID NO: 1477142 - RNA, 19 nt, Artificial Sequence
  Description of Artificial Sequence: Synthetic oligonucleotide
  Sense strand starting at position 3088 of SEQ ID NO: 1244270
cguuauaucagagacuuga

SEQ ID NO: 1477143 - RNA, 19 nt, Artificial Sequence
  Description of Artificial Sequence: Synthetic oligonucleotide
  Antisense strand to SEQ ID NO: 1477142
ucaagucucugauauaacg

SEQ ID NO: 1477144 - RNA, 19 nt, Artificial Sequence
  Description of Artificial Sequence: Synthetic oligonucleotide
  Sense strand starting at position 321 of SEQ ID NO: 1244271
uggcuucuacuccagggaa

SEQ ID NO: 1477145 - RNA, 19 nt, Artificial Sequence
  Description of Artificial Sequence: Synthetic oligonucleotide
  Antisense strand to SEQ ID NO: 1477144
uucccuggaguagaagcca

SEQ ID NO: 1477146 - RNA, 19 nt, Artificial Sequence
  Description of Artificial Sequence: Synthetic oligonucleotide
  Sense strand starting at position 464 of SEQ ID NO: 1244271
ugugguggauguguucaga

SEQ ID NO: 1477147 - RNA, 19 nt, Artificial Sequence
  Description of Artificial Sequence: Synthetic oligonucleotide
  Antisense strand to SEQ ID NO: 1477146
ucugaacacauccaccaca

SEQ ID NO: 1477148 - RNA, 19 nt, Artificial Sequence
  Description of Artificial Sequence: Synthetic oligonucleotide
  Sense strand starting at position 467 of SEQ ID NO: 1244271
gguggauguguucagauga

SEQ ID NO: 1477149 - RNA, 19 nt, Artificial Sequence
  Description of Artificial Sequence: Synthetic oligonucleotide
  Antisense strand to SEQ ID NO: 1477148
ucaucugaacacauccacc

SEQ ID NO: 1477150 - RNA, 19 nt, Artificial Sequence
  Description of Artificial Sequence: Synthetic oligonucleotide
  Sense strand starting at position 618 of SEQ ID NO: 1244271
gaagguuucuuugugcaga

SEQ ID NO: 1477151 - RNA, 19 nt, Artificial Sequence
  Description of Artificial Sequence: Synthetic oligonucleotide
  Antisense strand to SEQ ID NO: 1477150
ucugcacaaagaaaccuuc

SEQ ID NO: 1477152 - RNA, 19 nt, Artificial Sequence
  Description of Artificial Sequence: Synthetic oligonucleotide
  Sense strand starting at position 620 of SEQ ID NO: 1244271
agguuucuuugugcagaaa

SEQ ID NO: 1477153 - RNA, 19 nt, Artificial Sequence
  Description of Artificial Sequence: Synthetic oligonucleotide
  Antisense strand to SEQ ID NO: 1477152
uuucugcacaaagaaaccu

SEQ ID NO: 1477154 - RNA, 19 nt, Artificial Sequence
  Description of Artificial Sequence: Synthetic oligonucleotide
  Sense strand starting at position 621 of SEQ ID NO: 1244271
gguuucuuugugcagaaag

SEQ ID NO: 1477155 - RNA, 19 nt, Artificial Sequence
  Description of Artificial Sequence: Synthetic oligonucleotide
  Antisense strand to SEQ ID NO: 1477154
cuuucugcacaaagaaacc

SEQ ID NO: 1477156 - RNA, 19 nt, Artificial Sequence
  Description of Artificial Sequence: Synthetic oligonucleotide
  Sense strand starting at position 623 of SEQ ID NO: 1244271
uuucuuugugcagaaagcu

SEQ ID NO: 1477157 - RNA, 19 nt, Artificial Sequence
  Description of Artificial Sequence: Synthetic oligonucleotide
  Antisense strand to SEQ ID NO: 1477156
agcuuucugcacaaagaaa

SEQ ID NO: 1477158 - RNA, 19 nt, Artificial Sequence
  Description of Artificial Sequence: Synthetic oligonucleotide
  Sense strand starting at position 683 of SEQ ID NO: 1244271
cccaguuugucugugguga

SEQ ID NO: 1477159 - RNA, 19 nt, Artificial Sequence
  Description of Artificial Sequence: Synthetic oligonucleotide
  Antisense strand to SEQ ID NO: 1477158
ucaccacagacaaacuggg

SEQ ID NO: 1477160 - RNA, 19 nt, Artificial Sequence
  Description of Artificial Sequence: Synthetic oligonucleotide
  Sense strand starting at position 804 of SEQ ID NO: 1244271
cggccuguccuguuuguua

SEQ ID NO: 1477161 - RNA, 19 nt, Artificial Sequence
  Description of Artificial Sequence: Synthetic oligonucleotide
  Antisense strand to SEQ ID NO: 1477160
uaacaaacaggacaggccg

SEQ ID NO: 1477162 - RNA, 19 nt, Artificial Sequence
  Description of Artificial Sequence: Synthetic oligonucleotide
  Sense strand starting at position 831 of SEQ ID NO: 1244271
cugagcguaccuuguauuu

SEQ ID NO: 1477163 - RNA, 19 nt, Artificial Sequence
  Description of Artificial Sequence: Synthetic oligonucleotide
  Antisense strand to SEQ ID NO: 1477162
aaauacaagguacgcucag

SEQ ID NO: 1477164 - RNA, 19 nt, Artificial Sequence
  Description of Artificial Sequence: Synthetic oligonucleotide
  Sense strand starting at position 918 of SEQ ID NO: 1244271
ugggaaugcccuuguacac

SEQ ID NO: 1477165 - RNA, 19 nt, Artificial Sequence
  Description of Artificial Sequence: Synthetic oligonucleotide
  Antisense strand to SEQ ID NO: 1477164
guguacaagggcauuccca

SEQ ID NO: 1477166 - RNA, 19 nt, Artificial Sequence
  Description of Artificial Sequence: Synthetic oligonucleotide
  Sense strand starting at position 927 of SEQ ID NO: 1244271
ccuuguacacuagaucuau

SEQ ID NO: 1477167 - RNA, 19 nt, Artificial Sequence
  Description of Artificial Sequence: Synthetic oligonucleotide
  Antisense strand to SEQ ID NO: 1477166
auagaucuaguguacaagg

SEQ ID NO: 1477168 - RNA, 19 nt, Artificial Sequence
  Description of Artificial Sequence: Synthetic oligonucleotide
  Sense strand starting at position 941 of SEQ ID NO: 1244271
ucuaucagcugugugcaaa

SEQ ID NO: 1477169 - RNA, 19 nt, Artificial Sequence
  Description of Artificial Sequence: Synthetic oligonucleotide
  Antisense strand to SEQ ID NO: 1477168
uuugcacacagcugauaga

SEQ ID NO: 1477170 - RNA, 19 nt, Artificial Sequence
  Description of Artificial Sequence: Synthetic oligonucleotide
  Sense strand starting at position 1041 of SEQ ID NO: 1244271
ccaugauuccucgguagag

SEQ ID NO: 1477171 - RNA, 19 nt, Artificial Sequence
  Description of Artificial Sequence: Synthetic oligonucleotide
  Antisense strand to SEQ ID NO: 1477170
cucuaccgaggaaucaugg

SEQ ID NO: 1477172 - RNA, 19 nt, Artificial Sequence
  Description of Artificial Sequence: Synthetic oligonucleotide
  Sense strand starting at position 1042 of SEQ ID NO: 1244271
caugauuccucgguagagg

SEQ ID NO: 1477173 - RNA, 19 nt, Artificial Sequence
  Description of Artificial Sequence: Synthetic oligonucleotide
  Antisense strand to SEQ ID NO: 1477172
ccucuaccgaggaaucaug

SEQ ID NO: 1477174 - RNA, 19 nt, Artificial Sequence
  Description of Artificial Sequence: Synthetic oligonucleotide
  Sense strand starting at position 1043 of SEQ ID NO: 1244271
augauuccucgguagaggu

SEQ ID NO: 1477175 - RNA, 19 nt, Artificial Sequence
  Description of Artificial Sequence: Synthetic oligonucleotide
  Antisense strand to SEQ ID NO: 1477174
accucuaccgaggaaucau

SEQ ID NO: 1477176 - RNA, 19 nt, Artificial Sequence
  Description of Artificial Sequence: Synthetic oligonucleotide
  Sense strand starting at position 1106 of SEQ ID NO: 1244271
gauggacacucagagucaa

SEQ ID NO: 1477177 - RNA, 19 nt, Artificial Sequence
  Description of Artificial Sequence: Synthetic oligonucleotide
  Antisense strand to SEQ ID NO: 1477176
uugacucugaguguccauc

SEQ ID NO: 1477178 - RNA, 19 nt, Artificial Sequence
  Description of Artificial Sequence: Synthetic oligonucleotide
  Sense strand starting at position 1400 of SEQ ID NO: 1244271
uugguacuguucuuauaug

SEQ ID NO: 1477179 - RNA, 19 nt, Artificial Sequence
  Description of Artificial Sequence: Synthetic oligonucleotide
  Antisense strand to SEQ ID NO: 1477178
cauauaagaacaguaccaa

SEQ ID NO: 1477180 - RNA, 19 nt, Artificial Sequence
  Description of Artificial Sequence: Synthetic oligonucleotide
  Sense strand starting at position 1408 of SEQ ID NO: 1244271
guucuuauaugucucccau

SEQ ID NO: 1477181 - RNA, 19 nt, Artificial Sequence
  Description of Artificial Sequence: Synthetic oligonucleotide
  Antisense strand to SEQ ID NO: 1477180
augggagacauauaagaac

SEQ ID NO: 1477182 - RNA, 19 nt, Artificial Sequence
  Description of Artificial Sequence: Synthetic oligonucleotide
  Sense strand starting at position 1476 of SEQ ID NO: 1244271
uuugcugucaaaugaggua

SEQ ID NO: 1477183 - RNA, 19 nt, Artificial Sequence
  Description of Artificial Sequence: Synthetic oligonucleotide
  Antisense strand to SEQ ID NO: 1477182
uaccucauuugacagcaaa

SEQ ID NO: 1477184 - RNA, 19 nt, Artificial Sequence
  Description of Artificial Sequence: Synthetic oligonucleotide
  Sense strand starting at position 1481 of SEQ ID NO: 1244271
ugucaaaugagguauguug

SEQ ID NO: 1477185 - RNA, 19 nt, Artificial Sequence
  Description of Artificial Sequence: Synthetic oligonucleotide
  Antisense strand to SEQ ID NO: 1477184
caacauaccucauuugaca

SEQ ID NO: 1477186 - RNA, 19 nt, Artificial Sequence
  Description of Artificial Sequence: Synthetic oligonucleotide
  Sense strand starting at position 1483 of SEQ ID NO: 1244271
ucaaaugagguauguugga

SEQ ID NO: 1477187 - RNA, 19 nt, Artificial Sequence
  Description of Artificial Sequence: Synthetic oligonucleotide
  Antisense strand to SEQ ID NO: 1477186
uccaacauaccucauuuga

SEQ ID NO: 1477188 - RNA, 19 nt, Artificial Sequence
  Description of Artificial Sequence: Synthetic oligonucleotide
  Sense strand starting at position 1492 of SEQ ID NO: 1244271
guauguuggaguuagugga

SEQ ID NO: 1477189 - RNA, 19 nt, Artificial Sequence
  Description of Artificial Sequence: Synthetic oligonucleotide
  Antisense strand to SEQ ID NO: 1477188
uccacuaacuccaacauac

SEQ ID NO: 1477190 - RNA, 19 nt, Artificial Sequence
  Description of Artificial Sequence: Synthetic oligonucleotide
  Sense strand starting at position 1992 of SEQ ID NO: 1244271
uccgucucacuguaagaca

SEQ ID NO: 1477191 - RNA, 19 nt, Artificial Sequence
  Description of Artificial Sequence: Synthetic oligonucleotide
  Antisense strand to SEQ ID NO: 1477190
ugucuuacagugagacgga

SEQ ID NO: 1477192 - RNA, 19 nt, Artificial Sequence
  Description of Artificial Sequence: Synthetic oligonucleotide
  Sense strand starting at position 2641 of SEQ ID NO: 1244271
cgauccggucucuacuaaa

SEQ ID NO: 1477193 - RNA, 19 nt, Artificial Sequence
  Description of Artificial Sequence: Synthetic oligonucleotide
  Antisense strand to SEQ ID NO: 1477192
uuuaguagagaccggaucg

SEQ ID NO: 1477194 - RNA, 19 nt, Artificial Sequence
  Description of Artificial Sequence: Synthetic oligonucleotide
  Sense strand starting at position 3326 of SEQ ID NO: 1244271
ugguguguggucucugcua

SEQ ID NO: 1477195 - RNA, 19 nt, Artificial Sequence
  Description of Artificial Sequence: Synthetic oligonucleotide
  Antisense strand to SEQ ID NO: 1477194
uagcagagaccacacacca

SEQ ID NO: 1477196 - RNA, 19 nt, Artificial Sequence
  Description of Artificial Sequence: Synthetic oligonucleotide
  Sense strand starting at position 3363 of SEQ ID NO: 1244271
aucuuuacuuaguugaagu

SEQ ID NO: 1477197 - RNA, 19 nt, Artificial Sequence
  Description of Artificial Sequence: Synthetic oligonucleotide
  Antisense strand to SEQ ID NO: 1477196
acuucaacuaaguaaagau

SEQ ID NO: 1477198 - RNA, 19 nt, Artificial Sequence
  Description of Artificial Sequence: Synthetic oligonucleotide
  Sense strand starting at position 3503 of SEQ ID NO: 1244271
agggauucguuccuguguu

SEQ ID NO: 1477199 - RNA, 19 nt, Artificial Sequence
  Description of Artificial Sequence: Synthetic oligonucleotide
  Antisense strand to SEQ ID NO: 1477198
aacacaggaacgaaucccu

SEQ ID NO: 1477200 - RNA, 19 nt, Artificial Sequence
  Description of Artificial Sequence: Synthetic oligonucleotide
  Sense strand starting at position 3505 of SEQ ID NO: 1244271
ggauucguuccuguguugu

SEQ ID NO: 1477201 - RNA, 19 nt, Artificial Sequence
  Description of Artificial Sequence: Synthetic oligonucleotide
  Antisense strand to SEQ ID NO: 1477200
acaacacaggaacgaaucc

SEQ ID NO: 1477202 - RNA, 19 nt, Artificial Sequence
  Description of Artificial Sequence: Synthetic oligonucleotide
  Sense strand starting at position 3515 of SEQ ID NO: 1244271
cuguguuguacuugacaug

SEQ ID NO: 1477203 - RNA, 19 nt, Artificial Sequence
  Description of Artificial Sequence: Synthetic oligonucleotide
  Antisense strand to SEQ ID NO: 1477202
caugucaaguacaacacag

SEQ ID NO: 1477204 - RNA, 19 nt, Artificial Sequence
  Description of Artificial Sequence: Synthetic oligonucleotide
  Sense strand starting at position 3516 of SEQ ID NO: 1244271
uguguuguacuugacaugu

SEQ ID NO: 1477205 - RNA, 19 nt, Artificial Sequence
  Description of Artificial Sequence: Synthetic oligonucleotide
  Antisense strand to SEQ ID NO: 1477204
acaugucaaguacaacaca

SEQ ID NO: 1477206 - RNA, 19 nt, Artificial Sequence
  Description of Artificial Sequence: Synthetic oligonucleotide
  Sense strand starting at position 3545 of SEQ ID NO: 1244271
caguguugguuucuccaaa

SEQ ID NO: 1477207 - RNA, 19 nt, Artificial Sequence
  Description of Artificial Sequence: Synthetic oligonucleotide
  Antisense strand to SEQ ID NO: 1477206
uuuggagaaaccaacacug

SEQ ID NO: 1477208 - RNA, 19 nt, Artificial Sequence
  Description of Artificial Sequence: Synthetic oligonucleotide
  Sense strand starting at position 3546 of SEQ ID NO: 1244271
aguguugguuucuccaaag

SEQ ID NO: 1477209 - RNA, 19 nt, Artificial Sequence
  Description of Artificial Sequence: Synthetic oligonucleotide
  Antisense strand to SEQ ID NO: 1477208
cuuuggagaaaccaacacu

SEQ ID NO: 1477210 - RNA, 19 nt, Artificial Sequence
  Description of Artificial Sequence: Synthetic oligonucleotide
  Sense strand starting at position 3609 of SEQ ID NO: 1244271
ggccuuaagccauggugga

SEQ ID NO: 1477211 - RNA, 19 nt, Artificial Sequence
  Description of Artificial Sequence: Synthetic oligonucleotide
  Antisense strand to SEQ ID NO: 1477210
uccaccauggcuuaaggcc

SEQ ID NO: 1477212 - RNA, 19 nt, Artificial Sequence
  Description of Artificial Sequence: Synthetic oligonucleotide
  Sense strand starting at position 3610 of SEQ ID NO: 1244271
gccuuaagccaugguggau

SEQ ID NO: 1477213 - RNA, 19 nt, Artificial Sequence
  Description of Artificial Sequence: Synthetic oligonucleotide
  Antisense strand to SEQ ID NO: 1477212
auccaccauggcuuaaggc

SEQ ID NO: 1477214 - RNA, 19 nt, Artificial Sequence
  Description of Artificial Sequence: Synthetic oligonucleotide
  Sense strand starting at position 3655 of SEQ ID NO: 1244271
uuccuugagcuacagacau

SEQ ID NO: 1477215 - RNA, 19 nt, Artificial Sequence
  Description of Artificial Sequence: Synthetic oligonucleotide
  Antisense strand to SEQ ID NO: 1477214
augucuguagcucaaggaa

SEQ ID NO: 1477216 - RNA, 19 nt, Artificial Sequence
  Description of Artificial Sequence: Synthetic oligonucleotide
  Sense strand starting at position 3695 of SEQ ID NO: 1244271
ccuuguuucugcuccacau

SEQ ID NO: 1477217 - RNA, 19 nt, Artificial Sequence
  Description of Artificial Sequence: Synthetic oligonucleotide
  Antisense strand to SEQ ID NO: 1477216
auguggagcagaaacaagg

SEQ ID NO: 1477218 - RNA, 19 nt, Artificial Sequence
  Description of Artificial Sequence: Synthetic oligonucleotide
  Sense strand starting at position 3748 of SEQ ID NO: 1244271
ggcauuaucuggucuacaa

SEQ ID NO: 1477219 - RNA, 19 nt, Artificial Sequence
  Description of Artificial Sequence: Synthetic oligonucleotide
  Antisense strand to SEQ ID NO: 1477218
uuguagaccagauaaugcc

SEQ ID NO: 1477220 - RNA, 19 nt, Artificial Sequence
  Description of Artificial Sequence: Synthetic oligonucleotide
  Sense strand starting at position 3831 of SEQ ID NO: 1244271
cugggaaucccaugugacu

SEQ ID NO: 1477221 - RNA, 19 nt, Artificial Sequence
  Description of Artificial Sequence: Synthetic oligonucleotide
  Antisense strand to SEQ ID NO: 1477220
agucacaugggauucccag

SEQ ID NO: 1477222 - RNA, 19 nt, Artificial Sequence
  Description of Artificial Sequence: Synthetic oligonucleotide
  Sense strand starting at position 3926 of SEQ ID NO: 1244271
agguuucugacuugagguu

SEQ ID NO: 1477223 - RNA, 19 nt, Artificial Sequence
  Description of Artificial Sequence: Synthetic oligonucleotide
  Antisense strand to SEQ ID NO: 1477222
aaccucaagucagaaaccu

SEQ ID NO: 1477224 - RNA, 19 nt, Artificial Sequence
  Description of Artificial Sequence: Synthetic oligonucleotide
  Sense strand starting at position 3776 of SEQ ID NO: 1244268
gggagauugugcaguggca

SEQ ID NO: 1477225 - RNA, 19 nt, Artificial Sequence
  Description of Artificial Sequence: Synthetic oligonucleotide
  Antisense strand to SEQ ID NO: 1477224
ugccacugcacaaucuccc

SEQ ID NO: 1477226 - RNA, 19 nt, Artificial Sequence
  Description of Artificial Sequence: Synthetic oligonucleotide
  Sense strand starting at position 1630 of SEQ ID NO: 1244274
ucaggaucauguccggauu

SEQ ID NO: 1477227 - RNA, 19 nt, Artificial Sequence
  Description of Artificial Sequence: Synthetic oligonucleotide
  Antisense strand to SEQ ID NO: 1477226
aauccggacaugauccuga

SEQ ID NO: 1477228 - RNA, 19 nt, Artificial Sequence
  Description of Artificial Sequence: Synthetic oligonucleotide
  Sense strand starting at position 2978 of SEQ ID NO: 1244274
guaucacgaucauuuaugu

SEQ ID NO: 1477229 - RNA, 19 nt, Artificial Sequence
  Description of Artificial Sequence: Synthetic oligonucleotide
  Antisense strand to SEQ ID NO: 1477228
acauaaaugaucgugauac

SEQ ID NO: 1477230 - RNA, 19 nt, Artificial Sequence
  Description of Artificial Sequence: Synthetic oligonucleotide
  Sense strand starting at position 2982 of SEQ ID NO: 1244274
cacgaucauuuauguagca

SEQ ID NO: 1477231 - RNA, 19 nt, Artificial Sequence
  Description of Artificial Sequence: Synthetic oligonucleotide
  Antisense strand to SEQ ID NO: 1477230
ugcuacauaaaugaucgug

SEQ ID NO: 1477232 - RNA, 19 nt, Artificial Sequence
  Description of Artificial Sequence: Synthetic oligonucleotide
  Sense strand starting at position 1632 of SEQ ID NO: 1244275
ucaggaucauguccggauu

SEQ ID NO: 1477233 - RNA, 19 nt, Artificial Sequence
  Description of Artificial Sequence: Synthetic oligonucleotide
  Antisense strand to SEQ ID NO: 1477232
aauccggacaugauccuga

SEQ ID NO: 1477234 - RNA, 19 nt, Artificial Sequence
  Description of Artificial Sequence: Synthetic oligonucleotide
  Sense strand starting at position 2980 of SEQ ID NO: 1244275
guaucacgaucauuuaugu

SEQ ID NO: 1477235 - RNA, 19 nt, Artificial Sequence
  Description of Artificial Sequence: Synthetic oligonucleotide
  Antisense strand to SEQ ID NO: 1477234
acauaaaugaucgugauac

SEQ ID NO: 1477236 - RNA, 19 nt, Artificial Sequence
  Description of Artificial Sequence: Synthetic oligonucleotide
  Sense strand starting at position 2984 of SEQ ID NO: 1244275
cacgaucauuuauguagca

SEQ ID NO: 1477237 - RNA, 19 nt, Artificial Sequence
  Description of Artificial Sequence: Synthetic oligonucleotide
  Antisense strand to SEQ ID NO: 1477236
ugcuacauaaaugaucgug

SEQ ID NO: 1477238 - RNA, 19 nt, Artificial Sequence
  Description of Artificial Sequence: Synthetic oligonucleotide
  Sense strand starting at position 3983 of SEQ ID NO: 1244276
ucggauuauaggcauauca

SEQ ID NO: 1477239 - RNA, 19 nt, Artificial Sequence
  Description of Artificial Sequence: Synthetic oligonucleotide
  Antisense strand to SEQ ID NO: 1477238
ugauaugccuauaauccga

SEQ ID NO: 1477240 - RNA, 19 nt, Artificial Sequence
  Description of Artificial Sequence: Synthetic oligonucleotide
  Sense strand starting at position 3905 of SEQ ID NO: 1244277
agguuccucccuugacaaa

SEQ ID NO: 1477241 - RNA, 19 nt, Artificial Sequence
  Description of Artificial Sequence: Synthetic oligonucleotide
  Antisense strand to SEQ ID NO: 1477240
uuugucaagggaggaaccu

SEQ ID NO: 1477242 - RNA, 19 nt, Artificial Sequence
  Description of Artificial Sequence: Synthetic oligonucleotide
  Sense strand starting at position 3973 of SEQ ID NO: 1244277
cugugagggucucaaucua

SEQ ID NO: 1477243 - RNA, 19 nt, Artificial Sequence
  Description of Artificial Sequence: Synthetic oligonucleotide
  Antisense strand to SEQ ID NO: 1477242
uagauugagacccucacag

SEQ ID NO: 1477244 - RNA, 19 nt, Artificial Sequence
  Description of Artificial Sequence: Synthetic oligonucleotide
  Sense strand starting at position 1023 of SEQ ID NO: 1244279
ggguguuggguuuggagga

SEQ ID NO: 1477245 - RNA, 19 nt, Artificial Sequence
  Description of Artificial Sequence: Synthetic oligonucleotide
  Antisense strand to SEQ ID NO: 1477244
uccuccaaacccaacaccc

SEQ ID NO: 1477246 - RNA, 19 nt, Artificial Sequence
  Description of Artificial Sequence: Synthetic oligonucleotide
  Sense strand starting at position 2180 of SEQ ID NO: 1244279
auguguauguggguauaca

SEQ ID NO: 1477247 - RNA, 19 nt, Artificial Sequence
  Description of Artificial Sequence: Synthetic oligonucleotide
  Antisense strand to SEQ ID NO: 1477246
uguauacccacauacacau

SEQ ID NO: 1477248 - RNA, 19 nt, Artificial Sequence
  Description of Artificial Sequence: Synthetic oligonucleotide
  Sense strand starting at position 2595 of SEQ ID NO: 1244279
gcucaucuguccuuccaca

SEQ ID NO: 1477249 - RNA, 19 nt, Artificial Sequence
  Description of Artificial Sequence: Synthetic oligonucleotide
  Antisense strand to SEQ ID NO: 1477248
uguggaaggacagaugagc

SEQ ID NO: 1477250 - RNA, 19 nt, Artificial Sequence
  Description of Artificial Sequence: Synthetic oligonucleotide
  Sense strand starting at position 2391 of SEQ ID NO: 1244280
gcuauuggaucucagaaua

SEQ ID NO: 1477251 - RNA, 19 nt, Artificial Sequence
  Description of Artificial Sequence: Synthetic oligonucleotide
  Antisense strand to SEQ ID NO: 1477250
uauucugagauccaauagc

SEQ ID NO: 1477252 - RNA, 19 nt, Artificial Sequence
  Description of Artificial Sequence: Synthetic oligonucleotide
  Sense strand starting at position 3020 of SEQ ID NO: 1244280
uaaauaaucuaguaacggu

SEQ ID NO: 1477253 - RNA, 19 nt, Artificial Sequence
  Description of Artificial Sequence: Synthetic oligonucleotide
  Antisense strand to SEQ ID NO: 1477252
accguuacuagauuauuua

SEQ ID NO: 1477254 - RNA, 19 nt, Artificial Sequence
  Description of Artificial Sequence: Synthetic oligonucleotide
  Sense strand starting at position 3076 of SEQ ID NO: 1244280
aauacuaggccacguuaua

SEQ ID NO: 1477255 - RNA, 19 nt, Artificial Sequence
  Description of Artificial Sequence: Synthetic oligonucleotide
  Antisense strand to SEQ ID NO: 1477254
uauaacguggccuaguauu

SEQ ID NO: 1477256 - RNA, 19 nt, Artificial Sequence
  Description of Artificial Sequence: Synthetic oligonucleotide
  Sense strand starting at position 3086 of SEQ ID NO: 1244280
cacguuauaucagagacuu

SEQ ID NO: 1477257 - RNA, 19 nt, Artificial Sequence
  Description of Artificial Sequence: Synthetic oligonucleotide
  Antisense strand to SEQ ID NO: 1477256
aagucucugauauaacgug

SEQ ID NO: 1477258 - RNA, 19 nt, Artificial Sequence
  Description of Artificial Sequence: Synthetic oligonucleotide
  Sense strand starting at position 3088 of SEQ ID NO: 1244280
cguuauaucagagacuuga

SEQ ID NO: 1477259 - RNA, 19 nt, Artificial Sequence
  Description of Artificial Sequence: Synthetic oligonucleotide
  Antisense strand to SEQ ID NO: 1477258
ucaagucucugauauaacg

SEQ ID NO: 1477260 - RNA, 19 nt, Artificial Sequence
  Description of Artificial Sequence: Synthetic oligonucleotide
  Sense strand starting at position 321 of SEQ ID NO: 1244281
uggcuucuacuccagggaa

SEQ ID NO: 1477261 - RNA, 19 nt, Artificial Sequence
  Description of Artificial Sequence: Synthetic oligonucleotide
  Antisense strand to SEQ ID NO: 1477260
uucccuggaguagaagcca

SEQ ID NO: 1477262 - RNA, 19 nt, Artificial Sequence
  Description of Artificial Sequence: Synthetic oligonucleotide
  Sense strand starting at position 464 of SEQ ID NO: 1244281
ugugguggauguguucaga

SEQ ID NO: 1477263 - RNA, 19 nt, Artificial Sequence
  Description of Artificial Sequence: Synthetic oligonucleotide
  Antisense strand to SEQ ID NO: 1477262
ucugaacacauccaccaca

SEQ ID NO: 1477264 - RNA, 19 nt, Artificial Sequence
  Description of Artificial Sequence: Synthetic oligonucleotide
  Sense strand starting at position 467 of SEQ ID NO: 1244281
gguggauguguucagauga

SEQ ID NO: 1477265 - RNA, 19 nt, Artificial Sequence
  Description of Artificial Sequence: Synthetic oligonucleotide
  Antisense strand to SEQ ID NO: 1477264
ucaucugaacacauccacc

SEQ ID NO: 1477266 - RNA, 19 nt, Artificial Sequence
  Description of Artificial Sequence: Synthetic oligonucleotide
  Sense strand starting at position 618 of SEQ ID NO: 1244281
gaagguuucuuugugcaga

SEQ ID NO: 1477267 - RNA, 19 nt, Artificial Sequence
  Description of Artificial Sequence: Synthetic oligonucleotide
  Antisense strand to SEQ ID NO: 1477266
ucugcacaaagaaaccuuc

SEQ ID NO: 1477268 - RNA, 19 nt, Artificial Sequence
  Description of Artificial Sequence: Synthetic oligonucleotide
  Sense strand starting at position 620 of SEQ ID NO: 1244281
agguuucuuugugcagaaa

SEQ ID NO: 1477269 - RNA, 19 nt, Artificial Sequence
  Description of Artificial Sequence: Synthetic oligonucleotide
  Antisense strand to SEQ ID NO: 1477268
uuucugcacaaagaaaccu

SEQ ID NO: 1477270 - RNA, 19 nt, Artificial Sequence
  Description of Artificial Sequence: Synthetic oligonucleotide
  Sense strand starting at position 621 of SEQ ID NO: 1244281
gguuucuuugugcagaaag

SEQ ID NO: 1477271 - RNA, 19 nt, Artificial Sequence
  Description of Artificial Sequence: Synthetic oligonucleotide
  Antisense strand to SEQ ID NO: 1477270
cuuucugcacaaagaaacc

SEQ ID NO: 1477272 - RNA, 19 nt, Artificial Sequence
  Description of Artificial Sequence: Synthetic oligonucleotide
  Sense strand starting at position 623 of SEQ ID NO: 1244281
uuucuuugugcagaaagcu

SEQ ID NO: 1477273 - RNA, 19 nt, Artificial Sequence
  Description of Artificial Sequence: Synthetic oligonucleotide
  Antisense strand to SEQ ID NO: 1477272
agcuuucugcacaaagaaa

SEQ ID NO: 1477274 - RNA, 19 nt, Artificial Sequence
  Description of Artificial Sequence: Synthetic oligonucleotide
  Sense strand starting at position 683 of SEQ ID NO: 1244281
cccaguuugucugugguga

SEQ ID NO: 1477275 - RNA, 19 nt, Artificial Sequence
  Description of Artificial Sequence: Synthetic oligonucleotide
  Antisense strand to SEQ ID NO: 1477274
ucaccacagacaaacuggg

SEQ ID NO: 1477276 - RNA, 19 nt, Artificial Sequence
  Description of Artificial Sequence: Synthetic oligonucleotide
  Sense strand starting at position 804 of SEQ ID NO: 1244281
cggccuguccuguuuguua

SEQ ID NO: 1477277 - RNA, 19 nt, Artificial Sequence
  Description of Artificial Sequence: Synthetic oligonucleotide
  Antisense strand to SEQ ID NO: 1477276
uaacaaacaggacaggccg

SEQ ID NO: 1477278 - RNA, 19 nt, Artificial Sequence
  Description of Artificial Sequence: Synthetic oligonucleotide
  Sense strand starting at position 831 of SEQ ID NO: 1244281
cugagcguaccuuguauuu

SEQ ID NO: 1477279 - RNA, 19 nt, Artificial Sequence
  Description of Artificial Sequence: Synthetic oligonucleotide
  Antisense strand to SEQ ID NO: 1477278
aaauacaagguacgcucag

SEQ ID NO: 1477280 - RNA, 19 nt, Artificial Sequence
  Description of Artificial Sequence: Synthetic oligonucleotide
  Sense strand starting at position 918 of SEQ ID NO: 1244281
ugggaaugcccuuguacac

SEQ ID NO: 1477281 - RNA, 19 nt, Artificial Sequence
  Description of Artificial Sequence: Synthetic oligonucleotide
  Antisense strand to SEQ ID NO: 1477280
guguacaagggcauuccca

SEQ ID NO: 1477282 - RNA, 19 nt, Artificial Sequence
  Description of Artificial Sequence: Synthetic oligonucleotide
  Sense strand starting at position 927 of SEQ ID NO: 1244281
ccuuguacacuagaucuau

SEQ ID NO: 1477283 - RNA, 19 nt, Artificial Sequence
  Description of Artificial Sequence: Synthetic oligonucleotide
  Antisense strand to SEQ ID NO: 1477282
auagaucuaguguacaagg

SEQ ID NO: 1477284 - RNA, 19 nt, Artificial Sequence
  Description of Artificial Sequence: Synthetic oligonucleotide
  Sense strand starting at position 941 of SEQ ID NO: 1244281
ucuaucagcugugugcaaa

SEQ ID NO: 1477285 - RNA, 19 nt, Artificial Sequence
  Description of Artificial Sequence: Synthetic oligonucleotide
  Antisense strand to SEQ ID NO: 1477284
uuugcacacagcugauaga

SEQ ID NO: 1477286 - RNA, 19 nt, Artificial Sequence
  Description of Artificial Sequence: Synthetic oligonucleotide
  Sense strand starting at position 1041 of SEQ ID NO: 1244281
ccaugauuccucgguagag

SEQ ID NO: 1477287 - RNA, 19 nt, Artificial Sequence
  Description of Artificial Sequence: Synthetic oligonucleotide
  Antisense strand to SEQ ID NO: 1477286
cucuaccgaggaaucaugg

SEQ ID NO: 1477288 - RNA, 19 nt, Artificial Sequence
  Description of Artificial Sequence: Synthetic oligonucleotide
  Sense strand starting at position 1042 of SEQ ID NO: 1244281
caugauuccucgguagagg

SEQ ID NO: 1477289 - RNA, 19 nt, Artificial Sequence
  Description of Artificial Sequence: Synthetic oligonucleotide
  Antisense strand to SEQ ID NO: 1477288
ccucuaccgaggaaucaug

SEQ ID NO: 1477290 - RNA, 19 nt, Artificial Sequence
  Description of Artificial Sequence: Synthetic oligonucleotide
  Sense strand starting at position 1043 of SEQ ID NO: 1244281
augauuccucgguagaggu

SEQ ID NO: 1477291 - RNA, 19 nt, Artificial Sequence
  Description of Artificial Sequence: Synthetic oligonucleotide
  Antisense strand to SEQ ID NO: 1477290
accucuaccgaggaaucau

SEQ ID NO: 1477292 - RNA, 19 nt, Artificial Sequence
  Description of Artificial Sequence: Synthetic oligonucleotide
  Sense strand starting at position 1106 of SEQ ID NO: 1244281
gauggacacucagagucaa

SEQ ID NO: 1477293 - RNA, 19 nt, Artificial Sequence
  Description of Artificial Sequence: Synthetic oligonucleotide
  Antisense strand to SEQ ID NO: 1477292
uugacucugaguguccauc

SEQ ID NO: 1477294 - RNA, 19 nt, Artificial Sequence
  Description of Artificial Sequence: Synthetic oligonucleotide
  Sense strand starting at position 1400 of SEQ ID NO: 1244281
uugguacuguucuuauaug

SEQ ID NO: 1477295 - RNA, 19 nt, Artificial Sequence
  Description of Artificial Sequence: Synthetic oligonucleotide
  Antisense strand to SEQ ID NO: 1477294
cauauaagaacaguaccaa

SEQ ID NO: 1477296 - RNA, 19 nt, Artificial Sequence
  Description of Artificial Sequence: Synthetic oligonucleotide
  Sense strand starting at position 1408 of SEQ ID NO: 1244281
guucuuauaugucucccau

SEQ ID NO: 1477297 - RNA, 19 nt, Artificial Sequence
  Description of Artificial Sequence: Synthetic oligonucleotide
  Antisense strand to SEQ ID NO: 1477296
augggagacauauaagaac

SEQ ID NO: 1477298 - RNA, 19 nt, Artificial Sequence
  Description of Artificial Sequence: Synthetic oligonucleotide
  Sense strand starting at position 1476 of SEQ ID NO: 1244281
uuugcugucaaaugaggua

SEQ ID NO: 1477299 - RNA, 19 nt, Artificial Sequence
  Description of Artificial Sequence: Synthetic oligonucleotide
  Antisense strand to SEQ ID NO: 1477298
uaccucauuugacagcaaa

SEQ ID NO: 1477300 - RNA, 19 nt, Artificial Sequence
  Description of Artificial Sequence: Synthetic oligonucleotide
  Sense strand starting at position 1481 of SEQ ID NO: 1244281
ugucaaaugagguauguug

SEQ ID NO: 1477301 - RNA, 19 nt, Artificial Sequence
  Description of Artificial Sequence: Synthetic oligonucleotide
  Antisense strand to SEQ ID NO: 1477300
caacauaccucauuugaca

SEQ ID NO: 1477302 - RNA, 19 nt, Artificial Sequence
  Description of Artificial Sequence: Synthetic oligonucleotide
  Sense strand starting at position 1483 of SEQ ID NO: 1244281
ucaaaugagguauguugga

SEQ ID NO: 1477303 - RNA, 19 nt, Artificial Sequence
  Description of Artificial Sequence: Synthetic oligonucleotide
  Antisense strand to SEQ ID NO: 1477302
uccaacauaccucauuuga

SEQ ID NO: 1477304 - RNA, 19 nt, Artificial Sequence
  Description of Artificial Sequence: Synthetic oligonucleotide
  Sense strand starting at position 1492 of SEQ ID NO: 1244281
guauguuggaguuagugga

SEQ ID NO: 1477305 - RNA, 19 nt, Artificial Sequence
  Description of Artificial Sequence: Synthetic oligonucleotide
  Antisense strand to SEQ ID NO: 1477304
uccacuaacuccaacauac

SEQ ID NO: 1477306 - RNA, 19 nt, Artificial Sequence
  Description of Artificial Sequence: Synthetic oligonucleotide
  Sense strand starting at position 1992 of SEQ ID NO: 1244281
uccgucucacuguaagaca

SEQ ID NO: 1477307 - RNA, 19 nt, Artificial Sequence
  Description of Artificial Sequence: Synthetic oligonucleotide
  Antisense strand to SEQ ID NO: 1477306
ugucuuacagugagacgga

SEQ ID NO: 1477308 - RNA, 19 nt, Artificial Sequence
  Description of Artificial Sequence: Synthetic oligonucleotide
  Sense strand starting at position 2641 of SEQ ID NO: 1244281
cgauccggucucuacuaaa

SEQ ID NO: 1477309 - RNA, 19 nt, Artificial Sequence
  Description of Artificial Sequence: Synthetic oligonucleotide
  Antisense strand to SEQ ID NO: 1477308
uuuaguagagaccggaucg

SEQ ID NO: 1477310 - RNA, 19 nt, Artificial Sequence
  Description of Artificial Sequence: Synthetic oligonucleotide
  Sense strand starting at position 3326 of SEQ ID NO: 1244281
ugguguguggucucugcua

SEQ ID NO: 1477311 - RNA, 19 nt, Artificial Sequence
  Description of Artificial Sequence: Synthetic oligonucleotide
  Antisense strand to SEQ ID NO: 1477310
uagcagagaccacacacca

SEQ ID NO: 1477312 - RNA, 19 nt, Artificial Sequence
  Description of Artificial Sequence: Synthetic oligonucleotide
  Sense strand starting at position 3363 of SEQ ID NO: 1244281
aucuuuacuuaguugaagu

SEQ ID NO: 1477313 - RNA, 19 nt, Artificial Sequence
  Description of Artificial Sequence: Synthetic oligonucleotide
  Antisense strand to SEQ ID NO: 1477312
acuucaacuaaguaaagau

SEQ ID NO: 1477314 - RNA, 19 nt, Artificial Sequence
  Description of Artificial Sequence: Synthetic oligonucleotide
  Sense strand starting at position 3503 of SEQ ID NO: 1244281
agggauucguuccuguguu

SEQ ID NO: 1477315 - RNA, 19 nt, Artificial Sequence
  Description of Artificial Sequence: Synthetic oligonucleotide
  Antisense strand to SEQ ID NO: 1477314
aacacaggaacgaaucccu

SEQ ID NO: 1477316 - RNA, 19 nt, Artificial Sequence
  Description of Artificial Sequence: Synthetic oligonucleotide
  Sense strand starting at position 3505 of SEQ ID NO: 1244281
ggauucguuccuguguugu

SEQ ID NO: 1477317 - RNA, 19 nt, Artificial Sequence
  Description of Artificial Sequence: Synthetic oligonucleotide
  Antisense strand to SEQ ID NO: 1477316
acaacacaggaacgaaucc

SEQ ID NO: 1477318 - RNA, 19 nt, Artificial Sequence
  Description of Artificial Sequence: Synthetic oligonucleotide
  Sense strand starting at position 3515 of SEQ ID NO: 1244281
cuguguuguacuugacaug

SEQ ID NO: 1477319 - RNA, 19 nt, Artificial Sequence
  Description of Artificial Sequence: Synthetic oligonucleotide
  Antisense strand to SEQ ID NO: 1477318
caugucaaguacaacacag

SEQ ID NO: 1477320 - RNA, 19 nt, Artificial Sequence
  Description of Artificial Sequence: Synthetic oligonucleotide
  Sense strand starting at position 3516 of SEQ ID NO: 1244281
uguguuguacuugacaugu

SEQ ID NO: 1477321 - RNA, 19 nt, Artificial Sequence
  Description of Artificial Sequence: Synthetic oligonucleotide
  Antisense strand to SEQ ID NO: 1477320
acaugucaaguacaacaca

SEQ ID NO: 1477322 - RNA, 19 nt, Artificial Sequence
  Description of Artificial Sequence: Synthetic oligonucleotide
  Sense strand starting at position 3545 of SEQ ID NO: 1244281
caguguugguuucuccaaa

SEQ ID NO: 1477323 - RNA, 19 nt, Artificial Sequence
  Description of Artificial Sequence: Synthetic oligonucleotide
  Antisense strand to SEQ ID NO: 1477322
uuuggagaaaccaacacug

SEQ ID NO: 1477324 - RNA, 19 nt, Artificial Sequence
  Description of Artificial Sequence: Synthetic oligonucleotide
  Sense strand starting at position 3546 of SEQ ID NO: 1244281
aguguugguuucuccaaag

SEQ ID NO: 1477325 - RNA, 19 nt, Artificial Sequence
  Description of Artificial Sequence: Synthetic oligonucleotide
  Antisense strand to SEQ ID NO: 1477324
cuuuggagaaaccaacacu

SEQ ID NO: 1477326 - RNA, 19 nt, Artificial Sequence
  Description of Artificial Sequence: Synthetic oligonucleotide
  Sense strand starting at position 3609 of SEQ ID NO: 1244281
ggccuuaagccauggugga

SEQ ID NO: 1477327 - RNA, 19 nt, Artificial Sequence
  Description of Artificial Sequence: Synthetic oligonucleotide
  Antisense strand to SEQ ID NO: 1477326
uccaccauggcuuaaggcc

SEQ ID NO: 1477328 - RNA, 19 nt, Artificial Sequence
  Description of Artificial Sequence: Synthetic oligonucleotide
  Sense strand starting at position 3610 of SEQ ID NO: 1244281
gccuuaagccaugguggau

SEQ ID NO: 1477329 - RNA, 19 nt, Artificial Sequence
  Description of Artificial Sequence: Synthetic oligonucleotide
  Antisense strand to SEQ ID NO: 1477328
auccaccauggcuuaaggc

SEQ ID NO: 1477330 - RNA, 19 nt, Artificial Sequence
  Description of Artificial Sequence: Synthetic oligonucleotide
  Sense strand starting at position 3655 of SEQ ID NO: 1244281
uuccuugagcuacagacau

SEQ ID NO: 1477331 - RNA, 19 nt, Artificial Sequence
  Description of Artificial Sequence: Synthetic oligonucleotide
  Antisense strand to SEQ ID NO: 1477330
augucuguagcucaaggaa

SEQ ID NO: 1477332 - RNA, 19 nt, Artificial Sequence
  Description of Artificial Sequence: Synthetic oligonucleotide
  Sense strand starting at position 3695 of SEQ ID NO: 1244281
ccuuguuucugcuccacau

SEQ ID NO: 1477333 - RNA, 19 nt, Artificial Sequence
  Description of Artificial Sequence: Synthetic oligonucleotide
  Antisense strand to SEQ ID NO: 1477332
auguggagcagaaacaagg

SEQ ID NO: 1477334 - RNA, 19 nt, Artificial Sequence
  Description of Artificial Sequence: Synthetic oligonucleotide
  Sense strand starting at position 3748 of SEQ ID NO: 1244281
ggcauuaucuggucuacaa

SEQ ID NO: 1477335 - RNA, 19 nt, Artificial Sequence
  Description of Artificial Sequence: Synthetic oligonucleotide
  Antisense strand to SEQ ID NO: 1477334
uuguagaccagauaaugcc

SEQ ID NO: 1477336 - RNA, 19 nt, Artificial Sequence
  Description of Artificial Sequence: Synthetic oligonucleotide
  Sense strand starting at position 3831 of SEQ ID NO: 1244281
cugggaaucccaugugacu

SEQ ID NO: 1477337 - RNA, 19 nt, Artificial Sequence
  Description of Artificial Sequence: Synthetic oligonucleotide
  Antisense strand to SEQ ID NO: 1477336
agucacaugggauucccag

SEQ ID NO: 1477338 - RNA, 19 nt, Artificial Sequence
  Description of Artificial Sequence: Synthetic oligonucleotide
  Sense strand starting at position 3926 of SEQ ID NO: 1244281
agguuucugacuugagguu

SEQ ID NO: 1477339 - RNA, 19 nt, Artificial Sequence
  Description of Artificial Sequence: Synthetic oligonucleotide
  Antisense strand to SEQ ID NO: 1477338
aaccucaagucagaaaccu

SEQ ID NO: 1477340 - RNA, 19 nt, Artificial Sequence
  Description of Artificial Sequence: Synthetic oligonucleotide
  Sense strand starting at position 3776 of SEQ ID NO: 1244278
gggagauugugcaguggca

SEQ ID NO: 1477341 - RNA, 19 nt, Artificial Sequence
  Description of Artificial Sequence: Synthetic oligonucleotide
  Antisense strand to SEQ ID NO: 1477340
ugccacugcacaaucuccc

SEQ ID NO: 1477342 - RNA, 19 nt, Artificial Sequence
  Description of Artificial Sequence: Synthetic oligonucleotide
  Sense strand starting at position 1630 of SEQ ID NO: 1244283
ucaggaucauguccggauu

SEQ ID NO: 1477343 - RNA, 19 nt, Artificial Sequence
  Description of Artificial Sequence: Synthetic oligonucleotide
  Antisense strand to SEQ ID NO: 1477342
aauccggacaugauccuga

SEQ ID NO: 1477344 - RNA, 19 nt, Artificial Sequence
  Description of Artificial Sequence: Synthetic oligonucleotide
  Sense strand starting at position 2978 of SEQ ID NO: 1244283
guaucacgaucauuuaugu

SEQ ID NO: 1477345 - RNA, 19 nt, Artificial Sequence
  Description of Artificial Sequence: Synthetic oligonucleotide
  Antisense strand to SEQ ID NO: 1477344
acauaaaugaucgugauac

SEQ ID NO: 1477346 - RNA, 19 nt, Artificial Sequence
  Description of Artificial Sequence: Synthetic oligonucleotide
  Sense strand starting at position 2982 of SEQ ID NO: 1244283
cacgaucauuuauguagca

SEQ ID NO: 1477347 - RNA, 19 nt, Artificial Sequence
  Description of Artificial Sequence: Synthetic oligonucleotide
  Antisense strand to SEQ ID NO: 1477346
ugcuacauaaaugaucgug

SEQ ID NO: 1477348 - RNA, 19 nt, Artificial Sequence
  Description of Artificial Sequence: Synthetic oligonucleotide
  Sense strand starting at position 194 of SEQ ID NO: 1244285
cuguuaagcccaggaaguu

SEQ ID NO: 1477349 - RNA, 19 nt, Artificial Sequence
  Description of Artificial Sequence: Synthetic oligonucleotide
  Antisense strand to SEQ ID NO: 1477348
aacuuccugggcuuaacag

SEQ ID NO: 1477350 - RNA, 19 nt, Artificial Sequence
  Description of Artificial Sequence: Synthetic oligonucleotide
  Sense strand starting at position 458 of SEQ ID NO: 1244285
cagcuccuccgaugaugau

SEQ ID NO: 1477351 - RNA, 19 nt, Artificial Sequence
  Description of Artificial Sequence: Synthetic oligonucleotide
  Antisense strand to SEQ ID NO: 1477350
aucaucaucggaggagcug

SEQ ID NO: 1477352 - RNA, 19 nt, Artificial Sequence
  Description of Artificial Sequence: Synthetic oligonucleotide
  Sense strand starting at position 459 of SEQ ID NO: 1244285
agcuccuccgaugaugaua

SEQ ID NO: 1477353 - RNA, 19 nt, Artificial Sequence
  Description of Artificial Sequence: Synthetic oligonucleotide
  Antisense strand to SEQ ID NO: 1477352
uaucaucaucggaggagcu

SEQ ID NO: 1477354 - RNA, 19 nt, Artificial Sequence
  Description of Artificial Sequence: Synthetic oligonucleotide
  Sense strand starting at position 497 of SEQ ID NO: 1244285
agggauguccucuaagccu

SEQ ID NO: 1477355 - RNA, 19 nt, Artificial Sequence
  Description of Artificial Sequence: Synthetic oligonucleotide
  Antisense strand to SEQ ID NO: 1477354
aggcuuagaggacaucccu

SEQ ID NO: 1477356 - RNA, 19 nt, Artificial Sequence
  Description of Artificial Sequence: Synthetic oligonucleotide
  Sense strand starting at position 547 of SEQ ID NO: 1244285
ucuuucuggcagggaguua

SEQ ID NO: 1477357 - RNA, 19 nt, Artificial Sequence
  Description of Artificial Sequence: Synthetic oligonucleotide
  Antisense strand to SEQ ID NO: 1477356
uaacucccugccagaaaga

SEQ ID NO: 1477358 - RNA, 19 nt, Artificial Sequence
  Description of Artificial Sequence: Synthetic oligonucleotide
  Sense strand starting at position 548 of SEQ ID NO: 1244285
cuuucuggcagggaguuau

SEQ ID NO: 1477359 - RNA, 19 nt, Artificial Sequence
  Description of Artificial Sequence: Synthetic oligonucleotide
  Antisense strand to SEQ ID NO: 1477358
auaacucccugccagaaag

SEQ ID NO: 1477360 - RNA, 19 nt, Artificial Sequence
  Description of Artificial Sequence: Synthetic oligonucleotide
  Sense strand starting at position 616 of SEQ ID NO: 1244285
uugcgucacaguuagaaug

SEQ ID NO: 1477361 - RNA, 19 nt, Artificial Sequence
  Description of Artificial Sequence: Synthetic oligonucleotide
  Antisense strand to SEQ ID NO: 1477360
cauucuaacugugacgcaa

SEQ ID NO: 1477362 - RNA, 19 nt, Artificial Sequence
  Description of Artificial Sequence: Synthetic oligonucleotide
  Sense strand starting at position 760 of SEQ ID NO: 1244285
uggcccuucccucagacau

SEQ ID NO: 1477363 - RNA, 19 nt, Artificial Sequence
  Description of Artificial Sequence: Synthetic oligonucleotide
  Antisense strand to SEQ ID NO: 1477362
augucugagggaagggcca

SEQ ID NO: 1477364 - RNA, 19 nt, Artificial Sequence
  Description of Artificial Sequence: Synthetic oligonucleotide
  Sense strand starting at position 977 of SEQ ID NO: 1244285
aucugucuuguugacagua

SEQ ID NO: 1477365 - RNA, 19 nt, Artificial Sequence
  Description of Artificial Sequence: Synthetic oligonucleotide
  Antisense strand to SEQ ID NO: 1477364
uacugucaacaagacagau

SEQ ID NO: 1477366 - RNA, 19 nt, Artificial Sequence
  Description of Artificial Sequence: Synthetic oligonucleotide
  Sense strand starting at position 993 of SEQ ID NO: 1244285
guagcaucccuagaaccua

SEQ ID NO: 1477367 - RNA, 19 nt, Artificial Sequence
  Description of Artificial Sequence: Synthetic oligonucleotide
  Antisense strand to SEQ ID NO: 1477366
uagguucuagggaugcuac

SEQ ID NO: 1477368 - RNA, 19 nt, Artificial Sequence
  Description of Artificial Sequence: Synthetic oligonucleotide
  Sense strand starting at position 1030 of SEQ ID NO: 1244285
gugugugcucaguccacau

SEQ ID NO: 1477369 - RNA, 19 nt, Artificial Sequence
  Description of Artificial Sequence: Synthetic oligonucleotide
  Antisense strand to SEQ ID NO: 1477368
auguggacugagcacacac

SEQ ID NO: 1477370 - RNA, 19 nt, Artificial Sequence
  Description of Artificial Sequence: Synthetic oligonucleotide
  Sense strand starting at position 1032 of SEQ ID NO: 1244285
gugugcucaguccacauuu

SEQ ID NO: 1477371 - RNA, 19 nt, Artificial Sequence
  Description of Artificial Sequence: Synthetic oligonucleotide
  Antisense strand to SEQ ID NO: 1477370
aaauguggacugagcacac

SEQ ID NO: 1477372 - RNA, 19 nt, Artificial Sequence
  Description of Artificial Sequence: Synthetic oligonucleotide
  Sense strand starting at position 1078 of SEQ ID NO: 1244285
cagagaugcgcucaggaac

SEQ ID NO: 1477373 - RNA, 19 nt, Artificial Sequence
  Description of Artificial Sequence: Synthetic oligonucleotide
  Antisense strand to SEQ ID NO: 1477372
guuccugagcgcaucucug

SEQ ID NO: 1477374 - RNA, 19 nt, Artificial Sequence
  Description of Artificial Sequence: Synthetic oligonucleotide
  Sense strand starting at position 1148 of SEQ ID NO: 1244285
ugcugauugguagaguuca

SEQ ID NO: 1477375 - RNA, 19 nt, Artificial Sequence
  Description of Artificial Sequence: Synthetic oligonucleotide
  Antisense strand to SEQ ID NO: 1477374
ugaacucuaccaaucagca

SEQ ID NO: 1477376 - RNA, 19 nt, Artificial Sequence
  Description of Artificial Sequence: Synthetic oligonucleotide
  Sense strand starting at position 1294 of SEQ ID NO: 1244285
cugcuuuggcuagagggua

SEQ ID NO: 1477377 - RNA, 19 nt, Artificial Sequence
  Description of Artificial Sequence: Synthetic oligonucleotide
  Antisense strand to SEQ ID NO: 1477376
uacccucuagccaaagcag

SEQ ID NO: 1477378 - RNA, 19 nt, Artificial Sequence
  Description of Artificial Sequence: Synthetic oligonucleotide
  Sense strand starting at position 1950 of SEQ ID NO: 1244285
cuucgacauccgugaaaca

SEQ ID NO: 1477379 - RNA, 19 nt, Artificial Sequence
  Description of Artificial Sequence: Synthetic oligonucleotide
  Antisense strand to SEQ ID NO: 1477378
uguuucacggaugucgaag

SEQ ID NO: 1477380 - RNA, 19 nt, Artificial Sequence
  Description of Artificial Sequence: Synthetic oligonucleotide
  Sense strand starting at position 1959 of SEQ ID NO: 1244285
ccgugaaacagccaugaau

SEQ ID NO: 1477381 - RNA, 19 nt, Artificial Sequence
  Description of Artificial Sequence: Synthetic oligonucleotide
  Antisense strand to SEQ ID NO: 1477380
auucauggcuguuucacgg

SEQ ID NO: 1477382 - RNA, 19 nt, Artificial Sequence
  Description of Artificial Sequence: Synthetic oligonucleotide
  Sense strand starting at position 1961 of SEQ ID NO: 1244285
gugaaacagccaugaauaa

SEQ ID NO: 1477383 - RNA, 19 nt, Artificial Sequence
  Description of Artificial Sequence: Synthetic oligonucleotide
  Antisense strand to SEQ ID NO: 1477382
uuauucauggcuguuucac

SEQ ID NO: 1477384 - RNA, 19 nt, Artificial Sequence
  Description of Artificial Sequence: Synthetic oligonucleotide
  Sense strand starting at position 1992 of SEQ ID NO: 1244285
ggucgacuccuguaugcag

SEQ ID NO: 1477385 - RNA, 19 nt, Artificial Sequence
  Description of Artificial Sequence: Synthetic oligonucleotide
  Antisense strand to SEQ ID NO: 1477384
cugcauacaggagucgacc

SEQ ID NO: 1477386 - RNA, 19 nt, Artificial Sequence
  Description of Artificial Sequence: Synthetic oligonucleotide
  Sense strand starting at position 2022 of SEQ ID NO: 1244285
gcaguaggugcccaaucau

SEQ ID NO: 1477387 - RNA, 19 nt, Artificial Sequence
  Description of Artificial Sequence: Synthetic oligonucleotide
  Antisense strand to SEQ ID NO: 1477386
augauugggcaccuacugc

SEQ ID NO: 1477388 - RNA, 19 nt, Artificial Sequence
  Description of Artificial Sequence: Synthetic oligonucleotide
  Sense strand starting at position 2271 of SEQ ID NO: 1244285
cucucaaaugagggcuaua

SEQ ID NO: 1477389 - RNA, 19 nt, Artificial Sequence
  Description of Artificial Sequence: Synthetic oligonucleotide
  Antisense strand to SEQ ID NO: 1477388
uauagcccucauuugagag

SEQ ID NO: 1477390 - RNA, 19 nt, Artificial Sequence
  Description of Artificial Sequence: Synthetic oligonucleotide
  Sense strand starting at position 2436 of SEQ ID NO: 1244285
gaggauguggcuugccaca

SEQ ID NO: 1477391 - RNA, 19 nt, Artificial Sequence
  Description of Artificial Sequence: Synthetic oligonucleotide
  Antisense strand to SEQ ID NO: 1477390
uguggcaagccacauccuc

SEQ ID NO: 1477392 - RNA, 19 nt, Artificial Sequence
  Description of Artificial Sequence: Synthetic oligonucleotide
  Sense strand starting at position 2438 of SEQ ID NO: 1244285
ggauguggcuugccacaga

SEQ ID NO: 1477393 - RNA, 19 nt, Artificial Sequence
  Description of Artificial Sequence: Synthetic oligonucleotide
  Antisense strand to SEQ ID NO: 1477392
ucuguggcaagccacaucc

SEQ ID NO: 1477394 - RNA, 19 nt, Artificial Sequence
  Description of Artificial Sequence: Synthetic oligonucleotide
  Sense strand starting at position 2499 of SEQ ID NO: 1244285
ucccauccuggccaagaau

SEQ ID NO: 1477395 - RNA, 19 nt, Artificial Sequence
  Description of Artificial Sequence: Synthetic oligonucleotide
  Antisense strand to SEQ ID NO: 1477394
auucuuggccaggauggga

SEQ ID NO: 1477396 - RNA, 19 nt, Artificial Sequence
  Description of Artificial Sequence: Synthetic oligonucleotide
  Sense strand starting at position 3372 of SEQ ID NO: 1244285
ccgcuuccuagcuauggga

SEQ ID NO: 1477397 - RNA, 19 nt, Artificial Sequence
  Description of Artificial Sequence: Synthetic oligonucleotide
  Antisense strand to SEQ ID NO: 1477396
ucccauagcuaggaagcgg

SEQ ID NO: 1477398 - RNA, 19 nt, Artificial Sequence
  Description of Artificial Sequence: Synthetic oligonucleotide
  Sense strand starting at position 3395 of SEQ ID NO: 1244285
gauugaguccuguaccgug

SEQ ID NO: 1477399 - RNA, 19 nt, Artificial Sequence
  Description of Artificial Sequence: Synthetic oligonucleotide
  Antisense strand to SEQ ID NO: 1477398
cacgguacaggacucaauc

SEQ ID NO: 1477400 - RNA, 19 nt, Artificial Sequence
  Description of Artificial Sequence: Synthetic oligonucleotide
  Sense strand starting at position 3495 of SEQ ID NO: 1244285
uaauaagagcuccacguau

SEQ ID NO: 1477401 - RNA, 19 nt, Artificial Sequence
  Description of Artificial Sequence: Synthetic oligonucleotide
  Antisense strand to SEQ ID NO: 1477400
auacguggagcucuuauua

SEQ ID NO: 1477402 - RNA, 19 nt, Artificial Sequence
  Description of Artificial Sequence: Synthetic oligonucleotide
  Sense strand starting at position 3497 of SEQ ID NO: 1244285
auaagagcuccacguauag

SEQ ID NO: 1477403 - RNA, 19 nt, Artificial Sequence
  Description of Artificial Sequence: Synthetic oligonucleotide
  Antisense strand to SEQ ID NO: 1477402
cuauacguggagcucuuau

SEQ ID NO: 1477404 - RNA, 19 nt, Artificial Sequence
  Description of Artificial Sequence: Synthetic oligonucleotide
  Sense strand starting at position 3550 of SEQ ID NO: 1244285
ccuugacuugcugggaguu

SEQ ID NO: 1477405 - RNA, 19 nt, Artificial Sequence
  Description of Artificial Sequence: Synthetic oligonucleotide
  Antisense strand to SEQ ID NO: 1477404
aacucccagcaagucaagg

SEQ ID NO: 1477406 - RNA, 19 nt, Artificial Sequence
  Description of Artificial Sequence: Synthetic oligonucleotide
  Sense strand starting at position 3551 of SEQ ID NO: 1244285
cuugacuugcugggaguua

SEQ ID NO: 1477407 - RNA, 19 nt, Artificial Sequence
  Description of Artificial Sequence: Synthetic oligonucleotide
  Antisense strand to SEQ ID NO: 1477406
uaacucccagcaagucaag

SEQ ID NO: 1477408 - RNA, 19 nt, Artificial Sequence
  Description of Artificial Sequence: Synthetic oligonucleotide
  Sense strand starting at position 3585 of SEQ ID NO: 1244285
gaccguuaaaccuguaggu

SEQ ID NO: 1477409 - RNA, 19 nt, Artificial Sequence
  Description of Artificial Sequence: Synthetic oligonucleotide
  Antisense strand to SEQ ID NO: 1477408
accuacagguuuaacgguc

SEQ ID NO: 1477410 - RNA, 19 nt, Artificial Sequence
  Description of Artificial Sequence: Synthetic oligonucleotide
  Sense strand starting at position 3587 of SEQ ID NO: 1244285
ccguuaaaccuguaggucu

SEQ ID NO: 1477411 - RNA, 19 nt, Artificial Sequence
  Description of Artificial Sequence: Synthetic oligonucleotide
  Antisense strand to SEQ ID NO: 1477410
agaccuacagguuuaacgg

SEQ ID NO: 1477412 - RNA, 19 nt, Artificial Sequence
  Description of Artificial Sequence: Synthetic oligonucleotide
  Sense strand starting at position 3594 of SEQ ID NO: 1244285
accuguaggucuuuccaga

SEQ ID NO: 1477413 - RNA, 19 nt, Artificial Sequence
  Description of Artificial Sequence: Synthetic oligonucleotide
  Antisense strand to SEQ ID NO: 1477412
ucuggaaagaccuacaggu

SEQ ID NO: 1477414 - RNA, 19 nt, Artificial Sequence
  Description of Artificial Sequence: Synthetic oligonucleotide
  Sense strand starting at position 3601 of SEQ ID NO: 1244285
ggucuuuccagagaaagug

SEQ ID NO: 1477415 - RNA, 19 nt, Artificial Sequence
  Description of Artificial Sequence: Synthetic oligonucleotide
  Antisense strand to SEQ ID NO: 1477414
cacuuucucuggaaagacc

SEQ ID NO: 1477416 - RNA, 19 nt, Artificial Sequence
  Description of Artificial Sequence: Synthetic oligonucleotide
  Sense strand starting at position 3664 of SEQ ID NO: 1244285
ggugguuucccaugaccac

SEQ ID NO: 1477417 - RNA, 19 nt, Artificial Sequence
  Description of Artificial Sequence: Synthetic oligonucleotide
  Antisense strand to SEQ ID NO: 1477416
guggucaugggaaaccacc

SEQ ID NO: 1477418 - RNA, 19 nt, Artificial Sequence
  Description of Artificial Sequence: Synthetic oligonucleotide
  Sense strand starting at position 3925 of SEQ ID NO: 1244285
gggucauucucccuggaga

SEQ ID NO: 1477419 - RNA, 19 nt, Artificial Sequence
  Description of Artificial Sequence: Synthetic oligonucleotide
  Antisense strand to SEQ ID NO: 1477418
ucuccagggagaaugaccc

SEQ ID NO: 1477420 - RNA, 19 nt, Artificial Sequence
  Description of Artificial Sequence: Synthetic oligonucleotide
  Sense strand starting at position 3926 of SEQ ID NO: 1244285
ggucauucucccuggagau

SEQ ID NO: 1477421 - RNA, 19 nt, Artificial Sequence
  Description of Artificial Sequence: Synthetic oligonucleotide
  Antisense strand to SEQ ID NO: 1477420
aucuccagggagaaugacc

SEQ ID NO: 1477422 - RNA, 19 nt, Artificial Sequence
  Description of Artificial Sequence: Synthetic oligonucleotide
  Sense strand starting at position 3927 of SEQ ID NO: 1244285
gucauucucccuggagaug

SEQ ID NO: 1477423 - RNA, 19 nt, Artificial Sequence
  Description of Artificial Sequence: Synthetic oligonucleotide
  Antisense strand to SEQ ID NO: 1477422
caucuccagggagaaugac

SEQ ID NO: 1477424 - RNA, 19 nt, Artificial Sequence
  Description of Artificial Sequence: Synthetic oligonucleotide
  Sense strand starting at position 3928 of SEQ ID NO: 1244285
ucauucucccuggagaugu

SEQ ID NO: 1477425 - RNA, 19 nt, Artificial Sequence
  Description of Artificial Sequence: Synthetic oligonucleotide
  Antisense strand to SEQ ID NO: 1477424
acaucuccagggagaauga

SEQ ID NO: 1477426 - RNA, 19 nt, Artificial Sequence
  Description of Artificial Sequence: Synthetic oligonucleotide
  Sense strand starting at position 3938 of SEQ ID NO: 1244285
uggagauguggucacguca

SEQ ID NO: 1477427 - RNA, 19 nt, Artificial Sequence
  Description of Artificial Sequence: Synthetic oligonucleotide
  Antisense strand to SEQ ID NO: 1477426
ugacgugaccacaucucca

SEQ ID NO: 1477428 - RNA, 19 nt, Artificial Sequence
  Description of Artificial Sequence: Synthetic oligonucleotide
  Sense strand starting at position 112 of SEQ ID NO: 1244287
ggccguacucggucuucaa

SEQ ID NO: 1477429 - RNA, 19 nt, Artificial Sequence
  Description of Artificial Sequence: Synthetic oligonucleotide
  Antisense strand to SEQ ID NO: 1477428
uugaagaccgaguacggcc

SEQ ID NO: 1477430 - RNA, 19 nt, Artificial Sequence
  Description of Artificial Sequence: Synthetic oligonucleotide
  Sense strand starting at position 113 of SEQ ID NO: 1244287
gccguacucggucuucaaa

SEQ ID NO: 1477431 - RNA, 19 nt, Artificial Sequence
  Description of Artificial Sequence: Synthetic oligonucleotide
  Antisense strand to SEQ ID NO: 1477430
uuugaagaccgaguacggc

SEQ ID NO: 1477432 - RNA, 19 nt, Artificial Sequence
  Description of Artificial Sequence: Synthetic oligonucleotide
  Sense strand starting at position 192 of SEQ ID NO: 1244287
gcugaucugccauaaggga

SEQ ID NO: 1477433 - RNA, 19 nt, Artificial Sequence
  Description of Artificial Sequence: Synthetic oligonucleotide
  Antisense strand to SEQ ID NO: 1477432
ucccuuauggcagaucagc

SEQ ID NO: 1477434 - RNA, 19 nt, Artificial Sequence
  Description of Artificial Sequence: Synthetic oligonucleotide
  Sense strand starting at position 199 of SEQ ID NO: 1244287
ugccauaagggaugguaga

SEQ ID NO: 1477435 - RNA, 19 nt, Artificial Sequence
  Description of Artificial Sequence: Synthetic oligonucleotide
  Antisense strand to SEQ ID NO: 1477434
ucuaccaucccuuauggca

SEQ ID NO: 1477436 - RNA, 19 nt, Artificial Sequence
  Description of Artificial Sequence: Synthetic oligonucleotide
  Sense strand starting at position 209 of SEQ ID NO: 1244287
gaugguagacucggauacu

SEQ ID NO: 1477437 - RNA, 19 nt, Artificial Sequence
  Description of Artificial Sequence: Synthetic oligonucleotide
  Antisense strand to SEQ ID NO: 1477436
aguauccgagucuaccauc

SEQ ID NO: 1477438 - RNA, 19 nt, Artificial Sequence
  Description of Artificial Sequence: Synthetic oligonucleotide
  Sense strand starting at position 229 of SEQ ID NO: 1244287
gcauguugugaggaccuga

SEQ ID NO: 1477439 - RNA, 19 nt, Artificial Sequence
  Description of Artificial Sequence: Synthetic oligonucleotide
  Antisense strand to SEQ ID NO: 1477438
ucagguccucacaacaugc

SEQ ID NO: 1477440 - RNA, 19 nt, Artificial Sequence
  Description of Artificial Sequence: Synthetic oligonucleotide
  Sense strand starting at position 269 of SEQ ID NO: 1244287
agggccuuguagcuauuua

SEQ ID NO: 1477441 - RNA, 19 nt, Artificial Sequence
  Description of Artificial Sequence: Synthetic oligonucleotide
  Antisense strand to SEQ ID NO: 1477440
uaaauagcuacaaggcccu

SEQ ID NO: 1477442 - RNA, 19 nt, Artificial Sequence
  Description of Artificial Sequence: Synthetic oligonucleotide
  Sense strand starting at position 307 of SEQ ID NO: 1244287
uuuggaaugcugggucaca

SEQ ID NO: 1477443 - RNA, 19 nt, Artificial Sequence
  Description of Artificial Sequence: Synthetic oligonucleotide
  Antisense strand to SEQ ID NO: 1477442
ugugacccagcauuccaaa

SEQ ID NO: 1477444 - RNA, 19 nt, Artificial Sequence
  Description of Artificial Sequence: Synthetic oligonucleotide
  Sense strand starting at position 393 of SEQ ID NO: 1244287
guuagaagaguuggaaauu

SEQ ID NO: 1477445 - RNA, 19 nt, Artificial Sequence
  Description of Artificial Sequence: Synthetic oligonucleotide
  Antisense strand to SEQ ID NO: 1477444
aauuuccaacucuucuaac

SEQ ID NO: 1477446 - RNA, 19 nt, Artificial Sequence
  Description of Artificial Sequence: Synthetic oligonucleotide
  Sense strand starting at position 497 of SEQ ID NO: 1244287
guaaauaauaugcaggguu

SEQ ID NO: 1477447 - RNA, 19 nt, Artificial Sequence
  Description of Artificial Sequence: Synthetic oligonucleotide
  Antisense strand to SEQ ID NO: 1477446
aacccugcauauuauuuac

SEQ ID NO: 1477448 - RNA, 19 nt, Artificial Sequence
  Description of Artificial Sequence: Synthetic oligonucleotide
  Sense strand starting at position 500 of SEQ ID NO: 1244287
aauaauaugcaggguuaga

SEQ ID NO: 1477449 - RNA, 19 nt, Artificial Sequence
  Description of Artificial Sequence: Synthetic oligonucleotide
  Antisense strand to SEQ ID NO: 1477448
ucuaacccugcauauuauu

SEQ ID NO: 1477450 - RNA, 19 nt, Artificial Sequence
  Description of Artificial Sequence: Synthetic oligonucleotide
  Sense strand starting at position 655 of SEQ ID NO: 1244287
cacgaacucuugucaauga

SEQ ID NO: 1477451 - RNA, 19 nt, Artificial Sequence
  Description of Artificial Sequence: Synthetic oligonucleotide
  Antisense strand to SEQ ID NO: 1477450
ucauugacaagaguucgug

SEQ ID NO: 1477452 - RNA, 19 nt, Artificial Sequence
  Description of Artificial Sequence: Synthetic oligonucleotide
  Sense strand starting at position 793 of SEQ ID NO: 1244287
gagucucauccucaggagu

SEQ ID NO: 1477453 - RNA, 19 nt, Artificial Sequence
  Description of Artificial Sequence: Synthetic oligonucleotide
  Antisense strand to SEQ ID NO: 1477452
acuccugaggaugagacuc

SEQ ID NO: 1477454 - RNA, 19 nt, Artificial Sequence
  Description of Artificial Sequence: Synthetic oligonucleotide
  Sense strand starting at position 1211 of SEQ ID NO: 1244287
uggcucaucccuuaaagau

SEQ ID NO: 1477455 - RNA, 19 nt, Artificial Sequence
  Description of Artificial Sequence: Synthetic oligonucleotide
  Antisense strand to SEQ ID NO: 1477454
aucuuuaagggaugagcca

SEQ ID NO: 1477456 - RNA, 19 nt, Artificial Sequence
  Description of Artificial Sequence: Synthetic oligonucleotide
  Sense strand starting at position 1503 of SEQ ID NO: 1244287
gggugcagcgcuguucuaa

SEQ ID NO: 1477457 - RNA, 19 nt, Artificial Sequence
  Description of Artificial Sequence: Synthetic oligonucleotide
  Antisense strand to SEQ ID NO: 1477456
uuagaacagcgcugcaccc

SEQ ID NO: 1477458 - RNA, 19 nt, Artificial Sequence
  Description of Artificial Sequence: Synthetic oligonucleotide
  Sense strand starting at position 1504 of SEQ ID NO: 1244287
ggugcagcgcuguucuaaa

SEQ ID NO: 1477459 - RNA, 19 nt, Artificial Sequence
  Description of Artificial Sequence: Synthetic oligonucleotide
  Antisense strand to SEQ ID NO: 1477458
uuuagaacagcgcugcacc

SEQ ID NO: 1477460 - RNA, 19 nt, Artificial Sequence
  Description of Artificial Sequence: Synthetic oligonucleotide
  Sense strand starting at position 1606 of SEQ ID NO: 1244287
gcuguaaauggauauaggu

SEQ ID NO: 1477461 - RNA, 19 nt, Artificial Sequence
  Description of Artificial Sequence: Synthetic oligonucleotide
  Antisense strand to SEQ ID NO: 1477460
accuauauccauuuacagc

SEQ ID NO: 1477462 - RNA, 19 nt, Artificial Sequence
  Description of Artificial Sequence: Synthetic oligonucleotide
  Sense strand starting at position 2212 of SEQ ID NO: 1244287
aagguuugucuccauggca

SEQ ID NO: 1477463 - RNA, 19 nt, Artificial Sequence
  Description of Artificial Sequence: Synthetic oligonucleotide
  Antisense strand to SEQ ID NO: 1477462
ugccauggagacaaaccuu

SEQ ID NO: 1477464 - RNA, 19 nt, Artificial Sequence
  Description of Artificial Sequence: Synthetic oligonucleotide
  Sense strand starting at position 2671 of SEQ ID NO: 1244287
ucucgcauaugauuaagaa

SEQ ID NO: 1477465 - RNA, 19 nt, Artificial Sequence
  Description of Artificial Sequence: Synthetic oligonucleotide
  Antisense strand to SEQ ID NO: 1477464
uucuuaaucauaugcgaga

SEQ ID NO: 1477466 - RNA, 19 nt, Artificial Sequence
  Description of Artificial Sequence: Synthetic oligonucleotide
  Sense strand starting at position 2672 of SEQ ID NO: 1244287
cucgcauaugauuaagaac

SEQ ID NO: 1477467 - RNA, 19 nt, Artificial Sequence
  Description of Artificial Sequence: Synthetic oligonucleotide
  Antisense strand to SEQ ID NO: 1477466
guucuuaaucauaugcgag

SEQ ID NO: 1477468 - RNA, 19 nt, Artificial Sequence
  Description of Artificial Sequence: Synthetic oligonucleotide
  Sense strand starting at position 2865 of SEQ ID NO: 1244287
uguuccuuccuggaaugga

SEQ ID NO: 1477469 - RNA, 19 nt, Artificial Sequence
  Description of Artificial Sequence: Synthetic oligonucleotide
  Antisense strand to SEQ ID NO: 1477468
uccauuccaggaaggaaca

SEQ ID NO: 1477470 - RNA, 19 nt, Artificial Sequence
  Description of Artificial Sequence: Synthetic oligonucleotide
  Sense strand starting at position 3257 of SEQ ID NO: 1244287
auccgugauguugagaaug

SEQ ID NO: 1477471 - RNA, 19 nt, Artificial Sequence
  Description of Artificial Sequence: Synthetic oligonucleotide
  Antisense strand to SEQ ID NO: 1477470
cauucucaacaucacggau

SEQ ID NO: 1477472 - RNA, 19 nt, Artificial Sequence
  Description of Artificial Sequence: Synthetic oligonucleotide
  Sense strand starting at position 3596 of SEQ ID NO: 1244287
ggaaguauaugaaggguga

SEQ ID NO: 1477473 - RNA, 19 nt, Artificial Sequence
  Description of Artificial Sequence: Synthetic oligonucleotide
  Antisense strand to SEQ ID NO: 1477472
ucacccuucauauacuucc

SEQ ID NO: 1477474 - RNA, 19 nt, Artificial Sequence
  Description of Artificial Sequence: Synthetic oligonucleotide
  Sense strand starting at position 3600 of SEQ ID NO: 1244287
guauaugaagggugaaauu

SEQ ID NO: 1477475 - RNA, 19 nt, Artificial Sequence
  Description of Artificial Sequence: Synthetic oligonucleotide
  Antisense strand to SEQ ID NO: 1477474
aauuucacccuucauauac

SEQ ID NO: 1477476 - RNA, 19 nt, Artificial Sequence
  Description of Artificial Sequence: Synthetic oligonucleotide
  Sense strand starting at position 3609 of SEQ ID NO: 1244287
gggugaaauugaaaggugu

SEQ ID NO: 1477477 - RNA, 19 nt, Artificial Sequence
  Description of Artificial Sequence: Synthetic oligonucleotide
  Antisense strand to SEQ ID NO: 1477476
acaccuuucaauuucaccc

SEQ ID NO: 1477478 - RNA, 19 nt, Artificial Sequence
  Description of Artificial Sequence: Synthetic oligonucleotide
  Sense strand starting at position 3645 of SEQ ID NO: 1244287
gaugguuuagguggaguga

SEQ ID NO: 1477479 - RNA, 19 nt, Artificial Sequence
  Description of Artificial Sequence: Synthetic oligonucleotide
  Antisense strand to SEQ ID NO: 1477478
ucacuccaccuaaaccauc

SEQ ID NO: 1477480 - RNA, 19 nt, Artificial Sequence
  Description of Artificial Sequence: Synthetic oligonucleotide
  Sense strand starting at position 3646 of SEQ ID NO: 1244287
augguuuagguggagugaa

SEQ ID NO: 1477481 - RNA, 19 nt, Artificial Sequence
  Description of Artificial Sequence: Synthetic oligonucleotide
  Antisense strand to SEQ ID NO: 1477480
uucacuccaccuaaaccau

SEQ ID NO: 1477482 - RNA, 19 nt, Artificial Sequence
  Description of Artificial Sequence: Synthetic oligonucleotide
  Sense strand starting at position 3736 of SEQ ID NO: 1244287
aguggaaugagaggauguu

SEQ ID NO: 1477483 - RNA, 19 nt, Artificial Sequence
  Description of Artificial Sequence: Synthetic oligonucleotide
  Antisense strand to SEQ ID NO: 1477482
aacauccucucauuccacu

SEQ ID NO: 1477484 - RNA, 19 nt, Artificial Sequence
  Description of Artificial Sequence: Synthetic oligonucleotide
  Sense strand starting at position 3770 of SEQ ID NO: 1244287
gagcuugaaggaugucaug

SEQ ID NO: 1477485 - RNA, 19 nt, Artificial Sequence
  Description of Artificial Sequence: Synthetic oligonucleotide
  Antisense strand to SEQ ID NO: 1477484
caugacauccuucaagcuc

SEQ ID NO: 1477486 - RNA, 19 nt, Artificial Sequence
  Description of Artificial Sequence: Synthetic oligonucleotide
  Sense strand starting at position 3792 of SEQ ID NO: 1244287
gggugugaaggguggaauu

SEQ ID NO: 1477487 - RNA, 19 nt, Artificial Sequence
  Description of Artificial Sequence: Synthetic oligonucleotide
  Antisense strand to SEQ ID NO: 1477486
aauuccacccuucacaccc

SEQ ID NO: 1477488 - RNA, 19 nt, Artificial Sequence
  Description of Artificial Sequence: Synthetic oligonucleotide
  Sense strand starting at position 3794 of SEQ ID NO: 1244287
gugugaaggguggaauuga

SEQ ID NO: 1477489 - RNA, 19 nt, Artificial Sequence
  Description of Artificial Sequence: Synthetic oligonucleotide
  Antisense strand to SEQ ID NO: 1477488
ucaauuccacccuucacac

SEQ ID NO: 1477490 - RNA, 19 nt, Artificial Sequence
  Description of Artificial Sequence: Synthetic oligonucleotide
  Sense strand starting at position 3795 of SEQ ID NO: 1244287
ugugaaggguggaauugaa

SEQ ID NO: 1477491 - RNA, 19 nt, Artificial Sequence
  Description of Artificial Sequence: Synthetic oligonucleotide
  Antisense strand to SEQ ID NO: 1477490
uucaauuccacccuucaca

SEQ ID NO: 1477492 - RNA, 19 nt, Artificial Sequence
  Description of Artificial Sequence: Synthetic oligonucleotide
  Sense strand starting at position 3897 of SEQ ID NO: 1244287
aagagugucaaggguggaa

SEQ ID NO: 1477493 - RNA, 19 nt, Artificial Sequence
  Description of Artificial Sequence: Synthetic oligonucleotide
  Antisense strand to SEQ ID NO: 1477492
uuccacccuugacacucuu

SEQ ID NO: 1477494 - RNA, 19 nt, Artificial Sequence
  Description of Artificial Sequence: Synthetic oligonucleotide
  Sense strand starting at position 3899 of SEQ ID NO: 1244287
gagugucaaggguggaaua

SEQ ID NO: 1477495 - RNA, 19 nt, Artificial Sequence
  Description of Artificial Sequence: Synthetic oligonucleotide
  Antisense strand to SEQ ID NO: 1477494
uauuccacccuugacacuc

SEQ ID NO: 1477496 - RNA, 19 nt, Artificial Sequence
  Description of Artificial Sequence: Synthetic oligonucleotide
  Sense strand starting at position 3900 of SEQ ID NO: 1244287
agugucaaggguggaauau

SEQ ID NO: 1477497 - RNA, 19 nt, Artificial Sequence
  Description of Artificial Sequence: Synthetic oligonucleotide
  Antisense strand to SEQ ID NO: 1477496
auauuccacccuugacacu

SEQ ID NO: 1477498 - RNA, 19 nt, Artificial Sequence
  Description of Artificial Sequence: Synthetic oligonucleotide
  Sense strand starting at position 3901 of SEQ ID NO: 1244287
gugucaaggguggaauaua

SEQ ID NO: 1477499 - RNA, 19 nt, Artificial Sequence
  Description of Artificial Sequence: Synthetic oligonucleotide
  Antisense strand to SEQ ID NO: 1477498
uauauuccacccuugacac

SEQ ID NO: 1477500 - RNA, 19 nt, Artificial Sequence
  Description of Artificial Sequence: Synthetic oligonucleotide
  Sense strand starting at position 3911 of SEQ ID NO: 1244287
uggaauauaagguguguaa

SEQ ID NO: 1477501 - RNA, 19 nt, Artificial Sequence
  Description of Artificial Sequence: Synthetic oligonucleotide
  Antisense strand to SEQ ID NO: 1477500
uuacacaccuuauauucca

SEQ ID NO: 1477502 - RNA, 19 nt, Artificial Sequence
  Description of Artificial Sequence: Synthetic oligonucleotide
  Sense strand starting at position 3942 of SEQ ID NO: 1244287
gaauaugaagguuguaaug

SEQ ID NO: 1477503 - RNA, 19 nt, Artificial Sequence
  Description of Artificial Sequence: Synthetic oligonucleotide
  Antisense strand to SEQ ID NO: 1477502
cauuacaaccuucauauuc

SEQ ID NO: 1477504 - RNA, 19 nt, Artificial Sequence
  Description of Artificial Sequence: Synthetic oligonucleotide
  Sense strand starting at position 3957 of SEQ ID NO: 1244287
aauggaauggcgugaagaa

SEQ ID NO: 1477505 - RNA, 19 nt, Artificial Sequence
  Description of Artificial Sequence: Synthetic oligonucleotide
  Antisense strand to SEQ ID NO: 1477504
uucuucacgccauuccauu

SEQ ID NO: 1477506 - RNA, 19 nt, Artificial Sequence
  Description of Artificial Sequence: Synthetic oligonucleotide
  Sense strand starting at position 3958 of SEQ ID NO: 1244287
auggaauggcgugaagaau

SEQ ID NO: 1477507 - RNA, 19 nt, Artificial Sequence
  Description of Artificial Sequence: Synthetic oligonucleotide
  Antisense strand to SEQ ID NO: 1477506
auucuucacgccauuccau

SEQ ID NO: 1477508 - RNA, 19 nt, Artificial Sequence
  Description of Artificial Sequence: Synthetic oligonucleotide
  Sense strand starting at position 194 of SEQ ID NO: 1244290
cuguuaagcccaggaaguu

SEQ ID NO: 1477509 - RNA, 19 nt, Artificial Sequence
  Description of Artificial Sequence: Synthetic oligonucleotide
  Antisense strand to SEQ ID NO: 1477508
aacuuccugggcuuaacag

SEQ ID NO: 1477510 - RNA, 19 nt, Artificial Sequence
  Description of Artificial Sequence: Synthetic oligonucleotide
  Sense strand starting at position 458 of SEQ ID NO: 1244290
cagcuccuccgaugaugau

SEQ ID NO: 1477511 - RNA, 19 nt, Artificial Sequence
  Description of Artificial Sequence: Synthetic oligonucleotide
  Antisense strand to SEQ ID NO: 1477510
aucaucaucggaggagcug

SEQ ID NO: 1477512 - RNA, 19 nt, Artificial Sequence
  Description of Artificial Sequence: Synthetic oligonucleotide
  Sense strand starting at position 459 of SEQ ID NO: 1244290
agcuccuccgaugaugaua

SEQ ID NO: 1477513 - RNA, 19 nt, Artificial Sequence
  Description of Artificial Sequence: Synthetic oligonucleotide
  Antisense strand to SEQ ID NO: 1477512
uaucaucaucggaggagcu

SEQ ID NO: 1477514 - RNA, 19 nt, Artificial Sequence
  Description of Artificial Sequence: Synthetic oligonucleotide
  Sense strand starting at position 497 of SEQ ID NO: 1244290
agggauguccucuaagccu

SEQ ID NO: 1477515 - RNA, 19 nt, Artificial Sequence
  Description of Artificial Sequence: Synthetic oligonucleotide
  Antisense strand to SEQ ID NO: 1477514
aggcuuagaggacaucccu

SEQ ID NO: 1477516 - RNA, 19 nt, Artificial Sequence
  Description of Artificial Sequence: Synthetic oligonucleotide
  Sense strand starting at position 547 of SEQ ID NO: 1244290
ucuuucuggcagggaguua

SEQ ID NO: 1477517 - RNA, 19 nt, Artificial Sequence
  Description of Artificial Sequence: Synthetic oligonucleotide
  Antisense strand to SEQ ID NO: 1477516
uaacucccugccagaaaga

SEQ ID NO: 1477518 - RNA, 19 nt, Artificial Sequence
  Description of Artificial Sequence: Synthetic oligonucleotide
  Sense strand starting at position 548 of SEQ ID NO: 1244290
cuuucuggcagggaguuau

SEQ ID NO: 1477519 - RNA, 19 nt, Artificial Sequence
  Description of Artificial Sequence: Synthetic oligonucleotide
  Antisense strand to SEQ ID NO: 1477518
auaacucccugccagaaag

SEQ ID NO: 1477520 - RNA, 19 nt, Artificial Sequence
  Description of Artificial Sequence: Synthetic oligonucleotide
  Sense strand starting at position 616 of SEQ ID NO: 1244290
uugcgucacaguuagaaug

SEQ ID NO: 1477521 - RNA, 19 nt, Artificial Sequence
  Description of Artificial Sequence: Synthetic oligonucleotide
  Antisense strand to SEQ ID NO: 1477520
cauucuaacugugacgcaa

SEQ ID NO: 1477522 - RNA, 19 nt, Artificial Sequence
  Description of Artificial Sequence: Synthetic oligonucleotide
  Sense strand starting at position 760 of SEQ ID NO: 1244290
uggcccuucccucagacau

SEQ ID NO: 1477523 - RNA, 19 nt, Artificial Sequence
  Description of Artificial Sequence: Synthetic oligonucleotide
  Antisense strand to SEQ ID NO: 1477522
augucugagggaagggcca

SEQ ID NO: 1477524 - RNA, 19 nt, Artificial Sequence
  Description of Artificial Sequence: Synthetic oligonucleotide
  Sense strand starting at position 977 of SEQ ID NO: 1244290
aucugucuuguugacagua

SEQ ID NO: 1477525 - RNA, 19 nt, Artificial Sequence
  Description of Artificial Sequence: Synthetic oligonucleotide
  Antisense strand to SEQ ID NO: 1477524
uacugucaacaagacagau

SEQ ID NO: 1477526 - RNA, 19 nt, Artificial Sequence
  Description of Artificial Sequence: Synthetic oligonucleotide
  Sense strand starting at position 993 of SEQ ID NO: 1244290
guagcaucccuagaaccua

SEQ ID NO: 1477527 - RNA, 19 nt, Artificial Sequence
  Description of Artificial Sequence: Synthetic oligonucleotide
  Antisense strand to SEQ ID NO: 1477526
uagguucuagggaugcuac

SEQ ID NO: 1477528 - RNA, 19 nt, Artificial Sequence
  Description of Artificial Sequence: Synthetic oligonucleotide
  Sense strand starting at position 1030 of SEQ ID NO: 1244290
gugugugcucaguccacau

SEQ ID NO: 1477529 - RNA, 19 nt, Artificial Sequence
  Description of Artificial Sequence: Synthetic oligonucleotide
  Antisense strand to SEQ ID NO: 1477528
auguggacugagcacacac

SEQ ID NO: 1477530 - RNA, 19 nt, Artificial Sequence
  Description of Artificial Sequence: Synthetic oligonucleotide
  Sense strand starting at position 1032 of SEQ ID NO: 1244290
gugugcucaguccacauuu

SEQ ID NO: 1477531 - RNA, 19 nt, Artificial Sequence
  Description of Artificial Sequence: Synthetic oligonucleotide
  Antisense strand to SEQ ID NO: 1477530
aaauguggacugagcacac

SEQ ID NO: 1477532 - RNA, 19 nt, Artificial Sequence
  Description of Artificial Sequence: Synthetic oligonucleotide
  Sense strand starting at position 1078 of SEQ ID NO: 1244290
cagagaugcgcucaggaac

SEQ ID NO: 1477533 - RNA, 19 nt, Artificial Sequence
  Description of Artificial Sequence: Synthetic oligonucleotide
  Antisense strand to SEQ ID NO: 1477532
guuccugagcgcaucucug

SEQ ID NO: 1477534 - RNA, 19 nt, Artificial Sequence
  Description of Artificial Sequence: Synthetic oligonucleotide
  Sense strand starting at position 1148 of SEQ ID NO: 1244290
ugcugauugguagaguuca

SEQ ID NO: 1477535 - RNA, 19 nt, Artificial Sequence
  Description of Artificial Sequence: Synthetic oligonucleotide
  Antisense strand to SEQ ID NO: 1477534
ugaacucuaccaaucagca

SEQ ID NO: 1477536 - RNA, 19 nt, Artificial Sequence
  Description of Artificial Sequence: Synthetic oligonucleotide
  Sense strand starting at position 1294 of SEQ ID NO: 1244290
cugcuuuggcuagagggua

SEQ ID NO: 1477537 - RNA, 19 nt, Artificial Sequence
  Description of Artificial Sequence: Synthetic oligonucleotide
  Antisense strand to SEQ ID NO: 1477536
uacccucuagccaaagcag

SEQ ID NO: 1477538 - RNA, 19 nt, Artificial Sequence
  Description of Artificial Sequence: Synthetic oligonucleotide
  Sense strand starting at position 1950 of SEQ ID NO: 1244290
cuucgacauccgugaaaca

SEQ ID NO: 1477539 - RNA, 19 nt, Artificial Sequence
  Description of Artificial Sequence: Synthetic oligonucleotide
  Antisense strand to SEQ ID NO: 1477538
uguuucacggaugucgaag

SEQ ID NO: 1477540 - RNA, 19 nt, Artificial Sequence
  Description of Artificial Sequence: Synthetic oligonucleotide
  Sense strand starting at position 1959 of SEQ ID NO: 1244290
ccgugaaacagccaugaau

SEQ ID NO: 1477541 - RNA, 19 nt, Artificial Sequence
  Description of Artificial Sequence: Synthetic oligonucleotide
  Antisense strand to SEQ ID NO: 1477540
auucauggcuguuucacgg

SEQ ID NO: 1477542 - RNA, 19 nt, Artificial Sequence
  Description of Artificial Sequence: Synthetic oligonucleotide
  Sense strand starting at position 1961 of SEQ ID NO: 1244290
gugaaacagccaugaauaa

SEQ ID NO: 1477543 - RNA, 19 nt, Artificial Sequence
  Description of Artificial Sequence: Synthetic oligonucleotide
  Antisense strand to SEQ ID NO: 1477542
uuauucauggcuguuucac

SEQ ID NO: 1477544 - RNA, 19 nt, Artificial Sequence
  Description of Artificial Sequence: Synthetic oligonucleotide
  Sense strand starting at position 1992 of SEQ ID NO: 1244290
ggucgacuccuguaugcag

SEQ ID NO: 1477545 - RNA, 19 nt, Artificial Sequence
  Description of Artificial Sequence: Synthetic oligonucleotide
  Antisense strand to SEQ ID NO: 1477544
cugcauacaggagucgacc

SEQ ID NO: 1477546 - RNA, 19 nt, Artificial Sequence
  Description of Artificial Sequence: Synthetic oligonucleotide
  Sense strand starting at position 2022 of SEQ ID NO: 1244290
gcaguaggugcccaaucau

SEQ ID NO: 1477547 - RNA, 19 nt, Artificial Sequence
  Description of Artificial Sequence: Synthetic oligonucleotide
  Antisense strand to SEQ ID NO: 1477546
augauugggcaccuacugc

SEQ ID NO: 1477548 - RNA, 19 nt, Artificial Sequence
  Description of Artificial Sequence: Synthetic oligonucleotide
  Sense strand starting at position 2271 of SEQ ID NO: 1244290
cucucaaaugagggcuaua

SEQ ID NO: 1477549 - RNA, 19 nt, Artificial Sequence
  Description of Artificial Sequence: Synthetic oligonucleotide
  Antisense strand to SEQ ID NO: 1477548
uauagcccucauuugagag

SEQ ID NO: 1477550 - RNA, 19 nt, Artificial Sequence
  Description of Artificial Sequence: Synthetic oligonucleotide
  Sense strand starting at position 2436 of SEQ ID NO: 1244290
gaggauguggcuugccaca

SEQ ID NO: 1477551 - RNA, 19 nt, Artificial Sequence
  Description of Artificial Sequence: Synthetic oligonucleotide
  Antisense strand to SEQ ID NO: 1477550
uguggcaagccacauccuc

SEQ ID NO: 1477552 - RNA, 19 nt, Artificial Sequence
  Description of Artificial Sequence: Synthetic oligonucleotide
  Sense strand starting at position 2438 of SEQ ID NO: 1244290
ggauguggcuugccacaga

SEQ ID NO: 1477553 - RNA, 19 nt, Artificial Sequence
  Description of Artificial Sequence: Synthetic oligonucleotide
  Antisense strand to SEQ ID NO: 1477552
ucuguggcaagccacaucc

SEQ ID NO: 1477554 - RNA, 19 nt, Artificial Sequence
  Description of Artificial Sequence: Synthetic oligonucleotide
  Sense strand starting at position 2499 of SEQ ID NO: 1244290
ucccauccuggccaagaau

SEQ ID NO: 1477555 - RNA, 19 nt, Artificial Sequence
  Description of Artificial Sequence: Synthetic oligonucleotide
  Antisense strand to SEQ ID NO: 1477554
auucuuggccaggauggga

SEQ ID NO: 1477556 - RNA, 19 nt, Artificial Sequence
  Description of Artificial Sequence: Synthetic oligonucleotide
  Sense strand starting at position 3372 of SEQ ID NO: 1244290
ccgcuuccuagcuauggga

SEQ ID NO: 1477557 - RNA, 19 nt, Artificial Sequence
  Description of Artificial Sequence: Synthetic oligonucleotide
  Antisense strand to SEQ ID NO: 1477556
ucccauagcuaggaagcgg

SEQ ID NO: 1477558 - RNA, 19 nt, Artificial Sequence
  Description of Artificial Sequence: Synthetic oligonucleotide
  Sense strand starting at position 3395 of SEQ ID NO: 1244290
gauugaguccuguaccgug

SEQ ID NO: 1477559 - RNA, 19 nt, Artificial Sequence
  Description of Artificial Sequence: Synthetic oligonucleotide
  Antisense strand to SEQ ID NO: 1477558
cacgguacaggacucaauc

SEQ ID NO: 1477560 - RNA, 19 nt, Artificial Sequence
  Description of Artificial Sequence: Synthetic oligonucleotide
  Sense strand starting at position 3495 of SEQ ID NO: 1244290
uaauaagagcuccacguau

SEQ ID NO: 1477561 - RNA, 19 nt, Artificial Sequence
  Description of Artificial Sequence: Synthetic oligonucleotide
  Antisense strand to SEQ ID NO: 1477560
auacguggagcucuuauua

SEQ ID NO: 1477562 - RNA, 19 nt, Artificial Sequence
  Description of Artificial Sequence: Synthetic oligonucleotide
  Sense strand starting at position 3497 of SEQ ID NO: 1244290
auaagagcuccacguauag

SEQ ID NO: 1477563 - RNA, 19 nt, Artificial Sequence
  Description of Artificial Sequence: Synthetic oligonucleotide
  Antisense strand to SEQ ID NO: 1477562
cuauacguggagcucuuau

SEQ ID NO: 1477564 - RNA, 19 nt, Artificial Sequence
  Description of Artificial Sequence: Synthetic oligonucleotide
  Sense strand starting at position 3550 of SEQ ID NO: 1244290
ccuugacuugcugggaguu

SEQ ID NO: 1477565 - RNA, 19 nt, Artificial Sequence
  Description of Artificial Sequence: Synthetic oligonucleotide
  Antisense strand to SEQ ID NO: 1477564
aacucccagcaagucaagg

SEQ ID NO: 1477566 - RNA, 19 nt, Artificial Sequence
  Description of Artificial Sequence: Synthetic oligonucleotide
  Sense strand starting at position 3551 of SEQ ID NO: 1244290
cuugacuugcugggaguua

SEQ ID NO: 1477567 - RNA, 19 nt, Artificial Sequence
  Description of Artificial Sequence: Synthetic oligonucleotide
  Antisense strand to SEQ ID NO: 1477566
uaacucccagcaagucaag

SEQ ID NO: 1477568 - RNA, 19 nt, Artificial Sequence
  Description of Artificial Sequence: Synthetic oligonucleotide
  Sense strand starting at position 3585 of SEQ ID NO: 1244290
gaccguuaaaccuguaggu

SEQ ID NO: 1477569 - RNA, 19 nt, Artificial Sequence
  Description of Artificial Sequence: Synthetic oligonucleotide
  Antisense strand to SEQ ID NO: 1477568
accuacagguuuaacgguc

SEQ ID NO: 1477570 - RNA, 19 nt, Artificial Sequence
  Description of Artificial Sequence: Synthetic oligonucleotide
  Sense strand starting at position 3587 of SEQ ID NO: 1244290
ccguuaaaccuguaggucu

SEQ ID NO: 1477571 - RNA, 19 nt, Artificial Sequence
  Description of Artificial Sequence: Synthetic oligonucleotide
  Antisense strand to SEQ ID NO: 1477570
agaccuacagguuuaacgg

SEQ ID NO: 1477572 - RNA, 19 nt, Artificial Sequence
  Description of Artificial Sequence: Synthetic oligonucleotide
  Sense strand starting at position 3594 of SEQ ID NO: 1244290
accuguaggucuuuccaga

SEQ ID NO: 1477573 - RNA, 19 nt, Artificial Sequence
  Description of Artificial Sequence: Synthetic oligonucleotide
  Antisense strand to SEQ ID NO: 1477572
ucuggaaagaccuacaggu

SEQ ID NO: 1477574 - RNA, 19 nt, Artificial Sequence
  Description of Artificial Sequence: Synthetic oligonucleotide
  Sense strand starting at position 3601 of SEQ ID NO: 1244290
ggucuuuccagagaaagug

SEQ ID NO: 1477575 - RNA, 19 nt, Artificial Sequence
  Description of Artificial Sequence: Synthetic oligonucleotide
  Antisense strand to SEQ ID NO: 1477574
cacuuucucuggaaagacc

SEQ ID NO: 1477576 - RNA, 19 nt, Artificial Sequence
  Description of Artificial Sequence: Synthetic oligonucleotide
  Sense strand starting at position 3664 of SEQ ID NO: 1244290
ggugguuucccaugaccac

SEQ ID NO: 1477577 - RNA, 19 nt, Artificial Sequence
  Description of Artificial Sequence: Synthetic oligonucleotide
  Antisense strand to SEQ ID NO: 1477576
guggucaugggaaaccacc

SEQ ID NO: 1477578 - RNA, 19 nt, Artificial Sequence
  Description of Artificial Sequence: Synthetic oligonucleotide
  Sense strand starting at position 3925 of SEQ ID NO: 1244290
gggucauucucccuggaga

SEQ ID NO: 1477579 - RNA, 19 nt, Artificial Sequence
  Description of Artificial Sequence: Synthetic oligonucleotide
  Antisense strand to SEQ ID NO: 1477578
ucuccagggagaaugaccc

SEQ ID NO: 1477580 - RNA, 19 nt, Artificial Sequence
  Description of Artificial Sequence: Synthetic oligonucleotide
  Sense strand starting at position 3926 of SEQ ID NO: 1244290
ggucauucucccuggagau

SEQ ID NO: 1477581 - RNA, 19 nt, Artificial Sequence
  Description of Artificial Sequence: Synthetic oligonucleotide
  Antisense strand to SEQ ID NO: 1477580
aucuccagggagaaugacc

SEQ ID NO: 1477582 - RNA, 19 nt, Artificial Sequence
  Description of Artificial Sequence: Synthetic oligonucleotide
  Sense strand starting at position 3927 of SEQ ID NO: 1244290
gucauucucccuggagaug

SEQ ID NO: 1477583 - RNA, 19 nt, Artificial Sequence
  Description of Artificial Sequence: Synthetic oligonucleotide
  Antisense strand to SEQ ID NO: 1477582
caucuccagggagaaugac

SEQ ID NO: 1477584 - RNA, 19 nt, Artificial Sequence
  Description of Artificial Sequence: Synthetic oligonucleotide
  Sense strand starting at position 3928 of SEQ ID NO: 1244290
ucauucucccuggagaugu

SEQ ID NO: 1477585 - RNA, 19 nt, Artificial Sequence
  Description of Artificial Sequence: Synthetic oligonucleotide
  Antisense strand to SEQ ID NO: 1477584
acaucuccagggagaauga

SEQ ID NO: 1477586 - RNA, 19 nt, Artificial Sequence
  Description of Artificial Sequence: Synthetic oligonucleotide
  Sense strand starting at position 3938 of SEQ ID NO: 1244290
uggagauguggucacguca

SEQ ID NO: 1477587 - RNA, 19 nt, Artificial Sequence
  Description of Artificial Sequence: Synthetic oligonucleotide
  Antisense strand to SEQ ID NO: 1477586
ugacgugaccacaucucca

SEQ ID NO: 1477588 - RNA, 19 nt, Artificial Sequence
  Description of Artificial Sequence: Synthetic oligonucleotide
  Sense strand starting at position 81 of SEQ ID NO: 1244291
gcccuuugauuugcagcaa

SEQ ID NO: 1477589 - RNA, 19 nt, Artificial Sequence
  Description of Artificial Sequence: Synthetic oligonucleotide
  Antisense strand to SEQ ID NO: 1477588
uugcugcaaaucaaagggc

SEQ ID NO: 1477590 - RNA, 19 nt, Artificial Sequence
  Description of Artificial Sequence: Synthetic oligonucleotide
  Sense strand starting at position 105 of SEQ ID NO: 1244291
ggagccuucccugggacau

SEQ ID NO: 1477591 - RNA, 19 nt, Artificial Sequence
  Description of Artificial Sequence: Synthetic oligonucleotide
  Antisense strand to SEQ ID NO: 1477590
augucccagggaaggcucc

SEQ ID NO: 1477592 - RNA, 19 nt, Artificial Sequence
  Description of Artificial Sequence: Synthetic oligonucleotide
  Sense strand starting at position 439 of SEQ ID NO: 1244291
aggaccuaagcaugucaau

SEQ ID NO: 1477593 - RNA, 19 nt, Artificial Sequence
  Description of Artificial Sequence: Synthetic oligonucleotide
  Antisense strand to SEQ ID NO: 1477592
auugacaugcuuagguccu

SEQ ID NO: 1477594 - RNA, 19 nt, Artificial Sequence
  Description of Artificial Sequence: Synthetic oligonucleotide
  Sense strand starting at position 611 of SEQ ID NO: 1244291
ugcagauucugacucagaa

SEQ ID NO: 1477595 - RNA, 19 nt, Artificial Sequence
  Description of Artificial Sequence: Synthetic oligonucleotide
  Antisense strand to SEQ ID NO: 1477594
uucugagucagaaucugca

SEQ ID NO: 1477596 - RNA, 19 nt, Artificial Sequence
  Description of Artificial Sequence: Synthetic oligonucleotide
  Sense strand starting at position 653 of SEQ ID NO: 1244291
cugcauuuccaguaagcuc

SEQ ID NO: 1477597 - RNA, 19 nt, Artificial Sequence
  Description of Artificial Sequence: Synthetic oligonucleotide
  Antisense strand to SEQ ID NO: 1477596
gagcuuacuggaaaugcag

SEQ ID NO: 1477598 - RNA, 19 nt, Artificial Sequence
  Description of Artificial Sequence: Synthetic oligonucleotide
  Sense strand starting at position 725 of SEQ ID NO: 1244291
uccagacuuugguucucaa

SEQ ID NO: 1477599 - RNA, 19 nt, Artificial Sequence
  Description of Artificial Sequence: Synthetic oligonucleotide
  Antisense strand to SEQ ID NO: 1477598
uugagaaccaaagucugga

SEQ ID NO: 1477600 - RNA, 19 nt, Artificial Sequence
  Description of Artificial Sequence: Synthetic oligonucleotide
  Sense strand starting at position 752 of SEQ ID NO: 1244291
agcagucaccaaggagaua

SEQ ID NO: 1477601 - RNA, 19 nt, Artificial Sequence
  Description of Artificial Sequence: Synthetic oligonucleotide
  Antisense strand to SEQ ID NO: 1477600
uaucuccuuggugacugcu

SEQ ID NO: 1477602 - RNA, 19 nt, Artificial Sequence
  Description of Artificial Sequence: Synthetic oligonucleotide
  Sense strand starting at position 789 of SEQ ID NO: 1244291
ggaugaagucagugagauu

SEQ ID NO: 1477603 - RNA, 19 nt, Artificial Sequence
  Description of Artificial Sequence: Synthetic oligonucleotide
  Antisense strand to SEQ ID NO: 1477602
aaucucacugacuucaucc

SEQ ID NO: 1477604 - RNA, 19 nt, Artificial Sequence
  Description of Artificial Sequence: Synthetic oligonucleotide
  Sense strand starting at position 800 of SEQ ID NO: 1244291
gugagauucucuuccauga

SEQ ID NO: 1477605 - RNA, 19 nt, Artificial Sequence
  Description of Artificial Sequence: Synthetic oligonucleotide
  Antisense strand to SEQ ID NO: 1477604
ucauggaagagaaucucac

SEQ ID NO: 1477606 - RNA, 19 nt, Artificial Sequence
  Description of Artificial Sequence: Synthetic oligonucleotide
  Sense strand starting at position 805 of SEQ ID NO: 1244291
auucucuuccaugauugua

SEQ ID NO: 1477607 - RNA, 19 nt, Artificial Sequence
  Description of Artificial Sequence: Synthetic oligonucleotide
  Antisense strand to SEQ ID NO: 1477606
uacaaucauggaagagaau

SEQ ID NO: 1477608 - RNA, 19 nt, Artificial Sequence
  Description of Artificial Sequence: Synthetic oligonucleotide
  Sense strand starting at position 960 of SEQ ID NO: 1244291
cccucuagagcggaaauaa

SEQ ID NO: 1477609 - RNA, 19 nt, Artificial Sequence
  Description of Artificial Sequence: Synthetic oligonucleotide
  Antisense strand to SEQ ID NO: 1477608
uuauuuccgcucuagaggg

SEQ ID NO: 1477610 - RNA, 19 nt, Artificial Sequence
  Description of Artificial Sequence: Synthetic oligonucleotide
  Sense strand starting at position 1187 of SEQ ID NO: 1244291
gcaugagaugcuggaaaug

SEQ ID NO: 1477611 - RNA, 19 nt, Artificial Sequence
  Description of Artificial Sequence: Synthetic oligonucleotide
  Antisense strand to SEQ ID NO: 1477610
cauuuccagcaucucaugc

SEQ ID NO: 1477612 - RNA, 19 nt, Artificial Sequence
  Description of Artificial Sequence: Synthetic oligonucleotide
  Sense strand starting at position 1399 of SEQ ID NO: 1244291
guggauaagagaggucuau

SEQ ID NO: 1477613 - RNA, 19 nt, Artificial Sequence
  Description of Artificial Sequence: Synthetic oligonucleotide
  Antisense strand to SEQ ID NO: 1477612
auagaccucucuuauccac

SEQ ID NO: 1477614 - RNA, 19 nt, Artificial Sequence
  Description of Artificial Sequence: Synthetic oligonucleotide
  Sense strand starting at position 1429 of SEQ ID NO: 1244291
gcccuaagaguuuaugauu

SEQ ID NO: 1477615 - RNA, 19 nt, Artificial Sequence
  Description of Artificial Sequence: Synthetic oligonucleotide
  Antisense strand to SEQ ID NO: 1477614
aaucauaaacucuuagggc

SEQ ID NO: 1477616 - RNA, 19 nt, Artificial Sequence
  Description of Artificial Sequence: Synthetic oligonucleotide
  Sense strand starting at position 1437 of SEQ ID NO: 1244291
aguuuaugauucucugaca

SEQ ID NO: 1477617 - RNA, 19 nt, Artificial Sequence
  Description of Artificial Sequence: Synthetic oligonucleotide
  Antisense strand to SEQ ID NO: 1477616
ugucagagaaucauaaacu

SEQ ID NO: 1477618 - RNA, 19 nt, Artificial Sequence
  Description of Artificial Sequence: Synthetic oligonucleotide
  Sense strand starting at position 1438 of SEQ ID NO: 1244291
guuuaugauucucugacau

SEQ ID NO: 1477619 - RNA, 19 nt, Artificial Sequence
  Description of Artificial Sequence: Synthetic oligonucleotide
  Antisense strand to SEQ ID NO: 1477618
augucagagaaucauaaac

SEQ ID NO: 1477620 - RNA, 19 nt, Artificial Sequence
  Description of Artificial Sequence: Synthetic oligonucleotide
  Sense strand starting at position 1569 of SEQ ID NO: 1244291
ccagaaagugccugauaga

SEQ ID NO: 1477621 - RNA, 19 nt, Artificial Sequence
  Description of Artificial Sequence: Synthetic oligonucleotide
  Antisense strand to SEQ ID NO: 1477620
ucuaucaggcacuuucugg

SEQ ID NO: 1477622 - RNA, 19 nt, Artificial Sequence
  Description of Artificial Sequence: Synthetic oligonucleotide
  Sense strand starting at position 1576 of SEQ ID NO: 1244291
gugccugauagagacaagu

SEQ ID NO: 1477623 - RNA, 19 nt, Artificial Sequence
  Description of Artificial Sequence: Synthetic oligonucleotide
  Antisense strand to SEQ ID NO: 1477622
acuugucucuaucaggcac

SEQ ID NO: 1477624 - RNA, 19 nt, Artificial Sequence
  Description of Artificial Sequence: Synthetic oligonucleotide
  Sense strand starting at position 1578 of SEQ ID NO: 1244291
gccugauagagacaagucu

SEQ ID NO: 1477625 - RNA, 19 nt, Artificial Sequence
  Description of Artificial Sequence: Synthetic oligonucleotide
  Antisense strand to SEQ ID NO: 1477624
agacuugucucuaucaggc

SEQ ID NO: 1477626 - RNA, 19 nt, Artificial Sequence
  Description of Artificial Sequence: Synthetic oligonucleotide
  Sense strand starting at position 1611 of SEQ ID NO: 1244291
gcuuucugagaagacguua

SEQ ID NO: 1477627 - RNA, 19 nt, Artificial Sequence
  Description of Artificial Sequence: Synthetic oligonucleotide
  Antisense strand to SEQ ID NO: 1477626
uaacgucuucucagaaagc

SEQ ID NO: 1477628 - RNA, 19 nt, Artificial Sequence
  Description of Artificial Sequence: Synthetic oligonucleotide
  Sense strand starting at position 1619 of SEQ ID NO: 1244291
agaagacguuaggaaauuu

SEQ ID NO: 1477629 - RNA, 19 nt, Artificial Sequence
  Description of Artificial Sequence: Synthetic oligonucleotide
  Antisense strand to SEQ ID NO: 1477628
aaauuuccuaacgucuucu

SEQ ID NO: 1477630 - RNA, 19 nt, Artificial Sequence
  Description of Artificial Sequence: Synthetic oligonucleotide
  Sense strand starting at position 1667 of SEQ ID NO: 1244291
augaaaguugacgagucuu

SEQ ID NO: 1477631 - RNA, 19 nt, Artificial Sequence
  Description of Artificial Sequence: Synthetic oligonucleotide
  Antisense strand to SEQ ID NO: 1477630
aagacucgucaacuuucau

SEQ ID NO: 1477632 - RNA, 19 nt, Artificial Sequence
  Description of Artificial Sequence: Synthetic oligonucleotide
  Sense strand starting at position 2283 of SEQ ID NO: 1244291
ugagaagagcccuaagcuu

SEQ ID NO: 1477633 - RNA, 19 nt, Artificial Sequence
  Description of Artificial Sequence: Synthetic oligonucleotide
  Antisense strand to SEQ ID NO: 1477632
aagcuuagggcucuucuca

SEQ ID NO: 1477634 - RNA, 19 nt, Artificial Sequence
  Description of Artificial Sequence: Synthetic oligonucleotide
  Sense strand starting at position 2386 of SEQ ID NO: 1244291
auugaaaucaaugguuggu

SEQ ID NO: 1477635 - RNA, 19 nt, Artificial Sequence
  Description of Artificial Sequence: Synthetic oligonucleotide
  Antisense strand to SEQ ID NO: 1477634
accaaccauugauuucaau

SEQ ID NO: 1477636 - RNA, 19 nt, Artificial Sequence
  Description of Artificial Sequence: Synthetic oligonucleotide
  Sense strand starting at position 2388 of SEQ ID NO: 1244291
ugaaaucaaugguugguuu

SEQ ID NO: 1477637 - RNA, 19 nt, Artificial Sequence
  Description of Artificial Sequence: Synthetic oligonucleotide
  Antisense strand to SEQ ID NO: 1477636
aaaccaaccauugauuuca

SEQ ID NO: 1477638 - RNA, 19 nt, Artificial Sequence
  Description of Artificial Sequence: Synthetic oligonucleotide
  Sense strand starting at position 2931 of SEQ ID NO: 1244291
gaaauuauacuuugaguug

SEQ ID NO: 1477639 - RNA, 19 nt, Artificial Sequence
  Description of Artificial Sequence: Synthetic oligonucleotide
  Antisense strand to SEQ ID NO: 1477638
caacucaaaguauaauuuc

SEQ ID NO: 1477640 - RNA, 19 nt, Artificial Sequence
  Description of Artificial Sequence: Synthetic oligonucleotide
  Sense strand starting at position 3063 of SEQ ID NO: 1244291
uacuucucucgugaugaau

SEQ ID NO: 1477641 - RNA, 19 nt, Artificial Sequence
  Description of Artificial Sequence: Synthetic oligonucleotide
  Antisense strand to SEQ ID NO: 1477640
auucaucacgagagaagua

SEQ ID NO: 1477642 - RNA, 19 nt, Artificial Sequence
  Description of Artificial Sequence: Synthetic oligonucleotide
  Sense strand starting at position 3071 of SEQ ID NO: 1244291
ucgugaugaauccaggcaa

SEQ ID NO: 1477643 - RNA, 19 nt, Artificial Sequence
  Description of Artificial Sequence: Synthetic oligonucleotide
  Antisense strand to SEQ ID NO: 1477642
uugccuggauucaucacga

SEQ ID NO: 1477644 - RNA, 19 nt, Artificial Sequence
  Description of Artificial Sequence: Synthetic oligonucleotide
  Sense strand starting at position 3312 of SEQ ID NO: 1244291
guugguucugaauaaucug

SEQ ID NO: 1477645 - RNA, 19 nt, Artificial Sequence
  Description of Artificial Sequence: Synthetic oligonucleotide
  Antisense strand to SEQ ID NO: 1477644
cagauuauucagaaccaac

SEQ ID NO: 1477646 - RNA, 19 nt, Artificial Sequence
  Description of Artificial Sequence: Synthetic oligonucleotide
  Sense strand starting at position 3315 of SEQ ID NO: 1244291
gguucugaauaaucugaag

SEQ ID NO: 1477647 - RNA, 19 nt, Artificial Sequence
  Description of Artificial Sequence: Synthetic oligonucleotide
  Antisense strand to SEQ ID NO: 1477646
cuucagauuauucagaacc

SEQ ID NO: 1477648 - RNA, 19 nt, Artificial Sequence
  Description of Artificial Sequence: Synthetic oligonucleotide
  Sense strand starting at position 3361 of SEQ ID NO: 1244291
gggauaacauugcuuccua

SEQ ID NO: 1477649 - RNA, 19 nt, Artificial Sequence
  Description of Artificial Sequence: Synthetic oligonucleotide
  Antisense strand to SEQ ID NO: 1477648
uaggaagcaauguuauccc

SEQ ID NO: 1477650 - RNA, 19 nt, Artificial Sequence
  Description of Artificial Sequence: Synthetic oligonucleotide
  Sense strand starting at position 3362 of SEQ ID NO: 1244291
ggauaacauugcuuccuau

SEQ ID NO: 1477651 - RNA, 19 nt, Artificial Sequence
  Description of Artificial Sequence: Synthetic oligonucleotide
  Antisense strand to SEQ ID NO: 1477650
auaggaagcaauguuaucc

SEQ ID NO: 1477652 - RNA, 19 nt, Artificial Sequence
  Description of Artificial Sequence: Synthetic oligonucleotide
  Sense strand starting at position 3394 of SEQ ID NO: 1244291
ugacuuauuggucagggua

SEQ ID NO: 1477653 - RNA, 19 nt, Artificial Sequence
  Description of Artificial Sequence: Synthetic oligonucleotide
  Antisense strand to SEQ ID NO: 1477652
uacccugaccaauaaguca

SEQ ID NO: 1477654 - RNA, 19 nt, Artificial Sequence
  Description of Artificial Sequence: Synthetic oligonucleotide
  Sense strand starting at position 3397 of SEQ ID NO: 1244291
cuuauuggucaggguaaca

SEQ ID NO: 1477655 - RNA, 19 nt, Artificial Sequence
  Description of Artificial Sequence: Synthetic oligonucleotide
  Antisense strand to SEQ ID NO: 1477654
uguuacccugaccaauaag

SEQ ID NO: 1477656 - RNA, 19 nt, Artificial Sequence
  Description of Artificial Sequence: Synthetic oligonucleotide
  Sense strand starting at position 3666 of SEQ ID NO: 1244291
uuuaucucagucuagucaa

SEQ ID NO: 1477657 - RNA, 19 nt, Artificial Sequence
  Description of Artificial Sequence: Synthetic oligonucleotide
  Antisense strand to SEQ ID NO: 1477656
uugacuagacugagauaaa

SEQ ID NO: 1477658 - RNA, 19 nt, Artificial Sequence
  Description of Artificial Sequence: Synthetic oligonucleotide
  Sense strand starting at position 3720 of SEQ ID NO: 1244291
auggcaaauuggccugaga

SEQ ID NO: 1477659 - RNA, 19 nt, Artificial Sequence
  Description of Artificial Sequence: Synthetic oligonucleotide
  Antisense strand to SEQ ID NO: 1477658
ucucaggccaauuugccau

SEQ ID NO: 1477660 - RNA, 19 nt, Artificial Sequence
  Description of Artificial Sequence: Synthetic oligonucleotide
  Sense strand starting at position 3722 of SEQ ID NO: 1244291
ggcaaauuggccugagaaa

SEQ ID NO: 1477661 - RNA, 19 nt, Artificial Sequence
  Description of Artificial Sequence: Synthetic oligonucleotide
  Antisense strand to SEQ ID NO: 1477660
uuucucaggccaauuugcc

SEQ ID NO: 1477662 - RNA, 19 nt, Artificial Sequence
  Description of Artificial Sequence: Synthetic oligonucleotide
  Sense strand starting at position 3723 of SEQ ID NO: 1244291
gcaaauuggccugagaaau

SEQ ID NO: 1477663 - RNA, 19 nt, Artificial Sequence
  Description of Artificial Sequence: Synthetic oligonucleotide
  Antisense strand to SEQ ID NO: 1477662
auuucucaggccaauuugc

SEQ ID NO: 1477664 - RNA, 19 nt, Artificial Sequence
  Description of Artificial Sequence: Synthetic oligonucleotide
  Sense strand starting at position 3802 of SEQ ID NO: 1244291
cagugcagaguccaagaua

SEQ ID NO: 1477665 - RNA, 19 nt, Artificial Sequence
  Description of Artificial Sequence: Synthetic oligonucleotide
  Antisense strand to SEQ ID NO: 1477664
uaucuuggacucugcacug

SEQ ID NO: 1477666 - RNA, 19 nt, Artificial Sequence
  Description of Artificial Sequence: Synthetic oligonucleotide
  Sense strand starting at position 3857 of SEQ ID NO: 1244291
gaagauaaggucuaucgcu

SEQ ID NO: 1477667 - RNA, 19 nt, Artificial Sequence
  Description of Artificial Sequence: Synthetic oligonucleotide
  Antisense strand to SEQ ID NO: 1477666
agcgauagaccuuaucuuc

SEQ ID NO: 1477668 - RNA, 19 nt, Artificial Sequence
  Description of Artificial Sequence: Synthetic oligonucleotide
  Sense strand starting at position 2895 of SEQ ID NO: 1244292
uagugcuuggcauagacau

SEQ ID NO: 1477669 - RNA, 19 nt, Artificial Sequence
  Description of Artificial Sequence: Synthetic oligonucleotide
  Antisense strand to SEQ ID NO: 1477668
augucuaugccaagcacua

SEQ ID NO: 1477670 - RNA, 19 nt, Artificial Sequence
  Description of Artificial Sequence: Synthetic oligonucleotide
  Sense strand starting at position 3279 of SEQ ID NO: 1244292
uagggauggagcuaucguu

SEQ ID NO: 1477671 - RNA, 19 nt, Artificial Sequence
  Description of Artificial Sequence: Synthetic oligonucleotide
  Antisense strand to SEQ ID NO: 1477670
aacgauagcuccaucccua

SEQ ID NO: 1477672 - RNA, 19 nt, Artificial Sequence
  Description of Artificial Sequence: Synthetic oligonucleotide
  Sense strand starting at position 3285 of SEQ ID NO: 1244292
uggagcuaucguuauaauc

SEQ ID NO: 1477673 - RNA, 19 nt, Artificial Sequence
  Description of Artificial Sequence: Synthetic oligonucleotide
  Antisense strand to SEQ ID NO: 1477672
gauuauaacgauagcucca

SEQ ID NO: 1477674 - RNA, 19 nt, Artificial Sequence
  Description of Artificial Sequence: Synthetic oligonucleotide
  Sense strand starting at position 3287 of SEQ ID NO: 1244292
gagcuaucguuauaaucag

SEQ ID NO: 1477675 - RNA, 19 nt, Artificial Sequence
  Description of Artificial Sequence: Synthetic oligonucleotide
  Antisense strand to SEQ ID NO: 1477674
cugauuauaacgauagcuc

SEQ ID NO: 1477676 - RNA, 19 nt, Artificial Sequence
  Description of Artificial Sequence: Synthetic oligonucleotide
  Sense strand starting at position 3293 of SEQ ID NO: 1244292
ucguuauaaucagauuucu

SEQ ID NO: 1477677 - RNA, 19 nt, Artificial Sequence
  Description of Artificial Sequence: Synthetic oligonucleotide
  Antisense strand to SEQ ID NO: 1477676
agaaaucugauuauaacga

SEQ ID NO: 1477678 - RNA, 19 nt, Artificial Sequence
  Description of Artificial Sequence: Synthetic oligonucleotide
  Sense strand starting at position 3632 of SEQ ID NO: 1244292
gcuugagaaaugugucacu

SEQ ID NO: 1477679 - RNA, 19 nt, Artificial Sequence
  Description of Artificial Sequence: Synthetic oligonucleotide
  Antisense strand to SEQ ID NO: 1477678
agugacacauuucucaagc

SEQ ID NO: 1477680 - RNA, 19 nt, Artificial Sequence
  Description of Artificial Sequence: Synthetic oligonucleotide
  Sense strand starting at position 3630 of SEQ ID NO: 1244293
gagcuugagaaauggguca

SEQ ID NO: 1477681 - RNA, 19 nt, Artificial Sequence
  Description of Artificial Sequence: Synthetic oligonucleotide
  Antisense strand to SEQ ID NO: 1477680
ugacccauuucucaagcuc

SEQ ID NO: 1477682 - RNA, 19 nt, Artificial Sequence
  Description of Artificial Sequence: Synthetic oligonucleotide
  Sense strand starting at position 3632 of SEQ ID NO: 1244293
gcuugagaaaugggucacu

SEQ ID NO: 1477683 - RNA, 19 nt, Artificial Sequence
  Description of Artificial Sequence: Synthetic oligonucleotide
  Antisense strand to SEQ ID NO: 1477682
agugacccauuucucaagc

SEQ ID NO: 1477684 - RNA, 19 nt, Artificial Sequence
  Description of Artificial Sequence: Synthetic oligonucleotide
  Sense strand starting at position 142 of SEQ ID NO: 1244294
acuuauuaagguggccaaa

SEQ ID NO: 1477685 - RNA, 19 nt, Artificial Sequence
  Description of Artificial Sequence: Synthetic oligonucleotide
  Antisense strand to SEQ ID NO: 1477684
uuuggccaccuuaauaagu

SEQ ID NO: 1477686 - RNA, 19 nt, Artificial Sequence
  Description of Artificial Sequence: Synthetic oligonucleotide
  Sense strand starting at position 764 of SEQ ID NO: 1244294
gugauacacucauauaaag

SEQ ID NO: 1477687 - RNA, 19 nt, Artificial Sequence
  Description of Artificial Sequence: Synthetic oligonucleotide
  Antisense strand to SEQ ID NO: 1477686
cuuuauaugaguguaucac

SEQ ID NO: 1477688 - RNA, 19 nt, Artificial Sequence
  Description of Artificial Sequence: Synthetic oligonucleotide
  Sense strand starting at position 1359 of SEQ ID NO: 1244294
augcuaagaugucauuuaa

SEQ ID NO: 1477689 - RNA, 19 nt, Artificial Sequence
  Description of Artificial Sequence: Synthetic oligonucleotide
  Antisense strand to SEQ ID NO: 1477688
uuaaaugacaucuuagcau

SEQ ID NO: 1477690 - RNA, 19 nt, Artificial Sequence
  Description of Artificial Sequence: Synthetic oligonucleotide
  Sense strand starting at position 3729 of SEQ ID NO: 1244294
ucaguaacauagucaguua

SEQ ID NO: 1477691 - RNA, 19 nt, Artificial Sequence
  Description of Artificial Sequence: Synthetic oligonucleotide
  Antisense strand to SEQ ID NO: 1477690
uaacugacuauguuacuga

SEQ ID NO: 1477692 - RNA, 19 nt, Artificial Sequence
  Description of Artificial Sequence: Synthetic oligonucleotide
  Sense strand starting at position 3732 of SEQ ID NO: 1244294
guaacauagucaguuacaa

SEQ ID NO: 1477693 - RNA, 19 nt, Artificial Sequence
  Description of Artificial Sequence: Synthetic oligonucleotide
  Antisense strand to SEQ ID NO: 1477692
uuguaacugacuauguuac

SEQ ID NO: 1477694 - RNA, 19 nt, Artificial Sequence
  Description of Artificial Sequence: Synthetic oligonucleotide
  Sense strand starting at position 193 of SEQ ID NO: 1244295
agcagaaagucacuuguca

SEQ ID NO: 1477695 - RNA, 19 nt, Artificial Sequence
  Description of Artificial Sequence: Synthetic oligonucleotide
  Antisense strand to SEQ ID NO: 1477694
ugacaagugacuuucugcu

SEQ ID NO: 1477696 - RNA, 19 nt, Artificial Sequence
  Description of Artificial Sequence: Synthetic oligonucleotide
  Sense strand starting at position 197 of SEQ ID NO: 1244295
gaaagucacuugucaguau

SEQ ID NO: 1477697 - RNA, 19 nt, Artificial Sequence
  Description of Artificial Sequence: Synthetic oligonucleotide
  Antisense strand to SEQ ID NO: 1477696
auacugacaagugacuuuc

SEQ ID NO: 1477698 - RNA, 19 nt, Artificial Sequence
  Description of Artificial Sequence: Synthetic oligonucleotide
  Sense strand starting at position 201 of SEQ ID NO: 1244295
gucacuugucaguauggcu

SEQ ID NO: 1477699 - RNA, 19 nt, Artificial Sequence
  Description of Artificial Sequence: Synthetic oligonucleotide
  Antisense strand to SEQ ID NO: 1477698
agccauacugacaagugac

SEQ ID NO: 1477700 - RNA, 19 nt, Artificial Sequence
  Description of Artificial Sequence: Synthetic oligonucleotide
  Sense strand starting at position 262 of SEQ ID NO: 1244295
ugccaugucaggcaagaca

SEQ ID NO: 1477701 - RNA, 19 nt, Artificial Sequence
  Description of Artificial Sequence: Synthetic oligonucleotide
  Antisense strand to SEQ ID NO: 1477700
ugucuugccugacauggca

SEQ ID NO: 1477702 - RNA, 19 nt, Artificial Sequence
  Description of Artificial Sequence: Synthetic oligonucleotide
  Sense strand starting at position 299 of SEQ ID NO: 1244295
aggugauucuuacaaggug

SEQ ID NO: 1477703 - RNA, 19 nt, Artificial Sequence
  Description of Artificial Sequence: Synthetic oligonucleotide
  Antisense strand to SEQ ID NO: 1477702
caccuuguaagaaucaccu

SEQ ID NO: 1477704 - RNA, 19 nt, Artificial Sequence
  Description of Artificial Sequence: Synthetic oligonucleotide
  Sense strand starting at position 304 of SEQ ID NO: 1244295
auucuuacaagguggugaa

SEQ ID NO: 1477705 - RNA, 19 nt, Artificial Sequence
  Description of Artificial Sequence: Synthetic oligonucleotide
  Antisense strand to SEQ ID NO: 1477704
uucaccaccuuguaagaau

SEQ ID NO: 1477706 - RNA, 19 nt, Artificial Sequence
  Description of Artificial Sequence: Synthetic oligonucleotide
  Sense strand starting at position 307 of SEQ ID NO: 1244295
cuuacaagguggugaagau

SEQ ID NO: 1477707 - RNA, 19 nt, Artificial Sequence
  Description of Artificial Sequence: Synthetic oligonucleotide
  Antisense strand to SEQ ID NO: 1477706
aucuucaccaccuuguaag

SEQ ID NO: 1477708 - RNA, 19 nt, Artificial Sequence
  Description of Artificial Sequence: Synthetic oligonucleotide
  Sense strand starting at position 2052 of SEQ ID NO: 1244295
cccuuauaagcgugugcca

SEQ ID NO: 1477709 - RNA, 19 nt, Artificial Sequence
  Description of Artificial Sequence: Synthetic oligonucleotide
  Antisense strand to SEQ ID NO: 1477708
uggcacacgcuuauaaggg

SEQ ID NO: 1477710 - RNA, 19 nt, Artificial Sequence
  Description of Artificial Sequence: Synthetic oligonucleotide
  Sense strand starting at position 2065 of SEQ ID NO: 1244295
gugccaugcccugucuuua

SEQ ID NO: 1477711 - RNA, 19 nt, Artificial Sequence
  Description of Artificial Sequence: Synthetic oligonucleotide
  Antisense strand to SEQ ID NO: 1477710
uaaagacagggcauggcac

SEQ ID NO: 1477712 - RNA, 19 nt, Artificial Sequence
  Description of Artificial Sequence: Synthetic oligonucleotide
  Sense strand starting at position 2118 of SEQ ID NO: 1244295
ggguccagaucuguuccau

SEQ ID NO: 1477713 - RNA, 19 nt, Artificial Sequence
  Description of Artificial Sequence: Synthetic oligonucleotide
  Antisense strand to SEQ ID NO: 1477712
auggaacagaucuggaccc

SEQ ID NO: 1477714 - RNA, 19 nt, Artificial Sequence
  Description of Artificial Sequence: Synthetic oligonucleotide
  Sense strand starting at position 2122 of SEQ ID NO: 1244295
ccagaucuguuccauguua

SEQ ID NO: 1477715 - RNA, 19 nt, Artificial Sequence
  Description of Artificial Sequence: Synthetic oligonucleotide
  Antisense strand to SEQ ID NO: 1477714
uaacauggaacagaucugg

SEQ ID NO: 1477716 - RNA, 19 nt, Artificial Sequence
  Description of Artificial Sequence: Synthetic oligonucleotide
  Sense strand starting at position 2143 of SEQ ID NO: 1244295
agggcaaccuuaugucaca

SEQ ID NO: 1477717 - RNA, 19 nt, Artificial Sequence
  Description of Artificial Sequence: Synthetic oligonucleotide
  Antisense strand to SEQ ID NO: 1477716
ugugacauaagguugcccu

SEQ ID NO: 1477718 - RNA, 19 nt, Artificial Sequence
  Description of Artificial Sequence: Synthetic oligonucleotide
  Sense strand starting at position 2385 of SEQ ID NO: 1244295
uuccuccucugaggugaaa

SEQ ID NO: 1477719 - RNA, 19 nt, Artificial Sequence
  Description of Artificial Sequence: Synthetic oligonucleotide
  Antisense strand to SEQ ID NO: 1477718
uuucaccucagaggaggaa

SEQ ID NO: 1477720 - RNA, 19 nt, Artificial Sequence
  Description of Artificial Sequence: Synthetic oligonucleotide
  Sense strand starting at position 2394 of SEQ ID NO: 1244295
ugaggugaaauccgagaau

SEQ ID NO: 1477721 - RNA, 19 nt, Artificial Sequence
  Description of Artificial Sequence: Synthetic oligonucleotide
  Antisense strand to SEQ ID NO: 1477720
auucucggauuucaccuca

SEQ ID NO: 1477722 - RNA, 19 nt, Artificial Sequence
  Description of Artificial Sequence: Synthetic oligonucleotide
  Sense strand starting at position 2478 of SEQ ID NO: 1244295
gcgcguuacagucauuuau

SEQ ID NO: 1477723 - RNA, 19 nt, Artificial Sequence
  Description of Artificial Sequence: Synthetic oligonucleotide
  Antisense strand to SEQ ID NO: 1477722
auaaaugacuguaacgcgc

SEQ ID NO: 1477724 - RNA, 19 nt, Artificial Sequence
  Description of Artificial Sequence: Synthetic oligonucleotide
  Sense strand starting at position 2480 of SEQ ID NO: 1244295
gcguuacagucauuuauuc

SEQ ID NO: 1477725 - RNA, 19 nt, Artificial Sequence
  Description of Artificial Sequence: Synthetic oligonucleotide
  Antisense strand to SEQ ID NO: 1477724
gaauaaaugacuguaacgc

SEQ ID NO: 1477726 - RNA, 19 nt, Artificial Sequence
  Description of Artificial Sequence: Synthetic oligonucleotide
  Sense strand starting at position 2644 of SEQ ID NO: 1244295
aggcuucaauccgagggaa

SEQ ID NO: 1477727 - RNA, 19 nt, Artificial Sequence
  Description of Artificial Sequence: Synthetic oligonucleotide
  Antisense strand to SEQ ID NO: 1477726
uucccucggauugaagccu

SEQ ID NO: 1477728 - RNA, 19 nt, Artificial Sequence
  Description of Artificial Sequence: Synthetic oligonucleotide
  Sense strand starting at position 2721 of SEQ ID NO: 1244295
agccauuacccucgaaguu

SEQ ID NO: 1477729 - RNA, 19 nt, Artificial Sequence
  Description of Artificial Sequence: Synthetic oligonucleotide
  Antisense strand to SEQ ID NO: 1477728
aacuucgaggguaauggcu

SEQ ID NO: 1477730 - RNA, 19 nt, Artificial Sequence
  Description of Artificial Sequence: Synthetic oligonucleotide
  Sense strand starting at position 2722 of SEQ ID NO: 1244295
gccauuacccucgaaguua

SEQ ID NO: 1477731 - RNA, 19 nt, Artificial Sequence
  Description of Artificial Sequence: Synthetic oligonucleotide
  Antisense strand to SEQ ID NO: 1477730
uaacuucgaggguaauggc

SEQ ID NO: 1477732 - RNA, 19 nt, Artificial Sequence
  Description of Artificial Sequence: Synthetic oligonucleotide
  Sense strand starting at position 2880 of SEQ ID NO: 1244295
uuuauuacugucuggcaca

SEQ ID NO: 1477733 - RNA, 19 nt, Artificial Sequence
  Description of Artificial Sequence: Synthetic oligonucleotide
  Antisense strand to SEQ ID NO: 1477732
ugugccagacaguaauaaa

SEQ ID NO: 1477734 - RNA, 19 nt, Artificial Sequence
  Description of Artificial Sequence: Synthetic oligonucleotide
  Sense strand starting at position 2883 of SEQ ID NO: 1244295
auuacugucuggcacaauu

SEQ ID NO: 1477735 - RNA, 19 nt, Artificial Sequence
  Description of Artificial Sequence: Synthetic oligonucleotide
  Antisense strand to SEQ ID NO: 1477734
aauugugccagacaguaau

SEQ ID NO: 1477736 - RNA, 19 nt, Artificial Sequence
  Description of Artificial Sequence: Synthetic oligonucleotide
  Sense strand starting at position 3083 of SEQ ID NO: 1244295
ugaucaacaugcugaaacu

SEQ ID NO: 1477737 - RNA, 19 nt, Artificial Sequence
  Description of Artificial Sequence: Synthetic oligonucleotide
  Antisense strand to SEQ ID NO: 1477736
aguuucagcauguugauca

SEQ ID NO: 1477738 - RNA, 19 nt, Artificial Sequence
  Description of Artificial Sequence: Synthetic oligonucleotide
  Sense strand starting at position 3295 of SEQ ID NO: 1244295
uuccaagauucgccucauu

SEQ ID NO: 1477739 - RNA, 19 nt, Artificial Sequence
  Description of Artificial Sequence: Synthetic oligonucleotide
  Antisense strand to SEQ ID NO: 1477738
aaugaggcgaaucuuggaa

SEQ ID NO: 1477740 - RNA, 19 nt, Artificial Sequence
  Description of Artificial Sequence: Synthetic oligonucleotide
  Sense strand starting at position 3305 of SEQ ID NO: 1244295
cgccucauuuagggaugga

SEQ ID NO: 1477741 - RNA, 19 nt, Artificial Sequence
  Description of Artificial Sequence: Synthetic oligonucleotide
  Antisense strand to SEQ ID NO: 1477740
uccaucccuaaaugaggcg

SEQ ID NO: 1477742 - RNA, 19 nt, Artificial Sequence
  Description of Artificial Sequence: Synthetic oligonucleotide
  Sense strand starting at position 3320 of SEQ ID NO: 1244295
uggaucuauuguuauaauc

SEQ ID NO: 1477743 - RNA, 19 nt, Artificial Sequence
  Description of Artificial Sequence: Synthetic oligonucleotide
  Antisense strand to SEQ ID NO: 1477742
gauuauaacaauagaucca

SEQ ID NO: 1477744 - RNA, 19 nt, Artificial Sequence
  Description of Artificial Sequence: Synthetic oligonucleotide
  Sense strand starting at position 3343 of SEQ ID NO: 1244295
uucugaaaucagugcuaac

SEQ ID NO: 1477745 - RNA, 19 nt, Artificial Sequence
  Description of Artificial Sequence: Synthetic oligonucleotide
  Antisense strand to SEQ ID NO: 1477744
guuagcacugauuucagaa

SEQ ID NO: 1477746 - RNA, 19 nt, Artificial Sequence
  Description of Artificial Sequence: Synthetic oligonucleotide
  Sense strand starting at position 3346 of SEQ ID NO: 1244295
ugaaaucagugcuaacuuc

SEQ ID NO: 1477747 - RNA, 19 nt, Artificial Sequence
  Description of Artificial Sequence: Synthetic oligonucleotide
  Antisense strand to SEQ ID NO: 1477746
gaaguuagcacugauuuca

SEQ ID NO: 1477748 - RNA, 19 nt, Artificial Sequence
  Description of Artificial Sequence: Synthetic oligonucleotide
  Sense strand starting at position 3390 of SEQ ID NO: 1244295
cuucuuaaagcuggaaguu

SEQ ID NO: 1477749 - RNA, 19 nt, Artificial Sequence
  Description of Artificial Sequence: Synthetic oligonucleotide
  Antisense strand to SEQ ID NO: 1477748
aacuuccagcuuuaagaag

SEQ ID NO: 1477750 - RNA, 19 nt, Artificial Sequence
  Description of Artificial Sequence: Synthetic oligonucleotide
  Sense strand starting at position 3391 of SEQ ID NO: 1244295
uucuuaaagcuggaaguuu

SEQ ID NO: 1477751 - RNA, 19 nt, Artificial Sequence
  Description of Artificial Sequence: Synthetic oligonucleotide
  Antisense strand to SEQ ID NO: 1477750
aaacuuccagcuuuaagaa

SEQ ID NO: 1477752 - RNA, 19 nt, Artificial Sequence
  Description of Artificial Sequence: Synthetic oligonucleotide
  Sense strand starting at position 3402 of SEQ ID NO: 1244295
ggaaguuuccuuggugggu

SEQ ID NO: 1477753 - RNA, 19 nt, Artificial Sequence
  Description of Artificial Sequence: Synthetic oligonucleotide
  Antisense strand to SEQ ID NO: 1477752
acccaccaaggaaacuucc

SEQ ID NO: 1477754 - RNA, 19 nt, Artificial Sequence
  Description of Artificial Sequence: Synthetic oligonucleotide
  Sense strand starting at position 3411 of SEQ ID NO: 1244295
cuugguggguuugauuuaa

SEQ ID NO: 1477755 - RNA, 19 nt, Artificial Sequence
  Description of Artificial Sequence: Synthetic oligonucleotide
  Antisense strand to SEQ ID NO: 1477754
uuaaaucaaacccaccaag

SEQ ID NO: 1477756 - RNA, 19 nt, Artificial Sequence
  Description of Artificial Sequence: Synthetic oligonucleotide
  Sense strand starting at position 3474 of SEQ ID NO: 1244295
uuugcaacuuuggagugaa

SEQ ID NO: 1477757 - RNA, 19 nt, Artificial Sequence
  Description of Artificial Sequence: Synthetic oligonucleotide
  Antisense strand to SEQ ID NO: 1477756
uucacuccaaaguugcaaa

SEQ ID NO: 1477758 - RNA, 19 nt, Artificial Sequence
  Description of Artificial Sequence: Synthetic oligonucleotide
  Sense strand starting at position 3477 of SEQ ID NO: 1244295
gcaacuuuggagugaaagu

SEQ ID NO: 1477759 - RNA, 19 nt, Artificial Sequence
  Description of Artificial Sequence: Synthetic oligonucleotide
  Antisense strand to SEQ ID NO: 1477758
acuuucacuccaaaguugc

SEQ ID NO: 1477760 - RNA, 19 nt, Artificial Sequence
  Description of Artificial Sequence: Synthetic oligonucleotide
  Sense strand starting at position 3520 of SEQ ID NO: 1244295
uuaaguucccauugaaaug

SEQ ID NO: 1477761 - RNA, 19 nt, Artificial Sequence
  Description of Artificial Sequence: Synthetic oligonucleotide
  Antisense strand to SEQ ID NO: 1477760
cauuucaaugggaacuuaa

SEQ ID NO: 1477762 - RNA, 19 nt, Artificial Sequence
  Description of Artificial Sequence: Synthetic oligonucleotide
  Sense strand starting at position 3653 of SEQ ID NO: 1244295
cauugcuugccaugugaag

SEQ ID NO: 1477763 - RNA, 19 nt, Artificial Sequence
  Description of Artificial Sequence: Synthetic oligonucleotide
  Antisense strand to SEQ ID NO: 1477762
cuucacauggcaagcaaug

SEQ ID NO: 1477764 - RNA, 19 nt, Artificial Sequence
  Description of Artificial Sequence: Synthetic oligonucleotide
  Sense strand starting at position 3655 of SEQ ID NO: 1244295
uugcuugccaugugaagag

SEQ ID NO: 1477765 - RNA, 19 nt, Artificial Sequence
  Description of Artificial Sequence: Synthetic oligonucleotide
  Antisense strand to SEQ ID NO: 1477764
cucuucacauggcaagcaa

SEQ ID NO: 1477766 - RNA, 19 nt, Artificial Sequence
  Description of Artificial Sequence: Synthetic oligonucleotide
  Sense strand starting at position 3664 of SEQ ID NO: 1244295
augugaagagcuugagaaa

SEQ ID NO: 1477767 - RNA, 19 nt, Artificial Sequence
  Description of Artificial Sequence: Synthetic oligonucleotide
  Antisense strand to SEQ ID NO: 1477766
uuucucaagcucuucacau

SEQ ID NO: 1477768 - RNA, 19 nt, Artificial Sequence
  Description of Artificial Sequence: Synthetic oligonucleotide
  Sense strand starting at position 3667 of SEQ ID NO: 1244295
ugaagagcuugagaaaugu

SEQ ID NO: 1477769 - RNA, 19 nt, Artificial Sequence
  Description of Artificial Sequence: Synthetic oligonucleotide
  Antisense strand to SEQ ID NO: 1477768
acauuucucaagcucuuca

SEQ ID NO: 1477770 - RNA, 19 nt, Artificial Sequence
  Description of Artificial Sequence: Synthetic oligonucleotide
  Sense strand starting at position 3742 of SEQ ID NO: 1244295
ugguguagccuacagcaua

SEQ ID NO: 1477771 - RNA, 19 nt, Artificial Sequence
  Description of Artificial Sequence: Synthetic oligonucleotide
  Antisense strand to SEQ ID NO: 1477770
uaugcuguaggcuacacca

SEQ ID NO: 1477772 - RNA, 19 nt, Artificial Sequence
  Description of Artificial Sequence: Synthetic oligonucleotide
  Sense strand starting at position 3844 of SEQ ID NO: 1244295
gcagguauuuguguauaua

SEQ ID NO: 1477773 - RNA, 19 nt, Artificial Sequence
  Description of Artificial Sequence: Synthetic oligonucleotide
  Antisense strand to SEQ ID NO: 1477772
uauauacacaaauaccugc

SEQ ID NO: 1477774 - RNA, 19 nt, Artificial Sequence
  Description of Artificial Sequence: Synthetic oligonucleotide
  Sense strand starting at position 345 of SEQ ID NO: 1244296
ccaggugucggauaccuga

SEQ ID NO: 1477775 - RNA, 19 nt, Artificial Sequence
  Description of Artificial Sequence: Synthetic oligonucleotide
  Antisense strand to SEQ ID NO: 1477774
ucagguauccgacaccugg

SEQ ID NO: 1477776 - RNA, 19 nt, Artificial Sequence
  Description of Artificial Sequence: Synthetic oligonucleotide
  Sense strand starting at position 747 of SEQ ID NO: 1244296
ccuagucuuuccuuggaaa

SEQ ID NO: 1477777 - RNA, 19 nt, Artificial Sequence
  Description of Artificial Sequence: Synthetic oligonucleotide
  Antisense strand to SEQ ID NO: 1477776
uuuccaaggaaagacuagg

SEQ ID NO: 1477778 - RNA, 19 nt, Artificial Sequence
  Description of Artificial Sequence: Synthetic oligonucleotide
  Sense strand starting at position 855 of SEQ ID NO: 1244296
guucucugcgugguagauu

SEQ ID NO: 1477779 - RNA, 19 nt, Artificial Sequence
  Description of Artificial Sequence: Synthetic oligonucleotide
  Antisense strand to SEQ ID NO: 1477778
aaucuaccacgcagagaac

SEQ ID NO: 1477780 - RNA, 19 nt, Artificial Sequence
  Description of Artificial Sequence: Synthetic oligonucleotide
  Sense strand starting at position 871 of SEQ ID NO: 1244296
auugauugcuucucuagga

SEQ ID NO: 1477781 - RNA, 19 nt, Artificial Sequence
  Description of Artificial Sequence: Synthetic oligonucleotide
  Antisense strand to SEQ ID NO: 1477780
uccuagagaagcaaucaau

SEQ ID NO: 1477782 - RNA, 19 nt, Artificial Sequence
  Description of Artificial Sequence: Synthetic oligonucleotide
  Sense strand starting at position 919 of SEQ ID NO: 1244296
gccugauguggucaucucu

SEQ ID NO: 1477783 - RNA, 19 nt, Artificial Sequence
  Description of Artificial Sequence: Synthetic oligonucleotide
  Antisense strand to SEQ ID NO: 1477782
agagaugaccacaucaggc

SEQ ID NO: 1477784 - RNA, 19 nt, Artificial Sequence
  Description of Artificial Sequence: Synthetic oligonucleotide
  Sense strand starting at position 975 of SEQ ID NO: 1244296
gacucagguucucucaguu

SEQ ID NO: 1477785 - RNA, 19 nt, Artificial Sequence
  Description of Artificial Sequence: Synthetic oligonucleotide
  Antisense strand to SEQ ID NO: 1477784
aacugagagaaccugaguc

SEQ ID NO: 1477786 - RNA, 19 nt, Artificial Sequence
  Description of Artificial Sequence: Synthetic oligonucleotide
  Sense strand starting at position 1048 of SEQ ID NO: 1244296
caccaaagauggcuuggau

SEQ ID NO: 1477787 - RNA, 19 nt, Artificial Sequence
  Description of Artificial Sequence: Synthetic oligonucleotide
  Antisense strand to SEQ ID NO: 1477786
auccaagccaucuuuggug

SEQ ID NO: 1477788 - RNA, 19 nt, Artificial Sequence
  Description of Artificial Sequence: Synthetic oligonucleotide
  Sense strand starting at position 1205 of SEQ ID NO: 1244296
gggcaugucaccugacacu

SEQ ID NO: 1477789 - RNA, 19 nt, Artificial Sequence
  Description of Artificial Sequence: Synthetic oligonucleotide
  Antisense strand to SEQ ID NO: 1477788
agugucaggugacaugccc

SEQ ID NO: 1477790 - RNA, 19 nt, Artificial Sequence
  Description of Artificial Sequence: Synthetic oligonucleotide
  Sense strand starting at position 1260 of SEQ ID NO: 1244296
augugaagguacuuuguga

SEQ ID NO: 1477791 - RNA, 19 nt, Artificial Sequence
  Description of Artificial Sequence: Synthetic oligonucleotide
  Antisense strand to SEQ ID NO: 1477790
ucacaaaguaccuucacau

SEQ ID NO: 1477792 - RNA, 19 nt, Artificial Sequence
  Description of Artificial Sequence: Synthetic oligonucleotide
  Sense strand starting at position 1289 of SEQ ID NO: 1244296
aaaggcuaguuguuaggau

SEQ ID NO: 1477793 - RNA, 19 nt, Artificial Sequence
  Description of Artificial Sequence: Synthetic oligonucleotide
  Antisense strand to SEQ ID NO: 1477792
auccuaacaacuagccuuu

SEQ ID NO: 1477794 - RNA, 19 nt, Artificial Sequence
  Description of Artificial Sequence: Synthetic oligonucleotide
  Sense strand starting at position 1329 of SEQ ID NO: 1244296
auggucuuccuccaugauu

SEQ ID NO: 1477795 - RNA, 19 nt, Artificial Sequence
  Description of Artificial Sequence: Synthetic oligonucleotide
  Antisense strand to SEQ ID NO: 1477794
aaucauggaggaagaccau

SEQ ID NO: 1477796 - RNA, 19 nt, Artificial Sequence
  Description of Artificial Sequence: Synthetic oligonucleotide
  Sense strand starting at position 1414 of SEQ ID NO: 1244296
aagggucauagaugugauc

SEQ ID NO: 1477797 - RNA, 19 nt, Artificial Sequence
  Description of Artificial Sequence: Synthetic oligonucleotide
  Antisense strand to SEQ ID NO: 1477796
gaucacaucuaugacccuu

SEQ ID NO: 1477798 - RNA, 19 nt, Artificial Sequence
  Description of Artificial Sequence: Synthetic oligonucleotide
  Sense strand starting at position 1416 of SEQ ID NO: 1244296
gggucauagaugugaucca

SEQ ID NO: 1477799 - RNA, 19 nt, Artificial Sequence
  Description of Artificial Sequence: Synthetic oligonucleotide
  Antisense strand to SEQ ID NO: 1477798
uggaucacaucuaugaccc

SEQ ID NO: 1477800 - RNA, 19 nt, Artificial Sequence
  Description of Artificial Sequence: Synthetic oligonucleotide
  Sense strand starting at position 1423 of SEQ ID NO: 1244296
agaugugauccauguggau

SEQ ID NO: 1477801 - RNA, 19 nt, Artificial Sequence
  Description of Artificial Sequence: Synthetic oligonucleotide
  Antisense strand to SEQ ID NO: 1477800
auccacauggaucacaucu

SEQ ID NO: 1477802 - RNA, 19 nt, Artificial Sequence
  Description of Artificial Sequence: Synthetic oligonucleotide
  Sense strand starting at position 1425 of SEQ ID NO: 1244296
augugauccauguggauga

SEQ ID NO: 1477803 - RNA, 19 nt, Artificial Sequence
  Description of Artificial Sequence: Synthetic oligonucleotide
  Antisense strand to SEQ ID NO: 1477802
ucauccacauggaucacau

SEQ ID NO: 1477804 - RNA, 19 nt, Artificial Sequence
  Description of Artificial Sequence: Synthetic oligonucleotide
  Sense strand starting at position 1571 of SEQ ID NO: 1244296
agccucaaugauugauaga

SEQ ID NO: 1477805 - RNA, 19 nt, Artificial Sequence
  Description of Artificial Sequence: Synthetic oligonucleotide
  Antisense strand to SEQ ID NO: 1477804
ucuaucaaucauugaggcu

SEQ ID NO: 1477806 - RNA, 19 nt, Artificial Sequence
  Description of Artificial Sequence: Synthetic oligonucleotide
  Sense strand starting at position 1608 of SEQ ID NO: 1244296
gccaguugaucccuccuua

SEQ ID NO: 1477807 - RNA, 19 nt, Artificial Sequence
  Description of Artificial Sequence: Synthetic oligonucleotide
  Antisense strand to SEQ ID NO: 1477806
uaaggagggaucaacuggc

SEQ ID NO: 1477808 - RNA, 19 nt, Artificial Sequence
  Description of Artificial Sequence: Synthetic oligonucleotide
  Sense strand starting at position 1612 of SEQ ID NO: 1244296
guugaucccuccuuaguuu

SEQ ID NO: 1477809 - RNA, 19 nt, Artificial Sequence
  Description of Artificial Sequence: Synthetic oligonucleotide
  Antisense strand to SEQ ID NO: 1477808
aaacuaaggagggaucaac

SEQ ID NO: 1477810 - RNA, 19 nt, Artificial Sequence
  Description of Artificial Sequence: Synthetic oligonucleotide
  Sense strand starting at position 1625 of SEQ ID NO: 1244296
uaguuugcagaccgguaaa

SEQ ID NO: 1477811 - RNA, 19 nt, Artificial Sequence
  Description of Artificial Sequence: Synthetic oligonucleotide
  Antisense strand to SEQ ID NO: 1477810
uuuaccggucugcaaacua

SEQ ID NO: 1477812 - RNA, 19 nt, Artificial Sequence
  Description of Artificial Sequence: Synthetic oligonucleotide
  Sense strand starting at position 1650 of SEQ ID NO: 1244296
cccagaaugugaccagagu

SEQ ID NO: 1477813 - RNA, 19 nt, Artificial Sequence
  Description of Artificial Sequence: Synthetic oligonucleotide
  Antisense strand to SEQ ID NO: 1477812
acucuggucacauucuggg

SEQ ID NO: 1477814 - RNA, 19 nt, Artificial Sequence
  Description of Artificial Sequence: Synthetic oligonucleotide
  Sense strand starting at position 1664 of SEQ ID NO: 1244296
agaguuacacaaugaguca

SEQ ID NO: 1477815 - RNA, 19 nt, Artificial Sequence
  Description of Artificial Sequence: Synthetic oligonucleotide
  Antisense strand to SEQ ID NO: 1477814
ugacucauuguguaacucu

SEQ ID NO: 1477816 - RNA, 19 nt, Artificial Sequence
  Description of Artificial Sequence: Synthetic oligonucleotide
  Sense strand starting at position 1675 of SEQ ID NO: 1244296
augagucaguggccaaaga

SEQ ID NO: 1477817 - RNA, 19 nt, Artificial Sequence
  Description of Artificial Sequence: Synthetic oligonucleotide
  Antisense strand to SEQ ID NO: 1477816
ucuuuggccacugacucau

SEQ ID NO: 1477818 - RNA, 19 nt, Artificial Sequence
  Description of Artificial Sequence: Synthetic oligonucleotide
  Sense strand starting at position 2698 of SEQ ID NO: 1244296
gcauuaagacccugucuca

SEQ ID NO: 1477819 - RNA, 19 nt, Artificial Sequence
  Description of Artificial Sequence: Synthetic oligonucleotide
  Antisense strand to SEQ ID NO: 1477818
ugagacagggucuuaaugc

SEQ ID NO: 1477820 - RNA, 19 nt, Artificial Sequence
  Description of Artificial Sequence: Synthetic oligonucleotide
  Sense strand starting at position 2793 of SEQ ID NO: 1244296
gccucaugaguuugagacu

SEQ ID NO: 1477821 - RNA, 19 nt, Artificial Sequence
  Description of Artificial Sequence: Synthetic oligonucleotide
  Antisense strand to SEQ ID NO: 1477820
agucucaaacucaugaggc

SEQ ID NO: 1477822 - RNA, 19 nt, Artificial Sequence
  Description of Artificial Sequence: Synthetic oligonucleotide
  Sense strand starting at position 2829 of SEQ ID NO: 1244296
gaaaccucgucucuccaga

SEQ ID NO: 1477823 - RNA, 19 nt, Artificial Sequence
  Description of Artificial Sequence: Synthetic oligonucleotide
  Antisense strand to SEQ ID NO: 1477822
ucuggagagacgagguuuc

SEQ ID NO: 1477824 - RNA, 19 nt, Artificial Sequence
  Description of Artificial Sequence: Synthetic oligonucleotide
  Sense strand starting at position 3176 of SEQ ID NO: 1244296
ccuguagguuaccuuugaa

SEQ ID NO: 1477825 - RNA, 19 nt, Artificial Sequence
  Description of Artificial Sequence: Synthetic oligonucleotide
  Antisense strand to SEQ ID NO: 1477824
uucaaagguaaccuacagg

SEQ ID NO: 1477826 - RNA, 19 nt, Artificial Sequence
  Description of Artificial Sequence: Synthetic oligonucleotide
  Sense strand starting at position 3179 of SEQ ID NO: 1244296
guagguuaccuuugaacaa

SEQ ID NO: 1477827 - RNA, 19 nt, Artificial Sequence
  Description of Artificial Sequence: Synthetic oligonucleotide
  Antisense strand to SEQ ID NO: 1477826
uuguucaaagguaaccuac

SEQ ID NO: 1477828 - RNA, 19 nt, Artificial Sequence
  Description of Artificial Sequence: Synthetic oligonucleotide
  Sense strand starting at position 3247 of SEQ ID NO: 1244296
ugauaucaucucugaggau

SEQ ID NO: 1477829 - RNA, 19 nt, Artificial Sequence
  Description of Artificial Sequence: Synthetic oligonucleotide
  Antisense strand to SEQ ID NO: 1477828
auccucagagaugauauca

SEQ ID NO: 1477830 - RNA, 19 nt, Artificial Sequence
  Description of Artificial Sequence: Synthetic oligonucleotide
  Sense strand starting at position 3275 of SEQ ID NO: 1244296
acagacuuauuccugugau

SEQ ID NO: 1477831 - RNA, 19 nt, Artificial Sequence
  Description of Artificial Sequence: Synthetic oligonucleotide
  Antisense strand to SEQ ID NO: 1477830
aucacaggaauaagucugu

SEQ ID NO: 1477832 - RNA, 19 nt, Artificial Sequence
  Description of Artificial Sequence: Synthetic oligonucleotide
  Sense strand starting at position 3278 of SEQ ID NO: 1244296
gacuuauuccugugauguc

SEQ ID NO: 1477833 - RNA, 19 nt, Artificial Sequence
  Description of Artificial Sequence: Synthetic oligonucleotide
  Antisense strand to SEQ ID NO: 1477832
gacaucacaggaauaaguc

SEQ ID NO: 1477834 - RNA, 19 nt, Artificial Sequence
  Description of Artificial Sequence: Synthetic oligonucleotide
  Sense strand starting at position 3319 of SEQ ID NO: 1244296
acauuugucuaaggaauca

SEQ ID NO: 1477835 - RNA, 19 nt, Artificial Sequence
  Description of Artificial Sequence: Synthetic oligonucleotide
  Antisense strand to SEQ ID NO: 1477834
ugauuccuuagacaaaugu

SEQ ID NO: 1477836 - RNA, 19 nt, Artificial Sequence
  Description of Artificial Sequence: Synthetic oligonucleotide
  Sense strand starting at position 3524 of SEQ ID NO: 1244296
agaauugagccuggcuguu

SEQ ID NO: 1477837 - RNA, 19 nt, Artificial Sequence
  Description of Artificial Sequence: Synthetic oligonucleotide
  Antisense strand to SEQ ID NO: 1477836
aacagccaggcucaauucu

SEQ ID NO: 1477838 - RNA, 19 nt, Artificial Sequence
  Description of Artificial Sequence: Synthetic oligonucleotide
  Sense strand starting at position 3537 of SEQ ID NO: 1244296
gcuguugauggaggguuau

SEQ ID NO: 1477839 - RNA, 19 nt, Artificial Sequence
  Description of Artificial Sequence: Synthetic oligonucleotide
  Antisense strand to SEQ ID NO: 1477838
auaacccuccaucaacagc

SEQ ID NO: 1477840 - RNA, 19 nt, Artificial Sequence
  Description of Artificial Sequence: Synthetic oligonucleotide
  Sense strand starting at position 3648 of SEQ ID NO: 1244296
ugcagaugugguuaauuaa

SEQ ID NO: 1477841 - RNA, 19 nt, Artificial Sequence
  Description of Artificial Sequence: Synthetic oligonucleotide
  Antisense strand to SEQ ID NO: 1477840
uuaauuaaccacaucugca

SEQ ID NO: 1477842 - RNA, 19 nt, Artificial Sequence
  Description of Artificial Sequence: Synthetic oligonucleotide
  Sense strand starting at position 3656 of SEQ ID NO: 1244296
ugguuaauuaagggagucu

SEQ ID NO: 1477843 - RNA, 19 nt, Artificial Sequence
  Description of Artificial Sequence: Synthetic oligonucleotide
  Antisense strand to SEQ ID NO: 1477842
agacucccuuaauuaacca

SEQ ID NO: 1477844 - RNA, 19 nt, Artificial Sequence
  Description of Artificial Sequence: Synthetic oligonucleotide
  Sense strand starting at position 3665 of SEQ ID NO: 1244296
aagggagucugagugcaaa

SEQ ID NO: 1477845 - RNA, 19 nt, Artificial Sequence
  Description of Artificial Sequence: Synthetic oligonucleotide
  Antisense strand to SEQ ID NO: 1477844
uuugcacucagacucccuu

SEQ ID NO: 1477846 - RNA, 19 nt, Artificial Sequence
  Description of Artificial Sequence: Synthetic oligonucleotide
  Sense strand starting at position 3677 of SEQ ID NO: 1244296
gugcaaacucggugaagga

SEQ ID NO: 1477847 - RNA, 19 nt, Artificial Sequence
  Description of Artificial Sequence: Synthetic oligonucleotide
  Antisense strand to SEQ ID NO: 1477846
uccuucaccgaguuugcac

SEQ ID NO: 1477848 - RNA, 19 nt, Artificial Sequence
  Description of Artificial Sequence: Synthetic oligonucleotide
  Sense strand starting at position 3767 of SEQ ID NO: 1244296
agcagaaauucucugccau

SEQ ID NO: 1477849 - RNA, 19 nt, Artificial Sequence
  Description of Artificial Sequence: Synthetic oligonucleotide
  Antisense strand to SEQ ID NO: 1477848
auggcagagaauuucugcu

SEQ ID NO: 1477850 - RNA, 19 nt, Artificial Sequence
  Description of Artificial Sequence: Synthetic oligonucleotide
  Sense strand starting at position 3768 of SEQ ID NO: 1244296
gcagaaauucucugccauc

SEQ ID NO: 1477851 - RNA, 19 nt, Artificial Sequence
  Description of Artificial Sequence: Synthetic oligonucleotide
  Antisense strand to SEQ ID NO: 1477850
gauggcagagaauuucugc

SEQ ID NO: 1477852 - RNA, 19 nt, Artificial Sequence
  Description of Artificial Sequence: Synthetic oligonucleotide
  Sense strand starting at position 3814 of SEQ ID NO: 1244296
gauuuccugugagccuuau

SEQ ID NO: 1477853 - RNA, 19 nt, Artificial Sequence
  Description of Artificial Sequence: Synthetic oligonucleotide
  Antisense strand to SEQ ID NO: 1477852
auaaggcucacaggaaauc

SEQ ID NO: 1477854 - RNA, 19 nt, Artificial Sequence
  Description of Artificial Sequence: Synthetic oligonucleotide
  Sense strand starting at position 52 of SEQ ID NO: 1244297
acagaaugcaccuggcaga

SEQ ID NO: 1477855 - RNA, 19 nt, Artificial Sequence
  Description of Artificial Sequence: Synthetic oligonucleotide
  Antisense strand to SEQ ID NO: 1477854
ucugccaggugcauucugu

SEQ ID NO: 1477856 - RNA, 19 nt, Artificial Sequence
  Description of Artificial Sequence: Synthetic oligonucleotide
  Sense strand starting at position 113 of SEQ ID NO: 1244297
ccuugcagucaucaacaga

SEQ ID NO: 1477857 - RNA, 19 nt, Artificial Sequence
  Description of Artificial Sequence: Synthetic oligonucleotide
  Antisense strand to SEQ ID NO: 1477856
ucuguugaugacugcaagg

SEQ ID NO: 1477858 - RNA, 19 nt, Artificial Sequence
  Description of Artificial Sequence: Synthetic oligonucleotide
  Sense strand starting at position 519 of SEQ ID NO: 1244297
ccugccaacguaugugaaa

SEQ ID NO: 1477859 - RNA, 19 nt, Artificial Sequence
  Description of Artificial Sequence: Synthetic oligonucleotide
  Antisense strand to SEQ ID NO: 1477858
uuucacauacguuggcagg

SEQ ID NO: 1477860 - RNA, 19 nt, Artificial Sequence
  Description of Artificial Sequence: Synthetic oligonucleotide
  Sense strand starting at position 521 of SEQ ID NO: 1244297
ugccaacguaugugaaaca

SEQ ID NO: 1477861 - RNA, 19 nt, Artificial Sequence
  Description of Artificial Sequence: Synthetic oligonucleotide
  Antisense strand to SEQ ID NO: 1477860
uguuucacauacguuggca

SEQ ID NO: 1477862 - RNA, 19 nt, Artificial Sequence
  Description of Artificial Sequence: Synthetic oligonucleotide
  Sense strand starting at position 522 of SEQ ID NO: 1244297
gccaacguaugugaaacau

SEQ ID NO: 1477863 - RNA, 19 nt, Artificial Sequence
  Description of Artificial Sequence: Synthetic oligonucleotide
  Antisense strand to SEQ ID NO: 1477862
auguuucacauacguuggc

SEQ ID NO: 1477864 - RNA, 19 nt, Artificial Sequence
  Description of Artificial Sequence: Synthetic oligonucleotide
  Sense strand starting at position 558 of SEQ ID NO: 1244297
gaacucuugggcugcagaa

SEQ ID NO: 1477865 - RNA, 19 nt, Artificial Sequence
  Description of Artificial Sequence: Synthetic oligonucleotide
  Antisense strand to SEQ ID NO: 1477864
uucugcagcccaagaguuc

SEQ ID NO: 1477866 - RNA, 19 nt, Artificial Sequence
  Description of Artificial Sequence: Synthetic oligonucleotide
  Sense strand starting at position 700 of SEQ ID NO: 1244297
gaagguuguugcccuagga

SEQ ID NO: 1477867 - RNA, 19 nt, Artificial Sequence
  Description of Artificial Sequence: Synthetic oligonucleotide
  Antisense strand to SEQ ID NO: 1477866
uccuagggcaacaaccuuc

SEQ ID NO: 1477868 - RNA, 19 nt, Artificial Sequence
  Description of Artificial Sequence: Synthetic oligonucleotide
  Sense strand starting at position 704 of SEQ ID NO: 1244297
guuguugcccuaggagaga

SEQ ID NO: 1477869 - RNA, 19 nt, Artificial Sequence
  Description of Artificial Sequence: Synthetic oligonucleotide
  Antisense strand to SEQ ID NO: 1477868
ucucuccuagggcaacaac

SEQ ID NO: 1477870 - RNA, 19 nt, Artificial Sequence
  Description of Artificial Sequence: Synthetic oligonucleotide
  Sense strand starting at position 876 of SEQ ID NO: 1244297
cuuguuugccaaugugaac

SEQ ID NO: 1477871 - RNA, 19 nt, Artificial Sequence
  Description of Artificial Sequence: Synthetic oligonucleotide
  Antisense strand to SEQ ID NO: 1477870
guucacauuggcaaacaag

SEQ ID NO: 1477872 - RNA, 19 nt, Artificial Sequence
  Description of Artificial Sequence: Synthetic oligonucleotide
  Sense strand starting at position 888 of SEQ ID NO: 1244297
ugugaacucuugcucugga

SEQ ID NO: 1477873 - RNA, 19 nt, Artificial Sequence
  Description of Artificial Sequence: Synthetic oligonucleotide
  Antisense strand to SEQ ID NO: 1477872
uccagagcaagaguucaca

SEQ ID NO: 1477874 - RNA, 19 nt, Artificial Sequence
  Description of Artificial Sequence: Synthetic oligonucleotide
  Sense strand starting at position 891 of SEQ ID NO: 1244297
gaacucuugcucuggagau

SEQ ID NO: 1477875 - RNA, 19 nt, Artificial Sequence
  Description of Artificial Sequence: Synthetic oligonucleotide
  Antisense strand to SEQ ID NO: 1477874
aucuccagagcaagaguuc

SEQ ID NO: 1477876 - RNA, 19 nt, Artificial Sequence
  Description of Artificial Sequence: Synthetic oligonucleotide
  Sense strand starting at position 892 of SEQ ID NO: 1244297
aacucuugcucuggagaug

SEQ ID NO: 1477877 - RNA, 19 nt, Artificial Sequence
  Description of Artificial Sequence: Synthetic oligonucleotide
  Antisense strand to SEQ ID NO: 1477876
caucuccagagcaagaguu

SEQ ID NO: 1477878 - RNA, 19 nt, Artificial Sequence
  Description of Artificial Sequence: Synthetic oligonucleotide
  Sense strand starting at position 1053 of SEQ ID NO: 1244297
gcagguaucucaccuuuaa

SEQ ID NO: 1477879 - RNA, 19 nt, Artificial Sequence
  Description of Artificial Sequence: Synthetic oligonucleotide
  Antisense strand to SEQ ID NO: 1477878
uuaaaggugagauaccugc

SEQ ID NO: 1477880 - RNA, 19 nt, Artificial Sequence
  Description of Artificial Sequence: Synthetic oligonucleotide
  Sense strand starting at position 1258 of SEQ ID NO: 1244297
ccaagagucucgcugcgaa

SEQ ID NO: 1477881 - RNA, 19 nt, Artificial Sequence
  Description of Artificial Sequence: Synthetic oligonucleotide
  Antisense strand to SEQ ID NO: 1477880
uucgcagcgagacucuugg

SEQ ID NO: 1477882 - RNA, 19 nt, Artificial Sequence
  Description of Artificial Sequence: Synthetic oligonucleotide
  Sense strand starting at position 1260 of SEQ ID NO: 1244297
aagagucucgcugcgaagu

SEQ ID NO: 1477883 - RNA, 19 nt, Artificial Sequence
  Description of Artificial Sequence: Synthetic oligonucleotide
  Antisense strand to SEQ ID NO: 1477882
acuucgcagcgagacucuu

SEQ ID NO: 1477884 - RNA, 19 nt, Artificial Sequence
  Description of Artificial Sequence: Synthetic oligonucleotide
  Sense strand starting at position 1273 of SEQ ID NO: 1244297
cgaagucauguuugaaaca

SEQ ID NO: 1477885 - RNA, 19 nt, Artificial Sequence
  Description of Artificial Sequence: Synthetic oligonucleotide
  Antisense strand to SEQ ID NO: 1477884
uguuucaaacaugacuucg

SEQ ID NO: 1477886 - RNA, 19 nt, Artificial Sequence
  Description of Artificial Sequence: Synthetic oligonucleotide
  Sense strand starting at position 1274 of SEQ ID NO: 1244297
gaagucauguuugaaacac

SEQ ID NO: 1477887 - RNA, 19 nt, Artificial Sequence
  Description of Artificial Sequence: Synthetic oligonucleotide
  Antisense strand to SEQ ID NO: 1477886
guguuucaaacaugacuuc

SEQ ID NO: 1477888 - RNA, 19 nt, Artificial Sequence
  Description of Artificial Sequence: Synthetic oligonucleotide
  Sense strand starting at position 1339 of SEQ ID NO: 1244297
agguaagaccgcgaauguu

SEQ ID NO: 1477889 - RNA, 19 nt, Artificial Sequence
  Description of Artificial Sequence: Synthetic oligonucleotide
  Antisense strand to SEQ ID NO: 1477888
aacauucgcggucuuaccu

SEQ ID NO: 1477890 - RNA, 19 nt, Artificial Sequence
  Description of Artificial Sequence: Synthetic oligonucleotide
  Sense strand starting at position 1430 of SEQ ID NO: 1244297
uuaacuacggcacagaaau

SEQ ID NO: 1477891 - RNA, 19 nt, Artificial Sequence
  Description of Artificial Sequence: Synthetic oligonucleotide
  Antisense strand to SEQ ID NO: 1477890
auuucugugccguaguuaa

SEQ ID NO: 1477892 - RNA, 19 nt, Artificial Sequence
  Description of Artificial Sequence: Synthetic oligonucleotide
  Sense strand starting at position 2389 of SEQ ID NO: 1244297
ggcucauuggcugagacgu

SEQ ID NO: 1477893 - RNA, 19 nt, Artificial Sequence
  Description of Artificial Sequence: Synthetic oligonucleotide
  Antisense strand to SEQ ID NO: 1477892
acgucucagccaaugagcc

SEQ ID NO: 1477894 - RNA, 19 nt, Artificial Sequence
  Description of Artificial Sequence: Synthetic oligonucleotide
  Sense strand starting at position 2805 of SEQ ID NO: 1244297
uggagagggucugcagaaa

SEQ ID NO: 1477895 - RNA, 19 nt, Artificial Sequence
  Description of Artificial Sequence: Synthetic oligonucleotide
  Antisense strand to SEQ ID NO: 1477894
uuucugcagacccucucca

SEQ ID NO: 1477896 - RNA, 19 nt, Artificial Sequence
  Description of Artificial Sequence: Synthetic oligonucleotide
  Sense strand starting at position 2952 of SEQ ID NO: 1244297
gugagaucguccagcccga

SEQ ID NO: 1477897 - RNA, 19 nt, Artificial Sequence
  Description of Artificial Sequence: Synthetic oligonucleotide
  Antisense strand to SEQ ID NO: 1477896
ucgggcuggacgaucucac

SEQ ID NO: 1477898 - RNA, 19 nt, Artificial Sequence
  Description of Artificial Sequence: Synthetic oligonucleotide
  Sense strand starting at position 3070 of SEQ ID NO: 1244297
cggugcuccacguuacaca

SEQ ID NO: 1477899 - RNA, 19 nt, Artificial Sequence
  Description of Artificial Sequence: Synthetic oligonucleotide
  Antisense strand to SEQ ID NO: 1477898
uguguaacguggagcaccg

SEQ ID NO: 1477900 - RNA, 19 nt, Artificial Sequence
  Description of Artificial Sequence: Synthetic oligonucleotide
  Sense strand starting at position 3139 of SEQ ID NO: 1244297
ggcguuaagugacucagca

SEQ ID NO: 1477901 - RNA, 19 nt, Artificial Sequence
  Description of Artificial Sequence: Synthetic oligonucleotide
  Antisense strand to SEQ ID NO: 1477900
ugcugagucacuuaacgcc

SEQ ID NO: 1477902 - RNA, 19 nt, Artificial Sequence
  Description of Artificial Sequence: Synthetic oligonucleotide
  Sense strand starting at position 3283 of SEQ ID NO: 1244297
caggcagagugguuucuga

SEQ ID NO: 1477903 - RNA, 19 nt, Artificial Sequence
  Description of Artificial Sequence: Synthetic oligonucleotide
  Antisense strand to SEQ ID NO: 1477902
ucagaaaccacucugccug

SEQ ID NO: 1477904 - RNA, 19 nt, Artificial Sequence
  Description of Artificial Sequence: Synthetic oligonucleotide
  Sense strand starting at position 3335 of SEQ ID NO: 1244297
ccgagcuuccucgauguca

SEQ ID NO: 1477905 - RNA, 19 nt, Artificial Sequence
  Description of Artificial Sequence: Synthetic oligonucleotide
  Antisense strand to SEQ ID NO: 1477904
ugacaucgaggaagcucgg

SEQ ID NO: 1477906 - RNA, 19 nt, Artificial Sequence
  Description of Artificial Sequence: Synthetic oligonucleotide
  Sense strand starting at position 3392 of SEQ ID NO: 1244297
gucucaggcccuugugaac

SEQ ID NO: 1477907 - RNA, 19 nt, Artificial Sequence
  Description of Artificial Sequence: Synthetic oligonucleotide
  Antisense strand to SEQ ID NO: 1477906
guucacaagggccugagac

SEQ ID NO: 1477908 - RNA, 19 nt, Artificial Sequence
  Description of Artificial Sequence: Synthetic oligonucleotide
  Sense strand starting at position 3448 of SEQ ID NO: 1244297
ggagaauucuguuucuccu

SEQ ID NO: 1477909 - RNA, 19 nt, Artificial Sequence
  Description of Artificial Sequence: Synthetic oligonucleotide
  Antisense strand to SEQ ID NO: 1477908
aggagaaacagaauucucc

SEQ ID NO: 1477910 - RNA, 19 nt, Artificial Sequence
  Description of Artificial Sequence: Synthetic oligonucleotide
  Sense strand starting at position 3455 of SEQ ID NO: 1244297
ucuguuucuccugaaucag

SEQ ID NO: 1477911 - RNA, 19 nt, Artificial Sequence
  Description of Artificial Sequence: Synthetic oligonucleotide
  Antisense strand to SEQ ID NO: 1477910
cugauucaggagaaacaga

SEQ ID NO: 1477912 - RNA, 19 nt, Artificial Sequence
  Description of Artificial Sequence: Synthetic oligonucleotide
  Sense strand starting at position 3537 of SEQ ID NO: 1244297
ggugguggaguugaagauu

SEQ ID NO: 1477913 - RNA, 19 nt, Artificial Sequence
  Description of Artificial Sequence: Synthetic oligonucleotide
  Antisense strand to SEQ ID NO: 1477912
aaucuucaacuccaccacc

SEQ ID NO: 1477914 - RNA, 19 nt, Artificial Sequence
  Description of Artificial Sequence: Synthetic oligonucleotide
  Sense strand starting at position 3540 of SEQ ID NO: 1244297
gguggaguugaagauucuu

SEQ ID NO: 1477915 - RNA, 19 nt, Artificial Sequence
  Description of Artificial Sequence: Synthetic oligonucleotide
  Antisense strand to SEQ ID NO: 1477914
aagaaucuucaacuccacc

SEQ ID NO: 1477916 - RNA, 19 nt, Artificial Sequence
  Description of Artificial Sequence: Synthetic oligonucleotide
  Sense strand starting at position 3548 of SEQ ID NO: 1244297
ugaagauucuugccggaau

SEQ ID NO: 1477917 - RNA, 19 nt, Artificial Sequence
  Description of Artificial Sequence: Synthetic oligonucleotide
  Antisense strand to SEQ ID NO: 1477916
auuccggcaagaaucuuca

SEQ ID NO: 1477918 - RNA, 19 nt, Artificial Sequence
  Description of Artificial Sequence: Synthetic oligonucleotide
  Sense strand starting at position 3550 of SEQ ID NO: 1244297
aagauucuugccggaauuc

SEQ ID NO: 1477919 - RNA, 19 nt, Artificial Sequence
  Description of Artificial Sequence: Synthetic oligonucleotide
  Antisense strand to SEQ ID NO: 1477918
gaauuccggcaagaaucuu

SEQ ID NO: 1477920 - RNA, 19 nt, Artificial Sequence
  Description of Artificial Sequence: Synthetic oligonucleotide
  Sense strand starting at position 3604 of SEQ ID NO: 1244297
cugggugguugugagaaca

SEQ ID NO: 1477921 - RNA, 19 nt, Artificial Sequence
  Description of Artificial Sequence: Synthetic oligonucleotide
  Antisense strand to SEQ ID NO: 1477920
uguucucacaaccacccag

SEQ ID NO: 1477922 - RNA, 19 nt, Artificial Sequence
  Description of Artificial Sequence: Synthetic oligonucleotide
  Sense strand starting at position 3614 of SEQ ID NO: 1244297
gugagaacaccagguuaaa

SEQ ID NO: 1477923 - RNA, 19 nt, Artificial Sequence
  Description of Artificial Sequence: Synthetic oligonucleotide
  Antisense strand to SEQ ID NO: 1477922
uuuaaccugguguucucac

SEQ ID NO: 1477924 - RNA, 19 nt, Artificial Sequence
  Description of Artificial Sequence: Synthetic oligonucleotide
  Sense strand starting at position 3682 of SEQ ID NO: 1244297
gaggucauguguucuauca

SEQ ID NO: 1477925 - RNA, 19 nt, Artificial Sequence
  Description of Artificial Sequence: Synthetic oligonucleotide
  Antisense strand to SEQ ID NO: 1477924
ugauagaacacaugaccuc

SEQ ID NO: 1477926 - RNA, 19 nt, Artificial Sequence
  Description of Artificial Sequence: Synthetic oligonucleotide
  Sense strand starting at position 3684 of SEQ ID NO: 1244297
ggucauguguucuaucaag

SEQ ID NO: 1477927 - RNA, 19 nt, Artificial Sequence
  Description of Artificial Sequence: Synthetic oligonucleotide
  Antisense strand to SEQ ID NO: 1477926
cuugauagaacacaugacc

SEQ ID NO: 1477928 - RNA, 19 nt, Artificial Sequence
  Description of Artificial Sequence: Synthetic oligonucleotide
  Sense strand starting at position 3743 of SEQ ID NO: 1244297
uggaguuguggucauugca

SEQ ID NO: 1477929 - RNA, 19 nt, Artificial Sequence
  Description of Artificial Sequence: Synthetic oligonucleotide
  Antisense strand to SEQ ID NO: 1477928
ugcaaugaccacaacucca

SEQ ID NO: 1477930 - RNA, 19 nt, Artificial Sequence
  Description of Artificial Sequence: Synthetic oligonucleotide
  Sense strand starting at position 3750 of SEQ ID NO: 1244297
guggucauugcagagaaug

SEQ ID NO: 1477931 - RNA, 19 nt, Artificial Sequence
  Description of Artificial Sequence: Synthetic oligonucleotide
  Antisense strand to SEQ ID NO: 1477930
cauucucugcaaugaccac

SEQ ID NO: 1477932 - RNA, 19 nt, Artificial Sequence
  Description of Artificial Sequence: Synthetic oligonucleotide
  Sense strand starting at position 3761 of SEQ ID NO: 1244297
agagaaugagcgugagaau

SEQ ID NO: 1477933 - RNA, 19 nt, Artificial Sequence
  Description of Artificial Sequence: Synthetic oligonucleotide
  Antisense strand to SEQ ID NO: 1477932
auucucacgcucauucucu

SEQ ID NO: 1477934 - RNA, 19 nt, Artificial Sequence
  Description of Artificial Sequence: Synthetic oligonucleotide
  Sense strand starting at position 304 of SEQ ID NO: 1244298
ggccaaacaucccugacaa

SEQ ID NO: 1477935 - RNA, 19 nt, Artificial Sequence
  Description of Artificial Sequence: Synthetic oligonucleotide
  Antisense strand to SEQ ID NO: 1477934
uugucagggauguuuggcc

SEQ ID NO: 1477936 - RNA, 19 nt, Artificial Sequence
  Description of Artificial Sequence: Synthetic oligonucleotide
  Sense strand starting at position 305 of SEQ ID NO: 1244298
gccaaacaucccugacaag

SEQ ID NO: 1477937 - RNA, 19 nt, Artificial Sequence
  Description of Artificial Sequence: Synthetic oligonucleotide
  Antisense strand to SEQ ID NO: 1477936
cuugucagggauguuuggc

SEQ ID NO: 1477938 - RNA, 19 nt, Artificial Sequence
  Description of Artificial Sequence: Synthetic oligonucleotide
  Sense strand starting at position 418 of SEQ ID NO: 1244298
gugacagaugaguaggcau

SEQ ID NO: 1477939 - RNA, 19 nt, Artificial Sequence
  Description of Artificial Sequence: Synthetic oligonucleotide
  Antisense strand to SEQ ID NO: 1477938
augccuacucaucugucac

SEQ ID NO: 1477940 - RNA, 19 nt, Artificial Sequence
  Description of Artificial Sequence: Synthetic oligonucleotide
  Sense strand starting at position 420 of SEQ ID NO: 1244298
gacagaugaguaggcauua

SEQ ID NO: 1477941 - RNA, 19 nt, Artificial Sequence
  Description of Artificial Sequence: Synthetic oligonucleotide
  Antisense strand to SEQ ID NO: 1477940
uaaugccuacucaucuguc

SEQ ID NO: 1477942 - RNA, 19 nt, Artificial Sequence
  Description of Artificial Sequence: Synthetic oligonucleotide
  Sense strand starting at position 649 of SEQ ID NO: 1244298
ugaguaguaagguacuaag

SEQ ID NO: 1477943 - RNA, 19 nt, Artificial Sequence
  Description of Artificial Sequence: Synthetic oligonucleotide
  Antisense strand to SEQ ID NO: 1477942
cuuaguaccuuacuacuca

SEQ ID NO: 1477944 - RNA, 19 nt, Artificial Sequence
  Description of Artificial Sequence: Synthetic oligonucleotide
  Sense strand starting at position 674 of SEQ ID NO: 1244298
guacacagugugggaaauu

SEQ ID NO: 1477945 - RNA, 19 nt, Artificial Sequence
  Description of Artificial Sequence: Synthetic oligonucleotide
  Antisense strand to SEQ ID NO: 1477944
aauuucccacacuguguac

SEQ ID NO: 1477946 - RNA, 19 nt, Artificial Sequence
  Description of Artificial Sequence: Synthetic oligonucleotide
  Sense strand starting at position 775 of SEQ ID NO: 1244298
aaguuucuaucagugaaug

SEQ ID NO: 1477947 - RNA, 19 nt, Artificial Sequence
  Description of Artificial Sequence: Synthetic oligonucleotide
  Antisense strand to SEQ ID NO: 1477946
cauucacugauagaaacuu

SEQ ID NO: 1477948 - RNA, 19 nt, Artificial Sequence
  Description of Artificial Sequence: Synthetic oligonucleotide
  Sense strand starting at position 785 of SEQ ID NO: 1244298
cagugaaugccugauuaga

SEQ ID NO: 1477949 - RNA, 19 nt, Artificial Sequence
  Description of Artificial Sequence: Synthetic oligonucleotide
  Antisense strand to SEQ ID NO: 1477948
ucuaaucaggcauucacug

SEQ ID NO: 1477950 - RNA, 19 nt, Artificial Sequence
  Description of Artificial Sequence: Synthetic oligonucleotide
  Sense strand starting at position 787 of SEQ ID NO: 1244298
gugaaugccugauuagauu

SEQ ID NO: 1477951 - RNA, 19 nt, Artificial Sequence
  Description of Artificial Sequence: Synthetic oligonucleotide
  Antisense strand to SEQ ID NO: 1477950
aaucuaaucaggcauucac

SEQ ID NO: 1477952 - RNA, 19 nt, Artificial Sequence
  Description of Artificial Sequence: Synthetic oligonucleotide
  Sense strand starting at position 1109 of SEQ ID NO: 1244298
auaggauucugucucuauu

SEQ ID NO: 1477953 - RNA, 19 nt, Artificial Sequence
  Description of Artificial Sequence: Synthetic oligonucleotide
  Antisense strand to SEQ ID NO: 1477952
aauagagacagaauccuau

SEQ ID NO: 1477954 - RNA, 19 nt, Artificial Sequence
  Description of Artificial Sequence: Synthetic oligonucleotide
  Sense strand starting at position 1209 of SEQ ID NO: 1244298
ugaacacggccuuaucuaa

SEQ ID NO: 1477955 - RNA, 19 nt, Artificial Sequence
  Description of Artificial Sequence: Synthetic oligonucleotide
  Antisense strand to SEQ ID NO: 1477954
uuagauaaggccguguuca

SEQ ID NO: 1477956 - RNA, 19 nt, Artificial Sequence
  Description of Artificial Sequence: Synthetic oligonucleotide
  Sense strand starting at position 1222 of SEQ ID NO: 1244298
aucuaagacaguugaguga

SEQ ID NO: 1477957 - RNA, 19 nt, Artificial Sequence
  Description of Artificial Sequence: Synthetic oligonucleotide
  Antisense strand to SEQ ID NO: 1477956
ucacucaacugucuuagau

SEQ ID NO: 1477958 - RNA, 19 nt, Artificial Sequence
  Description of Artificial Sequence: Synthetic oligonucleotide
  Sense strand starting at position 1226 of SEQ ID NO: 1244298
aagacaguugagugaggau

SEQ ID NO: 1477959 - RNA, 19 nt, Artificial Sequence
  Description of Artificial Sequence: Synthetic oligonucleotide
  Antisense strand to SEQ ID NO: 1477958
auccucacucaacugucuu

SEQ ID NO: 1477960 - RNA, 19 nt, Artificial Sequence
  Description of Artificial Sequence: Synthetic oligonucleotide
  Sense strand starting at position 1233 of SEQ ID NO: 1244298
uugagugaggauggugaaa

SEQ ID NO: 1477961 - RNA, 19 nt, Artificial Sequence
  Description of Artificial Sequence: Synthetic oligonucleotide
  Antisense strand to SEQ ID NO: 1477960
uuucaccauccucacucaa

SEQ ID NO: 1477962 - RNA, 19 nt, Artificial Sequence
  Description of Artificial Sequence: Synthetic oligonucleotide
  Sense strand starting at position 1289 of SEQ ID NO: 1244298
gggcauuaccacugauuga

SEQ ID NO: 1477963 - RNA, 19 nt, Artificial Sequence
  Description of Artificial Sequence: Synthetic oligonucleotide
  Antisense strand to SEQ ID NO: 1477962
ucaaucagugguaaugccc

SEQ ID NO: 1477964 - RNA, 19 nt, Artificial Sequence
  Description of Artificial Sequence: Synthetic oligonucleotide
  Sense strand starting at position 1340 of SEQ ID NO: 1244298
uugacaaaucaguacacgu

SEQ ID NO: 1477965 - RNA, 19 nt, Artificial Sequence
  Description of Artificial Sequence: Synthetic oligonucleotide
  Antisense strand to SEQ ID NO: 1477964
acguguacugauuugucaa

SEQ ID NO: 1477966 - RNA, 19 nt, Artificial Sequence
  Description of Artificial Sequence: Synthetic oligonucleotide
  Sense strand starting at position 1419 of SEQ ID NO: 1244298
ucacaucuucucugacagu

SEQ ID NO: 1477967 - RNA, 19 nt, Artificial Sequence
  Description of Artificial Sequence: Synthetic oligonucleotide
  Antisense strand to SEQ ID NO: 1477966
acugucagagaagauguga

SEQ ID NO: 1477968 - RNA, 19 nt, Artificial Sequence
  Description of Artificial Sequence: Synthetic oligonucleotide
  Sense strand starting at position 1551 of SEQ ID NO: 1244298
gugacacuuccucacucuu

SEQ ID NO: 1477969 - RNA, 19 nt, Artificial Sequence
  Description of Artificial Sequence: Synthetic oligonucleotide
  Antisense strand to SEQ ID NO: 1477968
aagagugaggaagugucac

SEQ ID NO: 1477970 - RNA, 19 nt, Artificial Sequence
  Description of Artificial Sequence: Synthetic oligonucleotide
  Sense strand starting at position 2101 of SEQ ID NO: 1244298
cauucuuccgguggagaug

SEQ ID NO: 1477971 - RNA, 19 nt, Artificial Sequence
  Description of Artificial Sequence: Synthetic oligonucleotide
  Antisense strand to SEQ ID NO: 1477970
caucuccaccggaagaaug

SEQ ID NO: 1477972 - RNA, 19 nt, Artificial Sequence
  Description of Artificial Sequence: Synthetic oligonucleotide
  Sense strand starting at position 2396 of SEQ ID NO: 1244298
gcauuaugucuccaucuua

SEQ ID NO: 1477973 - RNA, 19 nt, Artificial Sequence
  Description of Artificial Sequence: Synthetic oligonucleotide
  Antisense strand to SEQ ID NO: 1477972
uaagauggagacauaaugc

SEQ ID NO: 1477974 - RNA, 19 nt, Artificial Sequence
  Description of Artificial Sequence: Synthetic oligonucleotide
  Sense strand starting at position 2578 of SEQ ID NO: 1244298
aguaagcgugcgguagaua

SEQ ID NO: 1477975 - RNA, 19 nt, Artificial Sequence
  Description of Artificial Sequence: Synthetic oligonucleotide
  Antisense strand to SEQ ID NO: 1477974
uaucuaccgcacgcuuacu

SEQ ID NO: 1477976 - RNA, 19 nt, Artificial Sequence
  Description of Artificial Sequence: Synthetic oligonucleotide
  Sense strand starting at position 2581 of SEQ ID NO: 1244298
aagcgugcgguagauauuu

SEQ ID NO: 1477977 - RNA, 19 nt, Artificial Sequence
  Description of Artificial Sequence: Synthetic oligonucleotide
  Antisense strand to SEQ ID NO: 1477976
aaauaucuaccgcacgcuu

SEQ ID NO: 1477978 - RNA, 19 nt, Artificial Sequence
  Description of Artificial Sequence: Synthetic oligonucleotide
  Sense strand starting at position 2586 of SEQ ID NO: 1244298
ugcgguagauauuuguuua

SEQ ID NO: 1477979 - RNA, 19 nt, Artificial Sequence
  Description of Artificial Sequence: Synthetic oligonucleotide
  Antisense strand to SEQ ID NO: 1477978
uaaacaaauaucuaccgca

SEQ ID NO: 1477980 - RNA, 19 nt, Artificial Sequence
  Description of Artificial Sequence: Synthetic oligonucleotide
  Sense strand starting at position 2587 of SEQ ID NO: 1244298
gcgguagauauuuguuuag

SEQ ID NO: 1477981 - RNA, 19 nt, Artificial Sequence
  Description of Artificial Sequence: Synthetic oligonucleotide
  Antisense strand to SEQ ID NO: 1477980
cuaaacaaauaucuaccgc

SEQ ID NO: 1477982 - RNA, 19 nt, Artificial Sequence
  Description of Artificial Sequence: Synthetic oligonucleotide
  Sense strand starting at position 2660 of SEQ ID NO: 1244298
uguguuagcucauuuaaau

SEQ ID NO: 1477983 - RNA, 19 nt, Artificial Sequence
  Description of Artificial Sequence: Synthetic oligonucleotide
  Antisense strand to SEQ ID NO: 1477982
auuuaaaugagcuaacaca

SEQ ID NO: 1477984 - RNA, 19 nt, Artificial Sequence
  Description of Artificial Sequence: Synthetic oligonucleotide
  Sense strand starting at position 2698 of SEQ ID NO: 1244298
uaaagcacccugugagaaa

SEQ ID NO: 1477985 - RNA, 19 nt, Artificial Sequence
  Description of Artificial Sequence: Synthetic oligonucleotide
  Antisense strand to SEQ ID NO: 1477984
uuucucacagggugcuuua

SEQ ID NO: 1477986 - RNA, 19 nt, Artificial Sequence
  Description of Artificial Sequence: Synthetic oligonucleotide
  Sense strand starting at position 2786 of SEQ ID NO: 1244298
cuaguaauuggcggaagag

SEQ ID NO: 1477987 - RNA, 19 nt, Artificial Sequence
  Description of Artificial Sequence: Synthetic oligonucleotide
  Antisense strand to SEQ ID NO: 1477986
cucuuccgccaauuacuag

SEQ ID NO: 1477988 - RNA, 19 nt, Artificial Sequence
  Description of Artificial Sequence: Synthetic oligonucleotide
  Sense strand starting at position 2787 of SEQ ID NO: 1244298
uaguaauuggcggaagaga

SEQ ID NO: 1477989 - RNA, 19 nt, Artificial Sequence
  Description of Artificial Sequence: Synthetic oligonucleotide
  Antisense strand to SEQ ID NO: 1477988
ucucuuccgccaauuacua

SEQ ID NO: 1477990 - RNA, 19 nt, Artificial Sequence
  Description of Artificial Sequence: Synthetic oligonucleotide
  Sense strand starting at position 3151 of SEQ ID NO: 1244298
agucuuaacaguuagguuu

SEQ ID NO: 1477991 - RNA, 19 nt, Artificial Sequence
  Description of Artificial Sequence: Synthetic oligonucleotide
  Antisense strand to SEQ ID NO: 1477990
aaaccuaacuguuaagacu

SEQ ID NO: 1477992 - RNA, 19 nt, Artificial Sequence
  Description of Artificial Sequence: Synthetic oligonucleotide
  Sense strand starting at position 3212 of SEQ ID NO: 1244298
auacucucugacuguuaga

SEQ ID NO: 1477993 - RNA, 19 nt, Artificial Sequence
  Description of Artificial Sequence: Synthetic oligonucleotide
  Antisense strand to SEQ ID NO: 1477992
ucuaacagucagagaguau

SEQ ID NO: 1477994 - RNA, 19 nt, Artificial Sequence
  Description of Artificial Sequence: Synthetic oligonucleotide
  Sense strand starting at position 3223 of SEQ ID NO: 1244298
cuguuagagccgccuucua

SEQ ID NO: 1477995 - RNA, 19 nt, Artificial Sequence
  Description of Artificial Sequence: Synthetic oligonucleotide
  Antisense strand to SEQ ID NO: 1477994
uagaaggcggcucuaacag

SEQ ID NO: 1477996 - RNA, 19 nt, Artificial Sequence
  Description of Artificial Sequence: Synthetic oligonucleotide
  Sense strand starting at position 3311 of SEQ ID NO: 1244298
ccuuguguugaggauuaag

SEQ ID NO: 1477997 - RNA, 19 nt, Artificial Sequence
  Description of Artificial Sequence: Synthetic oligonucleotide
  Antisense strand to SEQ ID NO: 1477996
cuuaauccucaacacaagg

SEQ ID NO: 1477998 - RNA, 19 nt, Artificial Sequence
  Description of Artificial Sequence: Synthetic oligonucleotide
  Sense strand starting at position 3319 of SEQ ID NO: 1244298
ugaggauuaaguggucacu

SEQ ID NO: 1477999 - RNA, 19 nt, Artificial Sequence
  Description of Artificial Sequence: Synthetic oligonucleotide
  Antisense strand to SEQ ID NO: 1477998
agugaccacuuaauccuca

SEQ ID NO: 1478000 - RNA, 19 nt, Artificial Sequence
  Description of Artificial Sequence: Synthetic oligonucleotide
  Sense strand starting at position 3321 of SEQ ID NO: 1244298
aggauuaaguggucacuuu

SEQ ID NO: 1478001 - RNA, 19 nt, Artificial Sequence
  Description of Artificial Sequence: Synthetic oligonucleotide
  Antisense strand to SEQ ID NO: 1478000
aaagugaccacuuaauccu

SEQ ID NO: 1478002 - RNA, 19 nt, Artificial Sequence
  Description of Artificial Sequence: Synthetic oligonucleotide
  Sense strand starting at position 3322 of SEQ ID NO: 1244298
ggauuaaguggucacuuug

SEQ ID NO: 1478003 - RNA, 19 nt, Artificial Sequence
  Description of Artificial Sequence: Synthetic oligonucleotide
  Antisense strand to SEQ ID NO: 1478002
caaagugaccacuuaaucc

SEQ ID NO: 1478004 - RNA, 19 nt, Artificial Sequence
  Description of Artificial Sequence: Synthetic oligonucleotide
  Sense strand starting at position 3421 of SEQ ID NO: 1244298
gagaaacuugucugagagc

SEQ ID NO: 1478005 - RNA, 19 nt, Artificial Sequence
  Description of Artificial Sequence: Synthetic oligonucleotide
  Antisense strand to SEQ ID NO: 1478004
gcucucagacaaguuucuc

SEQ ID NO: 1478006 - RNA, 19 nt, Artificial Sequence
  Description of Artificial Sequence: Synthetic oligonucleotide
  Sense strand starting at position 3430 of SEQ ID NO: 1244298
gucugagagcugugagaau

SEQ ID NO: 1478007 - RNA, 19 nt, Artificial Sequence
  Description of Artificial Sequence: Synthetic oligonucleotide
  Antisense strand to SEQ ID NO: 1478006
auucucacagcucucagac

SEQ ID NO: 1478008 - RNA, 19 nt, Artificial Sequence
  Description of Artificial Sequence: Synthetic oligonucleotide
  Sense strand starting at position 3441 of SEQ ID NO: 1244298
gugagaaugguguaacauu

SEQ ID NO: 1478009 - RNA, 19 nt, Artificial Sequence
  Description of Artificial Sequence: Synthetic oligonucleotide
  Antisense strand to SEQ ID NO: 1478008
aauguuacaccauucucac

SEQ ID NO: 1478010 - RNA, 19 nt, Artificial Sequence
  Description of Artificial Sequence: Synthetic oligonucleotide
  Sense strand starting at position 3675 of SEQ ID NO: 1244298
cuaggcagggccugagaau

SEQ ID NO: 1478011 - RNA, 19 nt, Artificial Sequence
  Description of Artificial Sequence: Synthetic oligonucleotide
  Antisense strand to SEQ ID NO: 1478010
auucucaggcccugccuag

SEQ ID NO: 1478012 - RNA, 19 nt, Artificial Sequence
  Description of Artificial Sequence: Synthetic oligonucleotide
  Sense strand starting at position 3676 of SEQ ID NO: 1244298
uaggcagggccugagaauu

SEQ ID NO: 1478013 - RNA, 19 nt, Artificial Sequence
  Description of Artificial Sequence: Synthetic oligonucleotide
  Antisense strand to SEQ ID NO: 1478012
aauucucaggcccugccua

SEQ ID NO: 1478014 - RNA, 19 nt, Artificial Sequence
  Description of Artificial Sequence: Synthetic oligonucleotide
  Sense strand starting at position 124 of SEQ ID NO: 1244299
ggagguaacuuuguggaaa

SEQ ID NO: 1478015 - RNA, 19 nt, Artificial Sequence
  Description of Artificial Sequence: Synthetic oligonucleotide
  Antisense strand to SEQ ID NO: 1478014
uuuccacaaaguuaccucc

SEQ ID NO: 1478016 - RNA, 19 nt, Artificial Sequence
  Description of Artificial Sequence: Synthetic oligonucleotide
  Sense strand starting at position 144 of SEQ ID NO: 1244299
gcccuuuaggugggagaga

SEQ ID NO: 1478017 - RNA, 19 nt, Artificial Sequence
  Description of Artificial Sequence: Synthetic oligonucleotide
  Antisense strand to SEQ ID NO: 1478016
ucucucccaccuaaagggc

SEQ ID NO: 1478018 - RNA, 19 nt, Artificial Sequence
  Description of Artificial Sequence: Synthetic oligonucleotide
  Sense strand starting at position 158 of SEQ ID NO: 1244299
agagaacagacuuguugca

SEQ ID NO: 1478019 - RNA, 19 nt, Artificial Sequence
  Description of Artificial Sequence: Synthetic oligonucleotide
  Antisense strand to SEQ ID NO: 1478018
ugcaacaagucuguucucu

SEQ ID NO: 1478020 - RNA, 19 nt, Artificial Sequence
  Description of Artificial Sequence: Synthetic oligonucleotide
  Sense strand starting at position 160 of SEQ ID NO: 1244299
agaacagacuuguugcacu

SEQ ID NO: 1478021 - RNA, 19 nt, Artificial Sequence
  Description of Artificial Sequence: Synthetic oligonucleotide
  Antisense strand to SEQ ID NO: 1478020
agugcaacaagucuguucu

SEQ ID NO: 1478022 - RNA, 19 nt, Artificial Sequence
  Description of Artificial Sequence: Synthetic oligonucleotide
  Sense strand starting at position 173 of SEQ ID NO: 1244299
ugcacuuuggcugaaguga

SEQ ID NO: 1478023 - RNA, 19 nt, Artificial Sequence
  Description of Artificial Sequence: Synthetic oligonucleotide
  Antisense strand to SEQ ID NO: 1478022
ucacuucagccaaagugca

SEQ ID NO: 1478024 - RNA, 19 nt, Artificial Sequence
  Description of Artificial Sequence: Synthetic oligonucleotide
  Sense strand starting at position 200 of SEQ ID NO: 1244299
uggagaggucugugggagu

SEQ ID NO: 1478025 - RNA, 19 nt, Artificial Sequence
  Description of Artificial Sequence: Synthetic oligonucleotide
  Antisense strand to SEQ ID NO: 1478024
acucccacagaccucucca

SEQ ID NO: 1478026 - RNA, 19 nt, Artificial Sequence
  Description of Artificial Sequence: Synthetic oligonucleotide
  Sense strand starting at position 247 of SEQ ID NO: 1244299
gcaccuagggcuuaauaag

SEQ ID NO: 1478027 - RNA, 19 nt, Artificial Sequence
  Description of Artificial Sequence: Synthetic oligonucleotide
  Antisense strand to SEQ ID NO: 1478026
cuuauuaagcccuaggugc

SEQ ID NO: 1478028 - RNA, 19 nt, Artificial Sequence
  Description of Artificial Sequence: Synthetic oligonucleotide
  Sense strand starting at position 446 of SEQ ID NO: 1244299
gaagcaaugugaucagauc

SEQ ID NO: 1478029 - RNA, 19 nt, Artificial Sequence
  Description of Artificial Sequence: Synthetic oligonucleotide
  Antisense strand to SEQ ID NO: 1478028
gaucugaucacauugcuuc

SEQ ID NO: 1478030 - RNA, 19 nt, Artificial Sequence
  Description of Artificial Sequence: Synthetic oligonucleotide
  Sense strand starting at position 447 of SEQ ID NO: 1244299
aagcaaugugaucagaucu

SEQ ID NO: 1478031 - RNA, 19 nt, Artificial Sequence
  Description of Artificial Sequence: Synthetic oligonucleotide
  Antisense strand to SEQ ID NO: 1478030
agaucugaucacauugcuu

SEQ ID NO: 1478032 - RNA, 19 nt, Artificial Sequence
  Description of Artificial Sequence: Synthetic oligonucleotide
  Sense strand starting at position 523 of SEQ ID NO: 1244299
gagagaugaccaggguguu

SEQ ID NO: 1478033 - RNA, 19 nt, Artificial Sequence
  Description of Artificial Sequence: Synthetic oligonucleotide
  Antisense strand to SEQ ID NO: 1478032
aacacccuggucaucucuc

SEQ ID NO: 1478034 - RNA, 19 nt, Artificial Sequence
  Description of Artificial Sequence: Synthetic oligonucleotide
  Sense strand starting at position 524 of SEQ ID NO: 1244299
agagaugaccaggguguua

SEQ ID NO: 1478035 - RNA, 19 nt, Artificial Sequence
  Description of Artificial Sequence: Synthetic oligonucleotide
  Antisense strand to SEQ ID NO: 1478034
uaacacccuggucaucucu

SEQ ID NO: 1478036 - RNA, 19 nt, Artificial Sequence
  Description of Artificial Sequence: Synthetic oligonucleotide
  Sense strand starting at position 535 of SEQ ID NO: 1244299
ggguguuagcaagauguag

SEQ ID NO: 1478037 - RNA, 19 nt, Artificial Sequence
  Description of Artificial Sequence: Synthetic oligonucleotide
  Antisense strand to SEQ ID NO: 1478036
cuacaucuugcuaacaccc

SEQ ID NO: 1478038 - RNA, 19 nt, Artificial Sequence
  Description of Artificial Sequence: Synthetic oligonucleotide
  Sense strand starting at position 543 of SEQ ID NO: 1244299
gcaagauguagaugggaga

SEQ ID NO: 1478039 - RNA, 19 nt, Artificial Sequence
  Description of Artificial Sequence: Synthetic oligonucleotide
  Antisense strand to SEQ ID NO: 1478038
ucucccaucuacaucuugc

SEQ ID NO: 1478040 - RNA, 19 nt, Artificial Sequence
  Description of Artificial Sequence: Synthetic oligonucleotide
  Sense strand starting at position 807 of SEQ ID NO: 1244299
gggaucuuauaguuuacca

SEQ ID NO: 1478041 - RNA, 19 nt, Artificial Sequence
  Description of Artificial Sequence: Synthetic oligonucleotide
  Antisense strand to SEQ ID NO: 1478040
ugguaaacuauaagauccc

SEQ ID NO: 1478042 - RNA, 19 nt, Artificial Sequence
  Description of Artificial Sequence: Synthetic oligonucleotide
  Sense strand starting at position 842 of SEQ ID NO: 1244299
uuugacuugccugaugaua

SEQ ID NO: 1478043 - RNA, 19 nt, Artificial Sequence
  Description of Artificial Sequence: Synthetic oligonucleotide
  Antisense strand to SEQ ID NO: 1478042
uaucaucaggcaagucaaa

SEQ ID NO: 1478044 - RNA, 19 nt, Artificial Sequence
  Description of Artificial Sequence: Synthetic oligonucleotide
  Sense strand starting at position 1006 of SEQ ID NO: 1244299
gucccuauuggccaugaau

SEQ ID NO: 1478045 - RNA, 19 nt, Artificial Sequence
  Description of Artificial Sequence: Synthetic oligonucleotide
  Antisense strand to SEQ ID NO: 1478044
auucauggccaauagggac

SEQ ID NO: 1478046 - RNA, 19 nt, Artificial Sequence
  Description of Artificial Sequence: Synthetic oligonucleotide
  Sense strand starting at position 1008 of SEQ ID NO: 1244299
cccuauuggccaugaauua

SEQ ID NO: 1478047 - RNA, 19 nt, Artificial Sequence
  Description of Artificial Sequence: Synthetic oligonucleotide
  Antisense strand to SEQ ID NO: 1478046
uaauucauggccaauaggg

SEQ ID NO: 1478048 - RNA, 19 nt, Artificial Sequence
  Description of Artificial Sequence: Synthetic oligonucleotide
  Sense strand starting at position 1009 of SEQ ID NO: 1244299
ccuauuggccaugaauuaa

SEQ ID NO: 1478049 - RNA, 19 nt, Artificial Sequence
  Description of Artificial Sequence: Synthetic oligonucleotide
  Antisense strand to SEQ ID NO: 1478048
uuaauucauggccaauagg

SEQ ID NO: 1478050 - RNA, 19 nt, Artificial Sequence
  Description of Artificial Sequence: Synthetic oligonucleotide
  Sense strand starting at position 1261 of SEQ ID NO: 1244299
gcacaugcauuauuuaagu

SEQ ID NO: 1478051 - RNA, 19 nt, Artificial Sequence
  Description of Artificial Sequence: Synthetic oligonucleotide
  Antisense strand to SEQ ID NO: 1478050
acuuaaauaaugcaugugc

SEQ ID NO: 1478052 - RNA, 19 nt, Artificial Sequence
  Description of Artificial Sequence: Synthetic oligonucleotide
  Sense strand starting at position 1375 of SEQ ID NO: 1244299
aaagucguacaaugaguua

SEQ ID NO: 1478053 - RNA, 19 nt, Artificial Sequence
  Description of Artificial Sequence: Synthetic oligonucleotide
  Antisense strand to SEQ ID NO: 1478052
uaacucauuguacgacuuu

SEQ ID NO: 1478054 - RNA, 19 nt, Artificial Sequence
  Description of Artificial Sequence: Synthetic oligonucleotide
  Sense strand starting at position 1475 of SEQ ID NO: 1244299
uaguuaugaggucaguuau

SEQ ID NO: 1478055 - RNA, 19 nt, Artificial Sequence
  Description of Artificial Sequence: Synthetic oligonucleotide
  Antisense strand to SEQ ID NO: 1478054
auaacugaccucauaacua

SEQ ID NO: 1478056 - RNA, 19 nt, Artificial Sequence
  Description of Artificial Sequence: Synthetic oligonucleotide
  Sense strand starting at position 1487 of SEQ ID NO: 1244299
caguuaugauggcuaaauu

SEQ ID NO: 1478057 - RNA, 19 nt, Artificial Sequence
  Description of Artificial Sequence: Synthetic oligonucleotide
  Antisense strand to SEQ ID NO: 1478056
aauuuagccaucauaacug

SEQ ID NO: 1478058 - RNA, 19 nt, Artificial Sequence
  Description of Artificial Sequence: Synthetic oligonucleotide
  Sense strand starting at position 1488 of SEQ ID NO: 1244299
aguuaugauggcuaaauuc

SEQ ID NO: 1478059 - RNA, 19 nt, Artificial Sequence
  Description of Artificial Sequence: Synthetic oligonucleotide
  Antisense strand to SEQ ID NO: 1478058
gaauuuagccaucauaacu

SEQ ID NO: 1478060 - RNA, 19 nt, Artificial Sequence
  Description of Artificial Sequence: Synthetic oligonucleotide
  Sense strand starting at position 1602 of SEQ ID NO: 1244299
gggaaaugcuuccuuagua

SEQ ID NO: 1478061 - RNA, 19 nt, Artificial Sequence
  Description of Artificial Sequence: Synthetic oligonucleotide
  Antisense strand to SEQ ID NO: 1478060
uacuaaggaagcauuuccc

SEQ ID NO: 1478062 - RNA, 19 nt, Artificial Sequence
  Description of Artificial Sequence: Synthetic oligonucleotide
  Sense strand starting at position 1603 of SEQ ID NO: 1244299
ggaaaugcuuccuuaguau

SEQ ID NO: 1478063 - RNA, 19 nt, Artificial Sequence
  Description of Artificial Sequence: Synthetic oligonucleotide
  Antisense strand to SEQ ID NO: 1478062
auacuaaggaagcauuucc

SEQ ID NO: 1478064 - RNA, 19 nt, Artificial Sequence
  Description of Artificial Sequence: Synthetic oligonucleotide
  Sense strand starting at position 1688 of SEQ ID NO: 1244299
cuguaaaguggcugggaga

SEQ ID NO: 1478065 - RNA, 19 nt, Artificial Sequence
  Description of Artificial Sequence: Synthetic oligonucleotide
  Antisense strand to SEQ ID NO: 1478064
ucucccagccacuuuacag

SEQ ID NO: 1478066 - RNA, 19 nt, Artificial Sequence
  Description of Artificial Sequence: Synthetic oligonucleotide
  Sense strand starting at position 2092 of SEQ ID NO: 1244299
guccauuugcgugauugac

SEQ ID NO: 1478067 - RNA, 19 nt, Artificial Sequence
  Description of Artificial Sequence: Synthetic oligonucleotide
  Antisense strand to SEQ ID NO: 1478066
gucaaucacgcaaauggac

SEQ ID NO: 1478068 - RNA, 19 nt, Artificial Sequence
  Description of Artificial Sequence: Synthetic oligonucleotide
  Sense strand starting at position 2995 of SEQ ID NO: 1244299
ccaacuuggacucggagau

SEQ ID NO: 1478069 - RNA, 19 nt, Artificial Sequence
  Description of Artificial Sequence: Synthetic oligonucleotide
  Antisense strand to SEQ ID NO: 1478068
aucuccgaguccaaguugg

SEQ ID NO: 1478070 - RNA, 19 nt, Artificial Sequence
  Description of Artificial Sequence: Synthetic oligonucleotide
  Sense strand starting at position 3284 of SEQ ID NO: 1244299
uugcuaauuugagcugcaa

SEQ ID NO: 1478071 - RNA, 19 nt, Artificial Sequence
  Description of Artificial Sequence: Synthetic oligonucleotide
  Antisense strand to SEQ ID NO: 1478070
uugcagcucaaauuagcaa

SEQ ID NO: 1478072 - RNA, 19 nt, Artificial Sequence
  Description of Artificial Sequence: Synthetic oligonucleotide
  Sense strand starting at position 3340 of SEQ ID NO: 1244299
gggcucuuggagggugauu

SEQ ID NO: 1478073 - RNA, 19 nt, Artificial Sequence
  Description of Artificial Sequence: Synthetic oligonucleotide
  Antisense strand to SEQ ID NO: 1478072
aaucacccuccaagagccc

SEQ ID NO: 1478074 - RNA, 19 nt, Artificial Sequence
  Description of Artificial Sequence: Synthetic oligonucleotide
  Sense strand starting at position 3345 of SEQ ID NO: 1244299
cuuggagggugauuaucuu

SEQ ID NO: 1478075 - RNA, 19 nt, Artificial Sequence
  Description of Artificial Sequence: Synthetic oligonucleotide
  Antisense strand to SEQ ID NO: 1478074
aagauaaucacccuccaag

SEQ ID NO: 1478076 - RNA, 19 nt, Artificial Sequence
  Description of Artificial Sequence: Synthetic oligonucleotide
  Sense strand starting at position 3349 of SEQ ID NO: 1244299
gagggugauuaucuuggca

SEQ ID NO: 1478077 - RNA, 19 nt, Artificial Sequence
  Description of Artificial Sequence: Synthetic oligonucleotide
  Antisense strand to SEQ ID NO: 1478076
ugccaagauaaucacccuc

SEQ ID NO: 1478078 - RNA, 19 nt, Artificial Sequence
  Description of Artificial Sequence: Synthetic oligonucleotide
  Sense strand starting at position 3529 of SEQ ID NO: 1244299
cugucaaaguguuuggaga

SEQ ID NO: 1478079 - RNA, 19 nt, Artificial Sequence
  Description of Artificial Sequence: Synthetic oligonucleotide
  Antisense strand to SEQ ID NO: 1478078
ucuccaaacacuuugacag

SEQ ID NO: 1478080 - RNA, 19 nt, Artificial Sequence
  Description of Artificial Sequence: Synthetic oligonucleotide
  Sense strand starting at position 3530 of SEQ ID NO: 1244299
ugucaaaguguuuggagau

SEQ ID NO: 1478081 - RNA, 19 nt, Artificial Sequence
  Description of Artificial Sequence: Synthetic oligonucleotide
  Antisense strand to SEQ ID NO: 1478080
aucuccaaacacuuugaca

SEQ ID NO: 1478082 - RNA, 19 nt, Artificial Sequence
  Description of Artificial Sequence: Synthetic oligonucleotide
  Sense strand starting at position 3536 of SEQ ID NO: 1244299
aguguuuggagaugagaug

SEQ ID NO: 1478083 - RNA, 19 nt, Artificial Sequence
  Description of Artificial Sequence: Synthetic oligonucleotide
  Antisense strand to SEQ ID NO: 1478082
caucucaucuccaaacacu

SEQ ID NO: 1478084 - RNA, 19 nt, Artificial Sequence
  Description of Artificial Sequence: Synthetic oligonucleotide
  Sense strand starting at position 3553 of SEQ ID NO: 1244299
ugugauagaucccuuaaag

SEQ ID NO: 1478085 - RNA, 19 nt, Artificial Sequence
  Description of Artificial Sequence: Synthetic oligonucleotide
  Antisense strand to SEQ ID NO: 1478084
cuuuaagggaucuaucaca

SEQ ID NO: 1478086 - RNA, 19 nt, Artificial Sequence
  Description of Artificial Sequence: Synthetic oligonucleotide
  Sense strand starting at position 3678 of SEQ ID NO: 1244299
agagaaugguacucagcau

SEQ ID NO: 1478087 - RNA, 19 nt, Artificial Sequence
  Description of Artificial Sequence: Synthetic oligonucleotide
  Antisense strand to SEQ ID NO: 1478086
augcugaguaccauucucu

SEQ ID NO: 1478088 - RNA, 19 nt, Artificial Sequence
  Description of Artificial Sequence: Synthetic oligonucleotide
  Sense strand starting at position 3866 of SEQ ID NO: 1244299
gccacuugaucagucaaga

SEQ ID NO: 1478089 - RNA, 19 nt, Artificial Sequence
  Description of Artificial Sequence: Synthetic oligonucleotide
  Antisense strand to SEQ ID NO: 1478088
ucuugacugaucaaguggc

SEQ ID NO: 1478090 - RNA, 19 nt, Artificial Sequence
  Description of Artificial Sequence: Synthetic oligonucleotide
  Sense strand starting at position 3880 of SEQ ID NO: 1244299
caagaaugcugauuaguuu

SEQ ID NO: 1478091 - RNA, 19 nt, Artificial Sequence
  Description of Artificial Sequence: Synthetic oligonucleotide
  Antisense strand to SEQ ID NO: 1478090
aaacuaaucagcauucuug

SEQ ID NO: 1478092 - RNA, 19 nt, Artificial Sequence
  Description of Artificial Sequence: Synthetic oligonucleotide
  Sense strand starting at position 3888 of SEQ ID NO: 1244299
cugauuaguuuguuugaaa

SEQ ID NO: 1478093 - RNA, 19 nt, Artificial Sequence
  Description of Artificial Sequence: Synthetic oligonucleotide
  Antisense strand to SEQ ID NO: 1478092
uuucaaacaaacuaaucag

SEQ ID NO: 1478094 - RNA, 19 nt, Artificial Sequence
  Description of Artificial Sequence: Synthetic oligonucleotide
  Sense strand starting at position 7 of SEQ ID NO: 1244300
ccauacauguugccugaau

SEQ ID NO: 1478095 - RNA, 19 nt, Artificial Sequence
  Description of Artificial Sequence: Synthetic oligonucleotide
  Antisense strand to SEQ ID NO: 1478094
auucaggcaacauguaugg

SEQ ID NO: 1478096 - RNA, 19 nt, Artificial Sequence
  Description of Artificial Sequence: Synthetic oligonucleotide
  Sense strand starting at position 9 of SEQ ID NO: 1244300
auacauguugccugaauca

SEQ ID NO: 1478097 - RNA, 19 nt, Artificial Sequence
  Description of Artificial Sequence: Synthetic oligonucleotide
  Antisense strand to SEQ ID NO: 1478096
ugauucaggcaacauguau

SEQ ID NO: 1478098 - RNA, 19 nt, Artificial Sequence
  Description of Artificial Sequence: Synthetic oligonucleotide
  Sense strand starting at position 20 of SEQ ID NO: 1244300
cugaaucaugacugaucga

SEQ ID NO: 1478099 - RNA, 19 nt, Artificial Sequence
  Description of Artificial Sequence: Synthetic oligonucleotide
  Antisense strand to SEQ ID NO: 1478098
ucgaucagucaugauucag

SEQ ID NO: 1478100 - RNA, 19 nt, Artificial Sequence
  Description of Artificial Sequence: Synthetic oligonucleotide
  Sense strand starting at position 23 of SEQ ID NO: 1244300
aaucaugacugaucgagua

SEQ ID NO: 1478101 - RNA, 19 nt, Artificial Sequence
  Description of Artificial Sequence: Synthetic oligonucleotide
  Antisense strand to SEQ ID NO: 1478100
uacucgaucagucaugauu

SEQ ID NO: 1478102 - RNA, 19 nt, Artificial Sequence
  Description of Artificial Sequence: Synthetic oligonucleotide
  Sense strand starting at position 37 of SEQ ID NO: 1244300
gaguaaguagcggagugaa

SEQ ID NO: 1478103 - RNA, 19 nt, Artificial Sequence
  Description of Artificial Sequence: Synthetic oligonucleotide
  Antisense strand to SEQ ID NO: 1478102
uucacuccgcuacuuacuc

SEQ ID NO: 1478104 - RNA, 19 nt, Artificial Sequence
  Description of Artificial Sequence: Synthetic oligonucleotide
  Sense strand starting at position 431 of SEQ ID NO: 1244300
agguuaaugcuggacuguu

SEQ ID NO: 1478105 - RNA, 19 nt, Artificial Sequence
  Description of Artificial Sequence: Synthetic oligonucleotide
  Antisense strand to SEQ ID NO: 1478104
aacaguccagcauuaaccu

SEQ ID NO: 1478106 - RNA, 19 nt, Artificial Sequence
  Description of Artificial Sequence: Synthetic oligonucleotide
  Sense strand starting at position 446 of SEQ ID NO: 1244300
uguucagaugccuggagua

SEQ ID NO: 1478107 - RNA, 19 nt, Artificial Sequence
  Description of Artificial Sequence: Synthetic oligonucleotide
  Antisense strand to SEQ ID NO: 1478106
uacuccaggcaucugaaca

SEQ ID NO: 1478108 - RNA, 19 nt, Artificial Sequence
  Description of Artificial Sequence: Synthetic oligonucleotide
  Sense strand starting at position 458 of SEQ ID NO: 1244300
uggaguauaugguuucaga

SEQ ID NO: 1478109 - RNA, 19 nt, Artificial Sequence
  Description of Artificial Sequence: Synthetic oligonucleotide
  Antisense strand to SEQ ID NO: 1478108
ucugaaaccauauacucca

SEQ ID NO: 1478110 - RNA, 19 nt, Artificial Sequence
  Description of Artificial Sequence: Synthetic oligonucleotide
  Sense strand starting at position 495 of SEQ ID NO: 1244300
gugaaauaaggcuggccau

SEQ ID NO: 1478111 - RNA, 19 nt, Artificial Sequence
  Description of Artificial Sequence: Synthetic oligonucleotide
  Antisense strand to SEQ ID NO: 1478110
auggccagccuuauuucac

SEQ ID NO: 1478112 - RNA, 19 nt, Artificial Sequence
  Description of Artificial Sequence: Synthetic oligonucleotide
  Sense strand starting at position 597 of SEQ ID NO: 1244300
agugaaguuugaccaccua

SEQ ID NO: 1478113 - RNA, 19 nt, Artificial Sequence
  Description of Artificial Sequence: Synthetic oligonucleotide
  Antisense strand to SEQ ID NO: 1478112
uagguggucaaacuucacu

SEQ ID NO: 1478114 - RNA, 19 nt, Artificial Sequence
  Description of Artificial Sequence: Synthetic oligonucleotide
  Sense strand starting at position 625 of SEQ ID NO: 1244300
uaaauacuacagcgggaaa

SEQ ID NO: 1478115 - RNA, 19 nt, Artificial Sequence
  Description of Artificial Sequence: Synthetic oligonucleotide
  Antisense strand to SEQ ID NO: 1478114
uuucccgcuguaguauuua

SEQ ID NO: 1478116 - RNA, 19 nt, Artificial Sequence
  Description of Artificial Sequence: Synthetic oligonucleotide
  Sense strand starting at position 668 of SEQ ID NO: 1244300
aguauuugcuccuuccaag

SEQ ID NO: 1478117 - RNA, 19 nt, Artificial Sequence
  Description of Artificial Sequence: Synthetic oligonucleotide
  Antisense strand to SEQ ID NO: 1478116
cuuggaaggagcaaauacu

SEQ ID NO: 1478118 - RNA, 19 nt, Artificial Sequence
  Description of Artificial Sequence: Synthetic oligonucleotide
  Sense strand starting at position 714 of SEQ ID NO: 1244300
ucccaauaagcguaugaga

SEQ ID NO: 1478119 - RNA, 19 nt, Artificial Sequence
  Description of Artificial Sequence: Synthetic oligonucleotide
  Antisense strand to SEQ ID NO: 1478118
ucucauacgcuuauuggga

SEQ ID NO: 1478120 - RNA, 19 nt, Artificial Sequence
  Description of Artificial Sequence: Synthetic oligonucleotide
  Sense strand starting at position 716 of SEQ ID NO: 1244300
ccaauaagcguaugagaug

SEQ ID NO: 1478121 - RNA, 19 nt, Artificial Sequence
  Description of Artificial Sequence: Synthetic oligonucleotide
  Antisense strand to SEQ ID NO: 1478120
caucucauacgcuuauugg

SEQ ID NO: 1478122 - RNA, 19 nt, Artificial Sequence
  Description of Artificial Sequence: Synthetic oligonucleotide
  Sense strand starting at position 721 of SEQ ID NO: 1244300
aagcguaugagauggaaac

SEQ ID NO: 1478123 - RNA, 19 nt, Artificial Sequence
  Description of Artificial Sequence: Synthetic oligonucleotide
  Antisense strand to SEQ ID NO: 1478122
guuuccaucucauacgcuu

SEQ ID NO: 1478124 - RNA, 19 nt, Artificial Sequence
  Description of Artificial Sequence: Synthetic oligonucleotide
  Sense strand starting at position 722 of SEQ ID NO: 1244300
agcguaugagauggaaacu

SEQ ID NO: 1478125 - RNA, 19 nt, Artificial Sequence
  Description of Artificial Sequence: Synthetic oligonucleotide
  Antisense strand to SEQ ID NO: 1478124
aguuuccaucucauacgcu

SEQ ID NO: 1478126 - RNA, 19 nt, Artificial Sequence
  Description of Artificial Sequence: Synthetic oligonucleotide
  Sense strand starting at position 723 of SEQ ID NO: 1244300
gcguaugagauggaaacua

SEQ ID NO: 1478127 - RNA, 19 nt, Artificial Sequence
  Description of Artificial Sequence: Synthetic oligonucleotide
  Antisense strand to SEQ ID NO: 1478126
uaguuuccaucucauacgc

SEQ ID NO: 1478128 - RNA, 19 nt, Artificial Sequence
  Description of Artificial Sequence: Synthetic oligonucleotide
  Sense strand starting at position 807 of SEQ ID NO: 1244300
gcuauuaagcaauggagcu

SEQ ID NO: 1478129 - RNA, 19 nt, Artificial Sequence
  Description of Artificial Sequence: Synthetic oligonucleotide
  Antisense strand to SEQ ID NO: 1478128
agcuccauugcuuaauagc

SEQ ID NO: 1478130 - RNA, 19 nt, Artificial Sequence
  Description of Artificial Sequence: Synthetic oligonucleotide
  Sense strand starting at position 844 of SEQ ID NO: 1244300
gguucuaaccacuguaaua

SEQ ID NO: 1478131 - RNA, 19 nt, Artificial Sequence
  Description of Artificial Sequence: Synthetic oligonucleotide
  Antisense strand to SEQ ID NO: 1478130
uauuacagugguuagaacc

SEQ ID NO: 1478132 - RNA, 19 nt, Artificial Sequence
  Description of Artificial Sequence: Synthetic oligonucleotide
  Sense strand starting at position 1167 of SEQ ID NO: 1244300
gggagacuuuacuuucuuc

SEQ ID NO: 1478133 - RNA, 19 nt, Artificial Sequence
  Description of Artificial Sequence: Synthetic oligonucleotide
  Antisense strand to SEQ ID NO: 1478132
gaagaaaguaaagucuccc

SEQ ID NO: 1478134 - RNA, 19 nt, Artificial Sequence
  Description of Artificial Sequence: Synthetic oligonucleotide
  Sense strand starting at position 1171 of SEQ ID NO: 1244300
gacuuuacuuucuucgagu

SEQ ID NO: 1478135 - RNA, 19 nt, Artificial Sequence
  Description of Artificial Sequence: Synthetic oligonucleotide
  Antisense strand to SEQ ID NO: 1478134
acucgaagaaaguaaaguc

SEQ ID NO: 1478136 - RNA, 19 nt, Artificial Sequence
  Description of Artificial Sequence: Synthetic oligonucleotide
  Sense strand starting at position 1172 of SEQ ID NO: 1244300
acuuuacuuucuucgaguu

SEQ ID NO: 1478137 - RNA, 19 nt, Artificial Sequence
  Description of Artificial Sequence: Synthetic oligonucleotide
  Antisense strand to SEQ ID NO: 1478136
aacucgaagaaaguaaagu

SEQ ID NO: 1478138 - RNA, 19 nt, Artificial Sequence
  Description of Artificial Sequence: Synthetic oligonucleotide
  Sense strand starting at position 1173 of SEQ ID NO: 1244300
cuuuacuuucuucgaguua

SEQ ID NO: 1478139 - RNA, 19 nt, Artificial Sequence
  Description of Artificial Sequence: Synthetic oligonucleotide
  Antisense strand to SEQ ID NO: 1478138
uaacucgaagaaaguaaag

SEQ ID NO: 1478140 - RNA, 19 nt, Artificial Sequence
  Description of Artificial Sequence: Synthetic oligonucleotide
  Sense strand starting at position 1392 of SEQ ID NO: 1244300
gugacagauucgcuucuua

SEQ ID NO: 1478141 - RNA, 19 nt, Artificial Sequence
  Description of Artificial Sequence: Synthetic oligonucleotide
  Antisense strand to SEQ ID NO: 1478140
uaagaagcgaaucugucac

SEQ ID NO: 1478142 - RNA, 19 nt, Artificial Sequence
  Description of Artificial Sequence: Synthetic oligonucleotide
  Sense strand starting at position 1434 of SEQ ID NO: 1244300
agaagcagaucuucccuau

SEQ ID NO: 1478143 - RNA, 19 nt, Artificial Sequence
  Description of Artificial Sequence: Synthetic oligonucleotide
  Antisense strand to SEQ ID NO: 1478142
auagggaagaucugcuucu

SEQ ID NO: 1478144 - RNA, 19 nt, Artificial Sequence
  Description of Artificial Sequence: Synthetic oligonucleotide
  Sense strand starting at position 1437 of SEQ ID NO: 1244300
agcagaucuucccuauguu

SEQ ID NO: 1478145 - RNA, 19 nt, Artificial Sequence
  Description of Artificial Sequence: Synthetic oligonucleotide
  Antisense strand to SEQ ID NO: 1478144
aacauagggaagaucugcu

SEQ ID NO: 1478146 - RNA, 19 nt, Artificial Sequence
  Description of Artificial Sequence: Synthetic oligonucleotide
  Sense strand starting at position 1438 of SEQ ID NO: 1244300
gcagaucuucccuauguuc

SEQ ID NO: 1478147 - RNA, 19 nt, Artificial Sequence
  Description of Artificial Sequence: Synthetic oligonucleotide
  Antisense strand to SEQ ID NO: 1478146
gaacauagggaagaucugc

SEQ ID NO: 1478148 - RNA, 19 nt, Artificial Sequence
  Description of Artificial Sequence: Synthetic oligonucleotide
  Sense strand starting at position 1478 of SEQ ID NO: 1244300
cguguacaucccgggaaga

SEQ ID NO: 1478149 - RNA, 19 nt, Artificial Sequence
  Description of Artificial Sequence: Synthetic oligonucleotide
  Antisense strand to SEQ ID NO: 1478148
ucuucccgggauguacacg

SEQ ID NO: 1478150 - RNA, 19 nt, Artificial Sequence
  Description of Artificial Sequence: Synthetic oligonucleotide
  Sense strand starting at position 1479 of SEQ ID NO: 1244300
guguacaucccgggaagaa

SEQ ID NO: 1478151 - RNA, 19 nt, Artificial Sequence
  Description of Artificial Sequence: Synthetic oligonucleotide
  Antisense strand to SEQ ID NO: 1478150
uucuucccgggauguacac

SEQ ID NO: 1478152 - RNA, 19 nt, Artificial Sequence
  Description of Artificial Sequence: Synthetic oligonucleotide
  Sense strand starting at position 2462 of SEQ ID NO: 1244300
ugcagcuaccucuaggaua

SEQ ID NO: 1478153 - RNA, 19 nt, Artificial Sequence
  Description of Artificial Sequence: Synthetic oligonucleotide
  Antisense strand to SEQ ID NO: 1478152
uauccuagagguagcugca

SEQ ID NO: 1478154 - RNA, 19 nt, Artificial Sequence
  Description of Artificial Sequence: Synthetic oligonucleotide
  Sense strand starting at position 2482 of SEQ ID NO: 1244300
ggaccacuuuccuuuggaa

SEQ ID NO: 1478155 - RNA, 19 nt, Artificial Sequence
  Description of Artificial Sequence: Synthetic oligonucleotide
  Antisense strand to SEQ ID NO: 1478154
uuccaaaggaaaguggucc

SEQ ID NO: 1478156 - RNA, 19 nt, Artificial Sequence
  Description of Artificial Sequence: Synthetic oligonucleotide
  Sense strand starting at position 2554 of SEQ ID NO: 1244300
ccuagaugcuguguagauu

SEQ ID NO: 1478157 - RNA, 19 nt, Artificial Sequence
  Description of Artificial Sequence: Synthetic oligonucleotide
  Antisense strand to SEQ ID NO: 1478156
aaucuacacagcaucuagg

SEQ ID NO: 1478158 - RNA, 19 nt, Artificial Sequence
  Description of Artificial Sequence: Synthetic oligonucleotide
  Sense strand starting at position 2736 of SEQ ID NO: 1244300
gcuacuuuaucaucagaga

SEQ ID NO: 1478159 - RNA, 19 nt, Artificial Sequence
  Description of Artificial Sequence: Synthetic oligonucleotide
  Antisense strand to SEQ ID NO: 1478158
ucucugaugauaaaguagc

SEQ ID NO: 1478160 - RNA, 19 nt, Artificial Sequence
  Description of Artificial Sequence: Synthetic oligonucleotide
  Sense strand starting at position 2739 of SEQ ID NO: 1244300
acuuuaucaucagagacag

SEQ ID NO: 1478161 - RNA, 19 nt, Artificial Sequence
  Description of Artificial Sequence: Synthetic oligonucleotide
  Antisense strand to SEQ ID NO: 1478160
cugucucugaugauaaagu

SEQ ID NO: 1478162 - RNA, 19 nt, Artificial Sequence
  Description of Artificial Sequence: Synthetic oligonucleotide
  Sense strand starting at position 2793 of SEQ ID NO: 1244300
auaccuauccacuggguau

SEQ ID NO: 1478163 - RNA, 19 nt, Artificial Sequence
  Description of Artificial Sequence: Synthetic oligonucleotide
  Antisense strand to SEQ ID NO: 1478162
auacccaguggauagguau

SEQ ID NO: 1478164 - RNA, 19 nt, Artificial Sequence
  Description of Artificial Sequence: Synthetic oligonucleotide
  Sense strand starting at position 3074 of SEQ ID NO: 1244300
ucuuaaucaucuucguaug

SEQ ID NO: 1478165 - RNA, 19 nt, Artificial Sequence
  Description of Artificial Sequence: Synthetic oligonucleotide
  Antisense strand to SEQ ID NO: 1478164
cauacgaagaugauuaaga

SEQ ID NO: 1478166 - RNA, 19 nt, Artificial Sequence
  Description of Artificial Sequence: Synthetic oligonucleotide
  Sense strand starting at position 3578 of SEQ ID NO: 1244300
ggaaucuugggccaugcaa

SEQ ID NO: 1478167 - RNA, 19 nt, Artificial Sequence
  Description of Artificial Sequence: Synthetic oligonucleotide
  Antisense strand to SEQ ID NO: 1478166
uugcauggcccaagauucc

SEQ ID NO: 1478168 - RNA, 19 nt, Artificial Sequence
  Description of Artificial Sequence: Synthetic oligonucleotide
  Sense strand starting at position 3589 of SEQ ID NO: 1244300
ccaugcaaugaguguuaua

SEQ ID NO: 1478169 - RNA, 19 nt, Artificial Sequence
  Description of Artificial Sequence: Synthetic oligonucleotide
  Antisense strand to SEQ ID NO: 1478168
uauaacacucauugcaugg

SEQ ID NO: 1478170 - RNA, 19 nt, Artificial Sequence
  Description of Artificial Sequence: Synthetic oligonucleotide
  Sense strand starting at position 3626 of SEQ ID NO: 1244300
aggacaaauccaggcacuu

SEQ ID NO: 1478171 - RNA, 19 nt, Artificial Sequence
  Description of Artificial Sequence: Synthetic oligonucleotide
  Antisense strand to SEQ ID NO: 1478170
aagugccuggauuuguccu

SEQ ID NO: 1478172 - RNA, 19 nt, Artificial Sequence
  Description of Artificial Sequence: Synthetic oligonucleotide
  Sense strand starting at position 3912 of SEQ ID NO: 1244300
ugcuguugccggcucgaau

SEQ ID NO: 1478173 - RNA, 19 nt, Artificial Sequence
  Description of Artificial Sequence: Synthetic oligonucleotide
  Antisense strand to SEQ ID NO: 1478172
auucgagccggcaacagca

SEQ ID NO: 1478174 - RNA, 19 nt, Artificial Sequence
  Description of Artificial Sequence: Synthetic oligonucleotide
  Sense strand starting at position 43 of SEQ ID NO: 1244301
aacagcaugugaucaggaa

SEQ ID NO: 1478175 - RNA, 19 nt, Artificial Sequence
  Description of Artificial Sequence: Synthetic oligonucleotide
  Antisense strand to SEQ ID NO: 1478174
uuccugaucacaugcuguu

SEQ ID NO: 1478176 - RNA, 19 nt, Artificial Sequence
  Description of Artificial Sequence: Synthetic oligonucleotide
  Sense strand starting at position 67 of SEQ ID NO: 1244301
uacuguaugguguguaaau

SEQ ID NO: 1478177 - RNA, 19 nt, Artificial Sequence
  Description of Artificial Sequence: Synthetic oligonucleotide
  Antisense strand to SEQ ID NO: 1478176
auuuacacaccauacagua

SEQ ID NO: 1478178 - RNA, 19 nt, Artificial Sequence
  Description of Artificial Sequence: Synthetic oligonucleotide
  Sense strand starting at position 68 of SEQ ID NO: 1244301
acuguaugguguguaaaua

SEQ ID NO: 1478179 - RNA, 19 nt, Artificial Sequence
  Description of Artificial Sequence: Synthetic oligonucleotide
  Antisense strand to SEQ ID NO: 1478178
uauuuacacaccauacagu

SEQ ID NO: 1478180 - RNA, 19 nt, Artificial Sequence
  Description of Artificial Sequence: Synthetic oligonucleotide
  Sense strand starting at position 138 of SEQ ID NO: 1244301
cuauaaaggccauauguca

SEQ ID NO: 1478181 - RNA, 19 nt, Artificial Sequence
  Description of Artificial Sequence: Synthetic oligonucleotide
  Antisense strand to SEQ ID NO: 1478180
ugacauauggccuuuauag

SEQ ID NO: 1478182 - RNA, 19 nt, Artificial Sequence
  Description of Artificial Sequence: Synthetic oligonucleotide
  Sense strand starting at position 213 of SEQ ID NO: 1244301
augucaucuuucuuugaug

SEQ ID NO: 1478183 - RNA, 19 nt, Artificial Sequence
  Description of Artificial Sequence: Synthetic oligonucleotide
  Antisense strand to SEQ ID NO: 1478182
caucaaagaaagaugacau

SEQ ID NO: 1478184 - RNA, 19 nt, Artificial Sequence
  Description of Artificial Sequence: Synthetic oligonucleotide
  Sense strand starting at position 214 of SEQ ID NO: 1244301
ugucaucuuucuuugauga

SEQ ID NO: 1478185 - RNA, 19 nt, Artificial Sequence
  Description of Artificial Sequence: Synthetic oligonucleotide
  Antisense strand to SEQ ID NO: 1478184
ucaucaaagaaagaugaca

SEQ ID NO: 1478186 - RNA, 19 nt, Artificial Sequence
  Description of Artificial Sequence: Synthetic oligonucleotide
  Sense strand starting at position 215 of SEQ ID NO: 1244301
gucaucuuucuuugaugac

SEQ ID NO: 1478187 - RNA, 19 nt, Artificial Sequence
  Description of Artificial Sequence: Synthetic oligonucleotide
  Antisense strand to SEQ ID NO: 1478186
gucaucaaagaaagaugac

SEQ ID NO: 1478188 - RNA, 19 nt, Artificial Sequence
  Description of Artificial Sequence: Synthetic oligonucleotide
  Sense strand starting at position 314 of SEQ ID NO: 1244301
gcagaagucccacaucuuc

SEQ ID NO: 1478189 - RNA, 19 nt, Artificial Sequence
  Description of Artificial Sequence: Synthetic oligonucleotide
  Antisense strand to SEQ ID NO: 1478188
gaagaugugggacuucugc

SEQ ID NO: 1478190 - RNA, 19 nt, Artificial Sequence
  Description of Artificial Sequence: Synthetic oligonucleotide
  Sense strand starting at position 450 of SEQ ID NO: 1244301
gggaugugggucugauuag

SEQ ID NO: 1478191 - RNA, 19 nt, Artificial Sequence
  Description of Artificial Sequence: Synthetic oligonucleotide
  Antisense strand to SEQ ID NO: 1478190
cuaaucagacccacauccc

SEQ ID NO: 1478192 - RNA, 19 nt, Artificial Sequence
  Description of Artificial Sequence: Synthetic oligonucleotide
  Sense strand starting at position 485 of SEQ ID NO: 1244301
ccaagaaggugcuccuaca

SEQ ID NO: 1478193 - RNA, 19 nt, Artificial Sequence
  Description of Artificial Sequence: Synthetic oligonucleotide
  Antisense strand to SEQ ID NO: 1478192
uguaggagcaccuucuugg

SEQ ID NO: 1478194 - RNA, 19 nt, Artificial Sequence
  Description of Artificial Sequence: Synthetic oligonucleotide
  Sense strand starting at position 616 of SEQ ID NO: 1244301
uggauugucuacccaccaa

SEQ ID NO: 1478195 - RNA, 19 nt, Artificial Sequence
  Description of Artificial Sequence: Synthetic oligonucleotide
  Antisense strand to SEQ ID NO: 1478194
uugguggguagacaaucca

SEQ ID NO: 1478196 - RNA, 19 nt, Artificial Sequence
  Description of Artificial Sequence: Synthetic oligonucleotide
  Sense strand starting at position 781 of SEQ ID NO: 1244301
gagugauagcauuagccuc

SEQ ID NO: 1478197 - RNA, 19 nt, Artificial Sequence
  Description of Artificial Sequence: Synthetic oligonucleotide
  Antisense strand to SEQ ID NO: 1478196
gaggcuaaugcuaucacuc

SEQ ID NO: 1478198 - RNA, 19 nt, Artificial Sequence
  Description of Artificial Sequence: Synthetic oligonucleotide
  Sense strand starting at position 981 of SEQ ID NO: 1244301
ugaggaucugcugaaguua

SEQ ID NO: 1478199 - RNA, 19 nt, Artificial Sequence
  Description of Artificial Sequence: Synthetic oligonucleotide
  Antisense strand to SEQ ID NO: 1478198
uaacuucagcagauccuca

SEQ ID NO: 1478200 - RNA, 19 nt, Artificial Sequence
  Description of Artificial Sequence: Synthetic oligonucleotide
  Sense strand starting at position 1466 of SEQ ID NO: 1244301
ggcuuccucgguuagggau

SEQ ID NO: 1478201 - RNA, 19 nt, Artificial Sequence
  Description of Artificial Sequence: Synthetic oligonucleotide
  Antisense strand to SEQ ID NO: 1478200
aucccuaaccgaggaagcc

SEQ ID NO: 1478202 - RNA, 19 nt, Artificial Sequence
  Description of Artificial Sequence: Synthetic oligonucleotide
  Sense strand starting at position 2497 of SEQ ID NO: 1244301
gaaugauaaucuccucggu

SEQ ID NO: 1478203 - RNA, 19 nt, Artificial Sequence
  Description of Artificial Sequence: Synthetic oligonucleotide
  Antisense strand to SEQ ID NO: 1478202
accgaggagauuaucauuc

SEQ ID NO: 1478204 - RNA, 19 nt, Artificial Sequence
  Description of Artificial Sequence: Synthetic oligonucleotide
  Sense strand starting at position 2606 of SEQ ID NO: 1244301
ggugugguuggugcguaaa

SEQ ID NO: 1478205 - RNA, 19 nt, Artificial Sequence
  Description of Artificial Sequence: Synthetic oligonucleotide
  Antisense strand to SEQ ID NO: 1478204
uuuacgcaccaaccacacc

SEQ ID NO: 1478206 - RNA, 19 nt, Artificial Sequence
  Description of Artificial Sequence: Synthetic oligonucleotide
  Sense strand starting at position 2616 of SEQ ID NO: 1244301
gugcguaaaccuggaaacu

SEQ ID NO: 1478207 - RNA, 19 nt, Artificial Sequence
  Description of Artificial Sequence: Synthetic oligonucleotide
  Antisense strand to SEQ ID NO: 1478206
aguuuccagguuuacgcac

SEQ ID NO: 1478208 - RNA, 19 nt, Artificial Sequence
  Description of Artificial Sequence: Synthetic oligonucleotide
  Sense strand starting at position 2916 of SEQ ID NO: 1244301
cagggcuugccagagugaa

SEQ ID NO: 1478209 - RNA, 19 nt, Artificial Sequence
  Description of Artificial Sequence: Synthetic oligonucleotide
  Antisense strand to SEQ ID NO: 1478208
uucacucuggcaagcccug

SEQ ID NO: 1478210 - RNA, 19 nt, Artificial Sequence
  Description of Artificial Sequence: Synthetic oligonucleotide
  Sense strand starting at position 2997 of SEQ ID NO: 1244301
ggcagaagcaauugugcaa

SEQ ID NO: 1478211 - RNA, 19 nt, Artificial Sequence
  Description of Artificial Sequence: Synthetic oligonucleotide
  Antisense strand to SEQ ID NO: 1478210
uugcacaauugcuucugcc

SEQ ID NO: 1478212 - RNA, 19 nt, Artificial Sequence
  Description of Artificial Sequence: Synthetic oligonucleotide
  Sense strand starting at position 3121 of SEQ ID NO: 1244301
cuuagugagcacugaguau

SEQ ID NO: 1478213 - RNA, 19 nt, Artificial Sequence
  Description of Artificial Sequence: Synthetic oligonucleotide
  Antisense strand to SEQ ID NO: 1478212
auacucagugcucacuaag

SEQ ID NO: 1478214 - RNA, 19 nt, Artificial Sequence
  Description of Artificial Sequence: Synthetic oligonucleotide
  Sense strand starting at position 3133 of SEQ ID NO: 1244301
ugaguaucaggcgagucuu

SEQ ID NO: 1478215 - RNA, 19 nt, Artificial Sequence
  Description of Artificial Sequence: Synthetic oligonucleotide
  Antisense strand to SEQ ID NO: 1478214
aagacucgccugauacuca

SEQ ID NO: 1478216 - RNA, 19 nt, Artificial Sequence
  Description of Artificial Sequence: Synthetic oligonucleotide
  Sense strand starting at position 3175 of SEQ ID NO: 1244301
ccugucaggcuaggauaau

SEQ ID NO: 1478217 - RNA, 19 nt, Artificial Sequence
  Description of Artificial Sequence: Synthetic oligonucleotide
  Antisense strand to SEQ ID NO: 1478216
auuauccuagccugacagg

SEQ ID NO: 1478218 - RNA, 19 nt, Artificial Sequence
  Description of Artificial Sequence: Synthetic oligonucleotide
  Sense strand starting at position 3213 of SEQ ID NO: 1244301
agaguaaacucgguggaca

SEQ ID NO: 1478219 - RNA, 19 nt, Artificial Sequence
  Description of Artificial Sequence: Synthetic oligonucleotide
  Antisense strand to SEQ ID NO: 1478218
uguccaccgaguuuacucu

SEQ ID NO: 1478220 - RNA, 19 nt, Artificial Sequence
  Description of Artificial Sequence: Synthetic oligonucleotide
  Sense strand starting at position 3214 of SEQ ID NO: 1244301
gaguaaacucgguggacac

SEQ ID NO: 1478221 - RNA, 19 nt, Artificial Sequence
  Description of Artificial Sequence: Synthetic oligonucleotide
  Antisense strand to SEQ ID NO: 1478220
guguccaccgaguuuacuc

SEQ ID NO: 1478222 - RNA, 19 nt, Artificial Sequence
  Description of Artificial Sequence: Synthetic oligonucleotide
  Sense strand starting at position 3262 of SEQ ID NO: 1244301
gaguuaaagcaucguaagg

SEQ ID NO: 1478223 - RNA, 19 nt, Artificial Sequence
  Description of Artificial Sequence: Synthetic oligonucleotide
  Antisense strand to SEQ ID NO: 1478222
ccuuacgaugcuuuaacuc

SEQ ID NO: 1478224 - RNA, 19 nt, Artificial Sequence
  Description of Artificial Sequence: Synthetic oligonucleotide
  Sense strand starting at position 3294 of SEQ ID NO: 1244301
ggaccauuaccauaggugu

SEQ ID NO: 1478225 - RNA, 19 nt, Artificial Sequence
  Description of Artificial Sequence: Synthetic oligonucleotide
  Antisense strand to SEQ ID NO: 1478224
acaccuaugguaauggucc

SEQ ID NO: 1478226 - RNA, 19 nt, Artificial Sequence
  Description of Artificial Sequence: Synthetic oligonucleotide
  Sense strand starting at position 3315 of SEQ ID NO: 1244301
ggaccucugcuaugagauu

SEQ ID NO: 1478227 - RNA, 19 nt, Artificial Sequence
  Description of Artificial Sequence: Synthetic oligonucleotide
  Antisense strand to SEQ ID NO: 1478226
aaucucauagcagaggucc

SEQ ID NO: 1478228 - RNA, 19 nt, Artificial Sequence
  Description of Artificial Sequence: Synthetic oligonucleotide
  Sense strand starting at position 3316 of SEQ ID NO: 1244301
gaccucugcuaugagauuu

SEQ ID NO: 1478229 - RNA, 19 nt, Artificial Sequence
  Description of Artificial Sequence: Synthetic oligonucleotide
  Antisense strand to SEQ ID NO: 1478228
aaaucucauagcagagguc

SEQ ID NO: 1478230 - RNA, 19 nt, Artificial Sequence
  Description of Artificial Sequence: Synthetic oligonucleotide
  Sense strand starting at position 3388 of SEQ ID NO: 1244301
gugggaauucguugcuaag

SEQ ID NO: 1478231 - RNA, 19 nt, Artificial Sequence
  Description of Artificial Sequence: Synthetic oligonucleotide
  Antisense strand to SEQ ID NO: 1478230
cuuagcaacgaauucccac

SEQ ID NO: 1478232 - RNA, 19 nt, Artificial Sequence
  Description of Artificial Sequence: Synthetic oligonucleotide
  Sense strand starting at position 3390 of SEQ ID NO: 1244301
gggaauucguugcuaagga

SEQ ID NO: 1478233 - RNA, 19 nt, Artificial Sequence
  Description of Artificial Sequence: Synthetic oligonucleotide
  Antisense strand to SEQ ID NO: 1478232
uccuuagcaacgaauuccc

SEQ ID NO: 1478234 - RNA, 19 nt, Artificial Sequence
  Description of Artificial Sequence: Synthetic oligonucleotide
  Sense strand starting at position 3428 of SEQ ID NO: 1244301
auagaaacuuaauaaggga

SEQ ID NO: 1478235 - RNA, 19 nt, Artificial Sequence
  Description of Artificial Sequence: Synthetic oligonucleotide
  Antisense strand to SEQ ID NO: 1478234
ucccuuauuaaguuucuau

SEQ ID NO: 1478236 - RNA, 19 nt, Artificial Sequence
  Description of Artificial Sequence: Synthetic oligonucleotide
  Sense strand starting at position 3564 of SEQ ID NO: 1244301
gaaccagauguucgccuaa

SEQ ID NO: 1478237 - RNA, 19 nt, Artificial Sequence
  Description of Artificial Sequence: Synthetic oligonucleotide
  Antisense strand to SEQ ID NO: 1478236
uuaggcgaacaucugguuc

SEQ ID NO: 1478238 - RNA, 19 nt, Artificial Sequence
  Description of Artificial Sequence: Synthetic oligonucleotide
  Sense strand starting at position 3571 of SEQ ID NO: 1244301
auguucgccuaaucaauaa

SEQ ID NO: 1478239 - RNA, 19 nt, Artificial Sequence
  Description of Artificial Sequence: Synthetic oligonucleotide
  Antisense strand to SEQ ID NO: 1478238
uuauugauuaggcgaacau

SEQ ID NO: 1478240 - RNA, 19 nt, Artificial Sequence
  Description of Artificial Sequence: Synthetic oligonucleotide
  Sense strand starting at position 3806 of SEQ ID NO: 1244301
agucacucuccuuggacua

SEQ ID NO: 1478241 - RNA, 19 nt, Artificial Sequence
  Description of Artificial Sequence: Synthetic oligonucleotide
  Antisense strand to SEQ ID NO: 1478240
uaguccaaggagagugacu

SEQ ID NO: 1478242 - RNA, 19 nt, Artificial Sequence
  Description of Artificial Sequence: Synthetic oligonucleotide
  Sense strand starting at position 3807 of SEQ ID NO: 1244301
gucacucuccuuggacuau

SEQ ID NO: 1478243 - RNA, 19 nt, Artificial Sequence
  Description of Artificial Sequence: Synthetic oligonucleotide
  Antisense strand to SEQ ID NO: 1478242
auaguccaaggagagugac

SEQ ID NO: 1478244 - RNA, 19 nt, Artificial Sequence
  Description of Artificial Sequence: Synthetic oligonucleotide
  Sense strand starting at position 3864 of SEQ ID NO: 1244301
uguuaaauguacuuugaug

SEQ ID NO: 1478245 - RNA, 19 nt, Artificial Sequence
  Description of Artificial Sequence: Synthetic oligonucleotide
  Antisense strand to SEQ ID NO: 1478244
caucaaaguacauuuaaca

SEQ ID NO: 1478246 - RNA, 19 nt, Artificial Sequence
  Description of Artificial Sequence: Synthetic oligonucleotide
  Sense strand starting at position 3871 of SEQ ID NO: 1244301
uguacuuugauguggaaug

SEQ ID NO: 1478247 - RNA, 19 nt, Artificial Sequence
  Description of Artificial Sequence: Synthetic oligonucleotide
  Antisense strand to SEQ ID NO: 1478246
cauuccacaucaaaguaca

SEQ ID NO: 1478248 - RNA, 19 nt, Artificial Sequence
  Description of Artificial Sequence: Synthetic oligonucleotide
  Sense strand starting at position 3876 of SEQ ID NO: 1244301
uuugauguggaauguguaa

SEQ ID NO: 1478249 - RNA, 19 nt, Artificial Sequence
  Description of Artificial Sequence: Synthetic oligonucleotide
  Antisense strand to SEQ ID NO: 1478248
uuacacauuccacaucaaa

SEQ ID NO: 1478250 - RNA, 19 nt, Artificial Sequence
  Description of Artificial Sequence: Synthetic oligonucleotide
  Sense strand starting at position 3878 of SEQ ID NO: 1244301
ugauguggaauguguaauc

SEQ ID NO: 1478251 - RNA, 19 nt, Artificial Sequence
  Description of Artificial Sequence: Synthetic oligonucleotide
  Antisense strand to SEQ ID NO: 1478250
gauuacacauuccacauca

SEQ ID NO: 1478252 - RNA, 19 nt, Artificial Sequence
  Description of Artificial Sequence: Synthetic oligonucleotide
  Sense strand starting at position 3883 of SEQ ID NO: 1244301
uggaauguguaaucuauaa

SEQ ID NO: 1478253 - RNA, 19 nt, Artificial Sequence
  Description of Artificial Sequence: Synthetic oligonucleotide
  Antisense strand to SEQ ID NO: 1478252
uuauagauuacacauucca

SEQ ID NO: 1478254 - RNA, 19 nt, Artificial Sequence
  Description of Artificial Sequence: Synthetic oligonucleotide
  Sense strand starting at position 173 of SEQ ID NO: 1244302
acagguuuccagugcaaac

SEQ ID NO: 1478255 - RNA, 19 nt, Artificial Sequence
  Description of Artificial Sequence: Synthetic oligonucleotide
  Antisense strand to SEQ ID NO: 1478254
guuugcacuggaaaccugu

SEQ ID NO: 1478256 - RNA, 19 nt, Artificial Sequence
  Description of Artificial Sequence: Synthetic oligonucleotide
  Sense strand starting at position 175 of SEQ ID NO: 1244302
agguuuccagugcaaacau

SEQ ID NO: 1478257 - RNA, 19 nt, Artificial Sequence
  Description of Artificial Sequence: Synthetic oligonucleotide
  Antisense strand to SEQ ID NO: 1478256
auguuugcacuggaaaccu

SEQ ID NO: 1478258 - RNA, 19 nt, Artificial Sequence
  Description of Artificial Sequence: Synthetic oligonucleotide
  Sense strand starting at position 602 of SEQ ID NO: 1244302
acccacugauccucgguaa

SEQ ID NO: 1478259 - RNA, 19 nt, Artificial Sequence
  Description of Artificial Sequence: Synthetic oligonucleotide
  Antisense strand to SEQ ID NO: 1478258
uuaccgaggaucagugggu

SEQ ID NO: 1478260 - RNA, 19 nt, Artificial Sequence
  Description of Artificial Sequence: Synthetic oligonucleotide
  Sense strand starting at position 603 of SEQ ID NO: 1244302
cccacugauccucgguaaa

SEQ ID NO: 1478261 - RNA, 19 nt, Artificial Sequence
  Description of Artificial Sequence: Synthetic oligonucleotide
  Antisense strand to SEQ ID NO: 1478260
uuuaccgaggaucaguggg

SEQ ID NO: 1478262 - RNA, 19 nt, Artificial Sequence
  Description of Artificial Sequence: Synthetic oligonucleotide
  Sense strand starting at position 605 of SEQ ID NO: 1244302
cacugauccucgguaaagc

SEQ ID NO: 1478263 - RNA, 19 nt, Artificial Sequence
  Description of Artificial Sequence: Synthetic oligonucleotide
  Antisense strand to SEQ ID NO: 1478262
gcuuuaccgaggaucagug

SEQ ID NO: 1478264 - RNA, 19 nt, Artificial Sequence
  Description of Artificial Sequence: Synthetic oligonucleotide
  Sense strand starting at position 1107 of SEQ ID NO: 1244302
gcgggauccuagguggagu

SEQ ID NO: 1478265 - RNA, 19 nt, Artificial Sequence
  Description of Artificial Sequence: Synthetic oligonucleotide
  Antisense strand to SEQ ID NO: 1478264
acuccaccuaggaucccgc

SEQ ID NO: 1478266 - RNA, 19 nt, Artificial Sequence
  Description of Artificial Sequence: Synthetic oligonucleotide
  Sense strand starting at position 1221 of SEQ ID NO: 1244302
auaaaugaccuacguggaa

SEQ ID NO: 1478267 - RNA, 19 nt, Artificial Sequence
  Description of Artificial Sequence: Synthetic oligonucleotide
  Antisense strand to SEQ ID NO: 1478266
uuccacguaggucauuuau

SEQ ID NO: 1478268 - RNA, 19 nt, Artificial Sequence
  Description of Artificial Sequence: Synthetic oligonucleotide
  Sense strand starting at position 1261 of SEQ ID NO: 1244302
agcugcagucuccauuaua

SEQ ID NO: 1478269 - RNA, 19 nt, Artificial Sequence
  Description of Artificial Sequence: Synthetic oligonucleotide
  Antisense strand to SEQ ID NO: 1478268
uauaauggagacugcagcu

SEQ ID NO: 1478270 - RNA, 19 nt, Artificial Sequence
  Description of Artificial Sequence: Synthetic oligonucleotide
  Sense strand starting at position 1371 of SEQ ID NO: 1244302
uaacgauacuuggacaaga

SEQ ID NO: 1478271 - RNA, 19 nt, Artificial Sequence
  Description of Artificial Sequence: Synthetic oligonucleotide
  Antisense strand to SEQ ID NO: 1478270
ucuuguccaaguaucguua

SEQ ID NO: 1478272 - RNA, 19 nt, Artificial Sequence
  Description of Artificial Sequence: Synthetic oligonucleotide
  Sense strand starting at position 1712 of SEQ ID NO: 1244302
auaacuacugagugauagu

SEQ ID NO: 1478273 - RNA, 19 nt, Artificial Sequence
  Description of Artificial Sequence: Synthetic oligonucleotide
  Antisense strand to SEQ ID NO: 1478272
acuaucacucaguaguuau

SEQ ID NO: 1478274 - RNA, 19 nt, Artificial Sequence
  Description of Artificial Sequence: Synthetic oligonucleotide
  Sense strand starting at position 1719 of SEQ ID NO: 1244302
cugagugauaguggaaaga

SEQ ID NO: 1478275 - RNA, 19 nt, Artificial Sequence
  Description of Artificial Sequence: Synthetic oligonucleotide
  Antisense strand to SEQ ID NO: 1478274
ucuuuccacuaucacucag

SEQ ID NO: 1478276 - RNA, 19 nt, Artificial Sequence
  Description of Artificial Sequence: Synthetic oligonucleotide
  Sense strand starting at position 1736 of SEQ ID NO: 1244302
gaacauuggcuguggaguu

SEQ ID NO: 1478277 - RNA, 19 nt, Artificial Sequence
  Description of Artificial Sequence: Synthetic oligonucleotide
  Antisense strand to SEQ ID NO: 1478276
aacuccacagccaauguuc

SEQ ID NO: 1478278 - RNA, 19 nt, Artificial Sequence
  Description of Artificial Sequence: Synthetic oligonucleotide
  Sense strand starting at position 1749 of SEQ ID NO: 1244302
ggaguuagauaagcuggaa

SEQ ID NO: 1478279 - RNA, 19 nt, Artificial Sequence
  Description of Artificial Sequence: Synthetic oligonucleotide
  Antisense strand to SEQ ID NO: 1478278
uuccagcuuaucuaacucc

SEQ ID NO: 1478280 - RNA, 19 nt, Artificial Sequence
  Description of Artificial Sequence: Synthetic oligonucleotide
  Sense strand starting at position 1844 of SEQ ID NO: 1244302
gcauuuguauugucacuuc

SEQ ID NO: 1478281 - RNA, 19 nt, Artificial Sequence
  Description of Artificial Sequence: Synthetic oligonucleotide
  Antisense strand to SEQ ID NO: 1478280
gaagugacaauacaaaugc

SEQ ID NO: 1478282 - RNA, 19 nt, Artificial Sequence
  Description of Artificial Sequence: Synthetic oligonucleotide
  Sense strand starting at position 1855 of SEQ ID NO: 1244302
gucacuucuugagcaucua

SEQ ID NO: 1478283 - RNA, 19 nt, Artificial Sequence
  Description of Artificial Sequence: Synthetic oligonucleotide
  Antisense strand to SEQ ID NO: 1478282
uagaugcucaagaagugac

SEQ ID NO: 1478284 - RNA, 19 nt, Artificial Sequence
  Description of Artificial Sequence: Synthetic oligonucleotide
  Sense strand starting at position 1876 of SEQ ID NO: 1244302
agcccuuugagguaggaau

SEQ ID NO: 1478285 - RNA, 19 nt, Artificial Sequence
  Description of Artificial Sequence: Synthetic oligonucleotide
  Antisense strand to SEQ ID NO: 1478284
auuccuaccucaaagggcu

SEQ ID NO: 1478286 - RNA, 19 nt, Artificial Sequence
  Description of Artificial Sequence: Synthetic oligonucleotide
  Sense strand starting at position 1878 of SEQ ID NO: 1244302
cccuuugagguaggaauca

SEQ ID NO: 1478287 - RNA, 19 nt, Artificial Sequence
  Description of Artificial Sequence: Synthetic oligonucleotide
  Antisense strand to SEQ ID NO: 1478286
ugauuccuaccucaaaggg

SEQ ID NO: 1478288 - RNA, 19 nt, Artificial Sequence
  Description of Artificial Sequence: Synthetic oligonucleotide
  Sense strand starting at position 1995 of SEQ ID NO: 1244302
acugcuauacucuguuaca

SEQ ID NO: 1478289 - RNA, 19 nt, Artificial Sequence
  Description of Artificial Sequence: Synthetic oligonucleotide
  Antisense strand to SEQ ID NO: 1478288
uguaacagaguauagcagu

SEQ ID NO: 1478290 - RNA, 19 nt, Artificial Sequence
  Description of Artificial Sequence: Synthetic oligonucleotide
  Sense strand starting at position 1996 of SEQ ID NO: 1244302
cugcuauacucuguuacau

SEQ ID NO: 1478291 - RNA, 19 nt, Artificial Sequence
  Description of Artificial Sequence: Synthetic oligonucleotide
  Antisense strand to SEQ ID NO: 1478290
auguaacagaguauagcag

SEQ ID NO: 1478292 - RNA, 19 nt, Artificial Sequence
  Description of Artificial Sequence: Synthetic oligonucleotide
  Sense strand starting at position 2048 of SEQ ID NO: 1244302
ugcgguaacggguauaagu

SEQ ID NO: 1478293 - RNA, 19 nt, Artificial Sequence
  Description of Artificial Sequence: Synthetic oligonucleotide
  Antisense strand to SEQ ID NO: 1478292
acuuauacccguuaccgca

SEQ ID NO: 1478294 - RNA, 19 nt, Artificial Sequence
  Description of Artificial Sequence: Synthetic oligonucleotide
  Sense strand starting at position 2075 of SEQ ID NO: 1244302
uguacuaggucuuuaauaa

SEQ ID NO: 1478295 - RNA, 19 nt, Artificial Sequence
  Description of Artificial Sequence: Synthetic oligonucleotide
  Antisense strand to SEQ ID NO: 1478294
uuauuaaagaccuaguaca

SEQ ID NO: 1478296 - RNA, 19 nt, Artificial Sequence
  Description of Artificial Sequence: Synthetic oligonucleotide
  Sense strand starting at position 2076 of SEQ ID NO: 1244302
guacuaggucuuuaauaaa

SEQ ID NO: 1478297 - RNA, 19 nt, Artificial Sequence
  Description of Artificial Sequence: Synthetic oligonucleotide
  Antisense strand to SEQ ID NO: 1478296
uuuauuaaagaccuaguac

SEQ ID NO: 1478298 - RNA, 19 nt, Artificial Sequence
  Description of Artificial Sequence: Synthetic oligonucleotide
  Sense strand starting at position 2252 of SEQ ID NO: 1244302
ccuugaauguccgucugau

SEQ ID NO: 1478299 - RNA, 19 nt, Artificial Sequence
  Description of Artificial Sequence: Synthetic oligonucleotide
  Antisense strand to SEQ ID NO: 1478298
aucagacggacauucaagg

SEQ ID NO: 1478300 - RNA, 19 nt, Artificial Sequence
  Description of Artificial Sequence: Synthetic oligonucleotide
  Sense strand starting at position 2305 of SEQ ID NO: 1244302
ggacuaugagcgugcauuu

SEQ ID NO: 1478301 - RNA, 19 nt, Artificial Sequence
  Description of Artificial Sequence: Synthetic oligonucleotide
  Antisense strand to SEQ ID NO: 1478300
aaaugcacgcucauagucc

SEQ ID NO: 1478302 - RNA, 19 nt, Artificial Sequence
  Description of Artificial Sequence: Synthetic oligonucleotide
  Sense strand starting at position 2459 of SEQ ID NO: 1244302
gcggcuuaaccugaacaaa

SEQ ID NO: 1478303 - RNA, 19 nt, Artificial Sequence
  Description of Artificial Sequence: Synthetic oligonucleotide
  Antisense strand to SEQ ID NO: 1478302
uuuguucagguuaagccgc

SEQ ID NO: 1478304 - RNA, 19 nt, Artificial Sequence
  Description of Artificial Sequence: Synthetic oligonucleotide
  Sense strand starting at position 2462 of SEQ ID NO: 1244302
gcuuaaccugaacaaaguu

SEQ ID NO: 1478305 - RNA, 19 nt, Artificial Sequence
  Description of Artificial Sequence: Synthetic oligonucleotide
  Antisense strand to SEQ ID NO: 1478304
aacuuuguucagguuaagc

SEQ ID NO: 1478306 - RNA, 19 nt, Artificial Sequence
  Description of Artificial Sequence: Synthetic oligonucleotide
  Sense strand starting at position 2515 of SEQ ID NO: 1244302
cuuccugguguuggaagua

SEQ ID NO: 1478307 - RNA, 19 nt, Artificial Sequence
  Description of Artificial Sequence: Synthetic oligonucleotide
  Antisense strand to SEQ ID NO: 1478306
uacuuccaacaccaggaag

SEQ ID NO: 1478308 - RNA, 19 nt, Artificial Sequence
  Description of Artificial Sequence: Synthetic oligonucleotide
  Sense strand starting at position 2520 of SEQ ID NO: 1244302
ugguguuggaaguauugau

SEQ ID NO: 1478309 - RNA, 19 nt, Artificial Sequence
  Description of Artificial Sequence: Synthetic oligonucleotide
  Antisense strand to SEQ ID NO: 1478308
aucaauacuuccaacacca

SEQ ID NO: 1478310 - RNA, 19 nt, Artificial Sequence
  Description of Artificial Sequence: Synthetic oligonucleotide
  Sense strand starting at position 2981 of SEQ ID NO: 1244302
uuuauauggaaucgugauu

SEQ ID NO: 1478311 - RNA, 19 nt, Artificial Sequence
  Description of Artificial Sequence: Synthetic oligonucleotide
  Antisense strand to SEQ ID NO: 1478310
aaucacgauuccauauaaa

SEQ ID NO: 1478312 - RNA, 19 nt, Artificial Sequence
  Description of Artificial Sequence: Synthetic oligonucleotide
  Sense strand starting at position 2986 of SEQ ID NO: 1244302
auggaaucgugauuauagg

SEQ ID NO: 1478313 - RNA, 19 nt, Artificial Sequence
  Description of Artificial Sequence: Synthetic oligonucleotide
  Antisense strand to SEQ ID NO: 1478312
ccuauaaucacgauuccau

SEQ ID NO: 1478314 - RNA, 19 nt, Artificial Sequence
  Description of Artificial Sequence: Synthetic oligonucleotide
  Sense strand starting at position 2987 of SEQ ID NO: 1244302
uggaaucgugauuauaggu

SEQ ID NO: 1478315 - RNA, 19 nt, Artificial Sequence
  Description of Artificial Sequence: Synthetic oligonucleotide
  Antisense strand to SEQ ID NO: 1478314
accuauaaucacgauucca

SEQ ID NO: 1478316 - RNA, 19 nt, Artificial Sequence
  Description of Artificial Sequence: Synthetic oligonucleotide
  Sense strand starting at position 3012 of SEQ ID NO: 1244302
auaagacuucuaggagcca

SEQ ID NO: 1478317 - RNA, 19 nt, Artificial Sequence
  Description of Artificial Sequence: Synthetic oligonucleotide
  Antisense strand to SEQ ID NO: 1478316
uggcuccuagaagucuuau

SEQ ID NO: 1478318 - RNA, 19 nt, Artificial Sequence
  Description of Artificial Sequence: Synthetic oligonucleotide
  Sense strand starting at position 3040 of SEQ ID NO: 1244302
gccuucuuggaggaaguga

SEQ ID NO: 1478319 - RNA, 19 nt, Artificial Sequence
  Description of Artificial Sequence: Synthetic oligonucleotide
  Antisense strand to SEQ ID NO: 1478318
ucacuuccuccaagaaggc

SEQ ID NO: 1478320 - RNA, 19 nt, Artificial Sequence
  Description of Artificial Sequence: Synthetic oligonucleotide
  Sense strand starting at position 3150 of SEQ ID NO: 1244302
gagagaacuuggugauuuc

SEQ ID NO: 1478321 - RNA, 19 nt, Artificial Sequence
  Description of Artificial Sequence: Synthetic oligonucleotide
  Antisense strand to SEQ ID NO: 1478320
gaaaucaccaaguucucuc

SEQ ID NO: 1478322 - RNA, 19 nt, Artificial Sequence
  Description of Artificial Sequence: Synthetic oligonucleotide
  Sense strand starting at position 3206 of SEQ ID NO: 1244302
gugggaguaggcugcuuaa

SEQ ID NO: 1478323 - RNA, 19 nt, Artificial Sequence
  Description of Artificial Sequence: Synthetic oligonucleotide
  Antisense strand to SEQ ID NO: 1478322
uuaagcagccuacucccac

SEQ ID NO: 1478324 - RNA, 19 nt, Artificial Sequence
  Description of Artificial Sequence: Synthetic oligonucleotide
  Sense strand starting at position 3209 of SEQ ID NO: 1244302
ggaguaggcugcuuaaggu

SEQ ID NO: 1478325 - RNA, 19 nt, Artificial Sequence
  Description of Artificial Sequence: Synthetic oligonucleotide
  Antisense strand to SEQ ID NO: 1478324
accuuaagcagccuacucc

SEQ ID NO: 1478326 - RNA, 19 nt, Artificial Sequence
  Description of Artificial Sequence: Synthetic oligonucleotide
  Sense strand starting at position 3239 of SEQ ID NO: 1244302
cucaaagacucgguaaaca

SEQ ID NO: 1478327 - RNA, 19 nt, Artificial Sequence
  Description of Artificial Sequence: Synthetic oligonucleotide
  Antisense strand to SEQ ID NO: 1478326
uguuuaccgagucuuugag

SEQ ID NO: 1478328 - RNA, 19 nt, Artificial Sequence
  Description of Artificial Sequence: Synthetic oligonucleotide
  Sense strand starting at position 3265 of SEQ ID NO: 1244302
cuuucucuucggcaauuaa

SEQ ID NO: 1478329 - RNA, 19 nt, Artificial Sequence
  Description of Artificial Sequence: Synthetic oligonucleotide
  Antisense strand to SEQ ID NO: 1478328
uuaauugccgaagagaaag

SEQ ID NO: 1478330 - RNA, 19 nt, Artificial Sequence
  Description of Artificial Sequence: Synthetic oligonucleotide
  Sense strand starting at position 3602 of SEQ ID NO: 1244302
guuggagguauugguauaa

SEQ ID NO: 1478331 - RNA, 19 nt, Artificial Sequence
  Description of Artificial Sequence: Synthetic oligonucleotide
  Antisense strand to SEQ ID NO: 1478330
uuauaccaauaccuccaac

SEQ ID NO: 1478332 - RNA, 19 nt, Artificial Sequence
  Description of Artificial Sequence: Synthetic oligonucleotide
  Sense strand starting at position 3906 of SEQ ID NO: 1244302
uggucagacuagucuccaa

SEQ ID NO: 1478333 - RNA, 19 nt, Artificial Sequence
  Description of Artificial Sequence: Synthetic oligonucleotide
  Antisense strand to SEQ ID NO: 1478332
uuggagacuagucugacca

SEQ ID NO: 1478334 - RNA, 19 nt, Artificial Sequence
  Description of Artificial Sequence: Synthetic oligonucleotide
  Sense strand starting at position 24 of SEQ ID NO: 1244303
gcaaucugucauuaaggca

SEQ ID NO: 1478335 - RNA, 19 nt, Artificial Sequence
  Description of Artificial Sequence: Synthetic oligonucleotide
  Antisense strand to SEQ ID NO: 1478334
ugccuuaaugacagauugc

SEQ ID NO: 1478336 - RNA, 19 nt, Artificial Sequence
  Description of Artificial Sequence: Synthetic oligonucleotide
  Sense strand starting at position 108 of SEQ ID NO: 1244303
gcagauuacggcugagaug

SEQ ID NO: 1478337 - RNA, 19 nt, Artificial Sequence
  Description of Artificial Sequence: Synthetic oligonucleotide
  Antisense strand to SEQ ID NO: 1478336
caucucagccguaaucugc

SEQ ID NO: 1478338 - RNA, 19 nt, Artificial Sequence
  Description of Artificial Sequence: Synthetic oligonucleotide
  Sense strand starting at position 147 of SEQ ID NO: 1244303
uucugagggccucaucauu

SEQ ID NO: 1478339 - RNA, 19 nt, Artificial Sequence
  Description of Artificial Sequence: Synthetic oligonucleotide
  Antisense strand to SEQ ID NO: 1478338
aaugaugaggcccucagaa

SEQ ID NO: 1478340 - RNA, 19 nt, Artificial Sequence
  Description of Artificial Sequence: Synthetic oligonucleotide
  Sense strand starting at position 152 of SEQ ID NO: 1244303
agggccucaucauugaaga

SEQ ID NO: 1478341 - RNA, 19 nt, Artificial Sequence
  Description of Artificial Sequence: Synthetic oligonucleotide
  Antisense strand to SEQ ID NO: 1478340
ucuucaaugaugaggcccu

SEQ ID NO: 1478342 - RNA, 19 nt, Artificial Sequence
  Description of Artificial Sequence: Synthetic oligonucleotide
  Sense strand starting at position 153 of SEQ ID NO: 1244303
gggccucaucauugaagag

SEQ ID NO: 1478343 - RNA, 19 nt, Artificial Sequence
  Description of Artificial Sequence: Synthetic oligonucleotide
  Antisense strand to SEQ ID NO: 1478342
cucuucaaugaugaggccc

SEQ ID NO: 1478344 - RNA, 19 nt, Artificial Sequence
  Description of Artificial Sequence: Synthetic oligonucleotide
  Sense strand starting at position 154 of SEQ ID NO: 1244303
ggccucaucauugaagagu

SEQ ID NO: 1478345 - RNA, 19 nt, Artificial Sequence
  Description of Artificial Sequence: Synthetic oligonucleotide
  Antisense strand to SEQ ID NO: 1478344
acucuucaaugaugaggcc

SEQ ID NO: 1478346 - RNA, 19 nt, Artificial Sequence
  Description of Artificial Sequence: Synthetic oligonucleotide
  Sense strand starting at position 273 of SEQ ID NO: 1244303
ggcuguuccaacugauaag

SEQ ID NO: 1478347 - RNA, 19 nt, Artificial Sequence
  Description of Artificial Sequence: Synthetic oligonucleotide
  Antisense strand to SEQ ID NO: 1478346
cuuaucaguuggaacagcc

SEQ ID NO: 1478348 - RNA, 19 nt, Artificial Sequence
  Description of Artificial Sequence: Synthetic oligonucleotide
  Sense strand starting at position 354 of SEQ ID NO: 1244303
gccaaaucgccauaauguu

SEQ ID NO: 1478349 - RNA, 19 nt, Artificial Sequence
  Description of Artificial Sequence: Synthetic oligonucleotide
  Antisense strand to SEQ ID NO: 1478348
aacauuauggcgauuuggc

SEQ ID NO: 1478350 - RNA, 19 nt, Artificial Sequence
  Description of Artificial Sequence: Synthetic oligonucleotide
  Sense strand starting at position 473 of SEQ ID NO: 1244303
guuacuucgcuauaacaaa

SEQ ID NO: 1478351 - RNA, 19 nt, Artificial Sequence
  Description of Artificial Sequence: Synthetic oligonucleotide
  Antisense strand to SEQ ID NO: 1478350
uuuguuauagcgaaguaac

SEQ ID NO: 1478352 - RNA, 19 nt, Artificial Sequence
  Description of Artificial Sequence: Synthetic oligonucleotide
  Sense strand starting at position 519 of SEQ ID NO: 1244303
guaagcaguuccuuagucu

SEQ ID NO: 1478353 - RNA, 19 nt, Artificial Sequence
  Description of Artificial Sequence: Synthetic oligonucleotide
  Antisense strand to SEQ ID NO: 1478352
agacuaaggaacugcuuac

SEQ ID NO: 1478354 - RNA, 19 nt, Artificial Sequence
  Description of Artificial Sequence: Synthetic oligonucleotide
  Sense strand starting at position 762 of SEQ ID NO: 1244303
accaaagccuacguuuaaa

SEQ ID NO: 1478355 - RNA, 19 nt, Artificial Sequence
  Description of Artificial Sequence: Synthetic oligonucleotide
  Antisense strand to SEQ ID NO: 1478354
uuuaaacguaggcuuuggu

SEQ ID NO: 1478356 - RNA, 19 nt, Artificial Sequence
  Description of Artificial Sequence: Synthetic oligonucleotide
  Sense strand starting at position 800 of SEQ ID NO: 1244303
ucuaaagaagcaugcauua

SEQ ID NO: 1478357 - RNA, 19 nt, Artificial Sequence
  Description of Artificial Sequence: Synthetic oligonucleotide
  Antisense strand to SEQ ID NO: 1478356
uaaugcaugcuucuuuaga

SEQ ID NO: 1478358 - RNA, 19 nt, Artificial Sequence
  Description of Artificial Sequence: Synthetic oligonucleotide
  Sense strand starting at position 901 of SEQ ID NO: 1244303
cuguaucuauucuccagau

SEQ ID NO: 1478359 - RNA, 19 nt, Artificial Sequence
  Description of Artificial Sequence: Synthetic oligonucleotide
  Antisense strand to SEQ ID NO: 1478358
aucuggagaauagauacag

SEQ ID NO: 1478360 - RNA, 19 nt, Artificial Sequence
  Description of Artificial Sequence: Synthetic oligonucleotide
  Sense strand starting at position 902 of SEQ ID NO: 1244303
uguaucuauucuccagaua

SEQ ID NO: 1478361 - RNA, 19 nt, Artificial Sequence
  Description of Artificial Sequence: Synthetic oligonucleotide
  Antisense strand to SEQ ID NO: 1478360
uaucuggagaauagauaca

SEQ ID NO: 1478362 - RNA, 19 nt, Artificial Sequence
  Description of Artificial Sequence: Synthetic oligonucleotide
  Sense strand starting at position 1000 of SEQ ID NO: 1244303
guuucauaggauuguggaa

SEQ ID NO: 1478363 - RNA, 19 nt, Artificial Sequence
  Description of Artificial Sequence: Synthetic oligonucleotide
  Antisense strand to SEQ ID NO: 1478362
uuccacaauccuaugaaac

SEQ ID NO: 1478364 - RNA, 19 nt, Artificial Sequence
  Description of Artificial Sequence: Synthetic oligonucleotide
  Sense strand starting at position 1013 of SEQ ID NO: 1244303
guggaaagcuaacagaacu

SEQ ID NO: 1478365 - RNA, 19 nt, Artificial Sequence
  Description of Artificial Sequence: Synthetic oligonucleotide
  Antisense strand to SEQ ID NO: 1478364
aguucuguuagcuuuccac

SEQ ID NO: 1478366 - RNA, 19 nt, Artificial Sequence
  Description of Artificial Sequence: Synthetic oligonucleotide
  Sense strand starting at position 1036 of SEQ ID NO: 1244303
agauuaguuuccucaguug

SEQ ID NO: 1478367 - RNA, 19 nt, Artificial Sequence
  Description of Artificial Sequence: Synthetic oligonucleotide
  Antisense strand to SEQ ID NO: 1478366
caacugaggaaacuaaucu

SEQ ID NO: 1478368 - RNA, 19 nt, Artificial Sequence
  Description of Artificial Sequence: Synthetic oligonucleotide
  Sense strand starting at position 1167 of SEQ ID NO: 1244303
cuugacagcugccucuaua

SEQ ID NO: 1478369 - RNA, 19 nt, Artificial Sequence
  Description of Artificial Sequence: Synthetic oligonucleotide
  Antisense strand to SEQ ID NO: 1478368
uauagaggcagcugucaag

SEQ ID NO: 1478370 - RNA, 19 nt, Artificial Sequence
  Description of Artificial Sequence: Synthetic oligonucleotide
  Sense strand starting at position 1186 of SEQ ID NO: 1244303
agggacuucuuagaauacu

SEQ ID NO: 1478371 - RNA, 19 nt, Artificial Sequence
  Description of Artificial Sequence: Synthetic oligonucleotide
  Antisense strand to SEQ ID NO: 1478370
aguauucuaagaagucccu

SEQ ID NO: 1478372 - RNA, 19 nt, Artificial Sequence
  Description of Artificial Sequence: Synthetic oligonucleotide
  Sense strand starting at position 1218 of SEQ ID NO: 1244303
acuuguaaaucaucacggu

SEQ ID NO: 1478373 - RNA, 19 nt, Artificial Sequence
  Description of Artificial Sequence: Synthetic oligonucleotide
  Antisense strand to SEQ ID NO: 1478372
accgugaugauuuacaagu

SEQ ID NO: 1478374 - RNA, 19 nt, Artificial Sequence
  Description of Artificial Sequence: Synthetic oligonucleotide
  Sense strand starting at position 1219 of SEQ ID NO: 1244303
cuuguaaaucaucacggua

SEQ ID NO: 1478375 - RNA, 19 nt, Artificial Sequence
  Description of Artificial Sequence: Synthetic oligonucleotide
  Antisense strand to SEQ ID NO: 1478374
uaccgugaugauuuacaag

SEQ ID NO: 1478376 - RNA, 19 nt, Artificial Sequence
  Description of Artificial Sequence: Synthetic oligonucleotide
  Sense strand starting at position 1234 of SEQ ID NO: 1244303
gguaaacccuaacaaguaa

SEQ ID NO: 1478377 - RNA, 19 nt, Artificial Sequence
  Description of Artificial Sequence: Synthetic oligonucleotide
  Antisense strand to SEQ ID NO: 1478376
uuacuuguuaggguuuacc

SEQ ID NO: 1478378 - RNA, 19 nt, Artificial Sequence
  Description of Artificial Sequence: Synthetic oligonucleotide
  Sense strand starting at position 1278 of SEQ ID NO: 1244303
cccguauaagcgucaugcu

SEQ ID NO: 1478379 - RNA, 19 nt, Artificial Sequence
  Description of Artificial Sequence: Synthetic oligonucleotide
  Antisense strand to SEQ ID NO: 1478378
agcaugacgcuuauacggg

SEQ ID NO: 1478380 - RNA, 19 nt, Artificial Sequence
  Description of Artificial Sequence: Synthetic oligonucleotide
  Sense strand starting at position 1286 of SEQ ID NO: 1244303
agcgucaugcuguaauuac

SEQ ID NO: 1478381 - RNA, 19 nt, Artificial Sequence
  Description of Artificial Sequence: Synthetic oligonucleotide
  Antisense strand to SEQ ID NO: 1478380
guaauuacagcaugacgcu

SEQ ID NO: 1478382 - RNA, 19 nt, Artificial Sequence
  Description of Artificial Sequence: Synthetic oligonucleotide
  Sense strand starting at position 1333 of SEQ ID NO: 1244303
caugaauccuggucagaaa

SEQ ID NO: 1478383 - RNA, 19 nt, Artificial Sequence
  Description of Artificial Sequence: Synthetic oligonucleotide
  Antisense strand to SEQ ID NO: 1478382
uuucugaccaggauucaug

SEQ ID NO: 1478384 - RNA, 19 nt, Artificial Sequence
  Description of Artificial Sequence: Synthetic oligonucleotide
  Sense strand starting at position 1336 of SEQ ID NO: 1244303
gaauccuggucagaaauuu

SEQ ID NO: 1478385 - RNA, 19 nt, Artificial Sequence
  Description of Artificial Sequence: Synthetic oligonucleotide
  Antisense strand to SEQ ID NO: 1478384
aaauuucugaccaggauuc

SEQ ID NO: 1478386 - RNA, 19 nt, Artificial Sequence
  Description of Artificial Sequence: Synthetic oligonucleotide
  Sense strand starting at position 2166 of SEQ ID NO: 1244303
gcuucuucacggugagaaa

SEQ ID NO: 1478387 - RNA, 19 nt, Artificial Sequence
  Description of Artificial Sequence: Synthetic oligonucleotide
  Antisense strand to SEQ ID NO: 1478386
uuucucaccgugaagaagc

SEQ ID NO: 1478388 - RNA, 19 nt, Artificial Sequence
  Description of Artificial Sequence: Synthetic oligonucleotide
  Sense strand starting at position 2226 of SEQ ID NO: 1244303
gagaaagugucuccuuuag

SEQ ID NO: 1478389 - RNA, 19 nt, Artificial Sequence
  Description of Artificial Sequence: Synthetic oligonucleotide
  Antisense strand to SEQ ID NO: 1478388
cuaaaggagacacuuucuc

SEQ ID NO: 1478390 - RNA, 19 nt, Artificial Sequence
  Description of Artificial Sequence: Synthetic oligonucleotide
  Sense strand starting at position 2228 of SEQ ID NO: 1244303
gaaagugucuccuuuaguc

SEQ ID NO: 1478391 - RNA, 19 nt, Artificial Sequence
  Description of Artificial Sequence: Synthetic oligonucleotide
  Antisense strand to SEQ ID NO: 1478390
gacuaaaggagacacuuuc

SEQ ID NO: 1478392 - RNA, 19 nt, Artificial Sequence
  Description of Artificial Sequence: Synthetic oligonucleotide
  Sense strand starting at position 2357 of SEQ ID NO: 1244303
cgcccugagucuccugauu

SEQ ID NO: 1478393 - RNA, 19 nt, Artificial Sequence
  Description of Artificial Sequence: Synthetic oligonucleotide
  Antisense strand to SEQ ID NO: 1478392
aaucaggagacucagggcg

SEQ ID NO: 1478394 - RNA, 19 nt, Artificial Sequence
  Description of Artificial Sequence: Synthetic oligonucleotide
  Sense strand starting at position 2362 of SEQ ID NO: 1244303
ugagucuccugauuaacag

SEQ ID NO: 1478395 - RNA, 19 nt, Artificial Sequence
  Description of Artificial Sequence: Synthetic oligonucleotide
  Antisense strand to SEQ ID NO: 1478394
cuguuaaucaggagacuca

SEQ ID NO: 1478396 - RNA, 19 nt, Artificial Sequence
  Description of Artificial Sequence: Synthetic oligonucleotide
  Sense strand starting at position 2446 of SEQ ID NO: 1244303
aaugucucccaguguggaa

SEQ ID NO: 1478397 - RNA, 19 nt, Artificial Sequence
  Description of Artificial Sequence: Synthetic oligonucleotide
  Antisense strand to SEQ ID NO: 1478396
uuccacacugggagacauu

SEQ ID NO: 1478398 - RNA, 19 nt, Artificial Sequence
  Description of Artificial Sequence: Synthetic oligonucleotide
  Sense strand starting at position 2986 of SEQ ID NO: 1244303
gggagauaaucgcugaaga

SEQ ID NO: 1478399 - RNA, 19 nt, Artificial Sequence
  Description of Artificial Sequence: Synthetic oligonucleotide
  Antisense strand to SEQ ID NO: 1478398
ucuucagcgauuaucuccc

SEQ ID NO: 1478400 - RNA, 19 nt, Artificial Sequence
  Description of Artificial Sequence: Synthetic oligonucleotide
  Sense strand starting at position 2987 of SEQ ID NO: 1244303
ggagauaaucgcugaagaa

SEQ ID NO: 1478401 - RNA, 19 nt, Artificial Sequence
  Description of Artificial Sequence: Synthetic oligonucleotide
  Antisense strand to SEQ ID NO: 1478400
uucuucagcgauuaucucc

SEQ ID NO: 1478402 - RNA, 19 nt, Artificial Sequence
  Description of Artificial Sequence: Synthetic oligonucleotide
  Sense strand starting at position 3033 of SEQ ID NO: 1244303
uugggauaaugcuuuagca

SEQ ID NO: 1478403 - RNA, 19 nt, Artificial Sequence
  Description of Artificial Sequence: Synthetic oligonucleotide
  Antisense strand to SEQ ID NO: 1478402
ugcuaaagcauuaucccaa

SEQ ID NO: 1478404 - RNA, 19 nt, Artificial Sequence
  Description of Artificial Sequence: Synthetic oligonucleotide
  Sense strand starting at position 3035 of SEQ ID NO: 1244303
gggauaaugcuuuagcaca

SEQ ID NO: 1478405 - RNA, 19 nt, Artificial Sequence
  Description of Artificial Sequence: Synthetic oligonucleotide
  Antisense strand to SEQ ID NO: 1478404
ugugcuaaagcauuauccc

SEQ ID NO: 1478406 - RNA, 19 nt, Artificial Sequence
  Description of Artificial Sequence: Synthetic oligonucleotide
  Sense strand starting at position 3037 of SEQ ID NO: 1244303
gauaaugcuuuagcacagu

SEQ ID NO: 1478407 - RNA, 19 nt, Artificial Sequence
  Description of Artificial Sequence: Synthetic oligonucleotide
  Antisense strand to SEQ ID NO: 1478406
acugugcuaaagcauuauc

SEQ ID NO: 1478408 - RNA, 19 nt, Artificial Sequence
  Description of Artificial Sequence: Synthetic oligonucleotide
  Sense strand starting at position 3077 of SEQ ID NO: 1244303
cagauugccuggguucgua

SEQ ID NO: 1478409 - RNA, 19 nt, Artificial Sequence
  Description of Artificial Sequence: Synthetic oligonucleotide
  Antisense strand to SEQ ID NO: 1478408
uacgaacccaggcaaucug

SEQ ID NO: 1478410 - RNA, 19 nt, Artificial Sequence
  Description of Artificial Sequence: Synthetic oligonucleotide
  Sense strand starting at position 3200 of SEQ ID NO: 1244303
gaguuuauacaauguaagg

SEQ ID NO: 1478411 - RNA, 19 nt, Artificial Sequence
  Description of Artificial Sequence: Synthetic oligonucleotide
  Antisense strand to SEQ ID NO: 1478410
ccuuacauuguauaaacuc

SEQ ID NO: 1478412 - RNA, 19 nt, Artificial Sequence
  Description of Artificial Sequence: Synthetic oligonucleotide
  Sense strand starting at position 3217 of SEQ ID NO: 1244303
ggcacuacacauugauaac

SEQ ID NO: 1478413 - RNA, 19 nt, Artificial Sequence
  Description of Artificial Sequence: Synthetic oligonucleotide
  Antisense strand to SEQ ID NO: 1478412
guuaucaauguguagugcc

SEQ ID NO: 1478414 - RNA, 19 nt, Artificial Sequence
  Description of Artificial Sequence: Synthetic oligonucleotide
  Sense strand starting at position 26 of SEQ ID NO: 1244304
ccuacauaggacuguugua

SEQ ID NO: 1478415 - RNA, 19 nt, Artificial Sequence
  Description of Artificial Sequence: Synthetic oligonucleotide
  Antisense strand to SEQ ID NO: 1478414
uacaacaguccuauguagg

SEQ ID NO: 1478416 - RNA, 19 nt, Artificial Sequence
  Description of Artificial Sequence: Synthetic oligonucleotide
  Sense strand starting at position 278 of SEQ ID NO: 1244304
uguaaucacuuauugugau

SEQ ID NO: 1478417 - RNA, 19 nt, Artificial Sequence
  Description of Artificial Sequence: Synthetic oligonucleotide
  Antisense strand to SEQ ID NO: 1478416
aucacaauaagugauuaca

SEQ ID NO: 1478418 - RNA, 19 nt, Artificial Sequence
  Description of Artificial Sequence: Synthetic oligonucleotide
  Sense strand starting at position 292 of SEQ ID NO: 1244304
gugauuauaaucgauguga

SEQ ID NO: 1478419 - RNA, 19 nt, Artificial Sequence
  Description of Artificial Sequence: Synthetic oligonucleotide
  Antisense strand to SEQ ID NO: 1478418
ucacaucgauuauaaucac

SEQ ID NO: 1478420 - RNA, 19 nt, Artificial Sequence
  Description of Artificial Sequence: Synthetic oligonucleotide
  Sense strand starting at position 294 of SEQ ID NO: 1244304
gauuauaaucgaugugaca

SEQ ID NO: 1478421 - RNA, 19 nt, Artificial Sequence
  Description of Artificial Sequence: Synthetic oligonucleotide
  Antisense strand to SEQ ID NO: 1478420
ugucacaucgauuauaauc

SEQ ID NO: 1478422 - RNA, 19 nt, Artificial Sequence
  Description of Artificial Sequence: Synthetic oligonucleotide
  Sense strand starting at position 296 of SEQ ID NO: 1244304
uuauaaucgaugugacaga

SEQ ID NO: 1478423 - RNA, 19 nt, Artificial Sequence
  Description of Artificial Sequence: Synthetic oligonucleotide
  Antisense strand to SEQ ID NO: 1478422
ucugucacaucgauuauaa

SEQ ID NO: 1478424 - RNA, 19 nt, Artificial Sequence
  Description of Artificial Sequence: Synthetic oligonucleotide
  Sense strand starting at position 399 of SEQ ID NO: 1244304
gguugacuucucuggacuu

SEQ ID NO: 1478425 - RNA, 19 nt, Artificial Sequence
  Description of Artificial Sequence: Synthetic oligonucleotide
  Antisense strand to SEQ ID NO: 1478424
aaguccagagaagucaacc

SEQ ID NO: 1478426 - RNA, 19 nt, Artificial Sequence
  Description of Artificial Sequence: Synthetic oligonucleotide
  Sense strand starting at position 525 of SEQ ID NO: 1244304
aucuuaagugcuugaacau

SEQ ID NO: 1478427 - RNA, 19 nt, Artificial Sequence
  Description of Artificial Sequence: Synthetic oligonucleotide
  Antisense strand to SEQ ID NO: 1478426
auguucaagcacuuaagau

SEQ ID NO: 1478428 - RNA, 19 nt, Artificial Sequence
  Description of Artificial Sequence: Synthetic oligonucleotide
  Sense strand starting at position 526 of SEQ ID NO: 1244304
ucuuaagugcuugaacauc

SEQ ID NO: 1478429 - RNA, 19 nt, Artificial Sequence
  Description of Artificial Sequence: Synthetic oligonucleotide
  Antisense strand to SEQ ID NO: 1478428
gauguucaagcacuuaaga

SEQ ID NO: 1478430 - RNA, 19 nt, Artificial Sequence
  Description of Artificial Sequence: Synthetic oligonucleotide
  Sense strand starting at position 768 of SEQ ID NO: 1244304
aaauucuaggcucaaguga

SEQ ID NO: 1478431 - RNA, 19 nt, Artificial Sequence
  Description of Artificial Sequence: Synthetic oligonucleotide
  Antisense strand to SEQ ID NO: 1478430
ucacuugagccuagaauuu

SEQ ID NO: 1478432 - RNA, 19 nt, Artificial Sequence
  Description of Artificial Sequence: Synthetic oligonucleotide
  Sense strand starting at position 954 of SEQ ID NO: 1244304
aagggaaauuaguaagaaa

SEQ ID NO: 1478433 - RNA, 19 nt, Artificial Sequence
  Description of Artificial Sequence: Synthetic oligonucleotide
  Antisense strand to SEQ ID NO: 1478432
uuucuuacuaauuucccuu

SEQ ID NO: 1478434 - RNA, 19 nt, Artificial Sequence
  Description of Artificial Sequence: Synthetic oligonucleotide
  Sense strand starting at position 992 of SEQ ID NO: 1244304
gucacuccuccacaguuua

SEQ ID NO: 1478435 - RNA, 19 nt, Artificial Sequence
  Description of Artificial Sequence: Synthetic oligonucleotide
  Antisense strand to SEQ ID NO: 1478434
uaaacuguggaggagugac

SEQ ID NO: 1478436 - RNA, 19 nt, Artificial Sequence
  Description of Artificial Sequence: Synthetic oligonucleotide
  Sense strand starting at position 1044 of SEQ ID NO: 1244304
gucaauugauucccaaguu

SEQ ID NO: 1478437 - RNA, 19 nt, Artificial Sequence
  Description of Artificial Sequence: Synthetic oligonucleotide
  Antisense strand to SEQ ID NO: 1478436
aacuugggaaucaauugac

SEQ ID NO: 1478438 - RNA, 19 nt, Artificial Sequence
  Description of Artificial Sequence: Synthetic oligonucleotide
  Sense strand starting at position 1083 of SEQ ID NO: 1244304
gcaggaaacuguccugaag

SEQ ID NO: 1478439 - RNA, 19 nt, Artificial Sequence
  Description of Artificial Sequence: Synthetic oligonucleotide
  Antisense strand to SEQ ID NO: 1478438
cuucaggacaguuuccugc

SEQ ID NO: 1478440 - RNA, 19 nt, Artificial Sequence
  Description of Artificial Sequence: Synthetic oligonucleotide
  Sense strand starting at position 1244 of SEQ ID NO: 1244304
ugccuagggcugggagaau

SEQ ID NO: 1478441 - RNA, 19 nt, Artificial Sequence
  Description of Artificial Sequence: Synthetic oligonucleotide
  Antisense strand to SEQ ID NO: 1478440
auucucccagcccuaggca

SEQ ID NO: 1478442 - RNA, 19 nt, Artificial Sequence
  Description of Artificial Sequence: Synthetic oligonucleotide
  Sense strand starting at position 1384 of SEQ ID NO: 1244304
gcacuuuagaugggugaac

SEQ ID NO: 1478443 - RNA, 19 nt, Artificial Sequence
  Description of Artificial Sequence: Synthetic oligonucleotide
  Antisense strand to SEQ ID NO: 1478442
guucacccaucuaaagugc

SEQ ID NO: 1478444 - RNA, 19 nt, Artificial Sequence
  Description of Artificial Sequence: Synthetic oligonucleotide
  Sense strand starting at position 1393 of SEQ ID NO: 1244304
augggugaacuguaugcuu

SEQ ID NO: 1478445 - RNA, 19 nt, Artificial Sequence
  Description of Artificial Sequence: Synthetic oligonucleotide
  Antisense strand to SEQ ID NO: 1478444
aagcauacaguucacccau

SEQ ID NO: 1478446 - RNA, 19 nt, Artificial Sequence
  Description of Artificial Sequence: Synthetic oligonucleotide
  Sense strand starting at position 1459 of SEQ ID NO: 1244304
ggaucaauccuaggagcga

SEQ ID NO: 1478447 - RNA, 19 nt, Artificial Sequence
  Description of Artificial Sequence: Synthetic oligonucleotide
  Antisense strand to SEQ ID NO: 1478446
ucgcuccuaggauugaucc

SEQ ID NO: 1478448 - RNA, 19 nt, Artificial Sequence
  Description of Artificial Sequence: Synthetic oligonucleotide
  Sense strand starting at position 2224 of SEQ ID NO: 1244304
cugaauauggauugugcua

SEQ ID NO: 1478449 - RNA, 19 nt, Artificial Sequence
  Description of Artificial Sequence: Synthetic oligonucleotide
  Antisense strand to SEQ ID NO: 1478448
uagcacaauccauauucag

SEQ ID NO: 1478450 - RNA, 19 nt, Artificial Sequence
  Description of Artificial Sequence: Synthetic oligonucleotide
  Sense strand starting at position 2231 of SEQ ID NO: 1244304
uggauugugcuaugaauau

SEQ ID NO: 1478451 - RNA, 19 nt, Artificial Sequence
  Description of Artificial Sequence: Synthetic oligonucleotide
  Antisense strand to SEQ ID NO: 1478450
auauucauagcacaaucca

SEQ ID NO: 1478452 - RNA, 19 nt, Artificial Sequence
  Description of Artificial Sequence: Synthetic oligonucleotide
  Sense strand starting at position 2299 of SEQ ID NO: 1244304
ucucguguugaugacaaga

SEQ ID NO: 1478453 - RNA, 19 nt, Artificial Sequence
  Description of Artificial Sequence: Synthetic oligonucleotide
  Antisense strand to SEQ ID NO: 1478452
ucuugucaucaacacgaga

SEQ ID NO: 1478454 - RNA, 19 nt, Artificial Sequence
  Description of Artificial Sequence: Synthetic oligonucleotide
  Sense strand starting at position 2313 of SEQ ID NO: 1244304
caagaauuguguuuggaua

SEQ ID NO: 1478455 - RNA, 19 nt, Artificial Sequence
  Description of Artificial Sequence: Synthetic oligonucleotide
  Antisense strand to SEQ ID NO: 1478454
uauccaaacacaauucuug

SEQ ID NO: 1478456 - RNA, 19 nt, Artificial Sequence
  Description of Artificial Sequence: Synthetic oligonucleotide
  Sense strand starting at position 2314 of SEQ ID NO: 1244304
aagaauuguguuuggauag

SEQ ID NO: 1478457 - RNA, 19 nt, Artificial Sequence
  Description of Artificial Sequence: Synthetic oligonucleotide
  Antisense strand to SEQ ID NO: 1478456
cuauccaaacacaauucuu

SEQ ID NO: 1478458 - RNA, 19 nt, Artificial Sequence
  Description of Artificial Sequence: Synthetic oligonucleotide
  Sense strand starting at position 2320 of SEQ ID NO: 1244304
uguguuuggauaggaaucu

SEQ ID NO: 1478459 - RNA, 19 nt, Artificial Sequence
  Description of Artificial Sequence: Synthetic oligonucleotide
  Antisense strand to SEQ ID NO: 1478458
agauuccuauccaaacaca

SEQ ID NO: 1478460 - RNA, 19 nt, Artificial Sequence
  Description of Artificial Sequence: Synthetic oligonucleotide
  Sense strand starting at position 2612 of SEQ ID NO: 1244304
augagucauuaucuuaaga

SEQ ID NO: 1478461 - RNA, 19 nt, Artificial Sequence
  Description of Artificial Sequence: Synthetic oligonucleotide
  Antisense strand to SEQ ID NO: 1478460
ucuuaagauaaugacucau

SEQ ID NO: 1478462 - RNA, 19 nt, Artificial Sequence
  Description of Artificial Sequence: Synthetic oligonucleotide
  Sense strand starting at position 2687 of SEQ ID NO: 1244304
uagguuguuaguggauaau

SEQ ID NO: 1478463 - RNA, 19 nt, Artificial Sequence
  Description of Artificial Sequence: Synthetic oligonucleotide
  Antisense strand to SEQ ID NO: 1478462
auuauccacuaacaaccua

SEQ ID NO: 1478464 - RNA, 19 nt, Artificial Sequence
  Description of Artificial Sequence: Synthetic oligonucleotide
  Sense strand starting at position 2690 of SEQ ID NO: 1244304
guuguuaguggauaauauu

SEQ ID NO: 1478465 - RNA, 19 nt, Artificial Sequence
  Description of Artificial Sequence: Synthetic oligonucleotide
  Antisense strand to SEQ ID NO: 1478464
aauauuauccacuaacaac

SEQ ID NO: 1478466 - RNA, 19 nt, Artificial Sequence
  Description of Artificial Sequence: Synthetic oligonucleotide
  Sense strand starting at position 2781 of SEQ ID NO: 1244304
cuccaugugucguugauuu

SEQ ID NO: 1478467 - RNA, 19 nt, Artificial Sequence
  Description of Artificial Sequence: Synthetic oligonucleotide
  Antisense strand to SEQ ID NO: 1478466
aaaucaacgacacauggag

SEQ ID NO: 1478468 - RNA, 19 nt, Artificial Sequence
  Description of Artificial Sequence: Synthetic oligonucleotide
  Sense strand starting at position 2785 of SEQ ID NO: 1244304
augugucguugauuuaaca

SEQ ID NO: 1478469 - RNA, 19 nt, Artificial Sequence
  Description of Artificial Sequence: Synthetic oligonucleotide
  Antisense strand to SEQ ID NO: 1478468
uguuaaaucaacgacacau

SEQ ID NO: 1478470 - RNA, 19 nt, Artificial Sequence
  Description of Artificial Sequence: Synthetic oligonucleotide
  Sense strand starting at position 2918 of SEQ ID NO: 1244304
agggauauuucuuaacgga

SEQ ID NO: 1478471 - RNA, 19 nt, Artificial Sequence
  Description of Artificial Sequence: Synthetic oligonucleotide
  Antisense strand to SEQ ID NO: 1478470
uccguuaagaaauaucccu

SEQ ID NO: 1478472 - RNA, 19 nt, Artificial Sequence
  Description of Artificial Sequence: Synthetic oligonucleotide
  Sense strand starting at position 3046 of SEQ ID NO: 1244304
gguucccucccuugaaaua

SEQ ID NO: 1478473 - RNA, 19 nt, Artificial Sequence
  Description of Artificial Sequence: Synthetic oligonucleotide
  Antisense strand to SEQ ID NO: 1478472
uauuucaagggagggaacc

SEQ ID NO: 1478474 - RNA, 19 nt, Artificial Sequence
  Description of Artificial Sequence: Synthetic oligonucleotide
  Sense strand starting at position 3182 of SEQ ID NO: 1244304
gucauuaaugcagagccaa

SEQ ID NO: 1478475 - RNA, 19 nt, Artificial Sequence
  Description of Artificial Sequence: Synthetic oligonucleotide
  Antisense strand to SEQ ID NO: 1478474
uuggcucugcauuaaugac

SEQ ID NO: 1478476 - RNA, 19 nt, Artificial Sequence
  Description of Artificial Sequence: Synthetic oligonucleotide
  Sense strand starting at position 3352 of SEQ ID NO: 1244304
guauuccugcaucagaaac

SEQ ID NO: 1478477 - RNA, 19 nt, Artificial Sequence
  Description of Artificial Sequence: Synthetic oligonucleotide
  Antisense strand to SEQ ID NO: 1478476
guuucugaugcaggaauac

SEQ ID NO: 1478478 - RNA, 19 nt, Artificial Sequence
  Description of Artificial Sequence: Synthetic oligonucleotide
  Sense strand starting at position 3363 of SEQ ID NO: 1244304
ucagaaacaugguucuaau

SEQ ID NO: 1478479 - RNA, 19 nt, Artificial Sequence
  Description of Artificial Sequence: Synthetic oligonucleotide
  Antisense strand to SEQ ID NO: 1478478
auuagaaccauguuucuga

SEQ ID NO: 1478480 - RNA, 19 nt, Artificial Sequence
  Description of Artificial Sequence: Synthetic oligonucleotide
  Sense strand starting at position 3418 of SEQ ID NO: 1244304
uugcuuuaccucugaaagg

SEQ ID NO: 1478481 - RNA, 19 nt, Artificial Sequence
  Description of Artificial Sequence: Synthetic oligonucleotide
  Antisense strand to SEQ ID NO: 1478480
ccuuucagagguaaagcaa

SEQ ID NO: 1478482 - RNA, 19 nt, Artificial Sequence
  Description of Artificial Sequence: Synthetic oligonucleotide
  Sense strand starting at position 3471 of SEQ ID NO: 1244304
uuuacaaacgcacaagauu

SEQ ID NO: 1478483 - RNA, 19 nt, Artificial Sequence
  Description of Artificial Sequence: Synthetic oligonucleotide
  Antisense strand to SEQ ID NO: 1478482
aaucuugugcguuuguaaa

SEQ ID NO: 1478484 - RNA, 19 nt, Artificial Sequence
  Description of Artificial Sequence: Synthetic oligonucleotide
  Sense strand starting at position 3807 of SEQ ID NO: 1244304
ucagacagugcaugauauu

SEQ ID NO: 1478485 - RNA, 19 nt, Artificial Sequence
  Description of Artificial Sequence: Synthetic oligonucleotide
  Antisense strand to SEQ ID NO: 1478484
aauaucaugcacugucuga

SEQ ID NO: 1478486 - RNA, 19 nt, Artificial Sequence
  Description of Artificial Sequence: Synthetic oligonucleotide
  Sense strand starting at position 3816 of SEQ ID NO: 1244304
gcaugauauuuacagauaa

SEQ ID NO: 1478487 - RNA, 19 nt, Artificial Sequence
  Description of Artificial Sequence: Synthetic oligonucleotide
  Antisense strand to SEQ ID NO: 1478486
uuaucuguaaauaucaugc

SEQ ID NO: 1478488 - RNA, 19 nt, Artificial Sequence
  Description of Artificial Sequence: Synthetic oligonucleotide
  Sense strand starting at position 3857 of SEQ ID NO: 1244304
uugagaaauuagucaccca

SEQ ID NO: 1478489 - RNA, 19 nt, Artificial Sequence
  Description of Artificial Sequence: Synthetic oligonucleotide
  Antisense strand to SEQ ID NO: 1478488
ugggugacuaauuucucaa

SEQ ID NO: 1478490 - RNA, 19 nt, Artificial Sequence
  Description of Artificial Sequence: Synthetic oligonucleotide
  Sense strand starting at position 3940 of SEQ ID NO: 1244304
cuugauuucugacauuaug

SEQ ID NO: 1478491 - RNA, 19 nt, Artificial Sequence
  Description of Artificial Sequence: Synthetic oligonucleotide
  Antisense strand to SEQ ID NO: 1478490
cauaaugucagaaaucaag

SEQ ID NO: 1478492 - RNA, 19 nt, Artificial Sequence
  Description of Artificial Sequence: Synthetic oligonucleotide
  Sense strand starting at position 3948 of SEQ ID NO: 1244304
cugacauuaugucauuuag

SEQ ID NO: 1478493 - RNA, 19 nt, Artificial Sequence
  Description of Artificial Sequence: Synthetic oligonucleotide
  Antisense strand to SEQ ID NO: 1478492
cuaaaugacauaaugucag

SEQ ID NO: 1478494 - RNA, 19 nt, Artificial Sequence
  Description of Artificial Sequence: Synthetic oligonucleotide
  Sense strand starting at position 86 of SEQ ID NO: 1244305
aucauagauugguuugaga

SEQ ID NO: 1478495 - RNA, 19 nt, Artificial Sequence
  Description of Artificial Sequence: Synthetic oligonucleotide
  Antisense strand to SEQ ID NO: 1478494
ucucaaaccaaucuaugau

SEQ ID NO: 1478496 - RNA, 19 nt, Artificial Sequence
  Description of Artificial Sequence: Synthetic oligonucleotide
  Sense strand starting at position 88 of SEQ ID NO: 1244305
cauagauugguuugagaac

SEQ ID NO: 1478497 - RNA, 19 nt, Artificial Sequence
  Description of Artificial Sequence: Synthetic oligonucleotide
  Antisense strand to SEQ ID NO: 1478496
guucucaaaccaaucuaug

SEQ ID NO: 1478498 - RNA, 19 nt, Artificial Sequence
  Description of Artificial Sequence: Synthetic oligonucleotide
  Sense strand starting at position 198 of SEQ ID NO: 1244305
uuauuaguugcacagaaag

SEQ ID NO: 1478499 - RNA, 19 nt, Artificial Sequence
  Description of Artificial Sequence: Synthetic oligonucleotide
  Antisense strand to SEQ ID NO: 1478498
cuuucugugcaacuaauaa

SEQ ID NO: 1478500 - RNA, 19 nt, Artificial Sequence
  Description of Artificial Sequence: Synthetic oligonucleotide
  Sense strand starting at position 226 of SEQ ID NO: 1244305
aacaguauacaguggauaa

SEQ ID NO: 1478501 - RNA, 19 nt, Artificial Sequence
  Description of Artificial Sequence: Synthetic oligonucleotide
  Antisense strand to SEQ ID NO: 1478500
uuauccacuguauacuguu

SEQ ID NO: 1478502 - RNA, 19 nt, Artificial Sequence
  Description of Artificial Sequence: Synthetic oligonucleotide
  Sense strand starting at position 351 of SEQ ID NO: 1244305
caauauuccguccagggau

SEQ ID NO: 1478503 - RNA, 19 nt, Artificial Sequence
  Description of Artificial Sequence: Synthetic oligonucleotide
  Antisense strand to SEQ ID NO: 1478502
aucccuggacggaauauug

SEQ ID NO: 1478504 - RNA, 19 nt, Artificial Sequence
  Description of Artificial Sequence: Synthetic oligonucleotide
  Sense strand starting at position 426 of SEQ ID NO: 1244305
uaagauaacuggccuguau

SEQ ID NO: 1478505 - RNA, 19 nt, Artificial Sequence
  Description of Artificial Sequence: Synthetic oligonucleotide
  Antisense strand to SEQ ID NO: 1478504
auacaggccaguuaucuua

SEQ ID NO: 1478506 - RNA, 19 nt, Artificial Sequence
  Description of Artificial Sequence: Synthetic oligonucleotide
  Sense strand starting at position 535 of SEQ ID NO: 1244305
gagagaauugcuuaggcca

SEQ ID NO: 1478507 - RNA, 19 nt, Artificial Sequence
  Description of Artificial Sequence: Synthetic oligonucleotide
  Antisense strand to SEQ ID NO: 1478506
uggccuaagcaauucucuc

SEQ ID NO: 1478508 - RNA, 19 nt, Artificial Sequence
  Description of Artificial Sequence: Synthetic oligonucleotide
  Sense strand starting at position 674 of SEQ ID NO: 1244305
cccuuaacuuagguauaug

SEQ ID NO: 1478509 - RNA, 19 nt, Artificial Sequence
  Description of Artificial Sequence: Synthetic oligonucleotide
  Antisense strand to SEQ ID NO: 1478508
cauauaccuaaguuaaggg

SEQ ID NO: 1478510 - RNA, 19 nt, Artificial Sequence
  Description of Artificial Sequence: Synthetic oligonucleotide
  Sense strand starting at position 800 of SEQ ID NO: 1244305
cuuguuauaggaggcagaa

SEQ ID NO: 1478511 - RNA, 19 nt, Artificial Sequence
  Description of Artificial Sequence: Synthetic oligonucleotide
  Antisense strand to SEQ ID NO: 1478510
uucugccuccuauaacaag

SEQ ID NO: 1478512 - RNA, 19 nt, Artificial Sequence
  Description of Artificial Sequence: Synthetic oligonucleotide
  Sense strand starting at position 881 of SEQ ID NO: 1244305
cgcaaagcagcucaaagau

SEQ ID NO: 1478513 - RNA, 19 nt, Artificial Sequence
  Description of Artificial Sequence: Synthetic oligonucleotide
  Antisense strand to SEQ ID NO: 1478512
aucuuugagcugcuuugcg

SEQ ID NO: 1478514 - RNA, 19 nt, Artificial Sequence
  Description of Artificial Sequence: Synthetic oligonucleotide
  Sense strand starting at position 1012 of SEQ ID NO: 1244305
ggaagucuccuggguaauc

SEQ ID NO: 1478515 - RNA, 19 nt, Artificial Sequence
  Description of Artificial Sequence: Synthetic oligonucleotide
  Antisense strand to SEQ ID NO: 1478514
gauuacccaggagacuucc

SEQ ID NO: 1478516 - RNA, 19 nt, Artificial Sequence
  Description of Artificial Sequence: Synthetic oligonucleotide
  Sense strand starting at position 1013 of SEQ ID NO: 1244305
gaagucuccuggguaauca

SEQ ID NO: 1478517 - RNA, 19 nt, Artificial Sequence
  Description of Artificial Sequence: Synthetic oligonucleotide
  Antisense strand to SEQ ID NO: 1478516
ugauuacccaggagacuuc

SEQ ID NO: 1478518 - RNA, 19 nt, Artificial Sequence
  Description of Artificial Sequence: Synthetic oligonucleotide
  Sense strand starting at position 1072 of SEQ ID NO: 1244305
gggccuuaauaacuacauu

SEQ ID NO: 1478519 - RNA, 19 nt, Artificial Sequence
  Description of Artificial Sequence: Synthetic oligonucleotide
  Antisense strand to SEQ ID NO: 1478518
aauguaguuauuaaggccc

SEQ ID NO: 1478520 - RNA, 19 nt, Artificial Sequence
  Description of Artificial Sequence: Synthetic oligonucleotide
  Sense strand starting at position 1096 of SEQ ID NO: 1244305
cucuuuaggcgcgcuaaga

SEQ ID NO: 1478521 - RNA, 19 nt, Artificial Sequence
  Description of Artificial Sequence: Synthetic oligonucleotide
  Antisense strand to SEQ ID NO: 1478520
ucuuagcgcgccuaaagag

SEQ ID NO: 1478522 - RNA, 19 nt, Artificial Sequence
  Description of Artificial Sequence: Synthetic oligonucleotide
  Sense strand starting at position 1097 of SEQ ID NO: 1244305
ucuuuaggcgcgcuaagau

SEQ ID NO: 1478523 - RNA, 19 nt, Artificial Sequence
  Description of Artificial Sequence: Synthetic oligonucleotide
  Antisense strand to SEQ ID NO: 1478522
aucuuagcgcgccuaaaga

SEQ ID NO: 1478524 - RNA, 19 nt, Artificial Sequence
  Description of Artificial Sequence: Synthetic oligonucleotide
  Sense strand starting at position 1128 of SEQ ID NO: 1244305
agcagaaucgauggguaug

SEQ ID NO: 1478525 - RNA, 19 nt, Artificial Sequence
  Description of Artificial Sequence: Synthetic oligonucleotide
  Antisense strand to SEQ ID NO: 1478524
cauacccaucgauucugcu

SEQ ID NO: 1478526 - RNA, 19 nt, Artificial Sequence
  Description of Artificial Sequence: Synthetic oligonucleotide
  Sense strand starting at position 1156 of SEQ ID NO: 1244305
gcaagaugugugggaauag

SEQ ID NO: 1478527 - RNA, 19 nt, Artificial Sequence
  Description of Artificial Sequence: Synthetic oligonucleotide
  Antisense strand to SEQ ID NO: 1478526
cuauucccacacaucuugc

SEQ ID NO: 1478528 - RNA, 19 nt, Artificial Sequence
  Description of Artificial Sequence: Synthetic oligonucleotide
  Sense strand starting at position 1407 of SEQ ID NO: 1244305
gggaccucugucugugaca

SEQ ID NO: 1478529 - RNA, 19 nt, Artificial Sequence
  Description of Artificial Sequence: Synthetic oligonucleotide
  Antisense strand to SEQ ID NO: 1478528
ugucacagacagagguccc

SEQ ID NO: 1478530 - RNA, 19 nt, Artificial Sequence
  Description of Artificial Sequence: Synthetic oligonucleotide
  Sense strand starting at position 1518 of SEQ ID NO: 1244305
gaccacgaaccuugguauu

SEQ ID NO: 1478531 - RNA, 19 nt, Artificial Sequence
  Description of Artificial Sequence: Synthetic oligonucleotide
  Antisense strand to SEQ ID NO: 1478530
aauaccaagguucgugguc

SEQ ID NO: 1478532 - RNA, 19 nt, Artificial Sequence
  Description of Artificial Sequence: Synthetic oligonucleotide
  Sense strand starting at position 1574 of SEQ ID NO: 1244305
aucugagacucguuccaca

SEQ ID NO: 1478533 - RNA, 19 nt, Artificial Sequence
  Description of Artificial Sequence: Synthetic oligonucleotide
  Antisense strand to SEQ ID NO: 1478532
uguggaacgagucucagau

SEQ ID NO: 1478534 - RNA, 19 nt, Artificial Sequence
  Description of Artificial Sequence: Synthetic oligonucleotide
  Sense strand starting at position 1744 of SEQ ID NO: 1244305
gauagaugucacugagccu

SEQ ID NO: 1478535 - RNA, 19 nt, Artificial Sequence
  Description of Artificial Sequence: Synthetic oligonucleotide
  Antisense strand to SEQ ID NO: 1478534
aggcucagugacaucuauc

SEQ ID NO: 1478536 - RNA, 19 nt, Artificial Sequence
  Description of Artificial Sequence: Synthetic oligonucleotide
  Sense strand starting at position 1909 of SEQ ID NO: 1244305
agagauuucugggaggauc

SEQ ID NO: 1478537 - RNA, 19 nt, Artificial Sequence
  Description of Artificial Sequence: Synthetic oligonucleotide
  Antisense strand to SEQ ID NO: 1478536
gauccucccagaaaucucu

SEQ ID NO: 1478538 - RNA, 19 nt, Artificial Sequence
  Description of Artificial Sequence: Synthetic oligonucleotide
  Sense strand starting at position 2306 of SEQ ID NO: 1244305
gcuugugugccagucacua

SEQ ID NO: 1478539 - RNA, 19 nt, Artificial Sequence
  Description of Artificial Sequence: Synthetic oligonucleotide
  Antisense strand to SEQ ID NO: 1478538
uagugacuggcacacaagc

SEQ ID NO: 1478540 - RNA, 19 nt, Artificial Sequence
  Description of Artificial Sequence: Synthetic oligonucleotide
  Sense strand starting at position 2601 of SEQ ID NO: 1244305
gggucaaccaucugugaua

SEQ ID NO: 1478541 - RNA, 19 nt, Artificial Sequence
  Description of Artificial Sequence: Synthetic oligonucleotide
  Antisense strand to SEQ ID NO: 1478540
uaucacagaugguugaccc

SEQ ID NO: 1478542 - RNA, 19 nt, Artificial Sequence
  Description of Artificial Sequence: Synthetic oligonucleotide
  Sense strand starting at position 2602 of SEQ ID NO: 1244305
ggucaaccaucugugauau

SEQ ID NO: 1478543 - RNA, 19 nt, Artificial Sequence
  Description of Artificial Sequence: Synthetic oligonucleotide
  Antisense strand to SEQ ID NO: 1478542
auaucacagaugguugacc

SEQ ID NO: 1478544 - RNA, 19 nt, Artificial Sequence
  Description of Artificial Sequence: Synthetic oligonucleotide
  Sense strand starting at position 2603 of SEQ ID NO: 1244305
gucaaccaucugugauaug

SEQ ID NO: 1478545 - RNA, 19 nt, Artificial Sequence
  Description of Artificial Sequence: Synthetic oligonucleotide
  Antisense strand to SEQ ID NO: 1478544
cauaucacagaugguugac

SEQ ID NO: 1478546 - RNA, 19 nt, Artificial Sequence
  Description of Artificial Sequence: Synthetic oligonucleotide
  Sense strand starting at position 2612 of SEQ ID NO: 1244305
cugugauauggugaccuga

SEQ ID NO: 1478547 - RNA, 19 nt, Artificial Sequence
  Description of Artificial Sequence: Synthetic oligonucleotide
  Antisense strand to SEQ ID NO: 1478546
ucaggucaccauaucacag

SEQ ID NO: 1478548 - RNA, 19 nt, Artificial Sequence
  Description of Artificial Sequence: Synthetic oligonucleotide
  Sense strand starting at position 2614 of SEQ ID NO: 1244305
gugauauggugaccugaca

SEQ ID NO: 1478549 - RNA, 19 nt, Artificial Sequence
  Description of Artificial Sequence: Synthetic oligonucleotide
  Antisense strand to SEQ ID NO: 1478548
ugucaggucaccauaucac

SEQ ID NO: 1478550 - RNA, 19 nt, Artificial Sequence
  Description of Artificial Sequence: Synthetic oligonucleotide
  Sense strand starting at position 2669 of SEQ ID NO: 1244305
caucauuagucaccgagga

SEQ ID NO: 1478551 - RNA, 19 nt, Artificial Sequence
  Description of Artificial Sequence: Synthetic oligonucleotide
  Antisense strand to SEQ ID NO: 1478550
uccucggugacuaaugaug

SEQ ID NO: 1478552 - RNA, 19 nt, Artificial Sequence
  Description of Artificial Sequence: Synthetic oligonucleotide
  Sense strand starting at position 2670 of SEQ ID NO: 1244305
aucauuagucaccgaggaa

SEQ ID NO: 1478553 - RNA, 19 nt, Artificial Sequence
  Description of Artificial Sequence: Synthetic oligonucleotide
  Antisense strand to SEQ ID NO: 1478552
uuccucggugacuaaugau

SEQ ID NO: 1478554 - RNA, 19 nt, Artificial Sequence
  Description of Artificial Sequence: Synthetic oligonucleotide
  Sense strand starting at position 2693 of SEQ ID NO: 1244305
gggagaaauuucuaccaac

SEQ ID NO: 1478555 - RNA, 19 nt, Artificial Sequence
  Description of Artificial Sequence: Synthetic oligonucleotide
  Antisense strand to SEQ ID NO: 1478554
guugguagaaauuucuccc

SEQ ID NO: 1478556 - RNA, 19 nt, Artificial Sequence
  Description of Artificial Sequence: Synthetic oligonucleotide
  Sense strand starting at position 3053 of SEQ ID NO: 1244305
ggaccacaugcuuggaaau

SEQ ID NO: 1478557 - RNA, 19 nt, Artificial Sequence
  Description of Artificial Sequence: Synthetic oligonucleotide
  Antisense strand to SEQ ID NO: 1478556
auuuccaagcauguggucc

SEQ ID NO: 1478558 - RNA, 19 nt, Artificial Sequence
  Description of Artificial Sequence: Synthetic oligonucleotide
  Sense strand starting at position 3120 of SEQ ID NO: 1244305
ucacaugagccucaguuua

SEQ ID NO: 1478559 - RNA, 19 nt, Artificial Sequence
  Description of Artificial Sequence: Synthetic oligonucleotide
  Antisense strand to SEQ ID NO: 1478558
uaaacugaggcucauguga

SEQ ID NO: 1478560 - RNA, 19 nt, Artificial Sequence
  Description of Artificial Sequence: Synthetic oligonucleotide
  Sense strand starting at position 3122 of SEQ ID NO: 1244305
acaugagccucaguuuaau

SEQ ID NO: 1478561 - RNA, 19 nt, Artificial Sequence
  Description of Artificial Sequence: Synthetic oligonucleotide
  Antisense strand to SEQ ID NO: 1478560
auuaaacugaggcucaugu

SEQ ID NO: 1478562 - RNA, 19 nt, Artificial Sequence
  Description of Artificial Sequence: Synthetic oligonucleotide
  Sense strand starting at position 3291 of SEQ ID NO: 1244305
guggcaaacauggguagau

SEQ ID NO: 1478563 - RNA, 19 nt, Artificial Sequence
  Description of Artificial Sequence: Synthetic oligonucleotide
  Antisense strand to SEQ ID NO: 1478562
aucuacccauguuugccac

SEQ ID NO: 1478564 - RNA, 19 nt, Artificial Sequence
  Description of Artificial Sequence: Synthetic oligonucleotide
  Sense strand starting at position 3292 of SEQ ID NO: 1244305
uggcaaacauggguagauu

SEQ ID NO: 1478565 - RNA, 19 nt, Artificial Sequence
  Description of Artificial Sequence: Synthetic oligonucleotide
  Antisense strand to SEQ ID NO: 1478564
aaucuacccauguuugcca

SEQ ID NO: 1478566 - RNA, 19 nt, Artificial Sequence
  Description of Artificial Sequence: Synthetic oligonucleotide
  Sense strand starting at position 3403 of SEQ ID NO: 1244305
gucucaauauuugcaaguu

SEQ ID NO: 1478567 - RNA, 19 nt, Artificial Sequence
  Description of Artificial Sequence: Synthetic oligonucleotide
  Antisense strand to SEQ ID NO: 1478566
aacuugcaaauauugagac

SEQ ID NO: 1478568 - RNA, 19 nt, Artificial Sequence
  Description of Artificial Sequence: Synthetic oligonucleotide
  Sense strand starting at position 3549 of SEQ ID NO: 1244305
agucucacucuggagugau

SEQ ID NO: 1478569 - RNA, 19 nt, Artificial Sequence
  Description of Artificial Sequence: Synthetic oligonucleotide
  Antisense strand to SEQ ID NO: 1478568
aucacuccagagugagacu

SEQ ID NO: 1478570 - RNA, 19 nt, Artificial Sequence
  Description of Artificial Sequence: Synthetic oligonucleotide
  Sense strand starting at position 3899 of SEQ ID NO: 1244305
ugauuuguauaugacagaa

SEQ ID NO: 1478571 - RNA, 19 nt, Artificial Sequence
  Description of Artificial Sequence: Synthetic oligonucleotide
  Antisense strand to SEQ ID NO: 1478570
uucugucauauacaaauca

SEQ ID NO: 1478572 - RNA, 19 nt, Artificial Sequence
  Description of Artificial Sequence: Synthetic oligonucleotide
  Sense strand starting at position 3901 of SEQ ID NO: 1244305
auuuguauaugacagaaag

SEQ ID NO: 1478573 - RNA, 19 nt, Artificial Sequence
  Description of Artificial Sequence: Synthetic oligonucleotide
  Antisense strand to SEQ ID NO: 1478572
cuuucugucauauacaaau

SEQ ID NO: 1478574 - RNA, 19 nt, Artificial Sequence
  Description of Artificial Sequence: Synthetic oligonucleotide
  Sense strand starting at position 134 of SEQ ID NO: 1244306
aagagaaguucugugagca

SEQ ID NO: 1478575 - RNA, 19 nt, Artificial Sequence
  Description of Artificial Sequence: Synthetic oligonucleotide
  Antisense strand to SEQ ID NO: 1478574
ugcucacagaacuucucuu

SEQ ID NO: 1478576 - RNA, 19 nt, Artificial Sequence
  Description of Artificial Sequence: Synthetic oligonucleotide
  Sense strand starting at position 135 of SEQ ID NO: 1244306
agagaaguucugugagcag

SEQ ID NO: 1478577 - RNA, 19 nt, Artificial Sequence
  Description of Artificial Sequence: Synthetic oligonucleotide
  Antisense strand to SEQ ID NO: 1478576
cugcucacagaacuucucu

SEQ ID NO: 1478578 - RNA, 19 nt, Artificial Sequence
  Description of Artificial Sequence: Synthetic oligonucleotide
  Sense strand starting at position 259 of SEQ ID NO: 1244306
aguggcuguugaucuggaa

SEQ ID NO: 1478579 - RNA, 19 nt, Artificial Sequence
  Description of Artificial Sequence: Synthetic oligonucleotide
  Antisense strand to SEQ ID NO: 1478578
uuccagaucaacagccacu

SEQ ID NO: 1478580 - RNA, 19 nt, Artificial Sequence
  Description of Artificial Sequence: Synthetic oligonucleotide
  Sense strand starting at position 351 of SEQ ID NO: 1244306
aggcacagcccuuagagua

SEQ ID NO: 1478581 - RNA, 19 nt, Artificial Sequence
  Description of Artificial Sequence: Synthetic oligonucleotide
  Antisense strand to SEQ ID NO: 1478580
uacucuaagggcugugccu

SEQ ID NO: 1478582 - RNA, 19 nt, Artificial Sequence
  Description of Artificial Sequence: Synthetic oligonucleotide
  Sense strand starting at position 373 of SEQ ID NO: 1244306
agaagaaggucaggauuua

SEQ ID NO: 1478583 - RNA, 19 nt, Artificial Sequence
  Description of Artificial Sequence: Synthetic oligonucleotide
  Antisense strand to SEQ ID NO: 1478582
uaaauccugaccuucuucu

SEQ ID NO: 1478584 - RNA, 19 nt, Artificial Sequence
  Description of Artificial Sequence: Synthetic oligonucleotide
  Sense strand starting at position 490 of SEQ ID NO: 1244306
gcuugaaaucuccauugac

SEQ ID NO: 1478585 - RNA, 19 nt, Artificial Sequence
  Description of Artificial Sequence: Synthetic oligonucleotide
  Antisense strand to SEQ ID NO: 1478584
gucaauggagauuucaagc

SEQ ID NO: 1478586 - RNA, 19 nt, Artificial Sequence
  Description of Artificial Sequence: Synthetic oligonucleotide
  Sense strand starting at position 493 of SEQ ID NO: 1244306
ugaaaucuccauugacuug

SEQ ID NO: 1478587 - RNA, 19 nt, Artificial Sequence
  Description of Artificial Sequence: Synthetic oligonucleotide
  Antisense strand to SEQ ID NO: 1478586
caagucaauggagauuuca

SEQ ID NO: 1478588 - RNA, 19 nt, Artificial Sequence
  Description of Artificial Sequence: Synthetic oligonucleotide
  Sense strand starting at position 698 of SEQ ID NO: 1244306
auauguaccuaagcuugua

SEQ ID NO: 1478589 - RNA, 19 nt, Artificial Sequence
  Description of Artificial Sequence: Synthetic oligonucleotide
  Antisense strand to SEQ ID NO: 1478588
uacaagcuuagguacauau

SEQ ID NO: 1478590 - RNA, 19 nt, Artificial Sequence
  Description of Artificial Sequence: Synthetic oligonucleotide
  Sense strand starting at position 1477 of SEQ ID NO: 1244306
guuguugguacauaauaag

SEQ ID NO: 1478591 - RNA, 19 nt, Artificial Sequence
  Description of Artificial Sequence: Synthetic oligonucleotide
  Antisense strand to SEQ ID NO: 1478590
cuuauuauguaccaacaac

SEQ ID NO: 1478592 - RNA, 19 nt, Artificial Sequence
  Description of Artificial Sequence: Synthetic oligonucleotide
  Sense strand starting at position 1592 of SEQ ID NO: 1244306
gaaagaagcuggccauaua

SEQ ID NO: 1478593 - RNA, 19 nt, Artificial Sequence
  Description of Artificial Sequence: Synthetic oligonucleotide
  Antisense strand to SEQ ID NO: 1478592
uauauggccagcuucuuuc

SEQ ID NO: 1478594 - RNA, 19 nt, Artificial Sequence
  Description of Artificial Sequence: Synthetic oligonucleotide
  Sense strand starting at position 1660 of SEQ ID NO: 1244306
acagucacucagggaguaa

SEQ ID NO: 1478595 - RNA, 19 nt, Artificial Sequence
  Description of Artificial Sequence: Synthetic oligonucleotide
  Antisense strand to SEQ ID NO: 1478594
uuacucccugagugacugu

SEQ ID NO: 1478596 - RNA, 19 nt, Artificial Sequence
  Description of Artificial Sequence: Synthetic oligonucleotide
  Sense strand starting at position 1734 of SEQ ID NO: 1244306
ugaugaggcuggccugauu

SEQ ID NO: 1478597 - RNA, 19 nt, Artificial Sequence
  Description of Artificial Sequence: Synthetic oligonucleotide
  Antisense strand to SEQ ID NO: 1478596
aaucaggccagccucauca

SEQ ID NO: 1478598 - RNA, 19 nt, Artificial Sequence
  Description of Artificial Sequence: Synthetic oligonucleotide
  Sense strand starting at position 1781 of SEQ ID NO: 1244306
augaguagcgccuuuguca

SEQ ID NO: 1478599 - RNA, 19 nt, Artificial Sequence
  Description of Artificial Sequence: Synthetic oligonucleotide
  Antisense strand to SEQ ID NO: 1478598
ugacaaaggcgcuacucau

SEQ ID NO: 1478600 - RNA, 19 nt, Artificial Sequence
  Description of Artificial Sequence: Synthetic oligonucleotide
  Sense strand starting at position 1782 of SEQ ID NO: 1244306
ugaguagcgccuuugucau

SEQ ID NO: 1478601 - RNA, 19 nt, Artificial Sequence
  Description of Artificial Sequence: Synthetic oligonucleotide
  Antisense strand to SEQ ID NO: 1478600
augacaaaggcgcuacuca

SEQ ID NO: 1478602 - RNA, 19 nt, Artificial Sequence
  Description of Artificial Sequence: Synthetic oligonucleotide
  Sense strand starting at position 1860 of SEQ ID NO: 1244306
ugcugaucuucucugagag

SEQ ID NO: 1478603 - RNA, 19 nt, Artificial Sequence
  Description of Artificial Sequence: Synthetic oligonucleotide
  Antisense strand to SEQ ID NO: 1478602
cucucagagaagaucagca

SEQ ID NO: 1478604 - RNA, 19 nt, Artificial Sequence
  Description of Artificial Sequence: Synthetic oligonucleotide
  Sense strand starting at position 2014 of SEQ ID NO: 1244306
gaaagagaauaguaucaug

SEQ ID NO: 1478605 - RNA, 19 nt, Artificial Sequence
  Description of Artificial Sequence: Synthetic oligonucleotide
  Antisense strand to SEQ ID NO: 1478604
caugauacuauucucuuuc

SEQ ID NO: 1478606 - RNA, 19 nt, Artificial Sequence
  Description of Artificial Sequence: Synthetic oligonucleotide
  Sense strand starting at position 2253 of SEQ ID NO: 1244306
auccauagguccucuuaua

SEQ ID NO: 1478607 - RNA, 19 nt, Artificial Sequence
  Description of Artificial Sequence: Synthetic oligonucleotide
  Antisense strand to SEQ ID NO: 1478606
uauaagaggaccuauggau

SEQ ID NO: 1478608 - RNA, 19 nt, Artificial Sequence
  Description of Artificial Sequence: Synthetic oligonucleotide
  Sense strand starting at position 2278 of SEQ ID NO: 1244306
cccagcuauggguaguauu

SEQ ID NO: 1478609 - RNA, 19 nt, Artificial Sequence
  Description of Artificial Sequence: Synthetic oligonucleotide
  Antisense strand to SEQ ID NO: 1478608
aauacuacccauagcuggg

SEQ ID NO: 1478610 - RNA, 19 nt, Artificial Sequence
  Description of Artificial Sequence: Synthetic oligonucleotide
  Sense strand starting at position 2317 of SEQ ID NO: 1244306
gagguuggcaaaggagauu

SEQ ID NO: 1478611 - RNA, 19 nt, Artificial Sequence
  Description of Artificial Sequence: Synthetic oligonucleotide
  Antisense strand to SEQ ID NO: 1478610
aaucuccuuugccaaccuc

SEQ ID NO: 1478612 - RNA, 19 nt, Artificial Sequence
  Description of Artificial Sequence: Synthetic oligonucleotide
  Sense strand starting at position 2617 of SEQ ID NO: 1244306
augugacuuugggcaacau

SEQ ID NO: 1478613 - RNA, 19 nt, Artificial Sequence
  Description of Artificial Sequence: Synthetic oligonucleotide
  Antisense strand to SEQ ID NO: 1478612
auguugcccaaagucacau

SEQ ID NO: 1478614 - RNA, 19 nt, Artificial Sequence
  Description of Artificial Sequence: Synthetic oligonucleotide
  Sense strand starting at position 2712 of SEQ ID NO: 1244306
augaaauaaugcccagauc

SEQ ID NO: 1478615 - RNA, 19 nt, Artificial Sequence
  Description of Artificial Sequence: Synthetic oligonucleotide
  Antisense strand to SEQ ID NO: 1478614
gaucugggcauuauuucau

SEQ ID NO: 1478616 - RNA, 19 nt, Artificial Sequence
  Description of Artificial Sequence: Synthetic oligonucleotide
  Sense strand starting at position 2777 of SEQ ID NO: 1244306
ggcugauucccaggcugga

SEQ ID NO: 1478617 - RNA, 19 nt, Artificial Sequence
  Description of Artificial Sequence: Synthetic oligonucleotide
  Antisense strand to SEQ ID NO: 1478616
uccagccugggaaucagcc

SEQ ID NO: 1478618 - RNA, 19 nt, Artificial Sequence
  Description of Artificial Sequence: Synthetic oligonucleotide
  Sense strand starting at position 2807 of SEQ ID NO: 1244306
uuaugagaugucuggauua

SEQ ID NO: 1478619 - RNA, 19 nt, Artificial Sequence
  Description of Artificial Sequence: Synthetic oligonucleotide
  Antisense strand to SEQ ID NO: 1478618
uaauccagacaucucauaa

SEQ ID NO: 1478620 - RNA, 19 nt, Artificial Sequence
  Description of Artificial Sequence: Synthetic oligonucleotide
  Sense strand starting at position 2819 of SEQ ID NO: 1244306
uggauuaucuugcuguaca

SEQ ID NO: 1478621 - RNA, 19 nt, Artificial Sequence
  Description of Artificial Sequence: Synthetic oligonucleotide
  Antisense strand to SEQ ID NO: 1478620
uguacagcaagauaaucca

SEQ ID NO: 1478622 - RNA, 19 nt, Artificial Sequence
  Description of Artificial Sequence: Synthetic oligonucleotide
  Sense strand starting at position 2822 of SEQ ID NO: 1244306
auuaucuugcuguacaaga

SEQ ID NO: 1478623 - RNA, 19 nt, Artificial Sequence
  Description of Artificial Sequence: Synthetic oligonucleotide
  Antisense strand to SEQ ID NO: 1478622
ucuuguacagcaagauaau

SEQ ID NO: 1478624 - RNA, 19 nt, Artificial Sequence
  Description of Artificial Sequence: Synthetic oligonucleotide
  Sense strand starting at position 2918 of SEQ ID NO: 1244306
ccagaucugaaacgauguu

SEQ ID NO: 1478625 - RNA, 19 nt, Artificial Sequence
  Description of Artificial Sequence: Synthetic oligonucleotide
  Antisense strand to SEQ ID NO: 1478624
aacaucguuucagaucugg

SEQ ID NO: 1478626 - RNA, 19 nt, Artificial Sequence
  Description of Artificial Sequence: Synthetic oligonucleotide
  Sense strand starting at position 2986 of SEQ ID NO: 1244306
ucaguuaaaguguacaauu

SEQ ID NO: 1478627 - RNA, 19 nt, Artificial Sequence
  Description of Artificial Sequence: Synthetic oligonucleotide
  Antisense strand to SEQ ID NO: 1478626
aauuguacacuuuaacuga

SEQ ID NO: 1478628 - RNA, 19 nt, Artificial Sequence
  Description of Artificial Sequence: Synthetic oligonucleotide
  Sense strand starting at position 3273 of SEQ ID NO: 1244306
ggagcauguaaugauacuu

SEQ ID NO: 1478629 - RNA, 19 nt, Artificial Sequence
  Description of Artificial Sequence: Synthetic oligonucleotide
  Antisense strand to SEQ ID NO: 1478628
aaguaucauuacaugcucc

SEQ ID NO: 1478630 - RNA, 19 nt, Artificial Sequence
  Description of Artificial Sequence: Synthetic oligonucleotide
  Sense strand starting at position 3335 of SEQ ID NO: 1244306
ccauacuucgucuauccau

SEQ ID NO: 1478631 - RNA, 19 nt, Artificial Sequence
  Description of Artificial Sequence: Synthetic oligonucleotide
  Antisense strand to SEQ ID NO: 1478630
auggauagacgaaguaugg

SEQ ID NO: 1478632 - RNA, 19 nt, Artificial Sequence
  Description of Artificial Sequence: Synthetic oligonucleotide
  Sense strand starting at position 3452 of SEQ ID NO: 1244306
uuuauuucuuuggaguaga

SEQ ID NO: 1478633 - RNA, 19 nt, Artificial Sequence
  Description of Artificial Sequence: Synthetic oligonucleotide
  Antisense strand to SEQ ID NO: 1478632
ucuacuccaaagaaauaaa

SEQ ID NO: 1478634 - RNA, 19 nt, Artificial Sequence
  Description of Artificial Sequence: Synthetic oligonucleotide
  Sense strand starting at position 3503 of SEQ ID NO: 1244306
gcuuaugaggccuaccaga

SEQ ID NO: 1478635 - RNA, 19 nt, Artificial Sequence
  Description of Artificial Sequence: Synthetic oligonucleotide
  Antisense strand to SEQ ID NO: 1478634
ucugguaggccucauaagc

SEQ ID NO: 1478636 - RNA, 19 nt, Artificial Sequence
  Description of Artificial Sequence: Synthetic oligonucleotide
  Sense strand starting at position 3638 of SEQ ID NO: 1244306
uggguaugaacugguauca

SEQ ID NO: 1478637 - RNA, 19 nt, Artificial Sequence
  Description of Artificial Sequence: Synthetic oligonucleotide
  Antisense strand to SEQ ID NO: 1478636
ugauaccaguucauaccca

SEQ ID NO: 1478638 - RNA, 19 nt, Artificial Sequence
  Description of Artificial Sequence: Synthetic oligonucleotide
  Sense strand starting at position 3668 of SEQ ID NO: 1244306
uaauuugcguuucccagau

SEQ ID NO: 1478639 - RNA, 19 nt, Artificial Sequence
  Description of Artificial Sequence: Synthetic oligonucleotide
  Antisense strand to SEQ ID NO: 1478638
aucugggaaacgcaaauua

SEQ ID NO: 1478640 - RNA, 19 nt, Artificial Sequence
  Description of Artificial Sequence: Synthetic oligonucleotide
  Sense strand starting at position 3726 of SEQ ID NO: 1244306
cacuguauaucuuugggaa

SEQ ID NO: 1478641 - RNA, 19 nt, Artificial Sequence
  Description of Artificial Sequence: Synthetic oligonucleotide
  Antisense strand to SEQ ID NO: 1478640
uucccaaagauauacagug

SEQ ID NO: 1478642 - RNA, 19 nt, Artificial Sequence
  Description of Artificial Sequence: Synthetic oligonucleotide
  Sense strand starting at position 3727 of SEQ ID NO: 1244306
acuguauaucuuugggaaa

SEQ ID NO: 1478643 - RNA, 19 nt, Artificial Sequence
  Description of Artificial Sequence: Synthetic oligonucleotide
  Antisense strand to SEQ ID NO: 1478642
uuucccaaagauauacagu

SEQ ID NO: 1478644 - RNA, 19 nt, Artificial Sequence
  Description of Artificial Sequence: Synthetic oligonucleotide
  Sense strand starting at position 3802 of SEQ ID NO: 1244306
ugggaagaguucuuuauau

SEQ ID NO: 1478645 - RNA, 19 nt, Artificial Sequence
  Description of Artificial Sequence: Synthetic oligonucleotide
  Antisense strand to SEQ ID NO: 1478644
auauaaagaacucuuccca

SEQ ID NO: 1478646 - RNA, 19 nt, Artificial Sequence
  Description of Artificial Sequence: Synthetic oligonucleotide
  Sense strand starting at position 3839 of SEQ ID NO: 1244306
gcaucagauauauggcaga

SEQ ID NO: 1478647 - RNA, 19 nt, Artificial Sequence
  Description of Artificial Sequence: Synthetic oligonucleotide
  Antisense strand to SEQ ID NO: 1478646
ucugccauauaucugaugc

SEQ ID NO: 1478648 - RNA, 19 nt, Artificial Sequence
  Description of Artificial Sequence: Synthetic oligonucleotide
  Sense strand starting at position 3930 of SEQ ID NO: 1244306
uuugaugaugugcaaguua

SEQ ID NO: 1478649 - RNA, 19 nt, Artificial Sequence
  Description of Artificial Sequence: Synthetic oligonucleotide
  Antisense strand to SEQ ID NO: 1478648
uaacuugcacaucaucaaa

SEQ ID NO: 1478650 - RNA, 19 nt, Artificial Sequence
  Description of Artificial Sequence: Synthetic oligonucleotide
  Sense strand starting at position 3937 of SEQ ID NO: 1244306
augugcaaguuaucuauuu

SEQ ID NO: 1478651 - RNA, 19 nt, Artificial Sequence
  Description of Artificial Sequence: Synthetic oligonucleotide
  Antisense strand to SEQ ID NO: 1478650
aaauagauaacuugcacau

SEQ ID NO: 1478652 - RNA, 19 nt, Artificial Sequence
  Description of Artificial Sequence: Synthetic oligonucleotide
  Sense strand starting at position 3939 of SEQ ID NO: 1244306
gugcaaguuaucuauuugu

SEQ ID NO: 1478653 - RNA, 19 nt, Artificial Sequence
  Description of Artificial Sequence: Synthetic oligonucleotide
  Antisense strand to SEQ ID NO: 1478652
acaaauagauaacuugcac

SEQ ID NO: 1478654 - RNA, 19 nt, Artificial Sequence
  Description of Artificial Sequence: Synthetic oligonucleotide
  Sense strand starting at position 192 of SEQ ID NO: 1244307
auugaaacaucuggaaucu

SEQ ID NO: 1478655 - RNA, 19 nt, Artificial Sequence
  Description of Artificial Sequence: Synthetic oligonucleotide
  Antisense strand to SEQ ID NO: 1478654
agauuccagauguuucaau

SEQ ID NO: 1478656 - RNA, 19 nt, Artificial Sequence
  Description of Artificial Sequence: Synthetic oligonucleotide
  Sense strand starting at position 238 of SEQ ID NO: 1244307
accuguguucuguguguau

SEQ ID NO: 1478657 - RNA, 19 nt, Artificial Sequence
  Description of Artificial Sequence: Synthetic oligonucleotide
  Antisense strand to SEQ ID NO: 1478656
auacacacagaacacaggu

SEQ ID NO: 1478658 - RNA, 19 nt, Artificial Sequence
  Description of Artificial Sequence: Synthetic oligonucleotide
  Sense strand starting at position 240 of SEQ ID NO: 1244307
cuguguucuguguguaugu

SEQ ID NO: 1478659 - RNA, 19 nt, Artificial Sequence
  Description of Artificial Sequence: Synthetic oligonucleotide
  Antisense strand to SEQ ID NO: 1478658
acauacacacagaacacag

SEQ ID NO: 1478660 - RNA, 19 nt, Artificial Sequence
  Description of Artificial Sequence: Synthetic oligonucleotide
  Sense strand starting at position 265 of SEQ ID NO: 1244307
ggugcucacugagaaugga

SEQ ID NO: 1478661 - RNA, 19 nt, Artificial Sequence
  Description of Artificial Sequence: Synthetic oligonucleotide
  Antisense strand to SEQ ID NO: 1478660
uccauucucagugagcacc

SEQ ID NO: 1478662 - RNA, 19 nt, Artificial Sequence
  Description of Artificial Sequence: Synthetic oligonucleotide
  Sense strand starting at position 274 of SEQ ID NO: 1244307
ugagaauggaccugugugu

SEQ ID NO: 1478663 - RNA, 19 nt, Artificial Sequence
  Description of Artificial Sequence: Synthetic oligonucleotide
  Antisense strand to SEQ ID NO: 1478662
acacacagguccauucuca

SEQ ID NO: 1478664 - RNA, 19 nt, Artificial Sequence
  Description of Artificial Sequence: Synthetic oligonucleotide
  Sense strand starting at position 395 of SEQ ID NO: 1244307
gaagucaaccuucgugaau

SEQ ID NO: 1478665 - RNA, 19 nt, Artificial Sequence
  Description of Artificial Sequence: Synthetic oligonucleotide
  Antisense strand to SEQ ID NO: 1478664
auucacgaagguugacuuc

SEQ ID NO: 1478666 - RNA, 19 nt, Artificial Sequence
  Description of Artificial Sequence: Synthetic oligonucleotide
  Sense strand starting at position 396 of SEQ ID NO: 1244307
aagucaaccuucgugaauc

SEQ ID NO: 1478667 - RNA, 19 nt, Artificial Sequence
  Description of Artificial Sequence: Synthetic oligonucleotide
  Antisense strand to SEQ ID NO: 1478666
gauucacgaagguugacuu

SEQ ID NO: 1478668 - RNA, 19 nt, Artificial Sequence
  Description of Artificial Sequence: Synthetic oligonucleotide
  Sense strand starting at position 397 of SEQ ID NO: 1244307
agucaaccuucgugaaucu

SEQ ID NO: 1478669 - RNA, 19 nt, Artificial Sequence
  Description of Artificial Sequence: Synthetic oligonucleotide
  Antisense strand to SEQ ID NO: 1478668
agauucacgaagguugacu

SEQ ID NO: 1478670 - RNA, 19 nt, Artificial Sequence
  Description of Artificial Sequence: Synthetic oligonucleotide
  Sense strand starting at position 404 of SEQ ID NO: 1244307
cuucgugaaucuccacaua

SEQ ID NO: 1478671 - RNA, 19 nt, Artificial Sequence
  Description of Artificial Sequence: Synthetic oligonucleotide
  Antisense strand to SEQ ID NO: 1478670
uauguggagauucacgaag

SEQ ID NO: 1478672 - RNA, 19 nt, Artificial Sequence
  Description of Artificial Sequence: Synthetic oligonucleotide
  Sense strand starting at position 722 of SEQ ID NO: 1244307
uuugccguuuccugguaga

SEQ ID NO: 1478673 - RNA, 19 nt, Artificial Sequence
  Description of Artificial Sequence: Synthetic oligonucleotide
  Antisense strand to SEQ ID NO: 1478672
ucuaccaggaaacggcaaa

SEQ ID NO: 1478674 - RNA, 19 nt, Artificial Sequence
  Description of Artificial Sequence: Synthetic oligonucleotide
  Sense strand starting at position 725 of SEQ ID NO: 1244307
gccguuuccugguagagcu

SEQ ID NO: 1478675 - RNA, 19 nt, Artificial Sequence
  Description of Artificial Sequence: Synthetic oligonucleotide
  Antisense strand to SEQ ID NO: 1478674
agcucuaccaggaaacggc

SEQ ID NO: 1478676 - RNA, 19 nt, Artificial Sequence
  Description of Artificial Sequence: Synthetic oligonucleotide
  Sense strand starting at position 920 of SEQ ID NO: 1244307
ggaacuauuucccaguuug

SEQ ID NO: 1478677 - RNA, 19 nt, Artificial Sequence
  Description of Artificial Sequence: Synthetic oligonucleotide
  Antisense strand to SEQ ID NO: 1478676
caaacugggaaauaguucc

SEQ ID NO: 1478678 - RNA, 19 nt, Artificial Sequence
  Description of Artificial Sequence: Synthetic oligonucleotide
  Sense strand starting at position 2012 of SEQ ID NO: 1244307
acagacgucacaugauguu

SEQ ID NO: 1478679 - RNA, 19 nt, Artificial Sequence
  Description of Artificial Sequence: Synthetic oligonucleotide
  Antisense strand to SEQ ID NO: 1478678
aacaucaugugacgucugu

SEQ ID NO: 1478680 - RNA, 19 nt, Artificial Sequence
  Description of Artificial Sequence: Synthetic oligonucleotide
  Sense strand starting at position 2018 of SEQ ID NO: 1244307
gucacaugauguuugguca

SEQ ID NO: 1478681 - RNA, 19 nt, Artificial Sequence
  Description of Artificial Sequence: Synthetic oligonucleotide
  Antisense strand to SEQ ID NO: 1478680
ugaccaaacaucaugugac

SEQ ID NO: 1478682 - RNA, 19 nt, Artificial Sequence
  Description of Artificial Sequence: Synthetic oligonucleotide
  Sense strand starting at position 3038 of SEQ ID NO: 1244307
aggccucaaccuuagugua

SEQ ID NO: 1478683 - RNA, 19 nt, Artificial Sequence
  Description of Artificial Sequence: Synthetic oligonucleotide
  Antisense strand to SEQ ID NO: 1478682
uacacuaagguugaggccu

SEQ ID NO: 1478684 - RNA, 19 nt, Artificial Sequence
  Description of Artificial Sequence: Synthetic oligonucleotide
  Sense strand starting at position 3040 of SEQ ID NO: 1244307
gccucaaccuuaguguaca

SEQ ID NO: 1478685 - RNA, 19 nt, Artificial Sequence
  Description of Artificial Sequence: Synthetic oligonucleotide
  Antisense strand to SEQ ID NO: 1478684
uguacacuaagguugaggc

SEQ ID NO: 1478686 - RNA, 19 nt, Artificial Sequence
  Description of Artificial Sequence: Synthetic oligonucleotide
  Sense strand starting at position 3041 of SEQ ID NO: 1244307
ccucaaccuuaguguacaa

SEQ ID NO: 1478687 - RNA, 19 nt, Artificial Sequence
  Description of Artificial Sequence: Synthetic oligonucleotide
  Antisense strand to SEQ ID NO: 1478686
uuguacacuaagguugagg

SEQ ID NO: 1478688 - RNA, 19 nt, Artificial Sequence
  Description of Artificial Sequence: Synthetic oligonucleotide
  Sense strand starting at position 3201 of SEQ ID NO: 1244307
ggugaagucgugcauugcu

SEQ ID NO: 1478689 - RNA, 19 nt, Artificial Sequence
  Description of Artificial Sequence: Synthetic oligonucleotide
  Antisense strand to SEQ ID NO: 1478688
agcaaugcacgacuucacc

SEQ ID NO: 1478690 - RNA, 19 nt, Artificial Sequence
  Description of Artificial Sequence: Synthetic oligonucleotide
  Sense strand starting at position 3430 of SEQ ID NO: 1244307
ggucgagcccgcucucauu

SEQ ID NO: 1478691 - RNA, 19 nt, Artificial Sequence
  Description of Artificial Sequence: Synthetic oligonucleotide
  Antisense strand to SEQ ID NO: 1478690
aaugagagcgggcucgacc

SEQ ID NO: 1478692 - RNA, 19 nt, Artificial Sequence
  Description of Artificial Sequence: Synthetic oligonucleotide
  Sense strand starting at position 3458 of SEQ ID NO: 1244307
gcgcgaauuuggaacggau

SEQ ID NO: 1478693 - RNA, 19 nt, Artificial Sequence
  Description of Artificial Sequence: Synthetic oligonucleotide
  Antisense strand to SEQ ID NO: 1478692
auccguuccaaauucgcgc

SEQ ID NO: 1478694 - RNA, 19 nt, Artificial Sequence
  Description of Artificial Sequence: Synthetic oligonucleotide
  Sense strand starting at position 3500 of SEQ ID NO: 1244307
gcugucuucuccugggaag

SEQ ID NO: 1478695 - RNA, 19 nt, Artificial Sequence
  Description of Artificial Sequence: Synthetic oligonucleotide
  Antisense strand to SEQ ID NO: 1478694
cuucccaggagaagacagc

SEQ ID NO: 1478696 - RNA, 19 nt, Artificial Sequence
  Description of Artificial Sequence: Synthetic oligonucleotide
  Sense strand starting at position 3502 of SEQ ID NO: 1244307
ugucuucuccugggaagga

SEQ ID NO: 1478697 - RNA, 19 nt, Artificial Sequence
  Description of Artificial Sequence: Synthetic oligonucleotide
  Antisense strand to SEQ ID NO: 1478696
uccuucccaggagaagaca

SEQ ID NO: 1478698 - RNA, 19 nt, Artificial Sequence
  Description of Artificial Sequence: Synthetic oligonucleotide
  Sense strand starting at position 3540 of SEQ ID NO: 1244307
ugggcacugucauagagau

SEQ ID NO: 1478699 - RNA, 19 nt, Artificial Sequence
  Description of Artificial Sequence: Synthetic oligonucleotide
  Antisense strand to SEQ ID NO: 1478698
aucucuaugacagugccca

SEQ ID NO: 1478700 - RNA, 19 nt, Artificial Sequence
  Description of Artificial Sequence: Synthetic oligonucleotide
  Sense strand starting at position 3673 of SEQ ID NO: 1244307
gguggcuuguagaaagagu

SEQ ID NO: 1478701 - RNA, 19 nt, Artificial Sequence
  Description of Artificial Sequence: Synthetic oligonucleotide
  Antisense strand to SEQ ID NO: 1478700
acucuuucuacaagccacc

SEQ ID NO: 1478702 - RNA, 19 nt, Artificial Sequence
  Description of Artificial Sequence: Synthetic oligonucleotide
  Sense strand starting at position 36 of SEQ ID NO: 1244308
gucugauaacucuguguau

SEQ ID NO: 1478703 - RNA, 19 nt, Artificial Sequence
  Description of Artificial Sequence: Synthetic oligonucleotide
  Antisense strand to SEQ ID NO: 1478702
auacacagaguuaucagac

SEQ ID NO: 1478704 - RNA, 19 nt, Artificial Sequence
  Description of Artificial Sequence: Synthetic oligonucleotide
  Sense strand starting at position 37 of SEQ ID NO: 1244308
ucugauaacucuguguaua

SEQ ID NO: 1478705 - RNA, 19 nt, Artificial Sequence
  Description of Artificial Sequence: Synthetic oligonucleotide
  Antisense strand to SEQ ID NO: 1478704
uauacacagaguuaucaga

SEQ ID NO: 1478706 - RNA, 19 nt, Artificial Sequence
  Description of Artificial Sequence: Synthetic oligonucleotide
  Sense strand starting at position 38 of SEQ ID NO: 1244308
cugauaacucuguguauau

SEQ ID NO: 1478707 - RNA, 19 nt, Artificial Sequence
  Description of Artificial Sequence: Synthetic oligonucleotide
  Antisense strand to SEQ ID NO: 1478706
auauacacagaguuaucag

SEQ ID NO: 1478708 - RNA, 19 nt, Artificial Sequence
  Description of Artificial Sequence: Synthetic oligonucleotide
  Sense strand starting at position 39 of SEQ ID NO: 1244308
ugauaacucuguguauaua

SEQ ID NO: 1478709 - RNA, 19 nt, Artificial Sequence
  Description of Artificial Sequence: Synthetic oligonucleotide
  Antisense strand to SEQ ID NO: 1478708
uauauacacagaguuauca

SEQ ID NO: 1478710 - RNA, 19 nt, Artificial Sequence
  Description of Artificial Sequence: Synthetic oligonucleotide
  Sense strand starting at position 79 of SEQ ID NO: 1244308
caaagagguguccguaagu

SEQ ID NO: 1478711 - RNA, 19 nt, Artificial Sequence
  Description of Artificial Sequence: Synthetic oligonucleotide
  Antisense strand to SEQ ID NO: 1478710
acuuacggacaccucuuug

SEQ ID NO: 1478712 - RNA, 19 nt, Artificial Sequence
  Description of Artificial Sequence: Synthetic oligonucleotide
  Sense strand starting at position 84 of SEQ ID NO: 1244308
agguguccguaaguuuaca

SEQ ID NO: 1478713 - RNA, 19 nt, Artificial Sequence
  Description of Artificial Sequence: Synthetic oligonucleotide
  Antisense strand to SEQ ID NO: 1478712
uguaaacuuacggacaccu

SEQ ID NO: 1478714 - RNA, 19 nt, Artificial Sequence
  Description of Artificial Sequence: Synthetic oligonucleotide
  Sense strand starting at position 89 of SEQ ID NO: 1244308
uccguaaguuuacaagaaa

SEQ ID NO: 1478715 - RNA, 19 nt, Artificial Sequence
  Description of Artificial Sequence: Synthetic oligonucleotide
  Antisense strand to SEQ ID NO: 1478714
uuucuuguaaacuuacgga

SEQ ID NO: 1478716 - RNA, 19 nt, Artificial Sequence
  Description of Artificial Sequence: Synthetic oligonucleotide
  Sense strand starting at position 188 of SEQ ID NO: 1244308
gucaaauggucuucuugcu

SEQ ID NO: 1478717 - RNA, 19 nt, Artificial Sequence
  Description of Artificial Sequence: Synthetic oligonucleotide
  Antisense strand to SEQ ID NO: 1478716
agcaagaagaccauuugac

SEQ ID NO: 1478718 - RNA, 19 nt, Artificial Sequence
  Description of Artificial Sequence: Synthetic oligonucleotide
  Sense strand starting at position 337 of SEQ ID NO: 1244308
acaaauaggucauguaaac

SEQ ID NO: 1478719 - RNA, 19 nt, Artificial Sequence
  Description of Artificial Sequence: Synthetic oligonucleotide
  Antisense strand to SEQ ID NO: 1478718
guuuacaugaccuauuugu

SEQ ID NO: 1478720 - RNA, 19 nt, Artificial Sequence
  Description of Artificial Sequence: Synthetic oligonucleotide
  Sense strand starting at position 899 of SEQ ID NO: 1244308
gguugugcuuugcagggaa

SEQ ID NO: 1478721 - RNA, 19 nt, Artificial Sequence
  Description of Artificial Sequence: Synthetic oligonucleotide
  Antisense strand to SEQ ID NO: 1478720
uucccugcaaagcacaacc

SEQ ID NO: 1478722 - RNA, 19 nt, Artificial Sequence
  Description of Artificial Sequence: Synthetic oligonucleotide
  Sense strand starting at position 901 of SEQ ID NO: 1244308
uugugcuuugcagggaaga

SEQ ID NO: 1478723 - RNA, 19 nt, Artificial Sequence
  Description of Artificial Sequence: Synthetic oligonucleotide
  Antisense strand to SEQ ID NO: 1478722
ucuucccugcaaagcacaa

SEQ ID NO: 1478724 - RNA, 19 nt, Artificial Sequence
  Description of Artificial Sequence: Synthetic oligonucleotide
  Sense strand starting at position 1045 of SEQ ID NO: 1244308
gggcauccgucuuggacuu

SEQ ID NO: 1478725 - RNA, 19 nt, Artificial Sequence
  Description of Artificial Sequence: Synthetic oligonucleotide
  Antisense strand to SEQ ID NO: 1478724
aaguccaagacggaugccc

SEQ ID NO: 1478726 - RNA, 19 nt, Artificial Sequence
  Description of Artificial Sequence: Synthetic oligonucleotide
  Sense strand starting at position 1047 of SEQ ID NO: 1244308
gcauccgucuuggacuuua

SEQ ID NO: 1478727 - RNA, 19 nt, Artificial Sequence
  Description of Artificial Sequence: Synthetic oligonucleotide
  Antisense strand to SEQ ID NO: 1478726
uaaaguccaagacggaugc

SEQ ID NO: 1478728 - RNA, 19 nt, Artificial Sequence
  Description of Artificial Sequence: Synthetic oligonucleotide
  Sense strand starting at position 1052 of SEQ ID NO: 1244308
cgucuuggacuuuacuauu

SEQ ID NO: 1478729 - RNA, 19 nt, Artificial Sequence
  Description of Artificial Sequence: Synthetic oligonucleotide
  Antisense strand to SEQ ID NO: 1478728
aauaguaaaguccaagacg

SEQ ID NO: 1478730 - RNA, 19 nt, Artificial Sequence
  Description of Artificial Sequence: Synthetic oligonucleotide
  Sense strand starting at position 1058 of SEQ ID NO: 1244308
ggacuuuacuauugugaug

SEQ ID NO: 1478731 - RNA, 19 nt, Artificial Sequence
  Description of Artificial Sequence: Synthetic oligonucleotide
  Antisense strand to SEQ ID NO: 1478730
caucacaauaguaaagucc

SEQ ID NO: 1478732 - RNA, 19 nt, Artificial Sequence
  Description of Artificial Sequence: Synthetic oligonucleotide
  Sense strand starting at position 1060 of SEQ ID NO: 1244308
acuuuacuauugugaugac

SEQ ID NO: 1478733 - RNA, 19 nt, Artificial Sequence
  Description of Artificial Sequence: Synthetic oligonucleotide
  Antisense strand to SEQ ID NO: 1478732
gucaucacaauaguaaagu

SEQ ID NO: 1478734 - RNA, 19 nt, Artificial Sequence
  Description of Artificial Sequence: Synthetic oligonucleotide
  Sense strand starting at position 1063 of SEQ ID NO: 1244308
uuacuauugugaugacgcu

SEQ ID NO: 1478735 - RNA, 19 nt, Artificial Sequence
  Description of Artificial Sequence: Synthetic oligonucleotide
  Antisense strand to SEQ ID NO: 1478734
agcgucaucacaauaguaa

SEQ ID NO: 1478736 - RNA, 19 nt, Artificial Sequence
  Description of Artificial Sequence: Synthetic oligonucleotide
  Sense strand starting at position 1587 of SEQ ID NO: 1244308
aggccuuguuuccuuuauu

SEQ ID NO: 1478737 - RNA, 19 nt, Artificial Sequence
  Description of Artificial Sequence: Synthetic oligonucleotide
  Antisense strand to SEQ ID NO: 1478736
aauaaaggaaacaaggccu

SEQ ID NO: 1478738 - RNA, 19 nt, Artificial Sequence
  Description of Artificial Sequence: Synthetic oligonucleotide
  Sense strand starting at position 1588 of SEQ ID NO: 1244308
ggccuuguuuccuuuauug

SEQ ID NO: 1478739 - RNA, 19 nt, Artificial Sequence
  Description of Artificial Sequence: Synthetic oligonucleotide
  Antisense strand to SEQ ID NO: 1478738
caauaaaggaaacaaggcc

SEQ ID NO: 1478740 - RNA, 19 nt, Artificial Sequence
  Description of Artificial Sequence: Synthetic oligonucleotide
  Sense strand starting at position 1638 of SEQ ID NO: 1244308
aggcgcucucugcaagaca

SEQ ID NO: 1478741 - RNA, 19 nt, Artificial Sequence
  Description of Artificial Sequence: Synthetic oligonucleotide
  Antisense strand to SEQ ID NO: 1478740
ugucuugcagagagcgccu

SEQ ID NO: 1478742 - RNA, 19 nt, Artificial Sequence
  Description of Artificial Sequence: Synthetic oligonucleotide
  Sense strand starting at position 2027 of SEQ ID NO: 1244308
ggcuguuccuggcgaguca

SEQ ID NO: 1478743 - RNA, 19 nt, Artificial Sequence
  Description of Artificial Sequence: Synthetic oligonucleotide
  Antisense strand to SEQ ID NO: 1478742
ugacucgccaggaacagcc

SEQ ID NO: 1478744 - RNA, 19 nt, Artificial Sequence
  Description of Artificial Sequence: Synthetic oligonucleotide
  Sense strand starting at position 2746 of SEQ ID NO: 1244308
cucacuuucuugcuaagga

SEQ ID NO: 1478745 - RNA, 19 nt, Artificial Sequence
  Description of Artificial Sequence: Synthetic oligonucleotide
  Antisense strand to SEQ ID NO: 1478744
uccuuagcaagaaagugag

SEQ ID NO: 1478746 - RNA, 19 nt, Artificial Sequence
  Description of Artificial Sequence: Synthetic oligonucleotide
  Sense strand starting at position 2747 of SEQ ID NO: 1244308
ucacuuucuugcuaaggau

SEQ ID NO: 1478747 - RNA, 19 nt, Artificial Sequence
  Description of Artificial Sequence: Synthetic oligonucleotide
  Antisense strand to SEQ ID NO: 1478746
auccuuagcaagaaaguga

SEQ ID NO: 1478748 - RNA, 19 nt, Artificial Sequence
  Description of Artificial Sequence: Synthetic oligonucleotide
  Sense strand starting at position 2759 of SEQ ID NO: 1244308
uaaggauguuucugggauu

SEQ ID NO: 1478749 - RNA, 19 nt, Artificial Sequence
  Description of Artificial Sequence: Synthetic oligonucleotide
  Antisense strand to SEQ ID NO: 1478748
aaucccagaaacauccuua

SEQ ID NO: 1478750 - RNA, 19 nt, Artificial Sequence
  Description of Artificial Sequence: Synthetic oligonucleotide
  Sense strand starting at position 2760 of SEQ ID NO: 1244308
aaggauguuucugggauuc

SEQ ID NO: 1478751 - RNA, 19 nt, Artificial Sequence
  Description of Artificial Sequence: Synthetic oligonucleotide
  Antisense strand to SEQ ID NO: 1478750
gaaucccagaaacauccuu

SEQ ID NO: 1478752 - RNA, 19 nt, Artificial Sequence
  Description of Artificial Sequence: Synthetic oligonucleotide
  Sense strand starting at position 3107 of SEQ ID NO: 1244308
gccacuggauucuuccaga

SEQ ID NO: 1478753 - RNA, 19 nt, Artificial Sequence
  Description of Artificial Sequence: Synthetic oligonucleotide
  Antisense strand to SEQ ID NO: 1478752
ucuggaagaauccaguggc

SEQ ID NO: 1478754 - RNA, 19 nt, Artificial Sequence
  Description of Artificial Sequence: Synthetic oligonucleotide
  Sense strand starting at position 3110 of SEQ ID NO: 1244308
acuggauucuuccagauaa

SEQ ID NO: 1478755 - RNA, 19 nt, Artificial Sequence
  Description of Artificial Sequence: Synthetic oligonucleotide
  Antisense strand to SEQ ID NO: 1478754
uuaucuggaagaauccagu

SEQ ID NO: 1478756 - RNA, 19 nt, Artificial Sequence
  Description of Artificial Sequence: Synthetic oligonucleotide
  Sense strand starting at position 3337 of SEQ ID NO: 1244308
aguggugacuuccugaaga

SEQ ID NO: 1478757 - RNA, 19 nt, Artificial Sequence
  Description of Artificial Sequence: Synthetic oligonucleotide
  Antisense strand to SEQ ID NO: 1478756
ucuucaggaagucaccacu

SEQ ID NO: 1478758 - RNA, 19 nt, Artificial Sequence
  Description of Artificial Sequence: Synthetic oligonucleotide
  Sense strand starting at position 3368 of SEQ ID NO: 1244308
aagugccuccucgacagau

SEQ ID NO: 1478759 - RNA, 19 nt, Artificial Sequence
  Description of Artificial Sequence: Synthetic oligonucleotide
  Antisense strand to SEQ ID NO: 1478758
aucugucgaggaggcacuu

SEQ ID NO: 1478760 - RNA, 19 nt, Artificial Sequence
  Description of Artificial Sequence: Synthetic oligonucleotide
  Sense strand starting at position 3404 of SEQ ID NO: 1244308
gccugaacucagcacaagu

SEQ ID NO: 1478761 - RNA, 19 nt, Artificial Sequence
  Description of Artificial Sequence: Synthetic oligonucleotide
  Antisense strand to SEQ ID NO: 1478760
acuugugcugaguucaggc

SEQ ID NO: 1478762 - RNA, 19 nt, Artificial Sequence
  Description of Artificial Sequence: Synthetic oligonucleotide
  Sense strand starting at position 3427 of SEQ ID NO: 1244308
gccaucgccuccuaucaaa

SEQ ID NO: 1478763 - RNA, 19 nt, Artificial Sequence
  Description of Artificial Sequence: Synthetic oligonucleotide
  Antisense strand to SEQ ID NO: 1478762
uuugauaggaggcgauggc

SEQ ID NO: 1478764 - RNA, 19 nt, Artificial Sequence
  Description of Artificial Sequence: Synthetic oligonucleotide
  Sense strand starting at position 3759 of SEQ ID NO: 1244308
cuccgucuccuuuggcuaa

SEQ ID NO: 1478765 - RNA, 19 nt, Artificial Sequence
  Description of Artificial Sequence: Synthetic oligonucleotide
  Antisense strand to SEQ ID NO: 1478764
uuagccaaaggagacggag

SEQ ID NO: 1478766 - RNA, 19 nt, Artificial Sequence
  Description of Artificial Sequence: Synthetic oligonucleotide
  Sense strand starting at position 3760 of SEQ ID NO: 1244308
uccgucuccuuuggcuaaa

SEQ ID NO: 1478767 - RNA, 19 nt, Artificial Sequence
  Description of Artificial Sequence: Synthetic oligonucleotide
  Antisense strand to SEQ ID NO: 1478766
uuuagccaaaggagacgga

SEQ ID NO: 1478768 - RNA, 19 nt, Artificial Sequence
  Description of Artificial Sequence: Synthetic oligonucleotide
  Sense strand starting at position 3763 of SEQ ID NO: 1244308
gucuccuuuggcuaaagua

SEQ ID NO: 1478769 - RNA, 19 nt, Artificial Sequence
  Description of Artificial Sequence: Synthetic oligonucleotide
  Antisense strand to SEQ ID NO: 1478768
uacuuuagccaaaggagac

SEQ ID NO: 1478770 - RNA, 19 nt, Artificial Sequence
  Description of Artificial Sequence: Synthetic oligonucleotide
  Sense strand starting at position 3872 of SEQ ID NO: 1244308
gcucucagcuccugaaagu

SEQ ID NO: 1478771 - RNA, 19 nt, Artificial Sequence
  Description of Artificial Sequence: Synthetic oligonucleotide
  Antisense strand to SEQ ID NO: 1478770
acuuucaggagcugagagc

SEQ ID NO: 1478772 - RNA, 19 nt, Artificial Sequence
  Description of Artificial Sequence: Synthetic oligonucleotide
  Sense strand starting at position 3914 of SEQ ID NO: 1244308
cuuaguuuccacugaugca

SEQ ID NO: 1478773 - RNA, 19 nt, Artificial Sequence
  Description of Artificial Sequence: Synthetic oligonucleotide
  Antisense strand to SEQ ID NO: 1478772
ugcaucaguggaaacuaag

SEQ ID NO: 1478774 - RNA, 19 nt, Artificial Sequence
  Description of Artificial Sequence: Synthetic oligonucleotide
  Sense strand starting at position 3921 of SEQ ID NO: 1244308
uccacugaugcauaaguga

SEQ ID NO: 1478775 - RNA, 19 nt, Artificial Sequence
  Description of Artificial Sequence: Synthetic oligonucleotide
  Antisense strand to SEQ ID NO: 1478774
ucacuuaugcaucagugga

SEQ ID NO: 1478776 - RNA, 19 nt, Artificial Sequence
  Description of Artificial Sequence: Synthetic oligonucleotide
  Sense strand starting at position 3928 of SEQ ID NO: 1244308
augcauaagugacugagaa

SEQ ID NO: 1478777 - RNA, 19 nt, Artificial Sequence
  Description of Artificial Sequence: Synthetic oligonucleotide
  Antisense strand to SEQ ID NO: 1478776
uucucagucacuuaugcau

SEQ ID NO: 1478778 - RNA, 19 nt, Artificial Sequence
  Description of Artificial Sequence: Synthetic oligonucleotide
  Sense strand starting at position 3929 of SEQ ID NO: 1244308
ugcauaagugacugagaag

SEQ ID NO: 1478779 - RNA, 19 nt, Artificial Sequence
  Description of Artificial Sequence: Synthetic oligonucleotide
  Antisense strand to SEQ ID NO: 1478778
cuucucagucacuuaugca

SEQ ID NO: 1478780 - RNA, 19 nt, Artificial Sequence
  Description of Artificial Sequence: Synthetic oligonucleotide
  Sense strand starting at position 719 of SEQ ID NO: 1244309
guuaaugcugcaugccaaa

SEQ ID NO: 1478781 - RNA, 19 nt, Artificial Sequence
  Description of Artificial Sequence: Synthetic oligonucleotide
  Antisense strand to SEQ ID NO: 1478780
uuuggcaugcagcauuaac

SEQ ID NO: 1478782 - RNA, 19 nt, Artificial Sequence
  Description of Artificial Sequence: Synthetic oligonucleotide
  Sense strand starting at position 862 of SEQ ID NO: 1244309
ggcccuaaagccugguaaa

SEQ ID NO: 1478783 - RNA, 19 nt, Artificial Sequence
  Description of Artificial Sequence: Synthetic oligonucleotide
  Antisense strand to SEQ ID NO: 1478782
uuuaccaggcuuuagggcc

SEQ ID NO: 1478784 - RNA, 19 nt, Artificial Sequence
  Description of Artificial Sequence: Synthetic oligonucleotide
  Sense strand starting at position 863 of SEQ ID NO: 1244309
gcccuaaagccugguaaau

SEQ ID NO: 1478785 - RNA, 19 nt, Artificial Sequence
  Description of Artificial Sequence: Synthetic oligonucleotide
  Antisense strand to SEQ ID NO: 1478784
auuuaccaggcuuuagggc

SEQ ID NO: 1478786 - RNA, 19 nt, Artificial Sequence
  Description of Artificial Sequence: Synthetic oligonucleotide
  Sense strand starting at position 877 of SEQ ID NO: 1244309
uaaauucuggccugcguga

SEQ ID NO: 1478787 - RNA, 19 nt, Artificial Sequence
  Description of Artificial Sequence: Synthetic oligonucleotide
  Antisense strand to SEQ ID NO: 1478786
ucacgcaggccagaauuua

SEQ ID NO: 1478788 - RNA, 19 nt, Artificial Sequence
  Description of Artificial Sequence: Synthetic oligonucleotide
  Sense strand starting at position 879 of SEQ ID NO: 1244309
aauucuggccugcgugaaa

SEQ ID NO: 1478789 - RNA, 19 nt, Artificial Sequence
  Description of Artificial Sequence: Synthetic oligonucleotide
  Antisense strand to SEQ ID NO: 1478788
uuucacgcaggccagaauu

SEQ ID NO: 1478790 - RNA, 19 nt, Artificial Sequence
  Description of Artificial Sequence: Synthetic oligonucleotide
  Sense strand starting at position 959 of SEQ ID NO: 1244309
gcuacuguuuauccaccua

SEQ ID NO: 1478791 - RNA, 19 nt, Artificial Sequence
  Description of Artificial Sequence: Synthetic oligonucleotide
  Antisense strand to SEQ ID NO: 1478790
uagguggauaaacaguagc

SEQ ID NO: 1478792 - RNA, 19 nt, Artificial Sequence
  Description of Artificial Sequence: Synthetic oligonucleotide
  Sense strand starting at position 1129 of SEQ ID NO: 1244309
acaagacuugcccagguaa

SEQ ID NO: 1478793 - RNA, 19 nt, Artificial Sequence
  Description of Artificial Sequence: Synthetic oligonucleotide
  Antisense strand to SEQ ID NO: 1478792
uuaccugggcaagucuugu

SEQ ID NO: 1478794 - RNA, 19 nt, Artificial Sequence
  Description of Artificial Sequence: Synthetic oligonucleotide
  Sense strand starting at position 1205 of SEQ ID NO: 1244309
cggcuuccugccugacaga

SEQ ID NO: 1478795 - RNA, 19 nt, Artificial Sequence
  Description of Artificial Sequence: Synthetic oligonucleotide
  Antisense strand to SEQ ID NO: 1478794
ucugucaggcaggaagccg

SEQ ID NO: 1478796 - RNA, 19 nt, Artificial Sequence
  Description of Artificial Sequence: Synthetic oligonucleotide
  Sense strand starting at position 1269 of SEQ ID NO: 1244309
augacuugugccugacacu

SEQ ID NO: 1478797 - RNA, 19 nt, Artificial Sequence
  Description of Artificial Sequence: Synthetic oligonucleotide
  Antisense strand to SEQ ID NO: 1478796
agugucaggcacaagucau

SEQ ID NO: 1478798 - RNA, 19 nt, Artificial Sequence
  Description of Artificial Sequence: Synthetic oligonucleotide
  Sense strand starting at position 1270 of SEQ ID NO: 1244309
ugacuugugccugacacuu

SEQ ID NO: 1478799 - RNA, 19 nt, Artificial Sequence
  Description of Artificial Sequence: Synthetic oligonucleotide
  Antisense strand to SEQ ID NO: 1478798
aagugucaggcacaaguca

SEQ ID NO: 1478800 - RNA, 19 nt, Artificial Sequence
  Description of Artificial Sequence: Synthetic oligonucleotide
  Sense strand starting at position 1283 of SEQ ID NO: 1244309
acacuuagcaaguguggaa

SEQ ID NO: 1478801 - RNA, 19 nt, Artificial Sequence
  Description of Artificial Sequence: Synthetic oligonucleotide
  Antisense strand to SEQ ID NO: 1478800
uuccacacuugcuaagugu

SEQ ID NO: 1478802 - RNA, 19 nt, Artificial Sequence
  Description of Artificial Sequence: Synthetic oligonucleotide
  Sense strand starting at position 1334 of SEQ ID NO: 1244309
ccauucucagucugcagau

SEQ ID NO: 1478803 - RNA, 19 nt, Artificial Sequence
  Description of Artificial Sequence: Synthetic oligonucleotide
  Antisense strand to SEQ ID NO: 1478802
aucugcagacugagaaugg

SEQ ID NO: 1478804 - RNA, 19 nt, Artificial Sequence
  Description of Artificial Sequence: Synthetic oligonucleotide
  Sense strand starting at position 1709 of SEQ ID NO: 1244309
uugccuaauagaggaaguu

SEQ ID NO: 1478805 - RNA, 19 nt, Artificial Sequence
  Description of Artificial Sequence: Synthetic oligonucleotide
  Antisense strand to SEQ ID NO: 1478804
aacuuccucuauuaggcaa

SEQ ID NO: 1478806 - RNA, 19 nt, Artificial Sequence
  Description of Artificial Sequence: Synthetic oligonucleotide
  Sense strand starting at position 1991 of SEQ ID NO: 1244309
cugagaacuuugcucccuu

SEQ ID NO: 1478807 - RNA, 19 nt, Artificial Sequence
  Description of Artificial Sequence: Synthetic oligonucleotide
  Antisense strand to SEQ ID NO: 1478806
aagggagcaaaguucucag

SEQ ID NO: 1478808 - RNA, 19 nt, Artificial Sequence
  Description of Artificial Sequence: Synthetic oligonucleotide
  Sense strand starting at position 1992 of SEQ ID NO: 1244309
ugagaacuuugcucccuuu

SEQ ID NO: 1478809 - RNA, 19 nt, Artificial Sequence
  Description of Artificial Sequence: Synthetic oligonucleotide
  Antisense strand to SEQ ID NO: 1478808
aaagggagcaaaguucuca

SEQ ID NO: 1478810 - RNA, 19 nt, Artificial Sequence
  Description of Artificial Sequence: Synthetic oligonucleotide
  Sense strand starting at position 2043 of SEQ ID NO: 1244309
uuuccugugcgucacaaga

SEQ ID NO: 1478811 - RNA, 19 nt, Artificial Sequence
  Description of Artificial Sequence: Synthetic oligonucleotide
  Antisense strand to SEQ ID NO: 1478810
ucuugugacgcacaggaaa

SEQ ID NO: 1478812 - RNA, 19 nt, Artificial Sequence
  Description of Artificial Sequence: Synthetic oligonucleotide
  Sense strand starting at position 2144 of SEQ ID NO: 1244309
aggauacaacagugcucua

SEQ ID NO: 1478813 - RNA, 19 nt, Artificial Sequence
  Description of Artificial Sequence: Synthetic oligonucleotide
  Antisense strand to SEQ ID NO: 1478812
uagagcacuguuguauccu

SEQ ID NO: 1478814 - RNA, 19 nt, Artificial Sequence
  Description of Artificial Sequence: Synthetic oligonucleotide
  Sense strand starting at position 2147 of SEQ ID NO: 1244309
auacaacagugcucuauga

SEQ ID NO: 1478815 - RNA, 19 nt, Artificial Sequence
  Description of Artificial Sequence: Synthetic oligonucleotide
  Antisense strand to SEQ ID NO: 1478814
ucauagagcacuguuguau

SEQ ID NO: 1478816 - RNA, 19 nt, Artificial Sequence
  Description of Artificial Sequence: Synthetic oligonucleotide
  Sense strand starting at position 2149 of SEQ ID NO: 1244309
acaacagugcucuaugaaa

SEQ ID NO: 1478817 - RNA, 19 nt, Artificial Sequence
  Description of Artificial Sequence: Synthetic oligonucleotide
  Antisense strand to SEQ ID NO: 1478816
uuucauagagcacuguugu

SEQ ID NO: 1478818 - RNA, 19 nt, Artificial Sequence
  Description of Artificial Sequence: Synthetic oligonucleotide
  Sense strand starting at position 2209 of SEQ ID NO: 1244309
aguccaagcugugugaaga

SEQ ID NO: 1478819 - RNA, 19 nt, Artificial Sequence
  Description of Artificial Sequence: Synthetic oligonucleotide
  Antisense strand to SEQ ID NO: 1478818
ucuucacacagcuuggacu

SEQ ID NO: 1478820 - RNA, 19 nt, Artificial Sequence
  Description of Artificial Sequence: Synthetic oligonucleotide
  Sense strand starting at position 2210 of SEQ ID NO: 1244309
guccaagcugugugaagau

SEQ ID NO: 1478821 - RNA, 19 nt, Artificial Sequence
  Description of Artificial Sequence: Synthetic oligonucleotide
  Antisense strand to SEQ ID NO: 1478820
aucuucacacagcuuggac

SEQ ID NO: 1478822 - RNA, 19 nt, Artificial Sequence
  Description of Artificial Sequence: Synthetic oligonucleotide
  Sense strand starting at position 2217 of SEQ ID NO: 1244309
cugugugaagauuagccau

SEQ ID NO: 1478823 - RNA, 19 nt, Artificial Sequence
  Description of Artificial Sequence: Synthetic oligonucleotide
  Antisense strand to SEQ ID NO: 1478822
auggcuaaucuucacacag

SEQ ID NO: 1478824 - RNA, 19 nt, Artificial Sequence
  Description of Artificial Sequence: Synthetic oligonucleotide
  Sense strand starting at position 2219 of SEQ ID NO: 1244309
gugugaagauuagccauga

SEQ ID NO: 1478825 - RNA, 19 nt, Artificial Sequence
  Description of Artificial Sequence: Synthetic oligonucleotide
  Antisense strand to SEQ ID NO: 1478824
ucauggcuaaucuucacac

SEQ ID NO: 1478826 - RNA, 19 nt, Artificial Sequence
  Description of Artificial Sequence: Synthetic oligonucleotide
  Sense strand starting at position 2220 of SEQ ID NO: 1244309
ugugaagauuagccaugaa

SEQ ID NO: 1478827 - RNA, 19 nt, Artificial Sequence
  Description of Artificial Sequence: Synthetic oligonucleotide
  Antisense strand to SEQ ID NO: 1478826
uucauggcuaaucuucaca

SEQ ID NO: 1478828 - RNA, 19 nt, Artificial Sequence
  Description of Artificial Sequence: Synthetic oligonucleotide
  Sense strand starting at position 2223 of SEQ ID NO: 1244309
gaagauuagccaugaagug

SEQ ID NO: 1478829 - RNA, 19 nt, Artificial Sequence
  Description of Artificial Sequence: Synthetic oligonucleotide
  Antisense strand to SEQ ID NO: 1478828
cacuucauggcuaaucuuc

SEQ ID NO: 1478830 - RNA, 19 nt, Artificial Sequence
  Description of Artificial Sequence: Synthetic oligonucleotide
  Sense strand starting at position 2281 of SEQ ID NO: 1244309
ccauguucugaacgacaac

SEQ ID NO: 1478831 - RNA, 19 nt, Artificial Sequence
  Description of Artificial Sequence: Synthetic oligonucleotide
  Antisense strand to SEQ ID NO: 1478830
guugucguucagaacaugg

SEQ ID NO: 1478832 - RNA, 19 nt, Artificial Sequence
  Description of Artificial Sequence: Synthetic oligonucleotide
  Sense strand starting at position 2653 of SEQ ID NO: 1244309
gagugaggcucuccaccua

SEQ ID NO: 1478833 - RNA, 19 nt, Artificial Sequence
  Description of Artificial Sequence: Synthetic oligonucleotide
  Antisense strand to SEQ ID NO: 1478832
uagguggagagccucacuc

SEQ ID NO: 1478834 - RNA, 19 nt, Artificial Sequence
  Description of Artificial Sequence: Synthetic oligonucleotide
  Sense strand starting at position 2701 of SEQ ID NO: 1244309
agcugaguucugcaucugu

SEQ ID NO: 1478835 - RNA, 19 nt, Artificial Sequence
  Description of Artificial Sequence: Synthetic oligonucleotide
  Antisense strand to SEQ ID NO: 1478834
acagaugcagaacucagcu

SEQ ID NO: 1478836 - RNA, 19 nt, Artificial Sequence
  Description of Artificial Sequence: Synthetic oligonucleotide
  Sense strand starting at position 2716 of SEQ ID NO: 1244309
cugucaaaugagugggauu

SEQ ID NO: 1478837 - RNA, 19 nt, Artificial Sequence
  Description of Artificial Sequence: Synthetic oligonucleotide
  Antisense strand to SEQ ID NO: 1478836
aaucccacucauuugacag

SEQ ID NO: 1478838 - RNA, 19 nt, Artificial Sequence
  Description of Artificial Sequence: Synthetic oligonucleotide
  Sense strand starting at position 2802 of SEQ ID NO: 1244309
gucuguccucuaggucuga

SEQ ID NO: 1478839 - RNA, 19 nt, Artificial Sequence
  Description of Artificial Sequence: Synthetic oligonucleotide
  Antisense strand to SEQ ID NO: 1478838
ucagaccuagaggacagac

SEQ ID NO: 1478840 - RNA, 19 nt, Artificial Sequence
  Description of Artificial Sequence: Synthetic oligonucleotide
  Sense strand starting at position 2843 of SEQ ID NO: 1244309
cugcacaugcucugagcaa

SEQ ID NO: 1478841 - RNA, 19 nt, Artificial Sequence
  Description of Artificial Sequence: Synthetic oligonucleotide
  Antisense strand to SEQ ID NO: 1478840
uugcucagagcaugugcag

SEQ ID NO: 1478842 - RNA, 19 nt, Artificial Sequence
  Description of Artificial Sequence: Synthetic oligonucleotide
  Sense strand starting at position 3335 of SEQ ID NO: 1244309
gaggcauucucugccugga

SEQ ID NO: 1478843 - RNA, 19 nt, Artificial Sequence
  Description of Artificial Sequence: Synthetic oligonucleotide
  Antisense strand to SEQ ID NO: 1478842
uccaggcagagaaugccuc

SEQ ID NO: 1478844 - RNA, 19 nt, Artificial Sequence
  Description of Artificial Sequence: Synthetic oligonucleotide
  Sense strand starting at position 3337 of SEQ ID NO: 1244309
ggcauucucugccuggaga

SEQ ID NO: 1478845 - RNA, 19 nt, Artificial Sequence
  Description of Artificial Sequence: Synthetic oligonucleotide
  Antisense strand to SEQ ID NO: 1478844
ucuccaggcagagaaugcc

SEQ ID NO: 1478846 - RNA, 19 nt, Artificial Sequence
  Description of Artificial Sequence: Synthetic oligonucleotide
  Sense strand starting at position 3413 of SEQ ID NO: 1244309
ggagaagugucugauuucc

SEQ ID NO: 1478847 - RNA, 19 nt, Artificial Sequence
  Description of Artificial Sequence: Synthetic oligonucleotide
  Antisense strand to SEQ ID NO: 1478846
ggaaaucagacacuucucc

SEQ ID NO: 1478848 - RNA, 19 nt, Artificial Sequence
  Description of Artificial Sequence: Synthetic oligonucleotide
  Sense strand starting at position 3772 of SEQ ID NO: 1244309
aggccuuuccagcaagaag

SEQ ID NO: 1478849 - RNA, 19 nt, Artificial Sequence
  Description of Artificial Sequence: Synthetic oligonucleotide
  Antisense strand to SEQ ID NO: 1478848
cuucuugcuggaaaggccu

SEQ ID NO: 1478850 - RNA, 19 nt, Artificial Sequence
  Description of Artificial Sequence: Synthetic oligonucleotide
  Sense strand starting at position 3796 of SEQ ID NO: 1244309
aaacaauagcgagaugugu

SEQ ID NO: 1478851 - RNA, 19 nt, Artificial Sequence
  Description of Artificial Sequence: Synthetic oligonucleotide
  Antisense strand to SEQ ID NO: 1478850
acacaucucgcuauuguuu

SEQ ID NO: 1478852 - RNA, 19 nt, Artificial Sequence
  Description of Artificial Sequence: Synthetic oligonucleotide
  Sense strand starting at position 3852 of SEQ ID NO: 1244309
aggugcuacgcugagagaa

SEQ ID NO: 1478853 - RNA, 19 nt, Artificial Sequence
  Description of Artificial Sequence: Synthetic oligonucleotide
  Antisense strand to SEQ ID NO: 1478852
uucucucagcguagcaccu

SEQ ID NO: 1478854 - RNA, 19 nt, Artificial Sequence
  Description of Artificial Sequence: Synthetic oligonucleotide
  Sense strand starting at position 3864 of SEQ ID NO: 1244309
gagagaacgccucagagcu

SEQ ID NO: 1478855 - RNA, 19 nt, Artificial Sequence
  Description of Artificial Sequence: Synthetic oligonucleotide
  Antisense strand to SEQ ID NO: 1478854
agcucugaggcguucucuc

SEQ ID NO: 1478856 - RNA, 19 nt, Artificial Sequence
  Description of Artificial Sequence: Synthetic oligonucleotide
  Sense strand starting at position 3929 of SEQ ID NO: 1244309
aggugcgauuacuuccaau

SEQ ID NO: 1478857 - RNA, 19 nt, Artificial Sequence
  Description of Artificial Sequence: Synthetic oligonucleotide
  Antisense strand to SEQ ID NO: 1478856
auuggaaguaaucgcaccu

SEQ ID NO: 1478858 - RNA, 19 nt, Artificial Sequence
  Description of Artificial Sequence: Synthetic oligonucleotide
  Sense strand starting at position 3932 of SEQ ID NO: 1244309
ugcgauuacuuccaauuua

SEQ ID NO: 1478859 - RNA, 19 nt, Artificial Sequence
  Description of Artificial Sequence: Synthetic oligonucleotide
  Antisense strand to SEQ ID NO: 1478858
uaaauuggaaguaaucgca

SEQ ID NO: 1478860 - RNA, 19 nt, Artificial Sequence
  Description of Artificial Sequence: Synthetic oligonucleotide
  Sense strand starting at position 33 of SEQ ID NO: 1244310
ggagaagugucugauuucc

SEQ ID NO: 1478861 - RNA, 19 nt, Artificial Sequence
  Description of Artificial Sequence: Synthetic oligonucleotide
  Antisense strand to SEQ ID NO: 1478860
ggaaaucagacacuucucc

SEQ ID NO: 1478862 - RNA, 19 nt, Artificial Sequence
  Description of Artificial Sequence: Synthetic oligonucleotide
  Sense strand starting at position 68 of SEQ ID NO: 1244310
cgaggucugugcagugcaa

SEQ ID NO: 1478863 - RNA, 19 nt, Artificial Sequence
  Description of Artificial Sequence: Synthetic oligonucleotide
  Antisense strand to SEQ ID NO: 1478862
uugcacugcacagaccucg

SEQ ID NO: 1478864 - RNA, 19 nt, Artificial Sequence
  Description of Artificial Sequence: Synthetic oligonucleotide
  Sense strand starting at position 167 of SEQ ID NO: 1244310
ccacuuauguaaggcauaa

SEQ ID NO: 1478865 - RNA, 19 nt, Artificial Sequence
  Description of Artificial Sequence: Synthetic oligonucleotide
  Antisense strand to SEQ ID NO: 1478864
uuaugccuuacauaagugg

SEQ ID NO: 1478866 - RNA, 19 nt, Artificial Sequence
  Description of Artificial Sequence: Synthetic oligonucleotide
  Sense strand starting at position 392 of SEQ ID NO: 1244310
aggccuuuccagcaagaag

SEQ ID NO: 1478867 - RNA, 19 nt, Artificial Sequence
  Description of Artificial Sequence: Synthetic oligonucleotide
  Antisense strand to SEQ ID NO: 1478866
cuucuugcuggaaaggccu

SEQ ID NO: 1478868 - RNA, 19 nt, Artificial Sequence
  Description of Artificial Sequence: Synthetic oligonucleotide
  Sense strand starting at position 416 of SEQ ID NO: 1244310
aaacaauagcgagaugugu

SEQ ID NO: 1478869 - RNA, 19 nt, Artificial Sequence
  Description of Artificial Sequence: Synthetic oligonucleotide
  Antisense strand to SEQ ID NO: 1478868
acacaucucgcuauuguuu

SEQ ID NO: 1478870 - RNA, 19 nt, Artificial Sequence
  Description of Artificial Sequence: Synthetic oligonucleotide
  Sense strand starting at position 425 of SEQ ID NO: 1244310
cgagaugugugcagccagu

SEQ ID NO: 1478871 - RNA, 19 nt, Artificial Sequence
  Description of Artificial Sequence: Synthetic oligonucleotide
  Antisense strand to SEQ ID NO: 1478870
acuggcugcacacaucucg

SEQ ID NO: 1478872 - RNA, 19 nt, Artificial Sequence
  Description of Artificial Sequence: Synthetic oligonucleotide
  Sense strand starting at position 472 of SEQ ID NO: 1244310
aggugcuacgcugagagaa

SEQ ID NO: 1478873 - RNA, 19 nt, Artificial Sequence
  Description of Artificial Sequence: Synthetic oligonucleotide
  Antisense strand to SEQ ID NO: 1478872
uucucucagcguagcaccu

SEQ ID NO: 1478874 - RNA, 19 nt, Artificial Sequence
  Description of Artificial Sequence: Synthetic oligonucleotide
  Sense strand starting at position 484 of SEQ ID NO: 1244310
gagagaacgccucagagcu

SEQ ID NO: 1478875 - RNA, 19 nt, Artificial Sequence
  Description of Artificial Sequence: Synthetic oligonucleotide
  Antisense strand to SEQ ID NO: 1478874
agcucugaggcguucucuc

SEQ ID NO: 1478876 - RNA, 19 nt, Artificial Sequence
  Description of Artificial Sequence: Synthetic oligonucleotide
  Sense strand starting at position 549 of SEQ ID NO: 1244310
aggugcgauuacuuccaau

SEQ ID NO: 1478877 - RNA, 19 nt, Artificial Sequence
  Description of Artificial Sequence: Synthetic oligonucleotide
  Antisense strand to SEQ ID NO: 1478876
auuggaaguaaucgcaccu

SEQ ID NO: 1478878 - RNA, 19 nt, Artificial Sequence
  Description of Artificial Sequence: Synthetic oligonucleotide
  Sense strand starting at position 552 of SEQ ID NO: 1244310
ugcgauuacuuccaauuua

SEQ ID NO: 1478879 - RNA, 19 nt, Artificial Sequence
  Description of Artificial Sequence: Synthetic oligonucleotide
  Antisense strand to SEQ ID NO: 1478878
uaaauuggaaguaaucgca

SEQ ID NO: 1478880 - RNA, 19 nt, Artificial Sequence
  Description of Artificial Sequence: Synthetic oligonucleotide
  Sense strand starting at position 663 of SEQ ID NO: 1244310
cggcuauguccgguuugga

SEQ ID NO: 1478881 - RNA, 19 nt, Artificial Sequence
  Description of Artificial Sequence: Synthetic oligonucleotide
  Antisense strand to SEQ ID NO: 1478880
uccaaaccggacauagccg

SEQ ID NO: 1478882 - RNA, 19 nt, Artificial Sequence
  Description of Artificial Sequence: Synthetic oligonucleotide
  Sense strand starting at position 666 of SEQ ID NO: 1244310
cuauguccgguuuggaaau

SEQ ID NO: 1478883 - RNA, 19 nt, Artificial Sequence
  Description of Artificial Sequence: Synthetic oligonucleotide
  Antisense strand to SEQ ID NO: 1478882
auuuccaaaccggacauag

SEQ ID NO: 1478884 - RNA, 19 nt, Artificial Sequence
  Description of Artificial Sequence: Synthetic oligonucleotide
  Sense strand starting at position 842 of SEQ ID NO: 1244310
gccagcuacuuggagaaga

SEQ ID NO: 1478885 - RNA, 19 nt, Artificial Sequence
  Description of Artificial Sequence: Synthetic oligonucleotide
  Antisense strand to SEQ ID NO: 1478884
ucuucuccaaguagcuggc

SEQ ID NO: 1478886 - RNA, 19 nt, Artificial Sequence
  Description of Artificial Sequence: Synthetic oligonucleotide
  Sense strand starting at position 957 of SEQ ID NO: 1244310
gggagaagcuugcaacuca

SEQ ID NO: 1478887 - RNA, 19 nt, Artificial Sequence
  Description of Artificial Sequence: Synthetic oligonucleotide
  Antisense strand to SEQ ID NO: 1478886
ugaguugcaagcuucuccc

SEQ ID NO: 1478888 - RNA, 19 nt, Artificial Sequence
  Description of Artificial Sequence: Synthetic oligonucleotide
  Sense strand starting at position 1307 of SEQ ID NO: 1244310
ggugaaggccagugugaau

SEQ ID NO: 1478889 - RNA, 19 nt, Artificial Sequence
  Description of Artificial Sequence: Synthetic oligonucleotide
  Antisense strand to SEQ ID NO: 1478888
auucacacuggccuucacc

SEQ ID NO: 1478890 - RNA, 19 nt, Artificial Sequence
  Description of Artificial Sequence: Synthetic oligonucleotide
  Sense strand starting at position 1318 of SEQ ID NO: 1244310
gugugaaucucaccugggu

SEQ ID NO: 1478891 - RNA, 19 nt, Artificial Sequence
  Description of Artificial Sequence: Synthetic oligonucleotide
  Antisense strand to SEQ ID NO: 1478890
acccaggugagauucacac

SEQ ID NO: 1478892 - RNA, 19 nt, Artificial Sequence
  Description of Artificial Sequence: Synthetic oligonucleotide
  Sense strand starting at position 1346 of SEQ ID NO: 1244310
ggagaagacugggagaguu

SEQ ID NO: 1478893 - RNA, 19 nt, Artificial Sequence
  Description of Artificial Sequence: Synthetic oligonucleotide
  Antisense strand to SEQ ID NO: 1478892
aacucucccagucuucucc

SEQ ID NO: 1478894 - RNA, 19 nt, Artificial Sequence
  Description of Artificial Sequence: Synthetic oligonucleotide
  Sense strand starting at position 1403 of SEQ ID NO: 1244310
gaaugaggcuccugacuug

SEQ ID NO: 1478895 - RNA, 19 nt, Artificial Sequence
  Description of Artificial Sequence: Synthetic oligonucleotide
  Antisense strand to SEQ ID NO: 1478894
caagucaggagccucauuc

SEQ ID NO: 1478896 - RNA, 19 nt, Artificial Sequence
  Description of Artificial Sequence: Synthetic oligonucleotide
  Sense strand starting at position 2004 of SEQ ID NO: 1244310
gcccgauugguccuuucgu

SEQ ID NO: 1478897 - RNA, 19 nt, Artificial Sequence
  Description of Artificial Sequence: Synthetic oligonucleotide
  Antisense strand to SEQ ID NO: 1478896
acgaaaggaccaaucgggc

SEQ ID NO: 1478898 - RNA, 19 nt, Artificial Sequence
  Description of Artificial Sequence: Synthetic oligonucleotide
  Sense strand starting at position 2005 of SEQ ID NO: 1244310
cccgauugguccuuucguu

SEQ ID NO: 1478899 - RNA, 19 nt, Artificial Sequence
  Description of Artificial Sequence: Synthetic oligonucleotide
  Antisense strand to SEQ ID NO: 1478898
aacgaaaggaccaaucggg

SEQ ID NO: 1478900 - RNA, 19 nt, Artificial Sequence
  Description of Artificial Sequence: Synthetic oligonucleotide
  Sense strand starting at position 2006 of SEQ ID NO: 1244310
ccgauugguccuuucguuu

SEQ ID NO: 1478901 - RNA, 19 nt, Artificial Sequence
  Description of Artificial Sequence: Synthetic oligonucleotide
  Antisense strand to SEQ ID NO: 1478900
aaacgaaaggaccaaucgg

SEQ ID NO: 1478902 - RNA, 19 nt, Artificial Sequence
  Description of Artificial Sequence: Synthetic oligonucleotide
  Sense strand starting at position 2032 of SEQ ID NO: 1244310
ccguccucugccuaucaga

SEQ ID NO: 1478903 - RNA, 19 nt, Artificial Sequence
  Description of Artificial Sequence: Synthetic oligonucleotide
  Antisense strand to SEQ ID NO: 1478902
ucugauaggcagaggacgg

SEQ ID NO: 1478904 - RNA, 19 nt, Artificial Sequence
  Description of Artificial Sequence: Synthetic oligonucleotide
  Sense strand starting at position 2333 of SEQ ID NO: 1244310
cugggugcgucgucuggaa

SEQ ID NO: 1478905 - RNA, 19 nt, Artificial Sequence
  Description of Artificial Sequence: Synthetic oligonucleotide
  Antisense strand to SEQ ID NO: 1478904
uuccagacgacgcacccag

SEQ ID NO: 1478906 - RNA, 19 nt, Artificial Sequence
  Description of Artificial Sequence: Synthetic oligonucleotide
  Sense strand starting at position 2334 of SEQ ID NO: 1244310
ugggugcgucgucuggaaa

SEQ ID NO: 1478907 - RNA, 19 nt, Artificial Sequence
  Description of Artificial Sequence: Synthetic oligonucleotide
  Antisense strand to SEQ ID NO: 1478906
uuuccagacgacgcaccca

SEQ ID NO: 1478908 - RNA, 19 nt, Artificial Sequence
  Description of Artificial Sequence: Synthetic oligonucleotide
  Sense strand starting at position 2355 of SEQ ID NO: 1244310
acccgagaucccuaaaggu

SEQ ID NO: 1478909 - RNA, 19 nt, Artificial Sequence
  Description of Artificial Sequence: Synthetic oligonucleotide
  Antisense strand to SEQ ID NO: 1478908
accuuuagggaucucgggu

SEQ ID NO: 1478910 - RNA, 19 nt, Artificial Sequence
  Description of Artificial Sequence: Synthetic oligonucleotide
  Sense strand starting at position 3020 of SEQ ID NO: 1244310
aacagaugacucuggaugu

SEQ ID NO: 1478911 - RNA, 19 nt, Artificial Sequence
  Description of Artificial Sequence: Synthetic oligonucleotide
  Antisense strand to SEQ ID NO: 1478910
acauccagagucaucuguu

SEQ ID NO: 1478912 - RNA, 19 nt, Artificial Sequence
  Description of Artificial Sequence: Synthetic oligonucleotide
  Sense strand starting at position 3021 of SEQ ID NO: 1244310
acagaugacucuggaugua

SEQ ID NO: 1478913 - RNA, 19 nt, Artificial Sequence
  Description of Artificial Sequence: Synthetic oligonucleotide
  Antisense strand to SEQ ID NO: 1478912
uacauccagagucaucugu

SEQ ID NO: 1478914 - RNA, 19 nt, Artificial Sequence
  Description of Artificial Sequence: Synthetic oligonucleotide
  Sense strand starting at position 3057 of SEQ ID NO: 1244310
ggcagaauguaccaggcaa

SEQ ID NO: 1478915 - RNA, 19 nt, Artificial Sequence
  Description of Artificial Sequence: Synthetic oligonucleotide
  Antisense strand to SEQ ID NO: 1478914
uugccugguacauucugcc

SEQ ID NO: 1478916 - RNA, 19 nt, Artificial Sequence
  Description of Artificial Sequence: Synthetic oligonucleotide
  Sense strand starting at position 3190 of SEQ ID NO: 1244310
ucugcuugcccagguguaa

SEQ ID NO: 1478917 - RNA, 19 nt, Artificial Sequence
  Description of Artificial Sequence: Synthetic oligonucleotide
  Antisense strand to SEQ ID NO: 1478916
uuacaccugggcaagcaga

SEQ ID NO: 1478918 - RNA, 19 nt, Artificial Sequence
  Description of Artificial Sequence: Synthetic oligonucleotide
  Sense strand starting at position 3422 of SEQ ID NO: 1244310
agcucugugccucaguuua

SEQ ID NO: 1478919 - RNA, 19 nt, Artificial Sequence
  Description of Artificial Sequence: Synthetic oligonucleotide
  Antisense strand to SEQ ID NO: 1478918
uaaacugaggcacagagcu

SEQ ID NO: 1478920 - RNA, 19 nt, Artificial Sequence
  Description of Artificial Sequence: Synthetic oligonucleotide
  Sense strand starting at position 3577 of SEQ ID NO: 1244310
gccauaucaucccugguga

SEQ ID NO: 1478921 - RNA, 19 nt, Artificial Sequence
  Description of Artificial Sequence: Synthetic oligonucleotide
  Antisense strand to SEQ ID NO: 1478920
ucaccagggaugauauggc

SEQ ID NO: 1478922 - RNA, 19 nt, Artificial Sequence
  Description of Artificial Sequence: Synthetic oligonucleotide
  Sense strand starting at position 3588 of SEQ ID NO: 1244310
ccuggugaccugugcuuau

SEQ ID NO: 1478923 - RNA, 19 nt, Artificial Sequence
  Description of Artificial Sequence: Synthetic oligonucleotide
  Antisense strand to SEQ ID NO: 1478922
auaagcacaggucaccagg

SEQ ID NO: 1478924 - RNA, 19 nt, Artificial Sequence
  Description of Artificial Sequence: Synthetic oligonucleotide
  Sense strand starting at position 3597 of SEQ ID NO: 1244310
cugugcuuauccgucugua

SEQ ID NO: 1478925 - RNA, 19 nt, Artificial Sequence
  Description of Artificial Sequence: Synthetic oligonucleotide
  Antisense strand to SEQ ID NO: 1478924
uacagacggauaagcacag

SEQ ID NO: 1478926 - RNA, 19 nt, Artificial Sequence
  Description of Artificial Sequence: Synthetic oligonucleotide
  Sense strand starting at position 3598 of SEQ ID NO: 1244310
ugugcuuauccgucuguaa

SEQ ID NO: 1478927 - RNA, 19 nt, Artificial Sequence
  Description of Artificial Sequence: Synthetic oligonucleotide
  Antisense strand to SEQ ID NO: 1478926
uuacagacggauaagcaca

SEQ ID NO: 1478928 - RNA, 19 nt, Artificial Sequence
  Description of Artificial Sequence: Synthetic oligonucleotide
  Sense strand starting at position 3599 of SEQ ID NO: 1244310
gugcuuauccgucuguaaa

SEQ ID NO: 1478929 - RNA, 19 nt, Artificial Sequence
  Description of Artificial Sequence: Synthetic oligonucleotide
  Antisense strand to SEQ ID NO: 1478928
uuuacagacggauaagcac

SEQ ID NO: 1478930 - RNA, 19 nt, Artificial Sequence
  Description of Artificial Sequence: Synthetic oligonucleotide
  Sense strand starting at position 3658 of SEQ ID NO: 1244310
aggcuaguccagcgaguuu

SEQ ID NO: 1478931 - RNA, 19 nt, Artificial Sequence
  Description of Artificial Sequence: Synthetic oligonucleotide
  Antisense strand to SEQ ID NO: 1478930
aaacucgcuggacuagccu

SEQ ID NO: 1478932 - RNA, 19 nt, Artificial Sequence
  Description of Artificial Sequence: Synthetic oligonucleotide
  Sense strand starting at position 3737 of SEQ ID NO: 1244310
gcacucugcuucuugggau

SEQ ID NO: 1478933 - RNA, 19 nt, Artificial Sequence
  Description of Artificial Sequence: Synthetic oligonucleotide
  Antisense strand to SEQ ID NO: 1478932
aucccaagaagcagagugc

SEQ ID NO: 1478934 - RNA, 19 nt, Artificial Sequence
  Description of Artificial Sequence: Synthetic oligonucleotide
  Sense strand starting at position 3778 of SEQ ID NO: 1244310
ccucaaaugugccagggau

SEQ ID NO: 1478935 - RNA, 19 nt, Artificial Sequence
  Description of Artificial Sequence: Synthetic oligonucleotide
  Antisense strand to SEQ ID NO: 1478934
aucccuggcacauuugagg

SEQ ID NO: 1478936 - RNA, 19 nt, Artificial Sequence
  Description of Artificial Sequence: Synthetic oligonucleotide
  Sense strand starting at position 3958 of SEQ ID NO: 1244310
gcugcugaugucuuuguua

SEQ ID NO: 1478937 - RNA, 19 nt, Artificial Sequence
  Description of Artificial Sequence: Synthetic oligonucleotide
  Antisense strand to SEQ ID NO: 1478936
uaacaaagacaucagcagc

SEQ ID NO: 1478938 - RNA, 19 nt, Artificial Sequence
  Description of Artificial Sequence: Synthetic oligonucleotide
  Sense strand starting at position 3960 of SEQ ID NO: 1244310
ugcugaugucuuuguuacu

SEQ ID NO: 1478939 - RNA, 19 nt, Artificial Sequence
  Description of Artificial Sequence: Synthetic oligonucleotide
  Antisense strand to SEQ ID NO: 1478938
aguaacaaagacaucagca

SEQ ID NO: 1478940 - RNA, 19 nt, Artificial Sequence
  Description of Artificial Sequence: Synthetic oligonucleotide
  Sense strand starting at position 26 of SEQ ID NO: 1244311
gcuuguuaccuuuauuacu

SEQ ID NO: 1478941 - RNA, 19 nt, Artificial Sequence
  Description of Artificial Sequence: Synthetic oligonucleotide
  Antisense strand to SEQ ID NO: 1478940
aguaauaaagguaacaagc

SEQ ID NO: 1478942 - RNA, 19 nt, Artificial Sequence
  Description of Artificial Sequence: Synthetic oligonucleotide
  Sense strand starting at position 277 of SEQ ID NO: 1244311
uuuauaagcuuuguaaguc

SEQ ID NO: 1478943 - RNA, 19 nt, Artificial Sequence
  Description of Artificial Sequence: Synthetic oligonucleotide
  Antisense strand to SEQ ID NO: 1478942
gacuuacaaagcuuauaaa

SEQ ID NO: 1478944 - RNA, 19 nt, Artificial Sequence
  Description of Artificial Sequence: Synthetic oligonucleotide
  Sense strand starting at position 437 of SEQ ID NO: 1244311
gugggcauccaauaacuaa

SEQ ID NO: 1478945 - RNA, 19 nt, Artificial Sequence
  Description of Artificial Sequence: Synthetic oligonucleotide
  Antisense strand to SEQ ID NO: 1478944
uuaguuauuggaugcccac

SEQ ID NO: 1478946 - RNA, 19 nt, Artificial Sequence
  Description of Artificial Sequence: Synthetic oligonucleotide
  Sense strand starting at position 488 of SEQ ID NO: 1244311
cagaaaguguccucuaagc

SEQ ID NO: 1478947 - RNA, 19 nt, Artificial Sequence
  Description of Artificial Sequence: Synthetic oligonucleotide
  Antisense strand to SEQ ID NO: 1478946
gcuuagaggacacuuucug

SEQ ID NO: 1478948 - RNA, 19 nt, Artificial Sequence
  Description of Artificial Sequence: Synthetic oligonucleotide
  Sense strand starting at position 490 of SEQ ID NO: 1244311
gaaaguguccucuaagcuc

SEQ ID NO: 1478949 - RNA, 19 nt, Artificial Sequence
  Description of Artificial Sequence: Synthetic oligonucleotide
  Antisense strand to SEQ ID NO: 1478948
gagcuuagaggacacuuuc

SEQ ID NO: 1478950 - RNA, 19 nt, Artificial Sequence
  Description of Artificial Sequence: Synthetic oligonucleotide
  Sense strand starting at position 525 of SEQ ID NO: 1244311
auauaucuaucacugguuu

SEQ ID NO: 1478951 - RNA, 19 nt, Artificial Sequence
  Description of Artificial Sequence: Synthetic oligonucleotide
  Antisense strand to SEQ ID NO: 1478950
aaaccagugauagauauau

SEQ ID NO: 1478952 - RNA, 19 nt, Artificial Sequence
  Description of Artificial Sequence: Synthetic oligonucleotide
  Sense strand starting at position 618 of SEQ ID NO: 1244311
ugaauuauggcaugcucua

SEQ ID NO: 1478953 - RNA, 19 nt, Artificial Sequence
  Description of Artificial Sequence: Synthetic oligonucleotide
  Antisense strand to SEQ ID NO: 1478952
uagagcaugccauaauuca

SEQ ID NO: 1478954 - RNA, 19 nt, Artificial Sequence
  Description of Artificial Sequence: Synthetic oligonucleotide
  Sense strand starting at position 625 of SEQ ID NO: 1244311
uggcaugcucuauaaacau

SEQ ID NO: 1478955 - RNA, 19 nt, Artificial Sequence
  Description of Artificial Sequence: Synthetic oligonucleotide
  Antisense strand to SEQ ID NO: 1478954
auguuuauagagcaugcca

SEQ ID NO: 1478956 - RNA, 19 nt, Artificial Sequence
  Description of Artificial Sequence: Synthetic oligonucleotide
  Sense strand starting at position 774 of SEQ ID NO: 1244311
acacaagcaguuugcuaaa

SEQ ID NO: 1478957 - RNA, 19 nt, Artificial Sequence
  Description of Artificial Sequence: Synthetic oligonucleotide
  Antisense strand to SEQ ID NO: 1478956
uuuagcaaacugcuugugu

SEQ ID NO: 1478958 - RNA, 19 nt, Artificial Sequence
  Description of Artificial Sequence: Synthetic oligonucleotide
  Sense strand starting at position 776 of SEQ ID NO: 1244311
acaagcaguuugcuaaagu

SEQ ID NO: 1478959 - RNA, 19 nt, Artificial Sequence
  Description of Artificial Sequence: Synthetic oligonucleotide
  Antisense strand to SEQ ID NO: 1478958
acuuuagcaaacugcuugu

SEQ ID NO: 1478960 - RNA, 19 nt, Artificial Sequence
  Description of Artificial Sequence: Synthetic oligonucleotide
  Sense strand starting at position 785 of SEQ ID NO: 1244311
uugcuaaaguugucaagag

SEQ ID NO: 1478961 - RNA, 19 nt, Artificial Sequence
  Description of Artificial Sequence: Synthetic oligonucleotide
  Antisense strand to SEQ ID NO: 1478960
cucuugacaacuuuagcaa

SEQ ID NO: 1478962 - RNA, 19 nt, Artificial Sequence
  Description of Artificial Sequence: Synthetic oligonucleotide
  Sense strand starting at position 789 of SEQ ID NO: 1244311
uaaaguugucaagagaguu

SEQ ID NO: 1478963 - RNA, 19 nt, Artificial Sequence
  Description of Artificial Sequence: Synthetic oligonucleotide
  Antisense strand to SEQ ID NO: 1478962
aacucucuugacaacuuua

SEQ ID NO: 1478964 - RNA, 19 nt, Artificial Sequence
  Description of Artificial Sequence: Synthetic oligonucleotide
  Sense strand starting at position 1108 of SEQ ID NO: 1244311
agaaaucccuggccuggaa

SEQ ID NO: 1478965 - RNA, 19 nt, Artificial Sequence
  Description of Artificial Sequence: Synthetic oligonucleotide
  Antisense strand to SEQ ID NO: 1478964
uuccaggccagggauuucu

SEQ ID NO: 1478966 - RNA, 19 nt, Artificial Sequence
  Description of Artificial Sequence: Synthetic oligonucleotide
  Sense strand starting at position 2188 of SEQ ID NO: 1244311
ccuaaagugguuugcagaa

SEQ ID NO: 1478967 - RNA, 19 nt, Artificial Sequence
  Description of Artificial Sequence: Synthetic oligonucleotide
  Antisense strand to SEQ ID NO: 1478966
uucugcaaaccacuuuagg

SEQ ID NO: 1478968 - RNA, 19 nt, Artificial Sequence
  Description of Artificial Sequence: Synthetic oligonucleotide
  Sense strand starting at position 2217 of SEQ ID NO: 1244311
gccugcauuugugcggaaa

SEQ ID NO: 1478969 - RNA, 19 nt, Artificial Sequence
  Description of Artificial Sequence: Synthetic oligonucleotide
  Antisense strand to SEQ ID NO: 1478968
uuuccgcacaaaugcaggc

SEQ ID NO: 1478970 - RNA, 19 nt, Artificial Sequence
  Description of Artificial Sequence: Synthetic oligonucleotide
  Sense strand starting at position 2218 of SEQ ID NO: 1244311
ccugcauuugugcggaaag

SEQ ID NO: 1478971 - RNA, 19 nt, Artificial Sequence
  Description of Artificial Sequence: Synthetic oligonucleotide
  Antisense strand to SEQ ID NO: 1478970
cuuuccgcacaaaugcagg

SEQ ID NO: 1478972 - RNA, 19 nt, Artificial Sequence
  Description of Artificial Sequence: Synthetic oligonucleotide
  Sense strand starting at position 2251 of SEQ ID NO: 1244311
ucaucauucccauggaggu

SEQ ID NO: 1478973 - RNA, 19 nt, Artificial Sequence
  Description of Artificial Sequence: Synthetic oligonucleotide
  Antisense strand to SEQ ID NO: 1478972
accuccaugggaaugauga

SEQ ID NO: 1478974 - RNA, 19 nt, Artificial Sequence
  Description of Artificial Sequence: Synthetic oligonucleotide
  Sense strand starting at position 2264 of SEQ ID NO: 1244311
ggaggucugugacucccaa

SEQ ID NO: 1478975 - RNA, 19 nt, Artificial Sequence
  Description of Artificial Sequence: Synthetic oligonucleotide
  Antisense strand to SEQ ID NO: 1478974
uugggagucacagaccucc

SEQ ID NO: 1478976 - RNA, 19 nt, Artificial Sequence
  Description of Artificial Sequence: Synthetic oligonucleotide
  Sense strand starting at position 2388 of SEQ ID NO: 1244311
gggaguuaccuagagcuau

SEQ ID NO: 1478977 - RNA, 19 nt, Artificial Sequence
  Description of Artificial Sequence: Synthetic oligonucleotide
  Antisense strand to SEQ ID NO: 1478976
auagcucuagguaacuccc

SEQ ID NO: 1478978 - RNA, 19 nt, Artificial Sequence
  Description of Artificial Sequence: Synthetic oligonucleotide
  Sense strand starting at position 2392 of SEQ ID NO: 1244311
guuaccuagagcuaugguu

SEQ ID NO: 1478979 - RNA, 19 nt, Artificial Sequence
  Description of Artificial Sequence: Synthetic oligonucleotide
  Antisense strand to SEQ ID NO: 1478978
aaccauagcucuagguaac

SEQ ID NO: 1478980 - RNA, 19 nt, Artificial Sequence
  Description of Artificial Sequence: Synthetic oligonucleotide
  Sense strand starting at position 2560 of SEQ ID NO: 1244311
agguaauuuguaugcccau

SEQ ID NO: 1478981 - RNA, 19 nt, Artificial Sequence
  Description of Artificial Sequence: Synthetic oligonucleotide
  Antisense strand to SEQ ID NO: 1478980
augggcauacaaauuaccu

SEQ ID NO: 1478982 - RNA, 19 nt, Artificial Sequence
  Description of Artificial Sequence: Synthetic oligonucleotide
  Sense strand starting at position 2561 of SEQ ID NO: 1244311
gguaauuuguaugcccauu

SEQ ID NO: 1478983 - RNA, 19 nt, Artificial Sequence
  Description of Artificial Sequence: Synthetic oligonucleotide
  Antisense strand to SEQ ID NO: 1478982
aaugggcauacaaauuacc

SEQ ID NO: 1478984 - RNA, 19 nt, Artificial Sequence
  Description of Artificial Sequence: Synthetic oligonucleotide
  Sense strand starting at position 2771 of SEQ ID NO: 1244311
uuccauugcuuugcacaga

SEQ ID NO: 1478985 - RNA, 19 nt, Artificial Sequence
  Description of Artificial Sequence: Synthetic oligonucleotide
  Antisense strand to SEQ ID NO: 1478984
ucugugcaaagcaauggaa

SEQ ID NO: 1478986 - RNA, 19 nt, Artificial Sequence
  Description of Artificial Sequence: Synthetic oligonucleotide
  Sense strand starting at position 2832 of SEQ ID NO: 1244311
ucucuaugaggcuacgauu

SEQ ID NO: 1478987 - RNA, 19 nt, Artificial Sequence
  Description of Artificial Sequence: Synthetic oligonucleotide
  Antisense strand to SEQ ID NO: 1478986
aaucguagccucauagaga

SEQ ID NO: 1478988 - RNA, 19 nt, Artificial Sequence
  Description of Artificial Sequence: Synthetic oligonucleotide
  Sense strand starting at position 2852 of SEQ ID NO: 1244311
guaagccaaccauaaugua

SEQ ID NO: 1478989 - RNA, 19 nt, Artificial Sequence
  Description of Artificial Sequence: Synthetic oligonucleotide
  Antisense strand to SEQ ID NO: 1478988
uacauuaugguuggcuuac

SEQ ID NO: 1478990 - RNA, 19 nt, Artificial Sequence
  Description of Artificial Sequence: Synthetic oligonucleotide
  Sense strand starting at position 2860 of SEQ ID NO: 1244311
accauaauguacucgaaau

SEQ ID NO: 1478991 - RNA, 19 nt, Artificial Sequence
  Description of Artificial Sequence: Synthetic oligonucleotide
  Antisense strand to SEQ ID NO: 1478990
auuucgaguacauuauggu

SEQ ID NO: 1478992 - RNA, 19 nt, Artificial Sequence
  Description of Artificial Sequence: Synthetic oligonucleotide
  Sense strand starting at position 2867 of SEQ ID NO: 1244311
uguacucgaaaugguaaga

SEQ ID NO: 1478993 - RNA, 19 nt, Artificial Sequence
  Description of Artificial Sequence: Synthetic oligonucleotide
  Antisense strand to SEQ ID NO: 1478992
ucuuaccauuucgaguaca

SEQ ID NO: 1478994 - RNA, 19 nt, Artificial Sequence
  Description of Artificial Sequence: Synthetic oligonucleotide
  Sense strand starting at position 2948 of SEQ ID NO: 1244311
gaaucuaagccauggagcu

SEQ ID NO: 1478995 - RNA, 19 nt, Artificial Sequence
  Description of Artificial Sequence: Synthetic oligonucleotide
  Antisense strand to SEQ ID NO: 1478994
agcuccauggcuuagauuc

SEQ ID NO: 1478996 - RNA, 19 nt, Artificial Sequence
  Description of Artificial Sequence: Synthetic oligonucleotide
  Sense strand starting at position 2985 of SEQ ID NO: 1244311
agaagcauugugugaucua

SEQ ID NO: 1478997 - RNA, 19 nt, Artificial Sequence
  Description of Artificial Sequence: Synthetic oligonucleotide
  Antisense strand to SEQ ID NO: 1478996
uagaucacacaaugcuucu

SEQ ID NO: 1478998 - RNA, 19 nt, Artificial Sequence
  Description of Artificial Sequence: Synthetic oligonucleotide
  Sense strand starting at position 2988 of SEQ ID NO: 1244311
agcauugugugaucuacag

SEQ ID NO: 1478999 - RNA, 19 nt, Artificial Sequence
  Description of Artificial Sequence: Synthetic oligonucleotide
  Antisense strand to SEQ ID NO: 1478998
cuguagaucacacaaugcu

SEQ ID NO: 1479000 - RNA, 19 nt, Artificial Sequence
  Description of Artificial Sequence: Synthetic oligonucleotide
  Sense strand starting at position 3027 of SEQ ID NO: 1244311
uucuuccacccagauguua

SEQ ID NO: 1479001 - RNA, 19 nt, Artificial Sequence
  Description of Artificial Sequence: Synthetic oligonucleotide
  Antisense strand to SEQ ID NO: 1479000
uaacaucuggguggaagaa

SEQ ID NO: 1479002 - RNA, 19 nt, Artificial Sequence
  Description of Artificial Sequence: Synthetic oligonucleotide
  Sense strand starting at position 3074 of SEQ ID NO: 1244311
uuggaaauguguccugggu

SEQ ID NO: 1479003 - RNA, 19 nt, Artificial Sequence
  Description of Artificial Sequence: Synthetic oligonucleotide
  Antisense strand to SEQ ID NO: 1479002
acccaggacacauuuccaa

SEQ ID NO: 1479004 - RNA, 19 nt, Artificial Sequence
  Description of Artificial Sequence: Synthetic oligonucleotide
  Sense strand starting at position 3078 of SEQ ID NO: 1244311
aaauguguccugggucaaa

SEQ ID NO: 1479005 - RNA, 19 nt, Artificial Sequence
  Description of Artificial Sequence: Synthetic oligonucleotide
  Antisense strand to SEQ ID NO: 1479004
uuugacccaggacacauuu

SEQ ID NO: 1479006 - RNA, 19 nt, Artificial Sequence
  Description of Artificial Sequence: Synthetic oligonucleotide
  Sense strand starting at position 3135 of SEQ ID NO: 1244311
ucaucuugauggcucagau

SEQ ID NO: 1479007 - RNA, 19 nt, Artificial Sequence
  Description of Artificial Sequence: Synthetic oligonucleotide
  Antisense strand to SEQ ID NO: 1479006
aucugagccaucaagauga

SEQ ID NO: 1479008 - RNA, 19 nt, Artificial Sequence
  Description of Artificial Sequence: Synthetic oligonucleotide
  Sense strand starting at position 3160 of SEQ ID NO: 1244311
aguggcuagccguaaacau

SEQ ID NO: 1479009 - RNA, 19 nt, Artificial Sequence
  Description of Artificial Sequence: Synthetic oligonucleotide
  Antisense strand to SEQ ID NO: 1479008
auguuuacggcuagccacu

SEQ ID NO: 1479010 - RNA, 19 nt, Artificial Sequence
  Description of Artificial Sequence: Synthetic oligonucleotide
  Sense strand starting at position 3222 of SEQ ID NO: 1244311
agguguacuucaguggaga

SEQ ID NO: 1479011 - RNA, 19 nt, Artificial Sequence
  Description of Artificial Sequence: Synthetic oligonucleotide
  Antisense strand to SEQ ID NO: 1479010
ucuccacugaaguacaccu

SEQ ID NO: 1479012 - RNA, 19 nt, Artificial Sequence
  Description of Artificial Sequence: Synthetic oligonucleotide
  Sense strand starting at position 3223 of SEQ ID NO: 1244311
gguguacuucaguggagag

SEQ ID NO: 1479013 - RNA, 19 nt, Artificial Sequence
  Description of Artificial Sequence: Synthetic oligonucleotide
  Antisense strand to SEQ ID NO: 1479012
cucuccacugaaguacacc

SEQ ID NO: 1479014 - RNA, 19 nt, Artificial Sequence
  Description of Artificial Sequence: Synthetic oligonucleotide
  Sense strand starting at position 3235 of SEQ ID NO: 1244311
uggagagcccgccagaauu

SEQ ID NO: 1479015 - RNA, 19 nt, Artificial Sequence
  Description of Artificial Sequence: Synthetic oligonucleotide
  Antisense strand to SEQ ID NO: 1479014
aauucuggcgggcucucca

SEQ ID NO: 1479016 - RNA, 19 nt, Artificial Sequence
  Description of Artificial Sequence: Synthetic oligonucleotide
  Sense strand starting at position 3301 of SEQ ID NO: 1244311
uuauaaacauggccagauu

SEQ ID NO: 1479017 - RNA, 19 nt, Artificial Sequence
  Description of Artificial Sequence: Synthetic oligonucleotide
  Antisense strand to SEQ ID NO: 1479016
aaucuggccauguuuauaa

SEQ ID NO: 1479018 - RNA, 19 nt, Artificial Sequence
  Description of Artificial Sequence: Synthetic oligonucleotide
  Sense strand starting at position 3392 of SEQ ID NO: 1244311
ggccuuuaauaagaauuua

SEQ ID NO: 1479019 - RNA, 19 nt, Artificial Sequence
  Description of Artificial Sequence: Synthetic oligonucleotide
  Antisense strand to SEQ ID NO: 1479018
uaaauucuuauuaaaggcc

SEQ ID NO: 1479020 - RNA, 19 nt, Artificial Sequence
  Description of Artificial Sequence: Synthetic oligonucleotide
  Sense strand starting at position 176 of SEQ ID NO: 1244312
agcgaauguuuaccaaaua

SEQ ID NO: 1479021 - RNA, 19 nt, Artificial Sequence
  Description of Artificial Sequence: Synthetic oligonucleotide
  Antisense strand to SEQ ID NO: 1479020
uauuugguaaacauucgcu

SEQ ID NO: 1479022 - RNA, 19 nt, Artificial Sequence
  Description of Artificial Sequence: Synthetic oligonucleotide
  Sense strand starting at position 317 of SEQ ID NO: 1244312
auaugucaauuccuagguu

SEQ ID NO: 1479023 - RNA, 19 nt, Artificial Sequence
  Description of Artificial Sequence: Synthetic oligonucleotide
  Antisense strand to SEQ ID NO: 1479022
aaccuaggaauugacauau

SEQ ID NO: 1479024 - RNA, 19 nt, Artificial Sequence
  Description of Artificial Sequence: Synthetic oligonucleotide
  Sense strand starting at position 320 of SEQ ID NO: 1244312
ugucaauuccuagguucuu

SEQ ID NO: 1479025 - RNA, 19 nt, Artificial Sequence
  Description of Artificial Sequence: Synthetic oligonucleotide
  Antisense strand to SEQ ID NO: 1479024
aagaaccuaggaauugaca

SEQ ID NO: 1479026 - RNA, 19 nt, Artificial Sequence
  Description of Artificial Sequence: Synthetic oligonucleotide
  Sense strand starting at position 401 of SEQ ID NO: 1244312
cuuugaaugcuugagauua

SEQ ID NO: 1479027 - RNA, 19 nt, Artificial Sequence
  Description of Artificial Sequence: Synthetic oligonucleotide
  Antisense strand to SEQ ID NO: 1479026
uaaucucaagcauucaaag

SEQ ID NO: 1479028 - RNA, 19 nt, Artificial Sequence
  Description of Artificial Sequence: Synthetic oligonucleotide
  Sense strand starting at position 630 of SEQ ID NO: 1244312
auaugcuuucucuauggua

SEQ ID NO: 1479029 - RNA, 19 nt, Artificial Sequence
  Description of Artificial Sequence: Synthetic oligonucleotide
  Antisense strand to SEQ ID NO: 1479028
uaccauagagaaagcauau

SEQ ID NO: 1479030 - RNA, 19 nt, Artificial Sequence
  Description of Artificial Sequence: Synthetic oligonucleotide
  Sense strand starting at position 632 of SEQ ID NO: 1244312
augcuuucucuaugguaaa

SEQ ID NO: 1479031 - RNA, 19 nt, Artificial Sequence
  Description of Artificial Sequence: Synthetic oligonucleotide
  Antisense strand to SEQ ID NO: 1479030
uuuaccauagagaaagcau

SEQ ID NO: 1479032 - RNA, 19 nt, Artificial Sequence
  Description of Artificial Sequence: Synthetic oligonucleotide
  Sense strand starting at position 719 of SEQ ID NO: 1244312
gaugucauaucaggaauuu

SEQ ID NO: 1479033 - RNA, 19 nt, Artificial Sequence
  Description of Artificial Sequence: Synthetic oligonucleotide
  Antisense strand to SEQ ID NO: 1479032
aaauuccugauaugacauc

SEQ ID NO: 1479034 - RNA, 19 nt, Artificial Sequence
  Description of Artificial Sequence: Synthetic oligonucleotide
  Sense strand starting at position 902 of SEQ ID NO: 1244312
ucauuaugcuugucaauga

SEQ ID NO: 1479035 - RNA, 19 nt, Artificial Sequence
  Description of Artificial Sequence: Synthetic oligonucleotide
  Antisense strand to SEQ ID NO: 1479034
ucauugacaagcauaauga

SEQ ID NO: 1479036 - RNA, 19 nt, Artificial Sequence
  Description of Artificial Sequence: Synthetic oligonucleotide
  Sense strand starting at position 1066 of SEQ ID NO: 1244312
aagcaauugguguaaagug

SEQ ID NO: 1479037 - RNA, 19 nt, Artificial Sequence
  Description of Artificial Sequence: Synthetic oligonucleotide
  Antisense strand to SEQ ID NO: 1479036
cacuuuacaccaauugcuu

SEQ ID NO: 1479038 - RNA, 19 nt, Artificial Sequence
  Description of Artificial Sequence: Synthetic oligonucleotide
  Sense strand starting at position 1186 of SEQ ID NO: 1244312
aggcgauaucaauggaaau

SEQ ID NO: 1479039 - RNA, 19 nt, Artificial Sequence
  Description of Artificial Sequence: Synthetic oligonucleotide
  Antisense strand to SEQ ID NO: 1479038
auuuccauugauaucgccu

SEQ ID NO: 1479040 - RNA, 19 nt, Artificial Sequence
  Description of Artificial Sequence: Synthetic oligonucleotide
  Sense strand starting at position 1187 of SEQ ID NO: 1244312
ggcgauaucaauggaaauu

SEQ ID NO: 1479041 - RNA, 19 nt, Artificial Sequence
  Description of Artificial Sequence: Synthetic oligonucleotide
  Antisense strand to SEQ ID NO: 1479040
aauuuccauugauaucgcc

SEQ ID NO: 1479042 - RNA, 19 nt, Artificial Sequence
  Description of Artificial Sequence: Synthetic oligonucleotide
  Sense strand starting at position 1258 of SEQ ID NO: 1244312
acauuaauuuccuaguagu

SEQ ID NO: 1479043 - RNA, 19 nt, Artificial Sequence
  Description of Artificial Sequence: Synthetic oligonucleotide
  Antisense strand to SEQ ID NO: 1479042
acuacuaggaaauuaaugu

SEQ ID NO: 1479044 - RNA, 19 nt, Artificial Sequence
  Description of Artificial Sequence: Synthetic oligonucleotide
  Sense strand starting at position 1352 of SEQ ID NO: 1244312
uuacaauaucugugcauag

SEQ ID NO: 1479045 - RNA, 19 nt, Artificial Sequence
  Description of Artificial Sequence: Synthetic oligonucleotide
  Antisense strand to SEQ ID NO: 1479044
cuaugcacagauauuguaa

SEQ ID NO: 1479046 - RNA, 19 nt, Artificial Sequence
  Description of Artificial Sequence: Synthetic oligonucleotide
  Sense strand starting at position 1354 of SEQ ID NO: 1244312
acaauaucugugcauagua

SEQ ID NO: 1479047 - RNA, 19 nt, Artificial Sequence
  Description of Artificial Sequence: Synthetic oligonucleotide
  Antisense strand to SEQ ID NO: 1479046
uacuaugcacagauauugu

SEQ ID NO: 1479048 - RNA, 19 nt, Artificial Sequence
  Description of Artificial Sequence: Synthetic oligonucleotide
  Sense strand starting at position 1470 of SEQ ID NO: 1244312
cuagcagaagaaugcaaau

SEQ ID NO: 1479049 - RNA, 19 nt, Artificial Sequence
  Description of Artificial Sequence: Synthetic oligonucleotide
  Antisense strand to SEQ ID NO: 1479048
auuugcauucuucugcuag

SEQ ID NO: 1479050 - RNA, 19 nt, Artificial Sequence
  Description of Artificial Sequence: Synthetic oligonucleotide
  Sense strand starting at position 1572 of SEQ ID NO: 1244312
augcaacugagcuguggaa

SEQ ID NO: 1479051 - RNA, 19 nt, Artificial Sequence
  Description of Artificial Sequence: Synthetic oligonucleotide
  Antisense strand to SEQ ID NO: 1479050
uuccacagcucaguugcau

SEQ ID NO: 1479052 - RNA, 19 nt, Artificial Sequence
  Description of Artificial Sequence: Synthetic oligonucleotide
  Sense strand starting at position 2058 of SEQ ID NO: 1244312
uguaguucuccggcggagu

SEQ ID NO: 1479053 - RNA, 19 nt, Artificial Sequence
  Description of Artificial Sequence: Synthetic oligonucleotide
  Antisense strand to SEQ ID NO: 1479052
acuccgccggagaacuaca

SEQ ID NO: 1479054 - RNA, 19 nt, Artificial Sequence
  Description of Artificial Sequence: Synthetic oligonucleotide
  Sense strand starting at position 2124 of SEQ ID NO: 1244312
gagauaacugggugcgaca

SEQ ID NO: 1479055 - RNA, 19 nt, Artificial Sequence
  Description of Artificial Sequence: Synthetic oligonucleotide
  Antisense strand to SEQ ID NO: 1479054
ugucgcacccaguuaucuc

SEQ ID NO: 1479056 - RNA, 19 nt, Artificial Sequence
  Description of Artificial Sequence: Synthetic oligonucleotide
  Sense strand starting at position 2126 of SEQ ID NO: 1244312
gauaacugggugcgacaaa

SEQ ID NO: 1479057 - RNA, 19 nt, Artificial Sequence
  Description of Artificial Sequence: Synthetic oligonucleotide
  Antisense strand to SEQ ID NO: 1479056
uuugucgcacccaguuauc

SEQ ID NO: 1479058 - RNA, 19 nt, Artificial Sequence
  Description of Artificial Sequence: Synthetic oligonucleotide
  Sense strand starting at position 2139 of SEQ ID NO: 1244312
gacaaagauugcguccaga

SEQ ID NO: 1479059 - RNA, 19 nt, Artificial Sequence
  Description of Artificial Sequence: Synthetic oligonucleotide
  Antisense strand to SEQ ID NO: 1479058
ucuggacgcaaucuuuguc

SEQ ID NO: 1479060 - RNA, 19 nt, Artificial Sequence
  Description of Artificial Sequence: Synthetic oligonucleotide
  Sense strand starting at position 2142 of SEQ ID NO: 1244312
aaagauugcguccagauaa

SEQ ID NO: 1479061 - RNA, 19 nt, Artificial Sequence
  Description of Artificial Sequence: Synthetic oligonucleotide
  Antisense strand to SEQ ID NO: 1479060
uuaucuggacgcaaucuuu

SEQ ID NO: 1479062 - RNA, 19 nt, Artificial Sequence
  Description of Artificial Sequence: Synthetic oligonucleotide
  Sense strand starting at position 2180 of SEQ ID NO: 1244312
aguagagugaugggugaaa

SEQ ID NO: 1479063 - RNA, 19 nt, Artificial Sequence
  Description of Artificial Sequence: Synthetic oligonucleotide
  Antisense strand to SEQ ID NO: 1479062
uuucacccaucacucuacu

SEQ ID NO: 1479064 - RNA, 19 nt, Artificial Sequence
  Description of Artificial Sequence: Synthetic oligonucleotide
  Sense strand starting at position 2264 of SEQ ID NO: 1244312
auauuagguuagcuaaaga

SEQ ID NO: 1479065 - RNA, 19 nt, Artificial Sequence
  Description of Artificial Sequence: Synthetic oligonucleotide
  Antisense strand to SEQ ID NO: 1479064
ucuuuagcuaaccuaauau

SEQ ID NO: 1479066 - RNA, 19 nt, Artificial Sequence
  Description of Artificial Sequence: Synthetic oligonucleotide
  Sense strand starting at position 2787 of SEQ ID NO: 1244312
uaccuuugcucuguggaga

SEQ ID NO: 1479067 - RNA, 19 nt, Artificial Sequence
  Description of Artificial Sequence: Synthetic oligonucleotide
  Antisense strand to SEQ ID NO: 1479066
ucuccacagagcaaaggua

SEQ ID NO: 1479068 - RNA, 19 nt, Artificial Sequence
  Description of Artificial Sequence: Synthetic oligonucleotide
  Sense strand starting at position 2788 of SEQ ID NO: 1244312
accuuugcucuguggagaa

SEQ ID NO: 1479069 - RNA, 19 nt, Artificial Sequence
  Description of Artificial Sequence: Synthetic oligonucleotide
  Antisense strand to SEQ ID NO: 1479068
uucuccacagagcaaaggu

SEQ ID NO: 1479070 - RNA, 19 nt, Artificial Sequence
  Description of Artificial Sequence: Synthetic oligonucleotide
  Sense strand starting at position 2790 of SEQ ID NO: 1244312
cuuugcucuguggagaaga

SEQ ID NO: 1479071 - RNA, 19 nt, Artificial Sequence
  Description of Artificial Sequence: Synthetic oligonucleotide
  Antisense strand to SEQ ID NO: 1479070
ucuucuccacagagcaaag

SEQ ID NO: 1479072 - RNA, 19 nt, Artificial Sequence
  Description of Artificial Sequence: Synthetic oligonucleotide
  Sense strand starting at position 2828 of SEQ ID NO: 1244312
agaaacaauccaggucagu

SEQ ID NO: 1479073 - RNA, 19 nt, Artificial Sequence
  Description of Artificial Sequence: Synthetic oligonucleotide
  Antisense strand to SEQ ID NO: 1479072
acugaccuggauuguuucu

SEQ ID NO: 1479074 - RNA, 19 nt, Artificial Sequence
  Description of Artificial Sequence: Synthetic oligonucleotide
  Sense strand starting at position 2841 of SEQ ID NO: 1244312
gucaguuauuuccaaggaa

SEQ ID NO: 1479075 - RNA, 19 nt, Artificial Sequence
  Description of Artificial Sequence: Synthetic oligonucleotide
  Antisense strand to SEQ ID NO: 1479074
uuccuuggaaauaacugac

SEQ ID NO: 1479076 - RNA, 19 nt, Artificial Sequence
  Description of Artificial Sequence: Synthetic oligonucleotide
  Sense strand starting at position 2918 of SEQ ID NO: 1244312
caggguuacagaggaaguu

SEQ ID NO: 1479077 - RNA, 19 nt, Artificial Sequence
  Description of Artificial Sequence: Synthetic oligonucleotide
  Antisense strand to SEQ ID NO: 1479076
aacuuccucuguaacccug

SEQ ID NO: 1479078 - RNA, 19 nt, Artificial Sequence
  Description of Artificial Sequence: Synthetic oligonucleotide
  Sense strand starting at position 3048 of SEQ ID NO: 1244312
acagucgaauaucuugaau

SEQ ID NO: 1479079 - RNA, 19 nt, Artificial Sequence
  Description of Artificial Sequence: Synthetic oligonucleotide
  Antisense strand to SEQ ID NO: 1479078
auucaagauauucgacugu

SEQ ID NO: 1479080 - RNA, 19 nt, Artificial Sequence
  Description of Artificial Sequence: Synthetic oligonucleotide
  Sense strand starting at position 3090 of SEQ ID NO: 1244312
cuuguugaguguccaggau

SEQ ID NO: 1479081 - RNA, 19 nt, Artificial Sequence
  Description of Artificial Sequence: Synthetic oligonucleotide
  Antisense strand to SEQ ID NO: 1479080
auccuggacacucaacaag

SEQ ID NO: 1479082 - RNA, 19 nt, Artificial Sequence
  Description of Artificial Sequence: Synthetic oligonucleotide
  Sense strand starting at position 3219 of SEQ ID NO: 1244312
gccagagaugcuuagcaca

SEQ ID NO: 1479083 - RNA, 19 nt, Artificial Sequence
  Description of Artificial Sequence: Synthetic oligonucleotide
  Antisense strand to SEQ ID NO: 1479082
ugugcuaagcaucucuggc

SEQ ID NO: 1479084 - RNA, 19 nt, Artificial Sequence
  Description of Artificial Sequence: Synthetic oligonucleotide
  Sense strand starting at position 3284 of SEQ ID NO: 1244312
ugagcucggacuuauacuu

SEQ ID NO: 1479085 - RNA, 19 nt, Artificial Sequence
  Description of Artificial Sequence: Synthetic oligonucleotide
  Antisense strand to SEQ ID NO: 1479084
aaguauaaguccgagcuca

SEQ ID NO: 1479086 - RNA, 19 nt, Artificial Sequence
  Description of Artificial Sequence: Synthetic oligonucleotide
  Sense strand starting at position 3648 of SEQ ID NO: 1244312
gagauagguuaggucagua

SEQ ID NO: 1479087 - RNA, 19 nt, Artificial Sequence
  Description of Artificial Sequence: Synthetic oligonucleotide
  Antisense strand to SEQ ID NO: 1479086
uacugaccuaaccuaucuc

SEQ ID NO: 1479088 - RNA, 19 nt, Artificial Sequence
  Description of Artificial Sequence: Synthetic oligonucleotide
  Sense strand starting at position 3652 of SEQ ID NO: 1244312
uagguuaggucaguaguga

SEQ ID NO: 1479089 - RNA, 19 nt, Artificial Sequence
  Description of Artificial Sequence: Synthetic oligonucleotide
  Antisense strand to SEQ ID NO: 1479088
ucacuacugaccuaaccua

SEQ ID NO: 1479090 - RNA, 19 nt, Artificial Sequence
  Description of Artificial Sequence: Synthetic oligonucleotide
  Sense strand starting at position 3653 of SEQ ID NO: 1244312
agguuaggucaguagugaa

SEQ ID NO: 1479091 - RNA, 19 nt, Artificial Sequence
  Description of Artificial Sequence: Synthetic oligonucleotide
  Antisense strand to SEQ ID NO: 1479090
uucacuacugaccuaaccu

SEQ ID NO: 1479092 - RNA, 19 nt, Artificial Sequence
  Description of Artificial Sequence: Synthetic oligonucleotide
  Sense strand starting at position 3701 of SEQ ID NO: 1244312
ucagcuagauuugaugauu

SEQ ID NO: 1479093 - RNA, 19 nt, Artificial Sequence
  Description of Artificial Sequence: Synthetic oligonucleotide
  Antisense strand to SEQ ID NO: 1479092
aaucaucaaaucuagcuga

SEQ ID NO: 1479094 - RNA, 19 nt, Artificial Sequence
  Description of Artificial Sequence: Synthetic oligonucleotide
  Sense strand starting at position 3771 of SEQ ID NO: 1244312
cugcauaagggaugcauua

SEQ ID NO: 1479095 - RNA, 19 nt, Artificial Sequence
  Description of Artificial Sequence: Synthetic oligonucleotide
  Antisense strand to SEQ ID NO: 1479094
uaaugcaucccuuaugcag

SEQ ID NO: 1479096 - RNA, 19 nt, Artificial Sequence
  Description of Artificial Sequence: Synthetic oligonucleotide
  Sense strand starting at position 3843 of SEQ ID NO: 1244312
uaugcaauagguugugaga

SEQ ID NO: 1479097 - RNA, 19 nt, Artificial Sequence
  Description of Artificial Sequence: Synthetic oligonucleotide
  Antisense strand to SEQ ID NO: 1479096
ucucacaaccuauugcaua

SEQ ID NO: 1479098 - RNA, 19 nt, Artificial Sequence
  Description of Artificial Sequence: Synthetic oligonucleotide
  Sense strand starting at position 3962 of SEQ ID NO: 1244312
cauugcuggucugugaaca

SEQ ID NO: 1479099 - RNA, 19 nt, Artificial Sequence
  Description of Artificial Sequence: Synthetic oligonucleotide
  Antisense strand to SEQ ID NO: 1479098
uguucacagaccagcaaug

SEQ ID NO: 1479100 - RNA, 19 nt, Artificial Sequence
  Description of Artificial Sequence: Synthetic oligonucleotide
  Sense strand starting at position 12 of SEQ ID NO: 1244313
ucuucucagcaguaaauga

SEQ ID NO: 1479101 - RNA, 19 nt, Artificial Sequence
  Description of Artificial Sequence: Synthetic oligonucleotide
  Antisense strand to SEQ ID NO: 1479100
ucauuuacugcugagaaga

SEQ ID NO: 1479102 - RNA, 19 nt, Artificial Sequence
  Description of Artificial Sequence: Synthetic oligonucleotide
  Sense strand starting at position 34 of SEQ ID NO: 1244313
acacauauuccaggcagau

SEQ ID NO: 1479103 - RNA, 19 nt, Artificial Sequence
  Description of Artificial Sequence: Synthetic oligonucleotide
  Antisense strand to SEQ ID NO: 1479102
aucugccuggaauaugugu

SEQ ID NO: 1479104 - RNA, 19 nt, Artificial Sequence
  Description of Artificial Sequence: Synthetic oligonucleotide
  Sense strand starting at position 52 of SEQ ID NO: 1244313
ucacaaaggagucaguguu

SEQ ID NO: 1479105 - RNA, 19 nt, Artificial Sequence
  Description of Artificial Sequence: Synthetic oligonucleotide
  Antisense strand to SEQ ID NO: 1479104
aacacugacuccuuuguga

SEQ ID NO: 1479106 - RNA, 19 nt, Artificial Sequence
  Description of Artificial Sequence: Synthetic oligonucleotide
  Sense strand starting at position 62 of SEQ ID NO: 1244313
gucaguguucaacaggaga

SEQ ID NO: 1479107 - RNA, 19 nt, Artificial Sequence
  Description of Artificial Sequence: Synthetic oligonucleotide
  Antisense strand to SEQ ID NO: 1479106
ucuccuguugaacacugac

SEQ ID NO: 1479108 - RNA, 19 nt, Artificial Sequence
  Description of Artificial Sequence: Synthetic oligonucleotide
  Sense strand starting at position 263 of SEQ ID NO: 1244313
agaagauggccugaagcuu

SEQ ID NO: 1479109 - RNA, 19 nt, Artificial Sequence
  Description of Artificial Sequence: Synthetic oligonucleotide
  Antisense strand to SEQ ID NO: 1479108
aagcuucaggccaucuucu

SEQ ID NO: 1479110 - RNA, 19 nt, Artificial Sequence
  Description of Artificial Sequence: Synthetic oligonucleotide
  Sense strand starting at position 284 of SEQ ID NO: 1244313
cagcgucuugcugucugau

SEQ ID NO: 1479111 - RNA, 19 nt, Artificial Sequence
  Description of Artificial Sequence: Synthetic oligonucleotide
  Antisense strand to SEQ ID NO: 1479110
aucagacagcaagacgcug

SEQ ID NO: 1479112 - RNA, 19 nt, Artificial Sequence
  Description of Artificial Sequence: Synthetic oligonucleotide
  Sense strand starting at position 285 of SEQ ID NO: 1244313
agcgucuugcugucugauu

SEQ ID NO: 1479113 - RNA, 19 nt, Artificial Sequence
  Description of Artificial Sequence: Synthetic oligonucleotide
  Antisense strand to SEQ ID NO: 1479112
aaucagacagcaagacgcu

SEQ ID NO: 1479114 - RNA, 19 nt, Artificial Sequence
  Description of Artificial Sequence: Synthetic oligonucleotide
  Sense strand starting at position 319 of SEQ ID NO: 1244313
acacauaccuggguacuua

SEQ ID NO: 1479115 - RNA, 19 nt, Artificial Sequence
  Description of Artificial Sequence: Synthetic oligonucleotide
  Antisense strand to SEQ ID NO: 1479114
uaaguacccagguaugugu

SEQ ID NO: 1479116 - RNA, 19 nt, Artificial Sequence
  Description of Artificial Sequence: Synthetic oligonucleotide
  Sense strand starting at position 327 of SEQ ID NO: 1244313
cuggguacuuaucucuaaa

SEQ ID NO: 1479117 - RNA, 19 nt, Artificial Sequence
  Description of Artificial Sequence: Synthetic oligonucleotide
  Antisense strand to SEQ ID NO: 1479116
uuuagagauaaguacccag

SEQ ID NO: 1479118 - RNA, 19 nt, Artificial Sequence
  Description of Artificial Sequence: Synthetic oligonucleotide
  Sense strand starting at position 452 of SEQ ID NO: 1244313
cuggcaucgcuccaaagaa

SEQ ID NO: 1479119 - RNA, 19 nt, Artificial Sequence
  Description of Artificial Sequence: Synthetic oligonucleotide
  Antisense strand to SEQ ID NO: 1479118
uucuuuggagcgaugccag

SEQ ID NO: 1479120 - RNA, 19 nt, Artificial Sequence
  Description of Artificial Sequence: Synthetic oligonucleotide
  Sense strand starting at position 601 of SEQ ID NO: 1244313
aucucaguucuauaaugug

SEQ ID NO: 1479121 - RNA, 19 nt, Artificial Sequence
  Description of Artificial Sequence: Synthetic oligonucleotide
  Antisense strand to SEQ ID NO: 1479120
cacauuauagaacugagau

SEQ ID NO: 1479122 - RNA, 19 nt, Artificial Sequence
  Description of Artificial Sequence: Synthetic oligonucleotide
  Sense strand starting at position 617 of SEQ ID NO: 1244313
gugguccugaucuaggauu

SEQ ID NO: 1479123 - RNA, 19 nt, Artificial Sequence
  Description of Artificial Sequence: Synthetic oligonucleotide
  Antisense strand to SEQ ID NO: 1479122
aauccuagaucaggaccac

SEQ ID NO: 1479124 - RNA, 19 nt, Artificial Sequence
  Description of Artificial Sequence: Synthetic oligonucleotide
  Sense strand starting at position 619 of SEQ ID NO: 1244313
gguccugaucuaggauucu

SEQ ID NO: 1479125 - RNA, 19 nt, Artificial Sequence
  Description of Artificial Sequence: Synthetic oligonucleotide
  Antisense strand to SEQ ID NO: 1479124
agaauccuagaucaggacc

SEQ ID NO: 1479126 - RNA, 19 nt, Artificial Sequence
  Description of Artificial Sequence: Synthetic oligonucleotide
  Sense strand starting at position 669 of SEQ ID NO: 1244313
ggcaucaggcaagauauau

SEQ ID NO: 1479127 - RNA, 19 nt, Artificial Sequence
  Description of Artificial Sequence: Synthetic oligonucleotide
  Antisense strand to SEQ ID NO: 1479126
auauaucuugccugaugcc

SEQ ID NO: 1479128 - RNA, 19 nt, Artificial Sequence
  Description of Artificial Sequence: Synthetic oligonucleotide
  Sense strand starting at position 861 of SEQ ID NO: 1244313
gaaagaccauguuucuagu

SEQ ID NO: 1479129 - RNA, 19 nt, Artificial Sequence
  Description of Artificial Sequence: Synthetic oligonucleotide
  Antisense strand to SEQ ID NO: 1479128
acuagaaacauggucuuuc

SEQ ID NO: 1479130 - RNA, 19 nt, Artificial Sequence
  Description of Artificial Sequence: Synthetic oligonucleotide
  Sense strand starting at position 1188 of SEQ ID NO: 1244313
gggaaacguacguacaagu

SEQ ID NO: 1479131 - RNA, 19 nt, Artificial Sequence
  Description of Artificial Sequence: Synthetic oligonucleotide
  Antisense strand to SEQ ID NO: 1479130
acuuguacguacguuuccc

SEQ ID NO: 1479132 - RNA, 19 nt, Artificial Sequence
  Description of Artificial Sequence: Synthetic oligonucleotide
  Sense strand starting at position 1251 of SEQ ID NO: 1244313
cacgauggguuuccaagau

SEQ ID NO: 1479133 - RNA, 19 nt, Artificial Sequence
  Description of Artificial Sequence: Synthetic oligonucleotide
  Antisense strand to SEQ ID NO: 1479132
aucuuggaaacccaucgug

SEQ ID NO: 1479134 - RNA, 19 nt, Artificial Sequence
  Description of Artificial Sequence: Synthetic oligonucleotide
  Sense strand starting at position 1257 of SEQ ID NO: 1244313
ggguuuccaagaugggaau

SEQ ID NO: 1479135 - RNA, 19 nt, Artificial Sequence
  Description of Artificial Sequence: Synthetic oligonucleotide
  Antisense strand to SEQ ID NO: 1479134
auucccaucuuggaaaccc

SEQ ID NO: 1479136 - RNA, 19 nt, Artificial Sequence
  Description of Artificial Sequence: Synthetic oligonucleotide
  Sense strand starting at position 1268 of SEQ ID NO: 1244313
augggaauguuauauuuga

SEQ ID NO: 1479137 - RNA, 19 nt, Artificial Sequence
  Description of Artificial Sequence: Synthetic oligonucleotide
  Antisense strand to SEQ ID NO: 1479136
ucaaauauaacauucccau

SEQ ID NO: 1479138 - RNA, 19 nt, Artificial Sequence
  Description of Artificial Sequence: Synthetic oligonucleotide
  Sense strand starting at position 1429 of SEQ ID NO: 1244313
ugaggugugaccugagaac

SEQ ID NO: 1479139 - RNA, 19 nt, Artificial Sequence
  Description of Artificial Sequence: Synthetic oligonucleotide
  Antisense strand to SEQ ID NO: 1479138
guucucaggucacaccuca

SEQ ID NO: 1479140 - RNA, 19 nt, Artificial Sequence
  Description of Artificial Sequence: Synthetic oligonucleotide
  Sense strand starting at position 2205 of SEQ ID NO: 1244313
gaggccugguuuccagaaa

SEQ ID NO: 1479141 - RNA, 19 nt, Artificial Sequence
  Description of Artificial Sequence: Synthetic oligonucleotide
  Antisense strand to SEQ ID NO: 1479140
uuucuggaaaccaggccuc

SEQ ID NO: 1479142 - RNA, 19 nt, Artificial Sequence
  Description of Artificial Sequence: Synthetic oligonucleotide
  Sense strand starting at position 2229 of SEQ ID NO: 1244313
acuauuuccggacgauguu

SEQ ID NO: 1479143 - RNA, 19 nt, Artificial Sequence
  Description of Artificial Sequence: Synthetic oligonucleotide
  Antisense strand to SEQ ID NO: 1479142
aacaucguccggaaauagu

SEQ ID NO: 1479144 - RNA, 19 nt, Artificial Sequence
  Description of Artificial Sequence: Synthetic oligonucleotide
  Sense strand starting at position 2243 of SEQ ID NO: 1244313
auguuuguagaagggagau

SEQ ID NO: 1479145 - RNA, 19 nt, Artificial Sequence
  Description of Artificial Sequence: Synthetic oligonucleotide
  Antisense strand to SEQ ID NO: 1479144
aucucccuucuacaaacau

SEQ ID NO: 1479146 - RNA, 19 nt, Artificial Sequence
  Description of Artificial Sequence: Synthetic oligonucleotide
  Sense strand starting at position 2418 of SEQ ID NO: 1244313
uucgguuaccuuggagaca

SEQ ID NO: 1479147 - RNA, 19 nt, Artificial Sequence
  Description of Artificial Sequence: Synthetic oligonucleotide
  Antisense strand to SEQ ID NO: 1479146
ugucuccaagguaaccgaa

SEQ ID NO: 1479148 - RNA, 19 nt, Artificial Sequence
  Description of Artificial Sequence: Synthetic oligonucleotide
  Sense strand starting at position 2561 of SEQ ID NO: 1244313
ccuguagaaucccuggaau

SEQ ID NO: 1479149 - RNA, 19 nt, Artificial Sequence
  Description of Artificial Sequence: Synthetic oligonucleotide
  Antisense strand to SEQ ID NO: 1479148
auuccagggauucuacagg

SEQ ID NO: 1479150 - RNA, 19 nt, Artificial Sequence
  Description of Artificial Sequence: Synthetic oligonucleotide
  Sense strand starting at position 2563 of SEQ ID NO: 1244313
uguagaaucccuggaauga

SEQ ID NO: 1479151 - RNA, 19 nt, Artificial Sequence
  Description of Artificial Sequence: Synthetic oligonucleotide
  Antisense strand to SEQ ID NO: 1479150
ucauuccagggauucuaca

SEQ ID NO: 1479152 - RNA, 19 nt, Artificial Sequence
  Description of Artificial Sequence: Synthetic oligonucleotide
  Sense strand starting at position 2652 of SEQ ID NO: 1244313
gguugaaacccagguacaa

SEQ ID NO: 1479153 - RNA, 19 nt, Artificial Sequence
  Description of Artificial Sequence: Synthetic oligonucleotide
  Antisense strand to SEQ ID NO: 1479152
uuguaccuggguuucaacc

SEQ ID NO: 1479154 - RNA, 19 nt, Artificial Sequence
  Description of Artificial Sequence: Synthetic oligonucleotide
  Sense strand starting at position 2755 of SEQ ID NO: 1244313
ggaugagagcuugauguau

SEQ ID NO: 1479155 - RNA, 19 nt, Artificial Sequence
  Description of Artificial Sequence: Synthetic oligonucleotide
  Antisense strand to SEQ ID NO: 1479154
auacaucaagcucucaucc

SEQ ID NO: 1479156 - RNA, 19 nt, Artificial Sequence
  Description of Artificial Sequence: Synthetic oligonucleotide
  Sense strand starting at position 2763 of SEQ ID NO: 1244313
gcuugauguaugcaaagaa

SEQ ID NO: 1479157 - RNA, 19 nt, Artificial Sequence
  Description of Artificial Sequence: Synthetic oligonucleotide
  Antisense strand to SEQ ID NO: 1479156
uucuuugcauacaucaagc

SEQ ID NO: 1479158 - RNA, 19 nt, Artificial Sequence
  Description of Artificial Sequence: Synthetic oligonucleotide
  Sense strand starting at position 2795 of SEQ ID NO: 1244313
cagaauaugcauugaagug

SEQ ID NO: 1479159 - RNA, 19 nt, Artificial Sequence
  Description of Artificial Sequence: Synthetic oligonucleotide
  Antisense strand to SEQ ID NO: 1479158
cacuucaaugcauauucug

SEQ ID NO: 1479160 - RNA, 19 nt, Artificial Sequence
  Description of Artificial Sequence: Synthetic oligonucleotide
  Sense strand starting at position 2796 of SEQ ID NO: 1244313
agaauaugcauugaagugu

SEQ ID NO: 1479161 - RNA, 19 nt, Artificial Sequence
  Description of Artificial Sequence: Synthetic oligonucleotide
  Antisense strand to SEQ ID NO: 1479160
acacuucaaugcauauucu

SEQ ID NO: 1479162 - RNA, 19 nt, Artificial Sequence
  Description of Artificial Sequence: Synthetic oligonucleotide
  Sense strand starting at position 3028 of SEQ ID NO: 1244313
ggagaacauccugggcaau

SEQ ID NO: 1479163 - RNA, 19 nt, Artificial Sequence
  Description of Artificial Sequence: Synthetic oligonucleotide
  Antisense strand to SEQ ID NO: 1479162
auugcccaggauguucucc

SEQ ID NO: 1479164 - RNA, 19 nt, Artificial Sequence
  Description of Artificial Sequence: Synthetic oligonucleotide
  Sense strand starting at position 3095 of SEQ ID NO: 1244313
gguaguuugcacuugcagu

SEQ ID NO: 1479165 - RNA, 19 nt, Artificial Sequence
  Description of Artificial Sequence: Synthetic oligonucleotide
  Antisense strand to SEQ ID NO: 1479164
acugcaagugcaaacuacc

SEQ ID NO: 1479166 - RNA, 19 nt, Artificial Sequence
  Description of Artificial Sequence: Synthetic oligonucleotide
  Sense strand starting at position 3278 of SEQ ID NO: 1244313
ccaugaaggguccauggua

SEQ ID NO: 1479167 - RNA, 19 nt, Artificial Sequence
  Description of Artificial Sequence: Synthetic oligonucleotide
  Antisense strand to SEQ ID NO: 1479166
uaccauggacccuucaugg

SEQ ID NO: 1479168 - RNA, 19 nt, Artificial Sequence
  Description of Artificial Sequence: Synthetic oligonucleotide
  Sense strand starting at position 3337 of SEQ ID NO: 1244313
acccaaggcugucuugaaa

SEQ ID NO: 1479169 - RNA, 19 nt, Artificial Sequence
  Description of Artificial Sequence: Synthetic oligonucleotide
  Antisense strand to SEQ ID NO: 1479168
uuucaagacagccuugggu

SEQ ID NO: 1479170 - RNA, 19 nt, Artificial Sequence
  Description of Artificial Sequence: Synthetic oligonucleotide
  Sense strand starting at position 3377 of SEQ ID NO: 1244313
ggaaguguuugagcaaaga

SEQ ID NO: 1479171 - RNA, 19 nt, Artificial Sequence
  Description of Artificial Sequence: Synthetic oligonucleotide
  Antisense strand to SEQ ID NO: 1479170
ucuuugcucaaacacuucc

SEQ ID NO: 1479172 - RNA, 19 nt, Artificial Sequence
  Description of Artificial Sequence: Synthetic oligonucleotide
  Sense strand starting at position 3396 of SEQ ID NO: 1244313
ccaccaucugcuugagacu

SEQ ID NO: 1479173 - RNA, 19 nt, Artificial Sequence
  Description of Artificial Sequence: Synthetic oligonucleotide
  Antisense strand to SEQ ID NO: 1479172
agucucaagcagauggugg

SEQ ID NO: 1479174 - RNA, 19 nt, Artificial Sequence
  Description of Artificial Sequence: Synthetic oligonucleotide
  Sense strand starting at position 3408 of SEQ ID NO: 1244313
ugagacuacuuugcagaca

SEQ ID NO: 1479175 - RNA, 19 nt, Artificial Sequence
  Description of Artificial Sequence: Synthetic oligonucleotide
  Antisense strand to SEQ ID NO: 1479174
ugucugcaaaguagucuca

SEQ ID NO: 1479176 - RNA, 19 nt, Artificial Sequence
  Description of Artificial Sequence: Synthetic oligonucleotide
  Sense strand starting at position 3449 of SEQ ID NO: 1244313
cuggauaucugugccaaac

SEQ ID NO: 1479177 - RNA, 19 nt, Artificial Sequence
  Description of Artificial Sequence: Synthetic oligonucleotide
  Antisense strand to SEQ ID NO: 1479176
guuuggcacagauauccag

SEQ ID NO: 1479178 - RNA, 19 nt, Artificial Sequence
  Description of Artificial Sequence: Synthetic oligonucleotide
  Sense strand starting at position 3711 of SEQ ID NO: 1244313
cguagaguccgugcuuuag

SEQ ID NO: 1479179 - RNA, 19 nt, Artificial Sequence
  Description of Artificial Sequence: Synthetic oligonucleotide
  Antisense strand to SEQ ID NO: 1479178
cuaaagcacggacucuacg

SEQ ID NO: 1479180 - RNA, 19 nt, Artificial Sequence
  Description of Artificial Sequence: Synthetic oligonucleotide
  Sense strand starting at position 11 of SEQ ID NO: 1244314
gggcacucuaacuggugua

SEQ ID NO: 1479181 - RNA, 19 nt, Artificial Sequence
  Description of Artificial Sequence: Synthetic oligonucleotide
  Antisense strand to SEQ ID NO: 1479180
uacaccaguuagagugccc

SEQ ID NO: 1479182 - RNA, 19 nt, Artificial Sequence
  Description of Artificial Sequence: Synthetic oligonucleotide
  Sense strand starting at position 23 of SEQ ID NO: 1244314
ugguguagcagucaacaaa

SEQ ID NO: 1479183 - RNA, 19 nt, Artificial Sequence
  Description of Artificial Sequence: Synthetic oligonucleotide
  Antisense strand to SEQ ID NO: 1479182
uuuguugacugcuacacca

SEQ ID NO: 1479184 - RNA, 19 nt, Artificial Sequence
  Description of Artificial Sequence: Synthetic oligonucleotide
  Sense strand starting at position 45 of SEQ ID NO: 1244314
ggaaguggauggucuacau

SEQ ID NO: 1479185 - RNA, 19 nt, Artificial Sequence
  Description of Artificial Sequence: Synthetic oligonucleotide
  Antisense strand to SEQ ID NO: 1479184
auguagaccauccacuucc

SEQ ID NO: 1479186 - RNA, 19 nt, Artificial Sequence
  Description of Artificial Sequence: Synthetic oligonucleotide
  Sense strand starting at position 224 of SEQ ID NO: 1244314
acaagaauucugugucuca

SEQ ID NO: 1479187 - RNA, 19 nt, Artificial Sequence
  Description of Artificial Sequence: Synthetic oligonucleotide
  Antisense strand to SEQ ID NO: 1479186
ugagacacagaauucuugu

SEQ ID NO: 1479188 - RNA, 19 nt, Artificial Sequence
  Description of Artificial Sequence: Synthetic oligonucleotide
  Sense strand starting at position 227 of SEQ ID NO: 1244314
agaauucugugucucaucu

SEQ ID NO: 1479189 - RNA, 19 nt, Artificial Sequence
  Description of Artificial Sequence: Synthetic oligonucleotide
  Antisense strand to SEQ ID NO: 1479188
agaugagacacagaauucu

SEQ ID NO: 1479190 - RNA, 19 nt, Artificial Sequence
  Description of Artificial Sequence: Synthetic oligonucleotide
  Sense strand starting at position 231 of SEQ ID NO: 1244314
uucugugucucaucuauaa

SEQ ID NO: 1479191 - RNA, 19 nt, Artificial Sequence
  Description of Artificial Sequence: Synthetic oligonucleotide
  Antisense strand to SEQ ID NO: 1479190
uuauagaugagacacagaa

SEQ ID NO: 1479192 - RNA, 19 nt, Artificial Sequence
  Description of Artificial Sequence: Synthetic oligonucleotide
  Sense strand starting at position 327 of SEQ ID NO: 1244314
agcagaccuucccucagaa

SEQ ID NO: 1479193 - RNA, 19 nt, Artificial Sequence
  Description of Artificial Sequence: Synthetic oligonucleotide
  Antisense strand to SEQ ID NO: 1479192
uucugagggaaggucugcu

SEQ ID NO: 1479194 - RNA, 19 nt, Artificial Sequence
  Description of Artificial Sequence: Synthetic oligonucleotide
  Sense strand starting at position 410 of SEQ ID NO: 1244314
ucucauacuguaugaggga

SEQ ID NO: 1479195 - RNA, 19 nt, Artificial Sequence
  Description of Artificial Sequence: Synthetic oligonucleotide
  Antisense strand to SEQ ID NO: 1479194
ucccucauacaguaugaga

SEQ ID NO: 1479196 - RNA, 19 nt, Artificial Sequence
  Description of Artificial Sequence: Synthetic oligonucleotide
  Sense strand starting at position 498 of SEQ ID NO: 1244314
gcgaauuugacauagcgua

SEQ ID NO: 1479197 - RNA, 19 nt, Artificial Sequence
  Description of Artificial Sequence: Synthetic oligonucleotide
  Antisense strand to SEQ ID NO: 1479196
uacgcuaugucaaauucgc

SEQ ID NO: 1479198 - RNA, 19 nt, Artificial Sequence
  Description of Artificial Sequence: Synthetic oligonucleotide
  Sense strand starting at position 505 of SEQ ID NO: 1244314
ugacauagcguacaguuaa

SEQ ID NO: 1479199 - RNA, 19 nt, Artificial Sequence
  Description of Artificial Sequence: Synthetic oligonucleotide
  Antisense strand to SEQ ID NO: 1479198
uuaacuguacgcuauguca

SEQ ID NO: 1479200 - RNA, 19 nt, Artificial Sequence
  Description of Artificial Sequence: Synthetic oligonucleotide
  Sense strand starting at position 536 of SEQ ID NO: 1244314
aggacuugaccuugcuaua

SEQ ID NO: 1479201 - RNA, 19 nt, Artificial Sequence
  Description of Artificial Sequence: Synthetic oligonucleotide
  Antisense strand to SEQ ID NO: 1479200
uauagcaaggucaaguccu

SEQ ID NO: 1479202 - RNA, 19 nt, Artificial Sequence
  Description of Artificial Sequence: Synthetic oligonucleotide
  Sense strand starting at position 625 of SEQ ID NO: 1244314
cgauccucucacugaaguu

SEQ ID NO: 1479203 - RNA, 19 nt, Artificial Sequence
  Description of Artificial Sequence: Synthetic oligonucleotide
  Antisense strand to SEQ ID NO: 1479202
aacuucagugagaggaucg

SEQ ID NO: 1479204 - RNA, 19 nt, Artificial Sequence
  Description of Artificial Sequence: Synthetic oligonucleotide
  Sense strand starting at position 690 of SEQ ID NO: 1244314
uugugacaacaguaucaca

SEQ ID NO: 1479205 - RNA, 19 nt, Artificial Sequence
  Description of Artificial Sequence: Synthetic oligonucleotide
  Antisense strand to SEQ ID NO: 1479204
ugugauacuguugucacaa

SEQ ID NO: 1479206 - RNA, 19 nt, Artificial Sequence
  Description of Artificial Sequence: Synthetic oligonucleotide
  Sense strand starting at position 726 of SEQ ID NO: 1244314
agaaguaaagaacguuuaa

SEQ ID NO: 1479207 - RNA, 19 nt, Artificial Sequence
  Description of Artificial Sequence: Synthetic oligonucleotide
  Antisense strand to SEQ ID NO: 1479206
uuaaacguucuuuacuucu

SEQ ID NO: 1479208 - RNA, 19 nt, Artificial Sequence
  Description of Artificial Sequence: Synthetic oligonucleotide
  Sense strand starting at position 747 of SEQ ID NO: 1244314
uguuauuucuuagucuagu

SEQ ID NO: 1479209 - RNA, 19 nt, Artificial Sequence
  Description of Artificial Sequence: Synthetic oligonucleotide
  Antisense strand to SEQ ID NO: 1479208
acuagacuaagaaauaaca

SEQ ID NO: 1479210 - RNA, 19 nt, Artificial Sequence
  Description of Artificial Sequence: Synthetic oligonucleotide
  Sense strand starting at position 748 of SEQ ID NO: 1244314
guuauuucuuagucuaguc

SEQ ID NO: 1479211 - RNA, 19 nt, Artificial Sequence
  Description of Artificial Sequence: Synthetic oligonucleotide
  Antisense strand to SEQ ID NO: 1479210
gacuagacuaagaaauaac

SEQ ID NO: 1479212 - RNA, 19 nt, Artificial Sequence
  Description of Artificial Sequence: Synthetic oligonucleotide
  Sense strand starting at position 753 of SEQ ID NO: 1244314
uucuuagucuaguccagua

SEQ ID NO: 1479213 - RNA, 19 nt, Artificial Sequence
  Description of Artificial Sequence: Synthetic oligonucleotide
  Antisense strand to SEQ ID NO: 1479212
uacuggacuagacuaagaa

SEQ ID NO: 1479214 - RNA, 19 nt, Artificial Sequence
  Description of Artificial Sequence: Synthetic oligonucleotide
  Sense strand starting at position 758 of SEQ ID NO: 1244314
agucuaguccaguagucau

SEQ ID NO: 1479215 - RNA, 19 nt, Artificial Sequence
  Description of Artificial Sequence: Synthetic oligonucleotide
  Antisense strand to SEQ ID NO: 1479214
augacuacuggacuagacu

SEQ ID NO: 1479216 - RNA, 19 nt, Artificial Sequence
  Description of Artificial Sequence: Synthetic oligonucleotide
  Sense strand starting at position 1023 of SEQ ID NO: 1244314
ugugaauucuaacuggcag

SEQ ID NO: 1479217 - RNA, 19 nt, Artificial Sequence
  Description of Artificial Sequence: Synthetic oligonucleotide
  Antisense strand to SEQ ID NO: 1479216
cugccaguuagaauucaca

SEQ ID NO: 1479218 - RNA, 19 nt, Artificial Sequence
  Description of Artificial Sequence: Synthetic oligonucleotide
  Sense strand starting at position 1104 of SEQ ID NO: 1244314
ugaucacagcuccaguuua

SEQ ID NO: 1479219 - RNA, 19 nt, Artificial Sequence
  Description of Artificial Sequence: Synthetic oligonucleotide
  Antisense strand to SEQ ID NO: 1479218
uaaacuggagcugugauca

SEQ ID NO: 1479220 - RNA, 19 nt, Artificial Sequence
  Description of Artificial Sequence: Synthetic oligonucleotide
  Sense strand starting at position 2337 of SEQ ID NO: 1244314
gcuguuagccaaucacgua

SEQ ID NO: 1479221 - RNA, 19 nt, Artificial Sequence
  Description of Artificial Sequence: Synthetic oligonucleotide
  Antisense strand to SEQ ID NO: 1479220
uacgugauuggcuaacagc

SEQ ID NO: 1479222 - RNA, 19 nt, Artificial Sequence
  Description of Artificial Sequence: Synthetic oligonucleotide
  Sense strand starting at position 2423 of SEQ ID NO: 1244314
ggagguguugguuguucca

SEQ ID NO: 1479223 - RNA, 19 nt, Artificial Sequence
  Description of Artificial Sequence: Synthetic oligonucleotide
  Antisense strand to SEQ ID NO: 1479222
uggaacaaccaacaccucc

SEQ ID NO: 1479224 - RNA, 19 nt, Artificial Sequence
  Description of Artificial Sequence: Synthetic oligonucleotide
  Sense strand starting at position 2882 of SEQ ID NO: 1244314
gcaugugggucccuggaaa

SEQ ID NO: 1479225 - RNA, 19 nt, Artificial Sequence
  Description of Artificial Sequence: Synthetic oligonucleotide
  Antisense strand to SEQ ID NO: 1479224
uuuccagggacccacaugc

SEQ ID NO: 1479226 - RNA, 19 nt, Artificial Sequence
  Description of Artificial Sequence: Synthetic oligonucleotide
  Sense strand starting at position 3040 of SEQ ID NO: 1244314
uagauaggcguuugacaaa

SEQ ID NO: 1479227 - RNA, 19 nt, Artificial Sequence
  Description of Artificial Sequence: Synthetic oligonucleotide
  Antisense strand to SEQ ID NO: 1479226
uuugucaaacgccuaucua

SEQ ID NO: 1479228 - RNA, 19 nt, Artificial Sequence
  Description of Artificial Sequence: Synthetic oligonucleotide
  Sense strand starting at position 3075 of SEQ ID NO: 1244314
uuuguaguaugcuuacauu

SEQ ID NO: 1479229 - RNA, 19 nt, Artificial Sequence
  Description of Artificial Sequence: Synthetic oligonucleotide
  Antisense strand to SEQ ID NO: 1479228
aauguaagcauacuacaaa

SEQ ID NO: 1479230 - RNA, 19 nt, Artificial Sequence
  Description of Artificial Sequence: Synthetic oligonucleotide
  Sense strand starting at position 3134 of SEQ ID NO: 1244314
aauuguacugauugcauga

SEQ ID NO: 1479231 - RNA, 19 nt, Artificial Sequence
  Description of Artificial Sequence: Synthetic oligonucleotide
  Antisense strand to SEQ ID NO: 1479230
ucaugcaaucaguacaauu

SEQ ID NO: 1479232 - RNA, 19 nt, Artificial Sequence
  Description of Artificial Sequence: Synthetic oligonucleotide
  Sense strand starting at position 3139 of SEQ ID NO: 1244314
uacugauugcaugauguuu

SEQ ID NO: 1479233 - RNA, 19 nt, Artificial Sequence
  Description of Artificial Sequence: Synthetic oligonucleotide
  Antisense strand to SEQ ID NO: 1479232
aaacaucaugcaaucagua

SEQ ID NO: 1479234 - RNA, 19 nt, Artificial Sequence
  Description of Artificial Sequence: Synthetic oligonucleotide
  Sense strand starting at position 3246 of SEQ ID NO: 1244314
caauuaaugugggcuccuu

SEQ ID NO: 1479235 - RNA, 19 nt, Artificial Sequence
  Description of Artificial Sequence: Synthetic oligonucleotide
  Antisense strand to SEQ ID NO: 1479234
aaggagcccacauuaauug

SEQ ID NO: 1479236 - RNA, 19 nt, Artificial Sequence
  Description of Artificial Sequence: Synthetic oligonucleotide
  Sense strand starting at position 3274 of SEQ ID NO: 1244314
ucuguuccaguguaauaug

SEQ ID NO: 1479237 - RNA, 19 nt, Artificial Sequence
  Description of Artificial Sequence: Synthetic oligonucleotide
  Antisense strand to SEQ ID NO: 1479236
cauauuacacuggaacaga

SEQ ID NO: 1479238 - RNA, 19 nt, Artificial Sequence
  Description of Artificial Sequence: Synthetic oligonucleotide
  Sense strand starting at position 3289 of SEQ ID NO: 1244314
uaugucaggcuccagaaua

SEQ ID NO: 1479239 - RNA, 19 nt, Artificial Sequence
  Description of Artificial Sequence: Synthetic oligonucleotide
  Antisense strand to SEQ ID NO: 1479238
uauucuggagccugacaua

SEQ ID NO: 1479240 - RNA, 19 nt, Artificial Sequence
  Description of Artificial Sequence: Synthetic oligonucleotide
  Sense strand starting at position 3314 of SEQ ID NO: 1244314
cucagaugucauuguccac

SEQ ID NO: 1479241 - RNA, 19 nt, Artificial Sequence
  Description of Artificial Sequence: Synthetic oligonucleotide
  Antisense strand to SEQ ID NO: 1479240
guggacaaugacaucugag

SEQ ID NO: 1479242 - RNA, 19 nt, Artificial Sequence
  Description of Artificial Sequence: Synthetic oligonucleotide
  Sense strand starting at position 3359 of SEQ ID NO: 1244314
cuuugccuugagugucaaa

SEQ ID NO: 1479243 - RNA, 19 nt, Artificial Sequence
  Description of Artificial Sequence: Synthetic oligonucleotide
  Antisense strand to SEQ ID NO: 1479242
uuugacacucaaggcaaag

SEQ ID NO: 1479244 - RNA, 19 nt, Artificial Sequence
  Description of Artificial Sequence: Synthetic oligonucleotide
  Sense strand starting at position 3369 of SEQ ID NO: 1244314
agugucaaaucccuuaaga

SEQ ID NO: 1479245 - RNA, 19 nt, Artificial Sequence
  Description of Artificial Sequence: Synthetic oligonucleotide
  Antisense strand to SEQ ID NO: 1479244
ucuuaagggauuugacacu

SEQ ID NO: 1479246 - RNA, 19 nt, Artificial Sequence
  Description of Artificial Sequence: Synthetic oligonucleotide
  Sense strand starting at position 3732 of SEQ ID NO: 1244314
uuacacucaucuccguaua

SEQ ID NO: 1479247 - RNA, 19 nt, Artificial Sequence
  Description of Artificial Sequence: Synthetic oligonucleotide
  Antisense strand to SEQ ID NO: 1479246
uauacggagaugaguguaa

SEQ ID NO: 1479248 - RNA, 19 nt, Artificial Sequence
  Description of Artificial Sequence: Synthetic oligonucleotide
  Sense strand starting at position 3734 of SEQ ID NO: 1244314
acacucaucuccguauauu

SEQ ID NO: 1479249 - RNA, 19 nt, Artificial Sequence
  Description of Artificial Sequence: Synthetic oligonucleotide
  Antisense strand to SEQ ID NO: 1479248
aauauacggagaugagugu

SEQ ID NO: 1479250 - RNA, 19 nt, Artificial Sequence
  Description of Artificial Sequence: Synthetic oligonucleotide
  Sense strand starting at position 3839 of SEQ ID NO: 1244314
acuggaguuccuuaacuau

SEQ ID NO: 1479251 - RNA, 19 nt, Artificial Sequence
  Description of Artificial Sequence: Synthetic oligonucleotide
  Antisense strand to SEQ ID NO: 1479250
auaguuaaggaacuccagu

SEQ ID NO: 1479252 - RNA, 19 nt, Artificial Sequence
  Description of Artificial Sequence: Synthetic oligonucleotide
  Sense strand starting at position 3842 of SEQ ID NO: 1244314
ggaguuccuuaacuauaau

SEQ ID NO: 1479253 - RNA, 19 nt, Artificial Sequence
  Description of Artificial Sequence: Synthetic oligonucleotide
  Antisense strand to SEQ ID NO: 1479252
auuauaguuaaggaacucc

SEQ ID NO: 1479254 - RNA, 19 nt, Artificial Sequence
  Description of Artificial Sequence: Synthetic oligonucleotide
  Sense strand starting at position 3966 of SEQ ID NO: 1244314
augcuaauacugugggcau

SEQ ID NO: 1479255 - RNA, 19 nt, Artificial Sequence
  Description of Artificial Sequence: Synthetic oligonucleotide
  Antisense strand to SEQ ID NO: 1479254
augcccacaguauuagcau

SEQ ID NO: 1479256 - RNA, 19 nt, Artificial Sequence
  Description of Artificial Sequence: Synthetic oligonucleotide
  Sense strand starting at position 3968 of SEQ ID NO: 1244314
gcuaauacugugggcauuu

SEQ ID NO: 1479257 - RNA, 19 nt, Artificial Sequence
  Description of Artificial Sequence: Synthetic oligonucleotide
  Antisense strand to SEQ ID NO: 1479256
aaaugcccacaguauuagc

SEQ ID NO: 1479258 - RNA, 19 nt, Artificial Sequence
  Description of Artificial Sequence: Synthetic oligonucleotide
  Sense strand starting at position 3981 of SEQ ID NO: 1244314
gcauuuaaaugaugaaagu

SEQ ID NO: 1479259 - RNA, 19 nt, Artificial Sequence
  Description of Artificial Sequence: Synthetic oligonucleotide
  Antisense strand to SEQ ID NO: 1479258
acuuucaucauuuaaaugc

SEQ ID NO: 1479260 - RNA, 19 nt, Artificial Sequence
  Description of Artificial Sequence: Synthetic oligonucleotide
  Sense strand starting at position 13 of SEQ ID NO: 1244315
uuagauucucuacgacuuu

SEQ ID NO: 1479261 - RNA, 19 nt, Artificial Sequence
  Description of Artificial Sequence: Synthetic oligonucleotide
  Antisense strand to SEQ ID NO: 1479260
aaagucguagagaaucuaa

SEQ ID NO: 1479262 - RNA, 19 nt, Artificial Sequence
  Description of Artificial Sequence: Synthetic oligonucleotide
  Sense strand starting at position 31 of SEQ ID NO: 1244315
uuccaugaacuugguuaaa

SEQ ID NO: 1479263 - RNA, 19 nt, Artificial Sequence
  Description of Artificial Sequence: Synthetic oligonucleotide
  Antisense strand to SEQ ID NO: 1479262
uuuaaccaaguucauggaa

SEQ ID NO: 1479264 - RNA, 19 nt, Artificial Sequence
  Description of Artificial Sequence: Synthetic oligonucleotide
  Sense strand starting at position 33 of SEQ ID NO: 1244315
ccaugaacuugguuaaauc

SEQ ID NO: 1479265 - RNA, 19 nt, Artificial Sequence
  Description of Artificial Sequence: Synthetic oligonucleotide
  Antisense strand to SEQ ID NO: 1479264
gauuuaaccaaguucaugg

SEQ ID NO: 1479266 - RNA, 19 nt, Artificial Sequence
  Description of Artificial Sequence: Synthetic oligonucleotide
  Sense strand starting at position 196 of SEQ ID NO: 1244315
uguccacugucuguaggaa

SEQ ID NO: 1479267 - RNA, 19 nt, Artificial Sequence
  Description of Artificial Sequence: Synthetic oligonucleotide
  Antisense strand to SEQ ID NO: 1479266
uuccuacagacaguggaca

SEQ ID NO: 1479268 - RNA, 19 nt, Artificial Sequence
  Description of Artificial Sequence: Synthetic oligonucleotide
  Sense strand starting at position 197 of SEQ ID NO: 1244315
guccacugucuguaggaaa

SEQ ID NO: 1479269 - RNA, 19 nt, Artificial Sequence
  Description of Artificial Sequence: Synthetic oligonucleotide
  Antisense strand to SEQ ID NO: 1479268
uuuccuacagacaguggac

SEQ ID NO: 1479270 - RNA, 19 nt, Artificial Sequence
  Description of Artificial Sequence: Synthetic oligonucleotide
  Sense strand starting at position 208 of SEQ ID NO: 1244315
guaggaaaguguucuguga

SEQ ID NO: 1479271 - RNA, 19 nt, Artificial Sequence
  Description of Artificial Sequence: Synthetic oligonucleotide
  Antisense strand to SEQ ID NO: 1479270
ucacagaacacuuuccuac

SEQ ID NO: 1479272 - RNA, 19 nt, Artificial Sequence
  Description of Artificial Sequence: Synthetic oligonucleotide
  Sense strand starting at position 212 of SEQ ID NO: 1244315
gaaaguguucugugauuga

SEQ ID NO: 1479273 - RNA, 19 nt, Artificial Sequence
  Description of Artificial Sequence: Synthetic oligonucleotide
  Antisense strand to SEQ ID NO: 1479272
ucaaucacagaacacuuuc

SEQ ID NO: 1479274 - RNA, 19 nt, Artificial Sequence
  Description of Artificial Sequence: Synthetic oligonucleotide
  Sense strand starting at position 215 of SEQ ID NO: 1244315
aguguucugugauugauua

SEQ ID NO: 1479275 - RNA, 19 nt, Artificial Sequence
  Description of Artificial Sequence: Synthetic oligonucleotide
  Antisense strand to SEQ ID NO: 1479274
uaaucaaucacagaacacu

SEQ ID NO: 1479276 - RNA, 19 nt, Artificial Sequence
  Description of Artificial Sequence: Synthetic oligonucleotide
  Sense strand starting at position 216 of SEQ ID NO: 1244315
guguucugugauugauuag

SEQ ID NO: 1479277 - RNA, 19 nt, Artificial Sequence
  Description of Artificial Sequence: Synthetic oligonucleotide
  Antisense strand to SEQ ID NO: 1479276
cuaaucaaucacagaacac

SEQ ID NO: 1479278 - RNA, 19 nt, Artificial Sequence
  Description of Artificial Sequence: Synthetic oligonucleotide
  Sense strand starting at position 217 of SEQ ID NO: 1244315
uguucugugauugauuagu

SEQ ID NO: 1479279 - RNA, 19 nt, Artificial Sequence
  Description of Artificial Sequence: Synthetic oligonucleotide
  Antisense strand to SEQ ID NO: 1479278
acuaaucaaucacagaaca

SEQ ID NO: 1479280 - RNA, 19 nt, Artificial Sequence
  Description of Artificial Sequence: Synthetic oligonucleotide
  Sense strand starting at position 219 of SEQ ID NO: 1244315
uucugugauugauuaguga

SEQ ID NO: 1479281 - RNA, 19 nt, Artificial Sequence
  Description of Artificial Sequence: Synthetic oligonucleotide
  Antisense strand to SEQ ID NO: 1479280
ucacuaaucaaucacagaa

SEQ ID NO: 1479282 - RNA, 19 nt, Artificial Sequence
  Description of Artificial Sequence: Synthetic oligonucleotide
  Sense strand starting at position 222 of SEQ ID NO: 1244315
ugugauugauuagugaagu

SEQ ID NO: 1479283 - RNA, 19 nt, Artificial Sequence
  Description of Artificial Sequence: Synthetic oligonucleotide
  Antisense strand to SEQ ID NO: 1479282
acuucacuaaucaaucaca

SEQ ID NO: 1479284 - RNA, 19 nt, Artificial Sequence
  Description of Artificial Sequence: Synthetic oligonucleotide
  Sense strand starting at position 233 of SEQ ID NO: 1244315
agugaagucugcuauggga

SEQ ID NO: 1479285 - RNA, 19 nt, Artificial Sequence
  Description of Artificial Sequence: Synthetic oligonucleotide
  Antisense strand to SEQ ID NO: 1479284
ucccauagcagacuucacu

SEQ ID NO: 1479286 - RNA, 19 nt, Artificial Sequence
  Description of Artificial Sequence: Synthetic oligonucleotide
  Sense strand starting at position 235 of SEQ ID NO: 1244315
ugaagucugcuaugggaau

SEQ ID NO: 1479287 - RNA, 19 nt, Artificial Sequence
  Description of Artificial Sequence: Synthetic oligonucleotide
  Antisense strand to SEQ ID NO: 1479286
auucccauagcagacuuca

SEQ ID NO: 1479288 - RNA, 19 nt, Artificial Sequence
  Description of Artificial Sequence: Synthetic oligonucleotide
  Sense strand starting at position 254 of SEQ ID NO: 1244315
aggaggguguggucauagu

SEQ ID NO: 1479289 - RNA, 19 nt, Artificial Sequence
  Description of Artificial Sequence: Synthetic oligonucleotide
  Antisense strand to SEQ ID NO: 1479288
acuaugaccacacccuccu

SEQ ID NO: 1479290 - RNA, 19 nt, Artificial Sequence
  Description of Artificial Sequence: Synthetic oligonucleotide
  Sense strand starting at position 255 of SEQ ID NO: 1244315
ggaggguguggucauagua

SEQ ID NO: 1479291 - RNA, 19 nt, Artificial Sequence
  Description of Artificial Sequence: Synthetic oligonucleotide
  Antisense strand to SEQ ID NO: 1479290
uacuaugaccacacccucc

SEQ ID NO: 1479292 - RNA, 19 nt, Artificial Sequence
  Description of Artificial Sequence: Synthetic oligonucleotide
  Sense strand starting at position 271 of SEQ ID NO: 1244315
guaggaauguccuacauuu

SEQ ID NO: 1479293 - RNA, 19 nt, Artificial Sequence
  Description of Artificial Sequence: Synthetic oligonucleotide
  Antisense strand to SEQ ID NO: 1479292
aaauguaggacauuccuac

SEQ ID NO: 1479294 - RNA, 19 nt, Artificial Sequence
  Description of Artificial Sequence: Synthetic oligonucleotide
  Sense strand starting at position 330 of SEQ ID NO: 1244315
ucuguacacuucuugagga

SEQ ID NO: 1479295 - RNA, 19 nt, Artificial Sequence
  Description of Artificial Sequence: Synthetic oligonucleotide
  Antisense strand to SEQ ID NO: 1479294
uccucaagaaguguacaga

SEQ ID NO: 1479296 - RNA, 19 nt, Artificial Sequence
  Description of Artificial Sequence: Synthetic oligonucleotide
  Sense strand starting at position 331 of SEQ ID NO: 1244315
cuguacacuucuugaggaa

SEQ ID NO: 1479297 - RNA, 19 nt, Artificial Sequence
  Description of Artificial Sequence: Synthetic oligonucleotide
  Antisense strand to SEQ ID NO: 1479296
uuccucaagaaguguacag

SEQ ID NO: 1479298 - RNA, 19 nt, Artificial Sequence
  Description of Artificial Sequence: Synthetic oligonucleotide
  Sense strand starting at position 351 of SEQ ID NO: 1244315
aacaguugucccuggcaaa

SEQ ID NO: 1479299 - RNA, 19 nt, Artificial Sequence
  Description of Artificial Sequence: Synthetic oligonucleotide
  Antisense strand to SEQ ID NO: 1479298
uuugccagggacaacuguu

SEQ ID NO: 1479300 - RNA, 19 nt, Artificial Sequence
  Description of Artificial Sequence: Synthetic oligonucleotide
  Sense strand starting at position 384 of SEQ ID NO: 1244315
guccuagaacugcgggaau

SEQ ID NO: 1479301 - RNA, 19 nt, Artificial Sequence
  Description of Artificial Sequence: Synthetic oligonucleotide
  Antisense strand to SEQ ID NO: 1479300
auucccgcaguucuaggac

SEQ ID NO: 1479302 - RNA, 19 nt, Artificial Sequence
  Description of Artificial Sequence: Synthetic oligonucleotide
  Sense strand starting at position 439 of SEQ ID NO: 1244315
uccagaacuucggcaacau

SEQ ID NO: 1479303 - RNA, 19 nt, Artificial Sequence
  Description of Artificial Sequence: Synthetic oligonucleotide
  Antisense strand to SEQ ID NO: 1479302
auguugccgaaguucugga

SEQ ID NO: 1479304 - RNA, 19 nt, Artificial Sequence
  Description of Artificial Sequence: Synthetic oligonucleotide
  Sense strand starting at position 758 of SEQ ID NO: 1244315
ucccuucuaggaugcaaau

SEQ ID NO: 1479305 - RNA, 19 nt, Artificial Sequence
  Description of Artificial Sequence: Synthetic oligonucleotide
  Antisense strand to SEQ ID NO: 1479304
auuugcauccuagaaggga

SEQ ID NO: 1479306 - RNA, 19 nt, Artificial Sequence
  Description of Artificial Sequence: Synthetic oligonucleotide
  Sense strand starting at position 884 of SEQ ID NO: 1244315
ccaauaggucaacguuaaa

SEQ ID NO: 1479307 - RNA, 19 nt, Artificial Sequence
  Description of Artificial Sequence: Synthetic oligonucleotide
  Antisense strand to SEQ ID NO: 1479306
uuuaacguugaccuauugg

SEQ ID NO: 1479308 - RNA, 19 nt, Artificial Sequence
  Description of Artificial Sequence: Synthetic oligonucleotide
  Sense strand starting at position 906 of SEQ ID NO: 1244315
aaggaaauauggcuuagua

SEQ ID NO: 1479309 - RNA, 19 nt, Artificial Sequence
  Description of Artificial Sequence: Synthetic oligonucleotide
  Antisense strand to SEQ ID NO: 1479308
uacuaagccauauuuccuu

SEQ ID NO: 1479310 - RNA, 19 nt, Artificial Sequence
  Description of Artificial Sequence: Synthetic oligonucleotide
  Sense strand starting at position 916 of SEQ ID NO: 1244315
ggcuuaguaacuuguugga

SEQ ID NO: 1479311 - RNA, 19 nt, Artificial Sequence
  Description of Artificial Sequence: Synthetic oligonucleotide
  Antisense strand to SEQ ID NO: 1479310
uccaacaaguuacuaagcc

SEQ ID NO: 1479312 - RNA, 19 nt, Artificial Sequence
  Description of Artificial Sequence: Synthetic oligonucleotide
  Sense strand starting at position 920 of SEQ ID NO: 1244315
uaguaacuuguuggagguu

SEQ ID NO: 1479313 - RNA, 19 nt, Artificial Sequence
  Description of Artificial Sequence: Synthetic oligonucleotide
  Antisense strand to SEQ ID NO: 1479312
aaccuccaacaaguuacua

SEQ ID NO: 1479314 - RNA, 19 nt, Artificial Sequence
  Description of Artificial Sequence: Synthetic oligonucleotide
  Sense strand starting at position 1026 of SEQ ID NO: 1244315
gccagugucuggcuccaga

SEQ ID NO: 1479315 - RNA, 19 nt, Artificial Sequence
  Description of Artificial Sequence: Synthetic oligonucleotide
  Antisense strand to SEQ ID NO: 1479314
ucuggagccagacacuggc

SEQ ID NO: 1479316 - RNA, 19 nt, Artificial Sequence
  Description of Artificial Sequence: Synthetic oligonucleotide
  Sense strand starting at position 1559 of SEQ ID NO: 1244315
cauggugucuguguggaga

SEQ ID NO: 1479317 - RNA, 19 nt, Artificial Sequence
  Description of Artificial Sequence: Synthetic oligonucleotide
  Antisense strand to SEQ ID NO: 1479316
ucuccacacagacaccaug

SEQ ID NO: 1479318 - RNA, 19 nt, Artificial Sequence
  Description of Artificial Sequence: Synthetic oligonucleotide
  Sense strand starting at position 1689 of SEQ ID NO: 1244315
ggcugguucguggcagacu

SEQ ID NO: 1479319 - RNA, 19 nt, Artificial Sequence
  Description of Artificial Sequence: Synthetic oligonucleotide
  Antisense strand to SEQ ID NO: 1479318
agucugccacgaaccagcc

SEQ ID NO: 1479320 - RNA, 19 nt, Artificial Sequence
  Description of Artificial Sequence: Synthetic oligonucleotide
  Sense strand starting at position 2352 of SEQ ID NO: 1244315
gacuguuaccuuggcuacu

SEQ ID NO: 1479321 - RNA, 19 nt, Artificial Sequence
  Description of Artificial Sequence: Synthetic oligonucleotide
  Antisense strand to SEQ ID NO: 1479320
aguagccaagguaacaguc

SEQ ID NO: 1479322 - RNA, 19 nt, Artificial Sequence
  Description of Artificial Sequence: Synthetic oligonucleotide
  Sense strand starting at position 2953 of SEQ ID NO: 1244315
agcaauauguaugcauauu

SEQ ID NO: 1479323 - RNA, 19 nt, Artificial Sequence
  Description of Artificial Sequence: Synthetic oligonucleotide
  Antisense strand to SEQ ID NO: 1479322
aauaugcauacauauugcu

SEQ ID NO: 1479324 - RNA, 19 nt, Artificial Sequence
  Description of Artificial Sequence: Synthetic oligonucleotide
  Sense strand starting at position 2961 of SEQ ID NO: 1244315
guaugcauauucguaccua

SEQ ID NO: 1479325 - RNA, 19 nt, Artificial Sequence
  Description of Artificial Sequence: Synthetic oligonucleotide
  Antisense strand to SEQ ID NO: 1479324
uagguacgaauaugcauac

SEQ ID NO: 1479326 - RNA, 19 nt, Artificial Sequence
  Description of Artificial Sequence: Synthetic oligonucleotide
  Sense strand starting at position 3175 of SEQ ID NO: 1244315
gguagagugguuuauggaa

SEQ ID NO: 1479327 - RNA, 19 nt, Artificial Sequence
  Description of Artificial Sequence: Synthetic oligonucleotide
  Antisense strand to SEQ ID NO: 1479326
uuccauaaaccacucuacc

SEQ ID NO: 1479328 - RNA, 19 nt, Artificial Sequence
  Description of Artificial Sequence: Synthetic oligonucleotide
  Sense strand starting at position 3177 of SEQ ID NO: 1244315
uagagugguuuauggaaca

SEQ ID NO: 1479329 - RNA, 19 nt, Artificial Sequence
  Description of Artificial Sequence: Synthetic oligonucleotide
  Antisense strand to SEQ ID NO: 1479328
uguuccauaaaccacucua

SEQ ID NO: 1479330 - RNA, 19 nt, Artificial Sequence
  Description of Artificial Sequence: Synthetic oligonucleotide
  Sense strand starting at position 3237 of SEQ ID NO: 1244315
ugagacaagucucaaguca

SEQ ID NO: 1479331 - RNA, 19 nt, Artificial Sequence
  Description of Artificial Sequence: Synthetic oligonucleotide
  Antisense strand to SEQ ID NO: 1479330
ugacuugagacuugucuca

SEQ ID NO: 1479332 - RNA, 19 nt, Artificial Sequence
  Description of Artificial Sequence: Synthetic oligonucleotide
  Sense strand starting at position 3343 of SEQ ID NO: 1244315
auagucagccuuuauacau

SEQ ID NO: 1479333 - RNA, 19 nt, Artificial Sequence
  Description of Artificial Sequence: Synthetic oligonucleotide
  Antisense strand to SEQ ID NO: 1479332
auguauaaaggcugacuau

SEQ ID NO: 1479334 - RNA, 19 nt, Artificial Sequence
  Description of Artificial Sequence: Synthetic oligonucleotide
  Sense strand starting at position 3392 of SEQ ID NO: 1244315
augcaagauugacauugau

SEQ ID NO: 1479335 - RNA, 19 nt, Artificial Sequence
  Description of Artificial Sequence: Synthetic oligonucleotide
  Antisense strand to SEQ ID NO: 1479334
aucaaugucaaucuugcau

SEQ ID NO: 1479336 - RNA, 19 nt, Artificial Sequence
  Description of Artificial Sequence: Synthetic oligonucleotide
  Sense strand starting at position 3406 of SEQ ID NO: 1244315
uugauuugaugugcuuauu

SEQ ID NO: 1479337 - RNA, 19 nt, Artificial Sequence
  Description of Artificial Sequence: Synthetic oligonucleotide
  Antisense strand to SEQ ID NO: 1479336
aauaagcacaucaaaucaa

SEQ ID NO: 1479338 - RNA, 19 nt, Artificial Sequence
  Description of Artificial Sequence: Synthetic oligonucleotide
  Sense strand starting at position 3535 of SEQ ID NO: 1244315
uuggcaguugguuacaaga

SEQ ID NO: 1479339 - RNA, 19 nt, Artificial Sequence
  Description of Artificial Sequence: Synthetic oligonucleotide
  Antisense strand to SEQ ID NO: 1479338
ucuuguaaccaacugccaa

SEQ ID NO: 1479340 - RNA, 19 nt, Artificial Sequence
  Description of Artificial Sequence: Synthetic oligonucleotide
  Sense strand starting at position 18 of SEQ ID NO: 1244316
ucccuucuaggaugcaaau

SEQ ID NO: 1479341 - RNA, 19 nt, Artificial Sequence
  Description of Artificial Sequence: Synthetic oligonucleotide
  Antisense strand to SEQ ID NO: 1479340
auuugcauccuagaaggga

SEQ ID NO: 1479342 - RNA, 19 nt, Artificial Sequence
  Description of Artificial Sequence: Synthetic oligonucleotide
  Sense strand starting at position 144 of SEQ ID NO: 1244316
ccaauaggucaacguuaaa

SEQ ID NO: 1479343 - RNA, 19 nt, Artificial Sequence
  Description of Artificial Sequence: Synthetic oligonucleotide
  Antisense strand to SEQ ID NO: 1479342
uuuaacguugaccuauugg

SEQ ID NO: 1479344 - RNA, 19 nt, Artificial Sequence
  Description of Artificial Sequence: Synthetic oligonucleotide
  Sense strand starting at position 166 of SEQ ID NO: 1244316
aaggaaauauggcuuagua

SEQ ID NO: 1479345 - RNA, 19 nt, Artificial Sequence
  Description of Artificial Sequence: Synthetic oligonucleotide
  Antisense strand to SEQ ID NO: 1479344
uacuaagccauauuuccuu

SEQ ID NO: 1479346 - RNA, 19 nt, Artificial Sequence
  Description of Artificial Sequence: Synthetic oligonucleotide
  Sense strand starting at position 176 of SEQ ID NO: 1244316
ggcuuaguaacuuguugga

SEQ ID NO: 1479347 - RNA, 19 nt, Artificial Sequence
  Description of Artificial Sequence: Synthetic oligonucleotide
  Antisense strand to SEQ ID NO: 1479346
uccaacaaguuacuaagcc

SEQ ID NO: 1479348 - RNA, 19 nt, Artificial Sequence
  Description of Artificial Sequence: Synthetic oligonucleotide
  Sense strand starting at position 179 of SEQ ID NO: 1244316
uuaguaacuuguuggaggu

SEQ ID NO: 1479349 - RNA, 19 nt, Artificial Sequence
  Description of Artificial Sequence: Synthetic oligonucleotide
  Antisense strand to SEQ ID NO: 1479348
accuccaacaaguuacuaa

SEQ ID NO: 1479350 - RNA, 19 nt, Artificial Sequence
  Description of Artificial Sequence: Synthetic oligonucleotide
  Sense strand starting at position 180 of SEQ ID NO: 1244316
uaguaacuuguuggagguu

SEQ ID NO: 1479351 - RNA, 19 nt, Artificial Sequence
  Description of Artificial Sequence: Synthetic oligonucleotide
  Antisense strand to SEQ ID NO: 1479350
aaccuccaacaaguuacua

SEQ ID NO: 1479352 - RNA, 19 nt, Artificial Sequence
  Description of Artificial Sequence: Synthetic oligonucleotide
  Sense strand starting at position 286 of SEQ ID NO: 1244316
gccagugucuggcuccaga

SEQ ID NO: 1479353 - RNA, 19 nt, Artificial Sequence
  Description of Artificial Sequence: Synthetic oligonucleotide
  Antisense strand to SEQ ID NO: 1479352
ucuggagccagacacuggc

SEQ ID NO: 1479354 - RNA, 19 nt, Artificial Sequence
  Description of Artificial Sequence: Synthetic oligonucleotide
  Sense strand starting at position 335 of SEQ ID NO: 1244316
gcucuccauucuggucuaa

SEQ ID NO: 1479355 - RNA, 19 nt, Artificial Sequence
  Description of Artificial Sequence: Synthetic oligonucleotide
  Antisense strand to SEQ ID NO: 1479354
uuagaccagaauggagagc

SEQ ID NO: 1479356 - RNA, 19 nt, Artificial Sequence
  Description of Artificial Sequence: Synthetic oligonucleotide
  Sense strand starting at position 819 of SEQ ID NO: 1244316
cauggugucuguguggaga

SEQ ID NO: 1479357 - RNA, 19 nt, Artificial Sequence
  Description of Artificial Sequence: Synthetic oligonucleotide
  Antisense strand to SEQ ID NO: 1479356
ucuccacacagacaccaug

SEQ ID NO: 1479358 - RNA, 19 nt, Artificial Sequence
  Description of Artificial Sequence: Synthetic oligonucleotide
  Sense strand starting at position 949 of SEQ ID NO: 1244316
ggcugguucguggcagacu

SEQ ID NO: 1479359 - RNA, 19 nt, Artificial Sequence
  Description of Artificial Sequence: Synthetic oligonucleotide
  Antisense strand to SEQ ID NO: 1479358
agucugccacgaaccagcc

SEQ ID NO: 1479360 - RNA, 19 nt, Artificial Sequence
  Description of Artificial Sequence: Synthetic oligonucleotide
  Sense strand starting at position 950 of SEQ ID NO: 1244316
gcugguucguggcagacua

SEQ ID NO: 1479361 - RNA, 19 nt, Artificial Sequence
  Description of Artificial Sequence: Synthetic oligonucleotide
  Antisense strand to SEQ ID NO: 1479360
uagucugccacgaaccagc

SEQ ID NO: 1479362 - RNA, 19 nt, Artificial Sequence
  Description of Artificial Sequence: Synthetic oligonucleotide
  Sense strand starting at position 1612 of SEQ ID NO: 1244316
gacuguuaccuuggcuacu

SEQ ID NO: 1479363 - RNA, 19 nt, Artificial Sequence
  Description of Artificial Sequence: Synthetic oligonucleotide
  Antisense strand to SEQ ID NO: 1479362
aguagccaagguaacaguc

SEQ ID NO: 1479364 - RNA, 19 nt, Artificial Sequence
  Description of Artificial Sequence: Synthetic oligonucleotide
  Sense strand starting at position 2213 of SEQ ID NO: 1244316
agcaauauguaugcauauu

SEQ ID NO: 1479365 - RNA, 19 nt, Artificial Sequence
  Description of Artificial Sequence: Synthetic oligonucleotide
  Antisense strand to SEQ ID NO: 1479364
aauaugcauacauauugcu

SEQ ID NO: 1479366 - RNA, 19 nt, Artificial Sequence
  Description of Artificial Sequence: Synthetic oligonucleotide
  Sense strand starting at position 2221 of SEQ ID NO: 1244316
guaugcauauucguaccua

SEQ ID NO: 1479367 - RNA, 19 nt, Artificial Sequence
  Description of Artificial Sequence: Synthetic oligonucleotide
  Antisense strand to SEQ ID NO: 1479366
uagguacgaauaugcauac

SEQ ID NO: 1479368 - RNA, 19 nt, Artificial Sequence
  Description of Artificial Sequence: Synthetic oligonucleotide
  Sense strand starting at position 2435 of SEQ ID NO: 1244316
gguagagugguuuauggaa

SEQ ID NO: 1479369 - RNA, 19 nt, Artificial Sequence
  Description of Artificial Sequence: Synthetic oligonucleotide
  Antisense strand to SEQ ID NO: 1479368
uuccauaaaccacucuacc

SEQ ID NO: 1479370 - RNA, 19 nt, Artificial Sequence
  Description of Artificial Sequence: Synthetic oligonucleotide
  Sense strand starting at position 2437 of SEQ ID NO: 1244316
uagagugguuuauggaaca

SEQ ID NO: 1479371 - RNA, 19 nt, Artificial Sequence
  Description of Artificial Sequence: Synthetic oligonucleotide
  Antisense strand to SEQ ID NO: 1479370
uguuccauaaaccacucua

SEQ ID NO: 1479372 - RNA, 19 nt, Artificial Sequence
  Description of Artificial Sequence: Synthetic oligonucleotide
  Sense strand starting at position 2497 of SEQ ID NO: 1244316
ugagacaagucucaaguca

SEQ ID NO: 1479373 - RNA, 19 nt, Artificial Sequence
  Description of Artificial Sequence: Synthetic oligonucleotide
  Antisense strand to SEQ ID NO: 1479372
ugacuugagacuugucuca

SEQ ID NO: 1479374 - RNA, 19 nt, Artificial Sequence
  Description of Artificial Sequence: Synthetic oligonucleotide
  Sense strand starting at position 2603 of SEQ ID NO: 1244316
auagucagccuuuauacau

SEQ ID NO: 1479375 - RNA, 19 nt, Artificial Sequence
  Description of Artificial Sequence: Synthetic oligonucleotide
  Antisense strand to SEQ ID NO: 1479374
auguauaaaggcugacuau

SEQ ID NO: 1479376 - RNA, 19 nt, Artificial Sequence
  Description of Artificial Sequence: Synthetic oligonucleotide
  Sense strand starting at position 2652 of SEQ ID NO: 1244316
augcaagauugacauugau

SEQ ID NO: 1479377 - RNA, 19 nt, Artificial Sequence
  Description of Artificial Sequence: Synthetic oligonucleotide
  Antisense strand to SEQ ID NO: 1479376
aucaaugucaaucuugcau

SEQ ID NO: 1479378 - RNA, 19 nt, Artificial Sequence
  Description of Artificial Sequence: Synthetic oligonucleotide
  Sense strand starting at position 2666 of SEQ ID NO: 1244316
uugauuugaugugcuuauu

SEQ ID NO: 1479379 - RNA, 19 nt, Artificial Sequence
  Description of Artificial Sequence: Synthetic oligonucleotide
  Antisense strand to SEQ ID NO: 1479378
aauaagcacaucaaaucaa

SEQ ID NO: 1479380 - RNA, 19 nt, Artificial Sequence
  Description of Artificial Sequence: Synthetic oligonucleotide
  Sense strand starting at position 2795 of SEQ ID NO: 1244316
uuggcaguugguuacaaga

SEQ ID NO: 1479381 - RNA, 19 nt, Artificial Sequence
  Description of Artificial Sequence: Synthetic oligonucleotide
  Antisense strand to SEQ ID NO: 1479380
ucuuguaaccaacugccaa

SEQ ID NO: 1479382 - RNA, 19 nt, Artificial Sequence
  Description of Artificial Sequence: Synthetic oligonucleotide
  Sense strand starting at position 2797 of SEQ ID NO: 1244316
ggcaguugguuacaagagu

SEQ ID NO: 1479383 - RNA, 19 nt, Artificial Sequence
  Description of Artificial Sequence: Synthetic oligonucleotide
  Antisense strand to SEQ ID NO: 1479382
acucuuguaaccaacugcc

SEQ ID NO: 1479384 - RNA, 19 nt, Artificial Sequence
  Description of Artificial Sequence: Synthetic oligonucleotide
  Sense strand starting at position 3310 of SEQ ID NO: 1244316
gacuuaaggucaguguuga

SEQ ID NO: 1479385 - RNA, 19 nt, Artificial Sequence
  Description of Artificial Sequence: Synthetic oligonucleotide
  Antisense strand to SEQ ID NO: 1479384
ucaacacugaccuuaaguc

SEQ ID NO: 1479386 - RNA, 19 nt, Artificial Sequence
  Description of Artificial Sequence: Synthetic oligonucleotide
  Sense strand starting at position 3311 of SEQ ID NO: 1244316
acuuaaggucaguguugau

SEQ ID NO: 1479387 - RNA, 19 nt, Artificial Sequence
  Description of Artificial Sequence: Synthetic oligonucleotide
  Antisense strand to SEQ ID NO: 1479386
aucaacacugaccuuaagu

SEQ ID NO: 1479388 - RNA, 19 nt, Artificial Sequence
  Description of Artificial Sequence: Synthetic oligonucleotide
  Sense strand starting at position 3320 of SEQ ID NO: 1244316
caguguugauguuaauguu

SEQ ID NO: 1479389 - RNA, 19 nt, Artificial Sequence
  Description of Artificial Sequence: Synthetic oligonucleotide
  Antisense strand to SEQ ID NO: 1479388
aacauuaacaucaacacug

SEQ ID NO: 1479390 - RNA, 19 nt, Artificial Sequence
  Description of Artificial Sequence: Synthetic oligonucleotide
  Sense strand starting at position 3478 of SEQ ID NO: 1244316
guuuauacccauuaacggu

SEQ ID NO: 1479391 - RNA, 19 nt, Artificial Sequence
  Description of Artificial Sequence: Synthetic oligonucleotide
  Antisense strand to SEQ ID NO: 1479390
accguuaauggguauaaac

SEQ ID NO: 1479392 - RNA, 19 nt, Artificial Sequence
  Description of Artificial Sequence: Synthetic oligonucleotide
  Sense strand starting at position 3557 of SEQ ID NO: 1244316
ggacuugcguauuguggau

SEQ ID NO: 1479393 - RNA, 19 nt, Artificial Sequence
  Description of Artificial Sequence: Synthetic oligonucleotide
  Antisense strand to SEQ ID NO: 1479392
auccacaauacgcaagucc

SEQ ID NO: 1479394 - RNA, 19 nt, Artificial Sequence
  Description of Artificial Sequence: Synthetic oligonucleotide
  Sense strand starting at position 3563 of SEQ ID NO: 1244316
gcguauuguggaugcucua

SEQ ID NO: 1479395 - RNA, 19 nt, Artificial Sequence
  Description of Artificial Sequence: Synthetic oligonucleotide
  Antisense strand to SEQ ID NO: 1479394
uagagcauccacaauacgc

SEQ ID NO: 1479396 - RNA, 19 nt, Artificial Sequence
  Description of Artificial Sequence: Synthetic oligonucleotide
  Sense strand starting at position 3570 of SEQ ID NO: 1244316
guggaugcucuauacuaau

SEQ ID NO: 1479397 - RNA, 19 nt, Artificial Sequence
  Description of Artificial Sequence: Synthetic oligonucleotide
  Antisense strand to SEQ ID NO: 1479396
auuaguauagagcauccac

SEQ ID NO: 1479398 - RNA, 19 nt, Artificial Sequence
  Description of Artificial Sequence: Synthetic oligonucleotide
  Sense strand starting at position 3576 of SEQ ID NO: 1244316
gcucuauacuaauggaauc

SEQ ID NO: 1479399 - RNA, 19 nt, Artificial Sequence
  Description of Artificial Sequence: Synthetic oligonucleotide
  Antisense strand to SEQ ID NO: 1479398
gauuccauuaguauagagc

SEQ ID NO: 1479400 - RNA, 19 nt, Artificial Sequence
  Description of Artificial Sequence: Synthetic oligonucleotide
  Sense strand starting at position 3648 of SEQ ID NO: 1244316
guugucauauuagcacuaa

SEQ ID NO: 1479401 - RNA, 19 nt, Artificial Sequence
  Description of Artificial Sequence: Synthetic oligonucleotide
  Antisense strand to SEQ ID NO: 1479400
uuagugcuaauaugacaac

SEQ ID NO: 1479402 - RNA, 19 nt, Artificial Sequence
  Description of Artificial Sequence: Synthetic oligonucleotide
  Sense strand starting at position 3710 of SEQ ID NO: 1244316
uuguuuauccaucaguuua

SEQ ID NO: 1479403 - RNA, 19 nt, Artificial Sequence
  Description of Artificial Sequence: Synthetic oligonucleotide
  Antisense strand to SEQ ID NO: 1479402
uaaacugauggauaaacaa

SEQ ID NO: 1479404 - RNA, 19 nt, Artificial Sequence
  Description of Artificial Sequence: Synthetic oligonucleotide
  Sense strand starting at position 3712 of SEQ ID NO: 1244316
guuuauccaucaguuuaug

SEQ ID NO: 1479405 - RNA, 19 nt, Artificial Sequence
  Description of Artificial Sequence: Synthetic oligonucleotide
  Antisense strand to SEQ ID NO: 1479404
cauaaacugauggauaaac

SEQ ID NO: 1479406 - RNA, 19 nt, Artificial Sequence
  Description of Artificial Sequence: Synthetic oligonucleotide
  Sense strand starting at position 3764 of SEQ ID NO: 1244316
ugauaaugcuucugagaac

SEQ ID NO: 1479407 - RNA, 19 nt, Artificial Sequence
  Description of Artificial Sequence: Synthetic oligonucleotide
  Antisense strand to SEQ ID NO: 1479406
guucucagaagcauuauca

SEQ ID NO: 1479408 - RNA, 19 nt, Artificial Sequence
  Description of Artificial Sequence: Synthetic oligonucleotide
  Sense strand starting at position 3813 of SEQ ID NO: 1244316
uuuccuuucucuugggagu

SEQ ID NO: 1479409 - RNA, 19 nt, Artificial Sequence
  Description of Artificial Sequence: Synthetic oligonucleotide
  Antisense strand to SEQ ID NO: 1479408
acucccaagagaaaggaaa

SEQ ID NO: 1479410 - RNA, 19 nt, Artificial Sequence
  Description of Artificial Sequence: Synthetic oligonucleotide
  Sense strand starting at position 3819 of SEQ ID NO: 1244316
uucucuugggagugggauu

SEQ ID NO: 1479411 - RNA, 19 nt, Artificial Sequence
  Description of Artificial Sequence: Synthetic oligonucleotide
  Antisense strand to SEQ ID NO: 1479410
aaucccacucccaagagaa

SEQ ID NO: 1479412 - RNA, 19 nt, Artificial Sequence
  Description of Artificial Sequence: Synthetic oligonucleotide
  Sense strand starting at position 3840 of SEQ ID NO: 1244316
ugggucacaugguaaacua

SEQ ID NO: 1479413 - RNA, 19 nt, Artificial Sequence
  Description of Artificial Sequence: Synthetic oligonucleotide
  Antisense strand to SEQ ID NO: 1479412
uaguuuaccaugugaccca

SEQ ID NO: 1479414 - RNA, 19 nt, Artificial Sequence
  Description of Artificial Sequence: Synthetic oligonucleotide
  Sense strand starting at position 3859 of SEQ ID NO: 1244316
uuaacuucuugagaaagug

SEQ ID NO: 1479415 - RNA, 19 nt, Artificial Sequence
  Description of Artificial Sequence: Synthetic oligonucleotide
  Antisense strand to SEQ ID NO: 1479414
cacuuucucaagaaguuaa

SEQ ID NO: 1479416 - RNA, 19 nt, Artificial Sequence
  Description of Artificial Sequence: Synthetic oligonucleotide
  Sense strand starting at position 3928 of SEQ ID NO: 1244316
auuuaagaguuccgauuuc

SEQ ID NO: 1479417 - RNA, 19 nt, Artificial Sequence
  Description of Artificial Sequence: Synthetic oligonucleotide
  Antisense strand to SEQ ID NO: 1479416
gaaaucggaacucuuaaau

SEQ ID NO: 1479418 - RNA, 19 nt, Artificial Sequence
  Description of Artificial Sequence: Synthetic oligonucleotide
  Sense strand starting at position 932 of SEQ ID NO: 1244317
gugggauccgcgcacuguu

SEQ ID NO: 1479419 - RNA, 19 nt, Artificial Sequence
  Description of Artificial Sequence: Synthetic oligonucleotide
  Antisense strand to SEQ ID NO: 1479418
aacagugcgcggaucccac

SEQ ID NO: 1479420 - RNA, 19 nt, Artificial Sequence
  Description of Artificial Sequence: Synthetic oligonucleotide
  Sense strand starting at position 1072 of SEQ ID NO: 1244317
acggguuucugaaggagga

SEQ ID NO: 1479421 - RNA, 19 nt, Artificial Sequence
  Description of Artificial Sequence: Synthetic oligonucleotide
  Antisense strand to SEQ ID NO: 1479420
uccuccuucagaaacccgu

SEQ ID NO: 1479422 - RNA, 19 nt, Artificial Sequence
  Description of Artificial Sequence: Synthetic oligonucleotide
  Sense strand starting at position 1073 of SEQ ID NO: 1244317
cggguuucugaaggaggaa

SEQ ID NO: 1479423 - RNA, 19 nt, Artificial Sequence
  Description of Artificial Sequence: Synthetic oligonucleotide
  Antisense strand to SEQ ID NO: 1479422
uuccuccuucagaaacccg

SEQ ID NO: 1479424 - RNA, 19 nt, Artificial Sequence
  Description of Artificial Sequence: Synthetic oligonucleotide
  Sense strand starting at position 1207 of SEQ ID NO: 1244317
ccacgucuuucuuagagcu

SEQ ID NO: 1479425 - RNA, 19 nt, Artificial Sequence
  Description of Artificial Sequence: Synthetic oligonucleotide
  Antisense strand to SEQ ID NO: 1479424
agcucuaagaaagacgugg

SEQ ID NO: 1479426 - RNA, 19 nt, Artificial Sequence
  Description of Artificial Sequence: Synthetic oligonucleotide
  Sense strand starting at position 1209 of SEQ ID NO: 1244317
acgucuuucuuagagcuga

SEQ ID NO: 1479427 - RNA, 19 nt, Artificial Sequence
  Description of Artificial Sequence: Synthetic oligonucleotide
  Antisense strand to SEQ ID NO: 1479426
ucagcucuaagaaagacgu

SEQ ID NO: 1479428 - RNA, 19 nt, Artificial Sequence
  Description of Artificial Sequence: Synthetic oligonucleotide
  Sense strand starting at position 1351 of SEQ ID NO: 1244317
ggcugcagucgagagugaa

SEQ ID NO: 1479429 - RNA, 19 nt, Artificial Sequence
  Description of Artificial Sequence: Synthetic oligonucleotide
  Antisense strand to SEQ ID NO: 1479428
uucacucucgacugcagcc

SEQ ID NO: 1479430 - RNA, 19 nt, Artificial Sequence
  Description of Artificial Sequence: Synthetic oligonucleotide
  Sense strand starting at position 1352 of SEQ ID NO: 1244317
gcugcagucgagagugaag

SEQ ID NO: 1479431 - RNA, 19 nt, Artificial Sequence
  Description of Artificial Sequence: Synthetic oligonucleotide
  Antisense strand to SEQ ID NO: 1479430
cuucacucucgacugcagc

SEQ ID NO: 1479432 - RNA, 19 nt, Artificial Sequence
  Description of Artificial Sequence: Synthetic oligonucleotide
  Sense strand starting at position 1439 of SEQ ID NO: 1244317
gcgcgaaucugguggugaa

SEQ ID NO: 1479433 - RNA, 19 nt, Artificial Sequence
  Description of Artificial Sequence: Synthetic oligonucleotide
  Antisense strand to SEQ ID NO: 1479432
uucaccaccagauucgcgc

SEQ ID NO: 1479434 - RNA, 19 nt, Artificial Sequence
  Description of Artificial Sequence: Synthetic oligonucleotide
  Sense strand starting at position 1689 of SEQ ID NO: 1244317
gcgcuuaccugauagucga

SEQ ID NO: 1479435 - RNA, 19 nt, Artificial Sequence
  Description of Artificial Sequence: Synthetic oligonucleotide
  Antisense strand to SEQ ID NO: 1479434
ucgacuaucagguaagcgc

SEQ ID NO: 1479436 - RNA, 19 nt, Artificial Sequence
  Description of Artificial Sequence: Synthetic oligonucleotide
  Sense strand starting at position 2250 of SEQ ID NO: 1244317
gguguccucuccuacagaa

SEQ ID NO: 1479437 - RNA, 19 nt, Artificial Sequence
  Description of Artificial Sequence: Synthetic oligonucleotide
  Antisense strand to SEQ ID NO: 1479436
uucuguaggagaggacacc

SEQ ID NO: 1479438 - RNA, 19 nt, Artificial Sequence
  Description of Artificial Sequence: Synthetic oligonucleotide
  Sense strand starting at position 2252 of SEQ ID NO: 1244317
uguccucuccuacagaagu

SEQ ID NO: 1479439 - RNA, 19 nt, Artificial Sequence
  Description of Artificial Sequence: Synthetic oligonucleotide
  Antisense strand to SEQ ID NO: 1479438
acuucuguaggagaggaca

SEQ ID NO: 1479440 - RNA, 19 nt, Artificial Sequence
  Description of Artificial Sequence: Synthetic oligonucleotide
  Sense strand starting at position 2406 of SEQ ID NO: 1244317
guuacugaccaaggugaau

SEQ ID NO: 1479441 - RNA, 19 nt, Artificial Sequence
  Description of Artificial Sequence: Synthetic oligonucleotide
  Antisense strand to SEQ ID NO: 1479440
auucaccuuggucaguaac

SEQ ID NO: 1479442 - RNA, 19 nt, Artificial Sequence
  Description of Artificial Sequence: Synthetic oligonucleotide
  Sense strand starting at position 2418 of SEQ ID NO: 1244317
ggugaauccuuuccuuaac

SEQ ID NO: 1479443 - RNA, 19 nt, Artificial Sequence
  Description of Artificial Sequence: Synthetic oligonucleotide
  Antisense strand to SEQ ID NO: 1479442
guuaaggaaaggauucacc

SEQ ID NO: 1479444 - RNA, 19 nt, Artificial Sequence
  Description of Artificial Sequence: Synthetic oligonucleotide
  Sense strand starting at position 2431 of SEQ ID NO: 1244317
cuuaacaaaucggcuuaaa

SEQ ID NO: 1479445 - RNA, 19 nt, Artificial Sequence
  Description of Artificial Sequence: Synthetic oligonucleotide
  Antisense strand to SEQ ID NO: 1479444
uuuaagccgauuuguuaag

SEQ ID NO: 1479446 - RNA, 19 nt, Artificial Sequence
  Description of Artificial Sequence: Synthetic oligonucleotide
  Sense strand starting at position 2500 of SEQ ID NO: 1244317
acgugaaucuaaccguuac

SEQ ID NO: 1479447 - RNA, 19 nt, Artificial Sequence
  Description of Artificial Sequence: Synthetic oligonucleotide
  Antisense strand to SEQ ID NO: 1479446
guaacgguuagauucacgu

SEQ ID NO: 1479448 - RNA, 19 nt, Artificial Sequence
  Description of Artificial Sequence: Synthetic oligonucleotide
  Sense strand starting at position 2504 of SEQ ID NO: 1244317
gaaucuaaccguuacguca

SEQ ID NO: 1479449 - RNA, 19 nt, Artificial Sequence
  Description of Artificial Sequence: Synthetic oligonucleotide
  Antisense strand to SEQ ID NO: 1479448
ugacguaacgguuagauuc

SEQ ID NO: 1479450 - RNA, 19 nt, Artificial Sequence
  Description of Artificial Sequence: Synthetic oligonucleotide
  Sense strand starting at position 2587 of SEQ ID NO: 1244317
uuauuuguaucacgucuuu

SEQ ID NO: 1479451 - RNA, 19 nt, Artificial Sequence
  Description of Artificial Sequence: Synthetic oligonucleotide
  Antisense strand to SEQ ID NO: 1479450
aaagacgugauacaaauaa

SEQ ID NO: 1479452 - RNA, 19 nt, Artificial Sequence
  Description of Artificial Sequence: Synthetic oligonucleotide
  Sense strand starting at position 2612 of SEQ ID NO: 1244317
accuuuaugcuguaaauag

SEQ ID NO: 1479453 - RNA, 19 nt, Artificial Sequence
  Description of Artificial Sequence: Synthetic oligonucleotide
  Antisense strand to SEQ ID NO: 1479452
cuauuuacagcauaaaggu

SEQ ID NO: 1479454 - RNA, 19 nt, Artificial Sequence
  Description of Artificial Sequence: Synthetic oligonucleotide
  Sense strand starting at position 2623 of SEQ ID NO: 1244317
guaaauagagcuugaaguc

SEQ ID NO: 1479455 - RNA, 19 nt, Artificial Sequence
  Description of Artificial Sequence: Synthetic oligonucleotide
  Antisense strand to SEQ ID NO: 1479454
gacuucaagcucuauuuac

SEQ ID NO: 1479456 - RNA, 19 nt, Artificial Sequence
  Description of Artificial Sequence: Synthetic oligonucleotide
  Sense strand starting at position 2624 of SEQ ID NO: 1244317
uaaauagagcuugaagucu

SEQ ID NO: 1479457 - RNA, 19 nt, Artificial Sequence
  Description of Artificial Sequence: Synthetic oligonucleotide
  Antisense strand to SEQ ID NO: 1479456
agacuucaagcucuauuua

SEQ ID NO: 1479458 - RNA, 19 nt, Artificial Sequence
  Description of Artificial Sequence: Synthetic oligonucleotide
  Sense strand starting at position 2630 of SEQ ID NO: 1244317
gagcuugaagucugaaugu

SEQ ID NO: 1479459 - RNA, 19 nt, Artificial Sequence
  Description of Artificial Sequence: Synthetic oligonucleotide
  Antisense strand to SEQ ID NO: 1479458
acauucagacuucaagcuc

SEQ ID NO: 1479460 - RNA, 19 nt, Artificial Sequence
  Description of Artificial Sequence: Synthetic oligonucleotide
  Sense strand starting at position 2797 of SEQ ID NO: 1244317
ugggaugauuucuauguag

SEQ ID NO: 1479461 - RNA, 19 nt, Artificial Sequence
  Description of Artificial Sequence: Synthetic oligonucleotide
  Antisense strand to SEQ ID NO: 1479460
cuacauagaaaucauccca

SEQ ID NO: 1479462 - RNA, 19 nt, Artificial Sequence
  Description of Artificial Sequence: Synthetic oligonucleotide
  Sense strand starting at position 2849 of SEQ ID NO: 1244317
augggaaguugucuugaag

SEQ ID NO: 1479463 - RNA, 19 nt, Artificial Sequence
  Description of Artificial Sequence: Synthetic oligonucleotide
  Antisense strand to SEQ ID NO: 1479462
cuucaagacaacuucccau

SEQ ID NO: 1479464 - RNA, 19 nt, Artificial Sequence
  Description of Artificial Sequence: Synthetic oligonucleotide
  Sense strand starting at position 2852 of SEQ ID NO: 1244317
ggaaguugucuugaagcuc

SEQ ID NO: 1479465 - RNA, 19 nt, Artificial Sequence
  Description of Artificial Sequence: Synthetic oligonucleotide
  Antisense strand to SEQ ID NO: 1479464
gagcuucaagacaacuucc

SEQ ID NO: 1479466 - RNA, 19 nt, Artificial Sequence
  Description of Artificial Sequence: Synthetic oligonucleotide
  Sense strand starting at position 3089 of SEQ ID NO: 1244317
cuagccuucugacuacaga

SEQ ID NO: 1479467 - RNA, 19 nt, Artificial Sequence
  Description of Artificial Sequence: Synthetic oligonucleotide
  Antisense strand to SEQ ID NO: 1479466
ucuguagucagaaggcuag

SEQ ID NO: 1479468 - RNA, 19 nt, Artificial Sequence
  Description of Artificial Sequence: Synthetic oligonucleotide
  Sense strand starting at position 3104 of SEQ ID NO: 1244317
cagaaugucucaugagcca

SEQ ID NO: 1479469 - RNA, 19 nt, Artificial Sequence
  Description of Artificial Sequence: Synthetic oligonucleotide
  Antisense strand to SEQ ID NO: 1479468
uggcucaugagacauucug

SEQ ID NO: 1479470 - RNA, 19 nt, Artificial Sequence
  Description of Artificial Sequence: Synthetic oligonucleotide
  Sense strand starting at position 3117 of SEQ ID NO: 1244317
gagccaauggccuggagau

SEQ ID NO: 1479471 - RNA, 19 nt, Artificial Sequence
  Description of Artificial Sequence: Synthetic oligonucleotide
  Antisense strand to SEQ ID NO: 1479470
aucuccaggccauuggcuc

SEQ ID NO: 1479472 - RNA, 19 nt, Artificial Sequence
  Description of Artificial Sequence: Synthetic oligonucleotide
  Sense strand starting at position 3445 of SEQ ID NO: 1244317
gcacucagccuggaauuga

SEQ ID NO: 1479473 - RNA, 19 nt, Artificial Sequence
  Description of Artificial Sequence: Synthetic oligonucleotide
  Antisense strand to SEQ ID NO: 1479472
ucaauuccaggcugagugc

SEQ ID NO: 1479474 - RNA, 19 nt, Artificial Sequence
  Description of Artificial Sequence: Synthetic oligonucleotide
  Sense strand starting at position 3508 of SEQ ID NO: 1244317
ccucuaucuugguucugga

SEQ ID NO: 1479475 - RNA, 19 nt, Artificial Sequence
  Description of Artificial Sequence: Synthetic oligonucleotide
  Antisense strand to SEQ ID NO: 1479474
uccagaaccaagauagagg

SEQ ID NO: 1479476 - RNA, 19 nt, Artificial Sequence
  Description of Artificial Sequence: Synthetic oligonucleotide
  Sense strand starting at position 3511 of SEQ ID NO: 1244317
cuaucuugguucuggacau

SEQ ID NO: 1479477 - RNA, 19 nt, Artificial Sequence
  Description of Artificial Sequence: Synthetic oligonucleotide
  Antisense strand to SEQ ID NO: 1479476
auguccagaaccaagauag

SEQ ID NO: 1479478 - RNA, 19 nt, Artificial Sequence
  Description of Artificial Sequence: Synthetic oligonucleotide
  Sense strand starting at position 3534 of SEQ ID NO: 1244317
ggaccuuagugaucuccuu

SEQ ID NO: 1479479 - RNA, 19 nt, Artificial Sequence
  Description of Artificial Sequence: Synthetic oligonucleotide
  Antisense strand to SEQ ID NO: 1479478
aaggagaucacuaaggucc

SEQ ID NO: 1479480 - RNA, 19 nt, Artificial Sequence
  Description of Artificial Sequence: Synthetic oligonucleotide
  Sense strand starting at position 347 of SEQ ID NO: 1244318
gcgucuggucugguaguua

SEQ ID NO: 1479481 - RNA, 19 nt, Artificial Sequence
  Description of Artificial Sequence: Synthetic oligonucleotide
  Antisense strand to SEQ ID NO: 1479480
uaacuaccagaccagacgc

SEQ ID NO: 1479482 - RNA, 19 nt, Artificial Sequence
  Description of Artificial Sequence: Synthetic oligonucleotide
  Sense strand starting at position 352 of SEQ ID NO: 1244318
uggucugguaguuaugaaa

SEQ ID NO: 1479483 - RNA, 19 nt, Artificial Sequence
  Description of Artificial Sequence: Synthetic oligonucleotide
  Antisense strand to SEQ ID NO: 1479482
uuucauaacuaccagacca

SEQ ID NO: 1479484 - RNA, 19 nt, Artificial Sequence
  Description of Artificial Sequence: Synthetic oligonucleotide
  Sense strand starting at position 384 of SEQ ID NO: 1244318
aucaucuggcccugaacaa

SEQ ID NO: 1479485 - RNA, 19 nt, Artificial Sequence
  Description of Artificial Sequence: Synthetic oligonucleotide
  Antisense strand to SEQ ID NO: 1479484
uuguucagggccagaugau

SEQ ID NO: 1479486 - RNA, 19 nt, Artificial Sequence
  Description of Artificial Sequence: Synthetic oligonucleotide
  Sense strand starting at position 385 of SEQ ID NO: 1244318
ucaucuggcccugaacaau

SEQ ID NO: 1479487 - RNA, 19 nt, Artificial Sequence
  Description of Artificial Sequence: Synthetic oligonucleotide
  Antisense strand to SEQ ID NO: 1479486
auuguucagggccagauga

SEQ ID NO: 1479488 - RNA, 19 nt, Artificial Sequence
  Description of Artificial Sequence: Synthetic oligonucleotide
  Sense strand starting at position 484 of SEQ ID NO: 1244318
acuacaauccaauguguau

SEQ ID NO: 1479489 - RNA, 19 nt, Artificial Sequence
  Description of Artificial Sequence: Synthetic oligonucleotide
  Antisense strand to SEQ ID NO: 1479488
auacacauuggauuguagu

SEQ ID NO: 1479490 - RNA, 19 nt, Artificial Sequence
  Description of Artificial Sequence: Synthetic oligonucleotide
  Sense strand starting at position 553 of SEQ ID NO: 1244318
cacuuaugggacuauguuu

SEQ ID NO: 1479491 - RNA, 19 nt, Artificial Sequence
  Description of Artificial Sequence: Synthetic oligonucleotide
  Antisense strand to SEQ ID NO: 1479490
aaacauagucccauaagug

SEQ ID NO: 1479492 - RNA, 19 nt, Artificial Sequence
  Description of Artificial Sequence: Synthetic oligonucleotide
  Sense strand starting at position 616 of SEQ ID NO: 1244318
gaaugaaguuaccuuugca

SEQ ID NO: 1479493 - RNA, 19 nt, Artificial Sequence
  Description of Artificial Sequence: Synthetic oligonucleotide
  Antisense strand to SEQ ID NO: 1479492
ugcaaagguaacuucauuc

SEQ ID NO: 1479494 - RNA, 19 nt, Artificial Sequence
  Description of Artificial Sequence: Synthetic oligonucleotide
  Sense strand starting at position 700 of SEQ ID NO: 1244318
agagaagccugucugaauc

SEQ ID NO: 1479495 - RNA, 19 nt, Artificial Sequence
  Description of Artificial Sequence: Synthetic oligonucleotide
  Antisense strand to SEQ ID NO: 1479494
gauucagacaggcuucucu

SEQ ID NO: 1479496 - RNA, 19 nt, Artificial Sequence
  Description of Artificial Sequence: Synthetic oligonucleotide
  Sense strand starting at position 755 of SEQ ID NO: 1244318
auauguuaauggucacuaa

SEQ ID NO: 1479497 - RNA, 19 nt, Artificial Sequence
  Description of Artificial Sequence: Synthetic oligonucleotide
  Antisense strand to SEQ ID NO: 1479496
uuagugaccauuaacauau

SEQ ID NO: 1479498 - RNA, 19 nt, Artificial Sequence
  Description of Artificial Sequence: Synthetic oligonucleotide
  Sense strand starting at position 758 of SEQ ID NO: 1244318
uguuaauggucacuaaagg

SEQ ID NO: 1479499 - RNA, 19 nt, Artificial Sequence
  Description of Artificial Sequence: Synthetic oligonucleotide
  Antisense strand to SEQ ID NO: 1479498
ccuuuagugaccauuaaca

SEQ ID NO: 1479500 - RNA, 19 nt, Artificial Sequence
  Description of Artificial Sequence: Synthetic oligonucleotide
  Sense strand starting at position 786 of SEQ ID NO: 1244318
cagaguccacuuggaugau

SEQ ID NO: 1479501 - RNA, 19 nt, Artificial Sequence
  Description of Artificial Sequence: Synthetic oligonucleotide
  Antisense strand to SEQ ID NO: 1479500
aucauccaaguggacucug

SEQ ID NO: 1479502 - RNA, 19 nt, Artificial Sequence
  Description of Artificial Sequence: Synthetic oligonucleotide
  Sense strand starting at position 789 of SEQ ID NO: 1244318
aguccacuuggaugauaca

SEQ ID NO: 1479503 - RNA, 19 nt, Artificial Sequence
  Description of Artificial Sequence: Synthetic oligonucleotide
  Antisense strand to SEQ ID NO: 1479502
uguaucauccaaguggacu

SEQ ID NO: 1479504 - RNA, 19 nt, Artificial Sequence
  Description of Artificial Sequence: Synthetic oligonucleotide
  Sense strand starting at position 792 of SEQ ID NO: 1244318
ccacuuggaugauacauuu

SEQ ID NO: 1479505 - RNA, 19 nt, Artificial Sequence
  Description of Artificial Sequence: Synthetic oligonucleotide
  Antisense strand to SEQ ID NO: 1479504
aaauguaucauccaagugg

SEQ ID NO: 1479506 - RNA, 19 nt, Artificial Sequence
  Description of Artificial Sequence: Synthetic oligonucleotide
  Sense strand starting at position 829 of SEQ ID NO: 1244318
uagaaagccgguuaaucua

SEQ ID NO: 1479507 - RNA, 19 nt, Artificial Sequence
  Description of Artificial Sequence: Synthetic oligonucleotide
  Antisense strand to SEQ ID NO: 1479506
uagauuaaccggcuuucua

SEQ ID NO: 1479508 - RNA, 19 nt, Artificial Sequence
  Description of Artificial Sequence: Synthetic oligonucleotide
  Sense strand starting at position 876 of SEQ ID NO: 1244318
ggaggcuucuaagucaaga

SEQ ID NO: 1479509 - RNA, 19 nt, Artificial Sequence
  Description of Artificial Sequence: Synthetic oligonucleotide
  Antisense strand to SEQ ID NO: 1479508
ucuugacuuagaagccucc

SEQ ID NO: 1479510 - RNA, 19 nt, Artificial Sequence
  Description of Artificial Sequence: Synthetic oligonucleotide
  Sense strand starting at position 881 of SEQ ID NO: 1244318
cuucuaagucaagaggcau

SEQ ID NO: 1479511 - RNA, 19 nt, Artificial Sequence
  Description of Artificial Sequence: Synthetic oligonucleotide
  Antisense strand to SEQ ID NO: 1479510
augccucuugacuuagaag

SEQ ID NO: 1479512 - RNA, 19 nt, Artificial Sequence
  Description of Artificial Sequence: Synthetic oligonucleotide
  Sense strand starting at position 887 of SEQ ID NO: 1244318
agucaagaggcaugaaaua

SEQ ID NO: 1479513 - RNA, 19 nt, Artificial Sequence
  Description of Artificial Sequence: Synthetic oligonucleotide
  Antisense strand to SEQ ID NO: 1479512
uauuucaugccucuugacu

SEQ ID NO: 1479514 - RNA, 19 nt, Artificial Sequence
  Description of Artificial Sequence: Synthetic oligonucleotide
  Sense strand starting at position 1477 of SEQ ID NO: 1244318
uggguuaccucaguauaag

SEQ ID NO: 1479515 - RNA, 19 nt, Artificial Sequence
  Description of Artificial Sequence: Synthetic oligonucleotide
  Antisense strand to SEQ ID NO: 1479514
cuuauacugagguaaccca

SEQ ID NO: 1479516 - RNA, 19 nt, Artificial Sequence
  Description of Artificial Sequence: Synthetic oligonucleotide
  Sense strand starting at position 1478 of SEQ ID NO: 1244318
ggguuaccucaguauaagc

SEQ ID NO: 1479517 - RNA, 19 nt, Artificial Sequence
  Description of Artificial Sequence: Synthetic oligonucleotide
  Antisense strand to SEQ ID NO: 1479516
gcuuauacugagguaaccc

SEQ ID NO: 1479518 - RNA, 19 nt, Artificial Sequence
  Description of Artificial Sequence: Synthetic oligonucleotide
  Sense strand starting at position 1480 of SEQ ID NO: 1244318
guuaccucaguauaagcaa

SEQ ID NO: 1479519 - RNA, 19 nt, Artificial Sequence
  Description of Artificial Sequence: Synthetic oligonucleotide
  Antisense strand to SEQ ID NO: 1479518
uugcuuauacugagguaac

SEQ ID NO: 1479520 - RNA, 19 nt, Artificial Sequence
  Description of Artificial Sequence: Synthetic oligonucleotide
  Sense strand starting at position 1601 of SEQ ID NO: 1244318
augagauaaugcuuaauuc

SEQ ID NO: 1479521 - RNA, 19 nt, Artificial Sequence
  Description of Artificial Sequence: Synthetic oligonucleotide
  Antisense strand to SEQ ID NO: 1479520
gaauuaagcauuaucucau

SEQ ID NO: 1479522 - RNA, 19 nt, Artificial Sequence
  Description of Artificial Sequence: Synthetic oligonucleotide
  Sense strand starting at position 1833 of SEQ ID NO: 1244318
agucuuucuggugauaaug

SEQ ID NO: 1479523 - RNA, 19 nt, Artificial Sequence
  Description of Artificial Sequence: Synthetic oligonucleotide
  Antisense strand to SEQ ID NO: 1479522
cauuaucaccagaaagacu

SEQ ID NO: 1479524 - RNA, 19 nt, Artificial Sequence
  Description of Artificial Sequence: Synthetic oligonucleotide
  Sense strand starting at position 1969 of SEQ ID NO: 1244318
gaaagcaagagcgaguaau

SEQ ID NO: 1479525 - RNA, 19 nt, Artificial Sequence
  Description of Artificial Sequence: Synthetic oligonucleotide
  Antisense strand to SEQ ID NO: 1479524
auuacucgcucuugcuuuc

SEQ ID NO: 1479526 - RNA, 19 nt, Artificial Sequence
  Description of Artificial Sequence: Synthetic oligonucleotide
  Sense strand starting at position 2039 of SEQ ID NO: 1244318
uucuaagaacuuugugaca

SEQ ID NO: 1479527 - RNA, 19 nt, Artificial Sequence
  Description of Artificial Sequence: Synthetic oligonucleotide
  Antisense strand to SEQ ID NO: 1479526
ugucacaaaguucuuagaa

SEQ ID NO: 1479528 - RNA, 19 nt, Artificial Sequence
  Description of Artificial Sequence: Synthetic oligonucleotide
  Sense strand starting at position 2121 of SEQ ID NO: 1244318
acagaaucugauugcagaa

SEQ ID NO: 1479529 - RNA, 19 nt, Artificial Sequence
  Description of Artificial Sequence: Synthetic oligonucleotide
  Antisense strand to SEQ ID NO: 1479528
uucugcaaucagauucugu

SEQ ID NO: 1479530 - RNA, 19 nt, Artificial Sequence
  Description of Artificial Sequence: Synthetic oligonucleotide
  Sense strand starting at position 2218 of SEQ ID NO: 1244318
gaaggagccuguucuuaau

SEQ ID NO: 1479531 - RNA, 19 nt, Artificial Sequence
  Description of Artificial Sequence: Synthetic oligonucleotide
  Antisense strand to SEQ ID NO: 1479530
auuaagaacaggcuccuuc

SEQ ID NO: 1479532 - RNA, 19 nt, Artificial Sequence
  Description of Artificial Sequence: Synthetic oligonucleotide
  Sense strand starting at position 2220 of SEQ ID NO: 1244318
aggagccuguucuuaauaa

SEQ ID NO: 1479533 - RNA, 19 nt, Artificial Sequence
  Description of Artificial Sequence: Synthetic oligonucleotide
  Antisense strand to SEQ ID NO: 1479532
uuauuaagaacaggcuccu

SEQ ID NO: 1479534 - RNA, 19 nt, Artificial Sequence
  Description of Artificial Sequence: Synthetic oligonucleotide
  Sense strand starting at position 2304 of SEQ ID NO: 1244318
gcuguuaagcaauaaagga

SEQ ID NO: 1479535 - RNA, 19 nt, Artificial Sequence
  Description of Artificial Sequence: Synthetic oligonucleotide
  Antisense strand to SEQ ID NO: 1479534
uccuuuauugcuuaacagc

SEQ ID NO: 1479536 - RNA, 19 nt, Artificial Sequence
  Description of Artificial Sequence: Synthetic oligonucleotide
  Sense strand starting at position 2387 of SEQ ID NO: 1244318
uuguuaauaccggacaauc

SEQ ID NO: 1479537 - RNA, 19 nt, Artificial Sequence
  Description of Artificial Sequence: Synthetic oligonucleotide
  Antisense strand to SEQ ID NO: 1479536
gauuguccgguauuaacaa

SEQ ID NO: 1479538 - RNA, 19 nt, Artificial Sequence
  Description of Artificial Sequence: Synthetic oligonucleotide
  Sense strand starting at position 2434 of SEQ ID NO: 1244318
uuaggugauuggagaagga

SEQ ID NO: 1479539 - RNA, 19 nt, Artificial Sequence
  Description of Artificial Sequence: Synthetic oligonucleotide
  Antisense strand to SEQ ID NO: 1479538
uccuucuccaaucaccuaa

SEQ ID NO: 1479540 - RNA, 19 nt, Artificial Sequence
  Description of Artificial Sequence: Synthetic oligonucleotide
  Sense strand starting at position 2567 of SEQ ID NO: 1244318
uuauaaacaugucuugagu

SEQ ID NO: 1479541 - RNA, 19 nt, Artificial Sequence
  Description of Artificial Sequence: Synthetic oligonucleotide
  Antisense strand to SEQ ID NO: 1479540
acucaagacauguuuauaa

SEQ ID NO: 1479542 - RNA, 19 nt, Artificial Sequence
  Description of Artificial Sequence: Synthetic oligonucleotide
  Sense strand starting at position 2575 of SEQ ID NO: 1244318
augucuugaguauaagcaa

SEQ ID NO: 1479543 - RNA, 19 nt, Artificial Sequence
  Description of Artificial Sequence: Synthetic oligonucleotide
  Antisense strand to SEQ ID NO: 1479542
uugcuuauacucaagacau

SEQ ID NO: 1479544 - RNA, 19 nt, Artificial Sequence
  Description of Artificial Sequence: Synthetic oligonucleotide
  Sense strand starting at position 2582 of SEQ ID NO: 1244318
gaguauaagcaacaaaguu

SEQ ID NO: 1479545 - RNA, 19 nt, Artificial Sequence
  Description of Artificial Sequence: Synthetic oligonucleotide
  Antisense strand to SEQ ID NO: 1479544
aacuuuguugcuuauacuc

SEQ ID NO: 1479546 - RNA, 19 nt, Artificial Sequence
  Description of Artificial Sequence: Synthetic oligonucleotide
  Sense strand starting at position 2610 of SEQ ID NO: 1244318
ggcccaauuuaagaauacu

SEQ ID NO: 1479547 - RNA, 19 nt, Artificial Sequence
  Description of Artificial Sequence: Synthetic oligonucleotide
  Antisense strand to SEQ ID NO: 1479546
aguauucuuaaauugggcc

SEQ ID NO: 1479548 - RNA, 19 nt, Artificial Sequence
  Description of Artificial Sequence: Synthetic oligonucleotide
  Sense strand starting at position 2621 of SEQ ID NO: 1244318
agaauacugugacugcaga

SEQ ID NO: 1479549 - RNA, 19 nt, Artificial Sequence
  Description of Artificial Sequence: Synthetic oligonucleotide
  Antisense strand to SEQ ID NO: 1479548
ucugcagucacaguauucu

SEQ ID NO: 1479550 - RNA, 19 nt, Artificial Sequence
  Description of Artificial Sequence: Synthetic oligonucleotide
  Sense strand starting at position 2823 of SEQ ID NO: 1244318
ggagaaacucaacguguaa

SEQ ID NO: 1479551 - RNA, 19 nt, Artificial Sequence
  Description of Artificial Sequence: Synthetic oligonucleotide
  Antisense strand to SEQ ID NO: 1479550
uuacacguugaguuucucc

SEQ ID NO: 1479552 - RNA, 19 nt, Artificial Sequence
  Description of Artificial Sequence: Synthetic oligonucleotide
  Sense strand starting at position 2860 of SEQ ID NO: 1244318
ggaaacgucacagguuuga

SEQ ID NO: 1479553 - RNA, 19 nt, Artificial Sequence
  Description of Artificial Sequence: Synthetic oligonucleotide
  Antisense strand to SEQ ID NO: 1479552
ucaaaccugugacguuucc

SEQ ID NO: 1479554 - RNA, 19 nt, Artificial Sequence
  Description of Artificial Sequence: Synthetic oligonucleotide
  Sense strand starting at position 3191 of SEQ ID NO: 1244318
uggcgucugcaggaaagaa

SEQ ID NO: 1479555 - RNA, 19 nt, Artificial Sequence
  Description of Artificial Sequence: Synthetic oligonucleotide
  Antisense strand to SEQ ID NO: 1479554
uucuuuccugcagacgcca

SEQ ID NO: 1479556 - RNA, 19 nt, Artificial Sequence
  Description of Artificial Sequence: Synthetic oligonucleotide
  Sense strand starting at position 3331 of SEQ ID NO: 1244318
gguuucccuccagaaucuu

SEQ ID NO: 1479557 - RNA, 19 nt, Artificial Sequence
  Description of Artificial Sequence: Synthetic oligonucleotide
  Antisense strand to SEQ ID NO: 1479556
aagauucuggagggaaacc

SEQ ID NO: 1479558 - RNA, 19 nt, Artificial Sequence
  Description of Artificial Sequence: Synthetic oligonucleotide
  Sense strand starting at position 3342 of SEQ ID NO: 1244318
agaaucuuguaagucgaaa

SEQ ID NO: 1479559 - RNA, 19 nt, Artificial Sequence
  Description of Artificial Sequence: Synthetic oligonucleotide
  Antisense strand to SEQ ID NO: 1479558
uuucgacuuacaagauucu

SEQ ID NO: 1479560 - RNA, 19 nt, Artificial Sequence
  Description of Artificial Sequence: Synthetic oligonucleotide
  Sense strand starting at position 105 of SEQ ID NO: 1244319
agucuuucuggugauaaug

SEQ ID NO: 1479561 - RNA, 19 nt, Artificial Sequence
  Description of Artificial Sequence: Synthetic oligonucleotide
  Antisense strand to SEQ ID NO: 1479560
cauuaucaccagaaagacu

SEQ ID NO: 1479562 - RNA, 19 nt, Artificial Sequence
  Description of Artificial Sequence: Synthetic oligonucleotide
  Sense strand starting at position 131 of SEQ ID NO: 1244319
ccaaaucugugcuuuagaa

SEQ ID NO: 1479563 - RNA, 19 nt, Artificial Sequence
  Description of Artificial Sequence: Synthetic oligonucleotide
  Antisense strand to SEQ ID NO: 1479562
uucuaaagcacagauuugg

SEQ ID NO: 1479564 - RNA, 19 nt, Artificial Sequence
  Description of Artificial Sequence: Synthetic oligonucleotide
  Sense strand starting at position 241 of SEQ ID NO: 1244319
gaaagcaagagcgaguaau

SEQ ID NO: 1479565 - RNA, 19 nt, Artificial Sequence
  Description of Artificial Sequence: Synthetic oligonucleotide
  Antisense strand to SEQ ID NO: 1479564
auuacucgcucuugcuuuc

SEQ ID NO: 1479566 - RNA, 19 nt, Artificial Sequence
  Description of Artificial Sequence: Synthetic oligonucleotide
  Sense strand starting at position 311 of SEQ ID NO: 1244319
uucuaagaacuuugugaca

SEQ ID NO: 1479567 - RNA, 19 nt, Artificial Sequence
  Description of Artificial Sequence: Synthetic oligonucleotide
  Antisense strand to SEQ ID NO: 1479566
ugucacaaaguucuuagaa

SEQ ID NO: 1479568 - RNA, 19 nt, Artificial Sequence
  Description of Artificial Sequence: Synthetic oligonucleotide
  Sense strand starting at position 393 of SEQ ID NO: 1244319
acagaaucugauugcagaa

SEQ ID NO: 1479569 - RNA, 19 nt, Artificial Sequence
  Description of Artificial Sequence: Synthetic oligonucleotide
  Antisense strand to SEQ ID NO: 1479568
uucugcaaucagauucugu

SEQ ID NO: 1479570 - RNA, 19 nt, Artificial Sequence
  Description of Artificial Sequence: Synthetic oligonucleotide
  Sense strand starting at position 490 of SEQ ID NO: 1244319
gaaggagccuguucuuaau

SEQ ID NO: 1479571 - RNA, 19 nt, Artificial Sequence
  Description of Artificial Sequence: Synthetic oligonucleotide
  Antisense strand to SEQ ID NO: 1479570
auuaagaacaggcuccuuc

SEQ ID NO: 1479572 - RNA, 19 nt, Artificial Sequence
  Description of Artificial Sequence: Synthetic oligonucleotide
  Sense strand starting at position 492 of SEQ ID NO: 1244319
aggagccuguucuuaauaa

SEQ ID NO: 1479573 - RNA, 19 nt, Artificial Sequence
  Description of Artificial Sequence: Synthetic oligonucleotide
  Antisense strand to SEQ ID NO: 1479572
uuauuaagaacaggcuccu

SEQ ID NO: 1479574 - RNA, 19 nt, Artificial Sequence
  Description of Artificial Sequence: Synthetic oligonucleotide
  Sense strand starting at position 513 of SEQ ID NO: 1244319
aucaaagucuuauugguuu

SEQ ID NO: 1479575 - RNA, 19 nt, Artificial Sequence
  Description of Artificial Sequence: Synthetic oligonucleotide
  Antisense strand to SEQ ID NO: 1479574
aaaccaauaagacuuugau

SEQ ID NO: 1479576 - RNA, 19 nt, Artificial Sequence
  Description of Artificial Sequence: Synthetic oligonucleotide
  Sense strand starting at position 520 of SEQ ID NO: 1244319
ucuuauugguuucuuacua

SEQ ID NO: 1479577 - RNA, 19 nt, Artificial Sequence
  Description of Artificial Sequence: Synthetic oligonucleotide
  Antisense strand to SEQ ID NO: 1479576
uaguaagaaaccaauaaga

SEQ ID NO: 1479578 - RNA, 19 nt, Artificial Sequence
  Description of Artificial Sequence: Synthetic oligonucleotide
  Sense strand starting at position 521 of SEQ ID NO: 1244319
cuuauugguuucuuacuau

SEQ ID NO: 1479579 - RNA, 19 nt, Artificial Sequence
  Description of Artificial Sequence: Synthetic oligonucleotide
  Antisense strand to SEQ ID NO: 1479578
auaguaagaaaccaauaag

SEQ ID NO: 1479580 - RNA, 19 nt, Artificial Sequence
  Description of Artificial Sequence: Synthetic oligonucleotide
  Sense strand starting at position 572 of SEQ ID NO: 1244319
auaugcuguuaagcaauaa

SEQ ID NO: 1479581 - RNA, 19 nt, Artificial Sequence
  Description of Artificial Sequence: Synthetic oligonucleotide
  Antisense strand to SEQ ID NO: 1479580
uuauugcuuaacagcauau

SEQ ID NO: 1479582 - RNA, 19 nt, Artificial Sequence
  Description of Artificial Sequence: Synthetic oligonucleotide
  Sense strand starting at position 576 of SEQ ID NO: 1244319
gcuguuaagcaauaaagga

SEQ ID NO: 1479583 - RNA, 19 nt, Artificial Sequence
  Description of Artificial Sequence: Synthetic oligonucleotide
  Antisense strand to SEQ ID NO: 1479582
uccuuuauugcuuaacagc

SEQ ID NO: 1479584 - RNA, 19 nt, Artificial Sequence
  Description of Artificial Sequence: Synthetic oligonucleotide
  Sense strand starting at position 622 of SEQ ID NO: 1244319
gacggaagguugcuuugaa

SEQ ID NO: 1479585 - RNA, 19 nt, Artificial Sequence
  Description of Artificial Sequence: Synthetic oligonucleotide
  Antisense strand to SEQ ID NO: 1479584
uucaaagcaaccuuccguc

SEQ ID NO: 1479586 - RNA, 19 nt, Artificial Sequence
  Description of Artificial Sequence: Synthetic oligonucleotide
  Sense strand starting at position 623 of SEQ ID NO: 1244319
acggaagguugcuuugaaa

SEQ ID NO: 1479587 - RNA, 19 nt, Artificial Sequence
  Description of Artificial Sequence: Synthetic oligonucleotide
  Antisense strand to SEQ ID NO: 1479586
uuucaaagcaaccuuccgu

SEQ ID NO: 1479588 - RNA, 19 nt, Artificial Sequence
  Description of Artificial Sequence: Synthetic oligonucleotide
  Sense strand starting at position 659 of SEQ ID NO: 1244319
uuguuaauaccggacaauc

SEQ ID NO: 1479589 - RNA, 19 nt, Artificial Sequence
  Description of Artificial Sequence: Synthetic oligonucleotide
  Antisense strand to SEQ ID NO: 1479588
gauuguccgguauuaacaa

SEQ ID NO: 1479590 - RNA, 19 nt, Artificial Sequence
  Description of Artificial Sequence: Synthetic oligonucleotide
  Sense strand starting at position 706 of SEQ ID NO: 1244319
uuaggugauuggagaagga

SEQ ID NO: 1479591 - RNA, 19 nt, Artificial Sequence
  Description of Artificial Sequence: Synthetic oligonucleotide
  Antisense strand to SEQ ID NO: 1479590
uccuucuccaaucaccuaa

SEQ ID NO: 1479592 - RNA, 19 nt, Artificial Sequence
  Description of Artificial Sequence: Synthetic oligonucleotide
  Sense strand starting at position 839 of SEQ ID NO: 1244319
uuauaaacaugucuugagu

SEQ ID NO: 1479593 - RNA, 19 nt, Artificial Sequence
  Description of Artificial Sequence: Synthetic oligonucleotide
  Antisense strand to SEQ ID NO: 1479592
acucaagacauguuuauaa

SEQ ID NO: 1479594 - RNA, 19 nt, Artificial Sequence
  Description of Artificial Sequence: Synthetic oligonucleotide
  Sense strand starting at position 847 of SEQ ID NO: 1244319
augucuugaguauaagcaa

SEQ ID NO: 1479595 - RNA, 19 nt, Artificial Sequence
  Description of Artificial Sequence: Synthetic oligonucleotide
  Antisense strand to SEQ ID NO: 1479594
uugcuuauacucaagacau

SEQ ID NO: 1479596 - RNA, 19 nt, Artificial Sequence
  Description of Artificial Sequence: Synthetic oligonucleotide
  Sense strand starting at position 854 of SEQ ID NO: 1244319
gaguauaagcaacaaaguu

SEQ ID NO: 1479597 - RNA, 19 nt, Artificial Sequence
  Description of Artificial Sequence: Synthetic oligonucleotide
  Antisense strand to SEQ ID NO: 1479596
aacuuuguugcuuauacuc

SEQ ID NO: 1479598 - RNA, 19 nt, Artificial Sequence
  Description of Artificial Sequence: Synthetic oligonucleotide
  Sense strand starting at position 882 of SEQ ID NO: 1244319
ggcccaauuuaagaauacu

SEQ ID NO: 1479599 - RNA, 19 nt, Artificial Sequence
  Description of Artificial Sequence: Synthetic oligonucleotide
  Antisense strand to SEQ ID NO: 1479598
aguauucuuaaauugggcc

SEQ ID NO: 1479600 - RNA, 19 nt, Artificial Sequence
  Description of Artificial Sequence: Synthetic oligonucleotide
  Sense strand starting at position 893 of SEQ ID NO: 1244319
agaauacugugacugcaga

SEQ ID NO: 1479601 - RNA, 19 nt, Artificial Sequence
  Description of Artificial Sequence: Synthetic oligonucleotide
  Antisense strand to SEQ ID NO: 1479600
ucugcagucacaguauucu

SEQ ID NO: 1479602 - RNA, 19 nt, Artificial Sequence
  Description of Artificial Sequence: Synthetic oligonucleotide
  Sense strand starting at position 1095 of SEQ ID NO: 1244319
ggagaaacucaacguguaa

SEQ ID NO: 1479603 - RNA, 19 nt, Artificial Sequence
  Description of Artificial Sequence: Synthetic oligonucleotide
  Antisense strand to SEQ ID NO: 1479602
uuacacguugaguuucucc

SEQ ID NO: 1479604 - RNA, 19 nt, Artificial Sequence
  Description of Artificial Sequence: Synthetic oligonucleotide
  Sense strand starting at position 1132 of SEQ ID NO: 1244319
ggaaacgucacagguuuga

SEQ ID NO: 1479605 - RNA, 19 nt, Artificial Sequence
  Description of Artificial Sequence: Synthetic oligonucleotide
  Antisense strand to SEQ ID NO: 1479604
ucaaaccugugacguuucc

SEQ ID NO: 1479606 - RNA, 19 nt, Artificial Sequence
  Description of Artificial Sequence: Synthetic oligonucleotide
  Sense strand starting at position 1463 of SEQ ID NO: 1244319
uggcgucugcaggaaagaa

SEQ ID NO: 1479607 - RNA, 19 nt, Artificial Sequence
  Description of Artificial Sequence: Synthetic oligonucleotide
  Antisense strand to SEQ ID NO: 1479606
uucuuuccugcagacgcca

SEQ ID NO: 1479608 - RNA, 19 nt, Artificial Sequence
  Description of Artificial Sequence: Synthetic oligonucleotide
  Sense strand starting at position 1601 of SEQ ID NO: 1244319
ccgguuucccuccagaauc

SEQ ID NO: 1479609 - RNA, 19 nt, Artificial Sequence
  Description of Artificial Sequence: Synthetic oligonucleotide
  Antisense strand to SEQ ID NO: 1479608
gauucuggagggaaaccgg

SEQ ID NO: 1479610 - RNA, 19 nt, Artificial Sequence
  Description of Artificial Sequence: Synthetic oligonucleotide
  Sense strand starting at position 1603 of SEQ ID NO: 1244319
gguuucccuccagaaucuu

SEQ ID NO: 1479611 - RNA, 19 nt, Artificial Sequence
  Description of Artificial Sequence: Synthetic oligonucleotide
  Antisense strand to SEQ ID NO: 1479610
aagauucuggagggaaacc

SEQ ID NO: 1479612 - RNA, 19 nt, Artificial Sequence
  Description of Artificial Sequence: Synthetic oligonucleotide
  Sense strand starting at position 1614 of SEQ ID NO: 1244319
agaaucuuguaagucgaaa

SEQ ID NO: 1479613 - RNA, 19 nt, Artificial Sequence
  Description of Artificial Sequence: Synthetic oligonucleotide
  Antisense strand to SEQ ID NO: 1479612
uuucgacuuacaagauucu

SEQ ID NO: 1479614 - RNA, 19 nt, Artificial Sequence
  Description of Artificial Sequence: Synthetic oligonucleotide
  Sense strand starting at position 2448 of SEQ ID NO: 1244319
cuucguaaucagucgucuu

SEQ ID NO: 1479615 - RNA, 19 nt, Artificial Sequence
  Description of Artificial Sequence: Synthetic oligonucleotide
  Antisense strand to SEQ ID NO: 1479614
aagacgacugauuacgaag

SEQ ID NO: 1479616 - RNA, 19 nt, Artificial Sequence
  Description of Artificial Sequence: Synthetic oligonucleotide
  Sense strand starting at position 2564 of SEQ ID NO: 1244319
gugccagguugauuucuuu

SEQ ID NO: 1479617 - RNA, 19 nt, Artificial Sequence
  Description of Artificial Sequence: Synthetic oligonucleotide
  Antisense strand to SEQ ID NO: 1479616
aaagaaaucaaccuggcac

SEQ ID NO: 1479618 - RNA, 19 nt, Artificial Sequence
  Description of Artificial Sequence: Synthetic oligonucleotide
  Sense strand starting at position 2953 of SEQ ID NO: 1244319
ugguucucaugggcaaaga

SEQ ID NO: 1479619 - RNA, 19 nt, Artificial Sequence
  Description of Artificial Sequence: Synthetic oligonucleotide
  Antisense strand to SEQ ID NO: 1479618
ucuuugcccaugagaacca

SEQ ID NO: 1479620 - RNA, 19 nt, Artificial Sequence
  Description of Artificial Sequence: Synthetic oligonucleotide
  Sense strand starting at position 2954 of SEQ ID NO: 1244319
gguucucaugggcaaagau

SEQ ID NO: 1479621 - RNA, 19 nt, Artificial Sequence
  Description of Artificial Sequence: Synthetic oligonucleotide
  Antisense strand to SEQ ID NO: 1479620
aucuuugcccaugagaacc

SEQ ID NO: 1479622 - RNA, 19 nt, Artificial Sequence
  Description of Artificial Sequence: Synthetic oligonucleotide
  Sense strand starting at position 3239 of SEQ ID NO: 1244319
uugggcuccauggauuauu

SEQ ID NO: 1479623 - RNA, 19 nt, Artificial Sequence
  Description of Artificial Sequence: Synthetic oligonucleotide
  Antisense strand to SEQ ID NO: 1479622
aauaauccauggagcccaa

SEQ ID NO: 1479624 - RNA, 19 nt, Artificial Sequence
  Description of Artificial Sequence: Synthetic oligonucleotide
  Sense strand starting at position 3404 of SEQ ID NO: 1244319
guccaaacucgucacuaug

SEQ ID NO: 1479625 - RNA, 19 nt, Artificial Sequence
  Description of Artificial Sequence: Synthetic oligonucleotide
  Antisense strand to SEQ ID NO: 1479624
cauagugacgaguuuggac

SEQ ID NO: 1479626 - RNA, 19 nt, Artificial Sequence
  Description of Artificial Sequence: Synthetic oligonucleotide
  Sense strand starting at position 3496 of SEQ ID NO: 1244319
gccagaugggacuaugugu

SEQ ID NO: 1479627 - RNA, 19 nt, Artificial Sequence
  Description of Artificial Sequence: Synthetic oligonucleotide
  Antisense strand to SEQ ID NO: 1479626
acacauagucccaucuggc

SEQ ID NO: 1479628 - RNA, 19 nt, Artificial Sequence
  Description of Artificial Sequence: Synthetic oligonucleotide
  Sense strand starting at position 3510 of SEQ ID NO: 1244319
uguguuacacacugaacau

SEQ ID NO: 1479629 - RNA, 19 nt, Artificial Sequence
  Description of Artificial Sequence: Synthetic oligonucleotide
  Antisense strand to SEQ ID NO: 1479628
auguucaguguguaacaca

SEQ ID NO: 1479630 - RNA, 19 nt, Artificial Sequence
  Description of Artificial Sequence: Synthetic oligonucleotide
  Sense strand starting at position 3587 of SEQ ID NO: 1244319
aaauguacuuagcugaagu

SEQ ID NO: 1479631 - RNA, 19 nt, Artificial Sequence
  Description of Artificial Sequence: Synthetic oligonucleotide
  Antisense strand to SEQ ID NO: 1479630
acuucagcuaaguacauuu

SEQ ID NO: 1479632 - RNA, 19 nt, Artificial Sequence
  Description of Artificial Sequence: Synthetic oligonucleotide
  Sense strand starting at position 3705 of SEQ ID NO: 1244319
cucagcugauuaucaagua

SEQ ID NO: 1479633 - RNA, 19 nt, Artificial Sequence
  Description of Artificial Sequence: Synthetic oligonucleotide
  Antisense strand to SEQ ID NO: 1479632
uacuugauaaucagcugag

SEQ ID NO: 1479634 - RNA, 19 nt, Artificial Sequence
  Description of Artificial Sequence: Synthetic oligonucleotide
  Sense strand starting at position 3717 of SEQ ID NO: 1244319
ucaaguauuccuuaguaaa

SEQ ID NO: 1479635 - RNA, 19 nt, Artificial Sequence
  Description of Artificial Sequence: Synthetic oligonucleotide
  Antisense strand to SEQ ID NO: 1479634
uuuacuaaggaauacuuga

SEQ ID NO: 1479636 - RNA, 19 nt, Artificial Sequence
  Description of Artificial Sequence: Synthetic oligonucleotide
  Sense strand starting at position 3728 of SEQ ID NO: 1244319
uuaguaaagcauuaacuga

SEQ ID NO: 1479637 - RNA, 19 nt, Artificial Sequence
  Description of Artificial Sequence: Synthetic oligonucleotide
  Antisense strand to SEQ ID NO: 1479636
ucaguuaaugcuuuacuaa

SEQ ID NO: 1479638 - RNA, 19 nt, Artificial Sequence
  Description of Artificial Sequence: Synthetic oligonucleotide
  Sense strand starting at position 3780 of SEQ ID NO: 1244319
aagaacuugccucaugguu

SEQ ID NO: 1479639 - RNA, 19 nt, Artificial Sequence
  Description of Artificial Sequence: Synthetic oligonucleotide
  Antisense strand to SEQ ID NO: 1479638
aaccaugaggcaaguucuu

SEQ ID NO: 1479640 - RNA, 19 nt, Artificial Sequence
  Description of Artificial Sequence: Synthetic oligonucleotide
  Sense strand starting at position 41 of SEQ ID NO: 1244320
agcaacagucucuaaguua

SEQ ID NO: 1479641 - RNA, 19 nt, Artificial Sequence
  Description of Artificial Sequence: Synthetic oligonucleotide
  Antisense strand to SEQ ID NO: 1479640
uaacuuagagacuguugcu

SEQ ID NO: 1479642 - RNA, 19 nt, Artificial Sequence
  Description of Artificial Sequence: Synthetic oligonucleotide
  Sense strand starting at position 253 of SEQ ID NO: 1244320
ggcagcauagcucaccaaa

SEQ ID NO: 1479643 - RNA, 19 nt, Artificial Sequence
  Description of Artificial Sequence: Synthetic oligonucleotide
  Antisense strand to SEQ ID NO: 1479642
uuuggugagcuaugcugcc

SEQ ID NO: 1479644 - RNA, 19 nt, Artificial Sequence
  Description of Artificial Sequence: Synthetic oligonucleotide
  Sense strand starting at position 256 of SEQ ID NO: 1244320
agcauagcucaccaaauga

SEQ ID NO: 1479645 - RNA, 19 nt, Artificial Sequence
  Description of Artificial Sequence: Synthetic oligonucleotide
  Antisense strand to SEQ ID NO: 1479644
ucauuuggugagcuaugcu

SEQ ID NO: 1479646 - RNA, 19 nt, Artificial Sequence
  Description of Artificial Sequence: Synthetic oligonucleotide
  Sense strand starting at position 524 of SEQ ID NO: 1244320
gggugugggcgguaaucau

SEQ ID NO: 1479647 - RNA, 19 nt, Artificial Sequence
  Description of Artificial Sequence: Synthetic oligonucleotide
  Antisense strand to SEQ ID NO: 1479646
augauuaccgcccacaccc

SEQ ID NO: 1479648 - RNA, 19 nt, Artificial Sequence
  Description of Artificial Sequence: Synthetic oligonucleotide
  Sense strand starting at position 528 of SEQ ID NO: 1244320
gugggcgguaaucaucuaa

SEQ ID NO: 1479649 - RNA, 19 nt, Artificial Sequence
  Description of Artificial Sequence: Synthetic oligonucleotide
  Antisense strand to SEQ ID NO: 1479648
uuagaugauuaccgcccac

SEQ ID NO: 1479650 - RNA, 19 nt, Artificial Sequence
  Description of Artificial Sequence: Synthetic oligonucleotide
  Sense strand starting at position 598 of SEQ ID NO: 1244320
agaagugauuuagguaaua

SEQ ID NO: 1479651 - RNA, 19 nt, Artificial Sequence
  Description of Artificial Sequence: Synthetic oligonucleotide
  Antisense strand to SEQ ID NO: 1479650
uauuaccuaaaucacuucu

SEQ ID NO: 1479652 - RNA, 19 nt, Artificial Sequence
  Description of Artificial Sequence: Synthetic oligonucleotide
  Sense strand starting at position 646 of SEQ ID NO: 1244320
cggagaugacgcugaaauu

SEQ ID NO: 1479653 - RNA, 19 nt, Artificial Sequence
  Description of Artificial Sequence: Synthetic oligonucleotide
  Antisense strand to SEQ ID NO: 1479652
aauuucagcgucaucuccg

SEQ ID NO: 1479654 - RNA, 19 nt, Artificial Sequence
  Description of Artificial Sequence: Synthetic oligonucleotide
  Sense strand starting at position 704 of SEQ ID NO: 1244320
acgaaauucccauauugua

SEQ ID NO: 1479655 - RNA, 19 nt, Artificial Sequence
  Description of Artificial Sequence: Synthetic oligonucleotide
  Antisense strand to SEQ ID NO: 1479654
uacaauaugggaauuucgu

SEQ ID NO: 1479656 - RNA, 19 nt, Artificial Sequence
  Description of Artificial Sequence: Synthetic oligonucleotide
  Sense strand starting at position 724 of SEQ ID NO: 1244320
uucuuuagcuuccuguaga

SEQ ID NO: 1479657 - RNA, 19 nt, Artificial Sequence
  Description of Artificial Sequence: Synthetic oligonucleotide
  Antisense strand to SEQ ID NO: 1479656
ucuacaggaagcuaaagaa

SEQ ID NO: 1479658 - RNA, 19 nt, Artificial Sequence
  Description of Artificial Sequence: Synthetic oligonucleotide
  Sense strand starting at position 945 of SEQ ID NO: 1244320
ggacaugaaugagacugaa

SEQ ID NO: 1479659 - RNA, 19 nt, Artificial Sequence
  Description of Artificial Sequence: Synthetic oligonucleotide
  Antisense strand to SEQ ID NO: 1479658
uucagucucauucaugucc

SEQ ID NO: 1479660 - RNA, 19 nt, Artificial Sequence
  Description of Artificial Sequence: Synthetic oligonucleotide
  Sense strand starting at position 1071 of SEQ ID NO: 1244320
accuaccacuugucagaga

SEQ ID NO: 1479661 - RNA, 19 nt, Artificial Sequence
  Description of Artificial Sequence: Synthetic oligonucleotide
  Antisense strand to SEQ ID NO: 1479660
ucucugacaagugguaggu

SEQ ID NO: 1479662 - RNA, 19 nt, Artificial Sequence
  Description of Artificial Sequence: Synthetic oligonucleotide
  Sense strand starting at position 1120 of SEQ ID NO: 1244320
ccucuaaugucucuuccga

SEQ ID NO: 1479663 - RNA, 19 nt, Artificial Sequence
  Description of Artificial Sequence: Synthetic oligonucleotide
  Antisense strand to SEQ ID NO: 1479662
ucggaagagacauuagagg

SEQ ID NO: 1479664 - RNA, 19 nt, Artificial Sequence
  Description of Artificial Sequence: Synthetic oligonucleotide
  Sense strand starting at position 1122 of SEQ ID NO: 1244320
ucuaaugucucuuccgacu

SEQ ID NO: 1479665 - RNA, 19 nt, Artificial Sequence
  Description of Artificial Sequence: Synthetic oligonucleotide
  Antisense strand to SEQ ID NO: 1479664
agucggaagagacauuaga

SEQ ID NO: 1479666 - RNA, 19 nt, Artificial Sequence
  Description of Artificial Sequence: Synthetic oligonucleotide
  Sense strand starting at position 1173 of SEQ ID NO: 1244320
gaacgcaauggucacagaa

SEQ ID NO: 1479667 - RNA, 19 nt, Artificial Sequence
  Description of Artificial Sequence: Synthetic oligonucleotide
  Antisense strand to SEQ ID NO: 1479666
uucugugaccauugcguuc

SEQ ID NO: 1479668 - RNA, 19 nt, Artificial Sequence
  Description of Artificial Sequence: Synthetic oligonucleotide
  Sense strand starting at position 1229 of SEQ ID NO: 1244320
ggaggcugcuucccaaaca

SEQ ID NO: 1479669 - RNA, 19 nt, Artificial Sequence
  Description of Artificial Sequence: Synthetic oligonucleotide
  Antisense strand to SEQ ID NO: 1479668
uguuugggaagcagccucc

SEQ ID NO: 1479670 - RNA, 19 nt, Artificial Sequence
  Description of Artificial Sequence: Synthetic oligonucleotide
  Sense strand starting at position 2192 of SEQ ID NO: 1244320
ucagccgucccaguguaua

SEQ ID NO: 1479671 - RNA, 19 nt, Artificial Sequence
  Description of Artificial Sequence: Synthetic oligonucleotide
  Antisense strand to SEQ ID NO: 1479670
uauacacugggacggcuga

SEQ ID NO: 1479672 - RNA, 19 nt, Artificial Sequence
  Description of Artificial Sequence: Synthetic oligonucleotide
  Sense strand starting at position 2237 of SEQ ID NO: 1244320
uauguugcagcugcgaaau

SEQ ID NO: 1479673 - RNA, 19 nt, Artificial Sequence
  Description of Artificial Sequence: Synthetic oligonucleotide
  Antisense strand to SEQ ID NO: 1479672
auuucgcagcugcaacaua

SEQ ID NO: 1479674 - RNA, 19 nt, Artificial Sequence
  Description of Artificial Sequence: Synthetic oligonucleotide
  Sense strand starting at position 2247 of SEQ ID NO: 1244320
cugcgaaauuguguuggaa

SEQ ID NO: 1479675 - RNA, 19 nt, Artificial Sequence
  Description of Artificial Sequence: Synthetic oligonucleotide
  Antisense strand to SEQ ID NO: 1479674
uuccaacacaauuucgcag

SEQ ID NO: 1479676 - RNA, 19 nt, Artificial Sequence
  Description of Artificial Sequence: Synthetic oligonucleotide
  Sense strand starting at position 3100 of SEQ ID NO: 1244320
cggguaucugcuuugcgaa

SEQ ID NO: 1479677 - RNA, 19 nt, Artificial Sequence
  Description of Artificial Sequence: Synthetic oligonucleotide
  Antisense strand to SEQ ID NO: 1479676
uucgcaaagcagauacccg

SEQ ID NO: 1479678 - RNA, 19 nt, Artificial Sequence
  Description of Artificial Sequence: Synthetic oligonucleotide
  Sense strand starting at position 3221 of SEQ ID NO: 1244320
auucgauuucguugaugga

SEQ ID NO: 1479679 - RNA, 19 nt, Artificial Sequence
  Description of Artificial Sequence: Synthetic oligonucleotide
  Antisense strand to SEQ ID NO: 1479678
uccaucaacgaaaucgaau

SEQ ID NO: 1479680 - RNA, 19 nt, Artificial Sequence
  Description of Artificial Sequence: Synthetic oligonucleotide
  Sense strand starting at position 3326 of SEQ ID NO: 1244320
guguauuccguucauuuag

SEQ ID NO: 1479681 - RNA, 19 nt, Artificial Sequence
  Description of Artificial Sequence: Synthetic oligonucleotide
  Antisense strand to SEQ ID NO: 1479680
cuaaaugaacggaauacac

SEQ ID NO: 1479682 - RNA, 19 nt, Artificial Sequence
  Description of Artificial Sequence: Synthetic oligonucleotide
  Sense strand starting at position 3358 of SEQ ID NO: 1244320
accuguuaguugccagaua

SEQ ID NO: 1479683 - RNA, 19 nt, Artificial Sequence
  Description of Artificial Sequence: Synthetic oligonucleotide
  Antisense strand to SEQ ID NO: 1479682
uaucuggcaacuaacaggu

SEQ ID NO: 1479684 - RNA, 19 nt, Artificial Sequence
  Description of Artificial Sequence: Synthetic oligonucleotide
  Sense strand starting at position 3397 of SEQ ID NO: 1244320
cccugcgugauugaucaua

SEQ ID NO: 1479685 - RNA, 19 nt, Artificial Sequence
  Description of Artificial Sequence: Synthetic oligonucleotide
  Antisense strand to SEQ ID NO: 1479684
uaugaucaaucacgcaggg

SEQ ID NO: 1479686 - RNA, 19 nt, Artificial Sequence
  Description of Artificial Sequence: Synthetic oligonucleotide
  Sense strand starting at position 3469 of SEQ ID NO: 1244320
gagagucccggacauuguu

SEQ ID NO: 1479687 - RNA, 19 nt, Artificial Sequence
  Description of Artificial Sequence: Synthetic oligonucleotide
  Antisense strand to SEQ ID NO: 1479686
aacaauguccgggacucuc

SEQ ID NO: 1479688 - RNA, 19 nt, Artificial Sequence
  Description of Artificial Sequence: Synthetic oligonucleotide
  Sense strand starting at position 3553 of SEQ ID NO: 1244320
gugcuaguggcagagacaa

SEQ ID NO: 1479689 - RNA, 19 nt, Artificial Sequence
  Description of Artificial Sequence: Synthetic oligonucleotide
  Antisense strand to SEQ ID NO: 1479688
uugucucugccacuagcac

SEQ ID NO: 1479690 - RNA, 19 nt, Artificial Sequence
  Description of Artificial Sequence: Synthetic oligonucleotide
  Sense strand starting at position 3597 of SEQ ID NO: 1244320
ucagguuuguuggugacaa

SEQ ID NO: 1479691 - RNA, 19 nt, Artificial Sequence
  Description of Artificial Sequence: Synthetic oligonucleotide
  Antisense strand to SEQ ID NO: 1479690
uugucaccaacaaaccuga

SEQ ID NO: 1479692 - RNA, 19 nt, Artificial Sequence
  Description of Artificial Sequence: Synthetic oligonucleotide
  Sense strand starting at position 3599 of SEQ ID NO: 1244320
agguuuguuggugacaagu

SEQ ID NO: 1479693 - RNA, 19 nt, Artificial Sequence
  Description of Artificial Sequence: Synthetic oligonucleotide
  Antisense strand to SEQ ID NO: 1479692
acuugucaccaacaaaccu

SEQ ID NO: 1479694 - RNA, 19 nt, Artificial Sequence
  Description of Artificial Sequence: Synthetic oligonucleotide
  Sense strand starting at position 3605 of SEQ ID NO: 1244320
guuggugacaagugcugaa

SEQ ID NO: 1479695 - RNA, 19 nt, Artificial Sequence
  Description of Artificial Sequence: Synthetic oligonucleotide
  Antisense strand to SEQ ID NO: 1479694
uucagcacuugucaccaac

SEQ ID NO: 1479696 - RNA, 19 nt, Artificial Sequence
  Description of Artificial Sequence: Synthetic oligonucleotide
  Sense strand starting at position 3609 of SEQ ID NO: 1244320
gugacaagugcugaagaga

SEQ ID NO: 1479697 - RNA, 19 nt, Artificial Sequence
  Description of Artificial Sequence: Synthetic oligonucleotide
  Antisense strand to SEQ ID NO: 1479696
ucucuucagcacuugucac

SEQ ID NO: 1479698 - RNA, 19 nt, Artificial Sequence
  Description of Artificial Sequence: Synthetic oligonucleotide
  Sense strand starting at position 3659 of SEQ ID NO: 1244320
uguguagaggccugugaaa

SEQ ID NO: 1479699 - RNA, 19 nt, Artificial Sequence
  Description of Artificial Sequence: Synthetic oligonucleotide
  Antisense strand to SEQ ID NO: 1479698
uuucacaggccucuacaca

SEQ ID NO: 1479700 - RNA, 19 nt, Artificial Sequence
  Description of Artificial Sequence: Synthetic oligonucleotide
  Sense strand starting at position 3661 of SEQ ID NO: 1244320
uguagaggccugugaaauu

SEQ ID NO: 1479701 - RNA, 19 nt, Artificial Sequence
  Description of Artificial Sequence: Synthetic oligonucleotide
  Antisense strand to SEQ ID NO: 1479700
aauuucacaggccucuaca

SEQ ID NO: 1479702 - RNA, 19 nt, Artificial Sequence
  Description of Artificial Sequence: Synthetic oligonucleotide
  Sense strand starting at position 3696 of SEQ ID NO: 1244320
gaggaaagcucaccgagaa

SEQ ID NO: 1479703 - RNA, 19 nt, Artificial Sequence
  Description of Artificial Sequence: Synthetic oligonucleotide
  Antisense strand to SEQ ID NO: 1479702
uucucggugagcuuuccuc

SEQ ID NO: 1479704 - RNA, 19 nt, Artificial Sequence
  Description of Artificial Sequence: Synthetic oligonucleotide
  Sense strand starting at position 3697 of SEQ ID NO: 1244320
aggaaagcucaccgagaau

SEQ ID NO: 1479705 - RNA, 19 nt, Artificial Sequence
  Description of Artificial Sequence: Synthetic oligonucleotide
  Antisense strand to SEQ ID NO: 1479704
auucucggugagcuuuccu

SEQ ID NO: 1479706 - RNA, 19 nt, Artificial Sequence
  Description of Artificial Sequence: Synthetic oligonucleotide
  Sense strand starting at position 3708 of SEQ ID NO: 1244320
ccgagaauuacccaggcca

SEQ ID NO: 1479707 - RNA, 19 nt, Artificial Sequence
  Description of Artificial Sequence: Synthetic oligonucleotide
  Antisense strand to SEQ ID NO: 1479706
uggccuggguaauucucgg

SEQ ID NO: 1479708 - RNA, 19 nt, Artificial Sequence
  Description of Artificial Sequence: Synthetic oligonucleotide
  Sense strand starting at position 3710 of SEQ ID NO: 1244320
gagaauuacccaggccaug

SEQ ID NO: 1479709 - RNA, 19 nt, Artificial Sequence
  Description of Artificial Sequence: Synthetic oligonucleotide
  Antisense strand to SEQ ID NO: 1479708
cauggccuggguaauucuc

SEQ ID NO: 1479710 - RNA, 19 nt, Artificial Sequence
  Description of Artificial Sequence: Synthetic oligonucleotide
  Sense strand starting at position 3721 of SEQ ID NO: 1244320
aggccauguuuauuacaca

SEQ ID NO: 1479711 - RNA, 19 nt, Artificial Sequence
  Description of Artificial Sequence: Synthetic oligonucleotide
  Antisense strand to SEQ ID NO: 1479710
uguguaauaaacauggccu

SEQ ID NO: 1479712 - RNA, 19 nt, Artificial Sequence
  Description of Artificial Sequence: Synthetic oligonucleotide
  Sense strand starting at position 3899 of SEQ ID NO: 1244320
gggagcuguuggguuugaa

SEQ ID NO: 1479713 - RNA, 19 nt, Artificial Sequence
  Description of Artificial Sequence: Synthetic oligonucleotide
  Antisense strand to SEQ ID NO: 1479712
uucaaacccaacagcuccc

SEQ ID NO: 1479714 - RNA, 19 nt, Artificial Sequence
  Description of Artificial Sequence: Synthetic oligonucleotide
  Sense strand starting at position 3909 of SEQ ID NO: 1244320
ggguuugaaggcuauuaga

SEQ ID NO: 1479715 - RNA, 19 nt, Artificial Sequence
  Description of Artificial Sequence: Synthetic oligonucleotide
  Antisense strand to SEQ ID NO: 1479714
ucuaauagccuucaaaccc

SEQ ID NO: 1479716 - RNA, 19 nt, Artificial Sequence
  Description of Artificial Sequence: Synthetic oligonucleotide
  Sense strand starting at position 3917 of SEQ ID NO: 1244320
aggcuauuagacuaguagu

SEQ ID NO: 1479717 - RNA, 19 nt, Artificial Sequence
  Description of Artificial Sequence: Synthetic oligonucleotide
  Antisense strand to SEQ ID NO: 1479716
acuacuagucuaauagccu

SEQ ID NO: 1479718 - RNA, 19 nt, Artificial Sequence
  Description of Artificial Sequence: Synthetic oligonucleotide
  Sense strand starting at position 3956 of SEQ ID NO: 1244320
ggacauuucuaucauuggu

SEQ ID NO: 1479719 - RNA, 19 nt, Artificial Sequence
  Description of Artificial Sequence: Synthetic oligonucleotide
  Antisense strand to SEQ ID NO: 1479718
accaaugauagaaaugucc

SEQ ID NO: 1479720 - RNA, 19 nt, Artificial Sequence
  Description of Artificial Sequence: Synthetic oligonucleotide
  Sense strand starting at position 1029 of SEQ ID NO: 1244321
gcugauaaauaucuguacu

SEQ ID NO: 1479721 - RNA, 19 nt, Artificial Sequence
  Description of Artificial Sequence: Synthetic oligonucleotide
  Antisense strand to SEQ ID NO: 1479720
aguacagauauuuaucagc

SEQ ID NO: 1479722 - RNA, 19 nt, Artificial Sequence
  Description of Artificial Sequence: Synthetic oligonucleotide
  Sense strand starting at position 1075 of SEQ ID NO: 1244321
uauuacgugccagaaacua

SEQ ID NO: 1479723 - RNA, 19 nt, Artificial Sequence
  Description of Artificial Sequence: Synthetic oligonucleotide
  Antisense strand to SEQ ID NO: 1479722
uaguuucuggcacguaaua

SEQ ID NO: 1479724 - RNA, 19 nt, Artificial Sequence
  Description of Artificial Sequence: Synthetic oligonucleotide
  Sense strand starting at position 1215 of SEQ ID NO: 1244321
gccggaguguggaacuuua

SEQ ID NO: 1479725 - RNA, 19 nt, Artificial Sequence
  Description of Artificial Sequence: Synthetic oligonucleotide
  Antisense strand to SEQ ID NO: 1479724
uaaaguuccacacuccggc

SEQ ID NO: 1479726 - RNA, 19 nt, Artificial Sequence
  Description of Artificial Sequence: Synthetic oligonucleotide
  Sense strand starting at position 1241 of SEQ ID NO: 1244321
uuaguaaaguuccacagaa

SEQ ID NO: 1479727 - RNA, 19 nt, Artificial Sequence
  Description of Artificial Sequence: Synthetic oligonucleotide
  Antisense strand to SEQ ID NO: 1479726
uucuguggaacuuuacuaa

SEQ ID NO: 1479728 - RNA, 19 nt, Artificial Sequence
  Description of Artificial Sequence: Synthetic oligonucleotide
  Sense strand starting at position 1361 of SEQ ID NO: 1244321
gagaacugcuggcugcuaa

SEQ ID NO: 1479729 - RNA, 19 nt, Artificial Sequence
  Description of Artificial Sequence: Synthetic oligonucleotide
  Antisense strand to SEQ ID NO: 1479728
uuagcagccagcaguucuc

SEQ ID NO: 1479730 - RNA, 19 nt, Artificial Sequence
  Description of Artificial Sequence: Synthetic oligonucleotide
  Sense strand starting at position 1415 of SEQ ID NO: 1244321
aauagucuccaguacguuu

SEQ ID NO: 1479731 - RNA, 19 nt, Artificial Sequence
  Description of Artificial Sequence: Synthetic oligonucleotide
  Antisense strand to SEQ ID NO: 1479730
aaacguacuggagacuauu

SEQ ID NO: 1479732 - RNA, 19 nt, Artificial Sequence
  Description of Artificial Sequence: Synthetic oligonucleotide
  Sense strand starting at position 1454 of SEQ ID NO: 1244321
ucaggcgucucuucuggaa

SEQ ID NO: 1479733 - RNA, 19 nt, Artificial Sequence
  Description of Artificial Sequence: Synthetic oligonucleotide
  Antisense strand to SEQ ID NO: 1479732
uuccagaagagacgccuga

SEQ ID NO: 1479734 - RNA, 19 nt, Artificial Sequence
  Description of Artificial Sequence: Synthetic oligonucleotide
  Sense strand starting at position 1533 of SEQ ID NO: 1244321
gcccuagucgagcaugaaa

SEQ ID NO: 1479735 - RNA, 19 nt, Artificial Sequence
  Description of Artificial Sequence: Synthetic oligonucleotide
  Antisense strand to SEQ ID NO: 1479734
uuucaugcucgacuagggc

SEQ ID NO: 1479736 - RNA, 19 nt, Artificial Sequence
  Description of Artificial Sequence: Synthetic oligonucleotide
  Sense strand starting at position 1535 of SEQ ID NO: 1244321
ccuagucgagcaugaaauc

SEQ ID NO: 1479737 - RNA, 19 nt, Artificial Sequence
  Description of Artificial Sequence: Synthetic oligonucleotide
  Antisense strand to SEQ ID NO: 1479736
gauuucaugcucgacuagg

SEQ ID NO: 1479738 - RNA, 19 nt, Artificial Sequence
  Description of Artificial Sequence: Synthetic oligonucleotide
  Sense strand starting at position 1587 of SEQ ID NO: 1244321
gucgaagcucuauaaucac

SEQ ID NO: 1479739 - RNA, 19 nt, Artificial Sequence
  Description of Artificial Sequence: Synthetic oligonucleotide
  Antisense strand to SEQ ID NO: 1479738
gugauuauagagcuucgac

SEQ ID NO: 1479740 - RNA, 19 nt, Artificial Sequence
  Description of Artificial Sequence: Synthetic oligonucleotide
  Sense strand starting at position 1593 of SEQ ID NO: 1244321
gcucuauaaucaccaagga

SEQ ID NO: 1479741 - RNA, 19 nt, Artificial Sequence
  Description of Artificial Sequence: Synthetic oligonucleotide
  Antisense strand to SEQ ID NO: 1479740
uccuuggugauuauagagc

SEQ ID NO: 1479742 - RNA, 19 nt, Artificial Sequence
  Description of Artificial Sequence: Synthetic oligonucleotide
  Sense strand starting at position 1611 of SEQ ID NO: 1244321
aggguauagugacaaucua

SEQ ID NO: 1479743 - RNA, 19 nt, Artificial Sequence
  Description of Artificial Sequence: Synthetic oligonucleotide
  Antisense strand to SEQ ID NO: 1479742
uagauugucacuauacccu

SEQ ID NO: 1479744 - RNA, 19 nt, Artificial Sequence
  Description of Artificial Sequence: Synthetic oligonucleotide
  Sense strand starting at position 1899 of SEQ ID NO: 1244321
cuacucuucccgggaagga

SEQ ID NO: 1479745 - RNA, 19 nt, Artificial Sequence
  Description of Artificial Sequence: Synthetic oligonucleotide
  Antisense strand to SEQ ID NO: 1479744
uccuucccgggaagaguag

SEQ ID NO: 1479746 - RNA, 19 nt, Artificial Sequence
  Description of Artificial Sequence: Synthetic oligonucleotide
  Sense strand starting at position 2000 of SEQ ID NO: 1244321
cgagauaaaccgugguccu

SEQ ID NO: 1479747 - RNA, 19 nt, Artificial Sequence
  Description of Artificial Sequence: Synthetic oligonucleotide
  Antisense strand to SEQ ID NO: 1479746
aggaccacgguuuaucucg

SEQ ID NO: 1479748 - RNA, 19 nt, Artificial Sequence
  Description of Artificial Sequence: Synthetic oligonucleotide
  Sense strand starting at position 2045 of SEQ ID NO: 1244321
ucgaaaucucgcgaauauu

SEQ ID NO: 1479749 - RNA, 19 nt, Artificial Sequence
  Description of Artificial Sequence: Synthetic oligonucleotide
  Antisense strand to SEQ ID NO: 1479748
aauauucgcgagauuucga

SEQ ID NO: 1479750 - RNA, 19 nt, Artificial Sequence
  Description of Artificial Sequence: Synthetic oligonucleotide
  Sense strand starting at position 2053 of SEQ ID NO: 1244321
ucgcgaauauuggucaaug

SEQ ID NO: 1479751 - RNA, 19 nt, Artificial Sequence
  Description of Artificial Sequence: Synthetic oligonucleotide
  Antisense strand to SEQ ID NO: 1479750
cauugaccaauauucgcga

SEQ ID NO: 1479752 - RNA, 19 nt, Artificial Sequence
  Description of Artificial Sequence: Synthetic oligonucleotide
  Sense strand starting at position 2080 of SEQ ID NO: 1244321
ucgcgagauuucuuucagc

SEQ ID NO: 1479753 - RNA, 19 nt, Artificial Sequence
  Description of Artificial Sequence: Synthetic oligonucleotide
  Antisense strand to SEQ ID NO: 1479752
gcugaaagaaaucucgcga

SEQ ID NO: 1479754 - RNA, 19 nt, Artificial Sequence
  Description of Artificial Sequence: Synthetic oligonucleotide
  Sense strand starting at position 2213 of SEQ ID NO: 1244321
aguuaaacagcucgcaaau

SEQ ID NO: 1479755 - RNA, 19 nt, Artificial Sequence
  Description of Artificial Sequence: Synthetic oligonucleotide
  Antisense strand to SEQ ID NO: 1479754
auuugcgagcuguuuaacu

SEQ ID NO: 1479756 - RNA, 19 nt, Artificial Sequence
  Description of Artificial Sequence: Synthetic oligonucleotide
  Sense strand starting at position 2239 of SEQ ID NO: 1244321
uccagaucccuguacugaa

SEQ ID NO: 1479757 - RNA, 19 nt, Artificial Sequence
  Description of Artificial Sequence: Synthetic oligonucleotide
  Antisense strand to SEQ ID NO: 1479756
uucaguacagggaucugga

SEQ ID NO: 1479758 - RNA, 19 nt, Artificial Sequence
  Description of Artificial Sequence: Synthetic oligonucleotide
  Sense strand starting at position 2597 of SEQ ID NO: 1244321
ugguaucaggagugucuua

SEQ ID NO: 1479759 - RNA, 19 nt, Artificial Sequence
  Description of Artificial Sequence: Synthetic oligonucleotide
  Antisense strand to SEQ ID NO: 1479758
uaagacacuccugauacca

SEQ ID NO: 1479760 - RNA, 19 nt, Artificial Sequence
  Description of Artificial Sequence: Synthetic oligonucleotide
  Sense strand starting at position 2625 of SEQ ID NO: 1244321
aguuuaaccugagauacua

SEQ ID NO: 1479761 - RNA, 19 nt, Artificial Sequence
  Description of Artificial Sequence: Synthetic oligonucleotide
  Antisense strand to SEQ ID NO: 1479760
uaguaucucagguuaaacu

SEQ ID NO: 1479762 - RNA, 19 nt, Artificial Sequence
  Description of Artificial Sequence: Synthetic oligonucleotide
  Sense strand starting at position 2667 of SEQ ID NO: 1244321
aagauaguggcgcauugua

SEQ ID NO: 1479763 - RNA, 19 nt, Artificial Sequence
  Description of Artificial Sequence: Synthetic oligonucleotide
  Antisense strand to SEQ ID NO: 1479762
uacaaugcgccacuaucuu

SEQ ID NO: 1479764 - RNA, 19 nt, Artificial Sequence
  Description of Artificial Sequence: Synthetic oligonucleotide
  Sense strand starting at position 2702 of SEQ ID NO: 1244321
gagccuauagcacaguuaa

SEQ ID NO: 1479765 - RNA, 19 nt, Artificial Sequence
  Description of Artificial Sequence: Synthetic oligonucleotide
  Antisense strand to SEQ ID NO: 1479764
uuaacugugcuauaggcuc

SEQ ID NO: 1479766 - RNA, 19 nt, Artificial Sequence
  Description of Artificial Sequence: Synthetic oligonucleotide
  Sense strand starting at position 3088 of SEQ ID NO: 1244321
uuaguaagcaucuguggag

SEQ ID NO: 1479767 - RNA, 19 nt, Artificial Sequence
  Description of Artificial Sequence: Synthetic oligonucleotide
  Antisense strand to SEQ ID NO: 1479766
cuccacagaugcuuacuaa

SEQ ID NO: 1479768 - RNA, 19 nt, Artificial Sequence
  Description of Artificial Sequence: Synthetic oligonucleotide
  Sense strand starting at position 3089 of SEQ ID NO: 1244321
uaguaagcaucuguggagu

SEQ ID NO: 1479769 - RNA, 19 nt, Artificial Sequence
  Description of Artificial Sequence: Synthetic oligonucleotide
  Antisense strand to SEQ ID NO: 1479768
acuccacagaugcuuacua

SEQ ID NO: 1479770 - RNA, 19 nt, Artificial Sequence
  Description of Artificial Sequence: Synthetic oligonucleotide
  Sense strand starting at position 3103 of SEQ ID NO: 1244321
ggaguccuaauauguguau

SEQ ID NO: 1479771 - RNA, 19 nt, Artificial Sequence
  Description of Artificial Sequence: Synthetic oligonucleotide
  Antisense strand to SEQ ID NO: 1479770
auacacauauuaggacucc

SEQ ID NO: 1479772 - RNA, 19 nt, Artificial Sequence
  Description of Artificial Sequence: Synthetic oligonucleotide
  Sense strand starting at position 3104 of SEQ ID NO: 1244321
gaguccuaauauguguaua

SEQ ID NO: 1479773 - RNA, 19 nt, Artificial Sequence
  Description of Artificial Sequence: Synthetic oligonucleotide
  Antisense strand to SEQ ID NO: 1479772
uauacacauauuaggacuc

SEQ ID NO: 1479774 - RNA, 19 nt, Artificial Sequence
  Description of Artificial Sequence: Synthetic oligonucleotide
  Sense strand starting at position 3318 of SEQ ID NO: 1244321
uugauaggcuaaucuuauu

SEQ ID NO: 1479775 - RNA, 19 nt, Artificial Sequence
  Description of Artificial Sequence: Synthetic oligonucleotide
  Antisense strand to SEQ ID NO: 1479774
aauaagauuagccuaucaa

SEQ ID NO: 1479776 - RNA, 19 nt, Artificial Sequence
  Description of Artificial Sequence: Synthetic oligonucleotide
  Sense strand starting at position 3478 of SEQ ID NO: 1244321
uacuaaguguugcuaggaa

SEQ ID NO: 1479777 - RNA, 19 nt, Artificial Sequence
  Description of Artificial Sequence: Synthetic oligonucleotide
  Antisense strand to SEQ ID NO: 1479776
uuccuagcaacacuuagua

SEQ ID NO: 1479778 - RNA, 19 nt, Artificial Sequence
  Description of Artificial Sequence: Synthetic oligonucleotide
  Sense strand starting at position 3482 of SEQ ID NO: 1244321
aaguguugcuaggaaauuu

SEQ ID NO: 1479779 - RNA, 19 nt, Artificial Sequence
  Description of Artificial Sequence: Synthetic oligonucleotide
  Antisense strand to SEQ ID NO: 1479778
aaauuuccuagcaacacuu

SEQ ID NO: 1479780 - RNA, 19 nt, Artificial Sequence
  Description of Artificial Sequence: Synthetic oligonucleotide
  Sense strand starting at position 3531 of SEQ ID NO: 1244321
acuaacuucugguuacaga

SEQ ID NO: 1479781 - RNA, 19 nt, Artificial Sequence
  Description of Artificial Sequence: Synthetic oligonucleotide
  Antisense strand to SEQ ID NO: 1479780
ucuguaaccagaaguuagu

SEQ ID NO: 1479782 - RNA, 19 nt, Artificial Sequence
  Description of Artificial Sequence: Synthetic oligonucleotide
  Sense strand starting at position 3555 of SEQ ID NO: 1244321
augagaaguuaucauuugu

SEQ ID NO: 1479783 - RNA, 19 nt, Artificial Sequence
  Description of Artificial Sequence: Synthetic oligonucleotide
  Antisense strand to SEQ ID NO: 1479782
acaaaugauaacuucucau

SEQ ID NO: 1479784 - RNA, 19 nt, Artificial Sequence
  Description of Artificial Sequence: Synthetic oligonucleotide
  Sense strand starting at position 3562 of SEQ ID NO: 1244321
guuaucauuugucaucuga

SEQ ID NO: 1479785 - RNA, 19 nt, Artificial Sequence
  Description of Artificial Sequence: Synthetic oligonucleotide
  Antisense strand to SEQ ID NO: 1479784
ucagaugacaaaugauaac

SEQ ID NO: 1479786 - RNA, 19 nt, Artificial Sequence
  Description of Artificial Sequence: Synthetic oligonucleotide
  Sense strand starting at position 3625 of SEQ ID NO: 1244321
auaagagagcaauguccuu

SEQ ID NO: 1479787 - RNA, 19 nt, Artificial Sequence
  Description of Artificial Sequence: Synthetic oligonucleotide
  Antisense strand to SEQ ID NO: 1479786
aaggacauugcucucuuau

SEQ ID NO: 1479788 - RNA, 19 nt, Artificial Sequence
  Description of Artificial Sequence: Synthetic oligonucleotide
  Sense strand starting at position 3630 of SEQ ID NO: 1244321
agagcaauguccuuuggga

SEQ ID NO: 1479789 - RNA, 19 nt, Artificial Sequence
  Description of Artificial Sequence: Synthetic oligonucleotide
  Antisense strand to SEQ ID NO: 1479788
ucccaaaggacauugcucu

SEQ ID NO: 1479790 - RNA, 19 nt, Artificial Sequence
  Description of Artificial Sequence: Synthetic oligonucleotide
  Sense strand starting at position 3653 of SEQ ID NO: 1244321
gaggcagguacuugagauc

SEQ ID NO: 1479791 - RNA, 19 nt, Artificial Sequence
  Description of Artificial Sequence: Synthetic oligonucleotide
  Antisense strand to SEQ ID NO: 1479790
gaucucaaguaccugccuc

SEQ ID NO: 1479792 - RNA, 19 nt, Artificial Sequence
  Description of Artificial Sequence: Synthetic oligonucleotide
  Sense strand starting at position 3971 of SEQ ID NO: 1244321
ggcaaauuguaagugacua

SEQ ID NO: 1479793 - RNA, 19 nt, Artificial Sequence
  Description of Artificial Sequence: Synthetic oligonucleotide
  Antisense strand to SEQ ID NO: 1479792
uagucacuuacaauuugcc

SEQ ID NO: 1479794 - RNA, 19 nt, Artificial Sequence
  Description of Artificial Sequence: Synthetic oligonucleotide
  Sense strand starting at position 3976 of SEQ ID NO: 1244321
auuguaagugacuaagcuu

SEQ ID NO: 1479795 - RNA, 19 nt, Artificial Sequence
  Description of Artificial Sequence: Synthetic oligonucleotide
  Antisense strand to SEQ ID NO: 1479794
aagcuuagucacuuacaau

SEQ ID NO: 1479796 - RNA, 19 nt, Artificial Sequence
  Description of Artificial Sequence: Synthetic oligonucleotide
  Sense strand starting at position 3979 of SEQ ID NO: 1244321
guaagugacuaagcuuuga

SEQ ID NO: 1479797 - RNA, 19 nt, Artificial Sequence
  Description of Artificial Sequence: Synthetic oligonucleotide
  Antisense strand to SEQ ID NO: 1479796
ucaaagcuuagucacuuac

SEQ ID NO: 1479798 - RNA, 19 nt, Artificial Sequence
  Description of Artificial Sequence: Synthetic oligonucleotide
  Sense strand starting at position 3983 of SEQ ID NO: 1244321
gugacuaagcuuugaagga

SEQ ID NO: 1479799 - RNA, 19 nt, Artificial Sequence
  Description of Artificial Sequence: Synthetic oligonucleotide
  Antisense strand to SEQ ID NO: 1479798
uccuucaaagcuuagucac

SEQ ID NO: 1479800 - RNA, 19 nt, Artificial Sequence
  Description of Artificial Sequence: Synthetic oligonucleotide
  Sense strand starting at position 445 of SEQ ID NO: 1244322
cgucucauuucuucccuga

SEQ ID NO: 1479801 - RNA, 19 nt, Artificial Sequence
  Description of Artificial Sequence: Synthetic oligonucleotide
  Antisense strand to SEQ ID NO: 1479800
ucagggaagaaaugagacg

SEQ ID NO: 1479802 - RNA, 19 nt, Artificial Sequence
  Description of Artificial Sequence: Synthetic oligonucleotide
  Sense strand starting at position 449 of SEQ ID NO: 1244322
ucauuucuucccugaguuu

SEQ ID NO: 1479803 - RNA, 19 nt, Artificial Sequence
  Description of Artificial Sequence: Synthetic oligonucleotide
  Antisense strand to SEQ ID NO: 1479802
aaacucagggaagaaauga

SEQ ID NO: 1479804 - RNA, 19 nt, Artificial Sequence
  Description of Artificial Sequence: Synthetic oligonucleotide
  Sense strand starting at position 452 of SEQ ID NO: 1244322
uuucuucccugaguuugaa

SEQ ID NO: 1479805 - RNA, 19 nt, Artificial Sequence
  Description of Artificial Sequence: Synthetic oligonucleotide
  Antisense strand to SEQ ID NO: 1479804
uucaaacucagggaagaaa

SEQ ID NO: 1479806 - RNA, 19 nt, Artificial Sequence
  Description of Artificial Sequence: Synthetic oligonucleotide
  Sense strand starting at position 464 of SEQ ID NO: 1244322
guuugaauuuguuaggcca

SEQ ID NO: 1479807 - RNA, 19 nt, Artificial Sequence
  Description of Artificial Sequence: Synthetic oligonucleotide
  Antisense strand to SEQ ID NO: 1479806
uggccuaacaaauucaaac

SEQ ID NO: 1479808 - RNA, 19 nt, Artificial Sequence
  Description of Artificial Sequence: Synthetic oligonucleotide
  Sense strand starting at position 483 of SEQ ID NO: 1244322
ucugguagcuggguaaaua

SEQ ID NO: 1479809 - RNA, 19 nt, Artificial Sequence
  Description of Artificial Sequence: Synthetic oligonucleotide
  Antisense strand to SEQ ID NO: 1479808
uauuuacccagcuaccaga

SEQ ID NO: 1479810 - RNA, 19 nt, Artificial Sequence
  Description of Artificial Sequence: Synthetic oligonucleotide
  Sense strand starting at position 484 of SEQ ID NO: 1244322
cugguagcuggguaaauaa

SEQ ID NO: 1479811 - RNA, 19 nt, Artificial Sequence
  Description of Artificial Sequence: Synthetic oligonucleotide
  Antisense strand to SEQ ID NO: 1479810
uuauuuacccagcuaccag

SEQ ID NO: 1479812 - RNA, 19 nt, Artificial Sequence
  Description of Artificial Sequence: Synthetic oligonucleotide
  Sense strand starting at position 515 of SEQ ID NO: 1244322
auguuaaucuugucuguaa

SEQ ID NO: 1479813 - RNA, 19 nt, Artificial Sequence
  Description of Artificial Sequence: Synthetic oligonucleotide
  Antisense strand to SEQ ID NO: 1479812
uuacagacaagauuaacau

SEQ ID NO: 1479814 - RNA, 19 nt, Artificial Sequence
  Description of Artificial Sequence: Synthetic oligonucleotide
  Sense strand starting at position 516 of SEQ ID NO: 1244322
uguuaaucuugucuguaaa

SEQ ID NO: 1479815 - RNA, 19 nt, Artificial Sequence
  Description of Artificial Sequence: Synthetic oligonucleotide
  Antisense strand to SEQ ID NO: 1479814
uuuacagacaagauuaaca

SEQ ID NO: 1479816 - RNA, 19 nt, Artificial Sequence
  Description of Artificial Sequence: Synthetic oligonucleotide
  Sense strand starting at position 555 of SEQ ID NO: 1244322
uuccuagaguuguugagga

SEQ ID NO: 1479817 - RNA, 19 nt, Artificial Sequence
  Description of Artificial Sequence: Synthetic oligonucleotide
  Antisense strand to SEQ ID NO: 1479816
uccucaacaacucuaggaa

SEQ ID NO: 1479818 - RNA, 19 nt, Artificial Sequence
  Description of Artificial Sequence: Synthetic oligonucleotide
  Sense strand starting at position 557 of SEQ ID NO: 1244322
ccuagaguuguugaggauu

SEQ ID NO: 1479819 - RNA, 19 nt, Artificial Sequence
  Description of Artificial Sequence: Synthetic oligonucleotide
  Antisense strand to SEQ ID NO: 1479818
aauccucaacaacucuagg

SEQ ID NO: 1479820 - RNA, 19 nt, Artificial Sequence
  Description of Artificial Sequence: Synthetic oligonucleotide
  Sense strand starting at position 565 of SEQ ID NO: 1244322
uguugaggauuagauaaag

SEQ ID NO: 1479821 - RNA, 19 nt, Artificial Sequence
  Description of Artificial Sequence: Synthetic oligonucleotide
  Antisense strand to SEQ ID NO: 1479820
cuuuaucuaauccucaaca

SEQ ID NO: 1479822 - RNA, 19 nt, Artificial Sequence
  Description of Artificial Sequence: Synthetic oligonucleotide
  Sense strand starting at position 579 of SEQ ID NO: 1244322
uaaaguaaugcagaguauc

SEQ ID NO: 1479823 - RNA, 19 nt, Artificial Sequence
  Description of Artificial Sequence: Synthetic oligonucleotide
  Antisense strand to SEQ ID NO: 1479822
gauacucugcauuacuuua

SEQ ID NO: 1479824 - RNA, 19 nt, Artificial Sequence
  Description of Artificial Sequence: Synthetic oligonucleotide
  Sense strand starting at position 715 of SEQ ID NO: 1244322
ccaaguuuccagugacaaa

SEQ ID NO: 1479825 - RNA, 19 nt, Artificial Sequence
  Description of Artificial Sequence: Synthetic oligonucleotide
  Antisense strand to SEQ ID NO: 1479824
uuugucacuggaaacuugg

SEQ ID NO: 1479826 - RNA, 19 nt, Artificial Sequence
  Description of Artificial Sequence: Synthetic oligonucleotide
  Sense strand starting at position 727 of SEQ ID NO: 1244322
ugacaaaguucuguaguuc

SEQ ID NO: 1479827 - RNA, 19 nt, Artificial Sequence
  Description of Artificial Sequence: Synthetic oligonucleotide
  Antisense strand to SEQ ID NO: 1479826
gaacuacagaacuuuguca

SEQ ID NO: 1479828 - RNA, 19 nt, Artificial Sequence
  Description of Artificial Sequence: Synthetic oligonucleotide
  Sense strand starting at position 728 of SEQ ID NO: 1244322
gacaaaguucuguaguucu

SEQ ID NO: 1479829 - RNA, 19 nt, Artificial Sequence
  Description of Artificial Sequence: Synthetic oligonucleotide
  Antisense strand to SEQ ID NO: 1479828
agaacuacagaacuuuguc

SEQ ID NO: 1479830 - RNA, 19 nt, Artificial Sequence
  Description of Artificial Sequence: Synthetic oligonucleotide
  Sense strand starting at position 777 of SEQ ID NO: 1244322
augugauguuacccaguga

SEQ ID NO: 1479831 - RNA, 19 nt, Artificial Sequence
  Description of Artificial Sequence: Synthetic oligonucleotide
  Antisense strand to SEQ ID NO: 1479830
ucacuggguaacaucacau

SEQ ID NO: 1479832 - RNA, 19 nt, Artificial Sequence
  Description of Artificial Sequence: Synthetic oligonucleotide
  Sense strand starting at position 781 of SEQ ID NO: 1244322
gauguuacccagugaggua

SEQ ID NO: 1479833 - RNA, 19 nt, Artificial Sequence
  Description of Artificial Sequence: Synthetic oligonucleotide
  Antisense strand to SEQ ID NO: 1479832
uaccucacuggguaacauc

SEQ ID NO: 1479834 - RNA, 19 nt, Artificial Sequence
  Description of Artificial Sequence: Synthetic oligonucleotide
  Sense strand starting at position 782 of SEQ ID NO: 1244322
auguuacccagugagguau

SEQ ID NO: 1479835 - RNA, 19 nt, Artificial Sequence
  Description of Artificial Sequence: Synthetic oligonucleotide
  Antisense strand to SEQ ID NO: 1479834
auaccucacuggguaacau

SEQ ID NO: 1479836 - RNA, 19 nt, Artificial Sequence
  Description of Artificial Sequence: Synthetic oligonucleotide
  Sense strand starting at position 1424 of SEQ ID NO: 1244322
ucugguccugcccaguuaa

SEQ ID NO: 1479837 - RNA, 19 nt, Artificial Sequence
  Description of Artificial Sequence: Synthetic oligonucleotide
  Antisense strand to SEQ ID NO: 1479836
uuaacugggcaggaccaga

SEQ ID NO: 1479838 - RNA, 19 nt, Artificial Sequence
  Description of Artificial Sequence: Synthetic oligonucleotide
  Sense strand starting at position 2046 of SEQ ID NO: 1244322
cuacgauucccaggaugcu

SEQ ID NO: 1479839 - RNA, 19 nt, Artificial Sequence
  Description of Artificial Sequence: Synthetic oligonucleotide
  Antisense strand to SEQ ID NO: 1479838
agcauccugggaaucguag

SEQ ID NO: 1479840 - RNA, 19 nt, Artificial Sequence
  Description of Artificial Sequence: Synthetic oligonucleotide
  Sense strand starting at position 2213 of SEQ ID NO: 1244322
gucuguggccucuaguuua

SEQ ID NO: 1479841 - RNA, 19 nt, Artificial Sequence
  Description of Artificial Sequence: Synthetic oligonucleotide
  Antisense strand to SEQ ID NO: 1479840
uaaacuagaggccacagac

SEQ ID NO: 1479842 - RNA, 19 nt, Artificial Sequence
  Description of Artificial Sequence: Synthetic oligonucleotide
  Sense strand starting at position 2220 of SEQ ID NO: 1244322
gccucuaguuuauucuaca

SEQ ID NO: 1479843 - RNA, 19 nt, Artificial Sequence
  Description of Artificial Sequence: Synthetic oligonucleotide
  Antisense strand to SEQ ID NO: 1479842
uguagaauaaacuagaggc

SEQ ID NO: 1479844 - RNA, 19 nt, Artificial Sequence
  Description of Artificial Sequence: Synthetic oligonucleotide
  Sense strand starting at position 2514 of SEQ ID NO: 1244322
ugagcugaaucuuaaaggu

SEQ ID NO: 1479845 - RNA, 19 nt, Artificial Sequence
  Description of Artificial Sequence: Synthetic oligonucleotide
  Antisense strand to SEQ ID NO: 1479844
accuuuaagauucagcuca

SEQ ID NO: 1479846 - RNA, 19 nt, Artificial Sequence
  Description of Artificial Sequence: Synthetic oligonucleotide
  Sense strand starting at position 2529 of SEQ ID NO: 1244322
aggugaacuacguggauga

SEQ ID NO: 1479847 - RNA, 19 nt, Artificial Sequence
  Description of Artificial Sequence: Synthetic oligonucleotide
  Antisense strand to SEQ ID NO: 1479846
ucauccacguaguucaccu

SEQ ID NO: 1479848 - RNA, 19 nt, Artificial Sequence
  Description of Artificial Sequence: Synthetic oligonucleotide
  Sense strand starting at position 2531 of SEQ ID NO: 1244322
gugaacuacguggaugaaa

SEQ ID NO: 1479849 - RNA, 19 nt, Artificial Sequence
  Description of Artificial Sequence: Synthetic oligonucleotide
  Antisense strand to SEQ ID NO: 1479848
uuucauccacguaguucac

SEQ ID NO: 1479850 - RNA, 19 nt, Artificial Sequence
  Description of Artificial Sequence: Synthetic oligonucleotide
  Sense strand starting at position 2716 of SEQ ID NO: 1244322
gcuugcaagcuauguacuu

SEQ ID NO: 1479851 - RNA, 19 nt, Artificial Sequence
  Description of Artificial Sequence: Synthetic oligonucleotide
  Antisense strand to SEQ ID NO: 1479850
aaguacauagcuugcaagc

SEQ ID NO: 1479852 - RNA, 19 nt, Artificial Sequence
  Description of Artificial Sequence: Synthetic oligonucleotide
  Sense strand starting at position 2725 of SEQ ID NO: 1244322
cuauguacuuuggacuuga

SEQ ID NO: 1479853 - RNA, 19 nt, Artificial Sequence
  Description of Artificial Sequence: Synthetic oligonucleotide
  Antisense strand to SEQ ID NO: 1479852
ucaaguccaaaguacauag

SEQ ID NO: 1479854 - RNA, 19 nt, Artificial Sequence
  Description of Artificial Sequence: Synthetic oligonucleotide
  Sense strand starting at position 2729 of SEQ ID NO: 1244322
guacuuuggacuugagucu

SEQ ID NO: 1479855 - RNA, 19 nt, Artificial Sequence
  Description of Artificial Sequence: Synthetic oligonucleotide
  Antisense strand to SEQ ID NO: 1479854
agacucaaguccaaaguac

SEQ ID NO: 1479856 - RNA, 19 nt, Artificial Sequence
  Description of Artificial Sequence: Synthetic oligonucleotide
  Sense strand starting at position 2735 of SEQ ID NO: 1244322
uggacuugagucugaagac

SEQ ID NO: 1479857 - RNA, 19 nt, Artificial Sequence
  Description of Artificial Sequence: Synthetic oligonucleotide
  Antisense strand to SEQ ID NO: 1479856
gucuucagacucaagucca

SEQ ID NO: 1479858 - RNA, 19 nt, Artificial Sequence
  Description of Artificial Sequence: Synthetic oligonucleotide
  Sense strand starting at position 2736 of SEQ ID NO: 1244322
ggacuugagucugaagaca

SEQ ID NO: 1479859 - RNA, 19 nt, Artificial Sequence
  Description of Artificial Sequence: Synthetic oligonucleotide
  Antisense strand to SEQ ID NO: 1479858
ugucuucagacucaagucc

SEQ ID NO: 1479860 - RNA, 19 nt, Artificial Sequence
  Description of Artificial Sequence: Synthetic oligonucleotide
  Sense strand starting at position 2782 of SEQ ID NO: 1244322
guguguuaugaccagaauu

SEQ ID NO: 1479861 - RNA, 19 nt, Artificial Sequence
  Description of Artificial Sequence: Synthetic oligonucleotide
  Antisense strand to SEQ ID NO: 1479860
aauucuggucauaacacac

SEQ ID NO: 1479862 - RNA, 19 nt, Artificial Sequence
  Description of Artificial Sequence: Synthetic oligonucleotide
  Sense strand starting at position 2784 of SEQ ID NO: 1244322
guguuaugaccagaauuac

SEQ ID NO: 1479863 - RNA, 19 nt, Artificial Sequence
  Description of Artificial Sequence: Synthetic oligonucleotide
  Antisense strand to SEQ ID NO: 1479862
guaauucuggucauaacac

SEQ ID NO: 1479864 - RNA, 19 nt, Artificial Sequence
  Description of Artificial Sequence: Synthetic oligonucleotide
  Sense strand starting at position 2808 of SEQ ID NO: 1244322
uuggaaagaucguuuguaa

SEQ ID NO: 1479865 - RNA, 19 nt, Artificial Sequence
  Description of Artificial Sequence: Synthetic oligonucleotide
  Antisense strand to SEQ ID NO: 1479864
uuacaaacgaucuuuccaa

SEQ ID NO: 1479866 - RNA, 19 nt, Artificial Sequence
  Description of Artificial Sequence: Synthetic oligonucleotide
  Sense strand starting at position 2811 of SEQ ID NO: 1244322
gaaagaucguuuguaacag

SEQ ID NO: 1479867 - RNA, 19 nt, Artificial Sequence
  Description of Artificial Sequence: Synthetic oligonucleotide
  Antisense strand to SEQ ID NO: 1479866
cuguuacaaacgaucuuuc

SEQ ID NO: 1479868 - RNA, 19 nt, Artificial Sequence
  Description of Artificial Sequence: Synthetic oligonucleotide
  Sense strand starting at position 2882 of SEQ ID NO: 1244322
agguuagacucaguuaaac

SEQ ID NO: 1479869 - RNA, 19 nt, Artificial Sequence
  Description of Artificial Sequence: Synthetic oligonucleotide
  Antisense strand to SEQ ID NO: 1479868
guuuaacugagucuaaccu

SEQ ID NO: 1479870 - RNA, 19 nt, Artificial Sequence
  Description of Artificial Sequence: Synthetic oligonucleotide
  Sense strand starting at position 2893 of SEQ ID NO: 1244322
aguuaaacugaauggucua

SEQ ID NO: 1479871 - RNA, 19 nt, Artificial Sequence
  Description of Artificial Sequence: Synthetic oligonucleotide
  Antisense strand to SEQ ID NO: 1479870
uagaccauucaguuuaacu

SEQ ID NO: 1479872 - RNA, 19 nt, Artificial Sequence
  Description of Artificial Sequence: Synthetic oligonucleotide
  Sense strand starting at position 2926 of SEQ ID NO: 1244322
gugagauacugucuuuaua

SEQ ID NO: 1479873 - RNA, 19 nt, Artificial Sequence
  Description of Artificial Sequence: Synthetic oligonucleotide
  Antisense strand to SEQ ID NO: 1479872
uauaaagacaguaucucac

SEQ ID NO: 1479874 - RNA, 19 nt, Artificial Sequence
  Description of Artificial Sequence: Synthetic oligonucleotide
  Sense strand starting at position 3593 of SEQ ID NO: 1244322
acuugaugggucuggcauu

SEQ ID NO: 1479875 - RNA, 19 nt, Artificial Sequence
  Description of Artificial Sequence: Synthetic oligonucleotide
  Antisense strand to SEQ ID NO: 1479874
aaugccagacccaucaagu

SEQ ID NO: 1479876 - RNA, 19 nt, Artificial Sequence
  Description of Artificial Sequence: Synthetic oligonucleotide
  Sense strand starting at position 3594 of SEQ ID NO: 1244322
cuugaugggucuggcauuu

SEQ ID NO: 1479877 - RNA, 19 nt, Artificial Sequence
  Description of Artificial Sequence: Synthetic oligonucleotide
  Antisense strand to SEQ ID NO: 1479876
aaaugccagacccaucaag

SEQ ID NO: 1479878 - RNA, 19 nt, Artificial Sequence
  Description of Artificial Sequence: Synthetic oligonucleotide
  Sense strand starting at position 3784 of SEQ ID NO: 1244322
ucugaagagucaggaccau

SEQ ID NO: 1479879 - RNA, 19 nt, Artificial Sequence
  Description of Artificial Sequence: Synthetic oligonucleotide
  Antisense strand to SEQ ID NO: 1479878
augguccugacucuucaga

SEQ ID NO: 1479880 - RNA, 19 nt, Artificial Sequence
  Description of Artificial Sequence: Synthetic oligonucleotide
  Sense strand starting at position 120 of SEQ ID NO: 1244323
caauguaugcuugagauau

SEQ ID NO: 1479881 - RNA, 19 nt, Artificial Sequence
  Description of Artificial Sequence: Synthetic oligonucleotide
  Antisense strand to SEQ ID NO: 1479880
auaucucaagcauacauug

SEQ ID NO: 1479882 - RNA, 19 nt, Artificial Sequence
  Description of Artificial Sequence: Synthetic oligonucleotide
  Sense strand starting at position 124 of SEQ ID NO: 1244323
guaugcuugagauauugac

SEQ ID NO: 1479883 - RNA, 19 nt, Artificial Sequence
  Description of Artificial Sequence: Synthetic oligonucleotide
  Antisense strand to SEQ ID NO: 1479882
gucaauaucucaagcauac

SEQ ID NO: 1479884 - RNA, 19 nt, Artificial Sequence
  Description of Artificial Sequence: Synthetic oligonucleotide
  Sense strand starting at position 128 of SEQ ID NO: 1244323
gcuugagauauugacugca

SEQ ID NO: 1479885 - RNA, 19 nt, Artificial Sequence
  Description of Artificial Sequence: Synthetic oligonucleotide
  Antisense strand to SEQ ID NO: 1479884
ugcagucaauaucucaagc

SEQ ID NO: 1479886 - RNA, 19 nt, Artificial Sequence
  Description of Artificial Sequence: Synthetic oligonucleotide
  Sense strand starting at position 130 of SEQ ID NO: 1244323
uugagauauugacugcaaa

SEQ ID NO: 1479887 - RNA, 19 nt, Artificial Sequence
  Description of Artificial Sequence: Synthetic oligonucleotide
  Antisense strand to SEQ ID NO: 1479886
uuugcagucaauaucucaa

SEQ ID NO: 1479888 - RNA, 19 nt, Artificial Sequence
  Description of Artificial Sequence: Synthetic oligonucleotide
  Sense strand starting at position 131 of SEQ ID NO: 1244323
ugagauauugacugcaaau

SEQ ID NO: 1479889 - RNA, 19 nt, Artificial Sequence
  Description of Artificial Sequence: Synthetic oligonucleotide
  Antisense strand to SEQ ID NO: 1479888
auuugcagucaauaucuca

SEQ ID NO: 1479890 - RNA, 19 nt, Artificial Sequence
  Description of Artificial Sequence: Synthetic oligonucleotide
  Sense strand starting at position 221 of SEQ ID NO: 1244323
ccaccaugucacugaauag

SEQ ID NO: 1479891 - RNA, 19 nt, Artificial Sequence
  Description of Artificial Sequence: Synthetic oligonucleotide
  Antisense strand to SEQ ID NO: 1479890
cuauucagugacauggugg

SEQ ID NO: 1479892 - RNA, 19 nt, Artificial Sequence
  Description of Artificial Sequence: Synthetic oligonucleotide
  Sense strand starting at position 243 of SEQ ID NO: 1244323
gcaaauauguacuccaagu

SEQ ID NO: 1479893 - RNA, 19 nt, Artificial Sequence
  Description of Artificial Sequence: Synthetic oligonucleotide
  Antisense strand to SEQ ID NO: 1479892
acuuggaguacauauuugc

SEQ ID NO: 1479894 - RNA, 19 nt, Artificial Sequence
  Description of Artificial Sequence: Synthetic oligonucleotide
  Sense strand starting at position 334 of SEQ ID NO: 1244323
uguccuaacuggucacauu

SEQ ID NO: 1479895 - RNA, 19 nt, Artificial Sequence
  Description of Artificial Sequence: Synthetic oligonucleotide
  Antisense strand to SEQ ID NO: 1479894
aaugugaccaguuaggaca

SEQ ID NO: 1479896 - RNA, 19 nt, Artificial Sequence
  Description of Artificial Sequence: Synthetic oligonucleotide
  Sense strand starting at position 429 of SEQ ID NO: 1244323
gaaguaacgucucuaauga

SEQ ID NO: 1479897 - RNA, 19 nt, Artificial Sequence
  Description of Artificial Sequence: Synthetic oligonucleotide
  Antisense strand to SEQ ID NO: 1479896
ucauuagagacguuacuuc

SEQ ID NO: 1479898 - RNA, 19 nt, Artificial Sequence
  Description of Artificial Sequence: Synthetic oligonucleotide
  Sense strand starting at position 430 of SEQ ID NO: 1244323
aaguaacgucucuaaugaa

SEQ ID NO: 1479899 - RNA, 19 nt, Artificial Sequence
  Description of Artificial Sequence: Synthetic oligonucleotide
  Antisense strand to SEQ ID NO: 1479898
uucauuagagacguuacuu

SEQ ID NO: 1479900 - RNA, 19 nt, Artificial Sequence
  Description of Artificial Sequence: Synthetic oligonucleotide
  Sense strand starting at position 530 of SEQ ID NO: 1244323
aaagaacugucagauuugu

SEQ ID NO: 1479901 - RNA, 19 nt, Artificial Sequence
  Description of Artificial Sequence: Synthetic oligonucleotide
  Antisense strand to SEQ ID NO: 1479900
acaaaucugacaguucuuu

SEQ ID NO: 1479902 - RNA, 19 nt, Artificial Sequence
  Description of Artificial Sequence: Synthetic oligonucleotide
  Sense strand starting at position 696 of SEQ ID NO: 1244323
aggauagaguauuaaagau

SEQ ID NO: 1479903 - RNA, 19 nt, Artificial Sequence
  Description of Artificial Sequence: Synthetic oligonucleotide
  Antisense strand to SEQ ID NO: 1479902
aucuuuaauacucuauccu

SEQ ID NO: 1479904 - RNA, 19 nt, Artificial Sequence
  Description of Artificial Sequence: Synthetic oligonucleotide
  Sense strand starting at position 722 of SEQ ID NO: 1244323
uagcaugggcguuaagaaa

SEQ ID NO: 1479905 - RNA, 19 nt, Artificial Sequence
  Description of Artificial Sequence: Synthetic oligonucleotide
  Antisense strand to SEQ ID NO: 1479904
uuucuuaacgcccaugcua

SEQ ID NO: 1479906 - RNA, 19 nt, Artificial Sequence
  Description of Artificial Sequence: Synthetic oligonucleotide
  Sense strand starting at position 731 of SEQ ID NO: 1244323
cguuaagaaauucgacaag

SEQ ID NO: 1479907 - RNA, 19 nt, Artificial Sequence
  Description of Artificial Sequence: Synthetic oligonucleotide
  Antisense strand to SEQ ID NO: 1479906
cuugucgaauuucuuaacg

SEQ ID NO: 1479908 - RNA, 19 nt, Artificial Sequence
  Description of Artificial Sequence: Synthetic oligonucleotide
  Sense strand starting at position 964 of SEQ ID NO: 1244323
gcuacugucccauacagga

SEQ ID NO: 1479909 - RNA, 19 nt, Artificial Sequence
  Description of Artificial Sequence: Synthetic oligonucleotide
  Antisense strand to SEQ ID NO: 1479908
uccuguaugggacaguagc

SEQ ID NO: 1479910 - RNA, 19 nt, Artificial Sequence
  Description of Artificial Sequence: Synthetic oligonucleotide
  Sense strand starting at position 995 of SEQ ID NO: 1244323
aacaguugguacuucugaa

SEQ ID NO: 1479911 - RNA, 19 nt, Artificial Sequence
  Description of Artificial Sequence: Synthetic oligonucleotide
  Antisense strand to SEQ ID NO: 1479910
uucagaaguaccaacuguu

SEQ ID NO: 1479912 - RNA, 19 nt, Artificial Sequence
  Description of Artificial Sequence: Synthetic oligonucleotide
  Sense strand starting at position 1007 of SEQ ID NO: 1244323
uucugaaagccuuaacugu

SEQ ID NO: 1479913 - RNA, 19 nt, Artificial Sequence
  Description of Artificial Sequence: Synthetic oligonucleotide
  Antisense strand to SEQ ID NO: 1479912
acaguuaaggcuuucagaa

SEQ ID NO: 1479914 - RNA, 19 nt, Artificial Sequence
  Description of Artificial Sequence: Synthetic oligonucleotide
  Sense strand starting at position 1494 of SEQ ID NO: 1244323
uaauguaaagugugaagca

SEQ ID NO: 1479915 - RNA, 19 nt, Artificial Sequence
  Description of Artificial Sequence: Synthetic oligonucleotide
  Antisense strand to SEQ ID NO: 1479914
ugcuucacacuuuacauua

SEQ ID NO: 1479916 - RNA, 19 nt, Artificial Sequence
  Description of Artificial Sequence: Synthetic oligonucleotide
  Sense strand starting at position 2814 of SEQ ID NO: 1244323
gcugguggccacuaacaua

SEQ ID NO: 1479917 - RNA, 19 nt, Artificial Sequence
  Description of Artificial Sequence: Synthetic oligonucleotide
  Antisense strand to SEQ ID NO: 1479916
uauguuaguggccaccagc

SEQ ID NO: 1479918 - RNA, 19 nt, Artificial Sequence
  Description of Artificial Sequence: Synthetic oligonucleotide
  Sense strand starting at position 2902 of SEQ ID NO: 1244323
uuuacaguccaggaagguu

SEQ ID NO: 1479919 - RNA, 19 nt, Artificial Sequence
  Description of Artificial Sequence: Synthetic oligonucleotide
  Antisense strand to SEQ ID NO: 1479918
aaccuuccuggacuguaaa

SEQ ID NO: 1479920 - RNA, 19 nt, Artificial Sequence
  Description of Artificial Sequence: Synthetic oligonucleotide
  Sense strand starting at position 2935 of SEQ ID NO: 1244323
gugagaauuacguggaaau

SEQ ID NO: 1479921 - RNA, 19 nt, Artificial Sequence
  Description of Artificial Sequence: Synthetic oligonucleotide
  Antisense strand to SEQ ID NO: 1479920
auuuccacguaauucucac

SEQ ID NO: 1479922 - RNA, 19 nt, Artificial Sequence
  Description of Artificial Sequence: Synthetic oligonucleotide
  Sense strand starting at position 2936 of SEQ ID NO: 1244323
ugagaauuacguggaaauc

SEQ ID NO: 1479923 - RNA, 19 nt, Artificial Sequence
  Description of Artificial Sequence: Synthetic oligonucleotide
  Antisense strand to SEQ ID NO: 1479922
gauuuccacguaauucuca

SEQ ID NO: 1479924 - RNA, 19 nt, Artificial Sequence
  Description of Artificial Sequence: Synthetic oligonucleotide
  Sense strand starting at position 2947 of SEQ ID NO: 1244323
uggaaaucaguuugaguuc

SEQ ID NO: 1479925 - RNA, 19 nt, Artificial Sequence
  Description of Artificial Sequence: Synthetic oligonucleotide
  Antisense strand to SEQ ID NO: 1479924
gaacucaaacugauuucca

SEQ ID NO: 1479926 - RNA, 19 nt, Artificial Sequence
  Description of Artificial Sequence: Synthetic oligonucleotide
  Sense strand starting at position 2956 of SEQ ID NO: 1244323
guuugaguucuuuggaaga

SEQ ID NO: 1479927 - RNA, 19 nt, Artificial Sequence
  Description of Artificial Sequence: Synthetic oligonucleotide
  Antisense strand to SEQ ID NO: 1479926
ucuuccaaagaacucaaac

SEQ ID NO: 1479928 - RNA, 19 nt, Artificial Sequence
  Description of Artificial Sequence: Synthetic oligonucleotide
  Sense strand starting at position 3180 of SEQ ID NO: 1244323
gguuccaagcuugagcaaa

SEQ ID NO: 1479929 - RNA, 19 nt, Artificial Sequence
  Description of Artificial Sequence: Synthetic oligonucleotide
  Antisense strand to SEQ ID NO: 1479928
uuugcucaagcuuggaacc

SEQ ID NO: 1479930 - RNA, 19 nt, Artificial Sequence
  Description of Artificial Sequence: Synthetic oligonucleotide
  Sense strand starting at position 3313 of SEQ ID NO: 1244323
acagauaagcacuguuaag

SEQ ID NO: 1479931 - RNA, 19 nt, Artificial Sequence
  Description of Artificial Sequence: Synthetic oligonucleotide
  Antisense strand to SEQ ID NO: 1479930
cuuaacagugcuuaucugu

SEQ ID NO: 1479932 - RNA, 19 nt, Artificial Sequence
  Description of Artificial Sequence: Synthetic oligonucleotide
  Sense strand starting at position 3345 of SEQ ID NO: 1244323
uguugucaucauuaccuca

SEQ ID NO: 1479933 - RNA, 19 nt, Artificial Sequence
  Description of Artificial Sequence: Synthetic oligonucleotide
  Antisense strand to SEQ ID NO: 1479932
ugagguaaugaugacaaca

SEQ ID NO: 1479934 - RNA, 19 nt, Artificial Sequence
  Description of Artificial Sequence: Synthetic oligonucleotide
  Sense strand starting at position 3384 of SEQ ID NO: 1244323
ggagaacuaguguauguaa

SEQ ID NO: 1479935 - RNA, 19 nt, Artificial Sequence
  Description of Artificial Sequence: Synthetic oligonucleotide
  Antisense strand to SEQ ID NO: 1479934
uuacauacacuaguucucc

SEQ ID NO: 1479936 - RNA, 19 nt, Artificial Sequence
  Description of Artificial Sequence: Synthetic oligonucleotide
  Sense strand starting at position 3386 of SEQ ID NO: 1244323
agaacuaguguauguaaag

SEQ ID NO: 1479937 - RNA, 19 nt, Artificial Sequence
  Description of Artificial Sequence: Synthetic oligonucleotide
  Antisense strand to SEQ ID NO: 1479936
cuuuacauacacuaguucu

SEQ ID NO: 1479938 - RNA, 19 nt, Artificial Sequence
  Description of Artificial Sequence: Synthetic oligonucleotide
  Sense strand starting at position 3468 of SEQ ID NO: 1244323
acaguaggugcuugauauu

SEQ ID NO: 1479939 - RNA, 19 nt, Artificial Sequence
  Description of Artificial Sequence: Synthetic oligonucleotide
  Antisense strand to SEQ ID NO: 1479938
aauaucaagcaccuacugu

SEQ ID NO: 1479940 - RNA, 19 nt, Artificial Sequence
  Description of Artificial Sequence: Synthetic oligonucleotide
  Sense strand starting at position 3474 of SEQ ID NO: 1244323
ggugcuugauauuuguaua

SEQ ID NO: 1479941 - RNA, 19 nt, Artificial Sequence
  Description of Artificial Sequence: Synthetic oligonucleotide
  Antisense strand to SEQ ID NO: 1479940
uauacaaauaucaagcacc

SEQ ID NO: 1479942 - RNA, 19 nt, Artificial Sequence
  Description of Artificial Sequence: Synthetic oligonucleotide
  Sense strand starting at position 3475 of SEQ ID NO: 1244323
gugcuugauauuuguauag

SEQ ID NO: 1479943 - RNA, 19 nt, Artificial Sequence
  Description of Artificial Sequence: Synthetic oligonucleotide
  Antisense strand to SEQ ID NO: 1479942
cuauacaaauaucaagcac

SEQ ID NO: 1479944 - RNA, 19 nt, Artificial Sequence
  Description of Artificial Sequence: Synthetic oligonucleotide
  Sense strand starting at position 3663 of SEQ ID NO: 1244323
uuagaaacaucagugaguu

SEQ ID NO: 1479945 - RNA, 19 nt, Artificial Sequence
  Description of Artificial Sequence: Synthetic oligonucleotide
  Antisense strand to SEQ ID NO: 1479944
aacucacugauguuucuaa

SEQ ID NO: 1479946 - RNA, 19 nt, Artificial Sequence
  Description of Artificial Sequence: Synthetic oligonucleotide
  Sense strand starting at position 3664 of SEQ ID NO: 1244323
uagaaacaucagugaguua

SEQ ID NO: 1479947 - RNA, 19 nt, Artificial Sequence
  Description of Artificial Sequence: Synthetic oligonucleotide
  Antisense strand to SEQ ID NO: 1479946
uaacucacugauguuucua

SEQ ID NO: 1479948 - RNA, 19 nt, Artificial Sequence
  Description of Artificial Sequence: Synthetic oligonucleotide
  Sense strand starting at position 3667 of SEQ ID NO: 1244323
aaacaucagugaguuagga

SEQ ID NO: 1479949 - RNA, 19 nt, Artificial Sequence
  Description of Artificial Sequence: Synthetic oligonucleotide
  Antisense strand to SEQ ID NO: 1479948
uccuaacucacugauguuu

SEQ ID NO: 1479950 - RNA, 19 nt, Artificial Sequence
  Description of Artificial Sequence: Synthetic oligonucleotide
  Sense strand starting at position 3676 of SEQ ID NO: 1244323
ugaguuaggacuuacugua

SEQ ID NO: 1479951 - RNA, 19 nt, Artificial Sequence
  Description of Artificial Sequence: Synthetic oligonucleotide
  Antisense strand to SEQ ID NO: 1479950
uacaguaaguccuaacuca

SEQ ID NO: 1479952 - RNA, 19 nt, Artificial Sequence
  Description of Artificial Sequence: Synthetic oligonucleotide
  Sense strand starting at position 3764 of SEQ ID NO: 1244323
augguagacucuuccaugu

SEQ ID NO: 1479953 - RNA, 19 nt, Artificial Sequence
  Description of Artificial Sequence: Synthetic oligonucleotide
  Antisense strand to SEQ ID NO: 1479952
acauggaagagucuaccau

SEQ ID NO: 1479954 - RNA, 19 nt, Artificial Sequence
  Description of Artificial Sequence: Synthetic oligonucleotide
  Sense strand starting at position 3892 of SEQ ID NO: 1244323
cucacuaguuagucuuaga

SEQ ID NO: 1479955 - RNA, 19 nt, Artificial Sequence
  Description of Artificial Sequence: Synthetic oligonucleotide
  Antisense strand to SEQ ID NO: 1479954
ucuaagacuaacuagugag

SEQ ID NO: 1479956 - RNA, 19 nt, Artificial Sequence
  Description of Artificial Sequence: Synthetic oligonucleotide
  Sense strand starting at position 3902 of SEQ ID NO: 1244323
agucuuagaucauauuuga

SEQ ID NO: 1479957 - RNA, 19 nt, Artificial Sequence
  Description of Artificial Sequence: Synthetic oligonucleotide
  Antisense strand to SEQ ID NO: 1479956
ucaaauaugaucuaagacu

SEQ ID NO: 1479958 - RNA, 19 nt, Artificial Sequence
  Description of Artificial Sequence: Synthetic oligonucleotide
  Sense strand starting at position 3941 of SEQ ID NO: 1244323
gcuuucucucgguuauugu

SEQ ID NO: 1479959 - RNA, 19 nt, Artificial Sequence
  Description of Artificial Sequence: Synthetic oligonucleotide
  Antisense strand to SEQ ID NO: 1479958
acaauaaccgagagaaagc

SEQ ID NO: 1479960 - RNA, 19 nt, Artificial Sequence
  Description of Artificial Sequence: Synthetic oligonucleotide
  Sense strand starting at position 287 of SEQ ID NO: 1244324
cccaaauuguguuuguuug

SEQ ID NO: 1479961 - RNA, 19 nt, Artificial Sequence
  Description of Artificial Sequence: Synthetic oligonucleotide
  Antisense strand to SEQ ID NO: 1479960
caaacaaacacaauuuggg

SEQ ID NO: 1479962 - RNA, 19 nt, Artificial Sequence
  Description of Artificial Sequence: Synthetic oligonucleotide
  Sense strand starting at position 289 of SEQ ID NO: 1244324
caaauuguguuuguuuguu

SEQ ID NO: 1479963 - RNA, 19 nt, Artificial Sequence
  Description of Artificial Sequence: Synthetic oligonucleotide
  Antisense strand to SEQ ID NO: 1479962
aacaaacaaacacaauuug

SEQ ID NO: 1479964 - RNA, 19 nt, Artificial Sequence
  Description of Artificial Sequence: Synthetic oligonucleotide
  Sense strand starting at position 301 of SEQ ID NO: 1244324
guuuguuucuuuccugaga

SEQ ID NO: 1479965 - RNA, 19 nt, Artificial Sequence
  Description of Artificial Sequence: Synthetic oligonucleotide
  Antisense strand to SEQ ID NO: 1479964
ucucaggaaagaaacaaac

SEQ ID NO: 1479966 - RNA, 19 nt, Artificial Sequence
  Description of Artificial Sequence: Synthetic oligonucleotide
  Sense strand starting at position 652 of SEQ ID NO: 1244324
ggaagcuuaccugggaacu

SEQ ID NO: 1479967 - RNA, 19 nt, Artificial Sequence
  Description of Artificial Sequence: Synthetic oligonucleotide
  Antisense strand to SEQ ID NO: 1479966
aguucccagguaagcuucc

SEQ ID NO: 1479968 - RNA, 19 nt, Artificial Sequence
  Description of Artificial Sequence: Synthetic oligonucleotide
  Sense strand starting at position 653 of SEQ ID NO: 1244324
gaagcuuaccugggaacua

SEQ ID NO: 1479969 - RNA, 19 nt, Artificial Sequence
  Description of Artificial Sequence: Synthetic oligonucleotide
  Antisense strand to SEQ ID NO: 1479968
uaguucccagguaagcuuc

SEQ ID NO: 1479970 - RNA, 19 nt, Artificial Sequence
  Description of Artificial Sequence: Synthetic oligonucleotide
  Sense strand starting at position 717 of SEQ ID NO: 1244324
ccaaucauggccugcucua

SEQ ID NO: 1479971 - RNA, 19 nt, Artificial Sequence
  Description of Artificial Sequence: Synthetic oligonucleotide
  Antisense strand to SEQ ID NO: 1479970
uagagcaggccaugauugg

SEQ ID NO: 1479972 - RNA, 19 nt, Artificial Sequence
  Description of Artificial Sequence: Synthetic oligonucleotide
  Sense strand starting at position 739 of SEQ ID NO: 1244324
acgcaucugcaagaggaau

SEQ ID NO: 1479973 - RNA, 19 nt, Artificial Sequence
  Description of Artificial Sequence: Synthetic oligonucleotide
  Antisense strand to SEQ ID NO: 1479972
auuccucuugcagaugcgu

SEQ ID NO: 1479974 - RNA, 19 nt, Artificial Sequence
  Description of Artificial Sequence: Synthetic oligonucleotide
  Sense strand starting at position 778 of SEQ ID NO: 1244324
uuacaacuucucuggguuu

SEQ ID NO: 1479975 - RNA, 19 nt, Artificial Sequence
  Description of Artificial Sequence: Synthetic oligonucleotide
  Antisense strand to SEQ ID NO: 1479974
aaacccagagaaguuguaa

SEQ ID NO: 1479976 - RNA, 19 nt, Artificial Sequence
  Description of Artificial Sequence: Synthetic oligonucleotide
  Sense strand starting at position 780 of SEQ ID NO: 1244324
acaacuucucuggguuuau

SEQ ID NO: 1479977 - RNA, 19 nt, Artificial Sequence
  Description of Artificial Sequence: Synthetic oligonucleotide
  Antisense strand to SEQ ID NO: 1479976
auaaacccagagaaguugu

SEQ ID NO: 1479978 - RNA, 19 nt, Artificial Sequence
  Description of Artificial Sequence: Synthetic oligonucleotide
  Sense strand starting at position 789 of SEQ ID NO: 1244324
cuggguuuaucccucccau

SEQ ID NO: 1479979 - RNA, 19 nt, Artificial Sequence
  Description of Artificial Sequence: Synthetic oligonucleotide
  Antisense strand to SEQ ID NO: 1479978
augggagggauaaacccag

SEQ ID NO: 1479980 - RNA, 19 nt, Artificial Sequence
  Description of Artificial Sequence: Synthetic oligonucleotide
  Sense strand starting at position 843 of SEQ ID NO: 1244324
gagaauaucccagguggcu

SEQ ID NO: 1479981 - RNA, 19 nt, Artificial Sequence
  Description of Artificial Sequence: Synthetic oligonucleotide
  Antisense strand to SEQ ID NO: 1479980
agccaccugggauauucuc

SEQ ID NO: 1479982 - RNA, 19 nt, Artificial Sequence
  Description of Artificial Sequence: Synthetic oligonucleotide
  Sense strand starting at position 852 of SEQ ID NO: 1244324
ccagguggcuccuuuagga

SEQ ID NO: 1479983 - RNA, 19 nt, Artificial Sequence
  Description of Artificial Sequence: Synthetic oligonucleotide
  Antisense strand to SEQ ID NO: 1479982
uccuaaaggagccaccugg

SEQ ID NO: 1479984 - RNA, 19 nt, Artificial Sequence
  Description of Artificial Sequence: Synthetic oligonucleotide
  Sense strand starting at position 886 of SEQ ID NO: 1244324
uugauugcccauugguagu

SEQ ID NO: 1479985 - RNA, 19 nt, Artificial Sequence
  Description of Artificial Sequence: Synthetic oligonucleotide
  Antisense strand to SEQ ID NO: 1479984
acuaccaaugggcaaucaa

SEQ ID NO: 1479986 - RNA, 19 nt, Artificial Sequence
  Description of Artificial Sequence: Synthetic oligonucleotide
  Sense strand starting at position 996 of SEQ ID NO: 1244324
ccagcuuugaggugaaaga

SEQ ID NO: 1479987 - RNA, 19 nt, Artificial Sequence
  Description of Artificial Sequence: Synthetic oligonucleotide
  Antisense strand to SEQ ID NO: 1479986
ucuuucaccucaaagcugg

SEQ ID NO: 1479988 - RNA, 19 nt, Artificial Sequence
  Description of Artificial Sequence: Synthetic oligonucleotide
  Sense strand starting at position 1547 of SEQ ID NO: 1244324
gcaucaaggaguuaaggca

SEQ ID NO: 1479989 - RNA, 19 nt, Artificial Sequence
  Description of Artificial Sequence: Synthetic oligonucleotide
  Antisense strand to SEQ ID NO: 1479988
ugccuuaacuccuugaugc

SEQ ID NO: 1479990 - RNA, 19 nt, Artificial Sequence
  Description of Artificial Sequence: Synthetic oligonucleotide
  Sense strand starting at position 1565 of SEQ ID NO: 1244324
aguccugguugccuaauua

SEQ ID NO: 1479991 - RNA, 19 nt, Artificial Sequence
  Description of Artificial Sequence: Synthetic oligonucleotide
  Antisense strand to SEQ ID NO: 1479990
uaauuaggcaaccaggacu

SEQ ID NO: 1479992 - RNA, 19 nt, Artificial Sequence
  Description of Artificial Sequence: Synthetic oligonucleotide
  Sense strand starting at position 1730 of SEQ ID NO: 1244324
aauccaguucuagguggua

SEQ ID NO: 1479993 - RNA, 19 nt, Artificial Sequence
  Description of Artificial Sequence: Synthetic oligonucleotide
  Antisense strand to SEQ ID NO: 1479992
uaccaccuagaacuggauu

SEQ ID NO: 1479994 - RNA, 19 nt, Artificial Sequence
  Description of Artificial Sequence: Synthetic oligonucleotide
  Sense strand starting at position 1784 of SEQ ID NO: 1244324
uuucuauuggcugggagua

SEQ ID NO: 1479995 - RNA, 19 nt, Artificial Sequence
  Description of Artificial Sequence: Synthetic oligonucleotide
  Antisense strand to SEQ ID NO: 1479994
uacucccagccaauagaaa

SEQ ID NO: 1479996 - RNA, 19 nt, Artificial Sequence
  Description of Artificial Sequence: Synthetic oligonucleotide
  Sense strand starting at position 1785 of SEQ ID NO: 1244324
uucuauuggcugggaguaa

SEQ ID NO: 1479997 - RNA, 19 nt, Artificial Sequence
  Description of Artificial Sequence: Synthetic oligonucleotide
  Antisense strand to SEQ ID NO: 1479996
uuacucccagccaauagaa

SEQ ID NO: 1479998 - RNA, 19 nt, Artificial Sequence
  Description of Artificial Sequence: Synthetic oligonucleotide
  Sense strand starting at position 1845 of SEQ ID NO: 1244324
gucuucugggaaugguagu

SEQ ID NO: 1479999 - RNA, 19 nt, Artificial Sequence
  Description of Artificial Sequence: Synthetic oligonucleotide
  Antisense strand to SEQ ID NO: 1479998
acuaccauucccagaagac

SEQ ID NO: 1480000 - RNA, 19 nt, Artificial Sequence
  Description of Artificial Sequence: Synthetic oligonucleotide
  Sense strand starting at position 1855 of SEQ ID NO: 1244324
aaugguaguuccuuggacu

SEQ ID NO: 1480001 - RNA, 19 nt, Artificial Sequence
  Description of Artificial Sequence: Synthetic oligonucleotide
  Antisense strand to SEQ ID NO: 1480000
aguccaaggaacuaccauu

SEQ ID NO: 1480002 - RNA, 19 nt, Artificial Sequence
  Description of Artificial Sequence: Synthetic oligonucleotide
  Sense strand starting at position 1934 of SEQ ID NO: 1244324
guucuucuccuuuaaggga

SEQ ID NO: 1480003 - RNA, 19 nt, Artificial Sequence
  Description of Artificial Sequence: Synthetic oligonucleotide
  Antisense strand to SEQ ID NO: 1480002
ucccuuaaaggagaagaac

SEQ ID NO: 1480004 - RNA, 19 nt, Artificial Sequence
  Description of Artificial Sequence: Synthetic oligonucleotide
  Sense strand starting at position 2051 of SEQ ID NO: 1244324
gggcuucuccaucauauuc

SEQ ID NO: 1480005 - RNA, 19 nt, Artificial Sequence
  Description of Artificial Sequence: Synthetic oligonucleotide
  Antisense strand to SEQ ID NO: 1480004
gaauaugauggagaagccc

SEQ ID NO: 1480006 - RNA, 19 nt, Artificial Sequence
  Description of Artificial Sequence: Synthetic oligonucleotide
  Sense strand starting at position 2147 of SEQ ID NO: 1244324
gcaauaaggucuuucuccu

SEQ ID NO: 1480007 - RNA, 19 nt, Artificial Sequence
  Description of Artificial Sequence: Synthetic oligonucleotide
  Antisense strand to SEQ ID NO: 1480006
aggagaaagaccuuauugc

SEQ ID NO: 1480008 - RNA, 19 nt, Artificial Sequence
  Description of Artificial Sequence: Synthetic oligonucleotide
  Sense strand starting at position 2172 of SEQ ID NO: 1244324
ggcucuuucuguucuccua

SEQ ID NO: 1480009 - RNA, 19 nt, Artificial Sequence
  Description of Artificial Sequence: Synthetic oligonucleotide
  Antisense strand to SEQ ID NO: 1480008
uaggagaacagaaagagcc

SEQ ID NO: 1480010 - RNA, 19 nt, Artificial Sequence
  Description of Artificial Sequence: Synthetic oligonucleotide
  Sense strand starting at position 2255 of SEQ ID NO: 1244324
gccuuaguugcacacauau

SEQ ID NO: 1480011 - RNA, 19 nt, Artificial Sequence
  Description of Artificial Sequence: Synthetic oligonucleotide
  Antisense strand to SEQ ID NO: 1480010
auaugugugcaacuaaggc

SEQ ID NO: 1480012 - RNA, 19 nt, Artificial Sequence
  Description of Artificial Sequence: Synthetic oligonucleotide
  Sense strand starting at position 2448 of SEQ ID NO: 1244324
ucugaaugcgaucauggaa

SEQ ID NO: 1480013 - RNA, 19 nt, Artificial Sequence
  Description of Artificial Sequence: Synthetic oligonucleotide
  Antisense strand to SEQ ID NO: 1480012
uuccaugaucgcauucaga

SEQ ID NO: 1480014 - RNA, 19 nt, Artificial Sequence
  Description of Artificial Sequence: Synthetic oligonucleotide
  Sense strand starting at position 2511 of SEQ ID NO: 1244324
gguggacuuuaauuaauaa

SEQ ID NO: 1480015 - RNA, 19 nt, Artificial Sequence
  Description of Artificial Sequence: Synthetic oligonucleotide
  Antisense strand to SEQ ID NO: 1480014
uuauuaauuaaaguccacc

SEQ ID NO: 1480016 - RNA, 19 nt, Artificial Sequence
  Description of Artificial Sequence: Synthetic oligonucleotide
  Sense strand starting at position 2828 of SEQ ID NO: 1244324
gucugagccuucuuaugca

SEQ ID NO: 1480017 - RNA, 19 nt, Artificial Sequence
  Description of Artificial Sequence: Synthetic oligonucleotide
  Antisense strand to SEQ ID NO: 1480016
ugcauaagaaggcucagac

SEQ ID NO: 1480018 - RNA, 19 nt, Artificial Sequence
  Description of Artificial Sequence: Synthetic oligonucleotide
  Sense strand starting at position 2870 of SEQ ID NO: 1244324
auggacuggucaucccuaa

SEQ ID NO: 1480019 - RNA, 19 nt, Artificial Sequence
  Description of Artificial Sequence: Synthetic oligonucleotide
  Antisense strand to SEQ ID NO: 1480018
uuagggaugaccaguccau

SEQ ID NO: 1480020 - RNA, 19 nt, Artificial Sequence
  Description of Artificial Sequence: Synthetic oligonucleotide
  Sense strand starting at position 3411 of SEQ ID NO: 1244324
ucacccuuugaguggcaaa

SEQ ID NO: 1480021 - RNA, 19 nt, Artificial Sequence
  Description of Artificial Sequence: Synthetic oligonucleotide
  Antisense strand to SEQ ID NO: 1480020
uuugccacucaaaggguga

SEQ ID NO: 1480022 - RNA, 19 nt, Artificial Sequence
  Description of Artificial Sequence: Synthetic oligonucleotide
  Sense strand starting at position 3428 of SEQ ID NO: 1244324
aaaucaguccucgggagga

SEQ ID NO: 1480023 - RNA, 19 nt, Artificial Sequence
  Description of Artificial Sequence: Synthetic oligonucleotide
  Antisense strand to SEQ ID NO: 1480022
uccucccgaggacugauuu

SEQ ID NO: 1480024 - RNA, 19 nt, Artificial Sequence
  Description of Artificial Sequence: Synthetic oligonucleotide
  Sense strand starting at position 3430 of SEQ ID NO: 1244324
aucaguccucgggaggaua

SEQ ID NO: 1480025 - RNA, 19 nt, Artificial Sequence
  Description of Artificial Sequence: Synthetic oligonucleotide
  Antisense strand to SEQ ID NO: 1480024
uauccucccgaggacugau

SEQ ID NO: 1480026 - RNA, 19 nt, Artificial Sequence
  Description of Artificial Sequence: Synthetic oligonucleotide
  Sense strand starting at position 3432 of SEQ ID NO: 1244324
caguccucgggaggauaaa

SEQ ID NO: 1480027 - RNA, 19 nt, Artificial Sequence
  Description of Artificial Sequence: Synthetic oligonucleotide
  Antisense strand to SEQ ID NO: 1480026
uuuauccucccgaggacug

SEQ ID NO: 1480028 - RNA, 19 nt, Artificial Sequence
  Description of Artificial Sequence: Synthetic oligonucleotide
  Sense strand starting at position 3442 of SEQ ID NO: 1244324
gaggauaaaucugggagag

SEQ ID NO: 1480029 - RNA, 19 nt, Artificial Sequence
  Description of Artificial Sequence: Synthetic oligonucleotide
  Antisense strand to SEQ ID NO: 1480028
cucucccagauuuauccuc

SEQ ID NO: 1480030 - RNA, 19 nt, Artificial Sequence
  Description of Artificial Sequence: Synthetic oligonucleotide
  Sense strand starting at position 3444 of SEQ ID NO: 1244324
ggauaaaucugggagagca

SEQ ID NO: 1480031 - RNA, 19 nt, Artificial Sequence
  Description of Artificial Sequence: Synthetic oligonucleotide
  Antisense strand to SEQ ID NO: 1480030
ugcucucccagauuuaucc

SEQ ID NO: 1480032 - RNA, 19 nt, Artificial Sequence
  Description of Artificial Sequence: Synthetic oligonucleotide
  Sense strand starting at position 3525 of SEQ ID NO: 1244324
gugucuggagaauggucua

SEQ ID NO: 1480033 - RNA, 19 nt, Artificial Sequence
  Description of Artificial Sequence: Synthetic oligonucleotide
  Antisense strand to SEQ ID NO: 1480032
uagaccauucuccagacac

SEQ ID NO: 1480034 - RNA, 19 nt, Artificial Sequence
  Description of Artificial Sequence: Synthetic oligonucleotide
  Sense strand starting at position 3528 of SEQ ID NO: 1244324
ucuggagaauggucuaaac

SEQ ID NO: 1480035 - RNA, 19 nt, Artificial Sequence
  Description of Artificial Sequence: Synthetic oligonucleotide
  Antisense strand to SEQ ID NO: 1480034
guuuagaccauucuccaga

SEQ ID NO: 1480036 - RNA, 19 nt, Artificial Sequence
  Description of Artificial Sequence: Synthetic oligonucleotide
  Sense strand starting at position 3710 of SEQ ID NO: 1244324
gggaauaguguguauacaa

SEQ ID NO: 1480037 - RNA, 19 nt, Artificial Sequence
  Description of Artificial Sequence: Synthetic oligonucleotide
  Antisense strand to SEQ ID NO: 1480036
uuguauacacacuauuccc

SEQ ID NO: 1480038 - RNA, 19 nt, Artificial Sequence
  Description of Artificial Sequence: Synthetic oligonucleotide
  Sense strand starting at position 3974 of SEQ ID NO: 1244324
gagccauuccuggaucauc

SEQ ID NO: 1480039 - RNA, 19 nt, Artificial Sequence
  Description of Artificial Sequence: Synthetic oligonucleotide
  Antisense strand to SEQ ID NO: 1480038
gaugauccaggaauggcuc

SEQ ID NO: 1480040 - RNA, 19 nt, Artificial Sequence
  Description of Artificial Sequence: Synthetic oligonucleotide
  Sense strand starting at position 50 of SEQ ID NO: 1244325
aaaguaaaguguucugauu

SEQ ID NO: 1480041 - RNA, 19 nt, Artificial Sequence
  Description of Artificial Sequence: Synthetic oligonucleotide
  Antisense strand to SEQ ID NO: 1480040
aaucagaacacuuuacuuu

SEQ ID NO: 1480042 - RNA, 19 nt, Artificial Sequence
  Description of Artificial Sequence: Synthetic oligonucleotide
  Sense strand starting at position 89 of SEQ ID NO: 1244325
cugguuucuguguagaaag

SEQ ID NO: 1480043 - RNA, 19 nt, Artificial Sequence
  Description of Artificial Sequence: Synthetic oligonucleotide
  Antisense strand to SEQ ID NO: 1480042
cuuucuacacagaaaccag

SEQ ID NO: 1480044 - RNA, 19 nt, Artificial Sequence
  Description of Artificial Sequence: Synthetic oligonucleotide
  Sense strand starting at position 193 of SEQ ID NO: 1244325
aguguuacaaguuagagau

SEQ ID NO: 1480045 - RNA, 19 nt, Artificial Sequence
  Description of Artificial Sequence: Synthetic oligonucleotide
  Antisense strand to SEQ ID NO: 1480044
aucucuaacuuguaacacu

SEQ ID NO: 1480046 - RNA, 19 nt, Artificial Sequence
  Description of Artificial Sequence: Synthetic oligonucleotide
  Sense strand starting at position 208 of SEQ ID NO: 1244325
agaugagggugucuuguau

SEQ ID NO: 1480047 - RNA, 19 nt, Artificial Sequence
  Description of Artificial Sequence: Synthetic oligonucleotide
  Antisense strand to SEQ ID NO: 1480046
auacaagacacccucaucu

SEQ ID NO: 1480048 - RNA, 19 nt, Artificial Sequence
  Description of Artificial Sequence: Synthetic oligonucleotide
  Sense strand starting at position 221 of SEQ ID NO: 1244325
uuguauuaagacggugaua

SEQ ID NO: 1480049 - RNA, 19 nt, Artificial Sequence
  Description of Artificial Sequence: Synthetic oligonucleotide
  Antisense strand to SEQ ID NO: 1480048
uaucaccgucuuaauacaa

SEQ ID NO: 1480050 - RNA, 19 nt, Artificial Sequence
  Description of Artificial Sequence: Synthetic oligonucleotide
  Sense strand starting at position 223 of SEQ ID NO: 1244325
guauuaagacggugauaac

SEQ ID NO: 1480051 - RNA, 19 nt, Artificial Sequence
  Description of Artificial Sequence: Synthetic oligonucleotide
  Antisense strand to SEQ ID NO: 1480050
guuaucaccgucuuaauac

SEQ ID NO: 1480052 - RNA, 19 nt, Artificial Sequence
  Description of Artificial Sequence: Synthetic oligonucleotide
  Sense strand starting at position 311 of SEQ ID NO: 1244325
guauacacaugcuuaggau

SEQ ID NO: 1480053 - RNA, 19 nt, Artificial Sequence
  Description of Artificial Sequence: Synthetic oligonucleotide
  Antisense strand to SEQ ID NO: 1480052
auccuaagcauguguauac

SEQ ID NO: 1480054 - RNA, 19 nt, Artificial Sequence
  Description of Artificial Sequence: Synthetic oligonucleotide
  Sense strand starting at position 348 of SEQ ID NO: 1244325
uuuagauacuuggcauauu

SEQ ID NO: 1480055 - RNA, 19 nt, Artificial Sequence
  Description of Artificial Sequence: Synthetic oligonucleotide
  Antisense strand to SEQ ID NO: 1480054
aauaugccaaguaucuaaa

SEQ ID NO: 1480056 - RNA, 19 nt, Artificial Sequence
  Description of Artificial Sequence: Synthetic oligonucleotide
  Sense strand starting at position 369 of SEQ ID NO: 1244325
gggucuuuccaguaaagca

SEQ ID NO: 1480057 - RNA, 19 nt, Artificial Sequence
  Description of Artificial Sequence: Synthetic oligonucleotide
  Antisense strand to SEQ ID NO: 1480056
ugcuuuacuggaaagaccc

SEQ ID NO: 1480058 - RNA, 19 nt, Artificial Sequence
  Description of Artificial Sequence: Synthetic oligonucleotide
  Sense strand starting at position 422 of SEQ ID NO: 1244325
gaaguaaccucuuugggca

SEQ ID NO: 1480059 - RNA, 19 nt, Artificial Sequence
  Description of Artificial Sequence: Synthetic oligonucleotide
  Antisense strand to SEQ ID NO: 1480058
ugcccaaagagguuacuuc

SEQ ID NO: 1480060 - RNA, 19 nt, Artificial Sequence
  Description of Artificial Sequence: Synthetic oligonucleotide
  Sense strand starting at position 671 of SEQ ID NO: 1244325
gucagaaaucauuaauagc

SEQ ID NO: 1480061 - RNA, 19 nt, Artificial Sequence
  Description of Artificial Sequence: Synthetic oligonucleotide
  Antisense strand to SEQ ID NO: 1480060
gcuauuaaugauuucugac

SEQ ID NO: 1480062 - RNA, 19 nt, Artificial Sequence
  Description of Artificial Sequence: Synthetic oligonucleotide
  Sense strand starting at position 791 of SEQ ID NO: 1244325
cagcaucaucuaggagaca

SEQ ID NO: 1480063 - RNA, 19 nt, Artificial Sequence
  Description of Artificial Sequence: Synthetic oligonucleotide
  Antisense strand to SEQ ID NO: 1480062
ugucuccuagaugaugcug

SEQ ID NO: 1480064 - RNA, 19 nt, Artificial Sequence
  Description of Artificial Sequence: Synthetic oligonucleotide
  Sense strand starting at position 849 of SEQ ID NO: 1244325
aauacugauuuguaguaag

SEQ ID NO: 1480065 - RNA, 19 nt, Artificial Sequence
  Description of Artificial Sequence: Synthetic oligonucleotide
  Antisense strand to SEQ ID NO: 1480064
cuuacuacaaaucaguauu

SEQ ID NO: 1480066 - RNA, 19 nt, Artificial Sequence
  Description of Artificial Sequence: Synthetic oligonucleotide
  Sense strand starting at position 852 of SEQ ID NO: 1244325
acugauuuguaguaaggaa

SEQ ID NO: 1480067 - RNA, 19 nt, Artificial Sequence
  Description of Artificial Sequence: Synthetic oligonucleotide
  Antisense strand to SEQ ID NO: 1480066
uuccuuacuacaaaucagu

SEQ ID NO: 1480068 - RNA, 19 nt, Artificial Sequence
  Description of Artificial Sequence: Synthetic oligonucleotide
  Sense strand starting at position 897 of SEQ ID NO: 1244325
uugagauggucuuccuaaa

SEQ ID NO: 1480069 - RNA, 19 nt, Artificial Sequence
  Description of Artificial Sequence: Synthetic oligonucleotide
  Antisense strand to SEQ ID NO: 1480068
uuuaggaagaccaucucaa

SEQ ID NO: 1480070 - RNA, 19 nt, Artificial Sequence
  Description of Artificial Sequence: Synthetic oligonucleotide
  Sense strand starting at position 930 of SEQ ID NO: 1244325
agauaaaccuuccuucgaa

SEQ ID NO: 1480071 - RNA, 19 nt, Artificial Sequence
  Description of Artificial Sequence: Synthetic oligonucleotide
  Antisense strand to SEQ ID NO: 1480070
uucgaaggaagguuuaucu

SEQ ID NO: 1480072 - RNA, 19 nt, Artificial Sequence
  Description of Artificial Sequence: Synthetic oligonucleotide
  Sense strand starting at position 985 of SEQ ID NO: 1244325
guuagaaguuucucuaaag

SEQ ID NO: 1480073 - RNA, 19 nt, Artificial Sequence
  Description of Artificial Sequence: Synthetic oligonucleotide
  Antisense strand to SEQ ID NO: 1480072
cuuuagagaaacuucuaac

SEQ ID NO: 1480074 - RNA, 19 nt, Artificial Sequence
  Description of Artificial Sequence: Synthetic oligonucleotide
  Sense strand starting at position 986 of SEQ ID NO: 1244325
uuagaaguuucucuaaagu

SEQ ID NO: 1480075 - RNA, 19 nt, Artificial Sequence
  Description of Artificial Sequence: Synthetic oligonucleotide
  Antisense strand to SEQ ID NO: 1480074
acuuuagagaaacuucuaa

SEQ ID NO: 1480076 - RNA, 19 nt, Artificial Sequence
  Description of Artificial Sequence: Synthetic oligonucleotide
  Sense strand starting at position 1507 of SEQ ID NO: 1244325
gcaccaguagcagaaugau

SEQ ID NO: 1480077 - RNA, 19 nt, Artificial Sequence
  Description of Artificial Sequence: Synthetic oligonucleotide
  Antisense strand to SEQ ID NO: 1480076
aucauucugcuacuggugc

SEQ ID NO: 1480078 - RNA, 19 nt, Artificial Sequence
  Description of Artificial Sequence: Synthetic oligonucleotide
  Sense strand starting at position 1510 of SEQ ID NO: 1244325
ccaguagcagaaugauaca

SEQ ID NO: 1480079 - RNA, 19 nt, Artificial Sequence
  Description of Artificial Sequence: Synthetic oligonucleotide
  Antisense strand to SEQ ID NO: 1480078
uguaucauucugcuacugg

SEQ ID NO: 1480080 - RNA, 19 nt, Artificial Sequence
  Description of Artificial Sequence: Synthetic oligonucleotide
  Sense strand starting at position 1721 of SEQ ID NO: 1244325
cuuucuagacgcuacaaga

SEQ ID NO: 1480081 - RNA, 19 nt, Artificial Sequence
  Description of Artificial Sequence: Synthetic oligonucleotide
  Antisense strand to SEQ ID NO: 1480080
ucuuguagcgucuagaaag

SEQ ID NO: 1480082 - RNA, 19 nt, Artificial Sequence
  Description of Artificial Sequence: Synthetic oligonucleotide
  Sense strand starting at position 1777 of SEQ ID NO: 1244325
agaguaaggccuggaagga

SEQ ID NO: 1480083 - RNA, 19 nt, Artificial Sequence
  Description of Artificial Sequence: Synthetic oligonucleotide
  Antisense strand to SEQ ID NO: 1480082
uccuuccaggccuuacucu

SEQ ID NO: 1480084 - RNA, 19 nt, Artificial Sequence
  Description of Artificial Sequence: Synthetic oligonucleotide
  Sense strand starting at position 1804 of SEQ ID NO: 1244325
ggaagaggucugggucaag

SEQ ID NO: 1480085 - RNA, 19 nt, Artificial Sequence
  Description of Artificial Sequence: Synthetic oligonucleotide
  Antisense strand to SEQ ID NO: 1480084
cuugacccagaccucuucc

SEQ ID NO: 1480086 - RNA, 19 nt, Artificial Sequence
  Description of Artificial Sequence: Synthetic oligonucleotide
  Sense strand starting at position 1824 of SEQ ID NO: 1244325
agaguuccaucugcgaaga

SEQ ID NO: 1480087 - RNA, 19 nt, Artificial Sequence
  Description of Artificial Sequence: Synthetic oligonucleotide
  Antisense strand to SEQ ID NO: 1480086
ucuucgcagauggaacucu

SEQ ID NO: 1480088 - RNA, 19 nt, Artificial Sequence
  Description of Artificial Sequence: Synthetic oligonucleotide
  Sense strand starting at position 1952 of SEQ ID NO: 1244325
ggcgaaguuccggaaacca

SEQ ID NO: 1480089 - RNA, 19 nt, Artificial Sequence
  Description of Artificial Sequence: Synthetic oligonucleotide
  Antisense strand to SEQ ID NO: 1480088
ugguuuccggaacuucgcc

SEQ ID NO: 1480090 - RNA, 19 nt, Artificial Sequence
  Description of Artificial Sequence: Synthetic oligonucleotide
  Sense strand starting at position 3691 of SEQ ID NO: 1244325
gggaacuugggcuauagca

SEQ ID NO: 1480091 - RNA, 19 nt, Artificial Sequence
  Description of Artificial Sequence: Synthetic oligonucleotide
  Antisense strand to SEQ ID NO: 1480090
ugcuauagcccaaguuccc

SEQ ID NO: 1480092 - RNA, 19 nt, Artificial Sequence
  Description of Artificial Sequence: Synthetic oligonucleotide
  Sense strand starting at position 3739 of SEQ ID NO: 1244325
gagcuuacacucuggugaa

SEQ ID NO: 1480093 - RNA, 19 nt, Artificial Sequence
  Description of Artificial Sequence: Synthetic oligonucleotide
  Antisense strand to SEQ ID NO: 1480092
uucaccagaguguaagcuc

SEQ ID NO: 1480094 - RNA, 19 nt, Artificial Sequence
  Description of Artificial Sequence: Synthetic oligonucleotide
  Sense strand starting at position 3761 of SEQ ID NO: 1244325
gcagacaagcaaugaugaa

SEQ ID NO: 1480095 - RNA, 19 nt, Artificial Sequence
  Description of Artificial Sequence: Synthetic oligonucleotide
  Antisense strand to SEQ ID NO: 1480094
uucaucauugcuugucugc

SEQ ID NO: 1480096 - RNA, 19 nt, Artificial Sequence
  Description of Artificial Sequence: Synthetic oligonucleotide
  Sense strand starting at position 3791 of SEQ ID NO: 1244325
uucuauugugauuagcacu

SEQ ID NO: 1480097 - RNA, 19 nt, Artificial Sequence
  Description of Artificial Sequence: Synthetic oligonucleotide
  Antisense strand to SEQ ID NO: 1480096
agugcuaaucacaauagaa

SEQ ID NO: 1480098 - RNA, 19 nt, Artificial Sequence
  Description of Artificial Sequence: Synthetic oligonucleotide
  Sense strand starting at position 3797 of SEQ ID NO: 1244325
ugugauuagcacuaugaag

SEQ ID NO: 1480099 - RNA, 19 nt, Artificial Sequence
  Description of Artificial Sequence: Synthetic oligonucleotide
  Antisense strand to SEQ ID NO: 1480098
cuucauagugcuaaucaca

SEQ ID NO: 1480100 - RNA, 19 nt, Artificial Sequence
  Description of Artificial Sequence: Synthetic oligonucleotide
  Sense strand starting at position 3799 of SEQ ID NO: 1244325
ugauuagcacuaugaagga

SEQ ID NO: 1480101 - RNA, 19 nt, Artificial Sequence
  Description of Artificial Sequence: Synthetic oligonucleotide
  Antisense strand to SEQ ID NO: 1480100
uccuucauagugcuaauca

SEQ ID NO: 1480102 - RNA, 19 nt, Artificial Sequence
  Description of Artificial Sequence: Synthetic oligonucleotide
  Sense strand starting at position 3815 of SEQ ID NO: 1244325
ggaaauacauggguaaugu

SEQ ID NO: 1480103 - RNA, 19 nt, Artificial Sequence
  Description of Artificial Sequence: Synthetic oligonucleotide
  Antisense strand to SEQ ID NO: 1480102
acauuacccauguauuucc

SEQ ID NO: 1480104 - RNA, 19 nt, Artificial Sequence
  Description of Artificial Sequence: Synthetic oligonucleotide
  Sense strand starting at position 3831 of SEQ ID NO: 1244325
ugugauagagaauggaagu

SEQ ID NO: 1480105 - RNA, 19 nt, Artificial Sequence
  Description of Artificial Sequence: Synthetic oligonucleotide
  Antisense strand to SEQ ID NO: 1480104
acuuccauucucuaucaca

SEQ ID NO: 1480106 - RNA, 19 nt, Artificial Sequence
  Description of Artificial Sequence: Synthetic oligonucleotide
  Sense strand starting at position 3875 of SEQ ID NO: 1244325
cagggaaggccuugcugau

SEQ ID NO: 1480107 - RNA, 19 nt, Artificial Sequence
  Description of Artificial Sequence: Synthetic oligonucleotide
  Antisense strand to SEQ ID NO: 1480106
aucagcaaggccuucccug

SEQ ID NO: 1480108 - RNA, 19 nt, Artificial Sequence
  Description of Artificial Sequence: Synthetic oligonucleotide
  Sense strand starting at position 3896 of SEQ ID NO: 1244325
guuaacauguaaucugaga

SEQ ID NO: 1480109 - RNA, 19 nt, Artificial Sequence
  Description of Artificial Sequence: Synthetic oligonucleotide
  Antisense strand to SEQ ID NO: 1480108
ucucagauuacauguuaac

SEQ ID NO: 1480110 - RNA, 19 nt, Artificial Sequence
  Description of Artificial Sequence: Synthetic oligonucleotide
  Sense strand starting at position 3903 of SEQ ID NO: 1244325
uguaaucugagauaugugu

SEQ ID NO: 1480111 - RNA, 19 nt, Artificial Sequence
  Description of Artificial Sequence: Synthetic oligonucleotide
  Antisense strand to SEQ ID NO: 1480110
acacauaucucagauuaca

SEQ ID NO: 1480112 - RNA, 19 nt, Artificial Sequence
  Description of Artificial Sequence: Synthetic oligonucleotide
  Sense strand starting at position 3907 of SEQ ID NO: 1244325
aucugagauaugugugaau

SEQ ID NO: 1480113 - RNA, 19 nt, Artificial Sequence
  Description of Artificial Sequence: Synthetic oligonucleotide
  Antisense strand to SEQ ID NO: 1480112
auucacacauaucucagau

SEQ ID NO: 1480114 - RNA, 19 nt, Artificial Sequence
  Description of Artificial Sequence: Synthetic oligonucleotide
  Sense strand starting at position 3909 of SEQ ID NO: 1244325
cugagauaugugugaauga

SEQ ID NO: 1480115 - RNA, 19 nt, Artificial Sequence
  Description of Artificial Sequence: Synthetic oligonucleotide
  Antisense strand to SEQ ID NO: 1480114
ucauucacacauaucucag

SEQ ID NO: 1480116 - RNA, 19 nt, Artificial Sequence
  Description of Artificial Sequence: Synthetic oligonucleotide
  Sense strand starting at position 3914 of SEQ ID NO: 1244325
auaugugugaaugaacagu

SEQ ID NO: 1480117 - RNA, 19 nt, Artificial Sequence
  Description of Artificial Sequence: Synthetic oligonucleotide
  Antisense strand to SEQ ID NO: 1480116
acuguucauucacacauau

SEQ ID NO: 1480118 - RNA, 19 nt, Artificial Sequence
  Description of Artificial Sequence: Synthetic oligonucleotide
  Sense strand starting at position 3945 of SEQ ID NO: 1244325
gugcauucuaggcagaaga

SEQ ID NO: 1480119 - RNA, 19 nt, Artificial Sequence
  Description of Artificial Sequence: Synthetic oligonucleotide
  Antisense strand to SEQ ID NO: 1480118
ucuucugccuagaaugcac

SEQ ID NO: 1480120 - RNA, 19 nt, Artificial Sequence
  Description of Artificial Sequence: Synthetic oligonucleotide
  Sense strand starting at position 10 of SEQ ID NO: 1244326
ccagcacugcccuaggauu

SEQ ID NO: 1480121 - RNA, 19 nt, Artificial Sequence
  Description of Artificial Sequence: Synthetic oligonucleotide
  Antisense strand to SEQ ID NO: 1480120
aauccuagggcagugcugg

SEQ ID NO: 1480122 - RNA, 19 nt, Artificial Sequence
  Description of Artificial Sequence: Synthetic oligonucleotide
  Sense strand starting at position 48 of SEQ ID NO: 1244326
uucugucuaugaucauuau

SEQ ID NO: 1480123 - RNA, 19 nt, Artificial Sequence
  Description of Artificial Sequence: Synthetic oligonucleotide
  Antisense strand to SEQ ID NO: 1480122
auaaugaucauagacagaa

SEQ ID NO: 1480124 - RNA, 19 nt, Artificial Sequence
  Description of Artificial Sequence: Synthetic oligonucleotide
  Sense strand starting at position 51 of SEQ ID NO: 1244326
ugucuaugaucauuaucac

SEQ ID NO: 1480125 - RNA, 19 nt, Artificial Sequence
  Description of Artificial Sequence: Synthetic oligonucleotide
  Antisense strand to SEQ ID NO: 1480124
gugauaaugaucauagaca

SEQ ID NO: 1480126 - RNA, 19 nt, Artificial Sequence
  Description of Artificial Sequence: Synthetic oligonucleotide
  Sense strand starting at position 443 of SEQ ID NO: 1244326
aaaugaagccagggucuaa

SEQ ID NO: 1480127 - RNA, 19 nt, Artificial Sequence
  Description of Artificial Sequence: Synthetic oligonucleotide
  Antisense strand to SEQ ID NO: 1480126
uuagacccuggcuucauuu

SEQ ID NO: 1480128 - RNA, 19 nt, Artificial Sequence
  Description of Artificial Sequence: Synthetic oligonucleotide
  Sense strand starting at position 636 of SEQ ID NO: 1244326
accugaauguuacuggaau

SEQ ID NO: 1480129 - RNA, 19 nt, Artificial Sequence
  Description of Artificial Sequence: Synthetic oligonucleotide
  Antisense strand to SEQ ID NO: 1480128
auuccaguaacauucaggu

SEQ ID NO: 1480130 - RNA, 19 nt, Artificial Sequence
  Description of Artificial Sequence: Synthetic oligonucleotide
  Sense strand starting at position 685 of SEQ ID NO: 1244326
gucuuuaaugguugaguaa

SEQ ID NO: 1480131 - RNA, 19 nt, Artificial Sequence
  Description of Artificial Sequence: Synthetic oligonucleotide
  Antisense strand to SEQ ID NO: 1480130
uuacucaaccauuaaagac

SEQ ID NO: 1480132 - RNA, 19 nt, Artificial Sequence
  Description of Artificial Sequence: Synthetic oligonucleotide
  Sense strand starting at position 686 of SEQ ID NO: 1244326
ucuuuaaugguugaguaag

SEQ ID NO: 1480133 - RNA, 19 nt, Artificial Sequence
  Description of Artificial Sequence: Synthetic oligonucleotide
  Antisense strand to SEQ ID NO: 1480132
cuuacucaaccauuaaaga

SEQ ID NO: 1480134 - RNA, 19 nt, Artificial Sequence
  Description of Artificial Sequence: Synthetic oligonucleotide
  Sense strand starting at position 729 of SEQ ID NO: 1244326
cuaguaucacguggauaua

SEQ ID NO: 1480135 - RNA, 19 nt, Artificial Sequence
  Description of Artificial Sequence: Synthetic oligonucleotide
  Antisense strand to SEQ ID NO: 1480134
uauauccacgugauacuag

SEQ ID NO: 1480136 - RNA, 19 nt, Artificial Sequence
  Description of Artificial Sequence: Synthetic oligonucleotide
  Sense strand starting at position 739 of SEQ ID NO: 1244326
guggauauacagugaagua

SEQ ID NO: 1480137 - RNA, 19 nt, Artificial Sequence
  Description of Artificial Sequence: Synthetic oligonucleotide
  Antisense strand to SEQ ID NO: 1480136
uacuucacuguauauccac

SEQ ID NO: 1480138 - RNA, 19 nt, Artificial Sequence
  Description of Artificial Sequence: Synthetic oligonucleotide
  Sense strand starting at position 1043 of SEQ ID NO: 1244326
ucuacagagucacuuugaa

SEQ ID NO: 1480139 - RNA, 19 nt, Artificial Sequence
  Description of Artificial Sequence: Synthetic oligonucleotide
  Antisense strand to SEQ ID NO: 1480138
uucaaagugacucuguaga

SEQ ID NO: 1480140 - RNA, 19 nt, Artificial Sequence
  Description of Artificial Sequence: Synthetic oligonucleotide
  Sense strand starting at position 1145 of SEQ ID NO: 1244326
ggucuaaucaucugaggca

SEQ ID NO: 1480141 - RNA, 19 nt, Artificial Sequence
  Description of Artificial Sequence: Synthetic oligonucleotide
  Antisense strand to SEQ ID NO: 1480140
ugccucagaugauuagacc

SEQ ID NO: 1480142 - RNA, 19 nt, Artificial Sequence
  Description of Artificial Sequence: Synthetic oligonucleotide
  Sense strand starting at position 1223 of SEQ ID NO: 1244326
uuugaauuguggguuauuc

SEQ ID NO: 1480143 - RNA, 19 nt, Artificial Sequence
  Description of Artificial Sequence: Synthetic oligonucleotide
  Antisense strand to SEQ ID NO: 1480142
gaauaacccacaauucaaa

SEQ ID NO: 1480144 - RNA, 19 nt, Artificial Sequence
  Description of Artificial Sequence: Synthetic oligonucleotide
  Sense strand starting at position 1332 of SEQ ID NO: 1244326
ggaagaugaugcuuaucug

SEQ ID NO: 1480145 - RNA, 19 nt, Artificial Sequence
  Description of Artificial Sequence: Synthetic oligonucleotide
  Antisense strand to SEQ ID NO: 1480144
cagauaagcaucaucuucc

SEQ ID NO: 1480146 - RNA, 19 nt, Artificial Sequence
  Description of Artificial Sequence: Synthetic oligonucleotide
  Sense strand starting at position 1333 of SEQ ID NO: 1244326
gaagaugaugcuuaucugu

SEQ ID NO: 1480147 - RNA, 19 nt, Artificial Sequence
  Description of Artificial Sequence: Synthetic oligonucleotide
  Antisense strand to SEQ ID NO: 1480146
acagauaagcaucaucuuc

SEQ ID NO: 1480148 - RNA, 19 nt, Artificial Sequence
  Description of Artificial Sequence: Synthetic oligonucleotide
  Sense strand starting at position 1335 of SEQ ID NO: 1244326
agaugaugcuuaucuguug

SEQ ID NO: 1480149 - RNA, 19 nt, Artificial Sequence
  Description of Artificial Sequence: Synthetic oligonucleotide
  Antisense strand to SEQ ID NO: 1480148
caacagauaagcaucaucu

SEQ ID NO: 1480150 - RNA, 19 nt, Artificial Sequence
  Description of Artificial Sequence: Synthetic oligonucleotide
  Sense strand starting at position 1336 of SEQ ID NO: 1244326
gaugaugcuuaucuguuga

SEQ ID NO: 1480151 - RNA, 19 nt, Artificial Sequence
  Description of Artificial Sequence: Synthetic oligonucleotide
  Antisense strand to SEQ ID NO: 1480150
ucaacagauaagcaucauc

SEQ ID NO: 1480152 - RNA, 19 nt, Artificial Sequence
  Description of Artificial Sequence: Synthetic oligonucleotide
  Sense strand starting at position 1370 of SEQ ID NO: 1244326
gaacuaaagugaguauuac

SEQ ID NO: 1480153 - RNA, 19 nt, Artificial Sequence
  Description of Artificial Sequence: Synthetic oligonucleotide
  Antisense strand to SEQ ID NO: 1480152
guaauacucacuuuaguuc

SEQ ID NO: 1480154 - RNA, 19 nt, Artificial Sequence
  Description of Artificial Sequence: Synthetic oligonucleotide
  Sense strand starting at position 1435 of SEQ ID NO: 1244326
ucaagaucgcugggaugaa

SEQ ID NO: 1480155 - RNA, 19 nt, Artificial Sequence
  Description of Artificial Sequence: Synthetic oligonucleotide
  Antisense strand to SEQ ID NO: 1480154
uucaucccagcgaucuuga

SEQ ID NO: 1480156 - RNA, 19 nt, Artificial Sequence
  Description of Artificial Sequence: Synthetic oligonucleotide
  Sense strand starting at position 1439 of SEQ ID NO: 1244326
gaucgcugggaugaacauu

SEQ ID NO: 1480157 - RNA, 19 nt, Artificial Sequence
  Description of Artificial Sequence: Synthetic oligonucleotide
  Antisense strand to SEQ ID NO: 1480156
aauguucaucccagcgauc

SEQ ID NO: 1480158 - RNA, 19 nt, Artificial Sequence
  Description of Artificial Sequence: Synthetic oligonucleotide
  Sense strand starting at position 1475 of SEQ ID NO: 1244326
gucugcauuuagucucuaa

SEQ ID NO: 1480159 - RNA, 19 nt, Artificial Sequence
  Description of Artificial Sequence: Synthetic oligonucleotide
  Antisense strand to SEQ ID NO: 1480158
uuagagacuaaaugcagac

SEQ ID NO: 1480160 - RNA, 19 nt, Artificial Sequence
  Description of Artificial Sequence: Synthetic oligonucleotide
  Sense strand starting at position 1478 of SEQ ID NO: 1244326
ugcauuuagucucuaagcu

SEQ ID NO: 1480161 - RNA, 19 nt, Artificial Sequence
  Description of Artificial Sequence: Synthetic oligonucleotide
  Antisense strand to SEQ ID NO: 1480160
agcuuagagacuaaaugca

SEQ ID NO: 1480162 - RNA, 19 nt, Artificial Sequence
  Description of Artificial Sequence: Synthetic oligonucleotide
  Sense strand starting at position 1542 of SEQ ID NO: 1244326
ugcuuaacucauggaaugu

SEQ ID NO: 1480163 - RNA, 19 nt, Artificial Sequence
  Description of Artificial Sequence: Synthetic oligonucleotide
  Antisense strand to SEQ ID NO: 1480162
acauuccaugaguuaagca

SEQ ID NO: 1480164 - RNA, 19 nt, Artificial Sequence
  Description of Artificial Sequence: Synthetic oligonucleotide
  Sense strand starting at position 2149 of SEQ ID NO: 1244326
uuuggauugugagucaaga

SEQ ID NO: 1480165 - RNA, 19 nt, Artificial Sequence
  Description of Artificial Sequence: Synthetic oligonucleotide
  Antisense strand to SEQ ID NO: 1480164
ucuugacucacaauccaaa

SEQ ID NO: 1480166 - RNA, 19 nt, Artificial Sequence
  Description of Artificial Sequence: Synthetic oligonucleotide
  Sense strand starting at position 2151 of SEQ ID NO: 1244326
uggauugugagucaagauu

SEQ ID NO: 1480167 - RNA, 19 nt, Artificial Sequence
  Description of Artificial Sequence: Synthetic oligonucleotide
  Antisense strand to SEQ ID NO: 1480166
aaucuugacucacaaucca

SEQ ID NO: 1480168 - RNA, 19 nt, Artificial Sequence
  Description of Artificial Sequence: Synthetic oligonucleotide
  Sense strand starting at position 2157 of SEQ ID NO: 1244326
gugagucaagauugcuaaa

SEQ ID NO: 1480169 - RNA, 19 nt, Artificial Sequence
  Description of Artificial Sequence: Synthetic oligonucleotide
  Antisense strand to SEQ ID NO: 1480168
uuuagcaaucuugacucac

SEQ ID NO: 1480170 - RNA, 19 nt, Artificial Sequence
  Description of Artificial Sequence: Synthetic oligonucleotide
  Sense strand starting at position 2159 of SEQ ID NO: 1244326
gagucaagauugcuaaauu

SEQ ID NO: 1480171 - RNA, 19 nt, Artificial Sequence
  Description of Artificial Sequence: Synthetic oligonucleotide
  Antisense strand to SEQ ID NO: 1480170
aauuuagcaaucuugacuc

SEQ ID NO: 1480172 - RNA, 19 nt, Artificial Sequence
  Description of Artificial Sequence: Synthetic oligonucleotide
  Sense strand starting at position 2717 of SEQ ID NO: 1244326
caucgagaccucgaguuua

SEQ ID NO: 1480173 - RNA, 19 nt, Artificial Sequence
  Description of Artificial Sequence: Synthetic oligonucleotide
  Antisense strand to SEQ ID NO: 1480172
uaaacucgaggucucgaug

SEQ ID NO: 1480174 - RNA, 19 nt, Artificial Sequence
  Description of Artificial Sequence: Synthetic oligonucleotide
  Sense strand starting at position 2728 of SEQ ID NO: 1244326
cgaguuuagcccuaaggac

SEQ ID NO: 1480175 - RNA, 19 nt, Artificial Sequence
  Description of Artificial Sequence: Synthetic oligonucleotide
  Antisense strand to SEQ ID NO: 1480174
guccuuagggcuaaacucg

SEQ ID NO: 1480176 - RNA, 19 nt, Artificial Sequence
  Description of Artificial Sequence: Synthetic oligonucleotide
  Sense strand starting at position 2786 of SEQ ID NO: 1244326
guugcuuagaaagagucua

SEQ ID NO: 1480177 - RNA, 19 nt, Artificial Sequence
  Description of Artificial Sequence: Synthetic oligonucleotide
  Antisense strand to SEQ ID NO: 1480176
uagacucuuucuaagcaac

SEQ ID NO: 1480178 - RNA, 19 nt, Artificial Sequence
  Description of Artificial Sequence: Synthetic oligonucleotide
  Sense strand starting at position 3122 of SEQ ID NO: 1244326
aggccaaagauggguuuau

SEQ ID NO: 1480179 - RNA, 19 nt, Artificial Sequence
  Description of Artificial Sequence: Synthetic oligonucleotide
  Antisense strand to SEQ ID NO: 1480178
auaaacccaucuuuggccu

SEQ ID NO: 1480180 - RNA, 19 nt, Artificial Sequence
  Description of Artificial Sequence: Synthetic oligonucleotide
  Sense strand starting at position 3123 of SEQ ID NO: 1244326
ggccaaagauggguuuaug

SEQ ID NO: 1480181 - RNA, 19 nt, Artificial Sequence
  Description of Artificial Sequence: Synthetic oligonucleotide
  Antisense strand to SEQ ID NO: 1480180
cauaaacccaucuuuggcc

SEQ ID NO: 1480182 - RNA, 19 nt, Artificial Sequence
  Description of Artificial Sequence: Synthetic oligonucleotide
  Sense strand starting at position 3126 of SEQ ID NO: 1244326
caaagauggguuuaugguu

SEQ ID NO: 1480183 - RNA, 19 nt, Artificial Sequence
  Description of Artificial Sequence: Synthetic oligonucleotide
  Antisense strand to SEQ ID NO: 1480182
aaccauaaacccaucuuug

SEQ ID NO: 1480184 - RNA, 19 nt, Artificial Sequence
  Description of Artificial Sequence: Synthetic oligonucleotide
  Sense strand starting at position 3215 of SEQ ID NO: 1244326
agcuuagcuagugaguaga

SEQ ID NO: 1480185 - RNA, 19 nt, Artificial Sequence
  Description of Artificial Sequence: Synthetic oligonucleotide
  Antisense strand to SEQ ID NO: 1480184
ucuacucacuagcuaagcu

SEQ ID NO: 1480186 - RNA, 19 nt, Artificial Sequence
  Description of Artificial Sequence: Synthetic oligonucleotide
  Sense strand starting at position 3218 of SEQ ID NO: 1244326
uuagcuagugaguagaaga

SEQ ID NO: 1480187 - RNA, 19 nt, Artificial Sequence
  Description of Artificial Sequence: Synthetic oligonucleotide
  Antisense strand to SEQ ID NO: 1480186
ucuucuacucacuagcuaa

SEQ ID NO: 1480188 - RNA, 19 nt, Artificial Sequence
  Description of Artificial Sequence: Synthetic oligonucleotide
  Sense strand starting at position 3275 of SEQ ID NO: 1244326
gcuguaauccaccaucaug

SEQ ID NO: 1480189 - RNA, 19 nt, Artificial Sequence
  Description of Artificial Sequence: Synthetic oligonucleotide
  Antisense strand to SEQ ID NO: 1480188
caugaugguggauuacagc

SEQ ID NO: 1480190 - RNA, 19 nt, Artificial Sequence
  Description of Artificial Sequence: Synthetic oligonucleotide
  Sense strand starting at position 3322 of SEQ ID NO: 1244326
auccacauagcaugaugaa

SEQ ID NO: 1480191 - RNA, 19 nt, Artificial Sequence
  Description of Artificial Sequence: Synthetic oligonucleotide
  Antisense strand to SEQ ID NO: 1480190
uucaucaugcuauguggau

SEQ ID NO: 1480192 - RNA, 19 nt, Artificial Sequence
  Description of Artificial Sequence: Synthetic oligonucleotide
  Sense strand starting at position 3669 of SEQ ID NO: 1244326
cuguauacccuuggaguca

SEQ ID NO: 1480193 - RNA, 19 nt, Artificial Sequence
  Description of Artificial Sequence: Synthetic oligonucleotide
  Antisense strand to SEQ ID NO: 1480192
ugacuccaaggguauacag

SEQ ID NO: 1480194 - RNA, 19 nt, Artificial Sequence
  Description of Artificial Sequence: Synthetic oligonucleotide
  Sense strand starting at position 3853 of SEQ ID NO: 1244326
gacuuacaaugguuaagau

SEQ ID NO: 1480195 - RNA, 19 nt, Artificial Sequence
  Description of Artificial Sequence: Synthetic oligonucleotide
  Antisense strand to SEQ ID NO: 1480194
aucuuaaccauuguaaguc

SEQ ID NO: 1480196 - RNA, 19 nt, Artificial Sequence
  Description of Artificial Sequence: Synthetic oligonucleotide
  Sense strand starting at position 3946 of SEQ ID NO: 1244326
cuaccaguucuguaacuuu

SEQ ID NO: 1480197 - RNA, 19 nt, Artificial Sequence
  Description of Artificial Sequence: Synthetic oligonucleotide
  Antisense strand to SEQ ID NO: 1480196
aaaguuacagaacugguag

SEQ ID NO: 1480198 - RNA, 19 nt, Artificial Sequence
  Description of Artificial Sequence: Synthetic oligonucleotide
  Sense strand starting at position 3975 of SEQ ID NO: 1244326
auguuaaaguggguuugaa

SEQ ID NO: 1480199 - RNA, 19 nt, Artificial Sequence
  Description of Artificial Sequence: Synthetic oligonucleotide
  Antisense strand to SEQ ID NO: 1480198
uucaaacccacuuuaacau

SEQ ID NO: 1480200 - RNA, 19 nt, Artificial Sequence
  Description of Artificial Sequence: Synthetic oligonucleotide
  Sense strand starting at position 38 of SEQ ID NO: 1244327
gcagaaacucgggaaagcu

SEQ ID NO: 1480201 - RNA, 19 nt, Artificial Sequence
  Description of Artificial Sequence: Synthetic oligonucleotide
  Antisense strand to SEQ ID NO: 1480200
agcuuucccgaguuucugc

SEQ ID NO: 1480202 - RNA, 19 nt, Artificial Sequence
  Description of Artificial Sequence: Synthetic oligonucleotide
  Sense strand starting at position 46 of SEQ ID NO: 1244327
ucgggaaagcugugcuuau

SEQ ID NO: 1480203 - RNA, 19 nt, Artificial Sequence
  Description of Artificial Sequence: Synthetic oligonucleotide
  Antisense strand to SEQ ID NO: 1480202
auaagcacagcuuucccga

SEQ ID NO: 1480204 - RNA, 19 nt, Artificial Sequence
  Description of Artificial Sequence: Synthetic oligonucleotide
  Sense strand starting at position 47 of SEQ ID NO: 1244327
cgggaaagcugugcuuaua

SEQ ID NO: 1480205 - RNA, 19 nt, Artificial Sequence
  Description of Artificial Sequence: Synthetic oligonucleotide
  Antisense strand to SEQ ID NO: 1480204
uauaagcacagcuuucccg

SEQ ID NO: 1480206 - RNA, 19 nt, Artificial Sequence
  Description of Artificial Sequence: Synthetic oligonucleotide
  Sense strand starting at position 50 of SEQ ID NO: 1244327
gaaagcugugcuuauaaag

SEQ ID NO: 1480207 - RNA, 19 nt, Artificial Sequence
  Description of Artificial Sequence: Synthetic oligonucleotide
  Antisense strand to SEQ ID NO: 1480206
cuuuauaagcacagcuuuc

SEQ ID NO: 1480208 - RNA, 19 nt, Artificial Sequence
  Description of Artificial Sequence: Synthetic oligonucleotide
  Sense strand starting at position 181 of SEQ ID NO: 1244327
ggcggcugucaggaggaaa

SEQ ID NO: 1480209 - RNA, 19 nt, Artificial Sequence
  Description of Artificial Sequence: Synthetic oligonucleotide
  Antisense strand to SEQ ID NO: 1480208
uuuccuccugacagccgcc

SEQ ID NO: 1480210 - RNA, 19 nt, Artificial Sequence
  Description of Artificial Sequence: Synthetic oligonucleotide
  Sense strand starting at position 226 of SEQ ID NO: 1244327
gucacugcuuuguucugaa

SEQ ID NO: 1480211 - RNA, 19 nt, Artificial Sequence
  Description of Artificial Sequence: Synthetic oligonucleotide
  Antisense strand to SEQ ID NO: 1480210
uucagaacaaagcagugac

SEQ ID NO: 1480212 - RNA, 19 nt, Artificial Sequence
  Description of Artificial Sequence: Synthetic oligonucleotide
  Sense strand starting at position 354 of SEQ ID NO: 1244327
gggcuuuagcuggaaucuu

SEQ ID NO: 1480213 - RNA, 19 nt, Artificial Sequence
  Description of Artificial Sequence: Synthetic oligonucleotide
  Antisense strand to SEQ ID NO: 1480212
aagauuccagcuaaagccc

SEQ ID NO: 1480214 - RNA, 19 nt, Artificial Sequence
  Description of Artificial Sequence: Synthetic oligonucleotide
  Sense strand starting at position 363 of SEQ ID NO: 1244327
cuggaaucuuaacaaauag

SEQ ID NO: 1480215 - RNA, 19 nt, Artificial Sequence
  Description of Artificial Sequence: Synthetic oligonucleotide
  Antisense strand to SEQ ID NO: 1480214
cuauuuguuaagauuccag

SEQ ID NO: 1480216 - RNA, 19 nt, Artificial Sequence
  Description of Artificial Sequence: Synthetic oligonucleotide
  Sense strand starting at position 568 of SEQ ID NO: 1244327
gugauaucuggugggcagu

SEQ ID NO: 1480217 - RNA, 19 nt, Artificial Sequence
  Description of Artificial Sequence: Synthetic oligonucleotide
  Antisense strand to SEQ ID NO: 1480216
acugcccaccagauaucac

SEQ ID NO: 1480218 - RNA, 19 nt, Artificial Sequence
  Description of Artificial Sequence: Synthetic oligonucleotide
  Sense strand starting at position 750 of SEQ ID NO: 1244327
agcugaacuucccugguaa

SEQ ID NO: 1480219 - RNA, 19 nt, Artificial Sequence
  Description of Artificial Sequence: Synthetic oligonucleotide
  Antisense strand to SEQ ID NO: 1480218
uuaccagggaaguucagcu

SEQ ID NO: 1480220 - RNA, 19 nt, Artificial Sequence
  Description of Artificial Sequence: Synthetic oligonucleotide
  Sense strand starting at position 751 of SEQ ID NO: 1244327
gcugaacuucccugguaag

SEQ ID NO: 1480221 - RNA, 19 nt, Artificial Sequence
  Description of Artificial Sequence: Synthetic oligonucleotide
  Antisense strand to SEQ ID NO: 1480220
cuuaccagggaaguucagc

SEQ ID NO: 1480222 - RNA, 19 nt, Artificial Sequence
  Description of Artificial Sequence: Synthetic oligonucleotide
  Sense strand starting at position 906 of SEQ ID NO: 1244327
ccuccaaauccuggcugau

SEQ ID NO: 1480223 - RNA, 19 nt, Artificial Sequence
  Description of Artificial Sequence: Synthetic oligonucleotide
  Antisense strand to SEQ ID NO: 1480222
aucagccaggauuuggagg

SEQ ID NO: 1480224 - RNA, 19 nt, Artificial Sequence
  Description of Artificial Sequence: Synthetic oligonucleotide
  Sense strand starting at position 996 of SEQ ID NO: 1244327
accagagaauccuagaacu

SEQ ID NO: 1480225 - RNA, 19 nt, Artificial Sequence
  Description of Artificial Sequence: Synthetic oligonucleotide
  Antisense strand to SEQ ID NO: 1480224
aguucuaggauucucuggu

SEQ ID NO: 1480226 - RNA, 19 nt, Artificial Sequence
  Description of Artificial Sequence: Synthetic oligonucleotide
  Sense strand starting at position 1007 of SEQ ID NO: 1244327
cuagaacucucaguggaag

SEQ ID NO: 1480227 - RNA, 19 nt, Artificial Sequence
  Description of Artificial Sequence: Synthetic oligonucleotide
  Antisense strand to SEQ ID NO: 1480226
cuuccacugagaguucuag

SEQ ID NO: 1480228 - RNA, 19 nt, Artificial Sequence
  Description of Artificial Sequence: Synthetic oligonucleotide
  Sense strand starting at position 1384 of SEQ ID NO: 1244327
gggugcugcucagugaaga

SEQ ID NO: 1480229 - RNA, 19 nt, Artificial Sequence
  Description of Artificial Sequence: Synthetic oligonucleotide
  Antisense strand to SEQ ID NO: 1480228
ucuucacugagcagcaccc

SEQ ID NO: 1480230 - RNA, 19 nt, Artificial Sequence
  Description of Artificial Sequence: Synthetic oligonucleotide
  Sense strand starting at position 1385 of SEQ ID NO: 1244327
ggugcugcucagugaagau

SEQ ID NO: 1480231 - RNA, 19 nt, Artificial Sequence
  Description of Artificial Sequence: Synthetic oligonucleotide
  Antisense strand to SEQ ID NO: 1480230
aucuucacugagcagcacc

SEQ ID NO: 1480232 - RNA, 19 nt, Artificial Sequence
  Description of Artificial Sequence: Synthetic oligonucleotide
  Sense strand starting at position 1493 of SEQ ID NO: 1244327
cugguuucugguggaagga

SEQ ID NO: 1480233 - RNA, 19 nt, Artificial Sequence
  Description of Artificial Sequence: Synthetic oligonucleotide
  Antisense strand to SEQ ID NO: 1480232
uccuuccaccagaaaccag

SEQ ID NO: 1480234 - RNA, 19 nt, Artificial Sequence
  Description of Artificial Sequence: Synthetic oligonucleotide
  Sense strand starting at position 1923 of SEQ ID NO: 1244327
guguauuugucgccaauga

SEQ ID NO: 1480235 - RNA, 19 nt, Artificial Sequence
  Description of Artificial Sequence: Synthetic oligonucleotide
  Antisense strand to SEQ ID NO: 1480234
ucauuggcgacaaauacac

SEQ ID NO: 1480236 - RNA, 19 nt, Artificial Sequence
  Description of Artificial Sequence: Synthetic oligonucleotide
  Sense strand starting at position 1924 of SEQ ID NO: 1244327
uguauuugucgccaaugac

SEQ ID NO: 1480237 - RNA, 19 nt, Artificial Sequence
  Description of Artificial Sequence: Synthetic oligonucleotide
  Antisense strand to SEQ ID NO: 1480236
gucauuggcgacaaauaca

SEQ ID NO: 1480238 - RNA, 19 nt, Artificial Sequence
  Description of Artificial Sequence: Synthetic oligonucleotide
  Sense strand starting at position 1933 of SEQ ID NO: 1244327
cgccaaugacacuaaacau

SEQ ID NO: 1480239 - RNA, 19 nt, Artificial Sequence
  Description of Artificial Sequence: Synthetic oligonucleotide
  Antisense strand to SEQ ID NO: 1480238
auguuuagugucauuggcg

SEQ ID NO: 1480240 - RNA, 19 nt, Artificial Sequence
  Description of Artificial Sequence: Synthetic oligonucleotide
  Sense strand starting at position 1983 of SEQ ID NO: 1244327
acgaggaguucguccugga

SEQ ID NO: 1480241 - RNA, 19 nt, Artificial Sequence
  Description of Artificial Sequence: Synthetic oligonucleotide
  Antisense strand to SEQ ID NO: 1480240
uccaggacgaacuccucgu

SEQ ID NO: 1480242 - RNA, 19 nt, Artificial Sequence
  Description of Artificial Sequence: Synthetic oligonucleotide
  Sense strand starting at position 2069 of SEQ ID NO: 1244327
gggagagagugacaaauuu

SEQ ID NO: 1480243 - RNA, 19 nt, Artificial Sequence
  Description of Artificial Sequence: Synthetic oligonucleotide
  Antisense strand to SEQ ID NO: 1480242
aaauuugucacucucuccc

SEQ ID NO: 1480244 - RNA, 19 nt, Artificial Sequence
  Description of Artificial Sequence: Synthetic oligonucleotide
  Sense strand starting at position 2077 of SEQ ID NO: 1244327
gugacaaauuucugaagug

SEQ ID NO: 1480245 - RNA, 19 nt, Artificial Sequence
  Description of Artificial Sequence: Synthetic oligonucleotide
  Antisense strand to SEQ ID NO: 1480244
cacuucagaaauuugucac

SEQ ID NO: 1480246 - RNA, 19 nt, Artificial Sequence
  Description of Artificial Sequence: Synthetic oligonucleotide
  Sense strand starting at position 2078 of SEQ ID NO: 1244327
ugacaaauuucugaaguga

SEQ ID NO: 1480247 - RNA, 19 nt, Artificial Sequence
  Description of Artificial Sequence: Synthetic oligonucleotide
  Antisense strand to SEQ ID NO: 1480246
ucacuucagaaauuuguca

SEQ ID NO: 1480248 - RNA, 19 nt, Artificial Sequence
  Description of Artificial Sequence: Synthetic oligonucleotide
  Sense strand starting at position 2310 of SEQ ID NO: 1244327
ccuguaacacuaugaaguu

SEQ ID NO: 1480249 - RNA, 19 nt, Artificial Sequence
  Description of Artificial Sequence: Synthetic oligonucleotide
  Antisense strand to SEQ ID NO: 1480248
aacuucauaguguuacagg

SEQ ID NO: 1480250 - RNA, 19 nt, Artificial Sequence
  Description of Artificial Sequence: Synthetic oligonucleotide
  Sense strand starting at position 2444 of SEQ ID NO: 1244327
aagagacaagcuuggugau

SEQ ID NO: 1480251 - RNA, 19 nt, Artificial Sequence
  Description of Artificial Sequence: Synthetic oligonucleotide
  Antisense strand to SEQ ID NO: 1480250
aucaccaagcuugucucuu

SEQ ID NO: 1480252 - RNA, 19 nt, Artificial Sequence
  Description of Artificial Sequence: Synthetic oligonucleotide
  Sense strand starting at position 2450 of SEQ ID NO: 1244327
caagcuuggugauugcauu

SEQ ID NO: 1480253 - RNA, 19 nt, Artificial Sequence
  Description of Artificial Sequence: Synthetic oligonucleotide
  Antisense strand to SEQ ID NO: 1480252
aaugcaaucaccaagcuug

SEQ ID NO: 1480254 - RNA, 19 nt, Artificial Sequence
  Description of Artificial Sequence: Synthetic oligonucleotide
  Sense strand starting at position 2458 of SEQ ID NO: 1244327
gugauugcauuugauuuaa

SEQ ID NO: 1480255 - RNA, 19 nt, Artificial Sequence
  Description of Artificial Sequence: Synthetic oligonucleotide
  Antisense strand to SEQ ID NO: 1480254
uuaaaucaaaugcaaucac

SEQ ID NO: 1480256 - RNA, 19 nt, Artificial Sequence
  Description of Artificial Sequence: Synthetic oligonucleotide
  Sense strand starting at position 2756 of SEQ ID NO: 1244327
uaaauaagguccuugaagu

SEQ ID NO: 1480257 - RNA, 19 nt, Artificial Sequence
  Description of Artificial Sequence: Synthetic oligonucleotide
  Antisense strand to SEQ ID NO: 1480256
acuucaaggaccuuauuua

SEQ ID NO: 1480258 - RNA, 19 nt, Artificial Sequence
  Description of Artificial Sequence: Synthetic oligonucleotide
  Sense strand starting at position 2757 of SEQ ID NO: 1244327
aaauaagguccuugaaguu

SEQ ID NO: 1480259 - RNA, 19 nt, Artificial Sequence
  Description of Artificial Sequence: Synthetic oligonucleotide
  Antisense strand to SEQ ID NO: 1480258
aacuucaaggaccuuauuu

SEQ ID NO: 1480260 - RNA, 19 nt, Artificial Sequence
  Description of Artificial Sequence: Synthetic oligonucleotide
  Sense strand starting at position 2910 of SEQ ID NO: 1244327
aaaggagccucuuuggcaa

SEQ ID NO: 1480261 - RNA, 19 nt, Artificial Sequence
  Description of Artificial Sequence: Synthetic oligonucleotide
  Antisense strand to SEQ ID NO: 1480260
uugccaaagaggcuccuuu

SEQ ID NO: 1480262 - RNA, 19 nt, Artificial Sequence
  Description of Artificial Sequence: Synthetic oligonucleotide
  Sense strand starting at position 3022 of SEQ ID NO: 1244327
uggucucucagaggguuaa

SEQ ID NO: 1480263 - RNA, 19 nt, Artificial Sequence
  Description of Artificial Sequence: Synthetic oligonucleotide
  Antisense strand to SEQ ID NO: 1480262
uuaacccucugagagacca

SEQ ID NO: 1480264 - RNA, 19 nt, Artificial Sequence
  Description of Artificial Sequence: Synthetic oligonucleotide
  Sense strand starting at position 3023 of SEQ ID NO: 1244327
ggucucucagaggguuaau

SEQ ID NO: 1480265 - RNA, 19 nt, Artificial Sequence
  Description of Artificial Sequence: Synthetic oligonucleotide
  Antisense strand to SEQ ID NO: 1480264
auuaacccucugagagacc

SEQ ID NO: 1480266 - RNA, 19 nt, Artificial Sequence
  Description of Artificial Sequence: Synthetic oligonucleotide
  Sense strand starting at position 3039 of SEQ ID NO: 1244327
aaugcaauuucuuggagga

SEQ ID NO: 1480267 - RNA, 19 nt, Artificial Sequence
  Description of Artificial Sequence: Synthetic oligonucleotide
  Antisense strand to SEQ ID NO: 1480266
uccuccaagaaauugcauu

SEQ ID NO: 1480268 - RNA, 19 nt, Artificial Sequence
  Description of Artificial Sequence: Synthetic oligonucleotide
  Sense strand starting at position 3098 of SEQ ID NO: 1244327
ugguuauucccauggccca

SEQ ID NO: 1480269 - RNA, 19 nt, Artificial Sequence
  Description of Artificial Sequence: Synthetic oligonucleotide
  Antisense strand to SEQ ID NO: 1480268
ugggccaugggaauaacca

SEQ ID NO: 1480270 - RNA, 19 nt, Artificial Sequence
  Description of Artificial Sequence: Synthetic oligonucleotide
  Sense strand starting at position 3435 of SEQ ID NO: 1244327
cagaguguuguagaccagu

SEQ ID NO: 1480271 - RNA, 19 nt, Artificial Sequence
  Description of Artificial Sequence: Synthetic oligonucleotide
  Antisense strand to SEQ ID NO: 1480270
acuggucuacaacacucug

SEQ ID NO: 1480272 - RNA, 19 nt, Artificial Sequence
  Description of Artificial Sequence: Synthetic oligonucleotide
  Sense strand starting at position 3438 of SEQ ID NO: 1244327
aguguuguagaccaguaga

SEQ ID NO: 1480273 - RNA, 19 nt, Artificial Sequence
  Description of Artificial Sequence: Synthetic oligonucleotide
  Antisense strand to SEQ ID NO: 1480272
ucuacuggucuacaacacu

SEQ ID NO: 1480274 - RNA, 19 nt, Artificial Sequence
  Description of Artificial Sequence: Synthetic oligonucleotide
  Sense strand starting at position 3471 of SEQ ID NO: 1244327
agcugucaaccagacucau

SEQ ID NO: 1480275 - RNA, 19 nt, Artificial Sequence
  Description of Artificial Sequence: Synthetic oligonucleotide
  Antisense strand to SEQ ID NO: 1480274
augagucugguugacagcu

SEQ ID NO: 1480276 - RNA, 19 nt, Artificial Sequence
  Description of Artificial Sequence: Synthetic oligonucleotide
  Sense strand starting at position 3556 of SEQ ID NO: 1244327
auggguaaguaagaauuau

SEQ ID NO: 1480277 - RNA, 19 nt, Artificial Sequence
  Description of Artificial Sequence: Synthetic oligonucleotide
  Antisense strand to SEQ ID NO: 1480276
auaauucuuacuuacccau

SEQ ID NO: 1480278 - RNA, 19 nt, Artificial Sequence
  Description of Artificial Sequence: Synthetic oligonucleotide
  Sense strand starting at position 3729 of SEQ ID NO: 1244327
ugagguuagacgggucuga

SEQ ID NO: 1480279 - RNA, 19 nt, Artificial Sequence
  Description of Artificial Sequence: Synthetic oligonucleotide
  Antisense strand to SEQ ID NO: 1480278
ucagacccgucuaaccuca

SEQ ID NO: 1480280 - RNA, 19 nt, Artificial Sequence
  Description of Artificial Sequence: Synthetic oligonucleotide
  Sense strand starting at position 21 of SEQ ID NO: 1244328
gguuuccuacgacaggauu

SEQ ID NO: 1480281 - RNA, 19 nt, Artificial Sequence
  Description of Artificial Sequence: Synthetic oligonucleotide
  Antisense strand to SEQ ID NO: 1480280
aauccugucguaggaaacc

SEQ ID NO: 1480282 - RNA, 19 nt, Artificial Sequence
  Description of Artificial Sequence: Synthetic oligonucleotide
  Sense strand starting at position 76 of SEQ ID NO: 1244328
agaugagcugcucacucua

SEQ ID NO: 1480283 - RNA, 19 nt, Artificial Sequence
  Description of Artificial Sequence: Synthetic oligonucleotide
  Antisense strand to SEQ ID NO: 1480282
uagagugagcagcucaucu

SEQ ID NO: 1480284 - RNA, 19 nt, Artificial Sequence
  Description of Artificial Sequence: Synthetic oligonucleotide
  Sense strand starting at position 112 of SEQ ID NO: 1244328
cuguguucucaccaacuuu

SEQ ID NO: 1480285 - RNA, 19 nt, Artificial Sequence
  Description of Artificial Sequence: Synthetic oligonucleotide
  Antisense strand to SEQ ID NO: 1480284
aaaguuggugagaacacag

SEQ ID NO: 1480286 - RNA, 19 nt, Artificial Sequence
  Description of Artificial Sequence: Synthetic oligonucleotide
  Sense strand starting at position 310 of SEQ ID NO: 1244328
gagcuuucuugggugagac

SEQ ID NO: 1480287 - RNA, 19 nt, Artificial Sequence
  Description of Artificial Sequence: Synthetic oligonucleotide
  Antisense strand to SEQ ID NO: 1480286
gucucacccaagaaagcuc

SEQ ID NO: 1480288 - RNA, 19 nt, Artificial Sequence
  Description of Artificial Sequence: Synthetic oligonucleotide
  Sense strand starting at position 369 of SEQ ID NO: 1244328
gcagaaacucgggaaagcu

SEQ ID NO: 1480289 - RNA, 19 nt, Artificial Sequence
  Description of Artificial Sequence: Synthetic oligonucleotide
  Antisense strand to SEQ ID NO: 1480288
agcuuucccgaguuucugc

SEQ ID NO: 1480290 - RNA, 19 nt, Artificial Sequence
  Description of Artificial Sequence: Synthetic oligonucleotide
  Sense strand starting at position 378 of SEQ ID NO: 1244328
cgggaaagcugugcuuaua

SEQ ID NO: 1480291 - RNA, 19 nt, Artificial Sequence
  Description of Artificial Sequence: Synthetic oligonucleotide
  Antisense strand to SEQ ID NO: 1480290
uauaagcacagcuuucccg

SEQ ID NO: 1480292 - RNA, 19 nt, Artificial Sequence
  Description of Artificial Sequence: Synthetic oligonucleotide
  Sense strand starting at position 381 of SEQ ID NO: 1244328
gaaagcugugcuuauaaag

SEQ ID NO: 1480293 - RNA, 19 nt, Artificial Sequence
  Description of Artificial Sequence: Synthetic oligonucleotide
  Antisense strand to SEQ ID NO: 1480292
cuuuauaagcacagcuuuc

SEQ ID NO: 1480294 - RNA, 19 nt, Artificial Sequence
  Description of Artificial Sequence: Synthetic oligonucleotide
  Sense strand starting at position 512 of SEQ ID NO: 1244328
ggcggcugucaggaggaaa

SEQ ID NO: 1480295 - RNA, 19 nt, Artificial Sequence
  Description of Artificial Sequence: Synthetic oligonucleotide
  Antisense strand to SEQ ID NO: 1480294
uuuccuccugacagccgcc

SEQ ID NO: 1480296 - RNA, 19 nt, Artificial Sequence
  Description of Artificial Sequence: Synthetic oligonucleotide
  Sense strand starting at position 685 of SEQ ID NO: 1244328
gggcuuuagcuggaaucuu

SEQ ID NO: 1480297 - RNA, 19 nt, Artificial Sequence
  Description of Artificial Sequence: Synthetic oligonucleotide
  Antisense strand to SEQ ID NO: 1480296
aagauuccagcuaaagccc

SEQ ID NO: 1480298 - RNA, 19 nt, Artificial Sequence
  Description of Artificial Sequence: Synthetic oligonucleotide
  Sense strand starting at position 694 of SEQ ID NO: 1244328
cuggaaucuuaacaaauag

SEQ ID NO: 1480299 - RNA, 19 nt, Artificial Sequence
  Description of Artificial Sequence: Synthetic oligonucleotide
  Antisense strand to SEQ ID NO: 1480298
cuauuuguuaagauuccag

SEQ ID NO: 1480300 - RNA, 19 nt, Artificial Sequence
  Description of Artificial Sequence: Synthetic oligonucleotide
  Sense strand starting at position 899 of SEQ ID NO: 1244328
gugauaucuggugggcagu

SEQ ID NO: 1480301 - RNA, 19 nt, Artificial Sequence
  Description of Artificial Sequence: Synthetic oligonucleotide
  Antisense strand to SEQ ID NO: 1480300
acugcccaccagauaucac

SEQ ID NO: 1480302 - RNA, 19 nt, Artificial Sequence
  Description of Artificial Sequence: Synthetic oligonucleotide
  Sense strand starting at position 1081 of SEQ ID NO: 1244328
agcugaacuucccugguaa

SEQ ID NO: 1480303 - RNA, 19 nt, Artificial Sequence
  Description of Artificial Sequence: Synthetic oligonucleotide
  Antisense strand to SEQ ID NO: 1480302
uuaccagggaaguucagcu

SEQ ID NO: 1480304 - RNA, 19 nt, Artificial Sequence
  Description of Artificial Sequence: Synthetic oligonucleotide
  Sense strand starting at position 1082 of SEQ ID NO: 1244328
gcugaacuucccugguaag

SEQ ID NO: 1480305 - RNA, 19 nt, Artificial Sequence
  Description of Artificial Sequence: Synthetic oligonucleotide
  Antisense strand to SEQ ID NO: 1480304
cuuaccagggaaguucagc

SEQ ID NO: 1480306 - RNA, 19 nt, Artificial Sequence
  Description of Artificial Sequence: Synthetic oligonucleotide
  Sense strand starting at position 1237 of SEQ ID NO: 1244328
ccuccaaauccuggcugau

SEQ ID NO: 1480307 - RNA, 19 nt, Artificial Sequence
  Description of Artificial Sequence: Synthetic oligonucleotide
  Antisense strand to SEQ ID NO: 1480306
aucagccaggauuuggagg

SEQ ID NO: 1480308 - RNA, 19 nt, Artificial Sequence
  Description of Artificial Sequence: Synthetic oligonucleotide
  Sense strand starting at position 1327 of SEQ ID NO: 1244328
accagagaauccuagaacu

SEQ ID NO: 1480309 - RNA, 19 nt, Artificial Sequence
  Description of Artificial Sequence: Synthetic oligonucleotide
  Antisense strand to SEQ ID NO: 1480308
aguucuaggauucucuggu

SEQ ID NO: 1480310 - RNA, 19 nt, Artificial Sequence
  Description of Artificial Sequence: Synthetic oligonucleotide
  Sense strand starting at position 1338 of SEQ ID NO: 1244328
cuagaacucucaguggaag

SEQ ID NO: 1480311 - RNA, 19 nt, Artificial Sequence
  Description of Artificial Sequence: Synthetic oligonucleotide
  Antisense strand to SEQ ID NO: 1480310
cuuccacugagaguucuag

SEQ ID NO: 1480312 - RNA, 19 nt, Artificial Sequence
  Description of Artificial Sequence: Synthetic oligonucleotide
  Sense strand starting at position 1715 of SEQ ID NO: 1244328
gggugcugcucagugaaga

SEQ ID NO: 1480313 - RNA, 19 nt, Artificial Sequence
  Description of Artificial Sequence: Synthetic oligonucleotide
  Antisense strand to SEQ ID NO: 1480312
ucuucacugagcagcaccc

SEQ ID NO: 1480314 - RNA, 19 nt, Artificial Sequence
  Description of Artificial Sequence: Synthetic oligonucleotide
  Sense strand starting at position 1716 of SEQ ID NO: 1244328
ggugcugcucagugaagau

SEQ ID NO: 1480315 - RNA, 19 nt, Artificial Sequence
  Description of Artificial Sequence: Synthetic oligonucleotide
  Antisense strand to SEQ ID NO: 1480314
aucuucacugagcagcacc

SEQ ID NO: 1480316 - RNA, 19 nt, Artificial Sequence
  Description of Artificial Sequence: Synthetic oligonucleotide
  Sense strand starting at position 1824 of SEQ ID NO: 1244328
cugguuucugguggaagga

SEQ ID NO: 1480317 - RNA, 19 nt, Artificial Sequence
  Description of Artificial Sequence: Synthetic oligonucleotide
  Antisense strand to SEQ ID NO: 1480316
uccuuccaccagaaaccag

SEQ ID NO: 1480318 - RNA, 19 nt, Artificial Sequence
  Description of Artificial Sequence: Synthetic oligonucleotide
  Sense strand starting at position 2254 of SEQ ID NO: 1244328
guguauuugucgccaauga

SEQ ID NO: 1480319 - RNA, 19 nt, Artificial Sequence
  Description of Artificial Sequence: Synthetic oligonucleotide
  Antisense strand to SEQ ID NO: 1480318
ucauuggcgacaaauacac

SEQ ID NO: 1480320 - RNA, 19 nt, Artificial Sequence
  Description of Artificial Sequence: Synthetic oligonucleotide
  Sense strand starting at position 2255 of SEQ ID NO: 1244328
uguauuugucgccaaugac

SEQ ID NO: 1480321 - RNA, 19 nt, Artificial Sequence
  Description of Artificial Sequence: Synthetic oligonucleotide
  Antisense strand to SEQ ID NO: 1480320
gucauuggcgacaaauaca

SEQ ID NO: 1480322 - RNA, 19 nt, Artificial Sequence
  Description of Artificial Sequence: Synthetic oligonucleotide
  Sense strand starting at position 2264 of SEQ ID NO: 1244328
cgccaaugacacuaaacau

SEQ ID NO: 1480323 - RNA, 19 nt, Artificial Sequence
  Description of Artificial Sequence: Synthetic oligonucleotide
  Antisense strand to SEQ ID NO: 1480322
auguuuagugucauuggcg

SEQ ID NO: 1480324 - RNA, 19 nt, Artificial Sequence
  Description of Artificial Sequence: Synthetic oligonucleotide
  Sense strand starting at position 2314 of SEQ ID NO: 1244328
acgaggaguucguccugga

SEQ ID NO: 1480325 - RNA, 19 nt, Artificial Sequence
  Description of Artificial Sequence: Synthetic oligonucleotide
  Antisense strand to SEQ ID NO: 1480324
uccaggacgaacuccucgu

SEQ ID NO: 1480326 - RNA, 19 nt, Artificial Sequence
  Description of Artificial Sequence: Synthetic oligonucleotide
  Sense strand starting at position 2400 of SEQ ID NO: 1244328
gggagagagugacaaauuu

SEQ ID NO: 1480327 - RNA, 19 nt, Artificial Sequence
  Description of Artificial Sequence: Synthetic oligonucleotide
  Antisense strand to SEQ ID NO: 1480326
aaauuugucacucucuccc

SEQ ID NO: 1480328 - RNA, 19 nt, Artificial Sequence
  Description of Artificial Sequence: Synthetic oligonucleotide
  Sense strand starting at position 2408 of SEQ ID NO: 1244328
gugacaaauuucugaagug

SEQ ID NO: 1480329 - RNA, 19 nt, Artificial Sequence
  Description of Artificial Sequence: Synthetic oligonucleotide
  Antisense strand to SEQ ID NO: 1480328
cacuucagaaauuugucac

SEQ ID NO: 1480330 - RNA, 19 nt, Artificial Sequence
  Description of Artificial Sequence: Synthetic oligonucleotide
  Sense strand starting at position 2409 of SEQ ID NO: 1244328
ugacaaauuucugaaguga

SEQ ID NO: 1480331 - RNA, 19 nt, Artificial Sequence
  Description of Artificial Sequence: Synthetic oligonucleotide
  Antisense strand to SEQ ID NO: 1480330
ucacuucagaaauuuguca

SEQ ID NO: 1480332 - RNA, 19 nt, Artificial Sequence
  Description of Artificial Sequence: Synthetic oligonucleotide
  Sense strand starting at position 2641 of SEQ ID NO: 1244328
ccuguaacacuaugaaguu

SEQ ID NO: 1480333 - RNA, 19 nt, Artificial Sequence
  Description of Artificial Sequence: Synthetic oligonucleotide
  Antisense strand to SEQ ID NO: 1480332
aacuucauaguguuacagg

SEQ ID NO: 1480334 - RNA, 19 nt, Artificial Sequence
  Description of Artificial Sequence: Synthetic oligonucleotide
  Sense strand starting at position 2775 of SEQ ID NO: 1244328
aagagacaagcuuggugau

SEQ ID NO: 1480335 - RNA, 19 nt, Artificial Sequence
  Description of Artificial Sequence: Synthetic oligonucleotide
  Antisense strand to SEQ ID NO: 1480334
aucaccaagcuugucucuu

SEQ ID NO: 1480336 - RNA, 19 nt, Artificial Sequence
  Description of Artificial Sequence: Synthetic oligonucleotide
  Sense strand starting at position 2781 of SEQ ID NO: 1244328
caagcuuggugauugcauu

SEQ ID NO: 1480337 - RNA, 19 nt, Artificial Sequence
  Description of Artificial Sequence: Synthetic oligonucleotide
  Antisense strand to SEQ ID NO: 1480336
aaugcaaucaccaagcuug

SEQ ID NO: 1480338 - RNA, 19 nt, Artificial Sequence
  Description of Artificial Sequence: Synthetic oligonucleotide
  Sense strand starting at position 2789 of SEQ ID NO: 1244328
gugauugcauuugauuuaa

SEQ ID NO: 1480339 - RNA, 19 nt, Artificial Sequence
  Description of Artificial Sequence: Synthetic oligonucleotide
  Antisense strand to SEQ ID NO: 1480338
uuaaaucaaaugcaaucac

SEQ ID NO: 1480340 - RNA, 19 nt, Artificial Sequence
  Description of Artificial Sequence: Synthetic oligonucleotide
  Sense strand starting at position 3087 of SEQ ID NO: 1244328
uaaauaagguccuugaagu

SEQ ID NO: 1480341 - RNA, 19 nt, Artificial Sequence
  Description of Artificial Sequence: Synthetic oligonucleotide
  Antisense strand to SEQ ID NO: 1480340
acuucaaggaccuuauuua

SEQ ID NO: 1480342 - RNA, 19 nt, Artificial Sequence
  Description of Artificial Sequence: Synthetic oligonucleotide
  Sense strand starting at position 3088 of SEQ ID NO: 1244328
aaauaagguccuugaaguu

SEQ ID NO: 1480343 - RNA, 19 nt, Artificial Sequence
  Description of Artificial Sequence: Synthetic oligonucleotide
  Antisense strand to SEQ ID NO: 1480342
aacuucaaggaccuuauuu

SEQ ID NO: 1480344 - RNA, 19 nt, Artificial Sequence
  Description of Artificial Sequence: Synthetic oligonucleotide
  Sense strand starting at position 3241 of SEQ ID NO: 1244328
aaaggagccucuuuggcaa

SEQ ID NO: 1480345 - RNA, 19 nt, Artificial Sequence
  Description of Artificial Sequence: Synthetic oligonucleotide
  Antisense strand to SEQ ID NO: 1480344
uugccaaagaggcuccuuu

SEQ ID NO: 1480346 - RNA, 19 nt, Artificial Sequence
  Description of Artificial Sequence: Synthetic oligonucleotide
  Sense strand starting at position 3353 of SEQ ID NO: 1244328
uggucucucagaggguuaa

SEQ ID NO: 1480347 - RNA, 19 nt, Artificial Sequence
  Description of Artificial Sequence: Synthetic oligonucleotide
  Antisense strand to SEQ ID NO: 1480346
uuaacccucugagagacca

SEQ ID NO: 1480348 - RNA, 19 nt, Artificial Sequence
  Description of Artificial Sequence: Synthetic oligonucleotide
  Sense strand starting at position 3354 of SEQ ID NO: 1244328
ggucucucagaggguuaau

SEQ ID NO: 1480349 - RNA, 19 nt, Artificial Sequence
  Description of Artificial Sequence: Synthetic oligonucleotide
  Antisense strand to SEQ ID NO: 1480348
auuaacccucugagagacc

SEQ ID NO: 1480350 - RNA, 19 nt, Artificial Sequence
  Description of Artificial Sequence: Synthetic oligonucleotide
  Sense strand starting at position 3370 of SEQ ID NO: 1244328
aaugcaauuucuuggagga

SEQ ID NO: 1480351 - RNA, 19 nt, Artificial Sequence
  Description of Artificial Sequence: Synthetic oligonucleotide
  Antisense strand to SEQ ID NO: 1480350
uccuccaagaaauugcauu

SEQ ID NO: 1480352 - RNA, 19 nt, Artificial Sequence
  Description of Artificial Sequence: Synthetic oligonucleotide
  Sense strand starting at position 3429 of SEQ ID NO: 1244328
ugguuauucccauggccca

SEQ ID NO: 1480353 - RNA, 19 nt, Artificial Sequence
  Description of Artificial Sequence: Synthetic oligonucleotide
  Antisense strand to SEQ ID NO: 1480352
ugggccaugggaauaacca

SEQ ID NO: 1480354 - RNA, 19 nt, Artificial Sequence
  Description of Artificial Sequence: Synthetic oligonucleotide
  Sense strand starting at position 3766 of SEQ ID NO: 1244328
cagaguguuguagaccagu

SEQ ID NO: 1480355 - RNA, 19 nt, Artificial Sequence
  Description of Artificial Sequence: Synthetic oligonucleotide
  Antisense strand to SEQ ID NO: 1480354
acuggucuacaacacucug

SEQ ID NO: 1480356 - RNA, 19 nt, Artificial Sequence
  Description of Artificial Sequence: Synthetic oligonucleotide
  Sense strand starting at position 3769 of SEQ ID NO: 1244328
aguguuguagaccaguaga

SEQ ID NO: 1480357 - RNA, 19 nt, Artificial Sequence
  Description of Artificial Sequence: Synthetic oligonucleotide
  Antisense strand to SEQ ID NO: 1480356
ucuacuggucuacaacacu

SEQ ID NO: 1480358 - RNA, 19 nt, Artificial Sequence
  Description of Artificial Sequence: Synthetic oligonucleotide
  Sense strand starting at position 3802 of SEQ ID NO: 1244328
agcugucaaccagacucau

SEQ ID NO: 1480359 - RNA, 19 nt, Artificial Sequence
  Description of Artificial Sequence: Synthetic oligonucleotide
  Antisense strand to SEQ ID NO: 1480358
augagucugguugacagcu

SEQ ID NO: 1480360 - RNA, 19 nt, Artificial Sequence
  Description of Artificial Sequence: Synthetic oligonucleotide
  Sense strand starting at position 781 of SEQ ID NO: 1244329
ucgacaucaccgcgugacu

SEQ ID NO: 1480361 - RNA, 19 nt, Artificial Sequence
  Description of Artificial Sequence: Synthetic oligonucleotide
  Antisense strand to SEQ ID NO: 1480360
agucacgcggugaugucga

SEQ ID NO: 1480362 - RNA, 19 nt, Artificial Sequence
  Description of Artificial Sequence: Synthetic oligonucleotide
  Sense strand starting at position 2946 of SEQ ID NO: 1244329
cgaguguguuccucggagu

SEQ ID NO: 1480363 - RNA, 19 nt, Artificial Sequence
  Description of Artificial Sequence: Synthetic oligonucleotide
  Antisense strand to SEQ ID NO: 1480362
acuccgaggaacacacucg

SEQ ID NO: 1480364 - RNA, 19 nt, Artificial Sequence
  Description of Artificial Sequence: Synthetic oligonucleotide
  Sense strand starting at position 2947 of SEQ ID NO: 1244329
gaguguguuccucggaguc

SEQ ID NO: 1480365 - RNA, 19 nt, Artificial Sequence
  Description of Artificial Sequence: Synthetic oligonucleotide
  Antisense strand to SEQ ID NO: 1480364
gacuccgaggaacacacuc

SEQ ID NO: 1480366 - RNA, 19 nt, Artificial Sequence
  Description of Artificial Sequence: Synthetic oligonucleotide
  Sense strand starting at position 3292 of SEQ ID NO: 1244329
uugcgaacgaccugugcaa

SEQ ID NO: 1480367 - RNA, 19 nt, Artificial Sequence
  Description of Artificial Sequence: Synthetic oligonucleotide
  Antisense strand to SEQ ID NO: 1480366
uugcacaggucguucgcaa

SEQ ID NO: 1480368 - RNA, 19 nt, Artificial Sequence
  Description of Artificial Sequence: Synthetic oligonucleotide
  Sense strand starting at position 3311 of SEQ ID NO: 1244329
gucugaauaacuggguugu

SEQ ID NO: 1480369 - RNA, 19 nt, Artificial Sequence
  Description of Artificial Sequence: Synthetic oligonucleotide
  Antisense strand to SEQ ID NO: 1480368
acaacccaguuauucagac

SEQ ID NO: 1480370 - RNA, 19 nt, Artificial Sequence
  Description of Artificial Sequence: Synthetic oligonucleotide
  Sense strand starting at position 3313 of SEQ ID NO: 1244329
cugaauaacuggguuguga

SEQ ID NO: 1480371 - RNA, 19 nt, Artificial Sequence
  Description of Artificial Sequence: Synthetic oligonucleotide
  Antisense strand to SEQ ID NO: 1480370
ucacaacccaguuauucag

SEQ ID NO: 1480372 - RNA, 19 nt, Artificial Sequence
  Description of Artificial Sequence: Synthetic oligonucleotide
  Sense strand starting at position 3315 of SEQ ID NO: 1244329
gaauaacuggguugugacu

SEQ ID NO: 1480373 - RNA, 19 nt, Artificial Sequence
  Description of Artificial Sequence: Synthetic oligonucleotide
  Antisense strand to SEQ ID NO: 1480372
agucacaacccaguuauuc

SEQ ID NO: 1480374 - RNA, 19 nt, Artificial Sequence
  Description of Artificial Sequence: Synthetic oligonucleotide
  Sense strand starting at position 3321 of SEQ ID NO: 1244329
cuggguugugacuaccaga

SEQ ID NO: 1480375 - RNA, 19 nt, Artificial Sequence
  Description of Artificial Sequence: Synthetic oligonucleotide
  Antisense strand to SEQ ID NO: 1480374
ucugguagucacaacccag

SEQ ID NO: 1480376 - RNA, 19 nt, Artificial Sequence
  Description of Artificial Sequence: Synthetic oligonucleotide
  Sense strand starting at position 3324 of SEQ ID NO: 1244329
gguugugacuaccagagga

SEQ ID NO: 1480377 - RNA, 19 nt, Artificial Sequence
  Description of Artificial Sequence: Synthetic oligonucleotide
  Antisense strand to SEQ ID NO: 1480376
uccucugguagucacaacc

SEQ ID NO: 1480378 - RNA, 19 nt, Artificial Sequence
  Description of Artificial Sequence: Synthetic oligonucleotide
  Sense strand starting at position 3380 of SEQ ID NO: 1244329
gacggaagucaccggcaaa

SEQ ID NO: 1480379 - RNA, 19 nt, Artificial Sequence
  Description of Artificial Sequence: Synthetic oligonucleotide
  Antisense strand to SEQ ID NO: 1480378
uuugccggugacuuccguc

SEQ ID NO: 1480380 - RNA, 19 nt, Artificial Sequence
  Description of Artificial Sequence: Synthetic oligonucleotide
  Sense strand starting at position 3566 of SEQ ID NO: 1244329
gugacaucacccugaggcu

SEQ ID NO: 1480381 - RNA, 19 nt, Artificial Sequence
  Description of Artificial Sequence: Synthetic oligonucleotide
  Antisense strand to SEQ ID NO: 1480380
agccucagggugaugucac

SEQ ID NO: 1480382 - RNA, 19 nt, Artificial Sequence
  Description of Artificial Sequence: Synthetic oligonucleotide
  Sense strand starting at position 3780 of SEQ ID NO: 1244329
gcccaccaagcauaagaua

SEQ ID NO: 1480383 - RNA, 19 nt, Artificial Sequence
  Description of Artificial Sequence: Synthetic oligonucleotide
  Antisense strand to SEQ ID NO: 1480382
uaucuuaugcuuggugggc

SEQ ID NO: 1480384 - RNA, 19 nt, Artificial Sequence
  Description of Artificial Sequence: Synthetic oligonucleotide
  Sense strand starting at position 3887 of SEQ ID NO: 1244329
cugggaucucuugaguuau

SEQ ID NO: 1480385 - RNA, 19 nt, Artificial Sequence
  Description of Artificial Sequence: Synthetic oligonucleotide
  Antisense strand to SEQ ID NO: 1480384
auaacucaagagaucccag

SEQ ID NO: 1480386 - RNA, 19 nt, Artificial Sequence
  Description of Artificial Sequence: Synthetic oligonucleotide
  Sense strand starting at position 3889 of SEQ ID NO: 1244329
gggaucucuugaguuauag

SEQ ID NO: 1480387 - RNA, 19 nt, Artificial Sequence
  Description of Artificial Sequence: Synthetic oligonucleotide
  Antisense strand to SEQ ID NO: 1480386
cuauaacucaagagauccc

SEQ ID NO: 1480388 - RNA, 19 nt, Artificial Sequence
  Description of Artificial Sequence: Synthetic oligonucleotide
  Sense strand starting at position 3899 of SEQ ID NO: 1244329
gaguuauagaugcggacau

SEQ ID NO: 1480389 - RNA, 19 nt, Artificial Sequence
  Description of Artificial Sequence: Synthetic oligonucleotide
  Antisense strand to SEQ ID NO: 1480388
auguccgcaucuauaacuc

SEQ ID NO: 1480390 - RNA, 19 nt, Artificial Sequence
  Description of Artificial Sequence: Synthetic oligonucleotide
  Sense strand starting at position 287 of SEQ ID NO: 1244330
ugugacauuuaugcgguau

SEQ ID NO: 1480391 - RNA, 19 nt, Artificial Sequence
  Description of Artificial Sequence: Synthetic oligonucleotide
  Antisense strand to SEQ ID NO: 1480390
auaccgcauaaaugucaca

SEQ ID NO: 1480392 - RNA, 19 nt, Artificial Sequence
  Description of Artificial Sequence: Synthetic oligonucleotide
  Sense strand starting at position 288 of SEQ ID NO: 1244330
gugacauuuaugcgguauu

SEQ ID NO: 1480393 - RNA, 19 nt, Artificial Sequence
  Description of Artificial Sequence: Synthetic oligonucleotide
  Antisense strand to SEQ ID NO: 1480392
aauaccgcauaaaugucac

SEQ ID NO: 1480394 - RNA, 19 nt, Artificial Sequence
  Description of Artificial Sequence: Synthetic oligonucleotide
  Sense strand starting at position 302 of SEQ ID NO: 1244330
guauuuguuccacgcauag

SEQ ID NO: 1480395 - RNA, 19 nt, Artificial Sequence
  Description of Artificial Sequence: Synthetic oligonucleotide
  Antisense strand to SEQ ID NO: 1480394
cuaugcguggaacaaauac

SEQ ID NO: 1480396 - RNA, 19 nt, Artificial Sequence
  Description of Artificial Sequence: Synthetic oligonucleotide
  Sense strand starting at position 327 of SEQ ID NO: 1244330
ugcugaucaagucagagua

SEQ ID NO: 1480397 - RNA, 19 nt, Artificial Sequence
  Description of Artificial Sequence: Synthetic oligonucleotide
  Antisense strand to SEQ ID NO: 1480396
uacucugacuugaucagca

SEQ ID NO: 1480398 - RNA, 19 nt, Artificial Sequence
  Description of Artificial Sequence: Synthetic oligonucleotide
  Sense strand starting at position 379 of SEQ ID NO: 1244330
aucuauguauugguaacau

SEQ ID NO: 1480399 - RNA, 19 nt, Artificial Sequence
  Description of Artificial Sequence: Synthetic oligonucleotide
  Antisense strand to SEQ ID NO: 1480398
auguuaccaauacauagau

SEQ ID NO: 1480400 - RNA, 19 nt, Artificial Sequence
  Description of Artificial Sequence: Synthetic oligonucleotide
  Sense strand starting at position 421 of SEQ ID NO: 1244330
ugaaauauacauuguugcu

SEQ ID NO: 1480401 - RNA, 19 nt, Artificial Sequence
  Description of Artificial Sequence: Synthetic oligonucleotide
  Antisense strand to SEQ ID NO: 1480400
agcaacaauguauauuuca

SEQ ID NO: 1480402 - RNA, 19 nt, Artificial Sequence
  Description of Artificial Sequence: Synthetic oligonucleotide
  Sense strand starting at position 439 of SEQ ID NO: 1244330
ugacuuuagucaccauauc

SEQ ID NO: 1480403 - RNA, 19 nt, Artificial Sequence
  Description of Artificial Sequence: Synthetic oligonucleotide
  Antisense strand to SEQ ID NO: 1480402
gauauggugacuaaaguca

SEQ ID NO: 1480404 - RNA, 19 nt, Artificial Sequence
  Description of Artificial Sequence: Synthetic oligonucleotide
  Sense strand starting at position 490 of SEQ ID NO: 1244330
agggcucugccacacauua

SEQ ID NO: 1480405 - RNA, 19 nt, Artificial Sequence
  Description of Artificial Sequence: Synthetic oligonucleotide
  Antisense strand to SEQ ID NO: 1480404
uaauguguggcagagcccu

SEQ ID NO: 1480406 - RNA, 19 nt, Artificial Sequence
  Description of Artificial Sequence: Synthetic oligonucleotide
  Sense strand starting at position 561 of SEQ ID NO: 1244330
cucugaauauaugugaaac

SEQ ID NO: 1480407 - RNA, 19 nt, Artificial Sequence
  Description of Artificial Sequence: Synthetic oligonucleotide
  Antisense strand to SEQ ID NO: 1480406
guuucacauauauucagag

SEQ ID NO: 1480408 - RNA, 19 nt, Artificial Sequence
  Description of Artificial Sequence: Synthetic oligonucleotide
  Sense strand starting at position 736 of SEQ ID NO: 1244330
agaguuuaacugggcauca

SEQ ID NO: 1480409 - RNA, 19 nt, Artificial Sequence
  Description of Artificial Sequence: Synthetic oligonucleotide
  Antisense strand to SEQ ID NO: 1480408
ugaugcccaguuaaacucu

SEQ ID NO: 1480410 - RNA, 19 nt, Artificial Sequence
  Description of Artificial Sequence: Synthetic oligonucleotide
  Sense strand starting at position 737 of SEQ ID NO: 1244330
gaguuuaacugggcaucaa

SEQ ID NO: 1480411 - RNA, 19 nt, Artificial Sequence
  Description of Artificial Sequence: Synthetic oligonucleotide
  Antisense strand to SEQ ID NO: 1480410
uugaugcccaguuaaacuc

SEQ ID NO: 1480412 - RNA, 19 nt, Artificial Sequence
  Description of Artificial Sequence: Synthetic oligonucleotide
  Sense strand starting at position 738 of SEQ ID NO: 1244330
aguuuaacugggcaucaau

SEQ ID NO: 1480413 - RNA, 19 nt, Artificial Sequence
  Description of Artificial Sequence: Synthetic oligonucleotide
  Antisense strand to SEQ ID NO: 1480412
auugaugcccaguuaaacu

SEQ ID NO: 1480414 - RNA, 19 nt, Artificial Sequence
  Description of Artificial Sequence: Synthetic oligonucleotide
  Sense strand starting at position 766 of SEQ ID NO: 1244330
uuucuucuuguugagacaa

SEQ ID NO: 1480415 - RNA, 19 nt, Artificial Sequence
  Description of Artificial Sequence: Synthetic oligonucleotide
  Antisense strand to SEQ ID NO: 1480414
uugucucaacaagaagaaa

SEQ ID NO: 1480416 - RNA, 19 nt, Artificial Sequence
  Description of Artificial Sequence: Synthetic oligonucleotide
  Sense strand starting at position 778 of SEQ ID NO: 1244330
gagacaaggucuuccauuc

SEQ ID NO: 1480417 - RNA, 19 nt, Artificial Sequence
  Description of Artificial Sequence: Synthetic oligonucleotide
  Antisense strand to SEQ ID NO: 1480416
gaauggaagaccuugucuc

SEQ ID NO: 1480418 - RNA, 19 nt, Artificial Sequence
  Description of Artificial Sequence: Synthetic oligonucleotide
  Sense strand starting at position 806 of SEQ ID NO: 1244330
gagugcaaugauggaauca

SEQ ID NO: 1480419 - RNA, 19 nt, Artificial Sequence
  Description of Artificial Sequence: Synthetic oligonucleotide
  Antisense strand to SEQ ID NO: 1480418
ugauuccaucauugcacuc

SEQ ID NO: 1480420 - RNA, 19 nt, Artificial Sequence
  Description of Artificial Sequence: Synthetic oligonucleotide
  Sense strand starting at position 1122 of SEQ ID NO: 1244330
agaguaggcacucaaguau

SEQ ID NO: 1480421 - RNA, 19 nt, Artificial Sequence
  Description of Artificial Sequence: Synthetic oligonucleotide
  Antisense strand to SEQ ID NO: 1480420
auacuugagugccuacucu

SEQ ID NO: 1480422 - RNA, 19 nt, Artificial Sequence
  Description of Artificial Sequence: Synthetic oligonucleotide
  Sense strand starting at position 1252 of SEQ ID NO: 1244330
uuacuugagucaguccaga

SEQ ID NO: 1480423 - RNA, 19 nt, Artificial Sequence
  Description of Artificial Sequence: Synthetic oligonucleotide
  Antisense strand to SEQ ID NO: 1480422
ucuggacugacucaaguaa

SEQ ID NO: 1480424 - RNA, 19 nt, Artificial Sequence
  Description of Artificial Sequence: Synthetic oligonucleotide
  Sense strand starting at position 1265 of SEQ ID NO: 1244330
uccagaaagccacaguuaa

SEQ ID NO: 1480425 - RNA, 19 nt, Artificial Sequence
  Description of Artificial Sequence: Synthetic oligonucleotide
  Antisense strand to SEQ ID NO: 1480424
uuaacuguggcuuucugga

SEQ ID NO: 1480426 - RNA, 19 nt, Artificial Sequence
  Description of Artificial Sequence: Synthetic oligonucleotide
  Sense strand starting at position 1355 of SEQ ID NO: 1244330
gguuccucuugaccauuaa

SEQ ID NO: 1480427 - RNA, 19 nt, Artificial Sequence
  Description of Artificial Sequence: Synthetic oligonucleotide
  Antisense strand to SEQ ID NO: 1480426
uuaauggucaagaggaacc

SEQ ID NO: 1480428 - RNA, 19 nt, Artificial Sequence
  Description of Artificial Sequence: Synthetic oligonucleotide
  Sense strand starting at position 1644 of SEQ ID NO: 1244330
aguccuagucucuauucua

SEQ ID NO: 1480429 - RNA, 19 nt, Artificial Sequence
  Description of Artificial Sequence: Synthetic oligonucleotide
  Antisense strand to SEQ ID NO: 1480428
uagaauagagacuaggacu

SEQ ID NO: 1480430 - RNA, 19 nt, Artificial Sequence
  Description of Artificial Sequence: Synthetic oligonucleotide
  Sense strand starting at position 1800 of SEQ ID NO: 1244330
cggguuaagugacccauga

SEQ ID NO: 1480431 - RNA, 19 nt, Artificial Sequence
  Description of Artificial Sequence: Synthetic oligonucleotide
  Antisense strand to SEQ ID NO: 1480430
ucaugggucacuuaacccg

SEQ ID NO: 1480432 - RNA, 19 nt, Artificial Sequence
  Description of Artificial Sequence: Synthetic oligonucleotide
  Sense strand starting at position 1804 of SEQ ID NO: 1244330
uuaagugacccaugauagu

SEQ ID NO: 1480433 - RNA, 19 nt, Artificial Sequence
  Description of Artificial Sequence: Synthetic oligonucleotide
  Antisense strand to SEQ ID NO: 1480432
acuaucaugggucacuuaa

SEQ ID NO: 1480434 - RNA, 19 nt, Artificial Sequence
  Description of Artificial Sequence: Synthetic oligonucleotide
  Sense strand starting at position 1821 of SEQ ID NO: 1244330
guaaaucugcgugagagau

SEQ ID NO: 1480435 - RNA, 19 nt, Artificial Sequence
  Description of Artificial Sequence: Synthetic oligonucleotide
  Antisense strand to SEQ ID NO: 1480434
aucucucacgcagauuuac

SEQ ID NO: 1480436 - RNA, 19 nt, Artificial Sequence
  Description of Artificial Sequence: Synthetic oligonucleotide
  Sense strand starting at position 1825 of SEQ ID NO: 1244330
aucugcgugagagauauaa

SEQ ID NO: 1480437 - RNA, 19 nt, Artificial Sequence
  Description of Artificial Sequence: Synthetic oligonucleotide
  Antisense strand to SEQ ID NO: 1480436
uuauaucucucacgcagau

SEQ ID NO: 1480438 - RNA, 19 nt, Artificial Sequence
  Description of Artificial Sequence: Synthetic oligonucleotide
  Sense strand starting at position 1827 of SEQ ID NO: 1244330
cugcgugagagauauaagu

SEQ ID NO: 1480439 - RNA, 19 nt, Artificial Sequence
  Description of Artificial Sequence: Synthetic oligonucleotide
  Antisense strand to SEQ ID NO: 1480438
acuuauaucucucacgcag

SEQ ID NO: 1480440 - RNA, 19 nt, Artificial Sequence
  Description of Artificial Sequence: Synthetic oligonucleotide
  Sense strand starting at position 1829 of SEQ ID NO: 1244330
gcgugagagauauaaguga

SEQ ID NO: 1480441 - RNA, 19 nt, Artificial Sequence
  Description of Artificial Sequence: Synthetic oligonucleotide
  Antisense strand to SEQ ID NO: 1480440
ucacuuauaucucucacgc

SEQ ID NO: 1480442 - RNA, 19 nt, Artificial Sequence
  Description of Artificial Sequence: Synthetic oligonucleotide
  Sense strand starting at position 2047 of SEQ ID NO: 1244330
agaagaaacccucgcgaca

SEQ ID NO: 1480443 - RNA, 19 nt, Artificial Sequence
  Description of Artificial Sequence: Synthetic oligonucleotide
  Antisense strand to SEQ ID NO: 1480442
ugucgcgaggguuucuucu

SEQ ID NO: 1480444 - RNA, 19 nt, Artificial Sequence
  Description of Artificial Sequence: Synthetic oligonucleotide
  Sense strand starting at position 2117 of SEQ ID NO: 1244330
aguccuuugagguauggca

SEQ ID NO: 1480445 - RNA, 19 nt, Artificial Sequence
  Description of Artificial Sequence: Synthetic oligonucleotide
  Antisense strand to SEQ ID NO: 1480444
ugccauaccucaaaggacu

SEQ ID NO: 1480446 - RNA, 19 nt, Artificial Sequence
  Description of Artificial Sequence: Synthetic oligonucleotide
  Sense strand starting at position 2263 of SEQ ID NO: 1244330
acgagacuugggugugaug

SEQ ID NO: 1480447 - RNA, 19 nt, Artificial Sequence
  Description of Artificial Sequence: Synthetic oligonucleotide
  Antisense strand to SEQ ID NO: 1480446
caucacacccaagucucgu

SEQ ID NO: 1480448 - RNA, 19 nt, Artificial Sequence
  Description of Artificial Sequence: Synthetic oligonucleotide
  Sense strand starting at position 2274 of SEQ ID NO: 1244330
gugugauggcgugcaguga

SEQ ID NO: 1480449 - RNA, 19 nt, Artificial Sequence
  Description of Artificial Sequence: Synthetic oligonucleotide
  Antisense strand to SEQ ID NO: 1480448
ucacugcacgccaucacac

SEQ ID NO: 1480450 - RNA, 19 nt, Artificial Sequence
  Description of Artificial Sequence: Synthetic oligonucleotide
  Sense strand starting at position 2382 of SEQ ID NO: 1244330
cucguuuacagcgaaagaa

SEQ ID NO: 1480451 - RNA, 19 nt, Artificial Sequence
  Description of Artificial Sequence: Synthetic oligonucleotide
  Antisense strand to SEQ ID NO: 1480450
uucuuucgcuguaaacgag

SEQ ID NO: 1480452 - RNA, 19 nt, Artificial Sequence
  Description of Artificial Sequence: Synthetic oligonucleotide
  Sense strand starting at position 2725 of SEQ ID NO: 1244330
guccucgucguuaauguga

SEQ ID NO: 1480453 - RNA, 19 nt, Artificial Sequence
  Description of Artificial Sequence: Synthetic oligonucleotide
  Antisense strand to SEQ ID NO: 1480452
ucacauuaacgacgaggac

SEQ ID NO: 1480454 - RNA, 19 nt, Artificial Sequence
  Description of Artificial Sequence: Synthetic oligonucleotide
  Sense strand starting at position 2858 of SEQ ID NO: 1244330
auaaucuguuguguaacaa

SEQ ID NO: 1480455 - RNA, 19 nt, Artificial Sequence
  Description of Artificial Sequence: Synthetic oligonucleotide
  Antisense strand to SEQ ID NO: 1480454
uuguuacacaacagauuau

SEQ ID NO: 1480456 - RNA, 19 nt, Artificial Sequence
  Description of Artificial Sequence: Synthetic oligonucleotide
  Sense strand starting at position 3069 of SEQ ID NO: 1244330
ccauguaauuugucuagca

SEQ ID NO: 1480457 - RNA, 19 nt, Artificial Sequence
  Description of Artificial Sequence: Synthetic oligonucleotide
  Antisense strand to SEQ ID NO: 1480456
ugcuagacaaauuacaugg

SEQ ID NO: 1480458 - RNA, 19 nt, Artificial Sequence
  Description of Artificial Sequence: Synthetic oligonucleotide
  Sense strand starting at position 3070 of SEQ ID NO: 1244330
cauguaauuugucuagcag

SEQ ID NO: 1480459 - RNA, 19 nt, Artificial Sequence
  Description of Artificial Sequence: Synthetic oligonucleotide
  Antisense strand to SEQ ID NO: 1480458
cugcuagacaaauuacaug

SEQ ID NO: 1480460 - RNA, 19 nt, Artificial Sequence
  Description of Artificial Sequence: Synthetic oligonucleotide
  Sense strand starting at position 3084 of SEQ ID NO: 1244330
agcagaguaggaugacauu

SEQ ID NO: 1480461 - RNA, 19 nt, Artificial Sequence
  Description of Artificial Sequence: Synthetic oligonucleotide
  Antisense strand to SEQ ID NO: 1480460
aaugucauccuacucugcu

SEQ ID NO: 1480462 - RNA, 19 nt, Artificial Sequence
  Description of Artificial Sequence: Synthetic oligonucleotide
  Sense strand starting at position 3581 of SEQ ID NO: 1244330
acuggaaggcaugguucau

SEQ ID NO: 1480463 - RNA, 19 nt, Artificial Sequence
  Description of Artificial Sequence: Synthetic oligonucleotide
  Antisense strand to SEQ ID NO: 1480462
augaaccaugccuuccagu

SEQ ID NO: 1480464 - RNA, 19 nt, Artificial Sequence
  Description of Artificial Sequence: Synthetic oligonucleotide
  Sense strand starting at position 3713 of SEQ ID NO: 1244330
aaagauggccucggagaua

SEQ ID NO: 1480465 - RNA, 19 nt, Artificial Sequence
  Description of Artificial Sequence: Synthetic oligonucleotide
  Antisense strand to SEQ ID NO: 1480464
uaucuccgaggccaucuuu

SEQ ID NO: 1480466 - RNA, 19 nt, Artificial Sequence
  Description of Artificial Sequence: Synthetic oligonucleotide
  Sense strand starting at position 3776 of SEQ ID NO: 1244330
uucuguuagcuccaaagag

SEQ ID NO: 1480467 - RNA, 19 nt, Artificial Sequence
  Description of Artificial Sequence: Synthetic oligonucleotide
  Antisense strand to SEQ ID NO: 1480466
cucuuuggagcuaacagaa

SEQ ID NO: 1480468 - RNA, 19 nt, Artificial Sequence
  Description of Artificial Sequence: Synthetic oligonucleotide
  Sense strand starting at position 3847 of SEQ ID NO: 1244330
ugggaaaccuggccuuuaa

SEQ ID NO: 1480469 - RNA, 19 nt, Artificial Sequence
  Description of Artificial Sequence: Synthetic oligonucleotide
  Antisense strand to SEQ ID NO: 1480468
uuaaaggccagguuuccca

SEQ ID NO: 1480470 - RNA, 19 nt, Artificial Sequence
  Description of Artificial Sequence: Synthetic oligonucleotide
  Sense strand starting at position 43 of SEQ ID NO: 1244331
agaggcuucuauucucaca

SEQ ID NO: 1480471 - RNA, 19 nt, Artificial Sequence
  Description of Artificial Sequence: Synthetic oligonucleotide
  Antisense strand to SEQ ID NO: 1480470
ugugagaauagaagccucu

SEQ ID NO: 1480472 - RNA, 19 nt, Artificial Sequence
  Description of Artificial Sequence: Synthetic oligonucleotide
  Sense strand starting at position 77 of SEQ ID NO: 1244331
cccuacauuuaggaagaaa

SEQ ID NO: 1480473 - RNA, 19 nt, Artificial Sequence
  Description of Artificial Sequence: Synthetic oligonucleotide
  Antisense strand to SEQ ID NO: 1480472
uuucuuccuaaauguaggg

SEQ ID NO: 1480474 - RNA, 19 nt, Artificial Sequence
  Description of Artificial Sequence: Synthetic oligonucleotide
  Sense strand starting at position 509 of SEQ ID NO: 1244331
ugagguugcaguuagcaaa

SEQ ID NO: 1480475 - RNA, 19 nt, Artificial Sequence
  Description of Artificial Sequence: Synthetic oligonucleotide
  Antisense strand to SEQ ID NO: 1480474
uuugcuaacugcaaccuca

SEQ ID NO: 1480476 - RNA, 19 nt, Artificial Sequence
  Description of Artificial Sequence: Synthetic oligonucleotide
  Sense strand starting at position 531 of SEQ ID NO: 1244331
aagugaagcuguuuggaaa

SEQ ID NO: 1480477 - RNA, 19 nt, Artificial Sequence
  Description of Artificial Sequence: Synthetic oligonucleotide
  Antisense strand to SEQ ID NO: 1480476
uuuccaaacagcuucacuu

SEQ ID NO: 1480478 - RNA, 19 nt, Artificial Sequence
  Description of Artificial Sequence: Synthetic oligonucleotide
  Sense strand starting at position 544 of SEQ ID NO: 1244331
uggaaacaaucagaaauag

SEQ ID NO: 1480479 - RNA, 19 nt, Artificial Sequence
  Description of Artificial Sequence: Synthetic oligonucleotide
  Antisense strand to SEQ ID NO: 1480478
cuauuucugauuguuucca

SEQ ID NO: 1480480 - RNA, 19 nt, Artificial Sequence
  Description of Artificial Sequence: Synthetic oligonucleotide
  Sense strand starting at position 752 of SEQ ID NO: 1244331
uuuguagagacguaguauc

SEQ ID NO: 1480481 - RNA, 19 nt, Artificial Sequence
  Description of Artificial Sequence: Synthetic oligonucleotide
  Antisense strand to SEQ ID NO: 1480480
gauacuacgucucuacaaa

SEQ ID NO: 1480482 - RNA, 19 nt, Artificial Sequence
  Description of Artificial Sequence: Synthetic oligonucleotide
  Sense strand starting at position 760 of SEQ ID NO: 1244331
gacguaguaucacuauauu

SEQ ID NO: 1480483 - RNA, 19 nt, Artificial Sequence
  Description of Artificial Sequence: Synthetic oligonucleotide
  Antisense strand to SEQ ID NO: 1480482
aauauagugauacuacguc

SEQ ID NO: 1480484 - RNA, 19 nt, Artificial Sequence
  Description of Artificial Sequence: Synthetic oligonucleotide
  Sense strand starting at position 853 of SEQ ID NO: 1244331
guuucuuuagcaugggaca

SEQ ID NO: 1480485 - RNA, 19 nt, Artificial Sequence
  Description of Artificial Sequence: Synthetic oligonucleotide
  Antisense strand to SEQ ID NO: 1480484
ugucccaugcuaaagaaac

SEQ ID NO: 1480486 - RNA, 19 nt, Artificial Sequence
  Description of Artificial Sequence: Synthetic oligonucleotide
  Sense strand starting at position 854 of SEQ ID NO: 1244331
uuucuuuagcaugggacau

SEQ ID NO: 1480487 - RNA, 19 nt, Artificial Sequence
  Description of Artificial Sequence: Synthetic oligonucleotide
  Antisense strand to SEQ ID NO: 1480486
augucccaugcuaaagaaa

SEQ ID NO: 1480488 - RNA, 19 nt, Artificial Sequence
  Description of Artificial Sequence: Synthetic oligonucleotide
  Sense strand starting at position 1266 of SEQ ID NO: 1244331
agaagcauuagaggucagu

SEQ ID NO: 1480489 - RNA, 19 nt, Artificial Sequence
  Description of Artificial Sequence: Synthetic oligonucleotide
  Antisense strand to SEQ ID NO: 1480488
acugaccucuaaugcuucu

SEQ ID NO: 1480490 - RNA, 19 nt, Artificial Sequence
  Description of Artificial Sequence: Synthetic oligonucleotide
  Sense strand starting at position 1269 of SEQ ID NO: 1244331
agcauuagaggucagucaa

SEQ ID NO: 1480491 - RNA, 19 nt, Artificial Sequence
  Description of Artificial Sequence: Synthetic oligonucleotide
  Antisense strand to SEQ ID NO: 1480490
uugacugaccucuaaugcu

SEQ ID NO: 1480492 - RNA, 19 nt, Artificial Sequence
  Description of Artificial Sequence: Synthetic oligonucleotide
  Sense strand starting at position 1279 of SEQ ID NO: 1244331
gucagucaagaaugucacu

SEQ ID NO: 1480493 - RNA, 19 nt, Artificial Sequence
  Description of Artificial Sequence: Synthetic oligonucleotide
  Antisense strand to SEQ ID NO: 1480492
agugacauucuugacugac

SEQ ID NO: 1480494 - RNA, 19 nt, Artificial Sequence
  Description of Artificial Sequence: Synthetic oligonucleotide
  Sense strand starting at position 1304 of SEQ ID NO: 1244331
gcaggaaagauucgaugug

SEQ ID NO: 1480495 - RNA, 19 nt, Artificial Sequence
  Description of Artificial Sequence: Synthetic oligonucleotide
  Antisense strand to SEQ ID NO: 1480494
cacaucgaaucuuuccugc

SEQ ID NO: 1480496 - RNA, 19 nt, Artificial Sequence
  Description of Artificial Sequence: Synthetic oligonucleotide
  Sense strand starting at position 1310 of SEQ ID NO: 1244331
aagauucgauguggagaaa

SEQ ID NO: 1480497 - RNA, 19 nt, Artificial Sequence
  Description of Artificial Sequence: Synthetic oligonucleotide
  Antisense strand to SEQ ID NO: 1480496
uuucuccacaucgaaucuu

SEQ ID NO: 1480498 - RNA, 19 nt, Artificial Sequence
  Description of Artificial Sequence: Synthetic oligonucleotide
  Sense strand starting at position 2866 of SEQ ID NO: 1244331
gagucaacuuccuucgguu

SEQ ID NO: 1480499 - RNA, 19 nt, Artificial Sequence
  Description of Artificial Sequence: Synthetic oligonucleotide
  Antisense strand to SEQ ID NO: 1480498
aaccgaaggaaguugacuc

SEQ ID NO: 1480500 - RNA, 19 nt, Artificial Sequence
  Description of Artificial Sequence: Synthetic oligonucleotide
  Sense strand starting at position 2873 of SEQ ID NO: 1244331
cuuccuucgguuugucauu

SEQ ID NO: 1480501 - RNA, 19 nt, Artificial Sequence
  Description of Artificial Sequence: Synthetic oligonucleotide
  Antisense strand to SEQ ID NO: 1480500
aaugacaaaccgaaggaag

SEQ ID NO: 1480502 - RNA, 19 nt, Artificial Sequence
  Description of Artificial Sequence: Synthetic oligonucleotide
  Sense strand starting at position 2874 of SEQ ID NO: 1244331
uuccuucgguuugucauua

SEQ ID NO: 1480503 - RNA, 19 nt, Artificial Sequence
  Description of Artificial Sequence: Synthetic oligonucleotide
  Antisense strand to SEQ ID NO: 1480502
uaaugacaaaccgaaggaa

SEQ ID NO: 1480504 - RNA, 19 nt, Artificial Sequence
  Description of Artificial Sequence: Synthetic oligonucleotide
  Sense strand starting at position 2879 of SEQ ID NO: 1244331
ucgguuugucauuaccagu

SEQ ID NO: 1480505 - RNA, 19 nt, Artificial Sequence
  Description of Artificial Sequence: Synthetic oligonucleotide
  Antisense strand to SEQ ID NO: 1480504
acugguaaugacaaaccga

SEQ ID NO: 1480506 - RNA, 19 nt, Artificial Sequence
  Description of Artificial Sequence: Synthetic oligonucleotide
  Sense strand starting at position 2999 of SEQ ID NO: 1244331
uuuacagcugucuguggaa

SEQ ID NO: 1480507 - RNA, 19 nt, Artificial Sequence
  Description of Artificial Sequence: Synthetic oligonucleotide
  Antisense strand to SEQ ID NO: 1480506
uuccacagacagcuguaaa

SEQ ID NO: 1480508 - RNA, 19 nt, Artificial Sequence
  Description of Artificial Sequence: Synthetic oligonucleotide
  Sense strand starting at position 3001 of SEQ ID NO: 1244331
uacagcugucuguggaaga

SEQ ID NO: 1480509 - RNA, 19 nt, Artificial Sequence
  Description of Artificial Sequence: Synthetic oligonucleotide
  Antisense strand to SEQ ID NO: 1480508
ucuuccacagacagcugua

SEQ ID NO: 1480510 - RNA, 19 nt, Artificial Sequence
  Description of Artificial Sequence: Synthetic oligonucleotide
  Sense strand starting at position 3023 of SEQ ID NO: 1244331
uguggagcgguaugaaaga

SEQ ID NO: 1480511 - RNA, 19 nt, Artificial Sequence
  Description of Artificial Sequence: Synthetic oligonucleotide
  Antisense strand to SEQ ID NO: 1480510
ucuuucauaccgcuccaca

SEQ ID NO: 1480512 - RNA, 19 nt, Artificial Sequence
  Description of Artificial Sequence: Synthetic oligonucleotide
  Sense strand starting at position 3028 of SEQ ID NO: 1244331
agcgguaugaaagaccuua

SEQ ID NO: 1480513 - RNA, 19 nt, Artificial Sequence
  Description of Artificial Sequence: Synthetic oligonucleotide
  Antisense strand to SEQ ID NO: 1480512
uaaggucuuucauaccgcu

SEQ ID NO: 1480514 - RNA, 19 nt, Artificial Sequence
  Description of Artificial Sequence: Synthetic oligonucleotide
  Sense strand starting at position 3079 of SEQ ID NO: 1244331
gcuggucugcgcaggagaa

SEQ ID NO: 1480515 - RNA, 19 nt, Artificial Sequence
  Description of Artificial Sequence: Synthetic oligonucleotide
  Antisense strand to SEQ ID NO: 1480514
uucuccugcgcagaccagc

SEQ ID NO: 1480516 - RNA, 19 nt, Artificial Sequence
  Description of Artificial Sequence: Synthetic oligonucleotide
  Sense strand starting at position 3080 of SEQ ID NO: 1244331
cuggucugcgcaggagaaa

SEQ ID NO: 1480517 - RNA, 19 nt, Artificial Sequence
  Description of Artificial Sequence: Synthetic oligonucleotide
  Antisense strand to SEQ ID NO: 1480516
uuucuccugcgcagaccag

SEQ ID NO: 1480518 - RNA, 19 nt, Artificial Sequence
  Description of Artificial Sequence: Synthetic oligonucleotide
  Sense strand starting at position 3081 of SEQ ID NO: 1244331
uggucugcgcaggagaaau

SEQ ID NO: 1480519 - RNA, 19 nt, Artificial Sequence
  Description of Artificial Sequence: Synthetic oligonucleotide
  Antisense strand to SEQ ID NO: 1480518
auuucuccugcgcagacca

SEQ ID NO: 1480520 - RNA, 19 nt, Artificial Sequence
  Description of Artificial Sequence: Synthetic oligonucleotide
  Sense strand starting at position 3146 of SEQ ID NO: 1244331
guguggugaggauaacgau

SEQ ID NO: 1480521 - RNA, 19 nt, Artificial Sequence
  Description of Artificial Sequence: Synthetic oligonucleotide
  Antisense strand to SEQ ID NO: 1480520
aucguuauccucaccacac

SEQ ID NO: 1480522 - RNA, 19 nt, Artificial Sequence
  Description of Artificial Sequence: Synthetic oligonucleotide
  Sense strand starting at position 3162 of SEQ ID NO: 1244331
gauggcuacucagugaaga

SEQ ID NO: 1480523 - RNA, 19 nt, Artificial Sequence
  Description of Artificial Sequence: Synthetic oligonucleotide
  Antisense strand to SEQ ID NO: 1480522
ucuucacugaguagccauc

SEQ ID NO: 1480524 - RNA, 19 nt, Artificial Sequence
  Description of Artificial Sequence: Synthetic oligonucleotide
  Sense strand starting at position 3163 of SEQ ID NO: 1244331
auggcuacucagugaagau

SEQ ID NO: 1480525 - RNA, 19 nt, Artificial Sequence
  Description of Artificial Sequence: Synthetic oligonucleotide
  Antisense strand to SEQ ID NO: 1480524
aucuucacugaguagccau

SEQ ID NO: 1480526 - RNA, 19 nt, Artificial Sequence
  Description of Artificial Sequence: Synthetic oligonucleotide
  Sense strand starting at position 3164 of SEQ ID NO: 1244331
uggcuacucagugaagaug

SEQ ID NO: 1480527 - RNA, 19 nt, Artificial Sequence
  Description of Artificial Sequence: Synthetic oligonucleotide
  Antisense strand to SEQ ID NO: 1480526
caucuucacugaguagcca

SEQ ID NO: 1480528 - RNA, 19 nt, Artificial Sequence
  Description of Artificial Sequence: Synthetic oligonucleotide
  Sense strand starting at position 3188 of SEQ ID NO: 1244331
gaaauacuacaucgaguac

SEQ ID NO: 1480529 - RNA, 19 nt, Artificial Sequence
  Description of Artificial Sequence: Synthetic oligonucleotide
  Antisense strand to SEQ ID NO: 1480528
guacucgauguaguauuuc

SEQ ID NO: 1480530 - RNA, 19 nt, Artificial Sequence
  Description of Artificial Sequence: Synthetic oligonucleotide
  Sense strand starting at position 3212 of SEQ ID NO: 1244331
gagcacucgagaugauagu

SEQ ID NO: 1480531 - RNA, 19 nt, Artificial Sequence
  Description of Artificial Sequence: Synthetic oligonucleotide
  Antisense strand to SEQ ID NO: 1480530
acuaucaucucgagugcuc

SEQ ID NO: 1480532 - RNA, 19 nt, Artificial Sequence
  Description of Artificial Sequence: Synthetic oligonucleotide
  Sense strand starting at position 3729 of SEQ ID NO: 1244331
agcauuugcucgcugaguu

SEQ ID NO: 1480533 - RNA, 19 nt, Artificial Sequence
  Description of Artificial Sequence: Synthetic oligonucleotide
  Antisense strand to SEQ ID NO: 1480532
aacucagcgagcaaaugcu

SEQ ID NO: 1480534 - RNA, 19 nt, Artificial Sequence
  Description of Artificial Sequence: Synthetic oligonucleotide
  Sense strand starting at position 3730 of SEQ ID NO: 1244331
gcauuugcucgcugaguuc

SEQ ID NO: 1480535 - RNA, 19 nt, Artificial Sequence
  Description of Artificial Sequence: Synthetic oligonucleotide
  Antisense strand to SEQ ID NO: 1480534
gaacucagcgagcaaaugc

SEQ ID NO: 1480536 - RNA, 19 nt, Artificial Sequence
  Description of Artificial Sequence: Synthetic oligonucleotide
  Sense strand starting at position 3739 of SEQ ID NO: 1244331
cgcugaguucaguugcuaa

SEQ ID NO: 1480537 - RNA, 19 nt, Artificial Sequence
  Description of Artificial Sequence: Synthetic oligonucleotide
  Antisense strand to SEQ ID NO: 1480536
uuagcaacugaacucagcg

SEQ ID NO: 1480538 - RNA, 19 nt, Artificial Sequence
  Description of Artificial Sequence: Synthetic oligonucleotide
  Sense strand starting at position 3775 of SEQ ID NO: 1244331
gaguacucccucggcugua

SEQ ID NO: 1480539 - RNA, 19 nt, Artificial Sequence
  Description of Artificial Sequence: Synthetic oligonucleotide
  Antisense strand to SEQ ID NO: 1480538
uacagccgagggaguacuc

SEQ ID NO: 1480540 - RNA, 19 nt, Artificial Sequence
  Description of Artificial Sequence: Synthetic oligonucleotide
  Sense strand starting at position 3847 of SEQ ID NO: 1244331
cugauuuaauucgggugau

SEQ ID NO: 1480541 - RNA, 19 nt, Artificial Sequence
  Description of Artificial Sequence: Synthetic oligonucleotide
  Antisense strand to SEQ ID NO: 1480540
aucacccgaauuaaaucag

SEQ ID NO: 1480542 - RNA, 19 nt, Artificial Sequence
  Description of Artificial Sequence: Synthetic oligonucleotide
  Sense strand starting at position 3848 of SEQ ID NO: 1244331
ugauuuaauucgggugaug

SEQ ID NO: 1480543 - RNA, 19 nt, Artificial Sequence
  Description of Artificial Sequence: Synthetic oligonucleotide
  Antisense strand to SEQ ID NO: 1480542
caucacccgaauuaaauca

SEQ ID NO: 1480544 - RNA, 19 nt, Artificial Sequence
  Description of Artificial Sequence: Synthetic oligonucleotide
  Sense strand starting at position 3864 of SEQ ID NO: 1244331
augccugcgcaucagaauu

SEQ ID NO: 1480545 - RNA, 19 nt, Artificial Sequence
  Description of Artificial Sequence: Synthetic oligonucleotide
  Antisense strand to SEQ ID NO: 1480544
aauucugaugcgcaggcau

SEQ ID NO: 1480546 - RNA, 19 nt, Artificial Sequence
  Description of Artificial Sequence: Synthetic oligonucleotide
  Sense strand starting at position 3874 of SEQ ID NO: 1244331
aucagaauuucugaaagcu

SEQ ID NO: 1480547 - RNA, 19 nt, Artificial Sequence
  Description of Artificial Sequence: Synthetic oligonucleotide
  Antisense strand to SEQ ID NO: 1480546
agcuuucagaaauucugau

SEQ ID NO: 1480548 - RNA, 19 nt, Artificial Sequence
  Description of Artificial Sequence: Synthetic oligonucleotide
  Sense strand starting at position 3920 of SEQ ID NO: 1244331
gguugaagcacugaucucu

SEQ ID NO: 1480549 - RNA, 19 nt, Artificial Sequence
  Description of Artificial Sequence: Synthetic oligonucleotide
  Antisense strand to SEQ ID NO: 1480548
agagaucagugcuucaacc

SEQ ID NO: 1480550 - RNA, 19 nt, Artificial Sequence
  Description of Artificial Sequence: Synthetic oligonucleotide
  Sense strand starting at position 863 of SEQ ID NO: 1244332
ugaucuaguugcugucaaa

SEQ ID NO: 1480551 - RNA, 19 nt, Artificial Sequence
  Description of Artificial Sequence: Synthetic oligonucleotide
  Antisense strand to SEQ ID NO: 1480550
uuugacagcaacuagauca

SEQ ID NO: 1480552 - RNA, 19 nt, Artificial Sequence
  Description of Artificial Sequence: Synthetic oligonucleotide
  Sense strand starting at position 926 of SEQ ID NO: 1244332
agaacucuuucagcgggua

SEQ ID NO: 1480553 - RNA, 19 nt, Artificial Sequence
  Description of Artificial Sequence: Synthetic oligonucleotide
  Antisense strand to SEQ ID NO: 1480552
uacccgcugaaagaguucu

SEQ ID NO: 1480554 - RNA, 19 nt, Artificial Sequence
  Description of Artificial Sequence: Synthetic oligonucleotide
  Sense strand starting at position 942 of SEQ ID NO: 1244332
guacuaaauuuguaguccu

SEQ ID NO: 1480555 - RNA, 19 nt, Artificial Sequence
  Description of Artificial Sequence: Synthetic oligonucleotide
  Antisense strand to SEQ ID NO: 1480554
aggacuacaaauuuaguac

SEQ ID NO: 1480556 - RNA, 19 nt, Artificial Sequence
  Description of Artificial Sequence: Synthetic oligonucleotide
  Sense strand starting at position 1443 of SEQ ID NO: 1244332
ccgcucuacuccugagauc

SEQ ID NO: 1480557 - RNA, 19 nt, Artificial Sequence
  Description of Artificial Sequence: Synthetic oligonucleotide
  Antisense strand to SEQ ID NO: 1480556
gaucucaggaguagagcgg

SEQ ID NO: 1480558 - RNA, 19 nt, Artificial Sequence
  Description of Artificial Sequence: Synthetic oligonucleotide
  Sense strand starting at position 1444 of SEQ ID NO: 1244332
cgcucuacuccugagaucu

SEQ ID NO: 1480559 - RNA, 19 nt, Artificial Sequence
  Description of Artificial Sequence: Synthetic oligonucleotide
  Antisense strand to SEQ ID NO: 1480558
agaucucaggaguagagcg

SEQ ID NO: 1480560 - RNA, 19 nt, Artificial Sequence
  Description of Artificial Sequence: Synthetic oligonucleotide
  Sense strand starting at position 1462 of SEQ ID NO: 1244332
ugcaucaggccaggaauaa

SEQ ID NO: 1480561 - RNA, 19 nt, Artificial Sequence
  Description of Artificial Sequence: Synthetic oligonucleotide
  Antisense strand to SEQ ID NO: 1480560
uuauuccuggccugaugca

SEQ ID NO: 1480562 - RNA, 19 nt, Artificial Sequence
  Description of Artificial Sequence: Synthetic oligonucleotide
  Sense strand starting at position 1537 of SEQ ID NO: 1244332
gcuggcuguugauaccaau

SEQ ID NO: 1480563 - RNA, 19 nt, Artificial Sequence
  Description of Artificial Sequence: Synthetic oligonucleotide
  Antisense strand to SEQ ID NO: 1480562
auugguaucaacagccagc

SEQ ID NO: 1480564 - RNA, 19 nt, Artificial Sequence
  Description of Artificial Sequence: Synthetic oligonucleotide
  Sense strand starting at position 1543 of SEQ ID NO: 1244332
uguugauaccaaugagagc

SEQ ID NO: 1480565 - RNA, 19 nt, Artificial Sequence
  Description of Artificial Sequence: Synthetic oligonucleotide
  Antisense strand to SEQ ID NO: 1480564
gcucucauugguaucaaca

SEQ ID NO: 1480566 - RNA, 19 nt, Artificial Sequence
  Description of Artificial Sequence: Synthetic oligonucleotide
  Sense strand starting at position 1862 of SEQ ID NO: 1244332
cagagugauuaccaggcau

SEQ ID NO: 1480567 - RNA, 19 nt, Artificial Sequence
  Description of Artificial Sequence: Synthetic oligonucleotide
  Antisense strand to SEQ ID NO: 1480566
augccugguaaucacucug

SEQ ID NO: 1480568 - RNA, 19 nt, Artificial Sequence
  Description of Artificial Sequence: Synthetic oligonucleotide
  Sense strand starting at position 1864 of SEQ ID NO: 1244332
gagugauuaccaggcauug

SEQ ID NO: 1480569 - RNA, 19 nt, Artificial Sequence
  Description of Artificial Sequence: Synthetic oligonucleotide
  Antisense strand to SEQ ID NO: 1480568
caaugccugguaaucacuc

SEQ ID NO: 1480570 - RNA, 19 nt, Artificial Sequence
  Description of Artificial Sequence: Synthetic oligonucleotide
  Sense strand starting at position 2002 of SEQ ID NO: 1244332
acuuuacuuuccguaacgu

SEQ ID NO: 1480571 - RNA, 19 nt, Artificial Sequence
  Description of Artificial Sequence: Synthetic oligonucleotide
  Antisense strand to SEQ ID NO: 1480570
acguuacggaaaguaaagu

SEQ ID NO: 1480572 - RNA, 19 nt, Artificial Sequence
  Description of Artificial Sequence: Synthetic oligonucleotide
  Sense strand starting at position 2019 of SEQ ID NO: 1244332
gugagaacuuccugcggac

SEQ ID NO: 1480573 - RNA, 19 nt, Artificial Sequence
  Description of Artificial Sequence: Synthetic oligonucleotide
  Antisense strand to SEQ ID NO: 1480572
guccgcaggaaguucucac

SEQ ID NO: 1480574 - RNA, 19 nt, Artificial Sequence
  Description of Artificial Sequence: Synthetic oligonucleotide
  Sense strand starting at position 2207 of SEQ ID NO: 1244332
aggagucguuucucauuga

SEQ ID NO: 1480575 - RNA, 19 nt, Artificial Sequence
  Description of Artificial Sequence: Synthetic oligonucleotide
  Antisense strand to SEQ ID NO: 1480574
ucaaugagaaacgacuccu

SEQ ID NO: 1480576 - RNA, 19 nt, Artificial Sequence
  Description of Artificial Sequence: Synthetic oligonucleotide
  Sense strand starting at position 2208 of SEQ ID NO: 1244332
ggagucguuucucauugau

SEQ ID NO: 1480577 - RNA, 19 nt, Artificial Sequence
  Description of Artificial Sequence: Synthetic oligonucleotide
  Antisense strand to SEQ ID NO: 1480576
aucaaugagaaacgacucc

SEQ ID NO: 1480578 - RNA, 19 nt, Artificial Sequence
  Description of Artificial Sequence: Synthetic oligonucleotide
  Sense strand starting at position 2210 of SEQ ID NO: 1244332
agucguuucucauugauga

SEQ ID NO: 1480579 - RNA, 19 nt, Artificial Sequence
  Description of Artificial Sequence: Synthetic oligonucleotide
  Antisense strand to SEQ ID NO: 1480578
ucaucaaugagaaacgacu

SEQ ID NO: 1480580 - RNA, 19 nt, Artificial Sequence
  Description of Artificial Sequence: Synthetic oligonucleotide
  Sense strand starting at position 2211 of SEQ ID NO: 1244332
gucguuucucauugaugag

SEQ ID NO: 1480581 - RNA, 19 nt, Artificial Sequence
  Description of Artificial Sequence: Synthetic oligonucleotide
  Antisense strand to SEQ ID NO: 1480580
cucaucaaugagaaacgac

SEQ ID NO: 1480582 - RNA, 19 nt, Artificial Sequence
  Description of Artificial Sequence: Synthetic oligonucleotide
  Sense strand starting at position 2467 of SEQ ID NO: 1244332
ucuuaauagugugggugua

SEQ ID NO: 1480583 - RNA, 19 nt, Artificial Sequence
  Description of Artificial Sequence: Synthetic oligonucleotide
  Antisense strand to SEQ ID NO: 1480582
uacacccacacuauuaaga

SEQ ID NO: 1480584 - RNA, 19 nt, Artificial Sequence
  Description of Artificial Sequence: Synthetic oligonucleotide
  Sense strand starting at position 2468 of SEQ ID NO: 1244332
cuuaauaguguggguguau

SEQ ID NO: 1480585 - RNA, 19 nt, Artificial Sequence
  Description of Artificial Sequence: Synthetic oligonucleotide
  Antisense strand to SEQ ID NO: 1480584
auacacccacacuauuaag

SEQ ID NO: 1480586 - RNA, 19 nt, Artificial Sequence
  Description of Artificial Sequence: Synthetic oligonucleotide
  Sense strand starting at position 2469 of SEQ ID NO: 1244332
uuaauaguguggguguaua

SEQ ID NO: 1480587 - RNA, 19 nt, Artificial Sequence
  Description of Artificial Sequence: Synthetic oligonucleotide
  Antisense strand to SEQ ID NO: 1480586
uauacacccacacuauuaa

SEQ ID NO: 1480588 - RNA, 19 nt, Artificial Sequence
  Description of Artificial Sequence: Synthetic oligonucleotide
  Sense strand starting at position 2685 of SEQ ID NO: 1244332
auacaaacaguuugucaua

SEQ ID NO: 1480589 - RNA, 19 nt, Artificial Sequence
  Description of Artificial Sequence: Synthetic oligonucleotide
  Antisense strand to SEQ ID NO: 1480588
uaugacaaacuguuuguau

SEQ ID NO: 1480590 - RNA, 19 nt, Artificial Sequence
  Description of Artificial Sequence: Synthetic oligonucleotide
  Sense strand starting at position 2969 of SEQ ID NO: 1244332
agacauagcacauggguaa

SEQ ID NO: 1480591 - RNA, 19 nt, Artificial Sequence
  Description of Artificial Sequence: Synthetic oligonucleotide
  Antisense strand to SEQ ID NO: 1480590
uuacccaugugcuaugucu

SEQ ID NO: 1480592 - RNA, 19 nt, Artificial Sequence
  Description of Artificial Sequence: Synthetic oligonucleotide
  Sense strand starting at position 2970 of SEQ ID NO: 1244332
gacauagcacauggguaau

SEQ ID NO: 1480593 - RNA, 19 nt, Artificial Sequence
  Description of Artificial Sequence: Synthetic oligonucleotide
  Antisense strand to SEQ ID NO: 1480592
auuacccaugugcuauguc

SEQ ID NO: 1480594 - RNA, 19 nt, Artificial Sequence
  Description of Artificial Sequence: Synthetic oligonucleotide
  Sense strand starting at position 3050 of SEQ ID NO: 1244332
gccggaucucagcucguua

SEQ ID NO: 1480595 - RNA, 19 nt, Artificial Sequence
  Description of Artificial Sequence: Synthetic oligonucleotide
  Antisense strand to SEQ ID NO: 1480594
uaacgagcugagauccggc

SEQ ID NO: 1480596 - RNA, 19 nt, Artificial Sequence
  Description of Artificial Sequence: Synthetic oligonucleotide
  Sense strand starting at position 3052 of SEQ ID NO: 1244332
cggaucucagcucguuaua

SEQ ID NO: 1480597 - RNA, 19 nt, Artificial Sequence
  Description of Artificial Sequence: Synthetic oligonucleotide
  Antisense strand to SEQ ID NO: 1480596
uauaacgagcugagauccg

SEQ ID NO: 1480598 - RNA, 19 nt, Artificial Sequence
  Description of Artificial Sequence: Synthetic oligonucleotide
  Sense strand starting at position 3484 of SEQ ID NO: 1244332
ucuuguggucuucggaaac

SEQ ID NO: 1480599 - RNA, 19 nt, Artificial Sequence
  Description of Artificial Sequence: Synthetic oligonucleotide
  Antisense strand to SEQ ID NO: 1480598
guuuccgaagaccacaaga

SEQ ID NO: 1480600 - RNA, 19 nt, Artificial Sequence
  Description of Artificial Sequence: Synthetic oligonucleotide
  Sense strand starting at position 3725 of SEQ ID NO: 1244332
uuacuauauuaguuccagu

SEQ ID NO: 1480601 - RNA, 19 nt, Artificial Sequence
  Description of Artificial Sequence: Synthetic oligonucleotide
  Antisense strand to SEQ ID NO: 1480600
acuggaacuaauauaguaa

SEQ ID NO: 1480602 - RNA, 19 nt, Artificial Sequence
  Description of Artificial Sequence: Synthetic oligonucleotide
  Sense strand starting at position 3728 of SEQ ID NO: 1244332
cuauauuaguuccagugga

SEQ ID NO: 1480603 - RNA, 19 nt, Artificial Sequence
  Description of Artificial Sequence: Synthetic oligonucleotide
  Antisense strand to SEQ ID NO: 1480602
uccacuggaacuaauauag

SEQ ID NO: 1480604 - RNA, 19 nt, Artificial Sequence
  Description of Artificial Sequence: Synthetic oligonucleotide
  Sense strand starting at position 3732 of SEQ ID NO: 1244332
auuaguuccaguggagaca

SEQ ID NO: 1480605 - RNA, 19 nt, Artificial Sequence
  Description of Artificial Sequence: Synthetic oligonucleotide
  Antisense strand to SEQ ID NO: 1480604
ugucuccacuggaacuaau

SEQ ID NO: 1480606 - RNA, 19 nt, Artificial Sequence
  Description of Artificial Sequence: Synthetic oligonucleotide
  Sense strand starting at position 3733 of SEQ ID NO: 1244332
uuaguuccaguggagacau

SEQ ID NO: 1480607 - RNA, 19 nt, Artificial Sequence
  Description of Artificial Sequence: Synthetic oligonucleotide
  Antisense strand to SEQ ID NO: 1480606
augucuccacuggaacuaa

SEQ ID NO: 1480608 - RNA, 19 nt, Artificial Sequence
  Description of Artificial Sequence: Synthetic oligonucleotide
  Sense strand starting at position 3783 of SEQ ID NO: 1244332
ugugaaaugugcuaaagua

SEQ ID NO: 1480609 - RNA, 19 nt, Artificial Sequence
  Description of Artificial Sequence: Synthetic oligonucleotide
  Antisense strand to SEQ ID NO: 1480608
uacuuuagcacauuucaca

SEQ ID NO: 1480610 - RNA, 19 nt, Artificial Sequence
  Description of Artificial Sequence: Synthetic oligonucleotide
  Sense strand starting at position 326 of SEQ ID NO: 1244333
ugcuguggccaguuuguua

SEQ ID NO: 1480611 - RNA, 19 nt, Artificial Sequence
  Description of Artificial Sequence: Synthetic oligonucleotide
  Antisense strand to SEQ ID NO: 1480610
uaacaaacuggccacagca

SEQ ID NO: 1480612 - RNA, 19 nt, Artificial Sequence
  Description of Artificial Sequence: Synthetic oligonucleotide
  Sense strand starting at position 456 of SEQ ID NO: 1244333
auacccaguuucguauaga

SEQ ID NO: 1480613 - RNA, 19 nt, Artificial Sequence
  Description of Artificial Sequence: Synthetic oligonucleotide
  Antisense strand to SEQ ID NO: 1480612
ucuauacgaaacuggguau

SEQ ID NO: 1480614 - RNA, 19 nt, Artificial Sequence
  Description of Artificial Sequence: Synthetic oligonucleotide
  Sense strand starting at position 498 of SEQ ID NO: 1244333
ggcguucuagaguucgagu

SEQ ID NO: 1480615 - RNA, 19 nt, Artificial Sequence
  Description of Artificial Sequence: Synthetic oligonucleotide
  Antisense strand to SEQ ID NO: 1480614
acucgaacucuagaacgcc

SEQ ID NO: 1480616 - RNA, 19 nt, Artificial Sequence
  Description of Artificial Sequence: Synthetic oligonucleotide
  Sense strand starting at position 525 of SEQ ID NO: 1244333
gugggaucugggcaaguua

SEQ ID NO: 1480617 - RNA, 19 nt, Artificial Sequence
  Description of Artificial Sequence: Synthetic oligonucleotide
  Antisense strand to SEQ ID NO: 1480616
uaacuugcccagaucccac

SEQ ID NO: 1480618 - RNA, 19 nt, Artificial Sequence
  Description of Artificial Sequence: Synthetic oligonucleotide
  Sense strand starting at position 556 of SEQ ID NO: 1244333
gggcuuuaguuccucacua

SEQ ID NO: 1480619 - RNA, 19 nt, Artificial Sequence
  Description of Artificial Sequence: Synthetic oligonucleotide
  Antisense strand to SEQ ID NO: 1480618
uagugaggaacuaaagccc

SEQ ID NO: 1480620 - RNA, 19 nt, Artificial Sequence
  Description of Artificial Sequence: Synthetic oligonucleotide
  Sense strand starting at position 557 of SEQ ID NO: 1244333
ggcuuuaguuccucacuac

SEQ ID NO: 1480621 - RNA, 19 nt, Artificial Sequence
  Description of Artificial Sequence: Synthetic oligonucleotide
  Antisense strand to SEQ ID NO: 1480620
guagugaggaacuaaagcc

SEQ ID NO: 1480622 - RNA, 19 nt, Artificial Sequence
  Description of Artificial Sequence: Synthetic oligonucleotide
  Sense strand starting at position 558 of SEQ ID NO: 1244333
gcuuuaguuccucacuacu

SEQ ID NO: 1480623 - RNA, 19 nt, Artificial Sequence
  Description of Artificial Sequence: Synthetic oligonucleotide
  Antisense strand to SEQ ID NO: 1480622
aguagugaggaacuaaagc

SEQ ID NO: 1480624 - RNA, 19 nt, Artificial Sequence
  Description of Artificial Sequence: Synthetic oligonucleotide
  Sense strand starting at position 591 of SEQ ID NO: 1244333
ugaggcuuaugugcauuaa

SEQ ID NO: 1480625 - RNA, 19 nt, Artificial Sequence
  Description of Artificial Sequence: Synthetic oligonucleotide
  Antisense strand to SEQ ID NO: 1480624
uuaaugcacauaagccuca

SEQ ID NO: 1480626 - RNA, 19 nt, Artificial Sequence
  Description of Artificial Sequence: Synthetic oligonucleotide
  Sense strand starting at position 592 of SEQ ID NO: 1244333
gaggcuuaugugcauuaac

SEQ ID NO: 1480627 - RNA, 19 nt, Artificial Sequence
  Description of Artificial Sequence: Synthetic oligonucleotide
  Antisense strand to SEQ ID NO: 1480626
guuaaugcacauaagccuc

SEQ ID NO: 1480628 - RNA, 19 nt, Artificial Sequence
  Description of Artificial Sequence: Synthetic oligonucleotide
  Sense strand starting at position 595 of SEQ ID NO: 1244333
gcuuaugugcauuaaccua

SEQ ID NO: 1480629 - RNA, 19 nt, Artificial Sequence
  Description of Artificial Sequence: Synthetic oligonucleotide
  Antisense strand to SEQ ID NO: 1480628
uagguuaaugcacauaagc

SEQ ID NO: 1480630 - RNA, 19 nt, Artificial Sequence
  Description of Artificial Sequence: Synthetic oligonucleotide
  Sense strand starting at position 831 of SEQ ID NO: 1244333
uggaguuuccagcagugag

SEQ ID NO: 1480631 - RNA, 19 nt, Artificial Sequence
  Description of Artificial Sequence: Synthetic oligonucleotide
  Antisense strand to SEQ ID NO: 1480630
cucacugcuggaaacucca

SEQ ID NO: 1480632 - RNA, 19 nt, Artificial Sequence
  Description of Artificial Sequence: Synthetic oligonucleotide
  Sense strand starting at position 966 of SEQ ID NO: 1244333
cugugcuguggguaucauu

SEQ ID NO: 1480633 - RNA, 19 nt, Artificial Sequence
  Description of Artificial Sequence: Synthetic oligonucleotide
  Antisense strand to SEQ ID NO: 1480632
aaugauacccacagcacag

SEQ ID NO: 1480634 - RNA, 19 nt, Artificial Sequence
  Description of Artificial Sequence: Synthetic oligonucleotide
  Sense strand starting at position 1005 of SEQ ID NO: 1244333
gaaacugagguucgcauau

SEQ ID NO: 1480635 - RNA, 19 nt, Artificial Sequence
  Description of Artificial Sequence: Synthetic oligonucleotide
  Antisense strand to SEQ ID NO: 1480634
auaugcgaaccucaguuuc

SEQ ID NO: 1480636 - RNA, 19 nt, Artificial Sequence
  Description of Artificial Sequence: Synthetic oligonucleotide
  Sense strand starting at position 1011 of SEQ ID NO: 1244333
gagguucgcauaugugaag

SEQ ID NO: 1480637 - RNA, 19 nt, Artificial Sequence
  Description of Artificial Sequence: Synthetic oligonucleotide
  Antisense strand to SEQ ID NO: 1480636
cuucacauaugcgaaccuc

SEQ ID NO: 1480638 - RNA, 19 nt, Artificial Sequence
  Description of Artificial Sequence: Synthetic oligonucleotide
  Sense strand starting at position 1195 of SEQ ID NO: 1244333
cauagaugucgucacaguc

SEQ ID NO: 1480639 - RNA, 19 nt, Artificial Sequence
  Description of Artificial Sequence: Synthetic oligonucleotide
  Antisense strand to SEQ ID NO: 1480638
gacugugacgacaucuaug

SEQ ID NO: 1480640 - RNA, 19 nt, Artificial Sequence
  Description of Artificial Sequence: Synthetic oligonucleotide
  Sense strand starting at position 1379 of SEQ ID NO: 1244333
ggagaugagcaaugcuuau

SEQ ID NO: 1480641 - RNA, 19 nt, Artificial Sequence
  Description of Artificial Sequence: Synthetic oligonucleotide
  Antisense strand to SEQ ID NO: 1480640
auaagcauugcucaucucc

SEQ ID NO: 1480642 - RNA, 19 nt, Artificial Sequence
  Description of Artificial Sequence: Synthetic oligonucleotide
  Sense strand starting at position 1383 of SEQ ID NO: 1244333
augagcaaugcuuauguca

SEQ ID NO: 1480643 - RNA, 19 nt, Artificial Sequence
  Description of Artificial Sequence: Synthetic oligonucleotide
  Antisense strand to SEQ ID NO: 1480642
ugacauaagcauugcucau

SEQ ID NO: 1480644 - RNA, 19 nt, Artificial Sequence
  Description of Artificial Sequence: Synthetic oligonucleotide
  Sense strand starting at position 1390 of SEQ ID NO: 1244333
augcuuaugucauccaucu

SEQ ID NO: 1480645 - RNA, 19 nt, Artificial Sequence
  Description of Artificial Sequence: Synthetic oligonucleotide
  Antisense strand to SEQ ID NO: 1480644
agauggaugacauaagcau

SEQ ID NO: 1480646 - RNA, 19 nt, Artificial Sequence
  Description of Artificial Sequence: Synthetic oligonucleotide
  Sense strand starting at position 1460 of SEQ ID NO: 1244333
cugacagucuguucugaca

SEQ ID NO: 1480647 - RNA, 19 nt, Artificial Sequence
  Description of Artificial Sequence: Synthetic oligonucleotide
  Antisense strand to SEQ ID NO: 1480646
ugucagaacagacugucag

SEQ ID NO: 1480648 - RNA, 19 nt, Artificial Sequence
  Description of Artificial Sequence: Synthetic oligonucleotide
  Sense strand starting at position 1671 of SEQ ID NO: 1244333
cccuguucucuuugcauuu

SEQ ID NO: 1480649 - RNA, 19 nt, Artificial Sequence
  Description of Artificial Sequence: Synthetic oligonucleotide
  Antisense strand to SEQ ID NO: 1480648
aaaugcaaagagaacaggg

SEQ ID NO: 1480650 - RNA, 19 nt, Artificial Sequence
  Description of Artificial Sequence: Synthetic oligonucleotide
  Sense strand starting at position 1829 of SEQ ID NO: 1244333
aagagaacuccuugugccu

SEQ ID NO: 1480651 - RNA, 19 nt, Artificial Sequence
  Description of Artificial Sequence: Synthetic oligonucleotide
  Antisense strand to SEQ ID NO: 1480650
aggcacaaggaguucucuu

SEQ ID NO: 1480652 - RNA, 19 nt, Artificial Sequence
  Description of Artificial Sequence: Synthetic oligonucleotide
  Sense strand starting at position 1940 of SEQ ID NO: 1244333
gucaguucugcucagagug

SEQ ID NO: 1480653 - RNA, 19 nt, Artificial Sequence
  Description of Artificial Sequence: Synthetic oligonucleotide
  Antisense strand to SEQ ID NO: 1480652
cacucugagcagaacugac

SEQ ID NO: 1480654 - RNA, 19 nt, Artificial Sequence
  Description of Artificial Sequence: Synthetic oligonucleotide
  Sense strand starting at position 2080 of SEQ ID NO: 1244333
ccagcaucaguuuacacua

SEQ ID NO: 1480655 - RNA, 19 nt, Artificial Sequence
  Description of Artificial Sequence: Synthetic oligonucleotide
  Antisense strand to SEQ ID NO: 1480654
uaguguaaacugaugcugg

SEQ ID NO: 1480656 - RNA, 19 nt, Artificial Sequence
  Description of Artificial Sequence: Synthetic oligonucleotide
  Sense strand starting at position 2150 of SEQ ID NO: 1244333
aguccugucgggcaaagua

SEQ ID NO: 1480657 - RNA, 19 nt, Artificial Sequence
  Description of Artificial Sequence: Synthetic oligonucleotide
  Antisense strand to SEQ ID NO: 1480656
uacuuugcccgacaggacu

SEQ ID NO: 1480658 - RNA, 19 nt, Artificial Sequence
  Description of Artificial Sequence: Synthetic oligonucleotide
  Sense strand starting at position 2552 of SEQ ID NO: 1244333
ugggacauuucugagccau

SEQ ID NO: 1480659 - RNA, 19 nt, Artificial Sequence
  Description of Artificial Sequence: Synthetic oligonucleotide
  Antisense strand to SEQ ID NO: 1480658
auggcucagaaauguccca

SEQ ID NO: 1480660 - RNA, 19 nt, Artificial Sequence
  Description of Artificial Sequence: Synthetic oligonucleotide
  Sense strand starting at position 2713 of SEQ ID NO: 1244333
gcucacaugcaauagguau

SEQ ID NO: 1480661 - RNA, 19 nt, Artificial Sequence
  Description of Artificial Sequence: Synthetic oligonucleotide
  Antisense strand to SEQ ID NO: 1480660
auaccuauugcaugugagc

SEQ ID NO: 1480662 - RNA, 19 nt, Artificial Sequence
  Description of Artificial Sequence: Synthetic oligonucleotide
  Sense strand starting at position 2864 of SEQ ID NO: 1244333
ccaggagaguuguucuaga

SEQ ID NO: 1480663 - RNA, 19 nt, Artificial Sequence
  Description of Artificial Sequence: Synthetic oligonucleotide
  Antisense strand to SEQ ID NO: 1480662
ucuagaacaacucuccugg

SEQ ID NO: 1480664 - RNA, 19 nt, Artificial Sequence
  Description of Artificial Sequence: Synthetic oligonucleotide
  Sense strand starting at position 2884 of SEQ ID NO: 1244333
ggccucucagauuauguca

SEQ ID NO: 1480665 - RNA, 19 nt, Artificial Sequence
  Description of Artificial Sequence: Synthetic oligonucleotide
  Antisense strand to SEQ ID NO: 1480664
ugacauaaucugagaggcc

SEQ ID NO: 1480666 - RNA, 19 nt, Artificial Sequence
  Description of Artificial Sequence: Synthetic oligonucleotide
  Sense strand starting at position 2944 of SEQ ID NO: 1244333
aggcuagguuucucaccuu

SEQ ID NO: 1480667 - RNA, 19 nt, Artificial Sequence
  Description of Artificial Sequence: Synthetic oligonucleotide
  Antisense strand to SEQ ID NO: 1480666
aaggugagaaaccuagccu

SEQ ID NO: 1480668 - RNA, 19 nt, Artificial Sequence
  Description of Artificial Sequence: Synthetic oligonucleotide
  Sense strand starting at position 2947 of SEQ ID NO: 1244333
cuagguuucucaccuugga

SEQ ID NO: 1480669 - RNA, 19 nt, Artificial Sequence
  Description of Artificial Sequence: Synthetic oligonucleotide
  Antisense strand to SEQ ID NO: 1480668
uccaaggugagaaaccuag

SEQ ID NO: 1480670 - RNA, 19 nt, Artificial Sequence
  Description of Artificial Sequence: Synthetic oligonucleotide
  Sense strand starting at position 2950 of SEQ ID NO: 1244333
gguuucucaccuuggacau

SEQ ID NO: 1480671 - RNA, 19 nt, Artificial Sequence
  Description of Artificial Sequence: Synthetic oligonucleotide
  Antisense strand to SEQ ID NO: 1480670
auguccaaggugagaaacc

SEQ ID NO: 1480672 - RNA, 19 nt, Artificial Sequence
  Description of Artificial Sequence: Synthetic oligonucleotide
  Sense strand starting at position 3014 of SEQ ID NO: 1244333
cccuuauugcugugacuca

SEQ ID NO: 1480673 - RNA, 19 nt, Artificial Sequence
  Description of Artificial Sequence: Synthetic oligonucleotide
  Antisense strand to SEQ ID NO: 1480672
ugagucacagcaauaaggg

SEQ ID NO: 1480674 - RNA, 19 nt, Artificial Sequence
  Description of Artificial Sequence: Synthetic oligonucleotide
  Sense strand starting at position 3200 of SEQ ID NO: 1244333
cagaguaggcuugauaugu

SEQ ID NO: 1480675 - RNA, 19 nt, Artificial Sequence
  Description of Artificial Sequence: Synthetic oligonucleotide
  Antisense strand to SEQ ID NO: 1480674
acauaucaagccuacucug

SEQ ID NO: 1480676 - RNA, 19 nt, Artificial Sequence
  Description of Artificial Sequence: Synthetic oligonucleotide
  Sense strand starting at position 3204 of SEQ ID NO: 1244333
guaggcuugauauguacau

SEQ ID NO: 1480677 - RNA, 19 nt, Artificial Sequence
  Description of Artificial Sequence: Synthetic oligonucleotide
  Antisense strand to SEQ ID NO: 1480676
auguacauaucaagccuac

SEQ ID NO: 1480678 - RNA, 19 nt, Artificial Sequence
  Description of Artificial Sequence: Synthetic oligonucleotide
  Sense strand starting at position 3622 of SEQ ID NO: 1244333
uggacagugaauugcaaau

SEQ ID NO: 1480679 - RNA, 19 nt, Artificial Sequence
  Description of Artificial Sequence: Synthetic oligonucleotide
  Antisense strand to SEQ ID NO: 1480678
auuugcaauucacugucca

SEQ ID NO: 1480680 - RNA, 19 nt, Artificial Sequence
  Description of Artificial Sequence: Synthetic oligonucleotide
  Sense strand starting at position 3628 of SEQ ID NO: 1244333
gugaauugcaaauguaagg

SEQ ID NO: 1480681 - RNA, 19 nt, Artificial Sequence
  Description of Artificial Sequence: Synthetic oligonucleotide
  Antisense strand to SEQ ID NO: 1480680
ccuuacauuugcaauucac

SEQ ID NO: 1480682 - RNA, 19 nt, Artificial Sequence
  Description of Artificial Sequence: Synthetic oligonucleotide
  Sense strand starting at position 3635 of SEQ ID NO: 1244333
gcaaauguaagguguauua

SEQ ID NO: 1480683 - RNA, 19 nt, Artificial Sequence
  Description of Artificial Sequence: Synthetic oligonucleotide
  Antisense strand to SEQ ID NO: 1480682
uaauacaccuuacauuugc

SEQ ID NO: 1480684 - RNA, 19 nt, Artificial Sequence
  Description of Artificial Sequence: Synthetic oligonucleotide
  Sense strand starting at position 3637 of SEQ ID NO: 1244333
aaauguaagguguauuaca

SEQ ID NO: 1480685 - RNA, 19 nt, Artificial Sequence
  Description of Artificial Sequence: Synthetic oligonucleotide
  Antisense strand to SEQ ID NO: 1480684
uguaauacaccuuacauuu

SEQ ID NO: 1480686 - RNA, 19 nt, Artificial Sequence
  Description of Artificial Sequence: Synthetic oligonucleotide
  Sense strand starting at position 3792 of SEQ ID NO: 1244333
ugacuugguucugugauug

SEQ ID NO: 1480687 - RNA, 19 nt, Artificial Sequence
  Description of Artificial Sequence: Synthetic oligonucleotide
  Antisense strand to SEQ ID NO: 1480686
caaucacagaaccaaguca

SEQ ID NO: 1480688 - RNA, 19 nt, Artificial Sequence
  Description of Artificial Sequence: Synthetic oligonucleotide
  Sense strand starting at position 3970 of SEQ ID NO: 1244333
ugugguaaggauuaaguaa

SEQ ID NO: 1480689 - RNA, 19 nt, Artificial Sequence
  Description of Artificial Sequence: Synthetic oligonucleotide
  Antisense strand to SEQ ID NO: 1480688
uuacuuaauccuuaccaca

SEQ ID NO: 1480690 - RNA, 19 nt, Artificial Sequence
  Description of Artificial Sequence: Synthetic oligonucleotide
  Sense strand starting at position 4 of SEQ ID NO: 1244334
gugacuugugaaggucuuu

SEQ ID NO: 1480691 - RNA, 19 nt, Artificial Sequence
  Description of Artificial Sequence: Synthetic oligonucleotide
  Antisense strand to SEQ ID NO: 1480690
aaagaccuucacaagucac

SEQ ID NO: 1480692 - RNA, 19 nt, Artificial Sequence
  Description of Artificial Sequence: Synthetic oligonucleotide
  Sense strand starting at position 80 of SEQ ID NO: 1244334
cugacauacguauauuaau

SEQ ID NO: 1480693 - RNA, 19 nt, Artificial Sequence
  Description of Artificial Sequence: Synthetic oligonucleotide
  Antisense strand to SEQ ID NO: 1480692
auuaauauacguaugucag

SEQ ID NO: 1480694 - RNA, 19 nt, Artificial Sequence
  Description of Artificial Sequence: Synthetic oligonucleotide
  Sense strand starting at position 89 of SEQ ID NO: 1244334
guauauuaaucgucaugaa

SEQ ID NO: 1480695 - RNA, 19 nt, Artificial Sequence
  Description of Artificial Sequence: Synthetic oligonucleotide
  Antisense strand to SEQ ID NO: 1480694
uucaugacgauuaauauac

SEQ ID NO: 1480696 - RNA, 19 nt, Artificial Sequence
  Description of Artificial Sequence: Synthetic oligonucleotide
  Sense strand starting at position 179 of SEQ ID NO: 1244334
acaauacuagagugcuuau

SEQ ID NO: 1480697 - RNA, 19 nt, Artificial Sequence
  Description of Artificial Sequence: Synthetic oligonucleotide
  Antisense strand to SEQ ID NO: 1480696
auaagcacucuaguauugu

SEQ ID NO: 1480698 - RNA, 19 nt, Artificial Sequence
  Description of Artificial Sequence: Synthetic oligonucleotide
  Sense strand starting at position 227 of SEQ ID NO: 1244334
acaugcauugucugaacua

SEQ ID NO: 1480699 - RNA, 19 nt, Artificial Sequence
  Description of Artificial Sequence: Synthetic oligonucleotide
  Antisense strand to SEQ ID NO: 1480698
uaguucagacaaugcaugu

SEQ ID NO: 1480700 - RNA, 19 nt, Artificial Sequence
  Description of Artificial Sequence: Synthetic oligonucleotide
  Sense strand starting at position 234 of SEQ ID NO: 1244334
uugucugaacuaggaaauu

SEQ ID NO: 1480701 - RNA, 19 nt, Artificial Sequence
  Description of Artificial Sequence: Synthetic oligonucleotide
  Antisense strand to SEQ ID NO: 1480700
aauuuccuaguucagacaa

SEQ ID NO: 1480702 - RNA, 19 nt, Artificial Sequence
  Description of Artificial Sequence: Synthetic oligonucleotide
  Sense strand starting at position 363 of SEQ ID NO: 1244334
ucuauuauguucucucagu

SEQ ID NO: 1480703 - RNA, 19 nt, Artificial Sequence
  Description of Artificial Sequence: Synthetic oligonucleotide
  Antisense strand to SEQ ID NO: 1480702
acugagagaacauaauaga

SEQ ID NO: 1480704 - RNA, 19 nt, Artificial Sequence
  Description of Artificial Sequence: Synthetic oligonucleotide
  Sense strand starting at position 364 of SEQ ID NO: 1244334
cuauuauguucucucaguc

SEQ ID NO: 1480705 - RNA, 19 nt, Artificial Sequence
  Description of Artificial Sequence: Synthetic oligonucleotide
  Antisense strand to SEQ ID NO: 1480704
gacugagagaacauaauag

SEQ ID NO: 1480706 - RNA, 19 nt, Artificial Sequence
  Description of Artificial Sequence: Synthetic oligonucleotide
  Sense strand starting at position 429 of SEQ ID NO: 1244334
uauucuauugcuggugauu

SEQ ID NO: 1480707 - RNA, 19 nt, Artificial Sequence
  Description of Artificial Sequence: Synthetic oligonucleotide
  Antisense strand to SEQ ID NO: 1480706
aaucaccagcaauagaaua

SEQ ID NO: 1480708 - RNA, 19 nt, Artificial Sequence
  Description of Artificial Sequence: Synthetic oligonucleotide
  Sense strand starting at position 443 of SEQ ID NO: 1244334
ugauucugaugagauuuaa

SEQ ID NO: 1480709 - RNA, 19 nt, Artificial Sequence
  Description of Artificial Sequence: Synthetic oligonucleotide
  Antisense strand to SEQ ID NO: 1480708
uuaaaucucaucagaauca

SEQ ID NO: 1480710 - RNA, 19 nt, Artificial Sequence
  Description of Artificial Sequence: Synthetic oligonucleotide
  Sense strand starting at position 498 of SEQ ID NO: 1244334
cgguacaauaccugguaua

SEQ ID NO: 1480711 - RNA, 19 nt, Artificial Sequence
  Description of Artificial Sequence: Synthetic oligonucleotide
  Antisense strand to SEQ ID NO: 1480710
uauaccagguauuguaccg

SEQ ID NO: 1480712 - RNA, 19 nt, Artificial Sequence
  Description of Artificial Sequence: Synthetic oligonucleotide
  Sense strand starting at position 499 of SEQ ID NO: 1244334
gguacaauaccugguauau

SEQ ID NO: 1480713 - RNA, 19 nt, Artificial Sequence
  Description of Artificial Sequence: Synthetic oligonucleotide
  Antisense strand to SEQ ID NO: 1480712
auauaccagguauuguacc

SEQ ID NO: 1480714 - RNA, 19 nt, Artificial Sequence
  Description of Artificial Sequence: Synthetic oligonucleotide
  Sense strand starting at position 560 of SEQ ID NO: 1244334
guuugcuguguggaagaua

SEQ ID NO: 1480715 - RNA, 19 nt, Artificial Sequence
  Description of Artificial Sequence: Synthetic oligonucleotide
  Antisense strand to SEQ ID NO: 1480714
uaucuuccacacagcaaac

SEQ ID NO: 1480716 - RNA, 19 nt, Artificial Sequence
  Description of Artificial Sequence: Synthetic oligonucleotide
  Sense strand starting at position 784 of SEQ ID NO: 1244334
uaaggaagcgcuuaauaca

SEQ ID NO: 1480717 - RNA, 19 nt, Artificial Sequence
  Description of Artificial Sequence: Synthetic oligonucleotide
  Antisense strand to SEQ ID NO: 1480716
uguauuaagcgcuuccuua

SEQ ID NO: 1480718 - RNA, 19 nt, Artificial Sequence
  Description of Artificial Sequence: Synthetic oligonucleotide
  Sense strand starting at position 791 of SEQ ID NO: 1244334
gcgcuuaauacagacgaga

SEQ ID NO: 1480719 - RNA, 19 nt, Artificial Sequence
  Description of Artificial Sequence: Synthetic oligonucleotide
  Antisense strand to SEQ ID NO: 1480718
ucucgucuguauuaagcgc

SEQ ID NO: 1480720 - RNA, 19 nt, Artificial Sequence
  Description of Artificial Sequence: Synthetic oligonucleotide
  Sense strand starting at position 882 of SEQ ID NO: 1244334
agaaaugucugacacaaga

SEQ ID NO: 1480721 - RNA, 19 nt, Artificial Sequence
  Description of Artificial Sequence: Synthetic oligonucleotide
  Antisense strand to SEQ ID NO: 1480720
ucuugugucagacauuucu

SEQ ID NO: 1480722 - RNA, 19 nt, Artificial Sequence
  Description of Artificial Sequence: Synthetic oligonucleotide
  Sense strand starting at position 964 of SEQ ID NO: 1244334
cgcgcuauuagauauaaug

SEQ ID NO: 1480723 - RNA, 19 nt, Artificial Sequence
  Description of Artificial Sequence: Synthetic oligonucleotide
  Antisense strand to SEQ ID NO: 1480722
cauuauaucuaauagcgcg

SEQ ID NO: 1480724 - RNA, 19 nt, Artificial Sequence
  Description of Artificial Sequence: Synthetic oligonucleotide
  Sense strand starting at position 2331 of SEQ ID NO: 1244334
cacucagagcuaugagcua

SEQ ID NO: 1480725 - RNA, 19 nt, Artificial Sequence
  Description of Artificial Sequence: Synthetic oligonucleotide
  Antisense strand to SEQ ID NO: 1480724
uagcucauagcucugagug

SEQ ID NO: 1480726 - RNA, 19 nt, Artificial Sequence
  Description of Artificial Sequence: Synthetic oligonucleotide
  Sense strand starting at position 3345 of SEQ ID NO: 1244334
aaugguaaugucugggaau

SEQ ID NO: 1480727 - RNA, 19 nt, Artificial Sequence
  Description of Artificial Sequence: Synthetic oligonucleotide
  Antisense strand to SEQ ID NO: 1480726
auucccagacauuaccauu

SEQ ID NO: 1480728 - RNA, 19 nt, Artificial Sequence
  Description of Artificial Sequence: Synthetic oligonucleotide
  Sense strand starting at position 3425 of SEQ ID NO: 1244334
auguaagaaugacuccuau

SEQ ID NO: 1480729 - RNA, 19 nt, Artificial Sequence
  Description of Artificial Sequence: Synthetic oligonucleotide
  Antisense strand to SEQ ID NO: 1480728
auaggagucauucuuacau

SEQ ID NO: 1480730 - RNA, 19 nt, Artificial Sequence
  Description of Artificial Sequence: Synthetic oligonucleotide
  Sense strand starting at position 3465 of SEQ ID NO: 1244334
guuacucaccuuugggagu

SEQ ID NO: 1480731 - RNA, 19 nt, Artificial Sequence
  Description of Artificial Sequence: Synthetic oligonucleotide
  Antisense strand to SEQ ID NO: 1480730
acucccaaaggugaguaac

SEQ ID NO: 1480732 - RNA, 19 nt, Artificial Sequence
  Description of Artificial Sequence: Synthetic oligonucleotide
  Sense strand starting at position 3504 of SEQ ID NO: 1244334
gcagaaaggauguguauga

SEQ ID NO: 1480733 - RNA, 19 nt, Artificial Sequence
  Description of Artificial Sequence: Synthetic oligonucleotide
  Antisense strand to SEQ ID NO: 1480732
ucauacacauccuuucugc

SEQ ID NO: 1480734 - RNA, 19 nt, Artificial Sequence
  Description of Artificial Sequence: Synthetic oligonucleotide
  Sense strand starting at position 3508 of SEQ ID NO: 1244334
aaaggauguguaugaagcu

SEQ ID NO: 1480735 - RNA, 19 nt, Artificial Sequence
  Description of Artificial Sequence: Synthetic oligonucleotide
  Antisense strand to SEQ ID NO: 1480734
agcuucauacacauccuuu

SEQ ID NO: 1480736 - RNA, 19 nt, Artificial Sequence
  Description of Artificial Sequence: Synthetic oligonucleotide
  Sense strand starting at position 3515 of SEQ ID NO: 1244334
guguaugaagcuuagauaa

SEQ ID NO: 1480737 - RNA, 19 nt, Artificial Sequence
  Description of Artificial Sequence: Synthetic oligonucleotide
  Antisense strand to SEQ ID NO: 1480736
uuaucuaagcuucauacac

SEQ ID NO: 1480738 - RNA, 19 nt, Artificial Sequence
  Description of Artificial Sequence: Synthetic oligonucleotide
  Sense strand starting at position 3544 of SEQ ID NO: 1244334
uucguaaacuguuugagac

SEQ ID NO: 1480739 - RNA, 19 nt, Artificial Sequence
  Description of Artificial Sequence: Synthetic oligonucleotide
  Antisense strand to SEQ ID NO: 1480738
gucucaaacaguuuacgaa

SEQ ID NO: 1480740 - RNA, 19 nt, Artificial Sequence
  Description of Artificial Sequence: Synthetic oligonucleotide
  Sense strand starting at position 3630 of SEQ ID NO: 1244334
cggucuccuguuugauaaa

SEQ ID NO: 1480741 - RNA, 19 nt, Artificial Sequence
  Description of Artificial Sequence: Synthetic oligonucleotide
  Antisense strand to SEQ ID NO: 1480740
uuuaucaaacaggagaccg

SEQ ID NO: 1480742 - RNA, 19 nt, Artificial Sequence
  Description of Artificial Sequence: Synthetic oligonucleotide
  Sense strand starting at position 3647 of SEQ ID NO: 1244334
aaagaauauuggccaguau

SEQ ID NO: 1480743 - RNA, 19 nt, Artificial Sequence
  Description of Artificial Sequence: Synthetic oligonucleotide
  Antisense strand to SEQ ID NO: 1480742
auacuggccaauauucuuu

SEQ ID NO: 1480744 - RNA, 19 nt, Artificial Sequence
  Description of Artificial Sequence: Synthetic oligonucleotide
  Sense strand starting at position 3705 of SEQ ID NO: 1244334
guuucugugggcguguauu

SEQ ID NO: 1480745 - RNA, 19 nt, Artificial Sequence
  Description of Artificial Sequence: Synthetic oligonucleotide
  Antisense strand to SEQ ID NO: 1480744
aauacacgcccacagaaac

SEQ ID NO: 1480746 - RNA, 19 nt, Artificial Sequence
  Description of Artificial Sequence: Synthetic oligonucleotide
  Sense strand starting at position 3715 of SEQ ID NO: 1244334
gcguguauuggagcagguu

SEQ ID NO: 1480747 - RNA, 19 nt, Artificial Sequence
  Description of Artificial Sequence: Synthetic oligonucleotide
  Antisense strand to SEQ ID NO: 1480746
aaccugcuccaauacacgc

SEQ ID NO: 1480748 - RNA, 19 nt, Artificial Sequence
  Description of Artificial Sequence: Synthetic oligonucleotide
  Sense strand starting at position 3723 of SEQ ID NO: 1244334
uggagcagguuugucuuua

SEQ ID NO: 1480749 - RNA, 19 nt, Artificial Sequence
  Description of Artificial Sequence: Synthetic oligonucleotide
  Antisense strand to SEQ ID NO: 1480748
uaaagacaaaccugcucca

SEQ ID NO: 1480750 - RNA, 19 nt, Artificial Sequence
  Description of Artificial Sequence: Synthetic oligonucleotide
  Sense strand starting at position 3724 of SEQ ID NO: 1244334
ggagcagguuugucuuuaa

SEQ ID NO: 1480751 - RNA, 19 nt, Artificial Sequence
  Description of Artificial Sequence: Synthetic oligonucleotide
  Antisense strand to SEQ ID NO: 1480750
uuaaagacaaaccugcucc

SEQ ID NO: 1480752 - RNA, 19 nt, Artificial Sequence
  Description of Artificial Sequence: Synthetic oligonucleotide
  Sense strand starting at position 3727 of SEQ ID NO: 1244334
gcagguuugucuuuaaaug

SEQ ID NO: 1480753 - RNA, 19 nt, Artificial Sequence
  Description of Artificial Sequence: Synthetic oligonucleotide
  Antisense strand to SEQ ID NO: 1480752
cauuuaaagacaaaccugc

SEQ ID NO: 1480754 - RNA, 19 nt, Artificial Sequence
  Description of Artificial Sequence: Synthetic oligonucleotide
  Sense strand starting at position 3728 of SEQ ID NO: 1244334
cagguuugucuuuaaaugu

SEQ ID NO: 1480755 - RNA, 19 nt, Artificial Sequence
  Description of Artificial Sequence: Synthetic oligonucleotide
  Antisense strand to SEQ ID NO: 1480754
acauuuaaagacaaaccug

SEQ ID NO: 1480756 - RNA, 19 nt, Artificial Sequence
  Description of Artificial Sequence: Synthetic oligonucleotide
  Sense strand starting at position 3791 of SEQ ID NO: 1244334
guuguacugacugggacuu

SEQ ID NO: 1480757 - RNA, 19 nt, Artificial Sequence
  Description of Artificial Sequence: Synthetic oligonucleotide
  Antisense strand to SEQ ID NO: 1480756
aagucccagucaguacaac

SEQ ID NO: 1480758 - RNA, 19 nt, Artificial Sequence
  Description of Artificial Sequence: Synthetic oligonucleotide
  Sense strand starting at position 3814 of SEQ ID NO: 1244334
uucuaauggauguggcaaa

SEQ ID NO: 1480759 - RNA, 19 nt, Artificial Sequence
  Description of Artificial Sequence: Synthetic oligonucleotide
  Antisense strand to SEQ ID NO: 1480758
uuugccacauccauuagaa

SEQ ID NO: 1480760 - RNA, 19 nt, Artificial Sequence
  Description of Artificial Sequence: Synthetic oligonucleotide
  Sense strand starting at position 3903 of SEQ ID NO: 1244334
aaaggauagugugucuuua

SEQ ID NO: 1480761 - RNA, 19 nt, Artificial Sequence
  Description of Artificial Sequence: Synthetic oligonucleotide
  Antisense strand to SEQ ID NO: 1480760
uaaagacacacuauccuuu

SEQ ID NO: 1480762 - RNA, 19 nt, Artificial Sequence
  Description of Artificial Sequence: Synthetic oligonucleotide
  Sense strand starting at position 3905 of SEQ ID NO: 1244334
aggauagugugucuuuaac

SEQ ID NO: 1480763 - RNA, 19 nt, Artificial Sequence
  Description of Artificial Sequence: Synthetic oligonucleotide
  Antisense strand to SEQ ID NO: 1480762
guuaaagacacacuauccu

SEQ ID NO: 1480764 - RNA, 19 nt, Artificial Sequence
  Description of Artificial Sequence: Synthetic oligonucleotide
  Sense strand starting at position 3907 of SEQ ID NO: 1244334
gauagugugucuuuaacuc

SEQ ID NO: 1480765 - RNA, 19 nt, Artificial Sequence
  Description of Artificial Sequence: Synthetic oligonucleotide
  Antisense strand to SEQ ID NO: 1480764
gaguuaaagacacacuauc

SEQ ID NO: 1480766 - RNA, 19 nt, Artificial Sequence
  Description of Artificial Sequence: Synthetic oligonucleotide
  Sense strand starting at position 3926 of SEQ ID NO: 1244334
uuaaauuguuugguccuau

SEQ ID NO: 1480767 - RNA, 19 nt, Artificial Sequence
  Description of Artificial Sequence: Synthetic oligonucleotide
  Antisense strand to SEQ ID NO: 1480766
auaggaccaaacaauuuaa

SEQ ID NO: 1480768 - RNA, 19 nt, Artificial Sequence
  Description of Artificial Sequence: Synthetic oligonucleotide
  Sense strand starting at position 3963 of SEQ ID NO: 1244334
cccuaaguagcucagauau

SEQ ID NO: 1480769 - RNA, 19 nt, Artificial Sequence
  Description of Artificial Sequence: Synthetic oligonucleotide
  Antisense strand to SEQ ID NO: 1480768
auaucugagcuacuuaggg

SEQ ID NO: 1480770 - RNA, 19 nt, Artificial Sequence
  Description of Artificial Sequence: Synthetic oligonucleotide
  Sense strand starting at position 28 of SEQ ID NO: 1244335
cgcgcuauuagauauaaug

SEQ ID NO: 1480771 - RNA, 19 nt, Artificial Sequence
  Description of Artificial Sequence: Synthetic oligonucleotide
  Antisense strand to SEQ ID NO: 1480770
cauuauaucuaauagcgcg

SEQ ID NO: 1480772 - RNA, 19 nt, Artificial Sequence
  Description of Artificial Sequence: Synthetic oligonucleotide
  Sense strand starting at position 1395 of SEQ ID NO: 1244335
cacucagagcuaugagcua

SEQ ID NO: 1480773 - RNA, 19 nt, Artificial Sequence
  Description of Artificial Sequence: Synthetic oligonucleotide
  Antisense strand to SEQ ID NO: 1480772
uagcucauagcucugagug

SEQ ID NO: 1480774 - RNA, 19 nt, Artificial Sequence
  Description of Artificial Sequence: Synthetic oligonucleotide
  Sense strand starting at position 2409 of SEQ ID NO: 1244335
aaugguaaugucugggaau

SEQ ID NO: 1480775 - RNA, 19 nt, Artificial Sequence
  Description of Artificial Sequence: Synthetic oligonucleotide
  Antisense strand to SEQ ID NO: 1480774
auucccagacauuaccauu

SEQ ID NO: 1480776 - RNA, 19 nt, Artificial Sequence
  Description of Artificial Sequence: Synthetic oligonucleotide
  Sense strand starting at position 2489 of SEQ ID NO: 1244335
auguaagaaugacuccuau

SEQ ID NO: 1480777 - RNA, 19 nt, Artificial Sequence
  Description of Artificial Sequence: Synthetic oligonucleotide
  Antisense strand to SEQ ID NO: 1480776
auaggagucauucuuacau

SEQ ID NO: 1480778 - RNA, 19 nt, Artificial Sequence
  Description of Artificial Sequence: Synthetic oligonucleotide
  Sense strand starting at position 2529 of SEQ ID NO: 1244335
guuacucaccuuugggagu

SEQ ID NO: 1480779 - RNA, 19 nt, Artificial Sequence
  Description of Artificial Sequence: Synthetic oligonucleotide
  Antisense strand to SEQ ID NO: 1480778
acucccaaaggugaguaac

SEQ ID NO: 1480780 - RNA, 19 nt, Artificial Sequence
  Description of Artificial Sequence: Synthetic oligonucleotide
  Sense strand starting at position 2568 of SEQ ID NO: 1244335
gcagaaaggauguguauga

SEQ ID NO: 1480781 - RNA, 19 nt, Artificial Sequence
  Description of Artificial Sequence: Synthetic oligonucleotide
  Antisense strand to SEQ ID NO: 1480780
ucauacacauccuuucugc

SEQ ID NO: 1480782 - RNA, 19 nt, Artificial Sequence
  Description of Artificial Sequence: Synthetic oligonucleotide
  Sense strand starting at position 2572 of SEQ ID NO: 1244335
aaaggauguguaugaagcu

SEQ ID NO: 1480783 - RNA, 19 nt, Artificial Sequence
  Description of Artificial Sequence: Synthetic oligonucleotide
  Antisense strand to SEQ ID NO: 1480782
agcuucauacacauccuuu

SEQ ID NO: 1480784 - RNA, 19 nt, Artificial Sequence
  Description of Artificial Sequence: Synthetic oligonucleotide
  Sense strand starting at position 2579 of SEQ ID NO: 1244335
guguaugaagcuuagauaa

SEQ ID NO: 1480785 - RNA, 19 nt, Artificial Sequence
  Description of Artificial Sequence: Synthetic oligonucleotide
  Antisense strand to SEQ ID NO: 1480784
uuaucuaagcuucauacac

SEQ ID NO: 1480786 - RNA, 19 nt, Artificial Sequence
  Description of Artificial Sequence: Synthetic oligonucleotide
  Sense strand starting at position 2596 of SEQ ID NO: 1244335
aauaauggcuguuucguaa

SEQ ID NO: 1480787 - RNA, 19 nt, Artificial Sequence
  Description of Artificial Sequence: Synthetic oligonucleotide
  Antisense strand to SEQ ID NO: 1480786
uuacgaaacagccauuauu

SEQ ID NO: 1480788 - RNA, 19 nt, Artificial Sequence
  Description of Artificial Sequence: Synthetic oligonucleotide
  Sense strand starting at position 2608 of SEQ ID NO: 1244335
uucguaaacuguuugagac

SEQ ID NO: 1480789 - RNA, 19 nt, Artificial Sequence
  Description of Artificial Sequence: Synthetic oligonucleotide
  Antisense strand to SEQ ID NO: 1480788
gucucaaacaguuuacgaa

SEQ ID NO: 1480790 - RNA, 19 nt, Artificial Sequence
  Description of Artificial Sequence: Synthetic oligonucleotide
  Sense strand starting at position 2694 of SEQ ID NO: 1244335
cggucuccuguuugauaaa

SEQ ID NO: 1480791 - RNA, 19 nt, Artificial Sequence
  Description of Artificial Sequence: Synthetic oligonucleotide
  Antisense strand to SEQ ID NO: 1480790
uuuaucaaacaggagaccg

SEQ ID NO: 1480792 - RNA, 19 nt, Artificial Sequence
  Description of Artificial Sequence: Synthetic oligonucleotide
  Sense strand starting at position 2711 of SEQ ID NO: 1244335
aaagaauauuggccaguau

SEQ ID NO: 1480793 - RNA, 19 nt, Artificial Sequence
  Description of Artificial Sequence: Synthetic oligonucleotide
  Antisense strand to SEQ ID NO: 1480792
auacuggccaauauucuuu

SEQ ID NO: 1480794 - RNA, 19 nt, Artificial Sequence
  Description of Artificial Sequence: Synthetic oligonucleotide
  Sense strand starting at position 2769 of SEQ ID NO: 1244335
guuucugugggcguguauu

SEQ ID NO: 1480795 - RNA, 19 nt, Artificial Sequence
  Description of Artificial Sequence: Synthetic oligonucleotide
  Antisense strand to SEQ ID NO: 1480794
aauacacgcccacagaaac

SEQ ID NO: 1480796 - RNA, 19 nt, Artificial Sequence
  Description of Artificial Sequence: Synthetic oligonucleotide
  Sense strand starting at position 2779 of SEQ ID NO: 1244335
gcguguauuggagcagguu

SEQ ID NO: 1480797 - RNA, 19 nt, Artificial Sequence
  Description of Artificial Sequence: Synthetic oligonucleotide
  Antisense strand to SEQ ID NO: 1480796
aaccugcuccaauacacgc

SEQ ID NO: 1480798 - RNA, 19 nt, Artificial Sequence
  Description of Artificial Sequence: Synthetic oligonucleotide
  Sense strand starting at position 2787 of SEQ ID NO: 1244335
uggagcagguuugucuuua

SEQ ID NO: 1480799 - RNA, 19 nt, Artificial Sequence
  Description of Artificial Sequence: Synthetic oligonucleotide
  Antisense strand to SEQ ID NO: 1480798
uaaagacaaaccugcucca

SEQ ID NO: 1480800 - RNA, 19 nt, Artificial Sequence
  Description of Artificial Sequence: Synthetic oligonucleotide
  Sense strand starting at position 2788 of SEQ ID NO: 1244335
ggagcagguuugucuuuaa

SEQ ID NO: 1480801 - RNA, 19 nt, Artificial Sequence
  Description of Artificial Sequence: Synthetic oligonucleotide
  Antisense strand to SEQ ID NO: 1480800
uuaaagacaaaccugcucc

SEQ ID NO: 1480802 - RNA, 19 nt, Artificial Sequence
  Description of Artificial Sequence: Synthetic oligonucleotide
  Sense strand starting at position 2791 of SEQ ID NO: 1244335
gcagguuugucuuuaaaug

SEQ ID NO: 1480803 - RNA, 19 nt, Artificial Sequence
  Description of Artificial Sequence: Synthetic oligonucleotide
  Antisense strand to SEQ ID NO: 1480802
cauuuaaagacaaaccugc

SEQ ID NO: 1480804 - RNA, 19 nt, Artificial Sequence
  Description of Artificial Sequence: Synthetic oligonucleotide
  Sense strand starting at position 2792 of SEQ ID NO: 1244335
cagguuugucuuuaaaugu

SEQ ID NO: 1480805 - RNA, 19 nt, Artificial Sequence
  Description of Artificial Sequence: Synthetic oligonucleotide
  Antisense strand to SEQ ID NO: 1480804
acauuuaaagacaaaccug

SEQ ID NO: 1480806 - RNA, 19 nt, Artificial Sequence
  Description of Artificial Sequence: Synthetic oligonucleotide
  Sense strand starting at position 2855 of SEQ ID NO: 1244335
guuguacugacugggacuu

SEQ ID NO: 1480807 - RNA, 19 nt, Artificial Sequence
  Description of Artificial Sequence: Synthetic oligonucleotide
  Antisense strand to SEQ ID NO: 1480806
aagucccagucaguacaac

SEQ ID NO: 1480808 - RNA, 19 nt, Artificial Sequence
  Description of Artificial Sequence: Synthetic oligonucleotide
  Sense strand starting at position 2878 of SEQ ID NO: 1244335
uucuaauggauguggcaaa

SEQ ID NO: 1480809 - RNA, 19 nt, Artificial Sequence
  Description of Artificial Sequence: Synthetic oligonucleotide
  Antisense strand to SEQ ID NO: 1480808
uuugccacauccauuagaa

SEQ ID NO: 1480810 - RNA, 19 nt, Artificial Sequence
  Description of Artificial Sequence: Synthetic oligonucleotide
  Sense strand starting at position 2967 of SEQ ID NO: 1244335
aaaggauagugugucuuua

SEQ ID NO: 1480811 - RNA, 19 nt, Artificial Sequence
  Description of Artificial Sequence: Synthetic oligonucleotide
  Antisense strand to SEQ ID NO: 1480810
uaaagacacacuauccuuu

SEQ ID NO: 1480812 - RNA, 19 nt, Artificial Sequence
  Description of Artificial Sequence: Synthetic oligonucleotide
  Sense strand starting at position 2969 of SEQ ID NO: 1244335
aggauagugugucuuuaac

SEQ ID NO: 1480813 - RNA, 19 nt, Artificial Sequence
  Description of Artificial Sequence: Synthetic oligonucleotide
  Antisense strand to SEQ ID NO: 1480812
guuaaagacacacuauccu

SEQ ID NO: 1480814 - RNA, 19 nt, Artificial Sequence
  Description of Artificial Sequence: Synthetic oligonucleotide
  Sense strand starting at position 2971 of SEQ ID NO: 1244335
gauagugugucuuuaacuc

SEQ ID NO: 1480815 - RNA, 19 nt, Artificial Sequence
  Description of Artificial Sequence: Synthetic oligonucleotide
  Antisense strand to SEQ ID NO: 1480814
gaguuaaagacacacuauc

SEQ ID NO: 1480816 - RNA, 19 nt, Artificial Sequence
  Description of Artificial Sequence: Synthetic oligonucleotide
  Sense strand starting at position 2975 of SEQ ID NO: 1244335
gugugucuuuaacucuuaa

SEQ ID NO: 1480817 - RNA, 19 nt, Artificial Sequence
  Description of Artificial Sequence: Synthetic oligonucleotide
  Antisense strand to SEQ ID NO: 1480816
uuaagaguuaaagacacac

SEQ ID NO: 1480818 - RNA, 19 nt, Artificial Sequence
  Description of Artificial Sequence: Synthetic oligonucleotide
  Sense strand starting at position 2990 of SEQ ID NO: 1244335
uuaaauuguuugguccuau

SEQ ID NO: 1480819 - RNA, 19 nt, Artificial Sequence
  Description of Artificial Sequence: Synthetic oligonucleotide
  Antisense strand to SEQ ID NO: 1480818
auaggaccaaacaauuuaa

SEQ ID NO: 1480820 - RNA, 19 nt, Artificial Sequence
  Description of Artificial Sequence: Synthetic oligonucleotide
  Sense strand starting at position 3027 of SEQ ID NO: 1244335
cccuaaguagcucagauau

SEQ ID NO: 1480821 - RNA, 19 nt, Artificial Sequence
  Description of Artificial Sequence: Synthetic oligonucleotide
  Antisense strand to SEQ ID NO: 1480820
auaucugagcuacuuaggg

SEQ ID NO: 1480822 - RNA, 19 nt, Artificial Sequence
  Description of Artificial Sequence: Synthetic oligonucleotide
  Sense strand starting at position 3113 of SEQ ID NO: 1244335
uucucugaucucgaguugu

SEQ ID NO: 1480823 - RNA, 19 nt, Artificial Sequence
  Description of Artificial Sequence: Synthetic oligonucleotide
  Antisense strand to SEQ ID NO: 1480822
acaacucgagaucagagaa

SEQ ID NO: 1480824 - RNA, 19 nt, Artificial Sequence
  Description of Artificial Sequence: Synthetic oligonucleotide
  Sense strand starting at position 3202 of SEQ ID NO: 1244335
uggccaggaauacguaaau

SEQ ID NO: 1480825 - RNA, 19 nt, Artificial Sequence
  Description of Artificial Sequence: Synthetic oligonucleotide
  Antisense strand to SEQ ID NO: 1480824
auuuacguauuccuggcca

SEQ ID NO: 1480826 - RNA, 19 nt, Artificial Sequence
  Description of Artificial Sequence: Synthetic oligonucleotide
  Sense strand starting at position 3238 of SEQ ID NO: 1244335
gaugguagccuuugugaaa

SEQ ID NO: 1480827 - RNA, 19 nt, Artificial Sequence
  Description of Artificial Sequence: Synthetic oligonucleotide
  Antisense strand to SEQ ID NO: 1480826
uuucacaaaggcuaccauc

SEQ ID NO: 1480828 - RNA, 19 nt, Artificial Sequence
  Description of Artificial Sequence: Synthetic oligonucleotide
  Sense strand starting at position 3239 of SEQ ID NO: 1244335
augguagccuuugugaaau

SEQ ID NO: 1480829 - RNA, 19 nt, Artificial Sequence
  Description of Artificial Sequence: Synthetic oligonucleotide
  Antisense strand to SEQ ID NO: 1480828
auuucacaaaggcuaccau

SEQ ID NO: 1480830 - RNA, 19 nt, Artificial Sequence
  Description of Artificial Sequence: Synthetic oligonucleotide
  Sense strand starting at position 3318 of SEQ ID NO: 1244335
ugaccagagccuuaguaag

SEQ ID NO: 1480831 - RNA, 19 nt, Artificial Sequence
  Description of Artificial Sequence: Synthetic oligonucleotide
  Antisense strand to SEQ ID NO: 1480830
cuuacuaaggcucugguca

SEQ ID NO: 1480832 - RNA, 19 nt, Artificial Sequence
  Description of Artificial Sequence: Synthetic oligonucleotide
  Sense strand starting at position 3320 of SEQ ID NO: 1244335
accagagccuuaguaagua

SEQ ID NO: 1480833 - RNA, 19 nt, Artificial Sequence
  Description of Artificial Sequence: Synthetic oligonucleotide
  Antisense strand to SEQ ID NO: 1480832
uacuuacuaaggcucuggu

SEQ ID NO: 1480834 - RNA, 19 nt, Artificial Sequence
  Description of Artificial Sequence: Synthetic oligonucleotide
  Sense strand starting at position 3356 of SEQ ID NO: 1244335
ccaugugcacuuuaaugga

SEQ ID NO: 1480835 - RNA, 19 nt, Artificial Sequence
  Description of Artificial Sequence: Synthetic oligonucleotide
  Antisense strand to SEQ ID NO: 1480834
uccauuaaagugcacaugg

SEQ ID NO: 1480836 - RNA, 19 nt, Artificial Sequence
  Description of Artificial Sequence: Synthetic oligonucleotide
  Sense strand starting at position 3361 of SEQ ID NO: 1244335
ugcacuuuaauggaaggua

SEQ ID NO: 1480837 - RNA, 19 nt, Artificial Sequence
  Description of Artificial Sequence: Synthetic oligonucleotide
  Antisense strand to SEQ ID NO: 1480836
uaccuuccauuaaagugca

SEQ ID NO: 1480838 - RNA, 19 nt, Artificial Sequence
  Description of Artificial Sequence: Synthetic oligonucleotide
  Sense strand starting at position 3453 of SEQ ID NO: 1244335
cacauaguccaucgaagaa

SEQ ID NO: 1480839 - RNA, 19 nt, Artificial Sequence
  Description of Artificial Sequence: Synthetic oligonucleotide
  Antisense strand to SEQ ID NO: 1480838
uucuucgauggacuaugug

SEQ ID NO: 1480840 - RNA, 19 nt, Artificial Sequence
  Description of Artificial Sequence: Synthetic oligonucleotide
  Sense strand starting at position 3713 of SEQ ID NO: 1244335
acagauugguaaccuaauu

SEQ ID NO: 1480841 - RNA, 19 nt, Artificial Sequence
  Description of Artificial Sequence: Synthetic oligonucleotide
  Antisense strand to SEQ ID NO: 1480840
aauuagguuaccaaucugu

SEQ ID NO: 1480842 - RNA, 19 nt, Artificial Sequence
  Description of Artificial Sequence: Synthetic oligonucleotide
  Sense strand starting at position 3787 of SEQ ID NO: 1244335
cugucaagagauugacuca

SEQ ID NO: 1480843 - RNA, 19 nt, Artificial Sequence
  Description of Artificial Sequence: Synthetic oligonucleotide
  Antisense strand to SEQ ID NO: 1480842
ugagucaaucucuugacag

SEQ ID NO: 1480844 - RNA, 19 nt, Artificial Sequence
  Description of Artificial Sequence: Synthetic oligonucleotide
  Sense strand starting at position 3790 of SEQ ID NO: 1244335
ucaagagauugacucagca

SEQ ID NO: 1480845 - RNA, 19 nt, Artificial Sequence
  Description of Artificial Sequence: Synthetic oligonucleotide
  Antisense strand to SEQ ID NO: 1480844
ugcugagucaaucucuuga

SEQ ID NO: 1480846 - RNA, 19 nt, Artificial Sequence
  Description of Artificial Sequence: Synthetic oligonucleotide
  Sense strand starting at position 3880 of SEQ ID NO: 1244335
ucuaaaugguaaucugaac

SEQ ID NO: 1480847 - RNA, 19 nt, Artificial Sequence
  Description of Artificial Sequence: Synthetic oligonucleotide
  Antisense strand to SEQ ID NO: 1480846
guucagauuaccauuuaga

SEQ ID NO: 1480848 - RNA, 19 nt, Artificial Sequence
  Description of Artificial Sequence: Synthetic oligonucleotide
  Sense strand starting at position 3942 of SEQ ID NO: 1244335
uugaaaggauuguuuauca

SEQ ID NO: 1480849 - RNA, 19 nt, Artificial Sequence
  Description of Artificial Sequence: Synthetic oligonucleotide
  Antisense strand to SEQ ID NO: 1480848
ugauaaacaauccuuucaa

SEQ ID NO: 1480850 - RNA, 19 nt, Artificial Sequence
  Description of Artificial Sequence: Synthetic oligonucleotide
  Sense strand starting at position 68 of SEQ ID NO: 1244336
cucagagucacugguguca

SEQ ID NO: 1480851 - RNA, 19 nt, Artificial Sequence
  Description of Artificial Sequence: Synthetic oligonucleotide
  Antisense strand to SEQ ID NO: 1480850
ugacaccagugacucugag

SEQ ID NO: 1480852 - RNA, 19 nt, Artificial Sequence
  Description of Artificial Sequence: Synthetic oligonucleotide
  Sense strand starting at position 102 of SEQ ID NO: 1244336
agcagcuucgaguacuuga

SEQ ID NO: 1480853 - RNA, 19 nt, Artificial Sequence
  Description of Artificial Sequence: Synthetic oligonucleotide
  Antisense strand to SEQ ID NO: 1480852
ucaaguacucgaagcugcu

SEQ ID NO: 1480854 - RNA, 19 nt, Artificial Sequence
  Description of Artificial Sequence: Synthetic oligonucleotide
  Sense strand starting at position 105 of SEQ ID NO: 1244336
agcuucgaguacuugauuu

SEQ ID NO: 1480855 - RNA, 19 nt, Artificial Sequence
  Description of Artificial Sequence: Synthetic oligonucleotide
  Antisense strand to SEQ ID NO: 1480854
aaaucaaguacucgaagcu

SEQ ID NO: 1480856 - RNA, 19 nt, Artificial Sequence
  Description of Artificial Sequence: Synthetic oligonucleotide
  Sense strand starting at position 487 of SEQ ID NO: 1244336
acaguuuccuaagcaaugu

SEQ ID NO: 1480857 - RNA, 19 nt, Artificial Sequence
  Description of Artificial Sequence: Synthetic oligonucleotide
  Antisense strand to SEQ ID NO: 1480856
acauugcuuaggaaacugu

SEQ ID NO: 1480858 - RNA, 19 nt, Artificial Sequence
  Description of Artificial Sequence: Synthetic oligonucleotide
  Sense strand starting at position 503 of SEQ ID NO: 1244336
uguagcuuugaacggauga

SEQ ID NO: 1480859 - RNA, 19 nt, Artificial Sequence
  Description of Artificial Sequence: Synthetic oligonucleotide
  Antisense strand to SEQ ID NO: 1480858
ucauccguucaaagcuaca

SEQ ID NO: 1480860 - RNA, 19 nt, Artificial Sequence
  Description of Artificial Sequence: Synthetic oligonucleotide
  Sense strand starting at position 504 of SEQ ID NO: 1244336
guagcuuugaacggaugaa

SEQ ID NO: 1480861 - RNA, 19 nt, Artificial Sequence
  Description of Artificial Sequence: Synthetic oligonucleotide
  Antisense strand to SEQ ID NO: 1480860
uucauccguucaaagcuac

SEQ ID NO: 1480862 - RNA, 19 nt, Artificial Sequence
  Description of Artificial Sequence: Synthetic oligonucleotide
  Sense strand starting at position 751 of SEQ ID NO: 1244336
aggcaaugcucaccaguaa

SEQ ID NO: 1480863 - RNA, 19 nt, Artificial Sequence
  Description of Artificial Sequence: Synthetic oligonucleotide
  Antisense strand to SEQ ID NO: 1480862
uuacuggugagcauugccu

SEQ ID NO: 1480864 - RNA, 19 nt, Artificial Sequence
  Description of Artificial Sequence: Synthetic oligonucleotide
  Sense strand starting at position 820 of SEQ ID NO: 1244336
ggccacuggucaucaggaa

SEQ ID NO: 1480865 - RNA, 19 nt, Artificial Sequence
  Description of Artificial Sequence: Synthetic oligonucleotide
  Antisense strand to SEQ ID NO: 1480864
uuccugaugaccaguggcc

SEQ ID NO: 1480866 - RNA, 19 nt, Artificial Sequence
  Description of Artificial Sequence: Synthetic oligonucleotide
  Sense strand starting at position 1093 of SEQ ID NO: 1244336
cugacaaauuggcuggauu

SEQ ID NO: 1480867 - RNA, 19 nt, Artificial Sequence
  Description of Artificial Sequence: Synthetic oligonucleotide
  Antisense strand to SEQ ID NO: 1480866
aauccagccaauuugucag

SEQ ID NO: 1480868 - RNA, 19 nt, Artificial Sequence
  Description of Artificial Sequence: Synthetic oligonucleotide
  Sense strand starting at position 1094 of SEQ ID NO: 1244336
ugacaaauuggcuggauuc

SEQ ID NO: 1480869 - RNA, 19 nt, Artificial Sequence
  Description of Artificial Sequence: Synthetic oligonucleotide
  Antisense strand to SEQ ID NO: 1480868
gaauccagccaauuuguca

SEQ ID NO: 1480870 - RNA, 19 nt, Artificial Sequence
  Description of Artificial Sequence: Synthetic oligonucleotide
  Sense strand starting at position 1166 of SEQ ID NO: 1244336
aguaacuucccagggauga

SEQ ID NO: 1480871 - RNA, 19 nt, Artificial Sequence
  Description of Artificial Sequence: Synthetic oligonucleotide
  Antisense strand to SEQ ID NO: 1480870
ucaucccugggaaguuacu

SEQ ID NO: 1480872 - RNA, 19 nt, Artificial Sequence
  Description of Artificial Sequence: Synthetic oligonucleotide
  Sense strand starting at position 1167 of SEQ ID NO: 1244336
guaacuucccagggaugau

SEQ ID NO: 1480873 - RNA, 19 nt, Artificial Sequence
  Description of Artificial Sequence: Synthetic oligonucleotide
  Antisense strand to SEQ ID NO: 1480872
aucaucccugggaaguuac

SEQ ID NO: 1480874 - RNA, 19 nt, Artificial Sequence
  Description of Artificial Sequence: Synthetic oligonucleotide
  Sense strand starting at position 1274 of SEQ ID NO: 1244336
acggaaaguuucucgguca

SEQ ID NO: 1480875 - RNA, 19 nt, Artificial Sequence
  Description of Artificial Sequence: Synthetic oligonucleotide
  Antisense strand to SEQ ID NO: 1480874
ugaccgagaaacuuuccgu

SEQ ID NO: 1480876 - RNA, 19 nt, Artificial Sequence
  Description of Artificial Sequence: Synthetic oligonucleotide
  Sense strand starting at position 1277 of SEQ ID NO: 1244336
gaaaguuucucggucacuu

SEQ ID NO: 1480877 - RNA, 19 nt, Artificial Sequence
  Description of Artificial Sequence: Synthetic oligonucleotide
  Antisense strand to SEQ ID NO: 1480876
aagugaccgagaaacuuuc

SEQ ID NO: 1480878 - RNA, 19 nt, Artificial Sequence
  Description of Artificial Sequence: Synthetic oligonucleotide
  Sense strand starting at position 1437 of SEQ ID NO: 1244336
cuuccauuacaagggaagu

SEQ ID NO: 1480879 - RNA, 19 nt, Artificial Sequence
  Description of Artificial Sequence: Synthetic oligonucleotide
  Antisense strand to SEQ ID NO: 1480878
acuucccuuguaauggaag

SEQ ID NO: 1480880 - RNA, 19 nt, Artificial Sequence
  Description of Artificial Sequence: Synthetic oligonucleotide
  Sense strand starting at position 2361 of SEQ ID NO: 1244336
ccacucugacaucgcaaau

SEQ ID NO: 1480881 - RNA, 19 nt, Artificial Sequence
  Description of Artificial Sequence: Synthetic oligonucleotide
  Antisense strand to SEQ ID NO: 1480880
auuugcgaugucagagugg

SEQ ID NO: 1480882 - RNA, 19 nt, Artificial Sequence
  Description of Artificial Sequence: Synthetic oligonucleotide
  Sense strand starting at position 2431 of SEQ ID NO: 1244336
cuugaucguucucucuaga

SEQ ID NO: 1480883 - RNA, 19 nt, Artificial Sequence
  Description of Artificial Sequence: Synthetic oligonucleotide
  Antisense strand to SEQ ID NO: 1480882
ucuagagagaacgaucaag

SEQ ID NO: 1480884 - RNA, 19 nt, Artificial Sequence
  Description of Artificial Sequence: Synthetic oligonucleotide
  Sense strand starting at position 2434 of SEQ ID NO: 1244336
gaucguucucucuagaacu

SEQ ID NO: 1480885 - RNA, 19 nt, Artificial Sequence
  Description of Artificial Sequence: Synthetic oligonucleotide
  Antisense strand to SEQ ID NO: 1480884
aguucuagagagaacgauc

SEQ ID NO: 1480886 - RNA, 19 nt, Artificial Sequence
  Description of Artificial Sequence: Synthetic oligonucleotide
  Sense strand starting at position 2436 of SEQ ID NO: 1244336
ucguucucucuagaacuua

SEQ ID NO: 1480887 - RNA, 19 nt, Artificial Sequence
  Description of Artificial Sequence: Synthetic oligonucleotide
  Antisense strand to SEQ ID NO: 1480886
uaaguucuagagagaacga

SEQ ID NO: 1480888 - RNA, 19 nt, Artificial Sequence
  Description of Artificial Sequence: Synthetic oligonucleotide
  Sense strand starting at position 2507 of SEQ ID NO: 1244336
gucugucuccaccagaauc

SEQ ID NO: 1480889 - RNA, 19 nt, Artificial Sequence
  Description of Artificial Sequence: Synthetic oligonucleotide
  Antisense strand to SEQ ID NO: 1480888
gauucugguggagacagac

SEQ ID NO: 1480890 - RNA, 19 nt, Artificial Sequence
  Description of Artificial Sequence: Synthetic oligonucleotide
  Sense strand starting at position 2594 of SEQ ID NO: 1244336
ucggaaauggcaugaccuu

SEQ ID NO: 1480891 - RNA, 19 nt, Artificial Sequence
  Description of Artificial Sequence: Synthetic oligonucleotide
  Antisense strand to SEQ ID NO: 1480890
aaggucaugccauuuccga

SEQ ID NO: 1480892 - RNA, 19 nt, Artificial Sequence
  Description of Artificial Sequence: Synthetic oligonucleotide
  Sense strand starting at position 2603 of SEQ ID NO: 1244336
gcaugaccuugggugacau

SEQ ID NO: 1480893 - RNA, 19 nt, Artificial Sequence
  Description of Artificial Sequence: Synthetic oligonucleotide
  Antisense strand to SEQ ID NO: 1480892
augucacccaaggucaugc

SEQ ID NO: 1480894 - RNA, 19 nt, Artificial Sequence
  Description of Artificial Sequence: Synthetic oligonucleotide
  Sense strand starting at position 2729 of SEQ ID NO: 1244336
uauguaugugcugcacagu

SEQ ID NO: 1480895 - RNA, 19 nt, Artificial Sequence
  Description of Artificial Sequence: Synthetic oligonucleotide
  Antisense strand to SEQ ID NO: 1480894
acugugcagcacauacaua

SEQ ID NO: 1480896 - RNA, 19 nt, Artificial Sequence
  Description of Artificial Sequence: Synthetic oligonucleotide
  Sense strand starting at position 2946 of SEQ ID NO: 1244336
gccaccuggauuggagaua

SEQ ID NO: 1480897 - RNA, 19 nt, Artificial Sequence
  Description of Artificial Sequence: Synthetic oligonucleotide
  Antisense strand to SEQ ID NO: 1480896
uaucuccaauccagguggc

SEQ ID NO: 1480898 - RNA, 19 nt, Artificial Sequence
  Description of Artificial Sequence: Synthetic oligonucleotide
  Sense strand starting at position 2947 of SEQ ID NO: 1244336
ccaccuggauuggagauaa

SEQ ID NO: 1480899 - RNA, 19 nt, Artificial Sequence
  Description of Artificial Sequence: Synthetic oligonucleotide
  Antisense strand to SEQ ID NO: 1480898
uuaucuccaauccaggugg

SEQ ID NO: 1480900 - RNA, 19 nt, Artificial Sequence
  Description of Artificial Sequence: Synthetic oligonucleotide
  Sense strand starting at position 2991 of SEQ ID NO: 1244336
gcuggaacaggcuauaaua

SEQ ID NO: 1480901 - RNA, 19 nt, Artificial Sequence
  Description of Artificial Sequence: Synthetic oligonucleotide
  Antisense strand to SEQ ID NO: 1480900
uauuauagccuguuccagc

SEQ ID NO: 1480902 - RNA, 19 nt, Artificial Sequence
  Description of Artificial Sequence: Synthetic oligonucleotide
  Sense strand starting at position 3322 of SEQ ID NO: 1244336
uagagaugccaguagucca

SEQ ID NO: 1480903 - RNA, 19 nt, Artificial Sequence
  Description of Artificial Sequence: Synthetic oligonucleotide
  Antisense strand to SEQ ID NO: 1480902
uggacuacuggcaucucua

SEQ ID NO: 1480904 - RNA, 19 nt, Artificial Sequence
  Description of Artificial Sequence: Synthetic oligonucleotide
  Sense strand starting at position 3414 of SEQ ID NO: 1244336
cauacaagguuugcucaga

SEQ ID NO: 1480905 - RNA, 19 nt, Artificial Sequence
  Description of Artificial Sequence: Synthetic oligonucleotide
  Antisense strand to SEQ ID NO: 1480904
ucugagcaaaccuuguaug

SEQ ID NO: 1480906 - RNA, 19 nt, Artificial Sequence
  Description of Artificial Sequence: Synthetic oligonucleotide
  Sense strand starting at position 3473 of SEQ ID NO: 1244336
acacaugucuauguguaag

SEQ ID NO: 1480907 - RNA, 19 nt, Artificial Sequence
  Description of Artificial Sequence: Synthetic oligonucleotide
  Antisense strand to SEQ ID NO: 1480906
cuuacacauagacaugugu

SEQ ID NO: 1480908 - RNA, 19 nt, Artificial Sequence
  Description of Artificial Sequence: Synthetic oligonucleotide
  Sense strand starting at position 3476 of SEQ ID NO: 1244336
caugucuauguguaaggga

SEQ ID NO: 1480909 - RNA, 19 nt, Artificial Sequence
  Description of Artificial Sequence: Synthetic oligonucleotide
  Antisense strand to SEQ ID NO: 1480908
ucccuuacacauagacaug

SEQ ID NO: 1480910 - RNA, 19 nt, Artificial Sequence
  Description of Artificial Sequence: Synthetic oligonucleotide
  Sense strand starting at position 3491 of SEQ ID NO: 1244336
gggaauucggccuaugacu

SEQ ID NO: 1480911 - RNA, 19 nt, Artificial Sequence
  Description of Artificial Sequence: Synthetic oligonucleotide
  Antisense strand to SEQ ID NO: 1480910
agucauaggccgaauuccc

SEQ ID NO: 1480912 - RNA, 19 nt, Artificial Sequence
  Description of Artificial Sequence: Synthetic oligonucleotide
  Sense strand starting at position 3579 of SEQ ID NO: 1244336
cugguaaacucugcagaca

SEQ ID NO: 1480913 - RNA, 19 nt, Artificial Sequence
  Description of Artificial Sequence: Synthetic oligonucleotide
  Antisense strand to SEQ ID NO: 1480912
ugucugcagaguuuaccag

SEQ ID NO: 1480914 - RNA, 19 nt, Artificial Sequence
  Description of Artificial Sequence: Synthetic oligonucleotide
  Sense strand starting at position 3606 of SEQ ID NO: 1244336
aaaccuaaugauuggugau

SEQ ID NO: 1480915 - RNA, 19 nt, Artificial Sequence
  Description of Artificial Sequence: Synthetic oligonucleotide
  Antisense strand to SEQ ID NO: 1480914
aucaccaaucauuagguuu

SEQ ID NO: 1480916 - RNA, 19 nt, Artificial Sequence
  Description of Artificial Sequence: Synthetic oligonucleotide
  Sense strand starting at position 3608 of SEQ ID NO: 1244336
accuaaugauuggugauga

SEQ ID NO: 1480917 - RNA, 19 nt, Artificial Sequence
  Description of Artificial Sequence: Synthetic oligonucleotide
  Antisense strand to SEQ ID NO: 1480916
ucaucaccaaucauuaggu

SEQ ID NO: 1480918 - RNA, 19 nt, Artificial Sequence
  Description of Artificial Sequence: Synthetic oligonucleotide
  Sense strand starting at position 3618 of SEQ ID NO: 1244336
uggugaugaaauugguaug

SEQ ID NO: 1480919 - RNA, 19 nt, Artificial Sequence
  Description of Artificial Sequence: Synthetic oligonucleotide
  Antisense strand to SEQ ID NO: 1480918
cauaccaauuucaucacca

SEQ ID NO: 1480920 - RNA, 19 nt, Artificial Sequence
  Description of Artificial Sequence: Synthetic oligonucleotide
  Sense strand starting at position 3619 of SEQ ID NO: 1244336
ggugaugaaauugguauga

SEQ ID NO: 1480921 - RNA, 19 nt, Artificial Sequence
  Description of Artificial Sequence: Synthetic oligonucleotide
  Antisense strand to SEQ ID NO: 1480920
ucauaccaauuucaucacc

SEQ ID NO: 1480922 - RNA, 19 nt, Artificial Sequence
  Description of Artificial Sequence: Synthetic oligonucleotide
  Sense strand starting at position 3629 of SEQ ID NO: 1244336
uugguaugaauccguuuau

SEQ ID NO: 1480923 - RNA, 19 nt, Artificial Sequence
  Description of Artificial Sequence: Synthetic oligonucleotide
  Antisense strand to SEQ ID NO: 1480922
auaaacggauucauaccaa

SEQ ID NO: 1480924 - RNA, 19 nt, Artificial Sequence
  Description of Artificial Sequence: Synthetic oligonucleotide
  Sense strand starting at position 3630 of SEQ ID NO: 1244336
ugguaugaauccguuuaua

SEQ ID NO: 1480925 - RNA, 19 nt, Artificial Sequence
  Description of Artificial Sequence: Synthetic oligonucleotide
  Antisense strand to SEQ ID NO: 1480924
uauaaacggauucauacca

SEQ ID NO: 1480926 - RNA, 19 nt, Artificial Sequence
  Description of Artificial Sequence: Synthetic oligonucleotide
  Sense strand starting at position 3675 of SEQ ID NO: 1244336
ucuagucuccuccagguaa

SEQ ID NO: 1480927 - RNA, 19 nt, Artificial Sequence
  Description of Artificial Sequence: Synthetic oligonucleotide
  Antisense strand to SEQ ID NO: 1480926
uuaccuggaggagacuaga

SEQ ID NO: 1480928 - RNA, 19 nt, Artificial Sequence
  Description of Artificial Sequence: Synthetic oligonucleotide
  Sense strand starting at position 3882 of SEQ ID NO: 1244336
cuccaaugugccuggacau

SEQ ID NO: 1480929 - RNA, 19 nt, Artificial Sequence
  Description of Artificial Sequence: Synthetic oligonucleotide
  Antisense strand to SEQ ID NO: 1480928
auguccaggcacauuggag

SEQ ID NO: 1480930 - RNA, 19 nt, Artificial Sequence
  Description of Artificial Sequence: Synthetic oligonucleotide
  Sense strand starting at position 180 of SEQ ID NO: 1244337
uuccaaucgcgccaggaaa

SEQ ID NO: 1480931 - RNA, 19 nt, Artificial Sequence
  Description of Artificial Sequence: Synthetic oligonucleotide
  Antisense strand to SEQ ID NO: 1480930
uuuccuggcgcgauuggaa

SEQ ID NO: 1480932 - RNA, 19 nt, Artificial Sequence
  Description of Artificial Sequence: Synthetic oligonucleotide
  Sense strand starting at position 1035 of SEQ ID NO: 1244337
gggcgaauccugggaugag

SEQ ID NO: 1480933 - RNA, 19 nt, Artificial Sequence
  Description of Artificial Sequence: Synthetic oligonucleotide
  Antisense strand to SEQ ID NO: 1480932
cucaucccaggauucgccc

SEQ ID NO: 1480934 - RNA, 19 nt, Artificial Sequence
  Description of Artificial Sequence: Synthetic oligonucleotide
  Sense strand starting at position 1051 of SEQ ID NO: 1244337
gagcgaguccucgcucuaa

SEQ ID NO: 1480935 - RNA, 19 nt, Artificial Sequence
  Description of Artificial Sequence: Synthetic oligonucleotide
  Antisense strand to SEQ ID NO: 1480934
uuagagcgaggacucgcuc

SEQ ID NO: 1480936 - RNA, 19 nt, Artificial Sequence
  Description of Artificial Sequence: Synthetic oligonucleotide
  Sense strand starting at position 1053 of SEQ ID NO: 1244337
gcgaguccucgcucuaauc

SEQ ID NO: 1480937 - RNA, 19 nt, Artificial Sequence
  Description of Artificial Sequence: Synthetic oligonucleotide
  Antisense strand to SEQ ID NO: 1480936
gauuagagcgaggacucgc

SEQ ID NO: 1480938 - RNA, 19 nt, Artificial Sequence
  Description of Artificial Sequence: Synthetic oligonucleotide
  Sense strand starting at position 1537 of SEQ ID NO: 1244337
acuugaacguucgcaggaa

SEQ ID NO: 1480939 - RNA, 19 nt, Artificial Sequence
  Description of Artificial Sequence: Synthetic oligonucleotide
  Antisense strand to SEQ ID NO: 1480938
uuccugcgaacguucaagu

SEQ ID NO: 1480940 - RNA, 19 nt, Artificial Sequence
  Description of Artificial Sequence: Synthetic oligonucleotide
  Sense strand starting at position 2619 of SEQ ID NO: 1244337
cacgauuucgcuuggcaac

SEQ ID NO: 1480941 - RNA, 19 nt, Artificial Sequence
  Description of Artificial Sequence: Synthetic oligonucleotide
  Antisense strand to SEQ ID NO: 1480940
guugccaagcgaaaucgug

SEQ ID NO: 1480942 - RNA, 19 nt, Artificial Sequence
  Description of Artificial Sequence: Synthetic oligonucleotide
  Sense strand starting at position 2620 of SEQ ID NO: 1244337
acgauuucgcuuggcaaca

SEQ ID NO: 1480943 - RNA, 19 nt, Artificial Sequence
  Description of Artificial Sequence: Synthetic oligonucleotide
  Antisense strand to SEQ ID NO: 1480942
uguugccaagcgaaaucgu

SEQ ID NO: 1480944 - RNA, 19 nt, Artificial Sequence
  Description of Artificial Sequence: Synthetic oligonucleotide
  Sense strand starting at position 2687 of SEQ ID NO: 1244337
uuugcuuacugaucugagu

SEQ ID NO: 1480945 - RNA, 19 nt, Artificial Sequence
  Description of Artificial Sequence: Synthetic oligonucleotide
  Antisense strand to SEQ ID NO: 1480944
acucagaucaguaagcaaa

SEQ ID NO: 1480946 - RNA, 19 nt, Artificial Sequence
  Description of Artificial Sequence: Synthetic oligonucleotide
  Sense strand starting at position 2813 of SEQ ID NO: 1244337
gucucagagucuccauuau

SEQ ID NO: 1480947 - RNA, 19 nt, Artificial Sequence
  Description of Artificial Sequence: Synthetic oligonucleotide
  Antisense strand to SEQ ID NO: 1480946
auaauggagacucugagac

SEQ ID NO: 1480948 - RNA, 19 nt, Artificial Sequence
  Description of Artificial Sequence: Synthetic oligonucleotide
  Sense strand starting at position 2887 of SEQ ID NO: 1244337
gaucucaugucgucucuua

SEQ ID NO: 1480949 - RNA, 19 nt, Artificial Sequence
  Description of Artificial Sequence: Synthetic oligonucleotide
  Antisense strand to SEQ ID NO: 1480948
uaagagacgacaugagauc

SEQ ID NO: 1480950 - RNA, 19 nt, Artificial Sequence
  Description of Artificial Sequence: Synthetic oligonucleotide
  Sense strand starting at position 2951 of SEQ ID NO: 1244337
ggagauguguuugcaguug

SEQ ID NO: 1480951 - RNA, 19 nt, Artificial Sequence
  Description of Artificial Sequence: Synthetic oligonucleotide
  Antisense strand to SEQ ID NO: 1480950
caacugcaaacacaucucc

SEQ ID NO: 1480952 - RNA, 19 nt, Artificial Sequence
  Description of Artificial Sequence: Synthetic oligonucleotide
  Sense strand starting at position 3008 of SEQ ID NO: 1244337
gaagaaagcucuccggcuu

SEQ ID NO: 1480953 - RNA, 19 nt, Artificial Sequence
  Description of Artificial Sequence: Synthetic oligonucleotide
  Antisense strand to SEQ ID NO: 1480952
aagccggagagcuuucuuc

SEQ ID NO: 1480954 - RNA, 19 nt, Artificial Sequence
  Description of Artificial Sequence: Synthetic oligonucleotide
  Sense strand starting at position 3031 of SEQ ID NO: 1244337
agcacuucccgaggucaua

SEQ ID NO: 1480955 - RNA, 19 nt, Artificial Sequence
  Description of Artificial Sequence: Synthetic oligonucleotide
  Antisense strand to SEQ ID NO: 1480954
uaugaccucgggaagugcu

SEQ ID NO: 1480956 - RNA, 19 nt, Artificial Sequence
  Description of Artificial Sequence: Synthetic oligonucleotide
  Sense strand starting at position 3073 of SEQ ID NO: 1244337
ugcccaaagccucagucau

SEQ ID NO: 1480957 - RNA, 19 nt, Artificial Sequence
  Description of Artificial Sequence: Synthetic oligonucleotide
  Antisense strand to SEQ ID NO: 1480956
augacugaggcuuugggca

SEQ ID NO: 1480958 - RNA, 19 nt, Artificial Sequence
  Description of Artificial Sequence: Synthetic oligonucleotide
  Sense strand starting at position 3094 of SEQ ID NO: 1244337
gucaaaugacucugagggu

SEQ ID NO: 1480959 - RNA, 19 nt, Artificial Sequence
  Description of Artificial Sequence: Synthetic oligonucleotide
  Antisense strand to SEQ ID NO: 1480958
acccucagagucauuugac

SEQ ID NO: 1480960 - RNA, 19 nt, Artificial Sequence
  Description of Artificial Sequence: Synthetic oligonucleotide
  Sense strand starting at position 3144 of SEQ ID NO: 1244337
ggcuuaugcgaggaggaga

SEQ ID NO: 1480961 - RNA, 19 nt, Artificial Sequence
  Description of Artificial Sequence: Synthetic oligonucleotide
  Antisense strand to SEQ ID NO: 1480960
ucuccuccucgcauaagcc

SEQ ID NO: 1480962 - RNA, 19 nt, Artificial Sequence
  Description of Artificial Sequence: Synthetic oligonucleotide
  Sense strand starting at position 3257 of SEQ ID NO: 1244337
gccauuacucacuggccau

SEQ ID NO: 1480963 - RNA, 19 nt, Artificial Sequence
  Description of Artificial Sequence: Synthetic oligonucleotide
  Antisense strand to SEQ ID NO: 1480962
auggccagugaguaauggc

SEQ ID NO: 1480964 - RNA, 19 nt, Artificial Sequence
  Description of Artificial Sequence: Synthetic oligonucleotide
  Sense strand starting at position 3327 of SEQ ID NO: 1244337
ugaguuccauuaucucacu

SEQ ID NO: 1480965 - RNA, 19 nt, Artificial Sequence
  Description of Artificial Sequence: Synthetic oligonucleotide
  Antisense strand to SEQ ID NO: 1480964
agugagauaauggaacuca

SEQ ID NO: 1480966 - RNA, 19 nt, Artificial Sequence
  Description of Artificial Sequence: Synthetic oligonucleotide
  Sense strand starting at position 3372 of SEQ ID NO: 1244337
gggugauaaauugguguua

SEQ ID NO: 1480967 - RNA, 19 nt, Artificial Sequence
  Description of Artificial Sequence: Synthetic oligonucleotide
  Antisense strand to SEQ ID NO: 1480966
uaacaccaauuuaucaccc

SEQ ID NO: 1480968 - RNA, 19 nt, Artificial Sequence
  Description of Artificial Sequence: Synthetic oligonucleotide
  Sense strand starting at position 3384 of SEQ ID NO: 1244337
gguguuagcagauauaaug

SEQ ID NO: 1480969 - RNA, 19 nt, Artificial Sequence
  Description of Artificial Sequence: Synthetic oligonucleotide
  Antisense strand to SEQ ID NO: 1480968
cauuauaucugcuaacacc

SEQ ID NO: 1480970 - RNA, 19 nt, Artificial Sequence
  Description of Artificial Sequence: Synthetic oligonucleotide
  Sense strand starting at position 3418 of SEQ ID NO: 1244337
guaacaaauuugcauugaa

SEQ ID NO: 1480971 - RNA, 19 nt, Artificial Sequence
  Description of Artificial Sequence: Synthetic oligonucleotide
  Antisense strand to SEQ ID NO: 1480970
uucaaugcaaauuuguuac

SEQ ID NO: 1480972 - RNA, 19 nt, Artificial Sequence
  Description of Artificial Sequence: Synthetic oligonucleotide
  Sense strand starting at position 3452 of SEQ ID NO: 1244337
cgugccuuugugcagaaga

SEQ ID NO: 1480973 - RNA, 19 nt, Artificial Sequence
  Description of Artificial Sequence: Synthetic oligonucleotide
  Antisense strand to SEQ ID NO: 1480972
ucuucugcacaaaggcacg

SEQ ID NO: 1480974 - RNA, 19 nt, Artificial Sequence
  Description of Artificial Sequence: Synthetic oligonucleotide
  Sense strand starting at position 3454 of SEQ ID NO: 1244337
ugccuuugugcagaagagu

SEQ ID NO: 1480975 - RNA, 19 nt, Artificial Sequence
  Description of Artificial Sequence: Synthetic oligonucleotide
  Antisense strand to SEQ ID NO: 1480974
acucuucugcacaaaggca

SEQ ID NO: 1480976 - RNA, 19 nt, Artificial Sequence
  Description of Artificial Sequence: Synthetic oligonucleotide
  Sense strand starting at position 3460 of SEQ ID NO: 1244337
ugugcagaagagugaugaa

SEQ ID NO: 1480977 - RNA, 19 nt, Artificial Sequence
  Description of Artificial Sequence: Synthetic oligonucleotide
  Antisense strand to SEQ ID NO: 1480976
uucaucacucuucugcaca

SEQ ID NO: 1480978 - RNA, 19 nt, Artificial Sequence
  Description of Artificial Sequence: Synthetic oligonucleotide
  Sense strand starting at position 3473 of SEQ ID NO: 1244337
gaugaaugguggccggaaa

SEQ ID NO: 1480979 - RNA, 19 nt, Artificial Sequence
  Description of Artificial Sequence: Synthetic oligonucleotide
  Antisense strand to SEQ ID NO: 1480978
uuuccggccaccauucauc

SEQ ID NO: 1480980 - RNA, 19 nt, Artificial Sequence
  Description of Artificial Sequence: Synthetic oligonucleotide
  Sense strand starting at position 3474 of SEQ ID NO: 1244337
augaaugguggccggaaau

SEQ ID NO: 1480981 - RNA, 19 nt, Artificial Sequence
  Description of Artificial Sequence: Synthetic oligonucleotide
  Antisense strand to SEQ ID NO: 1480980
auuuccggccaccauucau

SEQ ID NO: 1480982 - RNA, 19 nt, Artificial Sequence
  Description of Artificial Sequence: Synthetic oligonucleotide
  Sense strand starting at position 3485 of SEQ ID NO: 1244337
ccggaaauuugggcaucgu

SEQ ID NO: 1480983 - RNA, 19 nt, Artificial Sequence
  Description of Artificial Sequence: Synthetic oligonucleotide
  Antisense strand to SEQ ID NO: 1480982
acgaugcccaaauuuccgg

SEQ ID NO: 1480984 - RNA, 19 nt, Artificial Sequence
  Description of Artificial Sequence: Synthetic oligonucleotide
  Sense strand starting at position 3518 of SEQ ID NO: 1244337
ggagauguuggagggcaga

SEQ ID NO: 1480985 - RNA, 19 nt, Artificial Sequence
  Description of Artificial Sequence: Synthetic oligonucleotide
  Antisense strand to SEQ ID NO: 1480984
ucugcccuccaacaucucc

SEQ ID NO: 1480986 - RNA, 19 nt, Artificial Sequence
  Description of Artificial Sequence: Synthetic oligonucleotide
  Sense strand starting at position 3540 of SEQ ID NO: 1244337
cucugccaggccuguaaau

SEQ ID NO: 1480987 - RNA, 19 nt, Artificial Sequence
  Description of Artificial Sequence: Synthetic oligonucleotide
  Antisense strand to SEQ ID NO: 1480986
auuuacaggccuggcagag

SEQ ID NO: 1480988 - RNA, 19 nt, Artificial Sequence
  Description of Artificial Sequence: Synthetic oligonucleotide
  Sense strand starting at position 3587 of SEQ ID NO: 1244337
gccacaaauccuggcaaua

SEQ ID NO: 1480989 - RNA, 19 nt, Artificial Sequence
  Description of Artificial Sequence: Synthetic oligonucleotide
  Antisense strand to SEQ ID NO: 1480988
uauugccaggauuuguggc

SEQ ID NO: 1480990 - RNA, 19 nt, Artificial Sequence
  Description of Artificial Sequence: Synthetic oligonucleotide
  Sense strand starting at position 3599 of SEQ ID NO: 1244337
ggcaauaagccauaucuac

SEQ ID NO: 1480991 - RNA, 19 nt, Artificial Sequence
  Description of Artificial Sequence: Synthetic oligonucleotide
  Antisense strand to SEQ ID NO: 1480990
guagauauggcuuauugcc

SEQ ID NO: 1480992 - RNA, 19 nt, Artificial Sequence
  Description of Artificial Sequence: Synthetic oligonucleotide
  Sense strand starting at position 3626 of SEQ ID NO: 1244337
augaaaugguccuucugau

SEQ ID NO: 1480993 - RNA, 19 nt, Artificial Sequence
  Description of Artificial Sequence: Synthetic oligonucleotide
  Antisense strand to SEQ ID NO: 1480992
aucagaaggaccauuucau

SEQ ID NO: 1480994 - RNA, 19 nt, Artificial Sequence
  Description of Artificial Sequence: Synthetic oligonucleotide
  Sense strand starting at position 3644 of SEQ ID NO: 1244337
uuaggugucucucuucuga

SEQ ID NO: 1480995 - RNA, 19 nt, Artificial Sequence
  Description of Artificial Sequence: Synthetic oligonucleotide
  Antisense strand to SEQ ID NO: 1480994
ucagaagagagacaccuaa

SEQ ID NO: 1480996 - RNA, 19 nt, Artificial Sequence
  Description of Artificial Sequence: Synthetic oligonucleotide
  Sense strand starting at position 3646 of SEQ ID NO: 1244337
aggugucucucuucugauu

SEQ ID NO: 1480997 - RNA, 19 nt, Artificial Sequence
  Description of Artificial Sequence: Synthetic oligonucleotide
  Antisense strand to SEQ ID NO: 1480996
aaucagaagagagacaccu

SEQ ID NO: 1480998 - RNA, 19 nt, Artificial Sequence
  Description of Artificial Sequence: Synthetic oligonucleotide
  Sense strand starting at position 3667 of SEQ ID NO: 1244337
ggguucuucugauugagua

SEQ ID NO: 1480999 - RNA, 19 nt, Artificial Sequence
  Description of Artificial Sequence: Synthetic oligonucleotide
  Antisense strand to SEQ ID NO: 1480998
uacucaaucagaagaaccc

SEQ ID NO: 1481000 - RNA, 19 nt, Artificial Sequence
  Description of Artificial Sequence: Synthetic oligonucleotide
  Sense strand starting at position 3668 of SEQ ID NO: 1244337
gguucuucugauugaguag

SEQ ID NO: 1481001 - RNA, 19 nt, Artificial Sequence
  Description of Artificial Sequence: Synthetic oligonucleotide
  Antisense strand to SEQ ID NO: 1481000
cuacucaaucagaagaacc

SEQ ID NO: 1481002 - RNA, 19 nt, Artificial Sequence
  Description of Artificial Sequence: Synthetic oligonucleotide
  Sense strand starting at position 3701 of SEQ ID NO: 1244337
auuuauaucugguugccau

SEQ ID NO: 1481003 - RNA, 19 nt, Artificial Sequence
  Description of Artificial Sequence: Synthetic oligonucleotide
  Antisense strand to SEQ ID NO: 1481002
auggcaaccagauauaaau

SEQ ID NO: 1481004 - RNA, 19 nt, Artificial Sequence
  Description of Artificial Sequence: Synthetic oligonucleotide
  Sense strand starting at position 3702 of SEQ ID NO: 1244337
uuuauaucugguugccauu

SEQ ID NO: 1481005 - RNA, 19 nt, Artificial Sequence
  Description of Artificial Sequence: Synthetic oligonucleotide
  Antisense strand to SEQ ID NO: 1481004
aauggcaaccagauauaaa

SEQ ID NO: 1481006 - RNA, 19 nt, Artificial Sequence
  Description of Artificial Sequence: Synthetic oligonucleotide
  Sense strand starting at position 3887 of SEQ ID NO: 1244337
agaucuggacuuugaaguu

SEQ ID NO: 1481007 - RNA, 19 nt, Artificial Sequence
  Description of Artificial Sequence: Synthetic oligonucleotide
  Antisense strand to SEQ ID NO: 1481006
aacuucaaaguccagaucu

SEQ ID NO: 1481008 - RNA, 19 nt, Artificial Sequence
  Description of Artificial Sequence: Synthetic oligonucleotide
  Sense strand starting at position 3966 of SEQ ID NO: 1244337
gaggacagccagugacuuu

SEQ ID NO: 1481009 - RNA, 19 nt, Artificial Sequence
  Description of Artificial Sequence: Synthetic oligonucleotide
  Antisense strand to SEQ ID NO: 1481008
aaagucacuggcuguccuc

SEQ ID NO: 1481010 - RNA, 19 nt, Artificial Sequence
  Description of Artificial Sequence: Synthetic oligonucleotide
  Sense strand starting at position 133 of SEQ ID NO: 1244338
guuuaugaaucucugucua

SEQ ID NO: 1481011 - RNA, 19 nt, Artificial Sequence
  Description of Artificial Sequence: Synthetic oligonucleotide
  Antisense strand to SEQ ID NO: 1481010
uagacagagauucauaaac

SEQ ID NO: 1481012 - RNA, 19 nt, Artificial Sequence
  Description of Artificial Sequence: Synthetic oligonucleotide
  Sense strand starting at position 340 of SEQ ID NO: 1244338
cgacacauccauuaaguau

SEQ ID NO: 1481013 - RNA, 19 nt, Artificial Sequence
  Description of Artificial Sequence: Synthetic oligonucleotide
  Antisense strand to SEQ ID NO: 1481012
auacuuaauggaugugucg

SEQ ID NO: 1481014 - RNA, 19 nt, Artificial Sequence
  Description of Artificial Sequence: Synthetic oligonucleotide
  Sense strand starting at position 360 of SEQ ID NO: 1244338
gauggagugcucgccguuu

SEQ ID NO: 1481015 - RNA, 19 nt, Artificial Sequence
  Description of Artificial Sequence: Synthetic oligonucleotide
  Antisense strand to SEQ ID NO: 1481014
aaacggcgagcacuccauc

SEQ ID NO: 1481016 - RNA, 19 nt, Artificial Sequence
  Description of Artificial Sequence: Synthetic oligonucleotide
  Sense strand starting at position 364 of SEQ ID NO: 1244338
gagugcucgccguuugaca

SEQ ID NO: 1481017 - RNA, 19 nt, Artificial Sequence
  Description of Artificial Sequence: Synthetic oligonucleotide
  Antisense strand to SEQ ID NO: 1481016
ugucaaacggcgagcacuc

SEQ ID NO: 1481018 - RNA, 19 nt, Artificial Sequence
  Description of Artificial Sequence: Synthetic oligonucleotide
  Sense strand starting at position 495 of SEQ ID NO: 1244338
ugaggaaucucugcaaguc

SEQ ID NO: 1481019 - RNA, 19 nt, Artificial Sequence
  Description of Artificial Sequence: Synthetic oligonucleotide
  Antisense strand to SEQ ID NO: 1481018
gacuugcagagauuccuca

SEQ ID NO: 1481020 - RNA, 19 nt, Artificial Sequence
  Description of Artificial Sequence: Synthetic oligonucleotide
  Sense strand starting at position 496 of SEQ ID NO: 1244338
gaggaaucucugcaaguca

SEQ ID NO: 1481021 - RNA, 19 nt, Artificial Sequence
  Description of Artificial Sequence: Synthetic oligonucleotide
  Antisense strand to SEQ ID NO: 1481020
ugacuugcagagauuccuc

SEQ ID NO: 1481022 - RNA, 19 nt, Artificial Sequence
  Description of Artificial Sequence: Synthetic oligonucleotide
  Sense strand starting at position 507 of SEQ ID NO: 1244338
gcaagucagagacgggaua

SEQ ID NO: 1481023 - RNA, 19 nt, Artificial Sequence
  Description of Artificial Sequence: Synthetic oligonucleotide
  Antisense strand to SEQ ID NO: 1481022
uaucccgucucugacuugc

SEQ ID NO: 1481024 - RNA, 19 nt, Artificial Sequence
  Description of Artificial Sequence: Synthetic oligonucleotide
  Sense strand starting at position 549 of SEQ ID NO: 1244338
augacuaauaagcgugaga

SEQ ID NO: 1481025 - RNA, 19 nt, Artificial Sequence
  Description of Artificial Sequence: Synthetic oligonucleotide
  Antisense strand to SEQ ID NO: 1481024
ucucacgcuuauuagucau

SEQ ID NO: 1481026 - RNA, 19 nt, Artificial Sequence
  Description of Artificial Sequence: Synthetic oligonucleotide
  Sense strand starting at position 551 of SEQ ID NO: 1244338
gacuaauaagcgugagauu

SEQ ID NO: 1481027 - RNA, 19 nt, Artificial Sequence
  Description of Artificial Sequence: Synthetic oligonucleotide
  Antisense strand to SEQ ID NO: 1481026
aaucucacgcuuauuaguc

SEQ ID NO: 1481028 - RNA, 19 nt, Artificial Sequence
  Description of Artificial Sequence: Synthetic oligonucleotide
  Sense strand starting at position 552 of SEQ ID NO: 1244338
acuaauaagcgugagauuc

SEQ ID NO: 1481029 - RNA, 19 nt, Artificial Sequence
  Description of Artificial Sequence: Synthetic oligonucleotide
  Antisense strand to SEQ ID NO: 1481028
gaaucucacgcuuauuagu

SEQ ID NO: 1481030 - RNA, 19 nt, Artificial Sequence
  Description of Artificial Sequence: Synthetic oligonucleotide
  Sense strand starting at position 624 of SEQ ID NO: 1244338
aucuaaugaugagaugaca

SEQ ID NO: 1481031 - RNA, 19 nt, Artificial Sequence
  Description of Artificial Sequence: Synthetic oligonucleotide
  Antisense strand to SEQ ID NO: 1481030
ugucaucucaucauuagau

SEQ ID NO: 1481032 - RNA, 19 nt, Artificial Sequence
  Description of Artificial Sequence: Synthetic oligonucleotide
  Sense strand starting at position 687 of SEQ ID NO: 1244338
uauuuaacuugggaugucu

SEQ ID NO: 1481033 - RNA, 19 nt, Artificial Sequence
  Description of Artificial Sequence: Synthetic oligonucleotide
  Antisense strand to SEQ ID NO: 1481032
agacaucccaaguuaaaua

SEQ ID NO: 1481034 - RNA, 19 nt, Artificial Sequence
  Description of Artificial Sequence: Synthetic oligonucleotide
  Sense strand starting at position 823 of SEQ ID NO: 1244338
cgaacaguuccagaaaccu

SEQ ID NO: 1481035 - RNA, 19 nt, Artificial Sequence
  Description of Artificial Sequence: Synthetic oligonucleotide
  Antisense strand to SEQ ID NO: 1481034
agguuucuggaacuguucg

SEQ ID NO: 1481036 - RNA, 19 nt, Artificial Sequence
  Description of Artificial Sequence: Synthetic oligonucleotide
  Sense strand starting at position 1024 of SEQ ID NO: 1244338
caaccaugcuggguaaugu

SEQ ID NO: 1481037 - RNA, 19 nt, Artificial Sequence
  Description of Artificial Sequence: Synthetic oligonucleotide
  Antisense strand to SEQ ID NO: 1481036
acauuacccagcaugguug

SEQ ID NO: 1481038 - RNA, 19 nt, Artificial Sequence
  Description of Artificial Sequence: Synthetic oligonucleotide
  Sense strand starting at position 1088 of SEQ ID NO: 1244338
uguccuucucuguagggaa

SEQ ID NO: 1481039 - RNA, 19 nt, Artificial Sequence
  Description of Artificial Sequence: Synthetic oligonucleotide
  Antisense strand to SEQ ID NO: 1481038
uucccuacagagaaggaca

SEQ ID NO: 1481040 - RNA, 19 nt, Artificial Sequence
  Description of Artificial Sequence: Synthetic oligonucleotide
  Sense strand starting at position 1262 of SEQ ID NO: 1244338
gucccaagagcucagagau

SEQ ID NO: 1481041 - RNA, 19 nt, Artificial Sequence
  Description of Artificial Sequence: Synthetic oligonucleotide
  Antisense strand to SEQ ID NO: 1481040
aucucugagcucuugggac

SEQ ID NO: 1481042 - RNA, 19 nt, Artificial Sequence
  Description of Artificial Sequence: Synthetic oligonucleotide
  Sense strand starting at position 1339 of SEQ ID NO: 1244338
caaggaaaugugugccuca

SEQ ID NO: 1481043 - RNA, 19 nt, Artificial Sequence
  Description of Artificial Sequence: Synthetic oligonucleotide
  Antisense strand to SEQ ID NO: 1481042
ugaggcacacauuuccuug

SEQ ID NO: 1481044 - RNA, 19 nt, Artificial Sequence
  Description of Artificial Sequence: Synthetic oligonucleotide
  Sense strand starting at position 1340 of SEQ ID NO: 1244338
aaggaaaugugugccucaa

SEQ ID NO: 1481045 - RNA, 19 nt, Artificial Sequence
  Description of Artificial Sequence: Synthetic oligonucleotide
  Antisense strand to SEQ ID NO: 1481044
uugaggcacacauuuccuu

SEQ ID NO: 1481046 - RNA, 19 nt, Artificial Sequence
  Description of Artificial Sequence: Synthetic oligonucleotide
  Sense strand starting at position 1367 of SEQ ID NO: 1244338
gugucauauccagagaccu

SEQ ID NO: 1481047 - RNA, 19 nt, Artificial Sequence
  Description of Artificial Sequence: Synthetic oligonucleotide
  Antisense strand to SEQ ID NO: 1481046
aggucucuggauaugacac

SEQ ID NO: 1481048 - RNA, 19 nt, Artificial Sequence
  Description of Artificial Sequence: Synthetic oligonucleotide
  Sense strand starting at position 1427 of SEQ ID NO: 1244338
ucuucugaggccuggaaga

SEQ ID NO: 1481049 - RNA, 19 nt, Artificial Sequence
  Description of Artificial Sequence: Synthetic oligonucleotide
  Antisense strand to SEQ ID NO: 1481048
ucuuccaggccucagaaga

SEQ ID NO: 1481050 - RNA, 19 nt, Artificial Sequence
  Description of Artificial Sequence: Synthetic oligonucleotide
  Sense strand starting at position 1437 of SEQ ID NO: 1244338
ccuggaagacccuggcuua

SEQ ID NO: 1481051 - RNA, 19 nt, Artificial Sequence
  Description of Artificial Sequence: Synthetic oligonucleotide
  Antisense strand to SEQ ID NO: 1481050
uaagccagggucuuccagg

SEQ ID NO: 1481052 - RNA, 19 nt, Artificial Sequence
  Description of Artificial Sequence: Synthetic oligonucleotide
  Sense strand starting at position 1438 of SEQ ID NO: 1244338
cuggaagacccuggcuuaa

SEQ ID NO: 1481053 - RNA, 19 nt, Artificial Sequence
  Description of Artificial Sequence: Synthetic oligonucleotide
  Antisense strand to SEQ ID NO: 1481052
uuaagccagggucuuccag

SEQ ID NO: 1481054 - RNA, 19 nt, Artificial Sequence
  Description of Artificial Sequence: Synthetic oligonucleotide
  Sense strand starting at position 1440 of SEQ ID NO: 1244338
ggaagacccuggcuuaaag

SEQ ID NO: 1481055 - RNA, 19 nt, Artificial Sequence
  Description of Artificial Sequence: Synthetic oligonucleotide
  Antisense strand to SEQ ID NO: 1481054
cuuuaagccagggucuucc

SEQ ID NO: 1481056 - RNA, 19 nt, Artificial Sequence
  Description of Artificial Sequence: Synthetic oligonucleotide
  Sense strand starting at position 1461 of SEQ ID NO: 1244338
ccuagccuggccugagaau

SEQ ID NO: 1481057 - RNA, 19 nt, Artificial Sequence
  Description of Artificial Sequence: Synthetic oligonucleotide
  Antisense strand to SEQ ID NO: 1481056
auucucaggccaggcuagg

SEQ ID NO: 1481058 - RNA, 19 nt, Artificial Sequence
  Description of Artificial Sequence: Synthetic oligonucleotide
  Sense strand starting at position 2026 of SEQ ID NO: 1244338
ggcagaaugacgcacacuu

SEQ ID NO: 1481059 - RNA, 19 nt, Artificial Sequence
  Description of Artificial Sequence: Synthetic oligonucleotide
  Antisense strand to SEQ ID NO: 1481058
aagugugcgucauucugcc

SEQ ID NO: 1481060 - RNA, 19 nt, Artificial Sequence
  Description of Artificial Sequence: Synthetic oligonucleotide
  Sense strand starting at position 2366 of SEQ ID NO: 1244338
ucaugagcuuguuugaaca

SEQ ID NO: 1481061 - RNA, 19 nt, Artificial Sequence
  Description of Artificial Sequence: Synthetic oligonucleotide
  Antisense strand to SEQ ID NO: 1481060
uguucaaacaagcucauga

SEQ ID NO: 1481062 - RNA, 19 nt, Artificial Sequence
  Description of Artificial Sequence: Synthetic oligonucleotide
  Sense strand starting at position 2411 of SEQ ID NO: 1244338
guaagauguccagggcaga

SEQ ID NO: 1481063 - RNA, 19 nt, Artificial Sequence
  Description of Artificial Sequence: Synthetic oligonucleotide
  Antisense strand to SEQ ID NO: 1481062
ucugcccuggacaucuuac

SEQ ID NO: 1481064 - RNA, 19 nt, Artificial Sequence
  Description of Artificial Sequence: Synthetic oligonucleotide
  Sense strand starting at position 2626 of SEQ ID NO: 1244338
uguaguuauugauuaucca

SEQ ID NO: 1481065 - RNA, 19 nt, Artificial Sequence
  Description of Artificial Sequence: Synthetic oligonucleotide
  Antisense strand to SEQ ID NO: 1481064
uggauaaucaauaacuaca

SEQ ID NO: 1481066 - RNA, 19 nt, Artificial Sequence
  Description of Artificial Sequence: Synthetic oligonucleotide
  Sense strand starting at position 2627 of SEQ ID NO: 1244338
guaguuauugauuauccag

SEQ ID NO: 1481067 - RNA, 19 nt, Artificial Sequence
  Description of Artificial Sequence: Synthetic oligonucleotide
  Antisense strand to SEQ ID NO: 1481066
cuggauaaucaauaacuac

SEQ ID NO: 1481068 - RNA, 19 nt, Artificial Sequence
  Description of Artificial Sequence: Synthetic oligonucleotide
  Sense strand starting at position 2629 of SEQ ID NO: 1244338
aguuauugauuauccagca

SEQ ID NO: 1481069 - RNA, 19 nt, Artificial Sequence
  Description of Artificial Sequence: Synthetic oligonucleotide
  Antisense strand to SEQ ID NO: 1481068
ugcuggauaaucaauaacu

SEQ ID NO: 1481070 - RNA, 19 nt, Artificial Sequence
  Description of Artificial Sequence: Synthetic oligonucleotide
  Sense strand starting at position 3004 of SEQ ID NO: 1244338
augcaagacuugcuuuaug

SEQ ID NO: 1481071 - RNA, 19 nt, Artificial Sequence
  Description of Artificial Sequence: Synthetic oligonucleotide
  Antisense strand to SEQ ID NO: 1481070
cauaaagcaagucuugcau

SEQ ID NO: 1481072 - RNA, 19 nt, Artificial Sequence
  Description of Artificial Sequence: Synthetic oligonucleotide
  Sense strand starting at position 3286 of SEQ ID NO: 1244338
ggacacuuuccuuagcgca

SEQ ID NO: 1481073 - RNA, 19 nt, Artificial Sequence
  Description of Artificial Sequence: Synthetic oligonucleotide
  Antisense strand to SEQ ID NO: 1481072
ugcgcuaaggaaagugucc

SEQ ID NO: 1481074 - RNA, 19 nt, Artificial Sequence
  Description of Artificial Sequence: Synthetic oligonucleotide
  Sense strand starting at position 3456 of SEQ ID NO: 1244338
agcuauuuguccucccagu

SEQ ID NO: 1481075 - RNA, 19 nt, Artificial Sequence
  Description of Artificial Sequence: Synthetic oligonucleotide
  Antisense strand to SEQ ID NO: 1481074
acugggaggacaaauagcu

SEQ ID NO: 1481076 - RNA, 19 nt, Artificial Sequence
  Description of Artificial Sequence: Synthetic oligonucleotide
  Sense strand starting at position 3505 of SEQ ID NO: 1244338
ugucucuagucccuggaga

SEQ ID NO: 1481077 - RNA, 19 nt, Artificial Sequence
  Description of Artificial Sequence: Synthetic oligonucleotide
  Antisense strand to SEQ ID NO: 1481076
ucuccagggacuagagaca

SEQ ID NO: 1481078 - RNA, 19 nt, Artificial Sequence
  Description of Artificial Sequence: Synthetic oligonucleotide
  Sense strand starting at position 3506 of SEQ ID NO: 1244338
gucucuagucccuggagaa

SEQ ID NO: 1481079 - RNA, 19 nt, Artificial Sequence
  Description of Artificial Sequence: Synthetic oligonucleotide
  Antisense strand to SEQ ID NO: 1481078
uucuccagggacuagagac

SEQ ID NO: 1481080 - RNA, 19 nt, Artificial Sequence
  Description of Artificial Sequence: Synthetic oligonucleotide
  Sense strand starting at position 3507 of SEQ ID NO: 1244338
ucucuagucccuggagaag

SEQ ID NO: 1481081 - RNA, 19 nt, Artificial Sequence
  Description of Artificial Sequence: Synthetic oligonucleotide
  Antisense strand to SEQ ID NO: 1481080
cuucuccagggacuagaga

SEQ ID NO: 1481082 - RNA, 19 nt, Artificial Sequence
  Description of Artificial Sequence: Synthetic oligonucleotide
  Sense strand starting at position 3588 of SEQ ID NO: 1244338
acaacccugcuaugagaaa

SEQ ID NO: 1481083 - RNA, 19 nt, Artificial Sequence
  Description of Artificial Sequence: Synthetic oligonucleotide
  Antisense strand to SEQ ID NO: 1481082
uuucucauagcaggguugu

SEQ ID NO: 1481084 - RNA, 19 nt, Artificial Sequence
  Description of Artificial Sequence: Synthetic oligonucleotide
  Sense strand starting at position 3597 of SEQ ID NO: 1244338
cuaugagaaaggugucuac

SEQ ID NO: 1481085 - RNA, 19 nt, Artificial Sequence
  Description of Artificial Sequence: Synthetic oligonucleotide
  Antisense strand to SEQ ID NO: 1481084
guagacaccuuucucauag

SEQ ID NO: 1481086 - RNA, 19 nt, Artificial Sequence
  Description of Artificial Sequence: Synthetic oligonucleotide
  Sense strand starting at position 3849 of SEQ ID NO: 1244338
ccugccuuugaggaugaau

SEQ ID NO: 1481087 - RNA, 19 nt, Artificial Sequence
  Description of Artificial Sequence: Synthetic oligonucleotide
  Antisense strand to SEQ ID NO: 1481086
auucauccucaaaggcagg

SEQ ID NO: 1481088 - RNA, 19 nt, Artificial Sequence
  Description of Artificial Sequence: Synthetic oligonucleotide
  Sense strand starting at position 3851 of SEQ ID NO: 1244338
ugccuuugaggaugaauaa

SEQ ID NO: 1481089 - RNA, 19 nt, Artificial Sequence
  Description of Artificial Sequence: Synthetic oligonucleotide
  Antisense strand to SEQ ID NO: 1481088
uuauucauccucaaaggca

SEQ ID NO: 1481090 - RNA, 19 nt, Artificial Sequence
  Description of Artificial Sequence: Synthetic oligonucleotide
  Sense strand starting at position 10 of SEQ ID NO: 1244339
cuauguaaguugccauaau

SEQ ID NO: 1481091 - RNA, 19 nt, Artificial Sequence
  Description of Artificial Sequence: Synthetic oligonucleotide
  Antisense strand to SEQ ID NO: 1481090
auuauggcaacuuacauag

SEQ ID NO: 1481092 - RNA, 19 nt, Artificial Sequence
  Description of Artificial Sequence: Synthetic oligonucleotide
  Sense strand starting at position 64 of SEQ ID NO: 1244339
ggaaguuaauuugagaacu

SEQ ID NO: 1481093 - RNA, 19 nt, Artificial Sequence
  Description of Artificial Sequence: Synthetic oligonucleotide
  Antisense strand to SEQ ID NO: 1481092
aguucucaaauuaacuucc

SEQ ID NO: 1481094 - RNA, 19 nt, Artificial Sequence
  Description of Artificial Sequence: Synthetic oligonucleotide
  Sense strand starting at position 253 of SEQ ID NO: 1244339
aaaugaggcugguaaugaa

SEQ ID NO: 1481095 - RNA, 19 nt, Artificial Sequence
  Description of Artificial Sequence: Synthetic oligonucleotide
  Antisense strand to SEQ ID NO: 1481094
uucauuaccagccucauuu

SEQ ID NO: 1481096 - RNA, 19 nt, Artificial Sequence
  Description of Artificial Sequence: Synthetic oligonucleotide
  Sense strand starting at position 411 of SEQ ID NO: 1244339
ucgagaagguaucugaaag

SEQ ID NO: 1481097 - RNA, 19 nt, Artificial Sequence
  Description of Artificial Sequence: Synthetic oligonucleotide
  Antisense strand to SEQ ID NO: 1481096
cuuucagauaccuucucga

SEQ ID NO: 1481098 - RNA, 19 nt, Artificial Sequence
  Description of Artificial Sequence: Synthetic oligonucleotide
  Sense strand starting at position 467 of SEQ ID NO: 1244339
augcaaauaguuuaagcua

SEQ ID NO: 1481099 - RNA, 19 nt, Artificial Sequence
  Description of Artificial Sequence: Synthetic oligonucleotide
  Antisense strand to SEQ ID NO: 1481098
uagcuuaaacuauuugcau

SEQ ID NO: 1481100 - RNA, 19 nt, Artificial Sequence
  Description of Artificial Sequence: Synthetic oligonucleotide
  Sense strand starting at position 562 of SEQ ID NO: 1244339
gggcaaaugugugucucca

SEQ ID NO: 1481101 - RNA, 19 nt, Artificial Sequence
  Description of Artificial Sequence: Synthetic oligonucleotide
  Antisense strand to SEQ ID NO: 1481100
uggagacacacauuugccc

SEQ ID NO: 1481102 - RNA, 19 nt, Artificial Sequence
  Description of Artificial Sequence: Synthetic oligonucleotide
  Sense strand starting at position 564 of SEQ ID NO: 1244339
gcaaaugugugucuccaua

SEQ ID NO: 1481103 - RNA, 19 nt, Artificial Sequence
  Description of Artificial Sequence: Synthetic oligonucleotide
  Antisense strand to SEQ ID NO: 1481102
uauggagacacacauuugc

SEQ ID NO: 1481104 - RNA, 19 nt, Artificial Sequence
  Description of Artificial Sequence: Synthetic oligonucleotide
  Sense strand starting at position 581 of SEQ ID NO: 1244339
uauauauguguguagaaac

SEQ ID NO: 1481105 - RNA, 19 nt, Artificial Sequence
  Description of Artificial Sequence: Synthetic oligonucleotide
  Antisense strand to SEQ ID NO: 1481104
guuucuacacacauauaua

SEQ ID NO: 1481106 - RNA, 19 nt, Artificial Sequence
  Description of Artificial Sequence: Synthetic oligonucleotide
  Sense strand starting at position 734 of SEQ ID NO: 1244339
uuuguuaauuaaccgucua

SEQ ID NO: 1481107 - RNA, 19 nt, Artificial Sequence
  Description of Artificial Sequence: Synthetic oligonucleotide
  Antisense strand to SEQ ID NO: 1481106
uagacgguuaauuaacaaa

SEQ ID NO: 1481108 - RNA, 19 nt, Artificial Sequence
  Description of Artificial Sequence: Synthetic oligonucleotide
  Sense strand starting at position 808 of SEQ ID NO: 1244339
ucccgacugucccaagauu

SEQ ID NO: 1481109 - RNA, 19 nt, Artificial Sequence
  Description of Artificial Sequence: Synthetic oligonucleotide
  Antisense strand to SEQ ID NO: 1481108
aaucuugggacagucggga

SEQ ID NO: 1481110 - RNA, 19 nt, Artificial Sequence
  Description of Artificial Sequence: Synthetic oligonucleotide
  Sense strand starting at position 819 of SEQ ID NO: 1244339
ccaagauuaugcuuaaguu

SEQ ID NO: 1481111 - RNA, 19 nt, Artificial Sequence
  Description of Artificial Sequence: Synthetic oligonucleotide
  Antisense strand to SEQ ID NO: 1481110
aacuuaagcauaaucuugg

SEQ ID NO: 1481112 - RNA, 19 nt, Artificial Sequence
  Description of Artificial Sequence: Synthetic oligonucleotide
  Sense strand starting at position 1010 of SEQ ID NO: 1244339
guaggauccucguucaagu

SEQ ID NO: 1481113 - RNA, 19 nt, Artificial Sequence
  Description of Artificial Sequence: Synthetic oligonucleotide
  Antisense strand to SEQ ID NO: 1481112
acuugaacgaggauccuac

SEQ ID NO: 1481114 - RNA, 19 nt, Artificial Sequence
  Description of Artificial Sequence: Synthetic oligonucleotide
  Sense strand starting at position 1057 of SEQ ID NO: 1244339
ccaguuacugcuucgcuua

SEQ ID NO: 1481115 - RNA, 19 nt, Artificial Sequence
  Description of Artificial Sequence: Synthetic oligonucleotide
  Antisense strand to SEQ ID NO: 1481114
uaagcgaagcaguaacugg

SEQ ID NO: 1481116 - RNA, 19 nt, Artificial Sequence
  Description of Artificial Sequence: Synthetic oligonucleotide
  Sense strand starting at position 1058 of SEQ ID NO: 1244339
caguuacugcuucgcuuaa

SEQ ID NO: 1481117 - RNA, 19 nt, Artificial Sequence
  Description of Artificial Sequence: Synthetic oligonucleotide
  Antisense strand to SEQ ID NO: 1481116
uuaagcgaagcaguaacug

SEQ ID NO: 1481118 - RNA, 19 nt, Artificial Sequence
  Description of Artificial Sequence: Synthetic oligonucleotide
  Sense strand starting at position 1059 of SEQ ID NO: 1244339
aguuacugcuucgcuuaaa

SEQ ID NO: 1481119 - RNA, 19 nt, Artificial Sequence
  Description of Artificial Sequence: Synthetic oligonucleotide
  Antisense strand to SEQ ID NO: 1481118
uuuaagcgaagcaguaacu

SEQ ID NO: 1481120 - RNA, 19 nt, Artificial Sequence
  Description of Artificial Sequence: Synthetic oligonucleotide
  Sense strand starting at position 2046 of SEQ ID NO: 1244339
gcgccauuggcugagcaau

SEQ ID NO: 1481121 - RNA, 19 nt, Artificial Sequence
  Description of Artificial Sequence: Synthetic oligonucleotide
  Antisense strand to SEQ ID NO: 1481120
auugcucagccaauggcgc

SEQ ID NO: 1481122 - RNA, 19 nt, Artificial Sequence
  Description of Artificial Sequence: Synthetic oligonucleotide
  Sense strand starting at position 2059 of SEQ ID NO: 1244339
agcaaugguguccgucaga

SEQ ID NO: 1481123 - RNA, 19 nt, Artificial Sequence
  Description of Artificial Sequence: Synthetic oligonucleotide
  Antisense strand to SEQ ID NO: 1481122
ucugacggacaccauugcu

SEQ ID NO: 1481124 - RNA, 19 nt, Artificial Sequence
  Description of Artificial Sequence: Synthetic oligonucleotide
  Sense strand starting at position 2520 of SEQ ID NO: 1244339
ugagauagagccgguagaa

SEQ ID NO: 1481125 - RNA, 19 nt, Artificial Sequence
  Description of Artificial Sequence: Synthetic oligonucleotide
  Antisense strand to SEQ ID NO: 1481124
uucuaccggcucuaucuca

SEQ ID NO: 1481126 - RNA, 19 nt, Artificial Sequence
  Description of Artificial Sequence: Synthetic oligonucleotide
  Sense strand starting at position 2620 of SEQ ID NO: 1244339
gcggaagacuuacauaucu

SEQ ID NO: 1481127 - RNA, 19 nt, Artificial Sequence
  Description of Artificial Sequence: Synthetic oligonucleotide
  Antisense strand to SEQ ID NO: 1481126
agauauguaagucuuccgc

SEQ ID NO: 1481128 - RNA, 19 nt, Artificial Sequence
  Description of Artificial Sequence: Synthetic oligonucleotide
  Sense strand starting at position 2628 of SEQ ID NO: 1244339
cuuacauaucucggcauau

SEQ ID NO: 1481129 - RNA, 19 nt, Artificial Sequence
  Description of Artificial Sequence: Synthetic oligonucleotide
  Antisense strand to SEQ ID NO: 1481128
auaugccgagauauguaag

SEQ ID NO: 1481130 - RNA, 19 nt, Artificial Sequence
  Description of Artificial Sequence: Synthetic oligonucleotide
  Sense strand starting at position 2629 of SEQ ID NO: 1244339
uuacauaucucggcauauc

SEQ ID NO: 1481131 - RNA, 19 nt, Artificial Sequence
  Description of Artificial Sequence: Synthetic oligonucleotide
  Antisense strand to SEQ ID NO: 1481130
gauaugccgagauauguaa

SEQ ID NO: 1481132 - RNA, 19 nt, Artificial Sequence
  Description of Artificial Sequence: Synthetic oligonucleotide
  Sense strand starting at position 2637 of SEQ ID NO: 1244339
cucggcauaucauuuguau

SEQ ID NO: 1481133 - RNA, 19 nt, Artificial Sequence
  Description of Artificial Sequence: Synthetic oligonucleotide
  Antisense strand to SEQ ID NO: 1481132
auacaaaugauaugccgag

SEQ ID NO: 1481134 - RNA, 19 nt, Artificial Sequence
  Description of Artificial Sequence: Synthetic oligonucleotide
  Sense strand starting at position 2641 of SEQ ID NO: 1244339
gcauaucauuuguauccau

SEQ ID NO: 1481135 - RNA, 19 nt, Artificial Sequence
  Description of Artificial Sequence: Synthetic oligonucleotide
  Antisense strand to SEQ ID NO: 1481134
auggauacaaaugauaugc

SEQ ID NO: 1481136 - RNA, 19 nt, Artificial Sequence
  Description of Artificial Sequence: Synthetic oligonucleotide
  Sense strand starting at position 2917 of SEQ ID NO: 1244339
aggguccucugccuaaaga

SEQ ID NO: 1481137 - RNA, 19 nt, Artificial Sequence
  Description of Artificial Sequence: Synthetic oligonucleotide
  Antisense strand to SEQ ID NO: 1481136
ucuuuaggcagaggacccu

SEQ ID NO: 1481138 - RNA, 19 nt, Artificial Sequence
  Description of Artificial Sequence: Synthetic oligonucleotide
  Sense strand starting at position 2918 of SEQ ID NO: 1244339
ggguccucugccuaaagau

SEQ ID NO: 1481139 - RNA, 19 nt, Artificial Sequence
  Description of Artificial Sequence: Synthetic oligonucleotide
  Antisense strand to SEQ ID NO: 1481138
aucuuuaggcagaggaccc

SEQ ID NO: 1481140 - RNA, 19 nt, Artificial Sequence
  Description of Artificial Sequence: Synthetic oligonucleotide
  Sense strand starting at position 2927 of SEQ ID NO: 1244339
gccuaaagauagugaucua

SEQ ID NO: 1481141 - RNA, 19 nt, Artificial Sequence
  Description of Artificial Sequence: Synthetic oligonucleotide
  Antisense strand to SEQ ID NO: 1481140
uagaucacuaucuuuaggc

SEQ ID NO: 1481142 - RNA, 19 nt, Artificial Sequence
  Description of Artificial Sequence: Synthetic oligonucleotide
  Sense strand starting at position 2934 of SEQ ID NO: 1244339
gauagugaucuaugacaug

SEQ ID NO: 1481143 - RNA, 19 nt, Artificial Sequence
  Description of Artificial Sequence: Synthetic oligonucleotide
  Antisense strand to SEQ ID NO: 1481142
caugucauagaucacuauc

SEQ ID NO: 1481144 - RNA, 19 nt, Artificial Sequence
  Description of Artificial Sequence: Synthetic oligonucleotide
  Sense strand starting at position 2937 of SEQ ID NO: 1244339
agugaucuaugacaugcua

SEQ ID NO: 1481145 - RNA, 19 nt, Artificial Sequence
  Description of Artificial Sequence: Synthetic oligonucleotide
  Antisense strand to SEQ ID NO: 1481144
uagcaugucauagaucacu

SEQ ID NO: 1481146 - RNA, 19 nt, Artificial Sequence
  Description of Artificial Sequence: Synthetic oligonucleotide
  Sense strand starting at position 2957 of SEQ ID NO: 1244339
aggauaaacucccaaagaa

SEQ ID NO: 1481147 - RNA, 19 nt, Artificial Sequence
  Description of Artificial Sequence: Synthetic oligonucleotide
  Antisense strand to SEQ ID NO: 1481146
uucuuugggaguuuauccu

SEQ ID NO: 1481148 - RNA, 19 nt, Artificial Sequence
  Description of Artificial Sequence: Synthetic oligonucleotide
  Sense strand starting at position 3015 of SEQ ID NO: 1244339
aaagaaugucagugaggua

SEQ ID NO: 1481149 - RNA, 19 nt, Artificial Sequence
  Description of Artificial Sequence: Synthetic oligonucleotide
  Antisense strand to SEQ ID NO: 1481148
uaccucacugacauucuuu

SEQ ID NO: 1481150 - RNA, 19 nt, Artificial Sequence
  Description of Artificial Sequence: Synthetic oligonucleotide
  Sense strand starting at position 3068 of SEQ ID NO: 1244339
ggaggaagggucuguggaa

SEQ ID NO: 1481151 - RNA, 19 nt, Artificial Sequence
  Description of Artificial Sequence: Synthetic oligonucleotide
  Antisense strand to SEQ ID NO: 1481150
uuccacagacccuuccucc

SEQ ID NO: 1481152 - RNA, 19 nt, Artificial Sequence
  Description of Artificial Sequence: Synthetic oligonucleotide
  Sense strand starting at position 3422 of SEQ ID NO: 1244339
cugugagagccucauaggu

SEQ ID NO: 1481153 - RNA, 19 nt, Artificial Sequence
  Description of Artificial Sequence: Synthetic oligonucleotide
  Antisense strand to SEQ ID NO: 1481152
accuaugaggcucucacag

SEQ ID NO: 1481154 - RNA, 19 nt, Artificial Sequence
  Description of Artificial Sequence: Synthetic oligonucleotide
  Sense strand starting at position 3424 of SEQ ID NO: 1244339
gugagagccucauaggucu

SEQ ID NO: 1481155 - RNA, 19 nt, Artificial Sequence
  Description of Artificial Sequence: Synthetic oligonucleotide
  Antisense strand to SEQ ID NO: 1481154
agaccuaugaggcucucac

SEQ ID NO: 1481156 - RNA, 19 nt, Artificial Sequence
  Description of Artificial Sequence: Synthetic oligonucleotide
  Sense strand starting at position 3464 of SEQ ID NO: 1244339
ucugguaaccaugggacaa

SEQ ID NO: 1481157 - RNA, 19 nt, Artificial Sequence
  Description of Artificial Sequence: Synthetic oligonucleotide
  Antisense strand to SEQ ID NO: 1481156
uugucccaugguuaccaga

SEQ ID NO: 1481158 - RNA, 19 nt, Artificial Sequence
  Description of Artificial Sequence: Synthetic oligonucleotide
  Sense strand starting at position 3465 of SEQ ID NO: 1244339
cugguaaccaugggacaau

SEQ ID NO: 1481159 - RNA, 19 nt, Artificial Sequence
  Description of Artificial Sequence: Synthetic oligonucleotide
  Antisense strand to SEQ ID NO: 1481158
auugucccaugguuaccag

SEQ ID NO: 1481160 - RNA, 19 nt, Artificial Sequence
  Description of Artificial Sequence: Synthetic oligonucleotide
  Sense strand starting at position 3466 of SEQ ID NO: 1244339
ugguaaccaugggacaaua

SEQ ID NO: 1481161 - RNA, 19 nt, Artificial Sequence
  Description of Artificial Sequence: Synthetic oligonucleotide
  Antisense strand to SEQ ID NO: 1481160
uauugucccaugguuacca

SEQ ID NO: 1481162 - RNA, 19 nt, Artificial Sequence
  Description of Artificial Sequence: Synthetic oligonucleotide
  Sense strand starting at position 3687 of SEQ ID NO: 1244339
guuccagugagccgauauc

SEQ ID NO: 1481163 - RNA, 19 nt, Artificial Sequence
  Description of Artificial Sequence: Synthetic oligonucleotide
  Antisense strand to SEQ ID NO: 1481162
gauaucggcucacuggaac

SEQ ID NO: 1481164 - RNA, 19 nt, Artificial Sequence
  Description of Artificial Sequence: Synthetic oligonucleotide
  Sense strand starting at position 3910 of SEQ ID NO: 1244339
guuccuacccuuuagaguu

SEQ ID NO: 1481165 - RNA, 19 nt, Artificial Sequence
  Description of Artificial Sequence: Synthetic oligonucleotide
  Antisense strand to SEQ ID NO: 1481164
aacucuaaaggguaggaac

SEQ ID NO: 1481166 - RNA, 19 nt, Artificial Sequence
  Description of Artificial Sequence: Synthetic oligonucleotide
  Sense strand starting at position 3918 of SEQ ID NO: 1244339
ccuuuagaguuguugugaa

SEQ ID NO: 1481167 - RNA, 19 nt, Artificial Sequence
  Description of Artificial Sequence: Synthetic oligonucleotide
  Antisense strand to SEQ ID NO: 1481166
uucacaacaacucuaaagg

SEQ ID NO: 1481168 - RNA, 19 nt, Artificial Sequence
  Description of Artificial Sequence: Synthetic oligonucleotide
  Sense strand starting at position 3947 of SEQ ID NO: 1244339
gugaauacauaugauggau

SEQ ID NO: 1481169 - RNA, 19 nt, Artificial Sequence
  Description of Artificial Sequence: Synthetic oligonucleotide
  Antisense strand to SEQ ID NO: 1481168
auccaucauauguauucac

SEQ ID NO: 1481170 - RNA, 19 nt, Artificial Sequence
  Description of Artificial Sequence: Synthetic oligonucleotide
  Sense strand starting at position 174 of SEQ ID NO: 1244340
ccagacgaacacuguaauu

SEQ ID NO: 1481171 - RNA, 19 nt, Artificial Sequence
  Description of Artificial Sequence: Synthetic oligonucleotide
  Antisense strand to SEQ ID NO: 1481170
aauuacaguguucgucugg

SEQ ID NO: 1481172 - RNA, 19 nt, Artificial Sequence
  Description of Artificial Sequence: Synthetic oligonucleotide
  Sense strand starting at position 256 of SEQ ID NO: 1244340
agaagauguuucccacuga

SEQ ID NO: 1481173 - RNA, 19 nt, Artificial Sequence
  Description of Artificial Sequence: Synthetic oligonucleotide
  Antisense strand to SEQ ID NO: 1481172
ucagugggaaacaucuucu

SEQ ID NO: 1481174 - RNA, 19 nt, Artificial Sequence
  Description of Artificial Sequence: Synthetic oligonucleotide
  Sense strand starting at position 260 of SEQ ID NO: 1244340
gauguuucccacugagcaa

SEQ ID NO: 1481175 - RNA, 19 nt, Artificial Sequence
  Description of Artificial Sequence: Synthetic oligonucleotide
  Antisense strand to SEQ ID NO: 1481174
uugcucagugggaaacauc

SEQ ID NO: 1481176 - RNA, 19 nt, Artificial Sequence
  Description of Artificial Sequence: Synthetic oligonucleotide
  Sense strand starting at position 318 of SEQ ID NO: 1244340
cugcauucuuaaguaguaa

SEQ ID NO: 1481177 - RNA, 19 nt, Artificial Sequence
  Description of Artificial Sequence: Synthetic oligonucleotide
  Antisense strand to SEQ ID NO: 1481176
uuacuacuuaagaaugcag

SEQ ID NO: 1481178 - RNA, 19 nt, Artificial Sequence
  Description of Artificial Sequence: Synthetic oligonucleotide
  Sense strand starting at position 388 of SEQ ID NO: 1244340
gccagagaccucuaguaga

SEQ ID NO: 1481179 - RNA, 19 nt, Artificial Sequence
  Description of Artificial Sequence: Synthetic oligonucleotide
  Antisense strand to SEQ ID NO: 1481178
ucuacuagaggucucuggc

SEQ ID NO: 1481180 - RNA, 19 nt, Artificial Sequence
  Description of Artificial Sequence: Synthetic oligonucleotide
  Sense strand starting at position 439 of SEQ ID NO: 1244340
cagagagauuuagagguaa

SEQ ID NO: 1481181 - RNA, 19 nt, Artificial Sequence
  Description of Artificial Sequence: Synthetic oligonucleotide
  Antisense strand to SEQ ID NO: 1481180
uuaccucuaaaucucucug

SEQ ID NO: 1481182 - RNA, 19 nt, Artificial Sequence
  Description of Artificial Sequence: Synthetic oligonucleotide
  Sense strand starting at position 488 of SEQ ID NO: 1244340
uagggcuuuguguaccaaa

SEQ ID NO: 1481183 - RNA, 19 nt, Artificial Sequence
  Description of Artificial Sequence: Synthetic oligonucleotide
  Antisense strand to SEQ ID NO: 1481182
uuugguacacaaagcccua

SEQ ID NO: 1481184 - RNA, 19 nt, Artificial Sequence
  Description of Artificial Sequence: Synthetic oligonucleotide
  Sense strand starting at position 566 of SEQ ID NO: 1244340
cuugccugcuuccuaaaga

SEQ ID NO: 1481185 - RNA, 19 nt, Artificial Sequence
  Description of Artificial Sequence: Synthetic oligonucleotide
  Antisense strand to SEQ ID NO: 1481184
ucuuuaggaagcaggcaag

SEQ ID NO: 1481186 - RNA, 19 nt, Artificial Sequence
  Description of Artificial Sequence: Synthetic oligonucleotide
  Sense strand starting at position 636 of SEQ ID NO: 1244340
uuacacagguccucugauu

SEQ ID NO: 1481187 - RNA, 19 nt, Artificial Sequence
  Description of Artificial Sequence: Synthetic oligonucleotide
  Antisense strand to SEQ ID NO: 1481186
aaucagaggaccuguguaa

SEQ ID NO: 1481188 - RNA, 19 nt, Artificial Sequence
  Description of Artificial Sequence: Synthetic oligonucleotide
  Sense strand starting at position 666 of SEQ ID NO: 1244340
cagaacuucugguugcauu

SEQ ID NO: 1481189 - RNA, 19 nt, Artificial Sequence
  Description of Artificial Sequence: Synthetic oligonucleotide
  Antisense strand to SEQ ID NO: 1481188
aaugcaaccagaaguucug

SEQ ID NO: 1481190 - RNA, 19 nt, Artificial Sequence
  Description of Artificial Sequence: Synthetic oligonucleotide
  Sense strand starting at position 738 of SEQ ID NO: 1244340
uuuggcuuccuguauauua

SEQ ID NO: 1481191 - RNA, 19 nt, Artificial Sequence
  Description of Artificial Sequence: Synthetic oligonucleotide
  Antisense strand to SEQ ID NO: 1481190
uaauauacaggaagccaaa

SEQ ID NO: 1481192 - RNA, 19 nt, Artificial Sequence
  Description of Artificial Sequence: Synthetic oligonucleotide
  Sense strand starting at position 740 of SEQ ID NO: 1244340
uggcuuccuguauauuaau

SEQ ID NO: 1481193 - RNA, 19 nt, Artificial Sequence
  Description of Artificial Sequence: Synthetic oligonucleotide
  Antisense strand to SEQ ID NO: 1481192
auuaauauacaggaagcca

SEQ ID NO: 1481194 - RNA, 19 nt, Artificial Sequence
  Description of Artificial Sequence: Synthetic oligonucleotide
  Sense strand starting at position 776 of SEQ ID NO: 1244340
gcaauagcagcugaaacau

SEQ ID NO: 1481195 - RNA, 19 nt, Artificial Sequence
  Description of Artificial Sequence: Synthetic oligonucleotide
  Antisense strand to SEQ ID NO: 1481194
auguuucagcugcuauugc

SEQ ID NO: 1481196 - RNA, 19 nt, Artificial Sequence
  Description of Artificial Sequence: Synthetic oligonucleotide
  Sense strand starting at position 864 of SEQ ID NO: 1244340
acugcacuauugucugauu

SEQ ID NO: 1481197 - RNA, 19 nt, Artificial Sequence
  Description of Artificial Sequence: Synthetic oligonucleotide
  Antisense strand to SEQ ID NO: 1481196
aaucagacaauagugcagu

SEQ ID NO: 1481198 - RNA, 19 nt, Artificial Sequence
  Description of Artificial Sequence: Synthetic oligonucleotide
  Sense strand starting at position 865 of SEQ ID NO: 1244340
cugcacuauugucugauuu

SEQ ID NO: 1481199 - RNA, 19 nt, Artificial Sequence
  Description of Artificial Sequence: Synthetic oligonucleotide
  Antisense strand to SEQ ID NO: 1481198
aaaucagacaauagugcag

SEQ ID NO: 1481200 - RNA, 19 nt, Artificial Sequence
  Description of Artificial Sequence: Synthetic oligonucleotide
  Sense strand starting at position 866 of SEQ ID NO: 1244340
ugcacuauugucugauuuc

SEQ ID NO: 1481201 - RNA, 19 nt, Artificial Sequence
  Description of Artificial Sequence: Synthetic oligonucleotide
  Antisense strand to SEQ ID NO: 1481200
gaaaucagacaauagugca

SEQ ID NO: 1481202 - RNA, 19 nt, Artificial Sequence
  Description of Artificial Sequence: Synthetic oligonucleotide
  Sense strand starting at position 1135 of SEQ ID NO: 1244340
cuuaguccuaauggagagu

SEQ ID NO: 1481203 - RNA, 19 nt, Artificial Sequence
  Description of Artificial Sequence: Synthetic oligonucleotide
  Antisense strand to SEQ ID NO: 1481202
acucuccauuaggacuaag

SEQ ID NO: 1481204 - RNA, 19 nt, Artificial Sequence
  Description of Artificial Sequence: Synthetic oligonucleotide
  Sense strand starting at position 1146 of SEQ ID NO: 1244340
uggagaguucuuuggccau

SEQ ID NO: 1481205 - RNA, 19 nt, Artificial Sequence
  Description of Artificial Sequence: Synthetic oligonucleotide
  Antisense strand to SEQ ID NO: 1481204
auggccaaagaacucucca

SEQ ID NO: 1481206 - RNA, 19 nt, Artificial Sequence
  Description of Artificial Sequence: Synthetic oligonucleotide
  Sense strand starting at position 1148 of SEQ ID NO: 1244340
gagaguucuuuggccaucu

SEQ ID NO: 1481207 - RNA, 19 nt, Artificial Sequence
  Description of Artificial Sequence: Synthetic oligonucleotide
  Antisense strand to SEQ ID NO: 1481206
agauggccaaagaacucuc

SEQ ID NO: 1481208 - RNA, 19 nt, Artificial Sequence
  Description of Artificial Sequence: Synthetic oligonucleotide
  Sense strand starting at position 1149 of SEQ ID NO: 1244340
agaguucuuuggccaucua

SEQ ID NO: 1481209 - RNA, 19 nt, Artificial Sequence
  Description of Artificial Sequence: Synthetic oligonucleotide
  Antisense strand to SEQ ID NO: 1481208
uagauggccaaagaacucu

SEQ ID NO: 1481210 - RNA, 19 nt, Artificial Sequence
  Description of Artificial Sequence: Synthetic oligonucleotide
  Sense strand starting at position 1150 of SEQ ID NO: 1244340
gaguucuuuggccaucuau

SEQ ID NO: 1481211 - RNA, 19 nt, Artificial Sequence
  Description of Artificial Sequence: Synthetic oligonucleotide
  Antisense strand to SEQ ID NO: 1481210
auagauggccaaagaacuc

SEQ ID NO: 1481212 - RNA, 19 nt, Artificial Sequence
  Description of Artificial Sequence: Synthetic oligonucleotide
  Sense strand starting at position 1160 of SEQ ID NO: 1244340
gccaucuauguacaagaga

SEQ ID NO: 1481213 - RNA, 19 nt, Artificial Sequence
  Description of Artificial Sequence: Synthetic oligonucleotide
  Antisense strand to SEQ ID NO: 1481212
ucucuuguacauagauggc

SEQ ID NO: 1481214 - RNA, 19 nt, Artificial Sequence
  Description of Artificial Sequence: Synthetic oligonucleotide
  Sense strand starting at position 1258 of SEQ ID NO: 1244340
ugagguuuacccugugaaa

SEQ ID NO: 1481215 - RNA, 19 nt, Artificial Sequence
  Description of Artificial Sequence: Synthetic oligonucleotide
  Antisense strand to SEQ ID NO: 1481214
uuucacaggguaaaccuca

SEQ ID NO: 1481216 - RNA, 19 nt, Artificial Sequence
  Description of Artificial Sequence: Synthetic oligonucleotide
  Sense strand starting at position 1260 of SEQ ID NO: 1244340
agguuuacccugugaaaua

SEQ ID NO: 1481217 - RNA, 19 nt, Artificial Sequence
  Description of Artificial Sequence: Synthetic oligonucleotide
  Antisense strand to SEQ ID NO: 1481216
uauuucacaggguaaaccu

SEQ ID NO: 1481218 - RNA, 19 nt, Artificial Sequence
  Description of Artificial Sequence: Synthetic oligonucleotide
  Sense strand starting at position 1355 of SEQ ID NO: 1244340
cucugaaagagucauacgu

SEQ ID NO: 1481219 - RNA, 19 nt, Artificial Sequence
  Description of Artificial Sequence: Synthetic oligonucleotide
  Antisense strand to SEQ ID NO: 1481218
acguaugacucuuucagag

SEQ ID NO: 1481220 - RNA, 19 nt, Artificial Sequence
  Description of Artificial Sequence: Synthetic oligonucleotide
  Sense strand starting at position 1359 of SEQ ID NO: 1244340
gaaagagucauacguguaa

SEQ ID NO: 1481221 - RNA, 19 nt, Artificial Sequence
  Description of Artificial Sequence: Synthetic oligonucleotide
  Antisense strand to SEQ ID NO: 1481220
uuacacguaugacucuuuc

SEQ ID NO: 1481222 - RNA, 19 nt, Artificial Sequence
  Description of Artificial Sequence: Synthetic oligonucleotide
  Sense strand starting at position 1363 of SEQ ID NO: 1244340
gagucauacguguaaacca

SEQ ID NO: 1481223 - RNA, 19 nt, Artificial Sequence
  Description of Artificial Sequence: Synthetic oligonucleotide
  Antisense strand to SEQ ID NO: 1481222
ugguuuacacguaugacuc

SEQ ID NO: 1481224 - RNA, 19 nt, Artificial Sequence
  Description of Artificial Sequence: Synthetic oligonucleotide
  Sense strand starting at position 1386 of SEQ ID NO: 1244340
gucuuagaaugcccuaaua

SEQ ID NO: 1481225 - RNA, 19 nt, Artificial Sequence
  Description of Artificial Sequence: Synthetic oligonucleotide
  Antisense strand to SEQ ID NO: 1481224
uauuagggcauucuaagac

SEQ ID NO: 1481226 - RNA, 19 nt, Artificial Sequence
  Description of Artificial Sequence: Synthetic oligonucleotide
  Sense strand starting at position 1458 of SEQ ID NO: 1244340
acgugaaucagcuacugau

SEQ ID NO: 1481227 - RNA, 19 nt, Artificial Sequence
  Description of Artificial Sequence: Synthetic oligonucleotide
  Antisense strand to SEQ ID NO: 1481226
aucaguagcugauucacgu

SEQ ID NO: 1481228 - RNA, 19 nt, Artificial Sequence
  Description of Artificial Sequence: Synthetic oligonucleotide
  Sense strand starting at position 1534 of SEQ ID NO: 1244340
ggaccuagauguuugaauu

SEQ ID NO: 1481229 - RNA, 19 nt, Artificial Sequence
  Description of Artificial Sequence: Synthetic oligonucleotide
  Antisense strand to SEQ ID NO: 1481228
aauucaaacaucuaggucc

SEQ ID NO: 1481230 - RNA, 19 nt, Artificial Sequence
  Description of Artificial Sequence: Synthetic oligonucleotide
  Sense strand starting at position 1535 of SEQ ID NO: 1244340
gaccuagauguuugaauug

SEQ ID NO: 1481231 - RNA, 19 nt, Artificial Sequence
  Description of Artificial Sequence: Synthetic oligonucleotide
  Antisense strand to SEQ ID NO: 1481230
caauucaaacaucuagguc

SEQ ID NO: 1481232 - RNA, 19 nt, Artificial Sequence
  Description of Artificial Sequence: Synthetic oligonucleotide
  Sense strand starting at position 1589 of SEQ ID NO: 1244340
cuauguaaguugccauaau

SEQ ID NO: 1481233 - RNA, 19 nt, Artificial Sequence
  Description of Artificial Sequence: Synthetic oligonucleotide
  Antisense strand to SEQ ID NO: 1481232
auuauggcaacuuacauag

SEQ ID NO: 1481234 - RNA, 19 nt, Artificial Sequence
  Description of Artificial Sequence: Synthetic oligonucleotide
  Sense strand starting at position 1643 of SEQ ID NO: 1244340
ggaaguuaauuugagaacu

SEQ ID NO: 1481235 - RNA, 19 nt, Artificial Sequence
  Description of Artificial Sequence: Synthetic oligonucleotide
  Antisense strand to SEQ ID NO: 1481234
aguucucaaauuaacuucc

SEQ ID NO: 1481236 - RNA, 19 nt, Artificial Sequence
  Description of Artificial Sequence: Synthetic oligonucleotide
  Sense strand starting at position 1990 of SEQ ID NO: 1244340
ucgagaagguaucugaaag

SEQ ID NO: 1481237 - RNA, 19 nt, Artificial Sequence
  Description of Artificial Sequence: Synthetic oligonucleotide
  Antisense strand to SEQ ID NO: 1481236
cuuucagauaccuucucga

SEQ ID NO: 1481238 - RNA, 19 nt, Artificial Sequence
  Description of Artificial Sequence: Synthetic oligonucleotide
  Sense strand starting at position 2046 of SEQ ID NO: 1244340
augcaaauaguuuaagcua

SEQ ID NO: 1481239 - RNA, 19 nt, Artificial Sequence
  Description of Artificial Sequence: Synthetic oligonucleotide
  Antisense strand to SEQ ID NO: 1481238
uagcuuaaacuauuugcau

SEQ ID NO: 1481240 - RNA, 19 nt, Artificial Sequence
  Description of Artificial Sequence: Synthetic oligonucleotide
  Sense strand starting at position 2160 of SEQ ID NO: 1244340
uauauauguguguagaaac

SEQ ID NO: 1481241 - RNA, 19 nt, Artificial Sequence
  Description of Artificial Sequence: Synthetic oligonucleotide
  Antisense strand to SEQ ID NO: 1481240
guuucuacacacauauaua

SEQ ID NO: 1481242 - RNA, 19 nt, Artificial Sequence
  Description of Artificial Sequence: Synthetic oligonucleotide
  Sense strand starting at position 2313 of SEQ ID NO: 1244340
uuuguuaauuaaccgucua

SEQ ID NO: 1481243 - RNA, 19 nt, Artificial Sequence
  Description of Artificial Sequence: Synthetic oligonucleotide
  Antisense strand to SEQ ID NO: 1481242
uagacgguuaauuaacaaa

SEQ ID NO: 1481244 - RNA, 19 nt, Artificial Sequence
  Description of Artificial Sequence: Synthetic oligonucleotide
  Sense strand starting at position 2398 of SEQ ID NO: 1244340
ccaagauuaugcuuaaguu

SEQ ID NO: 1481245 - RNA, 19 nt, Artificial Sequence
  Description of Artificial Sequence: Synthetic oligonucleotide
  Antisense strand to SEQ ID NO: 1481244
aacuuaagcauaaucuugg

SEQ ID NO: 1481246 - RNA, 19 nt, Artificial Sequence
  Description of Artificial Sequence: Synthetic oligonucleotide
  Sense strand starting at position 2589 of SEQ ID NO: 1244340
guaggauccucguucaagu

SEQ ID NO: 1481247 - RNA, 19 nt, Artificial Sequence
  Description of Artificial Sequence: Synthetic oligonucleotide
  Antisense strand to SEQ ID NO: 1481246
acuugaacgaggauccuac

SEQ ID NO: 1481248 - RNA, 19 nt, Artificial Sequence
  Description of Artificial Sequence: Synthetic oligonucleotide
  Sense strand starting at position 2636 of SEQ ID NO: 1244340
ccaguuacugcuucgcuua

SEQ ID NO: 1481249 - RNA, 19 nt, Artificial Sequence
  Description of Artificial Sequence: Synthetic oligonucleotide
  Antisense strand to SEQ ID NO: 1481248
uaagcgaagcaguaacugg

SEQ ID NO: 1481250 - RNA, 19 nt, Artificial Sequence
  Description of Artificial Sequence: Synthetic oligonucleotide
  Sense strand starting at position 15 of SEQ ID NO: 1244341
cacguaaaguaccugagaa

SEQ ID NO: 1481251 - RNA, 19 nt, Artificial Sequence
  Description of Artificial Sequence: Synthetic oligonucleotide
  Antisense strand to SEQ ID NO: 1481250
uucucagguacuuuacgug

SEQ ID NO: 1481252 - RNA, 19 nt, Artificial Sequence
  Description of Artificial Sequence: Synthetic oligonucleotide
  Sense strand starting at position 16 of SEQ ID NO: 1244341
acguaaaguaccugagaaa

SEQ ID NO: 1481253 - RNA, 19 nt, Artificial Sequence
  Description of Artificial Sequence: Synthetic oligonucleotide
  Antisense strand to SEQ ID NO: 1481252
uuucucagguacuuuacgu

SEQ ID NO: 1481254 - RNA, 19 nt, Artificial Sequence
  Description of Artificial Sequence: Synthetic oligonucleotide
  Sense strand starting at position 45 of SEQ ID NO: 1244341
gggauaugagcuuggguuu

SEQ ID NO: 1481255 - RNA, 19 nt, Artificial Sequence
  Description of Artificial Sequence: Synthetic oligonucleotide
  Antisense strand to SEQ ID NO: 1481254
aaacccaagcucauauccc

SEQ ID NO: 1481256 - RNA, 19 nt, Artificial Sequence
  Description of Artificial Sequence: Synthetic oligonucleotide
  Sense strand starting at position 120 of SEQ ID NO: 1244341
ucccaaagcugccuggaaa

SEQ ID NO: 1481257 - RNA, 19 nt, Artificial Sequence
  Description of Artificial Sequence: Synthetic oligonucleotide
  Antisense strand to SEQ ID NO: 1481256
uuuccaggcagcuuuggga

SEQ ID NO: 1481258 - RNA, 19 nt, Artificial Sequence
  Description of Artificial Sequence: Synthetic oligonucleotide
  Sense strand starting at position 273 of SEQ ID NO: 1244341
gcucacaagugagugguaa

SEQ ID NO: 1481259 - RNA, 19 nt, Artificial Sequence
  Description of Artificial Sequence: Synthetic oligonucleotide
  Antisense strand to SEQ ID NO: 1481258
uuaccacucacuugugagc

SEQ ID NO: 1481260 - RNA, 19 nt, Artificial Sequence
  Description of Artificial Sequence: Synthetic oligonucleotide
  Sense strand starting at position 347 of SEQ ID NO: 1244341
acggauucucccugugcca

SEQ ID NO: 1481261 - RNA, 19 nt, Artificial Sequence
  Description of Artificial Sequence: Synthetic oligonucleotide
  Antisense strand to SEQ ID NO: 1481260
uggcacagggagaauccgu

SEQ ID NO: 1481262 - RNA, 19 nt, Artificial Sequence
  Description of Artificial Sequence: Synthetic oligonucleotide
  Sense strand starting at position 418 of SEQ ID NO: 1244341
acagcagcccucuaugaua

SEQ ID NO: 1481263 - RNA, 19 nt, Artificial Sequence
  Description of Artificial Sequence: Synthetic oligonucleotide
  Antisense strand to SEQ ID NO: 1481262
uaucauagagggcugcugu

SEQ ID NO: 1481264 - RNA, 19 nt, Artificial Sequence
  Description of Artificial Sequence: Synthetic oligonucleotide
  Sense strand starting at position 521 of SEQ ID NO: 1244341
cccaaaucuugacagggua

SEQ ID NO: 1481265 - RNA, 19 nt, Artificial Sequence
  Description of Artificial Sequence: Synthetic oligonucleotide
  Antisense strand to SEQ ID NO: 1481264
uacccugucaagauuuggg

SEQ ID NO: 1481266 - RNA, 19 nt, Artificial Sequence
  Description of Artificial Sequence: Synthetic oligonucleotide
  Sense strand starting at position 617 of SEQ ID NO: 1244341
ugugcuugucaggguugaa

SEQ ID NO: 1481267 - RNA, 19 nt, Artificial Sequence
  Description of Artificial Sequence: Synthetic oligonucleotide
  Antisense strand to SEQ ID NO: 1481266
uucaacccugacaagcaca

SEQ ID NO: 1481268 - RNA, 19 nt, Artificial Sequence
  Description of Artificial Sequence: Synthetic oligonucleotide
  Sense strand starting at position 694 of SEQ ID NO: 1244341
ccucucagucuugggacaa

SEQ ID NO: 1481269 - RNA, 19 nt, Artificial Sequence
  Description of Artificial Sequence: Synthetic oligonucleotide
  Antisense strand to SEQ ID NO: 1481268
uugucccaagacugagagg

SEQ ID NO: 1481270 - RNA, 19 nt, Artificial Sequence
  Description of Artificial Sequence: Synthetic oligonucleotide
  Sense strand starting at position 706 of SEQ ID NO: 1244341
gggacaauguguagguagu

SEQ ID NO: 1481271 - RNA, 19 nt, Artificial Sequence
  Description of Artificial Sequence: Synthetic oligonucleotide
  Antisense strand to SEQ ID NO: 1481270
acuaccuacacauuguccc

SEQ ID NO: 1481272 - RNA, 19 nt, Artificial Sequence
  Description of Artificial Sequence: Synthetic oligonucleotide
  Sense strand starting at position 728 of SEQ ID NO: 1244341
gggugaugcuucucaacug

SEQ ID NO: 1481273 - RNA, 19 nt, Artificial Sequence
  Description of Artificial Sequence: Synthetic oligonucleotide
  Antisense strand to SEQ ID NO: 1481272
caguugagaagcaucaccc

SEQ ID NO: 1481274 - RNA, 19 nt, Artificial Sequence
  Description of Artificial Sequence: Synthetic oligonucleotide
  Sense strand starting at position 1126 of SEQ ID NO: 1244341
ugaccagaugccuggagua

SEQ ID NO: 1481275 - RNA, 19 nt, Artificial Sequence
  Description of Artificial Sequence: Synthetic oligonucleotide
  Antisense strand to SEQ ID NO: 1481274
uacuccaggcaucugguca

SEQ ID NO: 1481276 - RNA, 19 nt, Artificial Sequence
  Description of Artificial Sequence: Synthetic oligonucleotide
  Sense strand starting at position 1327 of SEQ ID NO: 1244341
ccaggaaucuacuuugcaa

SEQ ID NO: 1481277 - RNA, 19 nt, Artificial Sequence
  Description of Artificial Sequence: Synthetic oligonucleotide
  Antisense strand to SEQ ID NO: 1481276
uugcaaaguagauuccugg

SEQ ID NO: 1481278 - RNA, 19 nt, Artificial Sequence
  Description of Artificial Sequence: Synthetic oligonucleotide
  Sense strand starting at position 1329 of SEQ ID NO: 1244341
aggaaucuacuuugcaaac

SEQ ID NO: 1481279 - RNA, 19 nt, Artificial Sequence
  Description of Artificial Sequence: Synthetic oligonucleotide
  Antisense strand to SEQ ID NO: 1481278
guuugcaaaguagauuccu

SEQ ID NO: 1481280 - RNA, 19 nt, Artificial Sequence
  Description of Artificial Sequence: Synthetic oligonucleotide
  Sense strand starting at position 1330 of SEQ ID NO: 1244341
ggaaucuacuuugcaaacu

SEQ ID NO: 1481281 - RNA, 19 nt, Artificial Sequence
  Description of Artificial Sequence: Synthetic oligonucleotide
  Antisense strand to SEQ ID NO: 1481280
aguuugcaaaguagauucc

SEQ ID NO: 1481282 - RNA, 19 nt, Artificial Sequence
  Description of Artificial Sequence: Synthetic oligonucleotide
  Sense strand starting at position 1348 of SEQ ID NO: 1244341
uguaaagcgcuuuaaauac

SEQ ID NO: 1481283 - RNA, 19 nt, Artificial Sequence
  Description of Artificial Sequence: Synthetic oligonucleotide
  Antisense strand to SEQ ID NO: 1481282
guauuuaaagcgcuuuaca

SEQ ID NO: 1481284 - RNA, 19 nt, Artificial Sequence
  Description of Artificial Sequence: Synthetic oligonucleotide
  Sense strand starting at position 2152 of SEQ ID NO: 1244341
gacgucugugcguuguaau

SEQ ID NO: 1481285 - RNA, 19 nt, Artificial Sequence
  Description of Artificial Sequence: Synthetic oligonucleotide
  Antisense strand to SEQ ID NO: 1481284
auuacaacgcacagacguc

SEQ ID NO: 1481286 - RNA, 19 nt, Artificial Sequence
  Description of Artificial Sequence: Synthetic oligonucleotide
  Sense strand starting at position 2154 of SEQ ID NO: 1244341
cgucugugcguuguaaugu

SEQ ID NO: 1481287 - RNA, 19 nt, Artificial Sequence
  Description of Artificial Sequence: Synthetic oligonucleotide
  Antisense strand to SEQ ID NO: 1481286
acauuacaacgcacagacg

SEQ ID NO: 1481288 - RNA, 19 nt, Artificial Sequence
  Description of Artificial Sequence: Synthetic oligonucleotide
  Sense strand starting at position 2269 of SEQ ID NO: 1244341
uuaggucaccucugcgaga

SEQ ID NO: 1481289 - RNA, 19 nt, Artificial Sequence
  Description of Artificial Sequence: Synthetic oligonucleotide
  Antisense strand to SEQ ID NO: 1481288
ucucgcagaggugaccuaa

SEQ ID NO: 1481290 - RNA, 19 nt, Artificial Sequence
  Description of Artificial Sequence: Synthetic oligonucleotide
  Sense strand starting at position 2271 of SEQ ID NO: 1244341
aggucaccucugcgagaga

SEQ ID NO: 1481291 - RNA, 19 nt, Artificial Sequence
  Description of Artificial Sequence: Synthetic oligonucleotide
  Antisense strand to SEQ ID NO: 1481290
ucucucgcagaggugaccu

SEQ ID NO: 1481292 - RNA, 19 nt, Artificial Sequence
  Description of Artificial Sequence: Synthetic oligonucleotide
  Sense strand starting at position 2290 of SEQ ID NO: 1244341
gugucuugguggccucauu

SEQ ID NO: 1481293 - RNA, 19 nt, Artificial Sequence
  Description of Artificial Sequence: Synthetic oligonucleotide
  Antisense strand to SEQ ID NO: 1481292
aaugaggccaccaagacac

SEQ ID NO: 1481294 - RNA, 19 nt, Artificial Sequence
  Description of Artificial Sequence: Synthetic oligonucleotide
  Sense strand starting at position 2443 of SEQ ID NO: 1244341
aaggaugguugggcauaua

SEQ ID NO: 1481295 - RNA, 19 nt, Artificial Sequence
  Description of Artificial Sequence: Synthetic oligonucleotide
  Antisense strand to SEQ ID NO: 1481294
uauaugcccaaccauccuu

SEQ ID NO: 1481296 - RNA, 19 nt, Artificial Sequence
  Description of Artificial Sequence: Synthetic oligonucleotide
  Sense strand starting at position 2593 of SEQ ID NO: 1244341
gacacuaagugggaauaau

SEQ ID NO: 1481297 - RNA, 19 nt, Artificial Sequence
  Description of Artificial Sequence: Synthetic oligonucleotide
  Antisense strand to SEQ ID NO: 1481296
auuauucccacuuaguguc

SEQ ID NO: 1481298 - RNA, 19 nt, Artificial Sequence
  Description of Artificial Sequence: Synthetic oligonucleotide
  Sense strand starting at position 2604 of SEQ ID NO: 1244341
ggaauaauaaccuggcgca

SEQ ID NO: 1481299 - RNA, 19 nt, Artificial Sequence
  Description of Artificial Sequence: Synthetic oligonucleotide
  Antisense strand to SEQ ID NO: 1481298
ugcgccagguuauuauucc

SEQ ID NO: 1481300 - RNA, 19 nt, Artificial Sequence
  Description of Artificial Sequence: Synthetic oligonucleotide
  Sense strand starting at position 2687 of SEQ ID NO: 1244341
acacgugcauucuuuguua

SEQ ID NO: 1481301 - RNA, 19 nt, Artificial Sequence
  Description of Artificial Sequence: Synthetic oligonucleotide
  Antisense strand to SEQ ID NO: 1481300
uaacaaagaaugcacgugu

SEQ ID NO: 1481302 - RNA, 19 nt, Artificial Sequence
  Description of Artificial Sequence: Synthetic oligonucleotide
  Sense strand starting at position 2689 of SEQ ID NO: 1244341
acgugcauucuuuguuaau

SEQ ID NO: 1481303 - RNA, 19 nt, Artificial Sequence
  Description of Artificial Sequence: Synthetic oligonucleotide
  Antisense strand to SEQ ID NO: 1481302
auuaacaaagaaugcacgu

SEQ ID NO: 1481304 - RNA, 19 nt, Artificial Sequence
  Description of Artificial Sequence: Synthetic oligonucleotide
  Sense strand starting at position 2690 of SEQ ID NO: 1244341
cgugcauucuuuguuaauu

SEQ ID NO: 1481305 - RNA, 19 nt, Artificial Sequence
  Description of Artificial Sequence: Synthetic oligonucleotide
  Antisense strand to SEQ ID NO: 1481304
aauuaacaaagaaugcacg

SEQ ID NO: 1481306 - RNA, 19 nt, Artificial Sequence
  Description of Artificial Sequence: Synthetic oligonucleotide
  Sense strand starting at position 2691 of SEQ ID NO: 1244341
gugcauucuuuguuaauuu

SEQ ID NO: 1481307 - RNA, 19 nt, Artificial Sequence
  Description of Artificial Sequence: Synthetic oligonucleotide
  Antisense strand to SEQ ID NO: 1481306
aaauuaacaaagaaugcac

SEQ ID NO: 1481308 - RNA, 19 nt, Artificial Sequence
  Description of Artificial Sequence: Synthetic oligonucleotide
  Sense strand starting at position 2700 of SEQ ID NO: 1244341
uuguuaauuugcucauggu

SEQ ID NO: 1481309 - RNA, 19 nt, Artificial Sequence
  Description of Artificial Sequence: Synthetic oligonucleotide
  Antisense strand to SEQ ID NO: 1481308
accaugagcaaauuaacaa

SEQ ID NO: 1481310 - RNA, 19 nt, Artificial Sequence
  Description of Artificial Sequence: Synthetic oligonucleotide
  Sense strand starting at position 2703 of SEQ ID NO: 1244341
uuaauuugcucauggugac

SEQ ID NO: 1481311 - RNA, 19 nt, Artificial Sequence
  Description of Artificial Sequence: Synthetic oligonucleotide
  Antisense strand to SEQ ID NO: 1481310
gucaccaugagcaaauuaa

SEQ ID NO: 1481312 - RNA, 19 nt, Artificial Sequence
  Description of Artificial Sequence: Synthetic oligonucleotide
  Sense strand starting at position 2717 of SEQ ID NO: 1244341
gugacaaccuuagaaagua

SEQ ID NO: 1481313 - RNA, 19 nt, Artificial Sequence
  Description of Artificial Sequence: Synthetic oligonucleotide
  Antisense strand to SEQ ID NO: 1481312
uacuuucuaagguugucac

SEQ ID NO: 1481314 - RNA, 19 nt, Artificial Sequence
  Description of Artificial Sequence: Synthetic oligonucleotide
  Sense strand starting at position 2794 of SEQ ID NO: 1244341
cugagaagcugauaccaga

SEQ ID NO: 1481315 - RNA, 19 nt, Artificial Sequence
  Description of Artificial Sequence: Synthetic oligonucleotide
  Antisense strand to SEQ ID NO: 1481314
ucugguaucagcuucucag

SEQ ID NO: 1481316 - RNA, 19 nt, Artificial Sequence
  Description of Artificial Sequence: Synthetic oligonucleotide
  Sense strand starting at position 3410 of SEQ ID NO: 1244341
cgaggauccaggugucuca

SEQ ID NO: 1481317 - RNA, 19 nt, Artificial Sequence
  Description of Artificial Sequence: Synthetic oligonucleotide
  Antisense strand to SEQ ID NO: 1481316
ugagacaccuggauccucg

SEQ ID NO: 1481318 - RNA, 19 nt, Artificial Sequence
  Description of Artificial Sequence: Synthetic oligonucleotide
  Sense strand starting at position 3485 of SEQ ID NO: 1244341
gguuuagaaucucucugag

SEQ ID NO: 1481319 - RNA, 19 nt, Artificial Sequence
  Description of Artificial Sequence: Synthetic oligonucleotide
  Antisense strand to SEQ ID NO: 1481318
cucagagagauucuaaacc

SEQ ID NO: 1481320 - RNA, 19 nt, Artificial Sequence
  Description of Artificial Sequence: Synthetic oligonucleotide
  Sense strand starting at position 3487 of SEQ ID NO: 1244341
uuuagaaucucucugaggu

SEQ ID NO: 1481321 - RNA, 19 nt, Artificial Sequence
  Description of Artificial Sequence: Synthetic oligonucleotide
  Antisense strand to SEQ ID NO: 1481320
accucagagagauucuaaa

SEQ ID NO: 1481322 - RNA, 19 nt, Artificial Sequence
  Description of Artificial Sequence: Synthetic oligonucleotide
  Sense strand starting at position 3488 of SEQ ID NO: 1244341
uuagaaucucucugagguc

SEQ ID NO: 1481323 - RNA, 19 nt, Artificial Sequence
  Description of Artificial Sequence: Synthetic oligonucleotide
  Antisense strand to SEQ ID NO: 1481322
gaccucagagagauucuaa

SEQ ID NO: 1481324 - RNA, 19 nt, Artificial Sequence
  Description of Artificial Sequence: Synthetic oligonucleotide
  Sense strand starting at position 3489 of SEQ ID NO: 1244341
uagaaucucucugagguca

SEQ ID NO: 1481325 - RNA, 19 nt, Artificial Sequence
  Description of Artificial Sequence: Synthetic oligonucleotide
  Antisense strand to SEQ ID NO: 1481324
ugaccucagagagauucua

SEQ ID NO: 1481326 - RNA, 19 nt, Artificial Sequence
  Description of Artificial Sequence: Synthetic oligonucleotide
  Sense strand starting at position 3587 of SEQ ID NO: 1244341
gggacuuaagccuggagau

SEQ ID NO: 1481327 - RNA, 19 nt, Artificial Sequence
  Description of Artificial Sequence: Synthetic oligonucleotide
  Antisense strand to SEQ ID NO: 1481326
aucuccaggcuuaaguccc

SEQ ID NO: 1481328 - RNA, 19 nt, Artificial Sequence
  Description of Artificial Sequence: Synthetic oligonucleotide
  Sense strand starting at position 3588 of SEQ ID NO: 1244341
ggacuuaagccuggagauc

SEQ ID NO: 1481329 - RNA, 19 nt, Artificial Sequence
  Description of Artificial Sequence: Synthetic oligonucleotide
  Antisense strand to SEQ ID NO: 1481328
gaucuccaggcuuaagucc

SEQ ID NO: 1481330 - RNA, 19 nt, Artificial Sequence
  Description of Artificial Sequence: Synthetic oligonucleotide
  Sense strand starting at position 38 of SEQ ID NO: 1244342
ucacacagaucaguguaua

SEQ ID NO: 1481331 - RNA, 19 nt, Artificial Sequence
  Description of Artificial Sequence: Synthetic oligonucleotide
  Antisense strand to SEQ ID NO: 1481330
uauacacugaucuguguga

SEQ ID NO: 1481332 - RNA, 19 nt, Artificial Sequence
  Description of Artificial Sequence: Synthetic oligonucleotide
  Sense strand starting at position 55 of SEQ ID NO: 1244342
uaugaaaucugggcaguca

SEQ ID NO: 1481333 - RNA, 19 nt, Artificial Sequence
  Description of Artificial Sequence: Synthetic oligonucleotide
  Antisense strand to SEQ ID NO: 1481332
ugacugcccagauuucaua

SEQ ID NO: 1481334 - RNA, 19 nt, Artificial Sequence
  Description of Artificial Sequence: Synthetic oligonucleotide
  Sense strand starting at position 56 of SEQ ID NO: 1244342
augaaaucugggcagucau

SEQ ID NO: 1481335 - RNA, 19 nt, Artificial Sequence
  Description of Artificial Sequence: Synthetic oligonucleotide
  Antisense strand to SEQ ID NO: 1481334
augacugcccagauuucau

SEQ ID NO: 1481336 - RNA, 19 nt, Artificial Sequence
  Description of Artificial Sequence: Synthetic oligonucleotide
  Sense strand starting at position 389 of SEQ ID NO: 1244342
auggucugccuguaagaga

SEQ ID NO: 1481337 - RNA, 19 nt, Artificial Sequence
  Description of Artificial Sequence: Synthetic oligonucleotide
  Antisense strand to SEQ ID NO: 1481336
ucucuuacaggcagaccau

SEQ ID NO: 1481338 - RNA, 19 nt, Artificial Sequence
  Description of Artificial Sequence: Synthetic oligonucleotide
  Sense strand starting at position 472 of SEQ ID NO: 1244342
gugcucuagcuguccuuau

SEQ ID NO: 1481339 - RNA, 19 nt, Artificial Sequence
  Description of Artificial Sequence: Synthetic oligonucleotide
  Antisense strand to SEQ ID NO: 1481338
auaaggacagcuagagcac

SEQ ID NO: 1481340 - RNA, 19 nt, Artificial Sequence
  Description of Artificial Sequence: Synthetic oligonucleotide
  Sense strand starting at position 483 of SEQ ID NO: 1244342
guccuuaugcuggguaaca

SEQ ID NO: 1481341 - RNA, 19 nt, Artificial Sequence
  Description of Artificial Sequence: Synthetic oligonucleotide
  Antisense strand to SEQ ID NO: 1481340
uguuacccagcauaaggac

SEQ ID NO: 1481342 - RNA, 19 nt, Artificial Sequence
  Description of Artificial Sequence: Synthetic oligonucleotide
  Sense strand starting at position 485 of SEQ ID NO: 1244342
ccuuaugcuggguaacaga

SEQ ID NO: 1481343 - RNA, 19 nt, Artificial Sequence
  Description of Artificial Sequence: Synthetic oligonucleotide
  Antisense strand to SEQ ID NO: 1481342
ucuguuacccagcauaagg

SEQ ID NO: 1481344 - RNA, 19 nt, Artificial Sequence
  Description of Artificial Sequence: Synthetic oligonucleotide
  Sense strand starting at position 527 of SEQ ID NO: 1244342
cugagaauuucucagagaa

SEQ ID NO: 1481345 - RNA, 19 nt, Artificial Sequence
  Description of Artificial Sequence: Synthetic oligonucleotide
  Antisense strand to SEQ ID NO: 1481344
uucucugagaaauucucag

SEQ ID NO: 1481346 - RNA, 19 nt, Artificial Sequence
  Description of Artificial Sequence: Synthetic oligonucleotide
  Sense strand starting at position 591 of SEQ ID NO: 1244342
cacguaaaguaccugagaa

SEQ ID NO: 1481347 - RNA, 19 nt, Artificial Sequence
  Description of Artificial Sequence: Synthetic oligonucleotide
  Antisense strand to SEQ ID NO: 1481346
uucucagguacuuuacgug

SEQ ID NO: 1481348 - RNA, 19 nt, Artificial Sequence
  Description of Artificial Sequence: Synthetic oligonucleotide
  Sense strand starting at position 592 of SEQ ID NO: 1244342
acguaaaguaccugagaaa

SEQ ID NO: 1481349 - RNA, 19 nt, Artificial Sequence
  Description of Artificial Sequence: Synthetic oligonucleotide
  Antisense strand to SEQ ID NO: 1481348
uuucucagguacuuuacgu

SEQ ID NO: 1481350 - RNA, 19 nt, Artificial Sequence
  Description of Artificial Sequence: Synthetic oligonucleotide
  Sense strand starting at position 621 of SEQ ID NO: 1244342
gggauaugagcuuggguuu

SEQ ID NO: 1481351 - RNA, 19 nt, Artificial Sequence
  Description of Artificial Sequence: Synthetic oligonucleotide
  Antisense strand to SEQ ID NO: 1481350
aaacccaagcucauauccc

SEQ ID NO: 1481352 - RNA, 19 nt, Artificial Sequence
  Description of Artificial Sequence: Synthetic oligonucleotide
  Sense strand starting at position 696 of SEQ ID NO: 1244342
ucccaaagcugccuggaaa

SEQ ID NO: 1481353 - RNA, 19 nt, Artificial Sequence
  Description of Artificial Sequence: Synthetic oligonucleotide
  Antisense strand to SEQ ID NO: 1481352
uuuccaggcagcuuuggga

SEQ ID NO: 1481354 - RNA, 19 nt, Artificial Sequence
  Description of Artificial Sequence: Synthetic oligonucleotide
  Sense strand starting at position 849 of SEQ ID NO: 1244342
gcucacaagugagugguaa

SEQ ID NO: 1481355 - RNA, 19 nt, Artificial Sequence
  Description of Artificial Sequence: Synthetic oligonucleotide
  Antisense strand to SEQ ID NO: 1481354
uuaccacucacuugugagc

SEQ ID NO: 1481356 - RNA, 19 nt, Artificial Sequence
  Description of Artificial Sequence: Synthetic oligonucleotide
  Sense strand starting at position 923 of SEQ ID NO: 1244342
acggauucucccugugcca

SEQ ID NO: 1481357 - RNA, 19 nt, Artificial Sequence
  Description of Artificial Sequence: Synthetic oligonucleotide
  Antisense strand to SEQ ID NO: 1481356
uggcacagggagaauccgu

SEQ ID NO: 1481358 - RNA, 19 nt, Artificial Sequence
  Description of Artificial Sequence: Synthetic oligonucleotide
  Sense strand starting at position 994 of SEQ ID NO: 1244342
acagcagcccucuaugaua

SEQ ID NO: 1481359 - RNA, 19 nt, Artificial Sequence
  Description of Artificial Sequence: Synthetic oligonucleotide
  Antisense strand to SEQ ID NO: 1481358
uaucauagagggcugcugu

SEQ ID NO: 1481360 - RNA, 19 nt, Artificial Sequence
  Description of Artificial Sequence: Synthetic oligonucleotide
  Sense strand starting at position 1097 of SEQ ID NO: 1244342
cccaaaucuugacagggua

SEQ ID NO: 1481361 - RNA, 19 nt, Artificial Sequence
  Description of Artificial Sequence: Synthetic oligonucleotide
  Antisense strand to SEQ ID NO: 1481360
uacccugucaagauuuggg

SEQ ID NO: 1481362 - RNA, 19 nt, Artificial Sequence
  Description of Artificial Sequence: Synthetic oligonucleotide
  Sense strand starting at position 1193 of SEQ ID NO: 1244342
ugugcuugucaggguugaa

SEQ ID NO: 1481363 - RNA, 19 nt, Artificial Sequence
  Description of Artificial Sequence: Synthetic oligonucleotide
  Antisense strand to SEQ ID NO: 1481362
uucaacccugacaagcaca

SEQ ID NO: 1481364 - RNA, 19 nt, Artificial Sequence
  Description of Artificial Sequence: Synthetic oligonucleotide
  Sense strand starting at position 1270 of SEQ ID NO: 1244342
ccucucagucuugggacaa

SEQ ID NO: 1481365 - RNA, 19 nt, Artificial Sequence
  Description of Artificial Sequence: Synthetic oligonucleotide
  Antisense strand to SEQ ID NO: 1481364
uugucccaagacugagagg

SEQ ID NO: 1481366 - RNA, 19 nt, Artificial Sequence
  Description of Artificial Sequence: Synthetic oligonucleotide
  Sense strand starting at position 1282 of SEQ ID NO: 1244342
gggacaauguguagguagu

SEQ ID NO: 1481367 - RNA, 19 nt, Artificial Sequence
  Description of Artificial Sequence: Synthetic oligonucleotide
  Antisense strand to SEQ ID NO: 1481366
acuaccuacacauuguccc

SEQ ID NO: 1481368 - RNA, 19 nt, Artificial Sequence
  Description of Artificial Sequence: Synthetic oligonucleotide
  Sense strand starting at position 1304 of SEQ ID NO: 1244342
gggugaugcuucucaacug

SEQ ID NO: 1481369 - RNA, 19 nt, Artificial Sequence
  Description of Artificial Sequence: Synthetic oligonucleotide
  Antisense strand to SEQ ID NO: 1481368
caguugagaagcaucaccc

SEQ ID NO: 1481370 - RNA, 19 nt, Artificial Sequence
  Description of Artificial Sequence: Synthetic oligonucleotide
  Sense strand starting at position 1702 of SEQ ID NO: 1244342
ugaccagaugccuggagua

SEQ ID NO: 1481371 - RNA, 19 nt, Artificial Sequence
  Description of Artificial Sequence: Synthetic oligonucleotide
  Antisense strand to SEQ ID NO: 1481370
uacuccaggcaucugguca

SEQ ID NO: 1481372 - RNA, 19 nt, Artificial Sequence
  Description of Artificial Sequence: Synthetic oligonucleotide
  Sense strand starting at position 1903 of SEQ ID NO: 1244342
ccaggaaucuacuuugcaa

SEQ ID NO: 1481373 - RNA, 19 nt, Artificial Sequence
  Description of Artificial Sequence: Synthetic oligonucleotide
  Antisense strand to SEQ ID NO: 1481372
uugcaaaguagauuccugg

SEQ ID NO: 1481374 - RNA, 19 nt, Artificial Sequence
  Description of Artificial Sequence: Synthetic oligonucleotide
  Sense strand starting at position 1905 of SEQ ID NO: 1244342
aggaaucuacuuugcaaac

SEQ ID NO: 1481375 - RNA, 19 nt, Artificial Sequence
  Description of Artificial Sequence: Synthetic oligonucleotide
  Antisense strand to SEQ ID NO: 1481374
guuugcaaaguagauuccu

SEQ ID NO: 1481376 - RNA, 19 nt, Artificial Sequence
  Description of Artificial Sequence: Synthetic oligonucleotide
  Sense strand starting at position 1906 of SEQ ID NO: 1244342
ggaaucuacuuugcaaacu

SEQ ID NO: 1481377 - RNA, 19 nt, Artificial Sequence
  Description of Artificial Sequence: Synthetic oligonucleotide
  Antisense strand to SEQ ID NO: 1481376
aguuugcaaaguagauucc

SEQ ID NO: 1481378 - RNA, 19 nt, Artificial Sequence
  Description of Artificial Sequence: Synthetic oligonucleotide
  Sense strand starting at position 1924 of SEQ ID NO: 1244342
uguaaagcgcuuuaaauac

SEQ ID NO: 1481379 - RNA, 19 nt, Artificial Sequence
  Description of Artificial Sequence: Synthetic oligonucleotide
  Antisense strand to SEQ ID NO: 1481378
guauuuaaagcgcuuuaca

SEQ ID NO: 1481380 - RNA, 19 nt, Artificial Sequence
  Description of Artificial Sequence: Synthetic oligonucleotide
  Sense strand starting at position 2728 of SEQ ID NO: 1244342
gacgucugugcguuguaau

SEQ ID NO: 1481381 - RNA, 19 nt, Artificial Sequence
  Description of Artificial Sequence: Synthetic oligonucleotide
  Antisense strand to SEQ ID NO: 1481380
auuacaacgcacagacguc

SEQ ID NO: 1481382 - RNA, 19 nt, Artificial Sequence
  Description of Artificial Sequence: Synthetic oligonucleotide
  Sense strand starting at position 2730 of SEQ ID NO: 1244342
cgucugugcguuguaaugu

SEQ ID NO: 1481383 - RNA, 19 nt, Artificial Sequence
  Description of Artificial Sequence: Synthetic oligonucleotide
  Antisense strand to SEQ ID NO: 1481382
acauuacaacgcacagacg

SEQ ID NO: 1481384 - RNA, 19 nt, Artificial Sequence
  Description of Artificial Sequence: Synthetic oligonucleotide
  Sense strand starting at position 2845 of SEQ ID NO: 1244342
uuaggucaccucugcgaga

SEQ ID NO: 1481385 - RNA, 19 nt, Artificial Sequence
  Description of Artificial Sequence: Synthetic oligonucleotide
  Antisense strand to SEQ ID NO: 1481384
ucucgcagaggugaccuaa

SEQ ID NO: 1481386 - RNA, 19 nt, Artificial Sequence
  Description of Artificial Sequence: Synthetic oligonucleotide
  Sense strand starting at position 2847 of SEQ ID NO: 1244342
aggucaccucugcgagaga

SEQ ID NO: 1481387 - RNA, 19 nt, Artificial Sequence
  Description of Artificial Sequence: Synthetic oligonucleotide
  Antisense strand to SEQ ID NO: 1481386
ucucucgcagaggugaccu

SEQ ID NO: 1481388 - RNA, 19 nt, Artificial Sequence
  Description of Artificial Sequence: Synthetic oligonucleotide
  Sense strand starting at position 2866 of SEQ ID NO: 1244342
gugucuugguggccucauu

SEQ ID NO: 1481389 - RNA, 19 nt, Artificial Sequence
  Description of Artificial Sequence: Synthetic oligonucleotide
  Antisense strand to SEQ ID NO: 1481388
aaugaggccaccaagacac

SEQ ID NO: 1481390 - RNA, 19 nt, Artificial Sequence
  Description of Artificial Sequence: Synthetic oligonucleotide
  Sense strand starting at position 3019 of SEQ ID NO: 1244342
aaggaugguugggcauaua

SEQ ID NO: 1481391 - RNA, 19 nt, Artificial Sequence
  Description of Artificial Sequence: Synthetic oligonucleotide
  Antisense strand to SEQ ID NO: 1481390
uauaugcccaaccauccuu

SEQ ID NO: 1481392 - RNA, 19 nt, Artificial Sequence
  Description of Artificial Sequence: Synthetic oligonucleotide
  Sense strand starting at position 3169 of SEQ ID NO: 1244342
gacacuaagugggaauaau

SEQ ID NO: 1481393 - RNA, 19 nt, Artificial Sequence
  Description of Artificial Sequence: Synthetic oligonucleotide
  Antisense strand to SEQ ID NO: 1481392
auuauucccacuuaguguc

SEQ ID NO: 1481394 - RNA, 19 nt, Artificial Sequence
  Description of Artificial Sequence: Synthetic oligonucleotide
  Sense strand starting at position 3180 of SEQ ID NO: 1244342
ggaauaauaaccuggcgca

SEQ ID NO: 1481395 - RNA, 19 nt, Artificial Sequence
  Description of Artificial Sequence: Synthetic oligonucleotide
  Antisense strand to SEQ ID NO: 1481394
ugcgccagguuauuauucc

SEQ ID NO: 1481396 - RNA, 19 nt, Artificial Sequence
  Description of Artificial Sequence: Synthetic oligonucleotide
  Sense strand starting at position 3263 of SEQ ID NO: 1244342
acacgugcauucuuuguua

SEQ ID NO: 1481397 - RNA, 19 nt, Artificial Sequence
  Description of Artificial Sequence: Synthetic oligonucleotide
  Antisense strand to SEQ ID NO: 1481396
uaacaaagaaugcacgugu

SEQ ID NO: 1481398 - RNA, 19 nt, Artificial Sequence
  Description of Artificial Sequence: Synthetic oligonucleotide
  Sense strand starting at position 3265 of SEQ ID NO: 1244342
acgugcauucuuuguuaau

SEQ ID NO: 1481399 - RNA, 19 nt, Artificial Sequence
  Description of Artificial Sequence: Synthetic oligonucleotide
  Antisense strand to SEQ ID NO: 1481398
auuaacaaagaaugcacgu

SEQ ID NO: 1481400 - RNA, 19 nt, Artificial Sequence
  Description of Artificial Sequence: Synthetic oligonucleotide
  Sense strand starting at position 3267 of SEQ ID NO: 1244342
gugcauucuuuguuaauuu

SEQ ID NO: 1481401 - RNA, 19 nt, Artificial Sequence
  Description of Artificial Sequence: Synthetic oligonucleotide
  Antisense strand to SEQ ID NO: 1481400
aaauuaacaaagaaugcac

SEQ ID NO: 1481402 - RNA, 19 nt, Artificial Sequence
  Description of Artificial Sequence: Synthetic oligonucleotide
  Sense strand starting at position 3276 of SEQ ID NO: 1244342
uuguuaauuugcucauggu

SEQ ID NO: 1481403 - RNA, 19 nt, Artificial Sequence
  Description of Artificial Sequence: Synthetic oligonucleotide
  Antisense strand to SEQ ID NO: 1481402
accaugagcaaauuaacaa

SEQ ID NO: 1481404 - RNA, 19 nt, Artificial Sequence
  Description of Artificial Sequence: Synthetic oligonucleotide
  Sense strand starting at position 3279 of SEQ ID NO: 1244342
uuaauuugcucauggugac

SEQ ID NO: 1481405 - RNA, 19 nt, Artificial Sequence
  Description of Artificial Sequence: Synthetic oligonucleotide
  Antisense strand to SEQ ID NO: 1481404
gucaccaugagcaaauuaa

SEQ ID NO: 1481406 - RNA, 19 nt, Artificial Sequence
  Description of Artificial Sequence: Synthetic oligonucleotide
  Sense strand starting at position 3293 of SEQ ID NO: 1244342
gugacaaccuuagaaagua

SEQ ID NO: 1481407 - RNA, 19 nt, Artificial Sequence
  Description of Artificial Sequence: Synthetic oligonucleotide
  Antisense strand to SEQ ID NO: 1481406
uacuuucuaagguugucac

SEQ ID NO: 1481408 - RNA, 19 nt, Artificial Sequence
  Description of Artificial Sequence: Synthetic oligonucleotide
  Sense strand starting at position 3370 of SEQ ID NO: 1244342
cugagaagcugauaccaga

SEQ ID NO: 1481409 - RNA, 19 nt, Artificial Sequence
  Description of Artificial Sequence: Synthetic oligonucleotide
  Antisense strand to SEQ ID NO: 1481408
ucugguaucagcuucucag

SEQ ID NO: 1481410 - RNA, 19 nt, Artificial Sequence
  Description of Artificial Sequence: Synthetic oligonucleotide
  Sense strand starting at position 311 of SEQ ID NO: 1244343
cuuugacgaccagaucauu

SEQ ID NO: 1481411 - RNA, 19 nt, Artificial Sequence
  Description of Artificial Sequence: Synthetic oligonucleotide
  Antisense strand to SEQ ID NO: 1481410
aaugaucuggucgucaaag

SEQ ID NO: 1481412 - RNA, 19 nt, Artificial Sequence
  Description of Artificial Sequence: Synthetic oligonucleotide
  Sense strand starting at position 316 of SEQ ID NO: 1244343
acgaccagaucauucuuau

SEQ ID NO: 1481413 - RNA, 19 nt, Artificial Sequence
  Description of Artificial Sequence: Synthetic oligonucleotide
  Antisense strand to SEQ ID NO: 1481412
auaagaaugaucuggucgu

SEQ ID NO: 1481414 - RNA, 19 nt, Artificial Sequence
  Description of Artificial Sequence: Synthetic oligonucleotide
  Sense strand starting at position 375 of SEQ ID NO: 1244343
guuauuuccuccuugugag

SEQ ID NO: 1481415 - RNA, 19 nt, Artificial Sequence
  Description of Artificial Sequence: Synthetic oligonucleotide
  Antisense strand to SEQ ID NO: 1481414
cucacaaggaggaaauaac

SEQ ID NO: 1481416 - RNA, 19 nt, Artificial Sequence
  Description of Artificial Sequence: Synthetic oligonucleotide
  Sense strand starting at position 376 of SEQ ID NO: 1244343
uuauuuccuccuugugagu

SEQ ID NO: 1481417 - RNA, 19 nt, Artificial Sequence
  Description of Artificial Sequence: Synthetic oligonucleotide
  Antisense strand to SEQ ID NO: 1481416
acucacaaggaggaaauaa

SEQ ID NO: 1481418 - RNA, 19 nt, Artificial Sequence
  Description of Artificial Sequence: Synthetic oligonucleotide
  Sense strand starting at position 434 of SEQ ID NO: 1244343
ggucuacugugggacucau

SEQ ID NO: 1481419 - RNA, 19 nt, Artificial Sequence
  Description of Artificial Sequence: Synthetic oligonucleotide
  Antisense strand to SEQ ID NO: 1481418
augagucccacaguagacc

SEQ ID NO: 1481420 - RNA, 19 nt, Artificial Sequence
  Description of Artificial Sequence: Synthetic oligonucleotide
  Sense strand starting at position 474 of SEQ ID NO: 1244343
agaggagcucacugaccua

SEQ ID NO: 1481421 - RNA, 19 nt, Artificial Sequence
  Description of Artificial Sequence: Synthetic oligonucleotide
  Antisense strand to SEQ ID NO: 1481420
uaggucagugagcuccucu

SEQ ID NO: 1481422 - RNA, 19 nt, Artificial Sequence
  Description of Artificial Sequence: Synthetic oligonucleotide
  Sense strand starting at position 493 of SEQ ID NO: 1244343
aggaguagcuguccagaaa

SEQ ID NO: 1481423 - RNA, 19 nt, Artificial Sequence
  Description of Artificial Sequence: Synthetic oligonucleotide
  Antisense strand to SEQ ID NO: 1481422
uuucuggacagcuacuccu

SEQ ID NO: 1481424 - RNA, 19 nt, Artificial Sequence
  Description of Artificial Sequence: Synthetic oligonucleotide
  Sense strand starting at position 494 of SEQ ID NO: 1244343
ggaguagcuguccagaaag

SEQ ID NO: 1481425 - RNA, 19 nt, Artificial Sequence
  Description of Artificial Sequence: Synthetic oligonucleotide
  Antisense strand to SEQ ID NO: 1481424
cuuucuggacagcuacucc

SEQ ID NO: 1481426 - RNA, 19 nt, Artificial Sequence
  Description of Artificial Sequence: Synthetic oligonucleotide
  Sense strand starting at position 610 of SEQ ID NO: 1244343
acuaguuagcauuaguguu

SEQ ID NO: 1481427 - RNA, 19 nt, Artificial Sequence
  Description of Artificial Sequence: Synthetic oligonucleotide
  Antisense strand to SEQ ID NO: 1481426
aacacuaaugcuaacuagu

SEQ ID NO: 1481428 - RNA, 19 nt, Artificial Sequence
  Description of Artificial Sequence: Synthetic oligonucleotide
  Sense strand starting at position 654 of SEQ ID NO: 1244343
cugacauugcccuggguua

SEQ ID NO: 1481429 - RNA, 19 nt, Artificial Sequence
  Description of Artificial Sequence: Synthetic oligonucleotide
  Antisense strand to SEQ ID NO: 1481428
uaacccagggcaaugucag

SEQ ID NO: 1481430 - RNA, 19 nt, Artificial Sequence
  Description of Artificial Sequence: Synthetic oligonucleotide
  Sense strand starting at position 692 of SEQ ID NO: 1244343
uguggcaucagacagguau

SEQ ID NO: 1481431 - RNA, 19 nt, Artificial Sequence
  Description of Artificial Sequence: Synthetic oligonucleotide
  Antisense strand to SEQ ID NO: 1481430
auaccugucugaugccaca

SEQ ID NO: 1481432 - RNA, 19 nt, Artificial Sequence
  Description of Artificial Sequence: Synthetic oligonucleotide
  Sense strand starting at position 694 of SEQ ID NO: 1244343
uggcaucagacagguauua

SEQ ID NO: 1481433 - RNA, 19 nt, Artificial Sequence
  Description of Artificial Sequence: Synthetic oligonucleotide
  Antisense strand to SEQ ID NO: 1481432
uaauaccugucugaugcca

SEQ ID NO: 1481434 - RNA, 19 nt, Artificial Sequence
  Description of Artificial Sequence: Synthetic oligonucleotide
  Sense strand starting at position 703 of SEQ ID NO: 1244343
acagguauuaccgaggcga

SEQ ID NO: 1481435 - RNA, 19 nt, Artificial Sequence
  Description of Artificial Sequence: Synthetic oligonucleotide
  Antisense strand to SEQ ID NO: 1481434
ucgccucgguaauaccugu

SEQ ID NO: 1481436 - RNA, 19 nt, Artificial Sequence
  Description of Artificial Sequence: Synthetic oligonucleotide
  Sense strand starting at position 705 of SEQ ID NO: 1244343
agguauuaccgaggcgaag

SEQ ID NO: 1481437 - RNA, 19 nt, Artificial Sequence
  Description of Artificial Sequence: Synthetic oligonucleotide
  Antisense strand to SEQ ID NO: 1481436
cuucgccucgguaauaccu

SEQ ID NO: 1481438 - RNA, 19 nt, Artificial Sequence
  Description of Artificial Sequence: Synthetic oligonucleotide
  Sense strand starting at position 732 of SEQ ID NO: 1244343
gggcuuucgugggcacuua

SEQ ID NO: 1481439 - RNA, 19 nt, Artificial Sequence
  Description of Artificial Sequence: Synthetic oligonucleotide
  Antisense strand to SEQ ID NO: 1481438
uaagugcccacgaaagccc

SEQ ID NO: 1481440 - RNA, 19 nt, Artificial Sequence
  Description of Artificial Sequence: Synthetic oligonucleotide
  Sense strand starting at position 764 of SEQ ID NO: 1244343
guaugagguggcuggagaa

SEQ ID NO: 1481441 - RNA, 19 nt, Artificial Sequence
  Description of Artificial Sequence: Synthetic oligonucleotide
  Antisense strand to SEQ ID NO: 1481440
uucuccagccaccucauac

SEQ ID NO: 1481442 - RNA, 19 nt, Artificial Sequence
  Description of Artificial Sequence: Synthetic oligonucleotide
  Sense strand starting at position 779 of SEQ ID NO: 1244343
agaaguguucauggagagu

SEQ ID NO: 1481443 - RNA, 19 nt, Artificial Sequence
  Description of Artificial Sequence: Synthetic oligonucleotide
  Antisense strand to SEQ ID NO: 1481442
acucuccaugaacacuucu

SEQ ID NO: 1481444 - RNA, 19 nt, Artificial Sequence
  Description of Artificial Sequence: Synthetic oligonucleotide
  Sense strand starting at position 869 of SEQ ID NO: 1244343
agggucucuuugcuaagga

SEQ ID NO: 1481445 - RNA, 19 nt, Artificial Sequence
  Description of Artificial Sequence: Synthetic oligonucleotide
  Antisense strand to SEQ ID NO: 1481444
uccuuagcaaagagacccu

SEQ ID NO: 1481446 - RNA, 19 nt, Artificial Sequence
  Description of Artificial Sequence: Synthetic oligonucleotide
  Sense strand starting at position 873 of SEQ ID NO: 1244343
ucucuuugcuaaggagcua

SEQ ID NO: 1481447 - RNA, 19 nt, Artificial Sequence
  Description of Artificial Sequence: Synthetic oligonucleotide
  Antisense strand to SEQ ID NO: 1481446
uagcuccuuagcaaagaga

SEQ ID NO: 1481448 - RNA, 19 nt, Artificial Sequence
  Description of Artificial Sequence: Synthetic oligonucleotide
  Sense strand starting at position 1060 of SEQ ID NO: 1244343
gccucaaugagcuagagga

SEQ ID NO: 1481449 - RNA, 19 nt, Artificial Sequence
  Description of Artificial Sequence: Synthetic oligonucleotide
  Antisense strand to SEQ ID NO: 1481448
uccucuagcucauugaggc

SEQ ID NO: 1481450 - RNA, 19 nt, Artificial Sequence
  Description of Artificial Sequence: Synthetic oligonucleotide
  Sense strand starting at position 1148 of SEQ ID NO: 1244343
acaucuuucucauagggaa

SEQ ID NO: 1481451 - RNA, 19 nt, Artificial Sequence
  Description of Artificial Sequence: Synthetic oligonucleotide
  Antisense strand to SEQ ID NO: 1481450
uucccuaugagaaagaugu

SEQ ID NO: 1481452 - RNA, 19 nt, Artificial Sequence
  Description of Artificial Sequence: Synthetic oligonucleotide
  Sense strand starting at position 1249 of SEQ ID NO: 1244343
augguacacugagaacaua

SEQ ID NO: 1481453 - RNA, 19 nt, Artificial Sequence
  Description of Artificial Sequence: Synthetic oligonucleotide
  Antisense strand to SEQ ID NO: 1481452
uauguucucaguguaccau

SEQ ID NO: 1481454 - RNA, 19 nt, Artificial Sequence
  Description of Artificial Sequence: Synthetic oligonucleotide
  Sense strand starting at position 1338 of SEQ ID NO: 1244343
auuuguagcuccuuaagca

SEQ ID NO: 1481455 - RNA, 19 nt, Artificial Sequence
  Description of Artificial Sequence: Synthetic oligonucleotide
  Antisense strand to SEQ ID NO: 1481454
ugcuuaaggagcuacaaau

SEQ ID NO: 1481456 - RNA, 19 nt, Artificial Sequence
  Description of Artificial Sequence: Synthetic oligonucleotide
  Sense strand starting at position 1339 of SEQ ID NO: 1244343
uuuguagcuccuuaagcaa

SEQ ID NO: 1481457 - RNA, 19 nt, Artificial Sequence
  Description of Artificial Sequence: Synthetic oligonucleotide
  Antisense strand to SEQ ID NO: 1481456
uugcuuaaggagcuacaaa

SEQ ID NO: 1481458 - RNA, 19 nt, Artificial Sequence
  Description of Artificial Sequence: Synthetic oligonucleotide
  Sense strand starting at position 1459 of SEQ ID NO: 1244343
auugcagucuaauagguuu

SEQ ID NO: 1481459 - RNA, 19 nt, Artificial Sequence
  Description of Artificial Sequence: Synthetic oligonucleotide
  Antisense strand to SEQ ID NO: 1481458
aaaccuauuagacugcaau

SEQ ID NO: 1481460 - RNA, 19 nt, Artificial Sequence
  Description of Artificial Sequence: Synthetic oligonucleotide
  Sense strand starting at position 1521 of SEQ ID NO: 1244343
acucauguuggccggacau

SEQ ID NO: 1481461 - RNA, 19 nt, Artificial Sequence
  Description of Artificial Sequence: Synthetic oligonucleotide
  Antisense strand to SEQ ID NO: 1481460
auguccggccaacaugagu

SEQ ID NO: 1481462 - RNA, 19 nt, Artificial Sequence
  Description of Artificial Sequence: Synthetic oligonucleotide
  Sense strand starting at position 2337 of SEQ ID NO: 1244343
guggcugaugcaugaaaua

SEQ ID NO: 1481463 - RNA, 19 nt, Artificial Sequence
  Description of Artificial Sequence: Synthetic oligonucleotide
  Antisense strand to SEQ ID NO: 1481462
uauuucaugcaucagccac

SEQ ID NO: 1481464 - RNA, 19 nt, Artificial Sequence
  Description of Artificial Sequence: Synthetic oligonucleotide
  Sense strand starting at position 2371 of SEQ ID NO: 1244343
cuaacaugccgauggcauu

SEQ ID NO: 1481465 - RNA, 19 nt, Artificial Sequence
  Description of Artificial Sequence: Synthetic oligonucleotide
  Antisense strand to SEQ ID NO: 1481464
aaugccaucggcauguuag

SEQ ID NO: 1481466 - RNA, 19 nt, Artificial Sequence
  Description of Artificial Sequence: Synthetic oligonucleotide
  Sense strand starting at position 2871 of SEQ ID NO: 1244343
auacacaaguguuucugau

SEQ ID NO: 1481467 - RNA, 19 nt, Artificial Sequence
  Description of Artificial Sequence: Synthetic oligonucleotide
  Antisense strand to SEQ ID NO: 1481466
aucagaaacacuuguguau

SEQ ID NO: 1481468 - RNA, 19 nt, Artificial Sequence
  Description of Artificial Sequence: Synthetic oligonucleotide
  Sense strand starting at position 2875 of SEQ ID NO: 1244343
acaaguguuucugauccca

SEQ ID NO: 1481469 - RNA, 19 nt, Artificial Sequence
  Description of Artificial Sequence: Synthetic oligonucleotide
  Antisense strand to SEQ ID NO: 1481468
ugggaucagaaacacuugu

SEQ ID NO: 1481470 - RNA, 19 nt, Artificial Sequence
  Description of Artificial Sequence: Synthetic oligonucleotide
  Sense strand starting at position 2880 of SEQ ID NO: 1244343
uguuucugaucccaaagcu

SEQ ID NO: 1481471 - RNA, 19 nt, Artificial Sequence
  Description of Artificial Sequence: Synthetic oligonucleotide
  Antisense strand to SEQ ID NO: 1481470
agcuuugggaucagaaaca

SEQ ID NO: 1481472 - RNA, 19 nt, Artificial Sequence
  Description of Artificial Sequence: Synthetic oligonucleotide
  Sense strand starting at position 3027 of SEQ ID NO: 1244343
uggcgucauuauucccauu

SEQ ID NO: 1481473 - RNA, 19 nt, Artificial Sequence
  Description of Artificial Sequence: Synthetic oligonucleotide
  Antisense strand to SEQ ID NO: 1481472
aaugggaauaaugacgcca

SEQ ID NO: 1481474 - RNA, 19 nt, Artificial Sequence
  Description of Artificial Sequence: Synthetic oligonucleotide
  Sense strand starting at position 3056 of SEQ ID NO: 1244343
ggaaauggagucugcacaa

SEQ ID NO: 1481475 - RNA, 19 nt, Artificial Sequence
  Description of Artificial Sequence: Synthetic oligonucleotide
  Antisense strand to SEQ ID NO: 1481474
uugugcagacuccauuucc

SEQ ID NO: 1481476 - RNA, 19 nt, Artificial Sequence
  Description of Artificial Sequence: Synthetic oligonucleotide
  Sense strand starting at position 3283 of SEQ ID NO: 1244343
ccuaguagcugagaucaua

SEQ ID NO: 1481477 - RNA, 19 nt, Artificial Sequence
  Description of Artificial Sequence: Synthetic oligonucleotide
  Antisense strand to SEQ ID NO: 1481476
uaugaucucagcuacuagg

SEQ ID NO: 1481478 - RNA, 19 nt, Artificial Sequence
  Description of Artificial Sequence: Synthetic oligonucleotide
  Sense strand starting at position 3913 of SEQ ID NO: 1244343
gagugagacuguguuccaa

SEQ ID NO: 1481479 - RNA, 19 nt, Artificial Sequence
  Description of Artificial Sequence: Synthetic oligonucleotide
  Antisense strand to SEQ ID NO: 1481478
uuggaacacagucucacuc

SEQ ID NO: 1481480 - RNA, 19 nt, Artificial Sequence
  Description of Artificial Sequence: Synthetic oligonucleotide
  Sense strand starting at position 3964 of SEQ ID NO: 1244343
ugcagugauuuguacuguu

SEQ ID NO: 1481481 - RNA, 19 nt, Artificial Sequence
  Description of Artificial Sequence: Synthetic oligonucleotide
  Antisense strand to SEQ ID NO: 1481480
aacaguacaaaucacugca

SEQ ID NO: 1481482 - RNA, 19 nt, Artificial Sequence
  Description of Artificial Sequence: Synthetic oligonucleotide
  Sense strand starting at position 3974 of SEQ ID NO: 1244343
uguacuguugccuaaccau

SEQ ID NO: 1481483 - RNA, 19 nt, Artificial Sequence
  Description of Artificial Sequence: Synthetic oligonucleotide
  Antisense strand to SEQ ID NO: 1481482
augguuaggcaacaguaca

SEQ ID NO: 1481484 - RNA, 19 nt, Artificial Sequence
  Description of Artificial Sequence: Synthetic oligonucleotide
  Sense strand starting at position 80 of SEQ ID NO: 1244344
caugauggguguugcuaau

SEQ ID NO: 1481485 - RNA, 19 nt, Artificial Sequence
  Description of Artificial Sequence: Synthetic oligonucleotide
  Antisense strand to SEQ ID NO: 1481484
auuagcaacacccaucaug

SEQ ID NO: 1481486 - RNA, 19 nt, Artificial Sequence
  Description of Artificial Sequence: Synthetic oligonucleotide
  Sense strand starting at position 86 of SEQ ID NO: 1244344
ggguguugcuaauuauuag

SEQ ID NO: 1481487 - RNA, 19 nt, Artificial Sequence
  Description of Artificial Sequence: Synthetic oligonucleotide
  Antisense strand to SEQ ID NO: 1481486
cuaauaauuagcaacaccc

SEQ ID NO: 1481488 - RNA, 19 nt, Artificial Sequence
  Description of Artificial Sequence: Synthetic oligonucleotide
  Sense strand starting at position 87 of SEQ ID NO: 1244344
gguguugcuaauuauuagu

SEQ ID NO: 1481489 - RNA, 19 nt, Artificial Sequence
  Description of Artificial Sequence: Synthetic oligonucleotide
  Antisense strand to SEQ ID NO: 1481488
acuaauaauuagcaacacc

SEQ ID NO: 1481490 - RNA, 19 nt, Artificial Sequence
  Description of Artificial Sequence: Synthetic oligonucleotide
  Sense strand starting at position 90 of SEQ ID NO: 1244344
guugcuaauuauuaguuga

SEQ ID NO: 1481491 - RNA, 19 nt, Artificial Sequence
  Description of Artificial Sequence: Synthetic oligonucleotide
  Antisense strand to SEQ ID NO: 1481490
ucaacuaauaauuagcaac

SEQ ID NO: 1481492 - RNA, 19 nt, Artificial Sequence
  Description of Artificial Sequence: Synthetic oligonucleotide
  Sense strand starting at position 93 of SEQ ID NO: 1244344
gcuaauuauuaguugaaga

SEQ ID NO: 1481493 - RNA, 19 nt, Artificial Sequence
  Description of Artificial Sequence: Synthetic oligonucleotide
  Antisense strand to SEQ ID NO: 1481492
ucuucaacuaauaauuagc

SEQ ID NO: 1481494 - RNA, 19 nt, Artificial Sequence
  Description of Artificial Sequence: Synthetic oligonucleotide
  Sense strand starting at position 115 of SEQ ID NO: 1244344
accucuguacugcguguua

SEQ ID NO: 1481495 - RNA, 19 nt, Artificial Sequence
  Description of Artificial Sequence: Synthetic oligonucleotide
  Antisense strand to SEQ ID NO: 1481494
uaacacgcaguacagaggu

SEQ ID NO: 1481496 - RNA, 19 nt, Artificial Sequence
  Description of Artificial Sequence: Synthetic oligonucleotide
  Sense strand starting at position 117 of SEQ ID NO: 1244344
cucuguacugcguguuaca

SEQ ID NO: 1481497 - RNA, 19 nt, Artificial Sequence
  Description of Artificial Sequence: Synthetic oligonucleotide
  Antisense strand to SEQ ID NO: 1481496
uguaacacgcaguacagag

SEQ ID NO: 1481498 - RNA, 19 nt, Artificial Sequence
  Description of Artificial Sequence: Synthetic oligonucleotide
  Sense strand starting at position 182 of SEQ ID NO: 1244344
acggaauauucuccaucuu

SEQ ID NO: 1481499 - RNA, 19 nt, Artificial Sequence
  Description of Artificial Sequence: Synthetic oligonucleotide
  Antisense strand to SEQ ID NO: 1481498
aagauggagaauauuccgu

SEQ ID NO: 1481500 - RNA, 19 nt, Artificial Sequence
  Description of Artificial Sequence: Synthetic oligonucleotide
  Sense strand starting at position 547 of SEQ ID NO: 1244344
ccauguuuccgggacuggu

SEQ ID NO: 1481501 - RNA, 19 nt, Artificial Sequence
  Description of Artificial Sequence: Synthetic oligonucleotide
  Antisense strand to SEQ ID NO: 1481500
accagucccggaaacaugg

SEQ ID NO: 1481502 - RNA, 19 nt, Artificial Sequence
  Description of Artificial Sequence: Synthetic oligonucleotide
  Sense strand starting at position 640 of SEQ ID NO: 1244344
cgccuagcccuaugguuaa

SEQ ID NO: 1481503 - RNA, 19 nt, Artificial Sequence
  Description of Artificial Sequence: Synthetic oligonucleotide
  Antisense strand to SEQ ID NO: 1481502
uuaaccauagggcuaggcg

SEQ ID NO: 1481504 - RNA, 19 nt, Artificial Sequence
  Description of Artificial Sequence: Synthetic oligonucleotide
  Sense strand starting at position 672 of SEQ ID NO: 1244344
ucuuuacagucugagaggu

SEQ ID NO: 1481505 - RNA, 19 nt, Artificial Sequence
  Description of Artificial Sequence: Synthetic oligonucleotide
  Antisense strand to SEQ ID NO: 1481504
accucucagacuguaaaga

SEQ ID NO: 1481506 - RNA, 19 nt, Artificial Sequence
  Description of Artificial Sequence: Synthetic oligonucleotide
  Sense strand starting at position 682 of SEQ ID NO: 1244344
cugagaggugacugugauu

SEQ ID NO: 1481507 - RNA, 19 nt, Artificial Sequence
  Description of Artificial Sequence: Synthetic oligonucleotide
  Antisense strand to SEQ ID NO: 1481506
aaucacagucaccucucag

SEQ ID NO: 1481508 - RNA, 19 nt, Artificial Sequence
  Description of Artificial Sequence: Synthetic oligonucleotide
  Sense strand starting at position 685 of SEQ ID NO: 1244344
agaggugacugugauucau

SEQ ID NO: 1481509 - RNA, 19 nt, Artificial Sequence
  Description of Artificial Sequence: Synthetic oligonucleotide
  Antisense strand to SEQ ID NO: 1481508
augaaucacagucaccucu

SEQ ID NO: 1481510 - RNA, 19 nt, Artificial Sequence
  Description of Artificial Sequence: Synthetic oligonucleotide
  Sense strand starting at position 725 of SEQ ID NO: 1244344
uguagcuugucuuccaguu

SEQ ID NO: 1481511 - RNA, 19 nt, Artificial Sequence
  Description of Artificial Sequence: Synthetic oligonucleotide
  Antisense strand to SEQ ID NO: 1481510
aacuggaagacaagcuaca

SEQ ID NO: 1481512 - RNA, 19 nt, Artificial Sequence
  Description of Artificial Sequence: Synthetic oligonucleotide
  Sense strand starting at position 757 of SEQ ID NO: 1244344
gccgacuccuaucgucaga

SEQ ID NO: 1481513 - RNA, 19 nt, Artificial Sequence
  Description of Artificial Sequence: Synthetic oligonucleotide
  Antisense strand to SEQ ID NO: 1481512
ucugacgauaggagucggc

SEQ ID NO: 1481514 - RNA, 19 nt, Artificial Sequence
  Description of Artificial Sequence: Synthetic oligonucleotide
  Sense strand starting at position 759 of SEQ ID NO: 1244344
cgacuccuaucgucagaga

SEQ ID NO: 1481515 - RNA, 19 nt, Artificial Sequence
  Description of Artificial Sequence: Synthetic oligonucleotide
  Antisense strand to SEQ ID NO: 1481514
ucucugacgauaggagucg

SEQ ID NO: 1481516 - RNA, 19 nt, Artificial Sequence
  Description of Artificial Sequence: Synthetic oligonucleotide
  Sense strand starting at position 760 of SEQ ID NO: 1244344
gacuccuaucgucagagaa

SEQ ID NO: 1481517 - RNA, 19 nt, Artificial Sequence
  Description of Artificial Sequence: Synthetic oligonucleotide
  Antisense strand to SEQ ID NO: 1481516
uucucugacgauaggaguc

SEQ ID NO: 1481518 - RNA, 19 nt, Artificial Sequence
  Description of Artificial Sequence: Synthetic oligonucleotide
  Sense strand starting at position 762 of SEQ ID NO: 1244344
cuccuaucgucagagaaug

SEQ ID NO: 1481519 - RNA, 19 nt, Artificial Sequence
  Description of Artificial Sequence: Synthetic oligonucleotide
  Antisense strand to SEQ ID NO: 1481518
cauucucugacgauaggag

SEQ ID NO: 1481520 - RNA, 19 nt, Artificial Sequence
  Description of Artificial Sequence: Synthetic oligonucleotide
  Sense strand starting at position 911 of SEQ ID NO: 1244344
gggucucugcaucaaagga

SEQ ID NO: 1481521 - RNA, 19 nt, Artificial Sequence
  Description of Artificial Sequence: Synthetic oligonucleotide
  Antisense strand to SEQ ID NO: 1481520
uccuuugaugcagagaccc

SEQ ID NO: 1481522 - RNA, 19 nt, Artificial Sequence
  Description of Artificial Sequence: Synthetic oligonucleotide
  Sense strand starting at position 1200 of SEQ ID NO: 1244344
accugcugcucaguuuaga

SEQ ID NO: 1481523 - RNA, 19 nt, Artificial Sequence
  Description of Artificial Sequence: Synthetic oligonucleotide
  Antisense strand to SEQ ID NO: 1481522
ucuaaacugagcagcaggu

SEQ ID NO: 1481524 - RNA, 19 nt, Artificial Sequence
  Description of Artificial Sequence: Synthetic oligonucleotide
  Sense strand starting at position 1203 of SEQ ID NO: 1244344
ugcugcucaguuuagaaau

SEQ ID NO: 1481525 - RNA, 19 nt, Artificial Sequence
  Description of Artificial Sequence: Synthetic oligonucleotide
  Antisense strand to SEQ ID NO: 1481524
auuucuaaacugagcagca

SEQ ID NO: 1481526 - RNA, 19 nt, Artificial Sequence
  Description of Artificial Sequence: Synthetic oligonucleotide
  Sense strand starting at position 1214 of SEQ ID NO: 1244344
uuagaaaucccucgcuugu

SEQ ID NO: 1481527 - RNA, 19 nt, Artificial Sequence
  Description of Artificial Sequence: Synthetic oligonucleotide
  Antisense strand to SEQ ID NO: 1481526
acaagcgagggauuucuaa

SEQ ID NO: 1481528 - RNA, 19 nt, Artificial Sequence
  Description of Artificial Sequence: Synthetic oligonucleotide
  Sense strand starting at position 1223 of SEQ ID NO: 1244344
ccucgcuugugggauuaca

SEQ ID NO: 1481529 - RNA, 19 nt, Artificial Sequence
  Description of Artificial Sequence: Synthetic oligonucleotide
  Antisense strand to SEQ ID NO: 1481528
uguaaucccacaagcgagg

SEQ ID NO: 1481530 - RNA, 19 nt, Artificial Sequence
  Description of Artificial Sequence: Synthetic oligonucleotide
  Sense strand starting at position 1328 of SEQ ID NO: 1244344
ggacguuacaguugcuuaa

SEQ ID NO: 1481531 - RNA, 19 nt, Artificial Sequence
  Description of Artificial Sequence: Synthetic oligonucleotide
  Antisense strand to SEQ ID NO: 1481530
uuaagcaacuguaacgucc

SEQ ID NO: 1481532 - RNA, 19 nt, Artificial Sequence
  Description of Artificial Sequence: Synthetic oligonucleotide
  Sense strand starting at position 1330 of SEQ ID NO: 1244344
acguuacaguugcuuaaau

SEQ ID NO: 1481533 - RNA, 19 nt, Artificial Sequence
  Description of Artificial Sequence: Synthetic oligonucleotide
  Antisense strand to SEQ ID NO: 1481532
auuuaagcaacuguaacgu

SEQ ID NO: 1481534 - RNA, 19 nt, Artificial Sequence
  Description of Artificial Sequence: Synthetic oligonucleotide
  Sense strand starting at position 1331 of SEQ ID NO: 1244344
cguuacaguugcuuaaaua

SEQ ID NO: 1481535 - RNA, 19 nt, Artificial Sequence
  Description of Artificial Sequence: Synthetic oligonucleotide
  Antisense strand to SEQ ID NO: 1481534
uauuuaagcaacuguaacg

SEQ ID NO: 1481536 - RNA, 19 nt, Artificial Sequence
  Description of Artificial Sequence: Synthetic oligonucleotide
  Sense strand starting at position 1332 of SEQ ID NO: 1244344
guuacaguugcuuaaauaa

SEQ ID NO: 1481537 - RNA, 19 nt, Artificial Sequence
  Description of Artificial Sequence: Synthetic oligonucleotide
  Antisense strand to SEQ ID NO: 1481536
uuauuuaagcaacuguaac

SEQ ID NO: 1481538 - RNA, 19 nt, Artificial Sequence
  Description of Artificial Sequence: Synthetic oligonucleotide
  Sense strand starting at position 1477 of SEQ ID NO: 1244344
ccgaguccuucggucucaa

SEQ ID NO: 1481539 - RNA, 19 nt, Artificial Sequence
  Description of Artificial Sequence: Synthetic oligonucleotide
  Antisense strand to SEQ ID NO: 1481538
uugagaccgaaggacucgg

SEQ ID NO: 1481540 - RNA, 19 nt, Artificial Sequence
  Description of Artificial Sequence: Synthetic oligonucleotide
  Sense strand starting at position 1601 of SEQ ID NO: 1244344
ccagcuucucccugggaca

SEQ ID NO: 1481541 - RNA, 19 nt, Artificial Sequence
  Description of Artificial Sequence: Synthetic oligonucleotide
  Antisense strand to SEQ ID NO: 1481540
ugucccagggagaagcugg

SEQ ID NO: 1481542 - RNA, 19 nt, Artificial Sequence
  Description of Artificial Sequence: Synthetic oligonucleotide
  Sense strand starting at position 1 of SEQ ID NO: 1244345
uccacccgcuucuaagaau

SEQ ID NO: 1481543 - RNA, 19 nt, Artificial Sequence
  Description of Artificial Sequence: Synthetic oligonucleotide
  Antisense strand to SEQ ID NO: 1481542
auucuuagaagcgggugga

SEQ ID NO: 1481544 - RNA, 19 nt, Artificial Sequence
  Description of Artificial Sequence: Synthetic oligonucleotide
  Sense strand starting at position 20 of SEQ ID NO: 1244345
uugagauauuuacaguaga

SEQ ID NO: 1481545 - RNA, 19 nt, Artificial Sequence
  Description of Artificial Sequence: Synthetic oligonucleotide
  Antisense strand to SEQ ID NO: 1481544
ucuacuguaaauaucucaa

SEQ ID NO: 1481546 - RNA, 19 nt, Artificial Sequence
  Description of Artificial Sequence: Synthetic oligonucleotide
  Sense strand starting at position 39 of SEQ ID NO: 1244345
gcacucauaugcuugaagu

SEQ ID NO: 1481547 - RNA, 19 nt, Artificial Sequence
  Description of Artificial Sequence: Synthetic oligonucleotide
  Antisense strand to SEQ ID NO: 1481546
acuucaagcauaugagugc

SEQ ID NO: 1481548 - RNA, 19 nt, Artificial Sequence
  Description of Artificial Sequence: Synthetic oligonucleotide
  Sense strand starting at position 40 of SEQ ID NO: 1244345
cacucauaugcuugaagug

SEQ ID NO: 1481549 - RNA, 19 nt, Artificial Sequence
  Description of Artificial Sequence: Synthetic oligonucleotide
  Antisense strand to SEQ ID NO: 1481548
cacuucaagcauaugagug

SEQ ID NO: 1481550 - RNA, 19 nt, Artificial Sequence
  Description of Artificial Sequence: Synthetic oligonucleotide
  Sense strand starting at position 41 of SEQ ID NO: 1244345
acucauaugcuugaaguga

SEQ ID NO: 1481551 - RNA, 19 nt, Artificial Sequence
  Description of Artificial Sequence: Synthetic oligonucleotide
  Antisense strand to SEQ ID NO: 1481550
ucacuucaagcauaugagu

SEQ ID NO: 1481552 - RNA, 19 nt, Artificial Sequence
  Description of Artificial Sequence: Synthetic oligonucleotide
  Sense strand starting at position 45 of SEQ ID NO: 1244345
auaugcuugaagugaaaga

SEQ ID NO: 1481553 - RNA, 19 nt, Artificial Sequence
  Description of Artificial Sequence: Synthetic oligonucleotide
  Antisense strand to SEQ ID NO: 1481552
ucuuucacuucaagcauau

SEQ ID NO: 1481554 - RNA, 19 nt, Artificial Sequence
  Description of Artificial Sequence: Synthetic oligonucleotide
  Sense strand starting at position 112 of SEQ ID NO: 1244345
gcgcaugguacuuauaaga

SEQ ID NO: 1481555 - RNA, 19 nt, Artificial Sequence
  Description of Artificial Sequence: Synthetic oligonucleotide
  Antisense strand to SEQ ID NO: 1481554
ucuuauaaguaccaugcgc

SEQ ID NO: 1481556 - RNA, 19 nt, Artificial Sequence
  Description of Artificial Sequence: Synthetic oligonucleotide
  Sense strand starting at position 117 of SEQ ID NO: 1244345
ugguacuuauaagaaauca

SEQ ID NO: 1481557 - RNA, 19 nt, Artificial Sequence
  Description of Artificial Sequence: Synthetic oligonucleotide
  Antisense strand to SEQ ID NO: 1481556
ugauuucuuauaaguacca

SEQ ID NO: 1481558 - RNA, 19 nt, Artificial Sequence
  Description of Artificial Sequence: Synthetic oligonucleotide
  Sense strand starting at position 294 of SEQ ID NO: 1244345
gucaucucaugucauccaa

SEQ ID NO: 1481559 - RNA, 19 nt, Artificial Sequence
  Description of Artificial Sequence: Synthetic oligonucleotide
  Antisense strand to SEQ ID NO: 1481558
uuggaugacaugagaugac

SEQ ID NO: 1481560 - RNA, 19 nt, Artificial Sequence
  Description of Artificial Sequence: Synthetic oligonucleotide
  Sense strand starting at position 810 of SEQ ID NO: 1244345
gcuuuagcugucuugucuu

SEQ ID NO: 1481561 - RNA, 19 nt, Artificial Sequence
  Description of Artificial Sequence: Synthetic oligonucleotide
  Antisense strand to SEQ ID NO: 1481560
aagacaagacagcuaaagc

SEQ ID NO: 1481562 - RNA, 19 nt, Artificial Sequence
  Description of Artificial Sequence: Synthetic oligonucleotide
  Sense strand starting at position 891 of SEQ ID NO: 1244345
gaauguaguuucucaggaa

SEQ ID NO: 1481563 - RNA, 19 nt, Artificial Sequence
  Description of Artificial Sequence: Synthetic oligonucleotide
  Antisense strand to SEQ ID NO: 1481562
uuccugagaaacuacauuc

SEQ ID NO: 1481564 - RNA, 19 nt, Artificial Sequence
  Description of Artificial Sequence: Synthetic oligonucleotide
  Sense strand starting at position 892 of SEQ ID NO: 1244345
aauguaguuucucaggaaa

SEQ ID NO: 1481565 - RNA, 19 nt, Artificial Sequence
  Description of Artificial Sequence: Synthetic oligonucleotide
  Antisense strand to SEQ ID NO: 1481564
uuuccugagaaacuacauu

SEQ ID NO: 1481566 - RNA, 19 nt, Artificial Sequence
  Description of Artificial Sequence: Synthetic oligonucleotide
  Sense strand starting at position 894 of SEQ ID NO: 1244345
uguaguuucucaggaaaca

SEQ ID NO: 1481567 - RNA, 19 nt, Artificial Sequence
  Description of Artificial Sequence: Synthetic oligonucleotide
  Antisense strand to SEQ ID NO: 1481566
uguuuccugagaaacuaca

SEQ ID NO: 1481568 - RNA, 19 nt, Artificial Sequence
  Description of Artificial Sequence: Synthetic oligonucleotide
  Sense strand starting at position 895 of SEQ ID NO: 1244345
guaguuucucaggaaacac

SEQ ID NO: 1481569 - RNA, 19 nt, Artificial Sequence
  Description of Artificial Sequence: Synthetic oligonucleotide
  Antisense strand to SEQ ID NO: 1481568
guguuuccugagaaacuac

SEQ ID NO: 1481570 - RNA, 19 nt, Artificial Sequence
  Description of Artificial Sequence: Synthetic oligonucleotide
  Sense strand starting at position 1071 of SEQ ID NO: 1244345
ggguguugcuaauuauuag

SEQ ID NO: 1481571 - RNA, 19 nt, Artificial Sequence
  Description of Artificial Sequence: Synthetic oligonucleotide
  Antisense strand to SEQ ID NO: 1481570
cuaauaauuagcaacaccc

SEQ ID NO: 1481572 - RNA, 19 nt, Artificial Sequence
  Description of Artificial Sequence: Synthetic oligonucleotide
  Sense strand starting at position 1072 of SEQ ID NO: 1244345
gguguugcuaauuauuagu

SEQ ID NO: 1481573 - RNA, 19 nt, Artificial Sequence
  Description of Artificial Sequence: Synthetic oligonucleotide
  Antisense strand to SEQ ID NO: 1481572
acuaauaauuagcaacacc

SEQ ID NO: 1481574 - RNA, 19 nt, Artificial Sequence
  Description of Artificial Sequence: Synthetic oligonucleotide
  Sense strand starting at position 1075 of SEQ ID NO: 1244345
guugcuaauuauuaguuga

SEQ ID NO: 1481575 - RNA, 19 nt, Artificial Sequence
  Description of Artificial Sequence: Synthetic oligonucleotide
  Antisense strand to SEQ ID NO: 1481574
ucaacuaauaauuagcaac

SEQ ID NO: 1481576 - RNA, 19 nt, Artificial Sequence
  Description of Artificial Sequence: Synthetic oligonucleotide
  Sense strand starting at position 1078 of SEQ ID NO: 1244345
gcuaauuauuaguugaaga

SEQ ID NO: 1481577 - RNA, 19 nt, Artificial Sequence
  Description of Artificial Sequence: Synthetic oligonucleotide
  Antisense strand to SEQ ID NO: 1481576
ucuucaacuaauaauuagc

SEQ ID NO: 1481578 - RNA, 19 nt, Artificial Sequence
  Description of Artificial Sequence: Synthetic oligonucleotide
  Sense strand starting at position 1100 of SEQ ID NO: 1244345
accucuguacugcguguua

SEQ ID NO: 1481579 - RNA, 19 nt, Artificial Sequence
  Description of Artificial Sequence: Synthetic oligonucleotide
  Antisense strand to SEQ ID NO: 1481578
uaacacgcaguacagaggu

SEQ ID NO: 1481580 - RNA, 19 nt, Artificial Sequence
  Description of Artificial Sequence: Synthetic oligonucleotide
  Sense strand starting at position 1102 of SEQ ID NO: 1244345
cucuguacugcguguuaca

SEQ ID NO: 1481581 - RNA, 19 nt, Artificial Sequence
  Description of Artificial Sequence: Synthetic oligonucleotide
  Antisense strand to SEQ ID NO: 1481580
uguaacacgcaguacagag

SEQ ID NO: 1481582 - RNA, 19 nt, Artificial Sequence
  Description of Artificial Sequence: Synthetic oligonucleotide
  Sense strand starting at position 1167 of SEQ ID NO: 1244345
acggaauauucuccaucuu

SEQ ID NO: 1481583 - RNA, 19 nt, Artificial Sequence
  Description of Artificial Sequence: Synthetic oligonucleotide
  Antisense strand to SEQ ID NO: 1481582
aagauggagaauauuccgu

SEQ ID NO: 1481584 - RNA, 19 nt, Artificial Sequence
  Description of Artificial Sequence: Synthetic oligonucleotide
  Sense strand starting at position 1532 of SEQ ID NO: 1244345
ccauguuuccgggacuggu

SEQ ID NO: 1481585 - RNA, 19 nt, Artificial Sequence
  Description of Artificial Sequence: Synthetic oligonucleotide
  Antisense strand to SEQ ID NO: 1481584
accagucccggaaacaugg

SEQ ID NO: 1481586 - RNA, 19 nt, Artificial Sequence
  Description of Artificial Sequence: Synthetic oligonucleotide
  Sense strand starting at position 1625 of SEQ ID NO: 1244345
cgccuagcccuaugguuaa

SEQ ID NO: 1481587 - RNA, 19 nt, Artificial Sequence
  Description of Artificial Sequence: Synthetic oligonucleotide
  Antisense strand to SEQ ID NO: 1481586
uuaaccauagggcuaggcg

SEQ ID NO: 1481588 - RNA, 19 nt, Artificial Sequence
  Description of Artificial Sequence: Synthetic oligonucleotide
  Sense strand starting at position 1657 of SEQ ID NO: 1244345
ucuuuacagucugagaggu

SEQ ID NO: 1481589 - RNA, 19 nt, Artificial Sequence
  Description of Artificial Sequence: Synthetic oligonucleotide
  Antisense strand to SEQ ID NO: 1481588
accucucagacuguaaaga

SEQ ID NO: 1481590 - RNA, 19 nt, Artificial Sequence
  Description of Artificial Sequence: Synthetic oligonucleotide
  Sense strand starting at position 1667 of SEQ ID NO: 1244345
cugagaggugacugugauu

SEQ ID NO: 1481591 - RNA, 19 nt, Artificial Sequence
  Description of Artificial Sequence: Synthetic oligonucleotide
  Antisense strand to SEQ ID NO: 1481590
aaucacagucaccucucag

SEQ ID NO: 1481592 - RNA, 19 nt, Artificial Sequence
  Description of Artificial Sequence: Synthetic oligonucleotide
  Sense strand starting at position 1670 of SEQ ID NO: 1244345
agaggugacugugauucau

SEQ ID NO: 1481593 - RNA, 19 nt, Artificial Sequence
  Description of Artificial Sequence: Synthetic oligonucleotide
  Antisense strand to SEQ ID NO: 1481592
augaaucacagucaccucu

SEQ ID NO: 1481594 - RNA, 19 nt, Artificial Sequence
  Description of Artificial Sequence: Synthetic oligonucleotide
  Sense strand starting at position 1710 of SEQ ID NO: 1244345
uguagcuugucuuccaguu

SEQ ID NO: 1481595 - RNA, 19 nt, Artificial Sequence
  Description of Artificial Sequence: Synthetic oligonucleotide
  Antisense strand to SEQ ID NO: 1481594
aacuggaagacaagcuaca

SEQ ID NO: 1481596 - RNA, 19 nt, Artificial Sequence
  Description of Artificial Sequence: Synthetic oligonucleotide
  Sense strand starting at position 1744 of SEQ ID NO: 1244345
cgacuccuaucgucagaga

SEQ ID NO: 1481597 - RNA, 19 nt, Artificial Sequence
  Description of Artificial Sequence: Synthetic oligonucleotide
  Antisense strand to SEQ ID NO: 1481596
ucucugacgauaggagucg

SEQ ID NO: 1481598 - RNA, 19 nt, Artificial Sequence
  Description of Artificial Sequence: Synthetic oligonucleotide
  Sense strand starting at position 1745 of SEQ ID NO: 1244345
gacuccuaucgucagagaa

SEQ ID NO: 1481599 - RNA, 19 nt, Artificial Sequence
  Description of Artificial Sequence: Synthetic oligonucleotide
  Antisense strand to SEQ ID NO: 1481598
uucucugacgauaggaguc

SEQ ID NO: 1481600 - RNA, 19 nt, Artificial Sequence
  Description of Artificial Sequence: Synthetic oligonucleotide
  Sense strand starting at position 1747 of SEQ ID NO: 1244345
cuccuaucgucagagaaug

SEQ ID NO: 1481601 - RNA, 19 nt, Artificial Sequence
  Description of Artificial Sequence: Synthetic oligonucleotide
  Antisense strand to SEQ ID NO: 1481600
cauucucugacgauaggag

SEQ ID NO: 1481602 - RNA, 19 nt, Artificial Sequence
  Description of Artificial Sequence: Synthetic oligonucleotide
  Sense strand starting at position 1896 of SEQ ID NO: 1244345
gggucucugcaucaaagga

SEQ ID NO: 1481603 - RNA, 19 nt, Artificial Sequence
  Description of Artificial Sequence: Synthetic oligonucleotide
  Antisense strand to SEQ ID NO: 1481602
uccuuugaugcagagaccc

SEQ ID NO: 1481604 - RNA, 19 nt, Artificial Sequence
  Description of Artificial Sequence: Synthetic oligonucleotide
  Sense strand starting at position 2185 of SEQ ID NO: 1244345
accugcugcucaguuuaga

SEQ ID NO: 1481605 - RNA, 19 nt, Artificial Sequence
  Description of Artificial Sequence: Synthetic oligonucleotide
  Antisense strand to SEQ ID NO: 1481604
ucuaaacugagcagcaggu

SEQ ID NO: 1481606 - RNA, 19 nt, Artificial Sequence
  Description of Artificial Sequence: Synthetic oligonucleotide
  Sense strand starting at position 2188 of SEQ ID NO: 1244345
ugcugcucaguuuagaaau

SEQ ID NO: 1481607 - RNA, 19 nt, Artificial Sequence
  Description of Artificial Sequence: Synthetic oligonucleotide
  Antisense strand to SEQ ID NO: 1481606
auuucuaaacugagcagca

SEQ ID NO: 1481608 - RNA, 19 nt, Artificial Sequence
  Description of Artificial Sequence: Synthetic oligonucleotide
  Sense strand starting at position 2199 of SEQ ID NO: 1244345
uuagaaaucccucgcuugu

SEQ ID NO: 1481609 - RNA, 19 nt, Artificial Sequence
  Description of Artificial Sequence: Synthetic oligonucleotide
  Antisense strand to SEQ ID NO: 1481608
acaagcgagggauuucuaa

SEQ ID NO: 1481610 - RNA, 19 nt, Artificial Sequence
  Description of Artificial Sequence: Synthetic oligonucleotide
  Sense strand starting at position 2313 of SEQ ID NO: 1244345
ggacguuacaguugcuuaa

SEQ ID NO: 1481611 - RNA, 19 nt, Artificial Sequence
  Description of Artificial Sequence: Synthetic oligonucleotide
  Antisense strand to SEQ ID NO: 1481610
uuaagcaacuguaacgucc

SEQ ID NO: 1481612 - RNA, 19 nt, Artificial Sequence
  Description of Artificial Sequence: Synthetic oligonucleotide
  Sense strand starting at position 2315 of SEQ ID NO: 1244345
acguuacaguugcuuaaau

SEQ ID NO: 1481613 - RNA, 19 nt, Artificial Sequence
  Description of Artificial Sequence: Synthetic oligonucleotide
  Antisense strand to SEQ ID NO: 1481612
auuuaagcaacuguaacgu

SEQ ID NO: 1481614 - RNA, 19 nt, Artificial Sequence
  Description of Artificial Sequence: Synthetic oligonucleotide
  Sense strand starting at position 2316 of SEQ ID NO: 1244345
cguuacaguugcuuaaaua

SEQ ID NO: 1481615 - RNA, 19 nt, Artificial Sequence
  Description of Artificial Sequence: Synthetic oligonucleotide
  Antisense strand to SEQ ID NO: 1481614
uauuuaagcaacuguaacg

SEQ ID NO: 1481616 - RNA, 19 nt, Artificial Sequence
  Description of Artificial Sequence: Synthetic oligonucleotide
  Sense strand starting at position 2317 of SEQ ID NO: 1244345
guuacaguugcuuaaauaa

SEQ ID NO: 1481617 - RNA, 19 nt, Artificial Sequence
  Description of Artificial Sequence: Synthetic oligonucleotide
  Antisense strand to SEQ ID NO: 1481616
uuauuuaagcaacuguaac

SEQ ID NO: 1481618 - RNA, 19 nt, Artificial Sequence
  Description of Artificial Sequence: Synthetic oligonucleotide
  Sense strand starting at position 2462 of SEQ ID NO: 1244345
ccgaguccuucggucucaa

SEQ ID NO: 1481619 - RNA, 19 nt, Artificial Sequence
  Description of Artificial Sequence: Synthetic oligonucleotide
  Antisense strand to SEQ ID NO: 1481618
uugagaccgaaggacucgg

SEQ ID NO: 1481620 - RNA, 19 nt, Artificial Sequence
  Description of Artificial Sequence: Synthetic oligonucleotide
  Sense strand starting at position 2586 of SEQ ID NO: 1244345
ccagcuucucccugggaca

SEQ ID NO: 1481621 - RNA, 19 nt, Artificial Sequence
  Description of Artificial Sequence: Synthetic oligonucleotide
  Antisense strand to SEQ ID NO: 1481620
ugucccagggagaagcugg

SEQ ID NO: 1481622 - RNA, 19 nt, Artificial Sequence
  Description of Artificial Sequence: Synthetic oligonucleotide
  Sense strand starting at position 98 of SEQ ID NO: 1244346
cagggucuguaacaauuua

SEQ ID NO: 1481623 - RNA, 19 nt, Artificial Sequence
  Description of Artificial Sequence: Synthetic oligonucleotide
  Antisense strand to SEQ ID NO: 1481622
uaaauuguuacagacccug

SEQ ID NO: 1481624 - RNA, 19 nt, Artificial Sequence
  Description of Artificial Sequence: Synthetic oligonucleotide
  Sense strand starting at position 116 of SEQ ID NO: 1244346
aaauguguaugcccuauga

SEQ ID NO: 1481625 - RNA, 19 nt, Artificial Sequence
  Description of Artificial Sequence: Synthetic oligonucleotide
  Antisense strand to SEQ ID NO: 1481624
ucauagggcauacacauuu

SEQ ID NO: 1481626 - RNA, 19 nt, Artificial Sequence
  Description of Artificial Sequence: Synthetic oligonucleotide
  Sense strand starting at position 201 of SEQ ID NO: 1244346
ggacguuguguacaaggau

SEQ ID NO: 1481627 - RNA, 19 nt, Artificial Sequence
  Description of Artificial Sequence: Synthetic oligonucleotide
  Antisense strand to SEQ ID NO: 1481626
auccuuguacacaacgucc

SEQ ID NO: 1481628 - RNA, 19 nt, Artificial Sequence
  Description of Artificial Sequence: Synthetic oligonucleotide
  Sense strand starting at position 281 of SEQ ID NO: 1244346
acgaaucauggcugagucu

SEQ ID NO: 1481629 - RNA, 19 nt, Artificial Sequence
  Description of Artificial Sequence: Synthetic oligonucleotide
  Antisense strand to SEQ ID NO: 1481628
agacucagccaugauucgu

SEQ ID NO: 1481630 - RNA, 19 nt, Artificial Sequence
  Description of Artificial Sequence: Synthetic oligonucleotide
  Sense strand starting at position 282 of SEQ ID NO: 1244346
cgaaucauggcugagucuu

SEQ ID NO: 1481631 - RNA, 19 nt, Artificial Sequence
  Description of Artificial Sequence: Synthetic oligonucleotide
  Antisense strand to SEQ ID NO: 1481630
aagacucagccaugauucg

SEQ ID NO: 1481632 - RNA, 19 nt, Artificial Sequence
  Description of Artificial Sequence: Synthetic oligonucleotide
  Sense strand starting at position 284 of SEQ ID NO: 1244346
aaucauggcugagucuuaa

SEQ ID NO: 1481633 - RNA, 19 nt, Artificial Sequence
  Description of Artificial Sequence: Synthetic oligonucleotide
  Antisense strand to SEQ ID NO: 1481632
uuaagacucagccaugauu

SEQ ID NO: 1481634 - RNA, 19 nt, Artificial Sequence
  Description of Artificial Sequence: Synthetic oligonucleotide
  Sense strand starting at position 649 of SEQ ID NO: 1244346
auauaaagugacuguugau

SEQ ID NO: 1481635 - RNA, 19 nt, Artificial Sequence
  Description of Artificial Sequence: Synthetic oligonucleotide
  Antisense strand to SEQ ID NO: 1481634
aucaacagucacuuuauau

SEQ ID NO: 1481636 - RNA, 19 nt, Artificial Sequence
  Description of Artificial Sequence: Synthetic oligonucleotide
  Sense strand starting at position 703 of SEQ ID NO: 1244346
ggaggaggauuguaacaga

SEQ ID NO: 1481637 - RNA, 19 nt, Artificial Sequence
  Description of Artificial Sequence: Synthetic oligonucleotide
  Antisense strand to SEQ ID NO: 1481636
ucuguuacaauccuccucc

SEQ ID NO: 1481638 - RNA, 19 nt, Artificial Sequence
  Description of Artificial Sequence: Synthetic oligonucleotide
  Sense strand starting at position 755 of SEQ ID NO: 1244346
uuggcuaucacuuacggau

SEQ ID NO: 1481639 - RNA, 19 nt, Artificial Sequence
  Description of Artificial Sequence: Synthetic oligonucleotide
  Antisense strand to SEQ ID NO: 1481638
auccguaagugauagccaa

SEQ ID NO: 1481640 - RNA, 19 nt, Artificial Sequence
  Description of Artificial Sequence: Synthetic oligonucleotide
  Sense strand starting at position 761 of SEQ ID NO: 1244346
aucacuuacggaugguuua

SEQ ID NO: 1481641 - RNA, 19 nt, Artificial Sequence
  Description of Artificial Sequence: Synthetic oligonucleotide
  Antisense strand to SEQ ID NO: 1481640
uaaaccauccguaagugau

SEQ ID NO: 1481642 - RNA, 19 nt, Artificial Sequence
  Description of Artificial Sequence: Synthetic oligonucleotide
  Sense strand starting at position 771 of SEQ ID NO: 1244346
gaugguuuaccauaugccu

SEQ ID NO: 1481643 - RNA, 19 nt, Artificial Sequence
  Description of Artificial Sequence: Synthetic oligonucleotide
  Antisense strand to SEQ ID NO: 1481642
aggcauaugguaaaccauc

SEQ ID NO: 1481644 - RNA, 19 nt, Artificial Sequence
  Description of Artificial Sequence: Synthetic oligonucleotide
  Sense strand starting at position 807 of SEQ ID NO: 1244346
cagggauugucucauuuga

SEQ ID NO: 1481645 - RNA, 19 nt, Artificial Sequence
  Description of Artificial Sequence: Synthetic oligonucleotide
  Antisense strand to SEQ ID NO: 1481644
ucaaaugagacaaucccug

SEQ ID NO: 1481646 - RNA, 19 nt, Artificial Sequence
  Description of Artificial Sequence: Synthetic oligonucleotide
  Sense strand starting at position 965 of SEQ ID NO: 1244346
ccuggcuaacgaugugaaa

SEQ ID NO: 1481647 - RNA, 19 nt, Artificial Sequence
  Description of Artificial Sequence: Synthetic oligonucleotide
  Antisense strand to SEQ ID NO: 1481646
uuucacaucguuagccagg

SEQ ID NO: 1481648 - RNA, 19 nt, Artificial Sequence
  Description of Artificial Sequence: Synthetic oligonucleotide
  Sense strand starting at position 1198 of SEQ ID NO: 1244346
ggucaaacuggguauguca

SEQ ID NO: 1481649 - RNA, 19 nt, Artificial Sequence
  Description of Artificial Sequence: Synthetic oligonucleotide
  Antisense strand to SEQ ID NO: 1481648
ugacauacccaguuugacc

SEQ ID NO: 1481650 - RNA, 19 nt, Artificial Sequence
  Description of Artificial Sequence: Synthetic oligonucleotide
  Sense strand starting at position 1206 of SEQ ID NO: 1244346
uggguaugucaugagcuca

SEQ ID NO: 1481651 - RNA, 19 nt, Artificial Sequence
  Description of Artificial Sequence: Synthetic oligonucleotide
  Antisense strand to SEQ ID NO: 1481650
ugagcucaugacauaccca

SEQ ID NO: 1481652 - RNA, 19 nt, Artificial Sequence
  Description of Artificial Sequence: Synthetic oligonucleotide
  Sense strand starting at position 1303 of SEQ ID NO: 1244346
cacaauaauucuguggguu

SEQ ID NO: 1481653 - RNA, 19 nt, Artificial Sequence
  Description of Artificial Sequence: Synthetic oligonucleotide
  Antisense strand to SEQ ID NO: 1481652
aacccacagaauuauugug

SEQ ID NO: 1481654 - RNA, 19 nt, Artificial Sequence
  Description of Artificial Sequence: Synthetic oligonucleotide
  Sense strand starting at position 1304 of SEQ ID NO: 1244346
acaauaauucuguggguuu

SEQ ID NO: 1481655 - RNA, 19 nt, Artificial Sequence
  Description of Artificial Sequence: Synthetic oligonucleotide
  Antisense strand to SEQ ID NO: 1481654
aaacccacagaauuauugu

SEQ ID NO: 1481656 - RNA, 19 nt, Artificial Sequence
  Description of Artificial Sequence: Synthetic oligonucleotide
  Sense strand starting at position 1464 of SEQ ID NO: 1244346
guguguuggcuuucuaguu

SEQ ID NO: 1481657 - RNA, 19 nt, Artificial Sequence
  Description of Artificial Sequence: Synthetic oligonucleotide
  Antisense strand to SEQ ID NO: 1481656
aacuagaaagccaacacac

SEQ ID NO: 1481658 - RNA, 19 nt, Artificial Sequence
  Description of Artificial Sequence: Synthetic oligonucleotide
  Sense strand starting at position 1693 of SEQ ID NO: 1244346
uugcaaucagacugucuca

SEQ ID NO: 1481659 - RNA, 19 nt, Artificial Sequence
  Description of Artificial Sequence: Synthetic oligonucleotide
  Antisense strand to SEQ ID NO: 1481658
ugagacagucugauugcaa

SEQ ID NO: 1481660 - RNA, 19 nt, Artificial Sequence
  Description of Artificial Sequence: Synthetic oligonucleotide
  Sense strand starting at position 1822 of SEQ ID NO: 1244346
cgauaaagcucacuuucca

SEQ ID NO: 1481661 - RNA, 19 nt, Artificial Sequence
  Description of Artificial Sequence: Synthetic oligonucleotide
  Antisense strand to SEQ ID NO: 1481660
uggaaagugagcuuuaucg

SEQ ID NO: 1481662 - RNA, 19 nt, Artificial Sequence
  Description of Artificial Sequence: Synthetic oligonucleotide
  Sense strand starting at position 1998 of SEQ ID NO: 1244346
uggugaguaacucggagaa

SEQ ID NO: 1481663 - RNA, 19 nt, Artificial Sequence
  Description of Artificial Sequence: Synthetic oligonucleotide
  Antisense strand to SEQ ID NO: 1481662
uucuccgaguuacucacca

SEQ ID NO: 1481664 - RNA, 19 nt, Artificial Sequence
  Description of Artificial Sequence: Synthetic oligonucleotide
  Sense strand starting at position 2050 of SEQ ID NO: 1244346
agaggguuuggaugagguu

SEQ ID NO: 1481665 - RNA, 19 nt, Artificial Sequence
  Description of Artificial Sequence: Synthetic oligonucleotide
  Antisense strand to SEQ ID NO: 1481664
aaccucauccaaacccucu

SEQ ID NO: 1481666 - RNA, 19 nt, Artificial Sequence
  Description of Artificial Sequence: Synthetic oligonucleotide
  Sense strand starting at position 2057 of SEQ ID NO: 1244346
uuggaugagguuugcauaa

SEQ ID NO: 1481667 - RNA, 19 nt, Artificial Sequence
  Description of Artificial Sequence: Synthetic oligonucleotide
  Antisense strand to SEQ ID NO: 1481666
uuaugcaaaccucauccaa

SEQ ID NO: 1481668 - RNA, 19 nt, Artificial Sequence
  Description of Artificial Sequence: Synthetic oligonucleotide
  Sense strand starting at position 2126 of SEQ ID NO: 1244346
agagauauuugguagauug

SEQ ID NO: 1481669 - RNA, 19 nt, Artificial Sequence
  Description of Artificial Sequence: Synthetic oligonucleotide
  Antisense strand to SEQ ID NO: 1481668
caaucuaccaaauaucucu

SEQ ID NO: 1481670 - RNA, 19 nt, Artificial Sequence
  Description of Artificial Sequence: Synthetic oligonucleotide
  Sense strand starting at position 2186 of SEQ ID NO: 1244346
ucccaugcuggcugggaaa

SEQ ID NO: 1481671 - RNA, 19 nt, Artificial Sequence
  Description of Artificial Sequence: Synthetic oligonucleotide
  Antisense strand to SEQ ID NO: 1481670
uuucccagccagcauggga

SEQ ID NO: 1481672 - RNA, 19 nt, Artificial Sequence
  Description of Artificial Sequence: Synthetic oligonucleotide
  Sense strand starting at position 2211 of SEQ ID NO: 1244346
agguaaaucugacuguuac

SEQ ID NO: 1481673 - RNA, 19 nt, Artificial Sequence
  Description of Artificial Sequence: Synthetic oligonucleotide
  Antisense strand to SEQ ID NO: 1481672
guaacagucagauuuaccu

SEQ ID NO: 1481674 - RNA, 19 nt, Artificial Sequence
  Description of Artificial Sequence: Synthetic oligonucleotide
  Sense strand starting at position 2212 of SEQ ID NO: 1244346
gguaaaucugacuguuaca

SEQ ID NO: 1481675 - RNA, 19 nt, Artificial Sequence
  Description of Artificial Sequence: Synthetic oligonucleotide
  Antisense strand to SEQ ID NO: 1481674
uguaacagucagauuuacc

SEQ ID NO: 1481676 - RNA, 19 nt, Artificial Sequence
  Description of Artificial Sequence: Synthetic oligonucleotide
  Sense strand starting at position 2224 of SEQ ID NO: 1244346
uguuacauugucuauguaa

SEQ ID NO: 1481677 - RNA, 19 nt, Artificial Sequence
  Description of Artificial Sequence: Synthetic oligonucleotide
  Antisense strand to SEQ ID NO: 1481676
uuacauagacaauguaaca

SEQ ID NO: 1481678 - RNA, 19 nt, Artificial Sequence
  Description of Artificial Sequence: Synthetic oligonucleotide
  Sense strand starting at position 2226 of SEQ ID NO: 1244346
uuacauugucuauguaaac

SEQ ID NO: 1481679 - RNA, 19 nt, Artificial Sequence
  Description of Artificial Sequence: Synthetic oligonucleotide
  Antisense strand to SEQ ID NO: 1481678
guuuacauagacaauguaa

SEQ ID NO: 1481680 - RNA, 19 nt, Artificial Sequence
  Description of Artificial Sequence: Synthetic oligonucleotide
  Sense strand starting at position 2265 of SEQ ID NO: 1244346
ggacucagucuaugccaaa

SEQ ID NO: 1481681 - RNA, 19 nt, Artificial Sequence
  Description of Artificial Sequence: Synthetic oligonucleotide
  Antisense strand to SEQ ID NO: 1481680
uuuggcauagacugagucc

SEQ ID NO: 1481682 - RNA, 19 nt, Artificial Sequence
  Description of Artificial Sequence: Synthetic oligonucleotide
  Sense strand starting at position 2317 of SEQ ID NO: 1244346
aagcaaaccgacugucuua

SEQ ID NO: 1481683 - RNA, 19 nt, Artificial Sequence
  Description of Artificial Sequence: Synthetic oligonucleotide
  Antisense strand to SEQ ID NO: 1481682
uaagacagucgguuugcuu

SEQ ID NO: 1481684 - RNA, 19 nt, Artificial Sequence
  Description of Artificial Sequence: Synthetic oligonucleotide
  Sense strand starting at position 2328 of SEQ ID NO: 1244346
cugucuuaagcagauacau

SEQ ID NO: 1481685 - RNA, 19 nt, Artificial Sequence
  Description of Artificial Sequence: Synthetic oligonucleotide
  Antisense strand to SEQ ID NO: 1481684
auguaucugcuuaagacag

SEQ ID NO: 1481686 - RNA, 19 nt, Artificial Sequence
  Description of Artificial Sequence: Synthetic oligonucleotide
  Sense strand starting at position 2766 of SEQ ID NO: 1244346
aauucuuacgcacagugaa

SEQ ID NO: 1481687 - RNA, 19 nt, Artificial Sequence
  Description of Artificial Sequence: Synthetic oligonucleotide
  Antisense strand to SEQ ID NO: 1481686
uucacugugcguaagaauu

SEQ ID NO: 1481688 - RNA, 19 nt, Artificial Sequence
  Description of Artificial Sequence: Synthetic oligonucleotide
  Sense strand starting at position 2776 of SEQ ID NO: 1244346
cacagugaaggcugagaaa

SEQ ID NO: 1481689 - RNA, 19 nt, Artificial Sequence
  Description of Artificial Sequence: Synthetic oligonucleotide
  Antisense strand to SEQ ID NO: 1481688
uuucucagccuucacugug

SEQ ID NO: 1481690 - RNA, 19 nt, Artificial Sequence
  Description of Artificial Sequence: Synthetic oligonucleotide
  Sense strand starting at position 2809 of SEQ ID NO: 1244346
gcugcugccucagugauuu

SEQ ID NO: 1481691 - RNA, 19 nt, Artificial Sequence
  Description of Artificial Sequence: Synthetic oligonucleotide
  Antisense strand to SEQ ID NO: 1481690
aaaucacugaggcagcagc

SEQ ID NO: 1481692 - RNA, 19 nt, Artificial Sequence
  Description of Artificial Sequence: Synthetic oligonucleotide
  Sense strand starting at position 2813 of SEQ ID NO: 1244346
cugccucagugauuucuga

SEQ ID NO: 1481693 - RNA, 19 nt, Artificial Sequence
  Description of Artificial Sequence: Synthetic oligonucleotide
  Antisense strand to SEQ ID NO: 1481692
ucagaaaucacugaggcag

SEQ ID NO: 1481694 - RNA, 19 nt, Artificial Sequence
  Description of Artificial Sequence: Synthetic oligonucleotide
  Sense strand starting at position 2883 of SEQ ID NO: 1244346
agaucugaaguaggaguua

SEQ ID NO: 1481695 - RNA, 19 nt, Artificial Sequence
  Description of Artificial Sequence: Synthetic oligonucleotide
  Antisense strand to SEQ ID NO: 1481694
uaacuccuacuucagaucu

SEQ ID NO: 1481696 - RNA, 19 nt, Artificial Sequence
  Description of Artificial Sequence: Synthetic oligonucleotide
  Sense strand starting at position 3034 of SEQ ID NO: 1244346
gcgaaaucccaucacuagu

SEQ ID NO: 1481697 - RNA, 19 nt, Artificial Sequence
  Description of Artificial Sequence: Synthetic oligonucleotide
  Antisense strand to SEQ ID NO: 1481696
acuagugaugggauuucgc

SEQ ID NO: 1481698 - RNA, 19 nt, Artificial Sequence
  Description of Artificial Sequence: Synthetic oligonucleotide
  Sense strand starting at position 3331 of SEQ ID NO: 1244346
cugguugacacuugcaaga

SEQ ID NO: 1481699 - RNA, 19 nt, Artificial Sequence
  Description of Artificial Sequence: Synthetic oligonucleotide
  Antisense strand to SEQ ID NO: 1481698
ucuugcaagugucaaccag

SEQ ID NO: 1481700 - RNA, 19 nt, Artificial Sequence
  Description of Artificial Sequence: Synthetic oligonucleotide
  Sense strand starting at position 3398 of SEQ ID NO: 1244346
agccuugagcugggacauu

SEQ ID NO: 1481701 - RNA, 19 nt, Artificial Sequence
  Description of Artificial Sequence: Synthetic oligonucleotide
  Antisense strand to SEQ ID NO: 1481700
aaugucccagcucaaggcu

SEQ ID NO: 1481702 - RNA, 19 nt, Artificial Sequence
  Description of Artificial Sequence: Synthetic oligonucleotide
  Sense strand starting at position 38 of SEQ ID NO: 1244347
ggaaccuguagccaguuaa

SEQ ID NO: 1481703 - RNA, 19 nt, Artificial Sequence
  Description of Artificial Sequence: Synthetic oligonucleotide
  Antisense strand to SEQ ID NO: 1481702
uuaacuggcuacagguucc

SEQ ID NO: 1481704 - RNA, 19 nt, Artificial Sequence
  Description of Artificial Sequence: Synthetic oligonucleotide
  Sense strand starting at position 45 of SEQ ID NO: 1244347
guagccaguuaaucaauaa

SEQ ID NO: 1481705 - RNA, 19 nt, Artificial Sequence
  Description of Artificial Sequence: Synthetic oligonucleotide
  Antisense strand to SEQ ID NO: 1481704
uuauugauuaacuggcuac

SEQ ID NO: 1481706 - RNA, 19 nt, Artificial Sequence
  Description of Artificial Sequence: Synthetic oligonucleotide
  Sense strand starting at position 81 of SEQ ID NO: 1244347
gguggaaguucaucccaga

SEQ ID NO: 1481707 - RNA, 19 nt, Artificial Sequence
  Description of Artificial Sequence: Synthetic oligonucleotide
  Antisense strand to SEQ ID NO: 1481706
ucugggaugaacuuccacc

SEQ ID NO: 1481708 - RNA, 19 nt, Artificial Sequence
  Description of Artificial Sequence: Synthetic oligonucleotide
  Sense strand starting at position 290 of SEQ ID NO: 1244347
ccagaaauuuaucacguua

SEQ ID NO: 1481709 - RNA, 19 nt, Artificial Sequence
  Description of Artificial Sequence: Synthetic oligonucleotide
  Antisense strand to SEQ ID NO: 1481708
uaacgugauaaauuucugg

SEQ ID NO: 1481710 - RNA, 19 nt, Artificial Sequence
  Description of Artificial Sequence: Synthetic oligonucleotide
  Sense strand starting at position 292 of SEQ ID NO: 1244347
agaaauuuaucacguuauc

SEQ ID NO: 1481711 - RNA, 19 nt, Artificial Sequence
  Description of Artificial Sequence: Synthetic oligonucleotide
  Antisense strand to SEQ ID NO: 1481710
gauaacgugauaaauuucu

SEQ ID NO: 1481712 - RNA, 19 nt, Artificial Sequence
  Description of Artificial Sequence: Synthetic oligonucleotide
  Sense strand starting at position 301 of SEQ ID NO: 1244347
ucacguuaucuccagcaag

SEQ ID NO: 1481713 - RNA, 19 nt, Artificial Sequence
  Description of Artificial Sequence: Synthetic oligonucleotide
  Antisense strand to SEQ ID NO: 1481712
cuugcuggagauaacguga

SEQ ID NO: 1481714 - RNA, 19 nt, Artificial Sequence
  Description of Artificial Sequence: Synthetic oligonucleotide
  Sense strand starting at position 304 of SEQ ID NO: 1244347
cguuaucuccagcaaguca

SEQ ID NO: 1481715 - RNA, 19 nt, Artificial Sequence
  Description of Artificial Sequence: Synthetic oligonucleotide
  Antisense strand to SEQ ID NO: 1481714
ugacuugcuggagauaacg

SEQ ID NO: 1481716 - RNA, 19 nt, Artificial Sequence
  Description of Artificial Sequence: Synthetic oligonucleotide
  Sense strand starting at position 323 of SEQ ID NO: 1244347
ggucucauagcccaacauu

SEQ ID NO: 1481717 - RNA, 19 nt, Artificial Sequence
  Description of Artificial Sequence: Synthetic oligonucleotide
  Antisense strand to SEQ ID NO: 1481716
aauguugggcuaugagacc

SEQ ID NO: 1481718 - RNA, 19 nt, Artificial Sequence
  Description of Artificial Sequence: Synthetic oligonucleotide
  Sense strand starting at position 383 of SEQ ID NO: 1244347
cugugucaccuagagaaac

SEQ ID NO: 1481719 - RNA, 19 nt, Artificial Sequence
  Description of Artificial Sequence: Synthetic oligonucleotide
  Antisense strand to SEQ ID NO: 1481718
guuucucuaggugacacag

SEQ ID NO: 1481720 - RNA, 19 nt, Artificial Sequence
  Description of Artificial Sequence: Synthetic oligonucleotide
  Sense strand starting at position 496 of SEQ ID NO: 1244347
ggccauguucccuggcuga

SEQ ID NO: 1481721 - RNA, 19 nt, Artificial Sequence
  Description of Artificial Sequence: Synthetic oligonucleotide
  Antisense strand to SEQ ID NO: 1481720
ucagccagggaacauggcc

SEQ ID NO: 1481722 - RNA, 19 nt, Artificial Sequence
  Description of Artificial Sequence: Synthetic oligonucleotide
  Sense strand starting at position 590 of SEQ ID NO: 1244347
acaccuuggccuggugaga

SEQ ID NO: 1481723 - RNA, 19 nt, Artificial Sequence
  Description of Artificial Sequence: Synthetic oligonucleotide
  Antisense strand to SEQ ID NO: 1481722
ucucaccaggccaaggugu

SEQ ID NO: 1481724 - RNA, 19 nt, Artificial Sequence
  Description of Artificial Sequence: Synthetic oligonucleotide
  Sense strand starting at position 642 of SEQ ID NO: 1244347
ggcugauagucuggagugu

SEQ ID NO: 1481725 - RNA, 19 nt, Artificial Sequence
  Description of Artificial Sequence: Synthetic oligonucleotide
  Antisense strand to SEQ ID NO: 1481724
acacuccagacuaucagcc

SEQ ID NO: 1481726 - RNA, 19 nt, Artificial Sequence
  Description of Artificial Sequence: Synthetic oligonucleotide
  Sense strand starting at position 643 of SEQ ID NO: 1244347
gcugauagucuggaguguu

SEQ ID NO: 1481727 - RNA, 19 nt, Artificial Sequence
  Description of Artificial Sequence: Synthetic oligonucleotide
  Antisense strand to SEQ ID NO: 1481726
aacacuccagacuaucagc

SEQ ID NO: 1481728 - RNA, 19 nt, Artificial Sequence
  Description of Artificial Sequence: Synthetic oligonucleotide
  Sense strand starting at position 766 of SEQ ID NO: 1244347
gggacaaugaacggguauu

SEQ ID NO: 1481729 - RNA, 19 nt, Artificial Sequence
  Description of Artificial Sequence: Synthetic oligonucleotide
  Antisense strand to SEQ ID NO: 1481728
aauacccguucauuguccc

SEQ ID NO: 1481730 - RNA, 19 nt, Artificial Sequence
  Description of Artificial Sequence: Synthetic oligonucleotide
  Sense strand starting at position 786 of SEQ ID NO: 1244347
ccaagaaauuccugcagca

SEQ ID NO: 1481731 - RNA, 19 nt, Artificial Sequence
  Description of Artificial Sequence: Synthetic oligonucleotide
  Antisense strand to SEQ ID NO: 1481730
ugcugcaggaauuucuugg

SEQ ID NO: 1481732 - RNA, 19 nt, Artificial Sequence
  Description of Artificial Sequence: Synthetic oligonucleotide
  Sense strand starting at position 860 of SEQ ID NO: 1244347
gcuuccagccuuuagcuaa

SEQ ID NO: 1481733 - RNA, 19 nt, Artificial Sequence
  Description of Artificial Sequence: Synthetic oligonucleotide
  Antisense strand to SEQ ID NO: 1481732
uuagcuaaaggcuggaagc

SEQ ID NO: 1481734 - RNA, 19 nt, Artificial Sequence
  Description of Artificial Sequence: Synthetic oligonucleotide
  Sense strand starting at position 978 of SEQ ID NO: 1244347
gugcuacaguuuccaaaga

SEQ ID NO: 1481735 - RNA, 19 nt, Artificial Sequence
  Description of Artificial Sequence: Synthetic oligonucleotide
  Antisense strand to SEQ ID NO: 1481734
ucuuuggaaacuguagcac

SEQ ID NO: 1481736 - RNA, 19 nt, Artificial Sequence
  Description of Artificial Sequence: Synthetic oligonucleotide
  Sense strand starting at position 1044 of SEQ ID NO: 1244347
ugcagaguuggucauguaa

SEQ ID NO: 1481737 - RNA, 19 nt, Artificial Sequence
  Description of Artificial Sequence: Synthetic oligonucleotide
  Antisense strand to SEQ ID NO: 1481736
uuacaugaccaacucugca

SEQ ID NO: 1481738 - RNA, 19 nt, Artificial Sequence
  Description of Artificial Sequence: Synthetic oligonucleotide
  Sense strand starting at position 1046 of SEQ ID NO: 1244347
cagaguuggucauguaaua

SEQ ID NO: 1481739 - RNA, 19 nt, Artificial Sequence
  Description of Artificial Sequence: Synthetic oligonucleotide
  Antisense strand to SEQ ID NO: 1481738
uauuacaugaccaacucug

SEQ ID NO: 1481740 - RNA, 19 nt, Artificial Sequence
  Description of Artificial Sequence: Synthetic oligonucleotide
  Sense strand starting at position 1080 of SEQ ID NO: 1244347
accggaaaugccugguucu

SEQ ID NO: 1481741 - RNA, 19 nt, Artificial Sequence
  Description of Artificial Sequence: Synthetic oligonucleotide
  Antisense strand to SEQ ID NO: 1481740
agaaccaggcauuuccggu

SEQ ID NO: 1481742 - RNA, 19 nt, Artificial Sequence
  Description of Artificial Sequence: Synthetic oligonucleotide
  Sense strand starting at position 1083 of SEQ ID NO: 1244347
ggaaaugccugguucugaa

SEQ ID NO: 1481743 - RNA, 19 nt, Artificial Sequence
  Description of Artificial Sequence: Synthetic oligonucleotide
  Antisense strand to SEQ ID NO: 1481742
uucagaaccaggcauuucc

SEQ ID NO: 1481744 - RNA, 19 nt, Artificial Sequence
  Description of Artificial Sequence: Synthetic oligonucleotide
  Sense strand starting at position 1369 of SEQ ID NO: 1244347
aaagguucuccaggugaug

SEQ ID NO: 1481745 - RNA, 19 nt, Artificial Sequence
  Description of Artificial Sequence: Synthetic oligonucleotide
  Antisense strand to SEQ ID NO: 1481744
caucaccuggagaaccuuu

SEQ ID NO: 1481746 - RNA, 19 nt, Artificial Sequence
  Description of Artificial Sequence: Synthetic oligonucleotide
  Sense strand starting at position 2667 of SEQ ID NO: 1244347
caaaguguucugcacaaag

SEQ ID NO: 1481747 - RNA, 19 nt, Artificial Sequence
  Description of Artificial Sequence: Synthetic oligonucleotide
  Antisense strand to SEQ ID NO: 1481746
cuuugugcagaacacuuug

SEQ ID NO: 1481748 - RNA, 19 nt, Artificial Sequence
  Description of Artificial Sequence: Synthetic oligonucleotide
  Sense strand starting at position 2785 of SEQ ID NO: 1244347
uagcuugggucaccuuaga

SEQ ID NO: 1481749 - RNA, 19 nt, Artificial Sequence
  Description of Artificial Sequence: Synthetic oligonucleotide
  Antisense strand to SEQ ID NO: 1481748
ucuaaggugacccaagcua

SEQ ID NO: 1481750 - RNA, 19 nt, Artificial Sequence
  Description of Artificial Sequence: Synthetic oligonucleotide
  Sense strand starting at position 202 of SEQ ID NO: 1244348
augaguaagucccuuguca

SEQ ID NO: 1481751 - RNA, 19 nt, Artificial Sequence
  Description of Artificial Sequence: Synthetic oligonucleotide
  Antisense strand to SEQ ID NO: 1481750
ugacaagggacuuacucau

SEQ ID NO: 1481752 - RNA, 19 nt, Artificial Sequence
  Description of Artificial Sequence: Synthetic oligonucleotide
  Sense strand starting at position 221 of SEQ ID NO: 1244348
gcuuuauaacccugacaug

SEQ ID NO: 1481753 - RNA, 19 nt, Artificial Sequence
  Description of Artificial Sequence: Synthetic oligonucleotide
  Antisense strand to SEQ ID NO: 1481752
caugucaggguuauaaagc

SEQ ID NO: 1481754 - RNA, 19 nt, Artificial Sequence
  Description of Artificial Sequence: Synthetic oligonucleotide
  Sense strand starting at position 354 of SEQ ID NO: 1244348
ugauauugcuugucauaga

SEQ ID NO: 1481755 - RNA, 19 nt, Artificial Sequence
  Description of Artificial Sequence: Synthetic oligonucleotide
  Antisense strand to SEQ ID NO: 1481754
ucuaugacaagcaauauca

SEQ ID NO: 1481756 - RNA, 19 nt, Artificial Sequence
  Description of Artificial Sequence: Synthetic oligonucleotide
  Sense strand starting at position 451 of SEQ ID NO: 1244348
uaggacgcacuuuaugaaa

SEQ ID NO: 1481757 - RNA, 19 nt, Artificial Sequence
  Description of Artificial Sequence: Synthetic oligonucleotide
  Antisense strand to SEQ ID NO: 1481756
uuucauaaagugcguccua

SEQ ID NO: 1481758 - RNA, 19 nt, Artificial Sequence
  Description of Artificial Sequence: Synthetic oligonucleotide
  Sense strand starting at position 530 of SEQ ID NO: 1244348
gaauuuauguuuguaggcu

SEQ ID NO: 1481759 - RNA, 19 nt, Artificial Sequence
  Description of Artificial Sequence: Synthetic oligonucleotide
  Antisense strand to SEQ ID NO: 1481758
agccuacaaacauaaauuc

SEQ ID NO: 1481760 - RNA, 19 nt, Artificial Sequence
  Description of Artificial Sequence: Synthetic oligonucleotide
  Sense strand starting at position 684 of SEQ ID NO: 1244348
ggcgugaugguggauacuu

SEQ ID NO: 1481761 - RNA, 19 nt, Artificial Sequence
  Description of Artificial Sequence: Synthetic oligonucleotide
  Antisense strand to SEQ ID NO: 1481760
aaguauccaccaucacgcc

SEQ ID NO: 1481762 - RNA, 19 nt, Artificial Sequence
  Description of Artificial Sequence: Synthetic oligonucleotide
  Sense strand starting at position 689 of SEQ ID NO: 1244348
gaugguggauacuugcaau

SEQ ID NO: 1481763 - RNA, 19 nt, Artificial Sequence
  Description of Artificial Sequence: Synthetic oligonucleotide
  Antisense strand to SEQ ID NO: 1481762
auugcaaguauccaccauc

SEQ ID NO: 1481764 - RNA, 19 nt, Artificial Sequence
  Description of Artificial Sequence: Synthetic oligonucleotide
  Sense strand starting at position 864 of SEQ ID NO: 1244348
uuaaauauggagugguuau

SEQ ID NO: 1481765 - RNA, 19 nt, Artificial Sequence
  Description of Artificial Sequence: Synthetic oligonucleotide
  Antisense strand to SEQ ID NO: 1481764
auaaccacuccauauuuaa

SEQ ID NO: 1481766 - RNA, 19 nt, Artificial Sequence
  Description of Artificial Sequence: Synthetic oligonucleotide
  Sense strand starting at position 895 of SEQ ID NO: 1244348
guauauguaagguaggauu

SEQ ID NO: 1481767 - RNA, 19 nt, Artificial Sequence
  Description of Artificial Sequence: Synthetic oligonucleotide
  Antisense strand to SEQ ID NO: 1481766
aauccuaccuuacauauac

SEQ ID NO: 1481768 - RNA, 19 nt, Artificial Sequence
  Description of Artificial Sequence: Synthetic oligonucleotide
  Sense strand starting at position 1153 of SEQ ID NO: 1244348
guaugaucucggcucgcua

SEQ ID NO: 1481769 - RNA, 19 nt, Artificial Sequence
  Description of Artificial Sequence: Synthetic oligonucleotide
  Antisense strand to SEQ ID NO: 1481768
uagcgagccgagaucauac

SEQ ID NO: 1481770 - RNA, 19 nt, Artificial Sequence
  Description of Artificial Sequence: Synthetic oligonucleotide
  Sense strand starting at position 2042 of SEQ ID NO: 1244348
ggcggaugugcguuccuua

SEQ ID NO: 1481771 - RNA, 19 nt, Artificial Sequence
  Description of Artificial Sequence: Synthetic oligonucleotide
  Antisense strand to SEQ ID NO: 1481770
uaaggaacgcacauccgcc

SEQ ID NO: 1481772 - RNA, 19 nt, Artificial Sequence
  Description of Artificial Sequence: Synthetic oligonucleotide
  Sense strand starting at position 2055 of SEQ ID NO: 1244348
uccuuaggucucuacggau

SEQ ID NO: 1481773 - RNA, 19 nt, Artificial Sequence
  Description of Artificial Sequence: Synthetic oligonucleotide
  Antisense strand to SEQ ID NO: 1481772
auccguagagaccuaagga

SEQ ID NO: 1481774 - RNA, 19 nt, Artificial Sequence
  Description of Artificial Sequence: Synthetic oligonucleotide
  Sense strand starting at position 2329 of SEQ ID NO: 1244348
ucucauuaucugggcugga

SEQ ID NO: 1481775 - RNA, 19 nt, Artificial Sequence
  Description of Artificial Sequence: Synthetic oligonucleotide
  Antisense strand to SEQ ID NO: 1481774
uccagcccagauaaugaga

SEQ ID NO: 1481776 - RNA, 19 nt, Artificial Sequence
  Description of Artificial Sequence: Synthetic oligonucleotide
  Sense strand starting at position 2330 of SEQ ID NO: 1244348
cucauuaucugggcuggau

SEQ ID NO: 1481777 - RNA, 19 nt, Artificial Sequence
  Description of Artificial Sequence: Synthetic oligonucleotide
  Antisense strand to SEQ ID NO: 1481776
auccagcccagauaaugag

SEQ ID NO: 1481778 - RNA, 19 nt, Artificial Sequence
  Description of Artificial Sequence: Synthetic oligonucleotide
  Sense strand starting at position 2332 of SEQ ID NO: 1244348
cauuaucugggcuggauau

SEQ ID NO: 1481779 - RNA, 19 nt, Artificial Sequence
  Description of Artificial Sequence: Synthetic oligonucleotide
  Antisense strand to SEQ ID NO: 1481778
auauccagcccagauaaug

SEQ ID NO: 1481780 - RNA, 19 nt, Artificial Sequence
  Description of Artificial Sequence: Synthetic oligonucleotide
  Sense strand starting at position 2345 of SEQ ID NO: 1244348
ggauaugacugggucuuca

SEQ ID NO: 1481781 - RNA, 19 nt, Artificial Sequence
  Description of Artificial Sequence: Synthetic oligonucleotide
  Antisense strand to SEQ ID NO: 1481780
ugaagacccagucauaucc

SEQ ID NO: 1481782 - RNA, 19 nt, Artificial Sequence
  Description of Artificial Sequence: Synthetic oligonucleotide
  Sense strand starting at position 2349 of SEQ ID NO: 1244348
augacugggucuucaggaa

SEQ ID NO: 1481783 - RNA, 19 nt, Artificial Sequence
  Description of Artificial Sequence: Synthetic oligonucleotide
  Antisense strand to SEQ ID NO: 1481782
uuccugaagacccagucau

SEQ ID NO: 1481784 - RNA, 19 nt, Artificial Sequence
  Description of Artificial Sequence: Synthetic oligonucleotide
  Sense strand starting at position 2459 of SEQ ID NO: 1244348
caagaaugcuuauccagug

SEQ ID NO: 1481785 - RNA, 19 nt, Artificial Sequence
  Description of Artificial Sequence: Synthetic oligonucleotide
  Antisense strand to SEQ ID NO: 1481784
cacuggauaagcauucuug

SEQ ID NO: 1481786 - RNA, 19 nt, Artificial Sequence
  Description of Artificial Sequence: Synthetic oligonucleotide
  Sense strand starting at position 2460 of SEQ ID NO: 1244348
aagaaugcuuauccaguga

SEQ ID NO: 1481787 - RNA, 19 nt, Artificial Sequence
  Description of Artificial Sequence: Synthetic oligonucleotide
  Antisense strand to SEQ ID NO: 1481786
ucacuggauaagcauucuu

SEQ ID NO: 1481788 - RNA, 19 nt, Artificial Sequence
  Description of Artificial Sequence: Synthetic oligonucleotide
  Sense strand starting at position 2575 of SEQ ID NO: 1244348
caagaaauguguccgagag

SEQ ID NO: 1481789 - RNA, 19 nt, Artificial Sequence
  Description of Artificial Sequence: Synthetic oligonucleotide
  Antisense strand to SEQ ID NO: 1481788
cucucggacacauuucuug

SEQ ID NO: 1481790 - RNA, 19 nt, Artificial Sequence
  Description of Artificial Sequence: Synthetic oligonucleotide
  Sense strand starting at position 2576 of SEQ ID NO: 1244348
aagaaauguguccgagagc

SEQ ID NO: 1481791 - RNA, 19 nt, Artificial Sequence
  Description of Artificial Sequence: Synthetic oligonucleotide
  Antisense strand to SEQ ID NO: 1481790
gcucucggacacauuucuu

SEQ ID NO: 1481792 - RNA, 19 nt, Artificial Sequence
  Description of Artificial Sequence: Synthetic oligonucleotide
  Sense strand starting at position 2579 of SEQ ID NO: 1244348
aaauguguccgagagcucu

SEQ ID NO: 1481793 - RNA, 19 nt, Artificial Sequence
  Description of Artificial Sequence: Synthetic oligonucleotide
  Antisense strand to SEQ ID NO: 1481792
agagcucucggacacauuu

SEQ ID NO: 1481794 - RNA, 19 nt, Artificial Sequence
  Description of Artificial Sequence: Synthetic oligonucleotide
  Sense strand starting at position 2613 of SEQ ID NO: 1244348
guaccauggugacuaguga

SEQ ID NO: 1481795 - RNA, 19 nt, Artificial Sequence
  Description of Artificial Sequence: Synthetic oligonucleotide
  Antisense strand to SEQ ID NO: 1481794
ucacuagucaccaugguac

SEQ ID NO: 1481796 - RNA, 19 nt, Artificial Sequence
  Description of Artificial Sequence: Synthetic oligonucleotide
  Sense strand starting at position 2631 of SEQ ID NO: 1244348
agaggaagguccguuuagu

SEQ ID NO: 1481797 - RNA, 19 nt, Artificial Sequence
  Description of Artificial Sequence: Synthetic oligonucleotide
  Antisense strand to SEQ ID NO: 1481796
acuaaacggaccuuccucu

SEQ ID NO: 1481798 - RNA, 19 nt, Artificial Sequence
  Description of Artificial Sequence: Synthetic oligonucleotide
  Sense strand starting at position 2773 of SEQ ID NO: 1244348
ucuccagucuccguuauuu

SEQ ID NO: 1481799 - RNA, 19 nt, Artificial Sequence
  Description of Artificial Sequence: Synthetic oligonucleotide
  Antisense strand to SEQ ID NO: 1481798
aaauaacggagacuggaga

SEQ ID NO: 1481800 - RNA, 19 nt, Artificial Sequence
  Description of Artificial Sequence: Synthetic oligonucleotide
  Sense strand starting at position 2866 of SEQ ID NO: 1244348
uuauuuguccugugucuaa

SEQ ID NO: 1481801 - RNA, 19 nt, Artificial Sequence
  Description of Artificial Sequence: Synthetic oligonucleotide
  Antisense strand to SEQ ID NO: 1481800
uuagacacaggacaaauaa

SEQ ID NO: 1481802 - RNA, 19 nt, Artificial Sequence
  Description of Artificial Sequence: Synthetic oligonucleotide
  Sense strand starting at position 2955 of SEQ ID NO: 1244348
guguuagguauugaggaua

SEQ ID NO: 1481803 - RNA, 19 nt, Artificial Sequence
  Description of Artificial Sequence: Synthetic oligonucleotide
  Antisense strand to SEQ ID NO: 1481802
uauccucaauaccuaacac

SEQ ID NO: 1481804 - RNA, 19 nt, Artificial Sequence
  Description of Artificial Sequence: Synthetic oligonucleotide
  Sense strand starting at position 3044 of SEQ ID NO: 1244348
ggaaaucacgucuaaguga

SEQ ID NO: 1481805 - RNA, 19 nt, Artificial Sequence
  Description of Artificial Sequence: Synthetic oligonucleotide
  Antisense strand to SEQ ID NO: 1481804
ucacuuagacgugauuucc

SEQ ID NO: 1481806 - RNA, 19 nt, Artificial Sequence
  Description of Artificial Sequence: Synthetic oligonucleotide
  Sense strand starting at position 3053 of SEQ ID NO: 1244348
gucuaagugaccgagaguu

SEQ ID NO: 1481807 - RNA, 19 nt, Artificial Sequence
  Description of Artificial Sequence: Synthetic oligonucleotide
  Antisense strand to SEQ ID NO: 1481806
aacucucggucacuuagac

SEQ ID NO: 1481808 - RNA, 19 nt, Artificial Sequence
  Description of Artificial Sequence: Synthetic oligonucleotide
  Sense strand starting at position 3059 of SEQ ID NO: 1244348
gugaccgagaguuggaaau

SEQ ID NO: 1481809 - RNA, 19 nt, Artificial Sequence
  Description of Artificial Sequence: Synthetic oligonucleotide
  Antisense strand to SEQ ID NO: 1481808
auuuccaacucucggucac

SEQ ID NO: 1481810 - RNA, 19 nt, Artificial Sequence
  Description of Artificial Sequence: Synthetic oligonucleotide
  Sense strand starting at position 3066 of SEQ ID NO: 1244348
agaguuggaaauugcuaga

SEQ ID NO: 1481811 - RNA, 19 nt, Artificial Sequence
  Description of Artificial Sequence: Synthetic oligonucleotide
  Antisense strand to SEQ ID NO: 1481810
ucuagcaauuuccaacucu

SEQ ID NO: 1481812 - RNA, 19 nt, Artificial Sequence
  Description of Artificial Sequence: Synthetic oligonucleotide
  Sense strand starting at position 3158 of SEQ ID NO: 1244348
gcaguuggaauugaucaca

SEQ ID NO: 1481813 - RNA, 19 nt, Artificial Sequence
  Description of Artificial Sequence: Synthetic oligonucleotide
  Antisense strand to SEQ ID NO: 1481812
ugugaucaauuccaacugc

SEQ ID NO: 1481814 - RNA, 19 nt, Artificial Sequence
  Description of Artificial Sequence: Synthetic oligonucleotide
  Sense strand starting at position 3345 of SEQ ID NO: 1244348
uugccuugucaggauauaa

SEQ ID NO: 1481815 - RNA, 19 nt, Artificial Sequence
  Description of Artificial Sequence: Synthetic oligonucleotide
  Antisense strand to SEQ ID NO: 1481814
uuauauccugacaaggcaa

SEQ ID NO: 1481816 - RNA, 19 nt, Artificial Sequence
  Description of Artificial Sequence: Synthetic oligonucleotide
  Sense strand starting at position 3532 of SEQ ID NO: 1244348
uuggaaaucacugguuuag

SEQ ID NO: 1481817 - RNA, 19 nt, Artificial Sequence
  Description of Artificial Sequence: Synthetic oligonucleotide
  Antisense strand to SEQ ID NO: 1481816
cuaaaccagugauuuccaa

SEQ ID NO: 1481818 - RNA, 19 nt, Artificial Sequence
  Description of Artificial Sequence: Synthetic oligonucleotide
  Sense strand starting at position 3534 of SEQ ID NO: 1244348
ggaaaucacugguuuagac

SEQ ID NO: 1481819 - RNA, 19 nt, Artificial Sequence
  Description of Artificial Sequence: Synthetic oligonucleotide
  Antisense strand to SEQ ID NO: 1481818
gucuaaaccagugauuucc

SEQ ID NO: 1481820 - RNA, 19 nt, Artificial Sequence
  Description of Artificial Sequence: Synthetic oligonucleotide
  Sense strand starting at position 3542 of SEQ ID NO: 1244348
cugguuuagacuuaacguu

SEQ ID NO: 1481821 - RNA, 19 nt, Artificial Sequence
  Description of Artificial Sequence: Synthetic oligonucleotide
  Antisense strand to SEQ ID NO: 1481820
aacguuaagucuaaaccag

SEQ ID NO: 1481822 - RNA, 19 nt, Artificial Sequence
  Description of Artificial Sequence: Synthetic oligonucleotide
  Sense strand starting at position 3701 of SEQ ID NO: 1244348
uuuaaauugugaucugucu

SEQ ID NO: 1481823 - RNA, 19 nt, Artificial Sequence
  Description of Artificial Sequence: Synthetic oligonucleotide
  Antisense strand to SEQ ID NO: 1481822
agacagaucacaauuuaaa

SEQ ID NO: 1481824 - RNA, 19 nt, Artificial Sequence
  Description of Artificial Sequence: Synthetic oligonucleotide
  Sense strand starting at position 3712 of SEQ ID NO: 1244348
aucugucuuccagggauca

SEQ ID NO: 1481825 - RNA, 19 nt, Artificial Sequence
  Description of Artificial Sequence: Synthetic oligonucleotide
  Antisense strand to SEQ ID NO: 1481824
ugaucccuggaagacagau

SEQ ID NO: 1481826 - RNA, 19 nt, Artificial Sequence
  Description of Artificial Sequence: Synthetic oligonucleotide
  Sense strand starting at position 3766 of SEQ ID NO: 1244348
uauggugguuuauuagauu

SEQ ID NO: 1481827 - RNA, 19 nt, Artificial Sequence
  Description of Artificial Sequence: Synthetic oligonucleotide
  Antisense strand to SEQ ID NO: 1481826
aaucuaauaaaccaccaua

SEQ ID NO: 1481828 - RNA, 19 nt, Artificial Sequence
  Description of Artificial Sequence: Synthetic oligonucleotide
  Sense strand starting at position 3797 of SEQ ID NO: 1244348
gguccuuuccagugauuaa

SEQ ID NO: 1481829 - RNA, 19 nt, Artificial Sequence
  Description of Artificial Sequence: Synthetic oligonucleotide
  Antisense strand to SEQ ID NO: 1481828
uuaaucacuggaaaggacc

SEQ ID NO: 1481830 - RNA, 19 nt, Artificial Sequence
  Description of Artificial Sequence: Synthetic oligonucleotide
  Sense strand starting at position 111 of SEQ ID NO: 1244349
aaaucuucugcaggaagua

SEQ ID NO: 1481831 - RNA, 19 nt, Artificial Sequence
  Description of Artificial Sequence: Synthetic oligonucleotide
  Antisense strand to SEQ ID NO: 1481830
uacuuccugcagaagauuu

SEQ ID NO: 1481832 - RNA, 19 nt, Artificial Sequence
  Description of Artificial Sequence: Synthetic oligonucleotide
  Sense strand starting at position 296 of SEQ ID NO: 1244349
uucccuuaccugugacuuu

SEQ ID NO: 1481833 - RNA, 19 nt, Artificial Sequence
  Description of Artificial Sequence: Synthetic oligonucleotide
  Antisense strand to SEQ ID NO: 1481832
aaagucacagguaagggaa

SEQ ID NO: 1481834 - RNA, 19 nt, Artificial Sequence
  Description of Artificial Sequence: Synthetic oligonucleotide
  Sense strand starting at position 721 of SEQ ID NO: 1244349
augaguaagucccuuguca

SEQ ID NO: 1481835 - RNA, 19 nt, Artificial Sequence
  Description of Artificial Sequence: Synthetic oligonucleotide
  Antisense strand to SEQ ID NO: 1481834
ugacaagggacuuacucau

SEQ ID NO: 1481836 - RNA, 19 nt, Artificial Sequence
  Description of Artificial Sequence: Synthetic oligonucleotide
  Sense strand starting at position 740 of SEQ ID NO: 1244349
gcuuuauaacccugacaug

SEQ ID NO: 1481837 - RNA, 19 nt, Artificial Sequence
  Description of Artificial Sequence: Synthetic oligonucleotide
  Antisense strand to SEQ ID NO: 1481836
caugucaggguuauaaagc

SEQ ID NO: 1481838 - RNA, 19 nt, Artificial Sequence
  Description of Artificial Sequence: Synthetic oligonucleotide
  Sense strand starting at position 774 of SEQ ID NO: 1244349
gcgaguaauuccucucaaa

SEQ ID NO: 1481839 - RNA, 19 nt, Artificial Sequence
  Description of Artificial Sequence: Synthetic oligonucleotide
  Antisense strand to SEQ ID NO: 1481838
uuugagaggaauuacucgc

SEQ ID NO: 1481840 - RNA, 19 nt, Artificial Sequence
  Description of Artificial Sequence: Synthetic oligonucleotide
  Sense strand starting at position 822 of SEQ ID NO: 1244349
ucuccuugucauuguggga

SEQ ID NO: 1481841 - RNA, 19 nt, Artificial Sequence
  Description of Artificial Sequence: Synthetic oligonucleotide
  Antisense strand to SEQ ID NO: 1481840
ucccacaaugacaaggaga

SEQ ID NO: 1481842 - RNA, 19 nt, Artificial Sequence
  Description of Artificial Sequence: Synthetic oligonucleotide
  Sense strand starting at position 873 of SEQ ID NO: 1244349
ugauauugcuugucauaga

SEQ ID NO: 1481843 - RNA, 19 nt, Artificial Sequence
  Description of Artificial Sequence: Synthetic oligonucleotide
  Antisense strand to SEQ ID NO: 1481842
ucuaugacaagcaauauca

SEQ ID NO: 1481844 - RNA, 19 nt, Artificial Sequence
  Description of Artificial Sequence: Synthetic oligonucleotide
  Sense strand starting at position 970 of SEQ ID NO: 1244349
uaggacgcacuuuaugaaa

SEQ ID NO: 1481845 - RNA, 19 nt, Artificial Sequence
  Description of Artificial Sequence: Synthetic oligonucleotide
  Antisense strand to SEQ ID NO: 1481844
uuucauaaagugcguccua

SEQ ID NO: 1481846 - RNA, 19 nt, Artificial Sequence
  Description of Artificial Sequence: Synthetic oligonucleotide
  Sense strand starting at position 1049 of SEQ ID NO: 1244349
gaauuuauguuuguaggcu

SEQ ID NO: 1481847 - RNA, 19 nt, Artificial Sequence
  Description of Artificial Sequence: Synthetic oligonucleotide
  Antisense strand to SEQ ID NO: 1481846
agccuacaaacauaaauuc

SEQ ID NO: 1481848 - RNA, 19 nt, Artificial Sequence
  Description of Artificial Sequence: Synthetic oligonucleotide
  Sense strand starting at position 1203 of SEQ ID NO: 1244349
ggcgugaugguggauacuu

SEQ ID NO: 1481849 - RNA, 19 nt, Artificial Sequence
  Description of Artificial Sequence: Synthetic oligonucleotide
  Antisense strand to SEQ ID NO: 1481848
aaguauccaccaucacgcc

SEQ ID NO: 1481850 - RNA, 19 nt, Artificial Sequence
  Description of Artificial Sequence: Synthetic oligonucleotide
  Sense strand starting at position 1208 of SEQ ID NO: 1244349
gaugguggauacuugcaau

SEQ ID NO: 1481851 - RNA, 19 nt, Artificial Sequence
  Description of Artificial Sequence: Synthetic oligonucleotide
  Antisense strand to SEQ ID NO: 1481850
auugcaaguauccaccauc

SEQ ID NO: 1481852 - RNA, 19 nt, Artificial Sequence
  Description of Artificial Sequence: Synthetic oligonucleotide
  Sense strand starting at position 1383 of SEQ ID NO: 1244349
uuaaauauggagugguuau

SEQ ID NO: 1481853 - RNA, 19 nt, Artificial Sequence
  Description of Artificial Sequence: Synthetic oligonucleotide
  Antisense strand to SEQ ID NO: 1481852
auaaccacuccauauuuaa

SEQ ID NO: 1481854 - RNA, 19 nt, Artificial Sequence
  Description of Artificial Sequence: Synthetic oligonucleotide
  Sense strand starting at position 1400 of SEQ ID NO: 1244349
auaacuguuuggcuguaua

SEQ ID NO: 1481855 - RNA, 19 nt, Artificial Sequence
  Description of Artificial Sequence: Synthetic oligonucleotide
  Antisense strand to SEQ ID NO: 1481854
uauacagccaaacaguuau

SEQ ID NO: 1481856 - RNA, 19 nt, Artificial Sequence
  Description of Artificial Sequence: Synthetic oligonucleotide
  Sense strand starting at position 1414 of SEQ ID NO: 1244349
guauauguaagguaggauu

SEQ ID NO: 1481857 - RNA, 19 nt, Artificial Sequence
  Description of Artificial Sequence: Synthetic oligonucleotide
  Antisense strand to SEQ ID NO: 1481856
aauccuaccuuacauauac

SEQ ID NO: 1481858 - RNA, 19 nt, Artificial Sequence
  Description of Artificial Sequence: Synthetic oligonucleotide
  Sense strand starting at position 1672 of SEQ ID NO: 1244349
guaugaucucggcucgcua

SEQ ID NO: 1481859 - RNA, 19 nt, Artificial Sequence
  Description of Artificial Sequence: Synthetic oligonucleotide
  Antisense strand to SEQ ID NO: 1481858
uagcgagccgagaucauac

SEQ ID NO: 1481860 - RNA, 19 nt, Artificial Sequence
  Description of Artificial Sequence: Synthetic oligonucleotide
  Sense strand starting at position 2561 of SEQ ID NO: 1244349
ggcggaugugcguuccuua

SEQ ID NO: 1481861 - RNA, 19 nt, Artificial Sequence
  Description of Artificial Sequence: Synthetic oligonucleotide
  Antisense strand to SEQ ID NO: 1481860
uaaggaacgcacauccgcc

SEQ ID NO: 1481862 - RNA, 19 nt, Artificial Sequence
  Description of Artificial Sequence: Synthetic oligonucleotide
  Sense strand starting at position 2574 of SEQ ID NO: 1244349
uccuuaggucucuacggau

SEQ ID NO: 1481863 - RNA, 19 nt, Artificial Sequence
  Description of Artificial Sequence: Synthetic oligonucleotide
  Antisense strand to SEQ ID NO: 1481862
auccguagagaccuaagga

SEQ ID NO: 1481864 - RNA, 19 nt, Artificial Sequence
  Description of Artificial Sequence: Synthetic oligonucleotide
  Sense strand starting at position 2848 of SEQ ID NO: 1244349
ucucauuaucugggcugga

SEQ ID NO: 1481865 - RNA, 19 nt, Artificial Sequence
  Description of Artificial Sequence: Synthetic oligonucleotide
  Antisense strand to SEQ ID NO: 1481864
uccagcccagauaaugaga

SEQ ID NO: 1481866 - RNA, 19 nt, Artificial Sequence
  Description of Artificial Sequence: Synthetic oligonucleotide
  Sense strand starting at position 2849 of SEQ ID NO: 1244349
cucauuaucugggcuggau

SEQ ID NO: 1481867 - RNA, 19 nt, Artificial Sequence
  Description of Artificial Sequence: Synthetic oligonucleotide
  Antisense strand to SEQ ID NO: 1481866
auccagcccagauaaugag

SEQ ID NO: 1481868 - RNA, 19 nt, Artificial Sequence
  Description of Artificial Sequence: Synthetic oligonucleotide
  Sense strand starting at position 2851 of SEQ ID NO: 1244349
cauuaucugggcuggauau

SEQ ID NO: 1481869 - RNA, 19 nt, Artificial Sequence
  Description of Artificial Sequence: Synthetic oligonucleotide
  Antisense strand to SEQ ID NO: 1481868
auauccagcccagauaaug

SEQ ID NO: 1481870 - RNA, 19 nt, Artificial Sequence
  Description of Artificial Sequence: Synthetic oligonucleotide
  Sense strand starting at position 2864 of SEQ ID NO: 1244349
ggauaugacugggucuuca

SEQ ID NO: 1481871 - RNA, 19 nt, Artificial Sequence
  Description of Artificial Sequence: Synthetic oligonucleotide
  Antisense strand to SEQ ID NO: 1481870
ugaagacccagucauaucc

SEQ ID NO: 1481872 - RNA, 19 nt, Artificial Sequence
  Description of Artificial Sequence: Synthetic oligonucleotide
  Sense strand starting at position 2868 of SEQ ID NO: 1244349
augacugggucuucaggaa

SEQ ID NO: 1481873 - RNA, 19 nt, Artificial Sequence
  Description of Artificial Sequence: Synthetic oligonucleotide
  Antisense strand to SEQ ID NO: 1481872
uuccugaagacccagucau

SEQ ID NO: 1481874 - RNA, 19 nt, Artificial Sequence
  Description of Artificial Sequence: Synthetic oligonucleotide
  Sense strand starting at position 2978 of SEQ ID NO: 1244349
caagaaugcuuauccagug

SEQ ID NO: 1481875 - RNA, 19 nt, Artificial Sequence
  Description of Artificial Sequence: Synthetic oligonucleotide
  Antisense strand to SEQ ID NO: 1481874
cacuggauaagcauucuug

SEQ ID NO: 1481876 - RNA, 19 nt, Artificial Sequence
  Description of Artificial Sequence: Synthetic oligonucleotide
  Sense strand starting at position 2979 of SEQ ID NO: 1244349
aagaaugcuuauccaguga

SEQ ID NO: 1481877 - RNA, 19 nt, Artificial Sequence
  Description of Artificial Sequence: Synthetic oligonucleotide
  Antisense strand to SEQ ID NO: 1481876
ucacuggauaagcauucuu

SEQ ID NO: 1481878 - RNA, 19 nt, Artificial Sequence
  Description of Artificial Sequence: Synthetic oligonucleotide
  Sense strand starting at position 3094 of SEQ ID NO: 1244349
caagaaauguguccgagag

SEQ ID NO: 1481879 - RNA, 19 nt, Artificial Sequence
  Description of Artificial Sequence: Synthetic oligonucleotide
  Antisense strand to SEQ ID NO: 1481878
cucucggacacauuucuug

SEQ ID NO: 1481880 - RNA, 19 nt, Artificial Sequence
  Description of Artificial Sequence: Synthetic oligonucleotide
  Sense strand starting at position 3095 of SEQ ID NO: 1244349
aagaaauguguccgagagc

SEQ ID NO: 1481881 - RNA, 19 nt, Artificial Sequence
  Description of Artificial Sequence: Synthetic oligonucleotide
  Antisense strand to SEQ ID NO: 1481880
gcucucggacacauuucuu

SEQ ID NO: 1481882 - RNA, 19 nt, Artificial Sequence
  Description of Artificial Sequence: Synthetic oligonucleotide
  Sense strand starting at position 3098 of SEQ ID NO: 1244349
aaauguguccgagagcucu

SEQ ID NO: 1481883 - RNA, 19 nt, Artificial Sequence
  Description of Artificial Sequence: Synthetic oligonucleotide
  Antisense strand to SEQ ID NO: 1481882
agagcucucggacacauuu

SEQ ID NO: 1481884 - RNA, 19 nt, Artificial Sequence
  Description of Artificial Sequence: Synthetic oligonucleotide
  Sense strand starting at position 3132 of SEQ ID NO: 1244349
guaccauggugacuaguga

SEQ ID NO: 1481885 - RNA, 19 nt, Artificial Sequence
  Description of Artificial Sequence: Synthetic oligonucleotide
  Antisense strand to SEQ ID NO: 1481884
ucacuagucaccaugguac

SEQ ID NO: 1481886 - RNA, 19 nt, Artificial Sequence
  Description of Artificial Sequence: Synthetic oligonucleotide
  Sense strand starting at position 3150 of SEQ ID NO: 1244349
agaggaagguccguuuagu

SEQ ID NO: 1481887 - RNA, 19 nt, Artificial Sequence
  Description of Artificial Sequence: Synthetic oligonucleotide
  Antisense strand to SEQ ID NO: 1481886
acuaaacggaccuuccucu

SEQ ID NO: 1481888 - RNA, 19 nt, Artificial Sequence
  Description of Artificial Sequence: Synthetic oligonucleotide
  Sense strand starting at position 3292 of SEQ ID NO: 1244349
ucuccagucuccguuauuu

SEQ ID NO: 1481889 - RNA, 19 nt, Artificial Sequence
  Description of Artificial Sequence: Synthetic oligonucleotide
  Antisense strand to SEQ ID NO: 1481888
aaauaacggagacuggaga

SEQ ID NO: 1481890 - RNA, 19 nt, Artificial Sequence
  Description of Artificial Sequence: Synthetic oligonucleotide
  Sense strand starting at position 3385 of SEQ ID NO: 1244349
uuauuuguccugugucuaa

SEQ ID NO: 1481891 - RNA, 19 nt, Artificial Sequence
  Description of Artificial Sequence: Synthetic oligonucleotide
  Antisense strand to SEQ ID NO: 1481890
uuagacacaggacaaauaa

SEQ ID NO: 1481892 - RNA, 19 nt, Artificial Sequence
  Description of Artificial Sequence: Synthetic oligonucleotide
  Sense strand starting at position 3474 of SEQ ID NO: 1244349
guguuagguauugaggaua

SEQ ID NO: 1481893 - RNA, 19 nt, Artificial Sequence
  Description of Artificial Sequence: Synthetic oligonucleotide
  Antisense strand to SEQ ID NO: 1481892
uauccucaauaccuaacac

SEQ ID NO: 1481894 - RNA, 19 nt, Artificial Sequence
  Description of Artificial Sequence: Synthetic oligonucleotide
  Sense strand starting at position 3563 of SEQ ID NO: 1244349
ggaaaucacgucuaaguga

SEQ ID NO: 1481895 - RNA, 19 nt, Artificial Sequence
  Description of Artificial Sequence: Synthetic oligonucleotide
  Antisense strand to SEQ ID NO: 1481894
ucacuuagacgugauuucc

SEQ ID NO: 1481896 - RNA, 19 nt, Artificial Sequence
  Description of Artificial Sequence: Synthetic oligonucleotide
  Sense strand starting at position 3572 of SEQ ID NO: 1244349
gucuaagugaccgagaguu

SEQ ID NO: 1481897 - RNA, 19 nt, Artificial Sequence
  Description of Artificial Sequence: Synthetic oligonucleotide
  Antisense strand to SEQ ID NO: 1481896
aacucucggucacuuagac

SEQ ID NO: 1481898 - RNA, 19 nt, Artificial Sequence
  Description of Artificial Sequence: Synthetic oligonucleotide
  Sense strand starting at position 3578 of SEQ ID NO: 1244349
gugaccgagaguuggaaau

SEQ ID NO: 1481899 - RNA, 19 nt, Artificial Sequence
  Description of Artificial Sequence: Synthetic oligonucleotide
  Antisense strand to SEQ ID NO: 1481898
auuuccaacucucggucac

SEQ ID NO: 1481900 - RNA, 19 nt, Artificial Sequence
  Description of Artificial Sequence: Synthetic oligonucleotide
  Sense strand starting at position 3585 of SEQ ID NO: 1244349
agaguuggaaauugcuaga

SEQ ID NO: 1481901 - RNA, 19 nt, Artificial Sequence
  Description of Artificial Sequence: Synthetic oligonucleotide
  Antisense strand to SEQ ID NO: 1481900
ucuagcaauuuccaacucu

SEQ ID NO: 1481902 - RNA, 19 nt, Artificial Sequence
  Description of Artificial Sequence: Synthetic oligonucleotide
  Sense strand starting at position 3605 of SEQ ID NO: 1244349
cuacuaauucuuuguugua

SEQ ID NO: 1481903 - RNA, 19 nt, Artificial Sequence
  Description of Artificial Sequence: Synthetic oligonucleotide
  Antisense strand to SEQ ID NO: 1481902
uacaacaaagaauuaguag

SEQ ID NO: 1481904 - RNA, 19 nt, Artificial Sequence
  Description of Artificial Sequence: Synthetic oligonucleotide
  Sense strand starting at position 3677 of SEQ ID NO: 1244349
gcaguuggaauugaucaca

SEQ ID NO: 1481905 - RNA, 19 nt, Artificial Sequence
  Description of Artificial Sequence: Synthetic oligonucleotide
  Antisense strand to SEQ ID NO: 1481904
ugugaucaauuccaacugc

SEQ ID NO: 1481906 - RNA, 19 nt, Artificial Sequence
  Description of Artificial Sequence: Synthetic oligonucleotide
  Sense strand starting at position 3860 of SEQ ID NO: 1244349
uaaguugccuugucaggau

SEQ ID NO: 1481907 - RNA, 19 nt, Artificial Sequence
  Description of Artificial Sequence: Synthetic oligonucleotide
  Antisense strand to SEQ ID NO: 1481906
auccugacaaggcaacuua

SEQ ID NO: 1481908 - RNA, 19 nt, Artificial Sequence
  Description of Artificial Sequence: Synthetic oligonucleotide
  Sense strand starting at position 3864 of SEQ ID NO: 1244349
uugccuugucaggauauaa

SEQ ID NO: 1481909 - RNA, 19 nt, Artificial Sequence
  Description of Artificial Sequence: Synthetic oligonucleotide
  Antisense strand to SEQ ID NO: 1481908
uuauauccugacaaggcaa

SEQ ID NO: 1481910 - RNA, 19 nt, Artificial Sequence
  Description of Artificial Sequence: Synthetic oligonucleotide
  Sense strand starting at position 56 of SEQ ID NO: 1244350
aaauaaacugagugugagu

SEQ ID NO: 1481911 - RNA, 19 nt, Artificial Sequence
  Description of Artificial Sequence: Synthetic oligonucleotide
  Antisense strand to SEQ ID NO: 1481910
acucacacucaguuuauuu

SEQ ID NO: 1481912 - RNA, 19 nt, Artificial Sequence
  Description of Artificial Sequence: Synthetic oligonucleotide
  Sense strand starting at position 132 of SEQ ID NO: 1244350
caagguuuacagugagcua

SEQ ID NO: 1481913 - RNA, 19 nt, Artificial Sequence
  Description of Artificial Sequence: Synthetic oligonucleotide
  Antisense strand to SEQ ID NO: 1481912
uagcucacuguaaaccuug

SEQ ID NO: 1481914 - RNA, 19 nt, Artificial Sequence
  Description of Artificial Sequence: Synthetic oligonucleotide
  Sense strand starting at position 169 of SEQ ID NO: 1244350
ccagccugagcagaagaau

SEQ ID NO: 1481915 - RNA, 19 nt, Artificial Sequence
  Description of Artificial Sequence: Synthetic oligonucleotide
  Antisense strand to SEQ ID NO: 1481914
auucuucugcucaggcugg

SEQ ID NO: 1481916 - RNA, 19 nt, Artificial Sequence
  Description of Artificial Sequence: Synthetic oligonucleotide
  Sense strand starting at position 446 of SEQ ID NO: 1244350
ugcacaucauaugcagauu

SEQ ID NO: 1481917 - RNA, 19 nt, Artificial Sequence
  Description of Artificial Sequence: Synthetic oligonucleotide
  Antisense strand to SEQ ID NO: 1481916
aaucugcauaugaugugca

SEQ ID NO: 1481918 - RNA, 19 nt, Artificial Sequence
  Description of Artificial Sequence: Synthetic oligonucleotide
  Sense strand starting at position 467 of SEQ ID NO: 1244350
gcaagcagucuccaguuua

SEQ ID NO: 1481919 - RNA, 19 nt, Artificial Sequence
  Description of Artificial Sequence: Synthetic oligonucleotide
  Antisense strand to SEQ ID NO: 1481918
uaaacuggagacugcuugc

SEQ ID NO: 1481920 - RNA, 19 nt, Artificial Sequence
  Description of Artificial Sequence: Synthetic oligonucleotide
  Sense strand starting at position 899 of SEQ ID NO: 1244350
cgggcaacucuauaacaua

SEQ ID NO: 1481921 - RNA, 19 nt, Artificial Sequence
  Description of Artificial Sequence: Synthetic oligonucleotide
  Antisense strand to SEQ ID NO: 1481920
uauguuauagaguugcccg

SEQ ID NO: 1481922 - RNA, 19 nt, Artificial Sequence
  Description of Artificial Sequence: Synthetic oligonucleotide
  Sense strand starting at position 918 of SEQ ID NO: 1244350
ucagaaguauaguauuugu

SEQ ID NO: 1481923 - RNA, 19 nt, Artificial Sequence
  Description of Artificial Sequence: Synthetic oligonucleotide
  Antisense strand to SEQ ID NO: 1481922
acaaauacuauacuucuga

SEQ ID NO: 1481924 - RNA, 19 nt, Artificial Sequence
  Description of Artificial Sequence: Synthetic oligonucleotide
  Sense strand starting at position 978 of SEQ ID NO: 1244350
uuaguauuagauggcacau

SEQ ID NO: 1481925 - RNA, 19 nt, Artificial Sequence
  Description of Artificial Sequence: Synthetic oligonucleotide
  Antisense strand to SEQ ID NO: 1481924
augugccaucuaauacuaa

SEQ ID NO: 1481926 - RNA, 19 nt, Artificial Sequence
  Description of Artificial Sequence: Synthetic oligonucleotide
  Sense strand starting at position 1086 of SEQ ID NO: 1244350
ugaagaaaguugcuugaug

SEQ ID NO: 1481927 - RNA, 19 nt, Artificial Sequence
  Description of Artificial Sequence: Synthetic oligonucleotide
  Antisense strand to SEQ ID NO: 1481926
caucaagcaacuuucuuca

SEQ ID NO: 1481928 - RNA, 19 nt, Artificial Sequence
  Description of Artificial Sequence: Synthetic oligonucleotide
  Sense strand starting at position 1087 of SEQ ID NO: 1244350
gaagaaaguugcuugaugu

SEQ ID NO: 1481929 - RNA, 19 nt, Artificial Sequence
  Description of Artificial Sequence: Synthetic oligonucleotide
  Antisense strand to SEQ ID NO: 1481928
acaucaagcaacuuucuuc

SEQ ID NO: 1481930 - RNA, 19 nt, Artificial Sequence
  Description of Artificial Sequence: Synthetic oligonucleotide
  Sense strand starting at position 1088 of SEQ ID NO: 1244350
aagaaaguugcuugaugug

SEQ ID NO: 1481931 - RNA, 19 nt, Artificial Sequence
  Description of Artificial Sequence: Synthetic oligonucleotide
  Antisense strand to SEQ ID NO: 1481930
cacaucaagcaacuuucuu

SEQ ID NO: 1481932 - RNA, 19 nt, Artificial Sequence
  Description of Artificial Sequence: Synthetic oligonucleotide
  Sense strand starting at position 1102 of SEQ ID NO: 1244350
augugauucuuugcaggug

SEQ ID NO: 1481933 - RNA, 19 nt, Artificial Sequence
  Description of Artificial Sequence: Synthetic oligonucleotide
  Antisense strand to SEQ ID NO: 1481932
caccugcaaagaaucacau

SEQ ID NO: 1481934 - RNA, 19 nt, Artificial Sequence
  Description of Artificial Sequence: Synthetic oligonucleotide
  Sense strand starting at position 1310 of SEQ ID NO: 1244350
ggcacagggcuuugagaaa

SEQ ID NO: 1481935 - RNA, 19 nt, Artificial Sequence
  Description of Artificial Sequence: Synthetic oligonucleotide
  Antisense strand to SEQ ID NO: 1481934
uuucucaaagcccugugcc

SEQ ID NO: 1481936 - RNA, 19 nt, Artificial Sequence
  Description of Artificial Sequence: Synthetic oligonucleotide
  Sense strand starting at position 1430 of SEQ ID NO: 1244350
cggagaaguggucgggauu

SEQ ID NO: 1481937 - RNA, 19 nt, Artificial Sequence
  Description of Artificial Sequence: Synthetic oligonucleotide
  Antisense strand to SEQ ID NO: 1481936
aaucccgaccacuucuccg

SEQ ID NO: 1481938 - RNA, 19 nt, Artificial Sequence
  Description of Artificial Sequence: Synthetic oligonucleotide
  Sense strand starting at position 1431 of SEQ ID NO: 1244350
ggagaaguggucgggauug

SEQ ID NO: 1481939 - RNA, 19 nt, Artificial Sequence
  Description of Artificial Sequence: Synthetic oligonucleotide
  Antisense strand to SEQ ID NO: 1481938
caaucccgaccacuucucc

SEQ ID NO: 1481940 - RNA, 19 nt, Artificial Sequence
  Description of Artificial Sequence: Synthetic oligonucleotide
  Sense strand starting at position 1433 of SEQ ID NO: 1244350
agaaguggucgggauugua

SEQ ID NO: 1481941 - RNA, 19 nt, Artificial Sequence
  Description of Artificial Sequence: Synthetic oligonucleotide
  Antisense strand to SEQ ID NO: 1481940
uacaaucccgaccacuucu

SEQ ID NO: 1481942 - RNA, 19 nt, Artificial Sequence
  Description of Artificial Sequence: Synthetic oligonucleotide
  Sense strand starting at position 1441 of SEQ ID NO: 1244350
ucgggauuguaagcagaaa

SEQ ID NO: 1481943 - RNA, 19 nt, Artificial Sequence
  Description of Artificial Sequence: Synthetic oligonucleotide
  Antisense strand to SEQ ID NO: 1481942
uuucugcuuacaaucccga

SEQ ID NO: 1481944 - RNA, 19 nt, Artificial Sequence
  Description of Artificial Sequence: Synthetic oligonucleotide
  Sense strand starting at position 1442 of SEQ ID NO: 1244350
cgggauuguaagcagaaag

SEQ ID NO: 1481945 - RNA, 19 nt, Artificial Sequence
  Description of Artificial Sequence: Synthetic oligonucleotide
  Antisense strand to SEQ ID NO: 1481944
cuuucugcuuacaaucccg

SEQ ID NO: 1481946 - RNA, 19 nt, Artificial Sequence
  Description of Artificial Sequence: Synthetic oligonucleotide
  Sense strand starting at position 1611 of SEQ ID NO: 1244350
gacggucuccgccaugaca

SEQ ID NO: 1481947 - RNA, 19 nt, Artificial Sequence
  Description of Artificial Sequence: Synthetic oligonucleotide
  Antisense strand to SEQ ID NO: 1481946
ugucauggcggagaccguc

SEQ ID NO: 1481948 - RNA, 19 nt, Artificial Sequence
  Description of Artificial Sequence: Synthetic oligonucleotide
  Sense strand starting at position 1830 of SEQ ID NO: 1244350
cuuaccauguaugcgauaa

SEQ ID NO: 1481949 - RNA, 19 nt, Artificial Sequence
  Description of Artificial Sequence: Synthetic oligonucleotide
  Antisense strand to SEQ ID NO: 1481948
uuaucgcauacaugguaag

SEQ ID NO: 1481950 - RNA, 19 nt, Artificial Sequence
  Description of Artificial Sequence: Synthetic oligonucleotide
  Sense strand starting at position 2040 of SEQ ID NO: 1244350
gggugaugugacuguaaga

SEQ ID NO: 1481951 - RNA, 19 nt, Artificial Sequence
  Description of Artificial Sequence: Synthetic oligonucleotide
  Antisense strand to SEQ ID NO: 1481950
ucuuacagucacaucaccc

SEQ ID NO: 1481952 - RNA, 19 nt, Artificial Sequence
  Description of Artificial Sequence: Synthetic oligonucleotide
  Sense strand starting at position 2098 of SEQ ID NO: 1244350
ggcccuuagccagacaaga

SEQ ID NO: 1481953 - RNA, 19 nt, Artificial Sequence
  Description of Artificial Sequence: Synthetic oligonucleotide
  Antisense strand to SEQ ID NO: 1481952
ucuugucuggcuaagggcc

SEQ ID NO: 1481954 - RNA, 19 nt, Artificial Sequence
  Description of Artificial Sequence: Synthetic oligonucleotide
  Sense strand starting at position 2157 of SEQ ID NO: 1244350
auuagucuuuguguugaua

SEQ ID NO: 1481955 - RNA, 19 nt, Artificial Sequence
  Description of Artificial Sequence: Synthetic oligonucleotide
  Antisense strand to SEQ ID NO: 1481954
uaucaacacaaagacuaau

SEQ ID NO: 1481956 - RNA, 19 nt, Artificial Sequence
  Description of Artificial Sequence: Synthetic oligonucleotide
  Sense strand starting at position 2160 of SEQ ID NO: 1244350
agucuuuguguugauauuc

SEQ ID NO: 1481957 - RNA, 19 nt, Artificial Sequence
  Description of Artificial Sequence: Synthetic oligonucleotide
  Antisense strand to SEQ ID NO: 1481956
gaauaucaacacaaagacu

SEQ ID NO: 1481958 - RNA, 19 nt, Artificial Sequence
  Description of Artificial Sequence: Synthetic oligonucleotide
  Sense strand starting at position 2244 of SEQ ID NO: 1244350
ugauucuuaccuuguguau

SEQ ID NO: 1481959 - RNA, 19 nt, Artificial Sequence
  Description of Artificial Sequence: Synthetic oligonucleotide
  Antisense strand to SEQ ID NO: 1481958
auacacaagguaagaauca

SEQ ID NO: 1481960 - RNA, 19 nt, Artificial Sequence
  Description of Artificial Sequence: Synthetic oligonucleotide
  Sense strand starting at position 2248 of SEQ ID NO: 1244350
ucuuaccuuguguauguua

SEQ ID NO: 1481961 - RNA, 19 nt, Artificial Sequence
  Description of Artificial Sequence: Synthetic oligonucleotide
  Antisense strand to SEQ ID NO: 1481960
uaacauacacaagguaaga

SEQ ID NO: 1481962 - RNA, 19 nt, Artificial Sequence
  Description of Artificial Sequence: Synthetic oligonucleotide
  Sense strand starting at position 2396 of SEQ ID NO: 1244350
gcacuuugggaaugucaac

SEQ ID NO: 1481963 - RNA, 19 nt, Artificial Sequence
  Description of Artificial Sequence: Synthetic oligonucleotide
  Antisense strand to SEQ ID NO: 1481962
guugacauucccaaagugc

SEQ ID NO: 1481964 - RNA, 19 nt, Artificial Sequence
  Description of Artificial Sequence: Synthetic oligonucleotide
  Sense strand starting at position 2511 of SEQ ID NO: 1244350
ggaagcucugggugccaua

SEQ ID NO: 1481965 - RNA, 19 nt, Artificial Sequence
  Description of Artificial Sequence: Synthetic oligonucleotide
  Antisense strand to SEQ ID NO: 1481964
uauggcacccagagcuucc

SEQ ID NO: 1481966 - RNA, 19 nt, Artificial Sequence
  Description of Artificial Sequence: Synthetic oligonucleotide
  Sense strand starting at position 2613 of SEQ ID NO: 1244350
ugucccaaauccuuguaga

SEQ ID NO: 1481967 - RNA, 19 nt, Artificial Sequence
  Description of Artificial Sequence: Synthetic oligonucleotide
  Antisense strand to SEQ ID NO: 1481966
ucuacaaggauuugggaca

SEQ ID NO: 1481968 - RNA, 19 nt, Artificial Sequence
  Description of Artificial Sequence: Synthetic oligonucleotide
  Sense strand starting at position 2614 of SEQ ID NO: 1244350
gucccaaauccuuguagaa

SEQ ID NO: 1481969 - RNA, 19 nt, Artificial Sequence
  Description of Artificial Sequence: Synthetic oligonucleotide
  Antisense strand to SEQ ID NO: 1481968
uucuacaaggauuugggac

SEQ ID NO: 1481970 - RNA, 19 nt, Artificial Sequence
  Description of Artificial Sequence: Synthetic oligonucleotide
  Sense strand starting at position 2675 of SEQ ID NO: 1244350
cgugaaggccaggguuuaa

SEQ ID NO: 1481971 - RNA, 19 nt, Artificial Sequence
  Description of Artificial Sequence: Synthetic oligonucleotide
  Antisense strand to SEQ ID NO: 1481970
uuaaacccuggccuucacg

SEQ ID NO: 1481972 - RNA, 19 nt, Artificial Sequence
  Description of Artificial Sequence: Synthetic oligonucleotide
  Sense strand starting at position 2725 of SEQ ID NO: 1244350
cugggauucuagcccaagu

SEQ ID NO: 1481973 - RNA, 19 nt, Artificial Sequence
  Description of Artificial Sequence: Synthetic oligonucleotide
  Antisense strand to SEQ ID NO: 1481972
acuugggcuagaaucccag

SEQ ID NO: 1481974 - RNA, 19 nt, Artificial Sequence
  Description of Artificial Sequence: Synthetic oligonucleotide
  Sense strand starting at position 3231 of SEQ ID NO: 1244350
uaggcaaucugugccacau

SEQ ID NO: 1481975 - RNA, 19 nt, Artificial Sequence
  Description of Artificial Sequence: Synthetic oligonucleotide
  Antisense strand to SEQ ID NO: 1481974
auguggcacagauugccua

SEQ ID NO: 1481976 - RNA, 19 nt, Artificial Sequence
  Description of Artificial Sequence: Synthetic oligonucleotide
  Sense strand starting at position 3266 of SEQ ID NO: 1244350
aguggagccugauucuagu

SEQ ID NO: 1481977 - RNA, 19 nt, Artificial Sequence
  Description of Artificial Sequence: Synthetic oligonucleotide
  Antisense strand to SEQ ID NO: 1481976
acuagaaucaggcuccacu

SEQ ID NO: 1481978 - RNA, 19 nt, Artificial Sequence
  Description of Artificial Sequence: Synthetic oligonucleotide
  Sense strand starting at position 3272 of SEQ ID NO: 1244350
gccugauucuaguuuaauu

SEQ ID NO: 1481979 - RNA, 19 nt, Artificial Sequence
  Description of Artificial Sequence: Synthetic oligonucleotide
  Antisense strand to SEQ ID NO: 1481978
aauuaaacuagaaucaggc

SEQ ID NO: 1481980 - RNA, 19 nt, Artificial Sequence
  Description of Artificial Sequence: Synthetic oligonucleotide
  Sense strand starting at position 3350 of SEQ ID NO: 1244350
ucuauaccacguuauggaa

SEQ ID NO: 1481981 - RNA, 19 nt, Artificial Sequence
  Description of Artificial Sequence: Synthetic oligonucleotide
  Antisense strand to SEQ ID NO: 1481980
uuccauaacgugguauaga

SEQ ID NO: 1481982 - RNA, 19 nt, Artificial Sequence
  Description of Artificial Sequence: Synthetic oligonucleotide
  Sense strand starting at position 3372 of SEQ ID NO: 1244350
uaagcuauuuguguaagca

SEQ ID NO: 1481983 - RNA, 19 nt, Artificial Sequence
  Description of Artificial Sequence: Synthetic oligonucleotide
  Antisense strand to SEQ ID NO: 1481982
ugcuuacacaaauagcuua

SEQ ID NO: 1481984 - RNA, 19 nt, Artificial Sequence
  Description of Artificial Sequence: Synthetic oligonucleotide
  Sense strand starting at position 3444 of SEQ ID NO: 1244350
acugauuucuaugaaucag

SEQ ID NO: 1481985 - RNA, 19 nt, Artificial Sequence
  Description of Artificial Sequence: Synthetic oligonucleotide
  Antisense strand to SEQ ID NO: 1481984
cugauucauagaaaucagu

SEQ ID NO: 1481986 - RNA, 19 nt, Artificial Sequence
  Description of Artificial Sequence: Synthetic oligonucleotide
  Sense strand starting at position 3484 of SEQ ID NO: 1244350
ucagcuuauuggucuuaag

SEQ ID NO: 1481987 - RNA, 19 nt, Artificial Sequence
  Description of Artificial Sequence: Synthetic oligonucleotide
  Antisense strand to SEQ ID NO: 1481986
cuuaagaccaauaagcuga

SEQ ID NO: 1481988 - RNA, 19 nt, Artificial Sequence
  Description of Artificial Sequence: Synthetic oligonucleotide
  Sense strand starting at position 3826 of SEQ ID NO: 1244350
cccugaaugcauuaguuau

SEQ ID NO: 1481989 - RNA, 19 nt, Artificial Sequence
  Description of Artificial Sequence: Synthetic oligonucleotide
  Antisense strand to SEQ ID NO: 1481988
auaacuaaugcauucaggg

SEQ ID NO: 1481990 - RNA, 19 nt, Artificial Sequence
  Description of Artificial Sequence: Synthetic oligonucleotide
  Sense strand starting at position 62 of SEQ ID NO: 1244351
gucccaacugucugcauuu

SEQ ID NO: 1481991 - RNA, 19 nt, Artificial Sequence
  Description of Artificial Sequence: Synthetic oligonucleotide
  Antisense strand to SEQ ID NO: 1481990
aaaugcagacaguugggac

SEQ ID NO: 1481992 - RNA, 19 nt, Artificial Sequence
  Description of Artificial Sequence: Synthetic oligonucleotide
  Sense strand starting at position 69 of SEQ ID NO: 1244351
cugucugcauuugcuagaa

SEQ ID NO: 1481993 - RNA, 19 nt, Artificial Sequence
  Description of Artificial Sequence: Synthetic oligonucleotide
  Antisense strand to SEQ ID NO: 1481992
uucuagcaaaugcagacag

SEQ ID NO: 1481994 - RNA, 19 nt, Artificial Sequence
  Description of Artificial Sequence: Synthetic oligonucleotide
  Sense strand starting at position 124 of SEQ ID NO: 1244351
gccauauauguagaaucac

SEQ ID NO: 1481995 - RNA, 19 nt, Artificial Sequence
  Description of Artificial Sequence: Synthetic oligonucleotide
  Antisense strand to SEQ ID NO: 1481994
gugauucuacauauauggc

SEQ ID NO: 1481996 - RNA, 19 nt, Artificial Sequence
  Description of Artificial Sequence: Synthetic oligonucleotide
  Sense strand starting at position 356 of SEQ ID NO: 1244351
aaauaaacugagugugagu

SEQ ID NO: 1481997 - RNA, 19 nt, Artificial Sequence
  Description of Artificial Sequence: Synthetic oligonucleotide
  Antisense strand to SEQ ID NO: 1481996
acucacacucaguuuauuu

SEQ ID NO: 1481998 - RNA, 19 nt, Artificial Sequence
  Description of Artificial Sequence: Synthetic oligonucleotide
  Sense strand starting at position 432 of SEQ ID NO: 1244351
caagguuuacagugagcua

SEQ ID NO: 1481999 - RNA, 19 nt, Artificial Sequence
  Description of Artificial Sequence: Synthetic oligonucleotide
  Antisense strand to SEQ ID NO: 1481998
uagcucacuguaaaccuug

SEQ ID NO: 1482000 - RNA, 19 nt, Artificial Sequence
  Description of Artificial Sequence: Synthetic oligonucleotide
  Sense strand starting at position 469 of SEQ ID NO: 1244351
ccagccugagcagaagaau

SEQ ID NO: 1482001 - RNA, 19 nt, Artificial Sequence
  Description of Artificial Sequence: Synthetic oligonucleotide
  Antisense strand to SEQ ID NO: 1482000
auucuucugcucaggcugg

SEQ ID NO: 1482002 - RNA, 19 nt, Artificial Sequence
  Description of Artificial Sequence: Synthetic oligonucleotide
  Sense strand starting at position 746 of SEQ ID NO: 1244351
ugcacaucauaugcagauu

SEQ ID NO: 1482003 - RNA, 19 nt, Artificial Sequence
  Description of Artificial Sequence: Synthetic oligonucleotide
  Antisense strand to SEQ ID NO: 1482002
aaucugcauaugaugugca

SEQ ID NO: 1482004 - RNA, 19 nt, Artificial Sequence
  Description of Artificial Sequence: Synthetic oligonucleotide
  Sense strand starting at position 767 of SEQ ID NO: 1244351
gcaagcagucuccaguuua

SEQ ID NO: 1482005 - RNA, 19 nt, Artificial Sequence
  Description of Artificial Sequence: Synthetic oligonucleotide
  Antisense strand to SEQ ID NO: 1482004
uaaacuggagacugcuugc

SEQ ID NO: 1482006 - RNA, 19 nt, Artificial Sequence
  Description of Artificial Sequence: Synthetic oligonucleotide
  Sense strand starting at position 1199 of SEQ ID NO: 1244351
cgggcaacucuauaacaua

SEQ ID NO: 1482007 - RNA, 19 nt, Artificial Sequence
  Description of Artificial Sequence: Synthetic oligonucleotide
  Antisense strand to SEQ ID NO: 1482006
uauguuauagaguugcccg

SEQ ID NO: 1482008 - RNA, 19 nt, Artificial Sequence
  Description of Artificial Sequence: Synthetic oligonucleotide
  Sense strand starting at position 1278 of SEQ ID NO: 1244351
uuaguauuagauggcacau

SEQ ID NO: 1482009 - RNA, 19 nt, Artificial Sequence
  Description of Artificial Sequence: Synthetic oligonucleotide
  Antisense strand to SEQ ID NO: 1482008
augugccaucuaauacuaa

SEQ ID NO: 1482010 - RNA, 19 nt, Artificial Sequence
  Description of Artificial Sequence: Synthetic oligonucleotide
  Sense strand starting at position 1386 of SEQ ID NO: 1244351
ugaagaaaguugcuugaug

SEQ ID NO: 1482011 - RNA, 19 nt, Artificial Sequence
  Description of Artificial Sequence: Synthetic oligonucleotide
  Antisense strand to SEQ ID NO: 1482010
caucaagcaacuuucuuca

SEQ ID NO: 1482012 - RNA, 19 nt, Artificial Sequence
  Description of Artificial Sequence: Synthetic oligonucleotide
  Sense strand starting at position 1387 of SEQ ID NO: 1244351
gaagaaaguugcuugaugu

SEQ ID NO: 1482013 - RNA, 19 nt, Artificial Sequence
  Description of Artificial Sequence: Synthetic oligonucleotide
  Antisense strand to SEQ ID NO: 1482012
acaucaagcaacuuucuuc

SEQ ID NO: 1482014 - RNA, 19 nt, Artificial Sequence
  Description of Artificial Sequence: Synthetic oligonucleotide
  Sense strand starting at position 1388 of SEQ ID NO: 1244351
aagaaaguugcuugaugug

SEQ ID NO: 1482015 - RNA, 19 nt, Artificial Sequence
  Description of Artificial Sequence: Synthetic oligonucleotide
  Antisense strand to SEQ ID NO: 1482014
cacaucaagcaacuuucuu

SEQ ID NO: 1482016 - RNA, 19 nt, Artificial Sequence
  Description of Artificial Sequence: Synthetic oligonucleotide
  Sense strand starting at position 1402 of SEQ ID NO: 1244351
augugauucuuugcaggug

SEQ ID NO: 1482017 - RNA, 19 nt, Artificial Sequence
  Description of Artificial Sequence: Synthetic oligonucleotide
  Antisense strand to SEQ ID NO: 1482016
caccugcaaagaaucacau

SEQ ID NO: 1482018 - RNA, 19 nt, Artificial Sequence
  Description of Artificial Sequence: Synthetic oligonucleotide
  Sense strand starting at position 1610 of SEQ ID NO: 1244351
ggcacagggcuuugagaaa

SEQ ID NO: 1482019 - RNA, 19 nt, Artificial Sequence
  Description of Artificial Sequence: Synthetic oligonucleotide
  Antisense strand to SEQ ID NO: 1482018
uuucucaaagcccugugcc

SEQ ID NO: 1482020 - RNA, 19 nt, Artificial Sequence
  Description of Artificial Sequence: Synthetic oligonucleotide
  Sense strand starting at position 1730 of SEQ ID NO: 1244351
cggagaaguggucgggauu

SEQ ID NO: 1482021 - RNA, 19 nt, Artificial Sequence
  Description of Artificial Sequence: Synthetic oligonucleotide
  Antisense strand to SEQ ID NO: 1482020
aaucccgaccacuucuccg

SEQ ID NO: 1482022 - RNA, 19 nt, Artificial Sequence
  Description of Artificial Sequence: Synthetic oligonucleotide
  Sense strand starting at position 1731 of SEQ ID NO: 1244351
ggagaaguggucgggauug

SEQ ID NO: 1482023 - RNA, 19 nt, Artificial Sequence
  Description of Artificial Sequence: Synthetic oligonucleotide
  Antisense strand to SEQ ID NO: 1482022
caaucccgaccacuucucc

SEQ ID NO: 1482024 - RNA, 19 nt, Artificial Sequence
  Description of Artificial Sequence: Synthetic oligonucleotide
  Sense strand starting at position 1733 of SEQ ID NO: 1244351
agaaguggucgggauugua

SEQ ID NO: 1482025 - RNA, 19 nt, Artificial Sequence
  Description of Artificial Sequence: Synthetic oligonucleotide
  Antisense strand to SEQ ID NO: 1482024
uacaaucccgaccacuucu

SEQ ID NO: 1482026 - RNA, 19 nt, Artificial Sequence
  Description of Artificial Sequence: Synthetic oligonucleotide
  Sense strand starting at position 1741 of SEQ ID NO: 1244351
ucgggauuguaagcagaaa

SEQ ID NO: 1482027 - RNA, 19 nt, Artificial Sequence
  Description of Artificial Sequence: Synthetic oligonucleotide
  Antisense strand to SEQ ID NO: 1482026
uuucugcuuacaaucccga

SEQ ID NO: 1482028 - RNA, 19 nt, Artificial Sequence
  Description of Artificial Sequence: Synthetic oligonucleotide
  Sense strand starting at position 1742 of SEQ ID NO: 1244351
cgggauuguaagcagaaag

SEQ ID NO: 1482029 - RNA, 19 nt, Artificial Sequence
  Description of Artificial Sequence: Synthetic oligonucleotide
  Antisense strand to SEQ ID NO: 1482028
cuuucugcuuacaaucccg

SEQ ID NO: 1482030 - RNA, 19 nt, Artificial Sequence
  Description of Artificial Sequence: Synthetic oligonucleotide
  Sense strand starting at position 1911 of SEQ ID NO: 1244351
gacggucuccgccaugaca

SEQ ID NO: 1482031 - RNA, 19 nt, Artificial Sequence
  Description of Artificial Sequence: Synthetic oligonucleotide
  Antisense strand to SEQ ID NO: 1482030
ugucauggcggagaccguc

SEQ ID NO: 1482032 - RNA, 19 nt, Artificial Sequence
  Description of Artificial Sequence: Synthetic oligonucleotide
  Sense strand starting at position 2130 of SEQ ID NO: 1244351
cuuaccauguaugcgauaa

SEQ ID NO: 1482033 - RNA, 19 nt, Artificial Sequence
  Description of Artificial Sequence: Synthetic oligonucleotide
  Antisense strand to SEQ ID NO: 1482032
uuaucgcauacaugguaag

SEQ ID NO: 1482034 - RNA, 19 nt, Artificial Sequence
  Description of Artificial Sequence: Synthetic oligonucleotide
  Sense strand starting at position 2340 of SEQ ID NO: 1244351
gggugaugugacuguaaga

SEQ ID NO: 1482035 - RNA, 19 nt, Artificial Sequence
  Description of Artificial Sequence: Synthetic oligonucleotide
  Antisense strand to SEQ ID NO: 1482034
ucuuacagucacaucaccc

SEQ ID NO: 1482036 - RNA, 19 nt, Artificial Sequence
  Description of Artificial Sequence: Synthetic oligonucleotide
  Sense strand starting at position 2398 of SEQ ID NO: 1244351
ggcccuuagccagacaaga

SEQ ID NO: 1482037 - RNA, 19 nt, Artificial Sequence
  Description of Artificial Sequence: Synthetic oligonucleotide
  Antisense strand to SEQ ID NO: 1482036
ucuugucuggcuaagggcc

SEQ ID NO: 1482038 - RNA, 19 nt, Artificial Sequence
  Description of Artificial Sequence: Synthetic oligonucleotide
  Sense strand starting at position 2457 of SEQ ID NO: 1244351
auuagucuuuguguugaua

SEQ ID NO: 1482039 - RNA, 19 nt, Artificial Sequence
  Description of Artificial Sequence: Synthetic oligonucleotide
  Antisense strand to SEQ ID NO: 1482038
uaucaacacaaagacuaau

SEQ ID NO: 1482040 - RNA, 19 nt, Artificial Sequence
  Description of Artificial Sequence: Synthetic oligonucleotide
  Sense strand starting at position 2460 of SEQ ID NO: 1244351
agucuuuguguugauauuc

SEQ ID NO: 1482041 - RNA, 19 nt, Artificial Sequence
  Description of Artificial Sequence: Synthetic oligonucleotide
  Antisense strand to SEQ ID NO: 1482040
gaauaucaacacaaagacu

SEQ ID NO: 1482042 - RNA, 19 nt, Artificial Sequence
  Description of Artificial Sequence: Synthetic oligonucleotide
  Sense strand starting at position 2544 of SEQ ID NO: 1244351
ugauucuuaccuuguguau

SEQ ID NO: 1482043 - RNA, 19 nt, Artificial Sequence
  Description of Artificial Sequence: Synthetic oligonucleotide
  Antisense strand to SEQ ID NO: 1482042
auacacaagguaagaauca

SEQ ID NO: 1482044 - RNA, 19 nt, Artificial Sequence
  Description of Artificial Sequence: Synthetic oligonucleotide
  Sense strand starting at position 2548 of SEQ ID NO: 1244351
ucuuaccuuguguauguua

SEQ ID NO: 1482045 - RNA, 19 nt, Artificial Sequence
  Description of Artificial Sequence: Synthetic oligonucleotide
  Antisense strand to SEQ ID NO: 1482044
uaacauacacaagguaaga

SEQ ID NO: 1482046 - RNA, 19 nt, Artificial Sequence
  Description of Artificial Sequence: Synthetic oligonucleotide
  Sense strand starting at position 2696 of SEQ ID NO: 1244351
gcacuuugggaaugucaac

SEQ ID NO: 1482047 - RNA, 19 nt, Artificial Sequence
  Description of Artificial Sequence: Synthetic oligonucleotide
  Antisense strand to SEQ ID NO: 1482046
guugacauucccaaagugc

SEQ ID NO: 1482048 - RNA, 19 nt, Artificial Sequence
  Description of Artificial Sequence: Synthetic oligonucleotide
  Sense strand starting at position 2811 of SEQ ID NO: 1244351
ggaagcucugggugccaua

SEQ ID NO: 1482049 - RNA, 19 nt, Artificial Sequence
  Description of Artificial Sequence: Synthetic oligonucleotide
  Antisense strand to SEQ ID NO: 1482048
uauggcacccagagcuucc

SEQ ID NO: 1482050 - RNA, 19 nt, Artificial Sequence
  Description of Artificial Sequence: Synthetic oligonucleotide
  Sense strand starting at position 2913 of SEQ ID NO: 1244351
ugucccaaauccuuguaga

SEQ ID NO: 1482051 - RNA, 19 nt, Artificial Sequence
  Description of Artificial Sequence: Synthetic oligonucleotide
  Antisense strand to SEQ ID NO: 1482050
ucuacaaggauuugggaca

SEQ ID NO: 1482052 - RNA, 19 nt, Artificial Sequence
  Description of Artificial Sequence: Synthetic oligonucleotide
  Sense strand starting at position 2914 of SEQ ID NO: 1244351
gucccaaauccuuguagaa

SEQ ID NO: 1482053 - RNA, 19 nt, Artificial Sequence
  Description of Artificial Sequence: Synthetic oligonucleotide
  Antisense strand to SEQ ID NO: 1482052
uucuacaaggauuugggac

SEQ ID NO: 1482054 - RNA, 19 nt, Artificial Sequence
  Description of Artificial Sequence: Synthetic oligonucleotide
  Sense strand starting at position 2975 of SEQ ID NO: 1244351
cgugaaggccaggguuuaa

SEQ ID NO: 1482055 - RNA, 19 nt, Artificial Sequence
  Description of Artificial Sequence: Synthetic oligonucleotide
  Antisense strand to SEQ ID NO: 1482054
uuaaacccuggccuucacg

SEQ ID NO: 1482056 - RNA, 19 nt, Artificial Sequence
  Description of Artificial Sequence: Synthetic oligonucleotide
  Sense strand starting at position 3025 of SEQ ID NO: 1244351
cugggauucuagcccaagu

SEQ ID NO: 1482057 - RNA, 19 nt, Artificial Sequence
  Description of Artificial Sequence: Synthetic oligonucleotide
  Antisense strand to SEQ ID NO: 1482056
acuugggcuagaaucccag

SEQ ID NO: 1482058 - RNA, 19 nt, Artificial Sequence
  Description of Artificial Sequence: Synthetic oligonucleotide
  Sense strand starting at position 3566 of SEQ ID NO: 1244351
aguggagccugauucuagu

SEQ ID NO: 1482059 - RNA, 19 nt, Artificial Sequence
  Description of Artificial Sequence: Synthetic oligonucleotide
  Antisense strand to SEQ ID NO: 1482058
acuagaaucaggcuccacu

SEQ ID NO: 1482060 - RNA, 19 nt, Artificial Sequence
  Description of Artificial Sequence: Synthetic oligonucleotide
  Sense strand starting at position 3572 of SEQ ID NO: 1244351
gccugauucuaguuuaauu

SEQ ID NO: 1482061 - RNA, 19 nt, Artificial Sequence
  Description of Artificial Sequence: Synthetic oligonucleotide
  Antisense strand to SEQ ID NO: 1482060
aauuaaacuagaaucaggc

SEQ ID NO: 1482062 - RNA, 19 nt, Artificial Sequence
  Description of Artificial Sequence: Synthetic oligonucleotide
  Sense strand starting at position 3650 of SEQ ID NO: 1244351
ucuauaccacguuauggaa

SEQ ID NO: 1482063 - RNA, 19 nt, Artificial Sequence
  Description of Artificial Sequence: Synthetic oligonucleotide
  Antisense strand to SEQ ID NO: 1482062
uuccauaacgugguauaga

SEQ ID NO: 1482064 - RNA, 19 nt, Artificial Sequence
  Description of Artificial Sequence: Synthetic oligonucleotide
  Sense strand starting at position 3672 of SEQ ID NO: 1244351
uaagcuauuuguguaagca

SEQ ID NO: 1482065 - RNA, 19 nt, Artificial Sequence
  Description of Artificial Sequence: Synthetic oligonucleotide
  Antisense strand to SEQ ID NO: 1482064
ugcuuacacaaauagcuua

SEQ ID NO: 1482066 - RNA, 19 nt, Artificial Sequence
  Description of Artificial Sequence: Synthetic oligonucleotide
  Sense strand starting at position 3744 of SEQ ID NO: 1244351
acugauuucuaugaaucag

SEQ ID NO: 1482067 - RNA, 19 nt, Artificial Sequence
  Description of Artificial Sequence: Synthetic oligonucleotide
  Antisense strand to SEQ ID NO: 1482066
cugauucauagaaaucagu

SEQ ID NO: 1482068 - RNA, 19 nt, Artificial Sequence
  Description of Artificial Sequence: Synthetic oligonucleotide
  Sense strand starting at position 3784 of SEQ ID NO: 1244351
ucagcuuauuggucuuaag

SEQ ID NO: 1482069 - RNA, 19 nt, Artificial Sequence
  Description of Artificial Sequence: Synthetic oligonucleotide
  Antisense strand to SEQ ID NO: 1482068
cuuaagaccaauaagcuga

SEQ ID NO: 1482070 - RNA, 19 nt, Artificial Sequence
  Description of Artificial Sequence: Synthetic oligonucleotide
  Sense strand starting at position 344 of SEQ ID NO: 1244352
guaggaaacuucccauaau

SEQ ID NO: 1482071 - RNA, 19 nt, Artificial Sequence
  Description of Artificial Sequence: Synthetic oligonucleotide
  Antisense strand to SEQ ID NO: 1482070
auuaugggaaguuuccuac

SEQ ID NO: 1482072 - RNA, 19 nt, Artificial Sequence
  Description of Artificial Sequence: Synthetic oligonucleotide
  Sense strand starting at position 466 of SEQ ID NO: 1244352
acaggaagucugugugaca

SEQ ID NO: 1482073 - RNA, 19 nt, Artificial Sequence
  Description of Artificial Sequence: Synthetic oligonucleotide
  Antisense strand to SEQ ID NO: 1482072
ugucacacagacuuccugu

SEQ ID NO: 1482074 - RNA, 19 nt, Artificial Sequence
  Description of Artificial Sequence: Synthetic oligonucleotide
  Sense strand starting at position 473 of SEQ ID NO: 1244352
gucugugugacagagcuaa

SEQ ID NO: 1482075 - RNA, 19 nt, Artificial Sequence
  Description of Artificial Sequence: Synthetic oligonucleotide
  Antisense strand to SEQ ID NO: 1482074
uuagcucugucacacagac

SEQ ID NO: 1482076 - RNA, 19 nt, Artificial Sequence
  Description of Artificial Sequence: Synthetic oligonucleotide
  Sense strand starting at position 684 of SEQ ID NO: 1244352
aggacagucgcugagcaaa

SEQ ID NO: 1482077 - RNA, 19 nt, Artificial Sequence
  Description of Artificial Sequence: Synthetic oligonucleotide
  Antisense strand to SEQ ID NO: 1482076
uuugcucagcgacuguccu

SEQ ID NO: 1482078 - RNA, 19 nt, Artificial Sequence
  Description of Artificial Sequence: Synthetic oligonucleotide
  Sense strand starting at position 879 of SEQ ID NO: 1244352
ggcgggaagucugagucuu

SEQ ID NO: 1482079 - RNA, 19 nt, Artificial Sequence
  Description of Artificial Sequence: Synthetic oligonucleotide
  Antisense strand to SEQ ID NO: 1482078
aagacucagacuucccgcc

SEQ ID NO: 1482080 - RNA, 19 nt, Artificial Sequence
  Description of Artificial Sequence: Synthetic oligonucleotide
  Sense strand starting at position 880 of SEQ ID NO: 1244352
gcgggaagucugagucuuu

SEQ ID NO: 1482081 - RNA, 19 nt, Artificial Sequence
  Description of Artificial Sequence: Synthetic oligonucleotide
  Antisense strand to SEQ ID NO: 1482080
aaagacucagacuucccgc

SEQ ID NO: 1482082 - RNA, 19 nt, Artificial Sequence
  Description of Artificial Sequence: Synthetic oligonucleotide
  Sense strand starting at position 881 of SEQ ID NO: 1244352
cgggaagucugagucuuug

SEQ ID NO: 1482083 - RNA, 19 nt, Artificial Sequence
  Description of Artificial Sequence: Synthetic oligonucleotide
  Antisense strand to SEQ ID NO: 1482082
caaagacucagacuucccg

SEQ ID NO: 1482084 - RNA, 19 nt, Artificial Sequence
  Description of Artificial Sequence: Synthetic oligonucleotide
  Sense strand starting at position 887 of SEQ ID NO: 1244352
gucugagucuuugaccuua

SEQ ID NO: 1482085 - RNA, 19 nt, Artificial Sequence
  Description of Artificial Sequence: Synthetic oligonucleotide
  Antisense strand to SEQ ID NO: 1482084
uaaggucaaagacucagac

SEQ ID NO: 1482086 - RNA, 19 nt, Artificial Sequence
  Description of Artificial Sequence: Synthetic oligonucleotide
  Sense strand starting at position 939 of SEQ ID NO: 1244352
uggacuuguuucccagcuu

SEQ ID NO: 1482087 - RNA, 19 nt, Artificial Sequence
  Description of Artificial Sequence: Synthetic oligonucleotide
  Antisense strand to SEQ ID NO: 1482086
aagcugggaaacaagucca

SEQ ID NO: 1482088 - RNA, 19 nt, Artificial Sequence
  Description of Artificial Sequence: Synthetic oligonucleotide
  Sense strand starting at position 970 of SEQ ID NO: 1244352
agccaucagcaucagaaau

SEQ ID NO: 1482089 - RNA, 19 nt, Artificial Sequence
  Description of Artificial Sequence: Synthetic oligonucleotide
  Antisense strand to SEQ ID NO: 1482088
auuucugaugcugauggcu

SEQ ID NO: 1482090 - RNA, 19 nt, Artificial Sequence
  Description of Artificial Sequence: Synthetic oligonucleotide
  Sense strand starting at position 1008 of SEQ ID NO: 1244352
aacagucacgaccgucaaa

SEQ ID NO: 1482091 - RNA, 19 nt, Artificial Sequence
  Description of Artificial Sequence: Synthetic oligonucleotide
  Antisense strand to SEQ ID NO: 1482090
uuugacggucgugacuguu

SEQ ID NO: 1482092 - RNA, 19 nt, Artificial Sequence
  Description of Artificial Sequence: Synthetic oligonucleotide
  Sense strand starting at position 1126 of SEQ ID NO: 1244352
auuccagaaucagguuaaa

SEQ ID NO: 1482093 - RNA, 19 nt, Artificial Sequence
  Description of Artificial Sequence: Synthetic oligonucleotide
  Antisense strand to SEQ ID NO: 1482092
uuuaaccugauucuggaau

SEQ ID NO: 1482094 - RNA, 19 nt, Artificial Sequence
  Description of Artificial Sequence: Synthetic oligonucleotide
  Sense strand starting at position 1280 of SEQ ID NO: 1244352
cugcgcccucggcaagauu

SEQ ID NO: 1482095 - RNA, 19 nt, Artificial Sequence
  Description of Artificial Sequence: Synthetic oligonucleotide
  Antisense strand to SEQ ID NO: 1482094
aaucuugccgagggcgcag

SEQ ID NO: 1482096 - RNA, 19 nt, Artificial Sequence
  Description of Artificial Sequence: Synthetic oligonucleotide
  Sense strand starting at position 1289 of SEQ ID NO: 1244352
cggcaagauuccucaagga

SEQ ID NO: 1482097 - RNA, 19 nt, Artificial Sequence
  Description of Artificial Sequence: Synthetic oligonucleotide
  Antisense strand to SEQ ID NO: 1482096
uccuugaggaaucuugccg

SEQ ID NO: 1482098 - RNA, 19 nt, Artificial Sequence
  Description of Artificial Sequence: Synthetic oligonucleotide
  Sense strand starting at position 1305 of SEQ ID NO: 1244352
ggaguuaacucccgaacca

SEQ ID NO: 1482099 - RNA, 19 nt, Artificial Sequence
  Description of Artificial Sequence: Synthetic oligonucleotide
  Antisense strand to SEQ ID NO: 1482098
ugguucgggaguuaacucc

SEQ ID NO: 1482100 - RNA, 19 nt, Artificial Sequence
  Description of Artificial Sequence: Synthetic oligonucleotide
  Sense strand starting at position 1306 of SEQ ID NO: 1244352
gaguuaacucccgaaccau

SEQ ID NO: 1482101 - RNA, 19 nt, Artificial Sequence
  Description of Artificial Sequence: Synthetic oligonucleotide
  Antisense strand to SEQ ID NO: 1482100
augguucgggaguuaacuc

SEQ ID NO: 1482102 - RNA, 19 nt, Artificial Sequence
  Description of Artificial Sequence: Synthetic oligonucleotide
  Sense strand starting at position 1469 of SEQ ID NO: 1244352
ucccauuauccggaagcga

SEQ ID NO: 1482103 - RNA, 19 nt, Artificial Sequence
  Description of Artificial Sequence: Synthetic oligonucleotide
  Antisense strand to SEQ ID NO: 1482102
ucgcuuccggauaauggga

SEQ ID NO: 1482104 - RNA, 19 nt, Artificial Sequence
  Description of Artificial Sequence: Synthetic oligonucleotide
  Sense strand starting at position 2488 of SEQ ID NO: 1244352
cggguaaagucuuagguuc

SEQ ID NO: 1482105 - RNA, 19 nt, Artificial Sequence
  Description of Artificial Sequence: Synthetic oligonucleotide
  Antisense strand to SEQ ID NO: 1482104
gaaccuaagacuuuacccg

SEQ ID NO: 1482106 - RNA, 19 nt, Artificial Sequence
  Description of Artificial Sequence: Synthetic oligonucleotide
  Sense strand starting at position 2490 of SEQ ID NO: 1244352
gguaaagucuuagguucag

SEQ ID NO: 1482107 - RNA, 19 nt, Artificial Sequence
  Description of Artificial Sequence: Synthetic oligonucleotide
  Antisense strand to SEQ ID NO: 1482106
cugaaccuaagacuuuacc

SEQ ID NO: 1482108 - RNA, 19 nt, Artificial Sequence
  Description of Artificial Sequence: Synthetic oligonucleotide
  Sense strand starting at position 2496 of SEQ ID NO: 1244352
gucuuagguucagggaaca

SEQ ID NO: 1482109 - RNA, 19 nt, Artificial Sequence
  Description of Artificial Sequence: Synthetic oligonucleotide
  Antisense strand to SEQ ID NO: 1482108
uguucccugaaccuaagac

SEQ ID NO: 1482110 - RNA, 19 nt, Artificial Sequence
  Description of Artificial Sequence: Synthetic oligonucleotide
  Sense strand starting at position 2677 of SEQ ID NO: 1244352
cuucgucucuggguggauu

SEQ ID NO: 1482111 - RNA, 19 nt, Artificial Sequence
  Description of Artificial Sequence: Synthetic oligonucleotide
  Antisense strand to SEQ ID NO: 1482110
aauccacccagagacgaag

SEQ ID NO: 1482112 - RNA, 19 nt, Artificial Sequence
  Description of Artificial Sequence: Synthetic oligonucleotide
  Sense strand starting at position 3236 of SEQ ID NO: 1244352
ggacuaaagucccugcaau

SEQ ID NO: 1482113 - RNA, 19 nt, Artificial Sequence
  Description of Artificial Sequence: Synthetic oligonucleotide
  Antisense strand to SEQ ID NO: 1482112
auugcagggacuuuagucc

SEQ ID NO: 1482114 - RNA, 19 nt, Artificial Sequence
  Description of Artificial Sequence: Synthetic oligonucleotide
  Sense strand starting at position 3726 of SEQ ID NO: 1244352
gggagaacuuguccuugac

SEQ ID NO: 1482115 - RNA, 19 nt, Artificial Sequence
  Description of Artificial Sequence: Synthetic oligonucleotide
  Antisense strand to SEQ ID NO: 1482114
gucaaggacaaguucuccc

SEQ ID NO: 1482116 - RNA, 19 nt, Artificial Sequence
  Description of Artificial Sequence: Synthetic oligonucleotide
  Sense strand starting at position 3728 of SEQ ID NO: 1244352
gagaacuuguccuugaccu

SEQ ID NO: 1482117 - RNA, 19 nt, Artificial Sequence
  Description of Artificial Sequence: Synthetic oligonucleotide
  Antisense strand to SEQ ID NO: 1482116
aggucaaggacaaguucuc

SEQ ID NO: 1482118 - RNA, 19 nt, Artificial Sequence
  Description of Artificial Sequence: Synthetic oligonucleotide
  Sense strand starting at position 3747 of SEQ ID NO: 1244352
ggucuuuggcgucagggau

SEQ ID NO: 1482119 - RNA, 19 nt, Artificial Sequence
  Description of Artificial Sequence: Synthetic oligonucleotide
  Antisense strand to SEQ ID NO: 1482118
aucccugacgccaaagacc

SEQ ID NO: 1482120 - RNA, 19 nt, Artificial Sequence
  Description of Artificial Sequence: Synthetic oligonucleotide
  Sense strand starting at position 3748 of SEQ ID NO: 1244352
gucuuuggcgucagggauu

SEQ ID NO: 1482121 - RNA, 19 nt, Artificial Sequence
  Description of Artificial Sequence: Synthetic oligonucleotide
  Antisense strand to SEQ ID NO: 1482120
aaucccugacgccaaagac

SEQ ID NO: 1482122 - RNA, 19 nt, Artificial Sequence
  Description of Artificial Sequence: Synthetic oligonucleotide
  Sense strand starting at position 3958 of SEQ ID NO: 1244352
ggccgagagccagauuauu

SEQ ID NO: 1482123 - RNA, 19 nt, Artificial Sequence
  Description of Artificial Sequence: Synthetic oligonucleotide
  Antisense strand to SEQ ID NO: 1482122
aauaaucuggcucucggcc

SEQ ID NO: 1482124 - RNA, 19 nt, Artificial Sequence
  Description of Artificial Sequence: Synthetic oligonucleotide
  Sense strand starting at position 3964 of SEQ ID NO: 1244352
gagccagauuauugcgaug

SEQ ID NO: 1482125 - RNA, 19 nt, Artificial Sequence
  Description of Artificial Sequence: Synthetic oligonucleotide
  Antisense strand to SEQ ID NO: 1482124
caucgcaauaaucuggcuc

SEQ ID NO: 1482126 - RNA, 19 nt, Artificial Sequence
  Description of Artificial Sequence: Synthetic oligonucleotide
  Sense strand starting at position 3966 of SEQ ID NO: 1244352
gccagauuauugcgaugac

SEQ ID NO: 1482127 - RNA, 19 nt, Artificial Sequence
  Description of Artificial Sequence: Synthetic oligonucleotide
  Antisense strand to SEQ ID NO: 1482126
gucaucgcaauaaucuggc

SEQ ID NO: 1482128 - RNA, 19 nt, Artificial Sequence
  Description of Artificial Sequence: Synthetic oligonucleotide
  Sense strand starting at position 3970 of SEQ ID NO: 1244352
gauuauugcgaugaccgga

SEQ ID NO: 1482129 - RNA, 19 nt, Artificial Sequence
  Description of Artificial Sequence: Synthetic oligonucleotide
  Antisense strand to SEQ ID NO: 1482128
uccggucaucgcaauaauc

SEQ ID NO: 1482130 - RNA, 19 nt, Artificial Sequence
  Description of Artificial Sequence: Synthetic oligonucleotide
  Sense strand starting at position 220 of SEQ ID NO: 1244353
aucaucuacgcucagagau

SEQ ID NO: 1482131 - RNA, 19 nt, Artificial Sequence
  Description of Artificial Sequence: Synthetic oligonucleotide
  Antisense strand to SEQ ID NO: 1482130
aucucugagcguagaugau

SEQ ID NO: 1482132 - RNA, 19 nt, Artificial Sequence
  Description of Artificial Sequence: Synthetic oligonucleotide
  Sense strand starting at position 345 of SEQ ID NO: 1244353
uaauguuccagaugaggug

SEQ ID NO: 1482133 - RNA, 19 nt, Artificial Sequence
  Description of Artificial Sequence: Synthetic oligonucleotide
  Antisense strand to SEQ ID NO: 1482132
caccucaucuggaacauua

SEQ ID NO: 1482134 - RNA, 19 nt, Artificial Sequence
  Description of Artificial Sequence: Synthetic oligonucleotide
  Sense strand starting at position 371 of SEQ ID NO: 1244353
gugagaccuugugucugau

SEQ ID NO: 1482135 - RNA, 19 nt, Artificial Sequence
  Description of Artificial Sequence: Synthetic oligonucleotide
  Antisense strand to SEQ ID NO: 1482134
aucagacacaaggucucac

SEQ ID NO: 1482136 - RNA, 19 nt, Artificial Sequence
  Description of Artificial Sequence: Synthetic oligonucleotide
  Sense strand starting at position 374 of SEQ ID NO: 1244353
agaccuugugucugauacu

SEQ ID NO: 1482137 - RNA, 19 nt, Artificial Sequence
  Description of Artificial Sequence: Synthetic oligonucleotide
  Antisense strand to SEQ ID NO: 1482136
aguaucagacacaaggucu

SEQ ID NO: 1482138 - RNA, 19 nt, Artificial Sequence
  Description of Artificial Sequence: Synthetic oligonucleotide
  Sense strand starting at position 375 of SEQ ID NO: 1244353
gaccuugugucugauacuu

SEQ ID NO: 1482139 - RNA, 19 nt, Artificial Sequence
  Description of Artificial Sequence: Synthetic oligonucleotide
  Antisense strand to SEQ ID NO: 1482138
aaguaucagacacaagguc

SEQ ID NO: 1482140 - RNA, 19 nt, Artificial Sequence
  Description of Artificial Sequence: Synthetic oligonucleotide
  Sense strand starting at position 377 of SEQ ID NO: 1244353
ccuugugucugauacuuug

SEQ ID NO: 1482141 - RNA, 19 nt, Artificial Sequence
  Description of Artificial Sequence: Synthetic oligonucleotide
  Antisense strand to SEQ ID NO: 1482140
caaaguaucagacacaagg

SEQ ID NO: 1482142 - RNA, 19 nt, Artificial Sequence
  Description of Artificial Sequence: Synthetic oligonucleotide
  Sense strand starting at position 383 of SEQ ID NO: 1244353
gucugauacuuuggcucca

SEQ ID NO: 1482143 - RNA, 19 nt, Artificial Sequence
  Description of Artificial Sequence: Synthetic oligonucleotide
  Antisense strand to SEQ ID NO: 1482142
uggagccaaaguaucagac

SEQ ID NO: 1482144 - RNA, 19 nt, Artificial Sequence
  Description of Artificial Sequence: Synthetic oligonucleotide
  Sense strand starting at position 423 of SEQ ID NO: 1244353
gggcuucccugucuaggaa

SEQ ID NO: 1482145 - RNA, 19 nt, Artificial Sequence
  Description of Artificial Sequence: Synthetic oligonucleotide
  Antisense strand to SEQ ID NO: 1482144
uuccuagacagggaagccc

SEQ ID NO: 1482146 - RNA, 19 nt, Artificial Sequence
  Description of Artificial Sequence: Synthetic oligonucleotide
  Sense strand starting at position 424 of SEQ ID NO: 1244353
ggcuucccugucuaggaaa

SEQ ID NO: 1482147 - RNA, 19 nt, Artificial Sequence
  Description of Artificial Sequence: Synthetic oligonucleotide
  Antisense strand to SEQ ID NO: 1482146
uuuccuagacagggaagcc

SEQ ID NO: 1482148 - RNA, 19 nt, Artificial Sequence
  Description of Artificial Sequence: Synthetic oligonucleotide
  Sense strand starting at position 436 of SEQ ID NO: 1244353
uaggaaagguacuacaauu

SEQ ID NO: 1482149 - RNA, 19 nt, Artificial Sequence
  Description of Artificial Sequence: Synthetic oligonucleotide
  Antisense strand to SEQ ID NO: 1482148
aauuguaguaccuuuccua

SEQ ID NO: 1482150 - RNA, 19 nt, Artificial Sequence
  Description of Artificial Sequence: Synthetic oligonucleotide
  Sense strand starting at position 1099 of SEQ ID NO: 1244353
uccauaggccugcaugaua

SEQ ID NO: 1482151 - RNA, 19 nt, Artificial Sequence
  Description of Artificial Sequence: Synthetic oligonucleotide
  Antisense strand to SEQ ID NO: 1482150
uaucaugcaggccuaugga

SEQ ID NO: 1482152 - RNA, 19 nt, Artificial Sequence
  Description of Artificial Sequence: Synthetic oligonucleotide
  Sense strand starting at position 1146 of SEQ ID NO: 1244353
acgugaugagggugugagu

SEQ ID NO: 1482153 - RNA, 19 nt, Artificial Sequence
  Description of Artificial Sequence: Synthetic oligonucleotide
  Antisense strand to SEQ ID NO: 1482152
acucacacccucaucacgu

SEQ ID NO: 1482154 - RNA, 19 nt, Artificial Sequence
  Description of Artificial Sequence: Synthetic oligonucleotide
  Sense strand starting at position 1149 of SEQ ID NO: 1244353
ugaugagggugugagugau

SEQ ID NO: 1482155 - RNA, 19 nt, Artificial Sequence
  Description of Artificial Sequence: Synthetic oligonucleotide
  Antisense strand to SEQ ID NO: 1482154
aucacucacacccucauca

SEQ ID NO: 1482156 - RNA, 19 nt, Artificial Sequence
  Description of Artificial Sequence: Synthetic oligonucleotide
  Sense strand starting at position 1207 of SEQ ID NO: 1244353
uucccuguuccagagcaga

SEQ ID NO: 1482157 - RNA, 19 nt, Artificial Sequence
  Description of Artificial Sequence: Synthetic oligonucleotide
  Antisense strand to SEQ ID NO: 1482156
ucugcucuggaacagggaa

SEQ ID NO: 1482158 - RNA, 19 nt, Artificial Sequence
  Description of Artificial Sequence: Synthetic oligonucleotide
  Sense strand starting at position 1235 of SEQ ID NO: 1244353
gugucacccucaguuguuu

SEQ ID NO: 1482159 - RNA, 19 nt, Artificial Sequence
  Description of Artificial Sequence: Synthetic oligonucleotide
  Antisense strand to SEQ ID NO: 1482158
aaacaacugagggugacac

SEQ ID NO: 1482160 - RNA, 19 nt, Artificial Sequence
  Description of Artificial Sequence: Synthetic oligonucleotide
  Sense strand starting at position 1331 of SEQ ID NO: 1244353
uuggcaacgccacaagaau

SEQ ID NO: 1482161 - RNA, 19 nt, Artificial Sequence
  Description of Artificial Sequence: Synthetic oligonucleotide
  Antisense strand to SEQ ID NO: 1482160
auucuuguggcguugccaa

SEQ ID NO: 1482162 - RNA, 19 nt, Artificial Sequence
  Description of Artificial Sequence: Synthetic oligonucleotide
  Sense strand starting at position 1363 of SEQ ID NO: 1244353
gcgggagugucccucuaga

SEQ ID NO: 1482163 - RNA, 19 nt, Artificial Sequence
  Description of Artificial Sequence: Synthetic oligonucleotide
  Antisense strand to SEQ ID NO: 1482162
ucuagagggacacucccgc

SEQ ID NO: 1482164 - RNA, 19 nt, Artificial Sequence
  Description of Artificial Sequence: Synthetic oligonucleotide
  Sense strand starting at position 1373 of SEQ ID NO: 1244353
cccucuagagcuuaagaug

SEQ ID NO: 1482165 - RNA, 19 nt, Artificial Sequence
  Description of Artificial Sequence: Synthetic oligonucleotide
  Antisense strand to SEQ ID NO: 1482164
caucuuaagcucuagaggg

SEQ ID NO: 1482166 - RNA, 19 nt, Artificial Sequence
  Description of Artificial Sequence: Synthetic oligonucleotide
  Sense strand starting at position 2479 of SEQ ID NO: 1244353
gcaggaugcauguggaaug

SEQ ID NO: 1482167 - RNA, 19 nt, Artificial Sequence
  Description of Artificial Sequence: Synthetic oligonucleotide
  Antisense strand to SEQ ID NO: 1482166
cauuccacaugcauccugc

SEQ ID NO: 1482168 - RNA, 19 nt, Artificial Sequence
  Description of Artificial Sequence: Synthetic oligonucleotide
  Sense strand starting at position 2529 of SEQ ID NO: 1244353
ugcggccucucauauuaaa

SEQ ID NO: 1482169 - RNA, 19 nt, Artificial Sequence
  Description of Artificial Sequence: Synthetic oligonucleotide
  Antisense strand to SEQ ID NO: 1482168
uuuaauaugagaggccgca

SEQ ID NO: 1482170 - RNA, 19 nt, Artificial Sequence
  Description of Artificial Sequence: Synthetic oligonucleotide
  Sense strand starting at position 2712 of SEQ ID NO: 1244353
gcacuuguggcuuaaggau

SEQ ID NO: 1482171 - RNA, 19 nt, Artificial Sequence
  Description of Artificial Sequence: Synthetic oligonucleotide
  Antisense strand to SEQ ID NO: 1482170
auccuuaagccacaagugc

SEQ ID NO: 1482172 - RNA, 19 nt, Artificial Sequence
  Description of Artificial Sequence: Synthetic oligonucleotide
  Sense strand starting at position 2721 of SEQ ID NO: 1244353
gcuuaaggaucccaaagau

SEQ ID NO: 1482173 - RNA, 19 nt, Artificial Sequence
  Description of Artificial Sequence: Synthetic oligonucleotide
  Antisense strand to SEQ ID NO: 1482172
aucuuugggauccuuaagc

SEQ ID NO: 1482174 - RNA, 19 nt, Artificial Sequence
  Description of Artificial Sequence: Synthetic oligonucleotide
  Sense strand starting at position 3414 of SEQ ID NO: 1244353
cgagacauuugucaggaag

SEQ ID NO: 1482175 - RNA, 19 nt, Artificial Sequence
  Description of Artificial Sequence: Synthetic oligonucleotide
  Antisense strand to SEQ ID NO: 1482174
cuuccugacaaaugucucg

SEQ ID NO: 1482176 - RNA, 19 nt, Artificial Sequence
  Description of Artificial Sequence: Synthetic oligonucleotide
  Sense strand starting at position 3416 of SEQ ID NO: 1244353
agacauuugucaggaagaa

SEQ ID NO: 1482177 - RNA, 19 nt, Artificial Sequence
  Description of Artificial Sequence: Synthetic oligonucleotide
  Antisense strand to SEQ ID NO: 1482176
uucuuccugacaaaugucu

SEQ ID NO: 1482178 - RNA, 19 nt, Artificial Sequence
  Description of Artificial Sequence: Synthetic oligonucleotide
  Sense strand starting at position 3625 of SEQ ID NO: 1244353
gacguucucccaggcagaa

SEQ ID NO: 1482179 - RNA, 19 nt, Artificial Sequence
  Description of Artificial Sequence: Synthetic oligonucleotide
  Antisense strand to SEQ ID NO: 1482178
uucugccugggagaacguc

SEQ ID NO: 1482180 - RNA, 19 nt, Artificial Sequence
  Description of Artificial Sequence: Synthetic oligonucleotide
  Sense strand starting at position 3857 of SEQ ID NO: 1244353
gagguuaccuucucuagaa

SEQ ID NO: 1482181 - RNA, 19 nt, Artificial Sequence
  Description of Artificial Sequence: Synthetic oligonucleotide
  Antisense strand to SEQ ID NO: 1482180
uucuagagaagguaaccuc

SEQ ID NO: 1482182 - RNA, 19 nt, Artificial Sequence
  Description of Artificial Sequence: Synthetic oligonucleotide
  Sense strand starting at position 3858 of SEQ ID NO: 1244353
agguuaccuucucuagaag

SEQ ID NO: 1482183 - RNA, 19 nt, Artificial Sequence
  Description of Artificial Sequence: Synthetic oligonucleotide
  Antisense strand to SEQ ID NO: 1482182
cuucuagagaagguaaccu

SEQ ID NO: 1482184 - RNA, 19 nt, Artificial Sequence
  Description of Artificial Sequence: Synthetic oligonucleotide
  Sense strand starting at position 3895 of SEQ ID NO: 1244353
aggugguguugggaacaga

SEQ ID NO: 1482185 - RNA, 19 nt, Artificial Sequence
  Description of Artificial Sequence: Synthetic oligonucleotide
  Antisense strand to SEQ ID NO: 1482184
ucuguucccaacaccaccu

SEQ ID NO: 1482186 - RNA, 19 nt, Artificial Sequence
  Description of Artificial Sequence: Synthetic oligonucleotide
  Sense strand starting at position 75 of SEQ ID NO: 1244354
acguuugugcaacaaauaa

SEQ ID NO: 1482187 - RNA, 19 nt, Artificial Sequence
  Description of Artificial Sequence: Synthetic oligonucleotide
  Antisense strand to SEQ ID NO: 1482186
uuauuuguugcacaaacgu

SEQ ID NO: 1482188 - RNA, 19 nt, Artificial Sequence
  Description of Artificial Sequence: Synthetic oligonucleotide
  Sense strand starting at position 132 of SEQ ID NO: 1244354
uccaaagguauagguaaga

SEQ ID NO: 1482189 - RNA, 19 nt, Artificial Sequence
  Description of Artificial Sequence: Synthetic oligonucleotide
  Antisense strand to SEQ ID NO: 1482188
ucuuaccuauaccuuugga

SEQ ID NO: 1482190 - RNA, 19 nt, Artificial Sequence
  Description of Artificial Sequence: Synthetic oligonucleotide
  Sense strand starting at position 197 of SEQ ID NO: 1244354
uugccacuguucucugaaa

SEQ ID NO: 1482191 - RNA, 19 nt, Artificial Sequence
  Description of Artificial Sequence: Synthetic oligonucleotide
  Antisense strand to SEQ ID NO: 1482190
uuucagagaacaguggcaa

SEQ ID NO: 1482192 - RNA, 19 nt, Artificial Sequence
  Description of Artificial Sequence: Synthetic oligonucleotide
  Sense strand starting at position 224 of SEQ ID NO: 1244354
agcacagacguguagagaa

SEQ ID NO: 1482193 - RNA, 19 nt, Artificial Sequence
  Description of Artificial Sequence: Synthetic oligonucleotide
  Antisense strand to SEQ ID NO: 1482192
uucucuacacgucugugcu

SEQ ID NO: 1482194 - RNA, 19 nt, Artificial Sequence
  Description of Artificial Sequence: Synthetic oligonucleotide
  Sense strand starting at position 276 of SEQ ID NO: 1244354
cacugaucaugacuggagu

SEQ ID NO: 1482195 - RNA, 19 nt, Artificial Sequence
  Description of Artificial Sequence: Synthetic oligonucleotide
  Antisense strand to SEQ ID NO: 1482194
acuccagucaugaucagug

SEQ ID NO: 1482196 - RNA, 19 nt, Artificial Sequence
  Description of Artificial Sequence: Synthetic oligonucleotide
  Sense strand starting at position 436 of SEQ ID NO: 1244354
ccugacugauaagcaauau

SEQ ID NO: 1482197 - RNA, 19 nt, Artificial Sequence
  Description of Artificial Sequence: Synthetic oligonucleotide
  Antisense strand to SEQ ID NO: 1482196
auauugcuuaucagucagg

SEQ ID NO: 1482198 - RNA, 19 nt, Artificial Sequence
  Description of Artificial Sequence: Synthetic oligonucleotide
  Sense strand starting at position 512 of SEQ ID NO: 1244354
gcaacucuucugugcauuu

SEQ ID NO: 1482199 - RNA, 19 nt, Artificial Sequence
  Description of Artificial Sequence: Synthetic oligonucleotide
  Antisense strand to SEQ ID NO: 1482198
aaaugcacagaagaguugc

SEQ ID NO: 1482200 - RNA, 19 nt, Artificial Sequence
  Description of Artificial Sequence: Synthetic oligonucleotide
  Sense strand starting at position 583 of SEQ ID NO: 1244354
cagugagggcauggagauu

SEQ ID NO: 1482201 - RNA, 19 nt, Artificial Sequence
  Description of Artificial Sequence: Synthetic oligonucleotide
  Antisense strand to SEQ ID NO: 1482200
aaucuccaugcccucacug

SEQ ID NO: 1482202 - RNA, 19 nt, Artificial Sequence
  Description of Artificial Sequence: Synthetic oligonucleotide
  Sense strand starting at position 838 of SEQ ID NO: 1244354
cucagagucaugggcuaac

SEQ ID NO: 1482203 - RNA, 19 nt, Artificial Sequence
  Description of Artificial Sequence: Synthetic oligonucleotide
  Antisense strand to SEQ ID NO: 1482202
guuagcccaugacucugag

SEQ ID NO: 1482204 - RNA, 19 nt, Artificial Sequence
  Description of Artificial Sequence: Synthetic oligonucleotide
  Sense strand starting at position 855 of SEQ ID NO: 1244354
accuccauccauuguuaga

SEQ ID NO: 1482205 - RNA, 19 nt, Artificial Sequence
  Description of Artificial Sequence: Synthetic oligonucleotide
  Antisense strand to SEQ ID NO: 1482204
ucuaacaauggauggaggu

SEQ ID NO: 1482206 - RNA, 19 nt, Artificial Sequence
  Description of Artificial Sequence: Synthetic oligonucleotide
  Sense strand starting at position 929 of SEQ ID NO: 1244354
ccagcucuacagugaauga

SEQ ID NO: 1482207 - RNA, 19 nt, Artificial Sequence
  Description of Artificial Sequence: Synthetic oligonucleotide
  Antisense strand to SEQ ID NO: 1482206
ucauucacuguagagcugg

SEQ ID NO: 1482208 - RNA, 19 nt, Artificial Sequence
  Description of Artificial Sequence: Synthetic oligonucleotide
  Sense strand starting at position 1202 of SEQ ID NO: 1244354
cccgcuuuacgacaaaucu

SEQ ID NO: 1482209 - RNA, 19 nt, Artificial Sequence
  Description of Artificial Sequence: Synthetic oligonucleotide
  Antisense strand to SEQ ID NO: 1482208
agauuugucguaaagcggg

SEQ ID NO: 1482210 - RNA, 19 nt, Artificial Sequence
  Description of Artificial Sequence: Synthetic oligonucleotide
  Sense strand starting at position 1442 of SEQ ID NO: 1244354
cgggaauccaucugagguc

SEQ ID NO: 1482211 - RNA, 19 nt, Artificial Sequence
  Description of Artificial Sequence: Synthetic oligonucleotide
  Antisense strand to SEQ ID NO: 1482210
gaccucagauggauucccg

SEQ ID NO: 1482212 - RNA, 19 nt, Artificial Sequence
  Description of Artificial Sequence: Synthetic oligonucleotide
  Sense strand starting at position 1496 of SEQ ID NO: 1244354
gcucccauccuuggaggaa

SEQ ID NO: 1482213 - RNA, 19 nt, Artificial Sequence
  Description of Artificial Sequence: Synthetic oligonucleotide
  Antisense strand to SEQ ID NO: 1482212
uuccuccaaggaugggagc

SEQ ID NO: 1482214 - RNA, 19 nt, Artificial Sequence
  Description of Artificial Sequence: Synthetic oligonucleotide
  Sense strand starting at position 1553 of SEQ ID NO: 1244354
ggaacugaucccuggccaa

SEQ ID NO: 1482215 - RNA, 19 nt, Artificial Sequence
  Description of Artificial Sequence: Synthetic oligonucleotide
  Antisense strand to SEQ ID NO: 1482214
uuggccagggaucaguucc

SEQ ID NO: 1482216 - RNA, 19 nt, Artificial Sequence
  Description of Artificial Sequence: Synthetic oligonucleotide
  Sense strand starting at position 1701 of SEQ ID NO: 1244354
auucuugaaccgcauugau

SEQ ID NO: 1482217 - RNA, 19 nt, Artificial Sequence
  Description of Artificial Sequence: Synthetic oligonucleotide
  Antisense strand to SEQ ID NO: 1482216
aucaaugcgguucaagaau

SEQ ID NO: 1482218 - RNA, 19 nt, Artificial Sequence
  Description of Artificial Sequence: Synthetic oligonucleotide
  Sense strand starting at position 2202 of SEQ ID NO: 1244354
ggcgcccuucuguaagaga

SEQ ID NO: 1482219 - RNA, 19 nt, Artificial Sequence
  Description of Artificial Sequence: Synthetic oligonucleotide
  Antisense strand to SEQ ID NO: 1482218
ucucuuacagaagggcgcc

SEQ ID NO: 1482220 - RNA, 19 nt, Artificial Sequence
  Description of Artificial Sequence: Synthetic oligonucleotide
  Sense strand starting at position 2412 of SEQ ID NO: 1244354
gcuauugugagaggaucca

SEQ ID NO: 1482221 - RNA, 19 nt, Artificial Sequence
  Description of Artificial Sequence: Synthetic oligonucleotide
  Antisense strand to SEQ ID NO: 1482220
uggauccucucacaauagc

SEQ ID NO: 1482222 - RNA, 19 nt, Artificial Sequence
  Description of Artificial Sequence: Synthetic oligonucleotide
  Sense strand starting at position 2453 of SEQ ID NO: 1244354
uugucugacccuugaggga

SEQ ID NO: 1482223 - RNA, 19 nt, Artificial Sequence
  Description of Artificial Sequence: Synthetic oligonucleotide
  Antisense strand to SEQ ID NO: 1482222
ucccucaagggucagacaa

SEQ ID NO: 1482224 - RNA, 19 nt, Artificial Sequence
  Description of Artificial Sequence: Synthetic oligonucleotide
  Sense strand starting at position 2462 of SEQ ID NO: 1244354
ccuugagggaguugagauc

SEQ ID NO: 1482225 - RNA, 19 nt, Artificial Sequence
  Description of Artificial Sequence: Synthetic oligonucleotide
  Antisense strand to SEQ ID NO: 1482224
gaucucaacucccucaagg

SEQ ID NO: 1482226 - RNA, 19 nt, Artificial Sequence
  Description of Artificial Sequence: Synthetic oligonucleotide
  Sense strand starting at position 2488 of SEQ ID NO: 1244354
gucuucuaacucugagauu

SEQ ID NO: 1482227 - RNA, 19 nt, Artificial Sequence
  Description of Artificial Sequence: Synthetic oligonucleotide
  Antisense strand to SEQ ID NO: 1482226
aaucucagaguuagaagac

SEQ ID NO: 1482228 - RNA, 19 nt, Artificial Sequence
  Description of Artificial Sequence: Synthetic oligonucleotide
  Sense strand starting at position 2524 of SEQ ID NO: 1244354
ggaggaauccucugcaagg

SEQ ID NO: 1482229 - RNA, 19 nt, Artificial Sequence
  Description of Artificial Sequence: Synthetic oligonucleotide
  Antisense strand to SEQ ID NO: 1482228
ccuugcagaggauuccucc

SEQ ID NO: 1482230 - RNA, 19 nt, Artificial Sequence
  Description of Artificial Sequence: Synthetic oligonucleotide
  Sense strand starting at position 2525 of SEQ ID NO: 1244354
gaggaauccucugcaagga

SEQ ID NO: 1482231 - RNA, 19 nt, Artificial Sequence
  Description of Artificial Sequence: Synthetic oligonucleotide
  Antisense strand to SEQ ID NO: 1482230
uccuugcagaggauuccuc

SEQ ID NO: 1482232 - RNA, 19 nt, Artificial Sequence
  Description of Artificial Sequence: Synthetic oligonucleotide
  Sense strand starting at position 3028 of SEQ ID NO: 1244354
gggugauuugucgagccuu

SEQ ID NO: 1482233 - RNA, 19 nt, Artificial Sequence
  Description of Artificial Sequence: Synthetic oligonucleotide
  Antisense strand to SEQ ID NO: 1482232
aaggcucgacaaaucaccc

SEQ ID NO: 1482234 - RNA, 19 nt, Artificial Sequence
  Description of Artificial Sequence: Synthetic oligonucleotide
  Sense strand starting at position 3040 of SEQ ID NO: 1244354
gagccuuuccaggaucacu

SEQ ID NO: 1482235 - RNA, 19 nt, Artificial Sequence
  Description of Artificial Sequence: Synthetic oligonucleotide
  Antisense strand to SEQ ID NO: 1482234
agugauccuggaaaggcuc

SEQ ID NO: 1482236 - RNA, 19 nt, Artificial Sequence
  Description of Artificial Sequence: Synthetic oligonucleotide
  Sense strand starting at position 3060 of SEQ ID NO: 1244354
auggaaguuauauguguuc

SEQ ID NO: 1482237 - RNA, 19 nt, Artificial Sequence
  Description of Artificial Sequence: Synthetic oligonucleotide
  Antisense strand to SEQ ID NO: 1482236
gaacacauauaacuuccau

SEQ ID NO: 1482238 - RNA, 19 nt, Artificial Sequence
  Description of Artificial Sequence: Synthetic oligonucleotide
  Sense strand starting at position 3063 of SEQ ID NO: 1244354
gaaguuauauguguucccu

SEQ ID NO: 1482239 - RNA, 19 nt, Artificial Sequence
  Description of Artificial Sequence: Synthetic oligonucleotide
  Antisense strand to SEQ ID NO: 1482238
agggaacacauauaacuuc

SEQ ID NO: 1482240 - RNA, 19 nt, Artificial Sequence
  Description of Artificial Sequence: Synthetic oligonucleotide
  Sense strand starting at position 3164 of SEQ ID NO: 1244354
ucauucgaccuacaguaaa

SEQ ID NO: 1482241 - RNA, 19 nt, Artificial Sequence
  Description of Artificial Sequence: Synthetic oligonucleotide
  Antisense strand to SEQ ID NO: 1482240
uuuacuguaggucgaauga

SEQ ID NO: 1482242 - RNA, 19 nt, Artificial Sequence
  Description of Artificial Sequence: Synthetic oligonucleotide
  Sense strand starting at position 3175 of SEQ ID NO: 1244354
acaguaaagcauuggaaag

SEQ ID NO: 1482243 - RNA, 19 nt, Artificial Sequence
  Description of Artificial Sequence: Synthetic oligonucleotide
  Antisense strand to SEQ ID NO: 1482242
cuuuccaaugcuuuacugu

SEQ ID NO: 1482244 - RNA, 19 nt, Artificial Sequence
  Description of Artificial Sequence: Synthetic oligonucleotide
  Sense strand starting at position 3198 of SEQ ID NO: 1244354
ggaauucugucacccauaa

SEQ ID NO: 1482245 - RNA, 19 nt, Artificial Sequence
  Description of Artificial Sequence: Synthetic oligonucleotide
  Antisense strand to SEQ ID NO: 1482244
uuaugggugacagaauucc

SEQ ID NO: 1482246 - RNA, 19 nt, Artificial Sequence
  Description of Artificial Sequence: Synthetic oligonucleotide
  Sense strand starting at position 3324 of SEQ ID NO: 1244354
gaggcuuauaguggucaau

SEQ ID NO: 1482247 - RNA, 19 nt, Artificial Sequence
  Description of Artificial Sequence: Synthetic oligonucleotide
  Antisense strand to SEQ ID NO: 1482246
auugaccacuauaagccuc

SEQ ID NO: 1482248 - RNA, 19 nt, Artificial Sequence
  Description of Artificial Sequence: Synthetic oligonucleotide
  Sense strand starting at position 3326 of SEQ ID NO: 1244354
ggcuuauaguggucaauaa

SEQ ID NO: 1482249 - RNA, 19 nt, Artificial Sequence
  Description of Artificial Sequence: Synthetic oligonucleotide
  Antisense strand to SEQ ID NO: 1482248
uuauugaccacuauaagcc

SEQ ID NO: 1482250 - RNA, 19 nt, Artificial Sequence
  Description of Artificial Sequence: Synthetic oligonucleotide
  Sense strand starting at position 3327 of SEQ ID NO: 1244354
gcuuauaguggucaauaaa

SEQ ID NO: 1482251 - RNA, 19 nt, Artificial Sequence
  Description of Artificial Sequence: Synthetic oligonucleotide
  Antisense strand to SEQ ID NO: 1482250
uuuauugaccacuauaagc

SEQ ID NO: 1482252 - RNA, 19 nt, Artificial Sequence
  Description of Artificial Sequence: Synthetic oligonucleotide
  Sense strand starting at position 3526 of SEQ ID NO: 1244354
gaaugaaagucugcuucuu

SEQ ID NO: 1482253 - RNA, 19 nt, Artificial Sequence
  Description of Artificial Sequence: Synthetic oligonucleotide
  Antisense strand to SEQ ID NO: 1482252
aagaagcagacuuucauuc

SEQ ID NO: 1482254 - RNA, 19 nt, Artificial Sequence
  Description of Artificial Sequence: Synthetic oligonucleotide
  Sense strand starting at position 3528 of SEQ ID NO: 1244354
augaaagucugcuucuuau

SEQ ID NO: 1482255 - RNA, 19 nt, Artificial Sequence
  Description of Artificial Sequence: Synthetic oligonucleotide
  Antisense strand to SEQ ID NO: 1482254
auaagaagcagacuuucau

SEQ ID NO: 1482256 - RNA, 19 nt, Artificial Sequence
  Description of Artificial Sequence: Synthetic oligonucleotide
  Sense strand starting at position 3602 of SEQ ID NO: 1244354
ggagauagcuaauaaagau

SEQ ID NO: 1482257 - RNA, 19 nt, Artificial Sequence
  Description of Artificial Sequence: Synthetic oligonucleotide
  Antisense strand to SEQ ID NO: 1482256
aucuuuauuagcuaucucc

SEQ ID NO: 1482258 - RNA, 19 nt, Artificial Sequence
  Description of Artificial Sequence: Synthetic oligonucleotide
  Sense strand starting at position 3730 of SEQ ID NO: 1244354
ggcuauguaugugugggaa

SEQ ID NO: 1482259 - RNA, 19 nt, Artificial Sequence
  Description of Artificial Sequence: Synthetic oligonucleotide
  Antisense strand to SEQ ID NO: 1482258
uucccacacauacauagcc

SEQ ID NO: 1482260 - RNA, 19 nt, Artificial Sequence
  Description of Artificial Sequence: Synthetic oligonucleotide
  Sense strand starting at position 3733 of SEQ ID NO: 1244354
uauguaugugugggaaauc

SEQ ID NO: 1482261 - RNA, 19 nt, Artificial Sequence
  Description of Artificial Sequence: Synthetic oligonucleotide
  Antisense strand to SEQ ID NO: 1482260
gauuucccacacauacaua

SEQ ID NO: 1482262 - RNA, 19 nt, Artificial Sequence
  Description of Artificial Sequence: Synthetic oligonucleotide
  Sense strand starting at position 3742 of SEQ ID NO: 1244354
gugggaaaucccuguacuu

SEQ ID NO: 1482263 - RNA, 19 nt, Artificial Sequence
  Description of Artificial Sequence: Synthetic oligonucleotide
  Antisense strand to SEQ ID NO: 1482262
aaguacagggauuucccac

SEQ ID NO: 1482264 - RNA, 19 nt, Artificial Sequence
  Description of Artificial Sequence: Synthetic oligonucleotide
  Sense strand starting at position 3894 of SEQ ID NO: 1244354
gcuugaagccuggagauug

SEQ ID NO: 1482265 - RNA, 19 nt, Artificial Sequence
  Description of Artificial Sequence: Synthetic oligonucleotide
  Antisense strand to SEQ ID NO: 1482264
caaucuccaggcuucaagc

SEQ ID NO: 1482266 - RNA, 19 nt, Artificial Sequence
  Description of Artificial Sequence: Synthetic oligonucleotide
  Sense strand starting at position 19 of SEQ ID NO: 1244355
gcaguuugagggcaggaaa

SEQ ID NO: 1482267 - RNA, 19 nt, Artificial Sequence
  Description of Artificial Sequence: Synthetic oligonucleotide
  Antisense strand to SEQ ID NO: 1482266
uuuccugcccucaaacugc

SEQ ID NO: 1482268 - RNA, 19 nt, Artificial Sequence
  Description of Artificial Sequence: Synthetic oligonucleotide
  Sense strand starting at position 70 of SEQ ID NO: 1244355
gagcauugggcucaguaau

SEQ ID NO: 1482269 - RNA, 19 nt, Artificial Sequence
  Description of Artificial Sequence: Synthetic oligonucleotide
  Antisense strand to SEQ ID NO: 1482268
auuacugagcccaaugcuc

SEQ ID NO: 1482270 - RNA, 19 nt, Artificial Sequence
  Description of Artificial Sequence: Synthetic oligonucleotide
  Sense strand starting at position 448 of SEQ ID NO: 1244355
cuggccguauucuugagaa

SEQ ID NO: 1482271 - RNA, 19 nt, Artificial Sequence
  Description of Artificial Sequence: Synthetic oligonucleotide
  Antisense strand to SEQ ID NO: 1482270
uucucaagaauacggccag

SEQ ID NO: 1482272 - RNA, 19 nt, Artificial Sequence
  Description of Artificial Sequence: Synthetic oligonucleotide
  Sense strand starting at position 450 of SEQ ID NO: 1244355
ggccguauucuugagaaga

SEQ ID NO: 1482273 - RNA, 19 nt, Artificial Sequence
  Description of Artificial Sequence: Synthetic oligonucleotide
  Antisense strand to SEQ ID NO: 1482272
ucuucucaagaauacggcc

SEQ ID NO: 1482274 - RNA, 19 nt, Artificial Sequence
  Description of Artificial Sequence: Synthetic oligonucleotide
  Sense strand starting at position 513 of SEQ ID NO: 1244355
agauacuguuguguuauua

SEQ ID NO: 1482275 - RNA, 19 nt, Artificial Sequence
  Description of Artificial Sequence: Synthetic oligonucleotide
  Antisense strand to SEQ ID NO: 1482274
uaauaacacaacaguaucu

SEQ ID NO: 1482276 - RNA, 19 nt, Artificial Sequence
  Description of Artificial Sequence: Synthetic oligonucleotide
  Sense strand starting at position 517 of SEQ ID NO: 1244355
acuguuguguuauuacaac

SEQ ID NO: 1482277 - RNA, 19 nt, Artificial Sequence
  Description of Artificial Sequence: Synthetic oligonucleotide
  Antisense strand to SEQ ID NO: 1482276
guuguaauaacacaacagu

SEQ ID NO: 1482278 - RNA, 19 nt, Artificial Sequence
  Description of Artificial Sequence: Synthetic oligonucleotide
  Sense strand starting at position 924 of SEQ ID NO: 1244355
gcaaguugaguccaaagca

SEQ ID NO: 1482279 - RNA, 19 nt, Artificial Sequence
  Description of Artificial Sequence: Synthetic oligonucleotide
  Antisense strand to SEQ ID NO: 1482278
ugcuuuggacucaacuugc

SEQ ID NO: 1482280 - RNA, 19 nt, Artificial Sequence
  Description of Artificial Sequence: Synthetic oligonucleotide
  Sense strand starting at position 953 of SEQ ID NO: 1244355
aagggagcucucuaagguu

SEQ ID NO: 1482281 - RNA, 19 nt, Artificial Sequence
  Description of Artificial Sequence: Synthetic oligonucleotide
  Antisense strand to SEQ ID NO: 1482280
aaccuuagagagcucccuu

SEQ ID NO: 1482282 - RNA, 19 nt, Artificial Sequence
  Description of Artificial Sequence: Synthetic oligonucleotide
  Sense strand starting at position 1009 of SEQ ID NO: 1244355
guuuaaagcuccuuagaag

SEQ ID NO: 1482283 - RNA, 19 nt, Artificial Sequence
  Description of Artificial Sequence: Synthetic oligonucleotide
  Antisense strand to SEQ ID NO: 1482282
cuucuaaggagcuuuaaac

SEQ ID NO: 1482284 - RNA, 19 nt, Artificial Sequence
  Description of Artificial Sequence: Synthetic oligonucleotide
  Sense strand starting at position 1074 of SEQ ID NO: 1244355
acuaguucugagcaguuua

SEQ ID NO: 1482285 - RNA, 19 nt, Artificial Sequence
  Description of Artificial Sequence: Synthetic oligonucleotide
  Antisense strand to SEQ ID NO: 1482284
uaaacugcucagaacuagu

SEQ ID NO: 1482286 - RNA, 19 nt, Artificial Sequence
  Description of Artificial Sequence: Synthetic oligonucleotide
  Sense strand starting at position 1088 of SEQ ID NO: 1244355
guuuaaauggcuugcccaa

SEQ ID NO: 1482287 - RNA, 19 nt, Artificial Sequence
  Description of Artificial Sequence: Synthetic oligonucleotide
  Antisense strand to SEQ ID NO: 1482286
uugggcaagccauuuaaac

SEQ ID NO: 1482288 - RNA, 19 nt, Artificial Sequence
  Description of Artificial Sequence: Synthetic oligonucleotide
  Sense strand starting at position 1502 of SEQ ID NO: 1244355
cgaguucugacaggucuca

SEQ ID NO: 1482289 - RNA, 19 nt, Artificial Sequence
  Description of Artificial Sequence: Synthetic oligonucleotide
  Antisense strand to SEQ ID NO: 1482288
ugagaccugucagaacucg

SEQ ID NO: 1482290 - RNA, 19 nt, Artificial Sequence
  Description of Artificial Sequence: Synthetic oligonucleotide
  Sense strand starting at position 2108 of SEQ ID NO: 1244355
ggaucuguccagggagggu

SEQ ID NO: 1482291 - RNA, 19 nt, Artificial Sequence
  Description of Artificial Sequence: Synthetic oligonucleotide
  Antisense strand to SEQ ID NO: 1482290
acccucccuggacagaucc

SEQ ID NO: 1482292 - RNA, 19 nt, Artificial Sequence
  Description of Artificial Sequence: Synthetic oligonucleotide
  Sense strand starting at position 2162 of SEQ ID NO: 1244355
accuaagacuucgaugaag

SEQ ID NO: 1482293 - RNA, 19 nt, Artificial Sequence
  Description of Artificial Sequence: Synthetic oligonucleotide
  Antisense strand to SEQ ID NO: 1482292
cuucaucgaagucuuaggu

SEQ ID NO: 1482294 - RNA, 19 nt, Artificial Sequence
  Description of Artificial Sequence: Synthetic oligonucleotide
  Sense strand starting at position 2178 of SEQ ID NO: 1244355
aagagagguccuggucuac

SEQ ID NO: 1482295 - RNA, 19 nt, Artificial Sequence
  Description of Artificial Sequence: Synthetic oligonucleotide
  Antisense strand to SEQ ID NO: 1482294
guagaccaggaccucucuu

SEQ ID NO: 1482296 - RNA, 19 nt, Artificial Sequence
  Description of Artificial Sequence: Synthetic oligonucleotide
  Sense strand starting at position 2278 of SEQ ID NO: 1244355
uggagucagaacuggguuu

SEQ ID NO: 1482297 - RNA, 19 nt, Artificial Sequence
  Description of Artificial Sequence: Synthetic oligonucleotide
  Antisense strand to SEQ ID NO: 1482296
aaacccaguucugacucca

SEQ ID NO: 1482298 - RNA, 19 nt, Artificial Sequence
  Description of Artificial Sequence: Synthetic oligonucleotide
  Sense strand starting at position 2280 of SEQ ID NO: 1244355
gagucagaacuggguuuga

SEQ ID NO: 1482299 - RNA, 19 nt, Artificial Sequence
  Description of Artificial Sequence: Synthetic oligonucleotide
  Antisense strand to SEQ ID NO: 1482298
ucaaacccaguucugacuc

SEQ ID NO: 1482300 - RNA, 19 nt, Artificial Sequence
  Description of Artificial Sequence: Synthetic oligonucleotide
  Sense strand starting at position 2403 of SEQ ID NO: 1244355
aucaguaaaugggauaaua

SEQ ID NO: 1482301 - RNA, 19 nt, Artificial Sequence
  Description of Artificial Sequence: Synthetic oligonucleotide
  Antisense strand to SEQ ID NO: 1482300
uauuaucccauuuacugau

SEQ ID NO: 1482302 - RNA, 19 nt, Artificial Sequence
  Description of Artificial Sequence: Synthetic oligonucleotide
  Sense strand starting at position 2426 of SEQ ID NO: 1244355
uaccgauauucugugacug

SEQ ID NO: 1482303 - RNA, 19 nt, Artificial Sequence
  Description of Artificial Sequence: Synthetic oligonucleotide
  Antisense strand to SEQ ID NO: 1482302
cagucacagaauaucggua

SEQ ID NO: 1482304 - RNA, 19 nt, Artificial Sequence
  Description of Artificial Sequence: Synthetic oligonucleotide
  Sense strand starting at position 2427 of SEQ ID NO: 1244355
accgauauucugugacugu

SEQ ID NO: 1482305 - RNA, 19 nt, Artificial Sequence
  Description of Artificial Sequence: Synthetic oligonucleotide
  Antisense strand to SEQ ID NO: 1482304
acagucacagaauaucggu

SEQ ID NO: 1482306 - RNA, 19 nt, Artificial Sequence
  Description of Artificial Sequence: Synthetic oligonucleotide
  Sense strand starting at position 2461 of SEQ ID NO: 1244355
gccuguaaauuacugaaca

SEQ ID NO: 1482307 - RNA, 19 nt, Artificial Sequence
  Description of Artificial Sequence: Synthetic oligonucleotide
  Antisense strand to SEQ ID NO: 1482306
uguucaguaauuuacaggc

SEQ ID NO: 1482308 - RNA, 19 nt, Artificial Sequence
  Description of Artificial Sequence: Synthetic oligonucleotide
  Sense strand starting at position 2492 of SEQ ID NO: 1244355
ucacgaagugugcacuuaa

SEQ ID NO: 1482309 - RNA, 19 nt, Artificial Sequence
  Description of Artificial Sequence: Synthetic oligonucleotide
  Antisense strand to SEQ ID NO: 1482308
uuaagugcacacuucguga

SEQ ID NO: 1482310 - RNA, 19 nt, Artificial Sequence
  Description of Artificial Sequence: Synthetic oligonucleotide
  Sense strand starting at position 2530 of SEQ ID NO: 1244355
gugugaucuuuggcaaagg

SEQ ID NO: 1482311 - RNA, 19 nt, Artificial Sequence
  Description of Artificial Sequence: Synthetic oligonucleotide
  Antisense strand to SEQ ID NO: 1482310
ccuuugccaaagaucacac

SEQ ID NO: 1482312 - RNA, 19 nt, Artificial Sequence
  Description of Artificial Sequence: Synthetic oligonucleotide
  Sense strand starting at position 2643 of SEQ ID NO: 1244355
aguguaaagugccugauuu

SEQ ID NO: 1482313 - RNA, 19 nt, Artificial Sequence
  Description of Artificial Sequence: Synthetic oligonucleotide
  Antisense strand to SEQ ID NO: 1482312
aaaucaggcacuuuacacu

SEQ ID NO: 1482314 - RNA, 19 nt, Artificial Sequence
  Description of Artificial Sequence: Synthetic oligonucleotide
  Sense strand starting at position 2677 of SEQ ID NO: 1244355
guuggagugaaacgguuua

SEQ ID NO: 1482315 - RNA, 19 nt, Artificial Sequence
  Description of Artificial Sequence: Synthetic oligonucleotide
  Antisense strand to SEQ ID NO: 1482314
uaaaccguuucacuccaac

SEQ ID NO: 1482316 - RNA, 19 nt, Artificial Sequence
  Description of Artificial Sequence: Synthetic oligonucleotide
  Sense strand starting at position 2682 of SEQ ID NO: 1244355
agugaaacgguuuacguga

SEQ ID NO: 1482317 - RNA, 19 nt, Artificial Sequence
  Description of Artificial Sequence: Synthetic oligonucleotide
  Antisense strand to SEQ ID NO: 1482316
ucacguaaaccguuucacu

SEQ ID NO: 1482318 - RNA, 19 nt, Artificial Sequence
  Description of Artificial Sequence: Synthetic oligonucleotide
  Sense strand starting at position 2696 of SEQ ID NO: 1244355
cgugaaagccuuugcuaaa

SEQ ID NO: 1482319 - RNA, 19 nt, Artificial Sequence
  Description of Artificial Sequence: Synthetic oligonucleotide
  Antisense strand to SEQ ID NO: 1482318
uuuagcaaaggcuuucacg

SEQ ID NO: 1482320 - RNA, 19 nt, Artificial Sequence
  Description of Artificial Sequence: Synthetic oligonucleotide
  Sense strand starting at position 2697 of SEQ ID NO: 1244355
gugaaagccuuugcuaaac

SEQ ID NO: 1482321 - RNA, 19 nt, Artificial Sequence
  Description of Artificial Sequence: Synthetic oligonucleotide
  Antisense strand to SEQ ID NO: 1482320
guuuagcaaaggcuuucac

SEQ ID NO: 1482322 - RNA, 19 nt, Artificial Sequence
  Description of Artificial Sequence: Synthetic oligonucleotide
  Sense strand starting at position 2743 of SEQ ID NO: 1244355
ucauuaucugucuguguaa

SEQ ID NO: 1482323 - RNA, 19 nt, Artificial Sequence
  Description of Artificial Sequence: Synthetic oligonucleotide
  Antisense strand to SEQ ID NO: 1482322
uuacacagacagauaauga

SEQ ID NO: 1482324 - RNA, 19 nt, Artificial Sequence
  Description of Artificial Sequence: Synthetic oligonucleotide
  Sense strand starting at position 2745 of SEQ ID NO: 1244355
auuaucugucuguguaacu

SEQ ID NO: 1482325 - RNA, 19 nt, Artificial Sequence
  Description of Artificial Sequence: Synthetic oligonucleotide
  Antisense strand to SEQ ID NO: 1482324
aguuacacagacagauaau

SEQ ID NO: 1482326 - RNA, 19 nt, Artificial Sequence
  Description of Artificial Sequence: Synthetic oligonucleotide
  Sense strand starting at position 2891 of SEQ ID NO: 1244355
cccuaaagugcugaacaaa

SEQ ID NO: 1482327 - RNA, 19 nt, Artificial Sequence
  Description of Artificial Sequence: Synthetic oligonucleotide
  Antisense strand to SEQ ID NO: 1482326
uuuguucagcacuuuaggg

SEQ ID NO: 1482328 - RNA, 19 nt, Artificial Sequence
  Description of Artificial Sequence: Synthetic oligonucleotide
  Sense strand starting at position 2944 of SEQ ID NO: 1244355
cucgguaucacacaacguu

SEQ ID NO: 1482329 - RNA, 19 nt, Artificial Sequence
  Description of Artificial Sequence: Synthetic oligonucleotide
  Antisense strand to SEQ ID NO: 1482328
aacguugugugauaccgag

SEQ ID NO: 1482330 - RNA, 19 nt, Artificial Sequence
  Description of Artificial Sequence: Synthetic oligonucleotide
  Sense strand starting at position 2985 of SEQ ID NO: 1244355
accacuuguguggaggaau

SEQ ID NO: 1482331 - RNA, 19 nt, Artificial Sequence
  Description of Artificial Sequence: Synthetic oligonucleotide
  Antisense strand to SEQ ID NO: 1482330
auuccuccacacaaguggu

SEQ ID NO: 1482332 - RNA, 19 nt, Artificial Sequence
  Description of Artificial Sequence: Synthetic oligonucleotide
  Sense strand starting at position 3238 of SEQ ID NO: 1244355
uggaaagauucugccugga

SEQ ID NO: 1482333 - RNA, 19 nt, Artificial Sequence
  Description of Artificial Sequence: Synthetic oligonucleotide
  Antisense strand to SEQ ID NO: 1482332
uccaggcagaaucuuucca

SEQ ID NO: 1482334 - RNA, 19 nt, Artificial Sequence
  Description of Artificial Sequence: Synthetic oligonucleotide
  Sense strand starting at position 3240 of SEQ ID NO: 1244355
gaaagauucugccuggaga

SEQ ID NO: 1482335 - RNA, 19 nt, Artificial Sequence
  Description of Artificial Sequence: Synthetic oligonucleotide
  Antisense strand to SEQ ID NO: 1482334
ucuccaggcagaaucuuuc

SEQ ID NO: 1482336 - RNA, 19 nt, Artificial Sequence
  Description of Artificial Sequence: Synthetic oligonucleotide
  Sense strand starting at position 3241 of SEQ ID NO: 1244355
aaagauucugccuggagaa

SEQ ID NO: 1482337 - RNA, 19 nt, Artificial Sequence
  Description of Artificial Sequence: Synthetic oligonucleotide
  Antisense strand to SEQ ID NO: 1482336
uucuccaggcagaaucuuu

SEQ ID NO: 1482338 - RNA, 19 nt, Artificial Sequence
  Description of Artificial Sequence: Synthetic oligonucleotide
  Sense strand starting at position 3242 of SEQ ID NO: 1244355
aagauucugccuggagaaa

SEQ ID NO: 1482339 - RNA, 19 nt, Artificial Sequence
  Description of Artificial Sequence: Synthetic oligonucleotide
  Antisense strand to SEQ ID NO: 1482338
uuucuccaggcagaaucuu

SEQ ID NO: 1482340 - RNA, 19 nt, Artificial Sequence
  Description of Artificial Sequence: Synthetic oligonucleotide
  Sense strand starting at position 3294 of SEQ ID NO: 1244355
uccacaguguccuuaccaa

SEQ ID NO: 1482341 - RNA, 19 nt, Artificial Sequence
  Description of Artificial Sequence: Synthetic oligonucleotide
  Antisense strand to SEQ ID NO: 1482340
uugguaaggacacugugga

SEQ ID NO: 1482342 - RNA, 19 nt, Artificial Sequence
  Description of Artificial Sequence: Synthetic oligonucleotide
  Sense strand starting at position 3911 of SEQ ID NO: 1244355
gcuggaagcucucuaagag

SEQ ID NO: 1482343 - RNA, 19 nt, Artificial Sequence
  Description of Artificial Sequence: Synthetic oligonucleotide
  Antisense strand to SEQ ID NO: 1482342
cucuuagagagcuuccagc

SEQ ID NO: 1482344 - RNA, 19 nt, Artificial Sequence
  Description of Artificial Sequence: Synthetic oligonucleotide
  Sense strand starting at position 3980 of SEQ ID NO: 1244355
cagggaugcuucuuaugaa

SEQ ID NO: 1482345 - RNA, 19 nt, Artificial Sequence
  Description of Artificial Sequence: Synthetic oligonucleotide
  Antisense strand to SEQ ID NO: 1482344
uucauaagaagcaucccug

SEQ ID NO: 1482346 - RNA, 19 nt, Artificial Sequence
  Description of Artificial Sequence: Synthetic oligonucleotide
  Sense strand starting at position 113 of SEQ ID NO: 1244356
cugcaugacucaucauuga

SEQ ID NO: 1482347 - RNA, 19 nt, Artificial Sequence
  Description of Artificial Sequence: Synthetic oligonucleotide
  Antisense strand to SEQ ID NO: 1482346
ucaaugaugagucaugcag

SEQ ID NO: 1482348 - RNA, 19 nt, Artificial Sequence
  Description of Artificial Sequence: Synthetic oligonucleotide
  Sense strand starting at position 117 of SEQ ID NO: 1244356
augacucaucauugaagca

SEQ ID NO: 1482349 - RNA, 19 nt, Artificial Sequence
  Description of Artificial Sequence: Synthetic oligonucleotide
  Antisense strand to SEQ ID NO: 1482348
ugcuucaaugaugagucau

SEQ ID NO: 1482350 - RNA, 19 nt, Artificial Sequence
  Description of Artificial Sequence: Synthetic oligonucleotide
  Sense strand starting at position 348 of SEQ ID NO: 1244356
gcgugaagauaggagucau

SEQ ID NO: 1482351 - RNA, 19 nt, Artificial Sequence
  Description of Artificial Sequence: Synthetic oligonucleotide
  Antisense strand to SEQ ID NO: 1482350
augacuccuaucuucacgc

SEQ ID NO: 1482352 - RNA, 19 nt, Artificial Sequence
  Description of Artificial Sequence: Synthetic oligonucleotide
  Sense strand starting at position 450 of SEQ ID NO: 1244356
gggcauaguuggaacguuu

SEQ ID NO: 1482353 - RNA, 19 nt, Artificial Sequence
  Description of Artificial Sequence: Synthetic oligonucleotide
  Antisense strand to SEQ ID NO: 1482352
aaacguuccaacuaugccc

SEQ ID NO: 1482354 - RNA, 19 nt, Artificial Sequence
  Description of Artificial Sequence: Synthetic oligonucleotide
  Sense strand starting at position 484 of SEQ ID NO: 1244356
aaaugugagcucuaaaugu

SEQ ID NO: 1482355 - RNA, 19 nt, Artificial Sequence
  Description of Artificial Sequence: Synthetic oligonucleotide
  Antisense strand to SEQ ID NO: 1482354
acauuuagagcucacauuu

SEQ ID NO: 1482356 - RNA, 19 nt, Artificial Sequence
  Description of Artificial Sequence: Synthetic oligonucleotide
  Sense strand starting at position 529 of SEQ ID NO: 1244356
ucccuugccucgggaucaa

SEQ ID NO: 1482357 - RNA, 19 nt, Artificial Sequence
  Description of Artificial Sequence: Synthetic oligonucleotide
  Antisense strand to SEQ ID NO: 1482356
uugaucccgaggcaaggga

SEQ ID NO: 1482358 - RNA, 19 nt, Artificial Sequence
  Description of Artificial Sequence: Synthetic oligonucleotide
  Sense strand starting at position 1039 of SEQ ID NO: 1244356
uggccaggaucauaagaca

SEQ ID NO: 1482359 - RNA, 19 nt, Artificial Sequence
  Description of Artificial Sequence: Synthetic oligonucleotide
  Antisense strand to SEQ ID NO: 1482358
ugucuuaugauccuggcca

SEQ ID NO: 1482360 - RNA, 19 nt, Artificial Sequence
  Description of Artificial Sequence: Synthetic oligonucleotide
  Sense strand starting at position 1051 of SEQ ID NO: 1244356
uaagacacgcgaugucauu

SEQ ID NO: 1482361 - RNA, 19 nt, Artificial Sequence
  Description of Artificial Sequence: Synthetic oligonucleotide
  Antisense strand to SEQ ID NO: 1482360
aaugacaucgcgugucuua

SEQ ID NO: 1482362 - RNA, 19 nt, Artificial Sequence
  Description of Artificial Sequence: Synthetic oligonucleotide
  Sense strand starting at position 1208 of SEQ ID NO: 1244356
cgcccacucgugugcuaua

SEQ ID NO: 1482363 - RNA, 19 nt, Artificial Sequence
  Description of Artificial Sequence: Synthetic oligonucleotide
  Antisense strand to SEQ ID NO: 1482362
uauagcacacgagugggcg

SEQ ID NO: 1482364 - RNA, 19 nt, Artificial Sequence
  Description of Artificial Sequence: Synthetic oligonucleotide
  Sense strand starting at position 1235 of SEQ ID NO: 1244356
cguguacacguccguucau

SEQ ID NO: 1482365 - RNA, 19 nt, Artificial Sequence
  Description of Artificial Sequence: Synthetic oligonucleotide
  Antisense strand to SEQ ID NO: 1482364
augaacggacguguacacg

SEQ ID NO: 1482366 - RNA, 19 nt, Artificial Sequence
  Description of Artificial Sequence: Synthetic oligonucleotide
  Sense strand starting at position 1473 of SEQ ID NO: 1244356
gcagcauguuaaugaauuc

SEQ ID NO: 1482367 - RNA, 19 nt, Artificial Sequence
  Description of Artificial Sequence: Synthetic oligonucleotide
  Antisense strand to SEQ ID NO: 1482366
gaauucauuaacaugcugc

SEQ ID NO: 1482368 - RNA, 19 nt, Artificial Sequence
  Description of Artificial Sequence: Synthetic oligonucleotide
  Sense strand starting at position 2074 of SEQ ID NO: 1244356
aagaaagggcuuugcaaca

SEQ ID NO: 1482369 - RNA, 19 nt, Artificial Sequence
  Description of Artificial Sequence: Synthetic oligonucleotide
  Antisense strand to SEQ ID NO: 1482368
uguugcaaagcccuuucuu

SEQ ID NO: 1482370 - RNA, 19 nt, Artificial Sequence
  Description of Artificial Sequence: Synthetic oligonucleotide
  Sense strand starting at position 2393 of SEQ ID NO: 1244356
gcguuugggucguucacga

SEQ ID NO: 1482371 - RNA, 19 nt, Artificial Sequence
  Description of Artificial Sequence: Synthetic oligonucleotide
  Antisense strand to SEQ ID NO: 1482370
ucgugaacgacccaaacgc

SEQ ID NO: 1482372 - RNA, 19 nt, Artificial Sequence
  Description of Artificial Sequence: Synthetic oligonucleotide
  Sense strand starting at position 2398 of SEQ ID NO: 1244356
ugggucguucacgacgaaa

SEQ ID NO: 1482373 - RNA, 19 nt, Artificial Sequence
  Description of Artificial Sequence: Synthetic oligonucleotide
  Antisense strand to SEQ ID NO: 1482372
uuucgucgugaacgaccca

SEQ ID NO: 1482374 - RNA, 19 nt, Artificial Sequence
  Description of Artificial Sequence: Synthetic oligonucleotide
  Sense strand starting at position 2400 of SEQ ID NO: 1244356
ggucguucacgacgaaauc

SEQ ID NO: 1482375 - RNA, 19 nt, Artificial Sequence
  Description of Artificial Sequence: Synthetic oligonucleotide
  Antisense strand to SEQ ID NO: 1482374
gauuucgucgugaacgacc

SEQ ID NO: 1482376 - RNA, 19 nt, Artificial Sequence
  Description of Artificial Sequence: Synthetic oligonucleotide
  Sense strand starting at position 2401 of SEQ ID NO: 1244356
gucguucacgacgaaaucu

SEQ ID NO: 1482377 - RNA, 19 nt, Artificial Sequence
  Description of Artificial Sequence: Synthetic oligonucleotide
  Antisense strand to SEQ ID NO: 1482376
agauuucgucgugaacgac

SEQ ID NO: 1482378 - RNA, 19 nt, Artificial Sequence
  Description of Artificial Sequence: Synthetic oligonucleotide
  Sense strand starting at position 2410 of SEQ ID NO: 1244356
gacgaaaucuguccugcug

SEQ ID NO: 1482379 - RNA, 19 nt, Artificial Sequence
  Description of Artificial Sequence: Synthetic oligonucleotide
  Antisense strand to SEQ ID NO: 1482378
cagcaggacagauuucguc

SEQ ID NO: 1482380 - RNA, 19 nt, Artificial Sequence
  Description of Artificial Sequence: Synthetic oligonucleotide
  Sense strand starting at position 2412 of SEQ ID NO: 1244356
cgaaaucuguccugcugga

SEQ ID NO: 1482381 - RNA, 19 nt, Artificial Sequence
  Description of Artificial Sequence: Synthetic oligonucleotide
  Antisense strand to SEQ ID NO: 1482380
uccagcaggacagauuucg

SEQ ID NO: 1482382 - RNA, 19 nt, Artificial Sequence
  Description of Artificial Sequence: Synthetic oligonucleotide
  Sense strand starting at position 2464 of SEQ ID NO: 1244356
gaguuccaaccaggauauu

SEQ ID NO: 1482383 - RNA, 19 nt, Artificial Sequence
  Description of Artificial Sequence: Synthetic oligonucleotide
  Antisense strand to SEQ ID NO: 1482382
aauauccugguuggaacuc

SEQ ID NO: 1482384 - RNA, 19 nt, Artificial Sequence
  Description of Artificial Sequence: Synthetic oligonucleotide
  Sense strand starting at position 2623 of SEQ ID NO: 1244356
acuggagacugucaagaga

SEQ ID NO: 1482385 - RNA, 19 nt, Artificial Sequence
  Description of Artificial Sequence: Synthetic oligonucleotide
  Antisense strand to SEQ ID NO: 1482384
ucucuugacagucuccagu

SEQ ID NO: 1482386 - RNA, 19 nt, Artificial Sequence
  Description of Artificial Sequence: Synthetic oligonucleotide
  Sense strand starting at position 2704 of SEQ ID NO: 1244356
gugcguucgcauccuauua

SEQ ID NO: 1482387 - RNA, 19 nt, Artificial Sequence
  Description of Artificial Sequence: Synthetic oligonucleotide
  Antisense strand to SEQ ID NO: 1482386
uaauaggaugcgaacgcac

SEQ ID NO: 1482388 - RNA, 19 nt, Artificial Sequence
  Description of Artificial Sequence: Synthetic oligonucleotide
  Sense strand starting at position 2800 of SEQ ID NO: 1244356
ccgccagccuucgguuuaa

SEQ ID NO: 1482389 - RNA, 19 nt, Artificial Sequence
  Description of Artificial Sequence: Synthetic oligonucleotide
  Antisense strand to SEQ ID NO: 1482388
uuaaaccgaaggcuggcgg

SEQ ID NO: 1482390 - RNA, 19 nt, Artificial Sequence
  Description of Artificial Sequence: Synthetic oligonucleotide
  Sense strand starting at position 2985 of SEQ ID NO: 1244356
agucuuuguccacgcguau

SEQ ID NO: 1482391 - RNA, 19 nt, Artificial Sequence
  Description of Artificial Sequence: Synthetic oligonucleotide
  Antisense strand to SEQ ID NO: 1482390
auacgcguggacaaagacu

SEQ ID NO: 1482392 - RNA, 19 nt, Artificial Sequence
  Description of Artificial Sequence: Synthetic oligonucleotide
  Sense strand starting at position 2986 of SEQ ID NO: 1244356
gucuuuguccacgcguauu

SEQ ID NO: 1482393 - RNA, 19 nt, Artificial Sequence
  Description of Artificial Sequence: Synthetic oligonucleotide
  Antisense strand to SEQ ID NO: 1482392
aauacgcguggacaaagac

SEQ ID NO: 1482394 - RNA, 19 nt, Artificial Sequence
  Description of Artificial Sequence: Synthetic oligonucleotide
  Sense strand starting at position 2996 of SEQ ID NO: 1244356
acgcguauucgaugugggu

SEQ ID NO: 1482395 - RNA, 19 nt, Artificial Sequence
  Description of Artificial Sequence: Synthetic oligonucleotide
  Antisense strand to SEQ ID NO: 1482394
acccacaucgaauacgcgu

SEQ ID NO: 1482396 - RNA, 19 nt, Artificial Sequence
  Description of Artificial Sequence: Synthetic oligonucleotide
  Sense strand starting at position 3002 of SEQ ID NO: 1244356
auucgauguggguggagau

SEQ ID NO: 1482397 - RNA, 19 nt, Artificial Sequence
  Description of Artificial Sequence: Synthetic oligonucleotide
  Antisense strand to SEQ ID NO: 1482396
aucuccacccacaucgaau

SEQ ID NO: 1482398 - RNA, 19 nt, Artificial Sequence
  Description of Artificial Sequence: Synthetic oligonucleotide
  Sense strand starting at position 3003 of SEQ ID NO: 1244356
uucgauguggguggagaua

SEQ ID NO: 1482399 - RNA, 19 nt, Artificial Sequence
  Description of Artificial Sequence: Synthetic oligonucleotide
  Antisense strand to SEQ ID NO: 1482398
uaucuccacccacaucgaa

SEQ ID NO: 1482400 - RNA, 19 nt, Artificial Sequence
  Description of Artificial Sequence: Synthetic oligonucleotide
  Sense strand starting at position 3303 of SEQ ID NO: 1244356
ggugcaaucggagaguuag

SEQ ID NO: 1482401 - RNA, 19 nt, Artificial Sequence
  Description of Artificial Sequence: Synthetic oligonucleotide
  Antisense strand to SEQ ID NO: 1482400
cuaacucuccgauugcacc

SEQ ID NO: 1482402 - RNA, 19 nt, Artificial Sequence
  Description of Artificial Sequence: Synthetic oligonucleotide
  Sense strand starting at position 3309 of SEQ ID NO: 1244356
aucggagaguuagcucuuu

SEQ ID NO: 1482403 - RNA, 19 nt, Artificial Sequence
  Description of Artificial Sequence: Synthetic oligonucleotide
  Antisense strand to SEQ ID NO: 1482402
aaagagcuaacucuccgau

SEQ ID NO: 1482404 - RNA, 19 nt, Artificial Sequence
  Description of Artificial Sequence: Synthetic oligonucleotide
  Sense strand starting at position 3396 of SEQ ID NO: 1244356
cgccuaaggucguuccgua

SEQ ID NO: 1482405 - RNA, 19 nt, Artificial Sequence
  Description of Artificial Sequence: Synthetic oligonucleotide
  Antisense strand to SEQ ID NO: 1482404
uacggaacgaccuuaggcg

SEQ ID NO: 1482406 - RNA, 19 nt, Artificial Sequence
  Description of Artificial Sequence: Synthetic oligonucleotide
  Sense strand starting at position 3397 of SEQ ID NO: 1244356
gccuaaggucguuccguau

SEQ ID NO: 1482407 - RNA, 19 nt, Artificial Sequence
  Description of Artificial Sequence: Synthetic oligonucleotide
  Antisense strand to SEQ ID NO: 1482406
auacggaacgaccuuaggc

SEQ ID NO: 1482408 - RNA, 19 nt, Artificial Sequence
  Description of Artificial Sequence: Synthetic oligonucleotide
  Sense strand starting at position 3596 of SEQ ID NO: 1244356
uucugcuuccucgguggaa

SEQ ID NO: 1482409 - RNA, 19 nt, Artificial Sequence
  Description of Artificial Sequence: Synthetic oligonucleotide
  Antisense strand to SEQ ID NO: 1482408
uuccaccgaggaagcagaa

SEQ ID NO: 1482410 - RNA, 19 nt, Artificial Sequence
  Description of Artificial Sequence: Synthetic oligonucleotide
  Sense strand starting at position 3743 of SEQ ID NO: 1244356
aggcuccauucuuugcuaa

SEQ ID NO: 1482411 - RNA, 19 nt, Artificial Sequence
  Description of Artificial Sequence: Synthetic oligonucleotide
  Antisense strand to SEQ ID NO: 1482410
uuagcaaagaauggagccu

SEQ ID NO: 1482412 - RNA, 19 nt, Artificial Sequence
  Description of Artificial Sequence: Synthetic oligonucleotide
  Sense strand starting at position 364 of SEQ ID NO: 1244357
ggauuauaagcucgagcua

SEQ ID NO: 1482413 - RNA, 19 nt, Artificial Sequence
  Description of Artificial Sequence: Synthetic oligonucleotide
  Antisense strand to SEQ ID NO: 1482412
uagcucgagcuuauaaucc

SEQ ID NO: 1482414 - RNA, 19 nt, Artificial Sequence
  Description of Artificial Sequence: Synthetic oligonucleotide
  Sense strand starting at position 541 of SEQ ID NO: 1244357
agagcucucugauccuuua

SEQ ID NO: 1482415 - RNA, 19 nt, Artificial Sequence
  Description of Artificial Sequence: Synthetic oligonucleotide
  Antisense strand to SEQ ID NO: 1482414
uaaaggaucagagagcucu

SEQ ID NO: 1482416 - RNA, 19 nt, Artificial Sequence
  Description of Artificial Sequence: Synthetic oligonucleotide
  Sense strand starting at position 1068 of SEQ ID NO: 1244357
ggaacuuggucuaguggga

SEQ ID NO: 1482417 - RNA, 19 nt, Artificial Sequence
  Description of Artificial Sequence: Synthetic oligonucleotide
  Antisense strand to SEQ ID NO: 1482416
ucccacuagaccaaguucc

SEQ ID NO: 1482418 - RNA, 19 nt, Artificial Sequence
  Description of Artificial Sequence: Synthetic oligonucleotide
  Sense strand starting at position 1092 of SEQ ID NO: 1244357
acucucacgggucaugaau

SEQ ID NO: 1482419 - RNA, 19 nt, Artificial Sequence
  Description of Artificial Sequence: Synthetic oligonucleotide
  Antisense strand to SEQ ID NO: 1482418
auucaugacccgugagagu

SEQ ID NO: 1482420 - RNA, 19 nt, Artificial Sequence
  Description of Artificial Sequence: Synthetic oligonucleotide
  Sense strand starting at position 1100 of SEQ ID NO: 1244357
gggucaugaaugcggcuaa

SEQ ID NO: 1482421 - RNA, 19 nt, Artificial Sequence
  Description of Artificial Sequence: Synthetic oligonucleotide
  Antisense strand to SEQ ID NO: 1482420
uuagccgcauucaugaccc

SEQ ID NO: 1482422 - RNA, 19 nt, Artificial Sequence
  Description of Artificial Sequence: Synthetic oligonucleotide
  Sense strand starting at position 1204 of SEQ ID NO: 1244357
uguggagcugucucgcaau

SEQ ID NO: 1482423 - RNA, 19 nt, Artificial Sequence
  Description of Artificial Sequence: Synthetic oligonucleotide
  Antisense strand to SEQ ID NO: 1482422
auugcgagacagcuccaca

SEQ ID NO: 1482424 - RNA, 19 nt, Artificial Sequence
  Description of Artificial Sequence: Synthetic oligonucleotide
  Sense strand starting at position 1236 of SEQ ID NO: 1244357
ggaggcaaauuauuccgaa

SEQ ID NO: 1482425 - RNA, 19 nt, Artificial Sequence
  Description of Artificial Sequence: Synthetic oligonucleotide
  Antisense strand to SEQ ID NO: 1482424
uucggaauaauuugccucc

SEQ ID NO: 1482426 - RNA, 19 nt, Artificial Sequence
  Description of Artificial Sequence: Synthetic oligonucleotide
  Sense strand starting at position 1237 of SEQ ID NO: 1244357
gaggcaaauuauuccgaaa

SEQ ID NO: 1482427 - RNA, 19 nt, Artificial Sequence
  Description of Artificial Sequence: Synthetic oligonucleotide
  Antisense strand to SEQ ID NO: 1482426
uuucggaauaauuugccuc

SEQ ID NO: 1482428 - RNA, 19 nt, Artificial Sequence
  Description of Artificial Sequence: Synthetic oligonucleotide
  Sense strand starting at position 1239 of SEQ ID NO: 1244357
ggcaaauuauuccgaaauc

SEQ ID NO: 1482429 - RNA, 19 nt, Artificial Sequence
  Description of Artificial Sequence: Synthetic oligonucleotide
  Antisense strand to SEQ ID NO: 1482428
gauuucggaauaauuugcc

SEQ ID NO: 1482430 - RNA, 19 nt, Artificial Sequence
  Description of Artificial Sequence: Synthetic oligonucleotide
  Sense strand starting at position 1240 of SEQ ID NO: 1244357
gcaaauuauuccgaaauca

SEQ ID NO: 1482431 - RNA, 19 nt, Artificial Sequence
  Description of Artificial Sequence: Synthetic oligonucleotide
  Antisense strand to SEQ ID NO: 1482430
ugauuucggaauaauuugc

SEQ ID NO: 1482432 - RNA, 19 nt, Artificial Sequence
  Description of Artificial Sequence: Synthetic oligonucleotide
  Sense strand starting at position 1377 of SEQ ID NO: 1244357
uaauaaagguuggcaugau

SEQ ID NO: 1482433 - RNA, 19 nt, Artificial Sequence
  Description of Artificial Sequence: Synthetic oligonucleotide
  Antisense strand to SEQ ID NO: 1482432
aucaugccaaccuuuauua

SEQ ID NO: 1482434 - RNA, 19 nt, Artificial Sequence
  Description of Artificial Sequence: Synthetic oligonucleotide
  Sense strand starting at position 1378 of SEQ ID NO: 1244357
aauaaagguuggcaugauu

SEQ ID NO: 1482435 - RNA, 19 nt, Artificial Sequence
  Description of Artificial Sequence: Synthetic oligonucleotide
  Antisense strand to SEQ ID NO: 1482434
aaucaugccaaccuuuauu

SEQ ID NO: 1482436 - RNA, 19 nt, Artificial Sequence
  Description of Artificial Sequence: Synthetic oligonucleotide
  Sense strand starting at position 1386 of SEQ ID NO: 1244357
uuggcaugauuugacuuaa

SEQ ID NO: 1482437 - RNA, 19 nt, Artificial Sequence
  Description of Artificial Sequence: Synthetic oligonucleotide
  Antisense strand to SEQ ID NO: 1482436
uuaagucaaaucaugccaa

SEQ ID NO: 1482438 - RNA, 19 nt, Artificial Sequence
  Description of Artificial Sequence: Synthetic oligonucleotide
  Sense strand starting at position 1545 of SEQ ID NO: 1244357
ccgcccuucucagaaguga

SEQ ID NO: 1482439 - RNA, 19 nt, Artificial Sequence
  Description of Artificial Sequence: Synthetic oligonucleotide
  Antisense strand to SEQ ID NO: 1482438
ucacuucugagaagggcgg

SEQ ID NO: 1482440 - RNA, 19 nt, Artificial Sequence
  Description of Artificial Sequence: Synthetic oligonucleotide
  Sense strand starting at position 1599 of SEQ ID NO: 1244357
gucacuuagucgccgauca

SEQ ID NO: 1482441 - RNA, 19 nt, Artificial Sequence
  Description of Artificial Sequence: Synthetic oligonucleotide
  Antisense strand to SEQ ID NO: 1482440
ugaucggcgacuaagugac

SEQ ID NO: 1482442 - RNA, 19 nt, Artificial Sequence
  Description of Artificial Sequence: Synthetic oligonucleotide
  Sense strand starting at position 1600 of SEQ ID NO: 1244357
ucacuuagucgccgaucaa

SEQ ID NO: 1482443 - RNA, 19 nt, Artificial Sequence
  Description of Artificial Sequence: Synthetic oligonucleotide
  Antisense strand to SEQ ID NO: 1482442
uugaucggcgacuaaguga

SEQ ID NO: 1482444 - RNA, 19 nt, Artificial Sequence
  Description of Artificial Sequence: Synthetic oligonucleotide
  Sense strand starting at position 1601 of SEQ ID NO: 1244357
cacuuagucgccgaucaag

SEQ ID NO: 1482445 - RNA, 19 nt, Artificial Sequence
  Description of Artificial Sequence: Synthetic oligonucleotide
  Antisense strand to SEQ ID NO: 1482444
cuugaucggcgacuaagug

SEQ ID NO: 1482446 - RNA, 19 nt, Artificial Sequence
  Description of Artificial Sequence: Synthetic oligonucleotide
  Sense strand starting at position 1611 of SEQ ID NO: 1244357
ccgaucaaggcuuggacua

SEQ ID NO: 1482447 - RNA, 19 nt, Artificial Sequence
  Description of Artificial Sequence: Synthetic oligonucleotide
  Antisense strand to SEQ ID NO: 1482446
uaguccaagccuugaucgg

SEQ ID NO: 1482448 - RNA, 19 nt, Artificial Sequence
  Description of Artificial Sequence: Synthetic oligonucleotide
  Sense strand starting at position 1612 of SEQ ID NO: 1244357
cgaucaaggcuuggacuaa

SEQ ID NO: 1482449 - RNA, 19 nt, Artificial Sequence
  Description of Artificial Sequence: Synthetic oligonucleotide
  Antisense strand to SEQ ID NO: 1482448
uuaguccaagccuugaucg

SEQ ID NO: 1482450 - RNA, 19 nt, Artificial Sequence
  Description of Artificial Sequence: Synthetic oligonucleotide
  Sense strand starting at position 1657 of SEQ ID NO: 1244357
uggaucggaugcugaauaa

SEQ ID NO: 1482451 - RNA, 19 nt, Artificial Sequence
  Description of Artificial Sequence: Synthetic oligonucleotide
  Antisense strand to SEQ ID NO: 1482450
uuauucagcauccgaucca

SEQ ID NO: 1482452 - RNA, 19 nt, Artificial Sequence
  Description of Artificial Sequence: Synthetic oligonucleotide
  Sense strand starting at position 1989 of SEQ ID NO: 1244357
aauuguaaagcuugccgaa

SEQ ID NO: 1482453 - RNA, 19 nt, Artificial Sequence
  Description of Artificial Sequence: Synthetic oligonucleotide
  Antisense strand to SEQ ID NO: 1482452
uucggcaagcuuuacaauu

SEQ ID NO: 1482454 - RNA, 19 nt, Artificial Sequence
  Description of Artificial Sequence: Synthetic oligonucleotide
  Sense strand starting at position 2108 of SEQ ID NO: 1244357
gccaucuugucuucuccua

SEQ ID NO: 1482455 - RNA, 19 nt, Artificial Sequence
  Description of Artificial Sequence: Synthetic oligonucleotide
  Antisense strand to SEQ ID NO: 1482454
uaggagaagacaagauggc

SEQ ID NO: 1482456 - RNA, 19 nt, Artificial Sequence
  Description of Artificial Sequence: Synthetic oligonucleotide
  Sense strand starting at position 2130 of SEQ ID NO: 1244357
cacuuuguauuguucgaag

SEQ ID NO: 1482457 - RNA, 19 nt, Artificial Sequence
  Description of Artificial Sequence: Synthetic oligonucleotide
  Antisense strand to SEQ ID NO: 1482456
cuucgaacaauacaaagug

SEQ ID NO: 1482458 - RNA, 19 nt, Artificial Sequence
  Description of Artificial Sequence: Synthetic oligonucleotide
  Sense strand starting at position 2132 of SEQ ID NO: 1244357
cuuuguauuguucgaaguu

SEQ ID NO: 1482459 - RNA, 19 nt, Artificial Sequence
  Description of Artificial Sequence: Synthetic oligonucleotide
  Antisense strand to SEQ ID NO: 1482458
aacuucgaacaauacaaag

SEQ ID NO: 1482460 - RNA, 19 nt, Artificial Sequence
  Description of Artificial Sequence: Synthetic oligonucleotide
  Sense strand starting at position 2138 of SEQ ID NO: 1244357
auuguucgaaguugagaga

SEQ ID NO: 1482461 - RNA, 19 nt, Artificial Sequence
  Description of Artificial Sequence: Synthetic oligonucleotide
  Antisense strand to SEQ ID NO: 1482460
ucucucaacuucgaacaau

SEQ ID NO: 1482462 - RNA, 19 nt, Artificial Sequence
  Description of Artificial Sequence: Synthetic oligonucleotide
  Sense strand starting at position 2670 of SEQ ID NO: 1244357
gcgucauuccgcuguggau

SEQ ID NO: 1482463 - RNA, 19 nt, Artificial Sequence
  Description of Artificial Sequence: Synthetic oligonucleotide
  Antisense strand to SEQ ID NO: 1482462
auccacagcggaaugacgc

SEQ ID NO: 1482464 - RNA, 19 nt, Artificial Sequence
  Description of Artificial Sequence: Synthetic oligonucleotide
  Sense strand starting at position 2729 of SEQ ID NO: 1244357
acggaugucugcaggcaga

SEQ ID NO: 1482465 - RNA, 19 nt, Artificial Sequence
  Description of Artificial Sequence: Synthetic oligonucleotide
  Antisense strand to SEQ ID NO: 1482464
ucugccugcagacauccgu

SEQ ID NO: 1482466 - RNA, 19 nt, Artificial Sequence
  Description of Artificial Sequence: Synthetic oligonucleotide
  Sense strand starting at position 2876 of SEQ ID NO: 1244357
cgccguagccagcuguaau

SEQ ID NO: 1482467 - RNA, 19 nt, Artificial Sequence
  Description of Artificial Sequence: Synthetic oligonucleotide
  Antisense strand to SEQ ID NO: 1482466
auuacagcuggcuacggcg

SEQ ID NO: 1482468 - RNA, 19 nt, Artificial Sequence
  Description of Artificial Sequence: Synthetic oligonucleotide
  Sense strand starting at position 2877 of SEQ ID NO: 1244357
gccguagccagcuguaaug

SEQ ID NO: 1482469 - RNA, 19 nt, Artificial Sequence
  Description of Artificial Sequence: Synthetic oligonucleotide
  Antisense strand to SEQ ID NO: 1482468
cauuacagcuggcuacggc

SEQ ID NO: 1482470 - RNA, 19 nt, Artificial Sequence
  Description of Artificial Sequence: Synthetic oligonucleotide
  Sense strand starting at position 2939 of SEQ ID NO: 1244357
ggagguccuuucuggaauc

SEQ ID NO: 1482471 - RNA, 19 nt, Artificial Sequence
  Description of Artificial Sequence: Synthetic oligonucleotide
  Antisense strand to SEQ ID NO: 1482470
gauuccagaaaggaccucc

SEQ ID NO: 1482472 - RNA, 19 nt, Artificial Sequence
  Description of Artificial Sequence: Synthetic oligonucleotide
  Sense strand starting at position 2960 of SEQ ID NO: 1244357
gaccuuggcuguccugaga

SEQ ID NO: 1482473 - RNA, 19 nt, Artificial Sequence
  Description of Artificial Sequence: Synthetic oligonucleotide
  Antisense strand to SEQ ID NO: 1482472
ucucaggacagccaagguc

SEQ ID NO: 1482474 - RNA, 19 nt, Artificial Sequence
  Description of Artificial Sequence: Synthetic oligonucleotide
  Sense strand starting at position 3162 of SEQ ID NO: 1244357
uucugcuggccuugaauau

SEQ ID NO: 1482475 - RNA, 19 nt, Artificial Sequence
  Description of Artificial Sequence: Synthetic oligonucleotide
  Antisense strand to SEQ ID NO: 1482474
auauucaaggccagcagaa

SEQ ID NO: 1482476 - RNA, 19 nt, Artificial Sequence
  Description of Artificial Sequence: Synthetic oligonucleotide
  Sense strand starting at position 3193 of SEQ ID NO: 1244357
aggacauucucauugcuca

SEQ ID NO: 1482477 - RNA, 19 nt, Artificial Sequence
  Description of Artificial Sequence: Synthetic oligonucleotide
  Antisense strand to SEQ ID NO: 1482476
ugagcaaugagaauguccu

SEQ ID NO: 1482478 - RNA, 19 nt, Artificial Sequence
  Description of Artificial Sequence: Synthetic oligonucleotide
  Sense strand starting at position 3220 of SEQ ID NO: 1244357
uggcgcugccuuugggaau

SEQ ID NO: 1482479 - RNA, 19 nt, Artificial Sequence
  Description of Artificial Sequence: Synthetic oligonucleotide
  Antisense strand to SEQ ID NO: 1482478
auucccaaaggcagcgcca

SEQ ID NO: 1482480 - RNA, 19 nt, Artificial Sequence
  Description of Artificial Sequence: Synthetic oligonucleotide
  Sense strand starting at position 3223 of SEQ ID NO: 1244357
cgcugccuuugggaaugaa

SEQ ID NO: 1482481 - RNA, 19 nt, Artificial Sequence
  Description of Artificial Sequence: Synthetic oligonucleotide
  Antisense strand to SEQ ID NO: 1482480
uucauucccaaaggcagcg

SEQ ID NO: 1482482 - RNA, 19 nt, Artificial Sequence
  Description of Artificial Sequence: Synthetic oligonucleotide
  Sense strand starting at position 3226 of SEQ ID NO: 1244357
ugccuuugggaaugaaguu

SEQ ID NO: 1482483 - RNA, 19 nt, Artificial Sequence
  Description of Artificial Sequence: Synthetic oligonucleotide
  Antisense strand to SEQ ID NO: 1482482
aacuucauucccaaaggca

SEQ ID NO: 1482484 - RNA, 19 nt, Artificial Sequence
  Description of Artificial Sequence: Synthetic oligonucleotide
  Sense strand starting at position 3269 of SEQ ID NO: 1244357
ggcugucugcugcauuuga

SEQ ID NO: 1482485 - RNA, 19 nt, Artificial Sequence
  Description of Artificial Sequence: Synthetic oligonucleotide
  Antisense strand to SEQ ID NO: 1482484
ucaaaugcagcagacagcc

SEQ ID NO: 1482486 - RNA, 19 nt, Artificial Sequence
  Description of Artificial Sequence: Synthetic oligonucleotide
  Sense strand starting at position 3434 of SEQ ID NO: 1244357
gggugaacccaugaggcau

SEQ ID NO: 1482487 - RNA, 19 nt, Artificial Sequence
  Description of Artificial Sequence: Synthetic oligonucleotide
  Antisense strand to SEQ ID NO: 1482486
augccucauggguucaccc

SEQ ID NO: 1482488 - RNA, 19 nt, Artificial Sequence
  Description of Artificial Sequence: Synthetic oligonucleotide
  Sense strand starting at position 3523 of SEQ ID NO: 1244357
cauagaaaggcaugugaca

SEQ ID NO: 1482489 - RNA, 19 nt, Artificial Sequence
  Description of Artificial Sequence: Synthetic oligonucleotide
  Antisense strand to SEQ ID NO: 1482488
ugucacaugccuuucuaug

SEQ ID NO: 1482490 - RNA, 19 nt, Artificial Sequence
  Description of Artificial Sequence: Synthetic oligonucleotide
  Sense strand starting at position 3528 of SEQ ID NO: 1244357
aaaggcaugugacaagaaa

SEQ ID NO: 1482491 - RNA, 19 nt, Artificial Sequence
  Description of Artificial Sequence: Synthetic oligonucleotide
  Antisense strand to SEQ ID NO: 1482490
uuucuugucacaugccuuu

SEQ ID NO: 1482492 - RNA, 19 nt, Artificial Sequence
  Description of Artificial Sequence: Synthetic oligonucleotide
  Sense strand starting at position 195 of SEQ ID NO: 1244358
auugcaugaacaugaguga

SEQ ID NO: 1482493 - RNA, 19 nt, Artificial Sequence
  Description of Artificial Sequence: Synthetic oligonucleotide
  Antisense strand to SEQ ID NO: 1482492
ucacucauguucaugcaau

SEQ ID NO: 1482494 - RNA, 19 nt, Artificial Sequence
  Description of Artificial Sequence: Synthetic oligonucleotide
  Sense strand starting at position 252 of SEQ ID NO: 1244358
gcacgaucucguuggagac

SEQ ID NO: 1482495 - RNA, 19 nt, Artificial Sequence
  Description of Artificial Sequence: Synthetic oligonucleotide
  Antisense strand to SEQ ID NO: 1482494
gucuccaacgagaucgugc

SEQ ID NO: 1482496 - RNA, 19 nt, Artificial Sequence
  Description of Artificial Sequence: Synthetic oligonucleotide
  Sense strand starting at position 666 of SEQ ID NO: 1244358
ccgcuugacuuggacaaca

SEQ ID NO: 1482497 - RNA, 19 nt, Artificial Sequence
  Description of Artificial Sequence: Synthetic oligonucleotide
  Antisense strand to SEQ ID NO: 1482496
uguuguccaagucaagcgg

SEQ ID NO: 1482498 - RNA, 19 nt, Artificial Sequence
  Description of Artificial Sequence: Synthetic oligonucleotide
  Sense strand starting at position 883 of SEQ ID NO: 1244358
gggugugaugggcaacagu

SEQ ID NO: 1482499 - RNA, 19 nt, Artificial Sequence
  Description of Artificial Sequence: Synthetic oligonucleotide
  Antisense strand to SEQ ID NO: 1482498
acuguugcccaucacaccc

SEQ ID NO: 1482500 - RNA, 19 nt, Artificial Sequence
  Description of Artificial Sequence: Synthetic oligonucleotide
  Sense strand starting at position 1014 of SEQ ID NO: 1244358
ggcugcuugaaguaggaua

SEQ ID NO: 1482501 - RNA, 19 nt, Artificial Sequence
  Description of Artificial Sequence: Synthetic oligonucleotide
  Antisense strand to SEQ ID NO: 1482500
uauccuacuucaagcagcc

SEQ ID NO: 1482502 - RNA, 19 nt, Artificial Sequence
  Description of Artificial Sequence: Synthetic oligonucleotide
  Sense strand starting at position 1072 of SEQ ID NO: 1244358
gcuugaugcugcuuggaga

SEQ ID NO: 1482503 - RNA, 19 nt, Artificial Sequence
  Description of Artificial Sequence: Synthetic oligonucleotide
  Antisense strand to SEQ ID NO: 1482502
ucuccaagcagcaucaagc

SEQ ID NO: 1482504 - RNA, 19 nt, Artificial Sequence
  Description of Artificial Sequence: Synthetic oligonucleotide
  Sense strand starting at position 1073 of SEQ ID NO: 1244358
cuugaugcugcuuggagaa

SEQ ID NO: 1482505 - RNA, 19 nt, Artificial Sequence
  Description of Artificial Sequence: Synthetic oligonucleotide
  Antisense strand to SEQ ID NO: 1482504
uucuccaagcagcaucaag

SEQ ID NO: 1482506 - RNA, 19 nt, Artificial Sequence
  Description of Artificial Sequence: Synthetic oligonucleotide
  Sense strand starting at position 1365 of SEQ ID NO: 1244358
gccugcugcuucucugaaa

SEQ ID NO: 1482507 - RNA, 19 nt, Artificial Sequence
  Description of Artificial Sequence: Synthetic oligonucleotide
  Antisense strand to SEQ ID NO: 1482506
uuucagagaagcagcaggc

SEQ ID NO: 1482508 - RNA, 19 nt, Artificial Sequence
  Description of Artificial Sequence: Synthetic oligonucleotide
  Sense strand starting at position 1590 of SEQ ID NO: 1244358
gaaggccugcucugagaaa

SEQ ID NO: 1482509 - RNA, 19 nt, Artificial Sequence
  Description of Artificial Sequence: Synthetic oligonucleotide
  Antisense strand to SEQ ID NO: 1482508
uuucucagagcaggccuuc

SEQ ID NO: 1482510 - RNA, 19 nt, Artificial Sequence
  Description of Artificial Sequence: Synthetic oligonucleotide
  Sense strand starting at position 1659 of SEQ ID NO: 1244358
ggaacuguuaccuggagca

SEQ ID NO: 1482511 - RNA, 19 nt, Artificial Sequence
  Description of Artificial Sequence: Synthetic oligonucleotide
  Antisense strand to SEQ ID NO: 1482510
ugcuccagguaacaguucc

SEQ ID NO: 1482512 - RNA, 19 nt, Artificial Sequence
  Description of Artificial Sequence: Synthetic oligonucleotide
  Sense strand starting at position 1787 of SEQ ID NO: 1244358
ccaugcaucugagagaaga

SEQ ID NO: 1482513 - RNA, 19 nt, Artificial Sequence
  Description of Artificial Sequence: Synthetic oligonucleotide
  Antisense strand to SEQ ID NO: 1482512
ucuucucucagaugcaugg

SEQ ID NO: 1482514 - RNA, 19 nt, Artificial Sequence
  Description of Artificial Sequence: Synthetic oligonucleotide
  Sense strand starting at position 1871 of SEQ ID NO: 1244358
cucagagggcccugucuau

SEQ ID NO: 1482515 - RNA, 19 nt, Artificial Sequence
  Description of Artificial Sequence: Synthetic oligonucleotide
  Antisense strand to SEQ ID NO: 1482514
auagacagggcccucugag

SEQ ID NO: 1482516 - RNA, 19 nt, Artificial Sequence
  Description of Artificial Sequence: Synthetic oligonucleotide
  Sense strand starting at position 1877 of SEQ ID NO: 1244358
gggcccugucuauggauaa

SEQ ID NO: 1482517 - RNA, 19 nt, Artificial Sequence
  Description of Artificial Sequence: Synthetic oligonucleotide
  Antisense strand to SEQ ID NO: 1482516
uuauccauagacagggccc

SEQ ID NO: 1482518 - RNA, 19 nt, Artificial Sequence
  Description of Artificial Sequence: Synthetic oligonucleotide
  Sense strand starting at position 1897 of SEQ ID NO: 1244358
gccagaccuccuugaggga

SEQ ID NO: 1482519 - RNA, 19 nt, Artificial Sequence
  Description of Artificial Sequence: Synthetic oligonucleotide
  Antisense strand to SEQ ID NO: 1482518
ucccucaaggaggucuggc

SEQ ID NO: 1482520 - RNA, 19 nt, Artificial Sequence
  Description of Artificial Sequence: Synthetic oligonucleotide
  Sense strand starting at position 2065 of SEQ ID NO: 1244358
aggucugauccuggagacu

SEQ ID NO: 1482521 - RNA, 19 nt, Artificial Sequence
  Description of Artificial Sequence: Synthetic oligonucleotide
  Antisense strand to SEQ ID NO: 1482520
agucuccaggaucagaccu

SEQ ID NO: 1482522 - RNA, 19 nt, Artificial Sequence
  Description of Artificial Sequence: Synthetic oligonucleotide
  Sense strand starting at position 2206 of SEQ ID NO: 1244358
gacguuaucuugcucuguu

SEQ ID NO: 1482523 - RNA, 19 nt, Artificial Sequence
  Description of Artificial Sequence: Synthetic oligonucleotide
  Antisense strand to SEQ ID NO: 1482522
aacagagcaagauaacguc

SEQ ID NO: 1482524 - RNA, 19 nt, Artificial Sequence
  Description of Artificial Sequence: Synthetic oligonucleotide
  Sense strand starting at position 2231 of SEQ ID NO: 1244358
gcugaugugcaaugguuca

SEQ ID NO: 1482525 - RNA, 19 nt, Artificial Sequence
  Description of Artificial Sequence: Synthetic oligonucleotide
  Antisense strand to SEQ ID NO: 1482524
ugaaccauugcacaucagc

SEQ ID NO: 1482526 - RNA, 19 nt, Artificial Sequence
  Description of Artificial Sequence: Synthetic oligonucleotide
  Sense strand starting at position 2541 of SEQ ID NO: 1244358
gcacuaccagcccaagauu

SEQ ID NO: 1482527 - RNA, 19 nt, Artificial Sequence
  Description of Artificial Sequence: Synthetic oligonucleotide
  Antisense strand to SEQ ID NO: 1482526
aaucuugggcugguagugc

SEQ ID NO: 1482528 - RNA, 19 nt, Artificial Sequence
  Description of Artificial Sequence: Synthetic oligonucleotide
  Sense strand starting at position 2567 of SEQ ID NO: 1244358
ucaccauugugugccuaua

SEQ ID NO: 1482529 - RNA, 19 nt, Artificial Sequence
  Description of Artificial Sequence: Synthetic oligonucleotide
  Antisense strand to SEQ ID NO: 1482528
uauaggcacacaaugguga

SEQ ID NO: 1482530 - RNA, 19 nt, Artificial Sequence
  Description of Artificial Sequence: Synthetic oligonucleotide
  Sense strand starting at position 2623 of SEQ ID NO: 1244358
cucugaaauucugguuaca

SEQ ID NO: 1482531 - RNA, 19 nt, Artificial Sequence
  Description of Artificial Sequence: Synthetic oligonucleotide
  Antisense strand to SEQ ID NO: 1482530
uguaaccagaauuucagag

SEQ ID NO: 1482532 - RNA, 19 nt, Artificial Sequence
  Description of Artificial Sequence: Synthetic oligonucleotide
  Sense strand starting at position 2625 of SEQ ID NO: 1244358
cugaaauucugguuacacu

SEQ ID NO: 1482533 - RNA, 19 nt, Artificial Sequence
  Description of Artificial Sequence: Synthetic oligonucleotide
  Antisense strand to SEQ ID NO: 1482532
aguguaaccagaauuucag

SEQ ID NO: 1482534 - RNA, 19 nt, Artificial Sequence
  Description of Artificial Sequence: Synthetic oligonucleotide
  Sense strand starting at position 2634 of SEQ ID NO: 1244358
ugguuacacugguuaucca

SEQ ID NO: 1482535 - RNA, 19 nt, Artificial Sequence
  Description of Artificial Sequence: Synthetic oligonucleotide
  Antisense strand to SEQ ID NO: 1482534
uggauaaccaguguaacca

SEQ ID NO: 1482536 - RNA, 19 nt, Artificial Sequence
  Description of Artificial Sequence: Synthetic oligonucleotide
  Sense strand starting at position 2647 of SEQ ID NO: 1244358
uauccaggguuccuuugaa

SEQ ID NO: 1482537 - RNA, 19 nt, Artificial Sequence
  Description of Artificial Sequence: Synthetic oligonucleotide
  Antisense strand to SEQ ID NO: 1482536
uucaaaggaacccuggaua

SEQ ID NO: 1482538 - RNA, 19 nt, Artificial Sequence
  Description of Artificial Sequence: Synthetic oligonucleotide
  Sense strand starting at position 2651 of SEQ ID NO: 1244358
caggguuccuuugaaagga

SEQ ID NO: 1482539 - RNA, 19 nt, Artificial Sequence
  Description of Artificial Sequence: Synthetic oligonucleotide
  Antisense strand to SEQ ID NO: 1482538
uccuuucaaaggaacccug

SEQ ID NO: 1482540 - RNA, 19 nt, Artificial Sequence
  Description of Artificial Sequence: Synthetic oligonucleotide
  Sense strand starting at position 2864 of SEQ ID NO: 1244358
aggaaaucuggcuggagac

SEQ ID NO: 1482541 - RNA, 19 nt, Artificial Sequence
  Description of Artificial Sequence: Synthetic oligonucleotide
  Antisense strand to SEQ ID NO: 1482540
gucuccagccagauuuccu

SEQ ID NO: 1482542 - RNA, 19 nt, Artificial Sequence
  Description of Artificial Sequence: Synthetic oligonucleotide
  Sense strand starting at position 3015 of SEQ ID NO: 1244358
accaucugcuccuggauuu

SEQ ID NO: 1482543 - RNA, 19 nt, Artificial Sequence
  Description of Artificial Sequence: Synthetic oligonucleotide
  Antisense strand to SEQ ID NO: 1482542
aaauccaggagcagauggu

SEQ ID NO: 1482544 - RNA, 19 nt, Artificial Sequence
  Description of Artificial Sequence: Synthetic oligonucleotide
  Sense strand starting at position 3049 of SEQ ID NO: 1244358
agcagaacugguugugguu

SEQ ID NO: 1482545 - RNA, 19 nt, Artificial Sequence
  Description of Artificial Sequence: Synthetic oligonucleotide
  Antisense strand to SEQ ID NO: 1482544
aaccacaaccaguucugcu

SEQ ID NO: 1482546 - RNA, 19 nt, Artificial Sequence
  Description of Artificial Sequence: Synthetic oligonucleotide
  Sense strand starting at position 3055 of SEQ ID NO: 1244358
acugguugugguuagugau

SEQ ID NO: 1482547 - RNA, 19 nt, Artificial Sequence
  Description of Artificial Sequence: Synthetic oligonucleotide
  Antisense strand to SEQ ID NO: 1482546
aucacuaaccacaaccagu

SEQ ID NO: 1482548 - RNA, 19 nt, Artificial Sequence
  Description of Artificial Sequence: Synthetic oligonucleotide
  Sense strand starting at position 3056 of SEQ ID NO: 1244358
cugguugugguuagugauc

SEQ ID NO: 1482549 - RNA, 19 nt, Artificial Sequence
  Description of Artificial Sequence: Synthetic oligonucleotide
  Antisense strand to SEQ ID NO: 1482548
gaucacuaaccacaaccag

SEQ ID NO: 1482550 - RNA, 19 nt, Artificial Sequence
  Description of Artificial Sequence: Synthetic oligonucleotide
  Sense strand starting at position 3061 of SEQ ID NO: 1244358
ugugguuagugaucaguua

SEQ ID NO: 1482551 - RNA, 19 nt, Artificial Sequence
  Description of Artificial Sequence: Synthetic oligonucleotide
  Antisense strand to SEQ ID NO: 1482550
uaacugaucacuaaccaca

SEQ ID NO: 1482552 - RNA, 19 nt, Artificial Sequence
  Description of Artificial Sequence: Synthetic oligonucleotide
  Sense strand starting at position 3070 of SEQ ID NO: 1244358
ugaucaguuaggugaugca

SEQ ID NO: 1482553 - RNA, 19 nt, Artificial Sequence
  Description of Artificial Sequence: Synthetic oligonucleotide
  Antisense strand to SEQ ID NO: 1482552
ugcaucaccuaacugauca

SEQ ID NO: 1482554 - RNA, 19 nt, Artificial Sequence
  Description of Artificial Sequence: Synthetic oligonucleotide
  Sense strand starting at position 3122 of SEQ ID NO: 1244358
uugggaggacuuggguuaa

SEQ ID NO: 1482555 - RNA, 19 nt, Artificial Sequence
  Description of Artificial Sequence: Synthetic oligonucleotide
  Antisense strand to SEQ ID NO: 1482554
uuaacccaaguccucccaa

SEQ ID NO: 1482556 - RNA, 19 nt, Artificial Sequence
  Description of Artificial Sequence: Synthetic oligonucleotide
  Sense strand starting at position 3167 of SEQ ID NO: 1244358
gaggauauuucuugcuuga

SEQ ID NO: 1482557 - RNA, 19 nt, Artificial Sequence
  Description of Artificial Sequence: Synthetic oligonucleotide
  Antisense strand to SEQ ID NO: 1482556
ucaagcaagaaauauccuc

SEQ ID NO: 1482558 - RNA, 19 nt, Artificial Sequence
  Description of Artificial Sequence: Synthetic oligonucleotide
  Sense strand starting at position 3204 of SEQ ID NO: 1244358
ccaccaaucucagcaggaa

SEQ ID NO: 1482559 - RNA, 19 nt, Artificial Sequence
  Description of Artificial Sequence: Synthetic oligonucleotide
  Antisense strand to SEQ ID NO: 1482558
uuccugcugagauuggugg

SEQ ID NO: 1482560 - RNA, 19 nt, Artificial Sequence
  Description of Artificial Sequence: Synthetic oligonucleotide
  Sense strand starting at position 3641 of SEQ ID NO: 1244358
ggcccacucuugucuucua

SEQ ID NO: 1482561 - RNA, 19 nt, Artificial Sequence
  Description of Artificial Sequence: Synthetic oligonucleotide
  Antisense strand to SEQ ID NO: 1482560
uagaagacaagagugggcc

SEQ ID NO: 1482562 - RNA, 19 nt, Artificial Sequence
  Description of Artificial Sequence: Synthetic oligonucleotide
  Sense strand starting at position 3705 of SEQ ID NO: 1244358
agaauaucuucccagugug

SEQ ID NO: 1482563 - RNA, 19 nt, Artificial Sequence
  Description of Artificial Sequence: Synthetic oligonucleotide
  Antisense strand to SEQ ID NO: 1482562
cacacugggaagauauucu

SEQ ID NO: 1482564 - RNA, 19 nt, Artificial Sequence
  Description of Artificial Sequence: Synthetic oligonucleotide
  Sense strand starting at position 3800 of SEQ ID NO: 1244358
ucgaguggcucuuugugaa

SEQ ID NO: 1482565 - RNA, 19 nt, Artificial Sequence
  Description of Artificial Sequence: Synthetic oligonucleotide
  Antisense strand to SEQ ID NO: 1482564
uucacaaagagccacucga

SEQ ID NO: 1482566 - RNA, 19 nt, Artificial Sequence
  Description of Artificial Sequence: Synthetic oligonucleotide
  Sense strand starting at position 3895 of SEQ ID NO: 1244358
guuugagaacacgaguaug

SEQ ID NO: 1482567 - RNA, 19 nt, Artificial Sequence
  Description of Artificial Sequence: Synthetic oligonucleotide
  Antisense strand to SEQ ID NO: 1482566
cauacucguguucucaaac

SEQ ID NO: 1482568 - RNA, 19 nt, Artificial Sequence
  Description of Artificial Sequence: Synthetic oligonucleotide
  Sense strand starting at position 3898 of SEQ ID NO: 1244358
ugagaacacgaguaugcaa

SEQ ID NO: 1482569 - RNA, 19 nt, Artificial Sequence
  Description of Artificial Sequence: Synthetic oligonucleotide
  Antisense strand to SEQ ID NO: 1482568
uugcauacucguguucuca

SEQ ID NO: 1482570 - RNA, 19 nt, Artificial Sequence
  Description of Artificial Sequence: Synthetic oligonucleotide
  Sense strand starting at position 3950 of SEQ ID NO: 1244358
gugagauuguggguacuuu

SEQ ID NO: 1482571 - RNA, 19 nt, Artificial Sequence
  Description of Artificial Sequence: Synthetic oligonucleotide
  Antisense strand to SEQ ID NO: 1482570
aaaguacccacaaucucac

SEQ ID NO: 1482572 - RNA, 19 nt, Artificial Sequence
  Description of Artificial Sequence: Synthetic oligonucleotide
  Sense strand starting at position 146 of SEQ ID NO: 1244359
ccacccaucuuggcuuaga

SEQ ID NO: 1482573 - RNA, 19 nt, Artificial Sequence
  Description of Artificial Sequence: Synthetic oligonucleotide
  Antisense strand to SEQ ID NO: 1482572
ucuaagccaagaugggugg

SEQ ID NO: 1482574 - RNA, 19 nt, Artificial Sequence
  Description of Artificial Sequence: Synthetic oligonucleotide
  Sense strand starting at position 319 of SEQ ID NO: 1244359
gguggauauccggauucca

SEQ ID NO: 1482575 - RNA, 19 nt, Artificial Sequence
  Description of Artificial Sequence: Synthetic oligonucleotide
  Antisense strand to SEQ ID NO: 1482574
uggaauccggauauccacc

SEQ ID NO: 1482576 - RNA, 19 nt, Artificial Sequence
  Description of Artificial Sequence: Synthetic oligonucleotide
  Sense strand starting at position 363 of SEQ ID NO: 1244359
gaggaaaugucuuccugaa

SEQ ID NO: 1482577 - RNA, 19 nt, Artificial Sequence
  Description of Artificial Sequence: Synthetic oligonucleotide
  Antisense strand to SEQ ID NO: 1482576
uucaggaagacauuuccuc

SEQ ID NO: 1482578 - RNA, 19 nt, Artificial Sequence
  Description of Artificial Sequence: Synthetic oligonucleotide
  Sense strand starting at position 365 of SEQ ID NO: 1244359
ggaaaugucuuccugaaag

SEQ ID NO: 1482579 - RNA, 19 nt, Artificial Sequence
  Description of Artificial Sequence: Synthetic oligonucleotide
  Antisense strand to SEQ ID NO: 1482578
cuuucaggaagacauuucc

SEQ ID NO: 1482580 - RNA, 19 nt, Artificial Sequence
  Description of Artificial Sequence: Synthetic oligonucleotide
  Sense strand starting at position 659 of SEQ ID NO: 1244359
uccaguugcccugaacaaa

SEQ ID NO: 1482581 - RNA, 19 nt, Artificial Sequence
  Description of Artificial Sequence: Synthetic oligonucleotide
  Antisense strand to SEQ ID NO: 1482580
uuuguucagggcaacugga

SEQ ID NO: 1482582 - RNA, 19 nt, Artificial Sequence
  Description of Artificial Sequence: Synthetic oligonucleotide
  Sense strand starting at position 678 of SEQ ID NO: 1244359
augugagagucaucccuuu

SEQ ID NO: 1482583 - RNA, 19 nt, Artificial Sequence
  Description of Artificial Sequence: Synthetic oligonucleotide
  Antisense strand to SEQ ID NO: 1482582
aaagggaugacucucacau

SEQ ID NO: 1482584 - RNA, 19 nt, Artificial Sequence
  Description of Artificial Sequence: Synthetic oligonucleotide
  Sense strand starting at position 1031 of SEQ ID NO: 1244359
ucuggaaacuugcuuggaa

SEQ ID NO: 1482585 - RNA, 19 nt, Artificial Sequence
  Description of Artificial Sequence: Synthetic oligonucleotide
  Antisense strand to SEQ ID NO: 1482584
uuccaagcaaguuuccaga

SEQ ID NO: 1482586 - RNA, 19 nt, Artificial Sequence
  Description of Artificial Sequence: Synthetic oligonucleotide
  Sense strand starting at position 1032 of SEQ ID NO: 1244359
cuggaaacuugcuuggaaa

SEQ ID NO: 1482587 - RNA, 19 nt, Artificial Sequence
  Description of Artificial Sequence: Synthetic oligonucleotide
  Antisense strand to SEQ ID NO: 1482586
uuuccaagcaaguuuccag

SEQ ID NO: 1482588 - RNA, 19 nt, Artificial Sequence
  Description of Artificial Sequence: Synthetic oligonucleotide
  Sense strand starting at position 1034 of SEQ ID NO: 1244359
ggaaacuugcuuggaaauc

SEQ ID NO: 1482589 - RNA, 19 nt, Artificial Sequence
  Description of Artificial Sequence: Synthetic oligonucleotide
  Antisense strand to SEQ ID NO: 1482588
gauuuccaagcaaguuucc

SEQ ID NO: 1482590 - RNA, 19 nt, Artificial Sequence
  Description of Artificial Sequence: Synthetic oligonucleotide
  Sense strand starting at position 1059 of SEQ ID NO: 1244359
augggaaucuaucccgaaa

SEQ ID NO: 1482591 - RNA, 19 nt, Artificial Sequence
  Description of Artificial Sequence: Synthetic oligonucleotide
  Antisense strand to SEQ ID NO: 1482590
uuucgggauagauucccau

SEQ ID NO: 1482592 - RNA, 19 nt, Artificial Sequence
  Description of Artificial Sequence: Synthetic oligonucleotide
  Sense strand starting at position 1062 of SEQ ID NO: 1244359
ggaaucuaucccgaaagca

SEQ ID NO: 1482593 - RNA, 19 nt, Artificial Sequence
  Description of Artificial Sequence: Synthetic oligonucleotide
  Antisense strand to SEQ ID NO: 1482592
ugcuuucgggauagauucc

SEQ ID NO: 1482594 - RNA, 19 nt, Artificial Sequence
  Description of Artificial Sequence: Synthetic oligonucleotide
  Sense strand starting at position 1118 of SEQ ID NO: 1244359
cugaguuccaaggguauaa

SEQ ID NO: 1482595 - RNA, 19 nt, Artificial Sequence
  Description of Artificial Sequence: Synthetic oligonucleotide
  Antisense strand to SEQ ID NO: 1482594
uuauacccuuggaacucag

SEQ ID NO: 1482596 - RNA, 19 nt, Artificial Sequence
  Description of Artificial Sequence: Synthetic oligonucleotide
  Sense strand starting at position 1120 of SEQ ID NO: 1244359
gaguuccaaggguauaagu

SEQ ID NO: 1482597 - RNA, 19 nt, Artificial Sequence
  Description of Artificial Sequence: Synthetic oligonucleotide
  Antisense strand to SEQ ID NO: 1482596
acuuauacccuuggaacuc

SEQ ID NO: 1482598 - RNA, 19 nt, Artificial Sequence
  Description of Artificial Sequence: Synthetic oligonucleotide
  Sense strand starting at position 1122 of SEQ ID NO: 1244359
guuccaaggguauaaguuu

SEQ ID NO: 1482599 - RNA, 19 nt, Artificial Sequence
  Description of Artificial Sequence: Synthetic oligonucleotide
  Antisense strand to SEQ ID NO: 1482598
aaacuuauacccuuggaac

SEQ ID NO: 1482600 - RNA, 19 nt, Artificial Sequence
  Description of Artificial Sequence: Synthetic oligonucleotide
  Sense strand starting at position 1128 of SEQ ID NO: 1244359
aggguauaaguuuggauau

SEQ ID NO: 1482601 - RNA, 19 nt, Artificial Sequence
  Description of Artificial Sequence: Synthetic oligonucleotide
  Antisense strand to SEQ ID NO: 1482600
auauccaaacuuauacccu

SEQ ID NO: 1482602 - RNA, 19 nt, Artificial Sequence
  Description of Artificial Sequence: Synthetic oligonucleotide
  Sense strand starting at position 1239 of SEQ ID NO: 1244359
auagcuuugacaggaauug

SEQ ID NO: 1482603 - RNA, 19 nt, Artificial Sequence
  Description of Artificial Sequence: Synthetic oligonucleotide
  Antisense strand to SEQ ID NO: 1482602
caauuccugucaaagcuau

SEQ ID NO: 1482604 - RNA, 19 nt, Artificial Sequence
  Description of Artificial Sequence: Synthetic oligonucleotide
  Sense strand starting at position 1259 of SEQ ID NO: 1244359
aggcuuuggucucuaaaca

SEQ ID NO: 1482605 - RNA, 19 nt, Artificial Sequence
  Description of Artificial Sequence: Synthetic oligonucleotide
  Antisense strand to SEQ ID NO: 1482604
uguuuagagaccaaagccu

SEQ ID NO: 1482606 - RNA, 19 nt, Artificial Sequence
  Description of Artificial Sequence: Synthetic oligonucleotide
  Sense strand starting at position 1260 of SEQ ID NO: 1244359
ggcuuuggucucuaaacaa

SEQ ID NO: 1482607 - RNA, 19 nt, Artificial Sequence
  Description of Artificial Sequence: Synthetic oligonucleotide
  Antisense strand to SEQ ID NO: 1482606
uuguuuagagaccaaagcc

SEQ ID NO: 1482608 - RNA, 19 nt, Artificial Sequence
  Description of Artificial Sequence: Synthetic oligonucleotide
  Sense strand starting at position 1729 of SEQ ID NO: 1244359
ccaccucugggcuggaaau

SEQ ID NO: 1482609 - RNA, 19 nt, Artificial Sequence
  Description of Artificial Sequence: Synthetic oligonucleotide
  Antisense strand to SEQ ID NO: 1482608
auuuccagcccagaggugg

SEQ ID NO: 1482610 - RNA, 19 nt, Artificial Sequence
  Description of Artificial Sequence: Synthetic oligonucleotide
  Sense strand starting at position 1747 of SEQ ID NO: 1244359
ucacucagcuauuuguauu

SEQ ID NO: 1482611 - RNA, 19 nt, Artificial Sequence
  Description of Artificial Sequence: Synthetic oligonucleotide
  Antisense strand to SEQ ID NO: 1482610
aauacaaauagcugaguga

SEQ ID NO: 1482612 - RNA, 19 nt, Artificial Sequence
  Description of Artificial Sequence: Synthetic oligonucleotide
  Sense strand starting at position 1955 of SEQ ID NO: 1244359
gcauucgucggucaacaag

SEQ ID NO: 1482613 - RNA, 19 nt, Artificial Sequence
  Description of Artificial Sequence: Synthetic oligonucleotide
  Antisense strand to SEQ ID NO: 1482612
cuuguugaccgacgaaugc

SEQ ID NO: 1482614 - RNA, 19 nt, Artificial Sequence
  Description of Artificial Sequence: Synthetic oligonucleotide
  Sense strand starting at position 2069 of SEQ ID NO: 1244359
gcaguuacagaaugagaag

SEQ ID NO: 1482615 - RNA, 19 nt, Artificial Sequence
  Description of Artificial Sequence: Synthetic oligonucleotide
  Antisense strand to SEQ ID NO: 1482614
cuucucauucuguaacugc

SEQ ID NO: 1482616 - RNA, 19 nt, Artificial Sequence
  Description of Artificial Sequence: Synthetic oligonucleotide
  Sense strand starting at position 2086 of SEQ ID NO: 1244359
agaaacauuuauugaugca

SEQ ID NO: 1482617 - RNA, 19 nt, Artificial Sequence
  Description of Artificial Sequence: Synthetic oligonucleotide
  Antisense strand to SEQ ID NO: 1482616
ugcaucaauaaauguuucu

SEQ ID NO: 1482618 - RNA, 19 nt, Artificial Sequence
  Description of Artificial Sequence: Synthetic oligonucleotide
  Sense strand starting at position 2147 of SEQ ID NO: 1244359
cugugauacugagauaagg

SEQ ID NO: 1482619 - RNA, 19 nt, Artificial Sequence
  Description of Artificial Sequence: Synthetic oligonucleotide
  Antisense strand to SEQ ID NO: 1482618
ccuuaucucaguaucacag

SEQ ID NO: 1482620 - RNA, 19 nt, Artificial Sequence
  Description of Artificial Sequence: Synthetic oligonucleotide
  Sense strand starting at position 2202 of SEQ ID NO: 1244359
gucggaaaggaguguguua

SEQ ID NO: 1482621 - RNA, 19 nt, Artificial Sequence
  Description of Artificial Sequence: Synthetic oligonucleotide
  Antisense strand to SEQ ID NO: 1482620
uaacacacuccuuuccgac

SEQ ID NO: 1482622 - RNA, 19 nt, Artificial Sequence
  Description of Artificial Sequence: Synthetic oligonucleotide
  Sense strand starting at position 2204 of SEQ ID NO: 1244359
cggaaaggaguguguuaca

SEQ ID NO: 1482623 - RNA, 19 nt, Artificial Sequence
  Description of Artificial Sequence: Synthetic oligonucleotide
  Antisense strand to SEQ ID NO: 1482622
uguaacacacuccuuuccg

SEQ ID NO: 1482624 - RNA, 19 nt, Artificial Sequence
  Description of Artificial Sequence: Synthetic oligonucleotide
  Sense strand starting at position 2213 of SEQ ID NO: 1244359
guguguuacauagauacaa

SEQ ID NO: 1482625 - RNA, 19 nt, Artificial Sequence
  Description of Artificial Sequence: Synthetic oligonucleotide
  Antisense strand to SEQ ID NO: 1482624
uuguaucuauguaacacac

SEQ ID NO: 1482626 - RNA, 19 nt, Artificial Sequence
  Description of Artificial Sequence: Synthetic oligonucleotide
  Sense strand starting at position 2315 of SEQ ID NO: 1244359
aaugguuggcaauggagua

SEQ ID NO: 1482627 - RNA, 19 nt, Artificial Sequence
  Description of Artificial Sequence: Synthetic oligonucleotide
  Antisense strand to SEQ ID NO: 1482626
uacuccauugccaaccauu

SEQ ID NO: 1482628 - RNA, 19 nt, Artificial Sequence
  Description of Artificial Sequence: Synthetic oligonucleotide
  Sense strand starting at position 2408 of SEQ ID NO: 1244359
gggaaugaguccuccuucu

SEQ ID NO: 1482629 - RNA, 19 nt, Artificial Sequence
  Description of Artificial Sequence: Synthetic oligonucleotide
  Antisense strand to SEQ ID NO: 1482628
agaaggaggacucauuccc

SEQ ID NO: 1482630 - RNA, 19 nt, Artificial Sequence
  Description of Artificial Sequence: Synthetic oligonucleotide
  Sense strand starting at position 2423 of SEQ ID NO: 1244359
uucucugagguuuguaauu

SEQ ID NO: 1482631 - RNA, 19 nt, Artificial Sequence
  Description of Artificial Sequence: Synthetic oligonucleotide
  Antisense strand to SEQ ID NO: 1482630
aauuacaaaccucagagaa

SEQ ID NO: 1482632 - RNA, 19 nt, Artificial Sequence
  Description of Artificial Sequence: Synthetic oligonucleotide
  Sense strand starting at position 2516 of SEQ ID NO: 1244359
aagguauuccuaugguggu

SEQ ID NO: 1482633 - RNA, 19 nt, Artificial Sequence
  Description of Artificial Sequence: Synthetic oligonucleotide
  Antisense strand to SEQ ID NO: 1482632
accaccauaggaauaccuu

SEQ ID NO: 1482634 - RNA, 19 nt, Artificial Sequence
  Description of Artificial Sequence: Synthetic oligonucleotide
  Sense strand starting at position 2531 of SEQ ID NO: 1244359
ugguguucagcccagaguu

SEQ ID NO: 1482635 - RNA, 19 nt, Artificial Sequence
  Description of Artificial Sequence: Synthetic oligonucleotide
  Antisense strand to SEQ ID NO: 1482634
aacucugggcugaacacca

SEQ ID NO: 1482636 - RNA, 19 nt, Artificial Sequence
  Description of Artificial Sequence: Synthetic oligonucleotide
  Sense strand starting at position 2609 of SEQ ID NO: 1244359
aaggcuuugcacugaguga

SEQ ID NO: 1482637 - RNA, 19 nt, Artificial Sequence
  Description of Artificial Sequence: Synthetic oligonucleotide
  Antisense strand to SEQ ID NO: 1482636
ucacucagugcaaagccuu

SEQ ID NO: 1482638 - RNA, 19 nt, Artificial Sequence
  Description of Artificial Sequence: Synthetic oligonucleotide
  Sense strand starting at position 2610 of SEQ ID NO: 1244359
aggcuuugcacugagugau

SEQ ID NO: 1482639 - RNA, 19 nt, Artificial Sequence
  Description of Artificial Sequence: Synthetic oligonucleotide
  Antisense strand to SEQ ID NO: 1482638
aucacucagugcaaagccu

SEQ ID NO: 1482640 - RNA, 19 nt, Artificial Sequence
  Description of Artificial Sequence: Synthetic oligonucleotide
  Sense strand starting at position 2732 of SEQ ID NO: 1244359
ugccuaguucuggaaaccu

SEQ ID NO: 1482641 - RNA, 19 nt, Artificial Sequence
  Description of Artificial Sequence: Synthetic oligonucleotide
  Antisense strand to SEQ ID NO: 1482640
agguuuccagaacuaggca

SEQ ID NO: 1482642 - RNA, 19 nt, Artificial Sequence
  Description of Artificial Sequence: Synthetic oligonucleotide
  Sense strand starting at position 3526 of SEQ ID NO: 1244359
gcaccaggccaggauuaau

SEQ ID NO: 1482643 - RNA, 19 nt, Artificial Sequence
  Description of Artificial Sequence: Synthetic oligonucleotide
  Antisense strand to SEQ ID NO: 1482642
auuaauccuggccuggugc

SEQ ID NO: 1482644 - RNA, 19 nt, Artificial Sequence
  Description of Artificial Sequence: Synthetic oligonucleotide
  Sense strand starting at position 3630 of SEQ ID NO: 1244359
ggaaaccacuguucuaaag

SEQ ID NO: 1482645 - RNA, 19 nt, Artificial Sequence
  Description of Artificial Sequence: Synthetic oligonucleotide
  Antisense strand to SEQ ID NO: 1482644
cuuuagaacagugguuucc

SEQ ID NO: 1482646 - RNA, 19 nt, Artificial Sequence
  Description of Artificial Sequence: Synthetic oligonucleotide
  Sense strand starting at position 3850 of SEQ ID NO: 1244359
gccugcguucaugucagau

SEQ ID NO: 1482647 - RNA, 19 nt, Artificial Sequence
  Description of Artificial Sequence: Synthetic oligonucleotide
  Antisense strand to SEQ ID NO: 1482646
aucugacaugaacgcaggc

SEQ ID NO: 1482648 - RNA, 19 nt, Artificial Sequence
  Description of Artificial Sequence: Synthetic oligonucleotide
  Sense strand starting at position 3860 of SEQ ID NO: 1244359
augucagauugccuuucua

SEQ ID NO: 1482649 - RNA, 19 nt, Artificial Sequence
  Description of Artificial Sequence: Synthetic oligonucleotide
  Antisense strand to SEQ ID NO: 1482648
uagaaaggcaaucugacau

SEQ ID NO: 1482650 - RNA, 19 nt, Artificial Sequence
  Description of Artificial Sequence: Synthetic oligonucleotide
  Sense strand starting at position 3869 of SEQ ID NO: 1244359
ugccuuucuagagggcaga

SEQ ID NO: 1482651 - RNA, 19 nt, Artificial Sequence
  Description of Artificial Sequence: Synthetic oligonucleotide
  Antisense strand to SEQ ID NO: 1482650
ucugcccucuagaaaggca

SEQ ID NO: 1482652 - RNA, 19 nt, Artificial Sequence
  Description of Artificial Sequence: Synthetic oligonucleotide
  Sense strand starting at position 239 of SEQ ID NO: 1244360
gaggauccuguaugaaauc

SEQ ID NO: 1482653 - RNA, 19 nt, Artificial Sequence
  Description of Artificial Sequence: Synthetic oligonucleotide
  Antisense strand to SEQ ID NO: 1482652
gauuucauacaggauccuc

SEQ ID NO: 1482654 - RNA, 19 nt, Artificial Sequence
  Description of Artificial Sequence: Synthetic oligonucleotide
  Sense strand starting at position 563 of SEQ ID NO: 1244360
gggagagguuucuuccaac

SEQ ID NO: 1482655 - RNA, 19 nt, Artificial Sequence
  Description of Artificial Sequence: Synthetic oligonucleotide
  Antisense strand to SEQ ID NO: 1482654
guuggaagaaaccucuccc

SEQ ID NO: 1482656 - RNA, 19 nt, Artificial Sequence
  Description of Artificial Sequence: Synthetic oligonucleotide
  Sense strand starting at position 727 of SEQ ID NO: 1244360
gcaugcuuggaccaucaga

SEQ ID NO: 1482657 - RNA, 19 nt, Artificial Sequence
  Description of Artificial Sequence: Synthetic oligonucleotide
  Antisense strand to SEQ ID NO: 1482656
ucugaugguccaagcaugc

SEQ ID NO: 1482658 - RNA, 19 nt, Artificial Sequence
  Description of Artificial Sequence: Synthetic oligonucleotide
  Sense strand starting at position 807 of SEQ ID NO: 1244360
gcguguugugagccaucaa

SEQ ID NO: 1482659 - RNA, 19 nt, Artificial Sequence
  Description of Artificial Sequence: Synthetic oligonucleotide
  Antisense strand to SEQ ID NO: 1482658
uugauggcucacaacacgc

SEQ ID NO: 1482660 - RNA, 19 nt, Artificial Sequence
  Description of Artificial Sequence: Synthetic oligonucleotide
  Sense strand starting at position 808 of SEQ ID NO: 1244360
cguguugugagccaucaaa

SEQ ID NO: 1482661 - RNA, 19 nt, Artificial Sequence
  Description of Artificial Sequence: Synthetic oligonucleotide
  Antisense strand to SEQ ID NO: 1482660
uuugauggcucacaacacg

SEQ ID NO: 1482662 - RNA, 19 nt, Artificial Sequence
  Description of Artificial Sequence: Synthetic oligonucleotide
  Sense strand starting at position 1185 of SEQ ID NO: 1244360
acguaaugccgggcuucua

SEQ ID NO: 1482663 - RNA, 19 nt, Artificial Sequence
  Description of Artificial Sequence: Synthetic oligonucleotide
  Antisense strand to SEQ ID NO: 1482662
uagaagcccggcauuacgu

SEQ ID NO: 1482664 - RNA, 19 nt, Artificial Sequence
  Description of Artificial Sequence: Synthetic oligonucleotide
  Sense strand starting at position 1186 of SEQ ID NO: 1244360
cguaaugccgggcuucuaa

SEQ ID NO: 1482665 - RNA, 19 nt, Artificial Sequence
  Description of Artificial Sequence: Synthetic oligonucleotide
  Antisense strand to SEQ ID NO: 1482664
uuagaagcccggcauuacg

SEQ ID NO: 1482666 - RNA, 19 nt, Artificial Sequence
  Description of Artificial Sequence: Synthetic oligonucleotide
  Sense strand starting at position 1433 of SEQ ID NO: 1244360
guuuaaacccagugaauag

SEQ ID NO: 1482667 - RNA, 19 nt, Artificial Sequence
  Description of Artificial Sequence: Synthetic oligonucleotide
  Antisense strand to SEQ ID NO: 1482666
cuauucacuggguuuaaac

SEQ ID NO: 1482668 - RNA, 19 nt, Artificial Sequence
  Description of Artificial Sequence: Synthetic oligonucleotide
  Sense strand starting at position 1460 of SEQ ID NO: 1244360
gugccgugucaggacgaaa

SEQ ID NO: 1482669 - RNA, 19 nt, Artificial Sequence
  Description of Artificial Sequence: Synthetic oligonucleotide
  Antisense strand to SEQ ID NO: 1482668
uuucguccugacacggcac

SEQ ID NO: 1482670 - RNA, 19 nt, Artificial Sequence
  Description of Artificial Sequence: Synthetic oligonucleotide
  Sense strand starting at position 1693 of SEQ ID NO: 1244360
gcacaacucggaggaagua

SEQ ID NO: 1482671 - RNA, 19 nt, Artificial Sequence
  Description of Artificial Sequence: Synthetic oligonucleotide
  Antisense strand to SEQ ID NO: 1482670
uacuuccuccgaguugugc

SEQ ID NO: 1482672 - RNA, 19 nt, Artificial Sequence
  Description of Artificial Sequence: Synthetic oligonucleotide
  Sense strand starting at position 1706 of SEQ ID NO: 1244360
gaaguagucuuucccagca

SEQ ID NO: 1482673 - RNA, 19 nt, Artificial Sequence
  Description of Artificial Sequence: Synthetic oligonucleotide
  Antisense strand to SEQ ID NO: 1482672
ugcugggaaagacuacuuc

SEQ ID NO: 1482674 - RNA, 19 nt, Artificial Sequence
  Description of Artificial Sequence: Synthetic oligonucleotide
  Sense strand starting at position 1742 of SEQ ID NO: 1244360
cagguagugguuugggaga

SEQ ID NO: 1482675 - RNA, 19 nt, Artificial Sequence
  Description of Artificial Sequence: Synthetic oligonucleotide
  Antisense strand to SEQ ID NO: 1482674
ucucccaaaccacuaccug

SEQ ID NO: 1482676 - RNA, 19 nt, Artificial Sequence
  Description of Artificial Sequence: Synthetic oligonucleotide
  Sense strand starting at position 1915 of SEQ ID NO: 1244360
ccacccaucuuggcuuaga

SEQ ID NO: 1482677 - RNA, 19 nt, Artificial Sequence
  Description of Artificial Sequence: Synthetic oligonucleotide
  Antisense strand to SEQ ID NO: 1482676
ucuaagccaagaugggugg

SEQ ID NO: 1482678 - RNA, 19 nt, Artificial Sequence
  Description of Artificial Sequence: Synthetic oligonucleotide
  Sense strand starting at position 2088 of SEQ ID NO: 1244360
gguggauauccggauucca

SEQ ID NO: 1482679 - RNA, 19 nt, Artificial Sequence
  Description of Artificial Sequence: Synthetic oligonucleotide
  Antisense strand to SEQ ID NO: 1482678
uggaauccggauauccacc

SEQ ID NO: 1482680 - RNA, 19 nt, Artificial Sequence
  Description of Artificial Sequence: Synthetic oligonucleotide
  Sense strand starting at position 2132 of SEQ ID NO: 1244360
gaggaaaugucuuccugaa

SEQ ID NO: 1482681 - RNA, 19 nt, Artificial Sequence
  Description of Artificial Sequence: Synthetic oligonucleotide
  Antisense strand to SEQ ID NO: 1482680
uucaggaagacauuuccuc

SEQ ID NO: 1482682 - RNA, 19 nt, Artificial Sequence
  Description of Artificial Sequence: Synthetic oligonucleotide
  Sense strand starting at position 2134 of SEQ ID NO: 1244360
ggaaaugucuuccugaaag

SEQ ID NO: 1482683 - RNA, 19 nt, Artificial Sequence
  Description of Artificial Sequence: Synthetic oligonucleotide
  Antisense strand to SEQ ID NO: 1482682
cuuucaggaagacauuucc

SEQ ID NO: 1482684 - RNA, 19 nt, Artificial Sequence
  Description of Artificial Sequence: Synthetic oligonucleotide
  Sense strand starting at position 2428 of SEQ ID NO: 1244360
uccaguugcccugaacaaa

SEQ ID NO: 1482685 - RNA, 19 nt, Artificial Sequence
  Description of Artificial Sequence: Synthetic oligonucleotide
  Antisense strand to SEQ ID NO: 1482684
uuuguucagggcaacugga

SEQ ID NO: 1482686 - RNA, 19 nt, Artificial Sequence
  Description of Artificial Sequence: Synthetic oligonucleotide
  Sense strand starting at position 2447 of SEQ ID NO: 1244360
augugagagucaucccuuu

SEQ ID NO: 1482687 - RNA, 19 nt, Artificial Sequence
  Description of Artificial Sequence: Synthetic oligonucleotide
  Antisense strand to SEQ ID NO: 1482686
aaagggaugacucucacau

SEQ ID NO: 1482688 - RNA, 19 nt, Artificial Sequence
  Description of Artificial Sequence: Synthetic oligonucleotide
  Sense strand starting at position 2476 of SEQ ID NO: 1244360
cuggauuccuaagaucaua

SEQ ID NO: 1482689 - RNA, 19 nt, Artificial Sequence
  Description of Artificial Sequence: Synthetic oligonucleotide
  Antisense strand to SEQ ID NO: 1482688
uaugaucuuaggaauccag

SEQ ID NO: 1482690 - RNA, 19 nt, Artificial Sequence
  Description of Artificial Sequence: Synthetic oligonucleotide
  Sense strand starting at position 2800 of SEQ ID NO: 1244360
ucuggaaacuugcuuggaa

SEQ ID NO: 1482691 - RNA, 19 nt, Artificial Sequence
  Description of Artificial Sequence: Synthetic oligonucleotide
  Antisense strand to SEQ ID NO: 1482690
uuccaagcaaguuuccaga

SEQ ID NO: 1482692 - RNA, 19 nt, Artificial Sequence
  Description of Artificial Sequence: Synthetic oligonucleotide
  Sense strand starting at position 2801 of SEQ ID NO: 1244360
cuggaaacuugcuuggaaa

SEQ ID NO: 1482693 - RNA, 19 nt, Artificial Sequence
  Description of Artificial Sequence: Synthetic oligonucleotide
  Antisense strand to SEQ ID NO: 1482692
uuuccaagcaaguuuccag

SEQ ID NO: 1482694 - RNA, 19 nt, Artificial Sequence
  Description of Artificial Sequence: Synthetic oligonucleotide
  Sense strand starting at position 2803 of SEQ ID NO: 1244360
ggaaacuugcuuggaaauc

SEQ ID NO: 1482695 - RNA, 19 nt, Artificial Sequence
  Description of Artificial Sequence: Synthetic oligonucleotide
  Antisense strand to SEQ ID NO: 1482694
gauuuccaagcaaguuucc

SEQ ID NO: 1482696 - RNA, 19 nt, Artificial Sequence
  Description of Artificial Sequence: Synthetic oligonucleotide
  Sense strand starting at position 2828 of SEQ ID NO: 1244360
augggaaucuaucccgaaa

SEQ ID NO: 1482697 - RNA, 19 nt, Artificial Sequence
  Description of Artificial Sequence: Synthetic oligonucleotide
  Antisense strand to SEQ ID NO: 1482696
uuucgggauagauucccau

SEQ ID NO: 1482698 - RNA, 19 nt, Artificial Sequence
  Description of Artificial Sequence: Synthetic oligonucleotide
  Sense strand starting at position 2831 of SEQ ID NO: 1244360
ggaaucuaucccgaaagca

SEQ ID NO: 1482699 - RNA, 19 nt, Artificial Sequence
  Description of Artificial Sequence: Synthetic oligonucleotide
  Antisense strand to SEQ ID NO: 1482698
ugcuuucgggauagauucc

SEQ ID NO: 1482700 - RNA, 19 nt, Artificial Sequence
  Description of Artificial Sequence: Synthetic oligonucleotide
  Sense strand starting at position 2887 of SEQ ID NO: 1244360
cugaguuccaaggguauaa

SEQ ID NO: 1482701 - RNA, 19 nt, Artificial Sequence
  Description of Artificial Sequence: Synthetic oligonucleotide
  Antisense strand to SEQ ID NO: 1482700
uuauacccuuggaacucag

SEQ ID NO: 1482702 - RNA, 19 nt, Artificial Sequence
  Description of Artificial Sequence: Synthetic oligonucleotide
  Sense strand starting at position 2889 of SEQ ID NO: 1244360
gaguuccaaggguauaagu

SEQ ID NO: 1482703 - RNA, 19 nt, Artificial Sequence
  Description of Artificial Sequence: Synthetic oligonucleotide
  Antisense strand to SEQ ID NO: 1482702
acuuauacccuuggaacuc

SEQ ID NO: 1482704 - RNA, 19 nt, Artificial Sequence
  Description of Artificial Sequence: Synthetic oligonucleotide
  Sense strand starting at position 2891 of SEQ ID NO: 1244360
guuccaaggguauaaguuu

SEQ ID NO: 1482705 - RNA, 19 nt, Artificial Sequence
  Description of Artificial Sequence: Synthetic oligonucleotide
  Antisense strand to SEQ ID NO: 1482704
aaacuuauacccuuggaac

SEQ ID NO: 1482706 - RNA, 19 nt, Artificial Sequence
  Description of Artificial Sequence: Synthetic oligonucleotide
  Sense strand starting at position 2897 of SEQ ID NO: 1244360
aggguauaaguuuggauau

SEQ ID NO: 1482707 - RNA, 19 nt, Artificial Sequence
  Description of Artificial Sequence: Synthetic oligonucleotide
  Antisense strand to SEQ ID NO: 1482706
auauccaaacuuauacccu

SEQ ID NO: 1482708 - RNA, 19 nt, Artificial Sequence
  Description of Artificial Sequence: Synthetic oligonucleotide
  Sense strand starting at position 3008 of SEQ ID NO: 1244360
auagcuuugacaggaauug

SEQ ID NO: 1482709 - RNA, 19 nt, Artificial Sequence
  Description of Artificial Sequence: Synthetic oligonucleotide
  Antisense strand to SEQ ID NO: 1482708
caauuccugucaaagcuau

SEQ ID NO: 1482710 - RNA, 19 nt, Artificial Sequence
  Description of Artificial Sequence: Synthetic oligonucleotide
  Sense strand starting at position 3028 of SEQ ID NO: 1244360
aggcuuuggucucuaaaca

SEQ ID NO: 1482711 - RNA, 19 nt, Artificial Sequence
  Description of Artificial Sequence: Synthetic oligonucleotide
  Antisense strand to SEQ ID NO: 1482710
uguuuagagaccaaagccu

SEQ ID NO: 1482712 - RNA, 19 nt, Artificial Sequence
  Description of Artificial Sequence: Synthetic oligonucleotide
  Sense strand starting at position 3029 of SEQ ID NO: 1244360
ggcuuuggucucuaaacaa

SEQ ID NO: 1482713 - RNA, 19 nt, Artificial Sequence
  Description of Artificial Sequence: Synthetic oligonucleotide
  Antisense strand to SEQ ID NO: 1482712
uuguuuagagaccaaagcc

SEQ ID NO: 1482714 - RNA, 19 nt, Artificial Sequence
  Description of Artificial Sequence: Synthetic oligonucleotide
  Sense strand starting at position 3498 of SEQ ID NO: 1244360
ccaccucugggcuggaaau

SEQ ID NO: 1482715 - RNA, 19 nt, Artificial Sequence
  Description of Artificial Sequence: Synthetic oligonucleotide
  Antisense strand to SEQ ID NO: 1482714
auuuccagcccagaggugg

SEQ ID NO: 1482716 - RNA, 19 nt, Artificial Sequence
  Description of Artificial Sequence: Synthetic oligonucleotide
  Sense strand starting at position 3516 of SEQ ID NO: 1244360
ucacucagcuauuuguauu

SEQ ID NO: 1482717 - RNA, 19 nt, Artificial Sequence
  Description of Artificial Sequence: Synthetic oligonucleotide
  Antisense strand to SEQ ID NO: 1482716
aauacaaauagcugaguga

SEQ ID NO: 1482718 - RNA, 19 nt, Artificial Sequence
  Description of Artificial Sequence: Synthetic oligonucleotide
  Sense strand starting at position 3724 of SEQ ID NO: 1244360
gcauucgucggucaacaag

SEQ ID NO: 1482719 - RNA, 19 nt, Artificial Sequence
  Description of Artificial Sequence: Synthetic oligonucleotide
  Antisense strand to SEQ ID NO: 1482718
cuuguugaccgacgaaugc

SEQ ID NO: 1482720 - RNA, 19 nt, Artificial Sequence
  Description of Artificial Sequence: Synthetic oligonucleotide
  Sense strand starting at position 3838 of SEQ ID NO: 1244360
gcaguuacagaaugagaag

SEQ ID NO: 1482721 - RNA, 19 nt, Artificial Sequence
  Description of Artificial Sequence: Synthetic oligonucleotide
  Antisense strand to SEQ ID NO: 1482720
cuucucauucuguaacugc

SEQ ID NO: 1482722 - RNA, 19 nt, Artificial Sequence
  Description of Artificial Sequence: Synthetic oligonucleotide
  Sense strand starting at position 3855 of SEQ ID NO: 1244360
agaaacauuuauugaugca

SEQ ID NO: 1482723 - RNA, 19 nt, Artificial Sequence
  Description of Artificial Sequence: Synthetic oligonucleotide
  Antisense strand to SEQ ID NO: 1482722
ugcaucaauaaauguuucu

SEQ ID NO: 1482724 - RNA, 19 nt, Artificial Sequence
  Description of Artificial Sequence: Synthetic oligonucleotide
  Sense strand starting at position 3916 of SEQ ID NO: 1244360
cugugauacugagauaagg

SEQ ID NO: 1482725 - RNA, 19 nt, Artificial Sequence
  Description of Artificial Sequence: Synthetic oligonucleotide
  Antisense strand to SEQ ID NO: 1482724
ccuuaucucaguaucacag

SEQ ID NO: 1482726 - RNA, 19 nt, Artificial Sequence
  Description of Artificial Sequence: Synthetic oligonucleotide
  Sense strand starting at position 3971 of SEQ ID NO: 1244360
gucggaaaggaguguguua

SEQ ID NO: 1482727 - RNA, 19 nt, Artificial Sequence
  Description of Artificial Sequence: Synthetic oligonucleotide
  Antisense strand to SEQ ID NO: 1482726
uaacacacuccuuuccgac

SEQ ID NO: 1482728 - RNA, 19 nt, Artificial Sequence
  Description of Artificial Sequence: Synthetic oligonucleotide
  Sense strand starting at position 3973 of SEQ ID NO: 1244360
cggaaaggaguguguuaca

SEQ ID NO: 1482729 - RNA, 19 nt, Artificial Sequence
  Description of Artificial Sequence: Synthetic oligonucleotide
  Antisense strand to SEQ ID NO: 1482728
uguaacacacuccuuuccg

SEQ ID NO: 1482730 - RNA, 19 nt, Artificial Sequence
  Description of Artificial Sequence: Synthetic oligonucleotide
  Sense strand starting at position 3982 of SEQ ID NO: 1244360
guguguuacauagauacaa

SEQ ID NO: 1482731 - RNA, 19 nt, Artificial Sequence
  Description of Artificial Sequence: Synthetic oligonucleotide
  Antisense strand to SEQ ID NO: 1482730
uuguaucuauguaacacac

SEQ ID NO: 1482732 - RNA, 19 nt, Artificial Sequence
  Description of Artificial Sequence: Synthetic oligonucleotide
  Sense strand starting at position 346 of SEQ ID NO: 1244361
ggguaucauuacucugcca

SEQ ID NO: 1482733 - RNA, 19 nt, Artificial Sequence
  Description of Artificial Sequence: Synthetic oligonucleotide
  Antisense strand to SEQ ID NO: 1482732
uggcagaguaaugauaccc

SEQ ID NO: 1482734 - RNA, 19 nt, Artificial Sequence
  Description of Artificial Sequence: Synthetic oligonucleotide
  Sense strand starting at position 630 of SEQ ID NO: 1244361
gggcuuggcauuggucaga

SEQ ID NO: 1482735 - RNA, 19 nt, Artificial Sequence
  Description of Artificial Sequence: Synthetic oligonucleotide
  Antisense strand to SEQ ID NO: 1482734
ucugaccaaugccaagccc

SEQ ID NO: 1482736 - RNA, 19 nt, Artificial Sequence
  Description of Artificial Sequence: Synthetic oligonucleotide
  Sense strand starting at position 635 of SEQ ID NO: 1244361
uggcauuggucagagaccu

SEQ ID NO: 1482737 - RNA, 19 nt, Artificial Sequence
  Description of Artificial Sequence: Synthetic oligonucleotide
  Antisense strand to SEQ ID NO: 1482736
aggucucugaccaaugcca

SEQ ID NO: 1482738 - RNA, 19 nt, Artificial Sequence
  Description of Artificial Sequence: Synthetic oligonucleotide
  Sense strand starting at position 662 of SEQ ID NO: 1244361
cucagugggcucugaaaga

SEQ ID NO: 1482739 - RNA, 19 nt, Artificial Sequence
  Description of Artificial Sequence: Synthetic oligonucleotide
  Antisense strand to SEQ ID NO: 1482738
ucuuucagagcccacugag

SEQ ID NO: 1482740 - RNA, 19 nt, Artificial Sequence
  Description of Artificial Sequence: Synthetic oligonucleotide
  Sense strand starting at position 719 of SEQ ID NO: 1244361
ccagauucccuccguuauc

SEQ ID NO: 1482741 - RNA, 19 nt, Artificial Sequence
  Description of Artificial Sequence: Synthetic oligonucleotide
  Antisense strand to SEQ ID NO: 1482740
gauaacggagggaaucugg

SEQ ID NO: 1482742 - RNA, 19 nt, Artificial Sequence
  Description of Artificial Sequence: Synthetic oligonucleotide
  Sense strand starting at position 1224 of SEQ ID NO: 1244361
gagcccuagucccacagau

SEQ ID NO: 1482743 - RNA, 19 nt, Artificial Sequence
  Description of Artificial Sequence: Synthetic oligonucleotide
  Antisense strand to SEQ ID NO: 1482742
aucugugggacuagggcuc

SEQ ID NO: 1482744 - RNA, 19 nt, Artificial Sequence
  Description of Artificial Sequence: Synthetic oligonucleotide
  Sense strand starting at position 1226 of SEQ ID NO: 1244361
gcccuagucccacagauug

SEQ ID NO: 1482745 - RNA, 19 nt, Artificial Sequence
  Description of Artificial Sequence: Synthetic oligonucleotide
  Antisense strand to SEQ ID NO: 1482744
caaucugugggacuagggc

SEQ ID NO: 1482746 - RNA, 19 nt, Artificial Sequence
  Description of Artificial Sequence: Synthetic oligonucleotide
  Sense strand starting at position 1510 of SEQ ID NO: 1244361
ggcccuguuuccuuuacaa

SEQ ID NO: 1482747 - RNA, 19 nt, Artificial Sequence
  Description of Artificial Sequence: Synthetic oligonucleotide
  Antisense strand to SEQ ID NO: 1482746
uuguaaaggaaacagggcc

SEQ ID NO: 1482748 - RNA, 19 nt, Artificial Sequence
  Description of Artificial Sequence: Synthetic oligonucleotide
  Sense strand starting at position 1525 of SEQ ID NO: 1244361
acaauagucccucagucua

SEQ ID NO: 1482749 - RNA, 19 nt, Artificial Sequence
  Description of Artificial Sequence: Synthetic oligonucleotide
  Antisense strand to SEQ ID NO: 1482748
uagacugagggacuauugu

SEQ ID NO: 1482750 - RNA, 19 nt, Artificial Sequence
  Description of Artificial Sequence: Synthetic oligonucleotide
  Sense strand starting at position 1786 of SEQ ID NO: 1244361
ggaugaugcccaggaagca

SEQ ID NO: 1482751 - RNA, 19 nt, Artificial Sequence
  Description of Artificial Sequence: Synthetic oligonucleotide
  Antisense strand to SEQ ID NO: 1482750
ugcuuccugggcaucaucc

SEQ ID NO: 1482752 - RNA, 19 nt, Artificial Sequence
  Description of Artificial Sequence: Synthetic oligonucleotide
  Sense strand starting at position 1921 of SEQ ID NO: 1244361
cugagaucuugugcccaag

SEQ ID NO: 1482753 - RNA, 19 nt, Artificial Sequence
  Description of Artificial Sequence: Synthetic oligonucleotide
  Antisense strand to SEQ ID NO: 1482752
cuugggcacaagaucucag

SEQ ID NO: 1482754 - RNA, 19 nt, Artificial Sequence
  Description of Artificial Sequence: Synthetic oligonucleotide
  Sense strand starting at position 1923 of SEQ ID NO: 1244361
gagaucuugugcccaagag

SEQ ID NO: 1482755 - RNA, 19 nt, Artificial Sequence
  Description of Artificial Sequence: Synthetic oligonucleotide
  Antisense strand to SEQ ID NO: 1482754
cucuugggcacaagaucuc

SEQ ID NO: 1482756 - RNA, 19 nt, Artificial Sequence
  Description of Artificial Sequence: Synthetic oligonucleotide
  Sense strand starting at position 1969 of SEQ ID NO: 1244361
cucagacauucccugagga

SEQ ID NO: 1482757 - RNA, 19 nt, Artificial Sequence
  Description of Artificial Sequence: Synthetic oligonucleotide
  Antisense strand to SEQ ID NO: 1482756
uccucagggaaugucugag

SEQ ID NO: 1482758 - RNA, 19 nt, Artificial Sequence
  Description of Artificial Sequence: Synthetic oligonucleotide
  Sense strand starting at position 2011 of SEQ ID NO: 1244361
ccugguugccaugacagua

SEQ ID NO: 1482759 - RNA, 19 nt, Artificial Sequence
  Description of Artificial Sequence: Synthetic oligonucleotide
  Antisense strand to SEQ ID NO: 1482758
uacugucauggcaaccagg

SEQ ID NO: 1482760 - RNA, 19 nt, Artificial Sequence
  Description of Artificial Sequence: Synthetic oligonucleotide
  Sense strand starting at position 2016 of SEQ ID NO: 1244361
uugccaugacaguagaauu

SEQ ID NO: 1482761 - RNA, 19 nt, Artificial Sequence
  Description of Artificial Sequence: Synthetic oligonucleotide
  Antisense strand to SEQ ID NO: 1482760
aauucuacugucauggcaa

SEQ ID NO: 1482762 - RNA, 19 nt, Artificial Sequence
  Description of Artificial Sequence: Synthetic oligonucleotide
  Sense strand starting at position 2230 of SEQ ID NO: 1244361
ucucccaagucucaggaaa

SEQ ID NO: 1482763 - RNA, 19 nt, Artificial Sequence
  Description of Artificial Sequence: Synthetic oligonucleotide
  Antisense strand to SEQ ID NO: 1482762
uuuccugagacuugggaga

SEQ ID NO: 1482764 - RNA, 19 nt, Artificial Sequence
  Description of Artificial Sequence: Synthetic oligonucleotide
  Sense strand starting at position 2459 of SEQ ID NO: 1244361
cucucuauccugugggaag

SEQ ID NO: 1482765 - RNA, 19 nt, Artificial Sequence
  Description of Artificial Sequence: Synthetic oligonucleotide
  Antisense strand to SEQ ID NO: 1482764
cuucccacaggauagagag

SEQ ID NO: 1482766 - RNA, 19 nt, Artificial Sequence
  Description of Artificial Sequence: Synthetic oligonucleotide
  Sense strand starting at position 2461 of SEQ ID NO: 1244361
cucuauccugugggaagua

SEQ ID NO: 1482767 - RNA, 19 nt, Artificial Sequence
  Description of Artificial Sequence: Synthetic oligonucleotide
  Antisense strand to SEQ ID NO: 1482766
uacuucccacaggauagag

SEQ ID NO: 1482768 - RNA, 19 nt, Artificial Sequence
  Description of Artificial Sequence: Synthetic oligonucleotide
  Sense strand starting at position 2462 of SEQ ID NO: 1244361
ucuauccugugggaaguau

SEQ ID NO: 1482769 - RNA, 19 nt, Artificial Sequence
  Description of Artificial Sequence: Synthetic oligonucleotide
  Antisense strand to SEQ ID NO: 1482768
auacuucccacaggauaga

SEQ ID NO: 1482770 - RNA, 19 nt, Artificial Sequence
  Description of Artificial Sequence: Synthetic oligonucleotide
  Sense strand starting at position 2526 of SEQ ID NO: 1244361
gaagcugggagcuaaugua

SEQ ID NO: 1482771 - RNA, 19 nt, Artificial Sequence
  Description of Artificial Sequence: Synthetic oligonucleotide
  Antisense strand to SEQ ID NO: 1482770
uacauuagcucccagcuuc

SEQ ID NO: 1482772 - RNA, 19 nt, Artificial Sequence
  Description of Artificial Sequence: Synthetic oligonucleotide
  Sense strand starting at position 2536 of SEQ ID NO: 1244361
gcuaauguagcucaggaua

SEQ ID NO: 1482773 - RNA, 19 nt, Artificial Sequence
  Description of Artificial Sequence: Synthetic oligonucleotide
  Antisense strand to SEQ ID NO: 1482772
uauccugagcuacauuagc

SEQ ID NO: 1482774 - RNA, 19 nt, Artificial Sequence
  Description of Artificial Sequence: Synthetic oligonucleotide
  Sense strand starting at position 2657 of SEQ ID NO: 1244361
ccaggaguccuuugaggaa

SEQ ID NO: 1482775 - RNA, 19 nt, Artificial Sequence
  Description of Artificial Sequence: Synthetic oligonucleotide
  Antisense strand to SEQ ID NO: 1482774
uuccucaaaggacuccugg

SEQ ID NO: 1482776 - RNA, 19 nt, Artificial Sequence
  Description of Artificial Sequence: Synthetic oligonucleotide
  Sense strand starting at position 2738 of SEQ ID NO: 1244361
cccaucaaguggucugcaa

SEQ ID NO: 1482777 - RNA, 19 nt, Artificial Sequence
  Description of Artificial Sequence: Synthetic oligonucleotide
  Antisense strand to SEQ ID NO: 1482776
uugcagaccacuugauggg

SEQ ID NO: 1482778 - RNA, 19 nt, Artificial Sequence
  Description of Artificial Sequence: Synthetic oligonucleotide
  Sense strand starting at position 2740 of SEQ ID NO: 1244361
caucaaguggucugcaaca

SEQ ID NO: 1482779 - RNA, 19 nt, Artificial Sequence
  Description of Artificial Sequence: Synthetic oligonucleotide
  Antisense strand to SEQ ID NO: 1482778
uguugcagaccacuugaug

SEQ ID NO: 1482780 - RNA, 19 nt, Artificial Sequence
  Description of Artificial Sequence: Synthetic oligonucleotide
  Sense strand starting at position 2805 of SEQ ID NO: 1244361
ggcacuauugguggguuua

SEQ ID NO: 1482781 - RNA, 19 nt, Artificial Sequence
  Description of Artificial Sequence: Synthetic oligonucleotide
  Antisense strand to SEQ ID NO: 1482780
uaaacccaccaauagugcc

SEQ ID NO: 1482782 - RNA, 19 nt, Artificial Sequence
  Description of Artificial Sequence: Synthetic oligonucleotide
  Sense strand starting at position 2806 of SEQ ID NO: 1244361
gcacuauugguggguuuac

SEQ ID NO: 1482783 - RNA, 19 nt, Artificial Sequence
  Description of Artificial Sequence: Synthetic oligonucleotide
  Antisense strand to SEQ ID NO: 1482782
guaaacccaccaauagugc

SEQ ID NO: 1482784 - RNA, 19 nt, Artificial Sequence
  Description of Artificial Sequence: Synthetic oligonucleotide
  Sense strand starting at position 2969 of SEQ ID NO: 1244361
gacugagcccucugaugcu

SEQ ID NO: 1482785 - RNA, 19 nt, Artificial Sequence
  Description of Artificial Sequence: Synthetic oligonucleotide
  Antisense strand to SEQ ID NO: 1482784
agcaucagagggcucaguc

SEQ ID NO: 1482786 - RNA, 19 nt, Artificial Sequence
  Description of Artificial Sequence: Synthetic oligonucleotide
  Sense strand starting at position 3034 of SEQ ID NO: 1244361
aggccuuuccuggacaagu

SEQ ID NO: 1482787 - RNA, 19 nt, Artificial Sequence
  Description of Artificial Sequence: Synthetic oligonucleotide
  Antisense strand to SEQ ID NO: 1482786
acuuguccaggaaaggccu

SEQ ID NO: 1482788 - RNA, 19 nt, Artificial Sequence
  Description of Artificial Sequence: Synthetic oligonucleotide
  Sense strand starting at position 3045 of SEQ ID NO: 1244361
ggacaaguguaccacaguu

SEQ ID NO: 1482789 - RNA, 19 nt, Artificial Sequence
  Description of Artificial Sequence: Synthetic oligonucleotide
  Antisense strand to SEQ ID NO: 1482788
aacugugguacacuugucc

SEQ ID NO: 1482790 - RNA, 19 nt, Artificial Sequence
  Description of Artificial Sequence: Synthetic oligonucleotide
  Sense strand starting at position 3047 of SEQ ID NO: 1244361
acaaguguaccacaguuua

SEQ ID NO: 1482791 - RNA, 19 nt, Artificial Sequence
  Description of Artificial Sequence: Synthetic oligonucleotide
  Antisense strand to SEQ ID NO: 1482790
uaaacugugguacacuugu

SEQ ID NO: 1482792 - RNA, 19 nt, Artificial Sequence
  Description of Artificial Sequence: Synthetic oligonucleotide
  Sense strand starting at position 3365 of SEQ ID NO: 1244361
ggauguauaugucuacgau

SEQ ID NO: 1482793 - RNA, 19 nt, Artificial Sequence
  Description of Artificial Sequence: Synthetic oligonucleotide
  Antisense strand to SEQ ID NO: 1482792
aucguagacauauacaucc

SEQ ID NO: 1482794 - RNA, 19 nt, Artificial Sequence
  Description of Artificial Sequence: Synthetic oligonucleotide
  Sense strand starting at position 3366 of SEQ ID NO: 1244361
gauguauaugucuacgaug

SEQ ID NO: 1482795 - RNA, 19 nt, Artificial Sequence
  Description of Artificial Sequence: Synthetic oligonucleotide
  Antisense strand to SEQ ID NO: 1482794
caucguagacauauacauc

SEQ ID NO: 1482796 - RNA, 19 nt, Artificial Sequence
  Description of Artificial Sequence: Synthetic oligonucleotide
  Sense strand starting at position 3368 of SEQ ID NO: 1244361
uguauaugucuacgaugag

SEQ ID NO: 1482797 - RNA, 19 nt, Artificial Sequence
  Description of Artificial Sequence: Synthetic oligonucleotide
  Antisense strand to SEQ ID NO: 1482796
cucaucguagacauauaca

SEQ ID NO: 1482798 - RNA, 19 nt, Artificial Sequence
  Description of Artificial Sequence: Synthetic oligonucleotide
  Sense strand starting at position 3398 of SEQ ID NO: 1244361
gucaccagauucuaaguga

SEQ ID NO: 1482799 - RNA, 19 nt, Artificial Sequence
  Description of Artificial Sequence: Synthetic oligonucleotide
  Antisense strand to SEQ ID NO: 1482798
ucacuuagaaucuggugac

SEQ ID NO: 1482800 - RNA, 19 nt, Artificial Sequence
  Description of Artificial Sequence: Synthetic oligonucleotide
  Sense strand starting at position 3405 of SEQ ID NO: 1244361
gauucuaagugacucagga

SEQ ID NO: 1482801 - RNA, 19 nt, Artificial Sequence
  Description of Artificial Sequence: Synthetic oligonucleotide
  Antisense strand to SEQ ID NO: 1482800
uccugagucacuuagaauc

SEQ ID NO: 1482802 - RNA, 19 nt, Artificial Sequence
  Description of Artificial Sequence: Synthetic oligonucleotide
  Sense strand starting at position 3409 of SEQ ID NO: 1244361
cuaagugacucaggaccaa

SEQ ID NO: 1482803 - RNA, 19 nt, Artificial Sequence
  Description of Artificial Sequence: Synthetic oligonucleotide
  Antisense strand to SEQ ID NO: 1482802
uugguccugagucacuuag

SEQ ID NO: 1482804 - RNA, 19 nt, Artificial Sequence
  Description of Artificial Sequence: Synthetic oligonucleotide
  Sense strand starting at position 3741 of SEQ ID NO: 1244361
aguuaagaacacugaucuu

SEQ ID NO: 1482805 - RNA, 19 nt, Artificial Sequence
  Description of Artificial Sequence: Synthetic oligonucleotide
  Antisense strand to SEQ ID NO: 1482804
aagaucaguguucuuaacu

SEQ ID NO: 1482806 - RNA, 19 nt, Artificial Sequence
  Description of Artificial Sequence: Synthetic oligonucleotide
  Sense strand starting at position 3765 of SEQ ID NO: 1244361
aucaucucaucuuagggaa

SEQ ID NO: 1482807 - RNA, 19 nt, Artificial Sequence
  Description of Artificial Sequence: Synthetic oligonucleotide
  Antisense strand to SEQ ID NO: 1482806
uucccuaagaugagaugau

SEQ ID NO: 1482808 - RNA, 19 nt, Artificial Sequence
  Description of Artificial Sequence: Synthetic oligonucleotide
  Sense strand starting at position 3768 of SEQ ID NO: 1244361
aucucaucuuagggaaauc

SEQ ID NO: 1482809 - RNA, 19 nt, Artificial Sequence
  Description of Artificial Sequence: Synthetic oligonucleotide
  Antisense strand to SEQ ID NO: 1482808
gauuucccuaagaugagau

SEQ ID NO: 1482810 - RNA, 19 nt, Artificial Sequence
  Description of Artificial Sequence: Synthetic oligonucleotide
  Sense strand starting at position 3778 of SEQ ID NO: 1244361
agggaaaucucaggucuuc

SEQ ID NO: 1482811 - RNA, 19 nt, Artificial Sequence
  Description of Artificial Sequence: Synthetic oligonucleotide
  Antisense strand to SEQ ID NO: 1482810
gaagaccugagauuucccu

SEQ ID NO: 1482812 - RNA, 19 nt, Artificial Sequence
  Description of Artificial Sequence: Synthetic oligonucleotide
  Sense strand starting at position 197 of SEQ ID NO: 1244362
ugguguaggucuguaauuc

SEQ ID NO: 1482813 - RNA, 19 nt, Artificial Sequence
  Description of Artificial Sequence: Synthetic oligonucleotide
  Antisense strand to SEQ ID NO: 1482812
gaauuacagaccuacacca

SEQ ID NO: 1482814 - RNA, 19 nt, Artificial Sequence
  Description of Artificial Sequence: Synthetic oligonucleotide
  Sense strand starting at position 198 of SEQ ID NO: 1244362
gguguaggucuguaauucu

SEQ ID NO: 1482815 - RNA, 19 nt, Artificial Sequence
  Description of Artificial Sequence: Synthetic oligonucleotide
  Antisense strand to SEQ ID NO: 1482814
agaauuacagaccuacacc

SEQ ID NO: 1482816 - RNA, 19 nt, Artificial Sequence
  Description of Artificial Sequence: Synthetic oligonucleotide
  Sense strand starting at position 724 of SEQ ID NO: 1244362
cagacaguacucggagcaa

SEQ ID NO: 1482817 - RNA, 19 nt, Artificial Sequence
  Description of Artificial Sequence: Synthetic oligonucleotide
  Antisense strand to SEQ ID NO: 1482816
uugcuccgaguacugucug

SEQ ID NO: 1482818 - RNA, 19 nt, Artificial Sequence
  Description of Artificial Sequence: Synthetic oligonucleotide
  Sense strand starting at position 735 of SEQ ID NO: 1244362
cggagcaaguccgugagua

SEQ ID NO: 1482819 - RNA, 19 nt, Artificial Sequence
  Description of Artificial Sequence: Synthetic oligonucleotide
  Antisense strand to SEQ ID NO: 1482818
uacucacggacuugcuccg

SEQ ID NO: 1482820 - RNA, 19 nt, Artificial Sequence
  Description of Artificial Sequence: Synthetic oligonucleotide
  Sense strand starting at position 736 of SEQ ID NO: 1244362
ggagcaaguccgugaguac

SEQ ID NO: 1482821 - RNA, 19 nt, Artificial Sequence
  Description of Artificial Sequence: Synthetic oligonucleotide
  Antisense strand to SEQ ID NO: 1482820
guacucacggacuugcucc

SEQ ID NO: 1482822 - RNA, 19 nt, Artificial Sequence
  Description of Artificial Sequence: Synthetic oligonucleotide
  Sense strand starting at position 737 of SEQ ID NO: 1244362
gagcaaguccgugaguaca

SEQ ID NO: 1482823 - RNA, 19 nt, Artificial Sequence
  Description of Artificial Sequence: Synthetic oligonucleotide
  Antisense strand to SEQ ID NO: 1482822
uguacucacggacuugcuc

SEQ ID NO: 1482824 - RNA, 19 nt, Artificial Sequence
  Description of Artificial Sequence: Synthetic oligonucleotide
  Sense strand starting at position 865 of SEQ ID NO: 1244362
agucuuuccugccuguaaa

SEQ ID NO: 1482825 - RNA, 19 nt, Artificial Sequence
  Description of Artificial Sequence: Synthetic oligonucleotide
  Antisense strand to SEQ ID NO: 1482824
uuuacaggcaggaaagacu

SEQ ID NO: 1482826 - RNA, 19 nt, Artificial Sequence
  Description of Artificial Sequence: Synthetic oligonucleotide
  Sense strand starting at position 914 of SEQ ID NO: 1244362
ggccuucagcucugaguga

SEQ ID NO: 1482827 - RNA, 19 nt, Artificial Sequence
  Description of Artificial Sequence: Synthetic oligonucleotide
  Antisense strand to SEQ ID NO: 1482826
ucacucagagcugaaggcc

SEQ ID NO: 1482828 - RNA, 19 nt, Artificial Sequence
  Description of Artificial Sequence: Synthetic oligonucleotide
  Sense strand starting at position 921 of SEQ ID NO: 1244362
agcucugagugacaaugau

SEQ ID NO: 1482829 - RNA, 19 nt, Artificial Sequence
  Description of Artificial Sequence: Synthetic oligonucleotide
  Antisense strand to SEQ ID NO: 1482828
aucauugucacucagagcu

SEQ ID NO: 1482830 - RNA, 19 nt, Artificial Sequence
  Description of Artificial Sequence: Synthetic oligonucleotide
  Sense strand starting at position 1275 of SEQ ID NO: 1244362
ggguaucauuacucugcca

SEQ ID NO: 1482831 - RNA, 19 nt, Artificial Sequence
  Description of Artificial Sequence: Synthetic oligonucleotide
  Antisense strand to SEQ ID NO: 1482830
uggcagaguaaugauaccc

SEQ ID NO: 1482832 - RNA, 19 nt, Artificial Sequence
  Description of Artificial Sequence: Synthetic oligonucleotide
  Sense strand starting at position 1559 of SEQ ID NO: 1244362
gggcuuggcauuggucaga

SEQ ID NO: 1482833 - RNA, 19 nt, Artificial Sequence
  Description of Artificial Sequence: Synthetic oligonucleotide
  Antisense strand to SEQ ID NO: 1482832
ucugaccaaugccaagccc

SEQ ID NO: 1482834 - RNA, 19 nt, Artificial Sequence
  Description of Artificial Sequence: Synthetic oligonucleotide
  Sense strand starting at position 1564 of SEQ ID NO: 1244362
uggcauuggucagagaccu

SEQ ID NO: 1482835 - RNA, 19 nt, Artificial Sequence
  Description of Artificial Sequence: Synthetic oligonucleotide
  Antisense strand to SEQ ID NO: 1482834
aggucucugaccaaugcca

SEQ ID NO: 1482836 - RNA, 19 nt, Artificial Sequence
  Description of Artificial Sequence: Synthetic oligonucleotide
  Sense strand starting at position 1591 of SEQ ID NO: 1244362
cucagugggcucugaaaga

SEQ ID NO: 1482837 - RNA, 19 nt, Artificial Sequence
  Description of Artificial Sequence: Synthetic oligonucleotide
  Antisense strand to SEQ ID NO: 1482836
ucuuucagagcccacugag

SEQ ID NO: 1482838 - RNA, 19 nt, Artificial Sequence
  Description of Artificial Sequence: Synthetic oligonucleotide
  Sense strand starting at position 1648 of SEQ ID NO: 1244362
ccagauucccuccguuauc

SEQ ID NO: 1482839 - RNA, 19 nt, Artificial Sequence
  Description of Artificial Sequence: Synthetic oligonucleotide
  Antisense strand to SEQ ID NO: 1482838
gauaacggagggaaucugg

SEQ ID NO: 1482840 - RNA, 19 nt, Artificial Sequence
  Description of Artificial Sequence: Synthetic oligonucleotide
  Sense strand starting at position 2153 of SEQ ID NO: 1244362
gagcccuagucccacagau

SEQ ID NO: 1482841 - RNA, 19 nt, Artificial Sequence
  Description of Artificial Sequence: Synthetic oligonucleotide
  Antisense strand to SEQ ID NO: 1482840
aucugugggacuagggcuc

SEQ ID NO: 1482842 - RNA, 19 nt, Artificial Sequence
  Description of Artificial Sequence: Synthetic oligonucleotide
  Sense strand starting at position 2155 of SEQ ID NO: 1244362
gcccuagucccacagauug

SEQ ID NO: 1482843 - RNA, 19 nt, Artificial Sequence
  Description of Artificial Sequence: Synthetic oligonucleotide
  Antisense strand to SEQ ID NO: 1482842
caaucugugggacuagggc

SEQ ID NO: 1482844 - RNA, 19 nt, Artificial Sequence
  Description of Artificial Sequence: Synthetic oligonucleotide
  Sense strand starting at position 2439 of SEQ ID NO: 1244362
ggcccuguuuccuuuacaa

SEQ ID NO: 1482845 - RNA, 19 nt, Artificial Sequence
  Description of Artificial Sequence: Synthetic oligonucleotide
  Antisense strand to SEQ ID NO: 1482844
uuguaaaggaaacagggcc

SEQ ID NO: 1482846 - RNA, 19 nt, Artificial Sequence
  Description of Artificial Sequence: Synthetic oligonucleotide
  Sense strand starting at position 2454 of SEQ ID NO: 1244362
acaauagucccucagucua

SEQ ID NO: 1482847 - RNA, 19 nt, Artificial Sequence
  Description of Artificial Sequence: Synthetic oligonucleotide
  Antisense strand to SEQ ID NO: 1482846
uagacugagggacuauugu

SEQ ID NO: 1482848 - RNA, 19 nt, Artificial Sequence
  Description of Artificial Sequence: Synthetic oligonucleotide
  Sense strand starting at position 2715 of SEQ ID NO: 1244362
ggaugaugcccaggaagca

SEQ ID NO: 1482849 - RNA, 19 nt, Artificial Sequence
  Description of Artificial Sequence: Synthetic oligonucleotide
  Antisense strand to SEQ ID NO: 1482848
ugcuuccugggcaucaucc

SEQ ID NO: 1482850 - RNA, 19 nt, Artificial Sequence
  Description of Artificial Sequence: Synthetic oligonucleotide
  Sense strand starting at position 2850 of SEQ ID NO: 1244362
cugagaucuugugcccaag

SEQ ID NO: 1482851 - RNA, 19 nt, Artificial Sequence
  Description of Artificial Sequence: Synthetic oligonucleotide
  Antisense strand to SEQ ID NO: 1482850
cuugggcacaagaucucag

SEQ ID NO: 1482852 - RNA, 19 nt, Artificial Sequence
  Description of Artificial Sequence: Synthetic oligonucleotide
  Sense strand starting at position 2852 of SEQ ID NO: 1244362
gagaucuugugcccaagag

SEQ ID NO: 1482853 - RNA, 19 nt, Artificial Sequence
  Description of Artificial Sequence: Synthetic oligonucleotide
  Antisense strand to SEQ ID NO: 1482852
cucuugggcacaagaucuc

SEQ ID NO: 1482854 - RNA, 19 nt, Artificial Sequence
  Description of Artificial Sequence: Synthetic oligonucleotide
  Sense strand starting at position 2898 of SEQ ID NO: 1244362
cucagacauucccugagga

SEQ ID NO: 1482855 - RNA, 19 nt, Artificial Sequence
  Description of Artificial Sequence: Synthetic oligonucleotide
  Antisense strand to SEQ ID NO: 1482854
uccucagggaaugucugag

SEQ ID NO: 1482856 - RNA, 19 nt, Artificial Sequence
  Description of Artificial Sequence: Synthetic oligonucleotide
  Sense strand starting at position 2940 of SEQ ID NO: 1244362
ccugguugccaugacagua

SEQ ID NO: 1482857 - RNA, 19 nt, Artificial Sequence
  Description of Artificial Sequence: Synthetic oligonucleotide
  Antisense strand to SEQ ID NO: 1482856
uacugucauggcaaccagg

SEQ ID NO: 1482858 - RNA, 19 nt, Artificial Sequence
  Description of Artificial Sequence: Synthetic oligonucleotide
  Sense strand starting at position 2945 of SEQ ID NO: 1244362
uugccaugacaguagaauu

SEQ ID NO: 1482859 - RNA, 19 nt, Artificial Sequence
  Description of Artificial Sequence: Synthetic oligonucleotide
  Antisense strand to SEQ ID NO: 1482858
aauucuacugucauggcaa

SEQ ID NO: 1482860 - RNA, 19 nt, Artificial Sequence
  Description of Artificial Sequence: Synthetic oligonucleotide
  Sense strand starting at position 3159 of SEQ ID NO: 1244362
ucucccaagucucaggaaa

SEQ ID NO: 1482861 - RNA, 19 nt, Artificial Sequence
  Description of Artificial Sequence: Synthetic oligonucleotide
  Antisense strand to SEQ ID NO: 1482860
uuuccugagacuugggaga

SEQ ID NO: 1482862 - RNA, 19 nt, Artificial Sequence
  Description of Artificial Sequence: Synthetic oligonucleotide
  Sense strand starting at position 3388 of SEQ ID NO: 1244362
cucucuauccugugggaag

SEQ ID NO: 1482863 - RNA, 19 nt, Artificial Sequence
  Description of Artificial Sequence: Synthetic oligonucleotide
  Antisense strand to SEQ ID NO: 1482862
cuucccacaggauagagag

SEQ ID NO: 1482864 - RNA, 19 nt, Artificial Sequence
  Description of Artificial Sequence: Synthetic oligonucleotide
  Sense strand starting at position 3390 of SEQ ID NO: 1244362
cucuauccugugggaagua

SEQ ID NO: 1482865 - RNA, 19 nt, Artificial Sequence
  Description of Artificial Sequence: Synthetic oligonucleotide
  Antisense strand to SEQ ID NO: 1482864
uacuucccacaggauagag

SEQ ID NO: 1482866 - RNA, 19 nt, Artificial Sequence
  Description of Artificial Sequence: Synthetic oligonucleotide
  Sense strand starting at position 3391 of SEQ ID NO: 1244362
ucuauccugugggaaguau

SEQ ID NO: 1482867 - RNA, 19 nt, Artificial Sequence
  Description of Artificial Sequence: Synthetic oligonucleotide
  Antisense strand to SEQ ID NO: 1482866
auacuucccacaggauaga

SEQ ID NO: 1482868 - RNA, 19 nt, Artificial Sequence
  Description of Artificial Sequence: Synthetic oligonucleotide
  Sense strand starting at position 3455 of SEQ ID NO: 1244362
gaagcugggagcuaaugua

SEQ ID NO: 1482869 - RNA, 19 nt, Artificial Sequence
  Description of Artificial Sequence: Synthetic oligonucleotide
  Antisense strand to SEQ ID NO: 1482868
uacauuagcucccagcuuc

SEQ ID NO: 1482870 - RNA, 19 nt, Artificial Sequence
  Description of Artificial Sequence: Synthetic oligonucleotide
  Sense strand starting at position 3465 of SEQ ID NO: 1244362
gcuaauguagcucaggaua

SEQ ID NO: 1482871 - RNA, 19 nt, Artificial Sequence
  Description of Artificial Sequence: Synthetic oligonucleotide
  Antisense strand to SEQ ID NO: 1482870
uauccugagcuacauuagc

SEQ ID NO: 1482872 - RNA, 19 nt, Artificial Sequence
  Description of Artificial Sequence: Synthetic oligonucleotide
  Sense strand starting at position 3586 of SEQ ID NO: 1244362
ccaggaguccuuugaggaa

SEQ ID NO: 1482873 - RNA, 19 nt, Artificial Sequence
  Description of Artificial Sequence: Synthetic oligonucleotide
  Antisense strand to SEQ ID NO: 1482872
uuccucaaaggacuccugg

SEQ ID NO: 1482874 - RNA, 19 nt, Artificial Sequence
  Description of Artificial Sequence: Synthetic oligonucleotide
  Sense strand starting at position 3667 of SEQ ID NO: 1244362
cccaucaaguggucugcaa

SEQ ID NO: 1482875 - RNA, 19 nt, Artificial Sequence
  Description of Artificial Sequence: Synthetic oligonucleotide
  Antisense strand to SEQ ID NO: 1482874
uugcagaccacuugauggg

SEQ ID NO: 1482876 - RNA, 19 nt, Artificial Sequence
  Description of Artificial Sequence: Synthetic oligonucleotide
  Sense strand starting at position 3669 of SEQ ID NO: 1244362
caucaaguggucugcaaca

SEQ ID NO: 1482877 - RNA, 19 nt, Artificial Sequence
  Description of Artificial Sequence: Synthetic oligonucleotide
  Antisense strand to SEQ ID NO: 1482876
uguugcagaccacuugaug

SEQ ID NO: 1482878 - RNA, 19 nt, Artificial Sequence
  Description of Artificial Sequence: Synthetic oligonucleotide
  Sense strand starting at position 3734 of SEQ ID NO: 1244362
ggcacuauugguggguuua

SEQ ID NO: 1482879 - RNA, 19 nt, Artificial Sequence
  Description of Artificial Sequence: Synthetic oligonucleotide
  Antisense strand to SEQ ID NO: 1482878
uaaacccaccaauagugcc

SEQ ID NO: 1482880 - RNA, 19 nt, Artificial Sequence
  Description of Artificial Sequence: Synthetic oligonucleotide
  Sense strand starting at position 3735 of SEQ ID NO: 1244362
gcacuauugguggguuuac

SEQ ID NO: 1482881 - RNA, 19 nt, Artificial Sequence
  Description of Artificial Sequence: Synthetic oligonucleotide
  Antisense strand to SEQ ID NO: 1482880
guaaacccaccaauagugc

SEQ ID NO: 1482882 - RNA, 19 nt, Artificial Sequence
  Description of Artificial Sequence: Synthetic oligonucleotide
  Sense strand starting at position 3898 of SEQ ID NO: 1244362
gacugagcccucugaugcu

SEQ ID NO: 1482883 - RNA, 19 nt, Artificial Sequence
  Description of Artificial Sequence: Synthetic oligonucleotide
  Antisense strand to SEQ ID NO: 1482882
agcaucagagggcucaguc

SEQ ID NO: 1482884 - RNA, 19 nt, Artificial Sequence
  Description of Artificial Sequence: Synthetic oligonucleotide
  Sense strand starting at position 3961 of SEQ ID NO: 1244362
agaggccuuuccuggacaa

SEQ ID NO: 1482885 - RNA, 19 nt, Artificial Sequence
  Description of Artificial Sequence: Synthetic oligonucleotide
  Antisense strand to SEQ ID NO: 1482884
uuguccaggaaaggccucu

SEQ ID NO: 1482886 - RNA, 19 nt, Artificial Sequence
  Description of Artificial Sequence: Synthetic oligonucleotide
  Sense strand starting at position 3963 of SEQ ID NO: 1244362
aggccuuuccuggacaagu

SEQ ID NO: 1482887 - RNA, 19 nt, Artificial Sequence
  Description of Artificial Sequence: Synthetic oligonucleotide
  Antisense strand to SEQ ID NO: 1482886
acuuguccaggaaaggccu

SEQ ID NO: 1482888 - RNA, 19 nt, Artificial Sequence
  Description of Artificial Sequence: Synthetic oligonucleotide
  Sense strand starting at position 3974 of SEQ ID NO: 1244362
ggacaaguguaccacaguu

SEQ ID NO: 1482889 - RNA, 19 nt, Artificial Sequence
  Description of Artificial Sequence: Synthetic oligonucleotide
  Antisense strand to SEQ ID NO: 1482888
aacugugguacacuugucc

SEQ ID NO: 1482890 - RNA, 19 nt, Artificial Sequence
  Description of Artificial Sequence: Synthetic oligonucleotide
  Sense strand starting at position 3976 of SEQ ID NO: 1244362
acaaguguaccacaguuua

SEQ ID NO: 1482891 - RNA, 19 nt, Artificial Sequence
  Description of Artificial Sequence: Synthetic oligonucleotide
  Antisense strand to SEQ ID NO: 1482890
uaaacugugguacacuugu

SEQ ID NO: 1482892 - RNA, 19 nt, Artificial Sequence
  Description of Artificial Sequence: Synthetic oligonucleotide
  Sense strand starting at position 123 of SEQ ID NO: 1244363
uagcgaagcuucucaugaa

SEQ ID NO: 1482893 - RNA, 19 nt, Artificial Sequence
  Description of Artificial Sequence: Synthetic oligonucleotide
  Antisense strand to SEQ ID NO: 1482892
uucaugagaagcuucgcua

SEQ ID NO: 1482894 - RNA, 19 nt, Artificial Sequence
  Description of Artificial Sequence: Synthetic oligonucleotide
  Sense strand starting at position 133 of SEQ ID NO: 1244363
ucucaugaaucugcaaaga

SEQ ID NO: 1482895 - RNA, 19 nt, Artificial Sequence
  Description of Artificial Sequence: Synthetic oligonucleotide
  Antisense strand to SEQ ID NO: 1482894
ucuuugcagauucaugaga

SEQ ID NO: 1482896 - RNA, 19 nt, Artificial Sequence
  Description of Artificial Sequence: Synthetic oligonucleotide
  Sense strand starting at position 248 of SEQ ID NO: 1244363
gagaaaguccuguguagug

SEQ ID NO: 1482897 - RNA, 19 nt, Artificial Sequence
  Description of Artificial Sequence: Synthetic oligonucleotide
  Antisense strand to SEQ ID NO: 1482896
cacuacacaggacuuucuc

SEQ ID NO: 1482898 - RNA, 19 nt, Artificial Sequence
  Description of Artificial Sequence: Synthetic oligonucleotide
  Sense strand starting at position 257 of SEQ ID NO: 1244363
cuguguagugggcaaguga

SEQ ID NO: 1482899 - RNA, 19 nt, Artificial Sequence
  Description of Artificial Sequence: Synthetic oligonucleotide
  Antisense strand to SEQ ID NO: 1482898
ucacuugcccacuacacag

SEQ ID NO: 1482900 - RNA, 19 nt, Artificial Sequence
  Description of Artificial Sequence: Synthetic oligonucleotide
  Sense strand starting at position 699 of SEQ ID NO: 1244363
uuaccagaguccuccgaua

SEQ ID NO: 1482901 - RNA, 19 nt, Artificial Sequence
  Description of Artificial Sequence: Synthetic oligonucleotide
  Antisense strand to SEQ ID NO: 1482900
uaucggaggacucugguaa

SEQ ID NO: 1482902 - RNA, 19 nt, Artificial Sequence
  Description of Artificial Sequence: Synthetic oligonucleotide
  Sense strand starting at position 704 of SEQ ID NO: 1244363
agaguccuccgauagcacu

SEQ ID NO: 1482903 - RNA, 19 nt, Artificial Sequence
  Description of Artificial Sequence: Synthetic oligonucleotide
  Antisense strand to SEQ ID NO: 1482902
agugcuaucggaggacucu

SEQ ID NO: 1482904 - RNA, 19 nt, Artificial Sequence
  Description of Artificial Sequence: Synthetic oligonucleotide
  Sense strand starting at position 777 of SEQ ID NO: 1244363
gguggagguggguauugaa

SEQ ID NO: 1482905 - RNA, 19 nt, Artificial Sequence
  Description of Artificial Sequence: Synthetic oligonucleotide
  Antisense strand to SEQ ID NO: 1482904
uucaauacccaccuccacc

SEQ ID NO: 1482906 - RNA, 19 nt, Artificial Sequence
  Description of Artificial Sequence: Synthetic oligonucleotide
  Sense strand starting at position 835 of SEQ ID NO: 1244363
ucuacuguguucucugaga

SEQ ID NO: 1482907 - RNA, 19 nt, Artificial Sequence
  Description of Artificial Sequence: Synthetic oligonucleotide
  Antisense strand to SEQ ID NO: 1482906
ucucagagaacacaguaga

SEQ ID NO: 1482908 - RNA, 19 nt, Artificial Sequence
  Description of Artificial Sequence: Synthetic oligonucleotide
  Sense strand starting at position 967 of SEQ ID NO: 1244363
ggugauuucuaugauaaac

SEQ ID NO: 1482909 - RNA, 19 nt, Artificial Sequence
  Description of Artificial Sequence: Synthetic oligonucleotide
  Antisense strand to SEQ ID NO: 1482908
guuuaucauagaaaucacc

SEQ ID NO: 1482910 - RNA, 19 nt, Artificial Sequence
  Description of Artificial Sequence: Synthetic oligonucleotide
  Sense strand starting at position 1005 of SEQ ID NO: 1244363
cugagaaaugacugcgaau

SEQ ID NO: 1482911 - RNA, 19 nt, Artificial Sequence
  Description of Artificial Sequence: Synthetic oligonucleotide
  Antisense strand to SEQ ID NO: 1482910
auucgcagucauuucucag

SEQ ID NO: 1482912 - RNA, 19 nt, Artificial Sequence
  Description of Artificial Sequence: Synthetic oligonucleotide
  Sense strand starting at position 1007 of SEQ ID NO: 1244363
gagaaaugacugcgaaugu

SEQ ID NO: 1482913 - RNA, 19 nt, Artificial Sequence
  Description of Artificial Sequence: Synthetic oligonucleotide
  Antisense strand to SEQ ID NO: 1482912
acauucgcagucauuucuc

SEQ ID NO: 1482914 - RNA, 19 nt, Artificial Sequence
  Description of Artificial Sequence: Synthetic oligonucleotide
  Sense strand starting at position 1014 of SEQ ID NO: 1244363
gacugcgaauguucccauu

SEQ ID NO: 1482915 - RNA, 19 nt, Artificial Sequence
  Description of Artificial Sequence: Synthetic oligonucleotide
  Antisense strand to SEQ ID NO: 1482914
aaugggaacauucgcaguc

SEQ ID NO: 1482916 - RNA, 19 nt, Artificial Sequence
  Description of Artificial Sequence: Synthetic oligonucleotide
  Sense strand starting at position 1064 of SEQ ID NO: 1244363
uucaguaagcuguggguca

SEQ ID NO: 1482917 - RNA, 19 nt, Artificial Sequence
  Description of Artificial Sequence: Synthetic oligonucleotide
  Antisense strand to SEQ ID NO: 1482916
ugacccacagcuuacugaa

SEQ ID NO: 1482918 - RNA, 19 nt, Artificial Sequence
  Description of Artificial Sequence: Synthetic oligonucleotide
  Sense strand starting at position 1066 of SEQ ID NO: 1244363
caguaagcugugggucaaa

SEQ ID NO: 1482919 - RNA, 19 nt, Artificial Sequence
  Description of Artificial Sequence: Synthetic oligonucleotide
  Antisense strand to SEQ ID NO: 1482918
uuugacccacagcuuacug

SEQ ID NO: 1482920 - RNA, 19 nt, Artificial Sequence
  Description of Artificial Sequence: Synthetic oligonucleotide
  Sense strand starting at position 1503 of SEQ ID NO: 1244363
gccacuaagaggcguaaga

SEQ ID NO: 1482921 - RNA, 19 nt, Artificial Sequence
  Description of Artificial Sequence: Synthetic oligonucleotide
  Antisense strand to SEQ ID NO: 1482920
ucuuacgccucuuaguggc

SEQ ID NO: 1482922 - RNA, 19 nt, Artificial Sequence
  Description of Artificial Sequence: Synthetic oligonucleotide
  Sense strand starting at position 1633 of SEQ ID NO: 1244363
gaaggaaccugugggagaa

SEQ ID NO: 1482923 - RNA, 19 nt, Artificial Sequence
  Description of Artificial Sequence: Synthetic oligonucleotide
  Antisense strand to SEQ ID NO: 1482922
uucucccacagguuccuuc

SEQ ID NO: 1482924 - RNA, 19 nt, Artificial Sequence
  Description of Artificial Sequence: Synthetic oligonucleotide
  Sense strand starting at position 1933 of SEQ ID NO: 1244363
gggaugugugcuccgcgaa

SEQ ID NO: 1482925 - RNA, 19 nt, Artificial Sequence
  Description of Artificial Sequence: Synthetic oligonucleotide
  Antisense strand to SEQ ID NO: 1482924
uucgcggagcacacauccc

SEQ ID NO: 1482926 - RNA, 19 nt, Artificial Sequence
  Description of Artificial Sequence: Synthetic oligonucleotide
  Sense strand starting at position 2385 of SEQ ID NO: 1244363
cacagauccuggguuugaa

SEQ ID NO: 1482927 - RNA, 19 nt, Artificial Sequence
  Description of Artificial Sequence: Synthetic oligonucleotide
  Antisense strand to SEQ ID NO: 1482926
uucaaacccaggaucugug

SEQ ID NO: 1482928 - RNA, 19 nt, Artificial Sequence
  Description of Artificial Sequence: Synthetic oligonucleotide
  Sense strand starting at position 2388 of SEQ ID NO: 1244363
agauccuggguuugaagau

SEQ ID NO: 1482929 - RNA, 19 nt, Artificial Sequence
  Description of Artificial Sequence: Synthetic oligonucleotide
  Antisense strand to SEQ ID NO: 1482928
aucuucaaacccaggaucu

SEQ ID NO: 1482930 - RNA, 19 nt, Artificial Sequence
  Description of Artificial Sequence: Synthetic oligonucleotide
  Sense strand starting at position 2441 of SEQ ID NO: 1244363
agggcaacucgcuguaaca

SEQ ID NO: 1482931 - RNA, 19 nt, Artificial Sequence
  Description of Artificial Sequence: Synthetic oligonucleotide
  Antisense strand to SEQ ID NO: 1482930
uguuacagcgaguugcccu

SEQ ID NO: 1482932 - RNA, 19 nt, Artificial Sequence
  Description of Artificial Sequence: Synthetic oligonucleotide
  Sense strand starting at position 2443 of SEQ ID NO: 1244363
ggcaacucgcuguaacaau

SEQ ID NO: 1482933 - RNA, 19 nt, Artificial Sequence
  Description of Artificial Sequence: Synthetic oligonucleotide
  Antisense strand to SEQ ID NO: 1482932
auuguuacagcgaguugcc

SEQ ID NO: 1482934 - RNA, 19 nt, Artificial Sequence
  Description of Artificial Sequence: Synthetic oligonucleotide
  Sense strand starting at position 2629 of SEQ ID NO: 1244363
cugaaauggccaugacgau

SEQ ID NO: 1482935 - RNA, 19 nt, Artificial Sequence
  Description of Artificial Sequence: Synthetic oligonucleotide
  Antisense strand to SEQ ID NO: 1482934
aucgucauggccauuucag

SEQ ID NO: 1482936 - RNA, 19 nt, Artificial Sequence
  Description of Artificial Sequence: Synthetic oligonucleotide
  Sense strand starting at position 2635 of SEQ ID NO: 1244363
uggccaugacgauaacuga

SEQ ID NO: 1482937 - RNA, 19 nt, Artificial Sequence
  Description of Artificial Sequence: Synthetic oligonucleotide
  Antisense strand to SEQ ID NO: 1482936
ucaguuaucgucauggcca

SEQ ID NO: 1482938 - RNA, 19 nt, Artificial Sequence
  Description of Artificial Sequence: Synthetic oligonucleotide
  Sense strand starting at position 2652 of SEQ ID NO: 1244363
gacuuauauugugcugucu

SEQ ID NO: 1482939 - RNA, 19 nt, Artificial Sequence
  Description of Artificial Sequence: Synthetic oligonucleotide
  Antisense strand to SEQ ID NO: 1482938
agacagcacaauauaaguc

SEQ ID NO: 1482940 - RNA, 19 nt, Artificial Sequence
  Description of Artificial Sequence: Synthetic oligonucleotide
  Sense strand starting at position 2677 of SEQ ID NO: 1244363
ccagguacuccucagauca

SEQ ID NO: 1482941 - RNA, 19 nt, Artificial Sequence
  Description of Artificial Sequence: Synthetic oligonucleotide
  Antisense strand to SEQ ID NO: 1482940
ugaucugaggaguaccugg

SEQ ID NO: 1482942 - RNA, 19 nt, Artificial Sequence
  Description of Artificial Sequence: Synthetic oligonucleotide
  Sense strand starting at position 2705 of SEQ ID NO: 1244363
acaguaguuccugauauca

SEQ ID NO: 1482943 - RNA, 19 nt, Artificial Sequence
  Description of Artificial Sequence: Synthetic oligonucleotide
  Antisense strand to SEQ ID NO: 1482942
ugauaucaggaacuacugu

SEQ ID NO: 1482944 - RNA, 19 nt, Artificial Sequence
  Description of Artificial Sequence: Synthetic oligonucleotide
  Sense strand starting at position 2739 of SEQ ID NO: 1244363
ugguucugcaauugaggaa

SEQ ID NO: 1482945 - RNA, 19 nt, Artificial Sequence
  Description of Artificial Sequence: Synthetic oligonucleotide
  Antisense strand to SEQ ID NO: 1482944
uuccucaauugcagaacca

SEQ ID NO: 1482946 - RNA, 19 nt, Artificial Sequence
  Description of Artificial Sequence: Synthetic oligonucleotide
  Sense strand starting at position 2770 of SEQ ID NO: 1244363
ggugaaagaauguguauag

SEQ ID NO: 1482947 - RNA, 19 nt, Artificial Sequence
  Description of Artificial Sequence: Synthetic oligonucleotide
  Antisense strand to SEQ ID NO: 1482946
cuauacacauucuuucacc

SEQ ID NO: 1482948 - RNA, 19 nt, Artificial Sequence
  Description of Artificial Sequence: Synthetic oligonucleotide
  Sense strand starting at position 2928 of SEQ ID NO: 1244363
agagguuaagucuggaagu

SEQ ID NO: 1482949 - RNA, 19 nt, Artificial Sequence
  Description of Artificial Sequence: Synthetic oligonucleotide
  Antisense strand to SEQ ID NO: 1482948
acuuccagacuuaaccucu

SEQ ID NO: 1482950 - RNA, 19 nt, Artificial Sequence
  Description of Artificial Sequence: Synthetic oligonucleotide
  Sense strand starting at position 2930 of SEQ ID NO: 1244363
agguuaagucuggaaguaa

SEQ ID NO: 1482951 - RNA, 19 nt, Artificial Sequence
  Description of Artificial Sequence: Synthetic oligonucleotide
  Antisense strand to SEQ ID NO: 1482950
uuacuuccagacuuaaccu

SEQ ID NO: 1482952 - RNA, 19 nt, Artificial Sequence
  Description of Artificial Sequence: Synthetic oligonucleotide
  Sense strand starting at position 3031 of SEQ ID NO: 1244363
aaaugucaugaugauguuu

SEQ ID NO: 1482953 - RNA, 19 nt, Artificial Sequence
  Description of Artificial Sequence: Synthetic oligonucleotide
  Antisense strand to SEQ ID NO: 1482952
aaacaucaucaugacauuu

SEQ ID NO: 1482954 - RNA, 19 nt, Artificial Sequence
  Description of Artificial Sequence: Synthetic oligonucleotide
  Sense strand starting at position 3112 of SEQ ID NO: 1244363
auguaacgugccugagacu

SEQ ID NO: 1482955 - RNA, 19 nt, Artificial Sequence
  Description of Artificial Sequence: Synthetic oligonucleotide
  Antisense strand to SEQ ID NO: 1482954
agucucaggcacguuacau

SEQ ID NO: 1482956 - RNA, 19 nt, Artificial Sequence
  Description of Artificial Sequence: Synthetic oligonucleotide
  Sense strand starting at position 3142 of SEQ ID NO: 1244363
uguguaaugcuggaguggu

SEQ ID NO: 1482957 - RNA, 19 nt, Artificial Sequence
  Description of Artificial Sequence: Synthetic oligonucleotide
  Antisense strand to SEQ ID NO: 1482956
accacuccagcauuacaca

SEQ ID NO: 1482958 - RNA, 19 nt, Artificial Sequence
  Description of Artificial Sequence: Synthetic oligonucleotide
  Sense strand starting at position 3159 of SEQ ID NO: 1244363
gugccagauucugaauuuc

SEQ ID NO: 1482959 - RNA, 19 nt, Artificial Sequence
  Description of Artificial Sequence: Synthetic oligonucleotide
  Antisense strand to SEQ ID NO: 1482958
gaaauucagaaucuggcac

SEQ ID NO: 1482960 - RNA, 19 nt, Artificial Sequence
  Description of Artificial Sequence: Synthetic oligonucleotide
  Sense strand starting at position 3290 of SEQ ID NO: 1244363
ugagaaccaucugauccau

SEQ ID NO: 1482961 - RNA, 19 nt, Artificial Sequence
  Description of Artificial Sequence: Synthetic oligonucleotide
  Antisense strand to SEQ ID NO: 1482960
auggaucagaugguucuca

SEQ ID NO: 1482962 - RNA, 19 nt, Artificial Sequence
  Description of Artificial Sequence: Synthetic oligonucleotide
  Sense strand starting at position 3345 of SEQ ID NO: 1244363
ggaagugguguuggaacaa

SEQ ID NO: 1482963 - RNA, 19 nt, Artificial Sequence
  Description of Artificial Sequence: Synthetic oligonucleotide
  Antisense strand to SEQ ID NO: 1482962
uuguuccaacaccacuucc

SEQ ID NO: 1482964 - RNA, 19 nt, Artificial Sequence
  Description of Artificial Sequence: Synthetic oligonucleotide
  Sense strand starting at position 3417 of SEQ ID NO: 1244363
aacgcaauuuaagagagau

SEQ ID NO: 1482965 - RNA, 19 nt, Artificial Sequence
  Description of Artificial Sequence: Synthetic oligonucleotide
  Antisense strand to SEQ ID NO: 1482964
aucucucuuaaauugcguu

SEQ ID NO: 1482966 - RNA, 19 nt, Artificial Sequence
  Description of Artificial Sequence: Synthetic oligonucleotide
  Sense strand starting at position 3427 of SEQ ID NO: 1244363
aagagagaucauuggccua

SEQ ID NO: 1482967 - RNA, 19 nt, Artificial Sequence
  Description of Artificial Sequence: Synthetic oligonucleotide
  Antisense strand to SEQ ID NO: 1482966
uaggccaaugaucucucuu

SEQ ID NO: 1482968 - RNA, 19 nt, Artificial Sequence
  Description of Artificial Sequence: Synthetic oligonucleotide
  Sense strand starting at position 3429 of SEQ ID NO: 1244363
gagagaucauuggccuaaa

SEQ ID NO: 1482969 - RNA, 19 nt, Artificial Sequence
  Description of Artificial Sequence: Synthetic oligonucleotide
  Antisense strand to SEQ ID NO: 1482968
uuuaggccaaugaucucuc

SEQ ID NO: 1482970 - RNA, 19 nt, Artificial Sequence
  Description of Artificial Sequence: Synthetic oligonucleotide
  Sense strand starting at position 3430 of SEQ ID NO: 1244363
agagaucauuggccuaaac

SEQ ID NO: 1482971 - RNA, 19 nt, Artificial Sequence
  Description of Artificial Sequence: Synthetic oligonucleotide
  Antisense strand to SEQ ID NO: 1482970
guuuaggccaaugaucucu

SEQ ID NO: 1482972 - RNA, 19 nt, Artificial Sequence
  Description of Artificial Sequence: Synthetic oligonucleotide
  Sense strand starting at position 115 of SEQ ID NO: 1244364
uuugacaguugcuuagaau

SEQ ID NO: 1482973 - RNA, 19 nt, Artificial Sequence
  Description of Artificial Sequence: Synthetic oligonucleotide
  Antisense strand to SEQ ID NO: 1482972
auucuaagcaacugucaaa

SEQ ID NO: 1482974 - RNA, 19 nt, Artificial Sequence
  Description of Artificial Sequence: Synthetic oligonucleotide
  Sense strand starting at position 116 of SEQ ID NO: 1244364
uugacaguugcuuagaaua

SEQ ID NO: 1482975 - RNA, 19 nt, Artificial Sequence
  Description of Artificial Sequence: Synthetic oligonucleotide
  Antisense strand to SEQ ID NO: 1482974
uauucuaagcaacugucaa

SEQ ID NO: 1482976 - RNA, 19 nt, Artificial Sequence
  Description of Artificial Sequence: Synthetic oligonucleotide
  Sense strand starting at position 260 of SEQ ID NO: 1244364
acaaaugcucagugaagga

SEQ ID NO: 1482977 - RNA, 19 nt, Artificial Sequence
  Description of Artificial Sequence: Synthetic oligonucleotide
  Antisense strand to SEQ ID NO: 1482976
uccuucacugagcauuugu

SEQ ID NO: 1482978 - RNA, 19 nt, Artificial Sequence
  Description of Artificial Sequence: Synthetic oligonucleotide
  Sense strand starting at position 457 of SEQ ID NO: 1244364
ggaaucaaguucuccuuua

SEQ ID NO: 1482979 - RNA, 19 nt, Artificial Sequence
  Description of Artificial Sequence: Synthetic oligonucleotide
  Antisense strand to SEQ ID NO: 1482978
uaaaggagaacuugauucc

SEQ ID NO: 1482980 - RNA, 19 nt, Artificial Sequence
  Description of Artificial Sequence: Synthetic oligonucleotide
  Sense strand starting at position 493 of SEQ ID NO: 1244364
cgagguaaaugaguucuau

SEQ ID NO: 1482981 - RNA, 19 nt, Artificial Sequence
  Description of Artificial Sequence: Synthetic oligonucleotide
  Antisense strand to SEQ ID NO: 1482980
auagaacucauuuaccucg

SEQ ID NO: 1482982 - RNA, 19 nt, Artificial Sequence
  Description of Artificial Sequence: Synthetic oligonucleotide
  Sense strand starting at position 502 of SEQ ID NO: 1244364
ugaguucuauccgucccaa

SEQ ID NO: 1482983 - RNA, 19 nt, Artificial Sequence
  Description of Artificial Sequence: Synthetic oligonucleotide
  Antisense strand to SEQ ID NO: 1482982
uugggacggauagaacuca

SEQ ID NO: 1482984 - RNA, 19 nt, Artificial Sequence
  Description of Artificial Sequence: Synthetic oligonucleotide
  Sense strand starting at position 784 of SEQ ID NO: 1244364
guucuucugcgacaggagu

SEQ ID NO: 1482985 - RNA, 19 nt, Artificial Sequence
  Description of Artificial Sequence: Synthetic oligonucleotide
  Antisense strand to SEQ ID NO: 1482984
acuccugucgcagaagaac

SEQ ID NO: 1482986 - RNA, 19 nt, Artificial Sequence
  Description of Artificial Sequence: Synthetic oligonucleotide
  Sense strand starting at position 1086 of SEQ ID NO: 1244364
cccagaacucuguguuuaa

SEQ ID NO: 1482987 - RNA, 19 nt, Artificial Sequence
  Description of Artificial Sequence: Synthetic oligonucleotide
  Antisense strand to SEQ ID NO: 1482986
uuaaacacagaguucuggg

SEQ ID NO: 1482988 - RNA, 19 nt, Artificial Sequence
  Description of Artificial Sequence: Synthetic oligonucleotide
  Sense strand starting at position 1087 of SEQ ID NO: 1244364
ccagaacucuguguuuaau

SEQ ID NO: 1482989 - RNA, 19 nt, Artificial Sequence
  Description of Artificial Sequence: Synthetic oligonucleotide
  Antisense strand to SEQ ID NO: 1482988
auuaaacacagaguucugg

SEQ ID NO: 1482990 - RNA, 19 nt, Artificial Sequence
  Description of Artificial Sequence: Synthetic oligonucleotide
  Sense strand starting at position 1097 of SEQ ID NO: 1244364
guguuuaauggcuaugacu

SEQ ID NO: 1482991 - RNA, 19 nt, Artificial Sequence
  Description of Artificial Sequence: Synthetic oligonucleotide
  Antisense strand to SEQ ID NO: 1482990
agucauagccauuaaacac

SEQ ID NO: 1482992 - RNA, 19 nt, Artificial Sequence
  Description of Artificial Sequence: Synthetic oligonucleotide
  Sense strand starting at position 1099 of SEQ ID NO: 1244364
guuuaauggcuaugacucu

SEQ ID NO: 1482993 - RNA, 19 nt, Artificial Sequence
  Description of Artificial Sequence: Synthetic oligonucleotide
  Antisense strand to SEQ ID NO: 1482992
agagucauagccauuaaac

SEQ ID NO: 1482994 - RNA, 19 nt, Artificial Sequence
  Description of Artificial Sequence: Synthetic oligonucleotide
  Sense strand starting at position 1105 of SEQ ID NO: 1244364
uggcuaugacucuaaugca

SEQ ID NO: 1482995 - RNA, 19 nt, Artificial Sequence
  Description of Artificial Sequence: Synthetic oligonucleotide
  Antisense strand to SEQ ID NO: 1482994
ugcauuagagucauagcca

SEQ ID NO: 1482996 - RNA, 19 nt, Artificial Sequence
  Description of Artificial Sequence: Synthetic oligonucleotide
  Sense strand starting at position 1123 of SEQ ID NO: 1244364
acguuugggagucauaacu

SEQ ID NO: 1482997 - RNA, 19 nt, Artificial Sequence
  Description of Artificial Sequence: Synthetic oligonucleotide
  Antisense strand to SEQ ID NO: 1482996
aguuaugacucccaaacgu

SEQ ID NO: 1482998 - RNA, 19 nt, Artificial Sequence
  Description of Artificial Sequence: Synthetic oligonucleotide
  Sense strand starting at position 1159 of SEQ ID NO: 1244364
gacaguuaaggcugggaga

SEQ ID NO: 1482999 - RNA, 19 nt, Artificial Sequence
  Description of Artificial Sequence: Synthetic oligonucleotide
  Antisense strand to SEQ ID NO: 1482998
ucucccagccuuaacuguc

SEQ ID NO: 1483000 - RNA, 19 nt, Artificial Sequence
  Description of Artificial Sequence: Synthetic oligonucleotide
  Sense strand starting at position 1333 of SEQ ID NO: 1244364
agugcuugacagugacgau

SEQ ID NO: 1483001 - RNA, 19 nt, Artificial Sequence
  Description of Artificial Sequence: Synthetic oligonucleotide
  Antisense strand to SEQ ID NO: 1483000
aucgucacugucaagcacu

SEQ ID NO: 1483002 - RNA, 19 nt, Artificial Sequence
  Description of Artificial Sequence: Synthetic oligonucleotide
  Sense strand starting at position 1425 of SEQ ID NO: 1244364
ccacucuggcuggacaaau

SEQ ID NO: 1483003 - RNA, 19 nt, Artificial Sequence
  Description of Artificial Sequence: Synthetic oligonucleotide
  Antisense strand to SEQ ID NO: 1483002
auuuguccagccagagugg

SEQ ID NO: 1483004 - RNA, 19 nt, Artificial Sequence
  Description of Artificial Sequence: Synthetic oligonucleotide
  Sense strand starting at position 1602 of SEQ ID NO: 1244364
uucggcauacucgaggauu

SEQ ID NO: 1483005 - RNA, 19 nt, Artificial Sequence
  Description of Artificial Sequence: Synthetic oligonucleotide
  Antisense strand to SEQ ID NO: 1483004
aauccucgaguaugccgaa

SEQ ID NO: 1483006 - RNA, 19 nt, Artificial Sequence
  Description of Artificial Sequence: Synthetic oligonucleotide
  Sense strand starting at position 2713 of SEQ ID NO: 1244364
cucggagaggauuaguuua

SEQ ID NO: 1483007 - RNA, 19 nt, Artificial Sequence
  Description of Artificial Sequence: Synthetic oligonucleotide
  Antisense strand to SEQ ID NO: 1483006
uaaacuaauccucuccgag

SEQ ID NO: 1483008 - RNA, 19 nt, Artificial Sequence
  Description of Artificial Sequence: Synthetic oligonucleotide
  Sense strand starting at position 2720 of SEQ ID NO: 1244364
aggauuaguuuagcaccua

SEQ ID NO: 1483009 - RNA, 19 nt, Artificial Sequence
  Description of Artificial Sequence: Synthetic oligonucleotide
  Antisense strand to SEQ ID NO: 1483008
uaggugcuaaacuaauccu

SEQ ID NO: 1483010 - RNA, 19 nt, Artificial Sequence
  Description of Artificial Sequence: Synthetic oligonucleotide
  Sense strand starting at position 2882 of SEQ ID NO: 1244364
cggguaguauuucaaggga

SEQ ID NO: 1483011 - RNA, 19 nt, Artificial Sequence
  Description of Artificial Sequence: Synthetic oligonucleotide
  Antisense strand to SEQ ID NO: 1483010
ucccuugaaauacuacccg

SEQ ID NO: 1483012 - RNA, 19 nt, Artificial Sequence
  Description of Artificial Sequence: Synthetic oligonucleotide
  Sense strand starting at position 2896 of SEQ ID NO: 1244364
agggaugacuaagagaaga

SEQ ID NO: 1483013 - RNA, 19 nt, Artificial Sequence
  Description of Artificial Sequence: Synthetic oligonucleotide
  Antisense strand to SEQ ID NO: 1483012
ucuucucuuagucaucccu

SEQ ID NO: 1483014 - RNA, 19 nt, Artificial Sequence
  Description of Artificial Sequence: Synthetic oligonucleotide
  Sense strand starting at position 2909 of SEQ ID NO: 1244364
agaagaugucagcggacuu

SEQ ID NO: 1483015 - RNA, 19 nt, Artificial Sequence
  Description of Artificial Sequence: Synthetic oligonucleotide
  Antisense strand to SEQ ID NO: 1483014
aaguccgcugacaucuucu

SEQ ID NO: 1483016 - RNA, 19 nt, Artificial Sequence
  Description of Artificial Sequence: Synthetic oligonucleotide
  Sense strand starting at position 3005 of SEQ ID NO: 1244364
ccaugaugugcuugaggaa

SEQ ID NO: 1483017 - RNA, 19 nt, Artificial Sequence
  Description of Artificial Sequence: Synthetic oligonucleotide
  Antisense strand to SEQ ID NO: 1483016
uuccucaagcacaucaugg

SEQ ID NO: 1483018 - RNA, 19 nt, Artificial Sequence
  Description of Artificial Sequence: Synthetic oligonucleotide
  Sense strand starting at position 3029 of SEQ ID NO: 1244364
gggucagacaccuggagua

SEQ ID NO: 1483019 - RNA, 19 nt, Artificial Sequence
  Description of Artificial Sequence: Synthetic oligonucleotide
  Antisense strand to SEQ ID NO: 1483018
uacuccaggugucugaccc

SEQ ID NO: 1483020 - RNA, 19 nt, Artificial Sequence
  Description of Artificial Sequence: Synthetic oligonucleotide
  Sense strand starting at position 3046 of SEQ ID NO: 1244364
uaauuuguguaggaucacu

SEQ ID NO: 1483021 - RNA, 19 nt, Artificial Sequence
  Description of Artificial Sequence: Synthetic oligonucleotide
  Antisense strand to SEQ ID NO: 1483020
agugauccuacacaaauua

SEQ ID NO: 1483022 - RNA, 19 nt, Artificial Sequence
  Description of Artificial Sequence: Synthetic oligonucleotide
  Sense strand starting at position 3230 of SEQ ID NO: 1244364
ggaaguuuaaguggacagu

SEQ ID NO: 1483023 - RNA, 19 nt, Artificial Sequence
  Description of Artificial Sequence: Synthetic oligonucleotide
  Antisense strand to SEQ ID NO: 1483022
acuguccacuuaaacuucc

SEQ ID NO: 1483024 - RNA, 19 nt, Artificial Sequence
  Description of Artificial Sequence: Synthetic oligonucleotide
  Sense strand starting at position 3372 of SEQ ID NO: 1244364
gcugggagucauggugagu

SEQ ID NO: 1483025 - RNA, 19 nt, Artificial Sequence
  Description of Artificial Sequence: Synthetic oligonucleotide
  Antisense strand to SEQ ID NO: 1483024
acucaccaugacucccagc

SEQ ID NO: 1483026 - RNA, 19 nt, Artificial Sequence
  Description of Artificial Sequence: Synthetic oligonucleotide
  Sense strand starting at position 3375 of SEQ ID NO: 1244364
gggagucauggugagucuu

SEQ ID NO: 1483027 - RNA, 19 nt, Artificial Sequence
  Description of Artificial Sequence: Synthetic oligonucleotide
  Antisense strand to SEQ ID NO: 1483026
aagacucaccaugacuccc

SEQ ID NO: 1483028 - RNA, 19 nt, Artificial Sequence
  Description of Artificial Sequence: Synthetic oligonucleotide
  Sense strand starting at position 3377 of SEQ ID NO: 1244364
gagucauggugagucuuua

SEQ ID NO: 1483029 - RNA, 19 nt, Artificial Sequence
  Description of Artificial Sequence: Synthetic oligonucleotide
  Antisense strand to SEQ ID NO: 1483028
uaaagacucaccaugacuc

SEQ ID NO: 1483030 - RNA, 19 nt, Artificial Sequence
  Description of Artificial Sequence: Synthetic oligonucleotide
  Sense strand starting at position 3381 of SEQ ID NO: 1244364
cauggugagucuuuaaaca

SEQ ID NO: 1483031 - RNA, 19 nt, Artificial Sequence
  Description of Artificial Sequence: Synthetic oligonucleotide
  Antisense strand to SEQ ID NO: 1483030
uguuuaaagacucaccaug

SEQ ID NO: 1483032 - RNA, 19 nt, Artificial Sequence
  Description of Artificial Sequence: Synthetic oligonucleotide
  Sense strand starting at position 3466 of SEQ ID NO: 1244364
gcagcugucgcucagggaa

SEQ ID NO: 1483033 - RNA, 19 nt, Artificial Sequence
  Description of Artificial Sequence: Synthetic oligonucleotide
  Antisense strand to SEQ ID NO: 1483032
uucccugagcgacagcugc

SEQ ID NO: 1483034 - RNA, 19 nt, Artificial Sequence
  Description of Artificial Sequence: Synthetic oligonucleotide
  Sense strand starting at position 3518 of SEQ ID NO: 1244364
cuuccagagcuguguacuu

SEQ ID NO: 1483035 - RNA, 19 nt, Artificial Sequence
  Description of Artificial Sequence: Synthetic oligonucleotide
  Antisense strand to SEQ ID NO: 1483034
aaguacacagcucuggaag

SEQ ID NO: 1483036 - RNA, 19 nt, Artificial Sequence
  Description of Artificial Sequence: Synthetic oligonucleotide
  Sense strand starting at position 3553 of SEQ ID NO: 1244364
guaaauaucccagggaggu

SEQ ID NO: 1483037 - RNA, 19 nt, Artificial Sequence
  Description of Artificial Sequence: Synthetic oligonucleotide
  Antisense strand to SEQ ID NO: 1483036
accucccugggauauuuac

SEQ ID NO: 1483038 - RNA, 19 nt, Artificial Sequence
  Description of Artificial Sequence: Synthetic oligonucleotide
  Sense strand starting at position 3566 of SEQ ID NO: 1244364
ggagguggauuucaacuua

SEQ ID NO: 1483039 - RNA, 19 nt, Artificial Sequence
  Description of Artificial Sequence: Synthetic oligonucleotide
  Antisense strand to SEQ ID NO: 1483038
uaaguugaaauccaccucc

SEQ ID NO: 1483040 - RNA, 19 nt, Artificial Sequence
  Description of Artificial Sequence: Synthetic oligonucleotide
  Sense strand starting at position 3628 of SEQ ID NO: 1244364
agaucaaaguccuuuggca

SEQ ID NO: 1483041 - RNA, 19 nt, Artificial Sequence
  Description of Artificial Sequence: Synthetic oligonucleotide
  Antisense strand to SEQ ID NO: 1483040
ugccaaaggacuuugaucu

SEQ ID NO: 1483042 - RNA, 19 nt, Artificial Sequence
  Description of Artificial Sequence: Synthetic oligonucleotide
  Sense strand starting at position 3775 of SEQ ID NO: 1244364
ugauauaaugcuuguuaag

SEQ ID NO: 1483043 - RNA, 19 nt, Artificial Sequence
  Description of Artificial Sequence: Synthetic oligonucleotide
  Antisense strand to SEQ ID NO: 1483042
cuuaacaagcauuauauca

SEQ ID NO: 1483044 - RNA, 19 nt, Artificial Sequence
  Description of Artificial Sequence: Synthetic oligonucleotide
  Sense strand starting at position 3787 of SEQ ID NO: 1244364
uguuaaguagcauaauguu

SEQ ID NO: 1483045 - RNA, 19 nt, Artificial Sequence
  Description of Artificial Sequence: Synthetic oligonucleotide
  Antisense strand to SEQ ID NO: 1483044
aacauuaugcuacuuaaca

SEQ ID NO: 1483046 - RNA, 19 nt, Artificial Sequence
  Description of Artificial Sequence: Synthetic oligonucleotide
  Sense strand starting at position 3796 of SEQ ID NO: 1244364
gcauaauguuaauugguga

SEQ ID NO: 1483047 - RNA, 19 nt, Artificial Sequence
  Description of Artificial Sequence: Synthetic oligonucleotide
  Antisense strand to SEQ ID NO: 1483046
ucaccaauuaacauuaugc

SEQ ID NO: 1483048 - RNA, 19 nt, Artificial Sequence
  Description of Artificial Sequence: Synthetic oligonucleotide
  Sense strand starting at position 3799 of SEQ ID NO: 1244364
uaauguuaauuggugaauc

SEQ ID NO: 1483049 - RNA, 19 nt, Artificial Sequence
  Description of Artificial Sequence: Synthetic oligonucleotide
  Antisense strand to SEQ ID NO: 1483048
gauucaccaauuaacauua

SEQ ID NO: 1483050 - RNA, 19 nt, Artificial Sequence
  Description of Artificial Sequence: Synthetic oligonucleotide
  Sense strand starting at position 3801 of SEQ ID NO: 1244364
auguuaauuggugaaucua

SEQ ID NO: 1483051 - RNA, 19 nt, Artificial Sequence
  Description of Artificial Sequence: Synthetic oligonucleotide
  Antisense strand to SEQ ID NO: 1483050
uagauucaccaauuaacau

SEQ ID NO: 1483052 - RNA, 19 nt, Artificial Sequence
  Description of Artificial Sequence: Synthetic oligonucleotide
  Sense strand starting at position 109 of SEQ ID NO: 1244365
uaaagugugcucuggagcu

SEQ ID NO: 1483053 - RNA, 19 nt, Artificial Sequence
  Description of Artificial Sequence: Synthetic oligonucleotide
  Antisense strand to SEQ ID NO: 1483052
agcuccagagcacacuuua

SEQ ID NO: 1483054 - RNA, 19 nt, Artificial Sequence
  Description of Artificial Sequence: Synthetic oligonucleotide
  Sense strand starting at position 273 of SEQ ID NO: 1244365
guuugugucugucccacau

SEQ ID NO: 1483055 - RNA, 19 nt, Artificial Sequence
  Description of Artificial Sequence: Synthetic oligonucleotide
  Antisense strand to SEQ ID NO: 1483054
augugggacagacacaaac

SEQ ID NO: 1483056 - RNA, 19 nt, Artificial Sequence
  Description of Artificial Sequence: Synthetic oligonucleotide
  Sense strand starting at position 366 of SEQ ID NO: 1244365
uuucccaucuggcagauau

SEQ ID NO: 1483057 - RNA, 19 nt, Artificial Sequence
  Description of Artificial Sequence: Synthetic oligonucleotide
  Antisense strand to SEQ ID NO: 1483056
auaucugccagaugggaaa

SEQ ID NO: 1483058 - RNA, 19 nt, Artificial Sequence
  Description of Artificial Sequence: Synthetic oligonucleotide
  Sense strand starting at position 385 of SEQ ID NO: 1244365
gugucuugugccuacguca

SEQ ID NO: 1483059 - RNA, 19 nt, Artificial Sequence
  Description of Artificial Sequence: Synthetic oligonucleotide
  Antisense strand to SEQ ID NO: 1483058
ugacguaggcacaagacac

SEQ ID NO: 1483060 - RNA, 19 nt, Artificial Sequence
  Description of Artificial Sequence: Synthetic oligonucleotide
  Sense strand starting at position 460 of SEQ ID NO: 1244365
gcugucugguccuugcaca

SEQ ID NO: 1483061 - RNA, 19 nt, Artificial Sequence
  Description of Artificial Sequence: Synthetic oligonucleotide
  Antisense strand to SEQ ID NO: 1483060
ugugcaaggaccagacagc

SEQ ID NO: 1483062 - RNA, 19 nt, Artificial Sequence
  Description of Artificial Sequence: Synthetic oligonucleotide
  Sense strand starting at position 461 of SEQ ID NO: 1244365
cugucugguccuugcacaa

SEQ ID NO: 1483063 - RNA, 19 nt, Artificial Sequence
  Description of Artificial Sequence: Synthetic oligonucleotide
  Antisense strand to SEQ ID NO: 1483062
uugugcaaggaccagacag

SEQ ID NO: 1483064 - RNA, 19 nt, Artificial Sequence
  Description of Artificial Sequence: Synthetic oligonucleotide
  Sense strand starting at position 593 of SEQ ID NO: 1244365
ggaaguggaucuuuccuuu

SEQ ID NO: 1483065 - RNA, 19 nt, Artificial Sequence
  Description of Artificial Sequence: Synthetic oligonucleotide
  Antisense strand to SEQ ID NO: 1483064
aaaggaaagauccacuucc

SEQ ID NO: 1483066 - RNA, 19 nt, Artificial Sequence
  Description of Artificial Sequence: Synthetic oligonucleotide
  Sense strand starting at position 614 of SEQ ID NO: 1244365
acucuuagauucuuggcga

SEQ ID NO: 1483067 - RNA, 19 nt, Artificial Sequence
  Description of Artificial Sequence: Synthetic oligonucleotide
  Antisense strand to SEQ ID NO: 1483066
ucgccaagaaucuaagagu

SEQ ID NO: 1483068 - RNA, 19 nt, Artificial Sequence
  Description of Artificial Sequence: Synthetic oligonucleotide
  Sense strand starting at position 615 of SEQ ID NO: 1244365
cucuuagauucuuggcgag

SEQ ID NO: 1483069 - RNA, 19 nt, Artificial Sequence
  Description of Artificial Sequence: Synthetic oligonucleotide
  Antisense strand to SEQ ID NO: 1483068
cucgccaagaaucuaagag

SEQ ID NO: 1483070 - RNA, 19 nt, Artificial Sequence
  Description of Artificial Sequence: Synthetic oligonucleotide
  Sense strand starting at position 618 of SEQ ID NO: 1244365
uuagauucuuggcgaggga

SEQ ID NO: 1483071 - RNA, 19 nt, Artificial Sequence
  Description of Artificial Sequence: Synthetic oligonucleotide
  Antisense strand to SEQ ID NO: 1483070
ucccucgccaagaaucuaa

SEQ ID NO: 1483072 - RNA, 19 nt, Artificial Sequence
  Description of Artificial Sequence: Synthetic oligonucleotide
  Sense strand starting at position 619 of SEQ ID NO: 1244365
uagauucuuggcgagggau

SEQ ID NO: 1483073 - RNA, 19 nt, Artificial Sequence
  Description of Artificial Sequence: Synthetic oligonucleotide
  Antisense strand to SEQ ID NO: 1483072
aucccucgccaagaaucua

SEQ ID NO: 1483074 - RNA, 19 nt, Artificial Sequence
  Description of Artificial Sequence: Synthetic oligonucleotide
  Sense strand starting at position 621 of SEQ ID NO: 1244365
gauucuuggcgagggaucu

SEQ ID NO: 1483075 - RNA, 19 nt, Artificial Sequence
  Description of Artificial Sequence: Synthetic oligonucleotide
  Antisense strand to SEQ ID NO: 1483074
agaucccucgccaagaauc

SEQ ID NO: 1483076 - RNA, 19 nt, Artificial Sequence
  Description of Artificial Sequence: Synthetic oligonucleotide
  Sense strand starting at position 925 of SEQ ID NO: 1244365
ccacaagccuccuugaaga

SEQ ID NO: 1483077 - RNA, 19 nt, Artificial Sequence
  Description of Artificial Sequence: Synthetic oligonucleotide
  Antisense strand to SEQ ID NO: 1483076
ucuucaaggaggcuugugg

SEQ ID NO: 1483078 - RNA, 19 nt, Artificial Sequence
  Description of Artificial Sequence: Synthetic oligonucleotide
  Sense strand starting at position 1368 of SEQ ID NO: 1244365
acacacgcuucuggagaaa

SEQ ID NO: 1483079 - RNA, 19 nt, Artificial Sequence
  Description of Artificial Sequence: Synthetic oligonucleotide
  Antisense strand to SEQ ID NO: 1483078
uuucuccagaagcgugugu

SEQ ID NO: 1483080 - RNA, 19 nt, Artificial Sequence
  Description of Artificial Sequence: Synthetic oligonucleotide
  Sense strand starting at position 2586 of SEQ ID NO: 1244365
cacaguuacucaguguuac

SEQ ID NO: 1483081 - RNA, 19 nt, Artificial Sequence
  Description of Artificial Sequence: Synthetic oligonucleotide
  Antisense strand to SEQ ID NO: 1483080
guaacacugaguaacugug

SEQ ID NO: 1483082 - RNA, 19 nt, Artificial Sequence
  Description of Artificial Sequence: Synthetic oligonucleotide
  Sense strand starting at position 2682 of SEQ ID NO: 1244365
ccugccugaccuugggaaa

SEQ ID NO: 1483083 - RNA, 19 nt, Artificial Sequence
  Description of Artificial Sequence: Synthetic oligonucleotide
  Antisense strand to SEQ ID NO: 1483082
uuucccaaggucaggcagg

SEQ ID NO: 1483084 - RNA, 19 nt, Artificial Sequence
  Description of Artificial Sequence: Synthetic oligonucleotide
  Sense strand starting at position 2768 of SEQ ID NO: 1244365
uuucuccuaccacgaguaa

SEQ ID NO: 1483085 - RNA, 19 nt, Artificial Sequence
  Description of Artificial Sequence: Synthetic oligonucleotide
  Antisense strand to SEQ ID NO: 1483084
uuacucgugguaggagaaa

SEQ ID NO: 1483086 - RNA, 19 nt, Artificial Sequence
  Description of Artificial Sequence: Synthetic oligonucleotide
  Sense strand starting at position 2769 of SEQ ID NO: 1244365
uucuccuaccacgaguaau

SEQ ID NO: 1483087 - RNA, 19 nt, Artificial Sequence
  Description of Artificial Sequence: Synthetic oligonucleotide
  Antisense strand to SEQ ID NO: 1483086
auuacucgugguaggagaa

SEQ ID NO: 1483088 - RNA, 19 nt, Artificial Sequence
  Description of Artificial Sequence: Synthetic oligonucleotide
  Sense strand starting at position 2772 of SEQ ID NO: 1244365
uccuaccacgaguaaucaa

SEQ ID NO: 1483089 - RNA, 19 nt, Artificial Sequence
  Description of Artificial Sequence: Synthetic oligonucleotide
  Antisense strand to SEQ ID NO: 1483088
uugauuacucgugguagga

SEQ ID NO: 1483090 - RNA, 19 nt, Artificial Sequence
  Description of Artificial Sequence: Synthetic oligonucleotide
  Sense strand starting at position 2966 of SEQ ID NO: 1244365
uuguauuguuuccuaucuu

SEQ ID NO: 1483091 - RNA, 19 nt, Artificial Sequence
  Description of Artificial Sequence: Synthetic oligonucleotide
  Antisense strand to SEQ ID NO: 1483090
aagauaggaaacaauacaa

SEQ ID NO: 1483092 - RNA, 19 nt, Artificial Sequence
  Description of Artificial Sequence: Synthetic oligonucleotide
  Sense strand starting at position 2967 of SEQ ID NO: 1244365
uguauuguuuccuaucuug

SEQ ID NO: 1483093 - RNA, 19 nt, Artificial Sequence
  Description of Artificial Sequence: Synthetic oligonucleotide
  Antisense strand to SEQ ID NO: 1483092
caagauaggaaacaauaca

SEQ ID NO: 1483094 - RNA, 19 nt, Artificial Sequence
  Description of Artificial Sequence: Synthetic oligonucleotide
  Sense strand starting at position 3035 of SEQ ID NO: 1244365
uuccuccuaucuuggguaa

SEQ ID NO: 1483095 - RNA, 19 nt, Artificial Sequence
  Description of Artificial Sequence: Synthetic oligonucleotide
  Antisense strand to SEQ ID NO: 1483094
uuacccaagauaggaggaa

SEQ ID NO: 1483096 - RNA, 19 nt, Artificial Sequence
  Description of Artificial Sequence: Synthetic oligonucleotide
  Sense strand starting at position 3036 of SEQ ID NO: 1244365
uccuccuaucuuggguaaa

SEQ ID NO: 1483097 - RNA, 19 nt, Artificial Sequence
  Description of Artificial Sequence: Synthetic oligonucleotide
  Antisense strand to SEQ ID NO: 1483096
uuuacccaagauaggagga

SEQ ID NO: 1483098 - RNA, 19 nt, Artificial Sequence
  Description of Artificial Sequence: Synthetic oligonucleotide
  Sense strand starting at position 3037 of SEQ ID NO: 1244365
ccuccuaucuuggguaaau

SEQ ID NO: 1483099 - RNA, 19 nt, Artificial Sequence
  Description of Artificial Sequence: Synthetic oligonucleotide
  Antisense strand to SEQ ID NO: 1483098
auuuacccaagauaggagg

SEQ ID NO: 1483100 - RNA, 19 nt, Artificial Sequence
  Description of Artificial Sequence: Synthetic oligonucleotide
  Sense strand starting at position 3038 of SEQ ID NO: 1244365
cuccuaucuuggguaaaug

SEQ ID NO: 1483101 - RNA, 19 nt, Artificial Sequence
  Description of Artificial Sequence: Synthetic oligonucleotide
  Antisense strand to SEQ ID NO: 1483100
cauuuacccaagauaggag

SEQ ID NO: 1483102 - RNA, 19 nt, Artificial Sequence
  Description of Artificial Sequence: Synthetic oligonucleotide
  Sense strand starting at position 3039 of SEQ ID NO: 1244365
uccuaucuuggguaaaugu

SEQ ID NO: 1483103 - RNA, 19 nt, Artificial Sequence
  Description of Artificial Sequence: Synthetic oligonucleotide
  Antisense strand to SEQ ID NO: 1483102
acauuuacccaagauagga

SEQ ID NO: 1483104 - RNA, 19 nt, Artificial Sequence
  Description of Artificial Sequence: Synthetic oligonucleotide
  Sense strand starting at position 3086 of SEQ ID NO: 1244365
gucagaaaugcucacucgu

SEQ ID NO: 1483105 - RNA, 19 nt, Artificial Sequence
  Description of Artificial Sequence: Synthetic oligonucleotide
  Antisense strand to SEQ ID NO: 1483104
acgagugagcauuucugac

SEQ ID NO: 1483106 - RNA, 19 nt, Artificial Sequence
  Description of Artificial Sequence: Synthetic oligonucleotide
  Sense strand starting at position 3088 of SEQ ID NO: 1244365
cagaaaugcucacucgucu

SEQ ID NO: 1483107 - RNA, 19 nt, Artificial Sequence
  Description of Artificial Sequence: Synthetic oligonucleotide
  Antisense strand to SEQ ID NO: 1483106
agacgagugagcauuucug

SEQ ID NO: 1483108 - RNA, 19 nt, Artificial Sequence
  Description of Artificial Sequence: Synthetic oligonucleotide
  Sense strand starting at position 3138 of SEQ ID NO: 1244365
uaaacaguccagugguaau

SEQ ID NO: 1483109 - RNA, 19 nt, Artificial Sequence
  Description of Artificial Sequence: Synthetic oligonucleotide
  Antisense strand to SEQ ID NO: 1483108
auuaccacuggacuguuua

SEQ ID NO: 1483110 - RNA, 19 nt, Artificial Sequence
  Description of Artificial Sequence: Synthetic oligonucleotide
  Sense strand starting at position 3141 of SEQ ID NO: 1244365
acaguccagugguaauaga

SEQ ID NO: 1483111 - RNA, 19 nt, Artificial Sequence
  Description of Artificial Sequence: Synthetic oligonucleotide
  Antisense strand to SEQ ID NO: 1483110
ucuauuaccacuggacugu

SEQ ID NO: 1483112 - RNA, 19 nt, Artificial Sequence
  Description of Artificial Sequence: Synthetic oligonucleotide
  Sense strand starting at position 3152 of SEQ ID NO: 1244365
guaauagagccucgaagca

SEQ ID NO: 1483113 - RNA, 19 nt, Artificial Sequence
  Description of Artificial Sequence: Synthetic oligonucleotide
  Antisense strand to SEQ ID NO: 1483112
ugcuucgaggcucuauuac

SEQ ID NO: 1483114 - RNA, 19 nt, Artificial Sequence
  Description of Artificial Sequence: Synthetic oligonucleotide
  Sense strand starting at position 3327 of SEQ ID NO: 1244365
ugggacaugucuucuuggu

SEQ ID NO: 1483115 - RNA, 19 nt, Artificial Sequence
  Description of Artificial Sequence: Synthetic oligonucleotide
  Antisense strand to SEQ ID NO: 1483114
accaagaagacauguccca

SEQ ID NO: 1483116 - RNA, 19 nt, Artificial Sequence
  Description of Artificial Sequence: Synthetic oligonucleotide
  Sense strand starting at position 3329 of SEQ ID NO: 1244365
ggacaugucuucuuggugu

SEQ ID NO: 1483117 - RNA, 19 nt, Artificial Sequence
  Description of Artificial Sequence: Synthetic oligonucleotide
  Antisense strand to SEQ ID NO: 1483116
acaccaagaagacaugucc

SEQ ID NO: 1483118 - RNA, 19 nt, Artificial Sequence
  Description of Artificial Sequence: Synthetic oligonucleotide
  Sense strand starting at position 3439 of SEQ ID NO: 1244365
ccuguaaucucugaaggau

SEQ ID NO: 1483119 - RNA, 19 nt, Artificial Sequence
  Description of Artificial Sequence: Synthetic oligonucleotide
  Antisense strand to SEQ ID NO: 1483118
auccuucagagauuacagg

SEQ ID NO: 1483120 - RNA, 19 nt, Artificial Sequence
  Description of Artificial Sequence: Synthetic oligonucleotide
  Sense strand starting at position 3742 of SEQ ID NO: 1244365
gacugcuagcccugugcua

SEQ ID NO: 1483121 - RNA, 19 nt, Artificial Sequence
  Description of Artificial Sequence: Synthetic oligonucleotide
  Antisense strand to SEQ ID NO: 1483120
uagcacagggcuagcaguc

SEQ ID NO: 1483122 - RNA, 19 nt, Artificial Sequence
  Description of Artificial Sequence: Synthetic oligonucleotide
  Sense strand starting at position 3754 of SEQ ID NO: 1244365
ugugcuagcugcuagagaa

SEQ ID NO: 1483123 - RNA, 19 nt, Artificial Sequence
  Description of Artificial Sequence: Synthetic oligonucleotide
  Antisense strand to SEQ ID NO: 1483122
uucucuagcagcuagcaca

SEQ ID NO: 1483124 - RNA, 19 nt, Artificial Sequence
  Description of Artificial Sequence: Synthetic oligonucleotide
  Sense strand starting at position 3839 of SEQ ID NO: 1244365
ugccauauuccaggcaaag

SEQ ID NO: 1483125 - RNA, 19 nt, Artificial Sequence
  Description of Artificial Sequence: Synthetic oligonucleotide
  Antisense strand to SEQ ID NO: 1483124
cuuugccuggaauauggca

SEQ ID NO: 1483126 - RNA, 19 nt, Artificial Sequence
  Description of Artificial Sequence: Synthetic oligonucleotide
  Sense strand starting at position 3901 of SEQ ID NO: 1244365
gggacagagguugguucaa

SEQ ID NO: 1483127 - RNA, 19 nt, Artificial Sequence
  Description of Artificial Sequence: Synthetic oligonucleotide
  Antisense strand to SEQ ID NO: 1483126
uugaaccaaccucuguccc

SEQ ID NO: 1483128 - RNA, 19 nt, Artificial Sequence
  Description of Artificial Sequence: Synthetic oligonucleotide
  Sense strand starting at position 3933 of SEQ ID NO: 1244365
aguucuagucucugucaag

SEQ ID NO: 1483129 - RNA, 19 nt, Artificial Sequence
  Description of Artificial Sequence: Synthetic oligonucleotide
  Antisense strand to SEQ ID NO: 1483128
cuugacagagacuagaacu

SEQ ID NO: 1483130 - RNA, 19 nt, Artificial Sequence
  Description of Artificial Sequence: Synthetic oligonucleotide
  Sense strand starting at position 3940 of SEQ ID NO: 1244365
gucucugucaagggugaga

SEQ ID NO: 1483131 - RNA, 19 nt, Artificial Sequence
  Description of Artificial Sequence: Synthetic oligonucleotide
  Antisense strand to SEQ ID NO: 1483130
ucucacccuugacagagac

SEQ ID NO: 1483132 - RNA, 19 nt, Artificial Sequence
  Description of Artificial Sequence: Synthetic oligonucleotide
  Sense strand starting at position 343 of SEQ ID NO: 1244366
agcguuguucuagacaggu

SEQ ID NO: 1483133 - RNA, 19 nt, Artificial Sequence
  Description of Artificial Sequence: Synthetic oligonucleotide
  Antisense strand to SEQ ID NO: 1483132
accugucuagaacaacgcu

SEQ ID NO: 1483134 - RNA, 19 nt, Artificial Sequence
  Description of Artificial Sequence: Synthetic oligonucleotide
  Sense strand starting at position 386 of SEQ ID NO: 1244366
agggaaauuucucacccug

SEQ ID NO: 1483135 - RNA, 19 nt, Artificial Sequence
  Description of Artificial Sequence: Synthetic oligonucleotide
  Antisense strand to SEQ ID NO: 1483134
cagggugagaaauuucccu

SEQ ID NO: 1483136 - RNA, 19 nt, Artificial Sequence
  Description of Artificial Sequence: Synthetic oligonucleotide
  Sense strand starting at position 444 of SEQ ID NO: 1244366
auuccauaugcagagcaau

SEQ ID NO: 1483137 - RNA, 19 nt, Artificial Sequence
  Description of Artificial Sequence: Synthetic oligonucleotide
  Antisense strand to SEQ ID NO: 1483136
auugcucugcauauggaau

SEQ ID NO: 1483138 - RNA, 19 nt, Artificial Sequence
  Description of Artificial Sequence: Synthetic oligonucleotide
  Sense strand starting at position 470 of SEQ ID NO: 1244366
ccuuguguccagcaaggga

SEQ ID NO: 1483139 - RNA, 19 nt, Artificial Sequence
  Description of Artificial Sequence: Synthetic oligonucleotide
  Antisense strand to SEQ ID NO: 1483138
ucccuugcuggacacaagg

SEQ ID NO: 1483140 - RNA, 19 nt, Artificial Sequence
  Description of Artificial Sequence: Synthetic oligonucleotide
  Sense strand starting at position 526 of SEQ ID NO: 1244366
caagguuugucucuugcua

SEQ ID NO: 1483141 - RNA, 19 nt, Artificial Sequence
  Description of Artificial Sequence: Synthetic oligonucleotide
  Antisense strand to SEQ ID NO: 1483140
uagcaagagacaaaccuug

SEQ ID NO: 1483142 - RNA, 19 nt, Artificial Sequence
  Description of Artificial Sequence: Synthetic oligonucleotide
  Sense strand starting at position 528 of SEQ ID NO: 1244366
agguuugucucuugcuaga

SEQ ID NO: 1483143 - RNA, 19 nt, Artificial Sequence
  Description of Artificial Sequence: Synthetic oligonucleotide
  Antisense strand to SEQ ID NO: 1483142
ucuagcaagagacaaaccu

SEQ ID NO: 1483144 - RNA, 19 nt, Artificial Sequence
  Description of Artificial Sequence: Synthetic oligonucleotide
  Sense strand starting at position 530 of SEQ ID NO: 1244366
guuugucucuugcuagaua

SEQ ID NO: 1483145 - RNA, 19 nt, Artificial Sequence
  Description of Artificial Sequence: Synthetic oligonucleotide
  Antisense strand to SEQ ID NO: 1483144
uaucuagcaagagacaaac

SEQ ID NO: 1483146 - RNA, 19 nt, Artificial Sequence
  Description of Artificial Sequence: Synthetic oligonucleotide
  Sense strand starting at position 533 of SEQ ID NO: 1244366
ugucucuugcuagauacua

SEQ ID NO: 1483147 - RNA, 19 nt, Artificial Sequence
  Description of Artificial Sequence: Synthetic oligonucleotide
  Antisense strand to SEQ ID NO: 1483146
uaguaucuagcaagagaca

SEQ ID NO: 1483148 - RNA, 19 nt, Artificial Sequence
  Description of Artificial Sequence: Synthetic oligonucleotide
  Sense strand starting at position 541 of SEQ ID NO: 1244366
gcuagauacuaauggcaua

SEQ ID NO: 1483149 - RNA, 19 nt, Artificial Sequence
  Description of Artificial Sequence: Synthetic oligonucleotide
  Antisense strand to SEQ ID NO: 1483148
uaugccauuaguaucuagc

SEQ ID NO: 1483150 - RNA, 19 nt, Artificial Sequence
  Description of Artificial Sequence: Synthetic oligonucleotide
  Sense strand starting at position 555 of SEQ ID NO: 1244366
gcauaaagaucuucuuguu

SEQ ID NO: 1483151 - RNA, 19 nt, Artificial Sequence
  Description of Artificial Sequence: Synthetic oligonucleotide
  Antisense strand to SEQ ID NO: 1483150
aacaagaagaucuuuaugc

SEQ ID NO: 1483152 - RNA, 19 nt, Artificial Sequence
  Description of Artificial Sequence: Synthetic oligonucleotide
  Sense strand starting at position 594 of SEQ ID NO: 1244366
gcccuauucgaggaacuca

SEQ ID NO: 1483153 - RNA, 19 nt, Artificial Sequence
  Description of Artificial Sequence: Synthetic oligonucleotide
  Antisense strand to SEQ ID NO: 1483152
ugaguuccucgaauagggc

SEQ ID NO: 1483154 - RNA, 19 nt, Artificial Sequence
  Description of Artificial Sequence: Synthetic oligonucleotide
  Sense strand starting at position 689 of SEQ ID NO: 1244366
gaggcugacuuacagaaga

SEQ ID NO: 1483155 - RNA, 19 nt, Artificial Sequence
  Description of Artificial Sequence: Synthetic oligonucleotide
  Antisense strand to SEQ ID NO: 1483154
ucuucuguaagucagccuc

SEQ ID NO: 1483156 - RNA, 19 nt, Artificial Sequence
  Description of Artificial Sequence: Synthetic oligonucleotide
  Sense strand starting at position 747 of SEQ ID NO: 1244366
gguauaacgcuaggaagaa

SEQ ID NO: 1483157 - RNA, 19 nt, Artificial Sequence
  Description of Artificial Sequence: Synthetic oligonucleotide
  Antisense strand to SEQ ID NO: 1483156
uucuuccuagcguuauacc

SEQ ID NO: 1483158 - RNA, 19 nt, Artificial Sequence
  Description of Artificial Sequence: Synthetic oligonucleotide
  Sense strand starting at position 748 of SEQ ID NO: 1244366
guauaacgcuaggaagaau

SEQ ID NO: 1483159 - RNA, 19 nt, Artificial Sequence
  Description of Artificial Sequence: Synthetic oligonucleotide
  Antisense strand to SEQ ID NO: 1483158
auucuuccuagcguuauac

SEQ ID NO: 1483160 - RNA, 19 nt, Artificial Sequence
  Description of Artificial Sequence: Synthetic oligonucleotide
  Sense strand starting at position 1129 of SEQ ID NO: 1244366
ggaugagaguucugggaca

SEQ ID NO: 1483161 - RNA, 19 nt, Artificial Sequence
  Description of Artificial Sequence: Synthetic oligonucleotide
  Antisense strand to SEQ ID NO: 1483160
ugucccagaacucucaucc

SEQ ID NO: 1483162 - RNA, 19 nt, Artificial Sequence
  Description of Artificial Sequence: Synthetic oligonucleotide
  Sense strand starting at position 2356 of SEQ ID NO: 1244366
cgcugauucucuuccuaag

SEQ ID NO: 1483163 - RNA, 19 nt, Artificial Sequence
  Description of Artificial Sequence: Synthetic oligonucleotide
  Antisense strand to SEQ ID NO: 1483162
cuuaggaagagaaucagcg

SEQ ID NO: 1483164 - RNA, 19 nt, Artificial Sequence
  Description of Artificial Sequence: Synthetic oligonucleotide
  Sense strand starting at position 2359 of SEQ ID NO: 1244366
ugauucucuuccuaaguga

SEQ ID NO: 1483165 - RNA, 19 nt, Artificial Sequence
  Description of Artificial Sequence: Synthetic oligonucleotide
  Antisense strand to SEQ ID NO: 1483164
ucacuuaggaagagaauca

SEQ ID NO: 1483166 - RNA, 19 nt, Artificial Sequence
  Description of Artificial Sequence: Synthetic oligonucleotide
  Sense strand starting at position 2387 of SEQ ID NO: 1244366
ugucguguuccugcugaca

SEQ ID NO: 1483167 - RNA, 19 nt, Artificial Sequence
  Description of Artificial Sequence: Synthetic oligonucleotide
  Antisense strand to SEQ ID NO: 1483166
ugucagcaggaacacgaca

SEQ ID NO: 1483168 - RNA, 19 nt, Artificial Sequence
  Description of Artificial Sequence: Synthetic oligonucleotide
  Sense strand starting at position 2389 of SEQ ID NO: 1244366
ucguguuccugcugacaag

SEQ ID NO: 1483169 - RNA, 19 nt, Artificial Sequence
  Description of Artificial Sequence: Synthetic oligonucleotide
  Antisense strand to SEQ ID NO: 1483168
cuugucagcaggaacacga

SEQ ID NO: 1483170 - RNA, 19 nt, Artificial Sequence
  Description of Artificial Sequence: Synthetic oligonucleotide
  Sense strand starting at position 2430 of SEQ ID NO: 1244366
agguaauggcgagacucuu

SEQ ID NO: 1483171 - RNA, 19 nt, Artificial Sequence
  Description of Artificial Sequence: Synthetic oligonucleotide
  Antisense strand to SEQ ID NO: 1483170
aagagucucgccauuaccu

SEQ ID NO: 1483172 - RNA, 19 nt, Artificial Sequence
  Description of Artificial Sequence: Synthetic oligonucleotide
  Sense strand starting at position 2528 of SEQ ID NO: 1244366
ugcuuaaguucugagcugu

SEQ ID NO: 1483173 - RNA, 19 nt, Artificial Sequence
  Description of Artificial Sequence: Synthetic oligonucleotide
  Antisense strand to SEQ ID NO: 1483172
acagcucagaacuuaagca

SEQ ID NO: 1483174 - RNA, 19 nt, Artificial Sequence
  Description of Artificial Sequence: Synthetic oligonucleotide
  Sense strand starting at position 2590 of SEQ ID NO: 1244366
accugucuucgcuuuguca

SEQ ID NO: 1483175 - RNA, 19 nt, Artificial Sequence
  Description of Artificial Sequence: Synthetic oligonucleotide
  Antisense strand to SEQ ID NO: 1483174
ugacaaagcgaagacaggu

SEQ ID NO: 1483176 - RNA, 19 nt, Artificial Sequence
  Description of Artificial Sequence: Synthetic oligonucleotide
  Sense strand starting at position 2591 of SEQ ID NO: 1244366
ccugucuucgcuuugucaa

SEQ ID NO: 1483177 - RNA, 19 nt, Artificial Sequence
  Description of Artificial Sequence: Synthetic oligonucleotide
  Antisense strand to SEQ ID NO: 1483176
uugacaaagcgaagacagg

SEQ ID NO: 1483178 - RNA, 19 nt, Artificial Sequence
  Description of Artificial Sequence: Synthetic oligonucleotide
  Sense strand starting at position 2592 of SEQ ID NO: 1244366
cugucuucgcuuugucaaa

SEQ ID NO: 1483179 - RNA, 19 nt, Artificial Sequence
  Description of Artificial Sequence: Synthetic oligonucleotide
  Antisense strand to SEQ ID NO: 1483178
uuugacaaagcgaagacag

SEQ ID NO: 1483180 - RNA, 19 nt, Artificial Sequence
  Description of Artificial Sequence: Synthetic oligonucleotide
  Sense strand starting at position 2593 of SEQ ID NO: 1244366
ugucuucgcuuugucaaac

SEQ ID NO: 1483181 - RNA, 19 nt, Artificial Sequence
  Description of Artificial Sequence: Synthetic oligonucleotide
  Antisense strand to SEQ ID NO: 1483180
guuugacaaagcgaagaca

SEQ ID NO: 1483182 - RNA, 19 nt, Artificial Sequence
  Description of Artificial Sequence: Synthetic oligonucleotide
  Sense strand starting at position 2594 of SEQ ID NO: 1244366
gucuucgcuuugucaaacu

SEQ ID NO: 1483183 - RNA, 19 nt, Artificial Sequence
  Description of Artificial Sequence: Synthetic oligonucleotide
  Antisense strand to SEQ ID NO: 1483182
aguuugacaaagcgaagac

SEQ ID NO: 1483184 - RNA, 19 nt, Artificial Sequence
  Description of Artificial Sequence: Synthetic oligonucleotide
  Sense strand starting at position 2603 of SEQ ID NO: 1244366
uugucaaacuccuacaugu

SEQ ID NO: 1483185 - RNA, 19 nt, Artificial Sequence
  Description of Artificial Sequence: Synthetic oligonucleotide
  Antisense strand to SEQ ID NO: 1483184
acauguaggaguuugacaa

SEQ ID NO: 1483186 - RNA, 19 nt, Artificial Sequence
  Description of Artificial Sequence: Synthetic oligonucleotide
  Sense strand starting at position 2605 of SEQ ID NO: 1244366
gucaaacuccuacauguuu

SEQ ID NO: 1483187 - RNA, 19 nt, Artificial Sequence
  Description of Artificial Sequence: Synthetic oligonucleotide
  Antisense strand to SEQ ID NO: 1483186
aaacauguaggaguuugac

SEQ ID NO: 1483188 - RNA, 19 nt, Artificial Sequence
  Description of Artificial Sequence: Synthetic oligonucleotide
  Sense strand starting at position 2663 of SEQ ID NO: 1244366
uccauacucccaugaguga

SEQ ID NO: 1483189 - RNA, 19 nt, Artificial Sequence
  Description of Artificial Sequence: Synthetic oligonucleotide
  Antisense strand to SEQ ID NO: 1483188
ucacucaugggaguaugga

SEQ ID NO: 1483190 - RNA, 19 nt, Artificial Sequence
  Description of Artificial Sequence: Synthetic oligonucleotide
  Sense strand starting at position 2713 of SEQ ID NO: 1244366
ggaagaaauucugagacac

SEQ ID NO: 1483191 - RNA, 19 nt, Artificial Sequence
  Description of Artificial Sequence: Synthetic oligonucleotide
  Antisense strand to SEQ ID NO: 1483190
gugucucagaauuucuucc

SEQ ID NO: 1483192 - RNA, 19 nt, Artificial Sequence
  Description of Artificial Sequence: Synthetic oligonucleotide
  Sense strand starting at position 2785 of SEQ ID NO: 1244366
aaggcagauugguugcgau

SEQ ID NO: 1483193 - RNA, 19 nt, Artificial Sequence
  Description of Artificial Sequence: Synthetic oligonucleotide
  Antisense strand to SEQ ID NO: 1483192
aucgcaaccaaucugccuu

SEQ ID NO: 1483194 - RNA, 19 nt, Artificial Sequence
  Description of Artificial Sequence: Synthetic oligonucleotide
  Sense strand starting at position 3428 of SEQ ID NO: 1244366
ucuccaaucuguggaaggu

SEQ ID NO: 1483195 - RNA, 19 nt, Artificial Sequence
  Description of Artificial Sequence: Synthetic oligonucleotide
  Antisense strand to SEQ ID NO: 1483194
accuuccacagauuggaga

SEQ ID NO: 1483196 - RNA, 19 nt, Artificial Sequence
  Description of Artificial Sequence: Synthetic oligonucleotide
  Sense strand starting at position 3429 of SEQ ID NO: 1244366
cuccaaucuguggaaggua

SEQ ID NO: 1483197 - RNA, 19 nt, Artificial Sequence
  Description of Artificial Sequence: Synthetic oligonucleotide
  Antisense strand to SEQ ID NO: 1483196
uaccuuccacagauuggag

SEQ ID NO: 1483198 - RNA, 19 nt, Artificial Sequence
  Description of Artificial Sequence: Synthetic oligonucleotide
  Sense strand starting at position 3521 of SEQ ID NO: 1244366
ggguuccuccagugaguag

SEQ ID NO: 1483199 - RNA, 19 nt, Artificial Sequence
  Description of Artificial Sequence: Synthetic oligonucleotide
  Antisense strand to SEQ ID NO: 1483198
cuacucacuggaggaaccc

SEQ ID NO: 1483200 - RNA, 19 nt, Artificial Sequence
  Description of Artificial Sequence: Synthetic oligonucleotide
  Sense strand starting at position 3522 of SEQ ID NO: 1244366
gguuccuccagugaguaga

SEQ ID NO: 1483201 - RNA, 19 nt, Artificial Sequence
  Description of Artificial Sequence: Synthetic oligonucleotide
  Antisense strand to SEQ ID NO: 1483200
ucuacucacuggaggaacc

SEQ ID NO: 1483202 - RNA, 19 nt, Artificial Sequence
  Description of Artificial Sequence: Synthetic oligonucleotide
  Sense strand starting at position 47 of SEQ ID NO: 1244367
gagagcuuguuagaaauuu

SEQ ID NO: 1483203 - RNA, 19 nt, Artificial Sequence
  Description of Artificial Sequence: Synthetic oligonucleotide
  Antisense strand to SEQ ID NO: 1483202
aaauuucuaacaagcucuc

SEQ ID NO: 1483204 - RNA, 19 nt, Artificial Sequence
  Description of Artificial Sequence: Synthetic oligonucleotide
  Sense strand starting at position 544 of SEQ ID NO: 1244367
gaugcugacgcaugcuaaa

SEQ ID NO: 1483205 - RNA, 19 nt, Artificial Sequence
  Description of Artificial Sequence: Synthetic oligonucleotide
  Antisense strand to SEQ ID NO: 1483204
uuuagcaugcgucagcauc

SEQ ID NO: 1483206 - RNA, 19 nt, Artificial Sequence
  Description of Artificial Sequence: Synthetic oligonucleotide
  Sense strand starting at position 674 of SEQ ID NO: 1244367
cucucuuccuguuuacaga

SEQ ID NO: 1483207 - RNA, 19 nt, Artificial Sequence
  Description of Artificial Sequence: Synthetic oligonucleotide
  Antisense strand to SEQ ID NO: 1483206
ucuguaaacaggaagagag

SEQ ID NO: 1483208 - RNA, 19 nt, Artificial Sequence
  Description of Artificial Sequence: Synthetic oligonucleotide
  Sense strand starting at position 1316 of SEQ ID NO: 1244367
acccaacuggucugaacuu

SEQ ID NO: 1483209 - RNA, 19 nt, Artificial Sequence
  Description of Artificial Sequence: Synthetic oligonucleotide
  Antisense strand to SEQ ID NO: 1483208
aaguucagaccaguugggu

SEQ ID NO: 1483210 - RNA, 19 nt, Artificial Sequence
  Description of Artificial Sequence: Synthetic oligonucleotide
  Sense strand starting at position 1334 of SEQ ID NO: 1244367
ucaguugcugcgucuguaa

SEQ ID NO: 1483211 - RNA, 19 nt, Artificial Sequence
  Description of Artificial Sequence: Synthetic oligonucleotide
  Antisense strand to SEQ ID NO: 1483210
uuacagacgcagcaacuga

SEQ ID NO: 1483212 - RNA, 19 nt, Artificial Sequence
  Description of Artificial Sequence: Synthetic oligonucleotide
  Sense strand starting at position 1355 of SEQ ID NO: 1244367
aggagaugcgaaugucuuu

SEQ ID NO: 1483213 - RNA, 19 nt, Artificial Sequence
  Description of Artificial Sequence: Synthetic oligonucleotide
  Antisense strand to SEQ ID NO: 1483212
aaagacauucgcaucuccu

SEQ ID NO: 1483214 - RNA, 19 nt, Artificial Sequence
  Description of Artificial Sequence: Synthetic oligonucleotide
  Sense strand starting at position 1360 of SEQ ID NO: 1244367
augcgaaugucuuucucac

SEQ ID NO: 1483215 - RNA, 19 nt, Artificial Sequence
  Description of Artificial Sequence: Synthetic oligonucleotide
  Antisense strand to SEQ ID NO: 1483214
gugagaaagacauucgcau

SEQ ID NO: 1483216 - RNA, 19 nt, Artificial Sequence
  Description of Artificial Sequence: Synthetic oligonucleotide
  Sense strand starting at position 1362 of SEQ ID NO: 1244367
gcgaaugucuuucucacag

SEQ ID NO: 1483217 - RNA, 19 nt, Artificial Sequence
  Description of Artificial Sequence: Synthetic oligonucleotide
  Antisense strand to SEQ ID NO: 1483216
cugugagaaagacauucgc

SEQ ID NO: 1483218 - RNA, 19 nt, Artificial Sequence
  Description of Artificial Sequence: Synthetic oligonucleotide
  Sense strand starting at position 1374 of SEQ ID NO: 1244367
cucacagggugcuuuagau

SEQ ID NO: 1483219 - RNA, 19 nt, Artificial Sequence
  Description of Artificial Sequence: Synthetic oligonucleotide
  Antisense strand to SEQ ID NO: 1483218
aucuaaagcacccugugag

SEQ ID NO: 1483220 - RNA, 19 nt, Artificial Sequence
  Description of Artificial Sequence: Synthetic oligonucleotide
  Sense strand starting at position 1378 of SEQ ID NO: 1244367
cagggugcuuuagauuuaa

SEQ ID NO: 1483221 - RNA, 19 nt, Artificial Sequence
  Description of Artificial Sequence: Synthetic oligonucleotide
  Antisense strand to SEQ ID NO: 1483220
uuaaaucuaaagcacccug

SEQ ID NO: 1483222 - RNA, 19 nt, Artificial Sequence
  Description of Artificial Sequence: Synthetic oligonucleotide
  Sense strand starting at position 1453 of SEQ ID NO: 1244367
ggccuauauuaagugcuca

SEQ ID NO: 1483223 - RNA, 19 nt, Artificial Sequence
  Description of Artificial Sequence: Synthetic oligonucleotide
  Antisense strand to SEQ ID NO: 1483222
ugagcacuuaauauaggcc

SEQ ID NO: 1483224 - RNA, 19 nt, Artificial Sequence
  Description of Artificial Sequence: Synthetic oligonucleotide
  Sense strand starting at position 1532 of SEQ ID NO: 1244367
gcuggcuaugcugaaugaa

SEQ ID NO: 1483225 - RNA, 19 nt, Artificial Sequence
  Description of Artificial Sequence: Synthetic oligonucleotide
  Antisense strand to SEQ ID NO: 1483224
uucauucagcauagccagc

SEQ ID NO: 1483226 - RNA, 19 nt, Artificial Sequence
  Description of Artificial Sequence: Synthetic oligonucleotide
  Sense strand starting at position 1535 of SEQ ID NO: 1244367
ggcuaugcugaaugaacau

SEQ ID NO: 1483227 - RNA, 19 nt, Artificial Sequence
  Description of Artificial Sequence: Synthetic oligonucleotide
  Antisense strand to SEQ ID NO: 1483226
auguucauucagcauagcc

SEQ ID NO: 1483228 - RNA, 19 nt, Artificial Sequence
  Description of Artificial Sequence: Synthetic oligonucleotide
  Sense strand starting at position 1541 of SEQ ID NO: 1244367
gcugaaugaacaugguucu

SEQ ID NO: 1483229 - RNA, 19 nt, Artificial Sequence
  Description of Artificial Sequence: Synthetic oligonucleotide
  Antisense strand to SEQ ID NO: 1483228
agaaccauguucauucagc

SEQ ID NO: 1483230 - RNA, 19 nt, Artificial Sequence
  Description of Artificial Sequence: Synthetic oligonucleotide
  Sense strand starting at position 1562 of SEQ ID NO: 1244367
ccuugcggaguuuaauaga

SEQ ID NO: 1483231 - RNA, 19 nt, Artificial Sequence
  Description of Artificial Sequence: Synthetic oligonucleotide
  Antisense strand to SEQ ID NO: 1483230
ucuauuaaacuccgcaagg

SEQ ID NO: 1483232 - RNA, 19 nt, Artificial Sequence
  Description of Artificial Sequence: Synthetic oligonucleotide
  Sense strand starting at position 1703 of SEQ ID NO: 1244367
cgaggagugguccaggcaa

SEQ ID NO: 1483233 - RNA, 19 nt, Artificial Sequence
  Description of Artificial Sequence: Synthetic oligonucleotide
  Antisense strand to SEQ ID NO: 1483232
uugccuggaccacuccucg

SEQ ID NO: 1483234 - RNA, 19 nt, Artificial Sequence
  Description of Artificial Sequence: Synthetic oligonucleotide
  Sense strand starting at position 1762 of SEQ ID NO: 1244367
gugauuaccagucgaguca

SEQ ID NO: 1483235 - RNA, 19 nt, Artificial Sequence
  Description of Artificial Sequence: Synthetic oligonucleotide
  Antisense strand to SEQ ID NO: 1483234
ugacucgacugguaaucac

SEQ ID NO: 1483236 - RNA, 19 nt, Artificial Sequence
  Description of Artificial Sequence: Synthetic oligonucleotide
  Sense strand starting at position 1823 of SEQ ID NO: 1244367
gucagagauuaugggaaga

SEQ ID NO: 1483237 - RNA, 19 nt, Artificial Sequence
  Description of Artificial Sequence: Synthetic oligonucleotide
  Antisense strand to SEQ ID NO: 1483236
ucuucccauaaucucugac

SEQ ID NO: 1483238 - RNA, 19 nt, Artificial Sequence
  Description of Artificial Sequence: Synthetic oligonucleotide
  Sense strand starting at position 1825 of SEQ ID NO: 1244367
cagagauuaugggaagaau

SEQ ID NO: 1483239 - RNA, 19 nt, Artificial Sequence
  Description of Artificial Sequence: Synthetic oligonucleotide
  Antisense strand to SEQ ID NO: 1483238
auucuucccauaaucucug

SEQ ID NO: 1483240 - RNA, 19 nt, Artificial Sequence
  Description of Artificial Sequence: Synthetic oligonucleotide
  Sense strand starting at position 2505 of SEQ ID NO: 1244367
ggguaaggccuccaagagu

SEQ ID NO: 1483241 - RNA, 19 nt, Artificial Sequence
  Description of Artificial Sequence: Synthetic oligonucleotide
  Antisense strand to SEQ ID NO: 1483240
acucuuggaggccuuaccc

SEQ ID NO: 1483242 - RNA, 19 nt, Artificial Sequence
  Description of Artificial Sequence: Synthetic oligonucleotide
  Sense strand starting at position 2689 of SEQ ID NO: 1244367
gugcuagaaggcugaaaca

SEQ ID NO: 1483243 - RNA, 19 nt, Artificial Sequence
  Description of Artificial Sequence: Synthetic oligonucleotide
  Antisense strand to SEQ ID NO: 1483242
uguuucagccuucuagcac

SEQ ID NO: 1483244 - RNA, 19 nt, Artificial Sequence
  Description of Artificial Sequence: Synthetic oligonucleotide
  Sense strand starting at position 2722 of SEQ ID NO: 1244367
gucccugacguguacugau

SEQ ID NO: 1483245 - RNA, 19 nt, Artificial Sequence
  Description of Artificial Sequence: Synthetic oligonucleotide
  Antisense strand to SEQ ID NO: 1483244
aucaguacacgucagggac

SEQ ID NO: 1483246 - RNA, 19 nt, Artificial Sequence
  Description of Artificial Sequence: Synthetic oligonucleotide
  Sense strand starting at position 2730 of SEQ ID NO: 1244367
cguguacugauuugucaac

SEQ ID NO: 1483247 - RNA, 19 nt, Artificial Sequence
  Description of Artificial Sequence: Synthetic oligonucleotide
  Antisense strand to SEQ ID NO: 1483246
guugacaaaucaguacacg

SEQ ID NO: 1483248 - RNA, 19 nt, Artificial Sequence
  Description of Artificial Sequence: Synthetic oligonucleotide
  Sense strand starting at position 2731 of SEQ ID NO: 1244367
guguacugauuugucaacu

SEQ ID NO: 1483249 - RNA, 19 nt, Artificial Sequence
  Description of Artificial Sequence: Synthetic oligonucleotide
  Antisense strand to SEQ ID NO: 1483248
aguugacaaaucaguacac

SEQ ID NO: 1483250 - RNA, 19 nt, Artificial Sequence
  Description of Artificial Sequence: Synthetic oligonucleotide
  Sense strand starting at position 2786 of SEQ ID NO: 1244367
agugguaaugcccagcuga

SEQ ID NO: 1483251 - RNA, 19 nt, Artificial Sequence
  Description of Artificial Sequence: Synthetic oligonucleotide
  Antisense strand to SEQ ID NO: 1483250
ucagcugggcauuaccacu

SEQ ID NO: 1483252 - RNA, 19 nt, Artificial Sequence
  Description of Artificial Sequence: Synthetic oligonucleotide
  Sense strand starting at position 3333 of SEQ ID NO: 1244367
gccuaagcaugaguugacu

SEQ ID NO: 1483253 - RNA, 19 nt, Artificial Sequence
  Description of Artificial Sequence: Synthetic oligonucleotide
  Antisense strand to SEQ ID NO: 1483252
agucaacucaugcuuaggc

SEQ ID NO: 1483254 - RNA, 19 nt, Artificial Sequence
  Description of Artificial Sequence: Synthetic oligonucleotide
  Sense strand starting at position 3424 of SEQ ID NO: 1244367
guaccuuacuacucagagu

SEQ ID NO: 1483255 - RNA, 19 nt, Artificial Sequence
  Description of Artificial Sequence: Synthetic oligonucleotide
  Antisense strand to SEQ ID NO: 1483254
acucugaguaguaagguac

SEQ ID NO: 1483256 - RNA, 19 nt, Artificial Sequence
  Description of Artificial Sequence: Synthetic oligonucleotide
  Sense strand starting at position 3438 of SEQ ID NO: 1244367
agaguauguguggauggga

SEQ ID NO: 1483257 - RNA, 19 nt, Artificial Sequence
  Description of Artificial Sequence: Synthetic oligonucleotide
  Antisense strand to SEQ ID NO: 1483256
ucccauccacacauacucu

SEQ ID NO: 1483258 - RNA, 19 nt, Artificial Sequence
  Description of Artificial Sequence: Synthetic oligonucleotide
  Sense strand starting at position 3498 of SEQ ID NO: 1244367
gcuuguuagaaguggagca

SEQ ID NO: 1483259 - RNA, 19 nt, Artificial Sequence
  Description of Artificial Sequence: Synthetic oligonucleotide
  Antisense strand to SEQ ID NO: 1483258
ugcuccacuucuaacaagc

SEQ ID NO: 1483260 - RNA, 19 nt, Artificial Sequence
  Description of Artificial Sequence: Synthetic oligonucleotide
  Sense strand starting at position 3545 of SEQ ID NO: 1244367
uuagaaucugcaugggcau

SEQ ID NO: 1483261 - RNA, 19 nt, Artificial Sequence
  Description of Artificial Sequence: Synthetic oligonucleotide
  Antisense strand to SEQ ID NO: 1483260
augcccaugcagauucuaa

SEQ ID NO: 1483262 - RNA, 19 nt, Artificial Sequence
  Description of Artificial Sequence: Synthetic oligonucleotide
  Sense strand starting at position 3546 of SEQ ID NO: 1244367
uagaaucugcaugggcaua

SEQ ID NO: 1483263 - RNA, 19 nt, Artificial Sequence
  Description of Artificial Sequence: Synthetic oligonucleotide
  Antisense strand to SEQ ID NO: 1483262
uaugcccaugcagauucua

SEQ ID NO: 1483264 - RNA, 19 nt, Artificial Sequence
  Description of Artificial Sequence: Synthetic oligonucleotide
  Sense strand starting at position 3756 of SEQ ID NO: 1244367
guuauccacuugucaggga

SEQ ID NO: 1483265 - RNA, 19 nt, Artificial Sequence
  Description of Artificial Sequence: Synthetic oligonucleotide
  Antisense strand to SEQ ID NO: 1483264
ucccugacaaguggauaac

SEQ ID NO: 1483266 - RNA, 19 nt, Artificial Sequence
  Description of Artificial Sequence: Synthetic oligonucleotide
  Sense strand starting at position 3760 of SEQ ID NO: 1244367
uccacuugucagggauguu

SEQ ID NO: 1483267 - RNA, 19 nt, Artificial Sequence
  Description of Artificial Sequence: Synthetic oligonucleotide
  Antisense strand to SEQ ID NO: 1483266
aacaucccugacaagugga

SEQ ID NO: 1483268 - RNA, 19 nt, Artificial Sequence
  Description of Artificial Sequence: Synthetic oligonucleotide
  Sense strand starting at position 3761 of SEQ ID NO: 1244367
ccacuugucagggauguuu

SEQ ID NO: 1483269 - RNA, 19 nt, Artificial Sequence
  Description of Artificial Sequence: Synthetic oligonucleotide
  Antisense strand to SEQ ID NO: 1483268
aaacaucccugacaagugg

SEQ ID NO: 1483270 - RNA, 19 nt, Artificial Sequence
  Description of Artificial Sequence: Synthetic oligonucleotide
  Sense strand starting at position 3769 of SEQ ID NO: 1244367
cagggauguuuggccuuau

SEQ ID NO: 1483271 - RNA, 19 nt, Artificial Sequence
  Description of Artificial Sequence: Synthetic oligonucleotide
  Antisense strand to SEQ ID NO: 1483270
auaaggccaaacaucccug

SEQ ID NO: 1483272 - RNA, 19 nt, Artificial Sequence
  Description of Artificial Sequence: Synthetic oligonucleotide
  Sense strand starting at position 3770 of SEQ ID NO: 1244367
agggauguuuggccuuauu

SEQ ID NO: 1483273 - RNA, 19 nt, Artificial Sequence
  Description of Artificial Sequence: Synthetic oligonucleotide
  Antisense strand to SEQ ID NO: 1483272
aauaaggccaaacaucccu

SEQ ID NO: 1483274 - RNA, 19 nt, Artificial Sequence
  Description of Artificial Sequence: Synthetic oligonucleotide
  Sense strand starting at position 3773 of SEQ ID NO: 1244367
gauguuuggccuuauucuu

SEQ ID NO: 1483275 - RNA, 19 nt, Artificial Sequence
  Description of Artificial Sequence: Synthetic oligonucleotide
  Antisense strand to SEQ ID NO: 1483274
aagaauaaggccaaacauc

SEQ ID NO: 1483276 - RNA, 19 nt, Artificial Sequence
  Description of Artificial Sequence: Synthetic oligonucleotide
  Sense strand starting at position 3871 of SEQ ID NO: 1244367
guuauccacuugucauaga

SEQ ID NO: 1483277 - RNA, 19 nt, Artificial Sequence
  Description of Artificial Sequence: Synthetic oligonucleotide
  Antisense strand to SEQ ID NO: 1483276
ucuaugacaaguggauaac

SEQ ID NO: 1483278 - RNA, 19 nt, Artificial Sequence
  Description of Artificial Sequence: Synthetic oligonucleotide
  Sense strand starting at position 3882 of SEQ ID NO: 1244367
gucauagauguuuggccuu

SEQ ID NO: 1483279 - RNA, 19 nt, Artificial Sequence
  Description of Artificial Sequence: Synthetic oligonucleotide
  Antisense strand to SEQ ID NO: 1483278
aaggccaaacaucuaugac

SEQ ID NO: 1483280 - RNA, 19 nt, Artificial Sequence
  Description of Artificial Sequence: Synthetic oligonucleotide
  Sense strand starting at position 3885 of SEQ ID NO: 1244367
auagauguuuggccuucuu

SEQ ID NO: 1483281 - RNA, 19 nt, Artificial Sequence
  Description of Artificial Sequence: Synthetic oligonucleotide
  Antisense strand to SEQ ID NO: 1483280
aagaaggccaaacaucuau

SEQ ID NO: 1483282 - RNA, 19 nt, Artificial Sequence
  Description of Artificial Sequence: Synthetic oligonucleotide
  Sense strand starting at position 460 of SEQ ID NO: 1244368
gaaacauggucuccacaug

SEQ ID NO: 1483283 - RNA, 19 nt, Artificial Sequence
  Description of Artificial Sequence: Synthetic oligonucleotide
  Antisense strand to SEQ ID NO: 1483282
cauguggagaccauguuuc

SEQ ID NO: 1483284 - RNA, 19 nt, Artificial Sequence
  Description of Artificial Sequence: Synthetic oligonucleotide
  Sense strand starting at position 475 of SEQ ID NO: 1244368
caugcaaagucgugcacau

SEQ ID NO: 1483285 - RNA, 19 nt, Artificial Sequence
  Description of Artificial Sequence: Synthetic oligonucleotide
  Antisense strand to SEQ ID NO: 1483284
augugcacgacuuugcaug

SEQ ID NO: 1483286 - RNA, 19 nt, Artificial Sequence
  Description of Artificial Sequence: Synthetic oligonucleotide
  Sense strand starting at position 565 of SEQ ID NO: 1244368
agcugcagaaccugagaua

SEQ ID NO: 1483287 - RNA, 19 nt, Artificial Sequence
  Description of Artificial Sequence: Synthetic oligonucleotide
  Antisense strand to SEQ ID NO: 1483286
uaucucagguucugcagcu

SEQ ID NO: 1483288 - RNA, 19 nt, Artificial Sequence
  Description of Artificial Sequence: Synthetic oligonucleotide
  Sense strand starting at position 624 of SEQ ID NO: 1244368
ccagaaaugccucauucug

SEQ ID NO: 1483289 - RNA, 19 nt, Artificial Sequence
  Description of Artificial Sequence: Synthetic oligonucleotide
  Antisense strand to SEQ ID NO: 1483288
cagaaugaggcauuucugg

SEQ ID NO: 1483290 - RNA, 19 nt, Artificial Sequence
  Description of Artificial Sequence: Synthetic oligonucleotide
  Sense strand starting at position 1154 of SEQ ID NO: 1244368
acuugucaguccuggaaug

SEQ ID NO: 1483291 - RNA, 19 nt, Artificial Sequence
  Description of Artificial Sequence: Synthetic oligonucleotide
  Antisense strand to SEQ ID NO: 1483290
cauuccaggacugacaagu

SEQ ID NO: 1483292 - RNA, 19 nt, Artificial Sequence
  Description of Artificial Sequence: Synthetic oligonucleotide
  Sense strand starting at position 1156 of SEQ ID NO: 1244368
uugucaguccuggaaugga

SEQ ID NO: 1483293 - RNA, 19 nt, Artificial Sequence
  Description of Artificial Sequence: Synthetic oligonucleotide
  Antisense strand to SEQ ID NO: 1483292
uccauuccaggacugacaa

SEQ ID NO: 1483294 - RNA, 19 nt, Artificial Sequence
  Description of Artificial Sequence: Synthetic oligonucleotide
  Sense strand starting at position 1243 of SEQ ID NO: 1244368
aucacuagggccggaaauu

SEQ ID NO: 1483295 - RNA, 19 nt, Artificial Sequence
  Description of Artificial Sequence: Synthetic oligonucleotide
  Antisense strand to SEQ ID NO: 1483294
aauuuccggcccuagugau

SEQ ID NO: 1483296 - RNA, 19 nt, Artificial Sequence
  Description of Artificial Sequence: Synthetic oligonucleotide
  Sense strand starting at position 1244 of SEQ ID NO: 1244368
ucacuagggccggaaauua

SEQ ID NO: 1483297 - RNA, 19 nt, Artificial Sequence
  Description of Artificial Sequence: Synthetic oligonucleotide
  Antisense strand to SEQ ID NO: 1483296
uaauuuccggcccuaguga

SEQ ID NO: 1483298 - RNA, 19 nt, Artificial Sequence
  Description of Artificial Sequence: Synthetic oligonucleotide
  Sense strand starting at position 1314 of SEQ ID NO: 1244368
ugauaagauuugcaaguua

SEQ ID NO: 1483299 - RNA, 19 nt, Artificial Sequence
  Description of Artificial Sequence: Synthetic oligonucleotide
  Antisense strand to SEQ ID NO: 1483298
uaacuugcaaaucuuauca

SEQ ID NO: 1483300 - RNA, 19 nt, Artificial Sequence
  Description of Artificial Sequence: Synthetic oligonucleotide
  Sense strand starting at position 1353 of SEQ ID NO: 1244368
cuuagaaagccacguguuu

SEQ ID NO: 1483301 - RNA, 19 nt, Artificial Sequence
  Description of Artificial Sequence: Synthetic oligonucleotide
  Antisense strand to SEQ ID NO: 1483300
aaacacguggcuuucuaag

SEQ ID NO: 1483302 - RNA, 19 nt, Artificial Sequence
  Description of Artificial Sequence: Synthetic oligonucleotide
  Sense strand starting at position 1365 of SEQ ID NO: 1244368
cguguuuauuugcagccau

SEQ ID NO: 1483303 - RNA, 19 nt, Artificial Sequence
  Description of Artificial Sequence: Synthetic oligonucleotide
  Antisense strand to SEQ ID NO: 1483302
auggcugcaaauaaacacg

SEQ ID NO: 1483304 - RNA, 19 nt, Artificial Sequence
  Description of Artificial Sequence: Synthetic oligonucleotide
  Sense strand starting at position 1396 of SEQ ID NO: 1244368
ucaaguuucugguuugaau

SEQ ID NO: 1483305 - RNA, 19 nt, Artificial Sequence
  Description of Artificial Sequence: Synthetic oligonucleotide
  Antisense strand to SEQ ID NO: 1483304
auucaaaccagaaacuuga

SEQ ID NO: 1483306 - RNA, 19 nt, Artificial Sequence
  Description of Artificial Sequence: Synthetic oligonucleotide
  Sense strand starting at position 1398 of SEQ ID NO: 1244368
aaguuucugguuugaauga

SEQ ID NO: 1483307 - RNA, 19 nt, Artificial Sequence
  Description of Artificial Sequence: Synthetic oligonucleotide
  Antisense strand to SEQ ID NO: 1483306
ucauucaaaccagaaacuu

SEQ ID NO: 1483308 - RNA, 19 nt, Artificial Sequence
  Description of Artificial Sequence: Synthetic oligonucleotide
  Sense strand starting at position 1453 of SEQ ID NO: 1244368
ggugcaucuuccugcgcaa

SEQ ID NO: 1483309 - RNA, 19 nt, Artificial Sequence
  Description of Artificial Sequence: Synthetic oligonucleotide
  Antisense strand to SEQ ID NO: 1483308
uugcgcaggaagaugcacc

SEQ ID NO: 1483310 - RNA, 19 nt, Artificial Sequence
  Description of Artificial Sequence: Synthetic oligonucleotide
  Sense strand starting at position 1454 of SEQ ID NO: 1244368
gugcaucuuccugcgcaaa

SEQ ID NO: 1483311 - RNA, 19 nt, Artificial Sequence
  Description of Artificial Sequence: Synthetic oligonucleotide
  Antisense strand to SEQ ID NO: 1483310
uuugcgcaggaagaugcac

SEQ ID NO: 1483312 - RNA, 19 nt, Artificial Sequence
  Description of Artificial Sequence: Synthetic oligonucleotide
  Sense strand starting at position 1985 of SEQ ID NO: 1244368
gcauucgagccggaaauga

SEQ ID NO: 1483313 - RNA, 19 nt, Artificial Sequence
  Description of Artificial Sequence: Synthetic oligonucleotide
  Antisense strand to SEQ ID NO: 1483312
ucauuuccggcucgaaugc

SEQ ID NO: 1483314 - RNA, 19 nt, Artificial Sequence
  Description of Artificial Sequence: Synthetic oligonucleotide
  Sense strand starting at position 2029 of SEQ ID NO: 1244368
cucgucucacccugagauu

SEQ ID NO: 1483315 - RNA, 19 nt, Artificial Sequence
  Description of Artificial Sequence: Synthetic oligonucleotide
  Antisense strand to SEQ ID NO: 1483314
aaucucagggugagacgag

SEQ ID NO: 1483316 - RNA, 19 nt, Artificial Sequence
  Description of Artificial Sequence: Synthetic oligonucleotide
  Sense strand starting at position 2030 of SEQ ID NO: 1244368
ucgucucacccugagauua

SEQ ID NO: 1483317 - RNA, 19 nt, Artificial Sequence
  Description of Artificial Sequence: Synthetic oligonucleotide
  Antisense strand to SEQ ID NO: 1483316
uaaucucagggugagacga

SEQ ID NO: 1483318 - RNA, 19 nt, Artificial Sequence
  Description of Artificial Sequence: Synthetic oligonucleotide
  Sense strand starting at position 2202 of SEQ ID NO: 1244368
gguuucuguccguacgcga

SEQ ID NO: 1483319 - RNA, 19 nt, Artificial Sequence
  Description of Artificial Sequence: Synthetic oligonucleotide
  Antisense strand to SEQ ID NO: 1483318
ucgcguacggacagaaacc

SEQ ID NO: 1483320 - RNA, 19 nt, Artificial Sequence
  Description of Artificial Sequence: Synthetic oligonucleotide
  Sense strand starting at position 2357 of SEQ ID NO: 1244368
gcgacauccucuuuccuag

SEQ ID NO: 1483321 - RNA, 19 nt, Artificial Sequence
  Description of Artificial Sequence: Synthetic oligonucleotide
  Antisense strand to SEQ ID NO: 1483320
cuaggaaagaggaugucgc

SEQ ID NO: 1483322 - RNA, 19 nt, Artificial Sequence
  Description of Artificial Sequence: Synthetic oligonucleotide
  Sense strand starting at position 2529 of SEQ ID NO: 1244368
guccauuccuuccuggaaa

SEQ ID NO: 1483323 - RNA, 19 nt, Artificial Sequence
  Description of Artificial Sequence: Synthetic oligonucleotide
  Antisense strand to SEQ ID NO: 1483322
uuuccaggaaggaauggac

SEQ ID NO: 1483324 - RNA, 19 nt, Artificial Sequence
  Description of Artificial Sequence: Synthetic oligonucleotide
  Sense strand starting at position 3244 of SEQ ID NO: 1244368
cgcugaugcuuucugaaau

SEQ ID NO: 1483325 - RNA, 19 nt, Artificial Sequence
  Description of Artificial Sequence: Synthetic oligonucleotide
  Antisense strand to SEQ ID NO: 1483324
auuucagaaagcaucagcg

SEQ ID NO: 1483326 - RNA, 19 nt, Artificial Sequence
  Description of Artificial Sequence: Synthetic oligonucleotide
  Sense strand starting at position 3859 of SEQ ID NO: 1244368
gccaucugugcaggaggaa

SEQ ID NO: 1483327 - RNA, 19 nt, Artificial Sequence
  Description of Artificial Sequence: Synthetic oligonucleotide
  Antisense strand to SEQ ID NO: 1483326
uuccuccugcacagauggc

SEQ ID NO: 1483328 - RNA, 19 nt, Artificial Sequence
  Description of Artificial Sequence: Synthetic oligonucleotide
  Sense strand starting at position 3947 of SEQ ID NO: 1244368
acccacaagugcuuguaau

SEQ ID NO: 1483329 - RNA, 19 nt, Artificial Sequence
  Description of Artificial Sequence: Synthetic oligonucleotide
  Antisense strand to SEQ ID NO: 1483328
auuacaagcacuugugggu

SEQ ID NO: 1483330 - RNA, 19 nt, Artificial Sequence
  Description of Artificial Sequence: Synthetic oligonucleotide
  Sense strand starting at position 3948 of SEQ ID NO: 1244368
cccacaagugcuuguaauc

SEQ ID NO: 1483331 - RNA, 19 nt, Artificial Sequence
  Description of Artificial Sequence: Synthetic oligonucleotide
  Antisense strand to SEQ ID NO: 1483330
gauuacaagcacuuguggg

SEQ ID NO: 1483332 - RNA, 19 nt, Artificial Sequence
  Description of Artificial Sequence: Synthetic oligonucleotide
  Sense strand starting at position 3957 of SEQ ID NO: 1244368
gcuuguaauccauguccac

SEQ ID NO: 1483333 - RNA, 19 nt, Artificial Sequence
  Description of Artificial Sequence: Synthetic oligonucleotide
  Antisense strand to SEQ ID NO: 1483332
guggacauggauuacaagc

SEQ ID NO: 1483334 - RNA, 19 nt, Artificial Sequence
  Description of Artificial Sequence: Synthetic oligonucleotide
  Sense strand starting at position 172 of SEQ ID NO: 1244369
ugggcccuuucuucucaaa

SEQ ID NO: 1483335 - RNA, 19 nt, Artificial Sequence
  Description of Artificial Sequence: Synthetic oligonucleotide
  Antisense strand to SEQ ID NO: 1483334
uuugagaagaaagggccca

SEQ ID NO: 1483336 - RNA, 19 nt, Artificial Sequence
  Description of Artificial Sequence: Synthetic oligonucleotide
  Sense strand starting at position 257 of SEQ ID NO: 1244369
auuccaaagugcucaauag

SEQ ID NO: 1483337 - RNA, 19 nt, Artificial Sequence
  Description of Artificial Sequence: Synthetic oligonucleotide
  Antisense strand to SEQ ID NO: 1483336
cuauugagcacuuuggaau

SEQ ID NO: 1483338 - RNA, 19 nt, Artificial Sequence
  Description of Artificial Sequence: Synthetic oligonucleotide
  Sense strand starting at position 318 of SEQ ID NO: 1244369
augguagucccuugcugua

SEQ ID NO: 1483339 - RNA, 19 nt, Artificial Sequence
  Description of Artificial Sequence: Synthetic oligonucleotide
  Antisense strand to SEQ ID NO: 1483338
uacagcaagggacuaccau

SEQ ID NO: 1483340 - RNA, 19 nt, Artificial Sequence
  Description of Artificial Sequence: Synthetic oligonucleotide
  Sense strand starting at position 323 of SEQ ID NO: 1244369
agucccuugcuguaugaca

SEQ ID NO: 1483341 - RNA, 19 nt, Artificial Sequence
  Description of Artificial Sequence: Synthetic oligonucleotide
  Antisense strand to SEQ ID NO: 1483340
ugucauacagcaagggacu

SEQ ID NO: 1483342 - RNA, 19 nt, Artificial Sequence
  Description of Artificial Sequence: Synthetic oligonucleotide
  Sense strand starting at position 399 of SEQ ID NO: 1244369
ccaugccagugucuuuaga

SEQ ID NO: 1483343 - RNA, 19 nt, Artificial Sequence
  Description of Artificial Sequence: Synthetic oligonucleotide
  Antisense strand to SEQ ID NO: 1483342
ucuaaagacacuggcaugg

SEQ ID NO: 1483344 - RNA, 19 nt, Artificial Sequence
  Description of Artificial Sequence: Synthetic oligonucleotide
  Sense strand starting at position 401 of SEQ ID NO: 1244369
augccagugucuuuagaga

SEQ ID NO: 1483345 - RNA, 19 nt, Artificial Sequence
  Description of Artificial Sequence: Synthetic oligonucleotide
  Antisense strand to SEQ ID NO: 1483344
ucucuaaagacacuggcau

SEQ ID NO: 1483346 - RNA, 19 nt, Artificial Sequence
  Description of Artificial Sequence: Synthetic oligonucleotide
  Sense strand starting at position 430 of SEQ ID NO: 1244369
gucucuggagccuauaagu

SEQ ID NO: 1483347 - RNA, 19 nt, Artificial Sequence
  Description of Artificial Sequence: Synthetic oligonucleotide
  Antisense strand to SEQ ID NO: 1483346
acuuauaggcuccagagac

SEQ ID NO: 1483348 - RNA, 19 nt, Artificial Sequence
  Description of Artificial Sequence: Synthetic oligonucleotide
  Sense strand starting at position 720 of SEQ ID NO: 1244369
ccaguugcuuaggcagaaa

SEQ ID NO: 1483349 - RNA, 19 nt, Artificial Sequence
  Description of Artificial Sequence: Synthetic oligonucleotide
  Antisense strand to SEQ ID NO: 1483348
uuucugccuaagcaacugg

SEQ ID NO: 1483350 - RNA, 19 nt, Artificial Sequence
  Description of Artificial Sequence: Synthetic oligonucleotide
  Sense strand starting at position 736 of SEQ ID NO: 1244369
aaaccagagucauugcaga

SEQ ID NO: 1483351 - RNA, 19 nt, Artificial Sequence
  Description of Artificial Sequence: Synthetic oligonucleotide
  Antisense strand to SEQ ID NO: 1483350
ucugcaaugacucugguuu

SEQ ID NO: 1483352 - RNA, 19 nt, Artificial Sequence
  Description of Artificial Sequence: Synthetic oligonucleotide
  Sense strand starting at position 763 of SEQ ID NO: 1244369
cuuugcuguccucacauau

SEQ ID NO: 1483353 - RNA, 19 nt, Artificial Sequence
  Description of Artificial Sequence: Synthetic oligonucleotide
  Antisense strand to SEQ ID NO: 1483352
auaugugaggacagcaaag

SEQ ID NO: 1483354 - RNA, 19 nt, Artificial Sequence
  Description of Artificial Sequence: Synthetic oligonucleotide
  Sense strand starting at position 799 of SEQ ID NO: 1244369
uguggaugcuaacuccaaa

SEQ ID NO: 1483355 - RNA, 19 nt, Artificial Sequence
  Description of Artificial Sequence: Synthetic oligonucleotide
  Antisense strand to SEQ ID NO: 1483354
uuuggaguuagcauccaca

SEQ ID NO: 1483356 - RNA, 19 nt, Artificial Sequence
  Description of Artificial Sequence: Synthetic oligonucleotide
  Sense strand starting at position 958 of SEQ ID NO: 1244369
agcaauaguuugcuucuca

SEQ ID NO: 1483357 - RNA, 19 nt, Artificial Sequence
  Description of Artificial Sequence: Synthetic oligonucleotide
  Antisense strand to SEQ ID NO: 1483356
ugagaagcaaacuauugcu

SEQ ID NO: 1483358 - RNA, 19 nt, Artificial Sequence
  Description of Artificial Sequence: Synthetic oligonucleotide
  Sense strand starting at position 959 of SEQ ID NO: 1244369
gcaauaguuugcuucucaa

SEQ ID NO: 1483359 - RNA, 19 nt, Artificial Sequence
  Description of Artificial Sequence: Synthetic oligonucleotide
  Antisense strand to SEQ ID NO: 1483358
uugagaagcaaacuauugc

SEQ ID NO: 1483360 - RNA, 19 nt, Artificial Sequence
  Description of Artificial Sequence: Synthetic oligonucleotide
  Sense strand starting at position 1341 of SEQ ID NO: 1244369
gccugucauucuuuagguu

SEQ ID NO: 1483361 - RNA, 19 nt, Artificial Sequence
  Description of Artificial Sequence: Synthetic oligonucleotide
  Antisense strand to SEQ ID NO: 1483360
aaccuaaagaaugacaggc

SEQ ID NO: 1483362 - RNA, 19 nt, Artificial Sequence
  Description of Artificial Sequence: Synthetic oligonucleotide
  Sense strand starting at position 1342 of SEQ ID NO: 1244369
ccugucauucuuuagguuu

SEQ ID NO: 1483363 - RNA, 19 nt, Artificial Sequence
  Description of Artificial Sequence: Synthetic oligonucleotide
  Antisense strand to SEQ ID NO: 1483362
aaaccuaaagaaugacagg

SEQ ID NO: 1483364 - RNA, 19 nt, Artificial Sequence
  Description of Artificial Sequence: Synthetic oligonucleotide
  Sense strand starting at position 1364 of SEQ ID NO: 1244369
auguuaucuccucagaagc

SEQ ID NO: 1483365 - RNA, 19 nt, Artificial Sequence
  Description of Artificial Sequence: Synthetic oligonucleotide
  Antisense strand to SEQ ID NO: 1483364
gcuucugaggagauaacau

SEQ ID NO: 1483366 - RNA, 19 nt, Artificial Sequence
  Description of Artificial Sequence: Synthetic oligonucleotide
  Sense strand starting at position 1565 of SEQ ID NO: 1244369
ccgugucuagcacaaagua

SEQ ID NO: 1483367 - RNA, 19 nt, Artificial Sequence
  Description of Artificial Sequence: Synthetic oligonucleotide
  Antisense strand to SEQ ID NO: 1483366
uacuuugugcuagacacgg

SEQ ID NO: 1483368 - RNA, 19 nt, Artificial Sequence
  Description of Artificial Sequence: Synthetic oligonucleotide
  Sense strand starting at position 1584 of SEQ ID NO: 1244369
agaccucaaucugcugaau

SEQ ID NO: 1483369 - RNA, 19 nt, Artificial Sequence
  Description of Artificial Sequence: Synthetic oligonucleotide
  Antisense strand to SEQ ID NO: 1483368
auucagcagauugaggucu

SEQ ID NO: 1483370 - RNA, 19 nt, Artificial Sequence
  Description of Artificial Sequence: Synthetic oligonucleotide
  Sense strand starting at position 1762 of SEQ ID NO: 1244369
ggaugugucacgugaccag

SEQ ID NO: 1483371 - RNA, 19 nt, Artificial Sequence
  Description of Artificial Sequence: Synthetic oligonucleotide
  Antisense strand to SEQ ID NO: 1483370
cuggucacgugacacaucc

SEQ ID NO: 1483372 - RNA, 19 nt, Artificial Sequence
  Description of Artificial Sequence: Synthetic oligonucleotide
  Sense strand starting at position 1845 of SEQ ID NO: 1244369
ggaucagugucaccuccuu

SEQ ID NO: 1483373 - RNA, 19 nt, Artificial Sequence
  Description of Artificial Sequence: Synthetic oligonucleotide
  Antisense strand to SEQ ID NO: 1483372
aaggaggugacacugaucc

SEQ ID NO: 1483374 - RNA, 19 nt, Artificial Sequence
  Description of Artificial Sequence: Synthetic oligonucleotide
  Sense strand starting at position 2001 of SEQ ID NO: 1244369
guuucuacuuccgcuauca

SEQ ID NO: 1483375 - RNA, 19 nt, Artificial Sequence
  Description of Artificial Sequence: Synthetic oligonucleotide
  Antisense strand to SEQ ID NO: 1483374
ugauagcggaaguagaaac

SEQ ID NO: 1483376 - RNA, 19 nt, Artificial Sequence
  Description of Artificial Sequence: Synthetic oligonucleotide
  Sense strand starting at position 2137 of SEQ ID NO: 1244369
ugcagaaucuugguggcua

SEQ ID NO: 1483377 - RNA, 19 nt, Artificial Sequence
  Description of Artificial Sequence: Synthetic oligonucleotide
  Antisense strand to SEQ ID NO: 1483376
uagccaccaagauucugca

SEQ ID NO: 1483378 - RNA, 19 nt, Artificial Sequence
  Description of Artificial Sequence: Synthetic oligonucleotide
  Sense strand starting at position 2452 of SEQ ID NO: 1244369
ugucuccuucugggucaua

SEQ ID NO: 1483379 - RNA, 19 nt, Artificial Sequence
  Description of Artificial Sequence: Synthetic oligonucleotide
  Antisense strand to SEQ ID NO: 1483378
uaugacccagaaggagaca

SEQ ID NO: 1483380 - RNA, 19 nt, Artificial Sequence
  Description of Artificial Sequence: Synthetic oligonucleotide
  Sense strand starting at position 2463 of SEQ ID NO: 1244369
gggucauaccuacaguguu

SEQ ID NO: 1483381 - RNA, 19 nt, Artificial Sequence
  Description of Artificial Sequence: Synthetic oligonucleotide
  Antisense strand to SEQ ID NO: 1483380
aacacuguagguaugaccc

SEQ ID NO: 1483382 - RNA, 19 nt, Artificial Sequence
  Description of Artificial Sequence: Synthetic oligonucleotide
  Sense strand starting at position 2471 of SEQ ID NO: 1244369
ccuacaguguuaguaaaug

SEQ ID NO: 1483383 - RNA, 19 nt, Artificial Sequence
  Description of Artificial Sequence: Synthetic oligonucleotide
  Antisense strand to SEQ ID NO: 1483382
cauuuacuaacacuguagg

SEQ ID NO: 1483384 - RNA, 19 nt, Artificial Sequence
  Description of Artificial Sequence: Synthetic oligonucleotide
  Sense strand starting at position 2494 of SEQ ID NO: 1244369
agaaaugauuagcuuugca

SEQ ID NO: 1483385 - RNA, 19 nt, Artificial Sequence
  Description of Artificial Sequence: Synthetic oligonucleotide
  Antisense strand to SEQ ID NO: 1483384
ugcaaagcuaaucauuucu

SEQ ID NO: 1483386 - RNA, 19 nt, Artificial Sequence
  Description of Artificial Sequence: Synthetic oligonucleotide
  Sense strand starting at position 2897 of SEQ ID NO: 1244369
gcuuaauggcugcaggaau

SEQ ID NO: 1483387 - RNA, 19 nt, Artificial Sequence
  Description of Artificial Sequence: Synthetic oligonucleotide
  Antisense strand to SEQ ID NO: 1483386
auuccugcagccauuaagc

SEQ ID NO: 1483388 - RNA, 19 nt, Artificial Sequence
  Description of Artificial Sequence: Synthetic oligonucleotide
  Sense strand starting at position 3000 of SEQ ID NO: 1244369
auauuaugcugugcaaauu

SEQ ID NO: 1483389 - RNA, 19 nt, Artificial Sequence
  Description of Artificial Sequence: Synthetic oligonucleotide
  Antisense strand to SEQ ID NO: 1483388
aauuugcacagcauaauau

SEQ ID NO: 1483390 - RNA, 19 nt, Artificial Sequence
  Description of Artificial Sequence: Synthetic oligonucleotide
  Sense strand starting at position 3709 of SEQ ID NO: 1244369
uguuaaaucuuguuaccac

SEQ ID NO: 1483391 - RNA, 19 nt, Artificial Sequence
  Description of Artificial Sequence: Synthetic oligonucleotide
  Antisense strand to SEQ ID NO: 1483390
gugguaacaagauuuaaca

SEQ ID NO: 1483392 - RNA, 19 nt, Artificial Sequence
  Description of Artificial Sequence: Synthetic oligonucleotide
  Sense strand starting at position 3745 of SEQ ID NO: 1244369
uuguaaugguaacucuacu

SEQ ID NO: 1483393 - RNA, 19 nt, Artificial Sequence
  Description of Artificial Sequence: Synthetic oligonucleotide
  Antisense strand to SEQ ID NO: 1483392
aguagaguuaccauuacaa

SEQ ID NO: 1483394 - RNA, 19 nt, Artificial Sequence
  Description of Artificial Sequence: Synthetic oligonucleotide
  Sense strand starting at position 3751 of SEQ ID NO: 1244369
ugguaacucuacuuuguuu

SEQ ID NO: 1483395 - RNA, 19 nt, Artificial Sequence
  Description of Artificial Sequence: Synthetic oligonucleotide
  Antisense strand to SEQ ID NO: 1483394
aaacaaaguagaguuacca

SEQ ID NO: 1483396 - RNA, 19 nt, Artificial Sequence
  Description of Artificial Sequence: Synthetic oligonucleotide
  Sense strand starting at position 3753 of SEQ ID NO: 1244369
guaacucuacuuuguuuau

SEQ ID NO: 1483397 - RNA, 19 nt, Artificial Sequence
  Description of Artificial Sequence: Synthetic oligonucleotide
  Antisense strand to SEQ ID NO: 1483396
auaaacaaaguagaguuac

SEQ ID NO: 1483398 - RNA, 19 nt, Artificial Sequence
  Description of Artificial Sequence: Synthetic oligonucleotide
  Sense strand starting at position 3775 of SEQ ID NO: 1244369
ucagcuugaccuggaaaga

SEQ ID NO: 1483399 - RNA, 19 nt, Artificial Sequence
  Description of Artificial Sequence: Synthetic oligonucleotide
  Antisense strand to SEQ ID NO: 1483398
ucuuuccaggucaagcuga

SEQ ID NO: 1483400 - RNA, 19 nt, Artificial Sequence
  Description of Artificial Sequence: Synthetic oligonucleotide
  Sense strand starting at position 3788 of SEQ ID NO: 1244369
gaaagaauuugaggaggau

SEQ ID NO: 1483401 - RNA, 19 nt, Artificial Sequence
  Description of Artificial Sequence: Synthetic oligonucleotide
  Antisense strand to SEQ ID NO: 1483400
auccuccucaaauucuuuc

SEQ ID NO: 1483402 - RNA, 19 nt, Artificial Sequence
  Description of Artificial Sequence: Synthetic oligonucleotide
  Sense strand starting at position 3801 of SEQ ID NO: 1244369
gaggauuccuguuagauua

SEQ ID NO: 1483403 - RNA, 19 nt, Artificial Sequence
  Description of Artificial Sequence: Synthetic oligonucleotide
  Antisense strand to SEQ ID NO: 1483402
uaaucuaacaggaauccuc

SEQ ID NO: 1483404 - RNA, 19 nt, Artificial Sequence
  Description of Artificial Sequence: Synthetic oligonucleotide
  Sense strand starting at position 3811 of SEQ ID NO: 1244369
guuagauuaccaggaguua

SEQ ID NO: 1483405 - RNA, 19 nt, Artificial Sequence
  Description of Artificial Sequence: Synthetic oligonucleotide
  Antisense strand to SEQ ID NO: 1483404
uaacuccugguaaucuaac

SEQ ID NO: 1483406 - RNA, 19 nt, Artificial Sequence
  Description of Artificial Sequence: Synthetic oligonucleotide
  Sense strand starting at position 3829 of SEQ ID NO: 1244369
agaguuccagauugaaugu

SEQ ID NO: 1483407 - RNA, 19 nt, Artificial Sequence
  Description of Artificial Sequence: Synthetic oligonucleotide
  Antisense strand to SEQ ID NO: 1483406
acauucaaucuggaacucu

SEQ ID NO: 1483408 - RNA, 19 nt, Artificial Sequence
  Description of Artificial Sequence: Synthetic oligonucleotide
  Sense strand starting at position 3862 of SEQ ID NO: 1244369
auauuucucuguuucugua

SEQ ID NO: 1483409 - RNA, 19 nt, Artificial Sequence
  Description of Artificial Sequence: Synthetic oligonucleotide
  Antisense strand to SEQ ID NO: 1483408
uacagaaacagagaaauau

SEQ ID NO: 1483410 - RNA, 19 nt, Artificial Sequence
  Description of Artificial Sequence: Synthetic oligonucleotide
  Sense strand starting at position 3872 of SEQ ID NO: 1244369
guuucuguauucucuauau

SEQ ID NO: 1483411 - RNA, 19 nt, Artificial Sequence
  Description of Artificial Sequence: Synthetic oligonucleotide
  Antisense strand to SEQ ID NO: 1483410
auauagagaauacagaaac

SEQ ID NO: 1483412 - RNA, 19 nt, Artificial Sequence
  Description of Artificial Sequence: Synthetic oligonucleotide
  Sense strand starting at position 3901 of SEQ ID NO: 1244369
ugucauaaagccuggcuau

SEQ ID NO: 1483413 - RNA, 19 nt, Artificial Sequence
  Description of Artificial Sequence: Synthetic oligonucleotide
  Antisense strand to SEQ ID NO: 1483412
auagccaggcuuuaugaca

SEQ ID NO: 1483414 - RNA, 19 nt, Artificial Sequence
  Description of Artificial Sequence: Synthetic oligonucleotide
  Sense strand starting at position 289 of SEQ ID NO: 1244370
gagcgagccucugccuuaa

SEQ ID NO: 1483415 - RNA, 19 nt, Artificial Sequence
  Description of Artificial Sequence: Synthetic oligonucleotide
  Antisense strand to SEQ ID NO: 1483414
uuaaggcagaggcucgcuc

SEQ ID NO: 1483416 - RNA, 19 nt, Artificial Sequence
  Description of Artificial Sequence: Synthetic oligonucleotide
  Sense strand starting at position 351 of SEQ ID NO: 1244370
cucaucagagauggcauua

SEQ ID NO: 1483417 - RNA, 19 nt, Artificial Sequence
  Description of Artificial Sequence: Synthetic oligonucleotide
  Antisense strand to SEQ ID NO: 1483416
uaaugccaucucugaugag

SEQ ID NO: 1483418 - RNA, 19 nt, Artificial Sequence
  Description of Artificial Sequence: Synthetic oligonucleotide
  Sense strand starting at position 464 of SEQ ID NO: 1244370
gacauuauccgagaggcug

SEQ ID NO: 1483419 - RNA, 19 nt, Artificial Sequence
  Description of Artificial Sequence: Synthetic oligonucleotide
  Antisense strand to SEQ ID NO: 1483418
cagccucucggauaauguc

SEQ ID NO: 1483420 - RNA, 19 nt, Artificial Sequence
  Description of Artificial Sequence: Synthetic oligonucleotide
  Sense strand starting at position 488 of SEQ ID NO: 1244370
ggauuuaaaucgggcuauu

SEQ ID NO: 1483421 - RNA, 19 nt, Artificial Sequence
  Description of Artificial Sequence: Synthetic oligonucleotide
  Antisense strand to SEQ ID NO: 1483420
aauagcccgauuuaaaucc

SEQ ID NO: 1483422 - RNA, 19 nt, Artificial Sequence
  Description of Artificial Sequence: Synthetic oligonucleotide
  Sense strand starting at position 598 of SEQ ID NO: 1244370
uuguaaguuccuuaaaggu

SEQ ID NO: 1483423 - RNA, 19 nt, Artificial Sequence
  Description of Artificial Sequence: Synthetic oligonucleotide
  Antisense strand to SEQ ID NO: 1483422
accuuuaaggaacuuacaa

SEQ ID NO: 1483424 - RNA, 19 nt, Artificial Sequence
  Description of Artificial Sequence: Synthetic oligonucleotide
  Sense strand starting at position 1111 of SEQ ID NO: 1244370
gccagaguuaccuacagag

SEQ ID NO: 1483425 - RNA, 19 nt, Artificial Sequence
  Description of Artificial Sequence: Synthetic oligonucleotide
  Antisense strand to SEQ ID NO: 1483424
cucuguagguaacucuggc

SEQ ID NO: 1483426 - RNA, 19 nt, Artificial Sequence
  Description of Artificial Sequence: Synthetic oligonucleotide
  Sense strand starting at position 1161 of SEQ ID NO: 1244370
cggaaagucagguggucaa

SEQ ID NO: 1483427 - RNA, 19 nt, Artificial Sequence
  Description of Artificial Sequence: Synthetic oligonucleotide
  Antisense strand to SEQ ID NO: 1483426
uugaccaccugacuuuccg

SEQ ID NO: 1483428 - RNA, 19 nt, Artificial Sequence
  Description of Artificial Sequence: Synthetic oligonucleotide
  Sense strand starting at position 1164 of SEQ ID NO: 1244370
aaagucagguggucaagau

SEQ ID NO: 1483429 - RNA, 19 nt, Artificial Sequence
  Description of Artificial Sequence: Synthetic oligonucleotide
  Antisense strand to SEQ ID NO: 1483428
aucuugaccaccugacuuu

SEQ ID NO: 1483430 - RNA, 19 nt, Artificial Sequence
  Description of Artificial Sequence: Synthetic oligonucleotide
  Sense strand starting at position 1165 of SEQ ID NO: 1244370
aagucagguggucaagauu

SEQ ID NO: 1483431 - RNA, 19 nt, Artificial Sequence
  Description of Artificial Sequence: Synthetic oligonucleotide
  Antisense strand to SEQ ID NO: 1483430
aaucuugaccaccugacuu

SEQ ID NO: 1483432 - RNA, 19 nt, Artificial Sequence
  Description of Artificial Sequence: Synthetic oligonucleotide
  Sense strand starting at position 1238 of SEQ ID NO: 1244370
ccaagaaugaggugcagaa

SEQ ID NO: 1483433 - RNA, 19 nt, Artificial Sequence
  Description of Artificial Sequence: Synthetic oligonucleotide
  Antisense strand to SEQ ID NO: 1483432
uucugcaccucauucuugg

SEQ ID NO: 1483434 - RNA, 19 nt, Artificial Sequence
  Description of Artificial Sequence: Synthetic oligonucleotide
  Sense strand starting at position 1273 of SEQ ID NO: 1244370
gggugauuaagcugccgau

SEQ ID NO: 1483435 - RNA, 19 nt, Artificial Sequence
  Description of Artificial Sequence: Synthetic oligonucleotide
  Antisense strand to SEQ ID NO: 1483434
aucggcagcuuaaucaccc

SEQ ID NO: 1483436 - RNA, 19 nt, Artificial Sequence
  Description of Artificial Sequence: Synthetic oligonucleotide
  Sense strand starting at position 1452 of SEQ ID NO: 1244370
cgaaauacucucgguaggu

SEQ ID NO: 1483437 - RNA, 19 nt, Artificial Sequence
  Description of Artificial Sequence: Synthetic oligonucleotide
  Antisense strand to SEQ ID NO: 1483436
accuaccgagaguauuucg

SEQ ID NO: 1483438 - RNA, 19 nt, Artificial Sequence
  Description of Artificial Sequence: Synthetic oligonucleotide
  Sense strand starting at position 1453 of SEQ ID NO: 1244370
gaaauacucucgguagguc

SEQ ID NO: 1483439 - RNA, 19 nt, Artificial Sequence
  Description of Artificial Sequence: Synthetic oligonucleotide
  Antisense strand to SEQ ID NO: 1483438
gaccuaccgagaguauuuc

SEQ ID NO: 1483440 - RNA, 19 nt, Artificial Sequence
  Description of Artificial Sequence: Synthetic oligonucleotide
  Sense strand starting at position 1566 of SEQ ID NO: 1244370
cgaugucacuguugggcau

SEQ ID NO: 1483441 - RNA, 19 nt, Artificial Sequence
  Description of Artificial Sequence: Synthetic oligonucleotide
  Antisense strand to SEQ ID NO: 1483440
augcccaacagugacaucg

SEQ ID NO: 1483442 - RNA, 19 nt, Artificial Sequence
  Description of Artificial Sequence: Synthetic oligonucleotide
  Sense strand starting at position 2024 of SEQ ID NO: 1244370
cagucauaugcucgcccau

SEQ ID NO: 1483443 - RNA, 19 nt, Artificial Sequence
  Description of Artificial Sequence: Synthetic oligonucleotide
  Antisense strand to SEQ ID NO: 1483442
augggcgagcauaugacug

SEQ ID NO: 1483444 - RNA, 19 nt, Artificial Sequence
  Description of Artificial Sequence: Synthetic oligonucleotide
  Sense strand starting at position 2172 of SEQ ID NO: 1244370
ggacucugcuuggguuuaa

SEQ ID NO: 1483445 - RNA, 19 nt, Artificial Sequence
  Description of Artificial Sequence: Synthetic oligonucleotide
  Antisense strand to SEQ ID NO: 1483444
uuaaacccaagcagagucc

SEQ ID NO: 1483446 - RNA, 19 nt, Artificial Sequence
  Description of Artificial Sequence: Synthetic oligonucleotide
  Sense strand starting at position 2173 of SEQ ID NO: 1244370
gacucugcuuggguuuaaa

SEQ ID NO: 1483447 - RNA, 19 nt, Artificial Sequence
  Description of Artificial Sequence: Synthetic oligonucleotide
  Antisense strand to SEQ ID NO: 1483446
uuuaaacccaagcagaguc

SEQ ID NO: 1483448 - RNA, 19 nt, Artificial Sequence
  Description of Artificial Sequence: Synthetic oligonucleotide
  Sense strand starting at position 2592 of SEQ ID NO: 1244370
cggaucaucugagguaauu

SEQ ID NO: 1483449 - RNA, 19 nt, Artificial Sequence
  Description of Artificial Sequence: Synthetic oligonucleotide
  Antisense strand to SEQ ID NO: 1483448
aauuaccucagaugauccg

SEQ ID NO: 1483450 - RNA, 19 nt, Artificial Sequence
  Description of Artificial Sequence: Synthetic oligonucleotide
  Sense strand starting at position 2601 of SEQ ID NO: 1244370
ugagguaauuaguuugaga

SEQ ID NO: 1483451 - RNA, 19 nt, Artificial Sequence
  Description of Artificial Sequence: Synthetic oligonucleotide
  Antisense strand to SEQ ID NO: 1483450
ucucaaacuaauuaccuca

SEQ ID NO: 1483452 - RNA, 19 nt, Artificial Sequence
  Description of Artificial Sequence: Synthetic oligonucleotide
  Sense strand starting at position 2604 of SEQ ID NO: 1244370
gguaauuaguuugagacca

SEQ ID NO: 1483453 - RNA, 19 nt, Artificial Sequence
  Description of Artificial Sequence: Synthetic oligonucleotide
  Antisense strand to SEQ ID NO: 1483452
uggucucaaacuaauuacc

SEQ ID NO: 1483454 - RNA, 19 nt, Artificial Sequence
  Description of Artificial Sequence: Synthetic oligonucleotide
  Sense strand starting at position 2858 of SEQ ID NO: 1244370
aaaccagaucgugaccuua

SEQ ID NO: 1483455 - RNA, 19 nt, Artificial Sequence
  Description of Artificial Sequence: Synthetic oligonucleotide
  Antisense strand to SEQ ID NO: 1483454
uaaggucacgaucugguuu

SEQ ID NO: 1483456 - RNA, 19 nt, Artificial Sequence
  Description of Artificial Sequence: Synthetic oligonucleotide
  Sense strand starting at position 2860 of SEQ ID NO: 1244370
accagaucgugaccuuacu

SEQ ID NO: 1483457 - RNA, 19 nt, Artificial Sequence
  Description of Artificial Sequence: Synthetic oligonucleotide
  Antisense strand to SEQ ID NO: 1483456
aguaaggucacgaucuggu

SEQ ID NO: 1483458 - RNA, 19 nt, Artificial Sequence
  Description of Artificial Sequence: Synthetic oligonucleotide
  Sense strand starting at position 2983 of SEQ ID NO: 1244370
guuuguguguuagcucaac

SEQ ID NO: 1483459 - RNA, 19 nt, Artificial Sequence
  Description of Artificial Sequence: Synthetic oligonucleotide
  Antisense strand to SEQ ID NO: 1483458
guugagcuaacacacaaac

SEQ ID NO: 1483460 - RNA, 19 nt, Artificial Sequence
  Description of Artificial Sequence: Synthetic oligonucleotide
  Sense strand starting at position 3032 of SEQ ID NO: 1244370
gcagaagugaccugguuaa

SEQ ID NO: 1483461 - RNA, 19 nt, Artificial Sequence
  Description of Artificial Sequence: Synthetic oligonucleotide
  Antisense strand to SEQ ID NO: 1483460
uuaaccaggucacuucugc

SEQ ID NO: 1483462 - RNA, 19 nt, Artificial Sequence
  Description of Artificial Sequence: Synthetic oligonucleotide
  Sense strand starting at position 3044 of SEQ ID NO: 1244370
ugguuaagugcagauguga

SEQ ID NO: 1483463 - RNA, 19 nt, Artificial Sequence
  Description of Artificial Sequence: Synthetic oligonucleotide
  Antisense strand to SEQ ID NO: 1483462
ucacaucugcacuuaacca

SEQ ID NO: 1483464 - RNA, 19 nt, Artificial Sequence
  Description of Artificial Sequence: Synthetic oligonucleotide
  Sense strand starting at position 3052 of SEQ ID NO: 1244370
ugcagaugugaauguuucu

SEQ ID NO: 1483465 - RNA, 19 nt, Artificial Sequence
  Description of Artificial Sequence: Synthetic oligonucleotide
  Antisense strand to SEQ ID NO: 1483464
agaaacauucacaucugca

SEQ ID NO: 1483466 - RNA, 19 nt, Artificial Sequence
  Description of Artificial Sequence: Synthetic oligonucleotide
  Sense strand starting at position 3059 of SEQ ID NO: 1244370
gugaauguuucuggcagga

SEQ ID NO: 1483467 - RNA, 19 nt, Artificial Sequence
  Description of Artificial Sequence: Synthetic oligonucleotide
  Antisense strand to SEQ ID NO: 1483466
uccugccagaaacauucac

SEQ ID NO: 1483468 - RNA, 19 nt, Artificial Sequence
  Description of Artificial Sequence: Synthetic oligonucleotide
  Sense strand starting at position 3061 of SEQ ID NO: 1244370
gaauguuucuggcaggacu

SEQ ID NO: 1483469 - RNA, 19 nt, Artificial Sequence
  Description of Artificial Sequence: Synthetic oligonucleotide
  Antisense strand to SEQ ID NO: 1483468
aguccugccagaaacauuc

SEQ ID NO: 1483470 - RNA, 19 nt, Artificial Sequence
  Description of Artificial Sequence: Synthetic oligonucleotide
  Sense strand starting at position 3080 of SEQ ID NO: 1244370
caggcuugcccuugugauc

SEQ ID NO: 1483471 - RNA, 19 nt, Artificial Sequence
  Description of Artificial Sequence: Synthetic oligonucleotide
  Antisense strand to SEQ ID NO: 1483470
gaucacaagggcaagccug

SEQ ID NO: 1483472 - RNA, 19 nt, Artificial Sequence
  Description of Artificial Sequence: Synthetic oligonucleotide
  Sense strand starting at position 3098 of SEQ ID NO: 1244370
ccaguucuaccauggcaaa

SEQ ID NO: 1483473 - RNA, 19 nt, Artificial Sequence
  Description of Artificial Sequence: Synthetic oligonucleotide
  Antisense strand to SEQ ID NO: 1483472
uuugccaugguagaacugg

SEQ ID NO: 1483474 - RNA, 19 nt, Artificial Sequence
  Description of Artificial Sequence: Synthetic oligonucleotide
  Sense strand starting at position 3390 of SEQ ID NO: 1244370
ucacaaucacuuugagaug

SEQ ID NO: 1483475 - RNA, 19 nt, Artificial Sequence
  Description of Artificial Sequence: Synthetic oligonucleotide
  Antisense strand to SEQ ID NO: 1483474
caucucaaagugauuguga

SEQ ID NO: 1483476 - RNA, 19 nt, Artificial Sequence
  Description of Artificial Sequence: Synthetic oligonucleotide
  Sense strand starting at position 3590 of SEQ ID NO: 1244370
cucguaaggaguugcuuau

SEQ ID NO: 1483477 - RNA, 19 nt, Artificial Sequence
  Description of Artificial Sequence: Synthetic oligonucleotide
  Antisense strand to SEQ ID NO: 1483476
auaagcaacuccuuacgag

SEQ ID NO: 1483478 - RNA, 19 nt, Artificial Sequence
  Description of Artificial Sequence: Synthetic oligonucleotide
  Sense strand starting at position 3597 of SEQ ID NO: 1244370
ggaguugcuuauugugaca

SEQ ID NO: 1483479 - RNA, 19 nt, Artificial Sequence
  Description of Artificial Sequence: Synthetic oligonucleotide
  Antisense strand to SEQ ID NO: 1483478
ugucacaauaagcaacucc

SEQ ID NO: 1483480 - RNA, 19 nt, Artificial Sequence
  Description of Artificial Sequence: Synthetic oligonucleotide
  Sense strand starting at position 3599 of SEQ ID NO: 1244370
aguugcuuauugugacauu

SEQ ID NO: 1483481 - RNA, 19 nt, Artificial Sequence
  Description of Artificial Sequence: Synthetic oligonucleotide
  Antisense strand to SEQ ID NO: 1483480
aaugucacaauaagcaacu

SEQ ID NO: 1483482 - RNA, 19 nt, Artificial Sequence
  Description of Artificial Sequence: Synthetic oligonucleotide
  Sense strand starting at position 3602 of SEQ ID NO: 1244370
ugcuuauugugacauucca

SEQ ID NO: 1483483 - RNA, 19 nt, Artificial Sequence
  Description of Artificial Sequence: Synthetic oligonucleotide
  Antisense strand to SEQ ID NO: 1483482
uggaaugucacaauaagca

SEQ ID NO: 1483484 - RNA, 19 nt, Artificial Sequence
  Description of Artificial Sequence: Synthetic oligonucleotide
  Sense strand starting at position 3609 of SEQ ID NO: 1244370
ugugacauuccauacugca

SEQ ID NO: 1483485 - RNA, 19 nt, Artificial Sequence
  Description of Artificial Sequence: Synthetic oligonucleotide
  Antisense strand to SEQ ID NO: 1483484
ugcaguauggaaugucaca

SEQ ID NO: 1483486 - RNA, 19 nt, Artificial Sequence
  Description of Artificial Sequence: Synthetic oligonucleotide
  Sense strand starting at position 3625 of SEQ ID NO: 1244370
gcaguuaugcaguacagga

SEQ ID NO: 1483487 - RNA, 19 nt, Artificial Sequence
  Description of Artificial Sequence: Synthetic oligonucleotide
  Antisense strand to SEQ ID NO: 1483486
uccuguacugcauaacugc

SEQ ID NO: 1483488 - RNA, 19 nt, Artificial Sequence
  Description of Artificial Sequence: Synthetic oligonucleotide
  Sense strand starting at position 3649 of SEQ ID NO: 1244370
acuggauuguguguuuaca

SEQ ID NO: 1483489 - RNA, 19 nt, Artificial Sequence
  Description of Artificial Sequence: Synthetic oligonucleotide
  Antisense strand to SEQ ID NO: 1483488
uguaaacacacaauccagu

SEQ ID NO: 1483490 - RNA, 19 nt, Artificial Sequence
  Description of Artificial Sequence: Synthetic oligonucleotide
  Sense strand starting at position 3651 of SEQ ID NO: 1244370
uggauuguguguuuacauc

SEQ ID NO: 1483491 - RNA, 19 nt, Artificial Sequence
  Description of Artificial Sequence: Synthetic oligonucleotide
  Antisense strand to SEQ ID NO: 1483490
gauguaaacacacaaucca

SEQ ID NO: 1483492 - RNA, 19 nt, Artificial Sequence
  Description of Artificial Sequence: Synthetic oligonucleotide
  Sense strand starting at position 3657 of SEQ ID NO: 1244370
guguguuuacaucguggcu

SEQ ID NO: 1483493 - RNA, 19 nt, Artificial Sequence
  Description of Artificial Sequence: Synthetic oligonucleotide
  Antisense strand to SEQ ID NO: 1483492
agccacgauguaaacacac

SEQ ID NO: 1483494 - RNA, 19 nt, Artificial Sequence
  Description of Artificial Sequence: Synthetic oligonucleotide
  Sense strand starting at position 268 of SEQ ID NO: 1244371
gguuaaucauuauugaggu

SEQ ID NO: 1483495 - RNA, 19 nt, Artificial Sequence
  Description of Artificial Sequence: Synthetic oligonucleotide
  Antisense strand to SEQ ID NO: 1483494
accucaauaaugauuaacc

SEQ ID NO: 1483496 - RNA, 19 nt, Artificial Sequence
  Description of Artificial Sequence: Synthetic oligonucleotide
  Sense strand starting at position 292 of SEQ ID NO: 1244371
ugacuucgugcuuaauuaa

SEQ ID NO: 1483497 - RNA, 19 nt, Artificial Sequence
  Description of Artificial Sequence: Synthetic oligonucleotide
  Antisense strand to SEQ ID NO: 1483496
uuaauuaagcacgaaguca

SEQ ID NO: 1483498 - RNA, 19 nt, Artificial Sequence
  Description of Artificial Sequence: Synthetic oligonucleotide
  Sense strand starting at position 348 of SEQ ID NO: 1244371
gaagaucucugacagaagg

SEQ ID NO: 1483499 - RNA, 19 nt, Artificial Sequence
  Description of Artificial Sequence: Synthetic oligonucleotide
  Antisense strand to SEQ ID NO: 1483498
ccuucugucagagaucuuc

SEQ ID NO: 1483500 - RNA, 19 nt, Artificial Sequence
  Description of Artificial Sequence: Synthetic oligonucleotide
  Sense strand starting at position 714 of SEQ ID NO: 1244371
gcauuaggaccuuaauacu

SEQ ID NO: 1483501 - RNA, 19 nt, Artificial Sequence
  Description of Artificial Sequence: Synthetic oligonucleotide
  Antisense strand to SEQ ID NO: 1483500
aguauuaagguccuaaugc

SEQ ID NO: 1483502 - RNA, 19 nt, Artificial Sequence
  Description of Artificial Sequence: Synthetic oligonucleotide
  Sense strand starting at position 730 of SEQ ID NO: 1244371
acuuaugggugucucuaaa

SEQ ID NO: 1483503 - RNA, 19 nt, Artificial Sequence
  Description of Artificial Sequence: Synthetic oligonucleotide
  Antisense strand to SEQ ID NO: 1483502
uuuagagacacccauaagu

SEQ ID NO: 1483504 - RNA, 19 nt, Artificial Sequence
  Description of Artificial Sequence: Synthetic oligonucleotide
  Sense strand starting at position 837 of SEQ ID NO: 1244371
uacggauacugaguugauc

SEQ ID NO: 1483505 - RNA, 19 nt, Artificial Sequence
  Description of Artificial Sequence: Synthetic oligonucleotide
  Antisense strand to SEQ ID NO: 1483504
gaucaacucaguauccgua

SEQ ID NO: 1483506 - RNA, 19 nt, Artificial Sequence
  Description of Artificial Sequence: Synthetic oligonucleotide
  Sense strand starting at position 839 of SEQ ID NO: 1244371
cggauacugaguugaucaa

SEQ ID NO: 1483507 - RNA, 19 nt, Artificial Sequence
  Description of Artificial Sequence: Synthetic oligonucleotide
  Antisense strand to SEQ ID NO: 1483506
uugaucaacucaguauccg

SEQ ID NO: 1483508 - RNA, 19 nt, Artificial Sequence
  Description of Artificial Sequence: Synthetic oligonucleotide
  Sense strand starting at position 843 of SEQ ID NO: 1244371
uacugaguugaucaaagca

SEQ ID NO: 1483509 - RNA, 19 nt, Artificial Sequence
  Description of Artificial Sequence: Synthetic oligonucleotide
  Antisense strand to SEQ ID NO: 1483508
ugcuuugaucaacucagua

SEQ ID NO: 1483510 - RNA, 19 nt, Artificial Sequence
  Description of Artificial Sequence: Synthetic oligonucleotide
  Sense strand starting at position 1208 of SEQ ID NO: 1244371
ccugaaugcuaugcuuaaa

SEQ ID NO: 1483511 - RNA, 19 nt, Artificial Sequence
  Description of Artificial Sequence: Synthetic oligonucleotide
  Antisense strand to SEQ ID NO: 1483510
uuuaagcauagcauucagg

SEQ ID NO: 1483512 - RNA, 19 nt, Artificial Sequence
  Description of Artificial Sequence: Synthetic oligonucleotide
  Sense strand starting at position 1218 of SEQ ID NO: 1244371
augcuuaaagcauaagcaa

SEQ ID NO: 1483513 - RNA, 19 nt, Artificial Sequence
  Description of Artificial Sequence: Synthetic oligonucleotide
  Antisense strand to SEQ ID NO: 1483512
uugcuuaugcuuuaagcau

SEQ ID NO: 1483514 - RNA, 19 nt, Artificial Sequence
  Description of Artificial Sequence: Synthetic oligonucleotide
  Sense strand starting at position 1373 of SEQ ID NO: 1244371
cucucugaucaugagguuu

SEQ ID NO: 1483515 - RNA, 19 nt, Artificial Sequence
  Description of Artificial Sequence: Synthetic oligonucleotide
  Antisense strand to SEQ ID NO: 1483514
aaaccucaugaucagagag

SEQ ID NO: 1483516 - RNA, 19 nt, Artificial Sequence
  Description of Artificial Sequence: Synthetic oligonucleotide
  Sense strand starting at position 1708 of SEQ ID NO: 1244371
gaguauuucccucgacucu

SEQ ID NO: 1483517 - RNA, 19 nt, Artificial Sequence
  Description of Artificial Sequence: Synthetic oligonucleotide
  Antisense strand to SEQ ID NO: 1483516
agagucgagggaaauacuc

SEQ ID NO: 1483518 - RNA, 19 nt, Artificial Sequence
  Description of Artificial Sequence: Synthetic oligonucleotide
  Sense strand starting at position 2150 of SEQ ID NO: 1244371
gggaaugggcauugcugua

SEQ ID NO: 1483519 - RNA, 19 nt, Artificial Sequence
  Description of Artificial Sequence: Synthetic oligonucleotide
  Antisense strand to SEQ ID NO: 1483518
uacagcaaugcccauuccc

SEQ ID NO: 1483520 - RNA, 19 nt, Artificial Sequence
  Description of Artificial Sequence: Synthetic oligonucleotide
  Sense strand starting at position 2173 of SEQ ID NO: 1244371
uggcacauugccguuuauu

SEQ ID NO: 1483521 - RNA, 19 nt, Artificial Sequence
  Description of Artificial Sequence: Synthetic oligonucleotide
  Antisense strand to SEQ ID NO: 1483520
aauaaacggcaaugugcca

SEQ ID NO: 1483522 - RNA, 19 nt, Artificial Sequence
  Description of Artificial Sequence: Synthetic oligonucleotide
  Sense strand starting at position 2174 of SEQ ID NO: 1244371
ggcacauugccguuuauuc

SEQ ID NO: 1483523 - RNA, 19 nt, Artificial Sequence
  Description of Artificial Sequence: Synthetic oligonucleotide
  Antisense strand to SEQ ID NO: 1483522
gaauaaacggcaaugugcc

SEQ ID NO: 1483524 - RNA, 19 nt, Artificial Sequence
  Description of Artificial Sequence: Synthetic oligonucleotide
  Sense strand starting at position 2184 of SEQ ID NO: 1244371
cguuuauuccauuaguuaa

SEQ ID NO: 1483525 - RNA, 19 nt, Artificial Sequence
  Description of Artificial Sequence: Synthetic oligonucleotide
  Antisense strand to SEQ ID NO: 1483524
uuaacuaauggaauaaacg

SEQ ID NO: 1483526 - RNA, 19 nt, Artificial Sequence
  Description of Artificial Sequence: Synthetic oligonucleotide
  Sense strand starting at position 2528 of SEQ ID NO: 1244371
gguugucaugcgccagcaa

SEQ ID NO: 1483527 - RNA, 19 nt, Artificial Sequence
  Description of Artificial Sequence: Synthetic oligonucleotide
  Antisense strand to SEQ ID NO: 1483526
uugcuggcgcaugacaacc

SEQ ID NO: 1483528 - RNA, 19 nt, Artificial Sequence
  Description of Artificial Sequence: Synthetic oligonucleotide
  Sense strand starting at position 2605 of SEQ ID NO: 1244371
aggagaaucccucgaacac

SEQ ID NO: 1483529 - RNA, 19 nt, Artificial Sequence
  Description of Artificial Sequence: Synthetic oligonucleotide
  Antisense strand to SEQ ID NO: 1483528
guguucgagggauucuccu

SEQ ID NO: 1483530 - RNA, 19 nt, Artificial Sequence
  Description of Artificial Sequence: Synthetic oligonucleotide
  Sense strand starting at position 2721 of SEQ ID NO: 1244371
ugacuacugucuucuacua

SEQ ID NO: 1483531 - RNA, 19 nt, Artificial Sequence
  Description of Artificial Sequence: Synthetic oligonucleotide
  Antisense strand to SEQ ID NO: 1483530
uaguagaagacaguaguca

SEQ ID NO: 1483532 - RNA, 19 nt, Artificial Sequence
  Description of Artificial Sequence: Synthetic oligonucleotide
  Sense strand starting at position 2751 of SEQ ID NO: 1244371
gcagaagacacgugaauug

SEQ ID NO: 1483533 - RNA, 19 nt, Artificial Sequence
  Description of Artificial Sequence: Synthetic oligonucleotide
  Antisense strand to SEQ ID NO: 1483532
caauucacgugucuucugc

SEQ ID NO: 1483534 - RNA, 19 nt, Artificial Sequence
  Description of Artificial Sequence: Synthetic oligonucleotide
  Sense strand starting at position 2756 of SEQ ID NO: 1244371
agacacgugaauugacaaa

SEQ ID NO: 1483535 - RNA, 19 nt, Artificial Sequence
  Description of Artificial Sequence: Synthetic oligonucleotide
  Antisense strand to SEQ ID NO: 1483534
uuugucaauucacgugucu

SEQ ID NO: 1483536 - RNA, 19 nt, Artificial Sequence
  Description of Artificial Sequence: Synthetic oligonucleotide
  Sense strand starting at position 2786 of SEQ ID NO: 1244371
uuugucauuucggaaagga

SEQ ID NO: 1483537 - RNA, 19 nt, Artificial Sequence
  Description of Artificial Sequence: Synthetic oligonucleotide
  Antisense strand to SEQ ID NO: 1483536
uccuuuccgaaaugacaaa

SEQ ID NO: 1483538 - RNA, 19 nt, Artificial Sequence
  Description of Artificial Sequence: Synthetic oligonucleotide
  Sense strand starting at position 2813 of SEQ ID NO: 1244371
gcaauuacguaauuuacuu

SEQ ID NO: 1483539 - RNA, 19 nt, Artificial Sequence
  Description of Artificial Sequence: Synthetic oligonucleotide
  Antisense strand to SEQ ID NO: 1483538
aaguaaauuacguaauugc

SEQ ID NO: 1483540 - RNA, 19 nt, Artificial Sequence
  Description of Artificial Sequence: Synthetic oligonucleotide
  Sense strand starting at position 2933 of SEQ ID NO: 1244371
uguuaaaggauucgugaug

SEQ ID NO: 1483541 - RNA, 19 nt, Artificial Sequence
  Description of Artificial Sequence: Synthetic oligonucleotide
  Antisense strand to SEQ ID NO: 1483540
caucacgaauccuuuaaca

SEQ ID NO: 1483542 - RNA, 19 nt, Artificial Sequence
  Description of Artificial Sequence: Synthetic oligonucleotide
  Sense strand starting at position 2942 of SEQ ID NO: 1244371
auucgugauguugggauca

SEQ ID NO: 1483543 - RNA, 19 nt, Artificial Sequence
  Description of Artificial Sequence: Synthetic oligonucleotide
  Antisense strand to SEQ ID NO: 1483542
ugaucccaacaucacgaau

SEQ ID NO: 1483544 - RNA, 19 nt, Artificial Sequence
  Description of Artificial Sequence: Synthetic oligonucleotide
  Sense strand starting at position 2952 of SEQ ID NO: 1244371
uugggaucacccugguaaa

SEQ ID NO: 1483545 - RNA, 19 nt, Artificial Sequence
  Description of Artificial Sequence: Synthetic oligonucleotide
  Antisense strand to SEQ ID NO: 1483544
uuuaccagggugaucccaa

SEQ ID NO: 1483546 - RNA, 19 nt, Artificial Sequence
  Description of Artificial Sequence: Synthetic oligonucleotide
  Sense strand starting at position 2953 of SEQ ID NO: 1244371
ugggaucacccugguaaau

SEQ ID NO: 1483547 - RNA, 19 nt, Artificial Sequence
  Description of Artificial Sequence: Synthetic oligonucleotide
  Antisense strand to SEQ ID NO: 1483546
auuuaccagggugauccca

SEQ ID NO: 1483548 - RNA, 19 nt, Artificial Sequence
  Description of Artificial Sequence: Synthetic oligonucleotide
  Sense strand starting at position 2964 of SEQ ID NO: 1244371
ugguaaauucaguagugua

SEQ ID NO: 1483549 - RNA, 19 nt, Artificial Sequence
  Description of Artificial Sequence: Synthetic oligonucleotide
  Antisense strand to SEQ ID NO: 1483548
uacacuacugaauuuacca

SEQ ID NO: 1483550 - RNA, 19 nt, Artificial Sequence
  Description of Artificial Sequence: Synthetic oligonucleotide
  Sense strand starting at position 3124 of SEQ ID NO: 1244371
guagaauugcuacaaaggu

SEQ ID NO: 1483551 - RNA, 19 nt, Artificial Sequence
  Description of Artificial Sequence: Synthetic oligonucleotide
  Antisense strand to SEQ ID NO: 1483550
accuuuguagcaauucuac

SEQ ID NO: 1483552 - RNA, 19 nt, Artificial Sequence
  Description of Artificial Sequence: Synthetic oligonucleotide
  Sense strand starting at position 3377 of SEQ ID NO: 1244371
ucuaguuuaguagagacga

SEQ ID NO: 1483553 - RNA, 19 nt, Artificial Sequence
  Description of Artificial Sequence: Synthetic oligonucleotide
  Antisense strand to SEQ ID NO: 1483552
ucgucucuacuaaacuaga

SEQ ID NO: 1483554 - RNA, 19 nt, Artificial Sequence
  Description of Artificial Sequence: Synthetic oligonucleotide
  Sense strand starting at position 3504 of SEQ ID NO: 1244371
cgcagcuauaucguacauu

SEQ ID NO: 1483555 - RNA, 19 nt, Artificial Sequence
  Description of Artificial Sequence: Synthetic oligonucleotide
  Antisense strand to SEQ ID NO: 1483554
aauguacgauauagcugcg

SEQ ID NO: 1483556 - RNA, 19 nt, Artificial Sequence
  Description of Artificial Sequence: Synthetic oligonucleotide
  Sense strand starting at position 3507 of SEQ ID NO: 1244371
agcuauaucguacauucuu

SEQ ID NO: 1483557 - RNA, 19 nt, Artificial Sequence
  Description of Artificial Sequence: Synthetic oligonucleotide
  Antisense strand to SEQ ID NO: 1483556
aagaauguacgauauagcu

SEQ ID NO: 1483558 - RNA, 19 nt, Artificial Sequence
  Description of Artificial Sequence: Synthetic oligonucleotide
  Sense strand starting at position 3516 of SEQ ID NO: 1244371
guacauucuuaugugguaa

SEQ ID NO: 1483559 - RNA, 19 nt, Artificial Sequence
  Description of Artificial Sequence: Synthetic oligonucleotide
  Antisense strand to SEQ ID NO: 1483558
uuaccacauaagaauguac

SEQ ID NO: 1483560 - RNA, 19 nt, Artificial Sequence
  Description of Artificial Sequence: Synthetic oligonucleotide
  Sense strand starting at position 3527 of SEQ ID NO: 1244371
ugugguaaguauuucccua

SEQ ID NO: 1483561 - RNA, 19 nt, Artificial Sequence
  Description of Artificial Sequence: Synthetic oligonucleotide
  Antisense strand to SEQ ID NO: 1483560
uagggaaauacuuaccaca

SEQ ID NO: 1483562 - RNA, 19 nt, Artificial Sequence
  Description of Artificial Sequence: Synthetic oligonucleotide
  Sense strand starting at position 3569 of SEQ ID NO: 1244371
ccuauagcacgacacauua

SEQ ID NO: 1483563 - RNA, 19 nt, Artificial Sequence
  Description of Artificial Sequence: Synthetic oligonucleotide
  Antisense strand to SEQ ID NO: 1483562
uaaugugucgugcuauagg

SEQ ID NO: 1483564 - RNA, 19 nt, Artificial Sequence
  Description of Artificial Sequence: Synthetic oligonucleotide
  Sense strand starting at position 3599 of SEQ ID NO: 1244371
aaauuagugcuguauguau

SEQ ID NO: 1483565 - RNA, 19 nt, Artificial Sequence
  Description of Artificial Sequence: Synthetic oligonucleotide
  Antisense strand to SEQ ID NO: 1483564
auacauacagcacuaauuu

SEQ ID NO: 1483566 - RNA, 19 nt, Artificial Sequence
  Description of Artificial Sequence: Synthetic oligonucleotide
  Sense strand starting at position 3611 of SEQ ID NO: 1244371
uauguauguguugaagagu

SEQ ID NO: 1483567 - RNA, 19 nt, Artificial Sequence
  Description of Artificial Sequence: Synthetic oligonucleotide
  Antisense strand to SEQ ID NO: 1483566
acucuucaacacauacaua

SEQ ID NO: 1483568 - RNA, 19 nt, Artificial Sequence
  Description of Artificial Sequence: Synthetic oligonucleotide
  Sense strand starting at position 3614 of SEQ ID NO: 1244371
guauguguugaagaguaug

SEQ ID NO: 1483569 - RNA, 19 nt, Artificial Sequence
  Description of Artificial Sequence: Synthetic oligonucleotide
  Antisense strand to SEQ ID NO: 1483568
cauacucuucaacacauac

SEQ ID NO: 1483570 - RNA, 19 nt, Artificial Sequence
  Description of Artificial Sequence: Synthetic oligonucleotide
  Sense strand starting at position 3688 of SEQ ID NO: 1244371
uggguuagaucccuugagu

SEQ ID NO: 1483571 - RNA, 19 nt, Artificial Sequence
  Description of Artificial Sequence: Synthetic oligonucleotide
  Antisense strand to SEQ ID NO: 1483570
acucaagggaucuaaccca

SEQ ID NO: 1483572 - RNA, 19 nt, Artificial Sequence
  Description of Artificial Sequence: Synthetic oligonucleotide
  Sense strand starting at position 3691 of SEQ ID NO: 1244371
guuagaucccuugagucca

SEQ ID NO: 1483573 - RNA, 19 nt, Artificial Sequence
  Description of Artificial Sequence: Synthetic oligonucleotide
  Antisense strand to SEQ ID NO: 1483572
uggacucaagggaucuaac

SEQ ID NO: 1483574 - RNA, 19 nt, Artificial Sequence
  Description of Artificial Sequence: Synthetic oligonucleotide
  Sense strand starting at position 223 of SEQ ID NO: 1244372
gaggaaguauucuugccac

SEQ ID NO: 1483575 - RNA, 19 nt, Artificial Sequence
  Description of Artificial Sequence: Synthetic oligonucleotide
  Antisense strand to SEQ ID NO: 1483574
guggcaagaauacuuccuc

SEQ ID NO: 1483576 - RNA, 19 nt, Artificial Sequence
  Description of Artificial Sequence: Synthetic oligonucleotide
  Sense strand starting at position 703 of SEQ ID NO: 1244372
ccggcauaaugaucaccau

SEQ ID NO: 1483577 - RNA, 19 nt, Artificial Sequence
  Description of Artificial Sequence: Synthetic oligonucleotide
  Antisense strand to SEQ ID NO: 1483576
auggugaucauuaugccgg

SEQ ID NO: 1483578 - RNA, 19 nt, Artificial Sequence
  Description of Artificial Sequence: Synthetic oligonucleotide
  Sense strand starting at position 704 of SEQ ID NO: 1244372
cggcauaaugaucaccaua

SEQ ID NO: 1483579 - RNA, 19 nt, Artificial Sequence
  Description of Artificial Sequence: Synthetic oligonucleotide
  Antisense strand to SEQ ID NO: 1483578
uauggugaucauuaugccg

SEQ ID NO: 1483580 - RNA, 19 nt, Artificial Sequence
  Description of Artificial Sequence: Synthetic oligonucleotide
  Sense strand starting at position 706 of SEQ ID NO: 1244372
gcauaaugaucaccauaag

SEQ ID NO: 1483581 - RNA, 19 nt, Artificial Sequence
  Description of Artificial Sequence: Synthetic oligonucleotide
  Antisense strand to SEQ ID NO: 1483580
cuuauggugaucauuaugc

SEQ ID NO: 1483582 - RNA, 19 nt, Artificial Sequence
  Description of Artificial Sequence: Synthetic oligonucleotide
  Sense strand starting at position 727 of SEQ ID NO: 1244372
uggagucagagaugugauu

SEQ ID NO: 1483583 - RNA, 19 nt, Artificial Sequence
  Description of Artificial Sequence: Synthetic oligonucleotide
  Antisense strand to SEQ ID NO: 1483582
aaucacaucucugacucca

SEQ ID NO: 1483584 - RNA, 19 nt, Artificial Sequence
  Description of Artificial Sequence: Synthetic oligonucleotide
  Sense strand starting at position 791 of SEQ ID NO: 1244372
agcuaauuuccuugagcuu

SEQ ID NO: 1483585 - RNA, 19 nt, Artificial Sequence
  Description of Artificial Sequence: Synthetic oligonucleotide
  Antisense strand to SEQ ID NO: 1483584
aagcucaaggaaauuagcu

SEQ ID NO: 1483586 - RNA, 19 nt, Artificial Sequence
  Description of Artificial Sequence: Synthetic oligonucleotide
  Sense strand starting at position 810 of SEQ ID NO: 1244372
cgcagucuccuugaauaaa

SEQ ID NO: 1483587 - RNA, 19 nt, Artificial Sequence
  Description of Artificial Sequence: Synthetic oligonucleotide
  Antisense strand to SEQ ID NO: 1483586
uuuauucaaggagacugcg

SEQ ID NO: 1483588 - RNA, 19 nt, Artificial Sequence
  Description of Artificial Sequence: Synthetic oligonucleotide
  Sense strand starting at position 867 of SEQ ID NO: 1244372
gccuuuagagaaugagaua

SEQ ID NO: 1483589 - RNA, 19 nt, Artificial Sequence
  Description of Artificial Sequence: Synthetic oligonucleotide
  Antisense strand to SEQ ID NO: 1483588
uaucucauucucuaaaggc

SEQ ID NO: 1483590 - RNA, 19 nt, Artificial Sequence
  Description of Artificial Sequence: Synthetic oligonucleotide
  Sense strand starting at position 890 of SEQ ID NO: 1244372
uugcaaagagcuuaguaca

SEQ ID NO: 1483591 - RNA, 19 nt, Artificial Sequence
  Description of Artificial Sequence: Synthetic oligonucleotide
  Antisense strand to SEQ ID NO: 1483590
uguacuaagcucuuugcaa

SEQ ID NO: 1483592 - RNA, 19 nt, Artificial Sequence
  Description of Artificial Sequence: Synthetic oligonucleotide
  Sense strand starting at position 922 of SEQ ID NO: 1244372
agcagaugcccagaaacau

SEQ ID NO: 1483593 - RNA, 19 nt, Artificial Sequence
  Description of Artificial Sequence: Synthetic oligonucleotide
  Antisense strand to SEQ ID NO: 1483592
auguuucugggcaucugcu

SEQ ID NO: 1483594 - RNA, 19 nt, Artificial Sequence
  Description of Artificial Sequence: Synthetic oligonucleotide
  Sense strand starting at position 934 of SEQ ID NO: 1244372
gaaacaugcggcuauaauu

SEQ ID NO: 1483595 - RNA, 19 nt, Artificial Sequence
  Description of Artificial Sequence: Synthetic oligonucleotide
  Antisense strand to SEQ ID NO: 1483594
aauuauagccgcauguuuc

SEQ ID NO: 1483596 - RNA, 19 nt, Artificial Sequence
  Description of Artificial Sequence: Synthetic oligonucleotide
  Sense strand starting at position 1021 of SEQ ID NO: 1244372
ggugcugccucccuaauuu

SEQ ID NO: 1483597 - RNA, 19 nt, Artificial Sequence
  Description of Artificial Sequence: Synthetic oligonucleotide
  Antisense strand to SEQ ID NO: 1483596
aaauuagggaggcagcacc

SEQ ID NO: 1483598 - RNA, 19 nt, Artificial Sequence
  Description of Artificial Sequence: Synthetic oligonucleotide
  Sense strand starting at position 1085 of SEQ ID NO: 1244372
auguuugaauucccagacu

SEQ ID NO: 1483599 - RNA, 19 nt, Artificial Sequence
  Description of Artificial Sequence: Synthetic oligonucleotide
  Antisense strand to SEQ ID NO: 1483598
agucugggaauucaaacau

SEQ ID NO: 1483600 - RNA, 19 nt, Artificial Sequence
  Description of Artificial Sequence: Synthetic oligonucleotide
  Sense strand starting at position 1187 of SEQ ID NO: 1244372
gguaccagaugucuuggau

SEQ ID NO: 1483601 - RNA, 19 nt, Artificial Sequence
  Description of Artificial Sequence: Synthetic oligonucleotide
  Antisense strand to SEQ ID NO: 1483600
auccaagacaucugguacc

SEQ ID NO: 1483602 - RNA, 19 nt, Artificial Sequence
  Description of Artificial Sequence: Synthetic oligonucleotide
  Sense strand starting at position 1231 of SEQ ID NO: 1244372
acucgaggccuuuggaaga

SEQ ID NO: 1483603 - RNA, 19 nt, Artificial Sequence
  Description of Artificial Sequence: Synthetic oligonucleotide
  Antisense strand to SEQ ID NO: 1483602
ucuuccaaaggccucgagu

SEQ ID NO: 1483604 - RNA, 19 nt, Artificial Sequence
  Description of Artificial Sequence: Synthetic oligonucleotide
  Sense strand starting at position 1274 of SEQ ID NO: 1244372
cgucauauacgucaaacca

SEQ ID NO: 1483605 - RNA, 19 nt, Artificial Sequence
  Description of Artificial Sequence: Synthetic oligonucleotide
  Antisense strand to SEQ ID NO: 1483604
ugguuugacguauaugacg

SEQ ID NO: 1483606 - RNA, 19 nt, Artificial Sequence
  Description of Artificial Sequence: Synthetic oligonucleotide
  Sense strand starting at position 1392 of SEQ ID NO: 1244372
ccugaaucagucuagcaca

SEQ ID NO: 1483607 - RNA, 19 nt, Artificial Sequence
  Description of Artificial Sequence: Synthetic oligonucleotide
  Antisense strand to SEQ ID NO: 1483606
ugugcuagacugauucagg

SEQ ID NO: 1483608 - RNA, 19 nt, Artificial Sequence
  Description of Artificial Sequence: Synthetic oligonucleotide
  Sense strand starting at position 1427 of SEQ ID NO: 1244372
guauuaugcggucugcaac

SEQ ID NO: 1483609 - RNA, 19 nt, Artificial Sequence
  Description of Artificial Sequence: Synthetic oligonucleotide
  Antisense strand to SEQ ID NO: 1483608
guugcagaccgcauaauac

SEQ ID NO: 1483610 - RNA, 19 nt, Artificial Sequence
  Description of Artificial Sequence: Synthetic oligonucleotide
  Sense strand starting at position 1476 of SEQ ID NO: 1244372
cagagaagaucuguccaca

SEQ ID NO: 1483611 - RNA, 19 nt, Artificial Sequence
  Description of Artificial Sequence: Synthetic oligonucleotide
  Antisense strand to SEQ ID NO: 1483610
uguggacagaucuucucug

SEQ ID NO: 1483612 - RNA, 19 nt, Artificial Sequence
  Description of Artificial Sequence: Synthetic oligonucleotide
  Sense strand starting at position 1512 of SEQ ID NO: 1244372
caacgcucaggagaguuaa

SEQ ID NO: 1483613 - RNA, 19 nt, Artificial Sequence
  Description of Artificial Sequence: Synthetic oligonucleotide
  Antisense strand to SEQ ID NO: 1483612
uuaacucuccugagcguug

SEQ ID NO: 1483614 - RNA, 19 nt, Artificial Sequence
  Description of Artificial Sequence: Synthetic oligonucleotide
  Sense strand starting at position 1900 of SEQ ID NO: 1244372
gaagaugcucccuacgguu

SEQ ID NO: 1483615 - RNA, 19 nt, Artificial Sequence
  Description of Artificial Sequence: Synthetic oligonucleotide
  Antisense strand to SEQ ID NO: 1483614
aaccguagggagcaucuuc

SEQ ID NO: 1483616 - RNA, 19 nt, Artificial Sequence
  Description of Artificial Sequence: Synthetic oligonucleotide
  Sense strand starting at position 2398 of SEQ ID NO: 1244372
guuguuuagagucacagac

SEQ ID NO: 1483617 - RNA, 19 nt, Artificial Sequence
  Description of Artificial Sequence: Synthetic oligonucleotide
  Antisense strand to SEQ ID NO: 1483616
gucugugacucuaaacaac

SEQ ID NO: 1483618 - RNA, 19 nt, Artificial Sequence
  Description of Artificial Sequence: Synthetic oligonucleotide
  Sense strand starting at position 2625 of SEQ ID NO: 1244372
agugaaaguguccggaaca

SEQ ID NO: 1483619 - RNA, 19 nt, Artificial Sequence
  Description of Artificial Sequence: Synthetic oligonucleotide
  Antisense strand to SEQ ID NO: 1483618
uguuccggacacuuucacu

SEQ ID NO: 1483620 - RNA, 19 nt, Artificial Sequence
  Description of Artificial Sequence: Synthetic oligonucleotide
  Sense strand starting at position 2674 of SEQ ID NO: 1244372
uggagaaagucaucucuca

SEQ ID NO: 1483621 - RNA, 19 nt, Artificial Sequence
  Description of Artificial Sequence: Synthetic oligonucleotide
  Antisense strand to SEQ ID NO: 1483620
ugagagaugacuuucucca

SEQ ID NO: 1483622 - RNA, 19 nt, Artificial Sequence
  Description of Artificial Sequence: Synthetic oligonucleotide
  Sense strand starting at position 2713 of SEQ ID NO: 1244372
auaaacuguguguagcaua

SEQ ID NO: 1483623 - RNA, 19 nt, Artificial Sequence
  Description of Artificial Sequence: Synthetic oligonucleotide
  Antisense strand to SEQ ID NO: 1483622
uaugcuacacacaguuuau

SEQ ID NO: 1483624 - RNA, 19 nt, Artificial Sequence
  Description of Artificial Sequence: Synthetic oligonucleotide
  Sense strand starting at position 2795 of SEQ ID NO: 1244372
gaggauguuugugcaagga

SEQ ID NO: 1483625 - RNA, 19 nt, Artificial Sequence
  Description of Artificial Sequence: Synthetic oligonucleotide
  Antisense strand to SEQ ID NO: 1483624
uccuugcacaaacauccuc

SEQ ID NO: 1483626 - RNA, 19 nt, Artificial Sequence
  Description of Artificial Sequence: Synthetic oligonucleotide
  Sense strand starting at position 2925 of SEQ ID NO: 1244372
gagcuagauccacauguau

SEQ ID NO: 1483627 - RNA, 19 nt, Artificial Sequence
  Description of Artificial Sequence: Synthetic oligonucleotide
  Antisense strand to SEQ ID NO: 1483626
auacauguggaucuagcuc

SEQ ID NO: 1483628 - RNA, 19 nt, Artificial Sequence
  Description of Artificial Sequence: Synthetic oligonucleotide
  Sense strand starting at position 2951 of SEQ ID NO: 1244372
gguuaagguacaugacuua

SEQ ID NO: 1483629 - RNA, 19 nt, Artificial Sequence
  Description of Artificial Sequence: Synthetic oligonucleotide
  Antisense strand to SEQ ID NO: 1483628
uaagucauguaccuuaacc

SEQ ID NO: 1483630 - RNA, 19 nt, Artificial Sequence
  Description of Artificial Sequence: Synthetic oligonucleotide
  Sense strand starting at position 2985 of SEQ ID NO: 1244372
cgaaguugcaaagaaacau

SEQ ID NO: 1483631 - RNA, 19 nt, Artificial Sequence
  Description of Artificial Sequence: Synthetic oligonucleotide
  Antisense strand to SEQ ID NO: 1483630
auguuucuuugcaacuucg

SEQ ID NO: 1483632 - RNA, 19 nt, Artificial Sequence
  Description of Artificial Sequence: Synthetic oligonucleotide
  Sense strand starting at position 2997 of SEQ ID NO: 1244372
gaaacauguuuaguggaau

SEQ ID NO: 1483633 - RNA, 19 nt, Artificial Sequence
  Description of Artificial Sequence: Synthetic oligonucleotide
  Antisense strand to SEQ ID NO: 1483632
auuccacuaaacauguuuc

SEQ ID NO: 1483634 - RNA, 19 nt, Artificial Sequence
  Description of Artificial Sequence: Synthetic oligonucleotide
  Sense strand starting at position 3011 of SEQ ID NO: 1244372
ggaaucucaacguguuaga

SEQ ID NO: 1483635 - RNA, 19 nt, Artificial Sequence
  Description of Artificial Sequence: Synthetic oligonucleotide
  Antisense strand to SEQ ID NO: 1483634
ucuaacacguugagauucc

SEQ ID NO: 1483636 - RNA, 19 nt, Artificial Sequence
  Description of Artificial Sequence: Synthetic oligonucleotide
  Sense strand starting at position 3097 of SEQ ID NO: 1244372
cacccaaggcugugaacau

SEQ ID NO: 1483637 - RNA, 19 nt, Artificial Sequence
  Description of Artificial Sequence: Synthetic oligonucleotide
  Antisense strand to SEQ ID NO: 1483636
auguucacagccuugggug

SEQ ID NO: 1483638 - RNA, 19 nt, Artificial Sequence
  Description of Artificial Sequence: Synthetic oligonucleotide
  Sense strand starting at position 3104 of SEQ ID NO: 1244372
ggcugugaacauuggauau

SEQ ID NO: 1483639 - RNA, 19 nt, Artificial Sequence
  Description of Artificial Sequence: Synthetic oligonucleotide
  Antisense strand to SEQ ID NO: 1483638
auauccaauguucacagcc

SEQ ID NO: 1483640 - RNA, 19 nt, Artificial Sequence
  Description of Artificial Sequence: Synthetic oligonucleotide
  Sense strand starting at position 3114 of SEQ ID NO: 1244372
auuggauaucucggaguga

SEQ ID NO: 1483641 - RNA, 19 nt, Artificial Sequence
  Description of Artificial Sequence: Synthetic oligonucleotide
  Antisense strand to SEQ ID NO: 1483640
ucacuccgagauauccaau

SEQ ID NO: 1483642 - RNA, 19 nt, Artificial Sequence
  Description of Artificial Sequence: Synthetic oligonucleotide
  Sense strand starting at position 3118 of SEQ ID NO: 1244372
gauaucucggagugaaacu

SEQ ID NO: 1483643 - RNA, 19 nt, Artificial Sequence
  Description of Artificial Sequence: Synthetic oligonucleotide
  Antisense strand to SEQ ID NO: 1483642
aguuucacuccgagauauc

SEQ ID NO: 1483644 - RNA, 19 nt, Artificial Sequence
  Description of Artificial Sequence: Synthetic oligonucleotide
  Sense strand starting at position 3191 of SEQ ID NO: 1244372
uuguaaagagauuguauuc

SEQ ID NO: 1483645 - RNA, 19 nt, Artificial Sequence
  Description of Artificial Sequence: Synthetic oligonucleotide
  Antisense strand to SEQ ID NO: 1483644
gaauacaaucucuuuacaa

SEQ ID NO: 1483646 - RNA, 19 nt, Artificial Sequence
  Description of Artificial Sequence: Synthetic oligonucleotide
  Sense strand starting at position 3325 of SEQ ID NO: 1244372
cuguuugaugaguaguuac

SEQ ID NO: 1483647 - RNA, 19 nt, Artificial Sequence
  Description of Artificial Sequence: Synthetic oligonucleotide
  Antisense strand to SEQ ID NO: 1483646
guaacuacucaucaaacag

SEQ ID NO: 1483648 - RNA, 19 nt, Artificial Sequence
  Description of Artificial Sequence: Synthetic oligonucleotide
  Sense strand starting at position 3381 of SEQ ID NO: 1244372
cccauaagguagcuauuaa

SEQ ID NO: 1483649 - RNA, 19 nt, Artificial Sequence
  Description of Artificial Sequence: Synthetic oligonucleotide
  Antisense strand to SEQ ID NO: 1483648
uuaauagcuaccuuauggg

SEQ ID NO: 1483650 - RNA, 19 nt, Artificial Sequence
  Description of Artificial Sequence: Synthetic oligonucleotide
  Sense strand starting at position 3440 of SEQ ID NO: 1244372
acauaacuugucugauaag

SEQ ID NO: 1483651 - RNA, 19 nt, Artificial Sequence
  Description of Artificial Sequence: Synthetic oligonucleotide
  Antisense strand to SEQ ID NO: 1483650
cuuaucagacaaguuaugu

SEQ ID NO: 1483652 - RNA, 19 nt, Artificial Sequence
  Description of Artificial Sequence: Synthetic oligonucleotide
  Sense strand starting at position 3976 of SEQ ID NO: 1244372
aguuaaaggguuuauucca

SEQ ID NO: 1483653 - RNA, 19 nt, Artificial Sequence
  Description of Artificial Sequence: Synthetic oligonucleotide
  Antisense strand to SEQ ID NO: 1483652
uggaauaaacccuuuaacu

SEQ ID NO: 1483654 - RNA, 19 nt, Artificial Sequence
  Description of Artificial Sequence: Synthetic oligonucleotide
  Sense strand starting at position 36 of SEQ ID NO: 1244373
ugagauuacaggugcaauc

SEQ ID NO: 1483655 - RNA, 19 nt, Artificial Sequence
  Description of Artificial Sequence: Synthetic oligonucleotide
  Antisense strand to SEQ ID NO: 1483654
gauugcaccuguaaucuca

SEQ ID NO: 1483656 - RNA, 19 nt, Artificial Sequence
  Description of Artificial Sequence: Synthetic oligonucleotide
  Sense strand starting at position 517 of SEQ ID NO: 1244373
ugagauuuguggcauggag

SEQ ID NO: 1483657 - RNA, 19 nt, Artificial Sequence
  Description of Artificial Sequence: Synthetic oligonucleotide
  Antisense strand to SEQ ID NO: 1483656
cuccaugccacaaaucuca

SEQ ID NO: 1483658 - RNA, 19 nt, Artificial Sequence
  Description of Artificial Sequence: Synthetic oligonucleotide
  Sense strand starting at position 716 of SEQ ID NO: 1244373
gcucuuaagcuacacugaa

SEQ ID NO: 1483659 - RNA, 19 nt, Artificial Sequence
  Description of Artificial Sequence: Synthetic oligonucleotide
  Antisense strand to SEQ ID NO: 1483658
uucaguguagcuuaagagc

SEQ ID NO: 1483660 - RNA, 19 nt, Artificial Sequence
  Description of Artificial Sequence: Synthetic oligonucleotide
  Sense strand starting at position 787 of SEQ ID NO: 1244373
ggaagugcuguuuaccuga

SEQ ID NO: 1483661 - RNA, 19 nt, Artificial Sequence
  Description of Artificial Sequence: Synthetic oligonucleotide
  Antisense strand to SEQ ID NO: 1483660
ucagguaaacagcacuucc

SEQ ID NO: 1483662 - RNA, 19 nt, Artificial Sequence
  Description of Artificial Sequence: Synthetic oligonucleotide
  Sense strand starting at position 792 of SEQ ID NO: 1244373
ugcuguuuaccugaaucau

SEQ ID NO: 1483663 - RNA, 19 nt, Artificial Sequence
  Description of Artificial Sequence: Synthetic oligonucleotide
  Antisense strand to SEQ ID NO: 1483662
augauucagguaaacagca

SEQ ID NO: 1483664 - RNA, 19 nt, Artificial Sequence
  Description of Artificial Sequence: Synthetic oligonucleotide
  Sense strand starting at position 1377 of SEQ ID NO: 1244373
aagugcuaacgguaaggau

SEQ ID NO: 1483665 - RNA, 19 nt, Artificial Sequence
  Description of Artificial Sequence: Synthetic oligonucleotide
  Antisense strand to SEQ ID NO: 1483664
auccuuaccguuagcacuu

SEQ ID NO: 1483666 - RNA, 19 nt, Artificial Sequence
  Description of Artificial Sequence: Synthetic oligonucleotide
  Sense strand starting at position 1441 of SEQ ID NO: 1244373
aucugagcucuuuagcuga

SEQ ID NO: 1483667 - RNA, 19 nt, Artificial Sequence
  Description of Artificial Sequence: Synthetic oligonucleotide
  Antisense strand to SEQ ID NO: 1483666
ucagcuaaagagcucagau

SEQ ID NO: 1483668 - RNA, 19 nt, Artificial Sequence
  Description of Artificial Sequence: Synthetic oligonucleotide
  Sense strand starting at position 1477 of SEQ ID NO: 1244373
gcguuagaacccuagauca

SEQ ID NO: 1483669 - RNA, 19 nt, Artificial Sequence
  Description of Artificial Sequence: Synthetic oligonucleotide
  Antisense strand to SEQ ID NO: 1483668
ugaucuaggguucuaacgc

SEQ ID NO: 1483670 - RNA, 19 nt, Artificial Sequence
  Description of Artificial Sequence: Synthetic oligonucleotide
  Sense strand starting at position 1510 of SEQ ID NO: 1244373
gcgagagguagucacuaaa

SEQ ID NO: 1483671 - RNA, 19 nt, Artificial Sequence
  Description of Artificial Sequence: Synthetic oligonucleotide
  Antisense strand to SEQ ID NO: 1483670
uuuagugacuaccucucgc

SEQ ID NO: 1483672 - RNA, 19 nt, Artificial Sequence
  Description of Artificial Sequence: Synthetic oligonucleotide
  Sense strand starting at position 2406 of SEQ ID NO: 1244373
agaucuucgggcugacaug

SEQ ID NO: 1483673 - RNA, 19 nt, Artificial Sequence
  Description of Artificial Sequence: Synthetic oligonucleotide
  Antisense strand to SEQ ID NO: 1483672
caugucagcccgaagaucu

SEQ ID NO: 1483674 - RNA, 19 nt, Artificial Sequence
  Description of Artificial Sequence: Synthetic oligonucleotide
  Sense strand starting at position 2580 of SEQ ID NO: 1244373
ucagaauugugaccaugug

SEQ ID NO: 1483675 - RNA, 19 nt, Artificial Sequence
  Description of Artificial Sequence: Synthetic oligonucleotide
  Antisense strand to SEQ ID NO: 1483674
cacauggucacaauucuga

SEQ ID NO: 1483676 - RNA, 19 nt, Artificial Sequence
  Description of Artificial Sequence: Synthetic oligonucleotide
  Sense strand starting at position 2581 of SEQ ID NO: 1244373
cagaauugugaccaugugu

SEQ ID NO: 1483677 - RNA, 19 nt, Artificial Sequence
  Description of Artificial Sequence: Synthetic oligonucleotide
  Antisense strand to SEQ ID NO: 1483676
acacauggucacaauucug

SEQ ID NO: 1483678 - RNA, 19 nt, Artificial Sequence
  Description of Artificial Sequence: Synthetic oligonucleotide
  Sense strand starting at position 2589 of SEQ ID NO: 1244373
ugaccauguguuggagaag

SEQ ID NO: 1483679 - RNA, 19 nt, Artificial Sequence
  Description of Artificial Sequence: Synthetic oligonucleotide
  Antisense strand to SEQ ID NO: 1483678
cuucuccaacacaugguca

SEQ ID NO: 1483680 - RNA, 19 nt, Artificial Sequence
  Description of Artificial Sequence: Synthetic oligonucleotide
  Sense strand starting at position 2592 of SEQ ID NO: 1244373
ccauguguuggagaaguga

SEQ ID NO: 1483681 - RNA, 19 nt, Artificial Sequence
  Description of Artificial Sequence: Synthetic oligonucleotide
  Antisense strand to SEQ ID NO: 1483680
ucacuucuccaacacaugg

SEQ ID NO: 1483682 - RNA, 19 nt, Artificial Sequence
  Description of Artificial Sequence: Synthetic oligonucleotide
  Sense strand starting at position 2623 of SEQ ID NO: 1244373
ggcagaaugcuugaaguga

SEQ ID NO: 1483683 - RNA, 19 nt, Artificial Sequence
  Description of Artificial Sequence: Synthetic oligonucleotide
  Antisense strand to SEQ ID NO: 1483682
ucacuucaagcauucugcc

SEQ ID NO: 1483684 - RNA, 19 nt, Artificial Sequence
  Description of Artificial Sequence: Synthetic oligonucleotide
  Sense strand starting at position 2641 of SEQ ID NO: 1244373
agaauaauauuccaaagag

SEQ ID NO: 1483685 - RNA, 19 nt, Artificial Sequence
  Description of Artificial Sequence: Synthetic oligonucleotide
  Antisense strand to SEQ ID NO: 1483684
cucuuuggaauauuauucu

SEQ ID NO: 1483686 - RNA, 19 nt, Artificial Sequence
  Description of Artificial Sequence: Synthetic oligonucleotide
  Sense strand starting at position 2772 of SEQ ID NO: 1244373
auccuaacgagucaguguu

SEQ ID NO: 1483687 - RNA, 19 nt, Artificial Sequence
  Description of Artificial Sequence: Synthetic oligonucleotide
  Antisense strand to SEQ ID NO: 1483686
aacacugacucguuaggau

SEQ ID NO: 1483688 - RNA, 19 nt, Artificial Sequence
  Description of Artificial Sequence: Synthetic oligonucleotide
  Sense strand starting at position 2795 of SEQ ID NO: 1244373
gccuauucugaguaaggcu

SEQ ID NO: 1483689 - RNA, 19 nt, Artificial Sequence
  Description of Artificial Sequence: Synthetic oligonucleotide
  Antisense strand to SEQ ID NO: 1483688
agccuuacucagaauaggc

SEQ ID NO: 1483690 - RNA, 19 nt, Artificial Sequence
  Description of Artificial Sequence: Synthetic oligonucleotide
  Sense strand starting at position 2827 of SEQ ID NO: 1244373
ugaagcuguaguuauagaa

SEQ ID NO: 1483691 - RNA, 19 nt, Artificial Sequence
  Description of Artificial Sequence: Synthetic oligonucleotide
  Antisense strand to SEQ ID NO: 1483690
uucuauaacuacagcuuca

SEQ ID NO: 1483692 - RNA, 19 nt, Artificial Sequence
  Description of Artificial Sequence: Synthetic oligonucleotide
  Sense strand starting at position 2884 of SEQ ID NO: 1244373
gaaggaaauguguguuaac

SEQ ID NO: 1483693 - RNA, 19 nt, Artificial Sequence
  Description of Artificial Sequence: Synthetic oligonucleotide
  Antisense strand to SEQ ID NO: 1483692
guuaacacacauuuccuuc

SEQ ID NO: 1483694 - RNA, 19 nt, Artificial Sequence
  Description of Artificial Sequence: Synthetic oligonucleotide
  Sense strand starting at position 2916 of SEQ ID NO: 1244373
aguacucugccugaggguu

SEQ ID NO: 1483695 - RNA, 19 nt, Artificial Sequence
  Description of Artificial Sequence: Synthetic oligonucleotide
  Antisense strand to SEQ ID NO: 1483694
aacccucaggcagaguacu

SEQ ID NO: 1483696 - RNA, 19 nt, Artificial Sequence
  Description of Artificial Sequence: Synthetic oligonucleotide
  Sense strand starting at position 2922 of SEQ ID NO: 1244373
cugccugaggguuaauaag

SEQ ID NO: 1483697 - RNA, 19 nt, Artificial Sequence
  Description of Artificial Sequence: Synthetic oligonucleotide
  Antisense strand to SEQ ID NO: 1483696
cuuauuaacccucaggcag

SEQ ID NO: 1483698 - RNA, 19 nt, Artificial Sequence
  Description of Artificial Sequence: Synthetic oligonucleotide
  Sense strand starting at position 2929 of SEQ ID NO: 1244373
aggguuaauaagugaacuu

SEQ ID NO: 1483699 - RNA, 19 nt, Artificial Sequence
  Description of Artificial Sequence: Synthetic oligonucleotide
  Antisense strand to SEQ ID NO: 1483698
aaguucacuuauuaacccu

SEQ ID NO: 1483700 - RNA, 19 nt, Artificial Sequence
  Description of Artificial Sequence: Synthetic oligonucleotide
  Sense strand starting at position 2941 of SEQ ID NO: 1244373
ugaacuuuccuguaggcua

SEQ ID NO: 1483701 - RNA, 19 nt, Artificial Sequence
  Description of Artificial Sequence: Synthetic oligonucleotide
  Antisense strand to SEQ ID NO: 1483700
uagccuacaggaaaguuca

SEQ ID NO: 1483702 - RNA, 19 nt, Artificial Sequence
  Description of Artificial Sequence: Synthetic oligonucleotide
  Sense strand starting at position 2963 of SEQ ID NO: 1244373
cuggaagccuccuuuaagu

SEQ ID NO: 1483703 - RNA, 19 nt, Artificial Sequence
  Description of Artificial Sequence: Synthetic oligonucleotide
  Antisense strand to SEQ ID NO: 1483702
acuuaaaggaggcuuccag

SEQ ID NO: 1483704 - RNA, 19 nt, Artificial Sequence
  Description of Artificial Sequence: Synthetic oligonucleotide
  Sense strand starting at position 2970 of SEQ ID NO: 1244373
ccuccuuuaaguggagaga

SEQ ID NO: 1483705 - RNA, 19 nt, Artificial Sequence
  Description of Artificial Sequence: Synthetic oligonucleotide
  Antisense strand to SEQ ID NO: 1483704
ucucuccacuuaaaggagg

SEQ ID NO: 1483706 - RNA, 19 nt, Artificial Sequence
  Description of Artificial Sequence: Synthetic oligonucleotide
  Sense strand starting at position 3065 of SEQ ID NO: 1244373
cgggaucuuggaggugaua

SEQ ID NO: 1483707 - RNA, 19 nt, Artificial Sequence
  Description of Artificial Sequence: Synthetic oligonucleotide
  Antisense strand to SEQ ID NO: 1483706
uaucaccuccaagaucccg

SEQ ID NO: 1483708 - RNA, 19 nt, Artificial Sequence
  Description of Artificial Sequence: Synthetic oligonucleotide
  Sense strand starting at position 3391 of SEQ ID NO: 1244373
uugcuauaaccagagugga

SEQ ID NO: 1483709 - RNA, 19 nt, Artificial Sequence
  Description of Artificial Sequence: Synthetic oligonucleotide
  Antisense strand to SEQ ID NO: 1483708
uccacucugguuauagcaa

SEQ ID NO: 1483710 - RNA, 19 nt, Artificial Sequence
  Description of Artificial Sequence: Synthetic oligonucleotide
  Sense strand starting at position 3394 of SEQ ID NO: 1244373
cuauaaccagaguggaauu

SEQ ID NO: 1483711 - RNA, 19 nt, Artificial Sequence
  Description of Artificial Sequence: Synthetic oligonucleotide
  Antisense strand to SEQ ID NO: 1483710
aauuccacucugguuauag

SEQ ID NO: 1483712 - RNA, 19 nt, Artificial Sequence
  Description of Artificial Sequence: Synthetic oligonucleotide
  Sense strand starting at position 3406 of SEQ ID NO: 1244373
uggaauuaguuugcuuuga

SEQ ID NO: 1483713 - RNA, 19 nt, Artificial Sequence
  Description of Artificial Sequence: Synthetic oligonucleotide
  Antisense strand to SEQ ID NO: 1483712
ucaaagcaaacuaauucca

SEQ ID NO: 1483714 - RNA, 19 nt, Artificial Sequence
  Description of Artificial Sequence: Synthetic oligonucleotide
  Sense strand starting at position 3407 of SEQ ID NO: 1244373
ggaauuaguuugcuuugaa

SEQ ID NO: 1483715 - RNA, 19 nt, Artificial Sequence
  Description of Artificial Sequence: Synthetic oligonucleotide
  Antisense strand to SEQ ID NO: 1483714
uucaaagcaaacuaauucc

SEQ ID NO: 1483716 - RNA, 19 nt, Artificial Sequence
  Description of Artificial Sequence: Synthetic oligonucleotide
  Sense strand starting at position 3408 of SEQ ID NO: 1244373
gaauuaguuugcuuugaag

SEQ ID NO: 1483717 - RNA, 19 nt, Artificial Sequence
  Description of Artificial Sequence: Synthetic oligonucleotide
  Antisense strand to SEQ ID NO: 1483716
cuucaaagcaaacuaauuc

SEQ ID NO: 1483718 - RNA, 19 nt, Artificial Sequence
  Description of Artificial Sequence: Synthetic oligonucleotide
  Sense strand starting at position 3426 of SEQ ID NO: 1244373
gguauuaauauggguauug

SEQ ID NO: 1483719 - RNA, 19 nt, Artificial Sequence
  Description of Artificial Sequence: Synthetic oligonucleotide
  Antisense strand to SEQ ID NO: 1483718
caauacccauauuaauacc

SEQ ID NO: 1483720 - RNA, 19 nt, Artificial Sequence
  Description of Artificial Sequence: Synthetic oligonucleotide
  Sense strand starting at position 3427 of SEQ ID NO: 1244373
guauuaauauggguauuga

SEQ ID NO: 1483721 - RNA, 19 nt, Artificial Sequence
  Description of Artificial Sequence: Synthetic oligonucleotide
  Antisense strand to SEQ ID NO: 1483720
ucaauacccauauuaauac

SEQ ID NO: 1483722 - RNA, 19 nt, Artificial Sequence
  Description of Artificial Sequence: Synthetic oligonucleotide
  Sense strand starting at position 3457 of SEQ ID NO: 1244373
gaccuaagcugaguuuaau

SEQ ID NO: 1483723 - RNA, 19 nt, Artificial Sequence
  Description of Artificial Sequence: Synthetic oligonucleotide
  Antisense strand to SEQ ID NO: 1483722
auuaaacucagcuuagguc

SEQ ID NO: 1483724 - RNA, 19 nt, Artificial Sequence
  Description of Artificial Sequence: Synthetic oligonucleotide
  Sense strand starting at position 3466 of SEQ ID NO: 1244373
ugaguuuaauaggcuacau

SEQ ID NO: 1483725 - RNA, 19 nt, Artificial Sequence
  Description of Artificial Sequence: Synthetic oligonucleotide
  Antisense strand to SEQ ID NO: 1483724
auguagccuauuaaacuca

SEQ ID NO: 1483726 - RNA, 19 nt, Artificial Sequence
  Description of Artificial Sequence: Synthetic oligonucleotide
  Sense strand starting at position 3847 of SEQ ID NO: 1244373
gucacaugguaucuguaga

SEQ ID NO: 1483727 - RNA, 19 nt, Artificial Sequence
  Description of Artificial Sequence: Synthetic oligonucleotide
  Antisense strand to SEQ ID NO: 1483726
ucuacagauaccaugugac

SEQ ID NO: 1483728 - RNA, 19 nt, Artificial Sequence
  Description of Artificial Sequence: Synthetic oligonucleotide
  Sense strand starting at position 3881 of SEQ ID NO: 1244373
guuguuacgacuuaaugug

SEQ ID NO: 1483729 - RNA, 19 nt, Artificial Sequence
  Description of Artificial Sequence: Synthetic oligonucleotide
  Antisense strand to SEQ ID NO: 1483728
cacauuaagucguaacaac

SEQ ID NO: 1483730 - RNA, 19 nt, Artificial Sequence
  Description of Artificial Sequence: Synthetic oligonucleotide
  Sense strand starting at position 3893 of SEQ ID NO: 1244373
uaaugugaacuguaccagu

SEQ ID NO: 1483731 - RNA, 19 nt, Artificial Sequence
  Description of Artificial Sequence: Synthetic oligonucleotide
  Antisense strand to SEQ ID NO: 1483730
acugguacaguucacauua

SEQ ID NO: 1483732 - RNA, 19 nt, Artificial Sequence
  Description of Artificial Sequence: Synthetic oligonucleotide
  Sense strand starting at position 3977 of SEQ ID NO: 1244373
ugaauuguugcagaagccu

SEQ ID NO: 1483733 - RNA, 19 nt, Artificial Sequence
  Description of Artificial Sequence: Synthetic oligonucleotide
  Antisense strand to SEQ ID NO: 1483732
aggcuucugcaacaauuca

SEQ ID NO: 1483734 - RNA, 19 nt, Artificial Sequence
  Description of Artificial Sequence: Synthetic oligonucleotide
  Sense strand starting at position 158 of SEQ ID NO: 1244374
ugucaaugcccagaucguu

SEQ ID NO: 1483735 - RNA, 19 nt, Artificial Sequence
  Description of Artificial Sequence: Synthetic oligonucleotide
  Antisense strand to SEQ ID NO: 1483734
aacgaucugggcauugaca

SEQ ID NO: 1483736 - RNA, 19 nt, Artificial Sequence
  Description of Artificial Sequence: Synthetic oligonucleotide
  Sense strand starting at position 652 of SEQ ID NO: 1244374
ucuuucuaagagggaucuu

SEQ ID NO: 1483737 - RNA, 19 nt, Artificial Sequence
  Description of Artificial Sequence: Synthetic oligonucleotide
  Antisense strand to SEQ ID NO: 1483736
aagaucccucuuagaaaga

SEQ ID NO: 1483738 - RNA, 19 nt, Artificial Sequence
  Description of Artificial Sequence: Synthetic oligonucleotide
  Sense strand starting at position 742 of SEQ ID NO: 1244374
aguaaaugaagcugaaugu

SEQ ID NO: 1483739 - RNA, 19 nt, Artificial Sequence
  Description of Artificial Sequence: Synthetic oligonucleotide
  Antisense strand to SEQ ID NO: 1483738
acauucagcuucauuuacu

SEQ ID NO: 1483740 - RNA, 19 nt, Artificial Sequence
  Description of Artificial Sequence: Synthetic oligonucleotide
  Sense strand starting at position 809 of SEQ ID NO: 1244374
agagauggguaucucugua

SEQ ID NO: 1483741 - RNA, 19 nt, Artificial Sequence
  Description of Artificial Sequence: Synthetic oligonucleotide
  Antisense strand to SEQ ID NO: 1483740
uacagagauacccaucucu

SEQ ID NO: 1483742 - RNA, 19 nt, Artificial Sequence
  Description of Artificial Sequence: Synthetic oligonucleotide
  Sense strand starting at position 813 of SEQ ID NO: 1244374
auggguaucucuguaucca

SEQ ID NO: 1483743 - RNA, 19 nt, Artificial Sequence
  Description of Artificial Sequence: Synthetic oligonucleotide
  Antisense strand to SEQ ID NO: 1483742
uggauacagagauacccau

SEQ ID NO: 1483744 - RNA, 19 nt, Artificial Sequence
  Description of Artificial Sequence: Synthetic oligonucleotide
  Sense strand starting at position 817 of SEQ ID NO: 1244374
guaucucuguauccagagu

SEQ ID NO: 1483745 - RNA, 19 nt, Artificial Sequence
  Description of Artificial Sequence: Synthetic oligonucleotide
  Antisense strand to SEQ ID NO: 1483744
acucuggauacagagauac

SEQ ID NO: 1483746 - RNA, 19 nt, Artificial Sequence
  Description of Artificial Sequence: Synthetic oligonucleotide
  Sense strand starting at position 1094 of SEQ ID NO: 1244374
cucuaaggcuaucuguaga

SEQ ID NO: 1483747 - RNA, 19 nt, Artificial Sequence
  Description of Artificial Sequence: Synthetic oligonucleotide
  Antisense strand to SEQ ID NO: 1483746
ucuacagauagccuuagag

SEQ ID NO: 1483748 - RNA, 19 nt, Artificial Sequence
  Description of Artificial Sequence: Synthetic oligonucleotide
  Sense strand starting at position 1619 of SEQ ID NO: 1244374
gcaauccaaagguguguaa

SEQ ID NO: 1483749 - RNA, 19 nt, Artificial Sequence
  Description of Artificial Sequence: Synthetic oligonucleotide
  Antisense strand to SEQ ID NO: 1483748
uuacacaccuuuggauugc

SEQ ID NO: 1483750 - RNA, 19 nt, Artificial Sequence
  Description of Artificial Sequence: Synthetic oligonucleotide
  Sense strand starting at position 1621 of SEQ ID NO: 1244374
aauccaaagguguguaacu

SEQ ID NO: 1483751 - RNA, 19 nt, Artificial Sequence
  Description of Artificial Sequence: Synthetic oligonucleotide
  Antisense strand to SEQ ID NO: 1483750
aguuacacaccuuuggauu

SEQ ID NO: 1483752 - RNA, 19 nt, Artificial Sequence
  Description of Artificial Sequence: Synthetic oligonucleotide
  Sense strand starting at position 1622 of SEQ ID NO: 1244374
auccaaagguguguaacuu

SEQ ID NO: 1483753 - RNA, 19 nt, Artificial Sequence
  Description of Artificial Sequence: Synthetic oligonucleotide
  Antisense strand to SEQ ID NO: 1483752
aaguuacacaccuuuggau

SEQ ID NO: 1483754 - RNA, 19 nt, Artificial Sequence
  Description of Artificial Sequence: Synthetic oligonucleotide
  Sense strand starting at position 2150 of SEQ ID NO: 1244374
ggcggaguucuagaacguc

SEQ ID NO: 1483755 - RNA, 19 nt, Artificial Sequence
  Description of Artificial Sequence: Synthetic oligonucleotide
  Antisense strand to SEQ ID NO: 1483754
gacguucuagaacuccgcc

SEQ ID NO: 1483756 - RNA, 19 nt, Artificial Sequence
  Description of Artificial Sequence: Synthetic oligonucleotide
  Sense strand starting at position 2336 of SEQ ID NO: 1244374
ccgacuucccuggaucaca

SEQ ID NO: 1483757 - RNA, 19 nt, Artificial Sequence
  Description of Artificial Sequence: Synthetic oligonucleotide
  Antisense strand to SEQ ID NO: 1483756
ugugauccagggaagucgg

SEQ ID NO: 1483758 - RNA, 19 nt, Artificial Sequence
  Description of Artificial Sequence: Synthetic oligonucleotide
  Sense strand starting at position 2541 of SEQ ID NO: 1244374
ccagccaccgcucagaaau

SEQ ID NO: 1483759 - RNA, 19 nt, Artificial Sequence
  Description of Artificial Sequence: Synthetic oligonucleotide
  Antisense strand to SEQ ID NO: 1483758
auuucugagcgguggcugg

SEQ ID NO: 1483760 - RNA, 19 nt, Artificial Sequence
  Description of Artificial Sequence: Synthetic oligonucleotide
  Sense strand starting at position 2551 of SEQ ID NO: 1244374
cucagaaauuuaggucaag

SEQ ID NO: 1483761 - RNA, 19 nt, Artificial Sequence
  Description of Artificial Sequence: Synthetic oligonucleotide
  Antisense strand to SEQ ID NO: 1483760
cuugaccuaaauuucugag

SEQ ID NO: 1483762 - RNA, 19 nt, Artificial Sequence
  Description of Artificial Sequence: Synthetic oligonucleotide
  Sense strand starting at position 2834 of SEQ ID NO: 1244374
cgagaaagugccgaagaaa

SEQ ID NO: 1483763 - RNA, 19 nt, Artificial Sequence
  Description of Artificial Sequence: Synthetic oligonucleotide
  Antisense strand to SEQ ID NO: 1483762
uuucuucggcacuuucucg

SEQ ID NO: 1483764 - RNA, 19 nt, Artificial Sequence
  Description of Artificial Sequence: Synthetic oligonucleotide
  Sense strand starting at position 2888 of SEQ ID NO: 1244374
guaauaagauagguuauag

SEQ ID NO: 1483765 - RNA, 19 nt, Artificial Sequence
  Description of Artificial Sequence: Synthetic oligonucleotide
  Antisense strand to SEQ ID NO: 1483764
cuauaaccuaucuuauuac

SEQ ID NO: 1483766 - RNA, 19 nt, Artificial Sequence
  Description of Artificial Sequence: Synthetic oligonucleotide
  Sense strand starting at position 2913 of SEQ ID NO: 1244374
aggucacaugauugagguu

SEQ ID NO: 1483767 - RNA, 19 nt, Artificial Sequence
  Description of Artificial Sequence: Synthetic oligonucleotide
  Antisense strand to SEQ ID NO: 1483766
aaccucaaucaugugaccu

SEQ ID NO: 1483768 - RNA, 19 nt, Artificial Sequence
  Description of Artificial Sequence: Synthetic oligonucleotide
  Sense strand starting at position 2943 of SEQ ID NO: 1244374
uuuguauauaacgagaagu

SEQ ID NO: 1483769 - RNA, 19 nt, Artificial Sequence
  Description of Artificial Sequence: Synthetic oligonucleotide
  Antisense strand to SEQ ID NO: 1483768
acuucucguuauauacaaa

SEQ ID NO: 1483770 - RNA, 19 nt, Artificial Sequence
  Description of Artificial Sequence: Synthetic oligonucleotide
  Sense strand starting at position 2945 of SEQ ID NO: 1244374
uguauauaacgagaaguac

SEQ ID NO: 1483771 - RNA, 19 nt, Artificial Sequence
  Description of Artificial Sequence: Synthetic oligonucleotide
  Antisense strand to SEQ ID NO: 1483770
guacuucucguuauauaca

SEQ ID NO: 1483772 - RNA, 19 nt, Artificial Sequence
  Description of Artificial Sequence: Synthetic oligonucleotide
  Sense strand starting at position 3015 of SEQ ID NO: 1244374
cuguguaauccguucguua

SEQ ID NO: 1483773 - RNA, 19 nt, Artificial Sequence
  Description of Artificial Sequence: Synthetic oligonucleotide
  Antisense strand to SEQ ID NO: 1483772
uaacgaacggauuacacag

SEQ ID NO: 1483774 - RNA, 19 nt, Artificial Sequence
  Description of Artificial Sequence: Synthetic oligonucleotide
  Sense strand starting at position 3016 of SEQ ID NO: 1244374
uguguaauccguucguuau

SEQ ID NO: 1483775 - RNA, 19 nt, Artificial Sequence
  Description of Artificial Sequence: Synthetic oligonucleotide
  Antisense strand to SEQ ID NO: 1483774
auaacgaacggauuacaca

SEQ ID NO: 1483776 - RNA, 19 nt, Artificial Sequence
  Description of Artificial Sequence: Synthetic oligonucleotide
  Sense strand starting at position 3020 of SEQ ID NO: 1244374
uaauccguucguuauauau

SEQ ID NO: 1483777 - RNA, 19 nt, Artificial Sequence
  Description of Artificial Sequence: Synthetic oligonucleotide
  Antisense strand to SEQ ID NO: 1483776
auauauaacgaacggauua

SEQ ID NO: 1483778 - RNA, 19 nt, Artificial Sequence
  Description of Artificial Sequence: Synthetic oligonucleotide
  Sense strand starting at position 3056 of SEQ ID NO: 1244374
cuuuguaugccaggauagu

SEQ ID NO: 1483779 - RNA, 19 nt, Artificial Sequence
  Description of Artificial Sequence: Synthetic oligonucleotide
  Antisense strand to SEQ ID NO: 1483778
acuauccuggcauacaaag

SEQ ID NO: 1483780 - RNA, 19 nt, Artificial Sequence
  Description of Artificial Sequence: Synthetic oligonucleotide
  Sense strand starting at position 3057 of SEQ ID NO: 1244374
uuuguaugccaggauagua

SEQ ID NO: 1483781 - RNA, 19 nt, Artificial Sequence
  Description of Artificial Sequence: Synthetic oligonucleotide
  Antisense strand to SEQ ID NO: 1483780
uacuauccuggcauacaaa

SEQ ID NO: 1483782 - RNA, 19 nt, Artificial Sequence
  Description of Artificial Sequence: Synthetic oligonucleotide
  Sense strand starting at position 3069 of SEQ ID NO: 1244374
gauaguaaagugcaugaua

SEQ ID NO: 1483783 - RNA, 19 nt, Artificial Sequence
  Description of Artificial Sequence: Synthetic oligonucleotide
  Antisense strand to SEQ ID NO: 1483782
uaucaugcacuuuacuauc

SEQ ID NO: 1483784 - RNA, 19 nt, Artificial Sequence
  Description of Artificial Sequence: Synthetic oligonucleotide
  Sense strand starting at position 3071 of SEQ ID NO: 1244374
uaguaaagugcaugauacu

SEQ ID NO: 1483785 - RNA, 19 nt, Artificial Sequence
  Description of Artificial Sequence: Synthetic oligonucleotide
  Antisense strand to SEQ ID NO: 1483784
aguaucaugcacuuuacua

SEQ ID NO: 1483786 - RNA, 19 nt, Artificial Sequence
  Description of Artificial Sequence: Synthetic oligonucleotide
  Sense strand starting at position 3187 of SEQ ID NO: 1244374
cggguucuggcauacagua

SEQ ID NO: 1483787 - RNA, 19 nt, Artificial Sequence
  Description of Artificial Sequence: Synthetic oligonucleotide
  Antisense strand to SEQ ID NO: 1483786
uacuguaugccagaacccg

SEQ ID NO: 1483788 - RNA, 19 nt, Artificial Sequence
  Description of Artificial Sequence: Synthetic oligonucleotide
  Sense strand starting at position 3256 of SEQ ID NO: 1244374
agacaaugucuguagccuu

SEQ ID NO: 1483789 - RNA, 19 nt, Artificial Sequence
  Description of Artificial Sequence: Synthetic oligonucleotide
  Antisense strand to SEQ ID NO: 1483788
aaggcuacagacauugucu

SEQ ID NO: 1483790 - RNA, 19 nt, Artificial Sequence
  Description of Artificial Sequence: Synthetic oligonucleotide
  Sense strand starting at position 3277 of SEQ ID NO: 1244374
aaaggcaucgcaugaaagu

SEQ ID NO: 1483791 - RNA, 19 nt, Artificial Sequence
  Description of Artificial Sequence: Synthetic oligonucleotide
  Antisense strand to SEQ ID NO: 1483790
acuuucaugcgaugccuuu

SEQ ID NO: 1483792 - RNA, 19 nt, Artificial Sequence
  Description of Artificial Sequence: Synthetic oligonucleotide
  Sense strand starting at position 3278 of SEQ ID NO: 1244374
aaggcaucgcaugaaaguu

SEQ ID NO: 1483793 - RNA, 19 nt, Artificial Sequence
  Description of Artificial Sequence: Synthetic oligonucleotide
  Antisense strand to SEQ ID NO: 1483792
aacuuucaugcgaugccuu

SEQ ID NO: 1483794 - RNA, 19 nt, Artificial Sequence
  Description of Artificial Sequence: Synthetic oligonucleotide
  Sense strand starting at position 3287 of SEQ ID NO: 1244374
caugaaaguuucuccggca

SEQ ID NO: 1483795 - RNA, 19 nt, Artificial Sequence
  Description of Artificial Sequence: Synthetic oligonucleotide
  Antisense strand to SEQ ID NO: 1483794
ugccggagaaacuuucaug

SEQ ID NO: 1483796 - RNA, 19 nt, Artificial Sequence
  Description of Artificial Sequence: Synthetic oligonucleotide
  Sense strand starting at position 3412 of SEQ ID NO: 1244374
gcaauaaacugaguuaaua

SEQ ID NO: 1483797 - RNA, 19 nt, Artificial Sequence
  Description of Artificial Sequence: Synthetic oligonucleotide
  Antisense strand to SEQ ID NO: 1483796
uauuaacucaguuuauugc

SEQ ID NO: 1483798 - RNA, 19 nt, Artificial Sequence
  Description of Artificial Sequence: Synthetic oligonucleotide
  Sense strand starting at position 3488 of SEQ ID NO: 1244374
augaauugaugcccaauua

SEQ ID NO: 1483799 - RNA, 19 nt, Artificial Sequence
  Description of Artificial Sequence: Synthetic oligonucleotide
  Antisense strand to SEQ ID NO: 1483798
uaauugggcaucaauucau

SEQ ID NO: 1483800 - RNA, 19 nt, Artificial Sequence
  Description of Artificial Sequence: Synthetic oligonucleotide
  Sense strand starting at position 3623 of SEQ ID NO: 1244374
cagccauagccuugaguga

SEQ ID NO: 1483801 - RNA, 19 nt, Artificial Sequence
  Description of Artificial Sequence: Synthetic oligonucleotide
  Antisense strand to SEQ ID NO: 1483800
ucacucaaggcuauggcug

SEQ ID NO: 1483802 - RNA, 19 nt, Artificial Sequence
  Description of Artificial Sequence: Synthetic oligonucleotide
  Sense strand starting at position 3675 of SEQ ID NO: 1244374
aguaauuccuccuugacag

SEQ ID NO: 1483803 - RNA, 19 nt, Artificial Sequence
  Description of Artificial Sequence: Synthetic oligonucleotide
  Antisense strand to SEQ ID NO: 1483802
cugucaaggaggaauuacu

SEQ ID NO: 1483804 - RNA, 19 nt, Artificial Sequence
  Description of Artificial Sequence: Synthetic oligonucleotide
  Sense strand starting at position 3690 of SEQ ID NO: 1244374
acaggauugauguggugaa

SEQ ID NO: 1483805 - RNA, 19 nt, Artificial Sequence
  Description of Artificial Sequence: Synthetic oligonucleotide
  Antisense strand to SEQ ID NO: 1483804
uucaccacaucaauccugu

SEQ ID NO: 1483806 - RNA, 19 nt, Artificial Sequence
  Description of Artificial Sequence: Synthetic oligonucleotide
  Sense strand starting at position 3717 of SEQ ID NO: 1244374
gcugaagugaaccaauguu

SEQ ID NO: 1483807 - RNA, 19 nt, Artificial Sequence
  Description of Artificial Sequence: Synthetic oligonucleotide
  Antisense strand to SEQ ID NO: 1483806
aacauugguucacuucagc

SEQ ID NO: 1483808 - RNA, 19 nt, Artificial Sequence
  Description of Artificial Sequence: Synthetic oligonucleotide
  Sense strand starting at position 3767 of SEQ ID NO: 1244374
ucguguuuauuaucaauca

SEQ ID NO: 1483809 - RNA, 19 nt, Artificial Sequence
  Description of Artificial Sequence: Synthetic oligonucleotide
  Antisense strand to SEQ ID NO: 1483808
ugauugauaauaaacacga

SEQ ID NO: 1483810 - RNA, 19 nt, Artificial Sequence
  Description of Artificial Sequence: Synthetic oligonucleotide
  Sense strand starting at position 3814 of SEQ ID NO: 1244374
gcucuaaggcuuuaaacca

SEQ ID NO: 1483811 - RNA, 19 nt, Artificial Sequence
  Description of Artificial Sequence: Synthetic oligonucleotide
  Antisense strand to SEQ ID NO: 1483810
ugguuuaaagccuuagagc

SEQ ID NO: 1483812 - RNA, 19 nt, Artificial Sequence
  Description of Artificial Sequence: Synthetic oligonucleotide
  Sense strand starting at position 3966 of SEQ ID NO: 1244374
auuguauuguguuugggau

SEQ ID NO: 1483813 - RNA, 19 nt, Artificial Sequence
  Description of Artificial Sequence: Synthetic oligonucleotide
  Antisense strand to SEQ ID NO: 1483812
aucccaaacacaauacaau

SEQ ID NO: 1483814 - RNA, 19 nt, Artificial Sequence
  Description of Artificial Sequence: Synthetic oligonucleotide
  Sense strand starting at position 29 of SEQ ID NO: 1244375
augaaaggaucugagaaag

SEQ ID NO: 1483815 - RNA, 19 nt, Artificial Sequence
  Description of Artificial Sequence: Synthetic oligonucleotide
  Antisense strand to SEQ ID NO: 1483814
cuuucucagauccuuucau

SEQ ID NO: 1483816 - RNA, 19 nt, Artificial Sequence
  Description of Artificial Sequence: Synthetic oligonucleotide
  Sense strand starting at position 209 of SEQ ID NO: 1244375
guugccuggaccuguaauu

SEQ ID NO: 1483817 - RNA, 19 nt, Artificial Sequence
  Description of Artificial Sequence: Synthetic oligonucleotide
  Antisense strand to SEQ ID NO: 1483816
aauuacagguccaggcaac

SEQ ID NO: 1483818 - RNA, 19 nt, Artificial Sequence
  Description of Artificial Sequence: Synthetic oligonucleotide
  Sense strand starting at position 274 of SEQ ID NO: 1244375
gcaggcugugccuucucaa

SEQ ID NO: 1483819 - RNA, 19 nt, Artificial Sequence
  Description of Artificial Sequence: Synthetic oligonucleotide
  Antisense strand to SEQ ID NO: 1483818
uugagaaggcacagccugc

SEQ ID NO: 1483820 - RNA, 19 nt, Artificial Sequence
  Description of Artificial Sequence: Synthetic oligonucleotide
  Sense strand starting at position 353 of SEQ ID NO: 1244375
gcauuugcucucuggugga

SEQ ID NO: 1483821 - RNA, 19 nt, Artificial Sequence
  Description of Artificial Sequence: Synthetic oligonucleotide
  Antisense strand to SEQ ID NO: 1483820
uccaccagagagcaaaugc

SEQ ID NO: 1483822 - RNA, 19 nt, Artificial Sequence
  Description of Artificial Sequence: Synthetic oligonucleotide
  Sense strand starting at position 366 of SEQ ID NO: 1244375
gguggaguuucucugcaca

SEQ ID NO: 1483823 - RNA, 19 nt, Artificial Sequence
  Description of Artificial Sequence: Synthetic oligonucleotide
  Antisense strand to SEQ ID NO: 1483822
ugugcagagaaacuccacc

SEQ ID NO: 1483824 - RNA, 19 nt, Artificial Sequence
  Description of Artificial Sequence: Synthetic oligonucleotide
  Sense strand starting at position 368 of SEQ ID NO: 1244375
uggaguuucucugcacagu

SEQ ID NO: 1483825 - RNA, 19 nt, Artificial Sequence
  Description of Artificial Sequence: Synthetic oligonucleotide
  Antisense strand to SEQ ID NO: 1483824
acugugcagagaaacucca

SEQ ID NO: 1483826 - RNA, 19 nt, Artificial Sequence
  Description of Artificial Sequence: Synthetic oligonucleotide
  Sense strand starting at position 601 of SEQ ID NO: 1244375
ugucaaugcccagaucguu

SEQ ID NO: 1483827 - RNA, 19 nt, Artificial Sequence
  Description of Artificial Sequence: Synthetic oligonucleotide
  Antisense strand to SEQ ID NO: 1483826
aacgaucugggcauugaca

SEQ ID NO: 1483828 - RNA, 19 nt, Artificial Sequence
  Description of Artificial Sequence: Synthetic oligonucleotide
  Sense strand starting at position 1095 of SEQ ID NO: 1244375
ucuuucuaagagggaucuu

SEQ ID NO: 1483829 - RNA, 19 nt, Artificial Sequence
  Description of Artificial Sequence: Synthetic oligonucleotide
  Antisense strand to SEQ ID NO: 1483828
aagaucccucuuagaaaga

SEQ ID NO: 1483830 - RNA, 19 nt, Artificial Sequence
  Description of Artificial Sequence: Synthetic oligonucleotide
  Sense strand starting at position 1185 of SEQ ID NO: 1244375
aguaaaugaagcugaaugu

SEQ ID NO: 1483831 - RNA, 19 nt, Artificial Sequence
  Description of Artificial Sequence: Synthetic oligonucleotide
  Antisense strand to SEQ ID NO: 1483830
acauucagcuucauuuacu

SEQ ID NO: 1483832 - RNA, 19 nt, Artificial Sequence
  Description of Artificial Sequence: Synthetic oligonucleotide
  Sense strand starting at position 1252 of SEQ ID NO: 1244375
agagauggguaucucugua

SEQ ID NO: 1483833 - RNA, 19 nt, Artificial Sequence
  Description of Artificial Sequence: Synthetic oligonucleotide
  Antisense strand to SEQ ID NO: 1483832
uacagagauacccaucucu

SEQ ID NO: 1483834 - RNA, 19 nt, Artificial Sequence
  Description of Artificial Sequence: Synthetic oligonucleotide
  Sense strand starting at position 1256 of SEQ ID NO: 1244375
auggguaucucuguaucca

SEQ ID NO: 1483835 - RNA, 19 nt, Artificial Sequence
  Description of Artificial Sequence: Synthetic oligonucleotide
  Antisense strand to SEQ ID NO: 1483834
uggauacagagauacccau

SEQ ID NO: 1483836 - RNA, 19 nt, Artificial Sequence
  Description of Artificial Sequence: Synthetic oligonucleotide
  Sense strand starting at position 1260 of SEQ ID NO: 1244375
guaucucuguauccagagu

SEQ ID NO: 1483837 - RNA, 19 nt, Artificial Sequence
  Description of Artificial Sequence: Synthetic oligonucleotide
  Antisense strand to SEQ ID NO: 1483836
acucuggauacagagauac

SEQ ID NO: 1483838 - RNA, 19 nt, Artificial Sequence
  Description of Artificial Sequence: Synthetic oligonucleotide
  Sense strand starting at position 1537 of SEQ ID NO: 1244375
cucuaaggcuaucuguaga

SEQ ID NO: 1483839 - RNA, 19 nt, Artificial Sequence
  Description of Artificial Sequence: Synthetic oligonucleotide
  Antisense strand to SEQ ID NO: 1483838
ucuacagauagccuuagag

SEQ ID NO: 1483840 - RNA, 19 nt, Artificial Sequence
  Description of Artificial Sequence: Synthetic oligonucleotide
  Sense strand starting at position 2062 of SEQ ID NO: 1244375
gcaauccaaagguguguaa

SEQ ID NO: 1483841 - RNA, 19 nt, Artificial Sequence
  Description of Artificial Sequence: Synthetic oligonucleotide
  Antisense strand to SEQ ID NO: 1483840
uuacacaccuuuggauugc

SEQ ID NO: 1483842 - RNA, 19 nt, Artificial Sequence
  Description of Artificial Sequence: Synthetic oligonucleotide
  Sense strand starting at position 2064 of SEQ ID NO: 1244375
aauccaaagguguguaacu

SEQ ID NO: 1483843 - RNA, 19 nt, Artificial Sequence
  Description of Artificial Sequence: Synthetic oligonucleotide
  Antisense strand to SEQ ID NO: 1483842
aguuacacaccuuuggauu

SEQ ID NO: 1483844 - RNA, 19 nt, Artificial Sequence
  Description of Artificial Sequence: Synthetic oligonucleotide
  Sense strand starting at position 2065 of SEQ ID NO: 1244375
auccaaagguguguaacuu

SEQ ID NO: 1483845 - RNA, 19 nt, Artificial Sequence
  Description of Artificial Sequence: Synthetic oligonucleotide
  Antisense strand to SEQ ID NO: 1483844
aaguuacacaccuuuggau

SEQ ID NO: 1483846 - RNA, 19 nt, Artificial Sequence
  Description of Artificial Sequence: Synthetic oligonucleotide
  Sense strand starting at position 2593 of SEQ ID NO: 1244375
ggcggaguucuagaacguc

SEQ ID NO: 1483847 - RNA, 19 nt, Artificial Sequence
  Description of Artificial Sequence: Synthetic oligonucleotide
  Antisense strand to SEQ ID NO: 1483846
gacguucuagaacuccgcc

SEQ ID NO: 1483848 - RNA, 19 nt, Artificial Sequence
  Description of Artificial Sequence: Synthetic oligonucleotide
  Sense strand starting at position 2779 of SEQ ID NO: 1244375
ccgacuucccuggaucaca

SEQ ID NO: 1483849 - RNA, 19 nt, Artificial Sequence
  Description of Artificial Sequence: Synthetic oligonucleotide
  Antisense strand to SEQ ID NO: 1483848
ugugauccagggaagucgg

SEQ ID NO: 1483850 - RNA, 19 nt, Artificial Sequence
  Description of Artificial Sequence: Synthetic oligonucleotide
  Sense strand starting at position 2984 of SEQ ID NO: 1244375
ccagccaccgcucagaaau

SEQ ID NO: 1483851 - RNA, 19 nt, Artificial Sequence
  Description of Artificial Sequence: Synthetic oligonucleotide
  Antisense strand to SEQ ID NO: 1483850
auuucugagcgguggcugg

SEQ ID NO: 1483852 - RNA, 19 nt, Artificial Sequence
  Description of Artificial Sequence: Synthetic oligonucleotide
  Sense strand starting at position 2994 of SEQ ID NO: 1244375
cucagaaauuuaggucaag

SEQ ID NO: 1483853 - RNA, 19 nt, Artificial Sequence
  Description of Artificial Sequence: Synthetic oligonucleotide
  Antisense strand to SEQ ID NO: 1483852
cuugaccuaaauuucugag

SEQ ID NO: 1483854 - RNA, 19 nt, Artificial Sequence
  Description of Artificial Sequence: Synthetic oligonucleotide
  Sense strand starting at position 3277 of SEQ ID NO: 1244375
cgagaaagugccgaagaaa

SEQ ID NO: 1483855 - RNA, 19 nt, Artificial Sequence
  Description of Artificial Sequence: Synthetic oligonucleotide
  Antisense strand to SEQ ID NO: 1483854
uuucuucggcacuuucucg

SEQ ID NO: 1483856 - RNA, 19 nt, Artificial Sequence
  Description of Artificial Sequence: Synthetic oligonucleotide
  Sense strand starting at position 3304 of SEQ ID NO: 1244375
gcguuaaucauacaguguu

SEQ ID NO: 1483857 - RNA, 19 nt, Artificial Sequence
  Description of Artificial Sequence: Synthetic oligonucleotide
  Antisense strand to SEQ ID NO: 1483856
aacacuguaugauuaacgc

SEQ ID NO: 1483858 - RNA, 19 nt, Artificial Sequence
  Description of Artificial Sequence: Synthetic oligonucleotide
  Sense strand starting at position 3331 of SEQ ID NO: 1244375
guaauaagauagguuauag

SEQ ID NO: 1483859 - RNA, 19 nt, Artificial Sequence
  Description of Artificial Sequence: Synthetic oligonucleotide
  Antisense strand to SEQ ID NO: 1483858
cuauaaccuaucuuauuac

SEQ ID NO: 1483860 - RNA, 19 nt, Artificial Sequence
  Description of Artificial Sequence: Synthetic oligonucleotide
  Sense strand starting at position 3356 of SEQ ID NO: 1244375
aggucacaugauugagguu

SEQ ID NO: 1483861 - RNA, 19 nt, Artificial Sequence
  Description of Artificial Sequence: Synthetic oligonucleotide
  Antisense strand to SEQ ID NO: 1483860
aaccucaaucaugugaccu

SEQ ID NO: 1483862 - RNA, 19 nt, Artificial Sequence
  Description of Artificial Sequence: Synthetic oligonucleotide
  Sense strand starting at position 3386 of SEQ ID NO: 1244375
uuuguauauaacgagaagu

SEQ ID NO: 1483863 - RNA, 19 nt, Artificial Sequence
  Description of Artificial Sequence: Synthetic oligonucleotide
  Antisense strand to SEQ ID NO: 1483862
acuucucguuauauacaaa

SEQ ID NO: 1483864 - RNA, 19 nt, Artificial Sequence
  Description of Artificial Sequence: Synthetic oligonucleotide
  Sense strand starting at position 3388 of SEQ ID NO: 1244375
uguauauaacgagaaguac

SEQ ID NO: 1483865 - RNA, 19 nt, Artificial Sequence
  Description of Artificial Sequence: Synthetic oligonucleotide
  Antisense strand to SEQ ID NO: 1483864
guacuucucguuauauaca

SEQ ID NO: 1483866 - RNA, 19 nt, Artificial Sequence
  Description of Artificial Sequence: Synthetic oligonucleotide
  Sense strand starting at position 3458 of SEQ ID NO: 1244375
cuguguaauccguucguua

SEQ ID NO: 1483867 - RNA, 19 nt, Artificial Sequence
  Description of Artificial Sequence: Synthetic oligonucleotide
  Antisense strand to SEQ ID NO: 1483866
uaacgaacggauuacacag

SEQ ID NO: 1483868 - RNA, 19 nt, Artificial Sequence
  Description of Artificial Sequence: Synthetic oligonucleotide
  Sense strand starting at position 3459 of SEQ ID NO: 1244375
uguguaauccguucguuau

SEQ ID NO: 1483869 - RNA, 19 nt, Artificial Sequence
  Description of Artificial Sequence: Synthetic oligonucleotide
  Antisense strand to SEQ ID NO: 1483868
auaacgaacggauuacaca

SEQ ID NO: 1483870 - RNA, 19 nt, Artificial Sequence
  Description of Artificial Sequence: Synthetic oligonucleotide
  Sense strand starting at position 3463 of SEQ ID NO: 1244375
uaauccguucguuauauau

SEQ ID NO: 1483871 - RNA, 19 nt, Artificial Sequence
  Description of Artificial Sequence: Synthetic oligonucleotide
  Antisense strand to SEQ ID NO: 1483870
auauauaacgaacggauua

SEQ ID NO: 1483872 - RNA, 19 nt, Artificial Sequence
  Description of Artificial Sequence: Synthetic oligonucleotide
  Sense strand starting at position 3499 of SEQ ID NO: 1244375
cuuuguaugccaggauagu

SEQ ID NO: 1483873 - RNA, 19 nt, Artificial Sequence
  Description of Artificial Sequence: Synthetic oligonucleotide
  Antisense strand to SEQ ID NO: 1483872
acuauccuggcauacaaag

SEQ ID NO: 1483874 - RNA, 19 nt, Artificial Sequence
  Description of Artificial Sequence: Synthetic oligonucleotide
  Sense strand starting at position 3500 of SEQ ID NO: 1244375
uuuguaugccaggauagua

SEQ ID NO: 1483875 - RNA, 19 nt, Artificial Sequence
  Description of Artificial Sequence: Synthetic oligonucleotide
  Antisense strand to SEQ ID NO: 1483874
uacuauccuggcauacaaa

SEQ ID NO: 1483876 - RNA, 19 nt, Artificial Sequence
  Description of Artificial Sequence: Synthetic oligonucleotide
  Sense strand starting at position 3512 of SEQ ID NO: 1244375
gauaguaaagugcaugaua

SEQ ID NO: 1483877 - RNA, 19 nt, Artificial Sequence
  Description of Artificial Sequence: Synthetic oligonucleotide
  Antisense strand to SEQ ID NO: 1483876
uaucaugcacuuuacuauc

SEQ ID NO: 1483878 - RNA, 19 nt, Artificial Sequence
  Description of Artificial Sequence: Synthetic oligonucleotide
  Sense strand starting at position 3514 of SEQ ID NO: 1244375
uaguaaagugcaugauacu

SEQ ID NO: 1483879 - RNA, 19 nt, Artificial Sequence
  Description of Artificial Sequence: Synthetic oligonucleotide
  Antisense strand to SEQ ID NO: 1483878
aguaucaugcacuuuacua

SEQ ID NO: 1483880 - RNA, 19 nt, Artificial Sequence
  Description of Artificial Sequence: Synthetic oligonucleotide
  Sense strand starting at position 3630 of SEQ ID NO: 1244375
cggguucuggcauacagua

SEQ ID NO: 1483881 - RNA, 19 nt, Artificial Sequence
  Description of Artificial Sequence: Synthetic oligonucleotide
  Antisense strand to SEQ ID NO: 1483880
uacuguaugccagaacccg

SEQ ID NO: 1483882 - RNA, 19 nt, Artificial Sequence
  Description of Artificial Sequence: Synthetic oligonucleotide
  Sense strand starting at position 3699 of SEQ ID NO: 1244375
agacaaugucuguagccuu

SEQ ID NO: 1483883 - RNA, 19 nt, Artificial Sequence
  Description of Artificial Sequence: Synthetic oligonucleotide
  Antisense strand to SEQ ID NO: 1483882
aaggcuacagacauugucu

SEQ ID NO: 1483884 - RNA, 19 nt, Artificial Sequence
  Description of Artificial Sequence: Synthetic oligonucleotide
  Sense strand starting at position 3720 of SEQ ID NO: 1244375
aaaggcaucgcaugaaagu

SEQ ID NO: 1483885 - RNA, 19 nt, Artificial Sequence
  Description of Artificial Sequence: Synthetic oligonucleotide
  Antisense strand to SEQ ID NO: 1483884
acuuucaugcgaugccuuu

SEQ ID NO: 1483886 - RNA, 19 nt, Artificial Sequence
  Description of Artificial Sequence: Synthetic oligonucleotide
  Sense strand starting at position 3721 of SEQ ID NO: 1244375
aaggcaucgcaugaaaguu

SEQ ID NO: 1483887 - RNA, 19 nt, Artificial Sequence
  Description of Artificial Sequence: Synthetic oligonucleotide
  Antisense strand to SEQ ID NO: 1483886
aacuuucaugcgaugccuu

SEQ ID NO: 1483888 - RNA, 19 nt, Artificial Sequence
  Description of Artificial Sequence: Synthetic oligonucleotide
  Sense strand starting at position 3730 of SEQ ID NO: 1244375
caugaaaguuucuccggca

SEQ ID NO: 1483889 - RNA, 19 nt, Artificial Sequence
  Description of Artificial Sequence: Synthetic oligonucleotide
  Antisense strand to SEQ ID NO: 1483888
ugccggagaaacuuucaug

SEQ ID NO: 1483890 - RNA, 19 nt, Artificial Sequence
  Description of Artificial Sequence: Synthetic oligonucleotide
  Sense strand starting at position 3855 of SEQ ID NO: 1244375
gcaauaaacugaguuaaua

SEQ ID NO: 1483891 - RNA, 19 nt, Artificial Sequence
  Description of Artificial Sequence: Synthetic oligonucleotide
  Antisense strand to SEQ ID NO: 1483890
uauuaacucaguuuauugc

SEQ ID NO: 1483892 - RNA, 19 nt, Artificial Sequence
  Description of Artificial Sequence: Synthetic oligonucleotide
  Sense strand starting at position 3931 of SEQ ID NO: 1244375
augaauugaugcccaauua

SEQ ID NO: 1483893 - RNA, 19 nt, Artificial Sequence
  Description of Artificial Sequence: Synthetic oligonucleotide
  Antisense strand to SEQ ID NO: 1483892
uaauugggcaucaauucau

SEQ ID NO: 1483894 - RNA, 19 nt, Artificial Sequence
  Description of Artificial Sequence: Synthetic oligonucleotide
  Sense strand starting at position 20 of SEQ ID NO: 1244376
acagccacccgaugagauu

SEQ ID NO: 1483895 - RNA, 19 nt, Artificial Sequence
  Description of Artificial Sequence: Synthetic oligonucleotide
  Antisense strand to SEQ ID NO: 1483894
aaucucaucggguggcugu

SEQ ID NO: 1483896 - RNA, 19 nt, Artificial Sequence
  Description of Artificial Sequence: Synthetic oligonucleotide
  Sense strand starting at position 271 of SEQ ID NO: 1244376
gcagcuguaagguaugcua

SEQ ID NO: 1483897 - RNA, 19 nt, Artificial Sequence
  Description of Artificial Sequence: Synthetic oligonucleotide
  Antisense strand to SEQ ID NO: 1483896
uagcauaccuuacagcugc

SEQ ID NO: 1483898 - RNA, 19 nt, Artificial Sequence
  Description of Artificial Sequence: Synthetic oligonucleotide
  Sense strand starting at position 316 of SEQ ID NO: 1244376
ucccucauaucugaaggaa

SEQ ID NO: 1483899 - RNA, 19 nt, Artificial Sequence
  Description of Artificial Sequence: Synthetic oligonucleotide
  Antisense strand to SEQ ID NO: 1483898
uuccuucagauaugaggga

SEQ ID NO: 1483900 - RNA, 19 nt, Artificial Sequence
  Description of Artificial Sequence: Synthetic oligonucleotide
  Sense strand starting at position 392 of SEQ ID NO: 1244376
guccaagcuccucagaagu

SEQ ID NO: 1483901 - RNA, 19 nt, Artificial Sequence
  Description of Artificial Sequence: Synthetic oligonucleotide
  Antisense strand to SEQ ID NO: 1483900
acuucugaggagcuuggac

SEQ ID NO: 1483902 - RNA, 19 nt, Artificial Sequence
  Description of Artificial Sequence: Synthetic oligonucleotide
  Sense strand starting at position 394 of SEQ ID NO: 1244376
ccaagcuccucagaaguaa

SEQ ID NO: 1483903 - RNA, 19 nt, Artificial Sequence
  Description of Artificial Sequence: Synthetic oligonucleotide
  Antisense strand to SEQ ID NO: 1483902
uuacuucugaggagcuugg

SEQ ID NO: 1483904 - RNA, 19 nt, Artificial Sequence
  Description of Artificial Sequence: Synthetic oligonucleotide
  Sense strand starting at position 552 of SEQ ID NO: 1244376
uggucagugggucauguau

SEQ ID NO: 1483905 - RNA, 19 nt, Artificial Sequence
  Description of Artificial Sequence: Synthetic oligonucleotide
  Antisense strand to SEQ ID NO: 1483904
auacaugacccacugacca

SEQ ID NO: 1483906 - RNA, 19 nt, Artificial Sequence
  Description of Artificial Sequence: Synthetic oligonucleotide
  Sense strand starting at position 559 of SEQ ID NO: 1244376
ugggucauguauuagaacu

SEQ ID NO: 1483907 - RNA, 19 nt, Artificial Sequence
  Description of Artificial Sequence: Synthetic oligonucleotide
  Antisense strand to SEQ ID NO: 1483906
aguucuaauacaugaccca

SEQ ID NO: 1483908 - RNA, 19 nt, Artificial Sequence
  Description of Artificial Sequence: Synthetic oligonucleotide
  Sense strand starting at position 561 of SEQ ID NO: 1244376
ggucauguauuagaacuca

SEQ ID NO: 1483909 - RNA, 19 nt, Artificial Sequence
  Description of Artificial Sequence: Synthetic oligonucleotide
  Antisense strand to SEQ ID NO: 1483908
ugaguucuaauacaugacc

SEQ ID NO: 1483910 - RNA, 19 nt, Artificial Sequence
  Description of Artificial Sequence: Synthetic oligonucleotide
  Sense strand starting at position 603 of SEQ ID NO: 1244376
aaucaaaggcagugauucu

SEQ ID NO: 1483911 - RNA, 19 nt, Artificial Sequence
  Description of Artificial Sequence: Synthetic oligonucleotide
  Antisense strand to SEQ ID NO: 1483910
agaaucacugccuuugauu

SEQ ID NO: 1483912 - RNA, 19 nt, Artificial Sequence
  Description of Artificial Sequence: Synthetic oligonucleotide
  Sense strand starting at position 610 of SEQ ID NO: 1244376
ggcagugauucucuuaaua

SEQ ID NO: 1483913 - RNA, 19 nt, Artificial Sequence
  Description of Artificial Sequence: Synthetic oligonucleotide
  Antisense strand to SEQ ID NO: 1483912
uauuaagagaaucacugcc

SEQ ID NO: 1483914 - RNA, 19 nt, Artificial Sequence
  Description of Artificial Sequence: Synthetic oligonucleotide
  Sense strand starting at position 769 of SEQ ID NO: 1244376
gugcauuucuaacgcaaua

SEQ ID NO: 1483915 - RNA, 19 nt, Artificial Sequence
  Description of Artificial Sequence: Synthetic oligonucleotide
  Antisense strand to SEQ ID NO: 1483914
uauugcguuagaaaugcac

SEQ ID NO: 1483916 - RNA, 19 nt, Artificial Sequence
  Description of Artificial Sequence: Synthetic oligonucleotide
  Sense strand starting at position 781 of SEQ ID NO: 1244376
cgcaauagcucuuuaauuu

SEQ ID NO: 1483917 - RNA, 19 nt, Artificial Sequence
  Description of Artificial Sequence: Synthetic oligonucleotide
  Antisense strand to SEQ ID NO: 1483916
aaauuaaagagcuauugcg

SEQ ID NO: 1483918 - RNA, 19 nt, Artificial Sequence
  Description of Artificial Sequence: Synthetic oligonucleotide
  Sense strand starting at position 951 of SEQ ID NO: 1244376
cugagagguugcccuuuaa

SEQ ID NO: 1483919 - RNA, 19 nt, Artificial Sequence
  Description of Artificial Sequence: Synthetic oligonucleotide
  Antisense strand to SEQ ID NO: 1483918
uuaaagggcaaccucucag

SEQ ID NO: 1483920 - RNA, 19 nt, Artificial Sequence
  Description of Artificial Sequence: Synthetic oligonucleotide
  Sense strand starting at position 1012 of SEQ ID NO: 1244376
agacccagcgccuaagaua

SEQ ID NO: 1483921 - RNA, 19 nt, Artificial Sequence
  Description of Artificial Sequence: Synthetic oligonucleotide
  Antisense strand to SEQ ID NO: 1483920
uaucuuaggcgcugggucu

SEQ ID NO: 1483922 - RNA, 19 nt, Artificial Sequence
  Description of Artificial Sequence: Synthetic oligonucleotide
  Sense strand starting at position 1243 of SEQ ID NO: 1244376
agcagaaggaucuguuuga

SEQ ID NO: 1483923 - RNA, 19 nt, Artificial Sequence
  Description of Artificial Sequence: Synthetic oligonucleotide
  Antisense strand to SEQ ID NO: 1483922
ucaaacagauccuucugcu

SEQ ID NO: 1483924 - RNA, 19 nt, Artificial Sequence
  Description of Artificial Sequence: Synthetic oligonucleotide
  Sense strand starting at position 1244 of SEQ ID NO: 1244376
gcagaaggaucuguuugag

SEQ ID NO: 1483925 - RNA, 19 nt, Artificial Sequence
  Description of Artificial Sequence: Synthetic oligonucleotide
  Antisense strand to SEQ ID NO: 1483924
cucaaacagauccuucugc

SEQ ID NO: 1483926 - RNA, 19 nt, Artificial Sequence
  Description of Artificial Sequence: Synthetic oligonucleotide
  Sense strand starting at position 1247 of SEQ ID NO: 1244376
gaaggaucuguuugaggca

SEQ ID NO: 1483927 - RNA, 19 nt, Artificial Sequence
  Description of Artificial Sequence: Synthetic oligonucleotide
  Antisense strand to SEQ ID NO: 1483926
ugccucaaacagauccuuc

SEQ ID NO: 1483928 - RNA, 19 nt, Artificial Sequence
  Description of Artificial Sequence: Synthetic oligonucleotide
  Sense strand starting at position 1307 of SEQ ID NO: 1244376
gagggcucuuccucauacu

SEQ ID NO: 1483929 - RNA, 19 nt, Artificial Sequence
  Description of Artificial Sequence: Synthetic oligonucleotide
  Antisense strand to SEQ ID NO: 1483928
aguaugaggaagagcccuc

SEQ ID NO: 1483930 - RNA, 19 nt, Artificial Sequence
  Description of Artificial Sequence: Synthetic oligonucleotide
  Sense strand starting at position 2492 of SEQ ID NO: 1244376
cucagcguuucccuuuaaa

SEQ ID NO: 1483931 - RNA, 19 nt, Artificial Sequence
  Description of Artificial Sequence: Synthetic oligonucleotide
  Antisense strand to SEQ ID NO: 1483930
uuuaaagggaaacgcugag

SEQ ID NO: 1483932 - RNA, 19 nt, Artificial Sequence
  Description of Artificial Sequence: Synthetic oligonucleotide
  Sense strand starting at position 3148 of SEQ ID NO: 1244376
gaaugaaguucuuugucuc

SEQ ID NO: 1483933 - RNA, 19 nt, Artificial Sequence
  Description of Artificial Sequence: Synthetic oligonucleotide
  Antisense strand to SEQ ID NO: 1483932
gagacaaagaacuucauuc

SEQ ID NO: 1483934 - RNA, 19 nt, Artificial Sequence
  Description of Artificial Sequence: Synthetic oligonucleotide
  Sense strand starting at position 3151 of SEQ ID NO: 1244376
ugaaguucuuugucucuaa

SEQ ID NO: 1483935 - RNA, 19 nt, Artificial Sequence
  Description of Artificial Sequence: Synthetic oligonucleotide
  Antisense strand to SEQ ID NO: 1483934
uuagagacaaagaacuuca

SEQ ID NO: 1483936 - RNA, 19 nt, Artificial Sequence
  Description of Artificial Sequence: Synthetic oligonucleotide
  Sense strand starting at position 3152 of SEQ ID NO: 1244376
gaaguucuuugucucuaag

SEQ ID NO: 1483937 - RNA, 19 nt, Artificial Sequence
  Description of Artificial Sequence: Synthetic oligonucleotide
  Antisense strand to SEQ ID NO: 1483936
cuuagagacaaagaacuuc

SEQ ID NO: 1483938 - RNA, 19 nt, Artificial Sequence
  Description of Artificial Sequence: Synthetic oligonucleotide
  Sense strand starting at position 3155 of SEQ ID NO: 1244376
guucuuugucucuaaggga

SEQ ID NO: 1483939 - RNA, 19 nt, Artificial Sequence
  Description of Artificial Sequence: Synthetic oligonucleotide
  Antisense strand to SEQ ID NO: 1483938
ucccuuagagacaaagaac

SEQ ID NO: 1483940 - RNA, 19 nt, Artificial Sequence
  Description of Artificial Sequence: Synthetic oligonucleotide
  Sense strand starting at position 3256 of SEQ ID NO: 1244376
gccuccuugggaugaagua

SEQ ID NO: 1483941 - RNA, 19 nt, Artificial Sequence
  Description of Artificial Sequence: Synthetic oligonucleotide
  Antisense strand to SEQ ID NO: 1483940
uacuucaucccaaggaggc

SEQ ID NO: 1483942 - RNA, 19 nt, Artificial Sequence
  Description of Artificial Sequence: Synthetic oligonucleotide
  Sense strand starting at position 3266 of SEQ ID NO: 1244376
gaugaaguauugccagcua

SEQ ID NO: 1483943 - RNA, 19 nt, Artificial Sequence
  Description of Artificial Sequence: Synthetic oligonucleotide
  Antisense strand to SEQ ID NO: 1483942
uagcuggcaauacuucauc

SEQ ID NO: 1483944 - RNA, 19 nt, Artificial Sequence
  Description of Artificial Sequence: Synthetic oligonucleotide
  Sense strand starting at position 3369 of SEQ ID NO: 1244376
aaggaaaucucugaaggga

SEQ ID NO: 1483945 - RNA, 19 nt, Artificial Sequence
  Description of Artificial Sequence: Synthetic oligonucleotide
  Antisense strand to SEQ ID NO: 1483944
ucccuucagagauuuccuu

SEQ ID NO: 1483946 - RNA, 19 nt, Artificial Sequence
  Description of Artificial Sequence: Synthetic oligonucleotide
  Sense strand starting at position 3429 of SEQ ID NO: 1244376
uguugagcgcuucuuccua

SEQ ID NO: 1483947 - RNA, 19 nt, Artificial Sequence
  Description of Artificial Sequence: Synthetic oligonucleotide
  Antisense strand to SEQ ID NO: 1483946
uaggaagaagcgcucaaca

SEQ ID NO: 1483948 - RNA, 19 nt, Artificial Sequence
  Description of Artificial Sequence: Synthetic oligonucleotide
  Sense strand starting at position 3459 of SEQ ID NO: 1244376
ucauguaugugugucuuua

SEQ ID NO: 1483949 - RNA, 19 nt, Artificial Sequence
  Description of Artificial Sequence: Synthetic oligonucleotide
  Antisense strand to SEQ ID NO: 1483948
uaaagacacacauacauga

SEQ ID NO: 1483950 - RNA, 19 nt, Artificial Sequence
  Description of Artificial Sequence: Synthetic oligonucleotide
  Sense strand starting at position 3463 of SEQ ID NO: 1244376
guaugugugucuuuauguc

SEQ ID NO: 1483951 - RNA, 19 nt, Artificial Sequence
  Description of Artificial Sequence: Synthetic oligonucleotide
  Antisense strand to SEQ ID NO: 1483950
gacauaaagacacacauac

SEQ ID NO: 1483952 - RNA, 19 nt, Artificial Sequence
  Description of Artificial Sequence: Synthetic oligonucleotide
  Sense strand starting at position 3469 of SEQ ID NO: 1244376
gugucuuuauguccaagca

SEQ ID NO: 1483953 - RNA, 19 nt, Artificial Sequence
  Description of Artificial Sequence: Synthetic oligonucleotide
  Antisense strand to SEQ ID NO: 1483952
ugcuuggacauaaagacac

SEQ ID NO: 1483954 - RNA, 19 nt, Artificial Sequence
  Description of Artificial Sequence: Synthetic oligonucleotide
  Sense strand starting at position 3470 of SEQ ID NO: 1244376
ugucuuuauguccaagcaa

SEQ ID NO: 1483955 - RNA, 19 nt, Artificial Sequence
  Description of Artificial Sequence: Synthetic oligonucleotide
  Antisense strand to SEQ ID NO: 1483954
uugcuuggacauaaagaca

SEQ ID NO: 1483956 - RNA, 19 nt, Artificial Sequence
  Description of Artificial Sequence: Synthetic oligonucleotide
  Sense strand starting at position 3493 of SEQ ID NO: 1244376
gccaacaaguccucagaau

SEQ ID NO: 1483957 - RNA, 19 nt, Artificial Sequence
  Description of Artificial Sequence: Synthetic oligonucleotide
  Antisense strand to SEQ ID NO: 1483956
auucugaggacuuguuggc

SEQ ID NO: 1483958 - RNA, 19 nt, Artificial Sequence
  Description of Artificial Sequence: Synthetic oligonucleotide
  Sense strand starting at position 3502 of SEQ ID NO: 1244376
uccucagaauuccuuguga

SEQ ID NO: 1483959 - RNA, 19 nt, Artificial Sequence
  Description of Artificial Sequence: Synthetic oligonucleotide
  Antisense strand to SEQ ID NO: 1483958
ucacaaggaauucugagga

SEQ ID NO: 1483960 - RNA, 19 nt, Artificial Sequence
  Description of Artificial Sequence: Synthetic oligonucleotide
  Sense strand starting at position 3504 of SEQ ID NO: 1244376
cucagaauuccuugugaaa

SEQ ID NO: 1483961 - RNA, 19 nt, Artificial Sequence
  Description of Artificial Sequence: Synthetic oligonucleotide
  Antisense strand to SEQ ID NO: 1483960
uuucacaaggaauucugag

SEQ ID NO: 1483962 - RNA, 19 nt, Artificial Sequence
  Description of Artificial Sequence: Synthetic oligonucleotide
  Sense strand starting at position 3807 of SEQ ID NO: 1244376
cgugcccagcccugaaaua

SEQ ID NO: 1483963 - RNA, 19 nt, Artificial Sequence
  Description of Artificial Sequence: Synthetic oligonucleotide
  Antisense strand to SEQ ID NO: 1483962
uauuucagggcugggcacg

SEQ ID NO: 1483964 - RNA, 19 nt, Artificial Sequence
  Description of Artificial Sequence: Synthetic oligonucleotide
  Sense strand starting at position 3818 of SEQ ID NO: 1244376
cugaaauagucuuaauugc

SEQ ID NO: 1483965 - RNA, 19 nt, Artificial Sequence
  Description of Artificial Sequence: Synthetic oligonucleotide
  Antisense strand to SEQ ID NO: 1483964
gcaauuaagacuauuucag

SEQ ID NO: 1483966 - RNA, 19 nt, Artificial Sequence
  Description of Artificial Sequence: Synthetic oligonucleotide
  Sense strand starting at position 3887 of SEQ ID NO: 1244376
ggagaagacugacauucuc

SEQ ID NO: 1483967 - RNA, 19 nt, Artificial Sequence
  Description of Artificial Sequence: Synthetic oligonucleotide
  Antisense strand to SEQ ID NO: 1483966
gagaaugucagucuucucc

SEQ ID NO: 1483968 - RNA, 19 nt, Artificial Sequence
  Description of Artificial Sequence: Synthetic oligonucleotide
  Sense strand starting at position 3942 of SEQ ID NO: 1244376
ugugcuuugugggcugaaa

SEQ ID NO: 1483969 - RNA, 19 nt, Artificial Sequence
  Description of Artificial Sequence: Synthetic oligonucleotide
  Antisense strand to SEQ ID NO: 1483968
uuucagcccacaaagcaca

SEQ ID NO: 1483970 - RNA, 19 nt, Artificial Sequence
  Description of Artificial Sequence: Synthetic oligonucleotide
  Sense strand starting at position 3950 of SEQ ID NO: 1244376
gugggcugaaagcaugaaa

SEQ ID NO: 1483971 - RNA, 19 nt, Artificial Sequence
  Description of Artificial Sequence: Synthetic oligonucleotide
  Antisense strand to SEQ ID NO: 1483970
uuucaugcuuucagcccac

SEQ ID NO: 1483972 - RNA, 19 nt, Artificial Sequence
  Description of Artificial Sequence: Synthetic oligonucleotide
  Sense strand starting at position 3981 of SEQ ID NO: 1244376
uaaacaaacguaugugaau

SEQ ID NO: 1483973 - RNA, 19 nt, Artificial Sequence
  Description of Artificial Sequence: Synthetic oligonucleotide
  Antisense strand to SEQ ID NO: 1483972
auucacauacguuuguuua

SEQ ID NO: 1483974 - RNA, 19 nt, Artificial Sequence
  Description of Artificial Sequence: Synthetic oligonucleotide
  Sense strand starting at position 153 of SEQ ID NO: 1244377
gugauauucugggcacccu

SEQ ID NO: 1483975 - RNA, 19 nt, Artificial Sequence
  Description of Artificial Sequence: Synthetic oligonucleotide
  Antisense strand to SEQ ID NO: 1483974
agggugcccagaauaucac

SEQ ID NO: 1483976 - RNA, 19 nt, Artificial Sequence
  Description of Artificial Sequence: Synthetic oligonucleotide
  Sense strand starting at position 171 of SEQ ID NO: 1244377
ugaagaugcuauccugaua

SEQ ID NO: 1483977 - RNA, 19 nt, Artificial Sequence
  Description of Artificial Sequence: Synthetic oligonucleotide
  Antisense strand to SEQ ID NO: 1483976
uaucaggauagcaucuuca

SEQ ID NO: 1483978 - RNA, 19 nt, Artificial Sequence
  Description of Artificial Sequence: Synthetic oligonucleotide
  Sense strand starting at position 390 of SEQ ID NO: 1244377
caagaagagggcuguuaug

SEQ ID NO: 1483979 - RNA, 19 nt, Artificial Sequence
  Description of Artificial Sequence: Synthetic oligonucleotide
  Antisense strand to SEQ ID NO: 1483978
cauaacagcccucuucuug

SEQ ID NO: 1483980 - RNA, 19 nt, Artificial Sequence
  Description of Artificial Sequence: Synthetic oligonucleotide
  Sense strand starting at position 399 of SEQ ID NO: 1244377
ggcuguuaugaaggguuaa

SEQ ID NO: 1483981 - RNA, 19 nt, Artificial Sequence
  Description of Artificial Sequence: Synthetic oligonucleotide
  Antisense strand to SEQ ID NO: 1483980
uuaacccuucauaacagcc

SEQ ID NO: 1483982 - RNA, 19 nt, Artificial Sequence
  Description of Artificial Sequence: Synthetic oligonucleotide
  Sense strand starting at position 400 of SEQ ID NO: 1244377
gcuguuaugaaggguuaau

SEQ ID NO: 1483983 - RNA, 19 nt, Artificial Sequence
  Description of Artificial Sequence: Synthetic oligonucleotide
  Antisense strand to SEQ ID NO: 1483982
auuaacccuucauaacagc

SEQ ID NO: 1483984 - RNA, 19 nt, Artificial Sequence
  Description of Artificial Sequence: Synthetic oligonucleotide
  Sense strand starting at position 506 of SEQ ID NO: 1244377
uguauacuggcugauguuu

SEQ ID NO: 1483985 - RNA, 19 nt, Artificial Sequence
  Description of Artificial Sequence: Synthetic oligonucleotide
  Antisense strand to SEQ ID NO: 1483984
aaacaucagccaguauaca

SEQ ID NO: 1483986 - RNA, 19 nt, Artificial Sequence
  Description of Artificial Sequence: Synthetic oligonucleotide
  Sense strand starting at position 557 of SEQ ID NO: 1244377
ggcagaugaacauguuuag

SEQ ID NO: 1483987 - RNA, 19 nt, Artificial Sequence
  Description of Artificial Sequence: Synthetic oligonucleotide
  Antisense strand to SEQ ID NO: 1483986
cuaaacauguucaucugcc

SEQ ID NO: 1483988 - RNA, 19 nt, Artificial Sequence
  Description of Artificial Sequence: Synthetic oligonucleotide
  Sense strand starting at position 852 of SEQ ID NO: 1244377
ccagucucuccacaaguca

SEQ ID NO: 1483989 - RNA, 19 nt, Artificial Sequence
  Description of Artificial Sequence: Synthetic oligonucleotide
  Antisense strand to SEQ ID NO: 1483988
ugacuuguggagagacugg

SEQ ID NO: 1483990 - RNA, 19 nt, Artificial Sequence
  Description of Artificial Sequence: Synthetic oligonucleotide
  Sense strand starting at position 962 of SEQ ID NO: 1244377
gaaugagugucauccaaga

SEQ ID NO: 1483991 - RNA, 19 nt, Artificial Sequence
  Description of Artificial Sequence: Synthetic oligonucleotide
  Antisense strand to SEQ ID NO: 1483990
ucuuggaugacacucauuc

SEQ ID NO: 1483992 - RNA, 19 nt, Artificial Sequence
  Description of Artificial Sequence: Synthetic oligonucleotide
  Sense strand starting at position 967 of SEQ ID NO: 1244377
agugucauccaagauuauu

SEQ ID NO: 1483993 - RNA, 19 nt, Artificial Sequence
  Description of Artificial Sequence: Synthetic oligonucleotide
  Antisense strand to SEQ ID NO: 1483992
aauaaucuuggaugacacu

SEQ ID NO: 1483994 - RNA, 19 nt, Artificial Sequence
  Description of Artificial Sequence: Synthetic oligonucleotide
  Sense strand starting at position 1023 of SEQ ID NO: 1244377
ggagaacacuucuuucuca

SEQ ID NO: 1483995 - RNA, 19 nt, Artificial Sequence
  Description of Artificial Sequence: Synthetic oligonucleotide
  Antisense strand to SEQ ID NO: 1483994
ugagaaagaaguguucucc

SEQ ID NO: 1483996 - RNA, 19 nt, Artificial Sequence
  Description of Artificial Sequence: Synthetic oligonucleotide
  Sense strand starting at position 1032 of SEQ ID NO: 1244377
uucuuucucagggagcaga

SEQ ID NO: 1483997 - RNA, 19 nt, Artificial Sequence
  Description of Artificial Sequence: Synthetic oligonucleotide
  Antisense strand to SEQ ID NO: 1483996
ucugcucccugagaaagaa

SEQ ID NO: 1483998 - RNA, 19 nt, Artificial Sequence
  Description of Artificial Sequence: Synthetic oligonucleotide
  Sense strand starting at position 1113 of SEQ ID NO: 1244377
gggugaaguggcaguaguu

SEQ ID NO: 1483999 - RNA, 19 nt, Artificial Sequence
  Description of Artificial Sequence: Synthetic oligonucleotide
  Antisense strand to SEQ ID NO: 1483998
aacuacugccacuucaccc

SEQ ID NO: 1484000 - RNA, 19 nt, Artificial Sequence
  Description of Artificial Sequence: Synthetic oligonucleotide
  Sense strand starting at position 1177 of SEQ ID NO: 1244377
gggaguaguacccaccuga

SEQ ID NO: 1484001 - RNA, 19 nt, Artificial Sequence
  Description of Artificial Sequence: Synthetic oligonucleotide
  Antisense strand to SEQ ID NO: 1484000
ucagguggguacuacuccc

SEQ ID NO: 1484002 - RNA, 19 nt, Artificial Sequence
  Description of Artificial Sequence: Synthetic oligonucleotide
  Sense strand starting at position 1275 of SEQ ID NO: 1244377
acagguccuccugagugua

SEQ ID NO: 1484003 - RNA, 19 nt, Artificial Sequence
  Description of Artificial Sequence: Synthetic oligonucleotide
  Antisense strand to SEQ ID NO: 1484002
uacacucaggaggaccugu

SEQ ID NO: 1484004 - RNA, 19 nt, Artificial Sequence
  Description of Artificial Sequence: Synthetic oligonucleotide
  Sense strand starting at position 1278 of SEQ ID NO: 1244377
gguccuccugaguguauuu

SEQ ID NO: 1484005 - RNA, 19 nt, Artificial Sequence
  Description of Artificial Sequence: Synthetic oligonucleotide
  Antisense strand to SEQ ID NO: 1484004
aaauacacucaggaggacc

SEQ ID NO: 1484006 - RNA, 19 nt, Artificial Sequence
  Description of Artificial Sequence: Synthetic oligonucleotide
  Sense strand starting at position 1287 of SEQ ID NO: 1244377
gaguguauuugacaccaag

SEQ ID NO: 1484007 - RNA, 19 nt, Artificial Sequence
  Description of Artificial Sequence: Synthetic oligonucleotide
  Antisense strand to SEQ ID NO: 1484006
cuuggugucaaauacacuc

SEQ ID NO: 1484008 - RNA, 19 nt, Artificial Sequence
  Description of Artificial Sequence: Synthetic oligonucleotide
  Sense strand starting at position 1369 of SEQ ID NO: 1244377
ggagucagcaucuguccaa

SEQ ID NO: 1484009 - RNA, 19 nt, Artificial Sequence
  Description of Artificial Sequence: Synthetic oligonucleotide
  Antisense strand to SEQ ID NO: 1484008
uuggacagaugcugacucc

SEQ ID NO: 1484010 - RNA, 19 nt, Artificial Sequence
  Description of Artificial Sequence: Synthetic oligonucleotide
  Sense strand starting at position 1382 of SEQ ID NO: 1244377
guccaaugagcccaaguaa

SEQ ID NO: 1484011 - RNA, 19 nt, Artificial Sequence
  Description of Artificial Sequence: Synthetic oligonucleotide
  Antisense strand to SEQ ID NO: 1484010
uuacuugggcucauuggac

SEQ ID NO: 1484012 - RNA, 19 nt, Artificial Sequence
  Description of Artificial Sequence: Synthetic oligonucleotide
  Sense strand starting at position 2472 of SEQ ID NO: 1244377
uuugguuucgcagcuguca

SEQ ID NO: 1484013 - RNA, 19 nt, Artificial Sequence
  Description of Artificial Sequence: Synthetic oligonucleotide
  Antisense strand to SEQ ID NO: 1484012
ugacagcugcgaaaccaaa

SEQ ID NO: 1484014 - RNA, 19 nt, Artificial Sequence
  Description of Artificial Sequence: Synthetic oligonucleotide
  Sense strand starting at position 2473 of SEQ ID NO: 1244377
uugguuucgcagcugucau

SEQ ID NO: 1484015 - RNA, 19 nt, Artificial Sequence
  Description of Artificial Sequence: Synthetic oligonucleotide
  Antisense strand to SEQ ID NO: 1484014
augacagcugcgaaaccaa

SEQ ID NO: 1484016 - RNA, 19 nt, Artificial Sequence
  Description of Artificial Sequence: Synthetic oligonucleotide
  Sense strand starting at position 2682 of SEQ ID NO: 1244377
gcuggcaguccugagugaa

SEQ ID NO: 1484017 - RNA, 19 nt, Artificial Sequence
  Description of Artificial Sequence: Synthetic oligonucleotide
  Antisense strand to SEQ ID NO: 1484016
uucacucaggacugccagc

SEQ ID NO: 1484018 - RNA, 19 nt, Artificial Sequence
  Description of Artificial Sequence: Synthetic oligonucleotide
  Sense strand starting at position 2685 of SEQ ID NO: 1244377
ggcaguccugagugaagaa

SEQ ID NO: 1484019 - RNA, 19 nt, Artificial Sequence
  Description of Artificial Sequence: Synthetic oligonucleotide
  Antisense strand to SEQ ID NO: 1484018
uucuucacucaggacugcc

SEQ ID NO: 1484020 - RNA, 19 nt, Artificial Sequence
  Description of Artificial Sequence: Synthetic oligonucleotide
  Sense strand starting at position 2962 of SEQ ID NO: 1244377
cgggccugagcgcuuuaau

SEQ ID NO: 1484021 - RNA, 19 nt, Artificial Sequence
  Description of Artificial Sequence: Synthetic oligonucleotide
  Antisense strand to SEQ ID NO: 1484020
auuaaagcgcucaggcccg

SEQ ID NO: 1484022 - RNA, 19 nt, Artificial Sequence
  Description of Artificial Sequence: Synthetic oligonucleotide
  Sense strand starting at position 2988 of SEQ ID NO: 1244377
gggcuaauguccucaccca

SEQ ID NO: 1484023 - RNA, 19 nt, Artificial Sequence
  Description of Artificial Sequence: Synthetic oligonucleotide
  Antisense strand to SEQ ID NO: 1484022
ugggugaggacauuagccc

SEQ ID NO: 1484024 - RNA, 19 nt, Artificial Sequence
  Description of Artificial Sequence: Synthetic oligonucleotide
  Sense strand starting at position 2989 of SEQ ID NO: 1244377
ggcuaauguccucacccau

SEQ ID NO: 1484025 - RNA, 19 nt, Artificial Sequence
  Description of Artificial Sequence: Synthetic oligonucleotide
  Antisense strand to SEQ ID NO: 1484024
augggugaggacauuagcc

SEQ ID NO: 1484026 - RNA, 19 nt, Artificial Sequence
  Description of Artificial Sequence: Synthetic oligonucleotide
  Sense strand starting at position 3002 of SEQ ID NO: 1244377
acccaucuuuguuuauaga

SEQ ID NO: 1484027 - RNA, 19 nt, Artificial Sequence
  Description of Artificial Sequence: Synthetic oligonucleotide
  Antisense strand to SEQ ID NO: 1484026
ucuauaaacaaagaugggu

SEQ ID NO: 1484028 - RNA, 19 nt, Artificial Sequence
  Description of Artificial Sequence: Synthetic oligonucleotide
  Sense strand starting at position 3010 of SEQ ID NO: 1244377
uuguuuauagaacguugaa

SEQ ID NO: 1484029 - RNA, 19 nt, Artificial Sequence
  Description of Artificial Sequence: Synthetic oligonucleotide
  Antisense strand to SEQ ID NO: 1484028
uucaacguucuauaaacaa

SEQ ID NO: 1484030 - RNA, 19 nt, Artificial Sequence
  Description of Artificial Sequence: Synthetic oligonucleotide
  Sense strand starting at position 3013 of SEQ ID NO: 1244377
uuuauagaacguugaaacu

SEQ ID NO: 1484031 - RNA, 19 nt, Artificial Sequence
  Description of Artificial Sequence: Synthetic oligonucleotide
  Antisense strand to SEQ ID NO: 1484030
aguuucaacguucuauaaa

SEQ ID NO: 1484032 - RNA, 19 nt, Artificial Sequence
  Description of Artificial Sequence: Synthetic oligonucleotide
  Sense strand starting at position 3024 of SEQ ID NO: 1244377
uugaaacuccaguacuguu

SEQ ID NO: 1484033 - RNA, 19 nt, Artificial Sequence
  Description of Artificial Sequence: Synthetic oligonucleotide
  Antisense strand to SEQ ID NO: 1484032
aacaguacuggaguuucaa

SEQ ID NO: 1484034 - RNA, 19 nt, Artificial Sequence
  Description of Artificial Sequence: Synthetic oligonucleotide
  Sense strand starting at position 3042 of SEQ ID NO: 1244377
ugguaaguuccaggaagac

SEQ ID NO: 1484035 - RNA, 19 nt, Artificial Sequence
  Description of Artificial Sequence: Synthetic oligonucleotide
  Antisense strand to SEQ ID NO: 1484034
gucuuccuggaacuuacca

SEQ ID NO: 1484036 - RNA, 19 nt, Artificial Sequence
  Description of Artificial Sequence: Synthetic oligonucleotide
  Sense strand starting at position 3062 of SEQ ID NO: 1244377
ggaacuuugcacuacuuga

SEQ ID NO: 1484037 - RNA, 19 nt, Artificial Sequence
  Description of Artificial Sequence: Synthetic oligonucleotide
  Antisense strand to SEQ ID NO: 1484036
ucaaguagugcaaaguucc

SEQ ID NO: 1484038 - RNA, 19 nt, Artificial Sequence
  Description of Artificial Sequence: Synthetic oligonucleotide
  Sense strand starting at position 3187 of SEQ ID NO: 1244377
uuacuauaguguuugguga

SEQ ID NO: 1484039 - RNA, 19 nt, Artificial Sequence
  Description of Artificial Sequence: Synthetic oligonucleotide
  Antisense strand to SEQ ID NO: 1484038
ucaccaaacacuauaguaa

SEQ ID NO: 1484040 - RNA, 19 nt, Artificial Sequence
  Description of Artificial Sequence: Synthetic oligonucleotide
  Sense strand starting at position 3188 of SEQ ID NO: 1244377
uacuauaguguuuggugau

SEQ ID NO: 1484041 - RNA, 19 nt, Artificial Sequence
  Description of Artificial Sequence: Synthetic oligonucleotide
  Antisense strand to SEQ ID NO: 1484040
aucaccaaacacuauagua

SEQ ID NO: 1484042 - RNA, 19 nt, Artificial Sequence
  Description of Artificial Sequence: Synthetic oligonucleotide
  Sense strand starting at position 3194 of SEQ ID NO: 1244377
aguguuuggugauuacaau

SEQ ID NO: 1484043 - RNA, 19 nt, Artificial Sequence
  Description of Artificial Sequence: Synthetic oligonucleotide
  Antisense strand to SEQ ID NO: 1484042
auuguaaucaccaaacacu

SEQ ID NO: 1484044 - RNA, 19 nt, Artificial Sequence
  Description of Artificial Sequence: Synthetic oligonucleotide
  Sense strand starting at position 3195 of SEQ ID NO: 1244377
guguuuggugauuacaaug

SEQ ID NO: 1484045 - RNA, 19 nt, Artificial Sequence
  Description of Artificial Sequence: Synthetic oligonucleotide
  Antisense strand to SEQ ID NO: 1484044
cauuguaaucaccaaacac

SEQ ID NO: 1484046 - RNA, 19 nt, Artificial Sequence
  Description of Artificial Sequence: Synthetic oligonucleotide
  Sense strand starting at position 3241 of SEQ ID NO: 1244377
acaggcuuucuacagugua

SEQ ID NO: 1484047 - RNA, 19 nt, Artificial Sequence
  Description of Artificial Sequence: Synthetic oligonucleotide
  Antisense strand to SEQ ID NO: 1484046
uacacuguagaaagccugu

SEQ ID NO: 1484048 - RNA, 19 nt, Artificial Sequence
  Description of Artificial Sequence: Synthetic oligonucleotide
  Sense strand starting at position 3244 of SEQ ID NO: 1244377
ggcuuucuacaguguagag

SEQ ID NO: 1484049 - RNA, 19 nt, Artificial Sequence
  Description of Artificial Sequence: Synthetic oligonucleotide
  Antisense strand to SEQ ID NO: 1484048
cucuacacuguagaaagcc

SEQ ID NO: 1484050 - RNA, 19 nt, Artificial Sequence
  Description of Artificial Sequence: Synthetic oligonucleotide
  Sense strand starting at position 3706 of SEQ ID NO: 1244377
uuuggacaguccuuuaaua

SEQ ID NO: 1484051 - RNA, 19 nt, Artificial Sequence
  Description of Artificial Sequence: Synthetic oligonucleotide
  Antisense strand to SEQ ID NO: 1484050
uauuaaaggacuguccaaa

SEQ ID NO: 1484052 - RNA, 19 nt, Artificial Sequence
  Description of Artificial Sequence: Synthetic oligonucleotide
  Sense strand starting at position 3708 of SEQ ID NO: 1244377
uggacaguccuuuaauauu

SEQ ID NO: 1484053 - RNA, 19 nt, Artificial Sequence
  Description of Artificial Sequence: Synthetic oligonucleotide
  Antisense strand to SEQ ID NO: 1484052
aauauuaaaggacugucca

SEQ ID NO: 1484054 - RNA, 19 nt, Artificial Sequence
  Description of Artificial Sequence: Synthetic oligonucleotide
  Sense strand starting at position 47 of SEQ ID NO: 1244378
gcuggauguagccagaaug

SEQ ID NO: 1484055 - RNA, 19 nt, Artificial Sequence
  Description of Artificial Sequence: Synthetic oligonucleotide
  Antisense strand to SEQ ID NO: 1484054
cauucuggcuacauccagc

SEQ ID NO: 1484056 - RNA, 19 nt, Artificial Sequence
  Description of Artificial Sequence: Synthetic oligonucleotide
  Sense strand starting at position 155 of SEQ ID NO: 1244378
ggcagugauguagagggua

SEQ ID NO: 1484057 - RNA, 19 nt, Artificial Sequence
  Description of Artificial Sequence: Synthetic oligonucleotide
  Antisense strand to SEQ ID NO: 1484056
uacccucuacaucacugcc

SEQ ID NO: 1484058 - RNA, 19 nt, Artificial Sequence
  Description of Artificial Sequence: Synthetic oligonucleotide
  Sense strand starting at position 157 of SEQ ID NO: 1244378
cagugauguagaggguaac

SEQ ID NO: 1484059 - RNA, 19 nt, Artificial Sequence
  Description of Artificial Sequence: Synthetic oligonucleotide
  Antisense strand to SEQ ID NO: 1484058
guuacccucuacaucacug

SEQ ID NO: 1484060 - RNA, 19 nt, Artificial Sequence
  Description of Artificial Sequence: Synthetic oligonucleotide
  Sense strand starting at position 158 of SEQ ID NO: 1244378
agugauguagaggguaaca

SEQ ID NO: 1484061 - RNA, 19 nt, Artificial Sequence
  Description of Artificial Sequence: Synthetic oligonucleotide
  Antisense strand to SEQ ID NO: 1484060
uguuacccucuacaucacu

SEQ ID NO: 1484062 - RNA, 19 nt, Artificial Sequence
  Description of Artificial Sequence: Synthetic oligonucleotide
  Sense strand starting at position 160 of SEQ ID NO: 1244378
ugauguagaggguaacagu

SEQ ID NO: 1484063 - RNA, 19 nt, Artificial Sequence
  Description of Artificial Sequence: Synthetic oligonucleotide
  Antisense strand to SEQ ID NO: 1484062
acuguuacccucuacauca

SEQ ID NO: 1484064 - RNA, 19 nt, Artificial Sequence
  Description of Artificial Sequence: Synthetic oligonucleotide
  Sense strand starting at position 323 of SEQ ID NO: 1244378
ugccauggcgauuaggaua

SEQ ID NO: 1484065 - RNA, 19 nt, Artificial Sequence
  Description of Artificial Sequence: Synthetic oligonucleotide
  Antisense strand to SEQ ID NO: 1484064
uauccuaaucgccauggca

SEQ ID NO: 1484066 - RNA, 19 nt, Artificial Sequence
  Description of Artificial Sequence: Synthetic oligonucleotide
  Sense strand starting at position 330 of SEQ ID NO: 1244378
gcgauuaggauagguacaa

SEQ ID NO: 1484067 - RNA, 19 nt, Artificial Sequence
  Description of Artificial Sequence: Synthetic oligonucleotide
  Antisense strand to SEQ ID NO: 1484066
uuguaccuauccuaaucgc

SEQ ID NO: 1484068 - RNA, 19 nt, Artificial Sequence
  Description of Artificial Sequence: Synthetic oligonucleotide
  Sense strand starting at position 331 of SEQ ID NO: 1244378
cgauuaggauagguacaau

SEQ ID NO: 1484069 - RNA, 19 nt, Artificial Sequence
  Description of Artificial Sequence: Synthetic oligonucleotide
  Antisense strand to SEQ ID NO: 1484068
auuguaccuauccuaaucg

SEQ ID NO: 1484070 - RNA, 19 nt, Artificial Sequence
  Description of Artificial Sequence: Synthetic oligonucleotide
  Sense strand starting at position 352 of SEQ ID NO: 1244378
gaaguagaagguuaguuau

SEQ ID NO: 1484071 - RNA, 19 nt, Artificial Sequence
  Description of Artificial Sequence: Synthetic oligonucleotide
  Antisense strand to SEQ ID NO: 1484070
auaacuaaccuucuacuuc

SEQ ID NO: 1484072 - RNA, 19 nt, Artificial Sequence
  Description of Artificial Sequence: Synthetic oligonucleotide
  Sense strand starting at position 355 of SEQ ID NO: 1244378
guagaagguuaguuaugga

SEQ ID NO: 1484073 - RNA, 19 nt, Artificial Sequence
  Description of Artificial Sequence: Synthetic oligonucleotide
  Antisense strand to SEQ ID NO: 1484072
uccauaacuaaccuucuac

SEQ ID NO: 1484074 - RNA, 19 nt, Artificial Sequence
  Description of Artificial Sequence: Synthetic oligonucleotide
  Sense strand starting at position 360 of SEQ ID NO: 1244378
agguuaguuauggacaugu

SEQ ID NO: 1484075 - RNA, 19 nt, Artificial Sequence
  Description of Artificial Sequence: Synthetic oligonucleotide
  Antisense strand to SEQ ID NO: 1484074
acauguccauaacuaaccu

SEQ ID NO: 1484076 - RNA, 19 nt, Artificial Sequence
  Description of Artificial Sequence: Synthetic oligonucleotide
  Sense strand starting at position 369 of SEQ ID NO: 1244378
auggacauguuguuaagaa

SEQ ID NO: 1484077 - RNA, 19 nt, Artificial Sequence
  Description of Artificial Sequence: Synthetic oligonucleotide
  Antisense strand to SEQ ID NO: 1484076
uucuuaacaacauguccau

SEQ ID NO: 1484078 - RNA, 19 nt, Artificial Sequence
  Description of Artificial Sequence: Synthetic oligonucleotide
  Sense strand starting at position 2034 of SEQ ID NO: 1244378
ugaaaucucccagguguaa

SEQ ID NO: 1484079 - RNA, 19 nt, Artificial Sequence
  Description of Artificial Sequence: Synthetic oligonucleotide
  Antisense strand to SEQ ID NO: 1484078
uuacaccugggagauuuca

SEQ ID NO: 1484080 - RNA, 19 nt, Artificial Sequence
  Description of Artificial Sequence: Synthetic oligonucleotide
  Sense strand starting at position 2127 of SEQ ID NO: 1244378
guuagauaguccuugaaau

SEQ ID NO: 1484081 - RNA, 19 nt, Artificial Sequence
  Description of Artificial Sequence: Synthetic oligonucleotide
  Antisense strand to SEQ ID NO: 1484080
auuucaaggacuaucuaac

SEQ ID NO: 1484082 - RNA, 19 nt, Artificial Sequence
  Description of Artificial Sequence: Synthetic oligonucleotide
  Sense strand starting at position 2128 of SEQ ID NO: 1244378
uuagauaguccuugaaaua

SEQ ID NO: 1484083 - RNA, 19 nt, Artificial Sequence
  Description of Artificial Sequence: Synthetic oligonucleotide
  Antisense strand to SEQ ID NO: 1484082
uauuucaaggacuaucuaa

SEQ ID NO: 1484084 - RNA, 19 nt, Artificial Sequence
  Description of Artificial Sequence: Synthetic oligonucleotide
  Sense strand starting at position 2250 of SEQ ID NO: 1244378
ucauaaggguuauuguaga

SEQ ID NO: 1484085 - RNA, 19 nt, Artificial Sequence
  Description of Artificial Sequence: Synthetic oligonucleotide
  Antisense strand to SEQ ID NO: 1484084
ucuacaauaacccuuauga

SEQ ID NO: 1484086 - RNA, 19 nt, Artificial Sequence
  Description of Artificial Sequence: Synthetic oligonucleotide
  Sense strand starting at position 2507 of SEQ ID NO: 1244378
ccuaguguucuggcgagca

SEQ ID NO: 1484087 - RNA, 19 nt, Artificial Sequence
  Description of Artificial Sequence: Synthetic oligonucleotide
  Antisense strand to SEQ ID NO: 1484086
ugcucgccagaacacuagg

SEQ ID NO: 1484088 - RNA, 19 nt, Artificial Sequence
  Description of Artificial Sequence: Synthetic oligonucleotide
  Sense strand starting at position 2511 of SEQ ID NO: 1244378
guguucuggcgagcaguuu

SEQ ID NO: 1484089 - RNA, 19 nt, Artificial Sequence
  Description of Artificial Sequence: Synthetic oligonucleotide
  Antisense strand to SEQ ID NO: 1484088
aaacugcucgccagaacac

SEQ ID NO: 1484090 - RNA, 19 nt, Artificial Sequence
  Description of Artificial Sequence: Synthetic oligonucleotide
  Sense strand starting at position 2547 of SEQ ID NO: 1244378
aaguuuagggcugagcaua

SEQ ID NO: 1484091 - RNA, 19 nt, Artificial Sequence
  Description of Artificial Sequence: Synthetic oligonucleotide
  Antisense strand to SEQ ID NO: 1484090
uaugcucagcccuaaacuu

SEQ ID NO: 1484092 - RNA, 19 nt, Artificial Sequence
  Description of Artificial Sequence: Synthetic oligonucleotide
  Sense strand starting at position 2659 of SEQ ID NO: 1244378
ucuacaacuuaggugaaau

SEQ ID NO: 1484093 - RNA, 19 nt, Artificial Sequence
  Description of Artificial Sequence: Synthetic oligonucleotide
  Antisense strand to SEQ ID NO: 1484092
auuucaccuaaguuguaga

SEQ ID NO: 1484094 - RNA, 19 nt, Artificial Sequence
  Description of Artificial Sequence: Synthetic oligonucleotide
  Sense strand starting at position 2677 of SEQ ID NO: 1244378
uuuagcuuuauugagggau

SEQ ID NO: 1484095 - RNA, 19 nt, Artificial Sequence
  Description of Artificial Sequence: Synthetic oligonucleotide
  Antisense strand to SEQ ID NO: 1484094
aucccucaauaaagcuaaa

SEQ ID NO: 1484096 - RNA, 19 nt, Artificial Sequence
  Description of Artificial Sequence: Synthetic oligonucleotide
  Sense strand starting at position 2875 of SEQ ID NO: 1244378
gcacuaaugcgugcuugau

SEQ ID NO: 1484097 - RNA, 19 nt, Artificial Sequence
  Description of Artificial Sequence: Synthetic oligonucleotide
  Antisense strand to SEQ ID NO: 1484096
aucaagcacgcauuagugc

SEQ ID NO: 1484098 - RNA, 19 nt, Artificial Sequence
  Description of Artificial Sequence: Synthetic oligonucleotide
  Sense strand starting at position 2944 of SEQ ID NO: 1244378
cgaugcuugcuuguguaau

SEQ ID NO: 1484099 - RNA, 19 nt, Artificial Sequence
  Description of Artificial Sequence: Synthetic oligonucleotide
  Antisense strand to SEQ ID NO: 1484098
auuacacaagcaagcaucg

SEQ ID NO: 1484100 - RNA, 19 nt, Artificial Sequence
  Description of Artificial Sequence: Synthetic oligonucleotide
  Sense strand starting at position 3045 of SEQ ID NO: 1244378
cuugcuuugggucauuaag

SEQ ID NO: 1484101 - RNA, 19 nt, Artificial Sequence
  Description of Artificial Sequence: Synthetic oligonucleotide
  Antisense strand to SEQ ID NO: 1484100
cuuaaugacccaaagcaag

SEQ ID NO: 1484102 - RNA, 19 nt, Artificial Sequence
  Description of Artificial Sequence: Synthetic oligonucleotide
  Sense strand starting at position 3053 of SEQ ID NO: 1244378
gggucauuaagcuacauag

SEQ ID NO: 1484103 - RNA, 19 nt, Artificial Sequence
  Description of Artificial Sequence: Synthetic oligonucleotide
  Antisense strand to SEQ ID NO: 1484102
cuauguagcuuaaugaccc

SEQ ID NO: 1484104 - RNA, 19 nt, Artificial Sequence
  Description of Artificial Sequence: Synthetic oligonucleotide
  Sense strand starting at position 3067 of SEQ ID NO: 1244378
cauagacugugauugcaca

SEQ ID NO: 1484105 - RNA, 19 nt, Artificial Sequence
  Description of Artificial Sequence: Synthetic oligonucleotide
  Antisense strand to SEQ ID NO: 1484104
ugugcaaucacagucuaug

SEQ ID NO: 1484106 - RNA, 19 nt, Artificial Sequence
  Description of Artificial Sequence: Synthetic oligonucleotide
  Sense strand starting at position 3326 of SEQ ID NO: 1244378
ucugguugaguuggauuaa

SEQ ID NO: 1484107 - RNA, 19 nt, Artificial Sequence
  Description of Artificial Sequence: Synthetic oligonucleotide
  Antisense strand to SEQ ID NO: 1484106
uuaauccaacucaaccaga

SEQ ID NO: 1484108 - RNA, 19 nt, Artificial Sequence
  Description of Artificial Sequence: Synthetic oligonucleotide
  Sense strand starting at position 3360 of SEQ ID NO: 1244378
ggguuuggcaaagaugucu

SEQ ID NO: 1484109 - RNA, 19 nt, Artificial Sequence
  Description of Artificial Sequence: Synthetic oligonucleotide
  Antisense strand to SEQ ID NO: 1484108
agacaucuuugccaaaccc

SEQ ID NO: 1484110 - RNA, 19 nt, Artificial Sequence
  Description of Artificial Sequence: Synthetic oligonucleotide
  Sense strand starting at position 3429 of SEQ ID NO: 1244378
uauuguagaguugauguga

SEQ ID NO: 1484111 - RNA, 19 nt, Artificial Sequence
  Description of Artificial Sequence: Synthetic oligonucleotide
  Antisense strand to SEQ ID NO: 1484110
ucacaucaacucuacaaua

SEQ ID NO: 1484112 - RNA, 19 nt, Artificial Sequence
  Description of Artificial Sequence: Synthetic oligonucleotide
  Sense strand starting at position 3457 of SEQ ID NO: 1244378
guggguguguuuacugauu

SEQ ID NO: 1484113 - RNA, 19 nt, Artificial Sequence
  Description of Artificial Sequence: Synthetic oligonucleotide
  Antisense strand to SEQ ID NO: 1484112
aaucaguaaacacacccac

SEQ ID NO: 1484114 - RNA, 19 nt, Artificial Sequence
  Description of Artificial Sequence: Synthetic oligonucleotide
  Sense strand starting at position 3529 of SEQ ID NO: 1244378
ugggauauugaauguaggu

SEQ ID NO: 1484115 - RNA, 19 nt, Artificial Sequence
  Description of Artificial Sequence: Synthetic oligonucleotide
  Antisense strand to SEQ ID NO: 1484114
accuacauucaauauccca

SEQ ID NO: 1484116 - RNA, 19 nt, Artificial Sequence
  Description of Artificial Sequence: Synthetic oligonucleotide
  Sense strand starting at position 3622 of SEQ ID NO: 1244378
caaugcuaucgcgugcaca

SEQ ID NO: 1484117 - RNA, 19 nt, Artificial Sequence
  Description of Artificial Sequence: Synthetic oligonucleotide
  Antisense strand to SEQ ID NO: 1484116
ugugcacgcgauagcauug

SEQ ID NO: 1484118 - RNA, 19 nt, Artificial Sequence
  Description of Artificial Sequence: Synthetic oligonucleotide
  Sense strand starting at position 3777 of SEQ ID NO: 1244378
caagaugccggauacaguu

SEQ ID NO: 1484119 - RNA, 19 nt, Artificial Sequence
  Description of Artificial Sequence: Synthetic oligonucleotide
  Antisense strand to SEQ ID NO: 1484118
aacuguauccggcaucuug

SEQ ID NO: 1484120 - RNA, 19 nt, Artificial Sequence
  Description of Artificial Sequence: Synthetic oligonucleotide
  Sense strand starting at position 3814 of SEQ ID NO: 1244378
guauuauggaccuggauca

SEQ ID NO: 1484121 - RNA, 19 nt, Artificial Sequence
  Description of Artificial Sequence: Synthetic oligonucleotide
  Antisense strand to SEQ ID NO: 1484120
ugauccagguccauaauac

SEQ ID NO: 1484122 - RNA, 19 nt, Artificial Sequence
  Description of Artificial Sequence: Synthetic oligonucleotide
  Sense strand starting at position 3841 of SEQ ID NO: 1244378
agcacucuucugcaggaua

SEQ ID NO: 1484123 - RNA, 19 nt, Artificial Sequence
  Description of Artificial Sequence: Synthetic oligonucleotide
  Antisense strand to SEQ ID NO: 1484122
uauccugcagaagagugcu

SEQ ID NO: 1484124 - RNA, 19 nt, Artificial Sequence
  Description of Artificial Sequence: Synthetic oligonucleotide
  Sense strand starting at position 3922 of SEQ ID NO: 1244378
ggacuuguuuaacuggaau

SEQ ID NO: 1484125 - RNA, 19 nt, Artificial Sequence
  Description of Artificial Sequence: Synthetic oligonucleotide
  Antisense strand to SEQ ID NO: 1484124
auuccaguuaaacaagucc

SEQ ID NO: 1484126 - RNA, 19 nt, Artificial Sequence
  Description of Artificial Sequence: Synthetic oligonucleotide
  Sense strand starting at position 3947 of SEQ ID NO: 1244378
ucuaccaugagcgauuaga

SEQ ID NO: 1484127 - RNA, 19 nt, Artificial Sequence
  Description of Artificial Sequence: Synthetic oligonucleotide
  Antisense strand to SEQ ID NO: 1484126
ucuaaucgcucaugguaga

SEQ ID NO: 1484128 - RNA, 19 nt, Artificial Sequence
  Description of Artificial Sequence: Synthetic oligonucleotide
  Sense strand starting at position 3956 of SEQ ID NO: 1244378
agcgauuagauguacuaug

SEQ ID NO: 1484129 - RNA, 19 nt, Artificial Sequence
  Description of Artificial Sequence: Synthetic oligonucleotide
  Antisense strand to SEQ ID NO: 1484128
cauaguacaucuaaucgcu

SEQ ID NO: 1484130 - RNA, 19 nt, Artificial Sequence
  Description of Artificial Sequence: Synthetic oligonucleotide
  Sense strand starting at position 3966 of SEQ ID NO: 1244378
uguacuauguacucaagga

SEQ ID NO: 1484131 - RNA, 19 nt, Artificial Sequence
  Description of Artificial Sequence: Synthetic oligonucleotide
  Antisense strand to SEQ ID NO: 1484130
uccuugaguacauaguaca

SEQ ID NO: 1484132 - RNA, 19 nt, Artificial Sequence
  Description of Artificial Sequence: Synthetic oligonucleotide
  Sense strand starting at position 3970 of SEQ ID NO: 1244378
cuauguacucaaggauaua

SEQ ID NO: 1484133 - RNA, 19 nt, Artificial Sequence
  Description of Artificial Sequence: Synthetic oligonucleotide
  Antisense strand to SEQ ID NO: 1484132
uauauccuugaguacauag

SEQ ID NO: 1484134 - RNA, 19 nt, Artificial Sequence
  Description of Artificial Sequence: Synthetic oligonucleotide
  Sense strand starting at position 86 of SEQ ID NO: 1244379
agccgaaagccuuguagaa

SEQ ID NO: 1484135 - RNA, 19 nt, Artificial Sequence
  Description of Artificial Sequence: Synthetic oligonucleotide
  Antisense strand to SEQ ID NO: 1484134
uucuacaaggcuuucggcu

SEQ ID NO: 1484136 - RNA, 19 nt, Artificial Sequence
  Description of Artificial Sequence: Synthetic oligonucleotide
  Sense strand starting at position 90 of SEQ ID NO: 1244379
gaaagccuuguagaaaguu

SEQ ID NO: 1484137 - RNA, 19 nt, Artificial Sequence
  Description of Artificial Sequence: Synthetic oligonucleotide
  Antisense strand to SEQ ID NO: 1484136
aacuuucuacaaggcuuuc

SEQ ID NO: 1484138 - RNA, 19 nt, Artificial Sequence
  Description of Artificial Sequence: Synthetic oligonucleotide
  Sense strand starting at position 98 of SEQ ID NO: 1244379
uguagaaaguucuuuaagc

SEQ ID NO: 1484139 - RNA, 19 nt, Artificial Sequence
  Description of Artificial Sequence: Synthetic oligonucleotide
  Antisense strand to SEQ ID NO: 1484138
gcuuaaagaacuuucuaca

SEQ ID NO: 1484140 - RNA, 19 nt, Artificial Sequence
  Description of Artificial Sequence: Synthetic oligonucleotide
  Sense strand starting at position 99 of SEQ ID NO: 1244379
guagaaaguucuuuaagcg

SEQ ID NO: 1484141 - RNA, 19 nt, Artificial Sequence
  Description of Artificial Sequence: Synthetic oligonucleotide
  Antisense strand to SEQ ID NO: 1484140
cgcuuaaagaacuuucuac

SEQ ID NO: 1484142 - RNA, 19 nt, Artificial Sequence
  Description of Artificial Sequence: Synthetic oligonucleotide
  Sense strand starting at position 181 of SEQ ID NO: 1244379
gagccuggugugggugaua

SEQ ID NO: 1484143 - RNA, 19 nt, Artificial Sequence
  Description of Artificial Sequence: Synthetic oligonucleotide
  Antisense strand to SEQ ID NO: 1484142
uaucacccacaccaggcuc

SEQ ID NO: 1484144 - RNA, 19 nt, Artificial Sequence
  Description of Artificial Sequence: Synthetic oligonucleotide
  Sense strand starting at position 237 of SEQ ID NO: 1244379
gcaugacggcuccagaacu

SEQ ID NO: 1484145 - RNA, 19 nt, Artificial Sequence
  Description of Artificial Sequence: Synthetic oligonucleotide
  Antisense strand to SEQ ID NO: 1484144
aguucuggagccgucaugc

SEQ ID NO: 1484146 - RNA, 19 nt, Artificial Sequence
  Description of Artificial Sequence: Synthetic oligonucleotide
  Sense strand starting at position 428 of SEQ ID NO: 1244379
cauuaaauguggcugguua

SEQ ID NO: 1484147 - RNA, 19 nt, Artificial Sequence
  Description of Artificial Sequence: Synthetic oligonucleotide
  Antisense strand to SEQ ID NO: 1484146
uaaccagccacauuuaaug

SEQ ID NO: 1484148 - RNA, 19 nt, Artificial Sequence
  Description of Artificial Sequence: Synthetic oligonucleotide
  Sense strand starting at position 430 of SEQ ID NO: 1244379
uuaaauguggcugguuaga

SEQ ID NO: 1484149 - RNA, 19 nt, Artificial Sequence
  Description of Artificial Sequence: Synthetic oligonucleotide
  Antisense strand to SEQ ID NO: 1484148
ucuaaccagccacauuuaa

SEQ ID NO: 1484150 - RNA, 19 nt, Artificial Sequence
  Description of Artificial Sequence: Synthetic oligonucleotide
  Sense strand starting at position 432 of SEQ ID NO: 1244379
aaauguggcugguuagaau

SEQ ID NO: 1484151 - RNA, 19 nt, Artificial Sequence
  Description of Artificial Sequence: Synthetic oligonucleotide
  Antisense strand to SEQ ID NO: 1484150
auucuaaccagccacauuu

SEQ ID NO: 1484152 - RNA, 19 nt, Artificial Sequence
  Description of Artificial Sequence: Synthetic oligonucleotide
  Sense strand starting at position 441 of SEQ ID NO: 1244379
ugguuagaauccucucuaa

SEQ ID NO: 1484153 - RNA, 19 nt, Artificial Sequence
  Description of Artificial Sequence: Synthetic oligonucleotide
  Antisense strand to SEQ ID NO: 1484152
uuagagaggauucuaacca

SEQ ID NO: 1484154 - RNA, 19 nt, Artificial Sequence
  Description of Artificial Sequence: Synthetic oligonucleotide
  Sense strand starting at position 513 of SEQ ID NO: 1244379
ggcgcacuuacucagcaaa

SEQ ID NO: 1484155 - RNA, 19 nt, Artificial Sequence
  Description of Artificial Sequence: Synthetic oligonucleotide
  Antisense strand to SEQ ID NO: 1484154
uuugcugaguaagugcgcc

SEQ ID NO: 1484156 - RNA, 19 nt, Artificial Sequence
  Description of Artificial Sequence: Synthetic oligonucleotide
  Sense strand starting at position 515 of SEQ ID NO: 1244379
cgcacuuacucagcaaaga

SEQ ID NO: 1484157 - RNA, 19 nt, Artificial Sequence
  Description of Artificial Sequence: Synthetic oligonucleotide
  Antisense strand to SEQ ID NO: 1484156
ucuuugcugaguaagugcg

SEQ ID NO: 1484158 - RNA, 19 nt, Artificial Sequence
  Description of Artificial Sequence: Synthetic oligonucleotide
  Sense strand starting at position 516 of SEQ ID NO: 1244379
gcacuuacucagcaaagag

SEQ ID NO: 1484159 - RNA, 19 nt, Artificial Sequence
  Description of Artificial Sequence: Synthetic oligonucleotide
  Antisense strand to SEQ ID NO: 1484158
cucuuugcugaguaagugc

SEQ ID NO: 1484160 - RNA, 19 nt, Artificial Sequence
  Description of Artificial Sequence: Synthetic oligonucleotide
  Sense strand starting at position 532 of SEQ ID NO: 1244379
gagaaaugccucugagcac

SEQ ID NO: 1484161 - RNA, 19 nt, Artificial Sequence
  Description of Artificial Sequence: Synthetic oligonucleotide
  Antisense strand to SEQ ID NO: 1484160
gugcucagaggcauuucuc

SEQ ID NO: 1484162 - RNA, 19 nt, Artificial Sequence
  Description of Artificial Sequence: Synthetic oligonucleotide
  Sense strand starting at position 577 of SEQ ID NO: 1244379
agggcuucucuccagggua

SEQ ID NO: 1484163 - RNA, 19 nt, Artificial Sequence
  Description of Artificial Sequence: Synthetic oligonucleotide
  Antisense strand to SEQ ID NO: 1484162
uacccuggagagaagcccu

SEQ ID NO: 1484164 - RNA, 19 nt, Artificial Sequence
  Description of Artificial Sequence: Synthetic oligonucleotide
  Sense strand starting at position 579 of SEQ ID NO: 1244379
ggcuucucuccaggguaaa

SEQ ID NO: 1484165 - RNA, 19 nt, Artificial Sequence
  Description of Artificial Sequence: Synthetic oligonucleotide
  Antisense strand to SEQ ID NO: 1484164
uuuacccuggagagaagcc

SEQ ID NO: 1484166 - RNA, 19 nt, Artificial Sequence
  Description of Artificial Sequence: Synthetic oligonucleotide
  Sense strand starting at position 580 of SEQ ID NO: 1244379
gcuucucuccaggguaaac

SEQ ID NO: 1484167 - RNA, 19 nt, Artificial Sequence
  Description of Artificial Sequence: Synthetic oligonucleotide
  Antisense strand to SEQ ID NO: 1484166
guuuacccuggagagaagc

SEQ ID NO: 1484168 - RNA, 19 nt, Artificial Sequence
  Description of Artificial Sequence: Synthetic oligonucleotide
  Sense strand starting at position 1014 of SEQ ID NO: 1244379
gaggguguuagauguguag

SEQ ID NO: 1484169 - RNA, 19 nt, Artificial Sequence
  Description of Artificial Sequence: Synthetic oligonucleotide
  Antisense strand to SEQ ID NO: 1484168
cuacacaucuaacacccuc

SEQ ID NO: 1484170 - RNA, 19 nt, Artificial Sequence
  Description of Artificial Sequence: Synthetic oligonucleotide
  Sense strand starting at position 1021 of SEQ ID NO: 1244379
uuagauguguagcuugaaa

SEQ ID NO: 1484171 - RNA, 19 nt, Artificial Sequence
  Description of Artificial Sequence: Synthetic oligonucleotide
  Antisense strand to SEQ ID NO: 1484170
uuucaagcuacacaucuaa

SEQ ID NO: 1484172 - RNA, 19 nt, Artificial Sequence
  Description of Artificial Sequence: Synthetic oligonucleotide
  Sense strand starting at position 1219 of SEQ ID NO: 1244379
cauggcaggccuggaaaua

SEQ ID NO: 1484173 - RNA, 19 nt, Artificial Sequence
  Description of Artificial Sequence: Synthetic oligonucleotide
  Antisense strand to SEQ ID NO: 1484172
uauuuccaggccugccaug

SEQ ID NO: 1484174 - RNA, 19 nt, Artificial Sequence
  Description of Artificial Sequence: Synthetic oligonucleotide
  Sense strand starting at position 2298 of SEQ ID NO: 1244379
gcgguucgucuuagagcau

SEQ ID NO: 1484175 - RNA, 19 nt, Artificial Sequence
  Description of Artificial Sequence: Synthetic oligonucleotide
  Antisense strand to SEQ ID NO: 1484174
augcucuaagacgaaccgc

SEQ ID NO: 1484176 - RNA, 19 nt, Artificial Sequence
  Description of Artificial Sequence: Synthetic oligonucleotide
  Sense strand starting at position 2377 of SEQ ID NO: 1244379
ccuggauuggcuuguaaag

SEQ ID NO: 1484177 - RNA, 19 nt, Artificial Sequence
  Description of Artificial Sequence: Synthetic oligonucleotide
  Antisense strand to SEQ ID NO: 1484176
cuuuacaagccaauccagg

SEQ ID NO: 1484178 - RNA, 19 nt, Artificial Sequence
  Description of Artificial Sequence: Synthetic oligonucleotide
  Sense strand starting at position 2406 of SEQ ID NO: 1244379
gccggauuacguucagcca

SEQ ID NO: 1484179 - RNA, 19 nt, Artificial Sequence
  Description of Artificial Sequence: Synthetic oligonucleotide
  Antisense strand to SEQ ID NO: 1484178
uggcugaacguaauccggc

SEQ ID NO: 1484180 - RNA, 19 nt, Artificial Sequence
  Description of Artificial Sequence: Synthetic oligonucleotide
  Sense strand starting at position 2462 of SEQ ID NO: 1244379
uccucaggguugccuuaau

SEQ ID NO: 1484181 - RNA, 19 nt, Artificial Sequence
  Description of Artificial Sequence: Synthetic oligonucleotide
  Antisense strand to SEQ ID NO: 1484180
auuaaggcaacccugagga

SEQ ID NO: 1484182 - RNA, 19 nt, Artificial Sequence
  Description of Artificial Sequence: Synthetic oligonucleotide
  Sense strand starting at position 2515 of SEQ ID NO: 1244379
agugaaugcucccuucgga

SEQ ID NO: 1484183 - RNA, 19 nt, Artificial Sequence
  Description of Artificial Sequence: Synthetic oligonucleotide
  Antisense strand to SEQ ID NO: 1484182
uccgaagggagcauucacu

SEQ ID NO: 1484184 - RNA, 19 nt, Artificial Sequence
  Description of Artificial Sequence: Synthetic oligonucleotide
  Sense strand starting at position 2564 of SEQ ID NO: 1244379
cccuguuaacaguaacaug

SEQ ID NO: 1484185 - RNA, 19 nt, Artificial Sequence
  Description of Artificial Sequence: Synthetic oligonucleotide
  Antisense strand to SEQ ID NO: 1484184
cauguuacuguuaacaggg

SEQ ID NO: 1484186 - RNA, 19 nt, Artificial Sequence
  Description of Artificial Sequence: Synthetic oligonucleotide
  Sense strand starting at position 2659 of SEQ ID NO: 1244379
ugcacaauuccagaaugca

SEQ ID NO: 1484187 - RNA, 19 nt, Artificial Sequence
  Description of Artificial Sequence: Synthetic oligonucleotide
  Antisense strand to SEQ ID NO: 1484186
ugcauucuggaauugugca

SEQ ID NO: 1484188 - RNA, 19 nt, Artificial Sequence
  Description of Artificial Sequence: Synthetic oligonucleotide
  Sense strand starting at position 2744 of SEQ ID NO: 1244379
gccucuguugcugaacagu

SEQ ID NO: 1484189 - RNA, 19 nt, Artificial Sequence
  Description of Artificial Sequence: Synthetic oligonucleotide
  Antisense strand to SEQ ID NO: 1484188
acuguucagcaacagaggc

SEQ ID NO: 1484190 - RNA, 19 nt, Artificial Sequence
  Description of Artificial Sequence: Synthetic oligonucleotide
  Sense strand starting at position 2768 of SEQ ID NO: 1244379
uugagauaaacacguugua

SEQ ID NO: 1484191 - RNA, 19 nt, Artificial Sequence
  Description of Artificial Sequence: Synthetic oligonucleotide
  Antisense strand to SEQ ID NO: 1484190
uacaacguguuuaucucaa

SEQ ID NO: 1484192 - RNA, 19 nt, Artificial Sequence
  Description of Artificial Sequence: Synthetic oligonucleotide
  Sense strand starting at position 2859 of SEQ ID NO: 1244379
cagguaucacgccaaacau

SEQ ID NO: 1484193 - RNA, 19 nt, Artificial Sequence
  Description of Artificial Sequence: Synthetic oligonucleotide
  Antisense strand to SEQ ID NO: 1484192
auguuuggcgugauaccug

SEQ ID NO: 1484194 - RNA, 19 nt, Artificial Sequence
  Description of Artificial Sequence: Synthetic oligonucleotide
  Sense strand starting at position 2914 of SEQ ID NO: 1244379
ugcugaggaugccuuuaau

SEQ ID NO: 1484195 - RNA, 19 nt, Artificial Sequence
  Description of Artificial Sequence: Synthetic oligonucleotide
  Antisense strand to SEQ ID NO: 1484194
auuaaaggcauccucagca

SEQ ID NO: 1484196 - RNA, 19 nt, Artificial Sequence
  Description of Artificial Sequence: Synthetic oligonucleotide
  Sense strand starting at position 2917 of SEQ ID NO: 1244379
ugaggaugccuuuaauacu

SEQ ID NO: 1484197 - RNA, 19 nt, Artificial Sequence
  Description of Artificial Sequence: Synthetic oligonucleotide
  Antisense strand to SEQ ID NO: 1484196
aguauuaaaggcauccuca

SEQ ID NO: 1484198 - RNA, 19 nt, Artificial Sequence
  Description of Artificial Sequence: Synthetic oligonucleotide
  Sense strand starting at position 2942 of SEQ ID NO: 1244379
ggaauauuacagugccuga

SEQ ID NO: 1484199 - RNA, 19 nt, Artificial Sequence
  Description of Artificial Sequence: Synthetic oligonucleotide
  Antisense strand to SEQ ID NO: 1484198
ucaggcacuguaauauucc

SEQ ID NO: 1484200 - RNA, 19 nt, Artificial Sequence
  Description of Artificial Sequence: Synthetic oligonucleotide
  Sense strand starting at position 2957 of SEQ ID NO: 1244379
cugagcugaucugugauau

SEQ ID NO: 1484201 - RNA, 19 nt, Artificial Sequence
  Description of Artificial Sequence: Synthetic oligonucleotide
  Antisense strand to SEQ ID NO: 1484200
auaucacagaucagcucag

SEQ ID NO: 1484202 - RNA, 19 nt, Artificial Sequence
  Description of Artificial Sequence: Synthetic oligonucleotide
  Sense strand starting at position 2958 of SEQ ID NO: 1244379
ugagcugaucugugauaua

SEQ ID NO: 1484203 - RNA, 19 nt, Artificial Sequence
  Description of Artificial Sequence: Synthetic oligonucleotide
  Antisense strand to SEQ ID NO: 1484202
uauaucacagaucagcuca

SEQ ID NO: 1484204 - RNA, 19 nt, Artificial Sequence
  Description of Artificial Sequence: Synthetic oligonucleotide
  Sense strand starting at position 3058 of SEQ ID NO: 1244379
gcugcacugcacgauauua

SEQ ID NO: 1484205 - RNA, 19 nt, Artificial Sequence
  Description of Artificial Sequence: Synthetic oligonucleotide
  Antisense strand to SEQ ID NO: 1484204
uaauaucgugcagugcagc

SEQ ID NO: 1484206 - RNA, 19 nt, Artificial Sequence
  Description of Artificial Sequence: Synthetic oligonucleotide
  Sense strand starting at position 3096 of SEQ ID NO: 1244379
uuuaguggugguugaugaa

SEQ ID NO: 1484207 - RNA, 19 nt, Artificial Sequence
  Description of Artificial Sequence: Synthetic oligonucleotide
  Antisense strand to SEQ ID NO: 1484206
uucaucaaccaccacuaaa

SEQ ID NO: 1484208 - RNA, 19 nt, Artificial Sequence
  Description of Artificial Sequence: Synthetic oligonucleotide
  Sense strand starting at position 3138 of SEQ ID NO: 1244379
ugaaauaggcuuuaucuac

SEQ ID NO: 1484209 - RNA, 19 nt, Artificial Sequence
  Description of Artificial Sequence: Synthetic oligonucleotide
  Antisense strand to SEQ ID NO: 1484208
guagauaaagccuauuuca

SEQ ID NO: 1484210 - RNA, 19 nt, Artificial Sequence
  Description of Artificial Sequence: Synthetic oligonucleotide
  Sense strand starting at position 3779 of SEQ ID NO: 1244379
uccuguucugcugacaaag

SEQ ID NO: 1484211 - RNA, 19 nt, Artificial Sequence
  Description of Artificial Sequence: Synthetic oligonucleotide
  Antisense strand to SEQ ID NO: 1484210
cuuugucagcagaacagga

SEQ ID NO: 1484212 - RNA, 19 nt, Artificial Sequence
  Description of Artificial Sequence: Synthetic oligonucleotide
  Sense strand starting at position 3812 of SEQ ID NO: 1244379
ucaaaugaguaagaaagaa

SEQ ID NO: 1484213 - RNA, 19 nt, Artificial Sequence
  Description of Artificial Sequence: Synthetic oligonucleotide
  Antisense strand to SEQ ID NO: 1484212
uucuuucuuacucauuuga

SEQ ID NO: 1484214 - RNA, 19 nt, Artificial Sequence
  Description of Artificial Sequence: Synthetic oligonucleotide
  Sense strand starting at position 581 of SEQ ID NO: 1244380
cugugauuaugccgucaca

SEQ ID NO: 1484215 - RNA, 19 nt, Artificial Sequence
  Description of Artificial Sequence: Synthetic oligonucleotide
  Antisense strand to SEQ ID NO: 1484214
ugugacggcauaaucacag

SEQ ID NO: 1484216 - RNA, 19 nt, Artificial Sequence
  Description of Artificial Sequence: Synthetic oligonucleotide
  Sense strand starting at position 753 of SEQ ID NO: 1244380
ggugacaccugcuacauuu

SEQ ID NO: 1484217 - RNA, 19 nt, Artificial Sequence
  Description of Artificial Sequence: Synthetic oligonucleotide
  Antisense strand to SEQ ID NO: 1484216
aaauguagcaggugucacc

SEQ ID NO: 1484218 - RNA, 19 nt, Artificial Sequence
  Description of Artificial Sequence: Synthetic oligonucleotide
  Sense strand starting at position 772 of SEQ ID NO: 1244380
ggucaucuguccucagguu

SEQ ID NO: 1484219 - RNA, 19 nt, Artificial Sequence
  Description of Artificial Sequence: Synthetic oligonucleotide
  Antisense strand to SEQ ID NO: 1484218
aaccugaggacagaugacc

SEQ ID NO: 1484220 - RNA, 19 nt, Artificial Sequence
  Description of Artificial Sequence: Synthetic oligonucleotide
  Sense strand starting at position 1821 of SEQ ID NO: 1244380
cauaccagguguuauaagu

SEQ ID NO: 1484221 - RNA, 19 nt, Artificial Sequence
  Description of Artificial Sequence: Synthetic oligonucleotide
  Antisense strand to SEQ ID NO: 1484220
acuuauaacaccugguaug

SEQ ID NO: 1484222 - RNA, 19 nt, Artificial Sequence
  Description of Artificial Sequence: Synthetic oligonucleotide
  Sense strand starting at position 1905 of SEQ ID NO: 1244380
ggacucuggccuuguggau

SEQ ID NO: 1484223 - RNA, 19 nt, Artificial Sequence
  Description of Artificial Sequence: Synthetic oligonucleotide
  Antisense strand to SEQ ID NO: 1484222
auccacaaggccagagucc

SEQ ID NO: 1484224 - RNA, 19 nt, Artificial Sequence
  Description of Artificial Sequence: Synthetic oligonucleotide
  Sense strand starting at position 2002 of SEQ ID NO: 1244380
ggaggacacucuuguggga

SEQ ID NO: 1484225 - RNA, 19 nt, Artificial Sequence
  Description of Artificial Sequence: Synthetic oligonucleotide
  Antisense strand to SEQ ID NO: 1484224
ucccacaagaguguccucc

SEQ ID NO: 1484226 - RNA, 19 nt, Artificial Sequence
  Description of Artificial Sequence: Synthetic oligonucleotide
  Sense strand starting at position 2047 of SEQ ID NO: 1244380
uacugucuccagggagaaa

SEQ ID NO: 1484227 - RNA, 19 nt, Artificial Sequence
  Description of Artificial Sequence: Synthetic oligonucleotide
  Antisense strand to SEQ ID NO: 1484226
uuucucccuggagacagua

SEQ ID NO: 1484228 - RNA, 19 nt, Artificial Sequence
  Description of Artificial Sequence: Synthetic oligonucleotide
  Sense strand starting at position 2058 of SEQ ID NO: 1244380
gggagaaagcgucacaaug

SEQ ID NO: 1484229 - RNA, 19 nt, Artificial Sequence
  Description of Artificial Sequence: Synthetic oligonucleotide
  Antisense strand to SEQ ID NO: 1484228
cauugugacgcuuucuccc

SEQ ID NO: 1484230 - RNA, 19 nt, Artificial Sequence
  Description of Artificial Sequence: Synthetic oligonucleotide
  Sense strand starting at position 2060 of SEQ ID NO: 1244380
gagaaagcgucacaaugga

SEQ ID NO: 1484231 - RNA, 19 nt, Artificial Sequence
  Description of Artificial Sequence: Synthetic oligonucleotide
  Antisense strand to SEQ ID NO: 1484230
uccauugugacgcuuucuc

SEQ ID NO: 1484232 - RNA, 19 nt, Artificial Sequence
  Description of Artificial Sequence: Synthetic oligonucleotide
  Sense strand starting at position 2249 of SEQ ID NO: 1244380
uggagacuugcuugguguu

SEQ ID NO: 1484233 - RNA, 19 nt, Artificial Sequence
  Description of Artificial Sequence: Synthetic oligonucleotide
  Antisense strand to SEQ ID NO: 1484232
aacaccaagcaagucucca

SEQ ID NO: 1484234 - RNA, 19 nt, Artificial Sequence
  Description of Artificial Sequence: Synthetic oligonucleotide
  Sense strand starting at position 2250 of SEQ ID NO: 1244380
ggagacuugcuugguguuu

SEQ ID NO: 1484235 - RNA, 19 nt, Artificial Sequence
  Description of Artificial Sequence: Synthetic oligonucleotide
  Antisense strand to SEQ ID NO: 1484234
aaacaccaagcaagucucc

SEQ ID NO: 1484236 - RNA, 19 nt, Artificial Sequence
  Description of Artificial Sequence: Synthetic oligonucleotide
  Sense strand starting at position 2303 of SEQ ID NO: 1244380
gaugaaguauuccauguug

SEQ ID NO: 1484237 - RNA, 19 nt, Artificial Sequence
  Description of Artificial Sequence: Synthetic oligonucleotide
  Antisense strand to SEQ ID NO: 1484236
caacauggaauacuucauc

SEQ ID NO: 1484238 - RNA, 19 nt, Artificial Sequence
  Description of Artificial Sequence: Synthetic oligonucleotide
  Sense strand starting at position 2305 of SEQ ID NO: 1244380
ugaaguauuccauguugga

SEQ ID NO: 1484239 - RNA, 19 nt, Artificial Sequence
  Description of Artificial Sequence: Synthetic oligonucleotide
  Antisense strand to SEQ ID NO: 1484238
uccaacauggaauacuuca

SEQ ID NO: 1484240 - RNA, 19 nt, Artificial Sequence
  Description of Artificial Sequence: Synthetic oligonucleotide
  Sense strand starting at position 2318 of SEQ ID NO: 1244380
guuggauguugacuguuga

SEQ ID NO: 1484241 - RNA, 19 nt, Artificial Sequence
  Description of Artificial Sequence: Synthetic oligonucleotide
  Antisense strand to SEQ ID NO: 1484240
ucaacagucaacauccaac

SEQ ID NO: 1484242 - RNA, 19 nt, Artificial Sequence
  Description of Artificial Sequence: Synthetic oligonucleotide
  Sense strand starting at position 2322 of SEQ ID NO: 1244380
gauguugacuguugagugu

SEQ ID NO: 1484243 - RNA, 19 nt, Artificial Sequence
  Description of Artificial Sequence: Synthetic oligonucleotide
  Antisense strand to SEQ ID NO: 1484242
acacucaacagucaacauc

SEQ ID NO: 1484244 - RNA, 19 nt, Artificial Sequence
  Description of Artificial Sequence: Synthetic oligonucleotide
  Sense strand starting at position 2326 of SEQ ID NO: 1244380
uugacuguugaguguguga

SEQ ID NO: 1484245 - RNA, 19 nt, Artificial Sequence
  Description of Artificial Sequence: Synthetic oligonucleotide
  Antisense strand to SEQ ID NO: 1484244
ucacacacucaacagucaa

SEQ ID NO: 1484246 - RNA, 19 nt, Artificial Sequence
  Description of Artificial Sequence: Synthetic oligonucleotide
  Sense strand starting at position 2328 of SEQ ID NO: 1244380
gacuguugagugugugaga

SEQ ID NO: 1484247 - RNA, 19 nt, Artificial Sequence
  Description of Artificial Sequence: Synthetic oligonucleotide
  Antisense strand to SEQ ID NO: 1484246
ucucacacacucaacaguc

SEQ ID NO: 1484248 - RNA, 19 nt, Artificial Sequence
  Description of Artificial Sequence: Synthetic oligonucleotide
  Sense strand starting at position 2478 of SEQ ID NO: 1244380
gcuuguugcugcuguggua

SEQ ID NO: 1484249 - RNA, 19 nt, Artificial Sequence
  Description of Artificial Sequence: Synthetic oligonucleotide
  Antisense strand to SEQ ID NO: 1484248
uaccacagcagcaacaagc

SEQ ID NO: 1484250 - RNA, 19 nt, Artificial Sequence
  Description of Artificial Sequence: Synthetic oligonucleotide
  Sense strand starting at position 2858 of SEQ ID NO: 1244380
uuuguaauguugucacaca

SEQ ID NO: 1484251 - RNA, 19 nt, Artificial Sequence
  Description of Artificial Sequence: Synthetic oligonucleotide
  Antisense strand to SEQ ID NO: 1484250
ugugugacaacauuacaaa

SEQ ID NO: 1484252 - RNA, 19 nt, Artificial Sequence
  Description of Artificial Sequence: Synthetic oligonucleotide
  Sense strand starting at position 2876 of SEQ ID NO: 1244380
aguggaaguucccugcuuu

SEQ ID NO: 1484253 - RNA, 19 nt, Artificial Sequence
  Description of Artificial Sequence: Synthetic oligonucleotide
  Antisense strand to SEQ ID NO: 1484252
aaagcagggaacuuccacu

SEQ ID NO: 1484254 - RNA, 19 nt, Artificial Sequence
  Description of Artificial Sequence: Synthetic oligonucleotide
  Sense strand starting at position 2924 of SEQ ID NO: 1244380
ggccaucgcugcuggaaga

SEQ ID NO: 1484255 - RNA, 19 nt, Artificial Sequence
  Description of Artificial Sequence: Synthetic oligonucleotide
  Antisense strand to SEQ ID NO: 1484254
ucuuccagcagcgauggcc

SEQ ID NO: 1484256 - RNA, 19 nt, Artificial Sequence
  Description of Artificial Sequence: Synthetic oligonucleotide
  Sense strand starting at position 2947 of SEQ ID NO: 1244380
cggcucaguguuggaugaa

SEQ ID NO: 1484257 - RNA, 19 nt, Artificial Sequence
  Description of Artificial Sequence: Synthetic oligonucleotide
  Antisense strand to SEQ ID NO: 1484256
uucauccaacacugagccg

SEQ ID NO: 1484258 - RNA, 19 nt, Artificial Sequence
  Description of Artificial Sequence: Synthetic oligonucleotide
  Sense strand starting at position 2948 of SEQ ID NO: 1244380
ggcucaguguuggaugaau

SEQ ID NO: 1484259 - RNA, 19 nt, Artificial Sequence
  Description of Artificial Sequence: Synthetic oligonucleotide
  Antisense strand to SEQ ID NO: 1484258
auucauccaacacugagcc

SEQ ID NO: 1484260 - RNA, 19 nt, Artificial Sequence
  Description of Artificial Sequence: Synthetic oligonucleotide
  Sense strand starting at position 2950 of SEQ ID NO: 1244380
cucaguguuggaugaaugu

SEQ ID NO: 1484261 - RNA, 19 nt, Artificial Sequence
  Description of Artificial Sequence: Synthetic oligonucleotide
  Antisense strand to SEQ ID NO: 1484260
acauucauccaacacugag

SEQ ID NO: 1484262 - RNA, 19 nt, Artificial Sequence
  Description of Artificial Sequence: Synthetic oligonucleotide
  Sense strand starting at position 2959 of SEQ ID NO: 1244380
ggaugaauguccugacugu

SEQ ID NO: 1484263 - RNA, 19 nt, Artificial Sequence
  Description of Artificial Sequence: Synthetic oligonucleotide
  Antisense strand to SEQ ID NO: 1484262
acagucaggacauucaucc

SEQ ID NO: 1484264 - RNA, 19 nt, Artificial Sequence
  Description of Artificial Sequence: Synthetic oligonucleotide
  Sense strand starting at position 2960 of SEQ ID NO: 1244380
gaugaauguccugacuguu

SEQ ID NO: 1484265 - RNA, 19 nt, Artificial Sequence
  Description of Artificial Sequence: Synthetic oligonucleotide
  Antisense strand to SEQ ID NO: 1484264
aacagucaggacauucauc

SEQ ID NO: 1484266 - RNA, 19 nt, Artificial Sequence
  Description of Artificial Sequence: Synthetic oligonucleotide
  Sense strand starting at position 3000 of SEQ ID NO: 1244380
cgccaaccguccugggaaa

SEQ ID NO: 1484267 - RNA, 19 nt, Artificial Sequence
  Description of Artificial Sequence: Synthetic oligonucleotide
  Antisense strand to SEQ ID NO: 1484266
uuucccaggacgguuggcg

SEQ ID NO: 1484268 - RNA, 19 nt, Artificial Sequence
  Description of Artificial Sequence: Synthetic oligonucleotide
  Sense strand starting at position 3075 of SEQ ID NO: 1244380
gcguccucuucguguccua

SEQ ID NO: 1484269 - RNA, 19 nt, Artificial Sequence
  Description of Artificial Sequence: Synthetic oligonucleotide
  Antisense strand to SEQ ID NO: 1484268
uaggacacgaagaggacgc

SEQ ID NO: 1484270 - RNA, 19 nt, Artificial Sequence
  Description of Artificial Sequence: Synthetic oligonucleotide
  Sense strand starting at position 3311 of SEQ ID NO: 1244380
ccgauugaccauuagguga

SEQ ID NO: 1484271 - RNA, 19 nt, Artificial Sequence
  Description of Artificial Sequence: Synthetic oligonucleotide
  Antisense strand to SEQ ID NO: 1484270
ucaccuaauggucaaucgg

SEQ ID NO: 1484272 - RNA, 19 nt, Artificial Sequence
  Description of Artificial Sequence: Synthetic oligonucleotide
  Sense strand starting at position 3339 of SEQ ID NO: 1244380
cuuucucuuucggcacaaa

SEQ ID NO: 1484273 - RNA, 19 nt, Artificial Sequence
  Description of Artificial Sequence: Synthetic oligonucleotide
  Antisense strand to SEQ ID NO: 1484272
uuugugccgaaagagaaag

SEQ ID NO: 1484274 - RNA, 19 nt, Artificial Sequence
  Description of Artificial Sequence: Synthetic oligonucleotide
  Sense strand starting at position 3340 of SEQ ID NO: 1244380
uuucucuuucggcacaaau

SEQ ID NO: 1484275 - RNA, 19 nt, Artificial Sequence
  Description of Artificial Sequence: Synthetic oligonucleotide
  Antisense strand to SEQ ID NO: 1484274
auuugugccgaaagagaaa

SEQ ID NO: 1484276 - RNA, 19 nt, Artificial Sequence
  Description of Artificial Sequence: Synthetic oligonucleotide
  Sense strand starting at position 3342 of SEQ ID NO: 1244380
ucucuuucggcacaaaugu

SEQ ID NO: 1484277 - RNA, 19 nt, Artificial Sequence
  Description of Artificial Sequence: Synthetic oligonucleotide
  Antisense strand to SEQ ID NO: 1484276
acauuugugccgaaagaga

SEQ ID NO: 1484278 - RNA, 19 nt, Artificial Sequence
  Description of Artificial Sequence: Synthetic oligonucleotide
  Sense strand starting at position 3351 of SEQ ID NO: 1244380
gcacaaaugugggaagaaa

SEQ ID NO: 1484279 - RNA, 19 nt, Artificial Sequence
  Description of Artificial Sequence: Synthetic oligonucleotide
  Antisense strand to SEQ ID NO: 1484278
uuucuucccacauuugugc

SEQ ID NO: 1484280 - RNA, 19 nt, Artificial Sequence
  Description of Artificial Sequence: Synthetic oligonucleotide
  Sense strand starting at position 3359 of SEQ ID NO: 1244380
gugggaagaaaggguuuau

SEQ ID NO: 1484281 - RNA, 19 nt, Artificial Sequence
  Description of Artificial Sequence: Synthetic oligonucleotide
  Antisense strand to SEQ ID NO: 1484280
auaaacccuuucuucccac

SEQ ID NO: 1484282 - RNA, 19 nt, Artificial Sequence
  Description of Artificial Sequence: Synthetic oligonucleotide
  Sense strand starting at position 3369 of SEQ ID NO: 1244380
aggguuuauuugucgguga

SEQ ID NO: 1484283 - RNA, 19 nt, Artificial Sequence
  Description of Artificial Sequence: Synthetic oligonucleotide
  Antisense strand to SEQ ID NO: 1484282
ucaccgacaaauaaacccu

SEQ ID NO: 1484284 - RNA, 19 nt, Artificial Sequence
  Description of Artificial Sequence: Synthetic oligonucleotide
  Sense strand starting at position 3370 of SEQ ID NO: 1244380
ggguuuauuugucggugaa

SEQ ID NO: 1484285 - RNA, 19 nt, Artificial Sequence
  Description of Artificial Sequence: Synthetic oligonucleotide
  Antisense strand to SEQ ID NO: 1484284
uucaccgacaaauaaaccc

SEQ ID NO: 1484286 - RNA, 19 nt, Artificial Sequence
  Description of Artificial Sequence: Synthetic oligonucleotide
  Sense strand starting at position 3371 of SEQ ID NO: 1244380
gguuuauuugucggugaaa

SEQ ID NO: 1484287 - RNA, 19 nt, Artificial Sequence
  Description of Artificial Sequence: Synthetic oligonucleotide
  Antisense strand to SEQ ID NO: 1484286
uuucaccgacaaauaaacc

SEQ ID NO: 1484288 - RNA, 19 nt, Artificial Sequence
  Description of Artificial Sequence: Synthetic oligonucleotide
  Sense strand starting at position 3372 of SEQ ID NO: 1244380
guuuauuugucggugaaau

SEQ ID NO: 1484289 - RNA, 19 nt, Artificial Sequence
  Description of Artificial Sequence: Synthetic oligonucleotide
  Antisense strand to SEQ ID NO: 1484288
auuucaccgacaaauaaac

SEQ ID NO: 1484290 - RNA, 19 nt, Artificial Sequence
  Description of Artificial Sequence: Synthetic oligonucleotide
  Sense strand starting at position 3373 of SEQ ID NO: 1244380
uuuauuugucggugaaauc

SEQ ID NO: 1484291 - RNA, 19 nt, Artificial Sequence
  Description of Artificial Sequence: Synthetic oligonucleotide
  Antisense strand to SEQ ID NO: 1484290
gauuucaccgacaaauaaa

SEQ ID NO: 1484292 - RNA, 19 nt, Artificial Sequence
  Description of Artificial Sequence: Synthetic oligonucleotide
  Sense strand starting at position 3923 of SEQ ID NO: 1244380
ccaguccugucuggguauu

SEQ ID NO: 1484293 - RNA, 19 nt, Artificial Sequence
  Description of Artificial Sequence: Synthetic oligonucleotide
  Antisense strand to SEQ ID NO: 1484292
aauacccagacaggacugg

SEQ ID NO: 1484294 - RNA, 19 nt, Artificial Sequence
  Description of Artificial Sequence: Synthetic oligonucleotide
  Sense strand starting at position 85 of SEQ ID NO: 1244381
ccugaaagguggcuaaucu

SEQ ID NO: 1484295 - RNA, 19 nt, Artificial Sequence
  Description of Artificial Sequence: Synthetic oligonucleotide
  Antisense strand to SEQ ID NO: 1484294
agauuagccaccuuucagg

SEQ ID NO: 1484296 - RNA, 19 nt, Artificial Sequence
  Description of Artificial Sequence: Synthetic oligonucleotide
  Sense strand starting at position 113 of SEQ ID NO: 1244381
ugugccuaaguguaacaua

SEQ ID NO: 1484297 - RNA, 19 nt, Artificial Sequence
  Description of Artificial Sequence: Synthetic oligonucleotide
  Antisense strand to SEQ ID NO: 1484296
uauguuacacuuaggcaca

SEQ ID NO: 1484298 - RNA, 19 nt, Artificial Sequence
  Description of Artificial Sequence: Synthetic oligonucleotide
  Sense strand starting at position 164 of SEQ ID NO: 1244381
aguguaagauaucucaaca

SEQ ID NO: 1484299 - RNA, 19 nt, Artificial Sequence
  Description of Artificial Sequence: Synthetic oligonucleotide
  Antisense strand to SEQ ID NO: 1484298
uguugagauaucuuacacu

SEQ ID NO: 1484300 - RNA, 19 nt, Artificial Sequence
  Description of Artificial Sequence: Synthetic oligonucleotide
  Sense strand starting at position 233 of SEQ ID NO: 1244381
agucaaaugucacuaaaug

SEQ ID NO: 1484301 - RNA, 19 nt, Artificial Sequence
  Description of Artificial Sequence: Synthetic oligonucleotide
  Antisense strand to SEQ ID NO: 1484300
cauuuagugacauuugacu

SEQ ID NO: 1484302 - RNA, 19 nt, Artificial Sequence
  Description of Artificial Sequence: Synthetic oligonucleotide
  Sense strand starting at position 234 of SEQ ID NO: 1244381
gucaaaugucacuaaaugu

SEQ ID NO: 1484303 - RNA, 19 nt, Artificial Sequence
  Description of Artificial Sequence: Synthetic oligonucleotide
  Antisense strand to SEQ ID NO: 1484302
acauuuagugacauuugac

SEQ ID NO: 1484304 - RNA, 19 nt, Artificial Sequence
  Description of Artificial Sequence: Synthetic oligonucleotide
  Sense strand starting at position 321 of SEQ ID NO: 1244381
uuguauuucuauggaacag

SEQ ID NO: 1484305 - RNA, 19 nt, Artificial Sequence
  Description of Artificial Sequence: Synthetic oligonucleotide
  Antisense strand to SEQ ID NO: 1484304
cuguuccauagaaauacaa

SEQ ID NO: 1484306 - RNA, 19 nt, Artificial Sequence
  Description of Artificial Sequence: Synthetic oligonucleotide
  Sense strand starting at position 367 of SEQ ID NO: 1244381
ccuugaugucucuguaaca

SEQ ID NO: 1484307 - RNA, 19 nt, Artificial Sequence
  Description of Artificial Sequence: Synthetic oligonucleotide
  Antisense strand to SEQ ID NO: 1484306
uguuacagagacaucaagg

SEQ ID NO: 1484308 - RNA, 19 nt, Artificial Sequence
  Description of Artificial Sequence: Synthetic oligonucleotide
  Sense strand starting at position 368 of SEQ ID NO: 1244381
cuugaugucucuguaacaa

SEQ ID NO: 1484309 - RNA, 19 nt, Artificial Sequence
  Description of Artificial Sequence: Synthetic oligonucleotide
  Antisense strand to SEQ ID NO: 1484308
uuguuacagagacaucaag

SEQ ID NO: 1484310 - RNA, 19 nt, Artificial Sequence
  Description of Artificial Sequence: Synthetic oligonucleotide
  Sense strand starting at position 814 of SEQ ID NO: 1244381
ucaccugaugcaggucaua

SEQ ID NO: 1484311 - RNA, 19 nt, Artificial Sequence
  Description of Artificial Sequence: Synthetic oligonucleotide
  Antisense strand to SEQ ID NO: 1484310
uaugaccugcaucagguga

SEQ ID NO: 1484312 - RNA, 19 nt, Artificial Sequence
  Description of Artificial Sequence: Synthetic oligonucleotide
  Sense strand starting at position 901 of SEQ ID NO: 1244381
aguuguguggcaggaggaa

SEQ ID NO: 1484313 - RNA, 19 nt, Artificial Sequence
  Description of Artificial Sequence: Synthetic oligonucleotide
  Antisense strand to SEQ ID NO: 1484312
uuccuccugccacacaacu

SEQ ID NO: 1484314 - RNA, 19 nt, Artificial Sequence
  Description of Artificial Sequence: Synthetic oligonucleotide
  Sense strand starting at position 1039 of SEQ ID NO: 1244381
cuagauuacuagucugaaa

SEQ ID NO: 1484315 - RNA, 19 nt, Artificial Sequence
  Description of Artificial Sequence: Synthetic oligonucleotide
  Antisense strand to SEQ ID NO: 1484314
uuucagacuaguaaucuag

SEQ ID NO: 1484316 - RNA, 19 nt, Artificial Sequence
  Description of Artificial Sequence: Synthetic oligonucleotide
  Sense strand starting at position 1041 of SEQ ID NO: 1244381
agauuacuagucugaaaug

SEQ ID NO: 1484317 - RNA, 19 nt, Artificial Sequence
  Description of Artificial Sequence: Synthetic oligonucleotide
  Antisense strand to SEQ ID NO: 1484316
cauuucagacuaguaaucu

SEQ ID NO: 1484318 - RNA, 19 nt, Artificial Sequence
  Description of Artificial Sequence: Synthetic oligonucleotide
  Sense strand starting at position 1159 of SEQ ID NO: 1244381
cagagaguggucuacucca

SEQ ID NO: 1484319 - RNA, 19 nt, Artificial Sequence
  Description of Artificial Sequence: Synthetic oligonucleotide
  Antisense strand to SEQ ID NO: 1484318
uggaguagaccacucucug

SEQ ID NO: 1484320 - RNA, 19 nt, Artificial Sequence
  Description of Artificial Sequence: Synthetic oligonucleotide
  Sense strand starting at position 2106 of SEQ ID NO: 1244381
gccguagcucugagcggaa

SEQ ID NO: 1484321 - RNA, 19 nt, Artificial Sequence
  Description of Artificial Sequence: Synthetic oligonucleotide
  Antisense strand to SEQ ID NO: 1484320
uuccgcucagagcuacggc

SEQ ID NO: 1484322 - RNA, 19 nt, Artificial Sequence
  Description of Artificial Sequence: Synthetic oligonucleotide
  Sense strand starting at position 2477 of SEQ ID NO: 1244381
gugaauacaucacccguua

SEQ ID NO: 1484323 - RNA, 19 nt, Artificial Sequence
  Description of Artificial Sequence: Synthetic oligonucleotide
  Antisense strand to SEQ ID NO: 1484322
uaacgggugauguauucac

SEQ ID NO: 1484324 - RNA, 19 nt, Artificial Sequence
  Description of Artificial Sequence: Synthetic oligonucleotide
  Sense strand starting at position 2516 of SEQ ID NO: 1244381
ucaauagggucuccaauaa

SEQ ID NO: 1484325 - RNA, 19 nt, Artificial Sequence
  Description of Artificial Sequence: Synthetic oligonucleotide
  Antisense strand to SEQ ID NO: 1484324
uuauuggagacccuauuga

SEQ ID NO: 1484326 - RNA, 19 nt, Artificial Sequence
  Description of Artificial Sequence: Synthetic oligonucleotide
  Sense strand starting at position 2573 of SEQ ID NO: 1244381
aguggcauuugggaugaga

SEQ ID NO: 1484327 - RNA, 19 nt, Artificial Sequence
  Description of Artificial Sequence: Synthetic oligonucleotide
  Antisense strand to SEQ ID NO: 1484326
ucucaucccaaaugccacu

SEQ ID NO: 1484328 - RNA, 19 nt, Artificial Sequence
  Description of Artificial Sequence: Synthetic oligonucleotide
  Sense strand starting at position 2619 of SEQ ID NO: 1244381
cccguacuccugcaaggau

SEQ ID NO: 1484329 - RNA, 19 nt, Artificial Sequence
  Description of Artificial Sequence: Synthetic oligonucleotide
  Antisense strand to SEQ ID NO: 1484328
auccuugcaggaguacggg

SEQ ID NO: 1484330 - RNA, 19 nt, Artificial Sequence
  Description of Artificial Sequence: Synthetic oligonucleotide
  Sense strand starting at position 2733 of SEQ ID NO: 1244381
gggauuucauucugagggu

SEQ ID NO: 1484331 - RNA, 19 nt, Artificial Sequence
  Description of Artificial Sequence: Synthetic oligonucleotide
  Antisense strand to SEQ ID NO: 1484330
acccucagaaugaaauccc

SEQ ID NO: 1484332 - RNA, 19 nt, Artificial Sequence
  Description of Artificial Sequence: Synthetic oligonucleotide
  Sense strand starting at position 2737 of SEQ ID NO: 1244381
uuucauucugagggugaug

SEQ ID NO: 1484333 - RNA, 19 nt, Artificial Sequence
  Description of Artificial Sequence: Synthetic oligonucleotide
  Antisense strand to SEQ ID NO: 1484332
caucacccucagaaugaaa

SEQ ID NO: 1484334 - RNA, 19 nt, Artificial Sequence
  Description of Artificial Sequence: Synthetic oligonucleotide
  Sense strand starting at position 2754 of SEQ ID NO: 1244381
ugggaagucacuggugagu

SEQ ID NO: 1484335 - RNA, 19 nt, Artificial Sequence
  Description of Artificial Sequence: Synthetic oligonucleotide
  Antisense strand to SEQ ID NO: 1484334
acucaccagugacuuccca

SEQ ID NO: 1484336 - RNA, 19 nt, Artificial Sequence
  Description of Artificial Sequence: Synthetic oligonucleotide
  Sense strand starting at position 2757 of SEQ ID NO: 1244381
gaagucacuggugaguuua

SEQ ID NO: 1484337 - RNA, 19 nt, Artificial Sequence
  Description of Artificial Sequence: Synthetic oligonucleotide
  Antisense strand to SEQ ID NO: 1484336
uaaacucaccagugacuuc

SEQ ID NO: 1484338 - RNA, 19 nt, Artificial Sequence
  Description of Artificial Sequence: Synthetic oligonucleotide
  Sense strand starting at position 2759 of SEQ ID NO: 1244381
agucacuggugaguuuaau

SEQ ID NO: 1484339 - RNA, 19 nt, Artificial Sequence
  Description of Artificial Sequence: Synthetic oligonucleotide
  Antisense strand to SEQ ID NO: 1484338
auuaaacucaccagugacu

SEQ ID NO: 1484340 - RNA, 19 nt, Artificial Sequence
  Description of Artificial Sequence: Synthetic oligonucleotide
  Sense strand starting at position 2957 of SEQ ID NO: 1244381
gggugauggaguuagaugu

SEQ ID NO: 1484341 - RNA, 19 nt, Artificial Sequence
  Description of Artificial Sequence: Synthetic oligonucleotide
  Antisense strand to SEQ ID NO: 1484340
acaucuaacuccaucaccc

SEQ ID NO: 1484342 - RNA, 19 nt, Artificial Sequence
  Description of Artificial Sequence: Synthetic oligonucleotide
  Sense strand starting at position 3013 of SEQ ID NO: 1244381
cugaaauaacuggguacau

SEQ ID NO: 1484343 - RNA, 19 nt, Artificial Sequence
  Description of Artificial Sequence: Synthetic oligonucleotide
  Antisense strand to SEQ ID NO: 1484342
auguacccaguuauuucag

SEQ ID NO: 1484344 - RNA, 19 nt, Artificial Sequence
  Description of Artificial Sequence: Synthetic oligonucleotide
  Sense strand starting at position 3014 of SEQ ID NO: 1244381
ugaaauaacuggguacauu

SEQ ID NO: 1484345 - RNA, 19 nt, Artificial Sequence
  Description of Artificial Sequence: Synthetic oligonucleotide
  Antisense strand to SEQ ID NO: 1484344
aauguacccaguuauuuca

SEQ ID NO: 1484346 - RNA, 19 nt, Artificial Sequence
  Description of Artificial Sequence: Synthetic oligonucleotide
  Sense strand starting at position 3035 of SEQ ID NO: 1244381
ggugccauuacggagaaga

SEQ ID NO: 1484347 - RNA, 19 nt, Artificial Sequence
  Description of Artificial Sequence: Synthetic oligonucleotide
  Antisense strand to SEQ ID NO: 1484346
ucuucuccguaauggcacc

SEQ ID NO: 1484348 - RNA, 19 nt, Artificial Sequence
  Description of Artificial Sequence: Synthetic oligonucleotide
  Sense strand starting at position 3082 of SEQ ID NO: 1244381
gugggaucaaacggucuau

SEQ ID NO: 1484349 - RNA, 19 nt, Artificial Sequence
  Description of Artificial Sequence: Synthetic oligonucleotide
  Antisense strand to SEQ ID NO: 1484348
auagaccguuugaucccac

SEQ ID NO: 1484350 - RNA, 19 nt, Artificial Sequence
  Description of Artificial Sequence: Synthetic oligonucleotide
  Sense strand starting at position 3168 of SEQ ID NO: 1244381
uugagaagcuguuuauaga

SEQ ID NO: 1484351 - RNA, 19 nt, Artificial Sequence
  Description of Artificial Sequence: Synthetic oligonucleotide
  Antisense strand to SEQ ID NO: 1484350
ucuauaaacagcuucucaa

SEQ ID NO: 1484352 - RNA, 19 nt, Artificial Sequence
  Description of Artificial Sequence: Synthetic oligonucleotide
  Sense strand starting at position 3188 of SEQ ID NO: 1244381
ggcugugguccagagagga

SEQ ID NO: 1484353 - RNA, 19 nt, Artificial Sequence
  Description of Artificial Sequence: Synthetic oligonucleotide
  Antisense strand to SEQ ID NO: 1484352
uccucucuggaccacagcc

SEQ ID NO: 1484354 - RNA, 19 nt, Artificial Sequence
  Description of Artificial Sequence: Synthetic oligonucleotide
  Sense strand starting at position 3329 of SEQ ID NO: 1244381
cugucuguucuagaaagug

SEQ ID NO: 1484355 - RNA, 19 nt, Artificial Sequence
  Description of Artificial Sequence: Synthetic oligonucleotide
  Antisense strand to SEQ ID NO: 1484354
cacuuucuagaacagacag

SEQ ID NO: 1484356 - RNA, 19 nt, Artificial Sequence
  Description of Artificial Sequence: Synthetic oligonucleotide
  Sense strand starting at position 3334 of SEQ ID NO: 1244381
uguucuagaaagugaaaug

SEQ ID NO: 1484357 - RNA, 19 nt, Artificial Sequence
  Description of Artificial Sequence: Synthetic oligonucleotide
  Antisense strand to SEQ ID NO: 1484356
cauuucacuuucuagaaca

SEQ ID NO: 1484358 - RNA, 19 nt, Artificial Sequence
  Description of Artificial Sequence: Synthetic oligonucleotide
  Sense strand starting at position 3529 of SEQ ID NO: 1244381
caggaauggugcuugguuu

SEQ ID NO: 1484359 - RNA, 19 nt, Artificial Sequence
  Description of Artificial Sequence: Synthetic oligonucleotide
  Antisense strand to SEQ ID NO: 1484358
aaaccaagcaccauuccug

SEQ ID NO: 1484360 - RNA, 19 nt, Artificial Sequence
  Description of Artificial Sequence: Synthetic oligonucleotide
  Sense strand starting at position 3540 of SEQ ID NO: 1244381
cuugguuuccgggagacuu

SEQ ID NO: 1484361 - RNA, 19 nt, Artificial Sequence
  Description of Artificial Sequence: Synthetic oligonucleotide
  Antisense strand to SEQ ID NO: 1484360
aagucucccggaaaccaag

SEQ ID NO: 1484362 - RNA, 19 nt, Artificial Sequence
  Description of Artificial Sequence: Synthetic oligonucleotide
  Sense strand starting at position 3582 of SEQ ID NO: 1244381
gguugaggcagauagguaa

SEQ ID NO: 1484363 - RNA, 19 nt, Artificial Sequence
  Description of Artificial Sequence: Synthetic oligonucleotide
  Antisense strand to SEQ ID NO: 1484362
uuaccuaucugccucaacc

SEQ ID NO: 1484364 - RNA, 19 nt, Artificial Sequence
  Description of Artificial Sequence: Synthetic oligonucleotide
  Sense strand starting at position 3760 of SEQ ID NO: 1244381
uuucguuauuacccugauu

SEQ ID NO: 1484365 - RNA, 19 nt, Artificial Sequence
  Description of Artificial Sequence: Synthetic oligonucleotide
  Antisense strand to SEQ ID NO: 1484364
aaucaggguaauaacgaaa

SEQ ID NO: 1484366 - RNA, 19 nt, Artificial Sequence
  Description of Artificial Sequence: Synthetic oligonucleotide
  Sense strand starting at position 3821 of SEQ ID NO: 1244381
ugaucugaagaaugauugu

SEQ ID NO: 1484367 - RNA, 19 nt, Artificial Sequence
  Description of Artificial Sequence: Synthetic oligonucleotide
  Antisense strand to SEQ ID NO: 1484366
acaaucauucuucagauca

SEQ ID NO: 1484368 - RNA, 19 nt, Artificial Sequence
  Description of Artificial Sequence: Synthetic oligonucleotide
  Sense strand starting at position 3827 of SEQ ID NO: 1244381
gaagaaugauuguuagcuc

SEQ ID NO: 1484369 - RNA, 19 nt, Artificial Sequence
  Description of Artificial Sequence: Synthetic oligonucleotide
  Antisense strand to SEQ ID NO: 1484368
gagcuaacaaucauucuuc

SEQ ID NO: 1484370 - RNA, 19 nt, Artificial Sequence
  Description of Artificial Sequence: Synthetic oligonucleotide
  Sense strand starting at position 3831 of SEQ ID NO: 1244381
aaugauuguuagcucugga

SEQ ID NO: 1484371 - RNA, 19 nt, Artificial Sequence
  Description of Artificial Sequence: Synthetic oligonucleotide
  Antisense strand to SEQ ID NO: 1484370
uccagagcuaacaaucauu

SEQ ID NO: 1484372 - RNA, 19 nt, Artificial Sequence
  Description of Artificial Sequence: Synthetic oligonucleotide
  Sense strand starting at position 3857 of SEQ ID NO: 1244381
acucaagucuagguaacuu

SEQ ID NO: 1484373 - RNA, 19 nt, Artificial Sequence
  Description of Artificial Sequence: Synthetic oligonucleotide
  Antisense strand to SEQ ID NO: 1484372
aaguuaccuagacuugagu

SEQ ID NO: 1484374 - RNA, 19 nt, Artificial Sequence
  Description of Artificial Sequence: Synthetic oligonucleotide
  Sense strand starting at position 288 of SEQ ID NO: 1244382
caggcuuucugaccuagua

SEQ ID NO: 1484375 - RNA, 19 nt, Artificial Sequence
  Description of Artificial Sequence: Synthetic oligonucleotide
  Antisense strand to SEQ ID NO: 1484374
uacuaggucagaaagccug

SEQ ID NO: 1484376 - RNA, 19 nt, Artificial Sequence
  Description of Artificial Sequence: Synthetic oligonucleotide
  Sense strand starting at position 434 of SEQ ID NO: 1244382
ucuugucugccauagaugu

SEQ ID NO: 1484377 - RNA, 19 nt, Artificial Sequence
  Description of Artificial Sequence: Synthetic oligonucleotide
  Antisense strand to SEQ ID NO: 1484376
acaucuauggcagacaaga

SEQ ID NO: 1484378 - RNA, 19 nt, Artificial Sequence
  Description of Artificial Sequence: Synthetic oligonucleotide
  Sense strand starting at position 586 of SEQ ID NO: 1244382
ucauuagacugaguuucuu

SEQ ID NO: 1484379 - RNA, 19 nt, Artificial Sequence
  Description of Artificial Sequence: Synthetic oligonucleotide
  Antisense strand to SEQ ID NO: 1484378
aagaaacucagucuaauga

SEQ ID NO: 1484380 - RNA, 19 nt, Artificial Sequence
  Description of Artificial Sequence: Synthetic oligonucleotide
  Sense strand starting at position 622 of SEQ ID NO: 1244382
aguuaauaccgauacccuu

SEQ ID NO: 1484381 - RNA, 19 nt, Artificial Sequence
  Description of Artificial Sequence: Synthetic oligonucleotide
  Antisense strand to SEQ ID NO: 1484380
aaggguaucgguauuaacu

SEQ ID NO: 1484382 - RNA, 19 nt, Artificial Sequence
  Description of Artificial Sequence: Synthetic oligonucleotide
  Sense strand starting at position 758 of SEQ ID NO: 1244382
ggccaagaauuugacacua

SEQ ID NO: 1484383 - RNA, 19 nt, Artificial Sequence
  Description of Artificial Sequence: Synthetic oligonucleotide
  Antisense strand to SEQ ID NO: 1484382
uagugucaaauucuuggcc

SEQ ID NO: 1484384 - RNA, 19 nt, Artificial Sequence
  Description of Artificial Sequence: Synthetic oligonucleotide
  Sense strand starting at position 917 of SEQ ID NO: 1244382
guggguugcaagugagaac

SEQ ID NO: 1484385 - RNA, 19 nt, Artificial Sequence
  Description of Artificial Sequence: Synthetic oligonucleotide
  Antisense strand to SEQ ID NO: 1484384
guucucacuugcaacccac

SEQ ID NO: 1484386 - RNA, 19 nt, Artificial Sequence
  Description of Artificial Sequence: Synthetic oligonucleotide
  Sense strand starting at position 928 of SEQ ID NO: 1244382
gugagaacauguccaugga

SEQ ID NO: 1484387 - RNA, 19 nt, Artificial Sequence
  Description of Artificial Sequence: Synthetic oligonucleotide
  Antisense strand to SEQ ID NO: 1484386
uccauggacauguucucac

SEQ ID NO: 1484388 - RNA, 19 nt, Artificial Sequence
  Description of Artificial Sequence: Synthetic oligonucleotide
  Sense strand starting at position 931 of SEQ ID NO: 1244382
agaacauguccauggaagu

SEQ ID NO: 1484389 - RNA, 19 nt, Artificial Sequence
  Description of Artificial Sequence: Synthetic oligonucleotide
  Antisense strand to SEQ ID NO: 1484388
acuuccauggacauguucu

SEQ ID NO: 1484390 - RNA, 19 nt, Artificial Sequence
  Description of Artificial Sequence: Synthetic oligonucleotide
  Sense strand starting at position 932 of SEQ ID NO: 1244382
gaacauguccauggaaguc

SEQ ID NO: 1484391 - RNA, 19 nt, Artificial Sequence
  Description of Artificial Sequence: Synthetic oligonucleotide
  Antisense strand to SEQ ID NO: 1484390
gacuuccauggacauguuc

SEQ ID NO: 1484392 - RNA, 19 nt, Artificial Sequence
  Description of Artificial Sequence: Synthetic oligonucleotide
  Sense strand starting at position 946 of SEQ ID NO: 1244382
aagucaguccgcuaucaga

SEQ ID NO: 1484393 - RNA, 19 nt, Artificial Sequence
  Description of Artificial Sequence: Synthetic oligonucleotide
  Antisense strand to SEQ ID NO: 1484392
ucugauagcggacugacuu

SEQ ID NO: 1484394 - RNA, 19 nt, Artificial Sequence
  Description of Artificial Sequence: Synthetic oligonucleotide
  Sense strand starting at position 1016 of SEQ ID NO: 1244382
agcagucauaucuagcgau

SEQ ID NO: 1484395 - RNA, 19 nt, Artificial Sequence
  Description of Artificial Sequence: Synthetic oligonucleotide
  Antisense strand to SEQ ID NO: 1484394
aucgcuagauaugacugcu

SEQ ID NO: 1484396 - RNA, 19 nt, Artificial Sequence
  Description of Artificial Sequence: Synthetic oligonucleotide
  Sense strand starting at position 1056 of SEQ ID NO: 1244382
ggauaagugucauccagcu

SEQ ID NO: 1484397 - RNA, 19 nt, Artificial Sequence
  Description of Artificial Sequence: Synthetic oligonucleotide
  Antisense strand to SEQ ID NO: 1484396
agcuggaugacacuuaucc

SEQ ID NO: 1484398 - RNA, 19 nt, Artificial Sequence
  Description of Artificial Sequence: Synthetic oligonucleotide
  Sense strand starting at position 1062 of SEQ ID NO: 1244382
gugucauccagcuggaaag

SEQ ID NO: 1484399 - RNA, 19 nt, Artificial Sequence
  Description of Artificial Sequence: Synthetic oligonucleotide
  Antisense strand to SEQ ID NO: 1484398
cuuuccagcuggaugacac

SEQ ID NO: 1484400 - RNA, 19 nt, Artificial Sequence
  Description of Artificial Sequence: Synthetic oligonucleotide
  Sense strand starting at position 1063 of SEQ ID NO: 1244382
ugucauccagcuggaaagu

SEQ ID NO: 1484401 - RNA, 19 nt, Artificial Sequence
  Description of Artificial Sequence: Synthetic oligonucleotide
  Antisense strand to SEQ ID NO: 1484400
acuuuccagcuggaugaca

SEQ ID NO: 1484402 - RNA, 19 nt, Artificial Sequence
  Description of Artificial Sequence: Synthetic oligonucleotide
  Sense strand starting at position 1344 of SEQ ID NO: 1244382
cuaagaugugguuagaggu

SEQ ID NO: 1484403 - RNA, 19 nt, Artificial Sequence
  Description of Artificial Sequence: Synthetic oligonucleotide
  Antisense strand to SEQ ID NO: 1484402
accucuaaccacaucuuag

SEQ ID NO: 1484404 - RNA, 19 nt, Artificial Sequence
  Description of Artificial Sequence: Synthetic oligonucleotide
  Sense strand starting at position 2426 of SEQ ID NO: 1244382
uucucacaguccuuggaga

SEQ ID NO: 1484405 - RNA, 19 nt, Artificial Sequence
  Description of Artificial Sequence: Synthetic oligonucleotide
  Antisense strand to SEQ ID NO: 1484404
ucuccaaggacugugagaa

SEQ ID NO: 1484406 - RNA, 19 nt, Artificial Sequence
  Description of Artificial Sequence: Synthetic oligonucleotide
  Sense strand starting at position 2427 of SEQ ID NO: 1244382
ucucacaguccuuggagau

SEQ ID NO: 1484407 - RNA, 19 nt, Artificial Sequence
  Description of Artificial Sequence: Synthetic oligonucleotide
  Antisense strand to SEQ ID NO: 1484406
aucuccaaggacugugaga

SEQ ID NO: 1484408 - RNA, 19 nt, Artificial Sequence
  Description of Artificial Sequence: Synthetic oligonucleotide
  Sense strand starting at position 2428 of SEQ ID NO: 1244382
cucacaguccuuggagaug

SEQ ID NO: 1484409 - RNA, 19 nt, Artificial Sequence
  Description of Artificial Sequence: Synthetic oligonucleotide
  Antisense strand to SEQ ID NO: 1484408
caucuccaaggacugugag

SEQ ID NO: 1484410 - RNA, 19 nt, Artificial Sequence
  Description of Artificial Sequence: Synthetic oligonucleotide
  Sense strand starting at position 2439 of SEQ ID NO: 1244382
uggagaugcugccucugau

SEQ ID NO: 1484411 - RNA, 19 nt, Artificial Sequence
  Description of Artificial Sequence: Synthetic oligonucleotide
  Antisense strand to SEQ ID NO: 1484410
aucagaggcagcaucucca

SEQ ID NO: 1484412 - RNA, 19 nt, Artificial Sequence
  Description of Artificial Sequence: Synthetic oligonucleotide
  Sense strand starting at position 2442 of SEQ ID NO: 1244382
agaugcugccucugauuau

SEQ ID NO: 1484413 - RNA, 19 nt, Artificial Sequence
  Description of Artificial Sequence: Synthetic oligonucleotide
  Antisense strand to SEQ ID NO: 1484412
auaaucagaggcagcaucu

SEQ ID NO: 1484414 - RNA, 19 nt, Artificial Sequence
  Description of Artificial Sequence: Synthetic oligonucleotide
  Sense strand starting at position 2508 of SEQ ID NO: 1244382
ugaggcauucugggauuau

SEQ ID NO: 1484415 - RNA, 19 nt, Artificial Sequence
  Description of Artificial Sequence: Synthetic oligonucleotide
  Antisense strand to SEQ ID NO: 1484414
auaaucccagaaugccuca

SEQ ID NO: 1484416 - RNA, 19 nt, Artificial Sequence
  Description of Artificial Sequence: Synthetic oligonucleotide
  Sense strand starting at position 2560 of SEQ ID NO: 1244382
uggcucucagaauguauga

SEQ ID NO: 1484417 - RNA, 19 nt, Artificial Sequence
  Description of Artificial Sequence: Synthetic oligonucleotide
  Antisense strand to SEQ ID NO: 1484416
ucauacauucugagagcca

SEQ ID NO: 1484418 - RNA, 19 nt, Artificial Sequence
  Description of Artificial Sequence: Synthetic oligonucleotide
  Sense strand starting at position 2562 of SEQ ID NO: 1244382
gcucucagaauguaugaga

SEQ ID NO: 1484419 - RNA, 19 nt, Artificial Sequence
  Description of Artificial Sequence: Synthetic oligonucleotide
  Antisense strand to SEQ ID NO: 1484418
ucucauacauucugagagc

SEQ ID NO: 1484420 - RNA, 19 nt, Artificial Sequence
  Description of Artificial Sequence: Synthetic oligonucleotide
  Sense strand starting at position 2613 of SEQ ID NO: 1244382
aaaguuuagcacuaguagu

SEQ ID NO: 1484421 - RNA, 19 nt, Artificial Sequence
  Description of Artificial Sequence: Synthetic oligonucleotide
  Antisense strand to SEQ ID NO: 1484420
acuacuagugcuaaacuuu

SEQ ID NO: 1484422 - RNA, 19 nt, Artificial Sequence
  Description of Artificial Sequence: Synthetic oligonucleotide
  Sense strand starting at position 2624 of SEQ ID NO: 1244382
cuaguagucaggcaguaaa

SEQ ID NO: 1484423 - RNA, 19 nt, Artificial Sequence
  Description of Artificial Sequence: Synthetic oligonucleotide
  Antisense strand to SEQ ID NO: 1484422
uuuacugccugacuacuag

SEQ ID NO: 1484424 - RNA, 19 nt, Artificial Sequence
  Description of Artificial Sequence: Synthetic oligonucleotide
  Sense strand starting at position 2637 of SEQ ID NO: 1244382
aguaaauuguaccucaaau

SEQ ID NO: 1484425 - RNA, 19 nt, Artificial Sequence
  Description of Artificial Sequence: Synthetic oligonucleotide
  Antisense strand to SEQ ID NO: 1484424
auuugagguacaauuuacu

SEQ ID NO: 1484426 - RNA, 19 nt, Artificial Sequence
  Description of Artificial Sequence: Synthetic oligonucleotide
  Sense strand starting at position 2665 of SEQ ID NO: 1244382
guucuagagccagacaauu

SEQ ID NO: 1484427 - RNA, 19 nt, Artificial Sequence
  Description of Artificial Sequence: Synthetic oligonucleotide
  Antisense strand to SEQ ID NO: 1484426
aauugucuggcucuagaac

SEQ ID NO: 1484428 - RNA, 19 nt, Artificial Sequence
  Description of Artificial Sequence: Synthetic oligonucleotide
  Sense strand starting at position 2674 of SEQ ID NO: 1244382
ccagacaauuggguucuaa

SEQ ID NO: 1484429 - RNA, 19 nt, Artificial Sequence
  Description of Artificial Sequence: Synthetic oligonucleotide
  Antisense strand to SEQ ID NO: 1484428
uuagaacccaauugucugg

SEQ ID NO: 1484430 - RNA, 19 nt, Artificial Sequence
  Description of Artificial Sequence: Synthetic oligonucleotide
  Sense strand starting at position 2696 of SEQ ID NO: 1244382
cagcuaugucggcuuguua

SEQ ID NO: 1484431 - RNA, 19 nt, Artificial Sequence
  Description of Artificial Sequence: Synthetic oligonucleotide
  Antisense strand to SEQ ID NO: 1484430
uaacaagccgacauagcug

SEQ ID NO: 1484432 - RNA, 19 nt, Artificial Sequence
  Description of Artificial Sequence: Synthetic oligonucleotide
  Sense strand starting at position 2711 of SEQ ID NO: 1244382
guuagcuguguguucuuga

SEQ ID NO: 1484433 - RNA, 19 nt, Artificial Sequence
  Description of Artificial Sequence: Synthetic oligonucleotide
  Antisense strand to SEQ ID NO: 1484432
ucaagaacacacagcuaac

SEQ ID NO: 1484434 - RNA, 19 nt, Artificial Sequence
  Description of Artificial Sequence: Synthetic oligonucleotide
  Sense strand starting at position 2716 of SEQ ID NO: 1244382
cuguguguucuugagccaa

SEQ ID NO: 1484435 - RNA, 19 nt, Artificial Sequence
  Description of Artificial Sequence: Synthetic oligonucleotide
  Antisense strand to SEQ ID NO: 1484434
uuggcucaagaacacacag

SEQ ID NO: 1484436 - RNA, 19 nt, Artificial Sequence
  Description of Artificial Sequence: Synthetic oligonucleotide
  Sense strand starting at position 3420 of SEQ ID NO: 1244382
ggccacugccaggguuaaa

SEQ ID NO: 1484437 - RNA, 19 nt, Artificial Sequence
  Description of Artificial Sequence: Synthetic oligonucleotide
  Antisense strand to SEQ ID NO: 1484436
uuuaacccuggcaguggcc

SEQ ID NO: 1484438 - RNA, 19 nt, Artificial Sequence
  Description of Artificial Sequence: Synthetic oligonucleotide
  Sense strand starting at position 3459 of SEQ ID NO: 1244382
uuucuuagcgaguaucuca

SEQ ID NO: 1484439 - RNA, 19 nt, Artificial Sequence
  Description of Artificial Sequence: Synthetic oligonucleotide
  Antisense strand to SEQ ID NO: 1484438
ugagauacucgcuaagaaa

SEQ ID NO: 1484440 - RNA, 19 nt, Artificial Sequence
  Description of Artificial Sequence: Synthetic oligonucleotide
  Sense strand starting at position 3741 of SEQ ID NO: 1244382
uggccugagugugcauuua

SEQ ID NO: 1484441 - RNA, 19 nt, Artificial Sequence
  Description of Artificial Sequence: Synthetic oligonucleotide
  Antisense strand to SEQ ID NO: 1484440
uaaaugcacacucaggcca

SEQ ID NO: 1484442 - RNA, 19 nt, Artificial Sequence
  Description of Artificial Sequence: Synthetic oligonucleotide
  Sense strand starting at position 3787 of SEQ ID NO: 1244382
acuguaguaucuucucagu

SEQ ID NO: 1484443 - RNA, 19 nt, Artificial Sequence
  Description of Artificial Sequence: Synthetic oligonucleotide
  Antisense strand to SEQ ID NO: 1484442
acugagaagauacuacagu

SEQ ID NO: 1484444 - RNA, 19 nt, Artificial Sequence
  Description of Artificial Sequence: Synthetic oligonucleotide
  Sense strand starting at position 3789 of SEQ ID NO: 1244382
uguaguaucuucucaguca

SEQ ID NO: 1484445 - RNA, 19 nt, Artificial Sequence
  Description of Artificial Sequence: Synthetic oligonucleotide
  Antisense strand to SEQ ID NO: 1484444
ugacugagaagauacuaca

SEQ ID NO: 1484446 - RNA, 19 nt, Artificial Sequence
  Description of Artificial Sequence: Synthetic oligonucleotide
  Sense strand starting at position 3792 of SEQ ID NO: 1244382
aguaucuucucagucaauu

SEQ ID NO: 1484447 - RNA, 19 nt, Artificial Sequence
  Description of Artificial Sequence: Synthetic oligonucleotide
  Antisense strand to SEQ ID NO: 1484446
aauugacugagaagauacu

SEQ ID NO: 1484448 - RNA, 19 nt, Artificial Sequence
  Description of Artificial Sequence: Synthetic oligonucleotide
  Sense strand starting at position 3893 of SEQ ID NO: 1244382
gguguaaugucaccugacu

SEQ ID NO: 1484449 - RNA, 19 nt, Artificial Sequence
  Description of Artificial Sequence: Synthetic oligonucleotide
  Antisense strand to SEQ ID NO: 1484448
agucaggugacauuacacc

SEQ ID NO: 1484450 - RNA, 19 nt, Artificial Sequence
  Description of Artificial Sequence: Synthetic oligonucleotide
  Sense strand starting at position 3969 of SEQ ID NO: 1244382
cccugucuccugggacauu

SEQ ID NO: 1484451 - RNA, 19 nt, Artificial Sequence
  Description of Artificial Sequence: Synthetic oligonucleotide
  Antisense strand to SEQ ID NO: 1484450
aaugucccaggagacaggg

SEQ ID NO: 1484452 - RNA, 19 nt, Artificial Sequence
  Description of Artificial Sequence: Synthetic oligonucleotide
  Sense strand starting at position 3970 of SEQ ID NO: 1244382
ccugucuccugggacauuu

SEQ ID NO: 1484453 - RNA, 19 nt, Artificial Sequence
  Description of Artificial Sequence: Synthetic oligonucleotide
  Antisense strand to SEQ ID NO: 1484452
aaaugucccaggagacagg

SEQ ID NO: 1484454 - RNA, 19 nt, Artificial Sequence
  Description of Artificial Sequence: Synthetic oligonucleotide
  Sense strand starting at position 266 of SEQ ID NO: 1244383
ccuggcuugguugaggaua

SEQ ID NO: 1484455 - RNA, 19 nt, Artificial Sequence
  Description of Artificial Sequence: Synthetic oligonucleotide
  Antisense strand to SEQ ID NO: 1484454
uauccucaaccaagccagg

SEQ ID NO: 1484456 - RNA, 19 nt, Artificial Sequence
  Description of Artificial Sequence: Synthetic oligonucleotide
  Sense strand starting at position 432 of SEQ ID NO: 1244383
cuaucauuggcuuauagag

SEQ ID NO: 1484457 - RNA, 19 nt, Artificial Sequence
  Description of Artificial Sequence: Synthetic oligonucleotide
  Antisense strand to SEQ ID NO: 1484456
cucuauaagccaaugauag

SEQ ID NO: 1484458 - RNA, 19 nt, Artificial Sequence
  Description of Artificial Sequence: Synthetic oligonucleotide
  Sense strand starting at position 472 of SEQ ID NO: 1244383
caggauagucuccaguucu

SEQ ID NO: 1484459 - RNA, 19 nt, Artificial Sequence
  Description of Artificial Sequence: Synthetic oligonucleotide
  Antisense strand to SEQ ID NO: 1484458
agaacuggagacuauccug

SEQ ID NO: 1484460 - RNA, 19 nt, Artificial Sequence
  Description of Artificial Sequence: Synthetic oligonucleotide
  Sense strand starting at position 641 of SEQ ID NO: 1244383
aggaauauguugcuauaau

SEQ ID NO: 1484461 - RNA, 19 nt, Artificial Sequence
  Description of Artificial Sequence: Synthetic oligonucleotide
  Antisense strand to SEQ ID NO: 1484460
auuauagcaacauauuccu

SEQ ID NO: 1484462 - RNA, 19 nt, Artificial Sequence
  Description of Artificial Sequence: Synthetic oligonucleotide
  Sense strand starting at position 695 of SEQ ID NO: 1244383
cauuauaaacuugggaguu

SEQ ID NO: 1484463 - RNA, 19 nt, Artificial Sequence
  Description of Artificial Sequence: Synthetic oligonucleotide
  Antisense strand to SEQ ID NO: 1484462
aacucccaaguuuauaaug

SEQ ID NO: 1484464 - RNA, 19 nt, Artificial Sequence
  Description of Artificial Sequence: Synthetic oligonucleotide
  Sense strand starting at position 790 of SEQ ID NO: 1244383
ccaucaauuucuguugucu

SEQ ID NO: 1484465 - RNA, 19 nt, Artificial Sequence
  Description of Artificial Sequence: Synthetic oligonucleotide
  Antisense strand to SEQ ID NO: 1484464
agacaacagaaauugaugg

SEQ ID NO: 1484466 - RNA, 19 nt, Artificial Sequence
  Description of Artificial Sequence: Synthetic oligonucleotide
  Sense strand starting at position 802 of SEQ ID NO: 1244383
guugucucuguauaauaau

SEQ ID NO: 1484467 - RNA, 19 nt, Artificial Sequence
  Description of Artificial Sequence: Synthetic oligonucleotide
  Antisense strand to SEQ ID NO: 1484466
auuauuauacagagacaac

SEQ ID NO: 1484468 - RNA, 19 nt, Artificial Sequence
  Description of Artificial Sequence: Synthetic oligonucleotide
  Sense strand starting at position 1119 of SEQ ID NO: 1244383
gcugaauaugcugacaauc

SEQ ID NO: 1484469 - RNA, 19 nt, Artificial Sequence
  Description of Artificial Sequence: Synthetic oligonucleotide
  Antisense strand to SEQ ID NO: 1484468
gauugucagcauauucagc

SEQ ID NO: 1484470 - RNA, 19 nt, Artificial Sequence
  Description of Artificial Sequence: Synthetic oligonucleotide
  Sense strand starting at position 1366 of SEQ ID NO: 1244383
ugaguaacacuuugaaaug

SEQ ID NO: 1484471 - RNA, 19 nt, Artificial Sequence
  Description of Artificial Sequence: Synthetic oligonucleotide
  Antisense strand to SEQ ID NO: 1484470
cauuucaaaguguuacuca

SEQ ID NO: 1484472 - RNA, 19 nt, Artificial Sequence
  Description of Artificial Sequence: Synthetic oligonucleotide
  Sense strand starting at position 1497 of SEQ ID NO: 1244383
cauauauugcgagggauau

SEQ ID NO: 1484473 - RNA, 19 nt, Artificial Sequence
  Description of Artificial Sequence: Synthetic oligonucleotide
  Antisense strand to SEQ ID NO: 1484472
auaucccucgcaauauaug

SEQ ID NO: 1484474 - RNA, 19 nt, Artificial Sequence
  Description of Artificial Sequence: Synthetic oligonucleotide
  Sense strand starting at position 1498 of SEQ ID NO: 1244383
auauauugcgagggauaug

SEQ ID NO: 1484475 - RNA, 19 nt, Artificial Sequence
  Description of Artificial Sequence: Synthetic oligonucleotide
  Antisense strand to SEQ ID NO: 1484474
cauaucccucgcaauauau

SEQ ID NO: 1484476 - RNA, 19 nt, Artificial Sequence
  Description of Artificial Sequence: Synthetic oligonucleotide
  Sense strand starting at position 1524 of SEQ ID NO: 1244383
gagaaccaguuucuaaagu

SEQ ID NO: 1484477 - RNA, 19 nt, Artificial Sequence
  Description of Artificial Sequence: Synthetic oligonucleotide
  Antisense strand to SEQ ID NO: 1484476
acuuuagaaacugguucuc

SEQ ID NO: 1484478 - RNA, 19 nt, Artificial Sequence
  Description of Artificial Sequence: Synthetic oligonucleotide
  Sense strand starting at position 1556 of SEQ ID NO: 1244383
uuaagagaagcgugaucaa

SEQ ID NO: 1484479 - RNA, 19 nt, Artificial Sequence
  Description of Artificial Sequence: Synthetic oligonucleotide
  Antisense strand to SEQ ID NO: 1484478
uugaucacgcuucucuuaa

SEQ ID NO: 1484480 - RNA, 19 nt, Artificial Sequence
  Description of Artificial Sequence: Synthetic oligonucleotide
  Sense strand starting at position 1559 of SEQ ID NO: 1244383
agagaagcgugaucaacca

SEQ ID NO: 1484481 - RNA, 19 nt, Artificial Sequence
  Description of Artificial Sequence: Synthetic oligonucleotide
  Antisense strand to SEQ ID NO: 1484480
ugguugaucacgcuucucu

SEQ ID NO: 1484482 - RNA, 19 nt, Artificial Sequence
  Description of Artificial Sequence: Synthetic oligonucleotide
  Sense strand starting at position 1566 of SEQ ID NO: 1244383
cgugaucaaccaugaaaug

SEQ ID NO: 1484483 - RNA, 19 nt, Artificial Sequence
  Description of Artificial Sequence: Synthetic oligonucleotide
  Antisense strand to SEQ ID NO: 1484482
cauuucaugguugaucacg

SEQ ID NO: 1484484 - RNA, 19 nt, Artificial Sequence
  Description of Artificial Sequence: Synthetic oligonucleotide
  Sense strand starting at position 1685 of SEQ ID NO: 1244383
aucagaaucuuaccguaga

SEQ ID NO: 1484485 - RNA, 19 nt, Artificial Sequence
  Description of Artificial Sequence: Synthetic oligonucleotide
  Antisense strand to SEQ ID NO: 1484484
ucuacgguaagauucugau

SEQ ID NO: 1484486 - RNA, 19 nt, Artificial Sequence
  Description of Artificial Sequence: Synthetic oligonucleotide
  Sense strand starting at position 1718 of SEQ ID NO: 1244383
guggaucagaacuguaaga

SEQ ID NO: 1484487 - RNA, 19 nt, Artificial Sequence
  Description of Artificial Sequence: Synthetic oligonucleotide
  Antisense strand to SEQ ID NO: 1484486
ucuuacaguucugauccac

SEQ ID NO: 1484488 - RNA, 19 nt, Artificial Sequence
  Description of Artificial Sequence: Synthetic oligonucleotide
  Sense strand starting at position 2177 of SEQ ID NO: 1244383
ggguuaaguauaugaauca

SEQ ID NO: 1484489 - RNA, 19 nt, Artificial Sequence
  Description of Artificial Sequence: Synthetic oligonucleotide
  Antisense strand to SEQ ID NO: 1484488
ugauucauauacuuaaccc

SEQ ID NO: 1484490 - RNA, 19 nt, Artificial Sequence
  Description of Artificial Sequence: Synthetic oligonucleotide
  Sense strand starting at position 2208 of SEQ ID NO: 1244383
uaauuugagucguuggcaa

SEQ ID NO: 1484491 - RNA, 19 nt, Artificial Sequence
  Description of Artificial Sequence: Synthetic oligonucleotide
  Antisense strand to SEQ ID NO: 1484490
uugccaacgacucaaauua

SEQ ID NO: 1484492 - RNA, 19 nt, Artificial Sequence
  Description of Artificial Sequence: Synthetic oligonucleotide
  Sense strand starting at position 2210 of SEQ ID NO: 1244383
auuugagucguuggcaauc

SEQ ID NO: 1484493 - RNA, 19 nt, Artificial Sequence
  Description of Artificial Sequence: Synthetic oligonucleotide
  Antisense strand to SEQ ID NO: 1484492
gauugccaacgacucaaau

SEQ ID NO: 1484494 - RNA, 19 nt, Artificial Sequence
  Description of Artificial Sequence: Synthetic oligonucleotide
  Sense strand starting at position 2281 of SEQ ID NO: 1244383
ucuggaaucccuggacuuu

SEQ ID NO: 1484495 - RNA, 19 nt, Artificial Sequence
  Description of Artificial Sequence: Synthetic oligonucleotide
  Antisense strand to SEQ ID NO: 1484494
aaaguccagggauuccaga

SEQ ID NO: 1484496 - RNA, 19 nt, Artificial Sequence
  Description of Artificial Sequence: Synthetic oligonucleotide
  Sense strand starting at position 2369 of SEQ ID NO: 1244383
gauaguguacucgggagga

SEQ ID NO: 1484497 - RNA, 19 nt, Artificial Sequence
  Description of Artificial Sequence: Synthetic oligonucleotide
  Antisense strand to SEQ ID NO: 1484496
uccucccgaguacacuauc

SEQ ID NO: 1484498 - RNA, 19 nt, Artificial Sequence
  Description of Artificial Sequence: Synthetic oligonucleotide
  Sense strand starting at position 2371 of SEQ ID NO: 1244383
uaguguacucgggaggaaa

SEQ ID NO: 1484499 - RNA, 19 nt, Artificial Sequence
  Description of Artificial Sequence: Synthetic oligonucleotide
  Antisense strand to SEQ ID NO: 1484498
uuuccucccgaguacacua

SEQ ID NO: 1484500 - RNA, 19 nt, Artificial Sequence
  Description of Artificial Sequence: Synthetic oligonucleotide
  Sense strand starting at position 2754 of SEQ ID NO: 1244383
cuaaauaugcagcaucgau

SEQ ID NO: 1484501 - RNA, 19 nt, Artificial Sequence
  Description of Artificial Sequence: Synthetic oligonucleotide
  Antisense strand to SEQ ID NO: 1484500
aucgaugcugcauauuuag

SEQ ID NO: 1484502 - RNA, 19 nt, Artificial Sequence
  Description of Artificial Sequence: Synthetic oligonucleotide
  Sense strand starting at position 2758 of SEQ ID NO: 1244383
auaugcagcaucgaugauu

SEQ ID NO: 1484503 - RNA, 19 nt, Artificial Sequence
  Description of Artificial Sequence: Synthetic oligonucleotide
  Antisense strand to SEQ ID NO: 1484502
aaucaucgaugcugcauau

SEQ ID NO: 1484504 - RNA, 19 nt, Artificial Sequence
  Description of Artificial Sequence: Synthetic oligonucleotide
  Sense strand starting at position 2785 of SEQ ID NO: 1244383
aucagcaguccaugggaua

SEQ ID NO: 1484505 - RNA, 19 nt, Artificial Sequence
  Description of Artificial Sequence: Synthetic oligonucleotide
  Antisense strand to SEQ ID NO: 1484504
uaucccauggacugcugau

SEQ ID NO: 1484506 - RNA, 19 nt, Artificial Sequence
  Description of Artificial Sequence: Synthetic oligonucleotide
  Sense strand starting at position 3014 of SEQ ID NO: 1244383
ugccuuaugaaaggagaua

SEQ ID NO: 1484507 - RNA, 19 nt, Artificial Sequence
  Description of Artificial Sequence: Synthetic oligonucleotide
  Antisense strand to SEQ ID NO: 1484506
uaucuccuuucauaaggca

SEQ ID NO: 1484508 - RNA, 19 nt, Artificial Sequence
  Description of Artificial Sequence: Synthetic oligonucleotide
  Sense strand starting at position 3035 of SEQ ID NO: 1244383
uggauauacuaguuguaaa

SEQ ID NO: 1484509 - RNA, 19 nt, Artificial Sequence
  Description of Artificial Sequence: Synthetic oligonucleotide
  Antisense strand to SEQ ID NO: 1484508
uuuacaacuaguauaucca

SEQ ID NO: 1484510 - RNA, 19 nt, Artificial Sequence
  Description of Artificial Sequence: Synthetic oligonucleotide
  Sense strand starting at position 3169 of SEQ ID NO: 1244383
agacucuggucaucugacu

SEQ ID NO: 1484511 - RNA, 19 nt, Artificial Sequence
  Description of Artificial Sequence: Synthetic oligonucleotide
  Antisense strand to SEQ ID NO: 1484510
agucagaugaccagagucu

SEQ ID NO: 1484512 - RNA, 19 nt, Artificial Sequence
  Description of Artificial Sequence: Synthetic oligonucleotide
  Sense strand starting at position 3453 of SEQ ID NO: 1244383
ugucuugcucuggauaaac

SEQ ID NO: 1484513 - RNA, 19 nt, Artificial Sequence
  Description of Artificial Sequence: Synthetic oligonucleotide
  Antisense strand to SEQ ID NO: 1484512
guuuauccagagcaagaca

SEQ ID NO: 1484514 - RNA, 19 nt, Artificial Sequence
  Description of Artificial Sequence: Synthetic oligonucleotide
  Sense strand starting at position 3455 of SEQ ID NO: 1244383
ucuugcucuggauaaacuu

SEQ ID NO: 1484515 - RNA, 19 nt, Artificial Sequence
  Description of Artificial Sequence: Synthetic oligonucleotide
  Antisense strand to SEQ ID NO: 1484514
aaguuuauccagagcaaga

SEQ ID NO: 1484516 - RNA, 19 nt, Artificial Sequence
  Description of Artificial Sequence: Synthetic oligonucleotide
  Sense strand starting at position 3542 of SEQ ID NO: 1244383
ccacgugauacaggaacaa

SEQ ID NO: 1484517 - RNA, 19 nt, Artificial Sequence
  Description of Artificial Sequence: Synthetic oligonucleotide
  Antisense strand to SEQ ID NO: 1484516
uuguuccuguaucacgugg

SEQ ID NO: 1484518 - RNA, 19 nt, Artificial Sequence
  Description of Artificial Sequence: Synthetic oligonucleotide
  Sense strand starting at position 3644 of SEQ ID NO: 1244383
guuaaacuaccaugucuaa

SEQ ID NO: 1484519 - RNA, 19 nt, Artificial Sequence
  Description of Artificial Sequence: Synthetic oligonucleotide
  Antisense strand to SEQ ID NO: 1484518
uuagacaugguaguuuaac

SEQ ID NO: 1484520 - RNA, 19 nt, Artificial Sequence
  Description of Artificial Sequence: Synthetic oligonucleotide
  Sense strand starting at position 3711 of SEQ ID NO: 1244383
ucuauuugaugggaaguua

SEQ ID NO: 1484521 - RNA, 19 nt, Artificial Sequence
  Description of Artificial Sequence: Synthetic oligonucleotide
  Antisense strand to SEQ ID NO: 1484520
uaacuucccaucaaauaga

SEQ ID NO: 1484522 - RNA, 19 nt, Artificial Sequence
  Description of Artificial Sequence: Synthetic oligonucleotide
  Sense strand starting at position 3744 of SEQ ID NO: 1244383
cuuuauucugucgaggaag

SEQ ID NO: 1484523 - RNA, 19 nt, Artificial Sequence
  Description of Artificial Sequence: Synthetic oligonucleotide
  Antisense strand to SEQ ID NO: 1484522
cuuccucgacagaauaaag

SEQ ID NO: 1484524 - RNA, 19 nt, Artificial Sequence
  Description of Artificial Sequence: Synthetic oligonucleotide
  Sense strand starting at position 3747 of SEQ ID NO: 1244383
uauucugucgaggaagguu

SEQ ID NO: 1484525 - RNA, 19 nt, Artificial Sequence
  Description of Artificial Sequence: Synthetic oligonucleotide
  Antisense strand to SEQ ID NO: 1484524
aaccuuccucgacagaaua

SEQ ID NO: 1484526 - RNA, 19 nt, Artificial Sequence
  Description of Artificial Sequence: Synthetic oligonucleotide
  Sense strand starting at position 3829 of SEQ ID NO: 1244383
cucugagugguccagauug

SEQ ID NO: 1484527 - RNA, 19 nt, Artificial Sequence
  Description of Artificial Sequence: Synthetic oligonucleotide
  Antisense strand to SEQ ID NO: 1484526
caaucuggaccacucagag

SEQ ID NO: 1484528 - RNA, 19 nt, Artificial Sequence
  Description of Artificial Sequence: Synthetic oligonucleotide
  Sense strand starting at position 3839 of SEQ ID NO: 1244383
uccagauugcuaugauauc

SEQ ID NO: 1484529 - RNA, 19 nt, Artificial Sequence
  Description of Artificial Sequence: Synthetic oligonucleotide
  Antisense strand to SEQ ID NO: 1484528
gauaucauagcaaucugga

SEQ ID NO: 1484530 - RNA, 19 nt, Artificial Sequence
  Description of Artificial Sequence: Synthetic oligonucleotide
  Sense strand starting at position 3889 of SEQ ID NO: 1244383
auguguguugaauauagau

SEQ ID NO: 1484531 - RNA, 19 nt, Artificial Sequence
  Description of Artificial Sequence: Synthetic oligonucleotide
  Antisense strand to SEQ ID NO: 1484530
aucuauauucaacacacau

SEQ ID NO: 1484532 - RNA, 19 nt, Artificial Sequence
  Description of Artificial Sequence: Synthetic oligonucleotide
  Sense strand starting at position 3967 of SEQ ID NO: 1244383
uuuauaugauuaucuggga

SEQ ID NO: 1484533 - RNA, 19 nt, Artificial Sequence
  Description of Artificial Sequence: Synthetic oligonucleotide
  Antisense strand to SEQ ID NO: 1484532
ucccagauaaucauauaaa

SEQ ID NO: 1484534 - RNA, 19 nt, Artificial Sequence
  Description of Artificial Sequence: Synthetic oligonucleotide
  Sense strand starting at position 20 of SEQ ID NO: 1244384
gcauaaaccgcugaagcau

SEQ ID NO: 1484535 - RNA, 19 nt, Artificial Sequence
  Description of Artificial Sequence: Synthetic oligonucleotide
  Antisense strand to SEQ ID NO: 1484534
augcuucagcgguuuaugc

SEQ ID NO: 1484536 - RNA, 19 nt, Artificial Sequence
  Description of Artificial Sequence: Synthetic oligonucleotide
  Sense strand starting at position 94 of SEQ ID NO: 1244384
cucagcugccuucguuaua

SEQ ID NO: 1484537 - RNA, 19 nt, Artificial Sequence
  Description of Artificial Sequence: Synthetic oligonucleotide
  Antisense strand to SEQ ID NO: 1484536
uauaacgaaggcagcugag

SEQ ID NO: 1484538 - RNA, 19 nt, Artificial Sequence
  Description of Artificial Sequence: Synthetic oligonucleotide
  Sense strand starting at position 95 of SEQ ID NO: 1244384
ucagcugccuucguuauaa

SEQ ID NO: 1484539 - RNA, 19 nt, Artificial Sequence
  Description of Artificial Sequence: Synthetic oligonucleotide
  Antisense strand to SEQ ID NO: 1484538
uuauaacgaaggcagcuga

SEQ ID NO: 1484540 - RNA, 19 nt, Artificial Sequence
  Description of Artificial Sequence: Synthetic oligonucleotide
  Sense strand starting at position 97 of SEQ ID NO: 1244384
agcugccuucguuauaaug

SEQ ID NO: 1484541 - RNA, 19 nt, Artificial Sequence
  Description of Artificial Sequence: Synthetic oligonucleotide
  Antisense strand to SEQ ID NO: 1484540
cauuauaacgaaggcagcu

SEQ ID NO: 1484542 - RNA, 19 nt, Artificial Sequence
  Description of Artificial Sequence: Synthetic oligonucleotide
  Sense strand starting at position 171 of SEQ ID NO: 1244384
cugccaaagcucgugcuau

SEQ ID NO: 1484543 - RNA, 19 nt, Artificial Sequence
  Description of Artificial Sequence: Synthetic oligonucleotide
  Antisense strand to SEQ ID NO: 1484542
auagcacgagcuuuggcag

SEQ ID NO: 1484544 - RNA, 19 nt, Artificial Sequence
  Description of Artificial Sequence: Synthetic oligonucleotide
  Sense strand starting at position 173 of SEQ ID NO: 1244384
gccaaagcucgugcuauau

SEQ ID NO: 1484545 - RNA, 19 nt, Artificial Sequence
  Description of Artificial Sequence: Synthetic oligonucleotide
  Antisense strand to SEQ ID NO: 1484544
auauagcacgagcuuuggc

SEQ ID NO: 1484546 - RNA, 19 nt, Artificial Sequence
  Description of Artificial Sequence: Synthetic oligonucleotide
  Sense strand starting at position 181 of SEQ ID NO: 1244384
ucgugcuauaucgcacaau

SEQ ID NO: 1484547 - RNA, 19 nt, Artificial Sequence
  Description of Artificial Sequence: Synthetic oligonucleotide
  Antisense strand to SEQ ID NO: 1484546
auugugcgauauagcacga

SEQ ID NO: 1484548 - RNA, 19 nt, Artificial Sequence
  Description of Artificial Sequence: Synthetic oligonucleotide
  Sense strand starting at position 184 of SEQ ID NO: 1244384
ugcuauaucgcacaauuac

SEQ ID NO: 1484549 - RNA, 19 nt, Artificial Sequence
  Description of Artificial Sequence: Synthetic oligonucleotide
  Antisense strand to SEQ ID NO: 1484548
guaauugugcgauauagca

SEQ ID NO: 1484550 - RNA, 19 nt, Artificial Sequence
  Description of Artificial Sequence: Synthetic oligonucleotide
  Sense strand starting at position 208 of SEQ ID NO: 1244384
augcuuucuccagauaagg

SEQ ID NO: 1484551 - RNA, 19 nt, Artificial Sequence
  Description of Artificial Sequence: Synthetic oligonucleotide
  Antisense strand to SEQ ID NO: 1484550
ccuuaucuggagaaagcau

SEQ ID NO: 1484552 - RNA, 19 nt, Artificial Sequence
  Description of Artificial Sequence: Synthetic oligonucleotide
  Sense strand starting at position 398 of SEQ ID NO: 1244384
uuuccagagugagauacua

SEQ ID NO: 1484553 - RNA, 19 nt, Artificial Sequence
  Description of Artificial Sequence: Synthetic oligonucleotide
  Antisense strand to SEQ ID NO: 1484552
uaguaucucacucuggaaa

SEQ ID NO: 1484554 - RNA, 19 nt, Artificial Sequence
  Description of Artificial Sequence: Synthetic oligonucleotide
  Sense strand starting at position 406 of SEQ ID NO: 1244384
gugagauacuaucaagaau

SEQ ID NO: 1484555 - RNA, 19 nt, Artificial Sequence
  Description of Artificial Sequence: Synthetic oligonucleotide
  Antisense strand to SEQ ID NO: 1484554
auucuugauaguaucucac

SEQ ID NO: 1484556 - RNA, 19 nt, Artificial Sequence
  Description of Artificial Sequence: Synthetic oligonucleotide
  Sense strand starting at position 490 of SEQ ID NO: 1244384
guauuauguuugguauuac

SEQ ID NO: 1484557 - RNA, 19 nt, Artificial Sequence
  Description of Artificial Sequence: Synthetic oligonucleotide
  Antisense strand to SEQ ID NO: 1484556
guaauaccaaacauaauac

SEQ ID NO: 1484558 - RNA, 19 nt, Artificial Sequence
  Description of Artificial Sequence: Synthetic oligonucleotide
  Sense strand starting at position 612 of SEQ ID NO: 1244384
cgcagugaucuugaaggga

SEQ ID NO: 1484559 - RNA, 19 nt, Artificial Sequence
  Description of Artificial Sequence: Synthetic oligonucleotide
  Antisense strand to SEQ ID NO: 1484558
ucccuucaagaucacugcg

SEQ ID NO: 1484560 - RNA, 19 nt, Artificial Sequence
  Description of Artificial Sequence: Synthetic oligonucleotide
  Sense strand starting at position 2997 of SEQ ID NO: 1244384
aucagagcucccuacguga

SEQ ID NO: 1484561 - RNA, 19 nt, Artificial Sequence
  Description of Artificial Sequence: Synthetic oligonucleotide
  Antisense strand to SEQ ID NO: 1484560
ucacguagggagcucugau

SEQ ID NO: 1484562 - RNA, 19 nt, Artificial Sequence
  Description of Artificial Sequence: Synthetic oligonucleotide
  Sense strand starting at position 3016 of SEQ ID NO: 1244384
agggcuaugagagguucuu

SEQ ID NO: 1484563 - RNA, 19 nt, Artificial Sequence
  Description of Artificial Sequence: Synthetic oligonucleotide
  Antisense strand to SEQ ID NO: 1484562
aagaaccucucauagcccu

SEQ ID NO: 1484564 - RNA, 19 nt, Artificial Sequence
  Description of Artificial Sequence: Synthetic oligonucleotide
  Sense strand starting at position 3022 of SEQ ID NO: 1244384
augagagguucuuaagaau

SEQ ID NO: 1484565 - RNA, 19 nt, Artificial Sequence
  Description of Artificial Sequence: Synthetic oligonucleotide
  Antisense strand to SEQ ID NO: 1484564
auucuuaagaaccucucau

SEQ ID NO: 1484566 - RNA, 19 nt, Artificial Sequence
  Description of Artificial Sequence: Synthetic oligonucleotide
  Sense strand starting at position 3025 of SEQ ID NO: 1244384
agagguucuuaagaauaua

SEQ ID NO: 1484567 - RNA, 19 nt, Artificial Sequence
  Description of Artificial Sequence: Synthetic oligonucleotide
  Antisense strand to SEQ ID NO: 1484566
uauauucuuaagaaccucu

SEQ ID NO: 1484568 - RNA, 19 nt, Artificial Sequence
  Description of Artificial Sequence: Synthetic oligonucleotide
  Sense strand starting at position 3046 of SEQ ID NO: 1244384
gcuggauuccuguagcgcu

SEQ ID NO: 1484569 - RNA, 19 nt, Artificial Sequence
  Description of Artificial Sequence: Synthetic oligonucleotide
  Antisense strand to SEQ ID NO: 1484568
agcgcuacaggaauccagc

SEQ ID NO: 1484570 - RNA, 19 nt, Artificial Sequence
  Description of Artificial Sequence: Synthetic oligonucleotide
  Sense strand starting at position 3053 of SEQ ID NO: 1244384
uccuguagcgcugucauau

SEQ ID NO: 1484571 - RNA, 19 nt, Artificial Sequence
  Description of Artificial Sequence: Synthetic oligonucleotide
  Antisense strand to SEQ ID NO: 1484570
auaugacagcgcuacagga

SEQ ID NO: 1484572 - RNA, 19 nt, Artificial Sequence
  Description of Artificial Sequence: Synthetic oligonucleotide
  Sense strand starting at position 3054 of SEQ ID NO: 1244384
ccuguagcgcugucauauc

SEQ ID NO: 1484573 - RNA, 19 nt, Artificial Sequence
  Description of Artificial Sequence: Synthetic oligonucleotide
  Antisense strand to SEQ ID NO: 1484572
gauaugacagcgcuacagg

SEQ ID NO: 1484574 - RNA, 19 nt, Artificial Sequence
  Description of Artificial Sequence: Synthetic oligonucleotide
  Sense strand starting at position 3163 of SEQ ID NO: 1244384
augaaaugucugcagaauc

SEQ ID NO: 1484575 - RNA, 19 nt, Artificial Sequence
  Description of Artificial Sequence: Synthetic oligonucleotide
  Antisense strand to SEQ ID NO: 1484574
gauucugcagacauuucau

SEQ ID NO: 1484576 - RNA, 19 nt, Artificial Sequence
  Description of Artificial Sequence: Synthetic oligonucleotide
  Sense strand starting at position 3305 of SEQ ID NO: 1244384
ugcaguuauuaaucaguua

SEQ ID NO: 1484577 - RNA, 19 nt, Artificial Sequence
  Description of Artificial Sequence: Synthetic oligonucleotide
  Antisense strand to SEQ ID NO: 1484576
uaacugauuaauaacugca

SEQ ID NO: 1484578 - RNA, 19 nt, Artificial Sequence
  Description of Artificial Sequence: Synthetic oligonucleotide
  Sense strand starting at position 3360 of SEQ ID NO: 1244384
uaaugauguguuugccuaa

SEQ ID NO: 1484579 - RNA, 19 nt, Artificial Sequence
  Description of Artificial Sequence: Synthetic oligonucleotide
  Antisense strand to SEQ ID NO: 1484578
uuaggcaaacacaucauua

SEQ ID NO: 1484580 - RNA, 19 nt, Artificial Sequence
  Description of Artificial Sequence: Synthetic oligonucleotide
  Sense strand starting at position 3361 of SEQ ID NO: 1244384
aaugauguguuugccuaag

SEQ ID NO: 1484581 - RNA, 19 nt, Artificial Sequence
  Description of Artificial Sequence: Synthetic oligonucleotide
  Antisense strand to SEQ ID NO: 1484580
cuuaggcaaacacaucauu

SEQ ID NO: 1484582 - RNA, 19 nt, Artificial Sequence
  Description of Artificial Sequence: Synthetic oligonucleotide
  Sense strand starting at position 3370 of SEQ ID NO: 1244384
uuugccuaagccuaggaaa

SEQ ID NO: 1484583 - RNA, 19 nt, Artificial Sequence
  Description of Artificial Sequence: Synthetic oligonucleotide
  Antisense strand to SEQ ID NO: 1484582
uuuccuaggcuuaggcaaa

SEQ ID NO: 1484584 - RNA, 19 nt, Artificial Sequence
  Description of Artificial Sequence: Synthetic oligonucleotide
  Sense strand starting at position 3386 of SEQ ID NO: 1244384
aaacgucuagucuggcaaa

SEQ ID NO: 1484585 - RNA, 19 nt, Artificial Sequence
  Description of Artificial Sequence: Synthetic oligonucleotide
  Antisense strand to SEQ ID NO: 1484584
uuugccagacuagacguuu

SEQ ID NO: 1484586 - RNA, 19 nt, Artificial Sequence
  Description of Artificial Sequence: Synthetic oligonucleotide
  Sense strand starting at position 3601 of SEQ ID NO: 1244384
gugacuuggcucugugaag

SEQ ID NO: 1484587 - RNA, 19 nt, Artificial Sequence
  Description of Artificial Sequence: Synthetic oligonucleotide
  Antisense strand to SEQ ID NO: 1484586
cuucacagagccaagucac

SEQ ID NO: 1484588 - RNA, 19 nt, Artificial Sequence
  Description of Artificial Sequence: Synthetic oligonucleotide
  Sense strand starting at position 3602 of SEQ ID NO: 1244384
ugacuuggcucugugaaga

SEQ ID NO: 1484589 - RNA, 19 nt, Artificial Sequence
  Description of Artificial Sequence: Synthetic oligonucleotide
  Antisense strand to SEQ ID NO: 1484588
ucuucacagagccaaguca

SEQ ID NO: 1484590 - RNA, 19 nt, Artificial Sequence
  Description of Artificial Sequence: Synthetic oligonucleotide
  Sense strand starting at position 3613 of SEQ ID NO: 1244384
ugugaagaggucuguccuu

SEQ ID NO: 1484591 - RNA, 19 nt, Artificial Sequence
  Description of Artificial Sequence: Synthetic oligonucleotide
  Antisense strand to SEQ ID NO: 1484590
aaggacagaccucuucaca

SEQ ID NO: 1484592 - RNA, 19 nt, Artificial Sequence
  Description of Artificial Sequence: Synthetic oligonucleotide
  Sense strand starting at position 3618 of SEQ ID NO: 1244384
agaggucuguccuucuaau

SEQ ID NO: 1484593 - RNA, 19 nt, Artificial Sequence
  Description of Artificial Sequence: Synthetic oligonucleotide
  Antisense strand to SEQ ID NO: 1484592
auuagaaggacagaccucu

SEQ ID NO: 1484594 - RNA, 19 nt, Artificial Sequence
  Description of Artificial Sequence: Synthetic oligonucleotide
  Sense strand starting at position 3637 of SEQ ID NO: 1244384
gcagucugcacauggagua

SEQ ID NO: 1484595 - RNA, 19 nt, Artificial Sequence
  Description of Artificial Sequence: Synthetic oligonucleotide
  Antisense strand to SEQ ID NO: 1484594
uacuccaugugcagacugc

SEQ ID NO: 1484596 - RNA, 19 nt, Artificial Sequence
  Description of Artificial Sequence: Synthetic oligonucleotide
  Sense strand starting at position 3770 of SEQ ID NO: 1244384
gaagucauuucucagugca

SEQ ID NO: 1484597 - RNA, 19 nt, Artificial Sequence
  Description of Artificial Sequence: Synthetic oligonucleotide
  Antisense strand to SEQ ID NO: 1484596
ugcacugagaaaugacuuc

SEQ ID NO: 1484598 - RNA, 19 nt, Artificial Sequence
  Description of Artificial Sequence: Synthetic oligonucleotide
  Sense strand starting at position 3773 of SEQ ID NO: 1244384
gucauuucucagugcaaug

SEQ ID NO: 1484599 - RNA, 19 nt, Artificial Sequence
  Description of Artificial Sequence: Synthetic oligonucleotide
  Antisense strand to SEQ ID NO: 1484598
cauugcacugagaaaugac

SEQ ID NO: 1484600 - RNA, 19 nt, Artificial Sequence
  Description of Artificial Sequence: Synthetic oligonucleotide
  Sense strand starting at position 3778 of SEQ ID NO: 1244384
uucucagugcaauguucua

SEQ ID NO: 1484601 - RNA, 19 nt, Artificial Sequence
  Description of Artificial Sequence: Synthetic oligonucleotide
  Antisense strand to SEQ ID NO: 1484600
uagaacauugcacugagaa

SEQ ID NO: 1484602 - RNA, 19 nt, Artificial Sequence
  Description of Artificial Sequence: Synthetic oligonucleotide
  Sense strand starting at position 3802 of SEQ ID NO: 1244384
agugcauccacucgcgaau

SEQ ID NO: 1484603 - RNA, 19 nt, Artificial Sequence
  Description of Artificial Sequence: Synthetic oligonucleotide
  Antisense strand to SEQ ID NO: 1484602
auucgcgaguggaugcacu

SEQ ID NO: 1484604 - RNA, 19 nt, Artificial Sequence
  Description of Artificial Sequence: Synthetic oligonucleotide
  Sense strand starting at position 3803 of SEQ ID NO: 1244384
gugcauccacucgcgaaua

SEQ ID NO: 1484605 - RNA, 19 nt, Artificial Sequence
  Description of Artificial Sequence: Synthetic oligonucleotide
  Antisense strand to SEQ ID NO: 1484604
uauucgcgaguggaugcac

SEQ ID NO: 1484606 - RNA, 19 nt, Artificial Sequence
  Description of Artificial Sequence: Synthetic oligonucleotide
  Sense strand starting at position 3816 of SEQ ID NO: 1244384
cgaauaacacuguaagcca

SEQ ID NO: 1484607 - RNA, 19 nt, Artificial Sequence
  Description of Artificial Sequence: Synthetic oligonucleotide
  Antisense strand to SEQ ID NO: 1484606
uggcuuacaguguuauucg

SEQ ID NO: 1484608 - RNA, 19 nt, Artificial Sequence
  Description of Artificial Sequence: Synthetic oligonucleotide
  Sense strand starting at position 3831 of SEQ ID NO: 1244384
gccacagagucaguaguuu

SEQ ID NO: 1484609 - RNA, 19 nt, Artificial Sequence
  Description of Artificial Sequence: Synthetic oligonucleotide
  Antisense strand to SEQ ID NO: 1484608
aaacuacugacucuguggc

SEQ ID NO: 1484610 - RNA, 19 nt, Artificial Sequence
  Description of Artificial Sequence: Synthetic oligonucleotide
  Sense strand starting at position 3835 of SEQ ID NO: 1244384
cagagucaguaguuucuca

SEQ ID NO: 1484611 - RNA, 19 nt, Artificial Sequence
  Description of Artificial Sequence: Synthetic oligonucleotide
  Antisense strand to SEQ ID NO: 1484610
ugagaaacuacugacucug

SEQ ID NO: 1484612 - RNA, 19 nt, Artificial Sequence
  Description of Artificial Sequence: Synthetic oligonucleotide
  Sense strand starting at position 3839 of SEQ ID NO: 1244384
gucaguaguuucucauaau

SEQ ID NO: 1484613 - RNA, 19 nt, Artificial Sequence
  Description of Artificial Sequence: Synthetic oligonucleotide
  Antisense strand to SEQ ID NO: 1484612
auuaugagaaacuacugac

SEQ ID NO: 1484614 - RNA, 19 nt, Artificial Sequence
  Description of Artificial Sequence: Synthetic oligonucleotide
  Sense strand starting at position 127 of SEQ ID NO: 1244385
caagaaugagaacguguaa

SEQ ID NO: 1484615 - RNA, 19 nt, Artificial Sequence
  Description of Artificial Sequence: Synthetic oligonucleotide
  Antisense strand to SEQ ID NO: 1484614
uuacacguucucauucuug

SEQ ID NO: 1484616 - RNA, 19 nt, Artificial Sequence
  Description of Artificial Sequence: Synthetic oligonucleotide
  Sense strand starting at position 374 of SEQ ID NO: 1244385
gaugguguggaaugaaaua

SEQ ID NO: 1484617 - RNA, 19 nt, Artificial Sequence
  Description of Artificial Sequence: Synthetic oligonucleotide
  Antisense strand to SEQ ID NO: 1484616
uauuucauuccacaccauc

SEQ ID NO: 1484618 - RNA, 19 nt, Artificial Sequence
  Description of Artificial Sequence: Synthetic oligonucleotide
  Sense strand starting at position 543 of SEQ ID NO: 1244385
caguaucugcccuauagga

SEQ ID NO: 1484619 - RNA, 19 nt, Artificial Sequence
  Description of Artificial Sequence: Synthetic oligonucleotide
  Antisense strand to SEQ ID NO: 1484618
uccuauagggcagauacug

SEQ ID NO: 1484620 - RNA, 19 nt, Artificial Sequence
  Description of Artificial Sequence: Synthetic oligonucleotide
  Sense strand starting at position 545 of SEQ ID NO: 1244385
guaucugcccuauaggaau

SEQ ID NO: 1484621 - RNA, 19 nt, Artificial Sequence
  Description of Artificial Sequence: Synthetic oligonucleotide
  Antisense strand to SEQ ID NO: 1484620
auuccuauagggcagauac

SEQ ID NO: 1484622 - RNA, 19 nt, Artificial Sequence
  Description of Artificial Sequence: Synthetic oligonucleotide
  Sense strand starting at position 581 of SEQ ID NO: 1244385
auaagagaaugcucaagua

SEQ ID NO: 1484623 - RNA, 19 nt, Artificial Sequence
  Description of Artificial Sequence: Synthetic oligonucleotide
  Antisense strand to SEQ ID NO: 1484622
uacuugagcauucucuuau

SEQ ID NO: 1484624 - RNA, 19 nt, Artificial Sequence
  Description of Artificial Sequence: Synthetic oligonucleotide
  Sense strand starting at position 593 of SEQ ID NO: 1244385
ucaaguaagucuuugaaca

SEQ ID NO: 1484625 - RNA, 19 nt, Artificial Sequence
  Description of Artificial Sequence: Synthetic oligonucleotide
  Antisense strand to SEQ ID NO: 1484624
uguucaaagacuuacuuga

SEQ ID NO: 1484626 - RNA, 19 nt, Artificial Sequence
  Description of Artificial Sequence: Synthetic oligonucleotide
  Sense strand starting at position 594 of SEQ ID NO: 1244385
caaguaagucuuugaacag

SEQ ID NO: 1484627 - RNA, 19 nt, Artificial Sequence
  Description of Artificial Sequence: Synthetic oligonucleotide
  Antisense strand to SEQ ID NO: 1484626
cuguucaaagacuuacuug

SEQ ID NO: 1484628 - RNA, 19 nt, Artificial Sequence
  Description of Artificial Sequence: Synthetic oligonucleotide
  Sense strand starting at position 720 of SEQ ID NO: 1244385
gggaaugcuccagauugca

SEQ ID NO: 1484629 - RNA, 19 nt, Artificial Sequence
  Description of Artificial Sequence: Synthetic oligonucleotide
  Antisense strand to SEQ ID NO: 1484628
ugcaaucuggagcauuccc

SEQ ID NO: 1484630 - RNA, 19 nt, Artificial Sequence
  Description of Artificial Sequence: Synthetic oligonucleotide
  Sense strand starting at position 887 of SEQ ID NO: 1244385
gaaucucagcucuaggagu

SEQ ID NO: 1484631 - RNA, 19 nt, Artificial Sequence
  Description of Artificial Sequence: Synthetic oligonucleotide
  Antisense strand to SEQ ID NO: 1484630
acuccuagagcugagauuc

SEQ ID NO: 1484632 - RNA, 19 nt, Artificial Sequence
  Description of Artificial Sequence: Synthetic oligonucleotide
  Sense strand starting at position 895 of SEQ ID NO: 1244385
gcucuaggaguuuauaaac

SEQ ID NO: 1484633 - RNA, 19 nt, Artificial Sequence
  Description of Artificial Sequence: Synthetic oligonucleotide
  Antisense strand to SEQ ID NO: 1484632
guuuauaaacuccuagagc

SEQ ID NO: 1484634 - RNA, 19 nt, Artificial Sequence
  Description of Artificial Sequence: Synthetic oligonucleotide
  Sense strand starting at position 919 of SEQ ID NO: 1244385
ggcuaucucaaggaggcau

SEQ ID NO: 1484635 - RNA, 19 nt, Artificial Sequence
  Description of Artificial Sequence: Synthetic oligonucleotide
  Antisense strand to SEQ ID NO: 1484634
augccuccuugagauagcc

SEQ ID NO: 1484636 - RNA, 19 nt, Artificial Sequence
  Description of Artificial Sequence: Synthetic oligonucleotide
  Sense strand starting at position 1257 of SEQ ID NO: 1244385
guaugauuucuuuggguuu

SEQ ID NO: 1484637 - RNA, 19 nt, Artificial Sequence
  Description of Artificial Sequence: Synthetic oligonucleotide
  Antisense strand to SEQ ID NO: 1484636
aaacccaaagaaaucauac

SEQ ID NO: 1484638 - RNA, 19 nt, Artificial Sequence
  Description of Artificial Sequence: Synthetic oligonucleotide
  Sense strand starting at position 1333 of SEQ ID NO: 1244385
gcccuaugagucuauaaca

SEQ ID NO: 1484639 - RNA, 19 nt, Artificial Sequence
  Description of Artificial Sequence: Synthetic oligonucleotide
  Antisense strand to SEQ ID NO: 1484638
uguuauagacucauagggc

SEQ ID NO: 1484640 - RNA, 19 nt, Artificial Sequence
  Description of Artificial Sequence: Synthetic oligonucleotide
  Sense strand starting at position 1352 of SEQ ID NO: 1244385
gacaguucuccguagagau

SEQ ID NO: 1484641 - RNA, 19 nt, Artificial Sequence
  Description of Artificial Sequence: Synthetic oligonucleotide
  Antisense strand to SEQ ID NO: 1484640
aucucuacggagaacuguc

SEQ ID NO: 1484642 - RNA, 19 nt, Artificial Sequence
  Description of Artificial Sequence: Synthetic oligonucleotide
  Sense strand starting at position 1364 of SEQ ID NO: 1244385
uagagaugguggccugaau

SEQ ID NO: 1484643 - RNA, 19 nt, Artificial Sequence
  Description of Artificial Sequence: Synthetic oligonucleotide
  Antisense strand to SEQ ID NO: 1484642
auucaggccaccaucucua

SEQ ID NO: 1484644 - RNA, 19 nt, Artificial Sequence
  Description of Artificial Sequence: Synthetic oligonucleotide
  Sense strand starting at position 1397 of SEQ ID NO: 1244385
aucucugagggaugcuauu

SEQ ID NO: 1484645 - RNA, 19 nt, Artificial Sequence
  Description of Artificial Sequence: Synthetic oligonucleotide
  Antisense strand to SEQ ID NO: 1484644
aauagcaucccucagagau

SEQ ID NO: 1484646 - RNA, 19 nt, Artificial Sequence
  Description of Artificial Sequence: Synthetic oligonucleotide
  Sense strand starting at position 1461 of SEQ ID NO: 1244385
gugagaacagucugcaaac

SEQ ID NO: 1484647 - RNA, 19 nt, Artificial Sequence
  Description of Artificial Sequence: Synthetic oligonucleotide
  Antisense strand to SEQ ID NO: 1484646
guuugcagacuguucucac

SEQ ID NO: 1484648 - RNA, 19 nt, Artificial Sequence
  Description of Artificial Sequence: Synthetic oligonucleotide
  Sense strand starting at position 1498 of SEQ ID NO: 1244385
cuaugacacuuuguaagau

SEQ ID NO: 1484649 - RNA, 19 nt, Artificial Sequence
  Description of Artificial Sequence: Synthetic oligonucleotide
  Antisense strand to SEQ ID NO: 1484648
aucuuacaaagugucauag

SEQ ID NO: 1484650 - RNA, 19 nt, Artificial Sequence
  Description of Artificial Sequence: Synthetic oligonucleotide
  Sense strand starting at position 1506 of SEQ ID NO: 1244385
cuuuguaagauggguaaga

SEQ ID NO: 1484651 - RNA, 19 nt, Artificial Sequence
  Description of Artificial Sequence: Synthetic oligonucleotide
  Antisense strand to SEQ ID NO: 1484650
ucuuacccaucuuacaaag

SEQ ID NO: 1484652 - RNA, 19 nt, Artificial Sequence
  Description of Artificial Sequence: Synthetic oligonucleotide
  Sense strand starting at position 1507 of SEQ ID NO: 1244385
uuuguaagauggguaagau

SEQ ID NO: 1484653 - RNA, 19 nt, Artificial Sequence
  Description of Artificial Sequence: Synthetic oligonucleotide
  Antisense strand to SEQ ID NO: 1484652
aucuuacccaucuuacaaa

SEQ ID NO: 1484654 - RNA, 19 nt, Artificial Sequence
  Description of Artificial Sequence: Synthetic oligonucleotide
  Sense strand starting at position 1516 of SEQ ID NO: 1244385
uggguaagaugcuugggau

SEQ ID NO: 1484655 - RNA, 19 nt, Artificial Sequence
  Description of Artificial Sequence: Synthetic oligonucleotide
  Antisense strand to SEQ ID NO: 1484654
aucccaagcaucuuaccca

SEQ ID NO: 1484656 - RNA, 19 nt, Artificial Sequence
  Description of Artificial Sequence: Synthetic oligonucleotide
  Sense strand starting at position 1517 of SEQ ID NO: 1244385
ggguaagaugcuugggauu

SEQ ID NO: 1484657 - RNA, 19 nt, Artificial Sequence
  Description of Artificial Sequence: Synthetic oligonucleotide
  Antisense strand to SEQ ID NO: 1484656
aaucccaagcaucuuaccc

SEQ ID NO: 1484658 - RNA, 19 nt, Artificial Sequence
  Description of Artificial Sequence: Synthetic oligonucleotide
  Sense strand starting at position 1656 of SEQ ID NO: 1244385
uugcuaacugaacaguaua

SEQ ID NO: 1484659 - RNA, 19 nt, Artificial Sequence
  Description of Artificial Sequence: Synthetic oligonucleotide
  Antisense strand to SEQ ID NO: 1484658
uauacuguucaguuagcaa

SEQ ID NO: 1484660 - RNA, 19 nt, Artificial Sequence
  Description of Artificial Sequence: Synthetic oligonucleotide
  Sense strand starting at position 1699 of SEQ ID NO: 1244385
ggaaucaugcauuauacuc

SEQ ID NO: 1484661 - RNA, 19 nt, Artificial Sequence
  Description of Artificial Sequence: Synthetic oligonucleotide
  Antisense strand to SEQ ID NO: 1484660
gaguauaaugcaugauucc

SEQ ID NO: 1484662 - RNA, 19 nt, Artificial Sequence
  Description of Artificial Sequence: Synthetic oligonucleotide
  Sense strand starting at position 1962 of SEQ ID NO: 1244385
gugagcacuuaccuagaga

SEQ ID NO: 1484663 - RNA, 19 nt, Artificial Sequence
  Description of Artificial Sequence: Synthetic oligonucleotide
  Antisense strand to SEQ ID NO: 1484662
ucucuagguaagugcucac

SEQ ID NO: 1484664 - RNA, 19 nt, Artificial Sequence
  Description of Artificial Sequence: Synthetic oligonucleotide
  Sense strand starting at position 2130 of SEQ ID NO: 1244385
uuguuaaguuacuuggaua

SEQ ID NO: 1484665 - RNA, 19 nt, Artificial Sequence
  Description of Artificial Sequence: Synthetic oligonucleotide
  Antisense strand to SEQ ID NO: 1484664
uauccaaguaacuuaacaa

SEQ ID NO: 1484666 - RNA, 19 nt, Artificial Sequence
  Description of Artificial Sequence: Synthetic oligonucleotide
  Sense strand starting at position 2306 of SEQ ID NO: 1244385
caagcaaugggugaucagu

SEQ ID NO: 1484667 - RNA, 19 nt, Artificial Sequence
  Description of Artificial Sequence: Synthetic oligonucleotide
  Antisense strand to SEQ ID NO: 1484666
acugaucacccauugcuug

SEQ ID NO: 1484668 - RNA, 19 nt, Artificial Sequence
  Description of Artificial Sequence: Synthetic oligonucleotide
  Sense strand starting at position 2319 of SEQ ID NO: 1244385
aucaguaguguggacagua

SEQ ID NO: 1484669 - RNA, 19 nt, Artificial Sequence
  Description of Artificial Sequence: Synthetic oligonucleotide
  Antisense strand to SEQ ID NO: 1484668
uacuguccacacuacugau

SEQ ID NO: 1484670 - RNA, 19 nt, Artificial Sequence
  Description of Artificial Sequence: Synthetic oligonucleotide
  Sense strand starting at position 2354 of SEQ ID NO: 1244385
ccagcauugguaugggaug

SEQ ID NO: 1484671 - RNA, 19 nt, Artificial Sequence
  Description of Artificial Sequence: Synthetic oligonucleotide
  Antisense strand to SEQ ID NO: 1484670
caucccauaccaaugcugg

SEQ ID NO: 1484672 - RNA, 19 nt, Artificial Sequence
  Description of Artificial Sequence: Synthetic oligonucleotide
  Sense strand starting at position 2608 of SEQ ID NO: 1244385
ggaucaugccugcacuaau

SEQ ID NO: 1484673 - RNA, 19 nt, Artificial Sequence
  Description of Artificial Sequence: Synthetic oligonucleotide
  Antisense strand to SEQ ID NO: 1484672
auuagugcaggcaugaucc

SEQ ID NO: 1484674 - RNA, 19 nt, Artificial Sequence
  Description of Artificial Sequence: Synthetic oligonucleotide
  Sense strand starting at position 2626 of SEQ ID NO: 1244385
uuguuccugcugugaauuu

SEQ ID NO: 1484675 - RNA, 19 nt, Artificial Sequence
  Description of Artificial Sequence: Synthetic oligonucleotide
  Antisense strand to SEQ ID NO: 1484674
aaauucacagcaggaacaa

SEQ ID NO: 1484676 - RNA, 19 nt, Artificial Sequence
  Description of Artificial Sequence: Synthetic oligonucleotide
  Sense strand starting at position 3086 of SEQ ID NO: 1244385
uuguauuauugauugggaa

SEQ ID NO: 1484677 - RNA, 19 nt, Artificial Sequence
  Description of Artificial Sequence: Synthetic oligonucleotide
  Antisense strand to SEQ ID NO: 1484676
uucccaaucaauaauacaa

SEQ ID NO: 1484678 - RNA, 19 nt, Artificial Sequence
  Description of Artificial Sequence: Synthetic oligonucleotide
  Sense strand starting at position 3241 of SEQ ID NO: 1244385
auaagugauguuugacuau

SEQ ID NO: 1484679 - RNA, 19 nt, Artificial Sequence
  Description of Artificial Sequence: Synthetic oligonucleotide
  Antisense strand to SEQ ID NO: 1484678
auagucaaacaucacuuau

SEQ ID NO: 1484680 - RNA, 19 nt, Artificial Sequence
  Description of Artificial Sequence: Synthetic oligonucleotide
  Sense strand starting at position 3247 of SEQ ID NO: 1244385
gauguuugacuauguagga

SEQ ID NO: 1484681 - RNA, 19 nt, Artificial Sequence
  Description of Artificial Sequence: Synthetic oligonucleotide
  Antisense strand to SEQ ID NO: 1484680
uccuacauagucaaacauc

SEQ ID NO: 1484682 - RNA, 19 nt, Artificial Sequence
  Description of Artificial Sequence: Synthetic oligonucleotide
  Sense strand starting at position 3248 of SEQ ID NO: 1244385
auguuugacuauguaggaa

SEQ ID NO: 1484683 - RNA, 19 nt, Artificial Sequence
  Description of Artificial Sequence: Synthetic oligonucleotide
  Antisense strand to SEQ ID NO: 1484682
uuccuacauagucaaacau

SEQ ID NO: 1484684 - RNA, 19 nt, Artificial Sequence
  Description of Artificial Sequence: Synthetic oligonucleotide
  Sense strand starting at position 3269 of SEQ ID NO: 1244385
acuguauauguagaaguua

SEQ ID NO: 1484685 - RNA, 19 nt, Artificial Sequence
  Description of Artificial Sequence: Synthetic oligonucleotide
  Antisense strand to SEQ ID NO: 1484684
uaacuucuacauauacagu

SEQ ID NO: 1484686 - RNA, 19 nt, Artificial Sequence
  Description of Artificial Sequence: Synthetic oligonucleotide
  Sense strand starting at position 3308 of SEQ ID NO: 1244385
gugugaucuguuuaaauug

SEQ ID NO: 1484687 - RNA, 19 nt, Artificial Sequence
  Description of Artificial Sequence: Synthetic oligonucleotide
  Antisense strand to SEQ ID NO: 1484686
caauuuaaacagaucacac

SEQ ID NO: 1484688 - RNA, 19 nt, Artificial Sequence
  Description of Artificial Sequence: Synthetic oligonucleotide
  Sense strand starting at position 3367 of SEQ ID NO: 1244385
gucuccaguggguagaauu

SEQ ID NO: 1484689 - RNA, 19 nt, Artificial Sequence
  Description of Artificial Sequence: Synthetic oligonucleotide
  Antisense strand to SEQ ID NO: 1484688
aauucuacccacuggagac

SEQ ID NO: 1484690 - RNA, 19 nt, Artificial Sequence
  Description of Artificial Sequence: Synthetic oligonucleotide
  Sense strand starting at position 3920 of SEQ ID NO: 1244385
uaaaguagauuugacagaa

SEQ ID NO: 1484691 - RNA, 19 nt, Artificial Sequence
  Description of Artificial Sequence: Synthetic oligonucleotide
  Antisense strand to SEQ ID NO: 1484690
uucugucaaaucuacuuua

SEQ ID NO: 1484692 - RNA, 19 nt, Artificial Sequence
  Description of Artificial Sequence: Synthetic oligonucleotide
  Sense strand starting at position 3969 of SEQ ID NO: 1244385
ugguccugugguuaaauga

SEQ ID NO: 1484693 - RNA, 19 nt, Artificial Sequence
  Description of Artificial Sequence: Synthetic oligonucleotide
  Antisense strand to SEQ ID NO: 1484692
ucauuuaaccacaggacca

SEQ ID NO: 1484694 - RNA, 19 nt, Artificial Sequence
  Description of Artificial Sequence: Synthetic oligonucleotide
  Sense strand starting at position 4 of SEQ ID NO: 1244386
caggaaagauaaccguuua

SEQ ID NO: 1484695 - RNA, 19 nt, Artificial Sequence
  Description of Artificial Sequence: Synthetic oligonucleotide
  Antisense strand to SEQ ID NO: 1484694
uaaacgguuaucuuuccug

SEQ ID NO: 1484696 - RNA, 19 nt, Artificial Sequence
  Description of Artificial Sequence: Synthetic oligonucleotide
  Sense strand starting at position 557 of SEQ ID NO: 1244386
cucacauucucauugggaa

SEQ ID NO: 1484697 - RNA, 19 nt, Artificial Sequence
  Description of Artificial Sequence: Synthetic oligonucleotide
  Antisense strand to SEQ ID NO: 1484696
uucccaaugagaaugugag

SEQ ID NO: 1484698 - RNA, 19 nt, Artificial Sequence
  Description of Artificial Sequence: Synthetic oligonucleotide
  Sense strand starting at position 585 of SEQ ID NO: 1244386
aguccagugcugcugucaa

SEQ ID NO: 1484699 - RNA, 19 nt, Artificial Sequence
  Description of Artificial Sequence: Synthetic oligonucleotide
  Antisense strand to SEQ ID NO: 1484698
uugacagcagcacuggacu

SEQ ID NO: 1484700 - RNA, 19 nt, Artificial Sequence
  Description of Artificial Sequence: Synthetic oligonucleotide
  Sense strand starting at position 649 of SEQ ID NO: 1244386
gugacuccaucuuuagaau

SEQ ID NO: 1484701 - RNA, 19 nt, Artificial Sequence
  Description of Artificial Sequence: Synthetic oligonucleotide
  Antisense strand to SEQ ID NO: 1484700
auucuaaagauggagucac

SEQ ID NO: 1484702 - RNA, 19 nt, Artificial Sequence
  Description of Artificial Sequence: Synthetic oligonucleotide
  Sense strand starting at position 701 of SEQ ID NO: 1244386
gcccaugauauaugugaag

SEQ ID NO: 1484703 - RNA, 19 nt, Artificial Sequence
  Description of Artificial Sequence: Synthetic oligonucleotide
  Antisense strand to SEQ ID NO: 1484702
cuucacauauaucaugggc

SEQ ID NO: 1484704 - RNA, 19 nt, Artificial Sequence
  Description of Artificial Sequence: Synthetic oligonucleotide
  Sense strand starting at position 780 of SEQ ID NO: 1244386
ccauuuauauaugagaugu

SEQ ID NO: 1484705 - RNA, 19 nt, Artificial Sequence
  Description of Artificial Sequence: Synthetic oligonucleotide
  Antisense strand to SEQ ID NO: 1484704
acaucucauauauaaaugg

SEQ ID NO: 1484706 - RNA, 19 nt, Artificial Sequence
  Description of Artificial Sequence: Synthetic oligonucleotide
  Sense strand starting at position 823 of SEQ ID NO: 1244386
ccaugucuugaauguaaug

SEQ ID NO: 1484707 - RNA, 19 nt, Artificial Sequence
  Description of Artificial Sequence: Synthetic oligonucleotide
  Antisense strand to SEQ ID NO: 1484706
cauuacauucaagacaugg

SEQ ID NO: 1484708 - RNA, 19 nt, Artificial Sequence
  Description of Artificial Sequence: Synthetic oligonucleotide
  Sense strand starting at position 1129 of SEQ ID NO: 1244386
cuaugugaucuguagguug

SEQ ID NO: 1484709 - RNA, 19 nt, Artificial Sequence
  Description of Artificial Sequence: Synthetic oligonucleotide
  Antisense strand to SEQ ID NO: 1484708
caaccuacagaucacauag

SEQ ID NO: 1484710 - RNA, 19 nt, Artificial Sequence
  Description of Artificial Sequence: Synthetic oligonucleotide
  Sense strand starting at position 1151 of SEQ ID NO: 1244386
gugguaucaguagaaugaa

SEQ ID NO: 1484711 - RNA, 19 nt, Artificial Sequence
  Description of Artificial Sequence: Synthetic oligonucleotide
  Antisense strand to SEQ ID NO: 1484710
uucauucuacugauaccac

SEQ ID NO: 1484712 - RNA, 19 nt, Artificial Sequence
  Description of Artificial Sequence: Synthetic oligonucleotide
  Sense strand starting at position 1163 of SEQ ID NO: 1244386
gaaugaaagguuuggcaaa

SEQ ID NO: 1484713 - RNA, 19 nt, Artificial Sequence
  Description of Artificial Sequence: Synthetic oligonucleotide
  Antisense strand to SEQ ID NO: 1484712
uuugccaaaccuuucauuc

SEQ ID NO: 1484714 - RNA, 19 nt, Artificial Sequence
  Description of Artificial Sequence: Synthetic oligonucleotide
  Sense strand starting at position 1165 of SEQ ID NO: 1244386
augaaagguuuggcaaaua

SEQ ID NO: 1484715 - RNA, 19 nt, Artificial Sequence
  Description of Artificial Sequence: Synthetic oligonucleotide
  Antisense strand to SEQ ID NO: 1484714
uauuugccaaaccuuucau

SEQ ID NO: 1484716 - RNA, 19 nt, Artificial Sequence
  Description of Artificial Sequence: Synthetic oligonucleotide
  Sense strand starting at position 1188 of SEQ ID NO: 1244386
uaccgcagucauuacauga

SEQ ID NO: 1484717 - RNA, 19 nt, Artificial Sequence
  Description of Artificial Sequence: Synthetic oligonucleotide
  Antisense strand to SEQ ID NO: 1484716
ucauguaaugacugcggua

SEQ ID NO: 1484718 - RNA, 19 nt, Artificial Sequence
  Description of Artificial Sequence: Synthetic oligonucleotide
  Sense strand starting at position 1254 of SEQ ID NO: 1244386
uuagaaaugcaguaaguag

SEQ ID NO: 1484719 - RNA, 19 nt, Artificial Sequence
  Description of Artificial Sequence: Synthetic oligonucleotide
  Antisense strand to SEQ ID NO: 1484718
cuacuuacugcauuucuaa

SEQ ID NO: 1484720 - RNA, 19 nt, Artificial Sequence
  Description of Artificial Sequence: Synthetic oligonucleotide
  Sense strand starting at position 1364 of SEQ ID NO: 1244386
aguuuaaagaaaggauugu

SEQ ID NO: 1484721 - RNA, 19 nt, Artificial Sequence
  Description of Artificial Sequence: Synthetic oligonucleotide
  Antisense strand to SEQ ID NO: 1484720
acaauccuuucuuuaaacu

SEQ ID NO: 1484722 - RNA, 19 nt, Artificial Sequence
  Description of Artificial Sequence: Synthetic oligonucleotide
  Sense strand starting at position 1375 of SEQ ID NO: 1244386
aggauugucuuacuuccau

SEQ ID NO: 1484723 - RNA, 19 nt, Artificial Sequence
  Description of Artificial Sequence: Synthetic oligonucleotide
  Antisense strand to SEQ ID NO: 1484722
auggaaguaagacaauccu

SEQ ID NO: 1484724 - RNA, 19 nt, Artificial Sequence
  Description of Artificial Sequence: Synthetic oligonucleotide
  Sense strand starting at position 1404 of SEQ ID NO: 1244386
uggacauuauguuuacuaa

SEQ ID NO: 1484725 - RNA, 19 nt, Artificial Sequence
  Description of Artificial Sequence: Synthetic oligonucleotide
  Antisense strand to SEQ ID NO: 1484724
uuaguaaacauaaugucca

SEQ ID NO: 1484726 - RNA, 19 nt, Artificial Sequence
  Description of Artificial Sequence: Synthetic oligonucleotide
  Sense strand starting at position 1572 of SEQ ID NO: 1244386
aaaugaggaugugugcauu

SEQ ID NO: 1484727 - RNA, 19 nt, Artificial Sequence
  Description of Artificial Sequence: Synthetic oligonucleotide
  Antisense strand to SEQ ID NO: 1484726
aaugcacacauccucauuu

SEQ ID NO: 1484728 - RNA, 19 nt, Artificial Sequence
  Description of Artificial Sequence: Synthetic oligonucleotide
  Sense strand starting at position 1584 of SEQ ID NO: 1244386
gugcauuguccugaaagga

SEQ ID NO: 1484729 - RNA, 19 nt, Artificial Sequence
  Description of Artificial Sequence: Synthetic oligonucleotide
  Antisense strand to SEQ ID NO: 1484728
uccuuucaggacaaugcac

SEQ ID NO: 1484730 - RNA, 19 nt, Artificial Sequence
  Description of Artificial Sequence: Synthetic oligonucleotide
  Sense strand starting at position 1727 of SEQ ID NO: 1244386
aggaacugguuaguccaaa

SEQ ID NO: 1484731 - RNA, 19 nt, Artificial Sequence
  Description of Artificial Sequence: Synthetic oligonucleotide
  Antisense strand to SEQ ID NO: 1484730
uuuggacuaaccaguuccu

SEQ ID NO: 1484732 - RNA, 19 nt, Artificial Sequence
  Description of Artificial Sequence: Synthetic oligonucleotide
  Sense strand starting at position 1728 of SEQ ID NO: 1244386
ggaacugguuaguccaaau

SEQ ID NO: 1484733 - RNA, 19 nt, Artificial Sequence
  Description of Artificial Sequence: Synthetic oligonucleotide
  Antisense strand to SEQ ID NO: 1484732
auuuggacuaaccaguucc

SEQ ID NO: 1484734 - RNA, 19 nt, Artificial Sequence
  Description of Artificial Sequence: Synthetic oligonucleotide
  Sense strand starting at position 1753 of SEQ ID NO: 1244386
uuguuagcaagugagaaga

SEQ ID NO: 1484735 - RNA, 19 nt, Artificial Sequence
  Description of Artificial Sequence: Synthetic oligonucleotide
  Antisense strand to SEQ ID NO: 1484734
ucuucucacuugcuaacaa

SEQ ID NO: 1484736 - RNA, 19 nt, Artificial Sequence
  Description of Artificial Sequence: Synthetic oligonucleotide
  Sense strand starting at position 1767 of SEQ ID NO: 1244386
gaagauguagccugggagu

SEQ ID NO: 1484737 - RNA, 19 nt, Artificial Sequence
  Description of Artificial Sequence: Synthetic oligonucleotide
  Antisense strand to SEQ ID NO: 1484736
acucccaggcuacaucuuc

SEQ ID NO: 1484738 - RNA, 19 nt, Artificial Sequence
  Description of Artificial Sequence: Synthetic oligonucleotide
  Sense strand starting at position 1769 of SEQ ID NO: 1244386
agauguagccugggaguga

SEQ ID NO: 1484739 - RNA, 19 nt, Artificial Sequence
  Description of Artificial Sequence: Synthetic oligonucleotide
  Antisense strand to SEQ ID NO: 1484738
ucacucccaggcuacaucu

SEQ ID NO: 1484740 - RNA, 19 nt, Artificial Sequence
  Description of Artificial Sequence: Synthetic oligonucleotide
  Sense strand starting at position 2065 of SEQ ID NO: 1244386
uauggauagcuauggaaac

SEQ ID NO: 1484741 - RNA, 19 nt, Artificial Sequence
  Description of Artificial Sequence: Synthetic oligonucleotide
  Antisense strand to SEQ ID NO: 1484740
guuuccauagcuauccaua

SEQ ID NO: 1484742 - RNA, 19 nt, Artificial Sequence
  Description of Artificial Sequence: Synthetic oligonucleotide
  Sense strand starting at position 2113 of SEQ ID NO: 1244386
aaaggaauuguuuggcaaa

SEQ ID NO: 1484743 - RNA, 19 nt, Artificial Sequence
  Description of Artificial Sequence: Synthetic oligonucleotide
  Antisense strand to SEQ ID NO: 1484742
uuugccaaacaauuccuuu

SEQ ID NO: 1484744 - RNA, 19 nt, Artificial Sequence
  Description of Artificial Sequence: Synthetic oligonucleotide
  Sense strand starting at position 2210 of SEQ ID NO: 1244386
cuuauugaguauguggaua

SEQ ID NO: 1484745 - RNA, 19 nt, Artificial Sequence
  Description of Artificial Sequence: Synthetic oligonucleotide
  Antisense strand to SEQ ID NO: 1484744
uauccacauacucaauaag

SEQ ID NO: 1484746 - RNA, 19 nt, Artificial Sequence
  Description of Artificial Sequence: Synthetic oligonucleotide
  Sense strand starting at position 2249 of SEQ ID NO: 1244386
agaagaugaucugaaagag

SEQ ID NO: 1484747 - RNA, 19 nt, Artificial Sequence
  Description of Artificial Sequence: Synthetic oligonucleotide
  Antisense strand to SEQ ID NO: 1484746
cucuuucagaucaucuucu

SEQ ID NO: 1484748 - RNA, 19 nt, Artificial Sequence
  Description of Artificial Sequence: Synthetic oligonucleotide
  Sense strand starting at position 2365 of SEQ ID NO: 1244386
cucgcaucacuuucgcaua

SEQ ID NO: 1484749 - RNA, 19 nt, Artificial Sequence
  Description of Artificial Sequence: Synthetic oligonucleotide
  Antisense strand to SEQ ID NO: 1484748
uaugcgaaagugaugcgag

SEQ ID NO: 1484750 - RNA, 19 nt, Artificial Sequence
  Description of Artificial Sequence: Synthetic oligonucleotide
  Sense strand starting at position 2513 of SEQ ID NO: 1244386
gacagaagguccucucugu

SEQ ID NO: 1484751 - RNA, 19 nt, Artificial Sequence
  Description of Artificial Sequence: Synthetic oligonucleotide
  Antisense strand to SEQ ID NO: 1484750
acagagaggaccuucuguc

SEQ ID NO: 1484752 - RNA, 19 nt, Artificial Sequence
  Description of Artificial Sequence: Synthetic oligonucleotide
  Sense strand starting at position 2536 of SEQ ID NO: 1244386
ccaauauuccuguaguuuc

SEQ ID NO: 1484753 - RNA, 19 nt, Artificial Sequence
  Description of Artificial Sequence: Synthetic oligonucleotide
  Antisense strand to SEQ ID NO: 1484752
gaaacuacaggaauauugg

SEQ ID NO: 1484754 - RNA, 19 nt, Artificial Sequence
  Description of Artificial Sequence: Synthetic oligonucleotide
  Sense strand starting at position 2639 of SEQ ID NO: 1244386
uuugacuugccugaaauaa

SEQ ID NO: 1484755 - RNA, 19 nt, Artificial Sequence
  Description of Artificial Sequence: Synthetic oligonucleotide
  Antisense strand to SEQ ID NO: 1484754
uuauuucaggcaagucaaa

SEQ ID NO: 1484756 - RNA, 19 nt, Artificial Sequence
  Description of Artificial Sequence: Synthetic oligonucleotide
  Sense strand starting at position 2747 of SEQ ID NO: 1244386
acaauauuaguguagcaug

SEQ ID NO: 1484757 - RNA, 19 nt, Artificial Sequence
  Description of Artificial Sequence: Synthetic oligonucleotide
  Antisense strand to SEQ ID NO: 1484756
caugcuacacuaauauugu

SEQ ID NO: 1484758 - RNA, 19 nt, Artificial Sequence
  Description of Artificial Sequence: Synthetic oligonucleotide
  Sense strand starting at position 2768 of SEQ ID NO: 1244386
agaguaauguggaagggau

SEQ ID NO: 1484759 - RNA, 19 nt, Artificial Sequence
  Description of Artificial Sequence: Synthetic oligonucleotide
  Antisense strand to SEQ ID NO: 1484758
aucccuuccacauuacucu

SEQ ID NO: 1484760 - RNA, 19 nt, Artificial Sequence
  Description of Artificial Sequence: Synthetic oligonucleotide
  Sense strand starting at position 2899 of SEQ ID NO: 1244386
acugaauaugucggaaacu

SEQ ID NO: 1484761 - RNA, 19 nt, Artificial Sequence
  Description of Artificial Sequence: Synthetic oligonucleotide
  Antisense strand to SEQ ID NO: 1484760
aguuuccgacauauucagu

SEQ ID NO: 1484762 - RNA, 19 nt, Artificial Sequence
  Description of Artificial Sequence: Synthetic oligonucleotide
  Sense strand starting at position 3055 of SEQ ID NO: 1244386
aucuguguucuugauaauu

SEQ ID NO: 1484763 - RNA, 19 nt, Artificial Sequence
  Description of Artificial Sequence: Synthetic oligonucleotide
  Antisense strand to SEQ ID NO: 1484762
aauuaucaagaacacagau

SEQ ID NO: 1484764 - RNA, 19 nt, Artificial Sequence
  Description of Artificial Sequence: Synthetic oligonucleotide
  Sense strand starting at position 3199 of SEQ ID NO: 1244386
aauauucucguacagugaa

SEQ ID NO: 1484765 - RNA, 19 nt, Artificial Sequence
  Description of Artificial Sequence: Synthetic oligonucleotide
  Antisense strand to SEQ ID NO: 1484764
uucacuguacgagaauauu

SEQ ID NO: 1484766 - RNA, 19 nt, Artificial Sequence
  Description of Artificial Sequence: Synthetic oligonucleotide
  Sense strand starting at position 3309 of SEQ ID NO: 1244386
aggagucaucagcauuggu

SEQ ID NO: 1484767 - RNA, 19 nt, Artificial Sequence
  Description of Artificial Sequence: Synthetic oligonucleotide
  Antisense strand to SEQ ID NO: 1484766
accaaugcugaugacuccu

SEQ ID NO: 1484768 - RNA, 19 nt, Artificial Sequence
  Description of Artificial Sequence: Synthetic oligonucleotide
  Sense strand starting at position 3525 of SEQ ID NO: 1244386
gucucuugacugcagaaga

SEQ ID NO: 1484769 - RNA, 19 nt, Artificial Sequence
  Description of Artificial Sequence: Synthetic oligonucleotide
  Antisense strand to SEQ ID NO: 1484768
ucuucugcagucaagagac

SEQ ID NO: 1484770 - RNA, 19 nt, Artificial Sequence
  Description of Artificial Sequence: Synthetic oligonucleotide
  Sense strand starting at position 3628 of SEQ ID NO: 1244386
guaggaaucauagguuaug

SEQ ID NO: 1484771 - RNA, 19 nt, Artificial Sequence
  Description of Artificial Sequence: Synthetic oligonucleotide
  Antisense strand to SEQ ID NO: 1484770
cauaaccuaugauuccuac

SEQ ID NO: 1484772 - RNA, 19 nt, Artificial Sequence
  Description of Artificial Sequence: Synthetic oligonucleotide
  Sense strand starting at position 3668 of SEQ ID NO: 1244386
cagucaacacucugaggaa

SEQ ID NO: 1484773 - RNA, 19 nt, Artificial Sequence
  Description of Artificial Sequence: Synthetic oligonucleotide
  Antisense strand to SEQ ID NO: 1484772
uuccucagaguguugacug

SEQ ID NO: 1484774 - RNA, 19 nt, Artificial Sequence
  Description of Artificial Sequence: Synthetic oligonucleotide
  Sense strand starting at position 225 of SEQ ID NO: 1244387
gcugaacucagagguccua

SEQ ID NO: 1484775 - RNA, 19 nt, Artificial Sequence
  Description of Artificial Sequence: Synthetic oligonucleotide
  Antisense strand to SEQ ID NO: 1484774
uaggaccucugaguucagc

SEQ ID NO: 1484776 - RNA, 19 nt, Artificial Sequence
  Description of Artificial Sequence: Synthetic oligonucleotide
  Sense strand starting at position 480 of SEQ ID NO: 1244387
cucacauucucauugggaa

SEQ ID NO: 1484777 - RNA, 19 nt, Artificial Sequence
  Description of Artificial Sequence: Synthetic oligonucleotide
  Antisense strand to SEQ ID NO: 1484776
uucccaaugagaaugugag

SEQ ID NO: 1484778 - RNA, 19 nt, Artificial Sequence
  Description of Artificial Sequence: Synthetic oligonucleotide
  Sense strand starting at position 508 of SEQ ID NO: 1244387
aguccagugcugcugucaa

SEQ ID NO: 1484779 - RNA, 19 nt, Artificial Sequence
  Description of Artificial Sequence: Synthetic oligonucleotide
  Antisense strand to SEQ ID NO: 1484778
uugacagcagcacuggacu

SEQ ID NO: 1484780 - RNA, 19 nt, Artificial Sequence
  Description of Artificial Sequence: Synthetic oligonucleotide
  Sense strand starting at position 572 of SEQ ID NO: 1244387
gugacuccaucuuuagaau

SEQ ID NO: 1484781 - RNA, 19 nt, Artificial Sequence
  Description of Artificial Sequence: Synthetic oligonucleotide
  Antisense strand to SEQ ID NO: 1484780
auucuaaagauggagucac

SEQ ID NO: 1484782 - RNA, 19 nt, Artificial Sequence
  Description of Artificial Sequence: Synthetic oligonucleotide
  Sense strand starting at position 624 of SEQ ID NO: 1244387
gcccaugauauaugugaag

SEQ ID NO: 1484783 - RNA, 19 nt, Artificial Sequence
  Description of Artificial Sequence: Synthetic oligonucleotide
  Antisense strand to SEQ ID NO: 1484782
cuucacauauaucaugggc

SEQ ID NO: 1484784 - RNA, 19 nt, Artificial Sequence
  Description of Artificial Sequence: Synthetic oligonucleotide
  Sense strand starting at position 703 of SEQ ID NO: 1244387
ccauuuauauaugagaugu

SEQ ID NO: 1484785 - RNA, 19 nt, Artificial Sequence
  Description of Artificial Sequence: Synthetic oligonucleotide
  Antisense strand to SEQ ID NO: 1484784
acaucucauauauaaaugg

SEQ ID NO: 1484786 - RNA, 19 nt, Artificial Sequence
  Description of Artificial Sequence: Synthetic oligonucleotide
  Sense strand starting at position 746 of SEQ ID NO: 1244387
ccaugucuugaauguaaug

SEQ ID NO: 1484787 - RNA, 19 nt, Artificial Sequence
  Description of Artificial Sequence: Synthetic oligonucleotide
  Antisense strand to SEQ ID NO: 1484786
cauuacauucaagacaugg

SEQ ID NO: 1484788 - RNA, 19 nt, Artificial Sequence
  Description of Artificial Sequence: Synthetic oligonucleotide
  Sense strand starting at position 1052 of SEQ ID NO: 1244387
cuaugugaucuguagguug

SEQ ID NO: 1484789 - RNA, 19 nt, Artificial Sequence
  Description of Artificial Sequence: Synthetic oligonucleotide
  Antisense strand to SEQ ID NO: 1484788
caaccuacagaucacauag

SEQ ID NO: 1484790 - RNA, 19 nt, Artificial Sequence
  Description of Artificial Sequence: Synthetic oligonucleotide
  Sense strand starting at position 1074 of SEQ ID NO: 1244387
gugguaucaguagaaugaa

SEQ ID NO: 1484791 - RNA, 19 nt, Artificial Sequence
  Description of Artificial Sequence: Synthetic oligonucleotide
  Antisense strand to SEQ ID NO: 1484790
uucauucuacugauaccac

SEQ ID NO: 1484792 - RNA, 19 nt, Artificial Sequence
  Description of Artificial Sequence: Synthetic oligonucleotide
  Sense strand starting at position 1086 of SEQ ID NO: 1244387
gaaugaaagguuuggcaaa

SEQ ID NO: 1484793 - RNA, 19 nt, Artificial Sequence
  Description of Artificial Sequence: Synthetic oligonucleotide
  Antisense strand to SEQ ID NO: 1484792
uuugccaaaccuuucauuc

SEQ ID NO: 1484794 - RNA, 19 nt, Artificial Sequence
  Description of Artificial Sequence: Synthetic oligonucleotide
  Sense strand starting at position 1088 of SEQ ID NO: 1244387
augaaagguuuggcaaaua

SEQ ID NO: 1484795 - RNA, 19 nt, Artificial Sequence
  Description of Artificial Sequence: Synthetic oligonucleotide
  Antisense strand to SEQ ID NO: 1484794
uauuugccaaaccuuucau

SEQ ID NO: 1484796 - RNA, 19 nt, Artificial Sequence
  Description of Artificial Sequence: Synthetic oligonucleotide
  Sense strand starting at position 1111 of SEQ ID NO: 1244387
uaccgcagucauuacauga

SEQ ID NO: 1484797 - RNA, 19 nt, Artificial Sequence
  Description of Artificial Sequence: Synthetic oligonucleotide
  Antisense strand to SEQ ID NO: 1484796
ucauguaaugacugcggua

SEQ ID NO: 1484798 - RNA, 19 nt, Artificial Sequence
  Description of Artificial Sequence: Synthetic oligonucleotide
  Sense strand starting at position 1177 of SEQ ID NO: 1244387
uuagaaaugcaguaaguag

SEQ ID NO: 1484799 - RNA, 19 nt, Artificial Sequence
  Description of Artificial Sequence: Synthetic oligonucleotide
  Antisense strand to SEQ ID NO: 1484798
cuacuuacugcauuucuaa

SEQ ID NO: 1484800 - RNA, 19 nt, Artificial Sequence
  Description of Artificial Sequence: Synthetic oligonucleotide
  Sense strand starting at position 1287 of SEQ ID NO: 1244387
aguuuaaagaaaggauugu

SEQ ID NO: 1484801 - RNA, 19 nt, Artificial Sequence
  Description of Artificial Sequence: Synthetic oligonucleotide
  Antisense strand to SEQ ID NO: 1484800
acaauccuuucuuuaaacu

SEQ ID NO: 1484802 - RNA, 19 nt, Artificial Sequence
  Description of Artificial Sequence: Synthetic oligonucleotide
  Sense strand starting at position 1298 of SEQ ID NO: 1244387
aggauugucuuacuuccau

SEQ ID NO: 1484803 - RNA, 19 nt, Artificial Sequence
  Description of Artificial Sequence: Synthetic oligonucleotide
  Antisense strand to SEQ ID NO: 1484802
auggaaguaagacaauccu

SEQ ID NO: 1484804 - RNA, 19 nt, Artificial Sequence
  Description of Artificial Sequence: Synthetic oligonucleotide
  Sense strand starting at position 1327 of SEQ ID NO: 1244387
uggacauuauguuuacuaa

SEQ ID NO: 1484805 - RNA, 19 nt, Artificial Sequence
  Description of Artificial Sequence: Synthetic oligonucleotide
  Antisense strand to SEQ ID NO: 1484804
uuaguaaacauaaugucca

SEQ ID NO: 1484806 - RNA, 19 nt, Artificial Sequence
  Description of Artificial Sequence: Synthetic oligonucleotide
  Sense strand starting at position 1495 of SEQ ID NO: 1244387
aaaugaggaugugugcauu

SEQ ID NO: 1484807 - RNA, 19 nt, Artificial Sequence
  Description of Artificial Sequence: Synthetic oligonucleotide
  Antisense strand to SEQ ID NO: 1484806
aaugcacacauccucauuu

SEQ ID NO: 1484808 - RNA, 19 nt, Artificial Sequence
  Description of Artificial Sequence: Synthetic oligonucleotide
  Sense strand starting at position 1507 of SEQ ID NO: 1244387
gugcauuguccugaaagga

SEQ ID NO: 1484809 - RNA, 19 nt, Artificial Sequence
  Description of Artificial Sequence: Synthetic oligonucleotide
  Antisense strand to SEQ ID NO: 1484808
uccuuucaggacaaugcac

SEQ ID NO: 1484810 - RNA, 19 nt, Artificial Sequence
  Description of Artificial Sequence: Synthetic oligonucleotide
  Sense strand starting at position 1650 of SEQ ID NO: 1244387
aggaacugguuaguccaaa

SEQ ID NO: 1484811 - RNA, 19 nt, Artificial Sequence
  Description of Artificial Sequence: Synthetic oligonucleotide
  Antisense strand to SEQ ID NO: 1484810
uuuggacuaaccaguuccu

SEQ ID NO: 1484812 - RNA, 19 nt, Artificial Sequence
  Description of Artificial Sequence: Synthetic oligonucleotide
  Sense strand starting at position 1651 of SEQ ID NO: 1244387
ggaacugguuaguccaaau

SEQ ID NO: 1484813 - RNA, 19 nt, Artificial Sequence
  Description of Artificial Sequence: Synthetic oligonucleotide
  Antisense strand to SEQ ID NO: 1484812
auuuggacuaaccaguucc

SEQ ID NO: 1484814 - RNA, 19 nt, Artificial Sequence
  Description of Artificial Sequence: Synthetic oligonucleotide
  Sense strand starting at position 1676 of SEQ ID NO: 1244387
uuguuagcaagugagaaga

SEQ ID NO: 1484815 - RNA, 19 nt, Artificial Sequence
  Description of Artificial Sequence: Synthetic oligonucleotide
  Antisense strand to SEQ ID NO: 1484814
ucuucucacuugcuaacaa

SEQ ID NO: 1484816 - RNA, 19 nt, Artificial Sequence
  Description of Artificial Sequence: Synthetic oligonucleotide
  Sense strand starting at position 1690 of SEQ ID NO: 1244387
gaagauguagccugggagu

SEQ ID NO: 1484817 - RNA, 19 nt, Artificial Sequence
  Description of Artificial Sequence: Synthetic oligonucleotide
  Antisense strand to SEQ ID NO: 1484816
acucccaggcuacaucuuc

SEQ ID NO: 1484818 - RNA, 19 nt, Artificial Sequence
  Description of Artificial Sequence: Synthetic oligonucleotide
  Sense strand starting at position 1692 of SEQ ID NO: 1244387
agauguagccugggaguga

SEQ ID NO: 1484819 - RNA, 19 nt, Artificial Sequence
  Description of Artificial Sequence: Synthetic oligonucleotide
  Antisense strand to SEQ ID NO: 1484818
ucacucccaggcuacaucu

SEQ ID NO: 1484820 - RNA, 19 nt, Artificial Sequence
  Description of Artificial Sequence: Synthetic oligonucleotide
  Sense strand starting at position 1988 of SEQ ID NO: 1244387
uauggauagcuauggaaac

SEQ ID NO: 1484821 - RNA, 19 nt, Artificial Sequence
  Description of Artificial Sequence: Synthetic oligonucleotide
  Antisense strand to SEQ ID NO: 1484820
guuuccauagcuauccaua

SEQ ID NO: 1484822 - RNA, 19 nt, Artificial Sequence
  Description of Artificial Sequence: Synthetic oligonucleotide
  Sense strand starting at position 2036 of SEQ ID NO: 1244387
aaaggaauuguuuggcaaa

SEQ ID NO: 1484823 - RNA, 19 nt, Artificial Sequence
  Description of Artificial Sequence: Synthetic oligonucleotide
  Antisense strand to SEQ ID NO: 1484822
uuugccaaacaauuccuuu

SEQ ID NO: 1484824 - RNA, 19 nt, Artificial Sequence
  Description of Artificial Sequence: Synthetic oligonucleotide
  Sense strand starting at position 2133 of SEQ ID NO: 1244387
cuuauugaguauguggaua

SEQ ID NO: 1484825 - RNA, 19 nt, Artificial Sequence
  Description of Artificial Sequence: Synthetic oligonucleotide
  Antisense strand to SEQ ID NO: 1484824
uauccacauacucaauaag

SEQ ID NO: 1484826 - RNA, 19 nt, Artificial Sequence
  Description of Artificial Sequence: Synthetic oligonucleotide
  Sense strand starting at position 2172 of SEQ ID NO: 1244387
agaagaugaucugaaagag

SEQ ID NO: 1484827 - RNA, 19 nt, Artificial Sequence
  Description of Artificial Sequence: Synthetic oligonucleotide
  Antisense strand to SEQ ID NO: 1484826
cucuuucagaucaucuucu

SEQ ID NO: 1484828 - RNA, 19 nt, Artificial Sequence
  Description of Artificial Sequence: Synthetic oligonucleotide
  Sense strand starting at position 2288 of SEQ ID NO: 1244387
cucgcaucacuuucgcaua

SEQ ID NO: 1484829 - RNA, 19 nt, Artificial Sequence
  Description of Artificial Sequence: Synthetic oligonucleotide
  Antisense strand to SEQ ID NO: 1484828
uaugcgaaagugaugcgag

SEQ ID NO: 1484830 - RNA, 19 nt, Artificial Sequence
  Description of Artificial Sequence: Synthetic oligonucleotide
  Sense strand starting at position 2436 of SEQ ID NO: 1244387
gacagaagguccucucugu

SEQ ID NO: 1484831 - RNA, 19 nt, Artificial Sequence
  Description of Artificial Sequence: Synthetic oligonucleotide
  Antisense strand to SEQ ID NO: 1484830
acagagaggaccuucuguc

SEQ ID NO: 1484832 - RNA, 19 nt, Artificial Sequence
  Description of Artificial Sequence: Synthetic oligonucleotide
  Sense strand starting at position 2459 of SEQ ID NO: 1244387
ccaauauuccuguaguuuc

SEQ ID NO: 1484833 - RNA, 19 nt, Artificial Sequence
  Description of Artificial Sequence: Synthetic oligonucleotide
  Antisense strand to SEQ ID NO: 1484832
gaaacuacaggaauauugg

SEQ ID NO: 1484834 - RNA, 19 nt, Artificial Sequence
  Description of Artificial Sequence: Synthetic oligonucleotide
  Sense strand starting at position 2562 of SEQ ID NO: 1244387
uuugacuugccugaaauaa

SEQ ID NO: 1484835 - RNA, 19 nt, Artificial Sequence
  Description of Artificial Sequence: Synthetic oligonucleotide
  Antisense strand to SEQ ID NO: 1484834
uuauuucaggcaagucaaa

SEQ ID NO: 1484836 - RNA, 19 nt, Artificial Sequence
  Description of Artificial Sequence: Synthetic oligonucleotide
  Sense strand starting at position 2670 of SEQ ID NO: 1244387
acaauauuaguguagcaug

SEQ ID NO: 1484837 - RNA, 19 nt, Artificial Sequence
  Description of Artificial Sequence: Synthetic oligonucleotide
  Antisense strand to SEQ ID NO: 1484836
caugcuacacuaauauugu

SEQ ID NO: 1484838 - RNA, 19 nt, Artificial Sequence
  Description of Artificial Sequence: Synthetic oligonucleotide
  Sense strand starting at position 2691 of SEQ ID NO: 1244387
agaguaauguggaagggau

SEQ ID NO: 1484839 - RNA, 19 nt, Artificial Sequence
  Description of Artificial Sequence: Synthetic oligonucleotide
  Antisense strand to SEQ ID NO: 1484838
aucccuuccacauuacucu

SEQ ID NO: 1484840 - RNA, 19 nt, Artificial Sequence
  Description of Artificial Sequence: Synthetic oligonucleotide
  Sense strand starting at position 2822 of SEQ ID NO: 1244387
acugaauaugucggaaacu

SEQ ID NO: 1484841 - RNA, 19 nt, Artificial Sequence
  Description of Artificial Sequence: Synthetic oligonucleotide
  Antisense strand to SEQ ID NO: 1484840
aguuuccgacauauucagu

SEQ ID NO: 1484842 - RNA, 19 nt, Artificial Sequence
  Description of Artificial Sequence: Synthetic oligonucleotide
  Sense strand starting at position 2978 of SEQ ID NO: 1244387
aucuguguucuugauaauu

SEQ ID NO: 1484843 - RNA, 19 nt, Artificial Sequence
  Description of Artificial Sequence: Synthetic oligonucleotide
  Antisense strand to SEQ ID NO: 1484842
aauuaucaagaacacagau

SEQ ID NO: 1484844 - RNA, 19 nt, Artificial Sequence
  Description of Artificial Sequence: Synthetic oligonucleotide
  Sense strand starting at position 3122 of SEQ ID NO: 1244387
aauauucucguacagugaa

SEQ ID NO: 1484845 - RNA, 19 nt, Artificial Sequence
  Description of Artificial Sequence: Synthetic oligonucleotide
  Antisense strand to SEQ ID NO: 1484844
uucacuguacgagaauauu

SEQ ID NO: 1484846 - RNA, 19 nt, Artificial Sequence
  Description of Artificial Sequence: Synthetic oligonucleotide
  Sense strand starting at position 3232 of SEQ ID NO: 1244387
aggagucaucagcauuggu

SEQ ID NO: 1484847 - RNA, 19 nt, Artificial Sequence
  Description of Artificial Sequence: Synthetic oligonucleotide
  Antisense strand to SEQ ID NO: 1484846
accaaugcugaugacuccu

SEQ ID NO: 1484848 - RNA, 19 nt, Artificial Sequence
  Description of Artificial Sequence: Synthetic oligonucleotide
  Sense strand starting at position 3448 of SEQ ID NO: 1244387
gucucuugacugcagaaga

SEQ ID NO: 1484849 - RNA, 19 nt, Artificial Sequence
  Description of Artificial Sequence: Synthetic oligonucleotide
  Antisense strand to SEQ ID NO: 1484848
ucuucugcagucaagagac

SEQ ID NO: 1484850 - RNA, 19 nt, Artificial Sequence
  Description of Artificial Sequence: Synthetic oligonucleotide
  Sense strand starting at position 3551 of SEQ ID NO: 1244387
guaggaaucauagguuaug

SEQ ID NO: 1484851 - RNA, 19 nt, Artificial Sequence
  Description of Artificial Sequence: Synthetic oligonucleotide
  Antisense strand to SEQ ID NO: 1484850
cauaaccuaugauuccuac

SEQ ID NO: 1484852 - RNA, 19 nt, Artificial Sequence
  Description of Artificial Sequence: Synthetic oligonucleotide
  Sense strand starting at position 3591 of SEQ ID NO: 1244387
cagucaacacucugaggaa

SEQ ID NO: 1484853 - RNA, 19 nt, Artificial Sequence
  Description of Artificial Sequence: Synthetic oligonucleotide
  Antisense strand to SEQ ID NO: 1484852
uuccucagaguguugacug

SEQ ID NO: 1484854 - RNA, 19 nt, Artificial Sequence
  Description of Artificial Sequence: Synthetic oligonucleotide
  Sense strand starting at position 27 of SEQ ID NO: 1244388
gaggcuugaacuggcgaua

SEQ ID NO: 1484855 - RNA, 19 nt, Artificial Sequence
  Description of Artificial Sequence: Synthetic oligonucleotide
  Antisense strand to SEQ ID NO: 1484854
uaucgccaguucaagccuc

SEQ ID NO: 1484856 - RNA, 19 nt, Artificial Sequence
  Description of Artificial Sequence: Synthetic oligonucleotide
  Sense strand starting at position 101 of SEQ ID NO: 1244388
ccagguguugcugagggaa

SEQ ID NO: 1484857 - RNA, 19 nt, Artificial Sequence
  Description of Artificial Sequence: Synthetic oligonucleotide
  Antisense strand to SEQ ID NO: 1484856
uucccucagcaacaccugg

SEQ ID NO: 1484858 - RNA, 19 nt, Artificial Sequence
  Description of Artificial Sequence: Synthetic oligonucleotide
  Sense strand starting at position 160 of SEQ ID NO: 1244388
caaagagagugugcuaaug

SEQ ID NO: 1484859 - RNA, 19 nt, Artificial Sequence
  Description of Artificial Sequence: Synthetic oligonucleotide
  Antisense strand to SEQ ID NO: 1484858
cauuagcacacucucuuug

SEQ ID NO: 1484860 - RNA, 19 nt, Artificial Sequence
  Description of Artificial Sequence: Synthetic oligonucleotide
  Sense strand starting at position 254 of SEQ ID NO: 1244388
uuccuuggguugcuaagaa

SEQ ID NO: 1484861 - RNA, 19 nt, Artificial Sequence
  Description of Artificial Sequence: Synthetic oligonucleotide
  Antisense strand to SEQ ID NO: 1484860
uucuuagcaacccaaggaa

SEQ ID NO: 1484862 - RNA, 19 nt, Artificial Sequence
  Description of Artificial Sequence: Synthetic oligonucleotide
  Sense strand starting at position 641 of SEQ ID NO: 1244388
acgaccuguccuugucuaa

SEQ ID NO: 1484863 - RNA, 19 nt, Artificial Sequence
  Description of Artificial Sequence: Synthetic oligonucleotide
  Antisense strand to SEQ ID NO: 1484862
uuagacaaggacaggucgu

SEQ ID NO: 1484864 - RNA, 19 nt, Artificial Sequence
  Description of Artificial Sequence: Synthetic oligonucleotide
  Sense strand starting at position 645 of SEQ ID NO: 1244388
ccuguccuugucuaaaugu

SEQ ID NO: 1484865 - RNA, 19 nt, Artificial Sequence
  Description of Artificial Sequence: Synthetic oligonucleotide
  Antisense strand to SEQ ID NO: 1484864
acauuuagacaaggacagg

SEQ ID NO: 1484866 - RNA, 19 nt, Artificial Sequence
  Description of Artificial Sequence: Synthetic oligonucleotide
  Sense strand starting at position 728 of SEQ ID NO: 1244388
cuuggauugccuggagauc

SEQ ID NO: 1484867 - RNA, 19 nt, Artificial Sequence
  Description of Artificial Sequence: Synthetic oligonucleotide
  Antisense strand to SEQ ID NO: 1484866
gaucuccaggcaauccaag

SEQ ID NO: 1484868 - RNA, 19 nt, Artificial Sequence
  Description of Artificial Sequence: Synthetic oligonucleotide
  Sense strand starting at position 880 of SEQ ID NO: 1244388
guggcugcguccauguaga

SEQ ID NO: 1484869 - RNA, 19 nt, Artificial Sequence
  Description of Artificial Sequence: Synthetic oligonucleotide
  Antisense strand to SEQ ID NO: 1484868
ucuacauggacgcagccac

SEQ ID NO: 1484870 - RNA, 19 nt, Artificial Sequence
  Description of Artificial Sequence: Synthetic oligonucleotide
  Sense strand starting at position 900 of SEQ ID NO: 1244388
ucggcuucugacgaguuaa

SEQ ID NO: 1484871 - RNA, 19 nt, Artificial Sequence
  Description of Artificial Sequence: Synthetic oligonucleotide
  Antisense strand to SEQ ID NO: 1484870
uuaacucgucagaagccga

SEQ ID NO: 1484872 - RNA, 19 nt, Artificial Sequence
  Description of Artificial Sequence: Synthetic oligonucleotide
  Sense strand starting at position 1335 of SEQ ID NO: 1244388
cccucagcugugcagaaau

SEQ ID NO: 1484873 - RNA, 19 nt, Artificial Sequence
  Description of Artificial Sequence: Synthetic oligonucleotide
  Antisense strand to SEQ ID NO: 1484872
auuucugcacagcugaggg

SEQ ID NO: 1484874 - RNA, 19 nt, Artificial Sequence
  Description of Artificial Sequence: Synthetic oligonucleotide
  Sense strand starting at position 1346 of SEQ ID NO: 1244388
gcagaaaucugguuucucu

SEQ ID NO: 1484875 - RNA, 19 nt, Artificial Sequence
  Description of Artificial Sequence: Synthetic oligonucleotide
  Antisense strand to SEQ ID NO: 1484874
agagaaaccagauuucugc

SEQ ID NO: 1484876 - RNA, 19 nt, Artificial Sequence
  Description of Artificial Sequence: Synthetic oligonucleotide
  Sense strand starting at position 1466 of SEQ ID NO: 1244388
aggucuccuugucugugaa

SEQ ID NO: 1484877 - RNA, 19 nt, Artificial Sequence
  Description of Artificial Sequence: Synthetic oligonucleotide
  Antisense strand to SEQ ID NO: 1484876
uucacagacaaggagaccu

SEQ ID NO: 1484878 - RNA, 19 nt, Artificial Sequence
  Description of Artificial Sequence: Synthetic oligonucleotide
  Sense strand starting at position 1469 of SEQ ID NO: 1244388
ucuccuugucugugaacag

SEQ ID NO: 1484879 - RNA, 19 nt, Artificial Sequence
  Description of Artificial Sequence: Synthetic oligonucleotide
  Antisense strand to SEQ ID NO: 1484878
cuguucacagacaaggaga

SEQ ID NO: 1484880 - RNA, 19 nt, Artificial Sequence
  Description of Artificial Sequence: Synthetic oligonucleotide
  Sense strand starting at position 1486 of SEQ ID NO: 1244388
aggcaauaucucugagauu

SEQ ID NO: 1484881 - RNA, 19 nt, Artificial Sequence
  Description of Artificial Sequence: Synthetic oligonucleotide
  Antisense strand to SEQ ID NO: 1484880
aaucucagagauauugccu

SEQ ID NO: 1484882 - RNA, 19 nt, Artificial Sequence
  Description of Artificial Sequence: Synthetic oligonucleotide
  Sense strand starting at position 1528 of SEQ ID NO: 1244388
caguguggucuugagagga

SEQ ID NO: 1484883 - RNA, 19 nt, Artificial Sequence
  Description of Artificial Sequence: Synthetic oligonucleotide
  Antisense strand to SEQ ID NO: 1484882
uccucucaagaccacacug

SEQ ID NO: 1484884 - RNA, 19 nt, Artificial Sequence
  Description of Artificial Sequence: Synthetic oligonucleotide
  Sense strand starting at position 1796 of SEQ ID NO: 1244388
gguguuugggcccagggaa

SEQ ID NO: 1484885 - RNA, 19 nt, Artificial Sequence
  Description of Artificial Sequence: Synthetic oligonucleotide
  Antisense strand to SEQ ID NO: 1484884
uucccugggcccaaacacc

SEQ ID NO: 1484886 - RNA, 19 nt, Artificial Sequence
  Description of Artificial Sequence: Synthetic oligonucleotide
  Sense strand starting at position 2208 of SEQ ID NO: 1244388
ugggaugccuuucucugaa

SEQ ID NO: 1484887 - RNA, 19 nt, Artificial Sequence
  Description of Artificial Sequence: Synthetic oligonucleotide
  Antisense strand to SEQ ID NO: 1484886
uucagagaaaggcauccca

SEQ ID NO: 1484888 - RNA, 19 nt, Artificial Sequence
  Description of Artificial Sequence: Synthetic oligonucleotide
  Sense strand starting at position 2210 of SEQ ID NO: 1244388
ggaugccuuucucugaacu

SEQ ID NO: 1484889 - RNA, 19 nt, Artificial Sequence
  Description of Artificial Sequence: Synthetic oligonucleotide
  Antisense strand to SEQ ID NO: 1484888
aguucagagaaaggcaucc

SEQ ID NO: 1484890 - RNA, 19 nt, Artificial Sequence
  Description of Artificial Sequence: Synthetic oligonucleotide
  Sense strand starting at position 2371 of SEQ ID NO: 1244388
ucggguggcuuacuuagaa

SEQ ID NO: 1484891 - RNA, 19 nt, Artificial Sequence
  Description of Artificial Sequence: Synthetic oligonucleotide
  Antisense strand to SEQ ID NO: 1484890
uucuaaguaagccacccga

SEQ ID NO: 1484892 - RNA, 19 nt, Artificial Sequence
  Description of Artificial Sequence: Synthetic oligonucleotide
  Sense strand starting at position 2410 of SEQ ID NO: 1244388
gaauaagacugagagugaa

SEQ ID NO: 1484893 - RNA, 19 nt, Artificial Sequence
  Description of Artificial Sequence: Synthetic oligonucleotide
  Antisense strand to SEQ ID NO: 1484892
uucacucucagucuuauuc

SEQ ID NO: 1484894 - RNA, 19 nt, Artificial Sequence
  Description of Artificial Sequence: Synthetic oligonucleotide
  Sense strand starting at position 2468 of SEQ ID NO: 1244388
acaaccuuggguugugauu

SEQ ID NO: 1484895 - RNA, 19 nt, Artificial Sequence
  Description of Artificial Sequence: Synthetic oligonucleotide
  Antisense strand to SEQ ID NO: 1484894
aaucacaacccaagguugu

SEQ ID NO: 1484896 - RNA, 19 nt, Artificial Sequence
  Description of Artificial Sequence: Synthetic oligonucleotide
  Sense strand starting at position 2494 of SEQ ID NO: 1244388
cugugccaggaauaauuaa

SEQ ID NO: 1484897 - RNA, 19 nt, Artificial Sequence
  Description of Artificial Sequence: Synthetic oligonucleotide
  Antisense strand to SEQ ID NO: 1484896
uuaauuauuccuggcacag

SEQ ID NO: 1484898 - RNA, 19 nt, Artificial Sequence
  Description of Artificial Sequence: Synthetic oligonucleotide
  Sense strand starting at position 2669 of SEQ ID NO: 1244388
ggaccagccaguuaaguua

SEQ ID NO: 1484899 - RNA, 19 nt, Artificial Sequence
  Description of Artificial Sequence: Synthetic oligonucleotide
  Antisense strand to SEQ ID NO: 1484898
uaacuuaacuggcuggucc

SEQ ID NO: 1484900 - RNA, 19 nt, Artificial Sequence
  Description of Artificial Sequence: Synthetic oligonucleotide
  Sense strand starting at position 2682 of SEQ ID NO: 1244388
aaguuagugacguggaucu

SEQ ID NO: 1484901 - RNA, 19 nt, Artificial Sequence
  Description of Artificial Sequence: Synthetic oligonucleotide
  Antisense strand to SEQ ID NO: 1484900
agauccacgucacuaacuu

SEQ ID NO: 1484902 - RNA, 19 nt, Artificial Sequence
  Description of Artificial Sequence: Synthetic oligonucleotide
  Sense strand starting at position 2684 of SEQ ID NO: 1244388
guuagugacguggaucuau

SEQ ID NO: 1484903 - RNA, 19 nt, Artificial Sequence
  Description of Artificial Sequence: Synthetic oligonucleotide
  Antisense strand to SEQ ID NO: 1484902
auagauccacgucacuaac

SEQ ID NO: 1484904 - RNA, 19 nt, Artificial Sequence
  Description of Artificial Sequence: Synthetic oligonucleotide
  Sense strand starting at position 2736 of SEQ ID NO: 1244388
gaggaccuguggcuauuaa

SEQ ID NO: 1484905 - RNA, 19 nt, Artificial Sequence
  Description of Artificial Sequence: Synthetic oligonucleotide
  Antisense strand to SEQ ID NO: 1484904
uuaauagccacagguccuc

SEQ ID NO: 1484906 - RNA, 19 nt, Artificial Sequence
  Description of Artificial Sequence: Synthetic oligonucleotide
  Sense strand starting at position 2859 of SEQ ID NO: 1244388
uguggucaucucuaaauca

SEQ ID NO: 1484907 - RNA, 19 nt, Artificial Sequence
  Description of Artificial Sequence: Synthetic oligonucleotide
  Antisense strand to SEQ ID NO: 1484906
ugauuuagagaugaccaca

SEQ ID NO: 1484908 - RNA, 19 nt, Artificial Sequence
  Description of Artificial Sequence: Synthetic oligonucleotide
  Sense strand starting at position 2904 of SEQ ID NO: 1244388
aagaguaaaguaugucgga

SEQ ID NO: 1484909 - RNA, 19 nt, Artificial Sequence
  Description of Artificial Sequence: Synthetic oligonucleotide
  Antisense strand to SEQ ID NO: 1484908
uccgacauacuuuacucuu

SEQ ID NO: 1484910 - RNA, 19 nt, Artificial Sequence
  Description of Artificial Sequence: Synthetic oligonucleotide
  Sense strand starting at position 2994 of SEQ ID NO: 1244388
ugugguugcuuauuccaaa

SEQ ID NO: 1484911 - RNA, 19 nt, Artificial Sequence
  Description of Artificial Sequence: Synthetic oligonucleotide
  Antisense strand to SEQ ID NO: 1484910
uuuggaauaagcaaccaca

SEQ ID NO: 1484912 - RNA, 19 nt, Artificial Sequence
  Description of Artificial Sequence: Synthetic oligonucleotide
  Sense strand starting at position 2995 of SEQ ID NO: 1244388
gugguugcuuauuccaaau

SEQ ID NO: 1484913 - RNA, 19 nt, Artificial Sequence
  Description of Artificial Sequence: Synthetic oligonucleotide
  Antisense strand to SEQ ID NO: 1484912
auuuggaauaagcaaccac

SEQ ID NO: 1484914 - RNA, 19 nt, Artificial Sequence
  Description of Artificial Sequence: Synthetic oligonucleotide
  Sense strand starting at position 3013 of SEQ ID NO: 1244388
uagaacuguuuguccaugu

SEQ ID NO: 1484915 - RNA, 19 nt, Artificial Sequence
  Description of Artificial Sequence: Synthetic oligonucleotide
  Antisense strand to SEQ ID NO: 1484914
acauggacaaacaguucua

SEQ ID NO: 1484916 - RNA, 19 nt, Artificial Sequence
  Description of Artificial Sequence: Synthetic oligonucleotide
  Sense strand starting at position 3014 of SEQ ID NO: 1244388
agaacuguuuguccauguu

SEQ ID NO: 1484917 - RNA, 19 nt, Artificial Sequence
  Description of Artificial Sequence: Synthetic oligonucleotide
  Antisense strand to SEQ ID NO: 1484916
aacauggacaaacaguucu

SEQ ID NO: 1484918 - RNA, 19 nt, Artificial Sequence
  Description of Artificial Sequence: Synthetic oligonucleotide
  Sense strand starting at position 3023 of SEQ ID NO: 1244388
uguccauguuucccauaga

SEQ ID NO: 1484919 - RNA, 19 nt, Artificial Sequence
  Description of Artificial Sequence: Synthetic oligonucleotide
  Antisense strand to SEQ ID NO: 1484918
ucuaugggaaacauggaca

SEQ ID NO: 1484920 - RNA, 19 nt, Artificial Sequence
  Description of Artificial Sequence: Synthetic oligonucleotide
  Sense strand starting at position 3181 of SEQ ID NO: 1244388
cacacagugcuucgagaag

SEQ ID NO: 1484921 - RNA, 19 nt, Artificial Sequence
  Description of Artificial Sequence: Synthetic oligonucleotide
  Antisense strand to SEQ ID NO: 1484920
cuucucgaagcacugugug

SEQ ID NO: 1484922 - RNA, 19 nt, Artificial Sequence
  Description of Artificial Sequence: Synthetic oligonucleotide
  Sense strand starting at position 3230 of SEQ ID NO: 1244388
cccuuaaggguuugaauuc

SEQ ID NO: 1484923 - RNA, 19 nt, Artificial Sequence
  Description of Artificial Sequence: Synthetic oligonucleotide
  Antisense strand to SEQ ID NO: 1484922
gaauucaaacccuuaaggg

SEQ ID NO: 1484924 - RNA, 19 nt, Artificial Sequence
  Description of Artificial Sequence: Synthetic oligonucleotide
  Sense strand starting at position 3255 of SEQ ID NO: 1244388
augaguccuguggaugcua

SEQ ID NO: 1484925 - RNA, 19 nt, Artificial Sequence
  Description of Artificial Sequence: Synthetic oligonucleotide
  Antisense strand to SEQ ID NO: 1484924
uagcauccacaggacucau

SEQ ID NO: 1484926 - RNA, 19 nt, Artificial Sequence
  Description of Artificial Sequence: Synthetic oligonucleotide
  Sense strand starting at position 3457 of SEQ ID NO: 1244388
gugagacugacauguccau

SEQ ID NO: 1484927 - RNA, 19 nt, Artificial Sequence
  Description of Artificial Sequence: Synthetic oligonucleotide
  Antisense strand to SEQ ID NO: 1484926
auggacaugucagucucac

SEQ ID NO: 1484928 - RNA, 19 nt, Artificial Sequence
  Description of Artificial Sequence: Synthetic oligonucleotide
  Sense strand starting at position 3504 of SEQ ID NO: 1244388
ggguaaccgucacuccuaa

SEQ ID NO: 1484929 - RNA, 19 nt, Artificial Sequence
  Description of Artificial Sequence: Synthetic oligonucleotide
  Antisense strand to SEQ ID NO: 1484928
uuaggagugacgguuaccc

SEQ ID NO: 1484930 - RNA, 19 nt, Artificial Sequence
  Description of Artificial Sequence: Synthetic oligonucleotide
  Sense strand starting at position 3586 of SEQ ID NO: 1244388
cacugucuccuugggagua

SEQ ID NO: 1484931 - RNA, 19 nt, Artificial Sequence
  Description of Artificial Sequence: Synthetic oligonucleotide
  Antisense strand to SEQ ID NO: 1484930
uacucccaaggagacagug

SEQ ID NO: 1484932 - RNA, 19 nt, Artificial Sequence
  Description of Artificial Sequence: Synthetic oligonucleotide
  Sense strand starting at position 3800 of SEQ ID NO: 1244388
ggaggaacuguguggaaau

SEQ ID NO: 1484933 - RNA, 19 nt, Artificial Sequence
  Description of Artificial Sequence: Synthetic oligonucleotide
  Antisense strand to SEQ ID NO: 1484932
auuuccacacaguuccucc

SEQ ID NO: 1484934 - RNA, 19 nt, Artificial Sequence
  Description of Artificial Sequence: Synthetic oligonucleotide
  Sense strand starting at position 26 of SEQ ID NO: 1244389
auguguugaucuguauuuc

SEQ ID NO: 1484935 - RNA, 19 nt, Artificial Sequence
  Description of Artificial Sequence: Synthetic oligonucleotide
  Antisense strand to SEQ ID NO: 1484934
gaaauacagaucaacacau

SEQ ID NO: 1484936 - RNA, 19 nt, Artificial Sequence
  Description of Artificial Sequence: Synthetic oligonucleotide
  Sense strand starting at position 27 of SEQ ID NO: 1244389
uguguugaucuguauuucu

SEQ ID NO: 1484937 - RNA, 19 nt, Artificial Sequence
  Description of Artificial Sequence: Synthetic oligonucleotide
  Antisense strand to SEQ ID NO: 1484936
agaaauacagaucaacaca

SEQ ID NO: 1484938 - RNA, 19 nt, Artificial Sequence
  Description of Artificial Sequence: Synthetic oligonucleotide
  Sense strand starting at position 34 of SEQ ID NO: 1244389
aucuguauuucucuuuguu

SEQ ID NO: 1484939 - RNA, 19 nt, Artificial Sequence
  Description of Artificial Sequence: Synthetic oligonucleotide
  Antisense strand to SEQ ID NO: 1484938
aacaaagagaaauacagau

SEQ ID NO: 1484940 - RNA, 19 nt, Artificial Sequence
  Description of Artificial Sequence: Synthetic oligonucleotide
  Sense strand starting at position 451 of SEQ ID NO: 1244389
aaauguuagcuauggaauu

SEQ ID NO: 1484941 - RNA, 19 nt, Artificial Sequence
  Description of Artificial Sequence: Synthetic oligonucleotide
  Antisense strand to SEQ ID NO: 1484940
aauuccauagcuaacauuu

SEQ ID NO: 1484942 - RNA, 19 nt, Artificial Sequence
  Description of Artificial Sequence: Synthetic oligonucleotide
  Sense strand starting at position 513 of SEQ ID NO: 1244389
uccugaugacacugugaaa

SEQ ID NO: 1484943 - RNA, 19 nt, Artificial Sequence
  Description of Artificial Sequence: Synthetic oligonucleotide
  Antisense strand to SEQ ID NO: 1484942
uuucacagugucaucagga

SEQ ID NO: 1484944 - RNA, 19 nt, Artificial Sequence
  Description of Artificial Sequence: Synthetic oligonucleotide
  Sense strand starting at position 675 of SEQ ID NO: 1244389
ccacguggagguuacuaua

SEQ ID NO: 1484945 - RNA, 19 nt, Artificial Sequence
  Description of Artificial Sequence: Synthetic oligonucleotide
  Antisense strand to SEQ ID NO: 1484944
uauaguaaccuccacgugg

SEQ ID NO: 1484946 - RNA, 19 nt, Artificial Sequence
  Description of Artificial Sequence: Synthetic oligonucleotide
  Sense strand starting at position 840 of SEQ ID NO: 1244389
ugaucauugccucaaguuu

SEQ ID NO: 1484947 - RNA, 19 nt, Artificial Sequence
  Description of Artificial Sequence: Synthetic oligonucleotide
  Antisense strand to SEQ ID NO: 1484946
aaacuugaggcaaugauca

SEQ ID NO: 1484948 - RNA, 19 nt, Artificial Sequence
  Description of Artificial Sequence: Synthetic oligonucleotide
  Sense strand starting at position 846 of SEQ ID NO: 1244389
uugccucaaguuuaaggaa

SEQ ID NO: 1484949 - RNA, 19 nt, Artificial Sequence
  Description of Artificial Sequence: Synthetic oligonucleotide
  Antisense strand to SEQ ID NO: 1484948
uuccuuaaacuugaggcaa

SEQ ID NO: 1484950 - RNA, 19 nt, Artificial Sequence
  Description of Artificial Sequence: Synthetic oligonucleotide
  Sense strand starting at position 1005 of SEQ ID NO: 1244389
aguacaugucuccacauga

SEQ ID NO: 1484951 - RNA, 19 nt, Artificial Sequence
  Description of Artificial Sequence: Synthetic oligonucleotide
  Antisense strand to SEQ ID NO: 1484950
ucauguggagacauguacu

SEQ ID NO: 1484952 - RNA, 19 nt, Artificial Sequence
  Description of Artificial Sequence: Synthetic oligonucleotide
  Sense strand starting at position 1228 of SEQ ID NO: 1244389
cauaguggugggugauaag

SEQ ID NO: 1484953 - RNA, 19 nt, Artificial Sequence
  Description of Artificial Sequence: Synthetic oligonucleotide
  Antisense strand to SEQ ID NO: 1484952
cuuaucacccaccacuaug

SEQ ID NO: 1484954 - RNA, 19 nt, Artificial Sequence
  Description of Artificial Sequence: Synthetic oligonucleotide
  Sense strand starting at position 1440 of SEQ ID NO: 1244389
cugauauaucuuuaugggu

SEQ ID NO: 1484955 - RNA, 19 nt, Artificial Sequence
  Description of Artificial Sequence: Synthetic oligonucleotide
  Antisense strand to SEQ ID NO: 1484954
acccauaaagauauaucag

SEQ ID NO: 1484956 - RNA, 19 nt, Artificial Sequence
  Description of Artificial Sequence: Synthetic oligonucleotide
  Sense strand starting at position 1445 of SEQ ID NO: 1244389
auaucuuuauggguuaagu

SEQ ID NO: 1484957 - RNA, 19 nt, Artificial Sequence
  Description of Artificial Sequence: Synthetic oligonucleotide
  Antisense strand to SEQ ID NO: 1484956
acuuaacccauaaagauau

SEQ ID NO: 1484958 - RNA, 19 nt, Artificial Sequence
  Description of Artificial Sequence: Synthetic oligonucleotide
  Sense strand starting at position 1558 of SEQ ID NO: 1244389
uugauuaaguggccugaaa

SEQ ID NO: 1484959 - RNA, 19 nt, Artificial Sequence
  Description of Artificial Sequence: Synthetic oligonucleotide
  Antisense strand to SEQ ID NO: 1484958
uuucaggccacuuaaucaa

SEQ ID NO: 1484960 - RNA, 19 nt, Artificial Sequence
  Description of Artificial Sequence: Synthetic oligonucleotide
  Sense strand starting at position 1655 of SEQ ID NO: 1244389
aaugguagcucauuaagau

SEQ ID NO: 1484961 - RNA, 19 nt, Artificial Sequence
  Description of Artificial Sequence: Synthetic oligonucleotide
  Antisense strand to SEQ ID NO: 1484960
aucuuaaugagcuaccauu

SEQ ID NO: 1484962 - RNA, 19 nt, Artificial Sequence
  Description of Artificial Sequence: Synthetic oligonucleotide
  Sense strand starting at position 1656 of SEQ ID NO: 1244389
augguagcucauuaagaug

SEQ ID NO: 1484963 - RNA, 19 nt, Artificial Sequence
  Description of Artificial Sequence: Synthetic oligonucleotide
  Antisense strand to SEQ ID NO: 1484962
caucuuaaugagcuaccau

SEQ ID NO: 1484964 - RNA, 19 nt, Artificial Sequence
  Description of Artificial Sequence: Synthetic oligonucleotide
  Sense strand starting at position 1728 of SEQ ID NO: 1244389
ccucuuguauuaucagaug

SEQ ID NO: 1484965 - RNA, 19 nt, Artificial Sequence
  Description of Artificial Sequence: Synthetic oligonucleotide
  Antisense strand to SEQ ID NO: 1484964
caucugauaauacaagagg

SEQ ID NO: 1484966 - RNA, 19 nt, Artificial Sequence
  Description of Artificial Sequence: Synthetic oligonucleotide
  Sense strand starting at position 1840 of SEQ ID NO: 1244389
guaacuauauugucuacaa

SEQ ID NO: 1484967 - RNA, 19 nt, Artificial Sequence
  Description of Artificial Sequence: Synthetic oligonucleotide
  Antisense strand to SEQ ID NO: 1484966
uuguagacaauauaguuac

SEQ ID NO: 1484968 - RNA, 19 nt, Artificial Sequence
  Description of Artificial Sequence: Synthetic oligonucleotide
  Sense strand starting at position 1856 of SEQ ID NO: 1244389
caaugucguccuuaagaau

SEQ ID NO: 1484969 - RNA, 19 nt, Artificial Sequence
  Description of Artificial Sequence: Synthetic oligonucleotide
  Antisense strand to SEQ ID NO: 1484968
auucuuaaggacgacauug

SEQ ID NO: 1484970 - RNA, 19 nt, Artificial Sequence
  Description of Artificial Sequence: Synthetic oligonucleotide
  Sense strand starting at position 1955 of SEQ ID NO: 1244389
aguguucuuccacauauac

SEQ ID NO: 1484971 - RNA, 19 nt, Artificial Sequence
  Description of Artificial Sequence: Synthetic oligonucleotide
  Antisense strand to SEQ ID NO: 1484970
guauauguggaagaacacu

SEQ ID NO: 1484972 - RNA, 19 nt, Artificial Sequence
  Description of Artificial Sequence: Synthetic oligonucleotide
  Sense strand starting at position 2196 of SEQ ID NO: 1244389
gaucuaggguucuuuauag

SEQ ID NO: 1484973 - RNA, 19 nt, Artificial Sequence
  Description of Artificial Sequence: Synthetic oligonucleotide
  Antisense strand to SEQ ID NO: 1484972
cuauaaagaacccuagauc

SEQ ID NO: 1484974 - RNA, 19 nt, Artificial Sequence
  Description of Artificial Sequence: Synthetic oligonucleotide
  Sense strand starting at position 2339 of SEQ ID NO: 1244389
acagaaugagucugaugug

SEQ ID NO: 1484975 - RNA, 19 nt, Artificial Sequence
  Description of Artificial Sequence: Synthetic oligonucleotide
  Antisense strand to SEQ ID NO: 1484974
cacaucagacucauucugu

SEQ ID NO: 1484976 - RNA, 19 nt, Artificial Sequence
  Description of Artificial Sequence: Synthetic oligonucleotide
  Sense strand starting at position 2344 of SEQ ID NO: 1244389
augagucugaugugaggaa

SEQ ID NO: 1484977 - RNA, 19 nt, Artificial Sequence
  Description of Artificial Sequence: Synthetic oligonucleotide
  Antisense strand to SEQ ID NO: 1484976
uuccucacaucagacucau

SEQ ID NO: 1484978 - RNA, 19 nt, Artificial Sequence
  Description of Artificial Sequence: Synthetic oligonucleotide
  Sense strand starting at position 2384 of SEQ ID NO: 1244389
gguucuuagagccauuaag

SEQ ID NO: 1484979 - RNA, 19 nt, Artificial Sequence
  Description of Artificial Sequence: Synthetic oligonucleotide
  Antisense strand to SEQ ID NO: 1484978
cuuaauggcucuaagaacc

SEQ ID NO: 1484980 - RNA, 19 nt, Artificial Sequence
  Description of Artificial Sequence: Synthetic oligonucleotide
  Sense strand starting at position 2440 of SEQ ID NO: 1244389
gaagcagugagcgauggau

SEQ ID NO: 1484981 - RNA, 19 nt, Artificial Sequence
  Description of Artificial Sequence: Synthetic oligonucleotide
  Antisense strand to SEQ ID NO: 1484980
auccaucgcucacugcuuc

SEQ ID NO: 1484982 - RNA, 19 nt, Artificial Sequence
  Description of Artificial Sequence: Synthetic oligonucleotide
  Sense strand starting at position 2442 of SEQ ID NO: 1244389
agcagugagcgauggauuu

SEQ ID NO: 1484983 - RNA, 19 nt, Artificial Sequence
  Description of Artificial Sequence: Synthetic oligonucleotide
  Antisense strand to SEQ ID NO: 1484982
aaauccaucgcucacugcu

SEQ ID NO: 1484984 - RNA, 19 nt, Artificial Sequence
  Description of Artificial Sequence: Synthetic oligonucleotide
  Sense strand starting at position 2491 of SEQ ID NO: 1244389
uuuagaaagacuggcgaua

SEQ ID NO: 1484985 - RNA, 19 nt, Artificial Sequence
  Description of Artificial Sequence: Synthetic oligonucleotide
  Antisense strand to SEQ ID NO: 1484984
uaucgccagucuuucuaaa

SEQ ID NO: 1484986 - RNA, 19 nt, Artificial Sequence
  Description of Artificial Sequence: Synthetic oligonucleotide
  Sense strand starting at position 2546 of SEQ ID NO: 1244389
gaaagugaauucucagauu

SEQ ID NO: 1484987 - RNA, 19 nt, Artificial Sequence
  Description of Artificial Sequence: Synthetic oligonucleotide
  Antisense strand to SEQ ID NO: 1484986
aaucugagaauucacuuuc

SEQ ID NO: 1484988 - RNA, 19 nt, Artificial Sequence
  Description of Artificial Sequence: Synthetic oligonucleotide
  Sense strand starting at position 2640 of SEQ ID NO: 1244389
aggacuuuccauggauauc

SEQ ID NO: 1484989 - RNA, 19 nt, Artificial Sequence
  Description of Artificial Sequence: Synthetic oligonucleotide
  Antisense strand to SEQ ID NO: 1484988
gauauccauggaaaguccu

SEQ ID NO: 1484990 - RNA, 19 nt, Artificial Sequence
  Description of Artificial Sequence: Synthetic oligonucleotide
  Sense strand starting at position 2717 of SEQ ID NO: 1244389
guuuccucugcauaaugga

SEQ ID NO: 1484991 - RNA, 19 nt, Artificial Sequence
  Description of Artificial Sequence: Synthetic oligonucleotide
  Antisense strand to SEQ ID NO: 1484990
uccauuaugcagaggaaac

SEQ ID NO: 1484992 - RNA, 19 nt, Artificial Sequence
  Description of Artificial Sequence: Synthetic oligonucleotide
  Sense strand starting at position 2791 of SEQ ID NO: 1244389
gcucuaaugaggugggaac

SEQ ID NO: 1484993 - RNA, 19 nt, Artificial Sequence
  Description of Artificial Sequence: Synthetic oligonucleotide
  Antisense strand to SEQ ID NO: 1484992
guucccaccucauuagagc

SEQ ID NO: 1484994 - RNA, 19 nt, Artificial Sequence
  Description of Artificial Sequence: Synthetic oligonucleotide
  Sense strand starting at position 2838 of SEQ ID NO: 1244389
agucaugguauccacgaua

SEQ ID NO: 1484995 - RNA, 19 nt, Artificial Sequence
  Description of Artificial Sequence: Synthetic oligonucleotide
  Antisense strand to SEQ ID NO: 1484994
uaucguggauaccaugacu

SEQ ID NO: 1484996 - RNA, 19 nt, Artificial Sequence
  Description of Artificial Sequence: Synthetic oligonucleotide
  Sense strand starting at position 2841 of SEQ ID NO: 1244389
caugguauccacgauauuc

SEQ ID NO: 1484997 - RNA, 19 nt, Artificial Sequence
  Description of Artificial Sequence: Synthetic oligonucleotide
  Antisense strand to SEQ ID NO: 1484996
gaauaucguggauaccaug

SEQ ID NO: 1484998 - RNA, 19 nt, Artificial Sequence
  Description of Artificial Sequence: Synthetic oligonucleotide
  Sense strand starting at position 2996 of SEQ ID NO: 1244389
cugagcucuggugagauau

SEQ ID NO: 1484999 - RNA, 19 nt, Artificial Sequence
  Description of Artificial Sequence: Synthetic oligonucleotide
  Antisense strand to SEQ ID NO: 1484998
auaucucaccagagcucag

SEQ ID NO: 1485000 - RNA, 19 nt, Artificial Sequence
  Description of Artificial Sequence: Synthetic oligonucleotide
  Sense strand starting at position 3246 of SEQ ID NO: 1244389
gaaggaaacuuguucuauu

SEQ ID NO: 1485001 - RNA, 19 nt, Artificial Sequence
  Description of Artificial Sequence: Synthetic oligonucleotide
  Antisense strand to SEQ ID NO: 1485000
aauagaacaaguuuccuuc

SEQ ID NO: 1485002 - RNA, 19 nt, Artificial Sequence
  Description of Artificial Sequence: Synthetic oligonucleotide
  Sense strand starting at position 3646 of SEQ ID NO: 1244389
cucuuaaaggauugucuac

SEQ ID NO: 1485003 - RNA, 19 nt, Artificial Sequence
  Description of Artificial Sequence: Synthetic oligonucleotide
  Antisense strand to SEQ ID NO: 1485002
guagacaauccuuuaagag

SEQ ID NO: 1485004 - RNA, 19 nt, Artificial Sequence
  Description of Artificial Sequence: Synthetic oligonucleotide
  Sense strand starting at position 3648 of SEQ ID NO: 1244389
cuuaaaggauugucuacau

SEQ ID NO: 1485005 - RNA, 19 nt, Artificial Sequence
  Description of Artificial Sequence: Synthetic oligonucleotide
  Antisense strand to SEQ ID NO: 1485004
auguagacaauccuuuaag

SEQ ID NO: 1485006 - RNA, 19 nt, Artificial Sequence
  Description of Artificial Sequence: Synthetic oligonucleotide
  Sense strand starting at position 3710 of SEQ ID NO: 1244389
guucuuugugauuagauau

SEQ ID NO: 1485007 - RNA, 19 nt, Artificial Sequence
  Description of Artificial Sequence: Synthetic oligonucleotide
  Antisense strand to SEQ ID NO: 1485006
auaucuaaucacaaagaac

SEQ ID NO: 1485008 - RNA, 19 nt, Artificial Sequence
  Description of Artificial Sequence: Synthetic oligonucleotide
  Sense strand starting at position 3732 of SEQ ID NO: 1244389
ugggaagaauggcuccaau

SEQ ID NO: 1485009 - RNA, 19 nt, Artificial Sequence
  Description of Artificial Sequence: Synthetic oligonucleotide
  Antisense strand to SEQ ID NO: 1485008
auuggagccauucuuccca

SEQ ID NO: 1485010 - RNA, 19 nt, Artificial Sequence
  Description of Artificial Sequence: Synthetic oligonucleotide
  Sense strand starting at position 3771 of SEQ ID NO: 1244389
uggaaacugucuuuaagca

SEQ ID NO: 1485011 - RNA, 19 nt, Artificial Sequence
  Description of Artificial Sequence: Synthetic oligonucleotide
  Antisense strand to SEQ ID NO: 1485010
ugcuuaaagacaguuucca

SEQ ID NO: 1485012 - RNA, 19 nt, Artificial Sequence
  Description of Artificial Sequence: Synthetic oligonucleotide
  Sense strand starting at position 3779 of SEQ ID NO: 1244389
gucuuuaagcagucugugu

SEQ ID NO: 1485013 - RNA, 19 nt, Artificial Sequence
  Description of Artificial Sequence: Synthetic oligonucleotide
  Antisense strand to SEQ ID NO: 1485012
acacagacugcuuaaagac

SEQ ID NO: 1485014 - RNA, 19 nt, Artificial Sequence
  Description of Artificial Sequence: Synthetic oligonucleotide
  Sense strand starting at position 271 of SEQ ID NO: 1244390
cacucauggcugcgauuua

SEQ ID NO: 1485015 - RNA, 19 nt, Artificial Sequence
  Description of Artificial Sequence: Synthetic oligonucleotide
  Antisense strand to SEQ ID NO: 1485014
uaaaucgcagccaugagug

SEQ ID NO: 1485016 - RNA, 19 nt, Artificial Sequence
  Description of Artificial Sequence: Synthetic oligonucleotide
  Sense strand starting at position 296 of SEQ ID NO: 1244390
aaaggauucugccuaggga

SEQ ID NO: 1485017 - RNA, 19 nt, Artificial Sequence
  Description of Artificial Sequence: Synthetic oligonucleotide
  Antisense strand to SEQ ID NO: 1485016
ucccuaggcagaauccuuu

SEQ ID NO: 1485018 - RNA, 19 nt, Artificial Sequence
  Description of Artificial Sequence: Synthetic oligonucleotide
  Sense strand starting at position 299 of SEQ ID NO: 1244390
ggauucugccuagggagga

SEQ ID NO: 1485019 - RNA, 19 nt, Artificial Sequence
  Description of Artificial Sequence: Synthetic oligonucleotide
  Antisense strand to SEQ ID NO: 1485018
uccucccuaggcagaaucc

SEQ ID NO: 1485020 - RNA, 19 nt, Artificial Sequence
  Description of Artificial Sequence: Synthetic oligonucleotide
  Sense strand starting at position 347 of SEQ ID NO: 1244390
agaagucacaaaugugagu

SEQ ID NO: 1485021 - RNA, 19 nt, Artificial Sequence
  Description of Artificial Sequence: Synthetic oligonucleotide
  Antisense strand to SEQ ID NO: 1485020
acucacauuugugacuucu

SEQ ID NO: 1485022 - RNA, 19 nt, Artificial Sequence
  Description of Artificial Sequence: Synthetic oligonucleotide
  Sense strand starting at position 352 of SEQ ID NO: 1244390
ucacaaaugugaguuagga

SEQ ID NO: 1485023 - RNA, 19 nt, Artificial Sequence
  Description of Artificial Sequence: Synthetic oligonucleotide
  Antisense strand to SEQ ID NO: 1485022
uccuaacucacauuuguga

SEQ ID NO: 1485024 - RNA, 19 nt, Artificial Sequence
  Description of Artificial Sequence: Synthetic oligonucleotide
  Sense strand starting at position 362 of SEQ ID NO: 1244390
gaguuaggauuugaaauga

SEQ ID NO: 1485025 - RNA, 19 nt, Artificial Sequence
  Description of Artificial Sequence: Synthetic oligonucleotide
  Antisense strand to SEQ ID NO: 1485024
ucauuucaaauccuaacuc

SEQ ID NO: 1485026 - RNA, 19 nt, Artificial Sequence
  Description of Artificial Sequence: Synthetic oligonucleotide
  Sense strand starting at position 439 of SEQ ID NO: 1244390
guucuaacauagucuaaag

SEQ ID NO: 1485027 - RNA, 19 nt, Artificial Sequence
  Description of Artificial Sequence: Synthetic oligonucleotide
  Antisense strand to SEQ ID NO: 1485026
cuuuagacuauguuagaac

SEQ ID NO: 1485028 - RNA, 19 nt, Artificial Sequence
  Description of Artificial Sequence: Synthetic oligonucleotide
  Sense strand starting at position 457 of SEQ ID NO: 1244390
ggacaaguauggagugaga

SEQ ID NO: 1485029 - RNA, 19 nt, Artificial Sequence
  Description of Artificial Sequence: Synthetic oligonucleotide
  Antisense strand to SEQ ID NO: 1485028
ucucacuccauacuugucc

SEQ ID NO: 1485030 - RNA, 19 nt, Artificial Sequence
  Description of Artificial Sequence: Synthetic oligonucleotide
  Sense strand starting at position 459 of SEQ ID NO: 1244390
acaaguauggagugagacu

SEQ ID NO: 1485031 - RNA, 19 nt, Artificial Sequence
  Description of Artificial Sequence: Synthetic oligonucleotide
  Antisense strand to SEQ ID NO: 1485030
agucucacuccauacuugu

SEQ ID NO: 1485032 - RNA, 19 nt, Artificial Sequence
  Description of Artificial Sequence: Synthetic oligonucleotide
  Sense strand starting at position 527 of SEQ ID NO: 1244390
auaucuugauccucaggga

SEQ ID NO: 1485033 - RNA, 19 nt, Artificial Sequence
  Description of Artificial Sequence: Synthetic oligonucleotide
  Antisense strand to SEQ ID NO: 1485032
ucccugaggaucaagauau

SEQ ID NO: 1485034 - RNA, 19 nt, Artificial Sequence
  Description of Artificial Sequence: Synthetic oligonucleotide
  Sense strand starting at position 664 of SEQ ID NO: 1244390
gccauaugccaggacaauc

SEQ ID NO: 1485035 - RNA, 19 nt, Artificial Sequence
  Description of Artificial Sequence: Synthetic oligonucleotide
  Antisense strand to SEQ ID NO: 1485034
gauuguccuggcauauggc

SEQ ID NO: 1485036 - RNA, 19 nt, Artificial Sequence
  Description of Artificial Sequence: Synthetic oligonucleotide
  Sense strand starting at position 811 of SEQ ID NO: 1244390
uguugauauuugguguugu

SEQ ID NO: 1485037 - RNA, 19 nt, Artificial Sequence
  Description of Artificial Sequence: Synthetic oligonucleotide
  Antisense strand to SEQ ID NO: 1485036
acaacaccaaauaucaaca

SEQ ID NO: 1485038 - RNA, 19 nt, Artificial Sequence
  Description of Artificial Sequence: Synthetic oligonucleotide
  Sense strand starting at position 893 of SEQ ID NO: 1244390
gguuguucccaacagacuu

SEQ ID NO: 1485039 - RNA, 19 nt, Artificial Sequence
  Description of Artificial Sequence: Synthetic oligonucleotide
  Antisense strand to SEQ ID NO: 1485038
aagucuguugggaacaacc

SEQ ID NO: 1485040 - RNA, 19 nt, Artificial Sequence
  Description of Artificial Sequence: Synthetic oligonucleotide
  Sense strand starting at position 1102 of SEQ ID NO: 1244390
auugucuucugauuaauag

SEQ ID NO: 1485041 - RNA, 19 nt, Artificial Sequence
  Description of Artificial Sequence: Synthetic oligonucleotide
  Antisense strand to SEQ ID NO: 1485040
cuauuaaucagaagacaau

SEQ ID NO: 1485042 - RNA, 19 nt, Artificial Sequence
  Description of Artificial Sequence: Synthetic oligonucleotide
  Sense strand starting at position 1103 of SEQ ID NO: 1244390
uugucuucugauuaauaga

SEQ ID NO: 1485043 - RNA, 19 nt, Artificial Sequence
  Description of Artificial Sequence: Synthetic oligonucleotide
  Antisense strand to SEQ ID NO: 1485042
ucuauuaaucagaagacaa

SEQ ID NO: 1485044 - RNA, 19 nt, Artificial Sequence
  Description of Artificial Sequence: Synthetic oligonucleotide
  Sense strand starting at position 1129 of SEQ ID NO: 1244390
cugcaauguggacauguua

SEQ ID NO: 1485045 - RNA, 19 nt, Artificial Sequence
  Description of Artificial Sequence: Synthetic oligonucleotide
  Antisense strand to SEQ ID NO: 1485044
uaacauguccacauugcag

SEQ ID NO: 1485046 - RNA, 19 nt, Artificial Sequence
  Description of Artificial Sequence: Synthetic oligonucleotide
  Sense strand starting at position 1196 of SEQ ID NO: 1244390
agggcaggauuccucuuaa

SEQ ID NO: 1485047 - RNA, 19 nt, Artificial Sequence
  Description of Artificial Sequence: Synthetic oligonucleotide
  Antisense strand to SEQ ID NO: 1485046
uuaagaggaauccugcccu

SEQ ID NO: 1485048 - RNA, 19 nt, Artificial Sequence
  Description of Artificial Sequence: Synthetic oligonucleotide
  Sense strand starting at position 1463 of SEQ ID NO: 1244390
cugagaacucacuguugaa

SEQ ID NO: 1485049 - RNA, 19 nt, Artificial Sequence
  Description of Artificial Sequence: Synthetic oligonucleotide
  Antisense strand to SEQ ID NO: 1485048
uucaacagugaguucucag

SEQ ID NO: 1485050 - RNA, 19 nt, Artificial Sequence
  Description of Artificial Sequence: Synthetic oligonucleotide
  Sense strand starting at position 1590 of SEQ ID NO: 1244390
cggaaacacucuuuccuga

SEQ ID NO: 1485051 - RNA, 19 nt, Artificial Sequence
  Description of Artificial Sequence: Synthetic oligonucleotide
  Antisense strand to SEQ ID NO: 1485050
ucaggaaagaguguuuccg

SEQ ID NO: 1485052 - RNA, 19 nt, Artificial Sequence
  Description of Artificial Sequence: Synthetic oligonucleotide
  Sense strand starting at position 1890 of SEQ ID NO: 1244390
gagagagcaguuuaaugcu

SEQ ID NO: 1485053 - RNA, 19 nt, Artificial Sequence
  Description of Artificial Sequence: Synthetic oligonucleotide
  Antisense strand to SEQ ID NO: 1485052
agcauuaaacugcucucuc

SEQ ID NO: 1485054 - RNA, 19 nt, Artificial Sequence
  Description of Artificial Sequence: Synthetic oligonucleotide
  Sense strand starting at position 1983 of SEQ ID NO: 1244390
uggguucuugguggaaaua

SEQ ID NO: 1485055 - RNA, 19 nt, Artificial Sequence
  Description of Artificial Sequence: Synthetic oligonucleotide
  Antisense strand to SEQ ID NO: 1485054
uauuuccaccaagaaccca

SEQ ID NO: 1485056 - RNA, 19 nt, Artificial Sequence
  Description of Artificial Sequence: Synthetic oligonucleotide
  Sense strand starting at position 2111 of SEQ ID NO: 1244390
uagugacauuugucauguu

SEQ ID NO: 1485057 - RNA, 19 nt, Artificial Sequence
  Description of Artificial Sequence: Synthetic oligonucleotide
  Antisense strand to SEQ ID NO: 1485056
aacaugacaaaugucacua

SEQ ID NO: 1485058 - RNA, 19 nt, Artificial Sequence
  Description of Artificial Sequence: Synthetic oligonucleotide
  Sense strand starting at position 2271 of SEQ ID NO: 1244390
cagaguaaguucuuaagag

SEQ ID NO: 1485059 - RNA, 19 nt, Artificial Sequence
  Description of Artificial Sequence: Synthetic oligonucleotide
  Antisense strand to SEQ ID NO: 1485058
cucuuaagaacuuacucug

SEQ ID NO: 1485060 - RNA, 19 nt, Artificial Sequence
  Description of Artificial Sequence: Synthetic oligonucleotide
  Sense strand starting at position 2329 of SEQ ID NO: 1244390
guagccaaaugaucagaua

SEQ ID NO: 1485061 - RNA, 19 nt, Artificial Sequence
  Description of Artificial Sequence: Synthetic oligonucleotide
  Antisense strand to SEQ ID NO: 1485060
uaucugaucauuuggcuac

SEQ ID NO: 1485062 - RNA, 19 nt, Artificial Sequence
  Description of Artificial Sequence: Synthetic oligonucleotide
  Sense strand starting at position 2468 of SEQ ID NO: 1244390
cagagauucuaccuugagu

SEQ ID NO: 1485063 - RNA, 19 nt, Artificial Sequence
  Description of Artificial Sequence: Synthetic oligonucleotide
  Antisense strand to SEQ ID NO: 1485062
acucaagguagaaucucug

SEQ ID NO: 1485064 - RNA, 19 nt, Artificial Sequence
  Description of Artificial Sequence: Synthetic oligonucleotide
  Sense strand starting at position 2470 of SEQ ID NO: 1244390
gagauucuaccuugagucu

SEQ ID NO: 1485065 - RNA, 19 nt, Artificial Sequence
  Description of Artificial Sequence: Synthetic oligonucleotide
  Antisense strand to SEQ ID NO: 1485064
agacucaagguagaaucuc

SEQ ID NO: 1485066 - RNA, 19 nt, Artificial Sequence
  Description of Artificial Sequence: Synthetic oligonucleotide
  Sense strand starting at position 2611 of SEQ ID NO: 1244390
auaagauagaggcguauaa

SEQ ID NO: 1485067 - RNA, 19 nt, Artificial Sequence
  Description of Artificial Sequence: Synthetic oligonucleotide
  Antisense strand to SEQ ID NO: 1485066
uuauacgccucuaucuuau

SEQ ID NO: 1485068 - RNA, 19 nt, Artificial Sequence
  Description of Artificial Sequence: Synthetic oligonucleotide
  Sense strand starting at position 2613 of SEQ ID NO: 1244390
aagauagaggcguauaagu

SEQ ID NO: 1485069 - RNA, 19 nt, Artificial Sequence
  Description of Artificial Sequence: Synthetic oligonucleotide
  Antisense strand to SEQ ID NO: 1485068
acuuauacgccucuaucuu

SEQ ID NO: 1485070 - RNA, 19 nt, Artificial Sequence
  Description of Artificial Sequence: Synthetic oligonucleotide
  Sense strand starting at position 2968 of SEQ ID NO: 1244390
agaacaauuccaggccuau

SEQ ID NO: 1485071 - RNA, 19 nt, Artificial Sequence
  Description of Artificial Sequence: Synthetic oligonucleotide
  Antisense strand to SEQ ID NO: 1485070
auaggccuggaauuguucu

SEQ ID NO: 1485072 - RNA, 19 nt, Artificial Sequence
  Description of Artificial Sequence: Synthetic oligonucleotide
  Sense strand starting at position 3046 of SEQ ID NO: 1244390
agccuuagagauuaggcua

SEQ ID NO: 1485073 - RNA, 19 nt, Artificial Sequence
  Description of Artificial Sequence: Synthetic oligonucleotide
  Antisense strand to SEQ ID NO: 1485072
uagccuaaucucuaaggcu

SEQ ID NO: 1485074 - RNA, 19 nt, Artificial Sequence
  Description of Artificial Sequence: Synthetic oligonucleotide
  Sense strand starting at position 3049 of SEQ ID NO: 1244390
cuuagagauuaggcuaaau

SEQ ID NO: 1485075 - RNA, 19 nt, Artificial Sequence
  Description of Artificial Sequence: Synthetic oligonucleotide
  Antisense strand to SEQ ID NO: 1485074
auuuagccuaaucucuaag

SEQ ID NO: 1485076 - RNA, 19 nt, Artificial Sequence
  Description of Artificial Sequence: Synthetic oligonucleotide
  Sense strand starting at position 3142 of SEQ ID NO: 1244390
uguaauauugcagaccuuu

SEQ ID NO: 1485077 - RNA, 19 nt, Artificial Sequence
  Description of Artificial Sequence: Synthetic oligonucleotide
  Antisense strand to SEQ ID NO: 1485076
aaaggucugcaauauuaca

SEQ ID NO: 1485078 - RNA, 19 nt, Artificial Sequence
  Description of Artificial Sequence: Synthetic oligonucleotide
  Sense strand starting at position 3322 of SEQ ID NO: 1244390
gaucauuugccauguuagu

SEQ ID NO: 1485079 - RNA, 19 nt, Artificial Sequence
  Description of Artificial Sequence: Synthetic oligonucleotide
  Antisense strand to SEQ ID NO: 1485078
acuaacauggcaaaugauc

SEQ ID NO: 1485080 - RNA, 19 nt, Artificial Sequence
  Description of Artificial Sequence: Synthetic oligonucleotide
  Sense strand starting at position 3615 of SEQ ID NO: 1244390
cgaucucaaucuucuagaa

SEQ ID NO: 1485081 - RNA, 19 nt, Artificial Sequence
  Description of Artificial Sequence: Synthetic oligonucleotide
  Antisense strand to SEQ ID NO: 1485080
uucuagaagauugagaucg

SEQ ID NO: 1485082 - RNA, 19 nt, Artificial Sequence
  Description of Artificial Sequence: Synthetic oligonucleotide
  Sense strand starting at position 3694 of SEQ ID NO: 1244390
guguguauuguauaagaaa

SEQ ID NO: 1485083 - RNA, 19 nt, Artificial Sequence
  Description of Artificial Sequence: Synthetic oligonucleotide
  Antisense strand to SEQ ID NO: 1485082
uuucuuauacaauacacac

SEQ ID NO: 1485084 - RNA, 19 nt, Artificial Sequence
  Description of Artificial Sequence: Synthetic oligonucleotide
  Sense strand starting at position 3780 of SEQ ID NO: 1244390
gaaauagugagauguguaa

SEQ ID NO: 1485085 - RNA, 19 nt, Artificial Sequence
  Description of Artificial Sequence: Synthetic oligonucleotide
  Antisense strand to SEQ ID NO: 1485084
uuacacaucucacuauuuc

SEQ ID NO: 1485086 - RNA, 19 nt, Artificial Sequence
  Description of Artificial Sequence: Synthetic oligonucleotide
  Sense strand starting at position 3784 of SEQ ID NO: 1244390
uagugagauguguaauccu

SEQ ID NO: 1485087 - RNA, 19 nt, Artificial Sequence
  Description of Artificial Sequence: Synthetic oligonucleotide
  Antisense strand to SEQ ID NO: 1485086
aggauuacacaucucacua

SEQ ID NO: 1485088 - RNA, 19 nt, Artificial Sequence
  Description of Artificial Sequence: Synthetic oligonucleotide
  Sense strand starting at position 3859 of SEQ ID NO: 1244390
guucgugugcauguaaucu

SEQ ID NO: 1485089 - RNA, 19 nt, Artificial Sequence
  Description of Artificial Sequence: Synthetic oligonucleotide
  Antisense strand to SEQ ID NO: 1485088
agauuacaugcacacgaac

SEQ ID NO: 1485090 - RNA, 19 nt, Artificial Sequence
  Description of Artificial Sequence: Synthetic oligonucleotide
  Sense strand starting at position 3900 of SEQ ID NO: 1244390
accguauuucuaugccaau

SEQ ID NO: 1485091 - RNA, 19 nt, Artificial Sequence
  Description of Artificial Sequence: Synthetic oligonucleotide
  Antisense strand to SEQ ID NO: 1485090
auuggcauagaaauacggu

SEQ ID NO: 1485092 - RNA, 19 nt, Artificial Sequence
  Description of Artificial Sequence: Synthetic oligonucleotide
  Sense strand starting at position 3901 of SEQ ID NO: 1244390
ccguauuucuaugccaaua

SEQ ID NO: 1485093 - RNA, 19 nt, Artificial Sequence
  Description of Artificial Sequence: Synthetic oligonucleotide
  Antisense strand to SEQ ID NO: 1485092
uauuggcauagaaauacgg

SEQ ID NO: 1485094 - RNA, 19 nt, Artificial Sequence
  Description of Artificial Sequence: Synthetic oligonucleotide
  Sense strand starting at position 105 of SEQ ID NO: 1244391
ggcacagugcuuuauggga

SEQ ID NO: 1485095 - RNA, 19 nt, Artificial Sequence
  Description of Artificial Sequence: Synthetic oligonucleotide
  Antisense strand to SEQ ID NO: 1485094
ucccauaaagcacugugcc

SEQ ID NO: 1485096 - RNA, 19 nt, Artificial Sequence
  Description of Artificial Sequence: Synthetic oligonucleotide
  Sense strand starting at position 120 of SEQ ID NO: 1244391
gggaacaaaucagaaauaa

SEQ ID NO: 1485097 - RNA, 19 nt, Artificial Sequence
  Description of Artificial Sequence: Synthetic oligonucleotide
  Antisense strand to SEQ ID NO: 1485096
uuauuucugauuuguuccc

SEQ ID NO: 1485098 - RNA, 19 nt, Artificial Sequence
  Description of Artificial Sequence: Synthetic oligonucleotide
  Sense strand starting at position 159 of SEQ ID NO: 1244391
gggugaaauagucagcuuu

SEQ ID NO: 1485099 - RNA, 19 nt, Artificial Sequence
  Description of Artificial Sequence: Synthetic oligonucleotide
  Antisense strand to SEQ ID NO: 1485098
aaagcugacuauuucaccc

SEQ ID NO: 1485100 - RNA, 19 nt, Artificial Sequence
  Description of Artificial Sequence: Synthetic oligonucleotide
  Sense strand starting at position 194 of SEQ ID NO: 1244391
uuguaaauggagugaugua

SEQ ID NO: 1485101 - RNA, 19 nt, Artificial Sequence
  Description of Artificial Sequence: Synthetic oligonucleotide
  Antisense strand to SEQ ID NO: 1485100
uacaucacuccauuuacaa

SEQ ID NO: 1485102 - RNA, 19 nt, Artificial Sequence
  Description of Artificial Sequence: Synthetic oligonucleotide
  Sense strand starting at position 195 of SEQ ID NO: 1244391
uguaaauggagugauguau

SEQ ID NO: 1485103 - RNA, 19 nt, Artificial Sequence
  Description of Artificial Sequence: Synthetic oligonucleotide
  Antisense strand to SEQ ID NO: 1485102
auacaucacuccauuuaca

SEQ ID NO: 1485104 - RNA, 19 nt, Artificial Sequence
  Description of Artificial Sequence: Synthetic oligonucleotide
  Sense strand starting at position 201 of SEQ ID NO: 1244391
uggagugauguaugaccua

SEQ ID NO: 1485105 - RNA, 19 nt, Artificial Sequence
  Description of Artificial Sequence: Synthetic oligonucleotide
  Antisense strand to SEQ ID NO: 1485104
uaggucauacaucacucca

SEQ ID NO: 1485106 - RNA, 19 nt, Artificial Sequence
  Description of Artificial Sequence: Synthetic oligonucleotide
  Sense strand starting at position 204 of SEQ ID NO: 1244391
agugauguaugaccuagaa

SEQ ID NO: 1485107 - RNA, 19 nt, Artificial Sequence
  Description of Artificial Sequence: Synthetic oligonucleotide
  Antisense strand to SEQ ID NO: 1485106
uucuaggucauacaucacu

SEQ ID NO: 1485108 - RNA, 19 nt, Artificial Sequence
  Description of Artificial Sequence: Synthetic oligonucleotide
  Sense strand starting at position 349 of SEQ ID NO: 1244391
gggucuuuggcauaauacu

SEQ ID NO: 1485109 - RNA, 19 nt, Artificial Sequence
  Description of Artificial Sequence: Synthetic oligonucleotide
  Antisense strand to SEQ ID NO: 1485108
aguauuaugccaaagaccc

SEQ ID NO: 1485110 - RNA, 19 nt, Artificial Sequence
  Description of Artificial Sequence: Synthetic oligonucleotide
  Sense strand starting at position 426 of SEQ ID NO: 1244391
caauuagagcucuggguuu

SEQ ID NO: 1485111 - RNA, 19 nt, Artificial Sequence
  Description of Artificial Sequence: Synthetic oligonucleotide
  Antisense strand to SEQ ID NO: 1485110
aaacccagagcucuaauug

SEQ ID NO: 1485112 - RNA, 19 nt, Artificial Sequence
  Description of Artificial Sequence: Synthetic oligonucleotide
  Sense strand starting at position 1004 of SEQ ID NO: 1244391
gccguaagaguguuuguga

SEQ ID NO: 1485113 - RNA, 19 nt, Artificial Sequence
  Description of Artificial Sequence: Synthetic oligonucleotide
  Antisense strand to SEQ ID NO: 1485112
ucacaaacacucuuacggc

SEQ ID NO: 1485114 - RNA, 19 nt, Artificial Sequence
  Description of Artificial Sequence: Synthetic oligonucleotide
  Sense strand starting at position 1054 of SEQ ID NO: 1244391
gaggauauucccugacugu

SEQ ID NO: 1485115 - RNA, 19 nt, Artificial Sequence
  Description of Artificial Sequence: Synthetic oligonucleotide
  Antisense strand to SEQ ID NO: 1485114
acagucagggaauauccuc

SEQ ID NO: 1485116 - RNA, 19 nt, Artificial Sequence
  Description of Artificial Sequence: Synthetic oligonucleotide
  Sense strand starting at position 1055 of SEQ ID NO: 1244391
aggauauucccugacuguu

SEQ ID NO: 1485117 - RNA, 19 nt, Artificial Sequence
  Description of Artificial Sequence: Synthetic oligonucleotide
  Antisense strand to SEQ ID NO: 1485116
aacagucagggaauauccu

SEQ ID NO: 1485118 - RNA, 19 nt, Artificial Sequence
  Description of Artificial Sequence: Synthetic oligonucleotide
  Sense strand starting at position 1061 of SEQ ID NO: 1244391
uucccugacuguuuauauc

SEQ ID NO: 1485119 - RNA, 19 nt, Artificial Sequence
  Description of Artificial Sequence: Synthetic oligonucleotide
  Antisense strand to SEQ ID NO: 1485118
gauauaaacagucagggaa

SEQ ID NO: 1485120 - RNA, 19 nt, Artificial Sequence
  Description of Artificial Sequence: Synthetic oligonucleotide
  Sense strand starting at position 1112 of SEQ ID NO: 1244391
aucugucuguucuccauaa

SEQ ID NO: 1485121 - RNA, 19 nt, Artificial Sequence
  Description of Artificial Sequence: Synthetic oligonucleotide
  Antisense strand to SEQ ID NO: 1485120
uuauggagaacagacagau

SEQ ID NO: 1485122 - RNA, 19 nt, Artificial Sequence
  Description of Artificial Sequence: Synthetic oligonucleotide
  Sense strand starting at position 1114 of SEQ ID NO: 1244391
cugucuguucuccauaaag

SEQ ID NO: 1485123 - RNA, 19 nt, Artificial Sequence
  Description of Artificial Sequence: Synthetic oligonucleotide
  Antisense strand to SEQ ID NO: 1485122
cuuuauggagaacagacag

SEQ ID NO: 1485124 - RNA, 19 nt, Artificial Sequence
  Description of Artificial Sequence: Synthetic oligonucleotide
  Sense strand starting at position 1116 of SEQ ID NO: 1244391
gucuguucuccauaaagau

SEQ ID NO: 1485125 - RNA, 19 nt, Artificial Sequence
  Description of Artificial Sequence: Synthetic oligonucleotide
  Antisense strand to SEQ ID NO: 1485124
aucuuuauggagaacagac

SEQ ID NO: 1485126 - RNA, 19 nt, Artificial Sequence
  Description of Artificial Sequence: Synthetic oligonucleotide
  Sense strand starting at position 1425 of SEQ ID NO: 1244391
uaaaguagaucgcuaagcu

SEQ ID NO: 1485127 - RNA, 19 nt, Artificial Sequence
  Description of Artificial Sequence: Synthetic oligonucleotide
  Antisense strand to SEQ ID NO: 1485126
agcuuagcgaucuacuuua

SEQ ID NO: 1485128 - RNA, 19 nt, Artificial Sequence
  Description of Artificial Sequence: Synthetic oligonucleotide
  Sense strand starting at position 1435 of SEQ ID NO: 1244391
cgcuaagcuccagagcaaa

SEQ ID NO: 1485129 - RNA, 19 nt, Artificial Sequence
  Description of Artificial Sequence: Synthetic oligonucleotide
  Antisense strand to SEQ ID NO: 1485128
uuugcucuggagcuuagcg

SEQ ID NO: 1485130 - RNA, 19 nt, Artificial Sequence
  Description of Artificial Sequence: Synthetic oligonucleotide
  Sense strand starting at position 1698 of SEQ ID NO: 1244391
gcgucugggagaugagaua

SEQ ID NO: 1485131 - RNA, 19 nt, Artificial Sequence
  Description of Artificial Sequence: Synthetic oligonucleotide
  Antisense strand to SEQ ID NO: 1485130
uaucucaucucccagacgc

SEQ ID NO: 1485132 - RNA, 19 nt, Artificial Sequence
  Description of Artificial Sequence: Synthetic oligonucleotide
  Sense strand starting at position 1789 of SEQ ID NO: 1244391
gcaacugcugcugacuaua

SEQ ID NO: 1485133 - RNA, 19 nt, Artificial Sequence
  Description of Artificial Sequence: Synthetic oligonucleotide
  Antisense strand to SEQ ID NO: 1485132
uauagucagcagcaguugc

SEQ ID NO: 1485134 - RNA, 19 nt, Artificial Sequence
  Description of Artificial Sequence: Synthetic oligonucleotide
  Sense strand starting at position 1844 of SEQ ID NO: 1244391
guguauugucaccagguuu

SEQ ID NO: 1485135 - RNA, 19 nt, Artificial Sequence
  Description of Artificial Sequence: Synthetic oligonucleotide
  Antisense strand to SEQ ID NO: 1485134
aaaccuggugacaauacac

SEQ ID NO: 1485136 - RNA, 19 nt, Artificial Sequence
  Description of Artificial Sequence: Synthetic oligonucleotide
  Sense strand starting at position 2019 of SEQ ID NO: 1244391
guugauaagccucacacaa

SEQ ID NO: 1485137 - RNA, 19 nt, Artificial Sequence
  Description of Artificial Sequence: Synthetic oligonucleotide
  Antisense strand to SEQ ID NO: 1485136
uugugugaggcuuaucaac

SEQ ID NO: 1485138 - RNA, 19 nt, Artificial Sequence
  Description of Artificial Sequence: Synthetic oligonucleotide
  Sense strand starting at position 2382 of SEQ ID NO: 1244391
gaagcagagagauguggua

SEQ ID NO: 1485139 - RNA, 19 nt, Artificial Sequence
  Description of Artificial Sequence: Synthetic oligonucleotide
  Antisense strand to SEQ ID NO: 1485138
uaccacaucucucugcuuc

SEQ ID NO: 1485140 - RNA, 19 nt, Artificial Sequence
  Description of Artificial Sequence: Synthetic oligonucleotide
  Sense strand starting at position 2384 of SEQ ID NO: 1244391
agcagagagaugugguaga

SEQ ID NO: 1485141 - RNA, 19 nt, Artificial Sequence
  Description of Artificial Sequence: Synthetic oligonucleotide
  Antisense strand to SEQ ID NO: 1485140
ucuaccacaucucucugcu

SEQ ID NO: 1485142 - RNA, 19 nt, Artificial Sequence
  Description of Artificial Sequence: Synthetic oligonucleotide
  Sense strand starting at position 2398 of SEQ ID NO: 1244391
guagaaagucgaggagacu

SEQ ID NO: 1485143 - RNA, 19 nt, Artificial Sequence
  Description of Artificial Sequence: Synthetic oligonucleotide
  Antisense strand to SEQ ID NO: 1485142
agucuccucgacuuucuac

SEQ ID NO: 1485144 - RNA, 19 nt, Artificial Sequence
  Description of Artificial Sequence: Synthetic oligonucleotide
  Sense strand starting at position 2536 of SEQ ID NO: 1244391
ggaacuguuaagugcuauu

SEQ ID NO: 1485145 - RNA, 19 nt, Artificial Sequence
  Description of Artificial Sequence: Synthetic oligonucleotide
  Antisense strand to SEQ ID NO: 1485144
aauagcacuuaacaguucc

SEQ ID NO: 1485146 - RNA, 19 nt, Artificial Sequence
  Description of Artificial Sequence: Synthetic oligonucleotide
  Sense strand starting at position 2998 of SEQ ID NO: 1244391
uggccaaggucacucaaau

SEQ ID NO: 1485147 - RNA, 19 nt, Artificial Sequence
  Description of Artificial Sequence: Synthetic oligonucleotide
  Antisense strand to SEQ ID NO: 1485146
auuugagugaccuuggcca

SEQ ID NO: 1485148 - RNA, 19 nt, Artificial Sequence
  Description of Artificial Sequence: Synthetic oligonucleotide
  Sense strand starting at position 3019 of SEQ ID NO: 1244391
uuagcuauaagcugggauu

SEQ ID NO: 1485149 - RNA, 19 nt, Artificial Sequence
  Description of Artificial Sequence: Synthetic oligonucleotide
  Antisense strand to SEQ ID NO: 1485148
aaucccagcuuauagcuaa

SEQ ID NO: 1485150 - RNA, 19 nt, Artificial Sequence
  Description of Artificial Sequence: Synthetic oligonucleotide
  Sense strand starting at position 3020 of SEQ ID NO: 1244391
uagcuauaagcugggauua

SEQ ID NO: 1485151 - RNA, 19 nt, Artificial Sequence
  Description of Artificial Sequence: Synthetic oligonucleotide
  Antisense strand to SEQ ID NO: 1485150
uaaucccagcuuauagcua

SEQ ID NO: 1485152 - RNA, 19 nt, Artificial Sequence
  Description of Artificial Sequence: Synthetic oligonucleotide
  Sense strand starting at position 3041 of SEQ ID NO: 1244391
uguagauaugucugagucu

SEQ ID NO: 1485153 - RNA, 19 nt, Artificial Sequence
  Description of Artificial Sequence: Synthetic oligonucleotide
  Antisense strand to SEQ ID NO: 1485152
agacucagacauaucuaca

SEQ ID NO: 1485154 - RNA, 19 nt, Artificial Sequence
  Description of Artificial Sequence: Synthetic oligonucleotide
  Sense strand starting at position 3054 of SEQ ID NO: 1244391
gagucuaaagccuaugcuu

SEQ ID NO: 1485155 - RNA, 19 nt, Artificial Sequence
  Description of Artificial Sequence: Synthetic oligonucleotide
  Antisense strand to SEQ ID NO: 1485154
aagcauaggcuuuagacuc

SEQ ID NO: 1485156 - RNA, 19 nt, Artificial Sequence
  Description of Artificial Sequence: Synthetic oligonucleotide
  Sense strand starting at position 3079 of SEQ ID NO: 1244391
uguauaugauaauccaguu

SEQ ID NO: 1485157 - RNA, 19 nt, Artificial Sequence
  Description of Artificial Sequence: Synthetic oligonucleotide
  Antisense strand to SEQ ID NO: 1485156
aacuggauuaucauauaca

SEQ ID NO: 1485158 - RNA, 19 nt, Artificial Sequence
  Description of Artificial Sequence: Synthetic oligonucleotide
  Sense strand starting at position 3121 of SEQ ID NO: 1244391
cugcauuuauuggaggagu

SEQ ID NO: 1485159 - RNA, 19 nt, Artificial Sequence
  Description of Artificial Sequence: Synthetic oligonucleotide
  Antisense strand to SEQ ID NO: 1485158
acuccuccaauaaaugcag

SEQ ID NO: 1485160 - RNA, 19 nt, Artificial Sequence
  Description of Artificial Sequence: Synthetic oligonucleotide
  Sense strand starting at position 3270 of SEQ ID NO: 1244391
agcauuuacuguuuaugua

SEQ ID NO: 1485161 - RNA, 19 nt, Artificial Sequence
  Description of Artificial Sequence: Synthetic oligonucleotide
  Antisense strand to SEQ ID NO: 1485160
uacauaaacaguaaaugcu

SEQ ID NO: 1485162 - RNA, 19 nt, Artificial Sequence
  Description of Artificial Sequence: Synthetic oligonucleotide
  Sense strand starting at position 3369 of SEQ ID NO: 1244391
ugugcugaaucuuuagacu

SEQ ID NO: 1485163 - RNA, 19 nt, Artificial Sequence
  Description of Artificial Sequence: Synthetic oligonucleotide
  Antisense strand to SEQ ID NO: 1485162
agucuaaagauucagcaca

SEQ ID NO: 1485164 - RNA, 19 nt, Artificial Sequence
  Description of Artificial Sequence: Synthetic oligonucleotide
  Sense strand starting at position 3377 of SEQ ID NO: 1244391
aucuuuagacucuacaguu

SEQ ID NO: 1485165 - RNA, 19 nt, Artificial Sequence
  Description of Artificial Sequence: Synthetic oligonucleotide
  Antisense strand to SEQ ID NO: 1485164
aacuguagagucuaaagau

SEQ ID NO: 1485166 - RNA, 19 nt, Artificial Sequence
  Description of Artificial Sequence: Synthetic oligonucleotide
  Sense strand starting at position 3474 of SEQ ID NO: 1244391
gcaagauugcuagacuaca

SEQ ID NO: 1485167 - RNA, 19 nt, Artificial Sequence
  Description of Artificial Sequence: Synthetic oligonucleotide
  Antisense strand to SEQ ID NO: 1485166
uguagucuagcaaucuugc

SEQ ID NO: 1485168 - RNA, 19 nt, Artificial Sequence
  Description of Artificial Sequence: Synthetic oligonucleotide
  Sense strand starting at position 3490 of SEQ ID NO: 1244391
acagaauccugguugcugu

SEQ ID NO: 1485169 - RNA, 19 nt, Artificial Sequence
  Description of Artificial Sequence: Synthetic oligonucleotide
  Antisense strand to SEQ ID NO: 1485168
acagcaaccaggauucugu

SEQ ID NO: 1485170 - RNA, 19 nt, Artificial Sequence
  Description of Artificial Sequence: Synthetic oligonucleotide
  Sense strand starting at position 3747 of SEQ ID NO: 1244391
gggugcagugcucucugua

SEQ ID NO: 1485171 - RNA, 19 nt, Artificial Sequence
  Description of Artificial Sequence: Synthetic oligonucleotide
  Antisense strand to SEQ ID NO: 1485170
uacagagagcacugcaccc

SEQ ID NO: 1485172 - RNA, 19 nt, Artificial Sequence
  Description of Artificial Sequence: Synthetic oligonucleotide
  Sense strand starting at position 3860 of SEQ ID NO: 1244391
ggacuugcucaagggaaua

SEQ ID NO: 1485173 - RNA, 19 nt, Artificial Sequence
  Description of Artificial Sequence: Synthetic oligonucleotide
  Antisense strand to SEQ ID NO: 1485172
uauucccuugagcaagucc

SEQ ID NO: 1485174 - RNA, 19 nt, Artificial Sequence
  Description of Artificial Sequence: Synthetic oligonucleotide
  Sense strand starting at position 85 of SEQ ID NO: 1244392
cucuucugucuuggaguaa

SEQ ID NO: 1485175 - RNA, 19 nt, Artificial Sequence
  Description of Artificial Sequence: Synthetic oligonucleotide
  Antisense strand to SEQ ID NO: 1485174
uuacuccaagacagaagag

SEQ ID NO: 1485176 - RNA, 19 nt, Artificial Sequence
  Description of Artificial Sequence: Synthetic oligonucleotide
  Sense strand starting at position 255 of SEQ ID NO: 1244392
gcaauuucucacgggugag

SEQ ID NO: 1485177 - RNA, 19 nt, Artificial Sequence
  Description of Artificial Sequence: Synthetic oligonucleotide
  Antisense strand to SEQ ID NO: 1485176
cucacccgugagaaauugc

SEQ ID NO: 1485178 - RNA, 19 nt, Artificial Sequence
  Description of Artificial Sequence: Synthetic oligonucleotide
  Sense strand starting at position 259 of SEQ ID NO: 1244392
uuucucacgggugagaaau

SEQ ID NO: 1485179 - RNA, 19 nt, Artificial Sequence
  Description of Artificial Sequence: Synthetic oligonucleotide
  Antisense strand to SEQ ID NO: 1485178
auuucucacccgugagaaa

SEQ ID NO: 1485180 - RNA, 19 nt, Artificial Sequence
  Description of Artificial Sequence: Synthetic oligonucleotide
  Sense strand starting at position 269 of SEQ ID NO: 1244392
gugagaaauugagagagga

SEQ ID NO: 1485181 - RNA, 19 nt, Artificial Sequence
  Description of Artificial Sequence: Synthetic oligonucleotide
  Antisense strand to SEQ ID NO: 1485180
uccucucucaauuucucac

SEQ ID NO: 1485182 - RNA, 19 nt, Artificial Sequence
  Description of Artificial Sequence: Synthetic oligonucleotide
  Sense strand starting at position 391 of SEQ ID NO: 1244392
ggcacagugcuuuauggga

SEQ ID NO: 1485183 - RNA, 19 nt, Artificial Sequence
  Description of Artificial Sequence: Synthetic oligonucleotide
  Antisense strand to SEQ ID NO: 1485182
ucccauaaagcacugugcc

SEQ ID NO: 1485184 - RNA, 19 nt, Artificial Sequence
  Description of Artificial Sequence: Synthetic oligonucleotide
  Sense strand starting at position 406 of SEQ ID NO: 1244392
gggaacaaaucagaaauaa

SEQ ID NO: 1485185 - RNA, 19 nt, Artificial Sequence
  Description of Artificial Sequence: Synthetic oligonucleotide
  Antisense strand to SEQ ID NO: 1485184
uuauuucugauuuguuccc

SEQ ID NO: 1485186 - RNA, 19 nt, Artificial Sequence
  Description of Artificial Sequence: Synthetic oligonucleotide
  Sense strand starting at position 445 of SEQ ID NO: 1244392
gggugaaauagucagcuuu

SEQ ID NO: 1485187 - RNA, 19 nt, Artificial Sequence
  Description of Artificial Sequence: Synthetic oligonucleotide
  Antisense strand to SEQ ID NO: 1485186
aaagcugacuauuucaccc

SEQ ID NO: 1485188 - RNA, 19 nt, Artificial Sequence
  Description of Artificial Sequence: Synthetic oligonucleotide
  Sense strand starting at position 480 of SEQ ID NO: 1244392
uuguaaauggagugaugua

SEQ ID NO: 1485189 - RNA, 19 nt, Artificial Sequence
  Description of Artificial Sequence: Synthetic oligonucleotide
  Antisense strand to SEQ ID NO: 1485188
uacaucacuccauuuacaa

SEQ ID NO: 1485190 - RNA, 19 nt, Artificial Sequence
  Description of Artificial Sequence: Synthetic oligonucleotide
  Sense strand starting at position 481 of SEQ ID NO: 1244392
uguaaauggagugauguau

SEQ ID NO: 1485191 - RNA, 19 nt, Artificial Sequence
  Description of Artificial Sequence: Synthetic oligonucleotide
  Antisense strand to SEQ ID NO: 1485190
auacaucacuccauuuaca

SEQ ID NO: 1485192 - RNA, 19 nt, Artificial Sequence
  Description of Artificial Sequence: Synthetic oligonucleotide
  Sense strand starting at position 487 of SEQ ID NO: 1244392
uggagugauguaugaccua

SEQ ID NO: 1485193 - RNA, 19 nt, Artificial Sequence
  Description of Artificial Sequence: Synthetic oligonucleotide
  Antisense strand to SEQ ID NO: 1485192
uaggucauacaucacucca

SEQ ID NO: 1485194 - RNA, 19 nt, Artificial Sequence
  Description of Artificial Sequence: Synthetic oligonucleotide
  Sense strand starting at position 490 of SEQ ID NO: 1244392
agugauguaugaccuagaa

SEQ ID NO: 1485195 - RNA, 19 nt, Artificial Sequence
  Description of Artificial Sequence: Synthetic oligonucleotide
  Antisense strand to SEQ ID NO: 1485194
uucuaggucauacaucacu

SEQ ID NO: 1485196 - RNA, 19 nt, Artificial Sequence
  Description of Artificial Sequence: Synthetic oligonucleotide
  Sense strand starting at position 635 of SEQ ID NO: 1244392
gggucuuuggcauaauacu

SEQ ID NO: 1485197 - RNA, 19 nt, Artificial Sequence
  Description of Artificial Sequence: Synthetic oligonucleotide
  Antisense strand to SEQ ID NO: 1485196
aguauuaugccaaagaccc

SEQ ID NO: 1485198 - RNA, 19 nt, Artificial Sequence
  Description of Artificial Sequence: Synthetic oligonucleotide
  Sense strand starting at position 712 of SEQ ID NO: 1244392
caauuagagcucuggguuu

SEQ ID NO: 1485199 - RNA, 19 nt, Artificial Sequence
  Description of Artificial Sequence: Synthetic oligonucleotide
  Antisense strand to SEQ ID NO: 1485198
aaacccagagcucuaauug

SEQ ID NO: 1485200 - RNA, 19 nt, Artificial Sequence
  Description of Artificial Sequence: Synthetic oligonucleotide
  Sense strand starting at position 1290 of SEQ ID NO: 1244392
gccguaagaguguuuguga

SEQ ID NO: 1485201 - RNA, 19 nt, Artificial Sequence
  Description of Artificial Sequence: Synthetic oligonucleotide
  Antisense strand to SEQ ID NO: 1485200
ucacaaacacucuuacggc

SEQ ID NO: 1485202 - RNA, 19 nt, Artificial Sequence
  Description of Artificial Sequence: Synthetic oligonucleotide
  Sense strand starting at position 1340 of SEQ ID NO: 1244392
gaggauauucccugacugu

SEQ ID NO: 1485203 - RNA, 19 nt, Artificial Sequence
  Description of Artificial Sequence: Synthetic oligonucleotide
  Antisense strand to SEQ ID NO: 1485202
acagucagggaauauccuc

SEQ ID NO: 1485204 - RNA, 19 nt, Artificial Sequence
  Description of Artificial Sequence: Synthetic oligonucleotide
  Sense strand starting at position 1341 of SEQ ID NO: 1244392
aggauauucccugacuguu

SEQ ID NO: 1485205 - RNA, 19 nt, Artificial Sequence
  Description of Artificial Sequence: Synthetic oligonucleotide
  Antisense strand to SEQ ID NO: 1485204
aacagucagggaauauccu

SEQ ID NO: 1485206 - RNA, 19 nt, Artificial Sequence
  Description of Artificial Sequence: Synthetic oligonucleotide
  Sense strand starting at position 1347 of SEQ ID NO: 1244392
uucccugacuguuuauauc

SEQ ID NO: 1485207 - RNA, 19 nt, Artificial Sequence
  Description of Artificial Sequence: Synthetic oligonucleotide
  Antisense strand to SEQ ID NO: 1485206
gauauaaacagucagggaa

SEQ ID NO: 1485208 - RNA, 19 nt, Artificial Sequence
  Description of Artificial Sequence: Synthetic oligonucleotide
  Sense strand starting at position 1398 of SEQ ID NO: 1244392
aucugucuguucuccauaa

SEQ ID NO: 1485209 - RNA, 19 nt, Artificial Sequence
  Description of Artificial Sequence: Synthetic oligonucleotide
  Antisense strand to SEQ ID NO: 1485208
uuauggagaacagacagau

SEQ ID NO: 1485210 - RNA, 19 nt, Artificial Sequence
  Description of Artificial Sequence: Synthetic oligonucleotide
  Sense strand starting at position 1400 of SEQ ID NO: 1244392
cugucuguucuccauaaag

SEQ ID NO: 1485211 - RNA, 19 nt, Artificial Sequence
  Description of Artificial Sequence: Synthetic oligonucleotide
  Antisense strand to SEQ ID NO: 1485210
cuuuauggagaacagacag

SEQ ID NO: 1485212 - RNA, 19 nt, Artificial Sequence
  Description of Artificial Sequence: Synthetic oligonucleotide
  Sense strand starting at position 1402 of SEQ ID NO: 1244392
gucuguucuccauaaagau

SEQ ID NO: 1485213 - RNA, 19 nt, Artificial Sequence
  Description of Artificial Sequence: Synthetic oligonucleotide
  Antisense strand to SEQ ID NO: 1485212
aucuuuauggagaacagac

SEQ ID NO: 1485214 - RNA, 19 nt, Artificial Sequence
  Description of Artificial Sequence: Synthetic oligonucleotide
  Sense strand starting at position 1721 of SEQ ID NO: 1244392
cgcuaagcuccagagcaaa

SEQ ID NO: 1485215 - RNA, 19 nt, Artificial Sequence
  Description of Artificial Sequence: Synthetic oligonucleotide
  Antisense strand to SEQ ID NO: 1485214
uuugcucuggagcuuagcg

SEQ ID NO: 1485216 - RNA, 19 nt, Artificial Sequence
  Description of Artificial Sequence: Synthetic oligonucleotide
  Sense strand starting at position 1984 of SEQ ID NO: 1244392
gcgucugggagaugagaua

SEQ ID NO: 1485217 - RNA, 19 nt, Artificial Sequence
  Description of Artificial Sequence: Synthetic oligonucleotide
  Antisense strand to SEQ ID NO: 1485216
uaucucaucucccagacgc

SEQ ID NO: 1485218 - RNA, 19 nt, Artificial Sequence
  Description of Artificial Sequence: Synthetic oligonucleotide
  Sense strand starting at position 2075 of SEQ ID NO: 1244392
gcaacugcugcugacuaua

SEQ ID NO: 1485219 - RNA, 19 nt, Artificial Sequence
  Description of Artificial Sequence: Synthetic oligonucleotide
  Antisense strand to SEQ ID NO: 1485218
uauagucagcagcaguugc

SEQ ID NO: 1485220 - RNA, 19 nt, Artificial Sequence
  Description of Artificial Sequence: Synthetic oligonucleotide
  Sense strand starting at position 2130 of SEQ ID NO: 1244392
guguauugucaccagguuu

SEQ ID NO: 1485221 - RNA, 19 nt, Artificial Sequence
  Description of Artificial Sequence: Synthetic oligonucleotide
  Antisense strand to SEQ ID NO: 1485220
aaaccuggugacaauacac

SEQ ID NO: 1485222 - RNA, 19 nt, Artificial Sequence
  Description of Artificial Sequence: Synthetic oligonucleotide
  Sense strand starting at position 2305 of SEQ ID NO: 1244392
guugauaagccucacacaa

SEQ ID NO: 1485223 - RNA, 19 nt, Artificial Sequence
  Description of Artificial Sequence: Synthetic oligonucleotide
  Antisense strand to SEQ ID NO: 1485222
uugugugaggcuuaucaac

SEQ ID NO: 1485224 - RNA, 19 nt, Artificial Sequence
  Description of Artificial Sequence: Synthetic oligonucleotide
  Sense strand starting at position 2668 of SEQ ID NO: 1244392
gaagcagagagauguggua

SEQ ID NO: 1485225 - RNA, 19 nt, Artificial Sequence
  Description of Artificial Sequence: Synthetic oligonucleotide
  Antisense strand to SEQ ID NO: 1485224
uaccacaucucucugcuuc

SEQ ID NO: 1485226 - RNA, 19 nt, Artificial Sequence
  Description of Artificial Sequence: Synthetic oligonucleotide
  Sense strand starting at position 2670 of SEQ ID NO: 1244392
agcagagagaugugguaga

SEQ ID NO: 1485227 - RNA, 19 nt, Artificial Sequence
  Description of Artificial Sequence: Synthetic oligonucleotide
  Antisense strand to SEQ ID NO: 1485226
ucuaccacaucucucugcu

SEQ ID NO: 1485228 - RNA, 19 nt, Artificial Sequence
  Description of Artificial Sequence: Synthetic oligonucleotide
  Sense strand starting at position 2684 of SEQ ID NO: 1244392
guagaaagucgaggagacu

SEQ ID NO: 1485229 - RNA, 19 nt, Artificial Sequence
  Description of Artificial Sequence: Synthetic oligonucleotide
  Antisense strand to SEQ ID NO: 1485228
agucuccucgacuuucuac

SEQ ID NO: 1485230 - RNA, 19 nt, Artificial Sequence
  Description of Artificial Sequence: Synthetic oligonucleotide
  Sense strand starting at position 2822 of SEQ ID NO: 1244392
ggaacuguuaagugcuauu

SEQ ID NO: 1485231 - RNA, 19 nt, Artificial Sequence
  Description of Artificial Sequence: Synthetic oligonucleotide
  Antisense strand to SEQ ID NO: 1485230
aauagcacuuaacaguucc

SEQ ID NO: 1485232 - RNA, 19 nt, Artificial Sequence
  Description of Artificial Sequence: Synthetic oligonucleotide
  Sense strand starting at position 3284 of SEQ ID NO: 1244392
uggccaaggucacucaaau

SEQ ID NO: 1485233 - RNA, 19 nt, Artificial Sequence
  Description of Artificial Sequence: Synthetic oligonucleotide
  Antisense strand to SEQ ID NO: 1485232
auuugagugaccuuggcca

SEQ ID NO: 1485234 - RNA, 19 nt, Artificial Sequence
  Description of Artificial Sequence: Synthetic oligonucleotide
  Sense strand starting at position 3305 of SEQ ID NO: 1244392
uuagcuauaagcugggauu

SEQ ID NO: 1485235 - RNA, 19 nt, Artificial Sequence
  Description of Artificial Sequence: Synthetic oligonucleotide
  Antisense strand to SEQ ID NO: 1485234
aaucccagcuuauagcuaa

SEQ ID NO: 1485236 - RNA, 19 nt, Artificial Sequence
  Description of Artificial Sequence: Synthetic oligonucleotide
  Sense strand starting at position 3306 of SEQ ID NO: 1244392
uagcuauaagcugggauua

SEQ ID NO: 1485237 - RNA, 19 nt, Artificial Sequence
  Description of Artificial Sequence: Synthetic oligonucleotide
  Antisense strand to SEQ ID NO: 1485236
uaaucccagcuuauagcua

SEQ ID NO: 1485238 - RNA, 19 nt, Artificial Sequence
  Description of Artificial Sequence: Synthetic oligonucleotide
  Sense strand starting at position 3327 of SEQ ID NO: 1244392
uguagauaugucugagucu

SEQ ID NO: 1485239 - RNA, 19 nt, Artificial Sequence
  Description of Artificial Sequence: Synthetic oligonucleotide
  Antisense strand to SEQ ID NO: 1485238
agacucagacauaucuaca

SEQ ID NO: 1485240 - RNA, 19 nt, Artificial Sequence
  Description of Artificial Sequence: Synthetic oligonucleotide
  Sense strand starting at position 3340 of SEQ ID NO: 1244392
gagucuaaagccuaugcuu

SEQ ID NO: 1485241 - RNA, 19 nt, Artificial Sequence
  Description of Artificial Sequence: Synthetic oligonucleotide
  Antisense strand to SEQ ID NO: 1485240
aagcauaggcuuuagacuc

SEQ ID NO: 1485242 - RNA, 19 nt, Artificial Sequence
  Description of Artificial Sequence: Synthetic oligonucleotide
  Sense strand starting at position 3365 of SEQ ID NO: 1244392
uguauaugauaauccaguu

SEQ ID NO: 1485243 - RNA, 19 nt, Artificial Sequence
  Description of Artificial Sequence: Synthetic oligonucleotide
  Antisense strand to SEQ ID NO: 1485242
aacuggauuaucauauaca

SEQ ID NO: 1485244 - RNA, 19 nt, Artificial Sequence
  Description of Artificial Sequence: Synthetic oligonucleotide
  Sense strand starting at position 3407 of SEQ ID NO: 1244392
cugcauuuauuggaggagu

SEQ ID NO: 1485245 - RNA, 19 nt, Artificial Sequence
  Description of Artificial Sequence: Synthetic oligonucleotide
  Antisense strand to SEQ ID NO: 1485244
acuccuccaauaaaugcag

SEQ ID NO: 1485246 - RNA, 19 nt, Artificial Sequence
  Description of Artificial Sequence: Synthetic oligonucleotide
  Sense strand starting at position 3556 of SEQ ID NO: 1244392
agcauuuacuguuuaugua

SEQ ID NO: 1485247 - RNA, 19 nt, Artificial Sequence
  Description of Artificial Sequence: Synthetic oligonucleotide
  Antisense strand to SEQ ID NO: 1485246
uacauaaacaguaaaugcu

SEQ ID NO: 1485248 - RNA, 19 nt, Artificial Sequence
  Description of Artificial Sequence: Synthetic oligonucleotide
  Sense strand starting at position 3655 of SEQ ID NO: 1244392
ugugcugaaucuuuagacu

SEQ ID NO: 1485249 - RNA, 19 nt, Artificial Sequence
  Description of Artificial Sequence: Synthetic oligonucleotide
  Antisense strand to SEQ ID NO: 1485248
agucuaaagauucagcaca

SEQ ID NO: 1485250 - RNA, 19 nt, Artificial Sequence
  Description of Artificial Sequence: Synthetic oligonucleotide
  Sense strand starting at position 3663 of SEQ ID NO: 1244392
aucuuuagacucuacaguu

SEQ ID NO: 1485251 - RNA, 19 nt, Artificial Sequence
  Description of Artificial Sequence: Synthetic oligonucleotide
  Antisense strand to SEQ ID NO: 1485250
aacuguagagucuaaagau

SEQ ID NO: 1485252 - RNA, 19 nt, Artificial Sequence
  Description of Artificial Sequence: Synthetic oligonucleotide
  Sense strand starting at position 3760 of SEQ ID NO: 1244392
gcaagauugcuagacuaca

SEQ ID NO: 1485253 - RNA, 19 nt, Artificial Sequence
  Description of Artificial Sequence: Synthetic oligonucleotide
  Antisense strand to SEQ ID NO: 1485252
uguagucuagcaaucuugc

SEQ ID NO: 1485254 - RNA, 19 nt, Artificial Sequence
  Description of Artificial Sequence: Synthetic oligonucleotide
  Sense strand starting at position 45 of SEQ ID NO: 1244393
ucuggaauaucucacuaga

SEQ ID NO: 1485255 - RNA, 19 nt, Artificial Sequence
  Description of Artificial Sequence: Synthetic oligonucleotide
  Antisense strand to SEQ ID NO: 1485254
ucuagugagauauuccaga

SEQ ID NO: 1485256 - RNA, 19 nt, Artificial Sequence
  Description of Artificial Sequence: Synthetic oligonucleotide
  Sense strand starting at position 73 of SEQ ID NO: 1244393
agaugaagggcuugaucuu

SEQ ID NO: 1485257 - RNA, 19 nt, Artificial Sequence
  Description of Artificial Sequence: Synthetic oligonucleotide
  Antisense strand to SEQ ID NO: 1485256
aagaucaagcccuucaucu

SEQ ID NO: 1485258 - RNA, 19 nt, Artificial Sequence
  Description of Artificial Sequence: Synthetic oligonucleotide
  Sense strand starting at position 79 of SEQ ID NO: 1244393
agggcuugaucuuagagag

SEQ ID NO: 1485259 - RNA, 19 nt, Artificial Sequence
  Description of Artificial Sequence: Synthetic oligonucleotide
  Antisense strand to SEQ ID NO: 1485258
cucucuaagaucaagcccu

SEQ ID NO: 1485260 - RNA, 19 nt, Artificial Sequence
  Description of Artificial Sequence: Synthetic oligonucleotide
  Sense strand starting at position 213 of SEQ ID NO: 1244393
uccugaagucggugugguu

SEQ ID NO: 1485261 - RNA, 19 nt, Artificial Sequence
  Description of Artificial Sequence: Synthetic oligonucleotide
  Antisense strand to SEQ ID NO: 1485260
aaccacaccgacuucagga

SEQ ID NO: 1485262 - RNA, 19 nt, Artificial Sequence
  Description of Artificial Sequence: Synthetic oligonucleotide
  Sense strand starting at position 225 of SEQ ID NO: 1244393
ugugguuacucuucccacu

SEQ ID NO: 1485263 - RNA, 19 nt, Artificial Sequence
  Description of Artificial Sequence: Synthetic oligonucleotide
  Antisense strand to SEQ ID NO: 1485262
agugggaagaguaaccaca

SEQ ID NO: 1485264 - RNA, 19 nt, Artificial Sequence
  Description of Artificial Sequence: Synthetic oligonucleotide
  Sense strand starting at position 227 of SEQ ID NO: 1244393
ugguuacucuucccacuuu

SEQ ID NO: 1485265 - RNA, 19 nt, Artificial Sequence
  Description of Artificial Sequence: Synthetic oligonucleotide
  Antisense strand to SEQ ID NO: 1485264
aaagugggaagaguaacca

SEQ ID NO: 1485266 - RNA, 19 nt, Artificial Sequence
  Description of Artificial Sequence: Synthetic oligonucleotide
  Sense strand starting at position 228 of SEQ ID NO: 1244393
gguuacucuucccacuuua

SEQ ID NO: 1485267 - RNA, 19 nt, Artificial Sequence
  Description of Artificial Sequence: Synthetic oligonucleotide
  Antisense strand to SEQ ID NO: 1485266
uaaagugggaagaguaacc

SEQ ID NO: 1485268 - RNA, 19 nt, Artificial Sequence
  Description of Artificial Sequence: Synthetic oligonucleotide
  Sense strand starting at position 269 of SEQ ID NO: 1244393
gagguuaugugagugacac

SEQ ID NO: 1485269 - RNA, 19 nt, Artificial Sequence
  Description of Artificial Sequence: Synthetic oligonucleotide
  Antisense strand to SEQ ID NO: 1485268
gugucacucacauaaccuc

SEQ ID NO: 1485270 - RNA, 19 nt, Artificial Sequence
  Description of Artificial Sequence: Synthetic oligonucleotide
  Sense strand starting at position 270 of SEQ ID NO: 1244393
agguuaugugagugacaca

SEQ ID NO: 1485271 - RNA, 19 nt, Artificial Sequence
  Description of Artificial Sequence: Synthetic oligonucleotide
  Antisense strand to SEQ ID NO: 1485270
ugugucacucacauaaccu

SEQ ID NO: 1485272 - RNA, 19 nt, Artificial Sequence
  Description of Artificial Sequence: Synthetic oligonucleotide
  Sense strand starting at position 289 of SEQ ID NO: 1244393
gcuugaagguggaguuaag

SEQ ID NO: 1485273 - RNA, 19 nt, Artificial Sequence
  Description of Artificial Sequence: Synthetic oligonucleotide
  Antisense strand to SEQ ID NO: 1485272
cuuaacuccaccuucaagc

SEQ ID NO: 1485274 - RNA, 19 nt, Artificial Sequence
  Description of Artificial Sequence: Synthetic oligonucleotide
  Sense strand starting at position 299 of SEQ ID NO: 1244393
ggaguuaagccugggcagu

SEQ ID NO: 1485275 - RNA, 19 nt, Artificial Sequence
  Description of Artificial Sequence: Synthetic oligonucleotide
  Antisense strand to SEQ ID NO: 1485274
acugcccaggcuuaacucc

SEQ ID NO: 1485276 - RNA, 19 nt, Artificial Sequence
  Description of Artificial Sequence: Synthetic oligonucleotide
  Sense strand starting at position 353 of SEQ ID NO: 1244393
ucacauggcuucuuagaaa

SEQ ID NO: 1485277 - RNA, 19 nt, Artificial Sequence
  Description of Artificial Sequence: Synthetic oligonucleotide
  Antisense strand to SEQ ID NO: 1485276
uuucuaagaagccauguga

SEQ ID NO: 1485278 - RNA, 19 nt, Artificial Sequence
  Description of Artificial Sequence: Synthetic oligonucleotide
  Sense strand starting at position 527 of SEQ ID NO: 1244393
gguggagacaaguagucuu

SEQ ID NO: 1485279 - RNA, 19 nt, Artificial Sequence
  Description of Artificial Sequence: Synthetic oligonucleotide
  Antisense strand to SEQ ID NO: 1485278
aagacuacuugucuccacc

SEQ ID NO: 1485280 - RNA, 19 nt, Artificial Sequence
  Description of Artificial Sequence: Synthetic oligonucleotide
  Sense strand starting at position 576 of SEQ ID NO: 1244393
gggagugucucugagguga

SEQ ID NO: 1485281 - RNA, 19 nt, Artificial Sequence
  Description of Artificial Sequence: Synthetic oligonucleotide
  Antisense strand to SEQ ID NO: 1485280
ucaccucagagacacuccc

SEQ ID NO: 1485282 - RNA, 19 nt, Artificial Sequence
  Description of Artificial Sequence: Synthetic oligonucleotide
  Sense strand starting at position 612 of SEQ ID NO: 1244393
cgccauguuuggucuggga

SEQ ID NO: 1485283 - RNA, 19 nt, Artificial Sequence
  Description of Artificial Sequence: Synthetic oligonucleotide
  Antisense strand to SEQ ID NO: 1485282
ucccagaccaaacauggcg

SEQ ID NO: 1485284 - RNA, 19 nt, Artificial Sequence
  Description of Artificial Sequence: Synthetic oligonucleotide
  Sense strand starting at position 614 of SEQ ID NO: 1244393
ccauguuuggucugggaca

SEQ ID NO: 1485285 - RNA, 19 nt, Artificial Sequence
  Description of Artificial Sequence: Synthetic oligonucleotide
  Antisense strand to SEQ ID NO: 1485284
ugucccagaccaaacaugg

SEQ ID NO: 1485286 - RNA, 19 nt, Artificial Sequence
  Description of Artificial Sequence: Synthetic oligonucleotide
  Sense strand starting at position 615 of SEQ ID NO: 1244393
cauguuuggucugggacac

SEQ ID NO: 1485287 - RNA, 19 nt, Artificial Sequence
  Description of Artificial Sequence: Synthetic oligonucleotide
  Antisense strand to SEQ ID NO: 1485286
gugucccagaccaaacaug

SEQ ID NO: 1485288 - RNA, 19 nt, Artificial Sequence
  Description of Artificial Sequence: Synthetic oligonucleotide
  Sense strand starting at position 722 of SEQ ID NO: 1244393
aggugagcugucuaggaga

SEQ ID NO: 1485289 - RNA, 19 nt, Artificial Sequence
  Description of Artificial Sequence: Synthetic oligonucleotide
  Antisense strand to SEQ ID NO: 1485288
ucuccuagacagcucaccu

SEQ ID NO: 1485290 - RNA, 19 nt, Artificial Sequence
  Description of Artificial Sequence: Synthetic oligonucleotide
  Sense strand starting at position 772 of SEQ ID NO: 1244393
cggcuuucuugccaaagga

SEQ ID NO: 1485291 - RNA, 19 nt, Artificial Sequence
  Description of Artificial Sequence: Synthetic oligonucleotide
  Antisense strand to SEQ ID NO: 1485290
uccuuuggcaagaaagccg

SEQ ID NO: 1485292 - RNA, 19 nt, Artificial Sequence
  Description of Artificial Sequence: Synthetic oligonucleotide
  Sense strand starting at position 801 of SEQ ID NO: 1244393
augagaaacuguggaaucu

SEQ ID NO: 1485293 - RNA, 19 nt, Artificial Sequence
  Description of Artificial Sequence: Synthetic oligonucleotide
  Antisense strand to SEQ ID NO: 1485292
agauuccacaguuucucau

SEQ ID NO: 1485294 - RNA, 19 nt, Artificial Sequence
  Description of Artificial Sequence: Synthetic oligonucleotide
  Sense strand starting at position 860 of SEQ ID NO: 1244393
acgugugggacagauagau

SEQ ID NO: 1485295 - RNA, 19 nt, Artificial Sequence
  Description of Artificial Sequence: Synthetic oligonucleotide
  Antisense strand to SEQ ID NO: 1485294
aucuaucugucccacacgu

SEQ ID NO: 1485296 - RNA, 19 nt, Artificial Sequence
  Description of Artificial Sequence: Synthetic oligonucleotide
  Sense strand starting at position 898 of SEQ ID NO: 1244393
uccuauguaccugagucuu

SEQ ID NO: 1485297 - RNA, 19 nt, Artificial Sequence
  Description of Artificial Sequence: Synthetic oligonucleotide
  Antisense strand to SEQ ID NO: 1485296
aagacucagguacauagga

SEQ ID NO: 1485298 - RNA, 19 nt, Artificial Sequence
  Description of Artificial Sequence: Synthetic oligonucleotide
  Sense strand starting at position 904 of SEQ ID NO: 1244393
guaccugagucuucuaaag

SEQ ID NO: 1485299 - RNA, 19 nt, Artificial Sequence
  Description of Artificial Sequence: Synthetic oligonucleotide
  Antisense strand to SEQ ID NO: 1485298
cuuuagaagacucagguac

SEQ ID NO: 1485300 - RNA, 19 nt, Artificial Sequence
  Description of Artificial Sequence: Synthetic oligonucleotide
  Sense strand starting at position 1324 of SEQ ID NO: 1244393
agaucuagcccaggaacaa

SEQ ID NO: 1485301 - RNA, 19 nt, Artificial Sequence
  Description of Artificial Sequence: Synthetic oligonucleotide
  Antisense strand to SEQ ID NO: 1485300
uuguuccugggcuagaucu

SEQ ID NO: 1485302 - RNA, 19 nt, Artificial Sequence
  Description of Artificial Sequence: Synthetic oligonucleotide
  Sense strand starting at position 1754 of SEQ ID NO: 1244393
agggccucaagaugaguua

SEQ ID NO: 1485303 - RNA, 19 nt, Artificial Sequence
  Description of Artificial Sequence: Synthetic oligonucleotide
  Antisense strand to SEQ ID NO: 1485302
uaacucaucuugaggcccu

SEQ ID NO: 1485304 - RNA, 19 nt, Artificial Sequence
  Description of Artificial Sequence: Synthetic oligonucleotide
  Sense strand starting at position 2388 of SEQ ID NO: 1244393
ccugacuucugaggcaaca

SEQ ID NO: 1485305 - RNA, 19 nt, Artificial Sequence
  Description of Artificial Sequence: Synthetic oligonucleotide
  Antisense strand to SEQ ID NO: 1485304
uguugccucagaagucagg

SEQ ID NO: 1485306 - RNA, 19 nt, Artificial Sequence
  Description of Artificial Sequence: Synthetic oligonucleotide
  Sense strand starting at position 2418 of SEQ ID NO: 1244393
gccaccuuguucucacaga

SEQ ID NO: 1485307 - RNA, 19 nt, Artificial Sequence
  Description of Artificial Sequence: Synthetic oligonucleotide
  Antisense strand to SEQ ID NO: 1485306
ucugugagaacaagguggc

SEQ ID NO: 1485308 - RNA, 19 nt, Artificial Sequence
  Description of Artificial Sequence: Synthetic oligonucleotide
  Sense strand starting at position 2708 of SEQ ID NO: 1244393
uuuacaaaguguucucagu

SEQ ID NO: 1485309 - RNA, 19 nt, Artificial Sequence
  Description of Artificial Sequence: Synthetic oligonucleotide
  Antisense strand to SEQ ID NO: 1485308
acugagaacacuuuguaaa

SEQ ID NO: 1485310 - RNA, 19 nt, Artificial Sequence
  Description of Artificial Sequence: Synthetic oligonucleotide
  Sense strand starting at position 3609 of SEQ ID NO: 1244393
ggaagauaucccugggcgu

SEQ ID NO: 1485311 - RNA, 19 nt, Artificial Sequence
  Description of Artificial Sequence: Synthetic oligonucleotide
  Antisense strand to SEQ ID NO: 1485310
acgcccagggauaucuucc

SEQ ID NO: 1485312 - RNA, 19 nt, Artificial Sequence
  Description of Artificial Sequence: Synthetic oligonucleotide
  Sense strand starting at position 3611 of SEQ ID NO: 1244393
aagauaucccugggcgugu

SEQ ID NO: 1485313 - RNA, 19 nt, Artificial Sequence
  Description of Artificial Sequence: Synthetic oligonucleotide
  Antisense strand to SEQ ID NO: 1485312
acacgcccagggauaucuu

SEQ ID NO: 1485314 - RNA, 19 nt, Artificial Sequence
  Description of Artificial Sequence: Synthetic oligonucleotide
  Sense strand starting at position 3628 of SEQ ID NO: 1244393
guguguccugaaggguaaa

SEQ ID NO: 1485315 - RNA, 19 nt, Artificial Sequence
  Description of Artificial Sequence: Synthetic oligonucleotide
  Antisense strand to SEQ ID NO: 1485314
uuuacccuucaggacacac

SEQ ID NO: 1485316 - RNA, 19 nt, Artificial Sequence
  Description of Artificial Sequence: Synthetic oligonucleotide
  Sense strand starting at position 3629 of SEQ ID NO: 1244393
uguguccugaaggguaaau

SEQ ID NO: 1485317 - RNA, 19 nt, Artificial Sequence
  Description of Artificial Sequence: Synthetic oligonucleotide
  Antisense strand to SEQ ID NO: 1485316
auuuacccuucaggacaca

SEQ ID NO: 1485318 - RNA, 19 nt, Artificial Sequence
  Description of Artificial Sequence: Synthetic oligonucleotide
  Sense strand starting at position 3640 of SEQ ID NO: 1244393
ggguaaaugccauggcaua

SEQ ID NO: 1485319 - RNA, 19 nt, Artificial Sequence
  Description of Artificial Sequence: Synthetic oligonucleotide
  Antisense strand to SEQ ID NO: 1485318
uaugccauggcauuuaccc

SEQ ID NO: 1485320 - RNA, 19 nt, Artificial Sequence
  Description of Artificial Sequence: Synthetic oligonucleotide
  Sense strand starting at position 3641 of SEQ ID NO: 1244393
gguaaaugccauggcauaa

SEQ ID NO: 1485321 - RNA, 19 nt, Artificial Sequence
  Description of Artificial Sequence: Synthetic oligonucleotide
  Antisense strand to SEQ ID NO: 1485320
uuaugccauggcauuuacc

SEQ ID NO: 1485322 - RNA, 19 nt, Artificial Sequence
  Description of Artificial Sequence: Synthetic oligonucleotide
  Sense strand starting at position 3677 of SEQ ID NO: 1244393
gcaggauguccgcaguugu

SEQ ID NO: 1485323 - RNA, 19 nt, Artificial Sequence
  Description of Artificial Sequence: Synthetic oligonucleotide
  Antisense strand to SEQ ID NO: 1485322
acaacugcggacauccugc

SEQ ID NO: 1485324 - RNA, 19 nt, Artificial Sequence
  Description of Artificial Sequence: Synthetic oligonucleotide
  Sense strand starting at position 3685 of SEQ ID NO: 1244393
uccgcaguugucugaccau

SEQ ID NO: 1485325 - RNA, 19 nt, Artificial Sequence
  Description of Artificial Sequence: Synthetic oligonucleotide
  Antisense strand to SEQ ID NO: 1485324
auggucagacaacugcgga

SEQ ID NO: 1485326 - RNA, 19 nt, Artificial Sequence
  Description of Artificial Sequence: Synthetic oligonucleotide
  Sense strand starting at position 3826 of SEQ ID NO: 1244393
agcgaaaccuugucuccau

SEQ ID NO: 1485327 - RNA, 19 nt, Artificial Sequence
  Description of Artificial Sequence: Synthetic oligonucleotide
  Antisense strand to SEQ ID NO: 1485326
auggagacaagguuucgcu

SEQ ID NO: 1485328 - RNA, 19 nt, Artificial Sequence
  Description of Artificial Sequence: Synthetic oligonucleotide
  Sense strand starting at position 245 of SEQ ID NO: 1244394
gugggaagccauggacaaa

SEQ ID NO: 1485329 - RNA, 19 nt, Artificial Sequence
  Description of Artificial Sequence: Synthetic oligonucleotide
  Antisense strand to SEQ ID NO: 1485328
uuuguccauggcuucccac

SEQ ID NO: 1485330 - RNA, 19 nt, Artificial Sequence
  Description of Artificial Sequence: Synthetic oligonucleotide
  Sense strand starting at position 268 of SEQ ID NO: 1244394
cagugaggcuugucaggaa

SEQ ID NO: 1485331 - RNA, 19 nt, Artificial Sequence
  Description of Artificial Sequence: Synthetic oligonucleotide
  Antisense strand to SEQ ID NO: 1485330
uuccugacaagccucacug

SEQ ID NO: 1485332 - RNA, 19 nt, Artificial Sequence
  Description of Artificial Sequence: Synthetic oligonucleotide
  Sense strand starting at position 393 of SEQ ID NO: 1244394
gcaccaaccugcucaagaa

SEQ ID NO: 1485333 - RNA, 19 nt, Artificial Sequence
  Description of Artificial Sequence: Synthetic oligonucleotide
  Antisense strand to SEQ ID NO: 1485332
uucuugagcagguuggugc

SEQ ID NO: 1485334 - RNA, 19 nt, Artificial Sequence
  Description of Artificial Sequence: Synthetic oligonucleotide
  Sense strand starting at position 476 of SEQ ID NO: 1244394
aggugaucuugcucuuaau

SEQ ID NO: 1485335 - RNA, 19 nt, Artificial Sequence
  Description of Artificial Sequence: Synthetic oligonucleotide
  Antisense strand to SEQ ID NO: 1485334
auuaagagcaagaucaccu

SEQ ID NO: 1485336 - RNA, 19 nt, Artificial Sequence
  Description of Artificial Sequence: Synthetic oligonucleotide
  Sense strand starting at position 644 of SEQ ID NO: 1244394
aagucauuggcagggugaa

SEQ ID NO: 1485337 - RNA, 19 nt, Artificial Sequence
  Description of Artificial Sequence: Synthetic oligonucleotide
  Antisense strand to SEQ ID NO: 1485336
uucacccugccaaugacuu

SEQ ID NO: 1485338 - RNA, 19 nt, Artificial Sequence
  Description of Artificial Sequence: Synthetic oligonucleotide
  Sense strand starting at position 695 of SEQ ID NO: 1244394
uggccaucugagggaauga

SEQ ID NO: 1485339 - RNA, 19 nt, Artificial Sequence
  Description of Artificial Sequence: Synthetic oligonucleotide
  Antisense strand to SEQ ID NO: 1485338
ucauucccucagauggcca

SEQ ID NO: 1485340 - RNA, 19 nt, Artificial Sequence
  Description of Artificial Sequence: Synthetic oligonucleotide
  Sense strand starting at position 903 of SEQ ID NO: 1244394
gccgcaaccuuuccaacua

SEQ ID NO: 1485341 - RNA, 19 nt, Artificial Sequence
  Description of Artificial Sequence: Synthetic oligonucleotide
  Antisense strand to SEQ ID NO: 1485340
uaguuggaaagguugcggc

SEQ ID NO: 1485342 - RNA, 19 nt, Artificial Sequence
  Description of Artificial Sequence: Synthetic oligonucleotide
  Sense strand starting at position 2362 of SEQ ID NO: 1244394
gcaggcuguguucaaggua

SEQ ID NO: 1485343 - RNA, 19 nt, Artificial Sequence
  Description of Artificial Sequence: Synthetic oligonucleotide
  Antisense strand to SEQ ID NO: 1485342
uaccuugaacacagccugc

SEQ ID NO: 1485344 - RNA, 19 nt, Artificial Sequence
  Description of Artificial Sequence: Synthetic oligonucleotide
  Sense strand starting at position 2377 of SEQ ID NO: 1244394
gguagugcugucuaaagga

SEQ ID NO: 1485345 - RNA, 19 nt, Artificial Sequence
  Description of Artificial Sequence: Synthetic oligonucleotide
  Antisense strand to SEQ ID NO: 1485344
uccuuuagacagcacuacc

SEQ ID NO: 1485346 - RNA, 19 nt, Artificial Sequence
  Description of Artificial Sequence: Synthetic oligonucleotide
  Sense strand starting at position 2554 of SEQ ID NO: 1244394
ucccaauagcuuggucuga

SEQ ID NO: 1485347 - RNA, 19 nt, Artificial Sequence
  Description of Artificial Sequence: Synthetic oligonucleotide
  Antisense strand to SEQ ID NO: 1485346
ucagaccaagcuauuggga

SEQ ID NO: 1485348 - RNA, 19 nt, Artificial Sequence
  Description of Artificial Sequence: Synthetic oligonucleotide
  Sense strand starting at position 2555 of SEQ ID NO: 1244394
cccaauagcuuggucugau

SEQ ID NO: 1485349 - RNA, 19 nt, Artificial Sequence
  Description of Artificial Sequence: Synthetic oligonucleotide
  Antisense strand to SEQ ID NO: 1485348
aucagaccaagcuauuggg

SEQ ID NO: 1485350 - RNA, 19 nt, Artificial Sequence
  Description of Artificial Sequence: Synthetic oligonucleotide
  Sense strand starting at position 2556 of SEQ ID NO: 1244394
ccaauagcuuggucugaua

SEQ ID NO: 1485351 - RNA, 19 nt, Artificial Sequence
  Description of Artificial Sequence: Synthetic oligonucleotide
  Antisense strand to SEQ ID NO: 1485350
uaucagaccaagcuauugg

SEQ ID NO: 1485352 - RNA, 19 nt, Artificial Sequence
  Description of Artificial Sequence: Synthetic oligonucleotide
  Sense strand starting at position 2558 of SEQ ID NO: 1244394
aauagcuuggucugauaca

SEQ ID NO: 1485353 - RNA, 19 nt, Artificial Sequence
  Description of Artificial Sequence: Synthetic oligonucleotide
  Antisense strand to SEQ ID NO: 1485352
uguaucagaccaagcuauu

SEQ ID NO: 1485354 - RNA, 19 nt, Artificial Sequence
  Description of Artificial Sequence: Synthetic oligonucleotide
  Sense strand starting at position 2621 of SEQ ID NO: 1244394
gggagccauggcuguaagu

SEQ ID NO: 1485355 - RNA, 19 nt, Artificial Sequence
  Description of Artificial Sequence: Synthetic oligonucleotide
  Antisense strand to SEQ ID NO: 1485354
acuuacagccauggcuccc

SEQ ID NO: 1485356 - RNA, 19 nt, Artificial Sequence
  Description of Artificial Sequence: Synthetic oligonucleotide
  Sense strand starting at position 2686 of SEQ ID NO: 1244394
ucagaagcucuuuggaaug

SEQ ID NO: 1485357 - RNA, 19 nt, Artificial Sequence
  Description of Artificial Sequence: Synthetic oligonucleotide
  Antisense strand to SEQ ID NO: 1485356
cauuccaaagagcuucuga

SEQ ID NO: 1485358 - RNA, 19 nt, Artificial Sequence
  Description of Artificial Sequence: Synthetic oligonucleotide
  Sense strand starting at position 2722 of SEQ ID NO: 1244394
cacugugugcuguaaauau

SEQ ID NO: 1485359 - RNA, 19 nt, Artificial Sequence
  Description of Artificial Sequence: Synthetic oligonucleotide
  Antisense strand to SEQ ID NO: 1485358
auauuuacagcacacagug

SEQ ID NO: 1485360 - RNA, 19 nt, Artificial Sequence
  Description of Artificial Sequence: Synthetic oligonucleotide
  Sense strand starting at position 2726 of SEQ ID NO: 1244394
gugugcuguaaauaucaag

SEQ ID NO: 1485361 - RNA, 19 nt, Artificial Sequence
  Description of Artificial Sequence: Synthetic oligonucleotide
  Antisense strand to SEQ ID NO: 1485360
cuugauauuuacagcacac

SEQ ID NO: 1485362 - RNA, 19 nt, Artificial Sequence
  Description of Artificial Sequence: Synthetic oligonucleotide
  Sense strand starting at position 2733 of SEQ ID NO: 1244394
guaaauaucaagugagcug

SEQ ID NO: 1485363 - RNA, 19 nt, Artificial Sequence
  Description of Artificial Sequence: Synthetic oligonucleotide
  Antisense strand to SEQ ID NO: 1485362
cagcucacuugauauuuac

SEQ ID NO: 1485364 - RNA, 19 nt, Artificial Sequence
  Description of Artificial Sequence: Synthetic oligonucleotide
  Sense strand starting at position 2773 of SEQ ID NO: 1244394
uuuauacuuccugggagag

SEQ ID NO: 1485365 - RNA, 19 nt, Artificial Sequence
  Description of Artificial Sequence: Synthetic oligonucleotide
  Antisense strand to SEQ ID NO: 1485364
cucucccaggaaguauaaa

SEQ ID NO: 1485366 - RNA, 19 nt, Artificial Sequence
  Description of Artificial Sequence: Synthetic oligonucleotide
  Sense strand starting at position 2828 of SEQ ID NO: 1244394
gugcuaugucuagaguuug

SEQ ID NO: 1485367 - RNA, 19 nt, Artificial Sequence
  Description of Artificial Sequence: Synthetic oligonucleotide
  Antisense strand to SEQ ID NO: 1485366
caaacucuagacauagcac

SEQ ID NO: 1485368 - RNA, 19 nt, Artificial Sequence
  Description of Artificial Sequence: Synthetic oligonucleotide
  Sense strand starting at position 2833 of SEQ ID NO: 1244394
augucuagaguuuggagaa

SEQ ID NO: 1485369 - RNA, 19 nt, Artificial Sequence
  Description of Artificial Sequence: Synthetic oligonucleotide
  Antisense strand to SEQ ID NO: 1485368
uucuccaaacucuagacau

SEQ ID NO: 1485370 - RNA, 19 nt, Artificial Sequence
  Description of Artificial Sequence: Synthetic oligonucleotide
  Sense strand starting at position 3208 of SEQ ID NO: 1244394
gagaucagacauggcauau

SEQ ID NO: 1485371 - RNA, 19 nt, Artificial Sequence
  Description of Artificial Sequence: Synthetic oligonucleotide
  Antisense strand to SEQ ID NO: 1485370
auaugccaugucugaucuc

SEQ ID NO: 1485372 - RNA, 19 nt, Artificial Sequence
  Description of Artificial Sequence: Synthetic oligonucleotide
  Sense strand starting at position 3220 of SEQ ID NO: 1244394
ggcauaucuccagggaaau

SEQ ID NO: 1485373 - RNA, 19 nt, Artificial Sequence
  Description of Artificial Sequence: Synthetic oligonucleotide
  Antisense strand to SEQ ID NO: 1485372
auuucccuggagauaugcc

SEQ ID NO: 1485374 - RNA, 19 nt, Artificial Sequence
  Description of Artificial Sequence: Synthetic oligonucleotide
  Sense strand starting at position 3221 of SEQ ID NO: 1244394
gcauaucuccagggaaauc

SEQ ID NO: 1485375 - RNA, 19 nt, Artificial Sequence
  Description of Artificial Sequence: Synthetic oligonucleotide
  Antisense strand to SEQ ID NO: 1485374
gauuucccuggagauaugc

SEQ ID NO: 1485376 - RNA, 19 nt, Artificial Sequence
  Description of Artificial Sequence: Synthetic oligonucleotide
  Sense strand starting at position 3255 of SEQ ID NO: 1244394
agaccugagcugugacagu

SEQ ID NO: 1485377 - RNA, 19 nt, Artificial Sequence
  Description of Artificial Sequence: Synthetic oligonucleotide
  Antisense strand to SEQ ID NO: 1485376
acugucacagcucaggucu

SEQ ID NO: 1485378 - RNA, 19 nt, Artificial Sequence
  Description of Artificial Sequence: Synthetic oligonucleotide
  Sense strand starting at position 3289 of SEQ ID NO: 1244394
gcuggcauuacuuggauga

SEQ ID NO: 1485379 - RNA, 19 nt, Artificial Sequence
  Description of Artificial Sequence: Synthetic oligonucleotide
  Antisense strand to SEQ ID NO: 1485378
ucauccaaguaaugccagc

SEQ ID NO: 1485380 - RNA, 19 nt, Artificial Sequence
  Description of Artificial Sequence: Synthetic oligonucleotide
  Sense strand starting at position 3290 of SEQ ID NO: 1244394
cuggcauuacuuggaugau

SEQ ID NO: 1485381 - RNA, 19 nt, Artificial Sequence
  Description of Artificial Sequence: Synthetic oligonucleotide
  Antisense strand to SEQ ID NO: 1485380
aucauccaaguaaugccag

SEQ ID NO: 1485382 - RNA, 19 nt, Artificial Sequence
  Description of Artificial Sequence: Synthetic oligonucleotide
  Sense strand starting at position 3293 of SEQ ID NO: 1244394
gcauuacuuggaugaugag

SEQ ID NO: 1485383 - RNA, 19 nt, Artificial Sequence
  Description of Artificial Sequence: Synthetic oligonucleotide
  Antisense strand to SEQ ID NO: 1485382
cucaucauccaaguaaugc

SEQ ID NO: 1485384 - RNA, 19 nt, Artificial Sequence
  Description of Artificial Sequence: Synthetic oligonucleotide
  Sense strand starting at position 3303 of SEQ ID NO: 1244394
gaugaugagauaggugcua

SEQ ID NO: 1485385 - RNA, 19 nt, Artificial Sequence
  Description of Artificial Sequence: Synthetic oligonucleotide
  Antisense strand to SEQ ID NO: 1485384
uagcaccuaucucaucauc

SEQ ID NO: 1485386 - RNA, 19 nt, Artificial Sequence
  Description of Artificial Sequence: Synthetic oligonucleotide
  Sense strand starting at position 3305 of SEQ ID NO: 1244394
ugaugagauaggugcuaug

SEQ ID NO: 1485387 - RNA, 19 nt, Artificial Sequence
  Description of Artificial Sequence: Synthetic oligonucleotide
  Antisense strand to SEQ ID NO: 1485386
cauagcaccuaucucauca

SEQ ID NO: 1485388 - RNA, 19 nt, Artificial Sequence
  Description of Artificial Sequence: Synthetic oligonucleotide
  Sense strand starting at position 3731 of SEQ ID NO: 1244394
caacgacuaucauuagugu

SEQ ID NO: 1485389 - RNA, 19 nt, Artificial Sequence
  Description of Artificial Sequence: Synthetic oligonucleotide
  Antisense strand to SEQ ID NO: 1485388
acacuaaugauagucguug

SEQ ID NO: 1485390 - RNA, 19 nt, Artificial Sequence
  Description of Artificial Sequence: Synthetic oligonucleotide
  Sense strand starting at position 3732 of SEQ ID NO: 1244394
aacgacuaucauuaguguu

SEQ ID NO: 1485391 - RNA, 19 nt, Artificial Sequence
  Description of Artificial Sequence: Synthetic oligonucleotide
  Antisense strand to SEQ ID NO: 1485390
aacacuaaugauagucguu

SEQ ID NO: 1485392 - RNA, 19 nt, Artificial Sequence
  Description of Artificial Sequence: Synthetic oligonucleotide
  Sense strand starting at position 3740 of SEQ ID NO: 1244394
ucauuaguguuuccugagu

SEQ ID NO: 1485393 - RNA, 19 nt, Artificial Sequence
  Description of Artificial Sequence: Synthetic oligonucleotide
  Antisense strand to SEQ ID NO: 1485392
acucaggaaacacuaauga

SEQ ID NO: 1485394 - RNA, 19 nt, Artificial Sequence
  Description of Artificial Sequence: Synthetic oligonucleotide
  Sense strand starting at position 3745 of SEQ ID NO: 1244394
aguguuuccugaguaccua

SEQ ID NO: 1485395 - RNA, 19 nt, Artificial Sequence
  Description of Artificial Sequence: Synthetic oligonucleotide
  Antisense strand to SEQ ID NO: 1485394
uagguacucaggaaacacu

SEQ ID NO: 1485396 - RNA, 19 nt, Artificial Sequence
  Description of Artificial Sequence: Synthetic oligonucleotide
  Sense strand starting at position 3746 of SEQ ID NO: 1244394
guguuuccugaguaccuau

SEQ ID NO: 1485397 - RNA, 19 nt, Artificial Sequence
  Description of Artificial Sequence: Synthetic oligonucleotide
  Antisense strand to SEQ ID NO: 1485396
auagguacucaggaaacac

SEQ ID NO: 1485398 - RNA, 19 nt, Artificial Sequence
  Description of Artificial Sequence: Synthetic oligonucleotide
  Sense strand starting at position 3808 of SEQ ID NO: 1244394
gggagacauuauuauuaua

SEQ ID NO: 1485399 - RNA, 19 nt, Artificial Sequence
  Description of Artificial Sequence: Synthetic oligonucleotide
  Antisense strand to SEQ ID NO: 1485398
uauaauaauaaugucuccc

SEQ ID NO: 1485400 - RNA, 19 nt, Artificial Sequence
  Description of Artificial Sequence: Synthetic oligonucleotide
  Sense strand starting at position 3876 of SEQ ID NO: 1244394
aucucaguucuguaaagua

SEQ ID NO: 1485401 - RNA, 19 nt, Artificial Sequence
  Description of Artificial Sequence: Synthetic oligonucleotide
  Antisense strand to SEQ ID NO: 1485400
uacuuuacagaacugagau

SEQ ID NO: 1485402 - RNA, 19 nt, Artificial Sequence
  Description of Artificial Sequence: Synthetic oligonucleotide
  Sense strand starting at position 3890 of SEQ ID NO: 1244394
aaguacuagcuguguuacu

SEQ ID NO: 1485403 - RNA, 19 nt, Artificial Sequence
  Description of Artificial Sequence: Synthetic oligonucleotide
  Antisense strand to SEQ ID NO: 1485402
aguaacacagcuaguacuu

SEQ ID NO: 1485404 - RNA, 19 nt, Artificial Sequence
  Description of Artificial Sequence: Synthetic oligonucleotide
  Sense strand starting at position 3900 of SEQ ID NO: 1244394
uguguuacucugggugauu

SEQ ID NO: 1485405 - RNA, 19 nt, Artificial Sequence
  Description of Artificial Sequence: Synthetic oligonucleotide
  Antisense strand to SEQ ID NO: 1485404
aaucacccagaguaacaca

SEQ ID NO: 1485406 - RNA, 19 nt, Artificial Sequence
  Description of Artificial Sequence: Synthetic oligonucleotide
  Sense strand starting at position 3901 of SEQ ID NO: 1244394
guguuacucugggugauuu

SEQ ID NO: 1485407 - RNA, 19 nt, Artificial Sequence
  Description of Artificial Sequence: Synthetic oligonucleotide
  Antisense strand to SEQ ID NO: 1485406
aaaucacccagaguaacac

SEQ ID NO: 1485408 - RNA, 19 nt, Artificial Sequence
  Description of Artificial Sequence: Synthetic oligonucleotide
  Sense strand starting at position 49 of SEQ ID NO: 1244395
gggugaagcgugccugcaa

SEQ ID NO: 1485409 - RNA, 19 nt, Artificial Sequence
  Description of Artificial Sequence: Synthetic oligonucleotide
  Antisense strand to SEQ ID NO: 1485408
uugcaggcacgcuucaccc

SEQ ID NO: 1485410 - RNA, 19 nt, Artificial Sequence
  Description of Artificial Sequence: Synthetic oligonucleotide
  Sense strand starting at position 67 of SEQ ID NO: 1244395
auggauuaacccuggugga

SEQ ID NO: 1485411 - RNA, 19 nt, Artificial Sequence
  Description of Artificial Sequence: Synthetic oligonucleotide
  Antisense strand to SEQ ID NO: 1485410
uccaccaggguuaauccau

SEQ ID NO: 1485412 - RNA, 19 nt, Artificial Sequence
  Description of Artificial Sequence: Synthetic oligonucleotide
  Sense strand starting at position 162 of SEQ ID NO: 1244395
gacaauugaggcggaaaca

SEQ ID NO: 1485413 - RNA, 19 nt, Artificial Sequence
  Description of Artificial Sequence: Synthetic oligonucleotide
  Antisense strand to SEQ ID NO: 1485412
uguuuccgccucaauuguc

SEQ ID NO: 1485414 - RNA, 19 nt, Artificial Sequence
  Description of Artificial Sequence: Synthetic oligonucleotide
  Sense strand starting at position 441 of SEQ ID NO: 1244395
gagugauaauauccagauc

SEQ ID NO: 1485415 - RNA, 19 nt, Artificial Sequence
  Description of Artificial Sequence: Synthetic oligonucleotide
  Antisense strand to SEQ ID NO: 1485414
gaucuggauauuaucacuc

SEQ ID NO: 1485416 - RNA, 19 nt, Artificial Sequence
  Description of Artificial Sequence: Synthetic oligonucleotide
  Sense strand starting at position 466 of SEQ ID NO: 1244395
ggcuaaaugaagcguuaaa

SEQ ID NO: 1485417 - RNA, 19 nt, Artificial Sequence
  Description of Artificial Sequence: Synthetic oligonucleotide
  Antisense strand to SEQ ID NO: 1485416
uuuaacgcuucauuuagcc

SEQ ID NO: 1485418 - RNA, 19 nt, Artificial Sequence
  Description of Artificial Sequence: Synthetic oligonucleotide
  Sense strand starting at position 487 of SEQ ID NO: 1244395
ggcuaauaccugugaaagc

SEQ ID NO: 1485419 - RNA, 19 nt, Artificial Sequence
  Description of Artificial Sequence: Synthetic oligonucleotide
  Antisense strand to SEQ ID NO: 1485418
gcuuucacagguauuagcc

SEQ ID NO: 1485420 - RNA, 19 nt, Artificial Sequence
  Description of Artificial Sequence: Synthetic oligonucleotide
  Sense strand starting at position 500 of SEQ ID NO: 1244395
gaaagcgcucugcaaaugu

SEQ ID NO: 1485421 - RNA, 19 nt, Artificial Sequence
  Description of Artificial Sequence: Synthetic oligonucleotide
  Antisense strand to SEQ ID NO: 1485420
acauuugcagagcgcuuuc

SEQ ID NO: 1485422 - RNA, 19 nt, Artificial Sequence
  Description of Artificial Sequence: Synthetic oligonucleotide
  Sense strand starting at position 509 of SEQ ID NO: 1244395
cugcaaauguuauuacgau

SEQ ID NO: 1485423 - RNA, 19 nt, Artificial Sequence
  Description of Artificial Sequence: Synthetic oligonucleotide
  Antisense strand to SEQ ID NO: 1485422
aucguaauaacauuugcag

SEQ ID NO: 1485424 - RNA, 19 nt, Artificial Sequence
  Description of Artificial Sequence: Synthetic oligonucleotide
  Sense strand starting at position 515 of SEQ ID NO: 1244395
auguuauuacgaugcagca

SEQ ID NO: 1485425 - RNA, 19 nt, Artificial Sequence
  Description of Artificial Sequence: Synthetic oligonucleotide
  Antisense strand to SEQ ID NO: 1485424
ugcugcaucguaauaacau

SEQ ID NO: 1485426 - RNA, 19 nt, Artificial Sequence
  Description of Artificial Sequence: Synthetic oligonucleotide
  Sense strand starting at position 544 of SEQ ID NO: 1244395
gcuggagucaagugagauu

SEQ ID NO: 1485427 - RNA, 19 nt, Artificial Sequence
  Description of Artificial Sequence: Synthetic oligonucleotide
  Antisense strand to SEQ ID NO: 1485426
aaucucacuugacuccagc

SEQ ID NO: 1485428 - RNA, 19 nt, Artificial Sequence
  Description of Artificial Sequence: Synthetic oligonucleotide
  Sense strand starting at position 547 of SEQ ID NO: 1244395
ggagucaagugagauuaga

SEQ ID NO: 1485429 - RNA, 19 nt, Artificial Sequence
  Description of Artificial Sequence: Synthetic oligonucleotide
  Antisense strand to SEQ ID NO: 1485428
ucuaaucucacuugacucc

SEQ ID NO: 1485430 - RNA, 19 nt, Artificial Sequence
  Description of Artificial Sequence: Synthetic oligonucleotide
  Sense strand starting at position 600 of SEQ ID NO: 1244395
gucgguuucgcgguuacca

SEQ ID NO: 1485431 - RNA, 19 nt, Artificial Sequence
  Description of Artificial Sequence: Synthetic oligonucleotide
  Antisense strand to SEQ ID NO: 1485430
ugguaaccgcgaaaccgac

SEQ ID NO: 1485432 - RNA, 19 nt, Artificial Sequence
  Description of Artificial Sequence: Synthetic oligonucleotide
  Sense strand starting at position 609 of SEQ ID NO: 1244395
gcgguuaccagccaagaau

SEQ ID NO: 1485433 - RNA, 19 nt, Artificial Sequence
  Description of Artificial Sequence: Synthetic oligonucleotide
  Antisense strand to SEQ ID NO: 1485432
auucuuggcugguaaccgc

SEQ ID NO: 1485434 - RNA, 19 nt, Artificial Sequence
  Description of Artificial Sequence: Synthetic oligonucleotide
  Sense strand starting at position 620 of SEQ ID NO: 1244395
ccaagaauuucuggaaagg

SEQ ID NO: 1485435 - RNA, 19 nt, Artificial Sequence
  Description of Artificial Sequence: Synthetic oligonucleotide
  Antisense strand to SEQ ID NO: 1485434
ccuuuccagaaauucuugg

SEQ ID NO: 1485436 - RNA, 19 nt, Artificial Sequence
  Description of Artificial Sequence: Synthetic oligonucleotide
  Sense strand starting at position 729 of SEQ ID NO: 1244395
cucagacuguuucuuucua

SEQ ID NO: 1485437 - RNA, 19 nt, Artificial Sequence
  Description of Artificial Sequence: Synthetic oligonucleotide
  Antisense strand to SEQ ID NO: 1485436
uagaaagaaacagucugag

SEQ ID NO: 1485438 - RNA, 19 nt, Artificial Sequence
  Description of Artificial Sequence: Synthetic oligonucleotide
  Sense strand starting at position 733 of SEQ ID NO: 1244395
gacuguuucuuucuaggca

SEQ ID NO: 1485439 - RNA, 19 nt, Artificial Sequence
  Description of Artificial Sequence: Synthetic oligonucleotide
  Antisense strand to SEQ ID NO: 1485438
ugccuagaaagaaacaguc

SEQ ID NO: 1485440 - RNA, 19 nt, Artificial Sequence
  Description of Artificial Sequence: Synthetic oligonucleotide
  Sense strand starting at position 737 of SEQ ID NO: 1244395
guuucuuucuaggcaugga

SEQ ID NO: 1485441 - RNA, 19 nt, Artificial Sequence
  Description of Artificial Sequence: Synthetic oligonucleotide
  Antisense strand to SEQ ID NO: 1485440
uccaugccuagaaagaaac

SEQ ID NO: 1485442 - RNA, 19 nt, Artificial Sequence
  Description of Artificial Sequence: Synthetic oligonucleotide
  Sense strand starting at position 915 of SEQ ID NO: 1244395
gagaguauguccuucccag

SEQ ID NO: 1485443 - RNA, 19 nt, Artificial Sequence
  Description of Artificial Sequence: Synthetic oligonucleotide
  Antisense strand to SEQ ID NO: 1485442
cugggaaggacauacucuc

SEQ ID NO: 1485444 - RNA, 19 nt, Artificial Sequence
  Description of Artificial Sequence: Synthetic oligonucleotide
  Sense strand starting at position 2130 of SEQ ID NO: 1244395
uuuggaguacgugagguau

SEQ ID NO: 1485445 - RNA, 19 nt, Artificial Sequence
  Description of Artificial Sequence: Synthetic oligonucleotide
  Antisense strand to SEQ ID NO: 1485444
auaccucacguacuccaaa

SEQ ID NO: 1485446 - RNA, 19 nt, Artificial Sequence
  Description of Artificial Sequence: Synthetic oligonucleotide
  Sense strand starting at position 2168 of SEQ ID NO: 1244395
gucgggcgucuguuaggaa

SEQ ID NO: 1485447 - RNA, 19 nt, Artificial Sequence
  Description of Artificial Sequence: Synthetic oligonucleotide
  Antisense strand to SEQ ID NO: 1485446
uuccuaacagacgcccgac

SEQ ID NO: 1485448 - RNA, 19 nt, Artificial Sequence
  Description of Artificial Sequence: Synthetic oligonucleotide
  Sense strand starting at position 2493 of SEQ ID NO: 1244395
guuacugugagauauuguc

SEQ ID NO: 1485449 - RNA, 19 nt, Artificial Sequence
  Description of Artificial Sequence: Synthetic oligonucleotide
  Antisense strand to SEQ ID NO: 1485448
gacaauaucucacaguaac

SEQ ID NO: 1485450 - RNA, 19 nt, Artificial Sequence
  Description of Artificial Sequence: Synthetic oligonucleotide
  Sense strand starting at position 2603 of SEQ ID NO: 1244395
acaaauguguucuuccagu

SEQ ID NO: 1485451 - RNA, 19 nt, Artificial Sequence
  Description of Artificial Sequence: Synthetic oligonucleotide
  Antisense strand to SEQ ID NO: 1485450
acuggaagaacacauuugu

SEQ ID NO: 1485452 - RNA, 19 nt, Artificial Sequence
  Description of Artificial Sequence: Synthetic oligonucleotide
  Sense strand starting at position 2634 of SEQ ID NO: 1244395
agacaaugauguguggcau

SEQ ID NO: 1485453 - RNA, 19 nt, Artificial Sequence
  Description of Artificial Sequence: Synthetic oligonucleotide
  Antisense strand to SEQ ID NO: 1485452
augccacacaucauugucu

SEQ ID NO: 1485454 - RNA, 19 nt, Artificial Sequence
  Description of Artificial Sequence: Synthetic oligonucleotide
  Sense strand starting at position 2635 of SEQ ID NO: 1244395
gacaaugauguguggcauu

SEQ ID NO: 1485455 - RNA, 19 nt, Artificial Sequence
  Description of Artificial Sequence: Synthetic oligonucleotide
  Antisense strand to SEQ ID NO: 1485454
aaugccacacaucauuguc

SEQ ID NO: 1485456 - RNA, 19 nt, Artificial Sequence
  Description of Artificial Sequence: Synthetic oligonucleotide
  Sense strand starting at position 2759 of SEQ ID NO: 1244395
cauagcugucuguaaauga

SEQ ID NO: 1485457 - RNA, 19 nt, Artificial Sequence
  Description of Artificial Sequence: Synthetic oligonucleotide
  Antisense strand to SEQ ID NO: 1485456
ucauuuacagacagcuaug

SEQ ID NO: 1485458 - RNA, 19 nt, Artificial Sequence
  Description of Artificial Sequence: Synthetic oligonucleotide
  Sense strand starting at position 2763 of SEQ ID NO: 1244395
gcugucuguaaaugaggaa

SEQ ID NO: 1485459 - RNA, 19 nt, Artificial Sequence
  Description of Artificial Sequence: Synthetic oligonucleotide
  Antisense strand to SEQ ID NO: 1485458
uuccucauuuacagacagc

SEQ ID NO: 1485460 - RNA, 19 nt, Artificial Sequence
  Description of Artificial Sequence: Synthetic oligonucleotide
  Sense strand starting at position 2901 of SEQ ID NO: 1244395
agcguuugaauuugcuuua

SEQ ID NO: 1485461 - RNA, 19 nt, Artificial Sequence
  Description of Artificial Sequence: Synthetic oligonucleotide
  Antisense strand to SEQ ID NO: 1485460
uaaagcaaauucaaacgcu

SEQ ID NO: 1485462 - RNA, 19 nt, Artificial Sequence
  Description of Artificial Sequence: Synthetic oligonucleotide
  Sense strand starting at position 2902 of SEQ ID NO: 1244395
gcguuugaauuugcuuuaa

SEQ ID NO: 1485463 - RNA, 19 nt, Artificial Sequence
  Description of Artificial Sequence: Synthetic oligonucleotide
  Antisense strand to SEQ ID NO: 1485462
uuaaagcaaauucaaacgc

SEQ ID NO: 1485464 - RNA, 19 nt, Artificial Sequence
  Description of Artificial Sequence: Synthetic oligonucleotide
  Sense strand starting at position 2912 of SEQ ID NO: 1244395
uugcuuuaaggucauuagu

SEQ ID NO: 1485465 - RNA, 19 nt, Artificial Sequence
  Description of Artificial Sequence: Synthetic oligonucleotide
  Antisense strand to SEQ ID NO: 1485464
acuaaugaccuuaaagcaa

SEQ ID NO: 1485466 - RNA, 19 nt, Artificial Sequence
  Description of Artificial Sequence: Synthetic oligonucleotide
  Sense strand starting at position 2969 of SEQ ID NO: 1244395
cguacugugcuccauaaua

SEQ ID NO: 1485467 - RNA, 19 nt, Artificial Sequence
  Description of Artificial Sequence: Synthetic oligonucleotide
  Antisense strand to SEQ ID NO: 1485466
uauuauggagcacaguacg

SEQ ID NO: 1485468 - RNA, 19 nt, Artificial Sequence
  Description of Artificial Sequence: Synthetic oligonucleotide
  Sense strand starting at position 3379 of SEQ ID NO: 1244395
gucugucuuguacagggaa

SEQ ID NO: 1485469 - RNA, 19 nt, Artificial Sequence
  Description of Artificial Sequence: Synthetic oligonucleotide
  Antisense strand to SEQ ID NO: 1485468
uucccuguacaagacagac

SEQ ID NO: 1485470 - RNA, 19 nt, Artificial Sequence
  Description of Artificial Sequence: Synthetic oligonucleotide
  Sense strand starting at position 3381 of SEQ ID NO: 1244395
cugucuuguacagggaaua

SEQ ID NO: 1485471 - RNA, 19 nt, Artificial Sequence
  Description of Artificial Sequence: Synthetic oligonucleotide
  Antisense strand to SEQ ID NO: 1485470
uauucccuguacaagacag

SEQ ID NO: 1485472 - RNA, 19 nt, Artificial Sequence
  Description of Artificial Sequence: Synthetic oligonucleotide
  Sense strand starting at position 3391 of SEQ ID NO: 1244395
cagggaauagcugaagcuu

SEQ ID NO: 1485473 - RNA, 19 nt, Artificial Sequence
  Description of Artificial Sequence: Synthetic oligonucleotide
  Antisense strand to SEQ ID NO: 1485472
aagcuucagcuauucccug

SEQ ID NO: 1485474 - RNA, 19 nt, Artificial Sequence
  Description of Artificial Sequence: Synthetic oligonucleotide
  Sense strand starting at position 3399 of SEQ ID NO: 1244395
agcugaagcuuuguaacca

SEQ ID NO: 1485475 - RNA, 19 nt, Artificial Sequence
  Description of Artificial Sequence: Synthetic oligonucleotide
  Antisense strand to SEQ ID NO: 1485474
ugguuacaaagcuucagcu

SEQ ID NO: 1485476 - RNA, 19 nt, Artificial Sequence
  Description of Artificial Sequence: Synthetic oligonucleotide
  Sense strand starting at position 3435 of SEQ ID NO: 1244395
guaugacauuucuaucuga

SEQ ID NO: 1485477 - RNA, 19 nt, Artificial Sequence
  Description of Artificial Sequence: Synthetic oligonucleotide
  Antisense strand to SEQ ID NO: 1485476
ucagauagaaaugucauac

SEQ ID NO: 1485478 - RNA, 19 nt, Artificial Sequence
  Description of Artificial Sequence: Synthetic oligonucleotide
  Sense strand starting at position 3448 of SEQ ID NO: 1244395
aucugaacacauuaguguu

SEQ ID NO: 1485479 - RNA, 19 nt, Artificial Sequence
  Description of Artificial Sequence: Synthetic oligonucleotide
  Antisense strand to SEQ ID NO: 1485478
aacacuaauguguucagau

SEQ ID NO: 1485480 - RNA, 19 nt, Artificial Sequence
  Description of Artificial Sequence: Synthetic oligonucleotide
  Sense strand starting at position 3498 of SEQ ID NO: 1244395
ucacaaauccuaggugaac

SEQ ID NO: 1485481 - RNA, 19 nt, Artificial Sequence
  Description of Artificial Sequence: Synthetic oligonucleotide
  Antisense strand to SEQ ID NO: 1485480
guucaccuaggauuuguga

SEQ ID NO: 1485482 - RNA, 19 nt, Artificial Sequence
  Description of Artificial Sequence: Synthetic oligonucleotide
  Sense strand starting at position 3516 of SEQ ID NO: 1244395
cucauuagggcccaaaguu

SEQ ID NO: 1485483 - RNA, 19 nt, Artificial Sequence
  Description of Artificial Sequence: Synthetic oligonucleotide
  Antisense strand to SEQ ID NO: 1485482
aacuuugggcccuaaugag

SEQ ID NO: 1485484 - RNA, 19 nt, Artificial Sequence
  Description of Artificial Sequence: Synthetic oligonucleotide
  Sense strand starting at position 3525 of SEQ ID NO: 1244395
gcccaaaguucugcucuga

SEQ ID NO: 1485485 - RNA, 19 nt, Artificial Sequence
  Description of Artificial Sequence: Synthetic oligonucleotide
  Antisense strand to SEQ ID NO: 1485484
ucagagcagaacuuugggc

SEQ ID NO: 1485486 - RNA, 19 nt, Artificial Sequence
  Description of Artificial Sequence: Synthetic oligonucleotide
  Sense strand starting at position 3539 of SEQ ID NO: 1244395
ucugaaaucuaguaauaag

SEQ ID NO: 1485487 - RNA, 19 nt, Artificial Sequence
  Description of Artificial Sequence: Synthetic oligonucleotide
  Antisense strand to SEQ ID NO: 1485486
cuuauuacuagauuucaga

SEQ ID NO: 1485488 - RNA, 19 nt, Artificial Sequence
  Description of Artificial Sequence: Synthetic oligonucleotide
  Sense strand starting at position 419 of SEQ ID NO: 1244396
gaaugaaucucagagccag

SEQ ID NO: 1485489 - RNA, 19 nt, Artificial Sequence
  Description of Artificial Sequence: Synthetic oligonucleotide
  Antisense strand to SEQ ID NO: 1485488
cuggcucugagauucauuc

SEQ ID NO: 1485490 - RNA, 19 nt, Artificial Sequence
  Description of Artificial Sequence: Synthetic oligonucleotide
  Sense strand starting at position 690 of SEQ ID NO: 1244396
agguaaaucuaagucucca

SEQ ID NO: 1485491 - RNA, 19 nt, Artificial Sequence
  Description of Artificial Sequence: Synthetic oligonucleotide
  Antisense strand to SEQ ID NO: 1485490
uggagacuuagauuuaccu

SEQ ID NO: 1485492 - RNA, 19 nt, Artificial Sequence
  Description of Artificial Sequence: Synthetic oligonucleotide
  Sense strand starting at position 1311 of SEQ ID NO: 1244396
ccguccuucuguucugagu

SEQ ID NO: 1485493 - RNA, 19 nt, Artificial Sequence
  Description of Artificial Sequence: Synthetic oligonucleotide
  Antisense strand to SEQ ID NO: 1485492
acucagaacagaaggacgg

SEQ ID NO: 1485494 - RNA, 19 nt, Artificial Sequence
  Description of Artificial Sequence: Synthetic oligonucleotide
  Sense strand starting at position 2036 of SEQ ID NO: 1244396
ggaggaaaugccuguuguc

SEQ ID NO: 1485495 - RNA, 19 nt, Artificial Sequence
  Description of Artificial Sequence: Synthetic oligonucleotide
  Antisense strand to SEQ ID NO: 1485494
gacaacaggcauuuccucc

SEQ ID NO: 1485496 - RNA, 19 nt, Artificial Sequence
  Description of Artificial Sequence: Synthetic oligonucleotide
  Sense strand starting at position 2039 of SEQ ID NO: 1244396
ggaaaugccuguuguccca

SEQ ID NO: 1485497 - RNA, 19 nt, Artificial Sequence
  Description of Artificial Sequence: Synthetic oligonucleotide
  Antisense strand to SEQ ID NO: 1485496
ugggacaacaggcauuucc

SEQ ID NO: 1485498 - RNA, 19 nt, Artificial Sequence
  Description of Artificial Sequence: Synthetic oligonucleotide
  Sense strand starting at position 2326 of SEQ ID NO: 1244396
ccaccaugaguuugagaga

SEQ ID NO: 1485499 - RNA, 19 nt, Artificial Sequence
  Description of Artificial Sequence: Synthetic oligonucleotide
  Antisense strand to SEQ ID NO: 1485498
ucucucaaacucauggugg

SEQ ID NO: 1485500 - RNA, 19 nt, Artificial Sequence
  Description of Artificial Sequence: Synthetic oligonucleotide
  Sense strand starting at position 2399 of SEQ ID NO: 1244396
ugaggaagcucuuggcuua

SEQ ID NO: 1485501 - RNA, 19 nt, Artificial Sequence
  Description of Artificial Sequence: Synthetic oligonucleotide
  Antisense strand to SEQ ID NO: 1485500
uaagccaagagcuuccuca

SEQ ID NO: 1485502 - RNA, 19 nt, Artificial Sequence
  Description of Artificial Sequence: Synthetic oligonucleotide
  Sense strand starting at position 2431 of SEQ ID NO: 1244396
cucagagcuugugagguua

SEQ ID NO: 1485503 - RNA, 19 nt, Artificial Sequence
  Description of Artificial Sequence: Synthetic oligonucleotide
  Antisense strand to SEQ ID NO: 1485502
uaaccucacaagcucugag

SEQ ID NO: 1485504 - RNA, 19 nt, Artificial Sequence
  Description of Artificial Sequence: Synthetic oligonucleotide
  Sense strand starting at position 2433 of SEQ ID NO: 1244396
cagagcuugugagguuagu

SEQ ID NO: 1485505 - RNA, 19 nt, Artificial Sequence
  Description of Artificial Sequence: Synthetic oligonucleotide
  Antisense strand to SEQ ID NO: 1485504
acuaaccucacaagcucug

SEQ ID NO: 1485506 - RNA, 19 nt, Artificial Sequence
  Description of Artificial Sequence: Synthetic oligonucleotide
  Sense strand starting at position 2579 of SEQ ID NO: 1244396
acacuuuccuggccugaga

SEQ ID NO: 1485507 - RNA, 19 nt, Artificial Sequence
  Description of Artificial Sequence: Synthetic oligonucleotide
  Antisense strand to SEQ ID NO: 1485506
ucucaggccaggaaagugu

SEQ ID NO: 1485508 - RNA, 19 nt, Artificial Sequence
  Description of Artificial Sequence: Synthetic oligonucleotide
  Sense strand starting at position 2614 of SEQ ID NO: 1244396
ccagccauuccuuauagga

SEQ ID NO: 1485509 - RNA, 19 nt, Artificial Sequence
  Description of Artificial Sequence: Synthetic oligonucleotide
  Antisense strand to SEQ ID NO: 1485508
uccuauaaggaauggcugg

SEQ ID NO: 1485510 - RNA, 19 nt, Artificial Sequence
  Description of Artificial Sequence: Synthetic oligonucleotide
  Sense strand starting at position 2616 of SEQ ID NO: 1244396
agccauuccuuauaggaag

SEQ ID NO: 1485511 - RNA, 19 nt, Artificial Sequence
  Description of Artificial Sequence: Synthetic oligonucleotide
  Antisense strand to SEQ ID NO: 1485510
cuuccuauaaggaauggcu

SEQ ID NO: 1485512 - RNA, 19 nt, Artificial Sequence
  Description of Artificial Sequence: Synthetic oligonucleotide
  Sense strand starting at position 3161 of SEQ ID NO: 1244396
aggcgggucuagugcgaua

SEQ ID NO: 1485513 - RNA, 19 nt, Artificial Sequence
  Description of Artificial Sequence: Synthetic oligonucleotide
  Antisense strand to SEQ ID NO: 1485512
uaucgcacuagacccgccu

SEQ ID NO: 1485514 - RNA, 19 nt, Artificial Sequence
  Description of Artificial Sequence: Synthetic oligonucleotide
  Sense strand starting at position 3163 of SEQ ID NO: 1244396
gcgggucuagugcgauaca

SEQ ID NO: 1485515 - RNA, 19 nt, Artificial Sequence
  Description of Artificial Sequence: Synthetic oligonucleotide
  Antisense strand to SEQ ID NO: 1485514
uguaucgcacuagacccgc

SEQ ID NO: 1485516 - RNA, 19 nt, Artificial Sequence
  Description of Artificial Sequence: Synthetic oligonucleotide
  Sense strand starting at position 3166 of SEQ ID NO: 1244396
ggucuagugcgauacacuu

SEQ ID NO: 1485517 - RNA, 19 nt, Artificial Sequence
  Description of Artificial Sequence: Synthetic oligonucleotide
  Antisense strand to SEQ ID NO: 1485516
aaguguaucgcacuagacc

SEQ ID NO: 1485518 - RNA, 19 nt, Artificial Sequence
  Description of Artificial Sequence: Synthetic oligonucleotide
  Sense strand starting at position 3174 of SEQ ID NO: 1244396
gcgauacacuuucugcaau

SEQ ID NO: 1485519 - RNA, 19 nt, Artificial Sequence
  Description of Artificial Sequence: Synthetic oligonucleotide
  Antisense strand to SEQ ID NO: 1485518
auugcagaaaguguaucgc

SEQ ID NO: 1485520 - RNA, 19 nt, Artificial Sequence
  Description of Artificial Sequence: Synthetic oligonucleotide
  Sense strand starting at position 3175 of SEQ ID NO: 1244396
cgauacacuuucugcaauu

SEQ ID NO: 1485521 - RNA, 19 nt, Artificial Sequence
  Description of Artificial Sequence: Synthetic oligonucleotide
  Antisense strand to SEQ ID NO: 1485520
aauugcagaaaguguaucg

SEQ ID NO: 1485522 - RNA, 19 nt, Artificial Sequence
  Description of Artificial Sequence: Synthetic oligonucleotide
  Sense strand starting at position 3191 of SEQ ID NO: 1244396
auuguucucccacaguaau

SEQ ID NO: 1485523 - RNA, 19 nt, Artificial Sequence
  Description of Artificial Sequence: Synthetic oligonucleotide
  Antisense strand to SEQ ID NO: 1485522
auuacugugggagaacaau

SEQ ID NO: 1485524 - RNA, 19 nt, Artificial Sequence
  Description of Artificial Sequence: Synthetic oligonucleotide
  Sense strand starting at position 3203 of SEQ ID NO: 1244396
caguaaucuugagaauagg

SEQ ID NO: 1485525 - RNA, 19 nt, Artificial Sequence
  Description of Artificial Sequence: Synthetic oligonucleotide
  Antisense strand to SEQ ID NO: 1485524
ccuauucucaagauuacug

SEQ ID NO: 1485526 - RNA, 19 nt, Artificial Sequence
  Description of Artificial Sequence: Synthetic oligonucleotide
  Sense strand starting at position 3385 of SEQ ID NO: 1244396
ugcaguaacccucgugaug

SEQ ID NO: 1485527 - RNA, 19 nt, Artificial Sequence
  Description of Artificial Sequence: Synthetic oligonucleotide
  Antisense strand to SEQ ID NO: 1485526
caucacgaggguuacugca

SEQ ID NO: 1485528 - RNA, 19 nt, Artificial Sequence
  Description of Artificial Sequence: Synthetic oligonucleotide
  Sense strand starting at position 3396 of SEQ ID NO: 1244396
ucgugauggcugugcaugu

SEQ ID NO: 1485529 - RNA, 19 nt, Artificial Sequence
  Description of Artificial Sequence: Synthetic oligonucleotide
  Antisense strand to SEQ ID NO: 1485528
acaugcacagccaucacga

SEQ ID NO: 1485530 - RNA, 19 nt, Artificial Sequence
  Description of Artificial Sequence: Synthetic oligonucleotide
  Sense strand starting at position 3400 of SEQ ID NO: 1244396
gauggcugugcaugugaga

SEQ ID NO: 1485531 - RNA, 19 nt, Artificial Sequence
  Description of Artificial Sequence: Synthetic oligonucleotide
  Antisense strand to SEQ ID NO: 1485530
ucucacaugcacagccauc

SEQ ID NO: 1485532 - RNA, 19 nt, Artificial Sequence
  Description of Artificial Sequence: Synthetic oligonucleotide
  Sense strand starting at position 3443 of SEQ ID NO: 1244396
uuuggaggucccuagguau

SEQ ID NO: 1485533 - RNA, 19 nt, Artificial Sequence
  Description of Artificial Sequence: Synthetic oligonucleotide
  Antisense strand to SEQ ID NO: 1485532
auaccuagggaccuccaaa

SEQ ID NO: 1485534 - RNA, 19 nt, Artificial Sequence
  Description of Artificial Sequence: Synthetic oligonucleotide
  Sense strand starting at position 3446 of SEQ ID NO: 1244396
ggaggucccuagguauaug

SEQ ID NO: 1485535 - RNA, 19 nt, Artificial Sequence
  Description of Artificial Sequence: Synthetic oligonucleotide
  Antisense strand to SEQ ID NO: 1485534
cauauaccuagggaccucc

SEQ ID NO: 1485536 - RNA, 19 nt, Artificial Sequence
  Description of Artificial Sequence: Synthetic oligonucleotide
  Sense strand starting at position 3535 of SEQ ID NO: 1244396
aagagaagaugguggcauu

SEQ ID NO: 1485537 - RNA, 19 nt, Artificial Sequence
  Description of Artificial Sequence: Synthetic oligonucleotide
  Antisense strand to SEQ ID NO: 1485536
aaugccaccaucuucucuu

SEQ ID NO: 1485538 - RNA, 19 nt, Artificial Sequence
  Description of Artificial Sequence: Synthetic oligonucleotide
  Sense strand starting at position 3548 of SEQ ID NO: 1244396
ggcauucuggacugguuaa

SEQ ID NO: 1485539 - RNA, 19 nt, Artificial Sequence
  Description of Artificial Sequence: Synthetic oligonucleotide
  Antisense strand to SEQ ID NO: 1485538
uuaaccaguccagaaugcc

SEQ ID NO: 1485540 - RNA, 19 nt, Artificial Sequence
  Description of Artificial Sequence: Synthetic oligonucleotide
  Sense strand starting at position 3549 of SEQ ID NO: 1244396
gcauucuggacugguuaac

SEQ ID NO: 1485541 - RNA, 19 nt, Artificial Sequence
  Description of Artificial Sequence: Synthetic oligonucleotide
  Antisense strand to SEQ ID NO: 1485540
guuaaccaguccagaaugc

SEQ ID NO: 1485542 - RNA, 19 nt, Artificial Sequence
  Description of Artificial Sequence: Synthetic oligonucleotide
  Sense strand starting at position 3738 of SEQ ID NO: 1244396
ccuggccacuucugcaaau

SEQ ID NO: 1485543 - RNA, 19 nt, Artificial Sequence
  Description of Artificial Sequence: Synthetic oligonucleotide
  Antisense strand to SEQ ID NO: 1485542
auuugcagaaguggccagg

SEQ ID NO: 1485544 - RNA, 19 nt, Artificial Sequence
  Description of Artificial Sequence: Synthetic oligonucleotide
  Sense strand starting at position 3767 of SEQ ID NO: 1244396
gaagucuaguugggaucua

SEQ ID NO: 1485545 - RNA, 19 nt, Artificial Sequence
  Description of Artificial Sequence: Synthetic oligonucleotide
  Antisense strand to SEQ ID NO: 1485544
uagaucccaacuagacuuc

SEQ ID NO: 1485546 - RNA, 19 nt, Artificial Sequence
  Description of Artificial Sequence: Synthetic oligonucleotide
  Sense strand starting at position 3790 of SEQ ID NO: 1244396
gucccuguuccuggaaucu

SEQ ID NO: 1485547 - RNA, 19 nt, Artificial Sequence
  Description of Artificial Sequence: Synthetic oligonucleotide
  Antisense strand to SEQ ID NO: 1485546
agauuccaggaacagggac

SEQ ID NO: 1485548 - RNA, 19 nt, Artificial Sequence
  Description of Artificial Sequence: Synthetic oligonucleotide
  Sense strand starting at position 298 of SEQ ID NO: 1244397
aguuuaucccggugacccu

SEQ ID NO: 1485549 - RNA, 19 nt, Artificial Sequence
  Description of Artificial Sequence: Synthetic oligonucleotide
  Antisense strand to SEQ ID NO: 1485548
agggucaccgggauaaacu

SEQ ID NO: 1485550 - RNA, 19 nt, Artificial Sequence
  Description of Artificial Sequence: Synthetic oligonucleotide
  Sense strand starting at position 384 of SEQ ID NO: 1244397
gccucacguagaugagauu

SEQ ID NO: 1485551 - RNA, 19 nt, Artificial Sequence
  Description of Artificial Sequence: Synthetic oligonucleotide
  Antisense strand to SEQ ID NO: 1485550
aaucucaucuacgugaggc

SEQ ID NO: 1485552 - RNA, 19 nt, Artificial Sequence
  Description of Artificial Sequence: Synthetic oligonucleotide
  Sense strand starting at position 393 of SEQ ID NO: 1244397
agaugagauucucccgaaa

SEQ ID NO: 1485553 - RNA, 19 nt, Artificial Sequence
  Description of Artificial Sequence: Synthetic oligonucleotide
  Antisense strand to SEQ ID NO: 1485552
uuucgggagaaucucaucu

SEQ ID NO: 1485554 - RNA, 19 nt, Artificial Sequence
  Description of Artificial Sequence: Synthetic oligonucleotide
  Sense strand starting at position 395 of SEQ ID NO: 1244397
augagauucucccgaaauc

SEQ ID NO: 1485555 - RNA, 19 nt, Artificial Sequence
  Description of Artificial Sequence: Synthetic oligonucleotide
  Antisense strand to SEQ ID NO: 1485554
gauuucgggagaaucucau

SEQ ID NO: 1485556 - RNA, 19 nt, Artificial Sequence
  Description of Artificial Sequence: Synthetic oligonucleotide
  Sense strand starting at position 396 of SEQ ID NO: 1244397
ugagauucucccgaaaucg

SEQ ID NO: 1485557 - RNA, 19 nt, Artificial Sequence
  Description of Artificial Sequence: Synthetic oligonucleotide
  Antisense strand to SEQ ID NO: 1485556
cgauuucgggagaaucuca

SEQ ID NO: 1485558 - RNA, 19 nt, Artificial Sequence
  Description of Artificial Sequence: Synthetic oligonucleotide
  Sense strand starting at position 417 of SEQ ID NO: 1244397
gccgcagguucucgaugaa

SEQ ID NO: 1485559 - RNA, 19 nt, Artificial Sequence
  Description of Artificial Sequence: Synthetic oligonucleotide
  Antisense strand to SEQ ID NO: 1485558
uucaucgagaaccugcggc

SEQ ID NO: 1485560 - RNA, 19 nt, Artificial Sequence
  Description of Artificial Sequence: Synthetic oligonucleotide
  Sense strand starting at position 932 of SEQ ID NO: 1244397
cagaaagacugcucuguug

SEQ ID NO: 1485561 - RNA, 19 nt, Artificial Sequence
  Description of Artificial Sequence: Synthetic oligonucleotide
  Antisense strand to SEQ ID NO: 1485560
caacagagcagucuuucug

SEQ ID NO: 1485562 - RNA, 19 nt, Artificial Sequence
  Description of Artificial Sequence: Synthetic oligonucleotide
  Sense strand starting at position 934 of SEQ ID NO: 1244397
gaaagacugcucuguugag

SEQ ID NO: 1485563 - RNA, 19 nt, Artificial Sequence
  Description of Artificial Sequence: Synthetic oligonucleotide
  Antisense strand to SEQ ID NO: 1485562
cucaacagagcagucuuuc

SEQ ID NO: 1485564 - RNA, 19 nt, Artificial Sequence
  Description of Artificial Sequence: Synthetic oligonucleotide
  Sense strand starting at position 979 of SEQ ID NO: 1244397
guuccuuccuccuaaagga

SEQ ID NO: 1485565 - RNA, 19 nt, Artificial Sequence
  Description of Artificial Sequence: Synthetic oligonucleotide
  Antisense strand to SEQ ID NO: 1485564
uccuuuaggaggaaggaac

SEQ ID NO: 1485566 - RNA, 19 nt, Artificial Sequence
  Description of Artificial Sequence: Synthetic oligonucleotide
  Sense strand starting at position 1056 of SEQ ID NO: 1244397
aggugcuuuggaggacaaa

SEQ ID NO: 1485567 - RNA, 19 nt, Artificial Sequence
  Description of Artificial Sequence: Synthetic oligonucleotide
  Antisense strand to SEQ ID NO: 1485566
uuuguccuccaaagcaccu

SEQ ID NO: 1485568 - RNA, 19 nt, Artificial Sequence
  Description of Artificial Sequence: Synthetic oligonucleotide
  Sense strand starting at position 1057 of SEQ ID NO: 1244397
ggugcuuuggaggacaaau

SEQ ID NO: 1485569 - RNA, 19 nt, Artificial Sequence
  Description of Artificial Sequence: Synthetic oligonucleotide
  Antisense strand to SEQ ID NO: 1485568
auuuguccuccaaagcacc

SEQ ID NO: 1485570 - RNA, 19 nt, Artificial Sequence
  Description of Artificial Sequence: Synthetic oligonucleotide
  Sense strand starting at position 1164 of SEQ ID NO: 1244397
gcaagagguuacucccaga

SEQ ID NO: 1485571 - RNA, 19 nt, Artificial Sequence
  Description of Artificial Sequence: Synthetic oligonucleotide
  Antisense strand to SEQ ID NO: 1485570
ucugggaguaaccucuugc

SEQ ID NO: 1485572 - RNA, 19 nt, Artificial Sequence
  Description of Artificial Sequence: Synthetic oligonucleotide
  Sense strand starting at position 1167 of SEQ ID NO: 1244397
agagguuacucccagacua

SEQ ID NO: 1485573 - RNA, 19 nt, Artificial Sequence
  Description of Artificial Sequence: Synthetic oligonucleotide
  Antisense strand to SEQ ID NO: 1485572
uagucugggaguaaccucu

SEQ ID NO: 1485574 - RNA, 19 nt, Artificial Sequence
  Description of Artificial Sequence: Synthetic oligonucleotide
  Sense strand starting at position 1324 of SEQ ID NO: 1244397
cacugagaguccugagaag

SEQ ID NO: 1485575 - RNA, 19 nt, Artificial Sequence
  Description of Artificial Sequence: Synthetic oligonucleotide
  Antisense strand to SEQ ID NO: 1485574
cuucucaggacucucagug

SEQ ID NO: 1485576 - RNA, 19 nt, Artificial Sequence
  Description of Artificial Sequence: Synthetic oligonucleotide
  Sense strand starting at position 1502 of SEQ ID NO: 1244397
cagaguauccagggucaga

SEQ ID NO: 1485577 - RNA, 19 nt, Artificial Sequence
  Description of Artificial Sequence: Synthetic oligonucleotide
  Antisense strand to SEQ ID NO: 1485576
ucugacccuggauacucug

SEQ ID NO: 1485578 - RNA, 19 nt, Artificial Sequence
  Description of Artificial Sequence: Synthetic oligonucleotide
  Sense strand starting at position 1569 of SEQ ID NO: 1244397
guguccucugaccacgaaa

SEQ ID NO: 1485579 - RNA, 19 nt, Artificial Sequence
  Description of Artificial Sequence: Synthetic oligonucleotide
  Antisense strand to SEQ ID NO: 1485578
uuucguggucagaggacac

SEQ ID NO: 1485580 - RNA, 19 nt, Artificial Sequence
  Description of Artificial Sequence: Synthetic oligonucleotide
  Sense strand starting at position 2400 of SEQ ID NO: 1244397
acucgagucccgggaaagu

SEQ ID NO: 1485581 - RNA, 19 nt, Artificial Sequence
  Description of Artificial Sequence: Synthetic oligonucleotide
  Antisense strand to SEQ ID NO: 1485580
acuuucccgggacucgagu

SEQ ID NO: 1485582 - RNA, 19 nt, Artificial Sequence
  Description of Artificial Sequence: Synthetic oligonucleotide
  Sense strand starting at position 2466 of SEQ ID NO: 1244397
gagcguucuccgugcggga

SEQ ID NO: 1485583 - RNA, 19 nt, Artificial Sequence
  Description of Artificial Sequence: Synthetic oligonucleotide
  Antisense strand to SEQ ID NO: 1485582
ucccgcacggagaacgcuc

SEQ ID NO: 1485584 - RNA, 19 nt, Artificial Sequence
  Description of Artificial Sequence: Synthetic oligonucleotide
  Sense strand starting at position 3187 of SEQ ID NO: 1244397
gggcgaaccuuggcucaga

SEQ ID NO: 1485585 - RNA, 19 nt, Artificial Sequence
  Description of Artificial Sequence: Synthetic oligonucleotide
  Antisense strand to SEQ ID NO: 1485584
ucugagccaagguucgccc

SEQ ID NO: 1485586 - RNA, 19 nt, Artificial Sequence
  Description of Artificial Sequence: Synthetic oligonucleotide
  Sense strand starting at position 3188 of SEQ ID NO: 1244397
ggcgaaccuuggcucagau

SEQ ID NO: 1485587 - RNA, 19 nt, Artificial Sequence
  Description of Artificial Sequence: Synthetic oligonucleotide
  Antisense strand to SEQ ID NO: 1485586
aucugagccaagguucgcc

SEQ ID NO: 1485588 - RNA, 19 nt, Artificial Sequence
  Description of Artificial Sequence: Synthetic oligonucleotide
  Sense strand starting at position 3352 of SEQ ID NO: 1244397
cguuggguggccugagaua

SEQ ID NO: 1485589 - RNA, 19 nt, Artificial Sequence
  Description of Artificial Sequence: Synthetic oligonucleotide
  Antisense strand to SEQ ID NO: 1485588
uaucucaggccacccaacg

SEQ ID NO: 1485590 - RNA, 19 nt, Artificial Sequence
  Description of Artificial Sequence: Synthetic oligonucleotide
  Sense strand starting at position 3933 of SEQ ID NO: 1244397
ggcggaucaucagaguuca

SEQ ID NO: 1485591 - RNA, 19 nt, Artificial Sequence
  Description of Artificial Sequence: Synthetic oligonucleotide
  Antisense strand to SEQ ID NO: 1485590
ugaacucugaugauccgcc

SEQ ID NO: 1485592 - RNA, 19 nt, Artificial Sequence
  Description of Artificial Sequence: Synthetic oligonucleotide
  Sense strand starting at position 275 of SEQ ID NO: 1244398
cugcuugaauccuggagga

SEQ ID NO: 1485593 - RNA, 19 nt, Artificial Sequence
  Description of Artificial Sequence: Synthetic oligonucleotide
  Antisense strand to SEQ ID NO: 1485592
uccuccaggauucaagcag

SEQ ID NO: 1485594 - RNA, 19 nt, Artificial Sequence
  Description of Artificial Sequence: Synthetic oligonucleotide
  Sense strand starting at position 395 of SEQ ID NO: 1244398
accuguacucccuguuuaa

SEQ ID NO: 1485595 - RNA, 19 nt, Artificial Sequence
  Description of Artificial Sequence: Synthetic oligonucleotide
  Antisense strand to SEQ ID NO: 1485594
uuaaacagggaguacaggu

SEQ ID NO: 1485596 - RNA, 19 nt, Artificial Sequence
  Description of Artificial Sequence: Synthetic oligonucleotide
  Sense strand starting at position 398 of SEQ ID NO: 1244398
uguacucccuguuuaaugu

SEQ ID NO: 1485597 - RNA, 19 nt, Artificial Sequence
  Description of Artificial Sequence: Synthetic oligonucleotide
  Antisense strand to SEQ ID NO: 1485596
acauuaaacagggaguaca

SEQ ID NO: 1485598 - RNA, 19 nt, Artificial Sequence
  Description of Artificial Sequence: Synthetic oligonucleotide
  Sense strand starting at position 405 of SEQ ID NO: 1244398
ccuguuuaauguccuugua

SEQ ID NO: 1485599 - RNA, 19 nt, Artificial Sequence
  Description of Artificial Sequence: Synthetic oligonucleotide
  Antisense strand to SEQ ID NO: 1485598
uacaaggacauuaaacagg

SEQ ID NO: 1485600 - RNA, 19 nt, Artificial Sequence
  Description of Artificial Sequence: Synthetic oligonucleotide
  Sense strand starting at position 407 of SEQ ID NO: 1244398
uguuuaauguccuuguaga

SEQ ID NO: 1485601 - RNA, 19 nt, Artificial Sequence
  Description of Artificial Sequence: Synthetic oligonucleotide
  Antisense strand to SEQ ID NO: 1485600
ucuacaaggacauuaaaca

SEQ ID NO: 1485602 - RNA, 19 nt, Artificial Sequence
  Description of Artificial Sequence: Synthetic oligonucleotide
  Sense strand starting at position 408 of SEQ ID NO: 1244398
guuuaauguccuuguagag

SEQ ID NO: 1485603 - RNA, 19 nt, Artificial Sequence
  Description of Artificial Sequence: Synthetic oligonucleotide
  Antisense strand to SEQ ID NO: 1485602
cucuacaaggacauuaaac

SEQ ID NO: 1485604 - RNA, 19 nt, Artificial Sequence
  Description of Artificial Sequence: Synthetic oligonucleotide
  Sense strand starting at position 441 of SEQ ID NO: 1244398
guuugagcuggucaucaca

SEQ ID NO: 1485605 - RNA, 19 nt, Artificial Sequence
  Description of Artificial Sequence: Synthetic oligonucleotide
  Antisense strand to SEQ ID NO: 1485604
ugugaugaccagcucaaac

SEQ ID NO: 1485606 - RNA, 19 nt, Artificial Sequence
  Description of Artificial Sequence: Synthetic oligonucleotide
  Sense strand starting at position 507 of SEQ ID NO: 1244398
guagucacgaccugcuaaa

SEQ ID NO: 1485607 - RNA, 19 nt, Artificial Sequence
  Description of Artificial Sequence: Synthetic oligonucleotide
  Antisense strand to SEQ ID NO: 1485606
uuuagcaggucgugacuac

SEQ ID NO: 1485608 - RNA, 19 nt, Artificial Sequence
  Description of Artificial Sequence: Synthetic oligonucleotide
  Sense strand starting at position 1448 of SEQ ID NO: 1244398
gaaugaaucucagagccag

SEQ ID NO: 1485609 - RNA, 19 nt, Artificial Sequence
  Description of Artificial Sequence: Synthetic oligonucleotide
  Antisense strand to SEQ ID NO: 1485608
cuggcucugagauucauuc

SEQ ID NO: 1485610 - RNA, 19 nt, Artificial Sequence
  Description of Artificial Sequence: Synthetic oligonucleotide
  Sense strand starting at position 1719 of SEQ ID NO: 1244398
agguaaaucuaagucucca

SEQ ID NO: 1485611 - RNA, 19 nt, Artificial Sequence
  Description of Artificial Sequence: Synthetic oligonucleotide
  Antisense strand to SEQ ID NO: 1485610
uggagacuuagauuuaccu

SEQ ID NO: 1485612 - RNA, 19 nt, Artificial Sequence
  Description of Artificial Sequence: Synthetic oligonucleotide
  Sense strand starting at position 2340 of SEQ ID NO: 1244398
ccguccuucuguucugagu

SEQ ID NO: 1485613 - RNA, 19 nt, Artificial Sequence
  Description of Artificial Sequence: Synthetic oligonucleotide
  Antisense strand to SEQ ID NO: 1485612
acucagaacagaaggacgg

SEQ ID NO: 1485614 - RNA, 19 nt, Artificial Sequence
  Description of Artificial Sequence: Synthetic oligonucleotide
  Sense strand starting at position 3065 of SEQ ID NO: 1244398
ggaggaaaugccuguuguc

SEQ ID NO: 1485615 - RNA, 19 nt, Artificial Sequence
  Description of Artificial Sequence: Synthetic oligonucleotide
  Antisense strand to SEQ ID NO: 1485614
gacaacaggcauuuccucc

SEQ ID NO: 1485616 - RNA, 19 nt, Artificial Sequence
  Description of Artificial Sequence: Synthetic oligonucleotide
  Sense strand starting at position 3068 of SEQ ID NO: 1244398
ggaaaugccuguuguccca

SEQ ID NO: 1485617 - RNA, 19 nt, Artificial Sequence
  Description of Artificial Sequence: Synthetic oligonucleotide
  Antisense strand to SEQ ID NO: 1485616
ugggacaacaggcauuucc

SEQ ID NO: 1485618 - RNA, 19 nt, Artificial Sequence
  Description of Artificial Sequence: Synthetic oligonucleotide
  Sense strand starting at position 3355 of SEQ ID NO: 1244398
ccaccaugaguuugagaga

SEQ ID NO: 1485619 - RNA, 19 nt, Artificial Sequence
  Description of Artificial Sequence: Synthetic oligonucleotide
  Antisense strand to SEQ ID NO: 1485618
ucucucaaacucauggugg

SEQ ID NO: 1485620 - RNA, 19 nt, Artificial Sequence
  Description of Artificial Sequence: Synthetic oligonucleotide
  Sense strand starting at position 3428 of SEQ ID NO: 1244398
ugaggaagcucuuggcuua

SEQ ID NO: 1485621 - RNA, 19 nt, Artificial Sequence
  Description of Artificial Sequence: Synthetic oligonucleotide
  Antisense strand to SEQ ID NO: 1485620
uaagccaagagcuuccuca

SEQ ID NO: 1485622 - RNA, 19 nt, Artificial Sequence
  Description of Artificial Sequence: Synthetic oligonucleotide
  Sense strand starting at position 3460 of SEQ ID NO: 1244398
cucagagcuugugagguua

SEQ ID NO: 1485623 - RNA, 19 nt, Artificial Sequence
  Description of Artificial Sequence: Synthetic oligonucleotide
  Antisense strand to SEQ ID NO: 1485622
uaaccucacaagcucugag

SEQ ID NO: 1485624 - RNA, 19 nt, Artificial Sequence
  Description of Artificial Sequence: Synthetic oligonucleotide
  Sense strand starting at position 3462 of SEQ ID NO: 1244398
cagagcuugugagguuagu

SEQ ID NO: 1485625 - RNA, 19 nt, Artificial Sequence
  Description of Artificial Sequence: Synthetic oligonucleotide
  Antisense strand to SEQ ID NO: 1485624
acuaaccucacaagcucug

SEQ ID NO: 1485626 - RNA, 19 nt, Artificial Sequence
  Description of Artificial Sequence: Synthetic oligonucleotide
  Sense strand starting at position 3608 of SEQ ID NO: 1244398
acacuuuccuggccugaga

SEQ ID NO: 1485627 - RNA, 19 nt, Artificial Sequence
  Description of Artificial Sequence: Synthetic oligonucleotide
  Antisense strand to SEQ ID NO: 1485626
ucucaggccaggaaagugu

SEQ ID NO: 1485628 - RNA, 19 nt, Artificial Sequence
  Description of Artificial Sequence: Synthetic oligonucleotide
  Sense strand starting at position 3643 of SEQ ID NO: 1244398
ccagccauuccuuauagga

SEQ ID NO: 1485629 - RNA, 19 nt, Artificial Sequence
  Description of Artificial Sequence: Synthetic oligonucleotide
  Antisense strand to SEQ ID NO: 1485628
uccuauaaggaauggcugg

SEQ ID NO: 1485630 - RNA, 19 nt, Artificial Sequence
  Description of Artificial Sequence: Synthetic oligonucleotide
  Sense strand starting at position 3645 of SEQ ID NO: 1244398
agccauuccuuauaggaag

SEQ ID NO: 1485631 - RNA, 19 nt, Artificial Sequence
  Description of Artificial Sequence: Synthetic oligonucleotide
  Antisense strand to SEQ ID NO: 1485630
cuuccuauaaggaauggcu

SEQ ID NO: 1485632 - RNA, 19 nt, Artificial Sequence
  Description of Artificial Sequence: Synthetic oligonucleotide
  Sense strand starting at position 71 of SEQ ID NO: 1244399
uucuauuacagaggaguag

SEQ ID NO: 1485633 - RNA, 19 nt, Artificial Sequence
  Description of Artificial Sequence: Synthetic oligonucleotide
  Antisense strand to SEQ ID NO: 1485632
cuacuccucuguaauagaa

SEQ ID NO: 1485634 - RNA, 19 nt, Artificial Sequence
  Description of Artificial Sequence: Synthetic oligonucleotide
  Sense strand starting at position 162 of SEQ ID NO: 1244399
uggcuaagcccauguauuu

SEQ ID NO: 1485635 - RNA, 19 nt, Artificial Sequence
  Description of Artificial Sequence: Synthetic oligonucleotide
  Antisense strand to SEQ ID NO: 1485634
aaauacaugggcuuagcca

SEQ ID NO: 1485636 - RNA, 19 nt, Artificial Sequence
  Description of Artificial Sequence: Synthetic oligonucleotide
  Sense strand starting at position 187 of SEQ ID NO: 1244399
ggugaaagauggagguuaa

SEQ ID NO: 1485637 - RNA, 19 nt, Artificial Sequence
  Description of Artificial Sequence: Synthetic oligonucleotide
  Antisense strand to SEQ ID NO: 1485636
uuaaccuccaucuuucacc

SEQ ID NO: 1485638 - RNA, 19 nt, Artificial Sequence
  Description of Artificial Sequence: Synthetic oligonucleotide
  Sense strand starting at position 236 of SEQ ID NO: 1244399
cauggucuuguauacagua

SEQ ID NO: 1485639 - RNA, 19 nt, Artificial Sequence
  Description of Artificial Sequence: Synthetic oligonucleotide
  Antisense strand to SEQ ID NO: 1485638
uacuguauacaagaccaug

SEQ ID NO: 1485640 - RNA, 19 nt, Artificial Sequence
  Description of Artificial Sequence: Synthetic oligonucleotide
  Sense strand starting at position 365 of SEQ ID NO: 1244399
ggaguagaaucucuuaauu

SEQ ID NO: 1485641 - RNA, 19 nt, Artificial Sequence
  Description of Artificial Sequence: Synthetic oligonucleotide
  Antisense strand to SEQ ID NO: 1485640
aauuaagagauucuacucc

SEQ ID NO: 1485642 - RNA, 19 nt, Artificial Sequence
  Description of Artificial Sequence: Synthetic oligonucleotide
  Sense strand starting at position 401 of SEQ ID NO: 1244399
augaaauugcuauguaacu

SEQ ID NO: 1485643 - RNA, 19 nt, Artificial Sequence
  Description of Artificial Sequence: Synthetic oligonucleotide
  Antisense strand to SEQ ID NO: 1485642
aguuacauagcaauuucau

SEQ ID NO: 1485644 - RNA, 19 nt, Artificial Sequence
  Description of Artificial Sequence: Synthetic oligonucleotide
  Sense strand starting at position 402 of SEQ ID NO: 1244399
ugaaauugcuauguaacuu

SEQ ID NO: 1485645 - RNA, 19 nt, Artificial Sequence
  Description of Artificial Sequence: Synthetic oligonucleotide
  Antisense strand to SEQ ID NO: 1485644
aaguuacauagcaauuuca

SEQ ID NO: 1485646 - RNA, 19 nt, Artificial Sequence
  Description of Artificial Sequence: Synthetic oligonucleotide
  Sense strand starting at position 486 of SEQ ID NO: 1244399
aggcacuaaucuuugaagu

SEQ ID NO: 1485647 - RNA, 19 nt, Artificial Sequence
  Description of Artificial Sequence: Synthetic oligonucleotide
  Antisense strand to SEQ ID NO: 1485646
acuucaaagauuagugccu

SEQ ID NO: 1485648 - RNA, 19 nt, Artificial Sequence
  Description of Artificial Sequence: Synthetic oligonucleotide
  Sense strand starting at position 487 of SEQ ID NO: 1244399
ggcacuaaucuuugaagua

SEQ ID NO: 1485649 - RNA, 19 nt, Artificial Sequence
  Description of Artificial Sequence: Synthetic oligonucleotide
  Antisense strand to SEQ ID NO: 1485648
uacuucaaagauuagugcc

SEQ ID NO: 1485650 - RNA, 19 nt, Artificial Sequence
  Description of Artificial Sequence: Synthetic oligonucleotide
  Sense strand starting at position 613 of SEQ ID NO: 1244399
gcaagaaugcaguggaacu

SEQ ID NO: 1485651 - RNA, 19 nt, Artificial Sequence
  Description of Artificial Sequence: Synthetic oligonucleotide
  Antisense strand to SEQ ID NO: 1485650
aguuccacugcauucuugc

SEQ ID NO: 1485652 - RNA, 19 nt, Artificial Sequence
  Description of Artificial Sequence: Synthetic oligonucleotide
  Sense strand starting at position 674 of SEQ ID NO: 1244399
auggguauugguuauagcu

SEQ ID NO: 1485653 - RNA, 19 nt, Artificial Sequence
  Description of Artificial Sequence: Synthetic oligonucleotide
  Antisense strand to SEQ ID NO: 1485652
agcuauaaccaauacccau

SEQ ID NO: 1485654 - RNA, 19 nt, Artificial Sequence
  Description of Artificial Sequence: Synthetic oligonucleotide
  Sense strand starting at position 689 of SEQ ID NO: 1244399
agcugauguagagguauau

SEQ ID NO: 1485655 - RNA, 19 nt, Artificial Sequence
  Description of Artificial Sequence: Synthetic oligonucleotide
  Antisense strand to SEQ ID NO: 1485654
auauaccucuacaucagcu

SEQ ID NO: 1485656 - RNA, 19 nt, Artificial Sequence
  Description of Artificial Sequence: Synthetic oligonucleotide
  Sense strand starting at position 897 of SEQ ID NO: 1244399
aagcuuaaggaaugauguu

SEQ ID NO: 1485657 - RNA, 19 nt, Artificial Sequence
  Description of Artificial Sequence: Synthetic oligonucleotide
  Antisense strand to SEQ ID NO: 1485656
aacaucauuccuuaagcuu

SEQ ID NO: 1485658 - RNA, 19 nt, Artificial Sequence
  Description of Artificial Sequence: Synthetic oligonucleotide
  Sense strand starting at position 903 of SEQ ID NO: 1244399
aaggaaugauguuuagcua

SEQ ID NO: 1485659 - RNA, 19 nt, Artificial Sequence
  Description of Artificial Sequence: Synthetic oligonucleotide
  Antisense strand to SEQ ID NO: 1485658
uagcuaaacaucauuccuu

SEQ ID NO: 1485660 - RNA, 19 nt, Artificial Sequence
  Description of Artificial Sequence: Synthetic oligonucleotide
  Sense strand starting at position 904 of SEQ ID NO: 1244399
aggaaugauguuuagcuau

SEQ ID NO: 1485661 - RNA, 19 nt, Artificial Sequence
  Description of Artificial Sequence: Synthetic oligonucleotide
  Antisense strand to SEQ ID NO: 1485660
auagcuaaacaucauuccu

SEQ ID NO: 1485662 - RNA, 19 nt, Artificial Sequence
  Description of Artificial Sequence: Synthetic oligonucleotide
  Sense strand starting at position 906 of SEQ ID NO: 1244399
gaaugauguuuagcuauaa

SEQ ID NO: 1485663 - RNA, 19 nt, Artificial Sequence
  Description of Artificial Sequence: Synthetic oligonucleotide
  Antisense strand to SEQ ID NO: 1485662
uuauagcuaaacaucauuc

SEQ ID NO: 1485664 - RNA, 19 nt, Artificial Sequence
  Description of Artificial Sequence: Synthetic oligonucleotide
  Sense strand starting at position 1047 of SEQ ID NO: 1244399
uuacucuaucaagggugaa

SEQ ID NO: 1485665 - RNA, 19 nt, Artificial Sequence
  Description of Artificial Sequence: Synthetic oligonucleotide
  Antisense strand to SEQ ID NO: 1485664
uucacccuugauagaguaa

SEQ ID NO: 1485666 - RNA, 19 nt, Artificial Sequence
  Description of Artificial Sequence: Synthetic oligonucleotide
  Sense strand starting at position 1050 of SEQ ID NO: 1244399
cucuaucaagggugaaaua

SEQ ID NO: 1485667 - RNA, 19 nt, Artificial Sequence
  Description of Artificial Sequence: Synthetic oligonucleotide
  Antisense strand to SEQ ID NO: 1485666
uauuucacccuugauagag

SEQ ID NO: 1485668 - RNA, 19 nt, Artificial Sequence
  Description of Artificial Sequence: Synthetic oligonucleotide
  Sense strand starting at position 1063 of SEQ ID NO: 1244399
gaaauaaucgcauguaaag

SEQ ID NO: 1485669 - RNA, 19 nt, Artificial Sequence
  Description of Artificial Sequence: Synthetic oligonucleotide
  Antisense strand to SEQ ID NO: 1485668
cuuuacaugcgauuauuuc

SEQ ID NO: 1485670 - RNA, 19 nt, Artificial Sequence
  Description of Artificial Sequence: Synthetic oligonucleotide
  Sense strand starting at position 1271 of SEQ ID NO: 1244399
cuggaaacgugucuaauua

SEQ ID NO: 1485671 - RNA, 19 nt, Artificial Sequence
  Description of Artificial Sequence: Synthetic oligonucleotide
  Antisense strand to SEQ ID NO: 1485670
uaauuagacacguuuccag

SEQ ID NO: 1485672 - RNA, 19 nt, Artificial Sequence
  Description of Artificial Sequence: Synthetic oligonucleotide
  Sense strand starting at position 1272 of SEQ ID NO: 1244399
uggaaacgugucuaauuac

SEQ ID NO: 1485673 - RNA, 19 nt, Artificial Sequence
  Description of Artificial Sequence: Synthetic oligonucleotide
  Antisense strand to SEQ ID NO: 1485672
guaauuagacacguuucca

SEQ ID NO: 1485674 - RNA, 19 nt, Artificial Sequence
  Description of Artificial Sequence: Synthetic oligonucleotide
  Sense strand starting at position 1282 of SEQ ID NO: 1244399
ucuaauuacguuuagagag

SEQ ID NO: 1485675 - RNA, 19 nt, Artificial Sequence
  Description of Artificial Sequence: Synthetic oligonucleotide
  Antisense strand to SEQ ID NO: 1485674
cucucuaaacguaauuaga

SEQ ID NO: 1485676 - RNA, 19 nt, Artificial Sequence
  Description of Artificial Sequence: Synthetic oligonucleotide
  Sense strand starting at position 1289 of SEQ ID NO: 1244399
acguuuagagaguaacuaa

SEQ ID NO: 1485677 - RNA, 19 nt, Artificial Sequence
  Description of Artificial Sequence: Synthetic oligonucleotide
  Antisense strand to SEQ ID NO: 1485676
uuaguuacucucuaaacgu

SEQ ID NO: 1485678 - RNA, 19 nt, Artificial Sequence
  Description of Artificial Sequence: Synthetic oligonucleotide
  Sense strand starting at position 1315 of SEQ ID NO: 1244399
gccagugucccggaacaga

SEQ ID NO: 1485679 - RNA, 19 nt, Artificial Sequence
  Description of Artificial Sequence: Synthetic oligonucleotide
  Antisense strand to SEQ ID NO: 1485678
ucuguuccgggacacuggc

SEQ ID NO: 1485680 - RNA, 19 nt, Artificial Sequence
  Description of Artificial Sequence: Synthetic oligonucleotide
  Sense strand starting at position 1429 of SEQ ID NO: 1244399
aaguguaaagccgggauga

SEQ ID NO: 1485681 - RNA, 19 nt, Artificial Sequence
  Description of Artificial Sequence: Synthetic oligonucleotide
  Antisense strand to SEQ ID NO: 1485680
ucaucccggcuuuacacuu

SEQ ID NO: 1485682 - RNA, 19 nt, Artificial Sequence
  Description of Artificial Sequence: Synthetic oligonucleotide
  Sense strand starting at position 1431 of SEQ ID NO: 1244399
guguaaagccgggaugaga

SEQ ID NO: 1485683 - RNA, 19 nt, Artificial Sequence
  Description of Artificial Sequence: Synthetic oligonucleotide
  Antisense strand to SEQ ID NO: 1485682
ucucaucccggcuuuacac

SEQ ID NO: 1485684 - RNA, 19 nt, Artificial Sequence
  Description of Artificial Sequence: Synthetic oligonucleotide
  Sense strand starting at position 2759 of SEQ ID NO: 1244399
agaaacuugccauacgacu

SEQ ID NO: 1485685 - RNA, 19 nt, Artificial Sequence
  Description of Artificial Sequence: Synthetic oligonucleotide
  Antisense strand to SEQ ID NO: 1485684
agucguauggcaaguuucu

SEQ ID NO: 1485686 - RNA, 19 nt, Artificial Sequence
  Description of Artificial Sequence: Synthetic oligonucleotide
  Sense strand starting at position 2890 of SEQ ID NO: 1244399
cgagcaugucaucagacau

SEQ ID NO: 1485687 - RNA, 19 nt, Artificial Sequence
  Description of Artificial Sequence: Synthetic oligonucleotide
  Antisense strand to SEQ ID NO: 1485686
augucugaugacaugcucg

SEQ ID NO: 1485688 - RNA, 19 nt, Artificial Sequence
  Description of Artificial Sequence: Synthetic oligonucleotide
  Sense strand starting at position 2944 of SEQ ID NO: 1244399
uguaucaucucuccaggau

SEQ ID NO: 1485689 - RNA, 19 nt, Artificial Sequence
  Description of Artificial Sequence: Synthetic oligonucleotide
  Antisense strand to SEQ ID NO: 1485688
auccuggagagaugauaca

SEQ ID NO: 1485690 - RNA, 19 nt, Artificial Sequence
  Description of Artificial Sequence: Synthetic oligonucleotide
  Sense strand starting at position 2945 of SEQ ID NO: 1244399
guaucaucucuccaggauu

SEQ ID NO: 1485691 - RNA, 19 nt, Artificial Sequence
  Description of Artificial Sequence: Synthetic oligonucleotide
  Antisense strand to SEQ ID NO: 1485690
aauccuggagagaugauac

SEQ ID NO: 1485692 - RNA, 19 nt, Artificial Sequence
  Description of Artificial Sequence: Synthetic oligonucleotide
  Sense strand starting at position 2958 of SEQ ID NO: 1244399
aggauuauugcggaugucu

SEQ ID NO: 1485693 - RNA, 19 nt, Artificial Sequence
  Description of Artificial Sequence: Synthetic oligonucleotide
  Antisense strand to SEQ ID NO: 1485692
agacauccgcaauaauccu

SEQ ID NO: 1485694 - RNA, 19 nt, Artificial Sequence
  Description of Artificial Sequence: Synthetic oligonucleotide
  Sense strand starting at position 2969 of SEQ ID NO: 1244399
ggaugucuugagcauggga

SEQ ID NO: 1485695 - RNA, 19 nt, Artificial Sequence
  Description of Artificial Sequence: Synthetic oligonucleotide
  Antisense strand to SEQ ID NO: 1485694
ucccaugcucaagacaucc

SEQ ID NO: 1485696 - RNA, 19 nt, Artificial Sequence
  Description of Artificial Sequence: Synthetic oligonucleotide
  Sense strand starting at position 3065 of SEQ ID NO: 1244399
aaugaagugaguuguaagu

SEQ ID NO: 1485697 - RNA, 19 nt, Artificial Sequence
  Description of Artificial Sequence: Synthetic oligonucleotide
  Antisense strand to SEQ ID NO: 1485696
acuuacaacucacuucauu

SEQ ID NO: 1485698 - RNA, 19 nt, Artificial Sequence
  Description of Artificial Sequence: Synthetic oligonucleotide
  Sense strand starting at position 3364 of SEQ ID NO: 1244399
auaaaugacuuucuaaggu

SEQ ID NO: 1485699 - RNA, 19 nt, Artificial Sequence
  Description of Artificial Sequence: Synthetic oligonucleotide
  Antisense strand to SEQ ID NO: 1485698
accuuagaaagucauuuau

SEQ ID NO: 1485700 - RNA, 19 nt, Artificial Sequence
  Description of Artificial Sequence: Synthetic oligonucleotide
  Sense strand starting at position 3487 of SEQ ID NO: 1244399
cugaguuugagaugaguaa

SEQ ID NO: 1485701 - RNA, 19 nt, Artificial Sequence
  Description of Artificial Sequence: Synthetic oligonucleotide
  Antisense strand to SEQ ID NO: 1485700
uuacucaucucaaacucag

SEQ ID NO: 1485702 - RNA, 19 nt, Artificial Sequence
  Description of Artificial Sequence: Synthetic oligonucleotide
  Sense strand starting at position 3694 of SEQ ID NO: 1244399
agauccaccugucucgaua

SEQ ID NO: 1485703 - RNA, 19 nt, Artificial Sequence
  Description of Artificial Sequence: Synthetic oligonucleotide
  Antisense strand to SEQ ID NO: 1485702
uaucgagacagguggaucu

SEQ ID NO: 1485704 - RNA, 19 nt, Artificial Sequence
  Description of Artificial Sequence: Synthetic oligonucleotide
  Sense strand starting at position 3697 of SEQ ID NO: 1244399
uccaccugucucgauauca

SEQ ID NO: 1485705 - RNA, 19 nt, Artificial Sequence
  Description of Artificial Sequence: Synthetic oligonucleotide
  Antisense strand to SEQ ID NO: 1485704
ugauaucgagacaggugga

SEQ ID NO: 1485706 - RNA, 19 nt, Artificial Sequence
  Description of Artificial Sequence: Synthetic oligonucleotide
  Sense strand starting at position 3715 of SEQ ID NO: 1244399
aguguccucauuuguggaa

SEQ ID NO: 1485707 - RNA, 19 nt, Artificial Sequence
  Description of Artificial Sequence: Synthetic oligonucleotide
  Antisense strand to SEQ ID NO: 1485706
uuccacaaaugaggacacu

SEQ ID NO: 1485708 - RNA, 19 nt, Artificial Sequence
  Description of Artificial Sequence: Synthetic oligonucleotide
  Sense strand starting at position 3716 of SEQ ID NO: 1244399
guguccucauuuguggaau

SEQ ID NO: 1485709 - RNA, 19 nt, Artificial Sequence
  Description of Artificial Sequence: Synthetic oligonucleotide
  Antisense strand to SEQ ID NO: 1485708
auuccacaaaugaggacac

SEQ ID NO: 1485710 - RNA, 19 nt, Artificial Sequence
  Description of Artificial Sequence: Synthetic oligonucleotide
  Sense strand starting at position 3805 of SEQ ID NO: 1244399
uagguuauugcauagggua

SEQ ID NO: 1485711 - RNA, 19 nt, Artificial Sequence
  Description of Artificial Sequence: Synthetic oligonucleotide
  Antisense strand to SEQ ID NO: 1485710
uacccuaugcaauaaccua

SEQ ID NO: 1485712 - RNA, 19 nt, Artificial Sequence
  Description of Artificial Sequence: Synthetic oligonucleotide
  Sense strand starting at position 35 of SEQ ID NO: 1244400
gcuggaauucucugaagcu

SEQ ID NO: 1485713 - RNA, 19 nt, Artificial Sequence
  Description of Artificial Sequence: Synthetic oligonucleotide
  Antisense strand to SEQ ID NO: 1485712
agcuucagagaauuccagc

SEQ ID NO: 1485714 - RNA, 19 nt, Artificial Sequence
  Description of Artificial Sequence: Synthetic oligonucleotide
  Sense strand starting at position 155 of SEQ ID NO: 1244400
cugcacuuuagcugaagga

SEQ ID NO: 1485715 - RNA, 19 nt, Artificial Sequence
  Description of Artificial Sequence: Synthetic oligonucleotide
  Antisense strand to SEQ ID NO: 1485714
uccuucagcuaaagugcag

SEQ ID NO: 1485716 - RNA, 19 nt, Artificial Sequence
  Description of Artificial Sequence: Synthetic oligonucleotide
  Sense strand starting at position 271 of SEQ ID NO: 1244400
aaggaagcauuugaaauga

SEQ ID NO: 1485717 - RNA, 19 nt, Artificial Sequence
  Description of Artificial Sequence: Synthetic oligonucleotide
  Antisense strand to SEQ ID NO: 1485716
ucauuucaaaugcuuccuu

SEQ ID NO: 1485718 - RNA, 19 nt, Artificial Sequence
  Description of Artificial Sequence: Synthetic oligonucleotide
  Sense strand starting at position 339 of SEQ ID NO: 1244400
ggcaguguugccuuacagu

SEQ ID NO: 1485719 - RNA, 19 nt, Artificial Sequence
  Description of Artificial Sequence: Synthetic oligonucleotide
  Antisense strand to SEQ ID NO: 1485718
acuguaaggcaacacugcc

SEQ ID NO: 1485720 - RNA, 19 nt, Artificial Sequence
  Description of Artificial Sequence: Synthetic oligonucleotide
  Sense strand starting at position 382 of SEQ ID NO: 1244400
gaggucucuagcugguuaa

SEQ ID NO: 1485721 - RNA, 19 nt, Artificial Sequence
  Description of Artificial Sequence: Synthetic oligonucleotide
  Antisense strand to SEQ ID NO: 1485720
uuaaccagcuagagaccuc

SEQ ID NO: 1485722 - RNA, 19 nt, Artificial Sequence
  Description of Artificial Sequence: Synthetic oligonucleotide
  Sense strand starting at position 501 of SEQ ID NO: 1244400
gagacuugugaccgccuaa

SEQ ID NO: 1485723 - RNA, 19 nt, Artificial Sequence
  Description of Artificial Sequence: Synthetic oligonucleotide
  Antisense strand to SEQ ID NO: 1485722
uuaggcggucacaagucuc

SEQ ID NO: 1485724 - RNA, 19 nt, Artificial Sequence
  Description of Artificial Sequence: Synthetic oligonucleotide
  Sense strand starting at position 512 of SEQ ID NO: 1244400
ccgccuaagcucuugaguu

SEQ ID NO: 1485725 - RNA, 19 nt, Artificial Sequence
  Description of Artificial Sequence: Synthetic oligonucleotide
  Antisense strand to SEQ ID NO: 1485724
aacucaagagcuuaggcgg

SEQ ID NO: 1485726 - RNA, 19 nt, Artificial Sequence
  Description of Artificial Sequence: Synthetic oligonucleotide
  Sense strand starting at position 537 of SEQ ID NO: 1244400
uugcaucaacaaugaagau

SEQ ID NO: 1485727 - RNA, 19 nt, Artificial Sequence
  Description of Artificial Sequence: Synthetic oligonucleotide
  Antisense strand to SEQ ID NO: 1485726
aucuucauuguugaugcaa

SEQ ID NO: 1485728 - RNA, 19 nt, Artificial Sequence
  Description of Artificial Sequence: Synthetic oligonucleotide
  Sense strand starting at position 753 of SEQ ID NO: 1244400
accuguuaugucuaauguu

SEQ ID NO: 1485729 - RNA, 19 nt, Artificial Sequence
  Description of Artificial Sequence: Synthetic oligonucleotide
  Antisense strand to SEQ ID NO: 1485728
aacauuagacauaacaggu

SEQ ID NO: 1485730 - RNA, 19 nt, Artificial Sequence
  Description of Artificial Sequence: Synthetic oligonucleotide
  Sense strand starting at position 1021 of SEQ ID NO: 1244400
uugagaaguuucuccaugu

SEQ ID NO: 1485731 - RNA, 19 nt, Artificial Sequence
  Description of Artificial Sequence: Synthetic oligonucleotide
  Antisense strand to SEQ ID NO: 1485730
acauggagaaacuucucaa

SEQ ID NO: 1485732 - RNA, 19 nt, Artificial Sequence
  Description of Artificial Sequence: Synthetic oligonucleotide
  Sense strand starting at position 1022 of SEQ ID NO: 1244400
ugagaaguuucuccaugug

SEQ ID NO: 1485733 - RNA, 19 nt, Artificial Sequence
  Description of Artificial Sequence: Synthetic oligonucleotide
  Antisense strand to SEQ ID NO: 1485732
cacauggagaaacuucuca

SEQ ID NO: 1485734 - RNA, 19 nt, Artificial Sequence
  Description of Artificial Sequence: Synthetic oligonucleotide
  Sense strand starting at position 1286 of SEQ ID NO: 1244400
agcgauuauaaccgauacu

SEQ ID NO: 1485735 - RNA, 19 nt, Artificial Sequence
  Description of Artificial Sequence: Synthetic oligonucleotide
  Antisense strand to SEQ ID NO: 1485734
aguaucgguuauaaucgcu

SEQ ID NO: 1485736 - RNA, 19 nt, Artificial Sequence
  Description of Artificial Sequence: Synthetic oligonucleotide
  Sense strand starting at position 1287 of SEQ ID NO: 1244400
gcgauuauaaccgauacua

SEQ ID NO: 1485737 - RNA, 19 nt, Artificial Sequence
  Description of Artificial Sequence: Synthetic oligonucleotide
  Antisense strand to SEQ ID NO: 1485736
uaguaucgguuauaaucgc

SEQ ID NO: 1485738 - RNA, 19 nt, Artificial Sequence
  Description of Artificial Sequence: Synthetic oligonucleotide
  Sense strand starting at position 1550 of SEQ ID NO: 1244400
ccuggcaggcuuugaaaca

SEQ ID NO: 1485739 - RNA, 19 nt, Artificial Sequence
  Description of Artificial Sequence: Synthetic oligonucleotide
  Antisense strand to SEQ ID NO: 1485738
uguuucaaagccugccagg

SEQ ID NO: 1485740 - RNA, 19 nt, Artificial Sequence
  Description of Artificial Sequence: Synthetic oligonucleotide
  Sense strand starting at position 1562 of SEQ ID NO: 1244400
ugaaacauuuauuggaaag

SEQ ID NO: 1485741 - RNA, 19 nt, Artificial Sequence
  Description of Artificial Sequence: Synthetic oligonucleotide
  Antisense strand to SEQ ID NO: 1485740
cuuuccaauaaauguuuca

SEQ ID NO: 1485742 - RNA, 19 nt, Artificial Sequence
  Description of Artificial Sequence: Synthetic oligonucleotide
  Sense strand starting at position 1577 of SEQ ID NO: 1244400
aaagcaguucuagaguuga

SEQ ID NO: 1485743 - RNA, 19 nt, Artificial Sequence
  Description of Artificial Sequence: Synthetic oligonucleotide
  Antisense strand to SEQ ID NO: 1485742
ucaacucuagaacugcuuu

SEQ ID NO: 1485744 - RNA, 19 nt, Artificial Sequence
  Description of Artificial Sequence: Synthetic oligonucleotide
  Sense strand starting at position 1588 of SEQ ID NO: 1244400
agaguugagaauugcagaa

SEQ ID NO: 1485745 - RNA, 19 nt, Artificial Sequence
  Description of Artificial Sequence: Synthetic oligonucleotide
  Antisense strand to SEQ ID NO: 1485744
uucugcaauucucaacucu

SEQ ID NO: 1485746 - RNA, 19 nt, Artificial Sequence
  Description of Artificial Sequence: Synthetic oligonucleotide
  Sense strand starting at position 1608 of SEQ ID NO: 1244400
aggaaaguuuaagaaggaa

SEQ ID NO: 1485747 - RNA, 19 nt, Artificial Sequence
  Description of Artificial Sequence: Synthetic oligonucleotide
  Antisense strand to SEQ ID NO: 1485746
uuccuucuuaaacuuuccu

SEQ ID NO: 1485748 - RNA, 19 nt, Artificial Sequence
  Description of Artificial Sequence: Synthetic oligonucleotide
  Sense strand starting at position 2861 of SEQ ID NO: 1244400
gaaugagucucuccuuagg

SEQ ID NO: 1485749 - RNA, 19 nt, Artificial Sequence
  Description of Artificial Sequence: Synthetic oligonucleotide
  Antisense strand to SEQ ID NO: 1485748
ccuaaggagagacucauuc

SEQ ID NO: 1485750 - RNA, 19 nt, Artificial Sequence
  Description of Artificial Sequence: Synthetic oligonucleotide
  Sense strand starting at position 2883 of SEQ ID NO: 1244400
aaauccauuccguaaccga

SEQ ID NO: 1485751 - RNA, 19 nt, Artificial Sequence
  Description of Artificial Sequence: Synthetic oligonucleotide
  Antisense strand to SEQ ID NO: 1485750
ucgguuacggaauggauuu

SEQ ID NO: 1485752 - RNA, 19 nt, Artificial Sequence
  Description of Artificial Sequence: Synthetic oligonucleotide
  Sense strand starting at position 2894 of SEQ ID NO: 1244400
guaaccgacccagaguuau

SEQ ID NO: 1485753 - RNA, 19 nt, Artificial Sequence
  Description of Artificial Sequence: Synthetic oligonucleotide
  Antisense strand to SEQ ID NO: 1485752
auaacucugggucgguuac

SEQ ID NO: 1485754 - RNA, 19 nt, Artificial Sequence
  Description of Artificial Sequence: Synthetic oligonucleotide
  Sense strand starting at position 2905 of SEQ ID NO: 1244400
agaguuauuugugcaucug

SEQ ID NO: 1485755 - RNA, 19 nt, Artificial Sequence
  Description of Artificial Sequence: Synthetic oligonucleotide
  Antisense strand to SEQ ID NO: 1485754
cagaugcacaaauaacucu

SEQ ID NO: 1485756 - RNA, 19 nt, Artificial Sequence
  Description of Artificial Sequence: Synthetic oligonucleotide
  Sense strand starting at position 2930 of SEQ ID NO: 1244400
guguuauaggcacauggau

SEQ ID NO: 1485757 - RNA, 19 nt, Artificial Sequence
  Description of Artificial Sequence: Synthetic oligonucleotide
  Antisense strand to SEQ ID NO: 1485756
auccaugugccuauaacac

SEQ ID NO: 1485758 - RNA, 19 nt, Artificial Sequence
  Description of Artificial Sequence: Synthetic oligonucleotide
  Sense strand starting at position 2974 of SEQ ID NO: 1244400
ucucaagaagcccguuaaa

SEQ ID NO: 1485759 - RNA, 19 nt, Artificial Sequence
  Description of Artificial Sequence: Synthetic oligonucleotide
  Antisense strand to SEQ ID NO: 1485758
uuuaacgggcuucuugaga

SEQ ID NO: 1485760 - RNA, 19 nt, Artificial Sequence
  Description of Artificial Sequence: Synthetic oligonucleotide
  Sense strand starting at position 2977 of SEQ ID NO: 1244400
caagaagcccguuaaauag

SEQ ID NO: 1485761 - RNA, 19 nt, Artificial Sequence
  Description of Artificial Sequence: Synthetic oligonucleotide
  Antisense strand to SEQ ID NO: 1485760
cuauuuaacgggcuucuug

SEQ ID NO: 1485762 - RNA, 19 nt, Artificial Sequence
  Description of Artificial Sequence: Synthetic oligonucleotide
  Sense strand starting at position 3126 of SEQ ID NO: 1244400
aagaucagucggugacaga

SEQ ID NO: 1485763 - RNA, 19 nt, Artificial Sequence
  Description of Artificial Sequence: Synthetic oligonucleotide
  Antisense strand to SEQ ID NO: 1485762
ucugucaccgacugaucuu

SEQ ID NO: 1485764 - RNA, 19 nt, Artificial Sequence
  Description of Artificial Sequence: Synthetic oligonucleotide
  Sense strand starting at position 3127 of SEQ ID NO: 1244400
agaucagucggugacagau

SEQ ID NO: 1485765 - RNA, 19 nt, Artificial Sequence
  Description of Artificial Sequence: Synthetic oligonucleotide
  Antisense strand to SEQ ID NO: 1485764
aucugucaccgacugaucu

SEQ ID NO: 1485766 - RNA, 19 nt, Artificial Sequence
  Description of Artificial Sequence: Synthetic oligonucleotide
  Sense strand starting at position 3239 of SEQ ID NO: 1244400
ggguuagcccuagagcuua

SEQ ID NO: 1485767 - RNA, 19 nt, Artificial Sequence
  Description of Artificial Sequence: Synthetic oligonucleotide
  Antisense strand to SEQ ID NO: 1485766
uaagcucuagggcuaaccc

SEQ ID NO: 1485768 - RNA, 19 nt, Artificial Sequence
  Description of Artificial Sequence: Synthetic oligonucleotide
  Sense strand starting at position 3251 of SEQ ID NO: 1244400
gagcuuacucucuggaucu

SEQ ID NO: 1485769 - RNA, 19 nt, Artificial Sequence
  Description of Artificial Sequence: Synthetic oligonucleotide
  Antisense strand to SEQ ID NO: 1485768
agauccagagaguaagcuc

SEQ ID NO: 1485770 - RNA, 19 nt, Artificial Sequence
  Description of Artificial Sequence: Synthetic oligonucleotide
  Sense strand starting at position 3253 of SEQ ID NO: 1244400
gcuuacucucuggaucuga

SEQ ID NO: 1485771 - RNA, 19 nt, Artificial Sequence
  Description of Artificial Sequence: Synthetic oligonucleotide
  Antisense strand to SEQ ID NO: 1485770
ucagauccagagaguaagc

SEQ ID NO: 1485772 - RNA, 19 nt, Artificial Sequence
  Description of Artificial Sequence: Synthetic oligonucleotide
  Sense strand starting at position 3400 of SEQ ID NO: 1244400
gcugauuucgugugcagga

SEQ ID NO: 1485773 - RNA, 19 nt, Artificial Sequence
  Description of Artificial Sequence: Synthetic oligonucleotide
  Antisense strand to SEQ ID NO: 1485772
uccugcacacgaaaucagc

SEQ ID NO: 1485774 - RNA, 19 nt, Artificial Sequence
  Description of Artificial Sequence: Synthetic oligonucleotide
  Sense strand starting at position 3415 of SEQ ID NO: 1244400
aggagcaucucagcgauua

SEQ ID NO: 1485775 - RNA, 19 nt, Artificial Sequence
  Description of Artificial Sequence: Synthetic oligonucleotide
  Antisense strand to SEQ ID NO: 1485774
uaaucgcugagaugcuccu

SEQ ID NO: 1485776 - RNA, 19 nt, Artificial Sequence
  Description of Artificial Sequence: Synthetic oligonucleotide
  Sense strand starting at position 3419 of SEQ ID NO: 1244400
gcaucucagcgauuacgua

SEQ ID NO: 1485777 - RNA, 19 nt, Artificial Sequence
  Description of Artificial Sequence: Synthetic oligonucleotide
  Antisense strand to SEQ ID NO: 1485776
uacguaaucgcugagaugc

SEQ ID NO: 1485778 - RNA, 19 nt, Artificial Sequence
  Description of Artificial Sequence: Synthetic oligonucleotide
  Sense strand starting at position 3420 of SEQ ID NO: 1244400
caucucagcgauuacguaa

SEQ ID NO: 1485779 - RNA, 19 nt, Artificial Sequence
  Description of Artificial Sequence: Synthetic oligonucleotide
  Antisense strand to SEQ ID NO: 1485778
uuacguaaucgcugagaug

SEQ ID NO: 1485780 - RNA, 19 nt, Artificial Sequence
  Description of Artificial Sequence: Synthetic oligonucleotide
  Sense strand starting at position 3512 of SEQ ID NO: 1244400
ugcuguuauggagggcaga

SEQ ID NO: 1485781 - RNA, 19 nt, Artificial Sequence
  Description of Artificial Sequence: Synthetic oligonucleotide
  Antisense strand to SEQ ID NO: 1485780
ucugcccuccauaacagca

SEQ ID NO: 1485782 - RNA, 19 nt, Artificial Sequence
  Description of Artificial Sequence: Synthetic oligonucleotide
  Sense strand starting at position 3513 of SEQ ID NO: 1244400
gcuguuauggagggcagaa

SEQ ID NO: 1485783 - RNA, 19 nt, Artificial Sequence
  Description of Artificial Sequence: Synthetic oligonucleotide
  Antisense strand to SEQ ID NO: 1485782
uucugcccuccauaacagc

SEQ ID NO: 1485784 - RNA, 19 nt, Artificial Sequence
  Description of Artificial Sequence: Synthetic oligonucleotide
  Sense strand starting at position 3839 of SEQ ID NO: 1244400
uucccuuugcuguauaaug

SEQ ID NO: 1485785 - RNA, 19 nt, Artificial Sequence
  Description of Artificial Sequence: Synthetic oligonucleotide
  Antisense strand to SEQ ID NO: 1485784
cauuauacagcaaagggaa

SEQ ID NO: 1485786 - RNA, 19 nt, Artificial Sequence
  Description of Artificial Sequence: Synthetic oligonucleotide
  Sense strand starting at position 3841 of SEQ ID NO: 1244400
cccuuugcuguauaaugua

SEQ ID NO: 1485787 - RNA, 19 nt, Artificial Sequence
  Description of Artificial Sequence: Synthetic oligonucleotide
  Antisense strand to SEQ ID NO: 1485786
uacauuauacagcaaaggg

SEQ ID NO: 1485788 - RNA, 19 nt, Artificial Sequence
  Description of Artificial Sequence: Synthetic oligonucleotide
  Sense strand starting at position 3909 of SEQ ID NO: 1244400
caugauuccgccugagauc

SEQ ID NO: 1485789 - RNA, 19 nt, Artificial Sequence
  Description of Artificial Sequence: Synthetic oligonucleotide
  Antisense strand to SEQ ID NO: 1485788
gaucucaggcggaaucaug

SEQ ID NO: 1485790 - RNA, 19 nt, Artificial Sequence
  Description of Artificial Sequence: Synthetic oligonucleotide
  Sense strand starting at position 3910 of SEQ ID NO: 1244400
augauuccgccugagaucu

SEQ ID NO: 1485791 - RNA, 19 nt, Artificial Sequence
  Description of Artificial Sequence: Synthetic oligonucleotide
  Antisense strand to SEQ ID NO: 1485790
agaucucaggcggaaucau

SEQ ID NO: 1485792 - RNA, 19 nt, Artificial Sequence
  Description of Artificial Sequence: Synthetic oligonucleotide
  Sense strand starting at position 711 of SEQ ID NO: 1244401
ggacaucuugguugggaga

SEQ ID NO: 1485793 - RNA, 19 nt, Artificial Sequence
  Description of Artificial Sequence: Synthetic oligonucleotide
  Antisense strand to SEQ ID NO: 1485792
ucucccaaccaagaugucc

SEQ ID NO: 1485794 - RNA, 19 nt, Artificial Sequence
  Description of Artificial Sequence: Synthetic oligonucleotide
  Sense strand starting at position 761 of SEQ ID NO: 1244401
agcccuuuccucuagggau

SEQ ID NO: 1485795 - RNA, 19 nt, Artificial Sequence
  Description of Artificial Sequence: Synthetic oligonucleotide
  Antisense strand to SEQ ID NO: 1485794
aucccuagaggaaagggcu

SEQ ID NO: 1485796 - RNA, 19 nt, Artificial Sequence
  Description of Artificial Sequence: Synthetic oligonucleotide
  Sense strand starting at position 825 of SEQ ID NO: 1244401
ggcccauucggucauaagu

SEQ ID NO: 1485797 - RNA, 19 nt, Artificial Sequence
  Description of Artificial Sequence: Synthetic oligonucleotide
  Antisense strand to SEQ ID NO: 1485796
acuuaugaccgaaugggcc

SEQ ID NO: 1485798 - RNA, 19 nt, Artificial Sequence
  Description of Artificial Sequence: Synthetic oligonucleotide
  Sense strand starting at position 827 of SEQ ID NO: 1244401
cccauucggucauaaguuu

SEQ ID NO: 1485799 - RNA, 19 nt, Artificial Sequence
  Description of Artificial Sequence: Synthetic oligonucleotide
  Antisense strand to SEQ ID NO: 1485798
aaacuuaugaccgaauggg

SEQ ID NO: 1485800 - RNA, 19 nt, Artificial Sequence
  Description of Artificial Sequence: Synthetic oligonucleotide
  Sense strand starting at position 833 of SEQ ID NO: 1244401
cggucauaaguuuaaugaa

SEQ ID NO: 1485801 - RNA, 19 nt, Artificial Sequence
  Description of Artificial Sequence: Synthetic oligonucleotide
  Antisense strand to SEQ ID NO: 1485800
uucauuaaacuuaugaccg

SEQ ID NO: 1485802 - RNA, 19 nt, Artificial Sequence
  Description of Artificial Sequence: Synthetic oligonucleotide
  Sense strand starting at position 836 of SEQ ID NO: 1244401
ucauaaguuuaaugaaguc

SEQ ID NO: 1485803 - RNA, 19 nt, Artificial Sequence
  Description of Artificial Sequence: Synthetic oligonucleotide
  Antisense strand to SEQ ID NO: 1485802
gacuucauuaaacuuauga

SEQ ID NO: 1485804 - RNA, 19 nt, Artificial Sequence
  Description of Artificial Sequence: Synthetic oligonucleotide
  Sense strand starting at position 865 of SEQ ID NO: 1244401
gcgccaucguggucagaga

SEQ ID NO: 1485805 - RNA, 19 nt, Artificial Sequence
  Description of Artificial Sequence: Synthetic oligonucleotide
  Antisense strand to SEQ ID NO: 1485804
ucucugaccacgauggcgc

SEQ ID NO: 1485806 - RNA, 19 nt, Artificial Sequence
  Description of Artificial Sequence: Synthetic oligonucleotide
  Sense strand starting at position 866 of SEQ ID NO: 1244401
cgccaucguggucagagau

SEQ ID NO: 1485807 - RNA, 19 nt, Artificial Sequence
  Description of Artificial Sequence: Synthetic oligonucleotide
  Antisense strand to SEQ ID NO: 1485806
aucucugaccacgauggcg

SEQ ID NO: 1485808 - RNA, 19 nt, Artificial Sequence
  Description of Artificial Sequence: Synthetic oligonucleotide
  Sense strand starting at position 1100 of SEQ ID NO: 1244401
aaaugccuugcguaagguu

SEQ ID NO: 1485809 - RNA, 19 nt, Artificial Sequence
  Description of Artificial Sequence: Synthetic oligonucleotide
  Antisense strand to SEQ ID NO: 1485808
aaccuuacgcaaggcauuu

SEQ ID NO: 1485810 - RNA, 19 nt, Artificial Sequence
  Description of Artificial Sequence: Synthetic oligonucleotide
  Sense strand starting at position 1109 of SEQ ID NO: 1244401
gcguaagguuccgccacau

SEQ ID NO: 1485811 - RNA, 19 nt, Artificial Sequence
  Description of Artificial Sequence: Synthetic oligonucleotide
  Antisense strand to SEQ ID NO: 1485810
auguggcggaaccuuacgc

SEQ ID NO: 1485812 - RNA, 19 nt, Artificial Sequence
  Description of Artificial Sequence: Synthetic oligonucleotide
  Sense strand starting at position 1257 of SEQ ID NO: 1244401
ugcgaaugcgcauagucuu

SEQ ID NO: 1485813 - RNA, 19 nt, Artificial Sequence
  Description of Artificial Sequence: Synthetic oligonucleotide
  Antisense strand to SEQ ID NO: 1485812
aagacuaugcgcauucgca

SEQ ID NO: 1485814 - RNA, 19 nt, Artificial Sequence
  Description of Artificial Sequence: Synthetic oligonucleotide
  Sense strand starting at position 1265 of SEQ ID NO: 1244401
cgcauagucuuguugagca

SEQ ID NO: 1485815 - RNA, 19 nt, Artificial Sequence
  Description of Artificial Sequence: Synthetic oligonucleotide
  Antisense strand to SEQ ID NO: 1485814
ugcucaacaagacuaugcg

SEQ ID NO: 1485816 - RNA, 19 nt, Artificial Sequence
  Description of Artificial Sequence: Synthetic oligonucleotide
  Sense strand starting at position 1325 of SEQ ID NO: 1244401
ucgcgcucuccguccgaau

SEQ ID NO: 1485817 - RNA, 19 nt, Artificial Sequence
  Description of Artificial Sequence: Synthetic oligonucleotide
  Antisense strand to SEQ ID NO: 1485816
auucggacggagagcgcga

SEQ ID NO: 1485818 - RNA, 19 nt, Artificial Sequence
  Description of Artificial Sequence: Synthetic oligonucleotide
  Sense strand starting at position 1659 of SEQ ID NO: 1244401
guugggugguccgagaucu

SEQ ID NO: 1485819 - RNA, 19 nt, Artificial Sequence
  Description of Artificial Sequence: Synthetic oligonucleotide
  Antisense strand to SEQ ID NO: 1485818
agaucucggaccacccaac

SEQ ID NO: 1485820 - RNA, 19 nt, Artificial Sequence
  Description of Artificial Sequence: Synthetic oligonucleotide
  Sense strand starting at position 1694 of SEQ ID NO: 1244401
cucuuuccuuucgcgagau

SEQ ID NO: 1485821 - RNA, 19 nt, Artificial Sequence
  Description of Artificial Sequence: Synthetic oligonucleotide
  Antisense strand to SEQ ID NO: 1485820
aucucgcgaaaggaaagag

SEQ ID NO: 1485822 - RNA, 19 nt, Artificial Sequence
  Description of Artificial Sequence: Synthetic oligonucleotide
  Sense strand starting at position 1727 of SEQ ID NO: 1244401
cuccuagucuccucggcaa

SEQ ID NO: 1485823 - RNA, 19 nt, Artificial Sequence
  Description of Artificial Sequence: Synthetic oligonucleotide
  Antisense strand to SEQ ID NO: 1485822
uugccgaggagacuaggag

SEQ ID NO: 1485824 - RNA, 19 nt, Artificial Sequence
  Description of Artificial Sequence: Synthetic oligonucleotide
  Sense strand starting at position 1757 of SEQ ID NO: 1244401
ucgcgagcuucuccuacuu

SEQ ID NO: 1485825 - RNA, 19 nt, Artificial Sequence
  Description of Artificial Sequence: Synthetic oligonucleotide
  Antisense strand to SEQ ID NO: 1485824
aaguaggagaagcucgcga

SEQ ID NO: 1485826 - RNA, 19 nt, Artificial Sequence
  Description of Artificial Sequence: Synthetic oligonucleotide
  Sense strand starting at position 1818 of SEQ ID NO: 1244401
uuaagauaucgcgagaccu

SEQ ID NO: 1485827 - RNA, 19 nt, Artificial Sequence
  Description of Artificial Sequence: Synthetic oligonucleotide
  Antisense strand to SEQ ID NO: 1485826
aggucucgcgauaucuuaa

SEQ ID NO: 1485828 - RNA, 19 nt, Artificial Sequence
  Description of Artificial Sequence: Synthetic oligonucleotide
  Sense strand starting at position 1820 of SEQ ID NO: 1244401
aagauaucgcgagaccuuu

SEQ ID NO: 1485829 - RNA, 19 nt, Artificial Sequence
  Description of Artificial Sequence: Synthetic oligonucleotide
  Antisense strand to SEQ ID NO: 1485828
aaaggucucgcgauaucuu

SEQ ID NO: 1485830 - RNA, 19 nt, Artificial Sequence
  Description of Artificial Sequence: Synthetic oligonucleotide
  Sense strand starting at position 1835 of SEQ ID NO: 1244401
cuuuaccucugguuucuua

SEQ ID NO: 1485831 - RNA, 19 nt, Artificial Sequence
  Description of Artificial Sequence: Synthetic oligonucleotide
  Antisense strand to SEQ ID NO: 1485830
uaagaaaccagagguaaag

SEQ ID NO: 1485832 - RNA, 19 nt, Artificial Sequence
  Description of Artificial Sequence: Synthetic oligonucleotide
  Sense strand starting at position 1839 of SEQ ID NO: 1244401
accucugguuucuuacaca

SEQ ID NO: 1485833 - RNA, 19 nt, Artificial Sequence
  Description of Artificial Sequence: Synthetic oligonucleotide
  Antisense strand to SEQ ID NO: 1485832
uguguaagaaaccagaggu

SEQ ID NO: 1485834 - RNA, 19 nt, Artificial Sequence
  Description of Artificial Sequence: Synthetic oligonucleotide
  Sense strand starting at position 1868 of SEQ ID NO: 1244401
acuggaauuuagcgagaau

SEQ ID NO: 1485835 - RNA, 19 nt, Artificial Sequence
  Description of Artificial Sequence: Synthetic oligonucleotide
  Antisense strand to SEQ ID NO: 1485834
auucucgcuaaauuccagu

SEQ ID NO: 1485836 - RNA, 19 nt, Artificial Sequence
  Description of Artificial Sequence: Synthetic oligonucleotide
  Sense strand starting at position 2615 of SEQ ID NO: 1244401
agaccagagacgugaguua

SEQ ID NO: 1485837 - RNA, 19 nt, Artificial Sequence
  Description of Artificial Sequence: Synthetic oligonucleotide
  Antisense strand to SEQ ID NO: 1485836
uaacucacgucucuggucu

SEQ ID NO: 1485838 - RNA, 19 nt, Artificial Sequence
  Description of Artificial Sequence: Synthetic oligonucleotide
  Sense strand starting at position 2622 of SEQ ID NO: 1244401
agacgugaguuaugcugga

SEQ ID NO: 1485839 - RNA, 19 nt, Artificial Sequence
  Description of Artificial Sequence: Synthetic oligonucleotide
  Antisense strand to SEQ ID NO: 1485838
uccagcauaacucacgucu

SEQ ID NO: 1485840 - RNA, 19 nt, Artificial Sequence
  Description of Artificial Sequence: Synthetic oligonucleotide
  Sense strand starting at position 2626 of SEQ ID NO: 1244401
gugaguuaugcuggaaccu

SEQ ID NO: 1485841 - RNA, 19 nt, Artificial Sequence
  Description of Artificial Sequence: Synthetic oligonucleotide
  Antisense strand to SEQ ID NO: 1485840
agguuccagcauaacucac

SEQ ID NO: 1485842 - RNA, 19 nt, Artificial Sequence
  Description of Artificial Sequence: Synthetic oligonucleotide
  Sense strand starting at position 2707 of SEQ ID NO: 1244401
ccuaauggcugcucugaca

SEQ ID NO: 1485843 - RNA, 19 nt, Artificial Sequence
  Description of Artificial Sequence: Synthetic oligonucleotide
  Antisense strand to SEQ ID NO: 1485842
ugucagagcagccauuagg

SEQ ID NO: 1485844 - RNA, 19 nt, Artificial Sequence
  Description of Artificial Sequence: Synthetic oligonucleotide
  Sense strand starting at position 2744 of SEQ ID NO: 1244401
cuuuaaagauccgcaagca

SEQ ID NO: 1485845 - RNA, 19 nt, Artificial Sequence
  Description of Artificial Sequence: Synthetic oligonucleotide
  Antisense strand to SEQ ID NO: 1485844
ugcuugcggaucuuuaaag

SEQ ID NO: 1485846 - RNA, 19 nt, Artificial Sequence
  Description of Artificial Sequence: Synthetic oligonucleotide
  Sense strand starting at position 3132 of SEQ ID NO: 1244401
uugggaauucuaggagugu

SEQ ID NO: 1485847 - RNA, 19 nt, Artificial Sequence
  Description of Artificial Sequence: Synthetic oligonucleotide
  Antisense strand to SEQ ID NO: 1485846
acacuccuagaauucccaa

SEQ ID NO: 1485848 - RNA, 19 nt, Artificial Sequence
  Description of Artificial Sequence: Synthetic oligonucleotide
  Sense strand starting at position 3133 of SEQ ID NO: 1244401
ugggaauucuaggaguguc

SEQ ID NO: 1485849 - RNA, 19 nt, Artificial Sequence
  Description of Artificial Sequence: Synthetic oligonucleotide
  Antisense strand to SEQ ID NO: 1485848
gacacuccuagaauuccca

SEQ ID NO: 1485850 - RNA, 19 nt, Artificial Sequence
  Description of Artificial Sequence: Synthetic oligonucleotide
  Sense strand starting at position 3176 of SEQ ID NO: 1244401
ccuuuauaagccugggaac

SEQ ID NO: 1485851 - RNA, 19 nt, Artificial Sequence
  Description of Artificial Sequence: Synthetic oligonucleotide
  Antisense strand to SEQ ID NO: 1485850
guucccaggcuuauaaagg

SEQ ID NO: 1485852 - RNA, 19 nt, Artificial Sequence
  Description of Artificial Sequence: Synthetic oligonucleotide
  Sense strand starting at position 3177 of SEQ ID NO: 1244401
cuuuauaagccugggaaca

SEQ ID NO: 1485853 - RNA, 19 nt, Artificial Sequence
  Description of Artificial Sequence: Synthetic oligonucleotide
  Antisense strand to SEQ ID NO: 1485852
uguucccaggcuuauaaag

SEQ ID NO: 1485854 - RNA, 19 nt, Artificial Sequence
  Description of Artificial Sequence: Synthetic oligonucleotide
  Sense strand starting at position 3202 of SEQ ID NO: 1244401
cauguaucuuagugauggu

SEQ ID NO: 1485855 - RNA, 19 nt, Artificial Sequence
  Description of Artificial Sequence: Synthetic oligonucleotide
  Antisense strand to SEQ ID NO: 1485854
accaucacuaagauacaug

SEQ ID NO: 1485856 - RNA, 19 nt, Artificial Sequence
  Description of Artificial Sequence: Synthetic oligonucleotide
  Sense strand starting at position 3334 of SEQ ID NO: 1244401
guuagaaguggcugccauu

SEQ ID NO: 1485857 - RNA, 19 nt, Artificial Sequence
  Description of Artificial Sequence: Synthetic oligonucleotide
  Antisense strand to SEQ ID NO: 1485856
aauggcagccacuucuaac

SEQ ID NO: 1485858 - RNA, 19 nt, Artificial Sequence
  Description of Artificial Sequence: Synthetic oligonucleotide
  Sense strand starting at position 3347 of SEQ ID NO: 1244401
gccauuaagaucuguagga

SEQ ID NO: 1485859 - RNA, 19 nt, Artificial Sequence
  Description of Artificial Sequence: Synthetic oligonucleotide
  Antisense strand to SEQ ID NO: 1485858
uccuacagaucuuaauggc

SEQ ID NO: 1485860 - RNA, 19 nt, Artificial Sequence
  Description of Artificial Sequence: Synthetic oligonucleotide
  Sense strand starting at position 3348 of SEQ ID NO: 1244401
ccauuaagaucuguaggac

SEQ ID NO: 1485861 - RNA, 19 nt, Artificial Sequence
  Description of Artificial Sequence: Synthetic oligonucleotide
  Antisense strand to SEQ ID NO: 1485860
guccuacagaucuuaaugg

SEQ ID NO: 1485862 - RNA, 19 nt, Artificial Sequence
  Description of Artificial Sequence: Synthetic oligonucleotide
  Sense strand starting at position 3351 of SEQ ID NO: 1244401
uuaagaucuguaggacuuu

SEQ ID NO: 1485863 - RNA, 19 nt, Artificial Sequence
  Description of Artificial Sequence: Synthetic oligonucleotide
  Antisense strand to SEQ ID NO: 1485862
aaaguccuacagaucuuaa

SEQ ID NO: 1485864 - RNA, 19 nt, Artificial Sequence
  Description of Artificial Sequence: Synthetic oligonucleotide
  Sense strand starting at position 3352 of SEQ ID NO: 1244401
uaagaucuguaggacuuua

SEQ ID NO: 1485865 - RNA, 19 nt, Artificial Sequence
  Description of Artificial Sequence: Synthetic oligonucleotide
  Antisense strand to SEQ ID NO: 1485864
uaaaguccuacagaucuua

SEQ ID NO: 1485866 - RNA, 19 nt, Artificial Sequence
  Description of Artificial Sequence: Synthetic oligonucleotide
  Sense strand starting at position 3456 of SEQ ID NO: 1244401
cuuugaucccagcgugugu

SEQ ID NO: 1485867 - RNA, 19 nt, Artificial Sequence
  Description of Artificial Sequence: Synthetic oligonucleotide
  Antisense strand to SEQ ID NO: 1485866
acacacgcugggaucaaag

SEQ ID NO: 1485868 - RNA, 19 nt, Artificial Sequence
  Description of Artificial Sequence: Synthetic oligonucleotide
  Sense strand starting at position 3460 of SEQ ID NO: 1244401
gaucccagcguguguauau

SEQ ID NO: 1485869 - RNA, 19 nt, Artificial Sequence
  Description of Artificial Sequence: Synthetic oligonucleotide
  Antisense strand to SEQ ID NO: 1485868
auauacacacgcugggauc

SEQ ID NO: 1485870 - RNA, 19 nt, Artificial Sequence
  Description of Artificial Sequence: Synthetic oligonucleotide
  Sense strand starting at position 3467 of SEQ ID NO: 1244401
gcguguguauauguauacu

SEQ ID NO: 1485871 - RNA, 19 nt, Artificial Sequence
  Description of Artificial Sequence: Synthetic oligonucleotide
  Antisense strand to SEQ ID NO: 1485870
aguauacauauacacacgc

SEQ ID NO: 1485872 - RNA, 19 nt, Artificial Sequence
  Description of Artificial Sequence: Synthetic oligonucleotide
  Sense strand starting at position 80 of SEQ ID NO: 1244402
auuauugagggcuagcuau

SEQ ID NO: 1485873 - RNA, 19 nt, Artificial Sequence
  Description of Artificial Sequence: Synthetic oligonucleotide
  Antisense strand to SEQ ID NO: 1485872
auagcuagcccucaauaau

SEQ ID NO: 1485874 - RNA, 19 nt, Artificial Sequence
  Description of Artificial Sequence: Synthetic oligonucleotide
  Sense strand starting at position 205 of SEQ ID NO: 1244402
acuauucuugcagagacuu

SEQ ID NO: 1485875 - RNA, 19 nt, Artificial Sequence
  Description of Artificial Sequence: Synthetic oligonucleotide
  Antisense strand to SEQ ID NO: 1485874
aagucucugcaagaauagu

SEQ ID NO: 1485876 - RNA, 19 nt, Artificial Sequence
  Description of Artificial Sequence: Synthetic oligonucleotide
  Sense strand starting at position 292 of SEQ ID NO: 1244402
uaagcuagucuagggauua

SEQ ID NO: 1485877 - RNA, 19 nt, Artificial Sequence
  Description of Artificial Sequence: Synthetic oligonucleotide
  Antisense strand to SEQ ID NO: 1485876
uaaucccuagacuagcuua

SEQ ID NO: 1485878 - RNA, 19 nt, Artificial Sequence
  Description of Artificial Sequence: Synthetic oligonucleotide
  Sense strand starting at position 311 of SEQ ID NO: 1244402
ggguaaacuuuccugagga

SEQ ID NO: 1485879 - RNA, 19 nt, Artificial Sequence
  Description of Artificial Sequence: Synthetic oligonucleotide
  Antisense strand to SEQ ID NO: 1485878
uccucaggaaaguuuaccc

SEQ ID NO: 1485880 - RNA, 19 nt, Artificial Sequence
  Description of Artificial Sequence: Synthetic oligonucleotide
  Sense strand starting at position 433 of SEQ ID NO: 1244402
cugaaagacguucaguaug

SEQ ID NO: 1485881 - RNA, 19 nt, Artificial Sequence
  Description of Artificial Sequence: Synthetic oligonucleotide
  Antisense strand to SEQ ID NO: 1485880
cauacugaacgucuuucag

SEQ ID NO: 1485882 - RNA, 19 nt, Artificial Sequence
  Description of Artificial Sequence: Synthetic oligonucleotide
  Sense strand starting at position 444 of SEQ ID NO: 1244402
ucaguaugaccagagcauu

SEQ ID NO: 1485883 - RNA, 19 nt, Artificial Sequence
  Description of Artificial Sequence: Synthetic oligonucleotide
  Antisense strand to SEQ ID NO: 1485882
aaugcucuggucauacuga

SEQ ID NO: 1485884 - RNA, 19 nt, Artificial Sequence
  Description of Artificial Sequence: Synthetic oligonucleotide
  Sense strand starting at position 580 of SEQ ID NO: 1244402
gcagaauggaucggacaga

SEQ ID NO: 1485885 - RNA, 19 nt, Artificial Sequence
  Description of Artificial Sequence: Synthetic oligonucleotide
  Antisense strand to SEQ ID NO: 1485884
ucuguccgauccauucugc

SEQ ID NO: 1485886 - RNA, 19 nt, Artificial Sequence
  Description of Artificial Sequence: Synthetic oligonucleotide
  Sense strand starting at position 674 of SEQ ID NO: 1244402
cagagaggugcaugaaucu

SEQ ID NO: 1485887 - RNA, 19 nt, Artificial Sequence
  Description of Artificial Sequence: Synthetic oligonucleotide
  Antisense strand to SEQ ID NO: 1485886
agauucaugcaccucucug

SEQ ID NO: 1485888 - RNA, 19 nt, Artificial Sequence
  Description of Artificial Sequence: Synthetic oligonucleotide
  Sense strand starting at position 680 of SEQ ID NO: 1244402
ggugcaugaaucugagaaa

SEQ ID NO: 1485889 - RNA, 19 nt, Artificial Sequence
  Description of Artificial Sequence: Synthetic oligonucleotide
  Antisense strand to SEQ ID NO: 1485888
uuucucagauucaugcacc

SEQ ID NO: 1485890 - RNA, 19 nt, Artificial Sequence
  Description of Artificial Sequence: Synthetic oligonucleotide
  Sense strand starting at position 800 of SEQ ID NO: 1244402
gaaugaaggguaugauggu

SEQ ID NO: 1485891 - RNA, 19 nt, Artificial Sequence
  Description of Artificial Sequence: Synthetic oligonucleotide
  Antisense strand to SEQ ID NO: 1485890
accaucauacccuucauuc

SEQ ID NO: 1485892 - RNA, 19 nt, Artificial Sequence
  Description of Artificial Sequence: Synthetic oligonucleotide
  Sense strand starting at position 855 of SEQ ID NO: 1244402
cuagucauccgguagagga

SEQ ID NO: 1485893 - RNA, 19 nt, Artificial Sequence
  Description of Artificial Sequence: Synthetic oligonucleotide
  Antisense strand to SEQ ID NO: 1485892
uccucuaccggaugacuag

SEQ ID NO: 1485894 - RNA, 19 nt, Artificial Sequence
  Description of Artificial Sequence: Synthetic oligonucleotide
  Sense strand starting at position 960 of SEQ ID NO: 1244402
ccaaaucugugucuuagga

SEQ ID NO: 1485895 - RNA, 19 nt, Artificial Sequence
  Description of Artificial Sequence: Synthetic oligonucleotide
  Antisense strand to SEQ ID NO: 1485894
uccuaagacacagauuugg

SEQ ID NO: 1485896 - RNA, 19 nt, Artificial Sequence
  Description of Artificial Sequence: Synthetic oligonucleotide
  Sense strand starting at position 1023 of SEQ ID NO: 1244402
ugaaucugaucaccuaugu

SEQ ID NO: 1485897 - RNA, 19 nt, Artificial Sequence
  Description of Artificial Sequence: Synthetic oligonucleotide
  Antisense strand to SEQ ID NO: 1485896
acauaggugaucagauuca

SEQ ID NO: 1485898 - RNA, 19 nt, Artificial Sequence
  Description of Artificial Sequence: Synthetic oligonucleotide
  Sense strand starting at position 1709 of SEQ ID NO: 1244402
uccuguaaccuguagaaga

SEQ ID NO: 1485899 - RNA, 19 nt, Artificial Sequence
  Description of Artificial Sequence: Synthetic oligonucleotide
  Antisense strand to SEQ ID NO: 1485898
ucuucuacagguuacagga

SEQ ID NO: 1485900 - RNA, 19 nt, Artificial Sequence
  Description of Artificial Sequence: Synthetic oligonucleotide
  Sense strand starting at position 2081 of SEQ ID NO: 1244402
gacauuugucagcagugcu

SEQ ID NO: 1485901 - RNA, 19 nt, Artificial Sequence
  Description of Artificial Sequence: Synthetic oligonucleotide
  Antisense strand to SEQ ID NO: 1485900
agcacugcugacaaauguc

SEQ ID NO: 1485902 - RNA, 19 nt, Artificial Sequence
  Description of Artificial Sequence: Synthetic oligonucleotide
  Sense strand starting at position 2084 of SEQ ID NO: 1244402
auuugucagcagugcuaca

SEQ ID NO: 1485903 - RNA, 19 nt, Artificial Sequence
  Description of Artificial Sequence: Synthetic oligonucleotide
  Antisense strand to SEQ ID NO: 1485902
uguagcacugcugacaaau

SEQ ID NO: 1485904 - RNA, 19 nt, Artificial Sequence
  Description of Artificial Sequence: Synthetic oligonucleotide
  Sense strand starting at position 2155 of SEQ ID NO: 1244402
uaaguuacgcggucugagu

SEQ ID NO: 1485905 - RNA, 19 nt, Artificial Sequence
  Description of Artificial Sequence: Synthetic oligonucleotide
  Antisense strand to SEQ ID NO: 1485904
acucagaccgcguaacuua

SEQ ID NO: 1485906 - RNA, 19 nt, Artificial Sequence
  Description of Artificial Sequence: Synthetic oligonucleotide
  Sense strand starting at position 2189 of SEQ ID NO: 1244402
gcacuugggaauugguuaa

SEQ ID NO: 1485907 - RNA, 19 nt, Artificial Sequence
  Description of Artificial Sequence: Synthetic oligonucleotide
  Antisense strand to SEQ ID NO: 1485906
uuaaccaauucccaagugc

SEQ ID NO: 1485908 - RNA, 19 nt, Artificial Sequence
  Description of Artificial Sequence: Synthetic oligonucleotide
  Sense strand starting at position 2193 of SEQ ID NO: 1244402
uugggaauugguuaauggu

SEQ ID NO: 1485909 - RNA, 19 nt, Artificial Sequence
  Description of Artificial Sequence: Synthetic oligonucleotide
  Antisense strand to SEQ ID NO: 1485908
accauuaaccaauucccaa

SEQ ID NO: 1485910 - RNA, 19 nt, Artificial Sequence
  Description of Artificial Sequence: Synthetic oligonucleotide
  Sense strand starting at position 2206 of SEQ ID NO: 1244402
aauggucaguuccuugaaa

SEQ ID NO: 1485911 - RNA, 19 nt, Artificial Sequence
  Description of Artificial Sequence: Synthetic oligonucleotide
  Antisense strand to SEQ ID NO: 1485910
uuucaaggaacugaccauu

SEQ ID NO: 1485912 - RNA, 19 nt, Artificial Sequence
  Description of Artificial Sequence: Synthetic oligonucleotide
  Sense strand starting at position 2338 of SEQ ID NO: 1244402
ccuuucuuugaguauuauc

SEQ ID NO: 1485913 - RNA, 19 nt, Artificial Sequence
  Description of Artificial Sequence: Synthetic oligonucleotide
  Antisense strand to SEQ ID NO: 1485912
gauaauacucaaagaaagg

SEQ ID NO: 1485914 - RNA, 19 nt, Artificial Sequence
  Description of Artificial Sequence: Synthetic oligonucleotide
  Sense strand starting at position 2349 of SEQ ID NO: 1244402
guauuaucuguuuauugga

SEQ ID NO: 1485915 - RNA, 19 nt, Artificial Sequence
  Description of Artificial Sequence: Synthetic oligonucleotide
  Antisense strand to SEQ ID NO: 1485914
uccaauaaacagauaauac

SEQ ID NO: 1485916 - RNA, 19 nt, Artificial Sequence
  Description of Artificial Sequence: Synthetic oligonucleotide
  Sense strand starting at position 2455 of SEQ ID NO: 1244402
acucaaaggugcucaugaa

SEQ ID NO: 1485917 - RNA, 19 nt, Artificial Sequence
  Description of Artificial Sequence: Synthetic oligonucleotide
  Antisense strand to SEQ ID NO: 1485916
uucaugagcaccuuugagu

SEQ ID NO: 1485918 - RNA, 19 nt, Artificial Sequence
  Description of Artificial Sequence: Synthetic oligonucleotide
  Sense strand starting at position 2484 of SEQ ID NO: 1244402
cgcagaauccuagauaugu

SEQ ID NO: 1485919 - RNA, 19 nt, Artificial Sequence
  Description of Artificial Sequence: Synthetic oligonucleotide
  Antisense strand to SEQ ID NO: 1485918
acauaucuaggauucugcg

SEQ ID NO: 1485920 - RNA, 19 nt, Artificial Sequence
  Description of Artificial Sequence: Synthetic oligonucleotide
  Sense strand starting at position 2722 of SEQ ID NO: 1244402
uugguaagccuauaacugu

SEQ ID NO: 1485921 - RNA, 19 nt, Artificial Sequence
  Description of Artificial Sequence: Synthetic oligonucleotide
  Antisense strand to SEQ ID NO: 1485920
acaguuauaggcuuaccaa

SEQ ID NO: 1485922 - RNA, 19 nt, Artificial Sequence
  Description of Artificial Sequence: Synthetic oligonucleotide
  Sense strand starting at position 2728 of SEQ ID NO: 1244402
agccuauaacuguauagag

SEQ ID NO: 1485923 - RNA, 19 nt, Artificial Sequence
  Description of Artificial Sequence: Synthetic oligonucleotide
  Antisense strand to SEQ ID NO: 1485922
cucuauacaguuauaggcu

SEQ ID NO: 1485924 - RNA, 19 nt, Artificial Sequence
  Description of Artificial Sequence: Synthetic oligonucleotide
  Sense strand starting at position 2803 of SEQ ID NO: 1244402
ggcaguagcacguuagcua

SEQ ID NO: 1485925 - RNA, 19 nt, Artificial Sequence
  Description of Artificial Sequence: Synthetic oligonucleotide
  Antisense strand to SEQ ID NO: 1485924
uagcuaacgugcuacugcc

SEQ ID NO: 1485926 - RNA, 19 nt, Artificial Sequence
  Description of Artificial Sequence: Synthetic oligonucleotide
  Sense strand starting at position 2836 of SEQ ID NO: 1244402
ggcuuccaccaauauguuu

SEQ ID NO: 1485927 - RNA, 19 nt, Artificial Sequence
  Description of Artificial Sequence: Synthetic oligonucleotide
  Antisense strand to SEQ ID NO: 1485926
aaacauauugguggaagcc

SEQ ID NO: 1485928 - RNA, 19 nt, Artificial Sequence
  Description of Artificial Sequence: Synthetic oligonucleotide
  Sense strand starting at position 2866 of SEQ ID NO: 1244402
cagagaguaucagucaauu

SEQ ID NO: 1485929 - RNA, 19 nt, Artificial Sequence
  Description of Artificial Sequence: Synthetic oligonucleotide
  Antisense strand to SEQ ID NO: 1485928
aauugacugauacucucug

SEQ ID NO: 1485930 - RNA, 19 nt, Artificial Sequence
  Description of Artificial Sequence: Synthetic oligonucleotide
  Sense strand starting at position 2896 of SEQ ID NO: 1244402
ggcuaaauauacguuaaga

SEQ ID NO: 1485931 - RNA, 19 nt, Artificial Sequence
  Description of Artificial Sequence: Synthetic oligonucleotide
  Antisense strand to SEQ ID NO: 1485930
ucuuaacguauauuuagcc

SEQ ID NO: 1485932 - RNA, 19 nt, Artificial Sequence
  Description of Artificial Sequence: Synthetic oligonucleotide
  Sense strand starting at position 3008 of SEQ ID NO: 1244402
agaucagaguacucuuaua

SEQ ID NO: 1485933 - RNA, 19 nt, Artificial Sequence
  Description of Artificial Sequence: Synthetic oligonucleotide
  Antisense strand to SEQ ID NO: 1485932
uauaagaguacucugaucu

SEQ ID NO: 1485934 - RNA, 19 nt, Artificial Sequence
  Description of Artificial Sequence: Synthetic oligonucleotide
  Sense strand starting at position 3056 of SEQ ID NO: 1244402
gcaguagcugaagacauaa

SEQ ID NO: 1485935 - RNA, 19 nt, Artificial Sequence
  Description of Artificial Sequence: Synthetic oligonucleotide
  Antisense strand to SEQ ID NO: 1485934
uuaugucuucagcuacugc

SEQ ID NO: 1485936 - RNA, 19 nt, Artificial Sequence
  Description of Artificial Sequence: Synthetic oligonucleotide
  Sense strand starting at position 3077 of SEQ ID NO: 1244402
auaguuggcggauagguaa

SEQ ID NO: 1485937 - RNA, 19 nt, Artificial Sequence
  Description of Artificial Sequence: Synthetic oligonucleotide
  Antisense strand to SEQ ID NO: 1485936
uuaccuauccgccaacuau

SEQ ID NO: 1485938 - RNA, 19 nt, Artificial Sequence
  Description of Artificial Sequence: Synthetic oligonucleotide
  Sense strand starting at position 3114 of SEQ ID NO: 1244402
aagagaccugagcauguuu

SEQ ID NO: 1485939 - RNA, 19 nt, Artificial Sequence
  Description of Artificial Sequence: Synthetic oligonucleotide
  Antisense strand to SEQ ID NO: 1485938
aaacaugcucaggucucuu

SEQ ID NO: 1485940 - RNA, 19 nt, Artificial Sequence
  Description of Artificial Sequence: Synthetic oligonucleotide
  Sense strand starting at position 3167 of SEQ ID NO: 1244402
gagggaaguugaucaguca

SEQ ID NO: 1485941 - RNA, 19 nt, Artificial Sequence
  Description of Artificial Sequence: Synthetic oligonucleotide
  Antisense strand to SEQ ID NO: 1485940
ugacugaucaacuucccuc

SEQ ID NO: 1485942 - RNA, 19 nt, Artificial Sequence
  Description of Artificial Sequence: Synthetic oligonucleotide
  Sense strand starting at position 3425 of SEQ ID NO: 1244402
gaguuaaagguuuauguau

SEQ ID NO: 1485943 - RNA, 19 nt, Artificial Sequence
  Description of Artificial Sequence: Synthetic oligonucleotide
  Antisense strand to SEQ ID NO: 1485942
auacauaaaccuuuaacuc

SEQ ID NO: 1485944 - RNA, 19 nt, Artificial Sequence
  Description of Artificial Sequence: Synthetic oligonucleotide
  Sense strand starting at position 3431 of SEQ ID NO: 1244402
aagguuuauguaugaugga

SEQ ID NO: 1485945 - RNA, 19 nt, Artificial Sequence
  Description of Artificial Sequence: Synthetic oligonucleotide
  Antisense strand to SEQ ID NO: 1485944
uccaucauacauaaaccuu

SEQ ID NO: 1485946 - RNA, 19 nt, Artificial Sequence
  Description of Artificial Sequence: Synthetic oligonucleotide
  Sense strand starting at position 3500 of SEQ ID NO: 1244402
agcacaauaggguaguaau

SEQ ID NO: 1485947 - RNA, 19 nt, Artificial Sequence
  Description of Artificial Sequence: Synthetic oligonucleotide
  Antisense strand to SEQ ID NO: 1485946
auuacuacccuauugugcu

SEQ ID NO: 1485948 - RNA, 19 nt, Artificial Sequence
  Description of Artificial Sequence: Synthetic oligonucleotide
  Sense strand starting at position 3526 of SEQ ID NO: 1244402
ugagguccuagcugagaua

SEQ ID NO: 1485949 - RNA, 19 nt, Artificial Sequence
  Description of Artificial Sequence: Synthetic oligonucleotide
  Antisense strand to SEQ ID NO: 1485948
uaucucagcuaggaccuca

SEQ ID NO: 1485950 - RNA, 19 nt, Artificial Sequence
  Description of Artificial Sequence: Synthetic oligonucleotide
  Sense strand starting at position 3574 of SEQ ID NO: 1244402
gcagguuaaaugggaggaa

SEQ ID NO: 1485951 - RNA, 19 nt, Artificial Sequence
  Description of Artificial Sequence: Synthetic oligonucleotide
  Antisense strand to SEQ ID NO: 1485950
uuccucccauuuaaccugc

SEQ ID NO: 1485952 - RNA, 19 nt, Artificial Sequence
  Description of Artificial Sequence: Synthetic oligonucleotide
  Sense strand starting at position 99 of SEQ ID NO: 1244403
gguugcuauuucuuuguau

SEQ ID NO: 1485953 - RNA, 19 nt, Artificial Sequence
  Description of Artificial Sequence: Synthetic oligonucleotide
  Antisense strand to SEQ ID NO: 1485952
auacaaagaaauagcaacc

SEQ ID NO: 1485954 - RNA, 19 nt, Artificial Sequence
  Description of Artificial Sequence: Synthetic oligonucleotide
  Sense strand starting at position 100 of SEQ ID NO: 1244403
guugcuauuucuuuguauu

SEQ ID NO: 1485955 - RNA, 19 nt, Artificial Sequence
  Description of Artificial Sequence: Synthetic oligonucleotide
  Antisense strand to SEQ ID NO: 1485954
aauacaaagaaauagcaac

SEQ ID NO: 1485956 - RNA, 19 nt, Artificial Sequence
  Description of Artificial Sequence: Synthetic oligonucleotide
  Sense strand starting at position 755 of SEQ ID NO: 1244403
cggguauuuggguggcaua

SEQ ID NO: 1485957 - RNA, 19 nt, Artificial Sequence
  Description of Artificial Sequence: Synthetic oligonucleotide
  Antisense strand to SEQ ID NO: 1485956
uaugccacccaaauacccg

SEQ ID NO: 1485958 - RNA, 19 nt, Artificial Sequence
  Description of Artificial Sequence: Synthetic oligonucleotide
  Sense strand starting at position 869 of SEQ ID NO: 1244403
ggaggacagcugugugaac

SEQ ID NO: 1485959 - RNA, 19 nt, Artificial Sequence
  Description of Artificial Sequence: Synthetic oligonucleotide
  Antisense strand to SEQ ID NO: 1485958
guucacacagcuguccucc

SEQ ID NO: 1485960 - RNA, 19 nt, Artificial Sequence
  Description of Artificial Sequence: Synthetic oligonucleotide
  Sense strand starting at position 1036 of SEQ ID NO: 1244403
ugcccaucaucgugcaaau

SEQ ID NO: 1485961 - RNA, 19 nt, Artificial Sequence
  Description of Artificial Sequence: Synthetic oligonucleotide
  Antisense strand to SEQ ID NO: 1485960
auuugcacgaugaugggca

SEQ ID NO: 1485962 - RNA, 19 nt, Artificial Sequence
  Description of Artificial Sequence: Synthetic oligonucleotide
  Sense strand starting at position 1045 of SEQ ID NO: 1244403
ucgugcaaauccucacaau

SEQ ID NO: 1485963 - RNA, 19 nt, Artificial Sequence
  Description of Artificial Sequence: Synthetic oligonucleotide
  Antisense strand to SEQ ID NO: 1485962
auugugaggauuugcacga

SEQ ID NO: 1485964 - RNA, 19 nt, Artificial Sequence
  Description of Artificial Sequence: Synthetic oligonucleotide
  Sense strand starting at position 1046 of SEQ ID NO: 1244403
cgugcaaauccucacaaua

SEQ ID NO: 1485965 - RNA, 19 nt, Artificial Sequence
  Description of Artificial Sequence: Synthetic oligonucleotide
  Antisense strand to SEQ ID NO: 1485964
uauugugaggauuugcacg

SEQ ID NO: 1485966 - RNA, 19 nt, Artificial Sequence
  Description of Artificial Sequence: Synthetic oligonucleotide
  Sense strand starting at position 2054 of SEQ ID NO: 1244403
ccagauauuuaacguaagu

SEQ ID NO: 1485967 - RNA, 19 nt, Artificial Sequence
  Description of Artificial Sequence: Synthetic oligonucleotide
  Antisense strand to SEQ ID NO: 1485966
acuuacguuaaauaucugg

SEQ ID NO: 1485968 - RNA, 19 nt, Artificial Sequence
  Description of Artificial Sequence: Synthetic oligonucleotide
  Sense strand starting at position 2075 of SEQ ID NO: 1244403
ggauuuccaucauaguugu

SEQ ID NO: 1485969 - RNA, 19 nt, Artificial Sequence
  Description of Artificial Sequence: Synthetic oligonucleotide
  Antisense strand to SEQ ID NO: 1485968
acaacuaugauggaaaucc

SEQ ID NO: 1485970 - RNA, 19 nt, Artificial Sequence
  Description of Artificial Sequence: Synthetic oligonucleotide
  Sense strand starting at position 2078 of SEQ ID NO: 1244403
uuuccaucauaguugugau

SEQ ID NO: 1485971 - RNA, 19 nt, Artificial Sequence
  Description of Artificial Sequence: Synthetic oligonucleotide
  Antisense strand to SEQ ID NO: 1485970
aucacaacuaugauggaaa

SEQ ID NO: 1485972 - RNA, 19 nt, Artificial Sequence
  Description of Artificial Sequence: Synthetic oligonucleotide
  Sense strand starting at position 2081 of SEQ ID NO: 1244403
ccaucauaguugugaugcu

SEQ ID NO: 1485973 - RNA, 19 nt, Artificial Sequence
  Description of Artificial Sequence: Synthetic oligonucleotide
  Antisense strand to SEQ ID NO: 1485972
agcaucacaacuaugaugg

SEQ ID NO: 1485974 - RNA, 19 nt, Artificial Sequence
  Description of Artificial Sequence: Synthetic oligonucleotide
  Sense strand starting at position 2091 of SEQ ID NO: 1244403
ugugaugcugcgaaguagu

SEQ ID NO: 1485975 - RNA, 19 nt, Artificial Sequence
  Description of Artificial Sequence: Synthetic oligonucleotide
  Antisense strand to SEQ ID NO: 1485974
acuacuucgcagcaucaca

SEQ ID NO: 1485976 - RNA, 19 nt, Artificial Sequence
  Description of Artificial Sequence: Synthetic oligonucleotide
  Sense strand starting at position 2102 of SEQ ID NO: 1244403
gaaguagugcaguaaguag

SEQ ID NO: 1485977 - RNA, 19 nt, Artificial Sequence
  Description of Artificial Sequence: Synthetic oligonucleotide
  Antisense strand to SEQ ID NO: 1485976
cuacuuacugcacuacuuc

SEQ ID NO: 1485978 - RNA, 19 nt, Artificial Sequence
  Description of Artificial Sequence: Synthetic oligonucleotide
  Sense strand starting at position 2122 of SEQ ID NO: 1244403
gaaguagcgaaguaagguu

SEQ ID NO: 1485979 - RNA, 19 nt, Artificial Sequence
  Description of Artificial Sequence: Synthetic oligonucleotide
  Antisense strand to SEQ ID NO: 1485978
aaccuuacuucgcuacuuc

SEQ ID NO: 1485980 - RNA, 19 nt, Artificial Sequence
  Description of Artificial Sequence: Synthetic oligonucleotide
  Sense strand starting at position 2131 of SEQ ID NO: 1244403
aaguaagguuuccaaagga

SEQ ID NO: 1485981 - RNA, 19 nt, Artificial Sequence
  Description of Artificial Sequence: Synthetic oligonucleotide
  Antisense strand to SEQ ID NO: 1485980
uccuuuggaaaccuuacuu

SEQ ID NO: 1485982 - RNA, 19 nt, Artificial Sequence
  Description of Artificial Sequence: Synthetic oligonucleotide
  Sense strand starting at position 2161 of SEQ ID NO: 1244403
aucugaaacucagggauga

SEQ ID NO: 1485983 - RNA, 19 nt, Artificial Sequence
  Description of Artificial Sequence: Synthetic oligonucleotide
  Antisense strand to SEQ ID NO: 1485982
ucaucccugaguuucagau

SEQ ID NO: 1485984 - RNA, 19 nt, Artificial Sequence
  Description of Artificial Sequence: Synthetic oligonucleotide
  Sense strand starting at position 2236 of SEQ ID NO: 1244403
uauugaaggcccugagaag

SEQ ID NO: 1485985 - RNA, 19 nt, Artificial Sequence
  Description of Artificial Sequence: Synthetic oligonucleotide
  Antisense strand to SEQ ID NO: 1485984
cuucucagggccuucaaua

SEQ ID NO: 1485986 - RNA, 19 nt, Artificial Sequence
  Description of Artificial Sequence: Synthetic oligonucleotide
  Sense strand starting at position 2411 of SEQ ID NO: 1244403
gucagaaguuuccaaccag

SEQ ID NO: 1485987 - RNA, 19 nt, Artificial Sequence
  Description of Artificial Sequence: Synthetic oligonucleotide
  Antisense strand to SEQ ID NO: 1485986
cugguuggaaacuucugac

SEQ ID NO: 1485988 - RNA, 19 nt, Artificial Sequence
  Description of Artificial Sequence: Synthetic oligonucleotide
  Sense strand starting at position 2496 of SEQ ID NO: 1244403
agguuaggccuucgucaca

SEQ ID NO: 1485989 - RNA, 19 nt, Artificial Sequence
  Description of Artificial Sequence: Synthetic oligonucleotide
  Antisense strand to SEQ ID NO: 1485988
ugugacgaaggccuaaccu

SEQ ID NO: 1485990 - RNA, 19 nt, Artificial Sequence
  Description of Artificial Sequence: Synthetic oligonucleotide
  Sense strand starting at position 2617 of SEQ ID NO: 1244403
gaaggugaccucugaucgu

SEQ ID NO: 1485991 - RNA, 19 nt, Artificial Sequence
  Description of Artificial Sequence: Synthetic oligonucleotide
  Antisense strand to SEQ ID NO: 1485990
acgaucagaggucaccuuc

SEQ ID NO: 1485992 - RNA, 19 nt, Artificial Sequence
  Description of Artificial Sequence: Synthetic oligonucleotide
  Sense strand starting at position 2664 of SEQ ID NO: 1244403
augcauuaguaugcuaaag

SEQ ID NO: 1485993 - RNA, 19 nt, Artificial Sequence
  Description of Artificial Sequence: Synthetic oligonucleotide
  Antisense strand to SEQ ID NO: 1485992
cuuuagcauacuaaugcau

SEQ ID NO: 1485994 - RNA, 19 nt, Artificial Sequence
  Description of Artificial Sequence: Synthetic oligonucleotide
  Sense strand starting at position 2666 of SEQ ID NO: 1244403
gcauuaguaugcuaaagac

SEQ ID NO: 1485995 - RNA, 19 nt, Artificial Sequence
  Description of Artificial Sequence: Synthetic oligonucleotide
  Antisense strand to SEQ ID NO: 1485994
gucuuuagcauacuaaugc

SEQ ID NO: 1485996 - RNA, 19 nt, Artificial Sequence
  Description of Artificial Sequence: Synthetic oligonucleotide
  Sense strand starting at position 2746 of SEQ ID NO: 1244403
ggucuaaacaguggaggaa

SEQ ID NO: 1485997 - RNA, 19 nt, Artificial Sequence
  Description of Artificial Sequence: Synthetic oligonucleotide
  Antisense strand to SEQ ID NO: 1485996
uuccuccacuguuuagacc

SEQ ID NO: 1485998 - RNA, 19 nt, Artificial Sequence
  Description of Artificial Sequence: Synthetic oligonucleotide
  Sense strand starting at position 3508 of SEQ ID NO: 1244403
ggaaucagauaucaacuuu

SEQ ID NO: 1485999 - RNA, 19 nt, Artificial Sequence
  Description of Artificial Sequence: Synthetic oligonucleotide
  Antisense strand to SEQ ID NO: 1485998
aaaguugauaucugauucc

SEQ ID NO: 1486000 - RNA, 19 nt, Artificial Sequence
  Description of Artificial Sequence: Synthetic oligonucleotide
  Sense strand starting at position 3524 of SEQ ID NO: 1244403
uuuagauacuagggaagua

SEQ ID NO: 1486001 - RNA, 19 nt, Artificial Sequence
  Description of Artificial Sequence: Synthetic oligonucleotide
  Antisense strand to SEQ ID NO: 1486000
uacuucccuaguaucuaaa

SEQ ID NO: 1486002 - RNA, 19 nt, Artificial Sequence
  Description of Artificial Sequence: Synthetic oligonucleotide
  Sense strand starting at position 3654 of SEQ ID NO: 1244403
caguuaaccuuuguaggga

SEQ ID NO: 1486003 - RNA, 19 nt, Artificial Sequence
  Description of Artificial Sequence: Synthetic oligonucleotide
  Antisense strand to SEQ ID NO: 1486002
ucccuacaaagguuaacug

SEQ ID NO: 1486004 - RNA, 19 nt, Artificial Sequence
  Description of Artificial Sequence: Synthetic oligonucleotide
  Sense strand starting at position 3655 of SEQ ID NO: 1244403
aguuaaccuuuguagggau

SEQ ID NO: 1486005 - RNA, 19 nt, Artificial Sequence
  Description of Artificial Sequence: Synthetic oligonucleotide
  Antisense strand to SEQ ID NO: 1486004
aucccuacaaagguuaacu

SEQ ID NO: 1486006 - RNA, 19 nt, Artificial Sequence
  Description of Artificial Sequence: Synthetic oligonucleotide
  Sense strand starting at position 3745 of SEQ ID NO: 1244403
agagauuucuuguuugcuu

SEQ ID NO: 1486007 - RNA, 19 nt, Artificial Sequence
  Description of Artificial Sequence: Synthetic oligonucleotide
  Antisense strand to SEQ ID NO: 1486006
aagcaaacaagaaaucucu

SEQ ID NO: 1486008 - RNA, 19 nt, Artificial Sequence
  Description of Artificial Sequence: Synthetic oligonucleotide
  Sense strand starting at position 3746 of SEQ ID NO: 1244403
gagauuucuuguuugcuuu

SEQ ID NO: 1486009 - RNA, 19 nt, Artificial Sequence
  Description of Artificial Sequence: Synthetic oligonucleotide
  Antisense strand to SEQ ID NO: 1486008
aaagcaaacaagaaaucuc

SEQ ID NO: 1486010 - RNA, 19 nt, Artificial Sequence
  Description of Artificial Sequence: Synthetic oligonucleotide
  Sense strand starting at position 3767 of SEQ ID NO: 1244403
uucugaucauuaggagagu

SEQ ID NO: 1486011 - RNA, 19 nt, Artificial Sequence
  Description of Artificial Sequence: Synthetic oligonucleotide
  Antisense strand to SEQ ID NO: 1486010
acucuccuaaugaucagaa

SEQ ID NO: 1486012 - RNA, 19 nt, Artificial Sequence
  Description of Artificial Sequence: Synthetic oligonucleotide
  Sense strand starting at position 3858 of SEQ ID NO: 1244403
aggaguucccucuaaaugc

SEQ ID NO: 1486013 - RNA, 19 nt, Artificial Sequence
  Description of Artificial Sequence: Synthetic oligonucleotide
  Antisense strand to SEQ ID NO: 1486012
gcauuuagagggaacuccu

SEQ ID NO: 1486014 - RNA, 19 nt, Artificial Sequence
  Description of Artificial Sequence: Synthetic oligonucleotide
  Sense strand starting at position 3948 of SEQ ID NO: 1244403
guaaucgcaucuuaaguaa

SEQ ID NO: 1486015 - RNA, 19 nt, Artificial Sequence
  Description of Artificial Sequence: Synthetic oligonucleotide
  Antisense strand to SEQ ID NO: 1486014
uuacuuaagaugcgauuac

SEQ ID NO: 1486016 - RNA, 19 nt, Artificial Sequence
  Description of Artificial Sequence: Synthetic oligonucleotide
  Sense strand starting at position 133 of SEQ ID NO: 1244404
ggaccuguguccggaguca

SEQ ID NO: 1486017 - RNA, 19 nt, Artificial Sequence
  Description of Artificial Sequence: Synthetic oligonucleotide
  Antisense strand to SEQ ID NO: 1486016
ugacuccggacacaggucc

SEQ ID NO: 1486018 - RNA, 19 nt, Artificial Sequence
  Description of Artificial Sequence: Synthetic oligonucleotide
  Sense strand starting at position 2248 of SEQ ID NO: 1244404
gcggguugucuuuaaucug

SEQ ID NO: 1486019 - RNA, 19 nt, Artificial Sequence
  Description of Artificial Sequence: Synthetic oligonucleotide
  Antisense strand to SEQ ID NO: 1486018
cagauuaaagacaacccgc

SEQ ID NO: 1486020 - RNA, 19 nt, Artificial Sequence
  Description of Artificial Sequence: Synthetic oligonucleotide
  Sense strand starting at position 2256 of SEQ ID NO: 1244404
ucuuuaaucugcugccaag

SEQ ID NO: 1486021 - RNA, 19 nt, Artificial Sequence
  Description of Artificial Sequence: Synthetic oligonucleotide
  Antisense strand to SEQ ID NO: 1486020
cuuggcagcagauuaaaga

SEQ ID NO: 1486022 - RNA, 19 nt, Artificial Sequence
  Description of Artificial Sequence: Synthetic oligonucleotide
  Sense strand starting at position 2259 of SEQ ID NO: 1244404
uuaaucugcugccaaggua

SEQ ID NO: 1486023 - RNA, 19 nt, Artificial Sequence
  Description of Artificial Sequence: Synthetic oligonucleotide
  Antisense strand to SEQ ID NO: 1486022
uaccuuggcagcagauuaa

SEQ ID NO: 1486024 - RNA, 19 nt, Artificial Sequence
  Description of Artificial Sequence: Synthetic oligonucleotide
  Sense strand starting at position 2320 of SEQ ID NO: 1244404
uuggcauucugaccagaga

SEQ ID NO: 1486025 - RNA, 19 nt, Artificial Sequence
  Description of Artificial Sequence: Synthetic oligonucleotide
  Antisense strand to SEQ ID NO: 1486024
ucucuggucagaaugccaa

SEQ ID NO: 1486026 - RNA, 19 nt, Artificial Sequence
  Description of Artificial Sequence: Synthetic oligonucleotide
  Sense strand starting at position 2461 of SEQ ID NO: 1244404
ccuguugccugagcucaaa

SEQ ID NO: 1486027 - RNA, 19 nt, Artificial Sequence
  Description of Artificial Sequence: Synthetic oligonucleotide
  Antisense strand to SEQ ID NO: 1486026
uuugagcucaggcaacagg

SEQ ID NO: 1486028 - RNA, 19 nt, Artificial Sequence
  Description of Artificial Sequence: Synthetic oligonucleotide
  Sense strand starting at position 2535 of SEQ ID NO: 1244404
ggguaccagcuugaggaau

SEQ ID NO: 1486029 - RNA, 19 nt, Artificial Sequence
  Description of Artificial Sequence: Synthetic oligonucleotide
  Antisense strand to SEQ ID NO: 1486028
auuccucaagcugguaccc

SEQ ID NO: 1486030 - RNA, 19 nt, Artificial Sequence
  Description of Artificial Sequence: Synthetic oligonucleotide
  Sense strand starting at position 2546 of SEQ ID NO: 1244404
ugaggaauucugugauauc

SEQ ID NO: 1486031 - RNA, 19 nt, Artificial Sequence
  Description of Artificial Sequence: Synthetic oligonucleotide
  Antisense strand to SEQ ID NO: 1486030
gauaucacagaauuccuca

SEQ ID NO: 1486032 - RNA, 19 nt, Artificial Sequence
  Description of Artificial Sequence: Synthetic oligonucleotide
  Sense strand starting at position 2547 of SEQ ID NO: 1244404
gaggaauucugugauaucc

SEQ ID NO: 1486033 - RNA, 19 nt, Artificial Sequence
  Description of Artificial Sequence: Synthetic oligonucleotide
  Antisense strand to SEQ ID NO: 1486032
ggauaucacagaauuccuc

SEQ ID NO: 1486034 - RNA, 19 nt, Artificial Sequence
  Description of Artificial Sequence: Synthetic oligonucleotide
  Sense strand starting at position 2549 of SEQ ID NO: 1244404
ggaauucugugauauccuc

SEQ ID NO: 1486035 - RNA, 19 nt, Artificial Sequence
  Description of Artificial Sequence: Synthetic oligonucleotide
  Antisense strand to SEQ ID NO: 1486034
gaggauaucacagaauucc

SEQ ID NO: 1486036 - RNA, 19 nt, Artificial Sequence
  Description of Artificial Sequence: Synthetic oligonucleotide
  Sense strand starting at position 2590 of SEQ ID NO: 1244404
auacuuuaguguuaaugcu

SEQ ID NO: 1486037 - RNA, 19 nt, Artificial Sequence
  Description of Artificial Sequence: Synthetic oligonucleotide
  Antisense strand to SEQ ID NO: 1486036
agcauuaacacuaaaguau

SEQ ID NO: 1486038 - RNA, 19 nt, Artificial Sequence
  Description of Artificial Sequence: Synthetic oligonucleotide
  Sense strand starting at position 2869 of SEQ ID NO: 1244404
ugcccagacuguucgugaa

SEQ ID NO: 1486039 - RNA, 19 nt, Artificial Sequence
  Description of Artificial Sequence: Synthetic oligonucleotide
  Antisense strand to SEQ ID NO: 1486038
uucacgaacagucugggca

SEQ ID NO: 1486040 - RNA, 19 nt, Artificial Sequence
  Description of Artificial Sequence: Synthetic oligonucleotide
  Sense strand starting at position 2871 of SEQ ID NO: 1244404
cccagacuguucgugaacu

SEQ ID NO: 1486041 - RNA, 19 nt, Artificial Sequence
  Description of Artificial Sequence: Synthetic oligonucleotide
  Antisense strand to SEQ ID NO: 1486040
aguucacgaacagucuggg

SEQ ID NO: 1486042 - RNA, 19 nt, Artificial Sequence
  Description of Artificial Sequence: Synthetic oligonucleotide
  Sense strand starting at position 2872 of SEQ ID NO: 1244404
ccagacuguucgugaacuc

SEQ ID NO: 1486043 - RNA, 19 nt, Artificial Sequence
  Description of Artificial Sequence: Synthetic oligonucleotide
  Antisense strand to SEQ ID NO: 1486042
gaguucacgaacagucugg

SEQ ID NO: 1486044 - RNA, 19 nt, Artificial Sequence
  Description of Artificial Sequence: Synthetic oligonucleotide
  Sense strand starting at position 3308 of SEQ ID NO: 1244404
acuuaaaguuuauccaugu

SEQ ID NO: 1486045 - RNA, 19 nt, Artificial Sequence
  Description of Artificial Sequence: Synthetic oligonucleotide
  Antisense strand to SEQ ID NO: 1486044
acauggauaaacuuuaagu

SEQ ID NO: 1486046 - RNA, 19 nt, Artificial Sequence
  Description of Artificial Sequence: Synthetic oligonucleotide
  Sense strand starting at position 3309 of SEQ ID NO: 1244404
cuuaaaguuuauccauguu

SEQ ID NO: 1486047 - RNA, 19 nt, Artificial Sequence
  Description of Artificial Sequence: Synthetic oligonucleotide
  Antisense strand to SEQ ID NO: 1486046
aacauggauaaacuuuaag

SEQ ID NO: 1486048 - RNA, 19 nt, Artificial Sequence
  Description of Artificial Sequence: Synthetic oligonucleotide
  Sense strand starting at position 3312 of SEQ ID NO: 1244404
aaaguuuauccauguuagg

SEQ ID NO: 1486049 - RNA, 19 nt, Artificial Sequence
  Description of Artificial Sequence: Synthetic oligonucleotide
  Antisense strand to SEQ ID NO: 1486048
ccuaacauggauaaacuuu

SEQ ID NO: 1486050 - RNA, 19 nt, Artificial Sequence
  Description of Artificial Sequence: Synthetic oligonucleotide
  Sense strand starting at position 3318 of SEQ ID NO: 1244404
uauccauguuaggucugua

SEQ ID NO: 1486051 - RNA, 19 nt, Artificial Sequence
  Description of Artificial Sequence: Synthetic oligonucleotide
  Antisense strand to SEQ ID NO: 1486050
uacagaccuaacauggaua

SEQ ID NO: 1486052 - RNA, 19 nt, Artificial Sequence
  Description of Artificial Sequence: Synthetic oligonucleotide
  Sense strand starting at position 3321 of SEQ ID NO: 1244404
ccauguuaggucuguaacu

SEQ ID NO: 1486053 - RNA, 19 nt, Artificial Sequence
  Description of Artificial Sequence: Synthetic oligonucleotide
  Antisense strand to SEQ ID NO: 1486052
aguuacagaccuaacaugg

SEQ ID NO: 1486054 - RNA, 19 nt, Artificial Sequence
  Description of Artificial Sequence: Synthetic oligonucleotide
  Sense strand starting at position 3322 of SEQ ID NO: 1244404
cauguuaggucuguaacua

SEQ ID NO: 1486055 - RNA, 19 nt, Artificial Sequence
  Description of Artificial Sequence: Synthetic oligonucleotide
  Antisense strand to SEQ ID NO: 1486054
uaguuacagaccuaacaug

SEQ ID NO: 1486056 - RNA, 19 nt, Artificial Sequence
  Description of Artificial Sequence: Synthetic oligonucleotide
  Sense strand starting at position 3323 of SEQ ID NO: 1244404
auguuaggucuguaacuag

SEQ ID NO: 1486057 - RNA, 19 nt, Artificial Sequence
  Description of Artificial Sequence: Synthetic oligonucleotide
  Antisense strand to SEQ ID NO: 1486056
cuaguuacagaccuaacau

SEQ ID NO: 1486058 - RNA, 19 nt, Artificial Sequence
  Description of Artificial Sequence: Synthetic oligonucleotide
  Sense strand starting at position 3354 of SEQ ID NO: 1244404
ugccauaagccuuaagaau

SEQ ID NO: 1486059 - RNA, 19 nt, Artificial Sequence
  Description of Artificial Sequence: Synthetic oligonucleotide
  Antisense strand to SEQ ID NO: 1486058
auucuuaaggcuuauggca

SEQ ID NO: 1486060 - RNA, 19 nt, Artificial Sequence
  Description of Artificial Sequence: Synthetic oligonucleotide
  Sense strand starting at position 3474 of SEQ ID NO: 1244404
gcaguaguggcauguuucu

SEQ ID NO: 1486061 - RNA, 19 nt, Artificial Sequence
  Description of Artificial Sequence: Synthetic oligonucleotide
  Antisense strand to SEQ ID NO: 1486060
agaaacaugccacuacugc

SEQ ID NO: 1486062 - RNA, 19 nt, Artificial Sequence
  Description of Artificial Sequence: Synthetic oligonucleotide
  Sense strand starting at position 3541 of SEQ ID NO: 1244404
aggagauugcggugaacug

SEQ ID NO: 1486063 - RNA, 19 nt, Artificial Sequence
  Description of Artificial Sequence: Synthetic oligonucleotide
  Antisense strand to SEQ ID NO: 1486062
caguucaccgcaaucuccu

SEQ ID NO: 1486064 - RNA, 19 nt, Artificial Sequence
  Description of Artificial Sequence: Synthetic oligonucleotide
  Sense strand starting at position 3648 of SEQ ID NO: 1244404
agaaucaagugagaggaaa

SEQ ID NO: 1486065 - RNA, 19 nt, Artificial Sequence
  Description of Artificial Sequence: Synthetic oligonucleotide
  Antisense strand to SEQ ID NO: 1486064
uuuccucucacuugauucu

SEQ ID NO: 1486066 - RNA, 19 nt, Artificial Sequence
  Description of Artificial Sequence: Synthetic oligonucleotide
  Sense strand starting at position 3706 of SEQ ID NO: 1244404
uugccugcuuucuugguaa

SEQ ID NO: 1486067 - RNA, 19 nt, Artificial Sequence
  Description of Artificial Sequence: Synthetic oligonucleotide
  Antisense strand to SEQ ID NO: 1486066
uuaccaagaaagcaggcaa

SEQ ID NO: 1486068 - RNA, 19 nt, Artificial Sequence
  Description of Artificial Sequence: Synthetic oligonucleotide
  Sense strand starting at position 3708 of SEQ ID NO: 1244404
gccugcuuucuugguaaca

SEQ ID NO: 1486069 - RNA, 19 nt, Artificial Sequence
  Description of Artificial Sequence: Synthetic oligonucleotide
  Antisense strand to SEQ ID NO: 1486068
uguuaccaagaaagcaggc

SEQ ID NO: 1486070 - RNA, 19 nt, Artificial Sequence
  Description of Artificial Sequence: Synthetic oligonucleotide
  Sense strand starting at position 3709 of SEQ ID NO: 1244404
ccugcuuucuugguaacau

SEQ ID NO: 1486071 - RNA, 19 nt, Artificial Sequence
  Description of Artificial Sequence: Synthetic oligonucleotide
  Antisense strand to SEQ ID NO: 1486070
auguuaccaagaaagcagg

SEQ ID NO: 1486072 - RNA, 19 nt, Artificial Sequence
  Description of Artificial Sequence: Synthetic oligonucleotide
  Sense strand starting at position 3710 of SEQ ID NO: 1244404
cugcuuucuugguaacaug

SEQ ID NO: 1486073 - RNA, 19 nt, Artificial Sequence
  Description of Artificial Sequence: Synthetic oligonucleotide
  Antisense strand to SEQ ID NO: 1486072
cauguuaccaagaaagcag

SEQ ID NO: 1486074 - RNA, 19 nt, Artificial Sequence
  Description of Artificial Sequence: Synthetic oligonucleotide
  Sense strand starting at position 3737 of SEQ ID NO: 1244404
gcaggugccauguguuaaa

SEQ ID NO: 1486075 - RNA, 19 nt, Artificial Sequence
  Description of Artificial Sequence: Synthetic oligonucleotide
  Antisense strand to SEQ ID NO: 1486074
uuuaacacauggcaccugc

SEQ ID NO: 1486076 - RNA, 19 nt, Artificial Sequence
  Description of Artificial Sequence: Synthetic oligonucleotide
  Sense strand starting at position 3740 of SEQ ID NO: 1244404
ggugccauguguuaaagau

SEQ ID NO: 1486077 - RNA, 19 nt, Artificial Sequence
  Description of Artificial Sequence: Synthetic oligonucleotide
  Antisense strand to SEQ ID NO: 1486076
aucuuuaacacauggcacc

SEQ ID NO: 1486078 - RNA, 19 nt, Artificial Sequence
  Description of Artificial Sequence: Synthetic oligonucleotide
  Sense strand starting at position 3773 of SEQ ID NO: 1244404
caaagccuucuguguggua

SEQ ID NO: 1486079 - RNA, 19 nt, Artificial Sequence
  Description of Artificial Sequence: Synthetic oligonucleotide
  Antisense strand to SEQ ID NO: 1486078
uaccacacagaaggcuuug

SEQ ID NO: 1486080 - RNA, 19 nt, Artificial Sequence
  Description of Artificial Sequence: Synthetic oligonucleotide
  Sense strand starting at position 3775 of SEQ ID NO: 1244404
aagccuucugugugguaga

SEQ ID NO: 1486081 - RNA, 19 nt, Artificial Sequence
  Description of Artificial Sequence: Synthetic oligonucleotide
  Antisense strand to SEQ ID NO: 1486080
ucuaccacacagaaggcuu

SEQ ID NO: 1486082 - RNA, 19 nt, Artificial Sequence
  Description of Artificial Sequence: Synthetic oligonucleotide
  Sense strand starting at position 3786 of SEQ ID NO: 1244404
gugguagaggaauagcuaa

SEQ ID NO: 1486083 - RNA, 19 nt, Artificial Sequence
  Description of Artificial Sequence: Synthetic oligonucleotide
  Antisense strand to SEQ ID NO: 1486082
uuagcuauuccucuaccac

SEQ ID NO: 1486084 - RNA, 19 nt, Artificial Sequence
  Description of Artificial Sequence: Synthetic oligonucleotide
  Sense strand starting at position 3809 of SEQ ID NO: 1244404
ugucgaaugcuaggcacua

SEQ ID NO: 1486085 - RNA, 19 nt, Artificial Sequence
  Description of Artificial Sequence: Synthetic oligonucleotide
  Antisense strand to SEQ ID NO: 1486084
uagugccuagcauucgaca

SEQ ID NO: 1486086 - RNA, 19 nt, Artificial Sequence
  Description of Artificial Sequence: Synthetic oligonucleotide
  Sense strand starting at position 3810 of SEQ ID NO: 1244404
gucgaaugcuaggcacuau

SEQ ID NO: 1486087 - RNA, 19 nt, Artificial Sequence
  Description of Artificial Sequence: Synthetic oligonucleotide
  Antisense strand to SEQ ID NO: 1486086
auagugccuagcauucgac

SEQ ID NO: 1486088 - RNA, 19 nt, Artificial Sequence
  Description of Artificial Sequence: Synthetic oligonucleotide
  Sense strand starting at position 3926 of SEQ ID NO: 1244404
acagaaauaugugaggauc

SEQ ID NO: 1486089 - RNA, 19 nt, Artificial Sequence
  Description of Artificial Sequence: Synthetic oligonucleotide
  Antisense strand to SEQ ID NO: 1486088
gauccucacauauuucugu

SEQ ID NO: 1486090 - RNA, 19 nt, Artificial Sequence
  Description of Artificial Sequence: Synthetic oligonucleotide
  Sense strand starting at position 3928 of SEQ ID NO: 1244404
agaaauaugugaggaucag

SEQ ID NO: 1486091 - RNA, 19 nt, Artificial Sequence
  Description of Artificial Sequence: Synthetic oligonucleotide
  Antisense strand to SEQ ID NO: 1486090
cugauccucacauauuucu

SEQ ID NO: 1486092 - RNA, 19 nt, Artificial Sequence
  Description of Artificial Sequence: Synthetic oligonucleotide
  Sense strand starting at position 71 of SEQ ID NO: 1244405
uaguuuacucugggcugau

SEQ ID NO: 1486093 - RNA, 19 nt, Artificial Sequence
  Description of Artificial Sequence: Synthetic oligonucleotide
  Antisense strand to SEQ ID NO: 1486092
aucagcccagaguaaacua

SEQ ID NO: 1486094 - RNA, 19 nt, Artificial Sequence
  Description of Artificial Sequence: Synthetic oligonucleotide
  Sense strand starting at position 72 of SEQ ID NO: 1244405
aguuuacucugggcugaua

SEQ ID NO: 1486095 - RNA, 19 nt, Artificial Sequence
  Description of Artificial Sequence: Synthetic oligonucleotide
  Antisense strand to SEQ ID NO: 1486094
uaucagcccagaguaaacu

SEQ ID NO: 1486096 - RNA, 19 nt, Artificial Sequence
  Description of Artificial Sequence: Synthetic oligonucleotide
  Sense strand starting at position 74 of SEQ ID NO: 1244405
uuuacucugggcugauaca

SEQ ID NO: 1486097 - RNA, 19 nt, Artificial Sequence
  Description of Artificial Sequence: Synthetic oligonucleotide
  Antisense strand to SEQ ID NO: 1486096
uguaucagcccagaguaaa

SEQ ID NO: 1486098 - RNA, 19 nt, Artificial Sequence
  Description of Artificial Sequence: Synthetic oligonucleotide
  Sense strand starting at position 75 of SEQ ID NO: 1244405
uuacucugggcugauacaa

SEQ ID NO: 1486099 - RNA, 19 nt, Artificial Sequence
  Description of Artificial Sequence: Synthetic oligonucleotide
  Antisense strand to SEQ ID NO: 1486098
uuguaucagcccagaguaa

SEQ ID NO: 1486100 - RNA, 19 nt, Artificial Sequence
  Description of Artificial Sequence: Synthetic oligonucleotide
  Sense strand starting at position 231 of SEQ ID NO: 1244405
cuucgucucccuuaagaaa

SEQ ID NO: 1486101 - RNA, 19 nt, Artificial Sequence
  Description of Artificial Sequence: Synthetic oligonucleotide
  Antisense strand to SEQ ID NO: 1486100
uuucuuaagggagacgaag

SEQ ID NO: 1486102 - RNA, 19 nt, Artificial Sequence
  Description of Artificial Sequence: Synthetic oligonucleotide
  Sense strand starting at position 253 of SEQ ID NO: 1244405
ugcacauucugaccaauga

SEQ ID NO: 1486103 - RNA, 19 nt, Artificial Sequence
  Description of Artificial Sequence: Synthetic oligonucleotide
  Antisense strand to SEQ ID NO: 1486102
ucauuggucagaaugugca

SEQ ID NO: 1486104 - RNA, 19 nt, Artificial Sequence
  Description of Artificial Sequence: Synthetic oligonucleotide
  Sense strand starting at position 264 of SEQ ID NO: 1244405
accaaugaagcucauguau

SEQ ID NO: 1486105 - RNA, 19 nt, Artificial Sequence
  Description of Artificial Sequence: Synthetic oligonucleotide
  Antisense strand to SEQ ID NO: 1486104
auacaugagcuucauuggu

SEQ ID NO: 1486106 - RNA, 19 nt, Artificial Sequence
  Description of Artificial Sequence: Synthetic oligonucleotide
  Sense strand starting at position 2014 of SEQ ID NO: 1244405
gcggccugccugucaguaa

SEQ ID NO: 1486107 - RNA, 19 nt, Artificial Sequence
  Description of Artificial Sequence: Synthetic oligonucleotide
  Antisense strand to SEQ ID NO: 1486106
uuacugacaggcaggccgc

SEQ ID NO: 1486108 - RNA, 19 nt, Artificial Sequence
  Description of Artificial Sequence: Synthetic oligonucleotide
  Sense strand starting at position 2026 of SEQ ID NO: 1244405
ucaguaaccacgugaugga

SEQ ID NO: 1486109 - RNA, 19 nt, Artificial Sequence
  Description of Artificial Sequence: Synthetic oligonucleotide
  Antisense strand to SEQ ID NO: 1486108
uccaucacgugguuacuga

SEQ ID NO: 1486110 - RNA, 19 nt, Artificial Sequence
  Description of Artificial Sequence: Synthetic oligonucleotide
  Sense strand starting at position 2082 of SEQ ID NO: 1244405
uugacauuugcguguguuc

SEQ ID NO: 1486111 - RNA, 19 nt, Artificial Sequence
  Description of Artificial Sequence: Synthetic oligonucleotide
  Antisense strand to SEQ ID NO: 1486110
gaacacacgcaaaugucaa

SEQ ID NO: 1486112 - RNA, 19 nt, Artificial Sequence
  Description of Artificial Sequence: Synthetic oligonucleotide
  Sense strand starting at position 2087 of SEQ ID NO: 1244405
auuugcguguguucacuau

SEQ ID NO: 1486113 - RNA, 19 nt, Artificial Sequence
  Description of Artificial Sequence: Synthetic oligonucleotide
  Antisense strand to SEQ ID NO: 1486112
auagugaacacacgcaaau

SEQ ID NO: 1486114 - RNA, 19 nt, Artificial Sequence
  Description of Artificial Sequence: Synthetic oligonucleotide
  Sense strand starting at position 2091 of SEQ ID NO: 1244405
gcguguguucacuauggau

SEQ ID NO: 1486115 - RNA, 19 nt, Artificial Sequence
  Description of Artificial Sequence: Synthetic oligonucleotide
  Antisense strand to SEQ ID NO: 1486114
auccauagugaacacacgc

SEQ ID NO: 1486116 - RNA, 19 nt, Artificial Sequence
  Description of Artificial Sequence: Synthetic oligonucleotide
  Sense strand starting at position 2093 of SEQ ID NO: 1244405
guguguucacuauggauag

SEQ ID NO: 1486117 - RNA, 19 nt, Artificial Sequence
  Description of Artificial Sequence: Synthetic oligonucleotide
  Antisense strand to SEQ ID NO: 1486116
cuauccauagugaacacac

SEQ ID NO: 1486118 - RNA, 19 nt, Artificial Sequence
  Description of Artificial Sequence: Synthetic oligonucleotide
  Sense strand starting at position 2215 of SEQ ID NO: 1244405
cuauaauggaaguguugga

SEQ ID NO: 1486119 - RNA, 19 nt, Artificial Sequence
  Description of Artificial Sequence: Synthetic oligonucleotide
  Antisense strand to SEQ ID NO: 1486118
uccaacacuuccauuauag

SEQ ID NO: 1486120 - RNA, 19 nt, Artificial Sequence
  Description of Artificial Sequence: Synthetic oligonucleotide
  Sense strand starting at position 2219 of SEQ ID NO: 1244405
aauggaaguguuggacuca

SEQ ID NO: 1486121 - RNA, 19 nt, Artificial Sequence
  Description of Artificial Sequence: Synthetic oligonucleotide
  Antisense strand to SEQ ID NO: 1486120
ugaguccaacacuuccauu

SEQ ID NO: 1486122 - RNA, 19 nt, Artificial Sequence
  Description of Artificial Sequence: Synthetic oligonucleotide
  Sense strand starting at position 2261 of SEQ ID NO: 1244405
guguguauuacagaaauca

SEQ ID NO: 1486123 - RNA, 19 nt, Artificial Sequence
  Description of Artificial Sequence: Synthetic oligonucleotide
  Antisense strand to SEQ ID NO: 1486122
ugauuucuguaauacacac

SEQ ID NO: 1486124 - RNA, 19 nt, Artificial Sequence
  Description of Artificial Sequence: Synthetic oligonucleotide
  Sense strand starting at position 2293 of SEQ ID NO: 1244405
agaacaugucugggagagu

SEQ ID NO: 1486125 - RNA, 19 nt, Artificial Sequence
  Description of Artificial Sequence: Synthetic oligonucleotide
  Antisense strand to SEQ ID NO: 1486124
acucucccagacauguucu

SEQ ID NO: 1486126 - RNA, 19 nt, Artificial Sequence
  Description of Artificial Sequence: Synthetic oligonucleotide
  Sense strand starting at position 2304 of SEQ ID NO: 1244405
gggagagugugacauaaga

SEQ ID NO: 1486127 - RNA, 19 nt, Artificial Sequence
  Description of Artificial Sequence: Synthetic oligonucleotide
  Antisense strand to SEQ ID NO: 1486126
ucuuaugucacacucuccc

SEQ ID NO: 1486128 - RNA, 19 nt, Artificial Sequence
  Description of Artificial Sequence: Synthetic oligonucleotide
  Sense strand starting at position 2389 of SEQ ID NO: 1244405
cuuccuguccucugagaaa

SEQ ID NO: 1486129 - RNA, 19 nt, Artificial Sequence
  Description of Artificial Sequence: Synthetic oligonucleotide
  Antisense strand to SEQ ID NO: 1486128
uuucucagaggacaggaag

SEQ ID NO: 1486130 - RNA, 19 nt, Artificial Sequence
  Description of Artificial Sequence: Synthetic oligonucleotide
  Sense strand starting at position 2488 of SEQ ID NO: 1244405
aguucucagccaugacaga

SEQ ID NO: 1486131 - RNA, 19 nt, Artificial Sequence
  Description of Artificial Sequence: Synthetic oligonucleotide
  Antisense strand to SEQ ID NO: 1486130
ucugucauggcugagaacu

SEQ ID NO: 1486132 - RNA, 19 nt, Artificial Sequence
  Description of Artificial Sequence: Synthetic oligonucleotide
  Sense strand starting at position 2489 of SEQ ID NO: 1244405
guucucagccaugacagau

SEQ ID NO: 1486133 - RNA, 19 nt, Artificial Sequence
  Description of Artificial Sequence: Synthetic oligonucleotide
  Antisense strand to SEQ ID NO: 1486132
aucugucauggcugagaac

SEQ ID NO: 1486134 - RNA, 19 nt, Artificial Sequence
  Description of Artificial Sequence: Synthetic oligonucleotide
  Sense strand starting at position 2511 of SEQ ID NO: 1244405
aggugagacaccuguuauu

SEQ ID NO: 1486135 - RNA, 19 nt, Artificial Sequence
  Description of Artificial Sequence: Synthetic oligonucleotide
  Antisense strand to SEQ ID NO: 1486134
aauaacaggugucucaccu

SEQ ID NO: 1486136 - RNA, 19 nt, Artificial Sequence
  Description of Artificial Sequence: Synthetic oligonucleotide
  Sense strand starting at position 2544 of SEQ ID NO: 1244405
gcuaacuaccauuagguuu

SEQ ID NO: 1486137 - RNA, 19 nt, Artificial Sequence
  Description of Artificial Sequence: Synthetic oligonucleotide
  Antisense strand to SEQ ID NO: 1486136
aaaccuaaugguaguuagc

SEQ ID NO: 1486138 - RNA, 19 nt, Artificial Sequence
  Description of Artificial Sequence: Synthetic oligonucleotide
  Sense strand starting at position 2566 of SEQ ID NO: 1244405
uggcuaagagcuuaacgga

SEQ ID NO: 1486139 - RNA, 19 nt, Artificial Sequence
  Description of Artificial Sequence: Synthetic oligonucleotide
  Antisense strand to SEQ ID NO: 1486138
uccguuaagcucuuagcca

SEQ ID NO: 1486140 - RNA, 19 nt, Artificial Sequence
  Description of Artificial Sequence: Synthetic oligonucleotide
  Sense strand starting at position 2598 of SEQ ID NO: 1244405
gaaagacuccaccgcugau

SEQ ID NO: 1486141 - RNA, 19 nt, Artificial Sequence
  Description of Artificial Sequence: Synthetic oligonucleotide
  Antisense strand to SEQ ID NO: 1486140
aucagcgguggagucuuuc

SEQ ID NO: 1486142 - RNA, 19 nt, Artificial Sequence
  Description of Artificial Sequence: Synthetic oligonucleotide
  Sense strand starting at position 2633 of SEQ ID NO: 1244405
gcaguuucggcccaauuga

SEQ ID NO: 1486143 - RNA, 19 nt, Artificial Sequence
  Description of Artificial Sequence: Synthetic oligonucleotide
  Antisense strand to SEQ ID NO: 1486142
ucaauugggccgaaacugc

SEQ ID NO: 1486144 - RNA, 19 nt, Artificial Sequence
  Description of Artificial Sequence: Synthetic oligonucleotide
  Sense strand starting at position 2641 of SEQ ID NO: 1244405
ggcccaauugaccaguauu

SEQ ID NO: 1486145 - RNA, 19 nt, Artificial Sequence
  Description of Artificial Sequence: Synthetic oligonucleotide
  Antisense strand to SEQ ID NO: 1486144
aauacuggucaauugggcc

SEQ ID NO: 1486146 - RNA, 19 nt, Artificial Sequence
  Description of Artificial Sequence: Synthetic oligonucleotide
  Sense strand starting at position 2651 of SEQ ID NO: 1244405
accaguauuccuuacugau

SEQ ID NO: 1486147 - RNA, 19 nt, Artificial Sequence
  Description of Artificial Sequence: Synthetic oligonucleotide
  Antisense strand to SEQ ID NO: 1486146
aucaguaaggaauacuggu

SEQ ID NO: 1486148 - RNA, 19 nt, Artificial Sequence
  Description of Artificial Sequence: Synthetic oligonucleotide
  Sense strand starting at position 2657 of SEQ ID NO: 1244405
auuccuuacugauaagaga

SEQ ID NO: 1486149 - RNA, 19 nt, Artificial Sequence
  Description of Artificial Sequence: Synthetic oligonucleotide
  Antisense strand to SEQ ID NO: 1486148
ucucuuaucaguaaggaau

SEQ ID NO: 1486150 - RNA, 19 nt, Artificial Sequence
  Description of Artificial Sequence: Synthetic oligonucleotide
  Sense strand starting at position 2688 of SEQ ID NO: 1244405
agugguucuggugagauga

SEQ ID NO: 1486151 - RNA, 19 nt, Artificial Sequence
  Description of Artificial Sequence: Synthetic oligonucleotide
  Antisense strand to SEQ ID NO: 1486150
ucaucucaccagaaccacu

SEQ ID NO: 1486152 - RNA, 19 nt, Artificial Sequence
  Description of Artificial Sequence: Synthetic oligonucleotide
  Sense strand starting at position 2704 of SEQ ID NO: 1244405
ugacaugacccucgugaag

SEQ ID NO: 1486153 - RNA, 19 nt, Artificial Sequence
  Description of Artificial Sequence: Synthetic oligonucleotide
  Antisense strand to SEQ ID NO: 1486152
cuucacgagggucauguca

SEQ ID NO: 1486154 - RNA, 19 nt, Artificial Sequence
  Description of Artificial Sequence: Synthetic oligonucleotide
  Sense strand starting at position 2778 of SEQ ID NO: 1244405
cuucuccuguagcuugaua

SEQ ID NO: 1486155 - RNA, 19 nt, Artificial Sequence
  Description of Artificial Sequence: Synthetic oligonucleotide
  Antisense strand to SEQ ID NO: 1486154
uaucaagcuacaggagaag

SEQ ID NO: 1486156 - RNA, 19 nt, Artificial Sequence
  Description of Artificial Sequence: Synthetic oligonucleotide
  Sense strand starting at position 2780 of SEQ ID NO: 1244405
ucuccuguagcuugauaaa

SEQ ID NO: 1486157 - RNA, 19 nt, Artificial Sequence
  Description of Artificial Sequence: Synthetic oligonucleotide
  Antisense strand to SEQ ID NO: 1486156
uuuaucaagcuacaggaga

SEQ ID NO: 1486158 - RNA, 19 nt, Artificial Sequence
  Description of Artificial Sequence: Synthetic oligonucleotide
  Sense strand starting at position 2824 of SEQ ID NO: 1244405
auagauuccuguucccuuu

SEQ ID NO: 1486159 - RNA, 19 nt, Artificial Sequence
  Description of Artificial Sequence: Synthetic oligonucleotide
  Antisense strand to SEQ ID NO: 1486158
aaagggaacaggaaucuau

SEQ ID NO: 1486160 - RNA, 19 nt, Artificial Sequence
  Description of Artificial Sequence: Synthetic oligonucleotide
  Sense strand starting at position 3513 of SEQ ID NO: 1244405
ugcugauugacugggaaug

SEQ ID NO: 1486161 - RNA, 19 nt, Artificial Sequence
  Description of Artificial Sequence: Synthetic oligonucleotide
  Antisense strand to SEQ ID NO: 1486160
cauucccagucaaucagca

SEQ ID NO: 1486162 - RNA, 19 nt, Artificial Sequence
  Description of Artificial Sequence: Synthetic oligonucleotide
  Sense strand starting at position 3514 of SEQ ID NO: 1244405
gcugauugacugggaauga

SEQ ID NO: 1486163 - RNA, 19 nt, Artificial Sequence
  Description of Artificial Sequence: Synthetic oligonucleotide
  Antisense strand to SEQ ID NO: 1486162
ucauucccagucaaucagc

SEQ ID NO: 1486164 - RNA, 19 nt, Artificial Sequence
  Description of Artificial Sequence: Synthetic oligonucleotide
  Sense strand starting at position 3515 of SEQ ID NO: 1244405
cugauugacugggaaugaa

SEQ ID NO: 1486165 - RNA, 19 nt, Artificial Sequence
  Description of Artificial Sequence: Synthetic oligonucleotide
  Antisense strand to SEQ ID NO: 1486164
uucauucccagucaaucag

SEQ ID NO: 1486166 - RNA, 19 nt, Artificial Sequence
  Description of Artificial Sequence: Synthetic oligonucleotide
  Sense strand starting at position 3694 of SEQ ID NO: 1244405
ggugcaauucgggaaguug

SEQ ID NO: 1486167 - RNA, 19 nt, Artificial Sequence
  Description of Artificial Sequence: Synthetic oligonucleotide
  Antisense strand to SEQ ID NO: 1486166
caacuucccgaauugcacc

SEQ ID NO: 1486168 - RNA, 19 nt, Artificial Sequence
  Description of Artificial Sequence: Synthetic oligonucleotide
  Sense strand starting at position 3854 of SEQ ID NO: 1244405
ccagaagugggaggugaua

SEQ ID NO: 1486169 - RNA, 19 nt, Artificial Sequence
  Description of Artificial Sequence: Synthetic oligonucleotide
  Antisense strand to SEQ ID NO: 1486168
uaucaccucccacuucugg

SEQ ID NO: 1486170 - RNA, 19 nt, Artificial Sequence
  Description of Artificial Sequence: Synthetic oligonucleotide
  Sense strand starting at position 3950 of SEQ ID NO: 1244405
ggcuuaugcccaggaacaa

SEQ ID NO: 1486171 - RNA, 19 nt, Artificial Sequence
  Description of Artificial Sequence: Synthetic oligonucleotide
  Antisense strand to SEQ ID NO: 1486170
uuguuccugggcauaagcc

SEQ ID NO: 1486172 - RNA, 19 nt, Artificial Sequence
  Description of Artificial Sequence: Synthetic oligonucleotide
  Sense strand starting at position 551 of SEQ ID NO: 1244406
uaguuuacucugggcugau

SEQ ID NO: 1486173 - RNA, 19 nt, Artificial Sequence
  Description of Artificial Sequence: Synthetic oligonucleotide
  Antisense strand to SEQ ID NO: 1486172
aucagcccagaguaaacua

SEQ ID NO: 1486174 - RNA, 19 nt, Artificial Sequence
  Description of Artificial Sequence: Synthetic oligonucleotide
  Sense strand starting at position 552 of SEQ ID NO: 1244406
aguuuacucugggcugaua

SEQ ID NO: 1486175 - RNA, 19 nt, Artificial Sequence
  Description of Artificial Sequence: Synthetic oligonucleotide
  Antisense strand to SEQ ID NO: 1486174
uaucagcccagaguaaacu

SEQ ID NO: 1486176 - RNA, 19 nt, Artificial Sequence
  Description of Artificial Sequence: Synthetic oligonucleotide
  Sense strand starting at position 554 of SEQ ID NO: 1244406
uuuacucugggcugauaca

SEQ ID NO: 1486177 - RNA, 19 nt, Artificial Sequence
  Description of Artificial Sequence: Synthetic oligonucleotide
  Antisense strand to SEQ ID NO: 1486176
uguaucagcccagaguaaa

SEQ ID NO: 1486178 - RNA, 19 nt, Artificial Sequence
  Description of Artificial Sequence: Synthetic oligonucleotide
  Sense strand starting at position 555 of SEQ ID NO: 1244406
uuacucugggcugauacaa

SEQ ID NO: 1486179 - RNA, 19 nt, Artificial Sequence
  Description of Artificial Sequence: Synthetic oligonucleotide
  Antisense strand to SEQ ID NO: 1486178
uuguaucagcccagaguaa

SEQ ID NO: 1486180 - RNA, 19 nt, Artificial Sequence
  Description of Artificial Sequence: Synthetic oligonucleotide
  Sense strand starting at position 711 of SEQ ID NO: 1244406
cuucgucucccuuaagaaa

SEQ ID NO: 1486181 - RNA, 19 nt, Artificial Sequence
  Description of Artificial Sequence: Synthetic oligonucleotide
  Antisense strand to SEQ ID NO: 1486180
uuucuuaagggagacgaag

SEQ ID NO: 1486182 - RNA, 19 nt, Artificial Sequence
  Description of Artificial Sequence: Synthetic oligonucleotide
  Sense strand starting at position 733 of SEQ ID NO: 1244406
ugcacauucugaccaauga

SEQ ID NO: 1486183 - RNA, 19 nt, Artificial Sequence
  Description of Artificial Sequence: Synthetic oligonucleotide
  Antisense strand to SEQ ID NO: 1486182
ucauuggucagaaugugca

SEQ ID NO: 1486184 - RNA, 19 nt, Artificial Sequence
  Description of Artificial Sequence: Synthetic oligonucleotide
  Sense strand starting at position 744 of SEQ ID NO: 1244406
accaaugaagcucauguau

SEQ ID NO: 1486185 - RNA, 19 nt, Artificial Sequence
  Description of Artificial Sequence: Synthetic oligonucleotide
  Antisense strand to SEQ ID NO: 1486184
auacaugagcuucauuggu

SEQ ID NO: 1486186 - RNA, 19 nt, Artificial Sequence
  Description of Artificial Sequence: Synthetic oligonucleotide
  Sense strand starting at position 1612 of SEQ ID NO: 1244406
uggacaaguucagggagaa

SEQ ID NO: 1486187 - RNA, 19 nt, Artificial Sequence
  Description of Artificial Sequence: Synthetic oligonucleotide
  Antisense strand to SEQ ID NO: 1486186
uucucccugaacuugucca

SEQ ID NO: 1486188 - RNA, 19 nt, Artificial Sequence
  Description of Artificial Sequence: Synthetic oligonucleotide
  Sense strand starting at position 2494 of SEQ ID NO: 1244406
gcggccugccugucaguaa

SEQ ID NO: 1486189 - RNA, 19 nt, Artificial Sequence
  Description of Artificial Sequence: Synthetic oligonucleotide
  Antisense strand to SEQ ID NO: 1486188
uuacugacaggcaggccgc

SEQ ID NO: 1486190 - RNA, 19 nt, Artificial Sequence
  Description of Artificial Sequence: Synthetic oligonucleotide
  Sense strand starting at position 2506 of SEQ ID NO: 1244406
ucaguaaccacgugaugga

SEQ ID NO: 1486191 - RNA, 19 nt, Artificial Sequence
  Description of Artificial Sequence: Synthetic oligonucleotide
  Antisense strand to SEQ ID NO: 1486190
uccaucacgugguuacuga

SEQ ID NO: 1486192 - RNA, 19 nt, Artificial Sequence
  Description of Artificial Sequence: Synthetic oligonucleotide
  Sense strand starting at position 2562 of SEQ ID NO: 1244406
uugacauuugcguguguuc

SEQ ID NO: 1486193 - RNA, 19 nt, Artificial Sequence
  Description of Artificial Sequence: Synthetic oligonucleotide
  Antisense strand to SEQ ID NO: 1486192
gaacacacgcaaaugucaa

SEQ ID NO: 1486194 - RNA, 19 nt, Artificial Sequence
  Description of Artificial Sequence: Synthetic oligonucleotide
  Sense strand starting at position 2567 of SEQ ID NO: 1244406
auuugcguguguucacuau

SEQ ID NO: 1486195 - RNA, 19 nt, Artificial Sequence
  Description of Artificial Sequence: Synthetic oligonucleotide
  Antisense strand to SEQ ID NO: 1486194
auagugaacacacgcaaau

SEQ ID NO: 1486196 - RNA, 19 nt, Artificial Sequence
  Description of Artificial Sequence: Synthetic oligonucleotide
  Sense strand starting at position 2571 of SEQ ID NO: 1244406
gcguguguucacuauggau

SEQ ID NO: 1486197 - RNA, 19 nt, Artificial Sequence
  Description of Artificial Sequence: Synthetic oligonucleotide
  Antisense strand to SEQ ID NO: 1486196
auccauagugaacacacgc

SEQ ID NO: 1486198 - RNA, 19 nt, Artificial Sequence
  Description of Artificial Sequence: Synthetic oligonucleotide
  Sense strand starting at position 2573 of SEQ ID NO: 1244406
guguguucacuauggauag

SEQ ID NO: 1486199 - RNA, 19 nt, Artificial Sequence
  Description of Artificial Sequence: Synthetic oligonucleotide
  Antisense strand to SEQ ID NO: 1486198
cuauccauagugaacacac

SEQ ID NO: 1486200 - RNA, 19 nt, Artificial Sequence
  Description of Artificial Sequence: Synthetic oligonucleotide
  Sense strand starting at position 2695 of SEQ ID NO: 1244406
cuauaauggaaguguugga

SEQ ID NO: 1486201 - RNA, 19 nt, Artificial Sequence
  Description of Artificial Sequence: Synthetic oligonucleotide
  Antisense strand to SEQ ID NO: 1486200
uccaacacuuccauuauag

SEQ ID NO: 1486202 - RNA, 19 nt, Artificial Sequence
  Description of Artificial Sequence: Synthetic oligonucleotide
  Sense strand starting at position 2699 of SEQ ID NO: 1244406
aauggaaguguuggacuca

SEQ ID NO: 1486203 - RNA, 19 nt, Artificial Sequence
  Description of Artificial Sequence: Synthetic oligonucleotide
  Antisense strand to SEQ ID NO: 1486202
ugaguccaacacuuccauu

SEQ ID NO: 1486204 - RNA, 19 nt, Artificial Sequence
  Description of Artificial Sequence: Synthetic oligonucleotide
  Sense strand starting at position 2741 of SEQ ID NO: 1244406
guguguauuacagaaauca

SEQ ID NO: 1486205 - RNA, 19 nt, Artificial Sequence
  Description of Artificial Sequence: Synthetic oligonucleotide
  Antisense strand to SEQ ID NO: 1486204
ugauuucuguaauacacac

SEQ ID NO: 1486206 - RNA, 19 nt, Artificial Sequence
  Description of Artificial Sequence: Synthetic oligonucleotide
  Sense strand starting at position 2773 of SEQ ID NO: 1244406
agaacaugucugggagagu

SEQ ID NO: 1486207 - RNA, 19 nt, Artificial Sequence
  Description of Artificial Sequence: Synthetic oligonucleotide
  Antisense strand to SEQ ID NO: 1486206
acucucccagacauguucu

SEQ ID NO: 1486208 - RNA, 19 nt, Artificial Sequence
  Description of Artificial Sequence: Synthetic oligonucleotide
  Sense strand starting at position 2774 of SEQ ID NO: 1244406
gaacaugucugggagagug

SEQ ID NO: 1486209 - RNA, 19 nt, Artificial Sequence
  Description of Artificial Sequence: Synthetic oligonucleotide
  Antisense strand to SEQ ID NO: 1486208
cacucucccagacauguuc

SEQ ID NO: 1486210 - RNA, 19 nt, Artificial Sequence
  Description of Artificial Sequence: Synthetic oligonucleotide
  Sense strand starting at position 2782 of SEQ ID NO: 1244406
cugggagagugugacauaa

SEQ ID NO: 1486211 - RNA, 19 nt, Artificial Sequence
  Description of Artificial Sequence: Synthetic oligonucleotide
  Antisense strand to SEQ ID NO: 1486210
uuaugucacacucucccag

SEQ ID NO: 1486212 - RNA, 19 nt, Artificial Sequence
  Description of Artificial Sequence: Synthetic oligonucleotide
  Sense strand starting at position 2784 of SEQ ID NO: 1244406
gggagagugugacauaaga

SEQ ID NO: 1486213 - RNA, 19 nt, Artificial Sequence
  Description of Artificial Sequence: Synthetic oligonucleotide
  Antisense strand to SEQ ID NO: 1486212
ucuuaugucacacucuccc

SEQ ID NO: 1486214 - RNA, 19 nt, Artificial Sequence
  Description of Artificial Sequence: Synthetic oligonucleotide
  Sense strand starting at position 2869 of SEQ ID NO: 1244406
cuuccuguccucugagaaa

SEQ ID NO: 1486215 - RNA, 19 nt, Artificial Sequence
  Description of Artificial Sequence: Synthetic oligonucleotide
  Antisense strand to SEQ ID NO: 1486214
uuucucagaggacaggaag

SEQ ID NO: 1486216 - RNA, 19 nt, Artificial Sequence
  Description of Artificial Sequence: Synthetic oligonucleotide
  Sense strand starting at position 2872 of SEQ ID NO: 1244406
ccuguccucugagaaauga

SEQ ID NO: 1486217 - RNA, 19 nt, Artificial Sequence
  Description of Artificial Sequence: Synthetic oligonucleotide
  Antisense strand to SEQ ID NO: 1486216
ucauuucucagaggacagg

SEQ ID NO: 1486218 - RNA, 19 nt, Artificial Sequence
  Description of Artificial Sequence: Synthetic oligonucleotide
  Sense strand starting at position 2968 of SEQ ID NO: 1244406
aguucucagccaugacaga

SEQ ID NO: 1486219 - RNA, 19 nt, Artificial Sequence
  Description of Artificial Sequence: Synthetic oligonucleotide
  Antisense strand to SEQ ID NO: 1486218
ucugucauggcugagaacu

SEQ ID NO: 1486220 - RNA, 19 nt, Artificial Sequence
  Description of Artificial Sequence: Synthetic oligonucleotide
  Sense strand starting at position 2969 of SEQ ID NO: 1244406
guucucagccaugacagau

SEQ ID NO: 1486221 - RNA, 19 nt, Artificial Sequence
  Description of Artificial Sequence: Synthetic oligonucleotide
  Antisense strand to SEQ ID NO: 1486220
aucugucauggcugagaac

SEQ ID NO: 1486222 - RNA, 19 nt, Artificial Sequence
  Description of Artificial Sequence: Synthetic oligonucleotide
  Sense strand starting at position 2991 of SEQ ID NO: 1244406
aggugagacaccuguuauu

SEQ ID NO: 1486223 - RNA, 19 nt, Artificial Sequence
  Description of Artificial Sequence: Synthetic oligonucleotide
  Antisense strand to SEQ ID NO: 1486222
aauaacaggugucucaccu

SEQ ID NO: 1486224 - RNA, 19 nt, Artificial Sequence
  Description of Artificial Sequence: Synthetic oligonucleotide
  Sense strand starting at position 2994 of SEQ ID NO: 1244406
ugagacaccuguuauuaag

SEQ ID NO: 1486225 - RNA, 19 nt, Artificial Sequence
  Description of Artificial Sequence: Synthetic oligonucleotide
  Antisense strand to SEQ ID NO: 1486224
cuuaauaacaggugucuca

SEQ ID NO: 1486226 - RNA, 19 nt, Artificial Sequence
  Description of Artificial Sequence: Synthetic oligonucleotide
  Sense strand starting at position 3024 of SEQ ID NO: 1244406
gcuaacuaccauuagguuu

SEQ ID NO: 1486227 - RNA, 19 nt, Artificial Sequence
  Description of Artificial Sequence: Synthetic oligonucleotide
  Antisense strand to SEQ ID NO: 1486226
aaaccuaaugguaguuagc

SEQ ID NO: 1486228 - RNA, 19 nt, Artificial Sequence
  Description of Artificial Sequence: Synthetic oligonucleotide
  Sense strand starting at position 3046 of SEQ ID NO: 1244406
uggcuaagagcuuaacgga

SEQ ID NO: 1486229 - RNA, 19 nt, Artificial Sequence
  Description of Artificial Sequence: Synthetic oligonucleotide
  Antisense strand to SEQ ID NO: 1486228
uccguuaagcucuuagcca

SEQ ID NO: 1486230 - RNA, 19 nt, Artificial Sequence
  Description of Artificial Sequence: Synthetic oligonucleotide
  Sense strand starting at position 3078 of SEQ ID NO: 1244406
gaaagacuccaccgcugau

SEQ ID NO: 1486231 - RNA, 19 nt, Artificial Sequence
  Description of Artificial Sequence: Synthetic oligonucleotide
  Antisense strand to SEQ ID NO: 1486230
aucagcgguggagucuuuc

SEQ ID NO: 1486232 - RNA, 19 nt, Artificial Sequence
  Description of Artificial Sequence: Synthetic oligonucleotide
  Sense strand starting at position 3113 of SEQ ID NO: 1244406
gcaguuucggcccaauuga

SEQ ID NO: 1486233 - RNA, 19 nt, Artificial Sequence
  Description of Artificial Sequence: Synthetic oligonucleotide
  Antisense strand to SEQ ID NO: 1486232
ucaauugggccgaaacugc

SEQ ID NO: 1486234 - RNA, 19 nt, Artificial Sequence
  Description of Artificial Sequence: Synthetic oligonucleotide
  Sense strand starting at position 3121 of SEQ ID NO: 1244406
ggcccaauugaccaguauu

SEQ ID NO: 1486235 - RNA, 19 nt, Artificial Sequence
  Description of Artificial Sequence: Synthetic oligonucleotide
  Antisense strand to SEQ ID NO: 1486234
aauacuggucaauugggcc

SEQ ID NO: 1486236 - RNA, 19 nt, Artificial Sequence
  Description of Artificial Sequence: Synthetic oligonucleotide
  Sense strand starting at position 3131 of SEQ ID NO: 1244406
accaguauuccuuacugau

SEQ ID NO: 1486237 - RNA, 19 nt, Artificial Sequence
  Description of Artificial Sequence: Synthetic oligonucleotide
  Antisense strand to SEQ ID NO: 1486236
aucaguaaggaauacuggu

SEQ ID NO: 1486238 - RNA, 19 nt, Artificial Sequence
  Description of Artificial Sequence: Synthetic oligonucleotide
  Sense strand starting at position 3137 of SEQ ID NO: 1244406
auuccuuacugauaagaga

SEQ ID NO: 1486239 - RNA, 19 nt, Artificial Sequence
  Description of Artificial Sequence: Synthetic oligonucleotide
  Antisense strand to SEQ ID NO: 1486238
ucucuuaucaguaaggaau

SEQ ID NO: 1486240 - RNA, 19 nt, Artificial Sequence
  Description of Artificial Sequence: Synthetic oligonucleotide
  Sense strand starting at position 3168 of SEQ ID NO: 1244406
agugguucuggugagauga

SEQ ID NO: 1486241 - RNA, 19 nt, Artificial Sequence
  Description of Artificial Sequence: Synthetic oligonucleotide
  Antisense strand to SEQ ID NO: 1486240
ucaucucaccagaaccacu

SEQ ID NO: 1486242 - RNA, 19 nt, Artificial Sequence
  Description of Artificial Sequence: Synthetic oligonucleotide
  Sense strand starting at position 3184 of SEQ ID NO: 1244406
ugacaugacccucgugaag

SEQ ID NO: 1486243 - RNA, 19 nt, Artificial Sequence
  Description of Artificial Sequence: Synthetic oligonucleotide
  Antisense strand to SEQ ID NO: 1486242
cuucacgagggucauguca

SEQ ID NO: 1486244 - RNA, 19 nt, Artificial Sequence
  Description of Artificial Sequence: Synthetic oligonucleotide
  Sense strand starting at position 3258 of SEQ ID NO: 1244406
cuucuccuguagcuugaua

SEQ ID NO: 1486245 - RNA, 19 nt, Artificial Sequence
  Description of Artificial Sequence: Synthetic oligonucleotide
  Antisense strand to SEQ ID NO: 1486244
uaucaagcuacaggagaag

SEQ ID NO: 1486246 - RNA, 19 nt, Artificial Sequence
  Description of Artificial Sequence: Synthetic oligonucleotide
  Sense strand starting at position 3260 of SEQ ID NO: 1244406
ucuccuguagcuugauaaa

SEQ ID NO: 1486247 - RNA, 19 nt, Artificial Sequence
  Description of Artificial Sequence: Synthetic oligonucleotide
  Antisense strand to SEQ ID NO: 1486246
uuuaucaagcuacaggaga

SEQ ID NO: 1486248 - RNA, 19 nt, Artificial Sequence
  Description of Artificial Sequence: Synthetic oligonucleotide
  Sense strand starting at position 3304 of SEQ ID NO: 1244406
auagauuccuguucccuuu

SEQ ID NO: 1486249 - RNA, 19 nt, Artificial Sequence
  Description of Artificial Sequence: Synthetic oligonucleotide
  Antisense strand to SEQ ID NO: 1486248
aaagggaacaggaaucuau

SEQ ID NO: 1486250 - RNA, 19 nt, Artificial Sequence
  Description of Artificial Sequence: Synthetic oligonucleotide
  Sense strand starting at position 3405 of SEQ ID NO: 1244406
gaaacccuuuaugagaagu

SEQ ID NO: 1486251 - RNA, 19 nt, Artificial Sequence
  Description of Artificial Sequence: Synthetic oligonucleotide
  Antisense strand to SEQ ID NO: 1486250
acuucucauaaaggguuuc

SEQ ID NO: 1486252 - RNA, 19 nt, Artificial Sequence
  Description of Artificial Sequence: Synthetic oligonucleotide
  Sense strand starting at position 162 of SEQ ID NO: 1244407
cuuaaaucugcuggacaca

SEQ ID NO: 1486253 - RNA, 19 nt, Artificial Sequence
  Description of Artificial Sequence: Synthetic oligonucleotide
  Antisense strand to SEQ ID NO: 1486252
uguguccagcagauuuaag

SEQ ID NO: 1486254 - RNA, 19 nt, Artificial Sequence
  Description of Artificial Sequence: Synthetic oligonucleotide
  Sense strand starting at position 238 of SEQ ID NO: 1244407
cgacuagguccagaaaggu

SEQ ID NO: 1486255 - RNA, 19 nt, Artificial Sequence
  Description of Artificial Sequence: Synthetic oligonucleotide
  Antisense strand to SEQ ID NO: 1486254
accuuucuggaccuagucg

SEQ ID NO: 1486256 - RNA, 19 nt, Artificial Sequence
  Description of Artificial Sequence: Synthetic oligonucleotide
  Sense strand starting at position 265 of SEQ ID NO: 1244407
ccaggcugaggguauuaua

SEQ ID NO: 1486257 - RNA, 19 nt, Artificial Sequence
  Description of Artificial Sequence: Synthetic oligonucleotide
  Antisense strand to SEQ ID NO: 1486256
uauaauacccucagccugg

SEQ ID NO: 1486258 - RNA, 19 nt, Artificial Sequence
  Description of Artificial Sequence: Synthetic oligonucleotide
  Sense strand starting at position 399 of SEQ ID NO: 1244407
ugugacuuuggacacguua

SEQ ID NO: 1486259 - RNA, 19 nt, Artificial Sequence
  Description of Artificial Sequence: Synthetic oligonucleotide
  Antisense strand to SEQ ID NO: 1486258
uaacguguccaaagucaca

SEQ ID NO: 1486260 - RNA, 19 nt, Artificial Sequence
  Description of Artificial Sequence: Synthetic oligonucleotide
  Sense strand starting at position 401 of SEQ ID NO: 1244407
ugacuuuggacacguuauu

SEQ ID NO: 1486261 - RNA, 19 nt, Artificial Sequence
  Description of Artificial Sequence: Synthetic oligonucleotide
  Antisense strand to SEQ ID NO: 1486260
aauaacguguccaaaguca

SEQ ID NO: 1486262 - RNA, 19 nt, Artificial Sequence
  Description of Artificial Sequence: Synthetic oligonucleotide
  Sense strand starting at position 496 of SEQ ID NO: 1244407
ugagauaaauguccuauau

SEQ ID NO: 1486263 - RNA, 19 nt, Artificial Sequence
  Description of Artificial Sequence: Synthetic oligonucleotide
  Antisense strand to SEQ ID NO: 1486262
auauaggacauuuaucuca

SEQ ID NO: 1486264 - RNA, 19 nt, Artificial Sequence
  Description of Artificial Sequence: Synthetic oligonucleotide
  Sense strand starting at position 562 of SEQ ID NO: 1244407
aucuuaagugauggacuuu

SEQ ID NO: 1486265 - RNA, 19 nt, Artificial Sequence
  Description of Artificial Sequence: Synthetic oligonucleotide
  Antisense strand to SEQ ID NO: 1486264
aaaguccaucacuuaagau

SEQ ID NO: 1486266 - RNA, 19 nt, Artificial Sequence
  Description of Artificial Sequence: Synthetic oligonucleotide
  Sense strand starting at position 940 of SEQ ID NO: 1244407
gguuguuuacccucgcuau

SEQ ID NO: 1486267 - RNA, 19 nt, Artificial Sequence
  Description of Artificial Sequence: Synthetic oligonucleotide
  Antisense strand to SEQ ID NO: 1486266
auagcgaggguaaacaacc

SEQ ID NO: 1486268 - RNA, 19 nt, Artificial Sequence
  Description of Artificial Sequence: Synthetic oligonucleotide
  Sense strand starting at position 952 of SEQ ID NO: 1244407
ucgcuaugacuacagaguu

SEQ ID NO: 1486269 - RNA, 19 nt, Artificial Sequence
  Description of Artificial Sequence: Synthetic oligonucleotide
  Antisense strand to SEQ ID NO: 1486268
aacucuguagucauagcga

SEQ ID NO: 1486270 - RNA, 19 nt, Artificial Sequence
  Description of Artificial Sequence: Synthetic oligonucleotide
  Sense strand starting at position 1066 of SEQ ID NO: 1244407
gucuuugugcccgugcaaa

SEQ ID NO: 1486271 - RNA, 19 nt, Artificial Sequence
  Description of Artificial Sequence: Synthetic oligonucleotide
  Antisense strand to SEQ ID NO: 1486270
uuugcacgggcacaaagac

SEQ ID NO: 1486272 - RNA, 19 nt, Artificial Sequence
  Description of Artificial Sequence: Synthetic oligonucleotide
  Sense strand starting at position 1474 of SEQ ID NO: 1244407
gggugucccgacuacaacu

SEQ ID NO: 1486273 - RNA, 19 nt, Artificial Sequence
  Description of Artificial Sequence: Synthetic oligonucleotide
  Antisense strand to SEQ ID NO: 1486272
aguuguagucgggacaccc

SEQ ID NO: 1486274 - RNA, 19 nt, Artificial Sequence
  Description of Artificial Sequence: Synthetic oligonucleotide
  Sense strand starting at position 1640 of SEQ ID NO: 1244407
gacucuucggccgccaauu

SEQ ID NO: 1486275 - RNA, 19 nt, Artificial Sequence
  Description of Artificial Sequence: Synthetic oligonucleotide
  Antisense strand to SEQ ID NO: 1486274
aauuggcggccgaagaguc

SEQ ID NO: 1486276 - RNA, 19 nt, Artificial Sequence
  Description of Artificial Sequence: Synthetic oligonucleotide
  Sense strand starting at position 1746 of SEQ ID NO: 1244407
gccggaugguuccuacaau

SEQ ID NO: 1486277 - RNA, 19 nt, Artificial Sequence
  Description of Artificial Sequence: Synthetic oligonucleotide
  Antisense strand to SEQ ID NO: 1486276
auuguaggaaccauccggc

SEQ ID NO: 1486278 - RNA, 19 nt, Artificial Sequence
  Description of Artificial Sequence: Synthetic oligonucleotide
  Sense strand starting at position 2148 of SEQ ID NO: 1244407
gcuggagccuauccagaua

SEQ ID NO: 1486279 - RNA, 19 nt, Artificial Sequence
  Description of Artificial Sequence: Synthetic oligonucleotide
  Antisense strand to SEQ ID NO: 1486278
uaucuggauaggcuccagc

SEQ ID NO: 1486280 - RNA, 19 nt, Artificial Sequence
  Description of Artificial Sequence: Synthetic oligonucleotide
  Sense strand starting at position 2493 of SEQ ID NO: 1244407
gucugaagucuggcgucuu

SEQ ID NO: 1486281 - RNA, 19 nt, Artificial Sequence
  Description of Artificial Sequence: Synthetic oligonucleotide
  Antisense strand to SEQ ID NO: 1486280
aagacgccagacuucagac

SEQ ID NO: 1486282 - RNA, 19 nt, Artificial Sequence
  Description of Artificial Sequence: Synthetic oligonucleotide
  Sense strand starting at position 2701 of SEQ ID NO: 1244407
ggacaacuccuuugugcaa

SEQ ID NO: 1486283 - RNA, 19 nt, Artificial Sequence
  Description of Artificial Sequence: Synthetic oligonucleotide
  Antisense strand to SEQ ID NO: 1486282
uugcacaaaggaguugucc

SEQ ID NO: 1486284 - RNA, 19 nt, Artificial Sequence
  Description of Artificial Sequence: Synthetic oligonucleotide
  Sense strand starting at position 2715 of SEQ ID NO: 1244407
ugcaaaguccugcaggaua

SEQ ID NO: 1486285 - RNA, 19 nt, Artificial Sequence
  Description of Artificial Sequence: Synthetic oligonucleotide
  Antisense strand to SEQ ID NO: 1486284
uauccugcaggacuuugca

SEQ ID NO: 1486286 - RNA, 19 nt, Artificial Sequence
  Description of Artificial Sequence: Synthetic oligonucleotide
  Sense strand starting at position 2717 of SEQ ID NO: 1244407
caaaguccugcaggauaga

SEQ ID NO: 1486287 - RNA, 19 nt, Artificial Sequence
  Description of Artificial Sequence: Synthetic oligonucleotide
  Antisense strand to SEQ ID NO: 1486286
ucuauccugcaggacuuug

SEQ ID NO: 1486288 - RNA, 19 nt, Artificial Sequence
  Description of Artificial Sequence: Synthetic oligonucleotide
  Sense strand starting at position 2850 of SEQ ID NO: 1244407
aagcgaaccugaguguuaa

SEQ ID NO: 1486289 - RNA, 19 nt, Artificial Sequence
  Description of Artificial Sequence: Synthetic oligonucleotide
  Antisense strand to SEQ ID NO: 1486288
uuaacacucagguucgcuu

SEQ ID NO: 1486290 - RNA, 19 nt, Artificial Sequence
  Description of Artificial Sequence: Synthetic oligonucleotide
  Sense strand starting at position 2851 of SEQ ID NO: 1244407
agcgaaccugaguguuaag

SEQ ID NO: 1486291 - RNA, 19 nt, Artificial Sequence
  Description of Artificial Sequence: Synthetic oligonucleotide
  Antisense strand to SEQ ID NO: 1486290
cuuaacacucagguucgcu

SEQ ID NO: 1486292 - RNA, 19 nt, Artificial Sequence
  Description of Artificial Sequence: Synthetic oligonucleotide
  Sense strand starting at position 2881 of SEQ ID NO: 1244407
ugugucuggagcugaauuu

SEQ ID NO: 1486293 - RNA, 19 nt, Artificial Sequence
  Description of Artificial Sequence: Synthetic oligonucleotide
  Antisense strand to SEQ ID NO: 1486292
aaauucagcuccagacaca

SEQ ID NO: 1486294 - RNA, 19 nt, Artificial Sequence
  Description of Artificial Sequence: Synthetic oligonucleotide
  Sense strand starting at position 2950 of SEQ ID NO: 1244407
gggauugugagugaaguua

SEQ ID NO: 1486295 - RNA, 19 nt, Artificial Sequence
  Description of Artificial Sequence: Synthetic oligonucleotide
  Antisense strand to SEQ ID NO: 1486294
uaacuucacucacaauccc

SEQ ID NO: 1486296 - RNA, 19 nt, Artificial Sequence
  Description of Artificial Sequence: Synthetic oligonucleotide
  Sense strand starting at position 2961 of SEQ ID NO: 1244407
ugaaguuacuaaccggaaa

SEQ ID NO: 1486297 - RNA, 19 nt, Artificial Sequence
  Description of Artificial Sequence: Synthetic oligonucleotide
  Antisense strand to SEQ ID NO: 1486296
uuuccgguuaguaacuuca

SEQ ID NO: 1486298 - RNA, 19 nt, Artificial Sequence
  Description of Artificial Sequence: Synthetic oligonucleotide
  Sense strand starting at position 2985 of SEQ ID NO: 1244407
gcgaaucuuggagaaaugu

SEQ ID NO: 1486299 - RNA, 19 nt, Artificial Sequence
  Description of Artificial Sequence: Synthetic oligonucleotide
  Antisense strand to SEQ ID NO: 1486298
acauuucuccaagauucgc

SEQ ID NO: 1486300 - RNA, 19 nt, Artificial Sequence
  Description of Artificial Sequence: Synthetic oligonucleotide
  Sense strand starting at position 3098 of SEQ ID NO: 1244407
ccuuguacuuccucugaca

SEQ ID NO: 1486301 - RNA, 19 nt, Artificial Sequence
  Description of Artificial Sequence: Synthetic oligonucleotide
  Antisense strand to SEQ ID NO: 1486300
ugucagaggaaguacaagg

SEQ ID NO: 1486302 - RNA, 19 nt, Artificial Sequence
  Description of Artificial Sequence: Synthetic oligonucleotide
  Sense strand starting at position 3100 of SEQ ID NO: 1244407
uuguacuuccucugacacu

SEQ ID NO: 1486303 - RNA, 19 nt, Artificial Sequence
  Description of Artificial Sequence: Synthetic oligonucleotide
  Antisense strand to SEQ ID NO: 1486302
agugucagaggaaguacaa

SEQ ID NO: 1486304 - RNA, 19 nt, Artificial Sequence
  Description of Artificial Sequence: Synthetic oligonucleotide
  Sense strand starting at position 3194 of SEQ ID NO: 1244407
gcuggaauggcucauugca

SEQ ID NO: 1486305 - RNA, 19 nt, Artificial Sequence
  Description of Artificial Sequence: Synthetic oligonucleotide
  Antisense strand to SEQ ID NO: 1486304
ugcaaugagccauuccagc

SEQ ID NO: 1486306 - RNA, 19 nt, Artificial Sequence
  Description of Artificial Sequence: Synthetic oligonucleotide
  Sense strand starting at position 3454 of SEQ ID NO: 1244407
ccaccaaaucacuguguua

SEQ ID NO: 1486307 - RNA, 19 nt, Artificial Sequence
  Description of Artificial Sequence: Synthetic oligonucleotide
  Antisense strand to SEQ ID NO: 1486306
uaacacagugauuuggugg

SEQ ID NO: 1486308 - RNA, 19 nt, Artificial Sequence
  Description of Artificial Sequence: Synthetic oligonucleotide
  Sense strand starting at position 3456 of SEQ ID NO: 1244407
accaaaucacuguguuauu

SEQ ID NO: 1486309 - RNA, 19 nt, Artificial Sequence
  Description of Artificial Sequence: Synthetic oligonucleotide
  Antisense strand to SEQ ID NO: 1486308
aauaacacagugauuuggu

SEQ ID NO: 1486310 - RNA, 19 nt, Artificial Sequence
  Description of Artificial Sequence: Synthetic oligonucleotide
  Sense strand starting at position 3457 of SEQ ID NO: 1244407
ccaaaucacuguguuauug

SEQ ID NO: 1486311 - RNA, 19 nt, Artificial Sequence
  Description of Artificial Sequence: Synthetic oligonucleotide
  Antisense strand to SEQ ID NO: 1486310
caauaacacagugauuugg

SEQ ID NO: 1486312 - RNA, 19 nt, Artificial Sequence
  Description of Artificial Sequence: Synthetic oligonucleotide
  Sense strand starting at position 3461 of SEQ ID NO: 1244407
aucacuguguuauugauaa

SEQ ID NO: 1486313 - RNA, 19 nt, Artificial Sequence
  Description of Artificial Sequence: Synthetic oligonucleotide
  Antisense strand to SEQ ID NO: 1486312
uuaucaauaacacagugau

SEQ ID NO: 1486314 - RNA, 19 nt, Artificial Sequence
  Description of Artificial Sequence: Synthetic oligonucleotide
  Sense strand starting at position 3499 of SEQ ID NO: 1244407
cucaguucgaccgagcaaa

SEQ ID NO: 1486315 - RNA, 19 nt, Artificial Sequence
  Description of Artificial Sequence: Synthetic oligonucleotide
  Antisense strand to SEQ ID NO: 1486314
uuugcucggucgaacugag

SEQ ID NO: 1486316 - RNA, 19 nt, Artificial Sequence
  Description of Artificial Sequence: Synthetic oligonucleotide
  Sense strand starting at position 3522 of SEQ ID NO: 1244407
gcuccagcacucuagaacu

SEQ ID NO: 1486317 - RNA, 19 nt, Artificial Sequence
  Description of Artificial Sequence: Synthetic oligonucleotide
  Antisense strand to SEQ ID NO: 1486316
aguucuagagugcuggagc

SEQ ID NO: 1486318 - RNA, 19 nt, Artificial Sequence
  Description of Artificial Sequence: Synthetic oligonucleotide
  Sense strand starting at position 3535 of SEQ ID NO: 1244407
agaacuuagcuguaucuaa

SEQ ID NO: 1486319 - RNA, 19 nt, Artificial Sequence
  Description of Artificial Sequence: Synthetic oligonucleotide
  Antisense strand to SEQ ID NO: 1486318
uuagauacagcuaaguucu

SEQ ID NO: 1486320 - RNA, 19 nt, Artificial Sequence
  Description of Artificial Sequence: Synthetic oligonucleotide
  Sense strand starting at position 3611 of SEQ ID NO: 1244407
uggcaauccucuucccuga

SEQ ID NO: 1486321 - RNA, 19 nt, Artificial Sequence
  Description of Artificial Sequence: Synthetic oligonucleotide
  Antisense strand to SEQ ID NO: 1486320
ucagggaagaggauugcca

SEQ ID NO: 1486322 - RNA, 19 nt, Artificial Sequence
  Description of Artificial Sequence: Synthetic oligonucleotide
  Sense strand starting at position 3613 of SEQ ID NO: 1244407
gcaauccucuucccugaga

SEQ ID NO: 1486323 - RNA, 19 nt, Artificial Sequence
  Description of Artificial Sequence: Synthetic oligonucleotide
  Antisense strand to SEQ ID NO: 1486322
ucucagggaagaggauugc

SEQ ID NO: 1486324 - RNA, 19 nt, Artificial Sequence
  Description of Artificial Sequence: Synthetic oligonucleotide
  Sense strand starting at position 3631 of SEQ ID NO: 1244407
acuggcaguugcucaagau

SEQ ID NO: 1486325 - RNA, 19 nt, Artificial Sequence
  Description of Artificial Sequence: Synthetic oligonucleotide
  Antisense strand to SEQ ID NO: 1486324
aucuugagcaacugccagu

SEQ ID NO: 1486326 - RNA, 19 nt, Artificial Sequence
  Description of Artificial Sequence: Synthetic oligonucleotide
  Sense strand starting at position 3632 of SEQ ID NO: 1244407
cuggcaguugcucaagaua

SEQ ID NO: 1486327 - RNA, 19 nt, Artificial Sequence
  Description of Artificial Sequence: Synthetic oligonucleotide
  Antisense strand to SEQ ID NO: 1486326
uaucuugagcaacugccag

SEQ ID NO: 1486328 - RNA, 19 nt, Artificial Sequence
  Description of Artificial Sequence: Synthetic oligonucleotide
  Sense strand starting at position 3635 of SEQ ID NO: 1244407
gcaguugcucaagauagga

SEQ ID NO: 1486329 - RNA, 19 nt, Artificial Sequence
  Description of Artificial Sequence: Synthetic oligonucleotide
  Antisense strand to SEQ ID NO: 1486328
uccuaucuugagcaacugc

SEQ ID NO: 1486330 - RNA, 19 nt, Artificial Sequence
  Description of Artificial Sequence: Synthetic oligonucleotide
  Sense strand starting at position 3707 of SEQ ID NO: 1244407
gcaaauaaacgcgugucuu

SEQ ID NO: 1486331 - RNA, 19 nt, Artificial Sequence
  Description of Artificial Sequence: Synthetic oligonucleotide
  Antisense strand to SEQ ID NO: 1486330
aagacacgcguuuauuugc

SEQ ID NO: 1486332 - RNA, 19 nt, Artificial Sequence
  Description of Artificial Sequence: Synthetic oligonucleotide
  Sense strand starting at position 1210 of SEQ ID NO: 1244408
gggaaauagcccugagacu

SEQ ID NO: 1486333 - RNA, 19 nt, Artificial Sequence
  Description of Artificial Sequence: Synthetic oligonucleotide
  Antisense strand to SEQ ID NO: 1486332
agucucagggcuauuuccc

SEQ ID NO: 1486334 - RNA, 19 nt, Artificial Sequence
  Description of Artificial Sequence: Synthetic oligonucleotide
  Sense strand starting at position 1270 of SEQ ID NO: 1244408
caugucaagcgggaaagau

SEQ ID NO: 1486335 - RNA, 19 nt, Artificial Sequence
  Description of Artificial Sequence: Synthetic oligonucleotide
  Antisense strand to SEQ ID NO: 1486334
aucuuucccgcuugacaug

SEQ ID NO: 1486336 - RNA, 19 nt, Artificial Sequence
  Description of Artificial Sequence: Synthetic oligonucleotide
  Sense strand starting at position 1282 of SEQ ID NO: 1244408
gaaagauaccugggcacau

SEQ ID NO: 1486337 - RNA, 19 nt, Artificial Sequence
  Description of Artificial Sequence: Synthetic oligonucleotide
  Antisense strand to SEQ ID NO: 1486336
augugcccagguaucuuuc

SEQ ID NO: 1486338 - RNA, 19 nt, Artificial Sequence
  Description of Artificial Sequence: Synthetic oligonucleotide
  Sense strand starting at position 1340 of SEQ ID NO: 1244408
gcagcaagguguucugauu

SEQ ID NO: 1486339 - RNA, 19 nt, Artificial Sequence
  Description of Artificial Sequence: Synthetic oligonucleotide
  Antisense strand to SEQ ID NO: 1486338
aaucagaacaccuugcugc

SEQ ID NO: 1486340 - RNA, 19 nt, Artificial Sequence
  Description of Artificial Sequence: Synthetic oligonucleotide
  Sense strand starting at position 1465 of SEQ ID NO: 1244408
guugacuuccgucauuagu

SEQ ID NO: 1486341 - RNA, 19 nt, Artificial Sequence
  Description of Artificial Sequence: Synthetic oligonucleotide
  Antisense strand to SEQ ID NO: 1486340
acuaaugacggaagucaac

SEQ ID NO: 1486342 - RNA, 19 nt, Artificial Sequence
  Description of Artificial Sequence: Synthetic oligonucleotide
  Sense strand starting at position 1473 of SEQ ID NO: 1244408
ccgucauuaguuccgucua

SEQ ID NO: 1486343 - RNA, 19 nt, Artificial Sequence
  Description of Artificial Sequence: Synthetic oligonucleotide
  Antisense strand to SEQ ID NO: 1486342
uagacggaacuaaugacgg

SEQ ID NO: 1486344 - RNA, 19 nt, Artificial Sequence
  Description of Artificial Sequence: Synthetic oligonucleotide
  Sense strand starting at position 1475 of SEQ ID NO: 1244408
gucauuaguuccgucuaga

SEQ ID NO: 1486345 - RNA, 19 nt, Artificial Sequence
  Description of Artificial Sequence: Synthetic oligonucleotide
  Antisense strand to SEQ ID NO: 1486344
ucuagacggaacuaaugac

SEQ ID NO: 1486346 - RNA, 19 nt, Artificial Sequence
  Description of Artificial Sequence: Synthetic oligonucleotide
  Sense strand starting at position 1478 of SEQ ID NO: 1244408
auuaguuccgucuagacac

SEQ ID NO: 1486347 - RNA, 19 nt, Artificial Sequence
  Description of Artificial Sequence: Synthetic oligonucleotide
  Antisense strand to SEQ ID NO: 1486346
gugucuagacggaacuaau

SEQ ID NO: 1486348 - RNA, 19 nt, Artificial Sequence
  Description of Artificial Sequence: Synthetic oligonucleotide
  Sense strand starting at position 2627 of SEQ ID NO: 1244408
gcucuuguggugggugaga

SEQ ID NO: 1486349 - RNA, 19 nt, Artificial Sequence
  Description of Artificial Sequence: Synthetic oligonucleotide
  Antisense strand to SEQ ID NO: 1486348
ucucacccaccacaagagc

SEQ ID NO: 1486350 - RNA, 19 nt, Artificial Sequence
  Description of Artificial Sequence: Synthetic oligonucleotide
  Sense strand starting at position 2638 of SEQ ID NO: 1244408
gggugagacuuagugguuu

SEQ ID NO: 1486351 - RNA, 19 nt, Artificial Sequence
  Description of Artificial Sequence: Synthetic oligonucleotide
  Antisense strand to SEQ ID NO: 1486350
aaaccacuaagucucaccc

SEQ ID NO: 1486352 - RNA, 19 nt, Artificial Sequence
  Description of Artificial Sequence: Synthetic oligonucleotide
  Sense strand starting at position 2760 of SEQ ID NO: 1244408
ccagauuucugucauccag

SEQ ID NO: 1486353 - RNA, 19 nt, Artificial Sequence
  Description of Artificial Sequence: Synthetic oligonucleotide
  Antisense strand to SEQ ID NO: 1486352
cuggaugacagaaaucugg

SEQ ID NO: 1486354 - RNA, 19 nt, Artificial Sequence
  Description of Artificial Sequence: Synthetic oligonucleotide
  Sense strand starting at position 2823 of SEQ ID NO: 1244408
cccuaagugucugugauaa

SEQ ID NO: 1486355 - RNA, 19 nt, Artificial Sequence
  Description of Artificial Sequence: Synthetic oligonucleotide
  Antisense strand to SEQ ID NO: 1486354
uuaucacagacacuuaggg

SEQ ID NO: 1486356 - RNA, 19 nt, Artificial Sequence
  Description of Artificial Sequence: Synthetic oligonucleotide
  Sense strand starting at position 3032 of SEQ ID NO: 1244408
cuacucuuccuacgugagu

SEQ ID NO: 1486357 - RNA, 19 nt, Artificial Sequence
  Description of Artificial Sequence: Synthetic oligonucleotide
  Antisense strand to SEQ ID NO: 1486356
acucacguaggaagaguag

SEQ ID NO: 1486358 - RNA, 19 nt, Artificial Sequence
  Description of Artificial Sequence: Synthetic oligonucleotide
  Sense strand starting at position 3043 of SEQ ID NO: 1244408
acgugagugugacuuauag

SEQ ID NO: 1486359 - RNA, 19 nt, Artificial Sequence
  Description of Artificial Sequence: Synthetic oligonucleotide
  Antisense strand to SEQ ID NO: 1486358
cuauaagucacacucacgu

SEQ ID NO: 1486360 - RNA, 19 nt, Artificial Sequence
  Description of Artificial Sequence: Synthetic oligonucleotide
  Sense strand starting at position 3045 of SEQ ID NO: 1244408
gugagugugacuuauagaa

SEQ ID NO: 1486361 - RNA, 19 nt, Artificial Sequence
  Description of Artificial Sequence: Synthetic oligonucleotide
  Antisense strand to SEQ ID NO: 1486360
uucuauaagucacacucac

SEQ ID NO: 1486362 - RNA, 19 nt, Artificial Sequence
  Description of Artificial Sequence: Synthetic oligonucleotide
  Sense strand starting at position 3074 of SEQ ID NO: 1244408
acuuaaguguuccuggcuu

SEQ ID NO: 1486363 - RNA, 19 nt, Artificial Sequence
  Description of Artificial Sequence: Synthetic oligonucleotide
  Antisense strand to SEQ ID NO: 1486362
aagccaggaacacuuaagu

SEQ ID NO: 1486364 - RNA, 19 nt, Artificial Sequence
  Description of Artificial Sequence: Synthetic oligonucleotide
  Sense strand starting at position 3101 of SEQ ID NO: 1244408
gcacauugcuugcuggaga

SEQ ID NO: 1486365 - RNA, 19 nt, Artificial Sequence
  Description of Artificial Sequence: Synthetic oligonucleotide
  Antisense strand to SEQ ID NO: 1486364
ucuccagcaagcaaugugc

SEQ ID NO: 1486366 - RNA, 19 nt, Artificial Sequence
  Description of Artificial Sequence: Synthetic oligonucleotide
  Sense strand starting at position 3137 of SEQ ID NO: 1244408
gcugcuugagcagaccaua

SEQ ID NO: 1486367 - RNA, 19 nt, Artificial Sequence
  Description of Artificial Sequence: Synthetic oligonucleotide
  Antisense strand to SEQ ID NO: 1486366
uauggucugcucaagcagc

SEQ ID NO: 1486368 - RNA, 19 nt, Artificial Sequence
  Description of Artificial Sequence: Synthetic oligonucleotide
  Sense strand starting at position 3207 of SEQ ID NO: 1244408
gguggcucagaauguaagu

SEQ ID NO: 1486369 - RNA, 19 nt, Artificial Sequence
  Description of Artificial Sequence: Synthetic oligonucleotide
  Antisense strand to SEQ ID NO: 1486368
acuuacauucugagccacc

SEQ ID NO: 1486370 - RNA, 19 nt, Artificial Sequence
  Description of Artificial Sequence: Synthetic oligonucleotide
  Sense strand starting at position 3212 of SEQ ID NO: 1244408
cucagaauguaagucagau

SEQ ID NO: 1486371 - RNA, 19 nt, Artificial Sequence
  Description of Artificial Sequence: Synthetic oligonucleotide
  Antisense strand to SEQ ID NO: 1486370
aucugacuuacauucugag

SEQ ID NO: 1486372 - RNA, 19 nt, Artificial Sequence
  Description of Artificial Sequence: Synthetic oligonucleotide
  Sense strand starting at position 3216 of SEQ ID NO: 1244408
gaauguaagucagauuuau

SEQ ID NO: 1486373 - RNA, 19 nt, Artificial Sequence
  Description of Artificial Sequence: Synthetic oligonucleotide
  Antisense strand to SEQ ID NO: 1486372
auaaaucugacuuacauuc

SEQ ID NO: 1486374 - RNA, 19 nt, Artificial Sequence
  Description of Artificial Sequence: Synthetic oligonucleotide
  Sense strand starting at position 3246 of SEQ ID NO: 1244408
gguguuugucagagugguc

SEQ ID NO: 1486375 - RNA, 19 nt, Artificial Sequence
  Description of Artificial Sequence: Synthetic oligonucleotide
  Antisense strand to SEQ ID NO: 1486374
gaccacucugacaaacacc

SEQ ID NO: 1486376 - RNA, 19 nt, Artificial Sequence
  Description of Artificial Sequence: Synthetic oligonucleotide
  Sense strand starting at position 3249 of SEQ ID NO: 1244408
guuugucagaguggucaag

SEQ ID NO: 1486377 - RNA, 19 nt, Artificial Sequence
  Description of Artificial Sequence: Synthetic oligonucleotide
  Antisense strand to SEQ ID NO: 1486376
cuugaccacucugacaaac

SEQ ID NO: 1486378 - RNA, 19 nt, Artificial Sequence
  Description of Artificial Sequence: Synthetic oligonucleotide
  Sense strand starting at position 3653 of SEQ ID NO: 1244408
gugauugacagcuguugac

SEQ ID NO: 1486379 - RNA, 19 nt, Artificial Sequence
  Description of Artificial Sequence: Synthetic oligonucleotide
  Antisense strand to SEQ ID NO: 1486378
gucaacagcugucaaucac

SEQ ID NO: 1486380 - RNA, 19 nt, Artificial Sequence
  Description of Artificial Sequence: Synthetic oligonucleotide
  Sense strand starting at position 3704 of SEQ ID NO: 1244408
cgcuuuggucuuuacugaa

SEQ ID NO: 1486381 - RNA, 19 nt, Artificial Sequence
  Description of Artificial Sequence: Synthetic oligonucleotide
  Antisense strand to SEQ ID NO: 1486380
uucaguaaagaccaaagcg

SEQ ID NO: 1486382 - RNA, 19 nt, Artificial Sequence
  Description of Artificial Sequence: Synthetic oligonucleotide
  Sense strand starting at position 3742 of SEQ ID NO: 1244408
uauagucuuggauggcgua

SEQ ID NO: 1486383 - RNA, 19 nt, Artificial Sequence
  Description of Artificial Sequence: Synthetic oligonucleotide
  Antisense strand to SEQ ID NO: 1486382
uacgccauccaagacuaua

SEQ ID NO: 1486384 - RNA, 19 nt, Artificial Sequence
  Description of Artificial Sequence: Synthetic oligonucleotide
  Sense strand starting at position 3780 of SEQ ID NO: 1244408
agagacuucuaauuacagu

SEQ ID NO: 1486385 - RNA, 19 nt, Artificial Sequence
  Description of Artificial Sequence: Synthetic oligonucleotide
  Antisense strand to SEQ ID NO: 1486384
acuguaauuagaagucucu

SEQ ID NO: 1486386 - RNA, 19 nt, Artificial Sequence
  Description of Artificial Sequence: Synthetic oligonucleotide
  Sense strand starting at position 3798 of SEQ ID NO: 1244408
uuugguggacucugcaauu

SEQ ID NO: 1486387 - RNA, 19 nt, Artificial Sequence
  Description of Artificial Sequence: Synthetic oligonucleotide
  Antisense strand to SEQ ID NO: 1486386
aauugcagaguccaccaaa

SEQ ID NO: 1486388 - RNA, 19 nt, Artificial Sequence
  Description of Artificial Sequence: Synthetic oligonucleotide
  Sense strand starting at position 3832 of SEQ ID NO: 1244408
auugauucucacugucuua

SEQ ID NO: 1486389 - RNA, 19 nt, Artificial Sequence
  Description of Artificial Sequence: Synthetic oligonucleotide
  Antisense strand to SEQ ID NO: 1486388
uaagacagugagaaucaau

SEQ ID NO: 1486390 - RNA, 19 nt, Artificial Sequence
  Description of Artificial Sequence: Synthetic oligonucleotide
  Sense strand starting at position 3888 of SEQ ID NO: 1244408
aguuuaucuucucuaugua

SEQ ID NO: 1486391 - RNA, 19 nt, Artificial Sequence
  Description of Artificial Sequence: Synthetic oligonucleotide
  Antisense strand to SEQ ID NO: 1486390
uacauagagaagauaaacu

SEQ ID NO: 1486392 - RNA, 19 nt, Artificial Sequence
  Description of Artificial Sequence: Synthetic oligonucleotide
  Sense strand starting at position 3889 of SEQ ID NO: 1244408
guuuaucuucucuauguaa

SEQ ID NO: 1486393 - RNA, 19 nt, Artificial Sequence
  Description of Artificial Sequence: Synthetic oligonucleotide
  Antisense strand to SEQ ID NO: 1486392
uuacauagagaagauaaac

SEQ ID NO: 1486394 - RNA, 19 nt, Artificial Sequence
  Description of Artificial Sequence: Synthetic oligonucleotide
  Sense strand starting at position 3906 of SEQ ID NO: 1244408
aacguaugauuggucauag

SEQ ID NO: 1486395 - RNA, 19 nt, Artificial Sequence
  Description of Artificial Sequence: Synthetic oligonucleotide
  Antisense strand to SEQ ID NO: 1486394
cuaugaccaaucauacguu

SEQ ID NO: 1486396 - RNA, 19 nt, Artificial Sequence
  Description of Artificial Sequence: Synthetic oligonucleotide
  Sense strand starting at position 3907 of SEQ ID NO: 1244408
acguaugauuggucauagu

SEQ ID NO: 1486397 - RNA, 19 nt, Artificial Sequence
  Description of Artificial Sequence: Synthetic oligonucleotide
  Antisense strand to SEQ ID NO: 1486396
acuaugaccaaucauacgu

SEQ ID NO: 1486398 - RNA, 19 nt, Artificial Sequence
  Description of Artificial Sequence: Synthetic oligonucleotide
  Sense strand starting at position 3914 of SEQ ID NO: 1244408
auuggucauaguuguuaca

SEQ ID NO: 1486399 - RNA, 19 nt, Artificial Sequence
  Description of Artificial Sequence: Synthetic oligonucleotide
  Antisense strand to SEQ ID NO: 1486398
uguaacaacuaugaccaau

SEQ ID NO: 1486400 - RNA, 19 nt, Artificial Sequence
  Description of Artificial Sequence: Synthetic oligonucleotide
  Sense strand starting at position 3916 of SEQ ID NO: 1244408
uggucauaguuguuacauc

SEQ ID NO: 1486401 - RNA, 19 nt, Artificial Sequence
  Description of Artificial Sequence: Synthetic oligonucleotide
  Antisense strand to SEQ ID NO: 1486400
gauguaacaacuaugacca

SEQ ID NO: 1486402 - RNA, 19 nt, Artificial Sequence
  Description of Artificial Sequence: Synthetic oligonucleotide
  Sense strand starting at position 3938 of SEQ ID NO: 1244408
gggcccucuugccuggaua

SEQ ID NO: 1486403 - RNA, 19 nt, Artificial Sequence
  Description of Artificial Sequence: Synthetic oligonucleotide
  Antisense strand to SEQ ID NO: 1486402
uauccaggcaagagggccc

SEQ ID NO: 1486404 - RNA, 19 nt, Artificial Sequence
  Description of Artificial Sequence: Synthetic oligonucleotide
  Sense strand starting at position 3939 of SEQ ID NO: 1244408
ggcccucuugccuggauaa

SEQ ID NO: 1486405 - RNA, 19 nt, Artificial Sequence
  Description of Artificial Sequence: Synthetic oligonucleotide
  Antisense strand to SEQ ID NO: 1486404
uuauccaggcaagagggcc

SEQ ID NO: 1486406 - RNA, 19 nt, Artificial Sequence
  Description of Artificial Sequence: Synthetic oligonucleotide
  Sense strand starting at position 3941 of SEQ ID NO: 1244408
cccucuugccuggauaagu

SEQ ID NO: 1486407 - RNA, 19 nt, Artificial Sequence
  Description of Artificial Sequence: Synthetic oligonucleotide
  Antisense strand to SEQ ID NO: 1486406
acuuauccaggcaagaggg

SEQ ID NO: 1486408 - RNA, 19 nt, Artificial Sequence
  Description of Artificial Sequence: Synthetic oligonucleotide
  Sense strand starting at position 3959 of SEQ ID NO: 1244408
uagccagaggguuggaaua

SEQ ID NO: 1486409 - RNA, 19 nt, Artificial Sequence
  Description of Artificial Sequence: Synthetic oligonucleotide
  Antisense strand to SEQ ID NO: 1486408
uauuccaacccucuggcua

SEQ ID NO: 1486410 - RNA, 19 nt, Artificial Sequence
  Description of Artificial Sequence: Synthetic oligonucleotide
  Sense strand starting at position 3976 of SEQ ID NO: 1244408
uaaucagaugguugacuca

SEQ ID NO: 1486411 - RNA, 19 nt, Artificial Sequence
  Description of Artificial Sequence: Synthetic oligonucleotide
  Antisense strand to SEQ ID NO: 1486410
ugagucaaccaucugauua

SEQ ID NO: 1486412 - RNA, 19 nt, Artificial Sequence
  Description of Artificial Sequence: Synthetic oligonucleotide
  Sense strand starting at position 61 of SEQ ID NO: 1244409
uucuuucugucucugagua

SEQ ID NO: 1486413 - RNA, 19 nt, Artificial Sequence
  Description of Artificial Sequence: Synthetic oligonucleotide
  Antisense strand to SEQ ID NO: 1486412
uacucagagacagaaagaa

SEQ ID NO: 1486414 - RNA, 19 nt, Artificial Sequence
  Description of Artificial Sequence: Synthetic oligonucleotide
  Sense strand starting at position 62 of SEQ ID NO: 1244409
ucuuucugucucugaguau

SEQ ID NO: 1486415 - RNA, 19 nt, Artificial Sequence
  Description of Artificial Sequence: Synthetic oligonucleotide
  Antisense strand to SEQ ID NO: 1486414
auacucagagacagaaaga

SEQ ID NO: 1486416 - RNA, 19 nt, Artificial Sequence
  Description of Artificial Sequence: Synthetic oligonucleotide
  Sense strand starting at position 65 of SEQ ID NO: 1244409
uucugucucugaguauaau

SEQ ID NO: 1486417 - RNA, 19 nt, Artificial Sequence
  Description of Artificial Sequence: Synthetic oligonucleotide
  Antisense strand to SEQ ID NO: 1486416
auuauacucagagacagaa

SEQ ID NO: 1486418 - RNA, 19 nt, Artificial Sequence
  Description of Artificial Sequence: Synthetic oligonucleotide
  Sense strand starting at position 66 of SEQ ID NO: 1244409
ucugucucugaguauaaug

SEQ ID NO: 1486419 - RNA, 19 nt, Artificial Sequence
  Description of Artificial Sequence: Synthetic oligonucleotide
  Antisense strand to SEQ ID NO: 1486418
cauuauacucagagacaga

SEQ ID NO: 1486420 - RNA, 19 nt, Artificial Sequence
  Description of Artificial Sequence: Synthetic oligonucleotide
  Sense strand starting at position 119 of SEQ ID NO: 1244409
ucuggaaccucagaagaga

SEQ ID NO: 1486421 - RNA, 19 nt, Artificial Sequence
  Description of Artificial Sequence: Synthetic oligonucleotide
  Antisense strand to SEQ ID NO: 1486420
ucucuucugagguuccaga

SEQ ID NO: 1486422 - RNA, 19 nt, Artificial Sequence
  Description of Artificial Sequence: Synthetic oligonucleotide
  Sense strand starting at position 271 of SEQ ID NO: 1244409
ggugaaguucugggugaug

SEQ ID NO: 1486423 - RNA, 19 nt, Artificial Sequence
  Description of Artificial Sequence: Synthetic oligonucleotide
  Antisense strand to SEQ ID NO: 1486422
caucacccagaacuucacc

SEQ ID NO: 1486424 - RNA, 19 nt, Artificial Sequence
  Description of Artificial Sequence: Synthetic oligonucleotide
  Sense strand starting at position 273 of SEQ ID NO: 1244409
ugaaguucugggugaugcu

SEQ ID NO: 1486425 - RNA, 19 nt, Artificial Sequence
  Description of Artificial Sequence: Synthetic oligonucleotide
  Antisense strand to SEQ ID NO: 1486424
agcaucacccagaacuuca

SEQ ID NO: 1486426 - RNA, 19 nt, Artificial Sequence
  Description of Artificial Sequence: Synthetic oligonucleotide
  Sense strand starting at position 282 of SEQ ID NO: 1244409
gggugaugcugggcaauca

SEQ ID NO: 1486427 - RNA, 19 nt, Artificial Sequence
  Description of Artificial Sequence: Synthetic oligonucleotide
  Antisense strand to SEQ ID NO: 1486426
ugauugcccagcaucaccc

SEQ ID NO: 1486428 - RNA, 19 nt, Artificial Sequence
  Description of Artificial Sequence: Synthetic oligonucleotide
  Sense strand starting at position 356 of SEQ ID NO: 1244409
caacauugucaggguauug

SEQ ID NO: 1486429 - RNA, 19 nt, Artificial Sequence
  Description of Artificial Sequence: Synthetic oligonucleotide
  Antisense strand to SEQ ID NO: 1486428
caauacccugacaauguug

SEQ ID NO: 1486430 - RNA, 19 nt, Artificial Sequence
  Description of Artificial Sequence: Synthetic oligonucleotide
  Sense strand starting at position 428 of SEQ ID NO: 1244409
uccaaauggcaucggagau

SEQ ID NO: 1486431 - RNA, 19 nt, Artificial Sequence
  Description of Artificial Sequence: Synthetic oligonucleotide
  Antisense strand to SEQ ID NO: 1486430
aucuccgaugccauuugga

SEQ ID NO: 1486432 - RNA, 19 nt, Artificial Sequence
  Description of Artificial Sequence: Synthetic oligonucleotide
  Sense strand starting at position 1149 of SEQ ID NO: 1244409
cuggucugauccuuuacau

SEQ ID NO: 1486433 - RNA, 19 nt, Artificial Sequence
  Description of Artificial Sequence: Synthetic oligonucleotide
  Antisense strand to SEQ ID NO: 1486432
auguaaaggaucagaccag

SEQ ID NO: 1486434 - RNA, 19 nt, Artificial Sequence
  Description of Artificial Sequence: Synthetic oligonucleotide
  Sense strand starting at position 1285 of SEQ ID NO: 1244409
cacugaagucuugauagug

SEQ ID NO: 1486435 - RNA, 19 nt, Artificial Sequence
  Description of Artificial Sequence: Synthetic oligonucleotide
  Antisense strand to SEQ ID NO: 1486434
cacuaucaagacuucagug

SEQ ID NO: 1486436 - RNA, 19 nt, Artificial Sequence
  Description of Artificial Sequence: Synthetic oligonucleotide
  Sense strand starting at position 2103 of SEQ ID NO: 1244409
guaguuacggccugggaga

SEQ ID NO: 1486437 - RNA, 19 nt, Artificial Sequence
  Description of Artificial Sequence: Synthetic oligonucleotide
  Antisense strand to SEQ ID NO: 1486436
ucucccaggccguaacuac

SEQ ID NO: 1486438 - RNA, 19 nt, Artificial Sequence
  Description of Artificial Sequence: Synthetic oligonucleotide
  Sense strand starting at position 2530 of SEQ ID NO: 1244409
aguaaucacugcgcugaga

SEQ ID NO: 1486439 - RNA, 19 nt, Artificial Sequence
  Description of Artificial Sequence: Synthetic oligonucleotide
  Antisense strand to SEQ ID NO: 1486438
ucucagcgcagugauuacu

SEQ ID NO: 1486440 - RNA, 19 nt, Artificial Sequence
  Description of Artificial Sequence: Synthetic oligonucleotide
  Sense strand starting at position 2532 of SEQ ID NO: 1244409
uaaucacugcgcugagauu

SEQ ID NO: 1486441 - RNA, 19 nt, Artificial Sequence
  Description of Artificial Sequence: Synthetic oligonucleotide
  Antisense strand to SEQ ID NO: 1486440
aaucucagcgcagugauua

SEQ ID NO: 1486442 - RNA, 19 nt, Artificial Sequence
  Description of Artificial Sequence: Synthetic oligonucleotide
  Sense strand starting at position 2553 of SEQ ID NO: 1244409
ucaccagaagccugagaaa

SEQ ID NO: 1486443 - RNA, 19 nt, Artificial Sequence
  Description of Artificial Sequence: Synthetic oligonucleotide
  Antisense strand to SEQ ID NO: 1486442
uuucucaggcuucugguga

SEQ ID NO: 1486444 - RNA, 19 nt, Artificial Sequence
  Description of Artificial Sequence: Synthetic oligonucleotide
  Sense strand starting at position 2564 of SEQ ID NO: 1244409
cugagaaauagguaugcuu

SEQ ID NO: 1486445 - RNA, 19 nt, Artificial Sequence
  Description of Artificial Sequence: Synthetic oligonucleotide
  Antisense strand to SEQ ID NO: 1486444
aagcauaccuauuucucag

SEQ ID NO: 1486446 - RNA, 19 nt, Artificial Sequence
  Description of Artificial Sequence: Synthetic oligonucleotide
  Sense strand starting at position 2566 of SEQ ID NO: 1244409
gagaaauagguaugcuuga

SEQ ID NO: 1486447 - RNA, 19 nt, Artificial Sequence
  Description of Artificial Sequence: Synthetic oligonucleotide
  Antisense strand to SEQ ID NO: 1486446
ucaagcauaccuauuucuc

SEQ ID NO: 1486448 - RNA, 19 nt, Artificial Sequence
  Description of Artificial Sequence: Synthetic oligonucleotide
  Sense strand starting at position 2573 of SEQ ID NO: 1244409
agguaugcuugacuccauu

SEQ ID NO: 1486449 - RNA, 19 nt, Artificial Sequence
  Description of Artificial Sequence: Synthetic oligonucleotide
  Antisense strand to SEQ ID NO: 1486448
aauggagucaagcauaccu

SEQ ID NO: 1486450 - RNA, 19 nt, Artificial Sequence
  Description of Artificial Sequence: Synthetic oligonucleotide
  Sense strand starting at position 2622 of SEQ ID NO: 1244409
gugaaagacaugcauaagu

SEQ ID NO: 1486451 - RNA, 19 nt, Artificial Sequence
  Description of Artificial Sequence: Synthetic oligonucleotide
  Antisense strand to SEQ ID NO: 1486450
acuuaugcaugucuuucac

SEQ ID NO: 1486452 - RNA, 19 nt, Artificial Sequence
  Description of Artificial Sequence: Synthetic oligonucleotide
  Sense strand starting at position 2730 of SEQ ID NO: 1244409
ggaauuguccugugaagcc

SEQ ID NO: 1486453 - RNA, 19 nt, Artificial Sequence
  Description of Artificial Sequence: Synthetic oligonucleotide
  Antisense strand to SEQ ID NO: 1486452
ggcuucacaggacaauucc

SEQ ID NO: 1486454 - RNA, 19 nt, Artificial Sequence
  Description of Artificial Sequence: Synthetic oligonucleotide
  Sense strand starting at position 2740 of SEQ ID NO: 1244409
ugugaagccuuguuuggga

SEQ ID NO: 1486455 - RNA, 19 nt, Artificial Sequence
  Description of Artificial Sequence: Synthetic oligonucleotide
  Antisense strand to SEQ ID NO: 1486454
ucccaaacaaggcuucaca

SEQ ID NO: 1486456 - RNA, 19 nt, Artificial Sequence
  Description of Artificial Sequence: Synthetic oligonucleotide
  Sense strand starting at position 2742 of SEQ ID NO: 1244409
ugaagccuuguuugggaua

SEQ ID NO: 1486457 - RNA, 19 nt, Artificial Sequence
  Description of Artificial Sequence: Synthetic oligonucleotide
  Antisense strand to SEQ ID NO: 1486456
uaucccaaacaaggcuuca

SEQ ID NO: 1486458 - RNA, 19 nt, Artificial Sequence
  Description of Artificial Sequence: Synthetic oligonucleotide
  Sense strand starting at position 2747 of SEQ ID NO: 1244409
ccuuguuugggauaggagu

SEQ ID NO: 1486459 - RNA, 19 nt, Artificial Sequence
  Description of Artificial Sequence: Synthetic oligonucleotide
  Antisense strand to SEQ ID NO: 1486458
acuccuaucccaaacaagg

SEQ ID NO: 1486460 - RNA, 19 nt, Artificial Sequence
  Description of Artificial Sequence: Synthetic oligonucleotide
  Sense strand starting at position 2780 of SEQ ID NO: 1244409
cccaaagagaggcguaaau

SEQ ID NO: 1486461 - RNA, 19 nt, Artificial Sequence
  Description of Artificial Sequence: Synthetic oligonucleotide
  Antisense strand to SEQ ID NO: 1486460
auuuacgccucucuuuggg

SEQ ID NO: 1486462 - RNA, 19 nt, Artificial Sequence
  Description of Artificial Sequence: Synthetic oligonucleotide
  Sense strand starting at position 2900 of SEQ ID NO: 1244409
ggcucagacuucuuugaaa

SEQ ID NO: 1486463 - RNA, 19 nt, Artificial Sequence
  Description of Artificial Sequence: Synthetic oligonucleotide
  Antisense strand to SEQ ID NO: 1486462
uuucaaagaagucugagcc

SEQ ID NO: 1486464 - RNA, 19 nt, Artificial Sequence
  Description of Artificial Sequence: Synthetic oligonucleotide
  Sense strand starting at position 2902 of SEQ ID NO: 1244409
cucagacuucuuugaaagg

SEQ ID NO: 1486465 - RNA, 19 nt, Artificial Sequence
  Description of Artificial Sequence: Synthetic oligonucleotide
  Antisense strand to SEQ ID NO: 1486464
ccuuucaaagaagucugag

SEQ ID NO: 1486466 - RNA, 19 nt, Artificial Sequence
  Description of Artificial Sequence: Synthetic oligonucleotide
  Sense strand starting at position 3000 of SEQ ID NO: 1244409
cccauagcugugcagugaa

SEQ ID NO: 1486467 - RNA, 19 nt, Artificial Sequence
  Description of Artificial Sequence: Synthetic oligonucleotide
  Antisense strand to SEQ ID NO: 1486466
uucacugcacagcuauggg

SEQ ID NO: 1486468 - RNA, 19 nt, Artificial Sequence
  Description of Artificial Sequence: Synthetic oligonucleotide
  Sense strand starting at position 3045 of SEQ ID NO: 1244409
cuaauuacggugcaaacuu

SEQ ID NO: 1486469 - RNA, 19 nt, Artificial Sequence
  Description of Artificial Sequence: Synthetic oligonucleotide
  Antisense strand to SEQ ID NO: 1486468
aaguuugcaccguaauuag

SEQ ID NO: 1486470 - RNA, 19 nt, Artificial Sequence
  Description of Artificial Sequence: Synthetic oligonucleotide
  Sense strand starting at position 3142 of SEQ ID NO: 1244409
ugcccuacccuuugaggua

SEQ ID NO: 1486471 - RNA, 19 nt, Artificial Sequence
  Description of Artificial Sequence: Synthetic oligonucleotide
  Antisense strand to SEQ ID NO: 1486470
uaccucaaaggguagggca

SEQ ID NO: 1486472 - RNA, 19 nt, Artificial Sequence
  Description of Artificial Sequence: Synthetic oligonucleotide
  Sense strand starting at position 3175 of SEQ ID NO: 1244409
cuucuaguguuguugacua

SEQ ID NO: 1486473 - RNA, 19 nt, Artificial Sequence
  Description of Artificial Sequence: Synthetic oligonucleotide
  Antisense strand to SEQ ID NO: 1486472
uagucaacaacacuagaag

SEQ ID NO: 1486474 - RNA, 19 nt, Artificial Sequence
  Description of Artificial Sequence: Synthetic oligonucleotide
  Sense strand starting at position 3177 of SEQ ID NO: 1244409
ucuaguguuguugacuaau

SEQ ID NO: 1486475 - RNA, 19 nt, Artificial Sequence
  Description of Artificial Sequence: Synthetic oligonucleotide
  Antisense strand to SEQ ID NO: 1486474
auuagucaacaacacuaga

SEQ ID NO: 1486476 - RNA, 19 nt, Artificial Sequence
  Description of Artificial Sequence: Synthetic oligonucleotide
  Sense strand starting at position 3179 of SEQ ID NO: 1244409
uaguguuguugacuaauua

SEQ ID NO: 1486477 - RNA, 19 nt, Artificial Sequence
  Description of Artificial Sequence: Synthetic oligonucleotide
  Antisense strand to SEQ ID NO: 1486476
uaauuagucaacaacacua

SEQ ID NO: 1486478 - RNA, 19 nt, Artificial Sequence
  Description of Artificial Sequence: Synthetic oligonucleotide
  Sense strand starting at position 3180 of SEQ ID NO: 1244409
aguguuguugacuaauuag

SEQ ID NO: 1486479 - RNA, 19 nt, Artificial Sequence
  Description of Artificial Sequence: Synthetic oligonucleotide
  Antisense strand to SEQ ID NO: 1486478
cuaauuagucaacaacacu

SEQ ID NO: 1486480 - RNA, 19 nt, Artificial Sequence
  Description of Artificial Sequence: Synthetic oligonucleotide
  Sense strand starting at position 3183 of SEQ ID NO: 1244409
guuguugacuaauuagguu

SEQ ID NO: 1486481 - RNA, 19 nt, Artificial Sequence
  Description of Artificial Sequence: Synthetic oligonucleotide
  Antisense strand to SEQ ID NO: 1486480
aaccuaauuagucaacaac

SEQ ID NO: 1486482 - RNA, 19 nt, Artificial Sequence
  Description of Artificial Sequence: Synthetic oligonucleotide
  Sense strand starting at position 3191 of SEQ ID NO: 1244409
cuaauuagguuucucuaga

SEQ ID NO: 1486483 - RNA, 19 nt, Artificial Sequence
  Description of Artificial Sequence: Synthetic oligonucleotide
  Antisense strand to SEQ ID NO: 1486482
ucuagagaaaccuaauuag

SEQ ID NO: 1486484 - RNA, 19 nt, Artificial Sequence
  Description of Artificial Sequence: Synthetic oligonucleotide
  Sense strand starting at position 3615 of SEQ ID NO: 1244409
uuucgccacugaguaauua

SEQ ID NO: 1486485 - RNA, 19 nt, Artificial Sequence
  Description of Artificial Sequence: Synthetic oligonucleotide
  Antisense strand to SEQ ID NO: 1486484
uaauuacucaguggcgaaa

SEQ ID NO: 1486486 - RNA, 19 nt, Artificial Sequence
  Description of Artificial Sequence: Synthetic oligonucleotide
  Sense strand starting at position 3616 of SEQ ID NO: 1244409
uucgccacugaguaauuau

SEQ ID NO: 1486487 - RNA, 19 nt, Artificial Sequence
  Description of Artificial Sequence: Synthetic oligonucleotide
  Antisense strand to SEQ ID NO: 1486486
auaauuacucaguggcgaa

SEQ ID NO: 1486488 - RNA, 19 nt, Artificial Sequence
  Description of Artificial Sequence: Synthetic oligonucleotide
  Sense strand starting at position 3623 of SEQ ID NO: 1244409
cugaguaauuauuccauug

SEQ ID NO: 1486489 - RNA, 19 nt, Artificial Sequence
  Description of Artificial Sequence: Synthetic oligonucleotide
  Antisense strand to SEQ ID NO: 1486488
caauggaauaauuacucag

SEQ ID NO: 1486490 - RNA, 19 nt, Artificial Sequence
  Description of Artificial Sequence: Synthetic oligonucleotide
  Sense strand starting at position 3813 of SEQ ID NO: 1244409
accuaauaccuguaaggug

SEQ ID NO: 1486491 - RNA, 19 nt, Artificial Sequence
  Description of Artificial Sequence: Synthetic oligonucleotide
  Antisense strand to SEQ ID NO: 1486490
caccuuacagguauuaggu

SEQ ID NO: 1486492 - RNA, 19 nt, Artificial Sequence
  Description of Artificial Sequence: Synthetic oligonucleotide
  Sense strand starting at position 523 of SEQ ID NO: 1244410
ccuacuugugaaggaaaug

SEQ ID NO: 1486493 - RNA, 19 nt, Artificial Sequence
  Description of Artificial Sequence: Synthetic oligonucleotide
  Antisense strand to SEQ ID NO: 1486492
cauuuccuucacaaguagg

SEQ ID NO: 1486494 - RNA, 19 nt, Artificial Sequence
  Description of Artificial Sequence: Synthetic oligonucleotide
  Sense strand starting at position 636 of SEQ ID NO: 1244410
gggagauucuagcuuggcu

SEQ ID NO: 1486495 - RNA, 19 nt, Artificial Sequence
  Description of Artificial Sequence: Synthetic oligonucleotide
  Antisense strand to SEQ ID NO: 1486494
agccaagcuagaaucuccc

SEQ ID NO: 1486496 - RNA, 19 nt, Artificial Sequence
  Description of Artificial Sequence: Synthetic oligonucleotide
  Sense strand starting at position 745 of SEQ ID NO: 1244410
acaccaaagcuaugguuaa

SEQ ID NO: 1486497 - RNA, 19 nt, Artificial Sequence
  Description of Artificial Sequence: Synthetic oligonucleotide
  Antisense strand to SEQ ID NO: 1486496
uuaaccauagcuuuggugu

SEQ ID NO: 1486498 - RNA, 19 nt, Artificial Sequence
  Description of Artificial Sequence: Synthetic oligonucleotide
  Sense strand starting at position 868 of SEQ ID NO: 1244410
cuuugcuuggcacaaguua

SEQ ID NO: 1486499 - RNA, 19 nt, Artificial Sequence
  Description of Artificial Sequence: Synthetic oligonucleotide
  Antisense strand to SEQ ID NO: 1486498
uaacuugugccaagcaaag

SEQ ID NO: 1486500 - RNA, 19 nt, Artificial Sequence
  Description of Artificial Sequence: Synthetic oligonucleotide
  Sense strand starting at position 995 of SEQ ID NO: 1244410
ccaaguuauccaggcuuua

SEQ ID NO: 1486501 - RNA, 19 nt, Artificial Sequence
  Description of Artificial Sequence: Synthetic oligonucleotide
  Antisense strand to SEQ ID NO: 1486500
uaaagccuggauaacuugg

SEQ ID NO: 1486502 - RNA, 19 nt, Artificial Sequence
  Description of Artificial Sequence: Synthetic oligonucleotide
  Sense strand starting at position 1118 of SEQ ID NO: 1244410
cuggguuggucuuugagaa

SEQ ID NO: 1486503 - RNA, 19 nt, Artificial Sequence
  Description of Artificial Sequence: Synthetic oligonucleotide
  Antisense strand to SEQ ID NO: 1486502
uucucaaagaccaacccag

SEQ ID NO: 1486504 - RNA, 19 nt, Artificial Sequence
  Description of Artificial Sequence: Synthetic oligonucleotide
  Sense strand starting at position 1119 of SEQ ID NO: 1244410
uggguuggucuuugagaaa

SEQ ID NO: 1486505 - RNA, 19 nt, Artificial Sequence
  Description of Artificial Sequence: Synthetic oligonucleotide
  Antisense strand to SEQ ID NO: 1486504
uuucucaaagaccaaccca

SEQ ID NO: 1486506 - RNA, 19 nt, Artificial Sequence
  Description of Artificial Sequence: Synthetic oligonucleotide
  Sense strand starting at position 1166 of SEQ ID NO: 1244410
cugaaagcugaguguuuga

SEQ ID NO: 1486507 - RNA, 19 nt, Artificial Sequence
  Description of Artificial Sequence: Synthetic oligonucleotide
  Antisense strand to SEQ ID NO: 1486506
ucaaacacucagcuuucag

SEQ ID NO: 1486508 - RNA, 19 nt, Artificial Sequence
  Description of Artificial Sequence: Synthetic oligonucleotide
  Sense strand starting at position 1169 of SEQ ID NO: 1244410
aaagcugaguguuugacaa

SEQ ID NO: 1486509 - RNA, 19 nt, Artificial Sequence
  Description of Artificial Sequence: Synthetic oligonucleotide
  Antisense strand to SEQ ID NO: 1486508
uugucaaacacucagcuuu

SEQ ID NO: 1486510 - RNA, 19 nt, Artificial Sequence
  Description of Artificial Sequence: Synthetic oligonucleotide
  Sense strand starting at position 1269 of SEQ ID NO: 1244410
augagaaggauguguaagu

SEQ ID NO: 1486511 - RNA, 19 nt, Artificial Sequence
  Description of Artificial Sequence: Synthetic oligonucleotide
  Antisense strand to SEQ ID NO: 1486510
acuuacacauccuucucau

SEQ ID NO: 1486512 - RNA, 19 nt, Artificial Sequence
  Description of Artificial Sequence: Synthetic oligonucleotide
  Sense strand starting at position 1270 of SEQ ID NO: 1244410
ugagaaggauguguaagua

SEQ ID NO: 1486513 - RNA, 19 nt, Artificial Sequence
  Description of Artificial Sequence: Synthetic oligonucleotide
  Antisense strand to SEQ ID NO: 1486512
uacuuacacauccuucuca

SEQ ID NO: 1486514 - RNA, 19 nt, Artificial Sequence
  Description of Artificial Sequence: Synthetic oligonucleotide
  Sense strand starting at position 1542 of SEQ ID NO: 1244410
aagauuagcugucccgaaa

SEQ ID NO: 1486515 - RNA, 19 nt, Artificial Sequence
  Description of Artificial Sequence: Synthetic oligonucleotide
  Antisense strand to SEQ ID NO: 1486514
uuucgggacagcuaaucuu

SEQ ID NO: 1486516 - RNA, 19 nt, Artificial Sequence
  Description of Artificial Sequence: Synthetic oligonucleotide
  Sense strand starting at position 2032 of SEQ ID NO: 1244410
gaggacuacuugcccgaga

SEQ ID NO: 1486517 - RNA, 19 nt, Artificial Sequence
  Description of Artificial Sequence: Synthetic oligonucleotide
  Antisense strand to SEQ ID NO: 1486516
ucucgggcaaguaguccuc

SEQ ID NO: 1486518 - RNA, 19 nt, Artificial Sequence
  Description of Artificial Sequence: Synthetic oligonucleotide
  Sense strand starting at position 2034 of SEQ ID NO: 1244410
ggacuacuugcccgagacu

SEQ ID NO: 1486519 - RNA, 19 nt, Artificial Sequence
  Description of Artificial Sequence: Synthetic oligonucleotide
  Antisense strand to SEQ ID NO: 1486518
agucucgggcaaguagucc

SEQ ID NO: 1486520 - RNA, 19 nt, Artificial Sequence
  Description of Artificial Sequence: Synthetic oligonucleotide
  Sense strand starting at position 2082 of SEQ ID NO: 1244410
cuaggaguuguagguaucu

SEQ ID NO: 1486521 - RNA, 19 nt, Artificial Sequence
  Description of Artificial Sequence: Synthetic oligonucleotide
  Antisense strand to SEQ ID NO: 1486520
agauaccuacaacuccuag

SEQ ID NO: 1486522 - RNA, 19 nt, Artificial Sequence
  Description of Artificial Sequence: Synthetic oligonucleotide
  Sense strand starting at position 2084 of SEQ ID NO: 1244410
aggaguuguagguaucuuu

SEQ ID NO: 1486523 - RNA, 19 nt, Artificial Sequence
  Description of Artificial Sequence: Synthetic oligonucleotide
  Antisense strand to SEQ ID NO: 1486522
aaagauaccuacaacuccu

SEQ ID NO: 1486524 - RNA, 19 nt, Artificial Sequence
  Description of Artificial Sequence: Synthetic oligonucleotide
  Sense strand starting at position 2115 of SEQ ID NO: 1244410
cucugcucucaagauagga

SEQ ID NO: 1486525 - RNA, 19 nt, Artificial Sequence
  Description of Artificial Sequence: Synthetic oligonucleotide
  Antisense strand to SEQ ID NO: 1486524
uccuaucuugagagcagag

SEQ ID NO: 1486526 - RNA, 19 nt, Artificial Sequence
  Description of Artificial Sequence: Synthetic oligonucleotide
  Sense strand starting at position 2212 of SEQ ID NO: 1244410
gugagaauugugcccgcuu

SEQ ID NO: 1486527 - RNA, 19 nt, Artificial Sequence
  Description of Artificial Sequence: Synthetic oligonucleotide
  Antisense strand to SEQ ID NO: 1486526
aagcgggcacaauucucac

SEQ ID NO: 1486528 - RNA, 19 nt, Artificial Sequence
  Description of Artificial Sequence: Synthetic oligonucleotide
  Sense strand starting at position 2217 of SEQ ID NO: 1244410
aauugugcccgcuuuggua

SEQ ID NO: 1486529 - RNA, 19 nt, Artificial Sequence
  Description of Artificial Sequence: Synthetic oligonucleotide
  Antisense strand to SEQ ID NO: 1486528
uaccaaagcgggcacaauu

SEQ ID NO: 1486530 - RNA, 19 nt, Artificial Sequence
  Description of Artificial Sequence: Synthetic oligonucleotide
  Sense strand starting at position 2286 of SEQ ID NO: 1244410
aggccuuucguuccgcaau

SEQ ID NO: 1486531 - RNA, 19 nt, Artificial Sequence
  Description of Artificial Sequence: Synthetic oligonucleotide
  Antisense strand to SEQ ID NO: 1486530
auugcggaacgaaaggccu

SEQ ID NO: 1486532 - RNA, 19 nt, Artificial Sequence
  Description of Artificial Sequence: Synthetic oligonucleotide
  Sense strand starting at position 2305 of SEQ ID NO: 1244410
gcauguuggaaauaguagu

SEQ ID NO: 1486533 - RNA, 19 nt, Artificial Sequence
  Description of Artificial Sequence: Synthetic oligonucleotide
  Antisense strand to SEQ ID NO: 1486532
acuacuauuuccaacaugc

SEQ ID NO: 1486534 - RNA, 19 nt, Artificial Sequence
  Description of Artificial Sequence: Synthetic oligonucleotide
  Sense strand starting at position 2485 of SEQ ID NO: 1244410
auuacugugacguaauaag

SEQ ID NO: 1486535 - RNA, 19 nt, Artificial Sequence
  Description of Artificial Sequence: Synthetic oligonucleotide
  Antisense strand to SEQ ID NO: 1486534
cuuauuacgucacaguaau

SEQ ID NO: 1486536 - RNA, 19 nt, Artificial Sequence
  Description of Artificial Sequence: Synthetic oligonucleotide
  Sense strand starting at position 2720 of SEQ ID NO: 1244410
aacaguaaagcgugggaau

SEQ ID NO: 1486537 - RNA, 19 nt, Artificial Sequence
  Description of Artificial Sequence: Synthetic oligonucleotide
  Antisense strand to SEQ ID NO: 1486536
auucccacgcuuuacuguu

SEQ ID NO: 1486538 - RNA, 19 nt, Artificial Sequence
  Description of Artificial Sequence: Synthetic oligonucleotide
  Sense strand starting at position 2721 of SEQ ID NO: 1244410
acaguaaagcgugggaauu

SEQ ID NO: 1486539 - RNA, 19 nt, Artificial Sequence
  Description of Artificial Sequence: Synthetic oligonucleotide
  Antisense strand to SEQ ID NO: 1486538
aauucccacgcuuuacugu

SEQ ID NO: 1486540 - RNA, 19 nt, Artificial Sequence
  Description of Artificial Sequence: Synthetic oligonucleotide
  Sense strand starting at position 2722 of SEQ ID NO: 1244410
caguaaagcgugggaauua

SEQ ID NO: 1486541 - RNA, 19 nt, Artificial Sequence
  Description of Artificial Sequence: Synthetic oligonucleotide
  Antisense strand to SEQ ID NO: 1486540
uaauucccacgcuuuacug

SEQ ID NO: 1486542 - RNA, 19 nt, Artificial Sequence
  Description of Artificial Sequence: Synthetic oligonucleotide
  Sense strand starting at position 2727 of SEQ ID NO: 1244410
aagcgugggaauuacagau

SEQ ID NO: 1486543 - RNA, 19 nt, Artificial Sequence
  Description of Artificial Sequence: Synthetic oligonucleotide
  Antisense strand to SEQ ID NO: 1486542
aucuguaauucccacgcuu

SEQ ID NO: 1486544 - RNA, 19 nt, Artificial Sequence
  Description of Artificial Sequence: Synthetic oligonucleotide
  Sense strand starting at position 2932 of SEQ ID NO: 1244410
ccucauucugcaggacuau

SEQ ID NO: 1486545 - RNA, 19 nt, Artificial Sequence
  Description of Artificial Sequence: Synthetic oligonucleotide
  Antisense strand to SEQ ID NO: 1486544
auaguccugcagaaugagg

SEQ ID NO: 1486546 - RNA, 19 nt, Artificial Sequence
  Description of Artificial Sequence: Synthetic oligonucleotide
  Sense strand starting at position 2954 of SEQ ID NO: 1244410
gugaccuuuacggaggaua

SEQ ID NO: 1486547 - RNA, 19 nt, Artificial Sequence
  Description of Artificial Sequence: Synthetic oligonucleotide
  Antisense strand to SEQ ID NO: 1486546
uauccuccguaaaggucac

SEQ ID NO: 1486548 - RNA, 19 nt, Artificial Sequence
  Description of Artificial Sequence: Synthetic oligonucleotide
  Sense strand starting at position 2968 of SEQ ID NO: 1244410
ggauaagaucaaugcccuu

SEQ ID NO: 1486549 - RNA, 19 nt, Artificial Sequence
  Description of Artificial Sequence: Synthetic oligonucleotide
  Antisense strand to SEQ ID NO: 1486548
aagggcauugaucuuaucc

SEQ ID NO: 1486550 - RNA, 19 nt, Artificial Sequence
  Description of Artificial Sequence: Synthetic oligonucleotide
  Sense strand starting at position 3109 of SEQ ID NO: 1244410
cgucgugagcucgcugaga

SEQ ID NO: 1486551 - RNA, 19 nt, Artificial Sequence
  Description of Artificial Sequence: Synthetic oligonucleotide
  Antisense strand to SEQ ID NO: 1486550
ucucagcgagcucacgacg

SEQ ID NO: 1486552 - RNA, 19 nt, Artificial Sequence
  Description of Artificial Sequence: Synthetic oligonucleotide
  Sense strand starting at position 3113 of SEQ ID NO: 1244410
gugagcucgcugagacguu

SEQ ID NO: 1486553 - RNA, 19 nt, Artificial Sequence
  Description of Artificial Sequence: Synthetic oligonucleotide
  Antisense strand to SEQ ID NO: 1486552
aacgucucagcgagcucac

SEQ ID NO: 1486554 - RNA, 19 nt, Artificial Sequence
  Description of Artificial Sequence: Synthetic oligonucleotide
  Sense strand starting at position 3199 of SEQ ID NO: 1244410
ucugcucuggguuaaggua

SEQ ID NO: 1486555 - RNA, 19 nt, Artificial Sequence
  Description of Artificial Sequence: Synthetic oligonucleotide
  Antisense strand to SEQ ID NO: 1486554
uaccuuaacccagagcaga

SEQ ID NO: 1486556 - RNA, 19 nt, Artificial Sequence
  Description of Artificial Sequence: Synthetic oligonucleotide
  Sense strand starting at position 3293 of SEQ ID NO: 1244410
uaggcagauggguauucuu

SEQ ID NO: 1486557 - RNA, 19 nt, Artificial Sequence
  Description of Artificial Sequence: Synthetic oligonucleotide
  Antisense strand to SEQ ID NO: 1486556
aagaauacccaucugccua

SEQ ID NO: 1486558 - RNA, 19 nt, Artificial Sequence
  Description of Artificial Sequence: Synthetic oligonucleotide
  Sense strand starting at position 3296 of SEQ ID NO: 1244410
gcagauggguauucuuaug

SEQ ID NO: 1486559 - RNA, 19 nt, Artificial Sequence
  Description of Artificial Sequence: Synthetic oligonucleotide
  Antisense strand to SEQ ID NO: 1486558
cauaagaauacccaucugc

SEQ ID NO: 1486560 - RNA, 19 nt, Artificial Sequence
  Description of Artificial Sequence: Synthetic oligonucleotide
  Sense strand starting at position 3378 of SEQ ID NO: 1244410
uuuguaggucucgagggaa

SEQ ID NO: 1486561 - RNA, 19 nt, Artificial Sequence
  Description of Artificial Sequence: Synthetic oligonucleotide
  Antisense strand to SEQ ID NO: 1486560
uucccucgagaccuacaaa

SEQ ID NO: 1486562 - RNA, 19 nt, Artificial Sequence
  Description of Artificial Sequence: Synthetic oligonucleotide
  Sense strand starting at position 3421 of SEQ ID NO: 1244410
caguguguccgaggaggaa

SEQ ID NO: 1486563 - RNA, 19 nt, Artificial Sequence
  Description of Artificial Sequence: Synthetic oligonucleotide
  Antisense strand to SEQ ID NO: 1486562
uuccuccucggacacacug

SEQ ID NO: 1486564 - RNA, 19 nt, Artificial Sequence
  Description of Artificial Sequence: Synthetic oligonucleotide
  Sense strand starting at position 3422 of SEQ ID NO: 1244410
aguguguccgaggaggaau

SEQ ID NO: 1486565 - RNA, 19 nt, Artificial Sequence
  Description of Artificial Sequence: Synthetic oligonucleotide
  Antisense strand to SEQ ID NO: 1486564
auuccuccucggacacacu

SEQ ID NO: 1486566 - RNA, 19 nt, Artificial Sequence
  Description of Artificial Sequence: Synthetic oligonucleotide
  Sense strand starting at position 3454 of SEQ ID NO: 1244410
acuggaaugugccuugaag

SEQ ID NO: 1486567 - RNA, 19 nt, Artificial Sequence
  Description of Artificial Sequence: Synthetic oligonucleotide
  Antisense strand to SEQ ID NO: 1486566
cuucaaggcacauuccagu

SEQ ID NO: 1486568 - RNA, 19 nt, Artificial Sequence
  Description of Artificial Sequence: Synthetic oligonucleotide
  Sense strand starting at position 3798 of SEQ ID NO: 1244410
ccggcugguauauaugaga

SEQ ID NO: 1486569 - RNA, 19 nt, Artificial Sequence
  Description of Artificial Sequence: Synthetic oligonucleotide
  Antisense strand to SEQ ID NO: 1486568
ucucauauauaccagccgg

SEQ ID NO: 1486570 - RNA, 19 nt, Artificial Sequence
  Description of Artificial Sequence: Synthetic oligonucleotide
  Sense strand starting at position 3835 of SEQ ID NO: 1244410
gaagaagugccaggaauau

SEQ ID NO: 1486571 - RNA, 19 nt, Artificial Sequence
  Description of Artificial Sequence: Synthetic oligonucleotide
  Antisense strand to SEQ ID NO: 1486570
auauuccuggcacuucuuc

SEQ ID NO: 1486572 - RNA, 19 nt, Artificial Sequence
  Description of Artificial Sequence: Synthetic oligonucleotide
  Sense strand starting at position 24 of SEQ ID NO: 1244411
ccuacuugugaaggaaaug

SEQ ID NO: 1486573 - RNA, 19 nt, Artificial Sequence
  Description of Artificial Sequence: Synthetic oligonucleotide
  Antisense strand to SEQ ID NO: 1486572
cauuuccuucacaaguagg

SEQ ID NO: 1486574 - RNA, 19 nt, Artificial Sequence
  Description of Artificial Sequence: Synthetic oligonucleotide
  Sense strand starting at position 137 of SEQ ID NO: 1244411
gggagauucuagcuuggcu

SEQ ID NO: 1486575 - RNA, 19 nt, Artificial Sequence
  Description of Artificial Sequence: Synthetic oligonucleotide
  Antisense strand to SEQ ID NO: 1486574
agccaagcuagaaucuccc

SEQ ID NO: 1486576 - RNA, 19 nt, Artificial Sequence
  Description of Artificial Sequence: Synthetic oligonucleotide
  Sense strand starting at position 246 of SEQ ID NO: 1244411
acaccaaagcuaugguuaa

SEQ ID NO: 1486577 - RNA, 19 nt, Artificial Sequence
  Description of Artificial Sequence: Synthetic oligonucleotide
  Antisense strand to SEQ ID NO: 1486576
uuaaccauagcuuuggugu

SEQ ID NO: 1486578 - RNA, 19 nt, Artificial Sequence
  Description of Artificial Sequence: Synthetic oligonucleotide
  Sense strand starting at position 619 of SEQ ID NO: 1244411
cuggguuggucuuugagaa

SEQ ID NO: 1486579 - RNA, 19 nt, Artificial Sequence
  Description of Artificial Sequence: Synthetic oligonucleotide
  Antisense strand to SEQ ID NO: 1486578
uucucaaagaccaacccag

SEQ ID NO: 1486580 - RNA, 19 nt, Artificial Sequence
  Description of Artificial Sequence: Synthetic oligonucleotide
  Sense strand starting at position 620 of SEQ ID NO: 1244411
uggguuggucuuugagaaa

SEQ ID NO: 1486581 - RNA, 19 nt, Artificial Sequence
  Description of Artificial Sequence: Synthetic oligonucleotide
  Antisense strand to SEQ ID NO: 1486580
uuucucaaagaccaaccca

SEQ ID NO: 1486582 - RNA, 19 nt, Artificial Sequence
  Description of Artificial Sequence: Synthetic oligonucleotide
  Sense strand starting at position 667 of SEQ ID NO: 1244411
cugaaagcugaguguuuga

SEQ ID NO: 1486583 - RNA, 19 nt, Artificial Sequence
  Description of Artificial Sequence: Synthetic oligonucleotide
  Antisense strand to SEQ ID NO: 1486582
ucaaacacucagcuuucag

SEQ ID NO: 1486584 - RNA, 19 nt, Artificial Sequence
  Description of Artificial Sequence: Synthetic oligonucleotide
  Sense strand starting at position 670 of SEQ ID NO: 1244411
aaagcugaguguuugacaa

SEQ ID NO: 1486585 - RNA, 19 nt, Artificial Sequence
  Description of Artificial Sequence: Synthetic oligonucleotide
  Antisense strand to SEQ ID NO: 1486584
uugucaaacacucagcuuu

SEQ ID NO: 1486586 - RNA, 19 nt, Artificial Sequence
  Description of Artificial Sequence: Synthetic oligonucleotide
  Sense strand starting at position 770 of SEQ ID NO: 1244411
augagaaggauguguaagu

SEQ ID NO: 1486587 - RNA, 19 nt, Artificial Sequence
  Description of Artificial Sequence: Synthetic oligonucleotide
  Antisense strand to SEQ ID NO: 1486586
acuuacacauccuucucau

SEQ ID NO: 1486588 - RNA, 19 nt, Artificial Sequence
  Description of Artificial Sequence: Synthetic oligonucleotide
  Sense strand starting at position 771 of SEQ ID NO: 1244411
ugagaaggauguguaagua

SEQ ID NO: 1486589 - RNA, 19 nt, Artificial Sequence
  Description of Artificial Sequence: Synthetic oligonucleotide
  Antisense strand to SEQ ID NO: 1486588
uacuuacacauccuucuca

SEQ ID NO: 1486590 - RNA, 19 nt, Artificial Sequence
  Description of Artificial Sequence: Synthetic oligonucleotide
  Sense strand starting at position 1043 of SEQ ID NO: 1244411
aagauuagcugucccgaaa

SEQ ID NO: 1486591 - RNA, 19 nt, Artificial Sequence
  Description of Artificial Sequence: Synthetic oligonucleotide
  Antisense strand to SEQ ID NO: 1486590
uuucgggacagcuaaucuu

SEQ ID NO: 1486592 - RNA, 19 nt, Artificial Sequence
  Description of Artificial Sequence: Synthetic oligonucleotide
  Sense strand starting at position 1533 of SEQ ID NO: 1244411
gaggacuacuugcccgaga

SEQ ID NO: 1486593 - RNA, 19 nt, Artificial Sequence
  Description of Artificial Sequence: Synthetic oligonucleotide
  Antisense strand to SEQ ID NO: 1486592
ucucgggcaaguaguccuc

SEQ ID NO: 1486594 - RNA, 19 nt, Artificial Sequence
  Description of Artificial Sequence: Synthetic oligonucleotide
  Sense strand starting at position 1535 of SEQ ID NO: 1244411
ggacuacuugcccgagacu

SEQ ID NO: 1486595 - RNA, 19 nt, Artificial Sequence
  Description of Artificial Sequence: Synthetic oligonucleotide
  Antisense strand to SEQ ID NO: 1486594
agucucgggcaaguagucc

SEQ ID NO: 1486596 - RNA, 19 nt, Artificial Sequence
  Description of Artificial Sequence: Synthetic oligonucleotide
  Sense strand starting at position 1585 of SEQ ID NO: 1244411
aggaguuguagguaucuuu

SEQ ID NO: 1486597 - RNA, 19 nt, Artificial Sequence
  Description of Artificial Sequence: Synthetic oligonucleotide
  Antisense strand to SEQ ID NO: 1486596
aaagauaccuacaacuccu

SEQ ID NO: 1486598 - RNA, 19 nt, Artificial Sequence
  Description of Artificial Sequence: Synthetic oligonucleotide
  Sense strand starting at position 1616 of SEQ ID NO: 1244411
cucugcucucaagauagga

SEQ ID NO: 1486599 - RNA, 19 nt, Artificial Sequence
  Description of Artificial Sequence: Synthetic oligonucleotide
  Antisense strand to SEQ ID NO: 1486598
uccuaucuugagagcagag

SEQ ID NO: 1486600 - RNA, 19 nt, Artificial Sequence
  Description of Artificial Sequence: Synthetic oligonucleotide
  Sense strand starting at position 1713 of SEQ ID NO: 1244411
gugagaauugugcccgcuu

SEQ ID NO: 1486601 - RNA, 19 nt, Artificial Sequence
  Description of Artificial Sequence: Synthetic oligonucleotide
  Antisense strand to SEQ ID NO: 1486600
aagcgggcacaauucucac

SEQ ID NO: 1486602 - RNA, 19 nt, Artificial Sequence
  Description of Artificial Sequence: Synthetic oligonucleotide
  Sense strand starting at position 1718 of SEQ ID NO: 1244411
aauugugcccgcuuuggua

SEQ ID NO: 1486603 - RNA, 19 nt, Artificial Sequence
  Description of Artificial Sequence: Synthetic oligonucleotide
  Antisense strand to SEQ ID NO: 1486602
uaccaaagcgggcacaauu

SEQ ID NO: 1486604 - RNA, 19 nt, Artificial Sequence
  Description of Artificial Sequence: Synthetic oligonucleotide
  Sense strand starting at position 1787 of SEQ ID NO: 1244411
aggccuuucguuccgcaau

SEQ ID NO: 1486605 - RNA, 19 nt, Artificial Sequence
  Description of Artificial Sequence: Synthetic oligonucleotide
  Antisense strand to SEQ ID NO: 1486604
auugcggaacgaaaggccu

SEQ ID NO: 1486606 - RNA, 19 nt, Artificial Sequence
  Description of Artificial Sequence: Synthetic oligonucleotide
  Sense strand starting at position 1806 of SEQ ID NO: 1244411
gcauguuggaaauaguagu

SEQ ID NO: 1486607 - RNA, 19 nt, Artificial Sequence
  Description of Artificial Sequence: Synthetic oligonucleotide
  Antisense strand to SEQ ID NO: 1486606
acuacuauuuccaacaugc

SEQ ID NO: 1486608 - RNA, 19 nt, Artificial Sequence
  Description of Artificial Sequence: Synthetic oligonucleotide
  Sense strand starting at position 1986 of SEQ ID NO: 1244411
auuacugugacguaauaag

SEQ ID NO: 1486609 - RNA, 19 nt, Artificial Sequence
  Description of Artificial Sequence: Synthetic oligonucleotide
  Antisense strand to SEQ ID NO: 1486608
cuuauuacgucacaguaau

SEQ ID NO: 1486610 - RNA, 19 nt, Artificial Sequence
  Description of Artificial Sequence: Synthetic oligonucleotide
  Sense strand starting at position 2221 of SEQ ID NO: 1244411
aacaguaaagcgugggaau

SEQ ID NO: 1486611 - RNA, 19 nt, Artificial Sequence
  Description of Artificial Sequence: Synthetic oligonucleotide
  Antisense strand to SEQ ID NO: 1486610
auucccacgcuuuacuguu

SEQ ID NO: 1486612 - RNA, 19 nt, Artificial Sequence
  Description of Artificial Sequence: Synthetic oligonucleotide
  Sense strand starting at position 2222 of SEQ ID NO: 1244411
acaguaaagcgugggaauu

SEQ ID NO: 1486613 - RNA, 19 nt, Artificial Sequence
  Description of Artificial Sequence: Synthetic oligonucleotide
  Antisense strand to SEQ ID NO: 1486612
aauucccacgcuuuacugu

SEQ ID NO: 1486614 - RNA, 19 nt, Artificial Sequence
  Description of Artificial Sequence: Synthetic oligonucleotide
  Sense strand starting at position 2223 of SEQ ID NO: 1244411
caguaaagcgugggaauua

SEQ ID NO: 1486615 - RNA, 19 nt, Artificial Sequence
  Description of Artificial Sequence: Synthetic oligonucleotide
  Antisense strand to SEQ ID NO: 1486614
uaauucccacgcuuuacug

SEQ ID NO: 1486616 - RNA, 19 nt, Artificial Sequence
  Description of Artificial Sequence: Synthetic oligonucleotide
  Sense strand starting at position 2228 of SEQ ID NO: 1244411
aagcgugggaauuacagau

SEQ ID NO: 1486617 - RNA, 19 nt, Artificial Sequence
  Description of Artificial Sequence: Synthetic oligonucleotide
  Antisense strand to SEQ ID NO: 1486616
aucuguaauucccacgcuu

SEQ ID NO: 1486618 - RNA, 19 nt, Artificial Sequence
  Description of Artificial Sequence: Synthetic oligonucleotide
  Sense strand starting at position 2433 of SEQ ID NO: 1244411
ccucauucugcaggacuau

SEQ ID NO: 1486619 - RNA, 19 nt, Artificial Sequence
  Description of Artificial Sequence: Synthetic oligonucleotide
  Antisense strand to SEQ ID NO: 1486618
auaguccugcagaaugagg

SEQ ID NO: 1486620 - RNA, 19 nt, Artificial Sequence
  Description of Artificial Sequence: Synthetic oligonucleotide
  Sense strand starting at position 2455 of SEQ ID NO: 1244411
gugaccuuuacggaggaua

SEQ ID NO: 1486621 - RNA, 19 nt, Artificial Sequence
  Description of Artificial Sequence: Synthetic oligonucleotide
  Antisense strand to SEQ ID NO: 1486620
uauccuccguaaaggucac

SEQ ID NO: 1486622 - RNA, 19 nt, Artificial Sequence
  Description of Artificial Sequence: Synthetic oligonucleotide
  Sense strand starting at position 2469 of SEQ ID NO: 1244411
ggauaagaucaaugcccuu

SEQ ID NO: 1486623 - RNA, 19 nt, Artificial Sequence
  Description of Artificial Sequence: Synthetic oligonucleotide
  Antisense strand to SEQ ID NO: 1486622
aagggcauugaucuuaucc

SEQ ID NO: 1486624 - RNA, 19 nt, Artificial Sequence
  Description of Artificial Sequence: Synthetic oligonucleotide
  Sense strand starting at position 2610 of SEQ ID NO: 1244411
cgucgugagcucgcugaga

SEQ ID NO: 1486625 - RNA, 19 nt, Artificial Sequence
  Description of Artificial Sequence: Synthetic oligonucleotide
  Antisense strand to SEQ ID NO: 1486624
ucucagcgagcucacgacg

SEQ ID NO: 1486626 - RNA, 19 nt, Artificial Sequence
  Description of Artificial Sequence: Synthetic oligonucleotide
  Sense strand starting at position 2700 of SEQ ID NO: 1244411
ucugcucuggguuaaggua

SEQ ID NO: 1486627 - RNA, 19 nt, Artificial Sequence
  Description of Artificial Sequence: Synthetic oligonucleotide
  Antisense strand to SEQ ID NO: 1486626
uaccuuaacccagagcaga

SEQ ID NO: 1486628 - RNA, 19 nt, Artificial Sequence
  Description of Artificial Sequence: Synthetic oligonucleotide
  Sense strand starting at position 2794 of SEQ ID NO: 1244411
uaggcagauggguauucuu

SEQ ID NO: 1486629 - RNA, 19 nt, Artificial Sequence
  Description of Artificial Sequence: Synthetic oligonucleotide
  Antisense strand to SEQ ID NO: 1486628
aagaauacccaucugccua

SEQ ID NO: 1486630 - RNA, 19 nt, Artificial Sequence
  Description of Artificial Sequence: Synthetic oligonucleotide
  Sense strand starting at position 2797 of SEQ ID NO: 1244411
gcagauggguauucuuaug

SEQ ID NO: 1486631 - RNA, 19 nt, Artificial Sequence
  Description of Artificial Sequence: Synthetic oligonucleotide
  Antisense strand to SEQ ID NO: 1486630
cauaagaauacccaucugc

SEQ ID NO: 1486632 - RNA, 19 nt, Artificial Sequence
  Description of Artificial Sequence: Synthetic oligonucleotide
  Sense strand starting at position 2879 of SEQ ID NO: 1244411
uuuguaggucucgagggaa

SEQ ID NO: 1486633 - RNA, 19 nt, Artificial Sequence
  Description of Artificial Sequence: Synthetic oligonucleotide
  Antisense strand to SEQ ID NO: 1486632
uucccucgagaccuacaaa

SEQ ID NO: 1486634 - RNA, 19 nt, Artificial Sequence
  Description of Artificial Sequence: Synthetic oligonucleotide
  Sense strand starting at position 2922 of SEQ ID NO: 1244411
caguguguccgaggaggaa

SEQ ID NO: 1486635 - RNA, 19 nt, Artificial Sequence
  Description of Artificial Sequence: Synthetic oligonucleotide
  Antisense strand to SEQ ID NO: 1486634
uuccuccucggacacacug

SEQ ID NO: 1486636 - RNA, 19 nt, Artificial Sequence
  Description of Artificial Sequence: Synthetic oligonucleotide
  Sense strand starting at position 2923 of SEQ ID NO: 1244411
aguguguccgaggaggaau

SEQ ID NO: 1486637 - RNA, 19 nt, Artificial Sequence
  Description of Artificial Sequence: Synthetic oligonucleotide
  Antisense strand to SEQ ID NO: 1486636
auuccuccucggacacacu

SEQ ID NO: 1486638 - RNA, 19 nt, Artificial Sequence
  Description of Artificial Sequence: Synthetic oligonucleotide
  Sense strand starting at position 2955 of SEQ ID NO: 1244411
acuggaaugugccuugaag

SEQ ID NO: 1486639 - RNA, 19 nt, Artificial Sequence
  Description of Artificial Sequence: Synthetic oligonucleotide
  Antisense strand to SEQ ID NO: 1486638
cuucaaggcacauuccagu

SEQ ID NO: 1486640 - RNA, 19 nt, Artificial Sequence
  Description of Artificial Sequence: Synthetic oligonucleotide
  Sense strand starting at position 3299 of SEQ ID NO: 1244411
ccggcugguauauaugaga

SEQ ID NO: 1486641 - RNA, 19 nt, Artificial Sequence
  Description of Artificial Sequence: Synthetic oligonucleotide
  Antisense strand to SEQ ID NO: 1486640
ucucauauauaccagccgg

SEQ ID NO: 1486642 - RNA, 19 nt, Artificial Sequence
  Description of Artificial Sequence: Synthetic oligonucleotide
  Sense strand starting at position 3336 of SEQ ID NO: 1244411
gaagaagugccaggaauau

SEQ ID NO: 1486643 - RNA, 19 nt, Artificial Sequence
  Description of Artificial Sequence: Synthetic oligonucleotide
  Antisense strand to SEQ ID NO: 1486642
auauuccuggcacuucuuc

SEQ ID NO: 1486644 - RNA, 19 nt, Artificial Sequence
  Description of Artificial Sequence: Synthetic oligonucleotide
  Sense strand starting at position 3508 of SEQ ID NO: 1244411
agagugggucgcugggaaa

SEQ ID NO: 1486645 - RNA, 19 nt, Artificial Sequence
  Description of Artificial Sequence: Synthetic oligonucleotide
  Antisense strand to SEQ ID NO: 1486644
uuucccagcgacccacucu

SEQ ID NO: 1486646 - RNA, 19 nt, Artificial Sequence
  Description of Artificial Sequence: Synthetic oligonucleotide
  Sense strand starting at position 3604 of SEQ ID NO: 1244411
gccagaagcauuggagaaa

SEQ ID NO: 1486647 - RNA, 19 nt, Artificial Sequence
  Description of Artificial Sequence: Synthetic oligonucleotide
  Antisense strand to SEQ ID NO: 1486646
uuucuccaaugcuucuggc

SEQ ID NO: 1486648 - RNA, 19 nt, Artificial Sequence
  Description of Artificial Sequence: Synthetic oligonucleotide
  Sense strand starting at position 3616 of SEQ ID NO: 1244411
ggagaaagcucaccacuua

SEQ ID NO: 1486649 - RNA, 19 nt, Artificial Sequence
  Description of Artificial Sequence: Synthetic oligonucleotide
  Antisense strand to SEQ ID NO: 1486648
uaaguggugagcuuucucc

SEQ ID NO: 1486650 - RNA, 19 nt, Artificial Sequence
  Description of Artificial Sequence: Synthetic oligonucleotide
  Sense strand starting at position 3695 of SEQ ID NO: 1244411
uuggaagcaauaugugaaa

SEQ ID NO: 1486651 - RNA, 19 nt, Artificial Sequence
  Description of Artificial Sequence: Synthetic oligonucleotide
  Antisense strand to SEQ ID NO: 1486650
uuucacauauugcuuccaa

SEQ ID NO: 1486652 - RNA, 19 nt, Artificial Sequence
  Description of Artificial Sequence: Synthetic oligonucleotide
  Sense strand starting at position 26 of SEQ ID NO: 1244412
guauaucggacuugauaaa

SEQ ID NO: 1486653 - RNA, 19 nt, Artificial Sequence
  Description of Artificial Sequence: Synthetic oligonucleotide
  Antisense strand to SEQ ID NO: 1486652
uuuaucaaguccgauauac

SEQ ID NO: 1486654 - RNA, 19 nt, Artificial Sequence
  Description of Artificial Sequence: Synthetic oligonucleotide
  Sense strand starting at position 66 of SEQ ID NO: 1244412
aaaggaugcuguuaagaaa

SEQ ID NO: 1486655 - RNA, 19 nt, Artificial Sequence
  Description of Artificial Sequence: Synthetic oligonucleotide
  Antisense strand to SEQ ID NO: 1486654
uuucuuaacagcauccuuu

SEQ ID NO: 1486656 - RNA, 19 nt, Artificial Sequence
  Description of Artificial Sequence: Synthetic oligonucleotide
  Sense strand starting at position 298 of SEQ ID NO: 1244412
cagaauaguucccaugaag

SEQ ID NO: 1486657 - RNA, 19 nt, Artificial Sequence
  Description of Artificial Sequence: Synthetic oligonucleotide
  Antisense strand to SEQ ID NO: 1486656
cuucaugggaacuauucug

SEQ ID NO: 1486658 - RNA, 19 nt, Artificial Sequence
  Description of Artificial Sequence: Synthetic oligonucleotide
  Sense strand starting at position 321 of SEQ ID NO: 1244412
gaacguauacaauguauua

SEQ ID NO: 1486659 - RNA, 19 nt, Artificial Sequence
  Description of Artificial Sequence: Synthetic oligonucleotide
  Antisense strand to SEQ ID NO: 1486658
uaauacauuguauacguuc

SEQ ID NO: 1486660 - RNA, 19 nt, Artificial Sequence
  Description of Artificial Sequence: Synthetic oligonucleotide
  Sense strand starting at position 441 of SEQ ID NO: 1244412
aacguccuagaguguuaga

SEQ ID NO: 1486661 - RNA, 19 nt, Artificial Sequence
  Description of Artificial Sequence: Synthetic oligonucleotide
  Antisense strand to SEQ ID NO: 1486660
ucuaacacucuaggacguu

SEQ ID NO: 1486662 - RNA, 19 nt, Artificial Sequence
  Description of Artificial Sequence: Synthetic oligonucleotide
  Sense strand starting at position 488 of SEQ ID NO: 1244412
guuguaugaguuuaugacu

SEQ ID NO: 1486663 - RNA, 19 nt, Artificial Sequence
  Description of Artificial Sequence: Synthetic oligonucleotide
  Antisense strand to SEQ ID NO: 1486662
agucauaaacucauacaac

SEQ ID NO: 1486664 - RNA, 19 nt, Artificial Sequence
  Description of Artificial Sequence: Synthetic oligonucleotide
  Sense strand starting at position 935 of SEQ ID NO: 1244412
uugguaaucggaugaauaa

SEQ ID NO: 1486665 - RNA, 19 nt, Artificial Sequence
  Description of Artificial Sequence: Synthetic oligonucleotide
  Antisense strand to SEQ ID NO: 1486664
uuauucauccgauuaccaa

SEQ ID NO: 1486666 - RNA, 19 nt, Artificial Sequence
  Description of Artificial Sequence: Synthetic oligonucleotide
  Sense strand starting at position 1081 of SEQ ID NO: 1244412
auguaauaauggugaaaga

SEQ ID NO: 1486667 - RNA, 19 nt, Artificial Sequence
  Description of Artificial Sequence: Synthetic oligonucleotide
  Antisense strand to SEQ ID NO: 1486666
ucuuucaccauuauuacau

SEQ ID NO: 1486668 - RNA, 19 nt, Artificial Sequence
  Description of Artificial Sequence: Synthetic oligonucleotide
  Sense strand starting at position 1146 of SEQ ID NO: 1244412
cucuguaaucaugacugca

SEQ ID NO: 1486669 - RNA, 19 nt, Artificial Sequence
  Description of Artificial Sequence: Synthetic oligonucleotide
  Antisense strand to SEQ ID NO: 1486668
ugcagucaugauuacagag

SEQ ID NO: 1486670 - RNA, 19 nt, Artificial Sequence
  Description of Artificial Sequence: Synthetic oligonucleotide
  Sense strand starting at position 1148 of SEQ ID NO: 1244412
cuguaaucaugacugcacu

SEQ ID NO: 1486671 - RNA, 19 nt, Artificial Sequence
  Description of Artificial Sequence: Synthetic oligonucleotide
  Antisense strand to SEQ ID NO: 1486670
agugcagucaugauuacag

SEQ ID NO: 1486672 - RNA, 19 nt, Artificial Sequence
  Description of Artificial Sequence: Synthetic oligonucleotide
  Sense strand starting at position 1149 of SEQ ID NO: 1244412
uguaaucaugacugcacuu

SEQ ID NO: 1486673 - RNA, 19 nt, Artificial Sequence
  Description of Artificial Sequence: Synthetic oligonucleotide
  Antisense strand to SEQ ID NO: 1486672
aagugcagucaugauuaca

SEQ ID NO: 1486674 - RNA, 19 nt, Artificial Sequence
  Description of Artificial Sequence: Synthetic oligonucleotide
  Sense strand starting at position 1179 of SEQ ID NO: 1244412
ucaggaggacccuguagua

SEQ ID NO: 1486675 - RNA, 19 nt, Artificial Sequence
  Description of Artificial Sequence: Synthetic oligonucleotide
  Antisense strand to SEQ ID NO: 1486674
uacuacaggguccuccuga

SEQ ID NO: 1486676 - RNA, 19 nt, Artificial Sequence
  Description of Artificial Sequence: Synthetic oligonucleotide
  Sense strand starting at position 1217 of SEQ ID NO: 1244412
cuuucuuagucucugagag

SEQ ID NO: 1486677 - RNA, 19 nt, Artificial Sequence
  Description of Artificial Sequence: Synthetic oligonucleotide
  Antisense strand to SEQ ID NO: 1486676
cucucagagacuaagaaag

SEQ ID NO: 1486678 - RNA, 19 nt, Artificial Sequence
  Description of Artificial Sequence: Synthetic oligonucleotide
  Sense strand starting at position 1219 of SEQ ID NO: 1244412
uucuuagucucugagagga

SEQ ID NO: 1486679 - RNA, 19 nt, Artificial Sequence
  Description of Artificial Sequence: Synthetic oligonucleotide
  Antisense strand to SEQ ID NO: 1486678
uccucucagagacuaagaa

SEQ ID NO: 1486680 - RNA, 19 nt, Artificial Sequence
  Description of Artificial Sequence: Synthetic oligonucleotide
  Sense strand starting at position 1290 of SEQ ID NO: 1244412
cuuggucuacucugauaug

SEQ ID NO: 1486681 - RNA, 19 nt, Artificial Sequence
  Description of Artificial Sequence: Synthetic oligonucleotide
  Antisense strand to SEQ ID NO: 1486680
cauaucagaguagaccaag

SEQ ID NO: 1486682 - RNA, 19 nt, Artificial Sequence
  Description of Artificial Sequence: Synthetic oligonucleotide
  Sense strand starting at position 1457 of SEQ ID NO: 1244412
gucuuuaucuuggcccuca

SEQ ID NO: 1486683 - RNA, 19 nt, Artificial Sequence
  Description of Artificial Sequence: Synthetic oligonucleotide
  Antisense strand to SEQ ID NO: 1486682
ugagggccaagauaaagac

SEQ ID NO: 1486684 - RNA, 19 nt, Artificial Sequence
  Description of Artificial Sequence: Synthetic oligonucleotide
  Sense strand starting at position 1557 of SEQ ID NO: 1244412
ucuagagaauugguaaguu

SEQ ID NO: 1486685 - RNA, 19 nt, Artificial Sequence
  Description of Artificial Sequence: Synthetic oligonucleotide
  Antisense strand to SEQ ID NO: 1486684
aacuuaccaauucucuaga

SEQ ID NO: 1486686 - RNA, 19 nt, Artificial Sequence
  Description of Artificial Sequence: Synthetic oligonucleotide
  Sense strand starting at position 1679 of SEQ ID NO: 1244412
gguuccuugucuuuguaaa

SEQ ID NO: 1486687 - RNA, 19 nt, Artificial Sequence
  Description of Artificial Sequence: Synthetic oligonucleotide
  Antisense strand to SEQ ID NO: 1486686
uuuacaaagacaaggaacc

SEQ ID NO: 1486688 - RNA, 19 nt, Artificial Sequence
  Description of Artificial Sequence: Synthetic oligonucleotide
  Sense strand starting at position 1680 of SEQ ID NO: 1244412
guuccuugucuuuguaaau

SEQ ID NO: 1486689 - RNA, 19 nt, Artificial Sequence
  Description of Artificial Sequence: Synthetic oligonucleotide
  Antisense strand to SEQ ID NO: 1486688
auuuacaaagacaaggaac

SEQ ID NO: 1486690 - RNA, 19 nt, Artificial Sequence
  Description of Artificial Sequence: Synthetic oligonucleotide
  Sense strand starting at position 1681 of SEQ ID NO: 1244412
uuccuugucuuuguaaaua

SEQ ID NO: 1486691 - RNA, 19 nt, Artificial Sequence
  Description of Artificial Sequence: Synthetic oligonucleotide
  Antisense strand to SEQ ID NO: 1486690
uauuuacaaagacaaggaa

SEQ ID NO: 1486692 - RNA, 19 nt, Artificial Sequence
  Description of Artificial Sequence: Synthetic oligonucleotide
  Sense strand starting at position 1734 of SEQ ID NO: 1244412
ggugguuucugucccacau

SEQ ID NO: 1486693 - RNA, 19 nt, Artificial Sequence
  Description of Artificial Sequence: Synthetic oligonucleotide
  Antisense strand to SEQ ID NO: 1486692
augugggacagaaaccacc

SEQ ID NO: 1486694 - RNA, 19 nt, Artificial Sequence
  Description of Artificial Sequence: Synthetic oligonucleotide
  Sense strand starting at position 1743 of SEQ ID NO: 1244412
ugucccacauguguauuaa

SEQ ID NO: 1486695 - RNA, 19 nt, Artificial Sequence
  Description of Artificial Sequence: Synthetic oligonucleotide
  Antisense strand to SEQ ID NO: 1486694
uuaauacacaugugggaca

SEQ ID NO: 1486696 - RNA, 19 nt, Artificial Sequence
  Description of Artificial Sequence: Synthetic oligonucleotide
  Sense strand starting at position 1744 of SEQ ID NO: 1244412
gucccacauguguauuaaa

SEQ ID NO: 1486697 - RNA, 19 nt, Artificial Sequence
  Description of Artificial Sequence: Synthetic oligonucleotide
  Antisense strand to SEQ ID NO: 1486696
uuuaauacacaugugggac

SEQ ID NO: 1486698 - RNA, 19 nt, Artificial Sequence
  Description of Artificial Sequence: Synthetic oligonucleotide
  Sense strand starting at position 1792 of SEQ ID NO: 1244412
augugcaauuugcauacua

SEQ ID NO: 1486699 - RNA, 19 nt, Artificial Sequence
  Description of Artificial Sequence: Synthetic oligonucleotide
  Antisense strand to SEQ ID NO: 1486698
uaguaugcaaauugcacau

SEQ ID NO: 1486700 - RNA, 19 nt, Artificial Sequence
  Description of Artificial Sequence: Synthetic oligonucleotide
  Sense strand starting at position 1835 of SEQ ID NO: 1244412
gguguugggaaauguauac

SEQ ID NO: 1486701 - RNA, 19 nt, Artificial Sequence
  Description of Artificial Sequence: Synthetic oligonucleotide
  Antisense strand to SEQ ID NO: 1486700
guauacauuucccaacacc

SEQ ID NO: 1486702 - RNA, 19 nt, Artificial Sequence
  Description of Artificial Sequence: Synthetic oligonucleotide
  Sense strand starting at position 1875 of SEQ ID NO: 1244412
cgacuuuguucugugcuga

SEQ ID NO: 1486703 - RNA, 19 nt, Artificial Sequence
  Description of Artificial Sequence: Synthetic oligonucleotide
  Antisense strand to SEQ ID NO: 1486702
ucagcacagaacaaagucg

SEQ ID NO: 1486704 - RNA, 19 nt, Artificial Sequence
  Description of Artificial Sequence: Synthetic oligonucleotide
  Sense strand starting at position 1897 of SEQ ID NO: 1244412
cuccuugguugggaggaua

SEQ ID NO: 1486705 - RNA, 19 nt, Artificial Sequence
  Description of Artificial Sequence: Synthetic oligonucleotide
  Antisense strand to SEQ ID NO: 1486704
uauccucccaaccaaggag

SEQ ID NO: 1486706 - RNA, 19 nt, Artificial Sequence
  Description of Artificial Sequence: Synthetic oligonucleotide
  Sense strand starting at position 2290 of SEQ ID NO: 1244412
uucuauaaaugucugagaa

SEQ ID NO: 1486707 - RNA, 19 nt, Artificial Sequence
  Description of Artificial Sequence: Synthetic oligonucleotide
  Antisense strand to SEQ ID NO: 1486706
uucucagacauuuauagaa

SEQ ID NO: 1486708 - RNA, 19 nt, Artificial Sequence
  Description of Artificial Sequence: Synthetic oligonucleotide
  Sense strand starting at position 2292 of SEQ ID NO: 1244412
cuauaaaugucugagaaau

SEQ ID NO: 1486709 - RNA, 19 nt, Artificial Sequence
  Description of Artificial Sequence: Synthetic oligonucleotide
  Antisense strand to SEQ ID NO: 1486708
auuucucagacauuuauag

SEQ ID NO: 1486710 - RNA, 19 nt, Artificial Sequence
  Description of Artificial Sequence: Synthetic oligonucleotide
  Sense strand starting at position 2347 of SEQ ID NO: 1244412
ugauaagucaauugcgaaa

SEQ ID NO: 1486711 - RNA, 19 nt, Artificial Sequence
  Description of Artificial Sequence: Synthetic oligonucleotide
  Antisense strand to SEQ ID NO: 1486710
uuucgcaauugacuuauca

SEQ ID NO: 1486712 - RNA, 19 nt, Artificial Sequence
  Description of Artificial Sequence: Synthetic oligonucleotide
  Sense strand starting at position 2404 of SEQ ID NO: 1244412
agggaaguauugucuuuau

SEQ ID NO: 1486713 - RNA, 19 nt, Artificial Sequence
  Description of Artificial Sequence: Synthetic oligonucleotide
  Antisense strand to SEQ ID NO: 1486712
auaaagacaauacuucccu

SEQ ID NO: 1486714 - RNA, 19 nt, Artificial Sequence
  Description of Artificial Sequence: Synthetic oligonucleotide
  Sense strand starting at position 2486 of SEQ ID NO: 1244412
ggacauuuguuauauuacu

SEQ ID NO: 1486715 - RNA, 19 nt, Artificial Sequence
  Description of Artificial Sequence: Synthetic oligonucleotide
  Antisense strand to SEQ ID NO: 1486714
aguaauauaacaaaugucc

SEQ ID NO: 1486716 - RNA, 19 nt, Artificial Sequence
  Description of Artificial Sequence: Synthetic oligonucleotide
  Sense strand starting at position 2694 of SEQ ID NO: 1244412
cggugacaugcgucuguaa

SEQ ID NO: 1486717 - RNA, 19 nt, Artificial Sequence
  Description of Artificial Sequence: Synthetic oligonucleotide
  Antisense strand to SEQ ID NO: 1486716
uuacagacgcaugucaccg

SEQ ID NO: 1486718 - RNA, 19 nt, Artificial Sequence
  Description of Artificial Sequence: Synthetic oligonucleotide
  Sense strand starting at position 3103 of SEQ ID NO: 1244412
cccagagaauucuggauga

SEQ ID NO: 1486719 - RNA, 19 nt, Artificial Sequence
  Description of Artificial Sequence: Synthetic oligonucleotide
  Antisense strand to SEQ ID NO: 1486718
ucauccagaauucucuggg

SEQ ID NO: 1486720 - RNA, 19 nt, Artificial Sequence
  Description of Artificial Sequence: Synthetic oligonucleotide
  Sense strand starting at position 3171 of SEQ ID NO: 1244412
uguuauacuccugaguauu

SEQ ID NO: 1486721 - RNA, 19 nt, Artificial Sequence
  Description of Artificial Sequence: Synthetic oligonucleotide
  Antisense strand to SEQ ID NO: 1486720
aauacucaggaguauaaca

SEQ ID NO: 1486722 - RNA, 19 nt, Artificial Sequence
  Description of Artificial Sequence: Synthetic oligonucleotide
  Sense strand starting at position 3231 of SEQ ID NO: 1244412
agcacaaauguuuauguua

SEQ ID NO: 1486723 - RNA, 19 nt, Artificial Sequence
  Description of Artificial Sequence: Synthetic oligonucleotide
  Antisense strand to SEQ ID NO: 1486722
uaacauaaacauuugugcu

SEQ ID NO: 1486724 - RNA, 19 nt, Artificial Sequence
  Description of Artificial Sequence: Synthetic oligonucleotide
  Sense strand starting at position 3271 of SEQ ID NO: 1244412
acauacauaugauagagaa

SEQ ID NO: 1486725 - RNA, 19 nt, Artificial Sequence
  Description of Artificial Sequence: Synthetic oligonucleotide
  Antisense strand to SEQ ID NO: 1486724
uucucuaucauauguaugu

SEQ ID NO: 1486726 - RNA, 19 nt, Artificial Sequence
  Description of Artificial Sequence: Synthetic oligonucleotide
  Sense strand starting at position 3395 of SEQ ID NO: 1244412
gugugugcauacucucuua

SEQ ID NO: 1486727 - RNA, 19 nt, Artificial Sequence
  Description of Artificial Sequence: Synthetic oligonucleotide
  Antisense strand to SEQ ID NO: 1486726
uaagagaguaugcacacac

SEQ ID NO: 1486728 - RNA, 19 nt, Artificial Sequence
  Description of Artificial Sequence: Synthetic oligonucleotide
  Sense strand starting at position 3398 of SEQ ID NO: 1244412
ugugcauacucucuuacuu

SEQ ID NO: 1486729 - RNA, 19 nt, Artificial Sequence
  Description of Artificial Sequence: Synthetic oligonucleotide
  Antisense strand to SEQ ID NO: 1486728
aaguaagagaguaugcaca

SEQ ID NO: 1486730 - RNA, 19 nt, Artificial Sequence
  Description of Artificial Sequence: Synthetic oligonucleotide
  Sense strand starting at position 3675 of SEQ ID NO: 1244412
uuauccaguuagguuuaaa

SEQ ID NO: 1486731 - RNA, 19 nt, Artificial Sequence
  Description of Artificial Sequence: Synthetic oligonucleotide
  Antisense strand to SEQ ID NO: 1486730
uuuaaaccuaacuggauaa

SEQ ID NO: 1486732 - RNA, 19 nt, Artificial Sequence
  Description of Artificial Sequence: Synthetic oligonucleotide
  Sense strand starting at position 23 of SEQ ID NO: 1244413
uguaaaugccgcgagagau

SEQ ID NO: 1486733 - RNA, 19 nt, Artificial Sequence
  Description of Artificial Sequence: Synthetic oligonucleotide
  Antisense strand to SEQ ID NO: 1486732
aucucucgcggcauuuaca

SEQ ID NO: 1486734 - RNA, 19 nt, Artificial Sequence
  Description of Artificial Sequence: Synthetic oligonucleotide
  Sense strand starting at position 24 of SEQ ID NO: 1244413
guaaaugccgcgagagaug

SEQ ID NO: 1486735 - RNA, 19 nt, Artificial Sequence
  Description of Artificial Sequence: Synthetic oligonucleotide
  Antisense strand to SEQ ID NO: 1486734
caucucucgcggcauuuac

SEQ ID NO: 1486736 - RNA, 19 nt, Artificial Sequence
  Description of Artificial Sequence: Synthetic oligonucleotide
  Sense strand starting at position 170 of SEQ ID NO: 1244413
gagaguagauguuuaccua

SEQ ID NO: 1486737 - RNA, 19 nt, Artificial Sequence
  Description of Artificial Sequence: Synthetic oligonucleotide
  Antisense strand to SEQ ID NO: 1486736
uagguaaacaucuacucuc

SEQ ID NO: 1486738 - RNA, 19 nt, Artificial Sequence
  Description of Artificial Sequence: Synthetic oligonucleotide
  Sense strand starting at position 173 of SEQ ID NO: 1244413
aguagauguuuaccuaaua

SEQ ID NO: 1486739 - RNA, 19 nt, Artificial Sequence
  Description of Artificial Sequence: Synthetic oligonucleotide
  Antisense strand to SEQ ID NO: 1486738
uauuagguaaacaucuacu

SEQ ID NO: 1486740 - RNA, 19 nt, Artificial Sequence
  Description of Artificial Sequence: Synthetic oligonucleotide
  Sense strand starting at position 174 of SEQ ID NO: 1244413
guagauguuuaccuaauau

SEQ ID NO: 1486741 - RNA, 19 nt, Artificial Sequence
  Description of Artificial Sequence: Synthetic oligonucleotide
  Antisense strand to SEQ ID NO: 1486740
auauuagguaaacaucuac

SEQ ID NO: 1486742 - RNA, 19 nt, Artificial Sequence
  Description of Artificial Sequence: Synthetic oligonucleotide
  Sense strand starting at position 215 of SEQ ID NO: 1244413
cagaaagguugaucaaguu

SEQ ID NO: 1486743 - RNA, 19 nt, Artificial Sequence
  Description of Artificial Sequence: Synthetic oligonucleotide
  Antisense strand to SEQ ID NO: 1486742
aacuugaucaaccuuucug

SEQ ID NO: 1486744 - RNA, 19 nt, Artificial Sequence
  Description of Artificial Sequence: Synthetic oligonucleotide
  Sense strand starting at position 417 of SEQ ID NO: 1244413
cauuaacaggugugcuuaa

SEQ ID NO: 1486745 - RNA, 19 nt, Artificial Sequence
  Description of Artificial Sequence: Synthetic oligonucleotide
  Antisense strand to SEQ ID NO: 1486744
uuaagcacaccuguuaaug

SEQ ID NO: 1486746 - RNA, 19 nt, Artificial Sequence
  Description of Artificial Sequence: Synthetic oligonucleotide
  Sense strand starting at position 418 of SEQ ID NO: 1244413
auuaacaggugugcuuaaa

SEQ ID NO: 1486747 - RNA, 19 nt, Artificial Sequence
  Description of Artificial Sequence: Synthetic oligonucleotide
  Antisense strand to SEQ ID NO: 1486746
uuuaagcacaccuguuaau

SEQ ID NO: 1486748 - RNA, 19 nt, Artificial Sequence
  Description of Artificial Sequence: Synthetic oligonucleotide
  Sense strand starting at position 482 of SEQ ID NO: 1244413
aaacuuccaccggauguua

SEQ ID NO: 1486749 - RNA, 19 nt, Artificial Sequence
  Description of Artificial Sequence: Synthetic oligonucleotide
  Antisense strand to SEQ ID NO: 1486748
uaacauccgguggaaguuu

SEQ ID NO: 1486750 - RNA, 19 nt, Artificial Sequence
  Description of Artificial Sequence: Synthetic oligonucleotide
  Sense strand starting at position 549 of SEQ ID NO: 1244413
guuacuucuucuguaauug

SEQ ID NO: 1486751 - RNA, 19 nt, Artificial Sequence
  Description of Artificial Sequence: Synthetic oligonucleotide
  Antisense strand to SEQ ID NO: 1486750
caauuacagaagaaguaac

SEQ ID NO: 1486752 - RNA, 19 nt, Artificial Sequence
  Description of Artificial Sequence: Synthetic oligonucleotide
  Sense strand starting at position 550 of SEQ ID NO: 1244413
uuacuucuucuguaauugu

SEQ ID NO: 1486753 - RNA, 19 nt, Artificial Sequence
  Description of Artificial Sequence: Synthetic oligonucleotide
  Antisense strand to SEQ ID NO: 1486752
acaauuacagaagaaguaa

SEQ ID NO: 1486754 - RNA, 19 nt, Artificial Sequence
  Description of Artificial Sequence: Synthetic oligonucleotide
  Sense strand starting at position 565 of SEQ ID NO: 1244413
uuguuacccuugucuaaau

SEQ ID NO: 1486755 - RNA, 19 nt, Artificial Sequence
  Description of Artificial Sequence: Synthetic oligonucleotide
  Antisense strand to SEQ ID NO: 1486754
auuuagacaaggguaacaa

SEQ ID NO: 1486756 - RNA, 19 nt, Artificial Sequence
  Description of Artificial Sequence: Synthetic oligonucleotide
  Sense strand starting at position 566 of SEQ ID NO: 1244413
uguuacccuugucuaaaua

SEQ ID NO: 1486757 - RNA, 19 nt, Artificial Sequence
  Description of Artificial Sequence: Synthetic oligonucleotide
  Antisense strand to SEQ ID NO: 1486756
uauuuagacaaggguaaca

SEQ ID NO: 1486758 - RNA, 19 nt, Artificial Sequence
  Description of Artificial Sequence: Synthetic oligonucleotide
  Sense strand starting at position 567 of SEQ ID NO: 1244413
guuacccuugucuaaauaa

SEQ ID NO: 1486759 - RNA, 19 nt, Artificial Sequence
  Description of Artificial Sequence: Synthetic oligonucleotide
  Antisense strand to SEQ ID NO: 1486758
uuauuuagacaaggguaac

SEQ ID NO: 1486760 - RNA, 19 nt, Artificial Sequence
  Description of Artificial Sequence: Synthetic oligonucleotide
  Sense strand starting at position 752 of SEQ ID NO: 1244413
agcagcuauugaucaagau

SEQ ID NO: 1486761 - RNA, 19 nt, Artificial Sequence
  Description of Artificial Sequence: Synthetic oligonucleotide
  Antisense strand to SEQ ID NO: 1486760
aucuugaucaauagcugcu

SEQ ID NO: 1486762 - RNA, 19 nt, Artificial Sequence
  Description of Artificial Sequence: Synthetic oligonucleotide
  Sense strand starting at position 753 of SEQ ID NO: 1244413
gcagcuauugaucaagaua

SEQ ID NO: 1486763 - RNA, 19 nt, Artificial Sequence
  Description of Artificial Sequence: Synthetic oligonucleotide
  Antisense strand to SEQ ID NO: 1486762
uaucuugaucaauagcugc

SEQ ID NO: 1486764 - RNA, 19 nt, Artificial Sequence
  Description of Artificial Sequence: Synthetic oligonucleotide
  Sense strand starting at position 874 of SEQ ID NO: 1244413
gcacacaaggaauguaaau

SEQ ID NO: 1486765 - RNA, 19 nt, Artificial Sequence
  Description of Artificial Sequence: Synthetic oligonucleotide
  Antisense strand to SEQ ID NO: 1486764
auuuacauuccuugugugc

SEQ ID NO: 1486766 - RNA, 19 nt, Artificial Sequence
  Description of Artificial Sequence: Synthetic oligonucleotide
  Sense strand starting at position 922 of SEQ ID NO: 1244413
gcaaaucugaugcagguuu

SEQ ID NO: 1486767 - RNA, 19 nt, Artificial Sequence
  Description of Artificial Sequence: Synthetic oligonucleotide
  Antisense strand to SEQ ID NO: 1486766
aaaccugcaucagauuugc

SEQ ID NO: 1486768 - RNA, 19 nt, Artificial Sequence
  Description of Artificial Sequence: Synthetic oligonucleotide
  Sense strand starting at position 985 of SEQ ID NO: 1244413
caagguuaacucuguggaa

SEQ ID NO: 1486769 - RNA, 19 nt, Artificial Sequence
  Description of Artificial Sequence: Synthetic oligonucleotide
  Antisense strand to SEQ ID NO: 1486768
uuccacagaguuaaccuug

SEQ ID NO: 1486770 - RNA, 19 nt, Artificial Sequence
  Description of Artificial Sequence: Synthetic oligonucleotide
  Sense strand starting at position 986 of SEQ ID NO: 1244413
aagguuaacucuguggaag

SEQ ID NO: 1486771 - RNA, 19 nt, Artificial Sequence
  Description of Artificial Sequence: Synthetic oligonucleotide
  Antisense strand to SEQ ID NO: 1486770
cuuccacagaguuaaccuu

SEQ ID NO: 1486772 - RNA, 19 nt, Artificial Sequence
  Description of Artificial Sequence: Synthetic oligonucleotide
  Sense strand starting at position 987 of SEQ ID NO: 1244413
agguuaacucuguggaaga

SEQ ID NO: 1486773 - RNA, 19 nt, Artificial Sequence
  Description of Artificial Sequence: Synthetic oligonucleotide
  Antisense strand to SEQ ID NO: 1486772
ucuuccacagaguuaaccu

SEQ ID NO: 1486774 - RNA, 19 nt, Artificial Sequence
  Description of Artificial Sequence: Synthetic oligonucleotide
  Sense strand starting at position 1039 of SEQ ID NO: 1244413
cugacacuuccugagcaaa

SEQ ID NO: 1486775 - RNA, 19 nt, Artificial Sequence
  Description of Artificial Sequence: Synthetic oligonucleotide
  Antisense strand to SEQ ID NO: 1486774
uuugcucaggaagugucag

SEQ ID NO: 1486776 - RNA, 19 nt, Artificial Sequence
  Description of Artificial Sequence: Synthetic oligonucleotide
  Sense strand starting at position 1116 of SEQ ID NO: 1244413
uccaguuaauuugaagaau

SEQ ID NO: 1486777 - RNA, 19 nt, Artificial Sequence
  Description of Artificial Sequence: Synthetic oligonucleotide
  Antisense strand to SEQ ID NO: 1486776
auucuucaaauuaacugga

SEQ ID NO: 1486778 - RNA, 19 nt, Artificial Sequence
  Description of Artificial Sequence: Synthetic oligonucleotide
  Sense strand starting at position 1212 of SEQ ID NO: 1244413
acggacuucgcuuaagaaa

SEQ ID NO: 1486779 - RNA, 19 nt, Artificial Sequence
  Description of Artificial Sequence: Synthetic oligonucleotide
  Antisense strand to SEQ ID NO: 1486778
uuucuuaagcgaaguccgu

SEQ ID NO: 1486780 - RNA, 19 nt, Artificial Sequence
  Description of Artificial Sequence: Synthetic oligonucleotide
  Sense strand starting at position 1251 of SEQ ID NO: 1244413
aagguauaguguucggauc

SEQ ID NO: 1486781 - RNA, 19 nt, Artificial Sequence
  Description of Artificial Sequence: Synthetic oligonucleotide
  Antisense strand to SEQ ID NO: 1486780
gauccgaacacuauaccuu

SEQ ID NO: 1486782 - RNA, 19 nt, Artificial Sequence
  Description of Artificial Sequence: Synthetic oligonucleotide
  Sense strand starting at position 1318 of SEQ ID NO: 1244413
gucuguuagaaaggugaac

SEQ ID NO: 1486783 - RNA, 19 nt, Artificial Sequence
  Description of Artificial Sequence: Synthetic oligonucleotide
  Antisense strand to SEQ ID NO: 1486782
guucaccuuucuaacagac

SEQ ID NO: 1486784 - RNA, 19 nt, Artificial Sequence
  Description of Artificial Sequence: Synthetic oligonucleotide
  Sense strand starting at position 1320 of SEQ ID NO: 1244413
cuguuagaaaggugaacua

SEQ ID NO: 1486785 - RNA, 19 nt, Artificial Sequence
  Description of Artificial Sequence: Synthetic oligonucleotide
  Antisense strand to SEQ ID NO: 1486784
uaguucaccuuucuaacag

SEQ ID NO: 1486786 - RNA, 19 nt, Artificial Sequence
  Description of Artificial Sequence: Synthetic oligonucleotide
  Sense strand starting at position 2276 of SEQ ID NO: 1244413
cuuccucaggcgugggaaa

SEQ ID NO: 1486787 - RNA, 19 nt, Artificial Sequence
  Description of Artificial Sequence: Synthetic oligonucleotide
  Antisense strand to SEQ ID NO: 1486786
uuucccacgccugaggaag

SEQ ID NO: 1486788 - RNA, 19 nt, Artificial Sequence
  Description of Artificial Sequence: Synthetic oligonucleotide
  Sense strand starting at position 2427 of SEQ ID NO: 1244413
uuucgaccugcccaagaua

SEQ ID NO: 1486789 - RNA, 19 nt, Artificial Sequence
  Description of Artificial Sequence: Synthetic oligonucleotide
  Antisense strand to SEQ ID NO: 1486788
uaucuugggcaggucgaaa

SEQ ID NO: 1486790 - RNA, 19 nt, Artificial Sequence
  Description of Artificial Sequence: Synthetic oligonucleotide
  Sense strand starting at position 2430 of SEQ ID NO: 1244413
cgaccugcccaagauacuu

SEQ ID NO: 1486791 - RNA, 19 nt, Artificial Sequence
  Description of Artificial Sequence: Synthetic oligonucleotide
  Antisense strand to SEQ ID NO: 1486790
aaguaucuugggcaggucg

SEQ ID NO: 1486792 - RNA, 19 nt, Artificial Sequence
  Description of Artificial Sequence: Synthetic oligonucleotide
  Sense strand starting at position 2451 of SEQ ID NO: 1244413
uagggcucuggcuggaauu

SEQ ID NO: 1486793 - RNA, 19 nt, Artificial Sequence
  Description of Artificial Sequence: Synthetic oligonucleotide
  Antisense strand to SEQ ID NO: 1486792
aauuccagccagagcccua

SEQ ID NO: 1486794 - RNA, 19 nt, Artificial Sequence
  Description of Artificial Sequence: Synthetic oligonucleotide
  Sense strand starting at position 2501 of SEQ ID NO: 1244413
ggccgauuuguccacgaug

SEQ ID NO: 1486795 - RNA, 19 nt, Artificial Sequence
  Description of Artificial Sequence: Synthetic oligonucleotide
  Antisense strand to SEQ ID NO: 1486794
caucguggacaaaucggcc

SEQ ID NO: 1486796 - RNA, 19 nt, Artificial Sequence
  Description of Artificial Sequence: Synthetic oligonucleotide
  Sense strand starting at position 2503 of SEQ ID NO: 1244413
ccgauuuguccacgauguu

SEQ ID NO: 1486797 - RNA, 19 nt, Artificial Sequence
  Description of Artificial Sequence: Synthetic oligonucleotide
  Antisense strand to SEQ ID NO: 1486796
aacaucguggacaaaucgg

SEQ ID NO: 1486798 - RNA, 19 nt, Artificial Sequence
  Description of Artificial Sequence: Synthetic oligonucleotide
  Sense strand starting at position 2504 of SEQ ID NO: 1244413
cgauuuguccacgauguug

SEQ ID NO: 1486799 - RNA, 19 nt, Artificial Sequence
  Description of Artificial Sequence: Synthetic oligonucleotide
  Antisense strand to SEQ ID NO: 1486798
caacaucguggacaaaucg

SEQ ID NO: 1486800 - RNA, 19 nt, Artificial Sequence
  Description of Artificial Sequence: Synthetic oligonucleotide
  Sense strand starting at position 2626 of SEQ ID NO: 1244413
gcacgcauacguuccuuua

SEQ ID NO: 1486801 - RNA, 19 nt, Artificial Sequence
  Description of Artificial Sequence: Synthetic oligonucleotide
  Antisense strand to SEQ ID NO: 1486800
uaaaggaacguaugcgugc

SEQ ID NO: 1486802 - RNA, 19 nt, Artificial Sequence
  Description of Artificial Sequence: Synthetic oligonucleotide
  Sense strand starting at position 3316 of SEQ ID NO: 1244413
cggauaacgggcugucuaa

SEQ ID NO: 1486803 - RNA, 19 nt, Artificial Sequence
  Description of Artificial Sequence: Synthetic oligonucleotide
  Antisense strand to SEQ ID NO: 1486802
uuagacagcccguuauccg

SEQ ID NO: 1486804 - RNA, 19 nt, Artificial Sequence
  Description of Artificial Sequence: Synthetic oligonucleotide
  Sense strand starting at position 3345 of SEQ ID NO: 1244413
acgagaaaggcccgaguuu

SEQ ID NO: 1486805 - RNA, 19 nt, Artificial Sequence
  Description of Artificial Sequence: Synthetic oligonucleotide
  Antisense strand to SEQ ID NO: 1486804
aaacucgggccuuucucgu

SEQ ID NO: 1486806 - RNA, 19 nt, Artificial Sequence
  Description of Artificial Sequence: Synthetic oligonucleotide
  Sense strand starting at position 3400 of SEQ ID NO: 1244413
uuccuauaagugggagcuu

SEQ ID NO: 1486807 - RNA, 19 nt, Artificial Sequence
  Description of Artificial Sequence: Synthetic oligonucleotide
  Antisense strand to SEQ ID NO: 1486806
aagcucccacuuauaggaa

SEQ ID NO: 1486808 - RNA, 19 nt, Artificial Sequence
  Description of Artificial Sequence: Synthetic oligonucleotide
  Sense strand starting at position 3488 of SEQ ID NO: 1244413
uggagacuucuguguuaaa

SEQ ID NO: 1486809 - RNA, 19 nt, Artificial Sequence
  Description of Artificial Sequence: Synthetic oligonucleotide
  Antisense strand to SEQ ID NO: 1486808
uuuaacacagaagucucca

SEQ ID NO: 1486810 - RNA, 19 nt, Artificial Sequence
  Description of Artificial Sequence: Synthetic oligonucleotide
  Sense strand starting at position 3946 of SEQ ID NO: 1244413
ggauuuaagugcuaaccga

SEQ ID NO: 1486811 - RNA, 19 nt, Artificial Sequence
  Description of Artificial Sequence: Synthetic oligonucleotide
  Antisense strand to SEQ ID NO: 1486810
ucgguuagcacuuaaaucc

SEQ ID NO: 1486812 - RNA, 19 nt, Artificial Sequence
  Description of Artificial Sequence: Synthetic oligonucleotide
  Sense strand starting at position 73 of SEQ ID NO: 1244414
aggaaauuauucuuuguac

SEQ ID NO: 1486813 - RNA, 19 nt, Artificial Sequence
  Description of Artificial Sequence: Synthetic oligonucleotide
  Antisense strand to SEQ ID NO: 1486812
guacaaagaauaauuuccu

SEQ ID NO: 1486814 - RNA, 19 nt, Artificial Sequence
  Description of Artificial Sequence: Synthetic oligonucleotide
  Sense strand starting at position 74 of SEQ ID NO: 1244414
ggaaauuauucuuuguaca

SEQ ID NO: 1486815 - RNA, 19 nt, Artificial Sequence
  Description of Artificial Sequence: Synthetic oligonucleotide
  Antisense strand to SEQ ID NO: 1486814
uguacaaagaauaauuucc

SEQ ID NO: 1486816 - RNA, 19 nt, Artificial Sequence
  Description of Artificial Sequence: Synthetic oligonucleotide
  Sense strand starting at position 115 of SEQ ID NO: 1244414
augauauuguuucugguua

SEQ ID NO: 1486817 - RNA, 19 nt, Artificial Sequence
  Description of Artificial Sequence: Synthetic oligonucleotide
  Antisense strand to SEQ ID NO: 1486816
uaaccagaaacaauaucau

SEQ ID NO: 1486818 - RNA, 19 nt, Artificial Sequence
  Description of Artificial Sequence: Synthetic oligonucleotide
  Sense strand starting at position 119 of SEQ ID NO: 1244414
uauuguuucugguuaacag

SEQ ID NO: 1486819 - RNA, 19 nt, Artificial Sequence
  Description of Artificial Sequence: Synthetic oligonucleotide
  Antisense strand to SEQ ID NO: 1486818
cuguuaaccagaaacaaua

SEQ ID NO: 1486820 - RNA, 19 nt, Artificial Sequence
  Description of Artificial Sequence: Synthetic oligonucleotide
  Sense strand starting at position 120 of SEQ ID NO: 1244414
auuguuucugguuaacagu

SEQ ID NO: 1486821 - RNA, 19 nt, Artificial Sequence
  Description of Artificial Sequence: Synthetic oligonucleotide
  Antisense strand to SEQ ID NO: 1486820
acuguuaaccagaaacaau

SEQ ID NO: 1486822 - RNA, 19 nt, Artificial Sequence
  Description of Artificial Sequence: Synthetic oligonucleotide
  Sense strand starting at position 173 of SEQ ID NO: 1244414
gaacucacuguuggcaaua

SEQ ID NO: 1486823 - RNA, 19 nt, Artificial Sequence
  Description of Artificial Sequence: Synthetic oligonucleotide
  Antisense strand to SEQ ID NO: 1486822
uauugccaacagugaguuc

SEQ ID NO: 1486824 - RNA, 19 nt, Artificial Sequence
  Description of Artificial Sequence: Synthetic oligonucleotide
  Sense strand starting at position 225 of SEQ ID NO: 1244414
aggugacauuuacagaauu

SEQ ID NO: 1486825 - RNA, 19 nt, Artificial Sequence
  Description of Artificial Sequence: Synthetic oligonucleotide
  Antisense strand to SEQ ID NO: 1486824
aauucuguaaaugucaccu

SEQ ID NO: 1486826 - RNA, 19 nt, Artificial Sequence
  Description of Artificial Sequence: Synthetic oligonucleotide
  Sense strand starting at position 320 of SEQ ID NO: 1244414
ucagaaacuuacgucagaa

SEQ ID NO: 1486827 - RNA, 19 nt, Artificial Sequence
  Description of Artificial Sequence: Synthetic oligonucleotide
  Antisense strand to SEQ ID NO: 1486826
uucugacguaaguuucuga

SEQ ID NO: 1486828 - RNA, 19 nt, Artificial Sequence
  Description of Artificial Sequence: Synthetic oligonucleotide
  Sense strand starting at position 322 of SEQ ID NO: 1244414
agaaacuuacgucagaagu

SEQ ID NO: 1486829 - RNA, 19 nt, Artificial Sequence
  Description of Artificial Sequence: Synthetic oligonucleotide
  Antisense strand to SEQ ID NO: 1486828
acuucugacguaaguuucu

SEQ ID NO: 1486830 - RNA, 19 nt, Artificial Sequence
  Description of Artificial Sequence: Synthetic oligonucleotide
  Sense strand starting at position 408 of SEQ ID NO: 1244414
ugcagaugucaugaaagca

SEQ ID NO: 1486831 - RNA, 19 nt, Artificial Sequence
  Description of Artificial Sequence: Synthetic oligonucleotide
  Antisense strand to SEQ ID NO: 1486830
ugcuuucaugacaucugca

SEQ ID NO: 1486832 - RNA, 19 nt, Artificial Sequence
  Description of Artificial Sequence: Synthetic oligonucleotide
  Sense strand starting at position 817 of SEQ ID NO: 1244414
uugaguaaguaaucuacca

SEQ ID NO: 1486833 - RNA, 19 nt, Artificial Sequence
  Description of Artificial Sequence: Synthetic oligonucleotide
  Antisense strand to SEQ ID NO: 1486832
ugguagauuacuuacucaa

SEQ ID NO: 1486834 - RNA, 19 nt, Artificial Sequence
  Description of Artificial Sequence: Synthetic oligonucleotide
  Sense strand starting at position 880 of SEQ ID NO: 1244414
guagcugagaaggguauaa

SEQ ID NO: 1486835 - RNA, 19 nt, Artificial Sequence
  Description of Artificial Sequence: Synthetic oligonucleotide
  Antisense strand to SEQ ID NO: 1486834
uuauacccuucucagcuac

SEQ ID NO: 1486836 - RNA, 19 nt, Artificial Sequence
  Description of Artificial Sequence: Synthetic oligonucleotide
  Sense strand starting at position 920 of SEQ ID NO: 1244414
gaacuccgagccuagaaau

SEQ ID NO: 1486837 - RNA, 19 nt, Artificial Sequence
  Description of Artificial Sequence: Synthetic oligonucleotide
  Antisense strand to SEQ ID NO: 1486836
auuucuaggcucggaguuc

SEQ ID NO: 1486838 - RNA, 19 nt, Artificial Sequence
  Description of Artificial Sequence: Synthetic oligonucleotide
  Sense strand starting at position 926 of SEQ ID NO: 1244414
cgagccuagaaauguaaau

SEQ ID NO: 1486839 - RNA, 19 nt, Artificial Sequence
  Description of Artificial Sequence: Synthetic oligonucleotide
  Antisense strand to SEQ ID NO: 1486838
auuuacauuucuaggcucg

SEQ ID NO: 1486840 - RNA, 19 nt, Artificial Sequence
  Description of Artificial Sequence: Synthetic oligonucleotide
  Sense strand starting at position 971 of SEQ ID NO: 1244414
guugguugaaccuaaguau

SEQ ID NO: 1486841 - RNA, 19 nt, Artificial Sequence
  Description of Artificial Sequence: Synthetic oligonucleotide
  Antisense strand to SEQ ID NO: 1486840
auacuuagguucaaccaac

SEQ ID NO: 1486842 - RNA, 19 nt, Artificial Sequence
  Description of Artificial Sequence: Synthetic oligonucleotide
  Sense strand starting at position 974 of SEQ ID NO: 1244414
gguugaaccuaaguauaaa

SEQ ID NO: 1486843 - RNA, 19 nt, Artificial Sequence
  Description of Artificial Sequence: Synthetic oligonucleotide
  Antisense strand to SEQ ID NO: 1486842
uuuauacuuagguucaacc

SEQ ID NO: 1486844 - RNA, 19 nt, Artificial Sequence
  Description of Artificial Sequence: Synthetic oligonucleotide
  Sense strand starting at position 1022 of SEQ ID NO: 1244414
caucgaaauggcgauaaca

SEQ ID NO: 1486845 - RNA, 19 nt, Artificial Sequence
  Description of Artificial Sequence: Synthetic oligonucleotide
  Antisense strand to SEQ ID NO: 1486844
uguuaucgccauuucgaug

SEQ ID NO: 1486846 - RNA, 19 nt, Artificial Sequence
  Description of Artificial Sequence: Synthetic oligonucleotide
  Sense strand starting at position 1024 of SEQ ID NO: 1244414
ucgaaauggcgauaacaua

SEQ ID NO: 1486847 - RNA, 19 nt, Artificial Sequence
  Description of Artificial Sequence: Synthetic oligonucleotide
  Antisense strand to SEQ ID NO: 1486846
uauguuaucgccauuucga

SEQ ID NO: 1486848 - RNA, 19 nt, Artificial Sequence
  Description of Artificial Sequence: Synthetic oligonucleotide
  Sense strand starting at position 1032 of SEQ ID NO: 1244414
gcgauaacauaaucaguug

SEQ ID NO: 1486849 - RNA, 19 nt, Artificial Sequence
  Description of Artificial Sequence: Synthetic oligonucleotide
  Antisense strand to SEQ ID NO: 1486848
caacugauuauguuaucgc

SEQ ID NO: 1486850 - RNA, 19 nt, Artificial Sequence
  Description of Artificial Sequence: Synthetic oligonucleotide
  Sense strand starting at position 1084 of SEQ ID NO: 1244414
gaagaagagugcucugaaa

SEQ ID NO: 1486851 - RNA, 19 nt, Artificial Sequence
  Description of Artificial Sequence: Synthetic oligonucleotide
  Antisense strand to SEQ ID NO: 1486850
uuucagagcacucuucuuc

SEQ ID NO: 1486852 - RNA, 19 nt, Artificial Sequence
  Description of Artificial Sequence: Synthetic oligonucleotide
  Sense strand starting at position 1086 of SEQ ID NO: 1244414
agaagagugcucugaaacg

SEQ ID NO: 1486853 - RNA, 19 nt, Artificial Sequence
  Description of Artificial Sequence: Synthetic oligonucleotide
  Antisense strand to SEQ ID NO: 1486852
cguuucagagcacucuucu

SEQ ID NO: 1486854 - RNA, 19 nt, Artificial Sequence
  Description of Artificial Sequence: Synthetic oligonucleotide
  Sense strand starting at position 1095 of SEQ ID NO: 1244414
cucugaaacguguaaaggu

SEQ ID NO: 1486855 - RNA, 19 nt, Artificial Sequence
  Description of Artificial Sequence: Synthetic oligonucleotide
  Antisense strand to SEQ ID NO: 1486854
accuuuacacguuucagag

SEQ ID NO: 1486856 - RNA, 19 nt, Artificial Sequence
  Description of Artificial Sequence: Synthetic oligonucleotide
  Sense strand starting at position 1103 of SEQ ID NO: 1244414
cguguaaaggugcuacgua

SEQ ID NO: 1486857 - RNA, 19 nt, Artificial Sequence
  Description of Artificial Sequence: Synthetic oligonucleotide
  Antisense strand to SEQ ID NO: 1486856
uacguagcaccuuuacacg

SEQ ID NO: 1486858 - RNA, 19 nt, Artificial Sequence
  Description of Artificial Sequence: Synthetic oligonucleotide
  Sense strand starting at position 1117 of SEQ ID NO: 1244414
acguaaauagaagguaaua

SEQ ID NO: 1486859 - RNA, 19 nt, Artificial Sequence
  Description of Artificial Sequence: Synthetic oligonucleotide
  Antisense strand to SEQ ID NO: 1486858
uauuaccuucuauuuacgu

SEQ ID NO: 1486860 - RNA, 19 nt, Artificial Sequence
  Description of Artificial Sequence: Synthetic oligonucleotide
  Sense strand starting at position 1128 of SEQ ID NO: 1244414
agguaauaaucagugguga

SEQ ID NO: 1486861 - RNA, 19 nt, Artificial Sequence
  Description of Artificial Sequence: Synthetic oligonucleotide
  Antisense strand to SEQ ID NO: 1486860
ucaccacugauuauuaccu

SEQ ID NO: 1486862 - RNA, 19 nt, Artificial Sequence
  Description of Artificial Sequence: Synthetic oligonucleotide
  Sense strand starting at position 1129 of SEQ ID NO: 1244414
gguaauaaucaguggugac

SEQ ID NO: 1486863 - RNA, 19 nt, Artificial Sequence
  Description of Artificial Sequence: Synthetic oligonucleotide
  Antisense strand to SEQ ID NO: 1486862
gucaccacugauuauuacc

SEQ ID NO: 1486864 - RNA, 19 nt, Artificial Sequence
  Description of Artificial Sequence: Synthetic oligonucleotide
  Sense strand starting at position 1130 of SEQ ID NO: 1244414
guaauaaucaguggugaca

SEQ ID NO: 1486865 - RNA, 19 nt, Artificial Sequence
  Description of Artificial Sequence: Synthetic oligonucleotide
  Antisense strand to SEQ ID NO: 1486864
ugucaccacugauuauuac

SEQ ID NO: 1486866 - RNA, 19 nt, Artificial Sequence
  Description of Artificial Sequence: Synthetic oligonucleotide
  Sense strand starting at position 1172 of SEQ ID NO: 1244414
cuuaaagggucaucucaug

SEQ ID NO: 1486867 - RNA, 19 nt, Artificial Sequence
  Description of Artificial Sequence: Synthetic oligonucleotide
  Antisense strand to SEQ ID NO: 1486866
caugagaugacccuuuaag

SEQ ID NO: 1486868 - RNA, 19 nt, Artificial Sequence
  Description of Artificial Sequence: Synthetic oligonucleotide
  Sense strand starting at position 2195 of SEQ ID NO: 1244414
gaaacugcuauucgggaga

SEQ ID NO: 1486869 - RNA, 19 nt, Artificial Sequence
  Description of Artificial Sequence: Synthetic oligonucleotide
  Antisense strand to SEQ ID NO: 1486868
ucucccgaauagcaguuuc

SEQ ID NO: 1486870 - RNA, 19 nt, Artificial Sequence
  Description of Artificial Sequence: Synthetic oligonucleotide
  Sense strand starting at position 2282 of SEQ ID NO: 1244414
gucuguguucccguuuaua

SEQ ID NO: 1486871 - RNA, 19 nt, Artificial Sequence
  Description of Artificial Sequence: Synthetic oligonucleotide
  Antisense strand to SEQ ID NO: 1486870
uauaaacgggaacacagac

SEQ ID NO: 1486872 - RNA, 19 nt, Artificial Sequence
  Description of Artificial Sequence: Synthetic oligonucleotide
  Sense strand starting at position 2369 of SEQ ID NO: 1244414
ggagcauucuaagcaucac

SEQ ID NO: 1486873 - RNA, 19 nt, Artificial Sequence
  Description of Artificial Sequence: Synthetic oligonucleotide
  Antisense strand to SEQ ID NO: 1486872
gugaugcuuagaaugcucc

SEQ ID NO: 1486874 - RNA, 19 nt, Artificial Sequence
  Description of Artificial Sequence: Synthetic oligonucleotide
  Sense strand starting at position 2436 of SEQ ID NO: 1244414
uuguauuuguucucaucuu

SEQ ID NO: 1486875 - RNA, 19 nt, Artificial Sequence
  Description of Artificial Sequence: Synthetic oligonucleotide
  Antisense strand to SEQ ID NO: 1486874
aagaugagaacaaauacaa

SEQ ID NO: 1486876 - RNA, 19 nt, Artificial Sequence
  Description of Artificial Sequence: Synthetic oligonucleotide
  Sense strand starting at position 2447 of SEQ ID NO: 1244414
cucaucuuccuccaguaga

SEQ ID NO: 1486877 - RNA, 19 nt, Artificial Sequence
  Description of Artificial Sequence: Synthetic oligonucleotide
  Antisense strand to SEQ ID NO: 1486876
ucuacuggaggaagaugag

SEQ ID NO: 1486878 - RNA, 19 nt, Artificial Sequence
  Description of Artificial Sequence: Synthetic oligonucleotide
  Sense strand starting at position 2461 of SEQ ID NO: 1244414
guagaauucuaaguucuau

SEQ ID NO: 1486879 - RNA, 19 nt, Artificial Sequence
  Description of Artificial Sequence: Synthetic oligonucleotide
  Antisense strand to SEQ ID NO: 1486878
auagaacuuagaauucuac

SEQ ID NO: 1486880 - RNA, 19 nt, Artificial Sequence
  Description of Artificial Sequence: Synthetic oligonucleotide
  Sense strand starting at position 2514 of SEQ ID NO: 1244414
acagauaacuugguucuag

SEQ ID NO: 1486881 - RNA, 19 nt, Artificial Sequence
  Description of Artificial Sequence: Synthetic oligonucleotide
  Antisense strand to SEQ ID NO: 1486880
cuagaaccaaguuaucugu

SEQ ID NO: 1486882 - RNA, 19 nt, Artificial Sequence
  Description of Artificial Sequence: Synthetic oligonucleotide
  Sense strand starting at position 2618 of SEQ ID NO: 1244414
guauauaucugagcauaua

SEQ ID NO: 1486883 - RNA, 19 nt, Artificial Sequence
  Description of Artificial Sequence: Synthetic oligonucleotide
  Antisense strand to SEQ ID NO: 1486882
uauaugcucagauauauac

SEQ ID NO: 1486884 - RNA, 19 nt, Artificial Sequence
  Description of Artificial Sequence: Synthetic oligonucleotide
  Sense strand starting at position 2710 of SEQ ID NO: 1244414
gaguccuauguguauauau

SEQ ID NO: 1486885 - RNA, 19 nt, Artificial Sequence
  Description of Artificial Sequence: Synthetic oligonucleotide
  Antisense strand to SEQ ID NO: 1486884
auauauacacauaggacuc

SEQ ID NO: 1486886 - RNA, 19 nt, Artificial Sequence
  Description of Artificial Sequence: Synthetic oligonucleotide
  Sense strand starting at position 3274 of SEQ ID NO: 1244414
cuguauaauguacaaggua

SEQ ID NO: 1486887 - RNA, 19 nt, Artificial Sequence
  Description of Artificial Sequence: Synthetic oligonucleotide
  Antisense strand to SEQ ID NO: 1486886
uaccuuguacauuauacag

SEQ ID NO: 1486888 - RNA, 19 nt, Artificial Sequence
  Description of Artificial Sequence: Synthetic oligonucleotide
  Sense strand starting at position 3288 of SEQ ID NO: 1244414
agguaauccuuuccuuuag

SEQ ID NO: 1486889 - RNA, 19 nt, Artificial Sequence
  Description of Artificial Sequence: Synthetic oligonucleotide
  Antisense strand to SEQ ID NO: 1486888
cuaaaggaaaggauuaccu

SEQ ID NO: 1486890 - RNA, 19 nt, Artificial Sequence
  Description of Artificial Sequence: Synthetic oligonucleotide
  Sense strand starting at position 3290 of SEQ ID NO: 1244414
guaauccuuuccuuuagga

SEQ ID NO: 1486891 - RNA, 19 nt, Artificial Sequence
  Description of Artificial Sequence: Synthetic oligonucleotide
  Antisense strand to SEQ ID NO: 1486890
uccuaaaggaaaggauuac

SEQ ID NO: 1486892 - RNA, 19 nt, Artificial Sequence
  Description of Artificial Sequence: Synthetic oligonucleotide
  Sense strand starting at position 741 of SEQ ID NO: 1244415
agguuaucaggccauaauc

SEQ ID NO: 1486893 - RNA, 19 nt, Artificial Sequence
  Description of Artificial Sequence: Synthetic oligonucleotide
  Antisense strand to SEQ ID NO: 1486892
gauuauggccugauaaccu

SEQ ID NO: 1486894 - RNA, 19 nt, Artificial Sequence
  Description of Artificial Sequence: Synthetic oligonucleotide
  Sense strand starting at position 743 of SEQ ID NO: 1244415
guuaucaggccauaaucua

SEQ ID NO: 1486895 - RNA, 19 nt, Artificial Sequence
  Description of Artificial Sequence: Synthetic oligonucleotide
  Antisense strand to SEQ ID NO: 1486894
uagauuauggccugauaac

SEQ ID NO: 1486896 - RNA, 19 nt, Artificial Sequence
  Description of Artificial Sequence: Synthetic oligonucleotide
  Sense strand starting at position 824 of SEQ ID NO: 1244415
uuacuagucuuucucgguu

SEQ ID NO: 1486897 - RNA, 19 nt, Artificial Sequence
  Description of Artificial Sequence: Synthetic oligonucleotide
  Antisense strand to SEQ ID NO: 1486896
aaccgagaaagacuaguaa

SEQ ID NO: 1486898 - RNA, 19 nt, Artificial Sequence
  Description of Artificial Sequence: Synthetic oligonucleotide
  Sense strand starting at position 832 of SEQ ID NO: 1244415
cuuucucgguuucuugaau

SEQ ID NO: 1486899 - RNA, 19 nt, Artificial Sequence
  Description of Artificial Sequence: Synthetic oligonucleotide
  Antisense strand to SEQ ID NO: 1486898
auucaagaaaccgagaaag

SEQ ID NO: 1486900 - RNA, 19 nt, Artificial Sequence
  Description of Artificial Sequence: Synthetic oligonucleotide
  Sense strand starting at position 858 of SEQ ID NO: 1244415
uuucccaugugagacauuu

SEQ ID NO: 1486901 - RNA, 19 nt, Artificial Sequence
  Description of Artificial Sequence: Synthetic oligonucleotide
  Antisense strand to SEQ ID NO: 1486900
aaaugucucacaugggaaa

SEQ ID NO: 1486902 - RNA, 19 nt, Artificial Sequence
  Description of Artificial Sequence: Synthetic oligonucleotide
  Sense strand starting at position 883 of SEQ ID NO: 1244415
cgcuauuuccuuugccuga

SEQ ID NO: 1486903 - RNA, 19 nt, Artificial Sequence
  Description of Artificial Sequence: Synthetic oligonucleotide
  Antisense strand to SEQ ID NO: 1486902
ucaggcaaaggaaauagcg

SEQ ID NO: 1486904 - RNA, 19 nt, Artificial Sequence
  Description of Artificial Sequence: Synthetic oligonucleotide
  Sense strand starting at position 884 of SEQ ID NO: 1244415
gcuauuuccuuugccugaa

SEQ ID NO: 1486905 - RNA, 19 nt, Artificial Sequence
  Description of Artificial Sequence: Synthetic oligonucleotide
  Antisense strand to SEQ ID NO: 1486904
uucaggcaaaggaaauagc

SEQ ID NO: 1486906 - RNA, 19 nt, Artificial Sequence
  Description of Artificial Sequence: Synthetic oligonucleotide
  Sense strand starting at position 920 of SEQ ID NO: 1244415
gcagacuacugguccucau

SEQ ID NO: 1486907 - RNA, 19 nt, Artificial Sequence
  Description of Artificial Sequence: Synthetic oligonucleotide
  Antisense strand to SEQ ID NO: 1486906
augaggaccaguagucugc

SEQ ID NO: 1486908 - RNA, 19 nt, Artificial Sequence
  Description of Artificial Sequence: Synthetic oligonucleotide
  Sense strand starting at position 939 of SEQ ID NO: 1244415
uccucaagucuuggccuua

SEQ ID NO: 1486909 - RNA, 19 nt, Artificial Sequence
  Description of Artificial Sequence: Synthetic oligonucleotide
  Antisense strand to SEQ ID NO: 1486908
uaaggccaagacuugagga

SEQ ID NO: 1486910 - RNA, 19 nt, Artificial Sequence
  Description of Artificial Sequence: Synthetic oligonucleotide
  Sense strand starting at position 940 of SEQ ID NO: 1244415
ccucaagucuuggccuuaa

SEQ ID NO: 1486911 - RNA, 19 nt, Artificial Sequence
  Description of Artificial Sequence: Synthetic oligonucleotide
  Antisense strand to SEQ ID NO: 1486910
uuaaggccaagacuugagg

SEQ ID NO: 1486912 - RNA, 19 nt, Artificial Sequence
  Description of Artificial Sequence: Synthetic oligonucleotide
  Sense strand starting at position 1478 of SEQ ID NO: 1244415
agagaauucuuccuugacc

SEQ ID NO: 1486913 - RNA, 19 nt, Artificial Sequence
  Description of Artificial Sequence: Synthetic oligonucleotide
  Antisense strand to SEQ ID NO: 1486912
ggucaaggaagaauucucu

SEQ ID NO: 1486914 - RNA, 19 nt, Artificial Sequence
  Description of Artificial Sequence: Synthetic oligonucleotide
  Sense strand starting at position 1599 of SEQ ID NO: 1244415
uguauaacuuucccacagu

SEQ ID NO: 1486915 - RNA, 19 nt, Artificial Sequence
  Description of Artificial Sequence: Synthetic oligonucleotide
  Antisense strand to SEQ ID NO: 1486914
acugugggaaaguuauaca

SEQ ID NO: 1486916 - RNA, 19 nt, Artificial Sequence
  Description of Artificial Sequence: Synthetic oligonucleotide
  Sense strand starting at position 1646 of SEQ ID NO: 1244415
gcccguuccgguucuaacu

SEQ ID NO: 1486917 - RNA, 19 nt, Artificial Sequence
  Description of Artificial Sequence: Synthetic oligonucleotide
  Antisense strand to SEQ ID NO: 1486916
aguuagaaccggaacgggc

SEQ ID NO: 1486918 - RNA, 19 nt, Artificial Sequence
  Description of Artificial Sequence: Synthetic oligonucleotide
  Sense strand starting at position 1674 of SEQ ID NO: 1244415
gcggccaaagccugacaua

SEQ ID NO: 1486919 - RNA, 19 nt, Artificial Sequence
  Description of Artificial Sequence: Synthetic oligonucleotide
  Antisense strand to SEQ ID NO: 1486918
uaugucaggcuuuggccgc

SEQ ID NO: 1486920 - RNA, 19 nt, Artificial Sequence
  Description of Artificial Sequence: Synthetic oligonucleotide
  Sense strand starting at position 1881 of SEQ ID NO: 1244415
gcgacuucgcgggcggaau

SEQ ID NO: 1486921 - RNA, 19 nt, Artificial Sequence
  Description of Artificial Sequence: Synthetic oligonucleotide
  Antisense strand to SEQ ID NO: 1486920
auuccgcccgcgaagucgc

SEQ ID NO: 1486922 - RNA, 19 nt, Artificial Sequence
  Description of Artificial Sequence: Synthetic oligonucleotide
  Sense strand starting at position 2001 of SEQ ID NO: 1244415
ucucauuucuuagaguuuc

SEQ ID NO: 1486923 - RNA, 19 nt, Artificial Sequence
  Description of Artificial Sequence: Synthetic oligonucleotide
  Antisense strand to SEQ ID NO: 1486922
gaaacucuaagaaaugaga

SEQ ID NO: 1486924 - RNA, 19 nt, Artificial Sequence
  Description of Artificial Sequence: Synthetic oligonucleotide
  Sense strand starting at position 2206 of SEQ ID NO: 1244415
ccacgcaguguccaagaau

SEQ ID NO: 1486925 - RNA, 19 nt, Artificial Sequence
  Description of Artificial Sequence: Synthetic oligonucleotide
  Antisense strand to SEQ ID NO: 1486924
auucuuggacacugcgugg

SEQ ID NO: 1486926 - RNA, 19 nt, Artificial Sequence
  Description of Artificial Sequence: Synthetic oligonucleotide
  Sense strand starting at position 2294 of SEQ ID NO: 1244415
ccuuguaaagcuugcuaga

SEQ ID NO: 1486927 - RNA, 19 nt, Artificial Sequence
  Description of Artificial Sequence: Synthetic oligonucleotide
  Antisense strand to SEQ ID NO: 1486926
ucuagcaagcuuuacaagg

SEQ ID NO: 1486928 - RNA, 19 nt, Artificial Sequence
  Description of Artificial Sequence: Synthetic oligonucleotide
  Sense strand starting at position 2296 of SEQ ID NO: 1244415
uuguaaagcuugcuagacu

SEQ ID NO: 1486929 - RNA, 19 nt, Artificial Sequence
  Description of Artificial Sequence: Synthetic oligonucleotide
  Antisense strand to SEQ ID NO: 1486928
agucuagcaagcuuuacaa

SEQ ID NO: 1486930 - RNA, 19 nt, Artificial Sequence
  Description of Artificial Sequence: Synthetic oligonucleotide
  Sense strand starting at position 2319 of SEQ ID NO: 1244415
ggaugucgcguucccgaga

SEQ ID NO: 1486931 - RNA, 19 nt, Artificial Sequence
  Description of Artificial Sequence: Synthetic oligonucleotide
  Antisense strand to SEQ ID NO: 1486930
ucucgggaacgcgacaucc

SEQ ID NO: 1486932 - RNA, 19 nt, Artificial Sequence
  Description of Artificial Sequence: Synthetic oligonucleotide
  Sense strand starting at position 2324 of SEQ ID NO: 1244415
ucgcguucccgagaguuaa

SEQ ID NO: 1486933 - RNA, 19 nt, Artificial Sequence
  Description of Artificial Sequence: Synthetic oligonucleotide
  Antisense strand to SEQ ID NO: 1486932
uuaacucucgggaacgcga

SEQ ID NO: 1486934 - RNA, 19 nt, Artificial Sequence
  Description of Artificial Sequence: Synthetic oligonucleotide
  Sense strand starting at position 2325 of SEQ ID NO: 1244415
cgcguucccgagaguuaaa

SEQ ID NO: 1486935 - RNA, 19 nt, Artificial Sequence
  Description of Artificial Sequence: Synthetic oligonucleotide
  Antisense strand to SEQ ID NO: 1486934
uuuaacucucgggaacgcg

SEQ ID NO: 1486936 - RNA, 19 nt, Artificial Sequence
  Description of Artificial Sequence: Synthetic oligonucleotide
  Sense strand starting at position 2384 of SEQ ID NO: 1244415
ccuucuugcccacgaguga

SEQ ID NO: 1486937 - RNA, 19 nt, Artificial Sequence
  Description of Artificial Sequence: Synthetic oligonucleotide
  Antisense strand to SEQ ID NO: 1486936
ucacucgugggcaagaagg

SEQ ID NO: 1486938 - RNA, 19 nt, Artificial Sequence
  Description of Artificial Sequence: Synthetic oligonucleotide
  Sense strand starting at position 2653 of SEQ ID NO: 1244415
aggguaaucugcccucagu

SEQ ID NO: 1486939 - RNA, 19 nt, Artificial Sequence
  Description of Artificial Sequence: Synthetic oligonucleotide
  Antisense strand to SEQ ID NO: 1486938
acugagggcagauuacccu

SEQ ID NO: 1486940 - RNA, 19 nt, Artificial Sequence
  Description of Artificial Sequence: Synthetic oligonucleotide
  Sense strand starting at position 2708 of SEQ ID NO: 1244415
gggucaguaccugaaagca

SEQ ID NO: 1486941 - RNA, 19 nt, Artificial Sequence
  Description of Artificial Sequence: Synthetic oligonucleotide
  Antisense strand to SEQ ID NO: 1486940
ugcuuucagguacugaccc

SEQ ID NO: 1486942 - RNA, 19 nt, Artificial Sequence
  Description of Artificial Sequence: Synthetic oligonucleotide
  Sense strand starting at position 2748 of SEQ ID NO: 1244415
gcgguuucgccgaaaugag

SEQ ID NO: 1486943 - RNA, 19 nt, Artificial Sequence
  Description of Artificial Sequence: Synthetic oligonucleotide
  Antisense strand to SEQ ID NO: 1486942
cucauuucggcgaaaccgc

SEQ ID NO: 1486944 - RNA, 19 nt, Artificial Sequence
  Description of Artificial Sequence: Synthetic oligonucleotide
  Sense strand starting at position 2796 of SEQ ID NO: 1244415
ugguuagugugaccagcua

SEQ ID NO: 1486945 - RNA, 19 nt, Artificial Sequence
  Description of Artificial Sequence: Synthetic oligonucleotide
  Antisense strand to SEQ ID NO: 1486944
uagcuggucacacuaacca

SEQ ID NO: 1486946 - RNA, 19 nt, Artificial Sequence
  Description of Artificial Sequence: Synthetic oligonucleotide
  Sense strand starting at position 2815 of SEQ ID NO: 1244415
ggcucuuuaccggaaguga

SEQ ID NO: 1486947 - RNA, 19 nt, Artificial Sequence
  Description of Artificial Sequence: Synthetic oligonucleotide
  Antisense strand to SEQ ID NO: 1486946
ucacuuccgguaaagagcc

SEQ ID NO: 1486948 - RNA, 19 nt, Artificial Sequence
  Description of Artificial Sequence: Synthetic oligonucleotide
  Sense strand starting at position 2833 of SEQ ID NO: 1244415
agguuaauuccagguucuc

SEQ ID NO: 1486949 - RNA, 19 nt, Artificial Sequence
  Description of Artificial Sequence: Synthetic oligonucleotide
  Antisense strand to SEQ ID NO: 1486948
gagaaccuggaauuaaccu

SEQ ID NO: 1486950 - RNA, 19 nt, Artificial Sequence
  Description of Artificial Sequence: Synthetic oligonucleotide
  Sense strand starting at position 3220 of SEQ ID NO: 1244415
gaggauggucacuagcuga

SEQ ID NO: 1486951 - RNA, 19 nt, Artificial Sequence
  Description of Artificial Sequence: Synthetic oligonucleotide
  Antisense strand to SEQ ID NO: 1486950
ucagcuagugaccauccuc

SEQ ID NO: 1486952 - RNA, 19 nt, Artificial Sequence
  Description of Artificial Sequence: Synthetic oligonucleotide
  Sense strand starting at position 3250 of SEQ ID NO: 1244415
ccuguaucagagugggcaa

SEQ ID NO: 1486953 - RNA, 19 nt, Artificial Sequence
  Description of Artificial Sequence: Synthetic oligonucleotide
  Antisense strand to SEQ ID NO: 1486952
uugcccacucugauacagg

SEQ ID NO: 1486954 - RNA, 19 nt, Artificial Sequence
  Description of Artificial Sequence: Synthetic oligonucleotide
  Sense strand starting at position 3471 of SEQ ID NO: 1244415
cugggcuuugguugacuua

SEQ ID NO: 1486955 - RNA, 19 nt, Artificial Sequence
  Description of Artificial Sequence: Synthetic oligonucleotide
  Antisense strand to SEQ ID NO: 1486954
uaagucaaccaaagcccag

SEQ ID NO: 1486956 - RNA, 19 nt, Artificial Sequence
  Description of Artificial Sequence: Synthetic oligonucleotide
  Sense strand starting at position 3472 of SEQ ID NO: 1244415
ugggcuuugguugacuuaa

SEQ ID NO: 1486957 - RNA, 19 nt, Artificial Sequence
  Description of Artificial Sequence: Synthetic oligonucleotide
  Antisense strand to SEQ ID NO: 1486956
uuaagucaaccaaagccca

SEQ ID NO: 1486958 - RNA, 19 nt, Artificial Sequence
  Description of Artificial Sequence: Synthetic oligonucleotide
  Sense strand starting at position 3474 of SEQ ID NO: 1244415
ggcuuugguugacuuaaga

SEQ ID NO: 1486959 - RNA, 19 nt, Artificial Sequence
  Description of Artificial Sequence: Synthetic oligonucleotide
  Antisense strand to SEQ ID NO: 1486958
ucuuaagucaaccaaagcc

SEQ ID NO: 1486960 - RNA, 19 nt, Artificial Sequence
  Description of Artificial Sequence: Synthetic oligonucleotide
  Sense strand starting at position 3504 of SEQ ID NO: 1244415
guuaauguguaaccuugga

SEQ ID NO: 1486961 - RNA, 19 nt, Artificial Sequence
  Description of Artificial Sequence: Synthetic oligonucleotide
  Antisense strand to SEQ ID NO: 1486960
uccaagguuacacauuaac

SEQ ID NO: 1486962 - RNA, 19 nt, Artificial Sequence
  Description of Artificial Sequence: Synthetic oligonucleotide
  Sense strand starting at position 3508 of SEQ ID NO: 1244415
auguguaaccuuggagcca

SEQ ID NO: 1486963 - RNA, 19 nt, Artificial Sequence
  Description of Artificial Sequence: Synthetic oligonucleotide
  Antisense strand to SEQ ID NO: 1486962
uggcuccaagguuacacau

SEQ ID NO: 1486964 - RNA, 19 nt, Artificial Sequence
  Description of Artificial Sequence: Synthetic oligonucleotide
  Sense strand starting at position 3713 of SEQ ID NO: 1244415
ccuccuuucgcccagaguu

SEQ ID NO: 1486965 - RNA, 19 nt, Artificial Sequence
  Description of Artificial Sequence: Synthetic oligonucleotide
  Antisense strand to SEQ ID NO: 1486964
aacucugggcgaaaggagg

SEQ ID NO: 1486966 - RNA, 19 nt, Artificial Sequence
  Description of Artificial Sequence: Synthetic oligonucleotide
  Sense strand starting at position 3715 of SEQ ID NO: 1244415
uccuuucgcccagaguuua

SEQ ID NO: 1486967 - RNA, 19 nt, Artificial Sequence
  Description of Artificial Sequence: Synthetic oligonucleotide
  Antisense strand to SEQ ID NO: 1486966
uaaacucugggcgaaagga

SEQ ID NO: 1486968 - RNA, 19 nt, Artificial Sequence
  Description of Artificial Sequence: Synthetic oligonucleotide
  Sense strand starting at position 3871 of SEQ ID NO: 1244415
uccagcugucccggcaaau

SEQ ID NO: 1486969 - RNA, 19 nt, Artificial Sequence
  Description of Artificial Sequence: Synthetic oligonucleotide
  Antisense strand to SEQ ID NO: 1486968
auuugccgggacagcugga

SEQ ID NO: 1486970 - RNA, 19 nt, Artificial Sequence
  Description of Artificial Sequence: Synthetic oligonucleotide
  Sense strand starting at position 3881 of SEQ ID NO: 1244415
ccggcaaaucggaggucuu

SEQ ID NO: 1486971 - RNA, 19 nt, Artificial Sequence
  Description of Artificial Sequence: Synthetic oligonucleotide
  Antisense strand to SEQ ID NO: 1486970
aagaccuccgauuugccgg

SEQ ID NO: 1486972 - RNA, 19 nt, Artificial Sequence
  Description of Artificial Sequence: Synthetic oligonucleotide
  Sense strand starting at position 52 of SEQ ID NO: 1244416
ccugucuugucacucuauu

SEQ ID NO: 1486973 - RNA, 19 nt, Artificial Sequence
  Description of Artificial Sequence: Synthetic oligonucleotide
  Antisense strand to SEQ ID NO: 1486972
aauagagugacaagacagg

SEQ ID NO: 1486974 - RNA, 19 nt, Artificial Sequence
  Description of Artificial Sequence: Synthetic oligonucleotide
  Sense strand starting at position 238 of SEQ ID NO: 1244416
cggugaucugggugcacuu

SEQ ID NO: 1486975 - RNA, 19 nt, Artificial Sequence
  Description of Artificial Sequence: Synthetic oligonucleotide
  Antisense strand to SEQ ID NO: 1486974
aagugcacccagaucaccg

SEQ ID NO: 1486976 - RNA, 19 nt, Artificial Sequence
  Description of Artificial Sequence: Synthetic oligonucleotide
  Sense strand starting at position 249 of SEQ ID NO: 1244416
gugcacuugccauaaaggu

SEQ ID NO: 1486977 - RNA, 19 nt, Artificial Sequence
  Description of Artificial Sequence: Synthetic oligonucleotide
  Antisense strand to SEQ ID NO: 1486976
accuuuauggcaagugcac

SEQ ID NO: 1486978 - RNA, 19 nt, Artificial Sequence
  Description of Artificial Sequence: Synthetic oligonucleotide
  Sense strand starting at position 430 of SEQ ID NO: 1244416
guccaucucucagcacaga

SEQ ID NO: 1486979 - RNA, 19 nt, Artificial Sequence
  Description of Artificial Sequence: Synthetic oligonucleotide
  Antisense strand to SEQ ID NO: 1486978
ucugugcugagagauggac

SEQ ID NO: 1486980 - RNA, 19 nt, Artificial Sequence
  Description of Artificial Sequence: Synthetic oligonucleotide
  Sense strand starting at position 486 of SEQ ID NO: 1244416
guggcacugcuuggaaagu

SEQ ID NO: 1486981 - RNA, 19 nt, Artificial Sequence
  Description of Artificial Sequence: Synthetic oligonucleotide
  Antisense strand to SEQ ID NO: 1486980
acuuuccaagcagugccac

SEQ ID NO: 1486982 - RNA, 19 nt, Artificial Sequence
  Description of Artificial Sequence: Synthetic oligonucleotide
  Sense strand starting at position 655 of SEQ ID NO: 1244416
ggcuuucugucucuuggaa

SEQ ID NO: 1486983 - RNA, 19 nt, Artificial Sequence
  Description of Artificial Sequence: Synthetic oligonucleotide
  Antisense strand to SEQ ID NO: 1486982
uuccaagagacagaaagcc

SEQ ID NO: 1486984 - RNA, 19 nt, Artificial Sequence
  Description of Artificial Sequence: Synthetic oligonucleotide
  Sense strand starting at position 662 of SEQ ID NO: 1244416
ugucucuuggaacacuaau

SEQ ID NO: 1486985 - RNA, 19 nt, Artificial Sequence
  Description of Artificial Sequence: Synthetic oligonucleotide
  Antisense strand to SEQ ID NO: 1486984
auuaguguuccaagagaca

SEQ ID NO: 1486986 - RNA, 19 nt, Artificial Sequence
  Description of Artificial Sequence: Synthetic oligonucleotide
  Sense strand starting at position 706 of SEQ ID NO: 1244416
ggacuccgucuugguaauu

SEQ ID NO: 1486987 - RNA, 19 nt, Artificial Sequence
  Description of Artificial Sequence: Synthetic oligonucleotide
  Antisense strand to SEQ ID NO: 1486986
aauuaccaagacggagucc

SEQ ID NO: 1486988 - RNA, 19 nt, Artificial Sequence
  Description of Artificial Sequence: Synthetic oligonucleotide
  Sense strand starting at position 707 of SEQ ID NO: 1244416
gacuccgucuugguaauua

SEQ ID NO: 1486989 - RNA, 19 nt, Artificial Sequence
  Description of Artificial Sequence: Synthetic oligonucleotide
  Antisense strand to SEQ ID NO: 1486988
uaauuaccaagacggaguc

SEQ ID NO: 1486990 - RNA, 19 nt, Artificial Sequence
  Description of Artificial Sequence: Synthetic oligonucleotide
  Sense strand starting at position 750 of SEQ ID NO: 1244416
gcucucuacucaguguuua

SEQ ID NO: 1486991 - RNA, 19 nt, Artificial Sequence
  Description of Artificial Sequence: Synthetic oligonucleotide
  Antisense strand to SEQ ID NO: 1486990
uaaacacugaguagagagc

SEQ ID NO: 1486992 - RNA, 19 nt, Artificial Sequence
  Description of Artificial Sequence: Synthetic oligonucleotide
  Sense strand starting at position 751 of SEQ ID NO: 1244416
cucucuacucaguguuuac

SEQ ID NO: 1486993 - RNA, 19 nt, Artificial Sequence
  Description of Artificial Sequence: Synthetic oligonucleotide
  Antisense strand to SEQ ID NO: 1486992
guaaacacugaguagagag

SEQ ID NO: 1486994 - RNA, 19 nt, Artificial Sequence
  Description of Artificial Sequence: Synthetic oligonucleotide
  Sense strand starting at position 754 of SEQ ID NO: 1244416
ucuacucaguguuuacuaa

SEQ ID NO: 1486995 - RNA, 19 nt, Artificial Sequence
  Description of Artificial Sequence: Synthetic oligonucleotide
  Antisense strand to SEQ ID NO: 1486994
uuaguaaacacugaguaga

SEQ ID NO: 1486996 - RNA, 19 nt, Artificial Sequence
  Description of Artificial Sequence: Synthetic oligonucleotide
  Sense strand starting at position 755 of SEQ ID NO: 1244416
cuacucaguguuuacuaaa

SEQ ID NO: 1486997 - RNA, 19 nt, Artificial Sequence
  Description of Artificial Sequence: Synthetic oligonucleotide
  Antisense strand to SEQ ID NO: 1486996
uuuaguaaacacugaguag

SEQ ID NO: 1486998 - RNA, 19 nt, Artificial Sequence
  Description of Artificial Sequence: Synthetic oligonucleotide
  Sense strand starting at position 891 of SEQ ID NO: 1244416
ucuugcucuuguguaucau

SEQ ID NO: 1486999 - RNA, 19 nt, Artificial Sequence
  Description of Artificial Sequence: Synthetic oligonucleotide
  Antisense strand to SEQ ID NO: 1486998
augauacacaagagcaaga

SEQ ID NO: 1487000 - RNA, 19 nt, Artificial Sequence
  Description of Artificial Sequence: Synthetic oligonucleotide
  Sense strand starting at position 892 of SEQ ID NO: 1244416
cuugcucuuguguaucauu

SEQ ID NO: 1487001 - RNA, 19 nt, Artificial Sequence
  Description of Artificial Sequence: Synthetic oligonucleotide
  Antisense strand to SEQ ID NO: 1487000
aaugauacacaagagcaag

SEQ ID NO: 1487002 - RNA, 19 nt, Artificial Sequence
  Description of Artificial Sequence: Synthetic oligonucleotide
  Sense strand starting at position 1351 of SEQ ID NO: 1244416
ugggauuacguuuguucgu

SEQ ID NO: 1487003 - RNA, 19 nt, Artificial Sequence
  Description of Artificial Sequence: Synthetic oligonucleotide
  Antisense strand to SEQ ID NO: 1487002
acgaacaaacguaauccca

SEQ ID NO: 1487004 - RNA, 19 nt, Artificial Sequence
  Description of Artificial Sequence: Synthetic oligonucleotide
  Sense strand starting at position 1352 of SEQ ID NO: 1244416
gggauuacguuuguucguu

SEQ ID NO: 1487005 - RNA, 19 nt, Artificial Sequence
  Description of Artificial Sequence: Synthetic oligonucleotide
  Antisense strand to SEQ ID NO: 1487004
aacgaacaaacguaauccc

SEQ ID NO: 1487006 - RNA, 19 nt, Artificial Sequence
  Description of Artificial Sequence: Synthetic oligonucleotide
  Sense strand starting at position 1432 of SEQ ID NO: 1244416
gaaauuguaccaggagguc

SEQ ID NO: 1487007 - RNA, 19 nt, Artificial Sequence
  Description of Artificial Sequence: Synthetic oligonucleotide
  Antisense strand to SEQ ID NO: 1487006
gaccuccugguacaauuuc

SEQ ID NO: 1487008 - RNA, 19 nt, Artificial Sequence
  Description of Artificial Sequence: Synthetic oligonucleotide
  Sense strand starting at position 1585 of SEQ ID NO: 1244416
gcucuauggucuuucuguu

SEQ ID NO: 1487009 - RNA, 19 nt, Artificial Sequence
  Description of Artificial Sequence: Synthetic oligonucleotide
  Antisense strand to SEQ ID NO: 1487008
aacagaaagaccauagagc

SEQ ID NO: 1487010 - RNA, 19 nt, Artificial Sequence
  Description of Artificial Sequence: Synthetic oligonucleotide
  Sense strand starting at position 1768 of SEQ ID NO: 1244416
acaccagcccgugguuaaa

SEQ ID NO: 1487011 - RNA, 19 nt, Artificial Sequence
  Description of Artificial Sequence: Synthetic oligonucleotide
  Antisense strand to SEQ ID NO: 1487010
uuuaaccacgggcuggugu

SEQ ID NO: 1487012 - RNA, 19 nt, Artificial Sequence
  Description of Artificial Sequence: Synthetic oligonucleotide
  Sense strand starting at position 2091 of SEQ ID NO: 1244416
ccagguaugcuuuacggca

SEQ ID NO: 1487013 - RNA, 19 nt, Artificial Sequence
  Description of Artificial Sequence: Synthetic oligonucleotide
  Antisense strand to SEQ ID NO: 1487012
ugccguaaagcauaccugg

SEQ ID NO: 1487014 - RNA, 19 nt, Artificial Sequence
  Description of Artificial Sequence: Synthetic oligonucleotide
  Sense strand starting at position 2322 of SEQ ID NO: 1244416
cacuuucugcuuugcgaca

SEQ ID NO: 1487015 - RNA, 19 nt, Artificial Sequence
  Description of Artificial Sequence: Synthetic oligonucleotide
  Antisense strand to SEQ ID NO: 1487014
ugucgcaaagcagaaagug

SEQ ID NO: 1487016 - RNA, 19 nt, Artificial Sequence
  Description of Artificial Sequence: Synthetic oligonucleotide
  Sense strand starting at position 2531 of SEQ ID NO: 1244416
gcggcaguccuuccacuuu

SEQ ID NO: 1487017 - RNA, 19 nt, Artificial Sequence
  Description of Artificial Sequence: Synthetic oligonucleotide
  Antisense strand to SEQ ID NO: 1487016
aaaguggaaggacugccgc

SEQ ID NO: 1487018 - RNA, 19 nt, Artificial Sequence
  Description of Artificial Sequence: Synthetic oligonucleotide
  Sense strand starting at position 2603 of SEQ ID NO: 1244416
gcucgcugauaguucaagu

SEQ ID NO: 1487019 - RNA, 19 nt, Artificial Sequence
  Description of Artificial Sequence: Synthetic oligonucleotide
  Antisense strand to SEQ ID NO: 1487018
acuugaacuaucagcgagc

SEQ ID NO: 1487020 - RNA, 19 nt, Artificial Sequence
  Description of Artificial Sequence: Synthetic oligonucleotide
  Sense strand starting at position 2799 of SEQ ID NO: 1244416
ccgugaggucacagucgaa

SEQ ID NO: 1487021 - RNA, 19 nt, Artificial Sequence
  Description of Artificial Sequence: Synthetic oligonucleotide
  Antisense strand to SEQ ID NO: 1487020
uucgacugugaccucacgg

SEQ ID NO: 1487022 - RNA, 19 nt, Artificial Sequence
  Description of Artificial Sequence: Synthetic oligonucleotide
  Sense strand starting at position 2841 of SEQ ID NO: 1244416
gggauuggcugguuuggau

SEQ ID NO: 1487023 - RNA, 19 nt, Artificial Sequence
  Description of Artificial Sequence: Synthetic oligonucleotide
  Antisense strand to SEQ ID NO: 1487022
auccaaaccagccaauccc

SEQ ID NO: 1487024 - RNA, 19 nt, Artificial Sequence
  Description of Artificial Sequence: Synthetic oligonucleotide
  Sense strand starting at position 2953 of SEQ ID NO: 1244416
cagcccgagucucuauaua

SEQ ID NO: 1487025 - RNA, 19 nt, Artificial Sequence
  Description of Artificial Sequence: Synthetic oligonucleotide
  Antisense strand to SEQ ID NO: 1487024
uauauagagacucgggcug

SEQ ID NO: 1487026 - RNA, 19 nt, Artificial Sequence
  Description of Artificial Sequence: Synthetic oligonucleotide
  Sense strand starting at position 2961 of SEQ ID NO: 1244416
gucucuauauagucuugau

SEQ ID NO: 1487027 - RNA, 19 nt, Artificial Sequence
  Description of Artificial Sequence: Synthetic oligonucleotide
  Antisense strand to SEQ ID NO: 1487026
aucaagacuauauagagac

SEQ ID NO: 1487028 - RNA, 19 nt, Artificial Sequence
  Description of Artificial Sequence: Synthetic oligonucleotide
  Sense strand starting at position 3248 of SEQ ID NO: 1244416
ccuccagaguagucuuguu

SEQ ID NO: 1487029 - RNA, 19 nt, Artificial Sequence
  Description of Artificial Sequence: Synthetic oligonucleotide
  Antisense strand to SEQ ID NO: 1487028
aacaagacuacucuggagg

SEQ ID NO: 1487030 - RNA, 19 nt, Artificial Sequence
  Description of Artificial Sequence: Synthetic oligonucleotide
  Sense strand starting at position 3253 of SEQ ID NO: 1244416
agaguagucuuguuucacg

SEQ ID NO: 1487031 - RNA, 19 nt, Artificial Sequence
  Description of Artificial Sequence: Synthetic oligonucleotide
  Antisense strand to SEQ ID NO: 1487030
cgugaaacaagacuacucu

SEQ ID NO: 1487032 - RNA, 19 nt, Artificial Sequence
  Description of Artificial Sequence: Synthetic oligonucleotide
  Sense strand starting at position 3298 of SEQ ID NO: 1244416
ggcuccguaacucauagua

SEQ ID NO: 1487033 - RNA, 19 nt, Artificial Sequence
  Description of Artificial Sequence: Synthetic oligonucleotide
  Antisense strand to SEQ ID NO: 1487032
uacuaugaguuacggagcc

SEQ ID NO: 1487034 - RNA, 19 nt, Artificial Sequence
  Description of Artificial Sequence: Synthetic oligonucleotide
  Sense strand starting at position 3577 of SEQ ID NO: 1244416
cggagcauccuacgaaaga

SEQ ID NO: 1487035 - RNA, 19 nt, Artificial Sequence
  Description of Artificial Sequence: Synthetic oligonucleotide
  Antisense strand to SEQ ID NO: 1487034
ucuuucguaggaugcuccg

SEQ ID NO: 1487036 - RNA, 19 nt, Artificial Sequence
  Description of Artificial Sequence: Synthetic oligonucleotide
  Sense strand starting at position 3578 of SEQ ID NO: 1244416
ggagcauccuacgaaagaa

SEQ ID NO: 1487037 - RNA, 19 nt, Artificial Sequence
  Description of Artificial Sequence: Synthetic oligonucleotide
  Antisense strand to SEQ ID NO: 1487036
uucuuucguaggaugcucc

SEQ ID NO: 1487038 - RNA, 19 nt, Artificial Sequence
  Description of Artificial Sequence: Synthetic oligonucleotide
  Sense strand starting at position 3780 of SEQ ID NO: 1244416
ccaggcuuucgggagaaga

SEQ ID NO: 1487039 - RNA, 19 nt, Artificial Sequence
  Description of Artificial Sequence: Synthetic oligonucleotide
  Antisense strand to SEQ ID NO: 1487038
ucuucucccgaaagccugg

SEQ ID NO: 1487040 - RNA, 19 nt, Artificial Sequence
  Description of Artificial Sequence: Synthetic oligonucleotide
  Sense strand starting at position 3820 of SEQ ID NO: 1244416
gcugcacaggacugugauu

SEQ ID NO: 1487041 - RNA, 19 nt, Artificial Sequence
  Description of Artificial Sequence: Synthetic oligonucleotide
  Antisense strand to SEQ ID NO: 1487040
aaucacaguccugugcagc

SEQ ID NO: 1487042 - RNA, 19 nt, Artificial Sequence
  Description of Artificial Sequence: Synthetic oligonucleotide
  Sense strand starting at position 3822 of SEQ ID NO: 1244416
ugcacaggacugugauuau

SEQ ID NO: 1487043 - RNA, 19 nt, Artificial Sequence
  Description of Artificial Sequence: Synthetic oligonucleotide
  Antisense strand to SEQ ID NO: 1487042
auaaucacaguccugugca

SEQ ID NO: 1487044 - RNA, 19 nt, Artificial Sequence
  Description of Artificial Sequence: Synthetic oligonucleotide
  Sense strand starting at position 3825 of SEQ ID NO: 1244416
acaggacugugauuaucau

SEQ ID NO: 1487045 - RNA, 19 nt, Artificial Sequence
  Description of Artificial Sequence: Synthetic oligonucleotide
  Antisense strand to SEQ ID NO: 1487044
augauaaucacaguccugu

SEQ ID NO: 1487046 - RNA, 19 nt, Artificial Sequence
  Description of Artificial Sequence: Synthetic oligonucleotide
  Sense strand starting at position 3829 of SEQ ID NO: 1244416
gacugugauuaucauuaag

SEQ ID NO: 1487047 - RNA, 19 nt, Artificial Sequence
  Description of Artificial Sequence: Synthetic oligonucleotide
  Antisense strand to SEQ ID NO: 1487046
cuuaaugauaaucacaguc

SEQ ID NO: 1487048 - RNA, 19 nt, Artificial Sequence
  Description of Artificial Sequence: Synthetic oligonucleotide
  Sense strand starting at position 3831 of SEQ ID NO: 1244416
cugugauuaucauuaaguc

SEQ ID NO: 1487049 - RNA, 19 nt, Artificial Sequence
  Description of Artificial Sequence: Synthetic oligonucleotide
  Antisense strand to SEQ ID NO: 1487048
gacuuaaugauaaucacag

SEQ ID NO: 1487050 - RNA, 19 nt, Artificial Sequence
  Description of Artificial Sequence: Synthetic oligonucleotide
  Sense strand starting at position 3832 of SEQ ID NO: 1244416
ugugauuaucauuaagucu

SEQ ID NO: 1487051 - RNA, 19 nt, Artificial Sequence
  Description of Artificial Sequence: Synthetic oligonucleotide
  Antisense strand to SEQ ID NO: 1487050
agacuuaaugauaaucaca

SEQ ID NO: 1487052 - RNA, 19 nt, Artificial Sequence
  Description of Artificial Sequence: Synthetic oligonucleotide
  Sense strand starting at position 16 of SEQ ID NO: 1244417
gcgccuugcuccgugagga

SEQ ID NO: 1487053 - RNA, 19 nt, Artificial Sequence
  Description of Artificial Sequence: Synthetic oligonucleotide
  Antisense strand to SEQ ID NO: 1487052
uccucacggagcaaggcgc

SEQ ID NO: 1487054 - RNA, 19 nt, Artificial Sequence
  Description of Artificial Sequence: Synthetic oligonucleotide
  Sense strand starting at position 17 of SEQ ID NO: 1244417
cgccuugcuccgugaggaa

SEQ ID NO: 1487055 - RNA, 19 nt, Artificial Sequence
  Description of Artificial Sequence: Synthetic oligonucleotide
  Antisense strand to SEQ ID NO: 1487054
uuccucacggagcaaggcg

SEQ ID NO: 1487056 - RNA, 19 nt, Artificial Sequence
  Description of Artificial Sequence: Synthetic oligonucleotide
  Sense strand starting at position 29 of SEQ ID NO: 1244417
ugaggaaguugcgagaguu

SEQ ID NO: 1487057 - RNA, 19 nt, Artificial Sequence
  Description of Artificial Sequence: Synthetic oligonucleotide
  Antisense strand to SEQ ID NO: 1487056
aacucucgcaacuuccuca

SEQ ID NO: 1487058 - RNA, 19 nt, Artificial Sequence
  Description of Artificial Sequence: Synthetic oligonucleotide
  Sense strand starting at position 31 of SEQ ID NO: 1244417
aggaaguugcgagaguuga

SEQ ID NO: 1487059 - RNA, 19 nt, Artificial Sequence
  Description of Artificial Sequence: Synthetic oligonucleotide
  Antisense strand to SEQ ID NO: 1487058
ucaacucucgcaacuuccu

SEQ ID NO: 1487060 - RNA, 19 nt, Artificial Sequence
  Description of Artificial Sequence: Synthetic oligonucleotide
  Sense strand starting at position 166 of SEQ ID NO: 1244417
cagauauaguucuuggcua

SEQ ID NO: 1487061 - RNA, 19 nt, Artificial Sequence
  Description of Artificial Sequence: Synthetic oligonucleotide
  Antisense strand to SEQ ID NO: 1487060
uagccaagaacuauaucug

SEQ ID NO: 1487062 - RNA, 19 nt, Artificial Sequence
  Description of Artificial Sequence: Synthetic oligonucleotide
  Sense strand starting at position 167 of SEQ ID NO: 1244417
agauauaguucuuggcuag

SEQ ID NO: 1487063 - RNA, 19 nt, Artificial Sequence
  Description of Artificial Sequence: Synthetic oligonucleotide
  Antisense strand to SEQ ID NO: 1487062
cuagccaagaacuauaucu

SEQ ID NO: 1487064 - RNA, 19 nt, Artificial Sequence
  Description of Artificial Sequence: Synthetic oligonucleotide
  Sense strand starting at position 1253 of SEQ ID NO: 1244417
ggaggaucgucuccucuag

SEQ ID NO: 1487065 - RNA, 19 nt, Artificial Sequence
  Description of Artificial Sequence: Synthetic oligonucleotide
  Antisense strand to SEQ ID NO: 1487064
cuagaggagacgauccucc

SEQ ID NO: 1487066 - RNA, 19 nt, Artificial Sequence
  Description of Artificial Sequence: Synthetic oligonucleotide
  Sense strand starting at position 1700 of SEQ ID NO: 1244417
ggcaucaucccaggaagga

SEQ ID NO: 1487067 - RNA, 19 nt, Artificial Sequence
  Description of Artificial Sequence: Synthetic oligonucleotide
  Antisense strand to SEQ ID NO: 1487066
uccuuccugggaugaugcc

SEQ ID NO: 1487068 - RNA, 19 nt, Artificial Sequence
  Description of Artificial Sequence: Synthetic oligonucleotide
  Sense strand starting at position 1716 of SEQ ID NO: 1244417
ggagguauuugaggacccu

SEQ ID NO: 1487069 - RNA, 19 nt, Artificial Sequence
  Description of Artificial Sequence: Synthetic oligonucleotide
  Antisense strand to SEQ ID NO: 1487068
aggguccucaaauaccucc

SEQ ID NO: 1487070 - RNA, 19 nt, Artificial Sequence
  Description of Artificial Sequence: Synthetic oligonucleotide
  Sense strand starting at position 1786 of SEQ ID NO: 1244417
cucccuuucggacaacuua

SEQ ID NO: 1487071 - RNA, 19 nt, Artificial Sequence
  Description of Artificial Sequence: Synthetic oligonucleotide
  Antisense strand to SEQ ID NO: 1487070
uaaguuguccgaaagggag

SEQ ID NO: 1487072 - RNA, 19 nt, Artificial Sequence
  Description of Artificial Sequence: Synthetic oligonucleotide
  Sense strand starting at position 1798 of SEQ ID NO: 1244417
caacuuaccucggagagga

SEQ ID NO: 1487073 - RNA, 19 nt, Artificial Sequence
  Description of Artificial Sequence: Synthetic oligonucleotide
  Antisense strand to SEQ ID NO: 1487072
uccucuccgagguaaguug

SEQ ID NO: 1487074 - RNA, 19 nt, Artificial Sequence
  Description of Artificial Sequence: Synthetic oligonucleotide
  Sense strand starting at position 1873 of SEQ ID NO: 1244417
gagggaucuucucgcuuau

SEQ ID NO: 1487075 - RNA, 19 nt, Artificial Sequence
  Description of Artificial Sequence: Synthetic oligonucleotide
  Antisense strand to SEQ ID NO: 1487074
auaagcgagaagaucccuc

SEQ ID NO: 1487076 - RNA, 19 nt, Artificial Sequence
  Description of Artificial Sequence: Synthetic oligonucleotide
  Sense strand starting at position 1875 of SEQ ID NO: 1244417
gggaucuucucgcuuauuu

SEQ ID NO: 1487077 - RNA, 19 nt, Artificial Sequence
  Description of Artificial Sequence: Synthetic oligonucleotide
  Antisense strand to SEQ ID NO: 1487076
aaauaagcgagaagauccc

SEQ ID NO: 1487078 - RNA, 19 nt, Artificial Sequence
  Description of Artificial Sequence: Synthetic oligonucleotide
  Sense strand starting at position 2056 of SEQ ID NO: 1244417
gcagcuaucacaugagaga

SEQ ID NO: 1487079 - RNA, 19 nt, Artificial Sequence
  Description of Artificial Sequence: Synthetic oligonucleotide
  Antisense strand to SEQ ID NO: 1487078
ucucucaugugauagcugc

SEQ ID NO: 1487080 - RNA, 19 nt, Artificial Sequence
  Description of Artificial Sequence: Synthetic oligonucleotide
  Sense strand starting at position 2075 of SEQ ID NO: 1244417
cggugauuggcaugcgucu

SEQ ID NO: 1487081 - RNA, 19 nt, Artificial Sequence
  Description of Artificial Sequence: Synthetic oligonucleotide
  Antisense strand to SEQ ID NO: 1487080
agacgcaugccaaucaccg

SEQ ID NO: 1487082 - RNA, 19 nt, Artificial Sequence
  Description of Artificial Sequence: Synthetic oligonucleotide
  Sense strand starting at position 2611 of SEQ ID NO: 1244417
aacauauguggcuaaacga

SEQ ID NO: 1487083 - RNA, 19 nt, Artificial Sequence
  Description of Artificial Sequence: Synthetic oligonucleotide
  Antisense strand to SEQ ID NO: 1487082
ucguuuagccacauauguu

SEQ ID NO: 1487084 - RNA, 19 nt, Artificial Sequence
  Description of Artificial Sequence: Synthetic oligonucleotide
  Sense strand starting at position 2660 of SEQ ID NO: 1244417
gaaagaugugccuggaugu

SEQ ID NO: 1487085 - RNA, 19 nt, Artificial Sequence
  Description of Artificial Sequence: Synthetic oligonucleotide
  Antisense strand to SEQ ID NO: 1487084
acauccaggcacaucuuuc

SEQ ID NO: 1487086 - RNA, 19 nt, Artificial Sequence
  Description of Artificial Sequence: Synthetic oligonucleotide
  Sense strand starting at position 2712 of SEQ ID NO: 1244417
gggacauguguguaucugu

SEQ ID NO: 1487087 - RNA, 19 nt, Artificial Sequence
  Description of Artificial Sequence: Synthetic oligonucleotide
  Antisense strand to SEQ ID NO: 1487086
acagauacacacauguccc

SEQ ID NO: 1487088 - RNA, 19 nt, Artificial Sequence
  Description of Artificial Sequence: Synthetic oligonucleotide
  Sense strand starting at position 2719 of SEQ ID NO: 1244417
guguguaucuguggaguca

SEQ ID NO: 1487089 - RNA, 19 nt, Artificial Sequence
  Description of Artificial Sequence: Synthetic oligonucleotide
  Antisense strand to SEQ ID NO: 1487088
ugacuccacagauacacac

SEQ ID NO: 1487090 - RNA, 19 nt, Artificial Sequence
  Description of Artificial Sequence: Synthetic oligonucleotide
  Sense strand starting at position 2744 of SEQ ID NO: 1244417
gggagaucuuuccuugguu

SEQ ID NO: 1487091 - RNA, 19 nt, Artificial Sequence
  Description of Artificial Sequence: Synthetic oligonucleotide
  Antisense strand to SEQ ID NO: 1487090
aaccaaggaaagaucuccc

SEQ ID NO: 1487092 - RNA, 19 nt, Artificial Sequence
  Description of Artificial Sequence: Synthetic oligonucleotide
  Sense strand starting at position 2745 of SEQ ID NO: 1244417
ggagaucuuuccuugguug

SEQ ID NO: 1487093 - RNA, 19 nt, Artificial Sequence
  Description of Artificial Sequence: Synthetic oligonucleotide
  Antisense strand to SEQ ID NO: 1487092
caaccaaggaaagaucucc

SEQ ID NO: 1487094 - RNA, 19 nt, Artificial Sequence
  Description of Artificial Sequence: Synthetic oligonucleotide
  Sense strand starting at position 2746 of SEQ ID NO: 1244417
gagaucuuuccuugguugu

SEQ ID NO: 1487095 - RNA, 19 nt, Artificial Sequence
  Description of Artificial Sequence: Synthetic oligonucleotide
  Antisense strand to SEQ ID NO: 1487094
acaaccaaggaaagaucuc

SEQ ID NO: 1487096 - RNA, 19 nt, Artificial Sequence
  Description of Artificial Sequence: Synthetic oligonucleotide
  Sense strand starting at position 2847 of SEQ ID NO: 1244417
ggucuaagucuggauuccu

SEQ ID NO: 1487097 - RNA, 19 nt, Artificial Sequence
  Description of Artificial Sequence: Synthetic oligonucleotide
  Antisense strand to SEQ ID NO: 1487096
aggaauccagacuuagacc

SEQ ID NO: 1487098 - RNA, 19 nt, Artificial Sequence
  Description of Artificial Sequence: Synthetic oligonucleotide
  Sense strand starting at position 2949 of SEQ ID NO: 1244417
uugguuauuugagggagga

SEQ ID NO: 1487099 - RNA, 19 nt, Artificial Sequence
  Description of Artificial Sequence: Synthetic oligonucleotide
  Antisense strand to SEQ ID NO: 1487098
uccucccucaaauaaccaa

SEQ ID NO: 1487100 - RNA, 19 nt, Artificial Sequence
  Description of Artificial Sequence: Synthetic oligonucleotide
  Sense strand starting at position 2977 of SEQ ID NO: 1244417
agugcugagaacugccuaa

SEQ ID NO: 1487101 - RNA, 19 nt, Artificial Sequence
  Description of Artificial Sequence: Synthetic oligonucleotide
  Antisense strand to SEQ ID NO: 1487100
uuaggcaguucucagcacu

SEQ ID NO: 1487102 - RNA, 19 nt, Artificial Sequence
  Description of Artificial Sequence: Synthetic oligonucleotide
  Sense strand starting at position 2981 of SEQ ID NO: 1244417
cugagaacugccuaaguuc

SEQ ID NO: 1487103 - RNA, 19 nt, Artificial Sequence
  Description of Artificial Sequence: Synthetic oligonucleotide
  Antisense strand to SEQ ID NO: 1487102
gaacuuaggcaguucucag

SEQ ID NO: 1487104 - RNA, 19 nt, Artificial Sequence
  Description of Artificial Sequence: Synthetic oligonucleotide
  Sense strand starting at position 2989 of SEQ ID NO: 1244417
ugccuaaguuccuggauga

SEQ ID NO: 1487105 - RNA, 19 nt, Artificial Sequence
  Description of Artificial Sequence: Synthetic oligonucleotide
  Antisense strand to SEQ ID NO: 1487104
ucauccaggaacuuaggca

SEQ ID NO: 1487106 - RNA, 19 nt, Artificial Sequence
  Description of Artificial Sequence: Synthetic oligonucleotide
  Sense strand starting at position 2990 of SEQ ID NO: 1244417
gccuaaguuccuggaugag

SEQ ID NO: 1487107 - RNA, 19 nt, Artificial Sequence
  Description of Artificial Sequence: Synthetic oligonucleotide
  Antisense strand to SEQ ID NO: 1487106
cucauccaggaacuuaggc

SEQ ID NO: 1487108 - RNA, 19 nt, Artificial Sequence
  Description of Artificial Sequence: Synthetic oligonucleotide
  Sense strand starting at position 3095 of SEQ ID NO: 1244417
ucagacagcugucuugaua

SEQ ID NO: 1487109 - RNA, 19 nt, Artificial Sequence
  Description of Artificial Sequence: Synthetic oligonucleotide
  Antisense strand to SEQ ID NO: 1487108
uaucaagacagcugucuga

SEQ ID NO: 1487110 - RNA, 19 nt, Artificial Sequence
  Description of Artificial Sequence: Synthetic oligonucleotide
  Sense strand starting at position 3104 of SEQ ID NO: 1244417
ugucuugauaagggaggua

SEQ ID NO: 1487111 - RNA, 19 nt, Artificial Sequence
  Description of Artificial Sequence: Synthetic oligonucleotide
  Antisense strand to SEQ ID NO: 1487110
uaccucccuuaucaagaca

SEQ ID NO: 1487112 - RNA, 19 nt, Artificial Sequence
  Description of Artificial Sequence: Synthetic oligonucleotide
  Sense strand starting at position 3342 of SEQ ID NO: 1244417
acauguaugugagcaggua

SEQ ID NO: 1487113 - RNA, 19 nt, Artificial Sequence
  Description of Artificial Sequence: Synthetic oligonucleotide
  Antisense strand to SEQ ID NO: 1487112
uaccugcucacauacaugu

SEQ ID NO: 1487114 - RNA, 19 nt, Artificial Sequence
  Description of Artificial Sequence: Synthetic oligonucleotide
  Sense strand starting at position 3343 of SEQ ID NO: 1244417
cauguaugugagcagguaa

SEQ ID NO: 1487115 - RNA, 19 nt, Artificial Sequence
  Description of Artificial Sequence: Synthetic oligonucleotide
  Antisense strand to SEQ ID NO: 1487114
uuaccugcucacauacaug

SEQ ID NO: 1487116 - RNA, 19 nt, Artificial Sequence
  Description of Artificial Sequence: Synthetic oligonucleotide
  Sense strand starting at position 3358 of SEQ ID NO: 1244417
guaaucacagccuggugua

SEQ ID NO: 1487117 - RNA, 19 nt, Artificial Sequence
  Description of Artificial Sequence: Synthetic oligonucleotide
  Antisense strand to SEQ ID NO: 1487116
uacaccaggcugugauuac

SEQ ID NO: 1487118 - RNA, 19 nt, Artificial Sequence
  Description of Artificial Sequence: Synthetic oligonucleotide
  Sense strand starting at position 3608 of SEQ ID NO: 1244417
ggaccuugggcugguaaga

SEQ ID NO: 1487119 - RNA, 19 nt, Artificial Sequence
  Description of Artificial Sequence: Synthetic oligonucleotide
  Antisense strand to SEQ ID NO: 1487118
ucuuaccagcccaaggucc

SEQ ID NO: 1487120 - RNA, 19 nt, Artificial Sequence
  Description of Artificial Sequence: Synthetic oligonucleotide
  Sense strand starting at position 3621 of SEQ ID NO: 1244417
guaagacacugaucugaug

SEQ ID NO: 1487121 - RNA, 19 nt, Artificial Sequence
  Description of Artificial Sequence: Synthetic oligonucleotide
  Antisense strand to SEQ ID NO: 1487120
caucagaucagugucuuac

SEQ ID NO: 1487122 - RNA, 19 nt, Artificial Sequence
  Description of Artificial Sequence: Synthetic oligonucleotide
  Sense strand starting at position 3650 of SEQ ID NO: 1244417
uggauuaaguucuaaauag

SEQ ID NO: 1487123 - RNA, 19 nt, Artificial Sequence
  Description of Artificial Sequence: Synthetic oligonucleotide
  Antisense strand to SEQ ID NO: 1487122
cuauuuagaacuuaaucca

SEQ ID NO: 1487124 - RNA, 19 nt, Artificial Sequence
  Description of Artificial Sequence: Synthetic oligonucleotide
  Sense strand starting at position 3678 of SEQ ID NO: 1244417
ucaggaggccuuggagaua

SEQ ID NO: 1487125 - RNA, 19 nt, Artificial Sequence
  Description of Artificial Sequence: Synthetic oligonucleotide
  Antisense strand to SEQ ID NO: 1487124
uaucuccaaggccuccuga

SEQ ID NO: 1487126 - RNA, 19 nt, Artificial Sequence
  Description of Artificial Sequence: Synthetic oligonucleotide
  Sense strand starting at position 3742 of SEQ ID NO: 1244417
uugaaaguagccugagaau

SEQ ID NO: 1487127 - RNA, 19 nt, Artificial Sequence
  Description of Artificial Sequence: Synthetic oligonucleotide
  Antisense strand to SEQ ID NO: 1487126
auucucaggcuacuuucaa

SEQ ID NO: 1487128 - RNA, 19 nt, Artificial Sequence
  Description of Artificial Sequence: Synthetic oligonucleotide
  Sense strand starting at position 3745 of SEQ ID NO: 1244417
aaaguagccugagaaugua

SEQ ID NO: 1487129 - RNA, 19 nt, Artificial Sequence
  Description of Artificial Sequence: Synthetic oligonucleotide
  Antisense strand to SEQ ID NO: 1487128
uacauucucaggcuacuuu

SEQ ID NO: 1487130 - RNA, 19 nt, Artificial Sequence
  Description of Artificial Sequence: Synthetic oligonucleotide
  Sense strand starting at position 3901 of SEQ ID NO: 1244417
cugccucaguggucucuaa

SEQ ID NO: 1487131 - RNA, 19 nt, Artificial Sequence
  Description of Artificial Sequence: Synthetic oligonucleotide
  Antisense strand to SEQ ID NO: 1487130
uuagagaccacugaggcag

SEQ ID NO: 1487132 - RNA, 19 nt, Artificial Sequence
  Description of Artificial Sequence: Synthetic oligonucleotide
  Sense strand starting at position 16 of SEQ ID NO: 1244418
acgcucuaucaauaaugua

SEQ ID NO: 1487133 - RNA, 19 nt, Artificial Sequence
  Description of Artificial Sequence: Synthetic oligonucleotide
  Antisense strand to SEQ ID NO: 1487132
uacauuauugauagagcgu

SEQ ID NO: 1487134 - RNA, 19 nt, Artificial Sequence
  Description of Artificial Sequence: Synthetic oligonucleotide
  Sense strand starting at position 66 of SEQ ID NO: 1244418
auggauuaguaguuuaguu

SEQ ID NO: 1487135 - RNA, 19 nt, Artificial Sequence
  Description of Artificial Sequence: Synthetic oligonucleotide
  Antisense strand to SEQ ID NO: 1487134
aacuaaacuacuaauccau

SEQ ID NO: 1487136 - RNA, 19 nt, Artificial Sequence
  Description of Artificial Sequence: Synthetic oligonucleotide
  Sense strand starting at position 68 of SEQ ID NO: 1244418
ggauuaguaguuuaguuua

SEQ ID NO: 1487137 - RNA, 19 nt, Artificial Sequence
  Description of Artificial Sequence: Synthetic oligonucleotide
  Antisense strand to SEQ ID NO: 1487136
uaaacuaaacuacuaaucc

SEQ ID NO: 1487138 - RNA, 19 nt, Artificial Sequence
  Description of Artificial Sequence: Synthetic oligonucleotide
  Sense strand starting at position 103 of SEQ ID NO: 1244418
gaagcauacgaauggauaa

SEQ ID NO: 1487139 - RNA, 19 nt, Artificial Sequence
  Description of Artificial Sequence: Synthetic oligonucleotide
  Antisense strand to SEQ ID NO: 1487138
uuauccauucguaugcuuc

SEQ ID NO: 1487140 - RNA, 19 nt, Artificial Sequence
  Description of Artificial Sequence: Synthetic oligonucleotide
  Sense strand starting at position 228 of SEQ ID NO: 1244418
cgcugagucccguaaagaa

SEQ ID NO: 1487141 - RNA, 19 nt, Artificial Sequence
  Description of Artificial Sequence: Synthetic oligonucleotide
  Antisense strand to SEQ ID NO: 1487140
uucuuuacgggacucagcg

SEQ ID NO: 1487142 - RNA, 19 nt, Artificial Sequence
  Description of Artificial Sequence: Synthetic oligonucleotide
  Sense strand starting at position 243 of SEQ ID NO: 1244418
agaaauguuuaugcaucaa

SEQ ID NO: 1487143 - RNA, 19 nt, Artificial Sequence
  Description of Artificial Sequence: Synthetic oligonucleotide
  Antisense strand to SEQ ID NO: 1487142
uugaugcauaaacauuucu

SEQ ID NO: 1487144 - RNA, 19 nt, Artificial Sequence
  Description of Artificial Sequence: Synthetic oligonucleotide
  Sense strand starting at position 462 of SEQ ID NO: 1244418
aaggcuaugugugcauuua

SEQ ID NO: 1487145 - RNA, 19 nt, Artificial Sequence
  Description of Artificial Sequence: Synthetic oligonucleotide
  Antisense strand to SEQ ID NO: 1487144
uaaaugcacacauagccuu

SEQ ID NO: 1487146 - RNA, 19 nt, Artificial Sequence
  Description of Artificial Sequence: Synthetic oligonucleotide
  Sense strand starting at position 463 of SEQ ID NO: 1244418
aggcuaugugugcauuuau

SEQ ID NO: 1487147 - RNA, 19 nt, Artificial Sequence
  Description of Artificial Sequence: Synthetic oligonucleotide
  Antisense strand to SEQ ID NO: 1487146
auaaaugcacacauagccu

SEQ ID NO: 1487148 - RNA, 19 nt, Artificial Sequence
  Description of Artificial Sequence: Synthetic oligonucleotide
  Sense strand starting at position 470 of SEQ ID NO: 1244418
gugugcauuuauucuaauc

SEQ ID NO: 1487149 - RNA, 19 nt, Artificial Sequence
  Description of Artificial Sequence: Synthetic oligonucleotide
  Antisense strand to SEQ ID NO: 1487148
gauuagaauaaaugcacac

SEQ ID NO: 1487150 - RNA, 19 nt, Artificial Sequence
  Description of Artificial Sequence: Synthetic oligonucleotide
  Sense strand starting at position 472 of SEQ ID NO: 1244418
gugcauuuauucuaaucag

SEQ ID NO: 1487151 - RNA, 19 nt, Artificial Sequence
  Description of Artificial Sequence: Synthetic oligonucleotide
  Antisense strand to SEQ ID NO: 1487150
cugauuagaauaaaugcac

SEQ ID NO: 1487152 - RNA, 19 nt, Artificial Sequence
  Description of Artificial Sequence: Synthetic oligonucleotide
  Sense strand starting at position 494 of SEQ ID NO: 1244418
caggauuuauugugugaaa

SEQ ID NO: 1487153 - RNA, 19 nt, Artificial Sequence
  Description of Artificial Sequence: Synthetic oligonucleotide
  Antisense strand to SEQ ID NO: 1487152
uuucacacaauaaauccug

SEQ ID NO: 1487154 - RNA, 19 nt, Artificial Sequence
  Description of Artificial Sequence: Synthetic oligonucleotide
  Sense strand starting at position 497 of SEQ ID NO: 1244418
gauuuauugugugaaacuc

SEQ ID NO: 1487155 - RNA, 19 nt, Artificial Sequence
  Description of Artificial Sequence: Synthetic oligonucleotide
  Antisense strand to SEQ ID NO: 1487154
gaguuucacacaauaaauc

SEQ ID NO: 1487156 - RNA, 19 nt, Artificial Sequence
  Description of Artificial Sequence: Synthetic oligonucleotide
  Sense strand starting at position 505 of SEQ ID NO: 1244418
gugugaaacucaggcgaua

SEQ ID NO: 1487157 - RNA, 19 nt, Artificial Sequence
  Description of Artificial Sequence: Synthetic oligonucleotide
  Antisense strand to SEQ ID NO: 1487156
uaucgccugaguuucacac

SEQ ID NO: 1487158 - RNA, 19 nt, Artificial Sequence
  Description of Artificial Sequence: Synthetic oligonucleotide
  Sense strand starting at position 507 of SEQ ID NO: 1244418
gugaaacucaggcgauaaa

SEQ ID NO: 1487159 - RNA, 19 nt, Artificial Sequence
  Description of Artificial Sequence: Synthetic oligonucleotide
  Antisense strand to SEQ ID NO: 1487158
uuuaucgccugaguuucac

SEQ ID NO: 1487160 - RNA, 19 nt, Artificial Sequence
  Description of Artificial Sequence: Synthetic oligonucleotide
  Sense strand starting at position 586 of SEQ ID NO: 1244418
ucuugucaaccaggagaga

SEQ ID NO: 1487161 - RNA, 19 nt, Artificial Sequence
  Description of Artificial Sequence: Synthetic oligonucleotide
  Antisense strand to SEQ ID NO: 1487160
ucucuccugguugacaaga

SEQ ID NO: 1487162 - RNA, 19 nt, Artificial Sequence
  Description of Artificial Sequence: Synthetic oligonucleotide
  Sense strand starting at position 687 of SEQ ID NO: 1244418
ugaagcaguuucucacuuu

SEQ ID NO: 1487163 - RNA, 19 nt, Artificial Sequence
  Description of Artificial Sequence: Synthetic oligonucleotide
  Antisense strand to SEQ ID NO: 1487162
aaagugagaaacugcuuca

SEQ ID NO: 1487164 - RNA, 19 nt, Artificial Sequence
  Description of Artificial Sequence: Synthetic oligonucleotide
  Sense strand starting at position 732 of SEQ ID NO: 1244418
ccaacauucucacucgaga

SEQ ID NO: 1487165 - RNA, 19 nt, Artificial Sequence
  Description of Artificial Sequence: Synthetic oligonucleotide
  Antisense strand to SEQ ID NO: 1487164
ucucgagugagaauguugg

SEQ ID NO: 1487166 - RNA, 19 nt, Artificial Sequence
  Description of Artificial Sequence: Synthetic oligonucleotide
  Sense strand starting at position 876 of SEQ ID NO: 1244418
cagucugugucaucaggau

SEQ ID NO: 1487167 - RNA, 19 nt, Artificial Sequence
  Description of Artificial Sequence: Synthetic oligonucleotide
  Antisense strand to SEQ ID NO: 1487166
auccugaugacacagacug

SEQ ID NO: 1487168 - RNA, 19 nt, Artificial Sequence
  Description of Artificial Sequence: Synthetic oligonucleotide
  Sense strand starting at position 1061 of SEQ ID NO: 1244418
ggcggaauguuaucguucu

SEQ ID NO: 1487169 - RNA, 19 nt, Artificial Sequence
  Description of Artificial Sequence: Synthetic oligonucleotide
  Antisense strand to SEQ ID NO: 1487168
agaacgauaacauuccgcc

SEQ ID NO: 1487170 - RNA, 19 nt, Artificial Sequence
  Description of Artificial Sequence: Synthetic oligonucleotide
  Sense strand starting at position 1067 of SEQ ID NO: 1244418
auguuaucguucuccuauu

SEQ ID NO: 1487171 - RNA, 19 nt, Artificial Sequence
  Description of Artificial Sequence: Synthetic oligonucleotide
  Antisense strand to SEQ ID NO: 1487170
aauaggagaacgauaacau

SEQ ID NO: 1487172 - RNA, 19 nt, Artificial Sequence
  Description of Artificial Sequence: Synthetic oligonucleotide
  Sense strand starting at position 1076 of SEQ ID NO: 1244418
uucuccuauugaggguaua

SEQ ID NO: 1487173 - RNA, 19 nt, Artificial Sequence
  Description of Artificial Sequence: Synthetic oligonucleotide
  Antisense strand to SEQ ID NO: 1487172
uauacccucaauaggagaa

SEQ ID NO: 1487174 - RNA, 19 nt, Artificial Sequence
  Description of Artificial Sequence: Synthetic oligonucleotide
  Sense strand starting at position 1077 of SEQ ID NO: 1244418
ucuccuauugaggguauau

SEQ ID NO: 1487175 - RNA, 19 nt, Artificial Sequence
  Description of Artificial Sequence: Synthetic oligonucleotide
  Antisense strand to SEQ ID NO: 1487174
auauacccucaauaggaga

SEQ ID NO: 1487176 - RNA, 19 nt, Artificial Sequence
  Description of Artificial Sequence: Synthetic oligonucleotide
  Sense strand starting at position 1552 of SEQ ID NO: 1244418
cgguuaccugcucgucgaa

SEQ ID NO: 1487177 - RNA, 19 nt, Artificial Sequence
  Description of Artificial Sequence: Synthetic oligonucleotide
  Antisense strand to SEQ ID NO: 1487176
uucgacgagcagguaaccg

SEQ ID NO: 1487178 - RNA, 19 nt, Artificial Sequence
  Description of Artificial Sequence: Synthetic oligonucleotide
  Sense strand starting at position 2336 of SEQ ID NO: 1244418
cgcggaucucugccgcuaa

SEQ ID NO: 1487179 - RNA, 19 nt, Artificial Sequence
  Description of Artificial Sequence: Synthetic oligonucleotide
  Antisense strand to SEQ ID NO: 1487178
uuagcggcagagauccgcg

SEQ ID NO: 1487180 - RNA, 19 nt, Artificial Sequence
  Description of Artificial Sequence: Synthetic oligonucleotide
  Sense strand starting at position 2437 of SEQ ID NO: 1244418
uugguagacugcugagaaa

SEQ ID NO: 1487181 - RNA, 19 nt, Artificial Sequence
  Description of Artificial Sequence: Synthetic oligonucleotide
  Antisense strand to SEQ ID NO: 1487180
uuucucagcagucuaccaa

SEQ ID NO: 1487182 - RNA, 19 nt, Artificial Sequence
  Description of Artificial Sequence: Synthetic oligonucleotide
  Sense strand starting at position 2440 of SEQ ID NO: 1244418
guagacugcugagaaacaa

SEQ ID NO: 1487183 - RNA, 19 nt, Artificial Sequence
  Description of Artificial Sequence: Synthetic oligonucleotide
  Antisense strand to SEQ ID NO: 1487182
uuguuucucagcagucuac

SEQ ID NO: 1487184 - RNA, 19 nt, Artificial Sequence
  Description of Artificial Sequence: Synthetic oligonucleotide
  Sense strand starting at position 2617 of SEQ ID NO: 1244418
auaacuauugcacaguuga

SEQ ID NO: 1487185 - RNA, 19 nt, Artificial Sequence
  Description of Artificial Sequence: Synthetic oligonucleotide
  Antisense strand to SEQ ID NO: 1487184
ucaacugugcaauaguuau

SEQ ID NO: 1487186 - RNA, 19 nt, Artificial Sequence
  Description of Artificial Sequence: Synthetic oligonucleotide
  Sense strand starting at position 2624 of SEQ ID NO: 1244418
uugcacaguugaugagaga

SEQ ID NO: 1487187 - RNA, 19 nt, Artificial Sequence
  Description of Artificial Sequence: Synthetic oligonucleotide
  Antisense strand to SEQ ID NO: 1487186
ucucucaucaacugugcaa

SEQ ID NO: 1487188 - RNA, 19 nt, Artificial Sequence
  Description of Artificial Sequence: Synthetic oligonucleotide
  Sense strand starting at position 2848 of SEQ ID NO: 1244418
ugaguugacagguggcaaa

SEQ ID NO: 1487189 - RNA, 19 nt, Artificial Sequence
  Description of Artificial Sequence: Synthetic oligonucleotide
  Antisense strand to SEQ ID NO: 1487188
uuugccaccugucaacuca

SEQ ID NO: 1487190 - RNA, 19 nt, Artificial Sequence
  Description of Artificial Sequence: Synthetic oligonucleotide
  Sense strand starting at position 2860 of SEQ ID NO: 1244418
uggcaaagucaggauguaa

SEQ ID NO: 1487191 - RNA, 19 nt, Artificial Sequence
  Description of Artificial Sequence: Synthetic oligonucleotide
  Antisense strand to SEQ ID NO: 1487190
uuacauccugacuuugcca

SEQ ID NO: 1487192 - RNA, 19 nt, Artificial Sequence
  Description of Artificial Sequence: Synthetic oligonucleotide
  Sense strand starting at position 2886 of SEQ ID NO: 1244418
ugguuuaacuccuagaaca

SEQ ID NO: 1487193 - RNA, 19 nt, Artificial Sequence
  Description of Artificial Sequence: Synthetic oligonucleotide
  Antisense strand to SEQ ID NO: 1487192
uguucuaggaguuaaacca

SEQ ID NO: 1487194 - RNA, 19 nt, Artificial Sequence
  Description of Artificial Sequence: Synthetic oligonucleotide
  Sense strand starting at position 2980 of SEQ ID NO: 1244418
guguaauuggguugugcca

SEQ ID NO: 1487195 - RNA, 19 nt, Artificial Sequence
  Description of Artificial Sequence: Synthetic oligonucleotide
  Antisense strand to SEQ ID NO: 1487194
uggcacaacccaauuacac

SEQ ID NO: 1487196 - RNA, 19 nt, Artificial Sequence
  Description of Artificial Sequence: Synthetic oligonucleotide
  Sense strand starting at position 3007 of SEQ ID NO: 1244418
ggaagaggauuacauccaa

SEQ ID NO: 1487197 - RNA, 19 nt, Artificial Sequence
  Description of Artificial Sequence: Synthetic oligonucleotide
  Antisense strand to SEQ ID NO: 1487196
uuggauguaauccucuucc

SEQ ID NO: 1487198 - RNA, 19 nt, Artificial Sequence
  Description of Artificial Sequence: Synthetic oligonucleotide
  Sense strand starting at position 3030 of SEQ ID NO: 1244418
acggauaaucuaugucuga

SEQ ID NO: 1487199 - RNA, 19 nt, Artificial Sequence
  Description of Artificial Sequence: Synthetic oligonucleotide
  Antisense strand to SEQ ID NO: 1487198
ucagacauagauuauccgu

SEQ ID NO: 1487200 - RNA, 19 nt, Artificial Sequence
  Description of Artificial Sequence: Synthetic oligonucleotide
  Sense strand starting at position 3031 of SEQ ID NO: 1244418
cggauaaucuaugucugac

SEQ ID NO: 1487201 - RNA, 19 nt, Artificial Sequence
  Description of Artificial Sequence: Synthetic oligonucleotide
  Antisense strand to SEQ ID NO: 1487200
gucagacauagauuauccg

SEQ ID NO: 1487202 - RNA, 19 nt, Artificial Sequence
  Description of Artificial Sequence: Synthetic oligonucleotide
  Sense strand starting at position 3037 of SEQ ID NO: 1244418
aucuaugucugacauugga

SEQ ID NO: 1487203 - RNA, 19 nt, Artificial Sequence
  Description of Artificial Sequence: Synthetic oligonucleotide
  Antisense strand to SEQ ID NO: 1487202
uccaaugucagacauagau

SEQ ID NO: 1487204 - RNA, 19 nt, Artificial Sequence
  Description of Artificial Sequence: Synthetic oligonucleotide
  Sense strand starting at position 3387 of SEQ ID NO: 1244418
auuugucuuccucgauaca

SEQ ID NO: 1487205 - RNA, 19 nt, Artificial Sequence
  Description of Artificial Sequence: Synthetic oligonucleotide
  Antisense strand to SEQ ID NO: 1487204
uguaucgaggaagacaaau

SEQ ID NO: 1487206 - RNA, 19 nt, Artificial Sequence
  Description of Artificial Sequence: Synthetic oligonucleotide
  Sense strand starting at position 3388 of SEQ ID NO: 1244418
uuugucuuccucgauacau

SEQ ID NO: 1487207 - RNA, 19 nt, Artificial Sequence
  Description of Artificial Sequence: Synthetic oligonucleotide
  Antisense strand to SEQ ID NO: 1487206
auguaucgaggaagacaaa

SEQ ID NO: 1487208 - RNA, 19 nt, Artificial Sequence
  Description of Artificial Sequence: Synthetic oligonucleotide
  Sense strand starting at position 3761 of SEQ ID NO: 1244418
cgcgcuaaucagccaguua

SEQ ID NO: 1487209 - RNA, 19 nt, Artificial Sequence
  Description of Artificial Sequence: Synthetic oligonucleotide
  Antisense strand to SEQ ID NO: 1487208
uaacuggcugauuagcgcg

SEQ ID NO: 1487210 - RNA, 19 nt, Artificial Sequence
  Description of Artificial Sequence: Synthetic oligonucleotide
  Sense strand starting at position 3762 of SEQ ID NO: 1244418
gcgcuaaucagccaguuaa

SEQ ID NO: 1487211 - RNA, 19 nt, Artificial Sequence
  Description of Artificial Sequence: Synthetic oligonucleotide
  Antisense strand to SEQ ID NO: 1487210
uuaacuggcugauuagcgc

SEQ ID NO: 1487212 - RNA, 19 nt, Artificial Sequence
  Description of Artificial Sequence: Synthetic oligonucleotide
  Sense strand starting at position 219 of SEQ ID NO: 1244419
gaaagcuacugaucacgaa

SEQ ID NO: 1487213 - RNA, 19 nt, Artificial Sequence
  Description of Artificial Sequence: Synthetic oligonucleotide
  Antisense strand to SEQ ID NO: 1487212
uucgugaucaguagcuuuc

SEQ ID NO: 1487214 - RNA, 19 nt, Artificial Sequence
  Description of Artificial Sequence: Synthetic oligonucleotide
  Sense strand starting at position 223 of SEQ ID NO: 1244419
gcuacugaucacgaaugau

SEQ ID NO: 1487215 - RNA, 19 nt, Artificial Sequence
  Description of Artificial Sequence: Synthetic oligonucleotide
  Antisense strand to SEQ ID NO: 1487214
aucauucgugaucaguagc

SEQ ID NO: 1487216 - RNA, 19 nt, Artificial Sequence
  Description of Artificial Sequence: Synthetic oligonucleotide
  Sense strand starting at position 238 of SEQ ID NO: 1244419
ugaucucaguuacugaaua

SEQ ID NO: 1487217 - RNA, 19 nt, Artificial Sequence
  Description of Artificial Sequence: Synthetic oligonucleotide
  Antisense strand to SEQ ID NO: 1487216
uauucaguaacugagauca

SEQ ID NO: 1487218 - RNA, 19 nt, Artificial Sequence
  Description of Artificial Sequence: Synthetic oligonucleotide
  Sense strand starting at position 276 of SEQ ID NO: 1244419
aaauguagcuugguuugaa

SEQ ID NO: 1487219 - RNA, 19 nt, Artificial Sequence
  Description of Artificial Sequence: Synthetic oligonucleotide
  Antisense strand to SEQ ID NO: 1487218
uucaaaccaagcuacauuu

SEQ ID NO: 1487220 - RNA, 19 nt, Artificial Sequence
  Description of Artificial Sequence: Synthetic oligonucleotide
  Sense strand starting at position 277 of SEQ ID NO: 1244419
aauguagcuugguuugaau

SEQ ID NO: 1487221 - RNA, 19 nt, Artificial Sequence
  Description of Artificial Sequence: Synthetic oligonucleotide
  Antisense strand to SEQ ID NO: 1487220
auucaaaccaagcuacauu

SEQ ID NO: 1487222 - RNA, 19 nt, Artificial Sequence
  Description of Artificial Sequence: Synthetic oligonucleotide
  Sense strand starting at position 279 of SEQ ID NO: 1244419
uguagcuugguuugaauaa

SEQ ID NO: 1487223 - RNA, 19 nt, Artificial Sequence
  Description of Artificial Sequence: Synthetic oligonucleotide
  Antisense strand to SEQ ID NO: 1487222
uuauucaaaccaagcuaca

SEQ ID NO: 1487224 - RNA, 19 nt, Artificial Sequence
  Description of Artificial Sequence: Synthetic oligonucleotide
  Sense strand starting at position 371 of SEQ ID NO: 1244419
gcgcauuacccagcuucua

SEQ ID NO: 1487225 - RNA, 19 nt, Artificial Sequence
  Description of Artificial Sequence: Synthetic oligonucleotide
  Antisense strand to SEQ ID NO: 1487224
uagaagcuggguaaugcgc

SEQ ID NO: 1487226 - RNA, 19 nt, Artificial Sequence
  Description of Artificial Sequence: Synthetic oligonucleotide
  Sense strand starting at position 497 of SEQ ID NO: 1244419
auuauuaaacagugagagu

SEQ ID NO: 1487227 - RNA, 19 nt, Artificial Sequence
  Description of Artificial Sequence: Synthetic oligonucleotide
  Antisense strand to SEQ ID NO: 1487226
acucucacuguuuaauaau

SEQ ID NO: 1487228 - RNA, 19 nt, Artificial Sequence
  Description of Artificial Sequence: Synthetic oligonucleotide
  Sense strand starting at position 990 of SEQ ID NO: 1244419
gacuauuccguccagaauu

SEQ ID NO: 1487229 - RNA, 19 nt, Artificial Sequence
  Description of Artificial Sequence: Synthetic oligonucleotide
  Antisense strand to SEQ ID NO: 1487228
aauucuggacggaauaguc

SEQ ID NO: 1487230 - RNA, 19 nt, Artificial Sequence
  Description of Artificial Sequence: Synthetic oligonucleotide
  Sense strand starting at position 1101 of SEQ ID NO: 1244419
ggaaguaaaucuguuucug

SEQ ID NO: 1487231 - RNA, 19 nt, Artificial Sequence
  Description of Artificial Sequence: Synthetic oligonucleotide
  Antisense strand to SEQ ID NO: 1487230
cagaaacagauuuacuucc

SEQ ID NO: 1487232 - RNA, 19 nt, Artificial Sequence
  Description of Artificial Sequence: Synthetic oligonucleotide
  Sense strand starting at position 1103 of SEQ ID NO: 1244419
aaguaaaucuguuucuggu

SEQ ID NO: 1487233 - RNA, 19 nt, Artificial Sequence
  Description of Artificial Sequence: Synthetic oligonucleotide
  Antisense strand to SEQ ID NO: 1487232
accagaaacagauuuacuu

SEQ ID NO: 1487234 - RNA, 19 nt, Artificial Sequence
  Description of Artificial Sequence: Synthetic oligonucleotide
  Sense strand starting at position 1307 of SEQ ID NO: 1244419
agaauuccugcuuacgcua

SEQ ID NO: 1487235 - RNA, 19 nt, Artificial Sequence
  Description of Artificial Sequence: Synthetic oligonucleotide
  Antisense strand to SEQ ID NO: 1487234
uagcguaagcaggaauucu

SEQ ID NO: 1487236 - RNA, 19 nt, Artificial Sequence
  Description of Artificial Sequence: Synthetic oligonucleotide
  Sense strand starting at position 1368 of SEQ ID NO: 1244419
gccaauuaaguucgaggaa

SEQ ID NO: 1487237 - RNA, 19 nt, Artificial Sequence
  Description of Artificial Sequence: Synthetic oligonucleotide
  Antisense strand to SEQ ID NO: 1487236
uuccucgaacuuaauuggc

SEQ ID NO: 1487238 - RNA, 19 nt, Artificial Sequence
  Description of Artificial Sequence: Synthetic oligonucleotide
  Sense strand starting at position 2024 of SEQ ID NO: 1244419
ggaacaguuucuccaauca

SEQ ID NO: 1487239 - RNA, 19 nt, Artificial Sequence
  Description of Artificial Sequence: Synthetic oligonucleotide
  Antisense strand to SEQ ID NO: 1487238
ugauuggagaaacuguucc

SEQ ID NO: 1487240 - RNA, 19 nt, Artificial Sequence
  Description of Artificial Sequence: Synthetic oligonucleotide
  Sense strand starting at position 2096 of SEQ ID NO: 1244419
ggcccaauggcugagugua

SEQ ID NO: 1487241 - RNA, 19 nt, Artificial Sequence
  Description of Artificial Sequence: Synthetic oligonucleotide
  Antisense strand to SEQ ID NO: 1487240
uacacucagccauugggcc

SEQ ID NO: 1487242 - RNA, 19 nt, Artificial Sequence
  Description of Artificial Sequence: Synthetic oligonucleotide
  Sense strand starting at position 2187 of SEQ ID NO: 1244419
gcgguauggacccaccaau

SEQ ID NO: 1487243 - RNA, 19 nt, Artificial Sequence
  Description of Artificial Sequence: Synthetic oligonucleotide
  Antisense strand to SEQ ID NO: 1487242
auugguggguccauaccgc

SEQ ID NO: 1487244 - RNA, 19 nt, Artificial Sequence
  Description of Artificial Sequence: Synthetic oligonucleotide
  Sense strand starting at position 2283 of SEQ ID NO: 1244419
ugggcguugggugaaguau

SEQ ID NO: 1487245 - RNA, 19 nt, Artificial Sequence
  Description of Artificial Sequence: Synthetic oligonucleotide
  Antisense strand to SEQ ID NO: 1487244
auacuucacccaacgccca

SEQ ID NO: 1487246 - RNA, 19 nt, Artificial Sequence
  Description of Artificial Sequence: Synthetic oligonucleotide
  Sense strand starting at position 2291 of SEQ ID NO: 1244419
gggugaaguauccagguug

SEQ ID NO: 1487247 - RNA, 19 nt, Artificial Sequence
  Description of Artificial Sequence: Synthetic oligonucleotide
  Antisense strand to SEQ ID NO: 1487246
caaccuggauacuucaccc

SEQ ID NO: 1487248 - RNA, 19 nt, Artificial Sequence
  Description of Artificial Sequence: Synthetic oligonucleotide
  Sense strand starting at position 2367 of SEQ ID NO: 1244419
gguguaucgccgccagagu

SEQ ID NO: 1487249 - RNA, 19 nt, Artificial Sequence
  Description of Artificial Sequence: Synthetic oligonucleotide
  Antisense strand to SEQ ID NO: 1487248
acucuggcggcgauacacc

SEQ ID NO: 1487250 - RNA, 19 nt, Artificial Sequence
  Description of Artificial Sequence: Synthetic oligonucleotide
  Sense strand starting at position 2431 of SEQ ID NO: 1244419
ucuagugagacccgagaau

SEQ ID NO: 1487251 - RNA, 19 nt, Artificial Sequence
  Description of Artificial Sequence: Synthetic oligonucleotide
  Antisense strand to SEQ ID NO: 1487250
auucucgggucucacuaga

SEQ ID NO: 1487252 - RNA, 19 nt, Artificial Sequence
  Description of Artificial Sequence: Synthetic oligonucleotide
  Sense strand starting at position 2820 of SEQ ID NO: 1244419
agucccaucugguuauauu

SEQ ID NO: 1487253 - RNA, 19 nt, Artificial Sequence
  Description of Artificial Sequence: Synthetic oligonucleotide
  Antisense strand to SEQ ID NO: 1487252
aauauaaccagaugggacu

SEQ ID NO: 1487254 - RNA, 19 nt, Artificial Sequence
  Description of Artificial Sequence: Synthetic oligonucleotide
  Sense strand starting at position 2821 of SEQ ID NO: 1244419
gucccaucugguuauauug

SEQ ID NO: 1487255 - RNA, 19 nt, Artificial Sequence
  Description of Artificial Sequence: Synthetic oligonucleotide
  Antisense strand to SEQ ID NO: 1487254
caauauaaccagaugggac

SEQ ID NO: 1487256 - RNA, 19 nt, Artificial Sequence
  Description of Artificial Sequence: Synthetic oligonucleotide
  Sense strand starting at position 2845 of SEQ ID NO: 1244419
acauguuugugacucucaa

SEQ ID NO: 1487257 - RNA, 19 nt, Artificial Sequence
  Description of Artificial Sequence: Synthetic oligonucleotide
  Antisense strand to SEQ ID NO: 1487256
uugagagucacaaacaugu

SEQ ID NO: 1487258 - RNA, 19 nt, Artificial Sequence
  Description of Artificial Sequence: Synthetic oligonucleotide
  Sense strand starting at position 2856 of SEQ ID NO: 1244419
acucucaaacguuaguuua

SEQ ID NO: 1487259 - RNA, 19 nt, Artificial Sequence
  Description of Artificial Sequence: Synthetic oligonucleotide
  Antisense strand to SEQ ID NO: 1487258
uaaacuaacguuugagagu

SEQ ID NO: 1487260 - RNA, 19 nt, Artificial Sequence
  Description of Artificial Sequence: Synthetic oligonucleotide
  Sense strand starting at position 2870 of SEQ ID NO: 1244419
guuuacucccagcaucacu

SEQ ID NO: 1487261 - RNA, 19 nt, Artificial Sequence
  Description of Artificial Sequence: Synthetic oligonucleotide
  Antisense strand to SEQ ID NO: 1487260
agugaugcugggaguaaac

SEQ ID NO: 1487262 - RNA, 19 nt, Artificial Sequence
  Description of Artificial Sequence: Synthetic oligonucleotide
  Sense strand starting at position 2924 of SEQ ID NO: 1244419
acuggagagucugauuuaa

SEQ ID NO: 1487263 - RNA, 19 nt, Artificial Sequence
  Description of Artificial Sequence: Synthetic oligonucleotide
  Antisense strand to SEQ ID NO: 1487262
uuaaaucagacucuccagu

SEQ ID NO: 1487264 - RNA, 19 nt, Artificial Sequence
  Description of Artificial Sequence: Synthetic oligonucleotide
  Sense strand starting at position 3025 of SEQ ID NO: 1244419
uuggguuggcguuugcaau

SEQ ID NO: 1487265 - RNA, 19 nt, Artificial Sequence
  Description of Artificial Sequence: Synthetic oligonucleotide
  Antisense strand to SEQ ID NO: 1487264
auugcaaacgccaacccaa

SEQ ID NO: 1487266 - RNA, 19 nt, Artificial Sequence
  Description of Artificial Sequence: Synthetic oligonucleotide
  Sense strand starting at position 3078 of SEQ ID NO: 1244419
acucaacugugucuucuua

SEQ ID NO: 1487267 - RNA, 19 nt, Artificial Sequence
  Description of Artificial Sequence: Synthetic oligonucleotide
  Antisense strand to SEQ ID NO: 1487266
uaagaagacacaguugagu

SEQ ID NO: 1487268 - RNA, 19 nt, Artificial Sequence
  Description of Artificial Sequence: Synthetic oligonucleotide
  Sense strand starting at position 3080 of SEQ ID NO: 1244419
ucaacugugucuucuuaga

SEQ ID NO: 1487269 - RNA, 19 nt, Artificial Sequence
  Description of Artificial Sequence: Synthetic oligonucleotide
  Antisense strand to SEQ ID NO: 1487268
ucuaagaagacacaguuga

SEQ ID NO: 1487270 - RNA, 19 nt, Artificial Sequence
  Description of Artificial Sequence: Synthetic oligonucleotide
  Sense strand starting at position 3082 of SEQ ID NO: 1244419
aacugugucuucuuagaag

SEQ ID NO: 1487271 - RNA, 19 nt, Artificial Sequence
  Description of Artificial Sequence: Synthetic oligonucleotide
  Antisense strand to SEQ ID NO: 1487270
cuucuaagaagacacaguu

SEQ ID NO: 1487272 - RNA, 19 nt, Artificial Sequence
  Description of Artificial Sequence: Synthetic oligonucleotide
  Sense strand starting at position 3093 of SEQ ID NO: 1244419
cuuagaagagcccauuauu

SEQ ID NO: 1487273 - RNA, 19 nt, Artificial Sequence
  Description of Artificial Sequence: Synthetic oligonucleotide
  Antisense strand to SEQ ID NO: 1487272
aauaaugggcucuucuaag

SEQ ID NO: 1487274 - RNA, 19 nt, Artificial Sequence
  Description of Artificial Sequence: Synthetic oligonucleotide
  Sense strand starting at position 3120 of SEQ ID NO: 1244419
agucauuagucccuguaca

SEQ ID NO: 1487275 - RNA, 19 nt, Artificial Sequence
  Description of Artificial Sequence: Synthetic oligonucleotide
  Antisense strand to SEQ ID NO: 1487274
uguacagggacuaaugacu

SEQ ID NO: 1487276 - RNA, 19 nt, Artificial Sequence
  Description of Artificial Sequence: Synthetic oligonucleotide
  Sense strand starting at position 3121 of SEQ ID NO: 1244419
gucauuagucccuguacaa

SEQ ID NO: 1487277 - RNA, 19 nt, Artificial Sequence
  Description of Artificial Sequence: Synthetic oligonucleotide
  Antisense strand to SEQ ID NO: 1487276
uuguacagggacuaaugac

SEQ ID NO: 1487278 - RNA, 19 nt, Artificial Sequence
  Description of Artificial Sequence: Synthetic oligonucleotide
  Sense strand starting at position 3387 of SEQ ID NO: 1244419
uuccauuuaucagggacua

SEQ ID NO: 1487279 - RNA, 19 nt, Artificial Sequence
  Description of Artificial Sequence: Synthetic oligonucleotide
  Antisense strand to SEQ ID NO: 1487278
uagucccugauaaauggaa

SEQ ID NO: 1487280 - RNA, 19 nt, Artificial Sequence
  Description of Artificial Sequence: Synthetic oligonucleotide
  Sense strand starting at position 3412 of SEQ ID NO: 1244419
cgugucucccaauaaauac

SEQ ID NO: 1487281 - RNA, 19 nt, Artificial Sequence
  Description of Artificial Sequence: Synthetic oligonucleotide
  Antisense strand to SEQ ID NO: 1487280
guauuuauugggagacacg

SEQ ID NO: 1487282 - RNA, 19 nt, Artificial Sequence
  Description of Artificial Sequence: Synthetic oligonucleotide
  Sense strand starting at position 3473 of SEQ ID NO: 1244419
uguuauaacuuaguagaca

SEQ ID NO: 1487283 - RNA, 19 nt, Artificial Sequence
  Description of Artificial Sequence: Synthetic oligonucleotide
  Antisense strand to SEQ ID NO: 1487282
ugucuacuaaguuauaaca

SEQ ID NO: 1487284 - RNA, 19 nt, Artificial Sequence
  Description of Artificial Sequence: Synthetic oligonucleotide
  Sense strand starting at position 3592 of SEQ ID NO: 1244419
aaggauauggcauguuaac

SEQ ID NO: 1487285 - RNA, 19 nt, Artificial Sequence
  Description of Artificial Sequence: Synthetic oligonucleotide
  Antisense strand to SEQ ID NO: 1487284
guuaacaugccauauccuu

SEQ ID NO: 1487286 - RNA, 19 nt, Artificial Sequence
  Description of Artificial Sequence: Synthetic oligonucleotide
  Sense strand starting at position 3720 of SEQ ID NO: 1244419
aaauaagguugagaaggaa

SEQ ID NO: 1487287 - RNA, 19 nt, Artificial Sequence
  Description of Artificial Sequence: Synthetic oligonucleotide
  Antisense strand to SEQ ID NO: 1487286
uuccuucucaaccuuauuu

SEQ ID NO: 1487288 - RNA, 19 nt, Artificial Sequence
  Description of Artificial Sequence: Synthetic oligonucleotide
  Sense strand starting at position 3982 of SEQ ID NO: 1244419
gugagaugcuuccucaaca

SEQ ID NO: 1487289 - RNA, 19 nt, Artificial Sequence
  Description of Artificial Sequence: Synthetic oligonucleotide
  Antisense strand to SEQ ID NO: 1487288
uguugaggaagcaucucac

SEQ ID NO: 1487290 - RNA, 19 nt, Artificial Sequence
  Description of Artificial Sequence: Synthetic oligonucleotide
  Sense strand starting at position 3983 of SEQ ID NO: 1244419
ugagaugcuuccucaacaa

SEQ ID NO: 1487291 - RNA, 19 nt, Artificial Sequence
  Description of Artificial Sequence: Synthetic oligonucleotide
  Antisense strand to SEQ ID NO: 1487290
uuguugaggaagcaucuca

SEQ ID NO: 1487292 - RNA, 19 nt, Artificial Sequence
  Description of Artificial Sequence: Synthetic oligonucleotide
  Sense strand starting at position 238 of SEQ ID NO: 1244420
cccaacuugcugugagauc

SEQ ID NO: 1487293 - RNA, 19 nt, Artificial Sequence
  Description of Artificial Sequence: Synthetic oligonucleotide
  Antisense strand to SEQ ID NO: 1487292
gaucucacagcaaguuggg

SEQ ID NO: 1487294 - RNA, 19 nt, Artificial Sequence
  Description of Artificial Sequence: Synthetic oligonucleotide
  Sense strand starting at position 259 of SEQ ID NO: 1244420
ggccaagucguuuaaacuc

SEQ ID NO: 1487295 - RNA, 19 nt, Artificial Sequence
  Description of Artificial Sequence: Synthetic oligonucleotide
  Antisense strand to SEQ ID NO: 1487294
gaguuuaaacgacuuggcc

SEQ ID NO: 1487296 - RNA, 19 nt, Artificial Sequence
  Description of Artificial Sequence: Synthetic oligonucleotide
  Sense strand starting at position 287 of SEQ ID NO: 1244420
cagucuccguaucuguaaa

SEQ ID NO: 1487297 - RNA, 19 nt, Artificial Sequence
  Description of Artificial Sequence: Synthetic oligonucleotide
  Antisense strand to SEQ ID NO: 1487296
uuuacagauacggagacug

SEQ ID NO: 1487298 - RNA, 19 nt, Artificial Sequence
  Description of Artificial Sequence: Synthetic oligonucleotide
  Sense strand starting at position 317 of SEQ ID NO: 1244420
gggcgcagugcucugauga

SEQ ID NO: 1487299 - RNA, 19 nt, Artificial Sequence
  Description of Artificial Sequence: Synthetic oligonucleotide
  Antisense strand to SEQ ID NO: 1487298
ucaucagagcacugcgccc

SEQ ID NO: 1487300 - RNA, 19 nt, Artificial Sequence
  Description of Artificial Sequence: Synthetic oligonucleotide
  Sense strand starting at position 318 of SEQ ID NO: 1244420
ggcgcagugcucugaugaa

SEQ ID NO: 1487301 - RNA, 19 nt, Artificial Sequence
  Description of Artificial Sequence: Synthetic oligonucleotide
  Antisense strand to SEQ ID NO: 1487300
uucaucagagcacugcgcc

SEQ ID NO: 1487302 - RNA, 19 nt, Artificial Sequence
  Description of Artificial Sequence: Synthetic oligonucleotide
  Sense strand starting at position 322 of SEQ ID NO: 1244420
cagugcucugaugaaagau

SEQ ID NO: 1487303 - RNA, 19 nt, Artificial Sequence
  Description of Artificial Sequence: Synthetic oligonucleotide
  Antisense strand to SEQ ID NO: 1487302
aucuuucaucagagcacug

SEQ ID NO: 1487304 - RNA, 19 nt, Artificial Sequence
  Description of Artificial Sequence: Synthetic oligonucleotide
  Sense strand starting at position 480 of SEQ ID NO: 1244420
gggauaccgcgcuacagaa

SEQ ID NO: 1487305 - RNA, 19 nt, Artificial Sequence
  Description of Artificial Sequence: Synthetic oligonucleotide
  Antisense strand to SEQ ID NO: 1487304
uucuguagcgcgguauccc

SEQ ID NO: 1487306 - RNA, 19 nt, Artificial Sequence
  Description of Artificial Sequence: Synthetic oligonucleotide
  Sense strand starting at position 1032 of SEQ ID NO: 1244420
gcuggaaauguccaagccu

SEQ ID NO: 1487307 - RNA, 19 nt, Artificial Sequence
  Description of Artificial Sequence: Synthetic oligonucleotide
  Antisense strand to SEQ ID NO: 1487306
aggcuuggacauuuccagc

SEQ ID NO: 1487308 - RNA, 19 nt, Artificial Sequence
  Description of Artificial Sequence: Synthetic oligonucleotide
  Sense strand starting at position 1763 of SEQ ID NO: 1244420
aguucugaucccgggaaag

SEQ ID NO: 1487309 - RNA, 19 nt, Artificial Sequence
  Description of Artificial Sequence: Synthetic oligonucleotide
  Antisense strand to SEQ ID NO: 1487308
cuuucccgggaucagaacu

SEQ ID NO: 1487310 - RNA, 19 nt, Artificial Sequence
  Description of Artificial Sequence: Synthetic oligonucleotide
  Sense strand starting at position 2562 of SEQ ID NO: 1244420
aguccauuccgacaucauu

SEQ ID NO: 1487311 - RNA, 19 nt, Artificial Sequence
  Description of Artificial Sequence: Synthetic oligonucleotide
  Antisense strand to SEQ ID NO: 1487310
aaugaugucggaauggacu

SEQ ID NO: 1487312 - RNA, 19 nt, Artificial Sequence
  Description of Artificial Sequence: Synthetic oligonucleotide
  Sense strand starting at position 2649 of SEQ ID NO: 1244420
agcucacuuguauguguga

SEQ ID NO: 1487313 - RNA, 19 nt, Artificial Sequence
  Description of Artificial Sequence: Synthetic oligonucleotide
  Antisense strand to SEQ ID NO: 1487312
ucacacauacaagugagcu

SEQ ID NO: 1487314 - RNA, 19 nt, Artificial Sequence
  Description of Artificial Sequence: Synthetic oligonucleotide
  Sense strand starting at position 2650 of SEQ ID NO: 1244420
gcucacuuguaugugugau

SEQ ID NO: 1487315 - RNA, 19 nt, Artificial Sequence
  Description of Artificial Sequence: Synthetic oligonucleotide
  Antisense strand to SEQ ID NO: 1487314
aucacacauacaagugagc

SEQ ID NO: 1487316 - RNA, 19 nt, Artificial Sequence
  Description of Artificial Sequence: Synthetic oligonucleotide
  Sense strand starting at position 2658 of SEQ ID NO: 1244420
guaugugugaucgugcacu

SEQ ID NO: 1487317 - RNA, 19 nt, Artificial Sequence
  Description of Artificial Sequence: Synthetic oligonucleotide
  Antisense strand to SEQ ID NO: 1487316
agugcacgaucacacauac

SEQ ID NO: 1487318 - RNA, 19 nt, Artificial Sequence
  Description of Artificial Sequence: Synthetic oligonucleotide
  Sense strand starting at position 2756 of SEQ ID NO: 1244420
gcacauaugugauccggac

SEQ ID NO: 1487319 - RNA, 19 nt, Artificial Sequence
  Description of Artificial Sequence: Synthetic oligonucleotide
  Antisense strand to SEQ ID NO: 1487318
guccggaucacauaugugc

SEQ ID NO: 1487320 - RNA, 19 nt, Artificial Sequence
  Description of Artificial Sequence: Synthetic oligonucleotide
  Sense strand starting at position 2758 of SEQ ID NO: 1244420
acauaugugauccggacau

SEQ ID NO: 1487321 - RNA, 19 nt, Artificial Sequence
  Description of Artificial Sequence: Synthetic oligonucleotide
  Antisense strand to SEQ ID NO: 1487320
auguccggaucacauaugu

SEQ ID NO: 1487322 - RNA, 19 nt, Artificial Sequence
  Description of Artificial Sequence: Synthetic oligonucleotide
  Sense strand starting at position 2760 of SEQ ID NO: 1244420
auaugugauccggacauuc
